United States Patent Application Publication US 2004/0031072 A1 - sequence listing, part 31

SEQ ID NO: 143886 - protein, 239 aa, Glycine max
  Clone ID: PAT_MRT3847_100942C.1.pep
MPYYIQRLYRLCNASFSPNGPASEEAIEKVREKLEKIKPSDVGLEQEAQVVQNWSGSMLERNGSHQSLPPIKYLHLHECDSFSIGIFCMPPSSIIPLHNHPGMTVLSKLLYGSMYVKSYDWIDAPGSTDPSEARPAKLVKDTEMTALIPTTVLYPTSGGNIHCFRAITPCAIFDILSPPYSSDHGRHCTYFRRSQRKDLPVNVLLNGVTVSEVTWLEDFQPPDDFVIRKGQYRGPVIRT

SEQ ID NO: 143887 - protein, 71 aa, Glycine max
  Clone ID: PAT_MRT3847_100943C.1.pep
ATVRKIDLSQNVVATGTFISNRSCILEIPLIPAEGGKPFVIIPATYDGHLPYQLGFSMTLFTSKPTGCDSH

SEQ ID NO: 143888 - protein, 203 aa, Glycine max
  Clone ID: PAT_MRT3847_100944C.1.pep
MVGPQYDFLANPLGAVRSTFDAAVASVPDPSAFDGRDWGVLPLFQHFLSDPSRLSQVPLLTPATIQWVKPNTLVRFRGMIQDMLGNEFYVGAYKDGSVWRTNKFMDASQSLTASSADMRIWERRLLYCVPVPGLSPWTQVSTEEFGHLSMDRTSENREKRRREDDESSDMPVSGDEVQNSPNTKRMREGEHSSLASNSRGAAT

SEQ ID NO: 143889 - protein, 56 aa, Glycine max
  Clone ID: PAT_MRT3847_100945C.1.pep
HIWFMPLMEKNLFLVSQDDIVLKGSSTPSFIKTPLASFALSLTQTQLYHIQMPHSW

SEQ ID NO: 143890 - protein, 93 aa, Glycine max
  Clone ID: PAT_MRT3847_100946C.1.pep
PIPPPEAIKLTDIENDISHDHDYDVEVATAMHAEEPDPAIQKQPVTVVADLIAHYADKPNDEVTTIKIQTCFQGGLYIRSFPLGIGSKPEVSM

SEQ ID NO: 143891 - protein, 64 aa, Glycine max
  Clone ID: PAT_MRT3847_100947C.1.pep
ELAATDYLTAVALARGNATRIRRRYRRGYVACSVECPVKWQQSSSALFTGRSNRRMNSLLRTCE

SEQ ID NO: 143892 - protein, 69 aa, Glycine max
  Clone ID: PAT_MRT3847_100948C.1.pep
TSLSPHSKHNTFYPIIPNNFFFPNLFFYYHLLFSFLTYFLHKIITHHLIHHNPLTIYFIKLIFSHNFHT

SEQ ID NO: 143893 - protein, 122 aa, Glycine max
  Clone ID: PAT_MRT3847_100949C.1.pep
DRHRSAPLTTPDDSLDTSIGAEILVVDTRPQPPVAQYLMPPLYGEDANAAHSTPPSKRQIETDQSSNETQFEIPKPFDTALSNNFTDTCANFLRKLLSDQEFNDLHAFSLMLETSTGFFDAS

SEQ ID NO: 143894 - protein, 42 aa, Glycine max
  Clone ID: PAT_MRT3847_10094C.1.pep
VSFKGVDYNLHITTTTFTDTIFFFLYDVLDSRVKRLLHFLKL

SEQ ID NO: 143895 - protein, 360 aa, Glycine max
  Clone ID: PAT_MRT3847_100950C.1.pep
MVTRIVDLRSDTVTKPTEAMRAAMASAEVDDDVLGYDPTAFRLETEMAKTMGKEAALFVPSGTMGNLVSVLVHCDVRGSEVILGDNCHINIFENGGIATIGGVHPRQVKNNDDGTIDIDLIEAAIRDPMGELFYPTTKLICLENTHANSGGRCLSVEYTDRVGELAKKHGLKLHIDGARIFNASVALGVPVDRLVQAADSVSVCLSKGIGAPVGSVIVGSKNFIAKARRLRKTLGGGMRQIGLLCAAALVALQENVGKLESDHKKARLLADGLKEVKGLRVDAGSVETNMVFIDIEEGTKTRAEKICKYMEERGILVMQESSSRMRVVLHHQISASDVQYALSCFQQALAVKGVQNEMGN

SEQ ID NO: 143896 - protein, 76 aa, Glycine max
  Clone ID: PAT_MRT3847_100951C.1.pep
ASEALATYFKMYHQLSPVPWDKASWRNSRSQSSVASIDLIIVFSPGGAAGREDNIFAPRKRIIQQRKKFTNGAAAD

SEQ ID NO: 143897 - protein, 100 aa, Glycine max
  Clone ID: PAT_MRT3847_100952C.1.pep
PWQRTTMSISLLCLRSSFGSPVVNGRNPLCSYRRLPSSTTRCGCPSWLCLGMLPRSLGIWPCALPMLSPVHRLICIGFAPAKCLTYKYCIMCRPSSLGLL

SEQ ID NO: 143898 - protein, 633 aa, Glycine max
  Clone ID: PAT_MRT3847_100953C.1.pep
MNGLRSERAPLLEAERAGRGKRDGASEGQASDLEHGDAVPAANVGFCRVLSLAKPEAGKLVIGTVALLIAATSSILVQKFGGKIIDIVSREMKTPEEKDEALNAVKNTILEIFLVVVFGSICTALRAWLFYTASERVVARLRKNLFSHLVNQEIAFFDVTRTGELLSRLSEDTQIIKNAATTNLSEALRNFSTALIGLSFMFATSWKLTLLALAVVPVLSVAVRKFGRYLRELSHKTQAAAAVASSIAEESFGAIRTVRSFAQEDYEVTRYSEKVNETLNLGLKQAKIVGLFSGGLNAASTLSVIIVVIYGANLTIKGSMSSGDLTSFILYSLSVGSSISGLSGLYTVVMKAAGASRRVFQLLDRTSSMPKSGDKCPLGDQDGEVELDDVWFAYPSRPSHPVLKGITLKLHPGSKVALVGPSGGGKSTIANLIERFYDPTKGKILLNGVPLVEISHKHLHWQISIVSQEPTLFNCSIEENIAYGFDGKVNDVDIENAAKMANAHEFISKFPEKYQTFVGERGVRLSGGQKQRIAIARALLMDPKILLLDEATSALDAESEYLVQDAMESLMKGRTVLVIAHRLSTVKTADTVAVISDGQVVERGNHEELLSKNGVYTALVKRQLQTTKAEISV

SEQ ID NO: 143899 - protein, 106 aa, Glycine max
  Clone ID: PAT_MRT3847_100954C.1.pep
NCTPILLSPMTINFCWLGSLEILEAFLNTGLVLYIAILFIYNVYLLIVLKEIFILPHVFGCPRKKFWVLLVTPGTRMFEQNWLRLVPIPSLFLYSGRMRRLMSRGY

SEQ ID NO: 143900 - protein, 74 aa, Glycine max
  Clone ID: PAT_MRT3847_100955C.1.pep
ATRRRRLADHKISMLNISIDLPQFWGWLRLLLRDARLLVLRRIHPLTLISRFRMAAVSTRNALFRERSWRPSRS

SEQ ID NO: 143901 - protein, 66 aa, Glycine max
  unsure (1)..(66): unsure at all Xaa locations
  Clone ID: PAT_MRT3847_100956C.1.pep
MDSDGGSKLTGIRQIVKIKEMLQKWQSVTLGPKPCNSLSDHVANDDGSISPLINXRVVNVISDNED

SEQ ID NO: 143902 - protein, 77 aa, Glycine max
  Clone ID: PAT_MRT3847_100957C.1.pep
FRHHRSCSACCFDGSLFFFFTLPLLVVNSPARMLCPYLADFPMPFHRNSPSTTVTNHQRPPRRPHAQQLQPSPHATP

SEQ ID NO: 143903 - protein, 46 aa, Glycine max
  Clone ID: PAT_MRT3847_100958C.1.pep
KRNPTLLSVPDSDEAFCYLRASILLIHLLQEYDAKIRKIRSEKLAE

SEQ ID NO: 143904 - protein, 99 aa, Glycine max
  unsure (1)..(99): unsure at all Xaa locations
  Clone ID: PAT_MRT3847_100959C.1.pep
VLFFTVVSSTYVPCNPPPKTSKHPPVPKPPSPKQASCPKDTIXFGVCADLLVLINVQLGKPPKTPCCNLIEGLADLXSAVCLFTAFITNVLGIILNVSM

SEQ ID NO: 143905 - protein, 268 aa, Glycine max
  unsure (1)..(268): unsure at all Xaa locations
  Clone ID: PAT_MRT3847_10095C.1.pep
MSTSSSSQSLKIGIVGFGNFGQFLAKTMIKQGHTLTATSRSDYSELCLQMGIHFFRDVSAFLTADIDVIVLCTSILSLSEVVGSMPLTSLKRPTLFVDVLSVXPRELLLRELPDSDILCTHPXFGPQTAKNGWTDHTFMYDKVRIRDEVICSNFIQIFATEGCKMVQMSCEEHDRAAAKSQFITHTIGRTLGEMDIQSTPIDTKGFETLVKLKETMMRNSFDLYSGLFVYNRFARQELENLEHALHKVKETLMIQRTNGEQGHKRTES

SEQ ID NO: 143906 - protein, 253 aa, Glycine max
  unsure (1)..(253): unsure at all Xaa locations
  Clone ID: PAT_MRT3847_100960C.1.pep
GRQMRKICTFELLTPKRVESFQAIREEEASNLVREIGLGEGSSINLTRMINSFSYGLTSRVAFGGKSKDQEAFIDVMKDVLKVIAGFSLADLYPIKGLQVLTGLRSKVEKLHQEVDRILEKIVRDHRDTSSETKETLEKTGEDLVDVLLKLQRQNNLEHPLSDNVIKATILDIFSSGSGTSAKTSEWAMSELVKNPRVMEKAQAEVRRVFGXKGHVDEANLHETKFLKXIIKKTLXLHIPFPFLLPRECIEKF

SEQ ID NO: 143907 - protein, 59 aa, Glycine max
  unsure (1)..(59): unsure at all Xaa locations
  Clone ID: PAT_MRT3847_100961C.1.pep
EYLKYQQQQQGGSQSXTGTHQGADYEGSNILSGFTPEFLKETFGVLMQIVRNLQGESDE

SEQ ID NO: 143908 - protein, 91 aa, Glycine max
  Clone ID: PAT_MRT3847_100962C.1.pep
RLELEPIRIEPCFFTTSCHSSPRHSYPRSSTTLIDRNRYTCVYALHLVHLLLSSKCLLLHSLLPLLPVPGSPPSIPTRMTVGLKTCGPYRR

SEQ ID NO: 143909 - protein, 105 aa, Glycine max
  unsure (1)..(105): unsure at all Xaa locations
  Clone ID: PAT_MRT3847_100963C.1.pep
RAGRAGATHASGERNGQLWNDTERGTLIYDGRHYDAXGMAPSEEAPEEXDQTICAGQKNRSNGPGEGLALNFGKDQQRKRSNTDTANNTLRWGACQRGETGQTEA

SEQ ID NO: 143910 - protein, 58 aa, Glycine max
  Clone ID: PAT_MRT3847_100964C.1.pep
GAFLRPDHNMTINVSSNPYPLRLCHQGVFIALRSSRRGVSQGRARLTYGPKRQVLRAI

SEQ ID NO: 143911 - protein, 311 aa, Glycine max
  Clone ID: PAT_MRT3847_100965C.1.pep
MLEALLWSFFISPLKIVWESLRILESNKLVFTSILCFTTLPLSFLTFTLAISTFPLQSRVLHLESVARVAGTRVEARHVWHESRDDAVSLLRTRALFALLCFPLSLAAAVSAVHATASAAQGKPAALRGSNWKRPAVTVVFVYVVLMAFAPVPRALAAAAFTSPPWIRILVRAIGSGLEVYLMTVLSLSLVVSVIEDRVGWEAIRVGSGLIRGRRACGWILSGSFVLVSGLMNRKVEVLLLENENSEIGVFDKSVLVCSYALVVLVSYVVTTVFYCDSRRRHHDNGGGIKEPQPQDDHEIEDSVVVDSSQL

SEQ ID NO: 143912 - protein, 93 aa, Glycine max
  unsure (1)..(93): unsure at all Xaa locations
  Clone ID: PAT_MRT3847_100966C.1.pep
MEALAIPQSKCFQSAIQFAMSKRLIAAPEPIHAIATLIWEPIHXLEAGEAKVILTAMCEHGHFDLPAYEKSLQSNSFDLSFTNDQMKPSLAII

SEQ ID NO: 143913 - protein, 85 aa, Glycine max
  Clone ID: PAT_MRT3847_100967C.1.pep
FGYDPHAATQAYGVGFSPQSLTIWYPQVCFSCLTLKLSCNHQTIIKDHLISFGYFLDENPNFIWLQLFVNHHISWPLCGSNIRTT

SEQ ID NO: 143914 - protein, 156 aa, Glycine max
  unsure (1)..(156): unsure at all Xaa locations
  Clone ID: PAT_MRT3847_100968C.1.pep
GSSEHFFVPLSETGFSISDADKRGALLRSKKLFVSQMDDSLLESHAXGGHGESKFDEFPHMLNDLEXFLHHLSDRKSLDPPSNNEVESSXDARRSIFDSICAQDQVFSPPLLMDSSLLTDPFEDLLAPLSETEIPLDRPCFSYLATCKSSLKKWHY

SEQ ID NO: 143915 - protein, 268 aa, Glycine max
  unsure (1)..(268): unsure at all Xaa locations
  Clone ID: PAT_MRT3847_100969C.1.pep
MGVICGKIFPACGDMCVCCPALRSRPRQPVKRYRKLLADIFPKSPDEPPSERKIIKLCEYAAKNPFRIPKIAKYLEERCYKELRSEHIKLVNIIAESFNKLLSICKVQIAYFAVDVLNVILELLSYSKDETIQTLGCQCLSRFIYCQVDATYTHSIEKLVRKVCMLSQEHGEAREKRCLRASSLQCLSAMVWFMAEFSHIFVDFDEIVHSALDNFDWSRQNEEADAREEAHHNWVDEVIRCEGRXGSVIGNDNRSXCLIIQPRPEVKD

SEQ ID NO: 143916 - protein, 107 aa, Glycine max
  unsure (1)..(107): unsure at all Xaa locations
  Clone ID: PAT_MRT3847_10096C.1.pep
AAKNQLKIWLFFMGKNKERGGAIVKKGEGPTCGAGGGNKEEVWFVESQQSRAKRGGDEGGGAVAXXVKVHXXNHTFHLQASVCVCVFLFSLFFIFCVCETKRLELEP

SEQ ID NO: 143917 - protein, 764 aa, Glycine max
  Clone ID: PAT_MRT3847_100970C.1.pep
QNILKKGATKNSDLTTRPGASSERDAESNHSAPSLLNTESISNPFSSKGAEDSAWETKSNSNQNSSWGVAVEKTGIASNPDQSDGWGSGGSWGQAEHKTGSMGDGNQNSNWNDKPNNLNGNQSSGRDSKSNWNTTKASEGESSGWNSVKKSNQTSSIGWGGGNGFKSGVKEVGNPDGTSDIDANQDVGWKSQPTKDGSGSSGWGTKNNWNAPVSSSHDKQGKGNDQGGWNAGKACSAADFCQASGWKGGLSENAQEGSNWGIKKFGSCDVSGDSSGNLGSNGWGQKSNWNSGSRSGNENQNSHWSSGRNEPGNQDSNLDKKSNWNSGNSGNLASDPKSSNWNSGSGNSNENSNWGTNVNNKSSWGTGNENKNSSWSSGHSDPGNQDANQGKKSNWNSGNSGNQPSDPNSNWNSNKSSWSAGNENKKSNWSSGDPGNTDSNWGNKNNCISGSGDANQNTSWRSNSSWNTANASSDDGNEGSNENSDGVGGGNWRGGYRGRGGSDRGGFRGRGFRGRGERGGFGGRGEHGGFGGRGERGGFGGRGRSDREGFGGRWGSEGGRGGRGRGRNDQSGGWNNRRDSGEDGPSDWKKGADNGGWKNSNGSQAWNQDTGDKDRQSWSQGNADKEHPSWNQGSGRNQSWSSASGANDNGSQAWNQGNADKEHPSWNQAGNKQSWSSASGGGNNNWNNNGSSQTAEASWKKSTTEGTNIQGGGWNKGSSSNTTSKDWGQSSAADKGQASSWKEAADGASGSWGKKNDGGDKGGW

SEQ ID NO: 143918 - protein, 90 aa, Glycine max
  unsure (1)..(90): unsure at all Xaa locations
  Clone ID: PAT_MRT3847_100971C.1.pep
XXLKLFQWVIFLYLFNPFELDTFNFDFQIYDMLYYHIYVILYLYGQIIEYSSFGLLCLWFFYGHRDFNLHFDAEALNIHSLNYIYSLLVI

SEQ ID NO: 143919 - protein, 63 aa, Glycine max
  unsure (1)..(63): unsure at all Xaa locations
  Clone ID: PAT_MRT3847_100972C.1.pep
SXVSXXLVMXLPXCLRFSXEXGXPVRRXXDLRXXXXXXFLXXGGXXLXXMXMSLXXRXRRXQR

SEQ ID NO: 143920 - protein, 102 aa, Glycine max
  Clone ID: PAT_MRT3847_100973C.1.pep
KKNNPLLQRNPRGGPAKNKNSQGQPRGQKKQTLWGNALPPIKKGGGPQEPQPFKMKTNPGPEKRGDPPQAPLGGALLYPIQFPKKFPVFFARNWPTTPNSQF

SEQ ID NO: 143921 - protein, 71 aa, Glycine max
  Clone ID: PAT_MRT3847_100974C.1.pep
SPNELNQLTFSGTRSVKACSQPKPDGRKALINRPTGGERKATKRAPWWLPNSHNRQTLDLLQPSSCPDDRV

SEQ ID NO: 143922 - protein, 110 aa, Glycine max
  unsure (1)..(110): unsure at all Xaa locations
  Clone ID: PAT_MRT3847_100975C.1.pep
NDDDDKDRENNNVISFAKILTPSDANNGDDFSVPRFCADSCFPPLDFRTDLPVXLLSVADIHGVEWRFRHIYHGTPRHHFFTIGWSKFVNHKKLVDGDTVIXVKDSHDGM

SEQ ID NO: 143923 - protein, 240 aa, Glycine max
  Clone ID: PAT_MRT3847_100976C.1.pep
MDVDDADNRSSWRSPREQLQHWQMNRRKLAFSTVGTPDYIAPEVLLKKGYGMECDWWSLGAIMYEMLVGYPPFFSDDPITTCRKIVHWRNHLRFPDDAQLTLEAKDLIYRLLCDVDHRLGTRGANEIKAHPWFKGVEWDKLYEMEAAFKPQVNGELDTQNFMKFDEVDPPTAARTGSGSSRKMLTTKDLSFVGYTYKNFDAVKEGLRQSFGDSMQEYASKRAAEETSLQMLASSGDPMVP

SEQ ID NO: 143924 - protein, 78 aa, Glycine max
  Clone ID: PAT_MRT3847_100977C.1.pep
PWFRQAVNSLSISTCRSHLGKEATSVQVTLLCTGRSHTPHGDQHKSQVSSKPSGMPRSTSIFPHENLRVLTDKVYTIS

SEQ ID NO: 143925 - protein, 87 aa, Glycine max
  Clone ID: PAT_MRT3847_100978C.1.pep
NFMKFDEVDPPTAARTGSGSSRKMLTTKDLSFVGYTYKNFDAVKKGFVNLLVIPCKSMLLNGQLKRQVYKCLHPLEIPWYHSFVQIE

SEQ ID NO: 143926 - protein, 511 aa, Glycine max
  Clone ID: PAT_MRT3847_100979C.1.pep
RKKRKKSKLTTDGEEEKRLKKSKKSKRDSPDIYASDLESNSLVVQDEHAESKTCESLVDLEQKTASRSKMGGKISITPIPLKQVWMIKPEKLKKGNHWSKDCIPPADFWLPQEDAILCAVVHEYGPNWSLVSETLYGMSGGGSYRGRYRHPVQCCERFRELFQKYVLLSMDNANHEKINSPGSGKALLKVTEDNIRMLLDVASEQVNRELLLQKHFFALLSSVWKVASHVDHRRNPSPSCNGLYFDQSFYTSIGQPSQNSLKKSSERMAFANLAPSKNLVAAALDDITTRQVNDKVILSNQGEDMPVSADQLDITLEFAKEDSDVLSSFPSVINLSIHGTEPTPSLNKLTGEDDLKVGLFIAENRFREAARVCGEDSSGWASSAFPTNDTRSRPGSRLQSSGKRKSSVSDSSKPSRSKSKKASMDRSEMHPYQADSMFQSMPSLKDLRIDLTSLTTDEVGIDGMDSIFSFDLNGESSLEMESVGMIPHDYVAGLISDLDDSTAFPEYTDIR

SEQ ID NO: 143927 - protein, 74 aa, Glycine max
  Clone ID: PAT_MRT3847_10097C.1.pep
LSLLRCQVGLRWCQLIFVRKTFTVHFMLPEELCEFNYMSKLEMSVSSIFSKLIFNKVHHTHLFGSFINSNKNMG

SEQ ID NO: 143928 - protein, 59 aa, Glycine max
  Clone ID: PAT_MRT3847_100980C.1.pep
AQEIIRLNLSVFIYPFVCFYLFDAGTCGCLTQKDLKFLEKWVKGGLCFVACIVWKICEV

SEQ ID NO: 143929 - protein, 220 aa, Glycine max
  Clone ID: PAT_MRT3847_100981C.1.pep
MSPTNTFAILVFFCCAISFTFASDPDTLQDLCVALPSSGVKVNGFACKAESNVTEADFFFAGLAKPGATNNTLGSVVTAANVDKIPGLNTLGVSFSRIDYKAGGLNPPHTHPRATEIVFVLDGQLDVGFITTANKLISKSINKGEIFVFPKGLVHYQKNNGDKPASVLSAFNSQLPGTVSIAATLFTSTPTVPHNVLSQAFQIDAKLVDDIKAKLAPKKT

SEQ ID NO: 143930 - protein, 254 aa, Glycine max
  Clone ID: PAT_MRT3847_100982C.1.pep
MAMSSIHTLYASSFRLCFPNSSPQFKPLNAIPLGGTKLYNNNNVKFPRERTRTRATLDDVETDQLSSTPLVENDKAKKDVDESVKVLKDAAKTRKVAAEDILSALSIIEKAKVDPSAFFETLGGKESPGRTWMLIFTAEKQLKGGRYFPLTAVQRFDAAAKRIENGVYLGPIGQLTFEGRLSFKKRILAFVFENIRIKVGPLQPLEISLGKKEDKEPSTKDPFFIWFYVDEEIAVARGRSGGTAFWCRCRRANN

SEQ ID NO: 143931 - protein, 221 aa, Glycine max
  Clone ID: PAT_MRT3847_100983C.1.pep
MSPTNNTFAIFVIFCCAISFAFASDPDTLQDLCVALPSSGVKVNGFACKAESNVTEADFFFAGLAKPGVINNTVGSVVTGANVEKIPGLNTLGVSFSRIDYKAEGLNPPHTHPRATEIVFVLDGQLDVGFITTANKLISKSIKKGEIFVFPKGLVHYQKNNGDKPASVLSAFNSQLPGTVSIAAALFTSTPTVPDDVLAQAFQIDTKKVDDIKAKLAPKKT

SEQ ID NO: 143932 - protein, 79 aa, Glycine max
  Clone ID: PAT_MRT3847_100984C.1.pep
IYWIIVLFLLHPVCLVAGPPVCINNCSLFSIRGAIGYYNTNFIIYPLTAVVVYLCPLNIAPPLPRISCSAALLPPDRKR

SEQ ID NO: 143933 - protein, 59 aa, Glycine max
  Clone ID: PAT_MRT3847_100985C.1.pep
TAARRRQKGTPNPHQILLLALRVPGLLLWVDISHPKFLLIASVAKLLCYEWQVRYVLPL

SEQ ID NO: 143934 - protein, 153 aa, Glycine max
  unsure (1)..(153): unsure at all Xaa locations
  Clone ID: PAT_MRT3847_100986C.1.pep
TSKAHRILKESILTXQDAKDETNNDAYNYLLPITPTFKDSRFIGSIEPHCKLRIMYMPYLSRSSPQIKILALTALSVLLYNDXDIXYLSSSDHVPSVLSMLQTLHEEITTAVLVVVKEMAPLLESREQQNMLSXAITDILPCASVSRKYFKSN

SEQ ID NO: 143935 - protein, 147 aa, Glycine max
  unsure (1)..(147): unsure at all Xaa locations
  Clone ID: PAT_MRT3847_100987C.1.pep
MTNDGARFVPDDFGHAAARLAVAQLCDATEFHGATASALDAFADVAVRDLLDLGRIAESHADRTQCTVFDTIRSMEDLEAPRAFASAGGIREIINFFESAADKISFAQPISNFWVXLGXRRIIPSFDQMGEAPPAKHIPTWLRRESG

SEQ ID NO: 143936 - protein, 38 aa, Glycine max
  unsure (1)..(38): unsure at all Xaa locations
  Clone ID: PAT_MRT3847_100988C.1.pep
EMSAFVYKDWLFTKRALPADFXKRGLAIEDPXCPHGIR

SEQ ID NO: 143937 - protein, 68 aa, Glycine max
  unsure (1)..(68): unsure at all Xaa locations
  Clone ID: PAT_MRT3847_100989C.1.pep
IVLLLATLILSPXVLESMRKTQWKRLPIGNPQVYKPPVEKPPVYKPPVEKPPIXKPPVEKPPVYKQPV

SEQ ID NO: 143938 - protein, 101 aa, Glycine max
  Clone ID: PAT_MRT3847_10098C.1.pep
MVRLRVDHRRVLLLEDVRWVLLFEDDRLCLVVEDARMAHAYIKCGHCTNSQNNCIGHLQNGGTPSSVCFNGVNSLNAVFKTTADRHIECNCLMSAFSQYLR

SEQ ID NO: 143939 - protein, 43 aa, Glycine max
  unsure (1)..(43): unsure at all Xaa locations
  Clone ID: PAT_MRT3847_100990C.1.pep
FIEKRXGLSQYLKRFFGVXXKEFYKEKFKSTKVIPYEIVXELV

SEQ ID NO: 143940 - protein, 171 aa, Glycine max
  unsure (1)..(171): unsure at all Xaa locations
  Clone ID: PAT_MRT3847_100991C.1.pep
MASGHMEALVGYPGKLTLRVVLTCVMAATGGLIFGYDHGVSGGVTSMDSFLKEFFPSVYEQESTMKASTDSYCKFNSQILTLFISSLYLTALVAGLVASSITRXWGRRATMIIGGIFFVLGALLNGLATGLWMLIVGRMLLGFGIGCANQSVPIYVSEMAPYKYRGSLNIC

SEQ ID NO: 143941 - protein, 66 aa, Glycine max
  Clone ID: PAT_MRT3847_100992C.1.pep
TIQQFKHYNNQNDTTFQPKIFNKYQKTQIFFLTNYGPHPLTNLQLKLPHFTTPSNHERGRKNPSQN

SEQ ID NO: 143942 - protein, 110 aa, Glycine max
  Clone ID: PAT_MRT3847_100993C.1.pep
HHRDIALSQSLFSALMSLVVGVTAWEAEDPCMPLVVALFAVVGMSLKSVVQFFSTIRNKPASDAVALLSFNWFILGTLTYPTLPRVARMLAPLVLRLMDQTMTPGSVSFP

SEQ ID NO: 143943 - protein, 180 aa, Glycine max
  unsure (1)..(180): unsure at all Xaa locations
  Clone ID: PAT_MRT3847_100994C.1.pep
LLTTCNLASGDVPSCDGIVYCQLVDSLQYLSLTCPDIAFPINXSQFMKDPTKIRMQATKRVLRYLKGTIDFGLQLRSSPDQHLRAFYDANWVDNTSDIRSTGAYVVYFGLSVISWSCKKQSIIDKSSTKVEYHKITTTIIESHLAXPSPTMYSYNIGAMYLCANPVFHLCMKHLTIDHLF

SEQ ID NO: 143944 - protein, 43 aa, Glycine max
  Clone ID: PAT_MRT3847_100995C.1.pep
FGAMYWLLQSWDGRFLLVYCFGIRLELCKYAASMPIASQRKLV

SEQ ID NO: 143945 - protein, 48 aa, Glycine max
  Clone ID: PAT_MRT3847_100996C.1.pep
RFMQICLHMSVNLAGLKLYSMYQSGVTFLAVRCISVQKYVCNRFCQLP

SEQ ID NO: 143946 - protein, 138 aa, Glycine max
  Clone ID: PAT_MRT3847_100997C.1.pep
GSSFCGKGMRGTTLVDGTDAELTPGSAAGHGRFQMGLEAMNFFLLLHAVRQGNELNNLGRRLRPELTHNNRVAGQNAAAVLDISDEDNDNDGRYNEDNDDGGVSLVSRLHGHGGGRVLLGRSGRRRRCREARARIGDS

SEQ ID NO: 143947 - protein, 95 aa, Glycine max
  Clone ID: PAT_MRT3847_100998C.1.pep
RQGNELNNLGRRLRPELTHNRVAGQNAAAVLDISDEDNDNDGRYNEDNNSRYNEDTDGGVSLVSRLHRHGGGRVLLGRSGRRRRCREARARIGDS

SEQ ID NO: 143948 - protein, 177 aa, Glycine max
  unsure (1)..(177): unsure at all Xaa locations
  Clone ID: PAT_MRT3847_100999C.1.pep
XXHWXRRREXXXAASELEDDDDSHDPSVXXRXLEEXXIPLRQRYSQPCSLPNNKRTQPMRTSLXSPSSNVKFSAGLMQGVIQLKPHSAHSTPSPFQELSVSSLSYIKKQKGVEIMGPSCSNRSIDDGTLLLNYKQCSFNKKLMNGYFSFGAQGLAVEDSNSCAKSNSSYKRLSSIVA

SEQ ID NO: 143949 - protein, 108 aa, Glycine max
  Clone ID: PAT_MRT3847_10099C.1.pep
ALEGEKVLNPSPCPPSLPAECVVSRADPILQQEKSTQSPSELTEVTGLEVTKDRPEELHLVLPAECPVSGDDPISPKEKPTQSPSQLIEETSLEVKPLEQSSINLERE

SEQ ID NO: 143950 - protein, 116 aa, Glycine max
  unsure (1)..(116): unsure at all Xaa locations
  Clone ID: PAT_MRT3847_1009C.1.pep
LVTDSSGHPXASVNKTVSNTVTTARVHNPVNGPKQEKAKGSSGGSLDDVKGADGVLIKKKVKRKLEQGLEGTHFRPEKIGASLQGEEKTRSLKQSAGVPPKSNLQPTSLPGLEQSS

SEQ ID NO: 143951 - protein, 171 aa, Glycine max
  unsure (1)..(171): unsure at all Xaa locations
  Clone ID: PAT_MRT3847_100C.1.pep
MGVPAFYRWLADRYPLSIADVVEEEPSVGSGAVDVSKPNPNGVEFDNLYLDMNGIIHPCFHPDGKSAPTTYEDVFKSIFDYIDHIFSLVRPRKLLYLAIDGVAPRAKMNQQRSRRFRAAKDAAEKDAAEAEAEIERLREEFEGEXNSLSSKDKXETYDSIGITPGTPFMGG

SEQ ID NO: 143952 - protein, 66 aa, Glycine max
  unsure (1)..(66): unsure at all Xaa locations
  Clone ID: PAT_MRT3847_101000C.1.pep
MVRVSVLNDALKSMYNAEKRGKRQVMIRPSSKVIIKFLLVMQKHGXGKIVVELNGRLNKXGVISPR

SEQ ID NO: 143953 - protein, 42 aa, Glycine max
  Clone ID: PAT_MRT3847_101001C.1.pep
AVITYSPSQHRNYYFTPFLNPTNFGSGETDIRCLLSTPPIFY

SEQ ID NO: 143954 - protein, 37 aa, Glycine max
  unsure (1)..(37): unsure at all Xaa locations
  Clone ID: PAT_MRT3847_101002C.1.pep
FXTMQLDRXQLVDFXGSRSSLXLRKAKLSRSYTSTPG

SEQ ID NO: 143955 - protein, 118 aa, Glycine max
  unsure (1)..(118): unsure at all Xaa locations
  Clone ID: PAT_MRT3847_101003C.1.pep
GRMHNRGKGISSSALPYKRTPPSWLKISSQNIKENICKFTKKSLTPSQINIILIDSHDIDSINTITSSKILRILEXHRLTPKIPENLYHLIKKTVSIRNHLXENRRDKXSKFKLILID

SEQ ID NO: 143956 - protein, 76 aa, Glycine max
  Clone ID: PAT_MRT3847_101004C.1.pep
PRVRPVKQLEPGNTAKVTGMLVEMDQSEVVHLLESPEALKAKVKEAMNVLRNVAQRQAGGSADHLVSLSLNGILVF

SEQ ID NO: 143957 - protein, 107 aa, Glycine max
  Clone ID: PAT_MRT3847_101005C.1.pep
IRLEAACFIQAAWRRFKKRMLTKSLSLRECQSFNHDEQVGDEMEHGEEEHSAVTSNTAQVKQNLGVTILASRFAANTRRGVQKIKDVELPKFQKPEEPDFSVEPDDG

SEQ ID NO: 143958 - protein, 134 aa, Glycine max
  Clone ID: PAT_MRT3847_101006C.1.pep
LTFGLYISFNFIIFCLQYPDYIDAYLRLAAIAKARNNILLSIELVNDALKVNNKCPNALSMLGELELKNDDWVKAKETLRAASDATEGKDSYATLSLVWLLFGAQFTSLFLHPQHLNPFLQVDSEDPRVQSSNS

SEQ ID NO: 143959 - protein, 250 aa, Glycine max
  unsure (1)..(250): unsure at all Xaa locations
  Clone ID: PAT_MRT3847_101007C.1.pep
VRSSLANSAGIQTIVLVPTDLGVVELGSVRMLPESFELLQAVKSVFSTPIPKXFGEHNSHQTHFREKLAVRKMEDNRPWNNNNVSFPNVRSNGLHVSSCWPVNSGLRQPAPRVVAELANGVRQDLRLSNSYEPQRQVQMQIDFSGGTSRPSDVEASCKEEQPSVADERKPRKRXRKPANGREEPLNHVEAERQRREKLNQRFYALRSVVPNIXKMDKASLLGDTIAYINELQAKVKIMEAERERFESISN

SEQ ID NO: 143960 - protein, 439 aa, Glycine max
  Clone ID: PAT_MRT3847_101008C.1.pep
LEPLEPDYCVRSSLASSAGIQTIVLVPTDMGVVELGSVRMLPESFELLQAVKSVFSTQSPSYQGVSVSTGGNAVFPGLAIGDANKVDGGVSIPKVFVNTIGNRTHFREKLAVRKMEDNRPWPGHGHPDPNGNNLHNNVSFPNVRGNSLHVSSWAVNSDLRQPGPLEIFAPRAPTSSVLAELANVGKQDFRPQRQVQMQIDFTGATSRPSSARPVVGELELSDVEASCREEQQPSFADERKPRKRGRKPANGREAPLNHVEAERQRREKLNQRFYALRSVVPNISKMDKASLLGDAIAYINELQAKVRIMEAEKERFGSTSNDGSVLEAKLRLENQEKKAPDVDIQAFQDEVIVKVSCPLDSHPVSKVIQTFNEAQISVVESKLAAANDTIFHTFVIKSQGPEQLTKDKLIAVFSPTESNSLQPLSQLDSKGIAVSIVHT

SEQ ID NO: 143961 - protein, 67 aa, Glycine max
  Clone ID: PAT_MRT3847_101009C.1.pep
LVIVWESGSYLWISAIKPPSVCRCVYLLNHAYGVTYDFKFYGTGSPEVLGLSNMWTQLMLQMQNITW

SEQ ID NO: 143962 - protein, 78 aa, Glycine max
  Clone ID: PAT_MRT3847_10100C.1.pep
MDMASSPRTVEEIFKDYSARRTSVIRALTHDVDEFYGLCDPGKRVVNWIWFYFLFLGSIFFFSFVYIFLWGSFCFANF

SEQ ID NO: 143963 - protein, 50 aa, Glycine max
  unsure (1)..(50): unsure at all Xaa locations
  Clone ID: PAT_MRT3847_101010C.1.pep
DYLXXLPLITIXWISIHVLISSFXPXXXXXNPPGXHPXPIIXXILELGNQ

SEQ ID NO: 143964 - protein, 109 aa, Glycine max
  Clone ID: PAT_MRT3847_101011C.1.pep
TEIQSVLAYIELPQPTRLPSVRPTLASKVFLIPSPNPLSSVAHLLLLYVTILTVIGYNHQTATTAEPCNDVGVHRIGWTFGSMIFELFYCTAGISRGHINPAVTFGLLL

SEQ ID NO: 143965 - protein, 97 aa, Glycine max
  Clone ID: PAT_MRT3847_101012C.1.pep
SLSATPGHSWRASSCFCYLFHVFLLVLPLVVPFFGGTRVPTEAGSSAVGGLALGFGLLPLRFQVHVVTTHLETLLVATTIIYGHYQMKNARKRRRGK

SEQ ID NO: 143966 - protein, 144 aa, Glycine max
  Clone ID: PAT_MRT3847_101013C.1.pep
PTVRHTRPRLREDDRRAIEFTVKVWDYLEEVVVAVLKRHSEHYHQLQTSTKRAGKNLIAKMKENSMKYVMEVVEMEKLTDYTSNPEYMSEYNELMANQDEFVEKVNTGNYHEVALDGFEQAIKVGHLSQYSTLLPQAFDLKMSL

SEQ ID NO: 143967 - protein, 58 aa, Glycine max
  unsure (1)..(58): unsure at all Xaa locations
  Clone ID: PAT_MRT3847_101014C.1.pep
LTIIPLLLQQYQIFNXKYQYFPIPITILYYIYPNPIPHTLHIFLSKILQYIPFYSPKL

SEQ ID NO: 143968 - protein, 74 aa, Glycine max
  Clone ID: PAT_MRT3847_101015C.1.pep
ASRELCLLDLCFELCGITKARRGTTKPYSANSNREKFGESKRETLIWKETSNKEQNPTRLSLSLYFFFSSGVFM

SEQ ID NO: 143969 - protein, 46 aa, Glycine max
  Clone ID: PAT_MRT3847_101016C.1.pep
QVTIAIIHCYPPEGKYHSPNSLLFLRTHATQIHLNTSLNFSIKVLF

SEQ ID NO: 143970 - protein, 110 aa, Glycine max
  Clone ID: PAT_MRT3847_101017C.1.pep
QKEAFHEEEEPHEISKNQCGDEYKEETCNKKGTHGVIVIENSNLLKPKTLKARDVDVGKTTELSRHEMDEINKHIADDRYMRMQEHGKTEQATNDLERLTLIRHEMEDSA

SEQ ID NO: 143971 - protein, 58 aa, Glycine max
  Clone ID: PAT_MRT3847_101018C.1.pep
DFVFLCPLLQGKVESDDYSIMKRENPIQSTHRKLHLRTSFQIKQYKLVNKIFQVHNHT

SEQ ID NO: 143972 - protein, 162 aa, Glycine max
  unsure (1)..(162): unsure at all Xaa locations
  Clone ID: PAT_MRT3847_101019C.1.pep
SSRFGCEALSTVVHLINRMPSXSLNNDTPFFKLFGHKPTYSNLRTFGCIWYVHLPHKNAXKLTTQFVKCAFLGYSVHHKGFVCYYPNLHKFRVSRNVIFQEDTYFFPTNQDTPSSTSTSILSLFPNNFVGKPAPQPLLVYQRHQVVLPNPHPYLQGPLLINL

SEQ ID NO: 143973 - protein, 137 aa, Glycine max
  Clone ID: PAT_MRT3847_10101C.1.pep
MSAAEQNVAVEADKKEVKKAKATKAKGAQAKKGKKTSLKFTVNCAAPVDDEIFDIQSFEKFLHERIKVGGKTGVLGDIIAIERERSNIHVTSKTAMSKRYVKYLTKKFLKKQQLRDYIRVISSSKNAYDLKYFNIHN

SEQ ID NO: 143974 - protein, 181 aa, Glycine max
  Clone ID: PAT_MRT3847_101020C.1.pep
SMIDGYGKNGFPDEALQLFGKIPNRIWHVPNYVTFLSALSACAHAGLVDKGWEIFQSMENEYLVKPGMEHYACMVDLLGRAGMLNQAWEFVMRMPERPNLDVWAALLSSCRLHGNLEMAKLAANELFKLNATGRPGAYVALSNTLAAAGKWESVTELREIMKERGISKDTGRSWVGADSVF

SEQ ID NO: 143975 - protein, 242 aa, Glycine max
  Clone ID: PAT_MRT3847_101021C.1.pep
TRPLFSDGKEKFAILCSNGHLREAFESFLSEIWAKPRLFSNLLQACIPLKYVSLGKQLHSLILTSGCSSDKFISNRLLNLYSKFGELRAAVALFDRMPRRNIMIKACLEMGNLQSAKHLFEEMPERNVATWNAMVTELTKFEMNEESLLLFSRMSELGFMPDEYSIGCVLRGYAHLGALLTGQQVHAYVMKCGFECNLVVGCSLAHMYMKTGSMHDGKRDIIWMPDCNLVAWIHLWFGKAQK

SEQ ID NO: 143976 - protein, 129 aa, Glycine max
  unsure (1)..(129): unsure at all Xaa locations
  Clone ID: PAT_MRT3847_101022C.1.pep
EFSLPFNSTRVEAAKELGSPIPCDDGHLDTVLSIDGGGIRTIIPGIILGCLGSELGKLDGYHVRLAHNFDAMAESSTEGVETAGLTAANENSRALYAXKDLANLYREHTPILYPQNRCWHLFSCMVKLT

SEQ ID NO: 143977 - protein, 103 aa, Glycine max
  Clone ID: PAT_MRT3847_101023C.1.pep
MAALGGFTDITGAQNSIDIENLARFAVDEHNKKENAVLEFVRVISAKKQVVSGTLYYITLEANDGVTKKVYETKVLEKPWLNIKEVQEFKPITVAVNPLSVTV

SEQ ID NO: 143978 - protein, 101 aa, Glycine max
  Clone ID: PAT_MRT3847_101024C.1.pep
INPFKSNSSCLLVATPQHHLVHNFLHKDEQHLAKVNHLAFFFLKRRLPVWDLSEAEGHDGTVLLGQGLQVSDHREARWAWRAIFALFWTQEDGGEYQYYEA

SEQ ID NO: 143979 - protein, 72 aa, Glycine max
  Clone ID: PAT_MRT3847_101025C.1.pep
EPIRQLDSVKESLWVSTLIEQVVEDESQMEGLMDNCSRVMVWHIDLESSYSFYPQKWIVKNNLDAIVHLPLV

SEQ ID NO: 143980 - protein, 125 aa, Glycine max
  Clone ID: PAT_MRT3847_101026C.1.pep
PKTPRFPQHTINIGAGFMFHSLNLKEYGSTIWPPFWLKFKSDLGASHLCFTLFFYLGDLWHLGPHIPVLKSHSPIFPLQPLRGVAYLGPKVPSCHFFGGNRPVLLSKDIGLVKPIWYPLSAFSLC

SEQ ID NO: 143981 - protein, 68 aa, Glycine max
  unsure (1)..(68): unsure at all Xaa locations
  Clone ID: PAT_MRT3847_101027C.1.pep
VVRFMTASWFWMDHGCSGMNQGSGATIRAINGRLEWDGANSSAVQARGNYYTQYCXNLGASPADNLTC

SEQ ID NO: 143982 - protein, 56 aa, Glycine max
  Clone ID: PAT_MRT3847_101028C.1.pep
IKVCVCVGGDKYHCGPLKLLYQVSISKELMYLMKVTGISVVEVSILIINTSVEEVP

SEQ ID NO: 143983 - protein, 170 aa, Glycine max
  Clone ID: PAT_MRT3847_101029C.1.pep
MNKDESDRNEKKAQDIKLWGVFIFGLIGATVTAFSERIRRMQSVFNRERDKHRRNYESWKENGAGAHHQHFQRDDWYWKAEASFREQWANQHTQRGSGNYSLSHHYSVLGLDRFRTTPYTEAEIKTAFRTKAKQYHPDQNQDNREAAEAKFKEVICSYEAIQQERKNQNL

SEQ ID NO: 143984 - protein, 61 aa, Glycine max
  unsure (1)..(61): unsure at all Xaa locations
  Clone ID: PAT_MRT3847_10102C.1.pep
LIAAGKEKLASVPFGGGGAVAVPPGSGGGGGGASPAAXVKKKEKVGEKKGFDDYMGFRLFD

SEQ ID NO: 143985 - protein, 145 aa, Glycine max
  Clone ID: PAT_MRT3847_101030C.1.pep
MNKDESDRNEKKAQDIKLWGVFIFGLIGATVTAFSLSRSQAKGGSSFRTAFQEEAWKRYNKRLQEEYEEEMERVERIRRMQSVFNRERDKHRRNYESWKENGAGAHHQHFQRDDWYWKAEASFREQWANQHTQRGSGNYSLSHHY

SEQ ID NO: 143986 - protein, 43 aa, Glycine max
  Clone ID: PAT_MRT3847_101031C.1.pep
SLSPLKLHIPHKIFGIPLVLNSVQLPAIICTPGFTLSLNTSAP

SEQ ID NO: 143987 - protein, 70 aa, Glycine max
  Clone ID: PAT_MRT3847_101032C.1.pep
ATPRGEHEHSDSPIHTRKIFTDLLYTHPKLYLRMLDMSNPPATTPSSYCKTTTTQVTHINNLAPRPHSHI

SEQ ID NO: 143988 - protein, 99 aa, Glycine max
  Clone ID: PAT_MRT3847_101033C.1.pep
INLKIGVVSNAQSLMHGFHQHIYNDNIYKIYKIFELKLINLHLICSQLIGLGFTKKSHFLLATNLPVRLPIKYEASSRHFCISLKSLAFVCLICFSTHT

SEQ ID NO: 143989 - protein, 65 aa, Glycine max
  Clone ID: PAT_MRT3847_101034C.1.pep
GKNEWLLLQTQRSNQSHHLPIDAYAYTKQTYRGSRHTKATEIVSSKTGEMLNSSSRSYRSVNNGQ

SEQ ID NO: 143990 - protein, 124 aa, Glycine max
  Clone ID: PAT_MRT3847_101035C.1.pep
MSTWHHKAETPISLKPPKPNQTLKNHLECNRPTKVLLLFRSFLRKKPTLNLIDSFSLLYALKACNHKHPSTQGKQLHTLIIKLGYQPIVQLQTTLLKTYAQRSNLRDAHQVFDEIPAKNIICWT

SEQ ID NO: 143991 - protein, 130 aa, Glycine max
  Clone ID: PAT_MRT3847_101036C.1.pep
MFSNRGVNLVNEEKRLAKSSEDGNTRNIVDSKTEIQSLVKLNLKLLTRDKKLGFDTFKVVARQATHTILAACSSDQQKSSTSSSSSVCSHADNTPQFQKSTLMPNCCRQCFYNFVNNVVHSTILEKVGCA

SEQ ID NO: 143992 - protein, 163 aa, Glycine max
  Clone ID: PAT_MRT3847_101037C.1.pep
YGCEKTTEGEGVKVKIPTFKGIYDPEVYLEWKMKVEYVFACYNYNEEKKIKLASLEFEGYALVWWNQVRSDVERMKRLLIDTWQYMKRVLRERFVLSYYGRDLHNKLQRLIRGNRSVVEYYKEMEISLIRAQIERSQEATMARFLHGLNREIQDIIELHHYAS

SEQ ID NO: 143993 - protein, 39 aa, Glycine max
  Clone ID: PAT_MRT3847_101038C.1.pep
WMAWIPSILRIRFPSLRYAGNAVHRTAPERSPSPASRWL

SEQ ID NO: 143994 - protein, 147 aa, Glycine max
  Clone ID: PAT_MRT3847_101039C.1.pep
SCSISRHNNVWSEATSSESVEMLLKSVGQEEFIPRETVIQESDACDELVCLAKQMEPDPKPDGRNEFKNNITDLQPTGFIDENLAGLKDEEREQSLAGVSQGVLSIDGSLSNLQPHDMLGNIDLPMARGILFTDDKSNDTNQGKVET

SEQ ID NO: 143995 - protein, 84 aa, Glycine max
  Clone ID: PAT_MRT3847_10103C.1.pep
GNHGGAGSGSPAGVREQAPRSRSIGLSCSTKRQAVGGGTVWRGFGKSPPQGKEKGPVQGGCLPVSQRGLSEIERFHSGFFECSP

SEQ ID NO: 143996 - protein, 104 aa, Glycine max
  unsure (1)..(104): unsure at all Xaa locations
  Clone ID: PAT_MRT3847_101040C.1.pep
RRQSPPRGTERGRERRRKEKRRRHNPGRPQEPRGQDRGNRTRRGKTQKRXRSPSRQXXGEEQDTKDPTGRSDPPKRKPTEKRRPRTHTRPQERRKTKPGGRQQS

SEQ ID NO: 143997 - protein, 55 aa, Glycine max
  Clone ID: PAT_MRT3847_101041C.1.pep
MGNNRFKLSDMIPNAWFYKLKDMSKSRKRNGSHAMKSKVSSPPTTTTSQRSLPRY

SEQ ID NO: 143998 - protein, 70 aa, Glycine max
  Clone ID: PAT_MRT3847_101042C.1.pep
STCIATCSNYPGFLPWCFLIIRARDLANSIVLHGIRTCHLSLTVRVRSIMIVLLRFILVYPTSATPKSLQ

SEQ ID NO: 143999 - protein, 83 aa, Glycine max
  Clone ID: PAT_MRT3847_101043C.1.pep
CFQCYVVIHSSKVVYICSRSIGPPDQNICSAMFLFSKTSRIGRSHMVLPGAGLLIMRRCCLVLGASLSHYSSSSPKQWPYSHR

SEQ ID NO: 144000 - protein, 108 aa, Glycine max
  unsure (1)..(108): unsure at all Xaa locations
  Clone ID: PAT_MRT3847_101044C.1.pep
NLMTLDAAPLXNQRTWAKETLEIFAPLSNRXRISTXKEQLQNLCFKHINPSHHDELSSKLVXSYDDPMITFAIERLQEALKDECISYNVISXLHKILYKVYRTMLKKK

SEQ ID NO: 144001 - protein, 54 aa, Glycine max
  Clone ID: PAT_MRT3847_101045C.1.pep
TCIELGKTPAQVALNWGLLTGHNVLPKNTYECLIKGNFCLFGLSITQKVMDKVF

SEQ ID NO: 144002 - protein, 226 aa, Glycine max
  Clone ID: PAT_MRT3847_101046C.1.pep
MATPASITNVTVEFLQFPAVVTPPASTKSYFLGGAGVRGLNIEEEFVKFTGIGVYLEDKAVSSLGAKWKGKSAAELLDSLDFYRDIIKGPFEKLIRGSKLRTLDGREYVRKVSENCVAHMESVGTYSEAEEKAIEEFRNAFKDQNFPPGSTVFYKQSPTGTLGLSFSKDETIPEHEHAVIDNKPLSEAVLETMIGEIPVSPALKESLATRFHQFFKELEANPNNEN

SEQ ID NO: 144003 - protein, 78 aa, Glycine max
  Clone ID: PAT_MRT3847_101047C.1.pep
ISCHICSRKQSTVAEISTQIWQESERTGDTHMSACRVPQATGEILFMCGTLCMIWNSCCLSPAGGVPSLKAIRQGRLS

SEQ ID NO: 144004 - protein, 126 aa, Glycine max
  Clone ID: PAT_MRT3847_101048C.1.pep
YVAPIMVIGSRSKIPERAVVRNNLVRLPIKATVSPLAIMATSTSFLDNKHLETFAAYVDINCVVDCRSPWCLYEHPSPIKPPLLLCIIIHVHHIPHCYQYVPKVLRVPSLKRNAPNLDPCQPESCE

SEQ ID NO: 144005 - protein, 101 aa, Glycine max
  Clone ID: PAT_MRT3847_101049C.1.pep
QDNRGYVTSYGIIHTFSLATLITSLEEMIYFQAPTVLETTTIRLKPRNYFHKYLEHLAYIPNDTHTSLFPMIGNNNFFVQIQLHCHHHPHKSCHGIYQWTN

SEQ ID NO: 144006 - protein, 64 aa, Glycine max
  Clone ID: PAT_MRT3847_10104C.1.pep
SESASTNPEFIQLVRDLDQKSETYPLRSLTLTSSHISNSSVFRVSTESVTGYDSRSLWPAHRVI

SEQ ID NO: 144007 - protein, 92 aa, Glycine max
  unsure (1)..(92): unsure at all Xaa locations
  Clone ID: PAT_MRT3847_101050C.1.pep
MVSQKKPFTVATLFFLALFLXXXXXXXXXXTRTIXSXTPSIHSDLYXXLXPXSXPPXPQPQQXDXSXSFTSTETQPEPXGDIDDATDNVTDA

SEQ ID NO: 144008 - protein, 103 aa, Glycine max
  unsure (1)..(103): unsure at all Xaa locations
  Clone ID: PAT_MRT3847_101051C.1.pep
CIHGLFGSLVGVTPDPKXVVEESKAKLVQVLIIESERLSKSKYXAHDLCSSVDMSHLPVLDYVVNNMGIKYLLEDMKHVRAXVADISSYPSWNKVFRFYRAPV

SEQ ID NO: 144009 - protein, 104 aa, Glycine max
  Clone ID: PAT_MRT3847_101052C.1.pep
KSIINWEGEGINKKLQRTNHFTTNFMENKQPTLAFPTNKQLKETGLRTKAYLPFLISSENKRVADPRTLLVANVIFSLVLNQLYAESLALSSGATAYINSFAKK

SEQ ID NO: 144010 - protein, 174 aa, Glycine max
  Clone ID: PAT_MRT3847_101053C.1.pep
MGYMCIKISFCVMCVLGLVIVGDVAYAQDSAEDYVNAHNAARAEVGSQSPRQTVIVPSLAWDDTVAAYAESYANQRKGDCQLIHSGGEYGENIAMSTGELSGTDAVKMWVDEKSNYDYDSNSCVGGECLHYTQVVWANSVRLGCAKVTCDNGGTFITCNYDPPGNFVGERPYKL

SEQ ID NO: 144011 - protein, 342 aa, Glycine max
  unsure (1)..(342): unsure at all Xaa locations
  Clone ID: PAT_MRT3847_101054C.1.pep
MKFQKPSSGRNEQQMSMAHGKRDGANESSKMKQVLETPDNARATSTPPLEQQHQRVRQSKGNQGMHDELKMKADELEKLFAEHKLRVPGDQSGSVRRVEPADVHVEQSQYRRGGVGDSTPQLPSRSNVTEVAASSSNLASFDAKLVTKMVDSRNYGDSLRQNFSDLNLSEDSRGKFYEKYMKKRNAKLREDWSMNRAEKEARMKAMQDSLERSRAEMKVKFSGSANRQDSASGAHRAEKLRYFKSNIKREQHPIDSLQNEDDEDLSEFSEEKTYGASRQSRKIFPNRHIPSGTPRTTAVSVSRSSGGRRRDNPLAQSVPNFSDLRQDNTKPSSGVSXTTRSQ

SEQ ID NO: 144012 - protein, 62 aa, Glycine max
  Clone ID: PAT_MRT3847_101055C.1.pep
CQRFNSVYIAEHSHPCGLLFFFMVLKVKSPSFASHPCCSLGILSWLKMLKNGGLFHGFCICV

SEQ ID NO: 144013 - protein, 98 aa, Glycine max
  Clone ID: PAT_MRT3847_101056C.1.pep
VKLCSKQQIESLSSSYSNIMEANRAGQIAPNTKAENHGNARTEIRQPANTTFRKGHRRAHSMPSNAQKADKTMANGKQQTIGEKQPEHKRRVMRHRHI

SEQ ID NO: 144014 - protein, 80 aa, Glycine max
  unsure (1)..(80): unsure at all Xaa locations
  Clone ID: PAT_MRT3847_101057C.1.pep
FCYADDDLTVDLCLYYAATHYLHLLPNALSLLAXQSYRSGQGCMLTGSRVFDTEXGHHALRDYQTLADMVDVVLQSVLLD

SEQ ID NO: 144015 - protein, 49 aa, Glycine max
  Clone ID: PAT_MRT3847_101058C.1.pep
KTLLVPGGFIKNWDLNPPGVEGPFSRFIPHKVNLKPFGLTKKKRGFFHY

SEQ ID NO: 144016 - protein, 63 aa, Glycine max
  Clone ID: PAT_MRT3847_101059C.1.pep
IFLKKLLANTSLGGPLLPPLTFLFKANCKERETYSPGGFSFLGNPFRKMITQGVSFASIKPVL

SEQ ID NO: 144017 - protein, 73 aa, Glycine max
  Clone ID: PAT_MRT3847_10105C.1.pep
YSARARAESARARAVKIPFLIALSSDPNSIHSFMRSFFFHPQQTKQINFHFIYLHHPTKRFNQSKTMASLNVH

SEQ ID NO: 144018 - protein, 79 aa, Glycine max
  unsure (1)..(79): unsure at all Xaa locations
  Clone ID: PAT_MRT3847_101060C.1.pep
GSSSGTRTRTCDWMDENYLYTCFAHTGXFGEVXDIRNMRTLQSERYRFIEDNISAGADIILQTYKGVIMPNGGQHFTVA

SEQ ID NO: 144019 - protein, 59 aa, Glycine max
  unsure (1)..(59): unsure at all Xaa locations
  Clone ID: PAT_MRT3847_101061C.1.pep
NSGVDPRDRTXVRTRLNGDARSCHLGAPWIHYNNLNGCPIAEHTCSICLTATAHGVITQ

SEQ ID NO: 144020 - protein, 31 aa, Glycine max
  Clone ID: PAT_MRT3847_101062C.1.pep
HIAHACYLEASHLYYSDAQRLSNVMCIFSAM

SEQ ID NO: 144021 - protein, 66 aa, Glycine max
  Clone ID: PAT_MRT3847_101063C.1.pep
HLVLHHSSRILNRGPRATRVLLLYKMTPPMVLRRGLRLLLHTRGLIIPRFRLSHSILGHNTSIDDK

SEQ ID NO: 144022 - protein, 103 aa, Glycine max
  Clone ID: PAT_MRT3847_101064C.1.pep
YKTSKSIFRCFHLLGEHFFFFKKTFCVLIRELSKENGQKLLFKSMLVLAFFLKKKSLNPRQSYNPRFHISKGQKKVHERKETIHNSFLFSFFLFQTNHHNEIT

SEQ ID NO: 144023 - protein, 59 aa, Glycine max
  Clone ID: PAT_MRT3847_101065C.1.pep
YLPPPRPYGILIRPRHPLTHLCDTLYKRVLCSRHWAVHVQCPIHIVLNTSARYGAENLH

SEQ ID NO: 144024 - protein, 72 aa, Glycine max
  Clone ID: PAT_MRT3847_101066C.1.pep
NHTRTRTKPEHTDFYGQIKRNRLQNQIKNKKPCLLVKDLRQSQKIPGPISGVGFRIRLHFCALSGPTFQARP

SEQ ID NO: 144025 - protein, 185 aa, Glycine max
  Clone ID: PAT_MRT3847_101067C.1.pep
PPCSLFFSRCPPPWPAFFVFFGPRVCRPFRLSPSPRWKGNFLLCVSRGKPFTHPVWRFFIPPVSAGFPFLYWGLGARFFLWLGCFVCSPFFLCLGSPFVPRGFLFLGGVFILCAVFSGYPFPSCTNHQIFSPPPSWGSLWVKGVRLRVPVWVLKVKKLANKKKKGKKKKKKKKKKKKKKKKKKKK

SEQ ID NO: 144026 - protein, 39 aa, Glycine max
  Clone ID: PAT_MRT3847_101068C.1.pep
YFTYMGGGRSPSTKFMFTNPMFHLTIKGKLTPPSITIHF

SEQ ID NO: 144027 - protein, 51 aa, Glycine max
  Clone ID: PAT_MRT3847_101069C.1.pep
LASGGMGARMGAPRGIPMVITIITLRRGTGRSIPGVGARRRGPTNRPRPSC

SEQ ID NO: 144028 - protein, 60 aa, Glycine max
  Clone ID: PAT_MRT3847_10106C.1.pep
SRWRSRSVTLNHNTSGTLVYLTPKEIMILRDSCFIDMAIILTMTRRYYPLRIITPAECTD

SEQ ID NO: 144029 - protein, 47 aa, Glycine max
  Clone ID: PAT_MRT3847_101070C.1.pep
HQPTKRQHLYDFLVKINKLRLETYRVSKLKIEDENCHLREFFCKKEP

SEQ ID NO: 144030 - protein, 82 aa, Glycine max
  Clone ID: PAT_MRT3847_101071C.1.pep
TFACLVNIFLIASTVVAKHDDQVVGDDDISHEYCSERCMPQLRIRRYRIIVEHGIASMNKPMTKIMSSFLIKRGKTSPINKT

SEQ ID NO: 144031 - protein, 86 aa, Glycine max
  Clone ID: PAT_MRT3847_101072C.1.pep
GGPFFSTFFRFPKKRGGQRGGHPQKFSRGAPFWETPIGQRDQPPNRFPKIRDLGPGVKLSTHPPGGTNAPPVSMGGFLLTPTQLFS

SEQ ID NO: 144032 - protein, 316 aa, Glycine max
  Clone ID: PAT_MRT3847_101073C.1.pep
MATLKVPQPLPPVADDCEQLRKAFSGWGTNEELIVSILAHRNAAQRKLIRETYAQTYGEDLLKALDKELTSDFERLVHLWTLDSAERDAFLANEATKKWTSSNQVLVEIACTRSSEQLFAARKAYHVLYKKSLEEDVAHHTTGDFRKLILPLVSSYRYEGDEVNLTLAKTEAKLLHEKISNKAYNDDDFIRILATRSRAQINATLNHYKDAFGQDINKDLKADPKDEFLSLLRATVKCLIRPEKYFEKVVRLAINKRGTDEGALTRVVATRAEVDLKNIADEYQRRSSVPLERAIVKDTTGDYEKMLVALLGHDDA

SEQ ID NO: 144033 - protein, 87 aa, Glycine max
  unsure (1)..(87): unsure at all Xaa locations
  Clone ID: PAT_MRT3847_101074C.1.pep
LRSVATIPSDCGIGDKVAAINNMXAYGLNPGIACSMILGTIPXFIADQTVCNQMGSVRTPQNPDSSRLSLCQFYIDLMLVRILGDQS

SEQ ID NO: 144034 - protein, 37 aa, Glycine max
  Clone ID: PAT_MRT3847_101075C.1.pep
NLCSLPFSSSAVIRYTPLSMIVFQEVGLAWDGCSNEL

SEQ ID NO: 144035 - protein, 102 aa, Glycine max
  Clone ID: PAT_MRT3847_101076C.1.pep
NEQYSTVRSNIMMMDPLPDLDKFFSILIQQERRLVLQFDDSRVFAQLDTNNGTCGRSRGRGGHTSGGRGRGRSTKMCTYCNISGHMVDTCYKKHGYPPHLHR

SEQ ID NO: 144036 - protein, 292 aa, Glycine max
  Clone ID: PAT_MRT3847_101077C.1.pep
HASGGIEYLHGYACPPVIHRDIKSSNILIDEEHNARVADFGLSLLGPADSGSPLAELPAGTLGYLDPEYYRLHYLTTKSDVYSFGVLLLEILSGRKAIDMQYEEGNIVEWAVPLIKSGDITAILDPVLKPPPDLEALKRIANVACKCVRMRGKERPSMDKVTTALERGLAQLMGSPCIEQPILPTEVVLGSNRLHKKSSQRSSNRSVSETDVAETEDQRFEFRAPSWITFPSVASSQRRKSSVSEEDVDGKNNNAEGKNLGNVGGGGDVLRSLEEEIGPASPRERMFLQHNF

SEQ ID NO: 144037 - protein, 69 aa, Glycine max
  Clone ID: PAT_MRT3847_101078C.1.pep
VLMMTPTGGEGAEKMDAEDGVNCSDYEHDIENEESGGYWSGIYDRHMAHTMPLLMKRANTTYPDCYCWC

SEQ ID NO: 144038 - protein, 65 aa, Glycine max
  Clone ID: PAT_MRT3847_101079C.1.pep
MQFTTIASLFAAAGLAAAAPLESRQDTASCPVTTEGDYVWKISEFYGRKPEGTYYNSLGFNIKAT

SEQ ID NO: 144039 - protein, 98 aa, Glycine max
  unsure (1)..(98): unsure at all Xaa locations
  Clone ID: PAT_MRT3847_10107C.1.pep
MRVLYAKVRPCYSLPCYKIQHDNVMVITIAENSDREVSGLEPHVVRGATESVNIITRETSXWVSGDARHYAKAHGRVRVYAIHKVNIMHKTDGLLLKC

SEQ ID NO: 144040 - protein, 82 aa, Glycine max
  unsure (1)..(82): unsure at all Xaa locations
  Clone ID: PAT_MRT3847_101080C.1.pep
SEMAEXHRASGDEAHNQAPRSAGHDDHLDPADKHADRWVCVPDQGKVSTDSTNATKHEIAGLHRDTTDTNQGTVHQRKDKQT

SEQ ID NO: 144041 - protein, 56 aa, Glycine max
  Clone ID: PAT_MRT3847_101081C.1.pep
FAYVKEDIAEILHRECGFQTVSQSLVTSNVKSKYIIIYYIYFTSTLFFLYFSPSCL

SEQ ID NO: 144042 - protein, 60 aa, Glycine max
  Clone ID: PAT_MRT3847_101082C.1.pep
NSDEKISMQHKKQNMRARRSLPNRNNTMALCLLRNLLSTMSITYPHKNHFGFRRKKMLCL

SEQ ID NO: 144043 - protein, 126 aa, Glycine max
  Clone ID: PAT_MRT3847_101083C.1.pep
IFFRCSMLSIPCYPCLPSLGAGTAFPPARALLPPPPITSVSALAPQCVSCVPEPVVQVQSYPVFVSGPPAEAPRVDVKVVDRQGQDCGYLQQELTHVLLQLHTDQLEEERQLQQVADLSGKLRYIQ

SEQ ID NO: 144044 - protein, 97 aa, Glycine max
  Clone ID: PAT_MRT3847_101084C.1.pep
CTRVQLCPVSDCQLSKRSIMKICPYEACSTRSMVHGFRVHQTRVRHLTVMHPGVRLYVPHLNLFYDPCQSIELFLPVPISVLVESRSSAQIDFQDLG

SEQ ID NO: 144045 - protein, 56 aa, Glycine max
  unsure (1)..(56): unsure at all Xaa locations
  Clone ID: PAT_MRT3847_101085C.1.pep
MIPTKPMVVETFSKYPPLDXFAMRDMRQTVTIGVIKSIKKKDPTRAKVAEAATKKK

SEQ ID NO: 144046 - protein, 63 aa, Glycine max
  Clone ID: PAT_MRT3847_101086C.1.pep
FRLGEIRPFRCSTTSKIICSLRKIFNHFACPERMGTRACRAVRDRWKHFWAQKVNWSFTASIR

SEQ ID NO: 144047 - protein, 91 aa, Glycine max
  Clone ID: PAT_MRT3847_101087C.1.pep
WNLTTPLSRKFFIPRNLLKKLSSEGKKRVPQIYSWARSLIYKPLWLLGGECQKLGKRRTKGGILVRKHLKKLLTLGVKVFRGGGLKTLLNP

SEQ ID NO: 144048 - protein, 150 aa, Glycine max
  unsure (1)..(150): unsure at all Xaa locations
  Clone ID: PAT_MRT3847_101088C.1.pep
KWKPRVWWFKKXDSCLNHHLSGLFGVSSFAXTGQLVQVAIPASREEYVXRWNNFLNVLPHPQGLGPLFQGQWNLYAQNPDSSSHLFGTSQGSGTAILTLLGGFHPQTQSLWLTDMAHHRLAIAILFLNAGHMYSTNFEIGPSIKDLLEKH

SEQ ID NO: 144049 - protein, 216 aa, Glycine max
  unsure (1)..(216): unsure at all Xaa locations
  Clone ID: PAT_MRT3847_101089C.1.pep
MMSMRRVRWMSLLVGLWNVGVALMGAFLILLTFRLCHASFLLPFVLVSFAALLRVLLMILTASAQQAAATLILQHSSSDLLIRLRRRAMYKKWLCLSRCSAVLIVLQFLSAAYLVLTSSHHFSTSHSNHHCLLESKWNHTPVSIFIILVSSWAXLQCFTGSDIIKVSHFYETHDHAWKCHYSEVFDHGIRETLXCLXXLQYLTTXEEDEVYSVARL

SEQ ID NO: 144050 - protein, 147 aa, Glycine max
  unsure (1)..(147): unsure at all Xaa locations
  Clone ID: PAT_MRT3847_10108C.1.pep
XXAFQKKGXXVNEMVALSGAHTIGSARCLTFRSRAYNDSDIEPSYANFLRSNCPKSGGDDNLSPIDIATKDIFDNAYYRNLLYKKGLFHSDQQLYSGSFTDSKVKYYATYPSLFFKSDFANAMLKMSNLSPLTGTQGQIRKVCSRVN

SEQ ID NO: 144051 - protein, 311 aa, Glycine max
  unsure (1)..(311): unsure at all Xaa locations
  Clone ID: PAT_MRT3847_101090C.1.pep
MAILSLQFHALPFPLPTSSSSSYFDAIHLRSNNKNLVFIAYPLFSISSSSSRRRFATLVASASGDYYGTLGVSKSASAREIKASYRRLARQYHPDVNKEPGATEKFKQISTAYEVLSDDKKRAMYDQYGEAGVKSTVGGASAAYTTNPLDLFETFFGSRMGGFSGMDPTEFGTWEQCTTVTKGQDIRYNISLDFTEAIFGTEXEFELFDMEICEVCSGTGAKIGSKMRICSTCGGRGQEKKKFPEDLCKRWPNPRAVDEVISEYCTNCRGEEQIQIKKNIKVKVPPGVSSCWVLLVAGVGPAAPSYQCKTH

SEQ ID NO: 144052 - protein, 135 aa, Glycine max
  Clone ID: PAT_MRT3847_101091C.1.pep
AEITLEPSDLMAQTNKRIVPKFTEILRREDANYPYSAFIASVRKDVIKHCTDHKGIFQPVLPPEKKVPELWFYTELKTRTSSITLAIRMDNLYLVGFRTPGGVWGEFYNILLFFLNHLFIILHYFTLLLFFSFFP

SEQ ID NO: 144053 - protein, 37 aa, Glycine max
  Clone ID: PAT_MRT3847_101092C.1.pep
FFFFFFFFFFFFFFFFFFFFFFFFLTRGIFVFPNWDY

SEQ ID NO: 144054 - protein, 62 aa, Glycine max
  Clone ID: PAT_MRT3847_101093C.1.pep
TPTRFSSPSLYNITSTSPSRTSLPFTMPSSMRNFKWDNHFILLHCKLDLNVWESDLLVDEVA

SEQ ID NO: 144055 - protein, 48 aa, Glycine max
  Clone ID: PAT_MRT3847_101094C.1.pep
EAPSIVVADVPSSNPGLQHATESILLSISQSLDGVVKQCHGMNTSFRT

SEQ ID NO: 144056 - protein, 387 aa, Glycine max
  unsure (1)..(387): unsure at all Xaa locations
  Clone ID: PAT_MRT3847_101095C.1.pep
MPPEHEENARNGPAQNSGRNDKEHEHPLASETRVEKLNEMEQDAYERLERSSSYVSSKIGSPVNGHTSITSTPNHRSATTPKQAASLNADSSSPILEENSKSRSISSDDENMDQEGCEKVFNGRNMSTGVQINNDESDFDIYSSNTTSLDSNYLVDKNPSFGLGTKDNLSEMFHSDKQYHVEDESVAQGVKDQVNLSSNSYSLGGLDNGMKGNVLKNERLKHVRSVRSSADSVRSIGSLGNNHLAEVKENGVNGDTQNNGGNIRSSDRKDAKVYPREARNAILDRKIEHLENKIKMLEGELREAAGIEAALYSVVAEHGSSTSKVHAPARRLSRLYLHACKENLQARRAXAAKSAVSGLALVAKACGNDVPSXHXWLSNSIVLRTNY

SEQ ID NO: 144057 - protein, 148 aa, Glycine max
  Clone ID: PAT_MRT3847_101096C.1.pep
MTLSPQHFVFPPFQKLYFLIDHIQRNFPSLVLLKFSNHSLFYVFYQVAALGAISNIVIDFTPQKSTFMECGGVKELIQLTKSMDSSLRLNAVLALRNMVFLADKMCKEGIFKELTVSSVASLICGNDLHCQFLFFLINWCVPSKLSLF

SEQ ID NO: 144058 - protein, 69 aa, Glycine max
  Clone ID: PAT_MRT3847_101097C.1.pep
ILLSKGTLGAQMVVLQPNQIGTGGYLKHKVNIIGKGADILNSLYRRLPPDSPHLNFLSKTIHPWKPPPC

SEQ ID NO: 144059 - protein, 178 aa, Glycine max
  Clone ID: PAT_MRT3847_101098C.1.pep
SQLKEYNIDEKKFIVVMVTKPKAASQASAGPSDPTATAAGDSDNKDSKDSKDSGGQSSSASPTSAQTNTPSTGGSSSTTGSTSAPTATITSAESALLVGDAYNQMVQNIVDMGYDRDQVEQALRASFNNPDRAVEYLINGIPAQALDAVPDAGQDDADPDPAPPSSPADEPLAFLRSQ

SEQ ID NO: 144060 - protein, 41 aa, Glycine max
  Clone ID: PAT_MRT3847_101099C.1.pep
WRGTSETAQDAARAYEESAGLMCRARALTNFLFNLNASHSG

SEQ ID NO: 144061 - protein, 35 aa, Glycine max
  Clone ID: PAT_MRT3847_10109C.1.pep
RRLGIMLVLLFKSSSFALTMVLYLFHAASHSLTNT

SEQ ID NO: 144062 - protein, 96 aa, Glycine max
  unsure (1)..(96): unsure at all Xaa locations
  Clone ID: PAT_MRT3847_1010C.1.pep
MRKHGWQLPYHPLQVVAVAVFLALGFAFYVFFAPFVGKKMYQYIVTGLYSQLIXXVFGLYXWCAAADPADPGVFKSKKYLKIPDSKKLAELKNSKL

SEQ ID NO: 144063 - protein, 76 aa, Glycine max
  unsure (1)..(76): unsure at all Xaa locations
  Clone ID: PAT_MRT3847_101100C.1.pep
NPARATRPPNVXPRFRIHCPLSINLTRAMYGAATIFHLVEQSLNLYSKEPRSDLNRANMYGLAIISYFIPAAPVYY

SEQ ID NO: 144064 - protein, 52 aa, Glycine max
  Clone ID: PAT_MRT3847_101101C.1.pep
ICPARLQVLLSVLVLVGDAGTCISVDDYQVGVEAQHNSTVHGVVAAPVFRLS

SEQ ID NO: 144065 - protein, 120 aa, Glycine max
  unsure (1)..(120): unsure at all Xaa locations
  Clone ID: PAT_MRT3847_101102C.1.pep
FASDLVMNSDGTCQGVTGLYLGDGTLHRXNAAITILATGGSGRAYFSAPSAHTCTGHGHAMGARAAIPVEDVEFVQLHPTGIYGASRLITEGSRGECRNLKNSVGXRSMKRCCPTAKDLA

SEQ ID NO: 144066 - protein, 91 aa, Glycine max
  unsure (1)..(91): unsure at all Xaa locations
  Clone ID: PAT_MRT3847_101103C.1.pep
MKKMASKGLTFLAGVICRSTLXLSPLVAGEGQNNGLVMTFSKESCLQLEDIITKQVKLFYKRHKNTAFSWLKNIXHDCAVQSCDASLLLDS

SEQ ID NO: 144067 - protein, 84 aa, Glycine max
  unsure (1)..(84): unsure at all Xaa locations
  Clone ID: PAT_MRT3847_101104C.1.pep
GSLGIIATIANGFVVGANILPARPFSGCSMNPTRSFCTPVVXGHFAANWIHCVXPLTERRLADLIYGHVFIGSYTSVPPSETNP

SEQ ID NO: 144068 - protein, 56 aa, Glycine max
  Clone ID: PAT_MRT3847_101105C.1.pep
YIFKIVHILINCKFNMNNYSQRQKTKRSTEIEQTMHKKLLDSSLFCLFLLNVITFV

SEQ ID NO: 144069 - protein, 56 aa, Glycine max
  Clone ID: PAT_MRT3847_101106C.1.pep
ENHIKHYRWHSIVGIFKHIRFKHVLKILRTMFPFFLSNISKKVMSRVKLGNCPPHL

SEQ ID NO: 144070 - protein, 136 aa, Glycine max
  Clone ID: PAT_MRT3847_101107C.1.pep
IRVFKEFQPICILVPTFYGGQPGPLPKDHLGINMGGVTVKEALSPKGFFILDSQDAFIQYLPGLNSLLTAKAIATGPILFLKEVGPLRPLVFELSNPHPDGVNLGPGRLGVLPATEGVVGPIGLLSKVNVIGNDFV

SEQ ID NO: 144071 - protein, 70 aa, Glycine max
  unsure (1)..(70): unsure at all Xaa locations
  Clone ID: PAT_MRT3847_101108C.1.pep
MVRGGKGLGKGRTTMHMYASRVIIQWITKPPIRGLALKGSDNXICCLIDNEERLILNIFFYTIFLDAVTF

SEQ ID NO: 144072 - protein, 74 aa, Glycine max
  Clone ID: PAT_MRT3847_101109C.1.pep
MDVLTAQIHQVPRNQLIDLIGLLRSECRGPSRSLSMVAKHHSHLHEIIFKLELRLLSMRTKVQVPERPDPPEAG

SEQ ID NO: 144073 - protein, 571 aa, Glycine max
  Clone ID: PAT_MRT3847_10110C.1.pep
LNLSGSLSPSVANLGSLVEIRLGGNDISGVVPGNWTSLASLKSLDLSGNNIYPPLPDFKTGLKPVVVGNPLLNGGAKTTPSGNNNPSTGSGNVDPSGNTNSNSSSSDSHETKKSKRKQLVSIVAPIAGVAAAAFLLIPLYAYCFRRRNGGFQAPTSLVIHPRDPSDSDSAVKIAVANNTNGSISTLTGSGSGSRNSSGIGDSHIIEAGNLRISVQVLRKVTENFAPENELGRGGFGVVYKGELDDGTKIAVKRMEAGVISSKALDEFQSEIAVLSKVRHRHLVSLLGYSTEGNERILVYEYMPQGALSKHLFHWKSHDLEPLSWKRRLNIALDVARGMEYLHTLAHQSFIHRDLKPSNILLADDFKAKVSDFGLVKLAPEGEKASVVTRLAGTFGYLAPEYAVTGKITTKADVFSFGVVLMELLTGLMALDEDRPEESQYLAAWFWHIKSDKKKLMAAIDPALDVKEETFESVSIIAELAGHCTAREPSQRPDMGHAVNVLAPLVEKWKPFDDDTEEYSGIDYSLPLNQMVKGWQEAEGKDLSYMDLEDSKSSIPARPTGFADSFTSADGR

SEQ ID NO: 144074 - protein, 396 aa, Glycine max
  Clone ID: PAT_MRT3847_101110C.1.pep
MESPPQLGSRGAETLKHIAPGSSISVAYHPSFGPYDDLLFLELDEKLLPDVLNERVVLRGQPDEDAVLCTLSKTYAMKFVGTSNSVLLVPPANHSEFSENPQKNDSTNDEDKVVVPVLKVVSGNMELIETAPRLDKLKLLLSEKPYKLEEDDMGNLEENQESRIGLYNWNYLVDNIQASDKELLSGLQALSALEINGYWRLVDGSYMDMILGMLLKNAVLNDWSLNALNEDEVVSILESDGFPRVLARHCLHVYGNKVNECMPSFVWKLDEKRVCIHFAREILKGGKRKLESFMDEWKQKIPDGMHPTFDLVEGEVLTERLGVETWVRAFSVASLPSTPAERFSILFRERPKWEWKDLQPYIRDLKVPGLSSEGLLLKYTRRTQPSPDTEPVFSAR

SEQ ID NO: 144075 - protein, 94 aa, Glycine max
  unsure (1)..(94): unsure at all Xaa locations
  Clone ID: PAT_MRT3847_101111C.1.pep
NVGARLLRKAVQANSHQMLSCADRKKLRPGIXPEFQMVTEFYLHPLLPPKADITLAKLPIPVHWYAVKVGSSMFFYDDDLGSDISAYILCTVEG

SEQ ID NO: 144076 - protein, 62 aa, Glycine max
  Clone ID: PAT_MRT3847_101112C.1.pep
VWGFFFFFLFFFFFLYFFFFCWGNGYYIPGNFFKKKKSTFGGVDISKAPNFLKNWGFPPNNT

SEQ ID NO: 144077 - protein, 43 aa, Glycine max
  unsure (1)..(43): unsure at all Xaa locations
  Clone ID: PAT_MRT3847_101113C.1.pep
LTIFYAGTVNGFDDIFAEKGQAMIVGGWRLGXXXGSNMGQPKG

SEQ ID NO: 144078 - protein, 140 aa, Glycine max
  unsure (1)..(140): unsure at all Xaa locations
  Clone ID: PAT_MRT3847_101114C.1.pep
MFKVYVACAAAGLTSRYTPTPMLESGLQKDSGLIVEYFXGRMSYVAHNANQAQEKDWLEGIFFFDIKSSSRXLEKVFFTKTQFVRGKTLKFDLNXVAGSNYSEDFSXKGKIKEKPKKNDARLRQKIHPQFNEGQAQKGNK

SEQ ID NO: 144079 - protein, 367 aa, Glycine max
  Clone ID: PAT_MRT3847_101115C.1.pep
MNERREMGRRRVGKESKSYTLPSSPSHSFSSRSSSSSDFEFTISVSPRKSSTALCPADELFYKGQLLPLHLSQRISMVRTLLLSSSSTSSTSTTARDSTGSSSSFTSDLALFPDCDSSRPSSVTDQDDDFKRLHNPNPSSSSISKQDHVKKTLKYFSFSRFSSVFRKENTTTKTRDLDNAASSNNNSSVKRMSVTAREVIRKYFKKVKPLYEKLSQKQQQQQHRTGGEAGVLLTAEAGATTTTTTTTTTTTSVLSLLTKTERSTKQTEGTNKRGRKDSSVTALSHSFSGNLRYPRRRRSCVSSCPSSMRSSPNHSGVLSQRAAAAAAGMYCGDTSTMEELQSAIQGAIAHCKNSLIQTNKTMVSNEI

SEQ ID NO: 144080 - protein, 66 aa, Glycine max
  Clone ID: PAT_MRT3847_101116C.1.pep
MAPQGLGPETGLKIGLKFSPRGTPQNKHFVTRLFFFAWAPKKKKKKPKKKKKKKKKKKKKKKKKKK

SEQ ID NO: 144081 - protein, 86 aa, Glycine max
  unsure (1)..(86): unsure at all Xaa locations
  Clone ID: PAT_MRT3847_101117C.1.pep
TLVLYCDNQSVVSIVHNSVFHSRMKHMEIDIFFVREKVPAKQLSVXHIPALDQWSDVLTKPLSSSRFEVLSGKLNVKSFSSENSSP

SEQ ID NO: 144082 - protein, 70 aa, Glycine max
  Clone ID: PAT_MRT3847_101118C.1.pep
EKTTYGLSLCLNSTCVGCVSISSFVRCEPPLHPVSRVPRVCFGTLGSSFTSLIFVCQSLRQKKKYHGTIY

SEQ ID NO: 144083 - protein, 99 aa, Glycine max
  unsure (1)..(99): unsure at all Xaa locations
  Clone ID: PAT_MRT3847_101119C.1.pep
MMVAMDRTVLRFSSSAAASADILSAKVYALVIVSICDCYVRRSDYAECVIGWLLDSVLSEXSVEIRNSYFVPLNKSIDEVGLDIQYHHNMLICYHNVNL

SEQ ID NO: 144084 - protein, 73 aa, Glycine max
  Clone ID: PAT_MRT3847_10111C.1.pep
NNELIERVGVLSSKSSTHLQDGNKLQDFKKITNLISKVIMSFILIYSASNYISKTCFPNPKEPPIHYFHELID

SEQ ID NO: 144085 - protein, 138 aa, Glycine max
  Clone ID: PAT_MRT3847_101120C.1.pep
LRYGVMKNPIGEGYLTIPVLINGTNPLLWINPTVPDAIKKHPDGHSQVISSDILVSSLFTGSNFSKEEQQALQTWNQLNHLIDNVQGLPKAARSYQGRLPGCGNSPLFPSIERAKARVMEMIGSRAKGESIVPIFLIT

SEQ ID NO: 144086 - protein, 53 aa, Glycine max
  unsure (1)..(53): unsure at all Xaa locations
  Clone ID: PAT_MRT3847_101121C.1.pep
MRETLHIQGGQCGNQIGANFXEVGCPEHPIYSTGRHQGDNQLQLXRGNVYYNE

SEQ ID NO: 144087 - protein, 71 aa, Glycine max
  Clone ID: PAT_MRT3847_101122C.1.pep
IQLKYPSLYFPSLYLPINTITLNSISTFSFLLLLLLLLLPTKTHYIQNSTVPFSQPFVHPLTTLITITSSP

SEQ ID NO: 144088 - protein, 40 aa, Glycine max
  Clone ID: PAT_MRT3847_101123C.1.pep
STRTSSTAFFFHCISVCALYYSPGLSLSDLRAYYLNCNPR

SEQ ID NO: 144089 - protein, 103 aa, Glycine max
  unsure (1)..(103): unsure at all Xaa locations
  Clone ID: PAT_MRT3847_101124C.1.pep
GSELELAANVAYDLXSKGRLFNLFSLVXWDLFHEXSEAFKYSVFPAAVSPRVSFEPGSSFGWATFVGAEGKAIGVVRFGASAPADRISKDFGIHKLAVDASAK

SEQ ID NO: 144090 - protein, 73 aa, Glycine max
  unsure (1)..(73): unsure at all Xaa locations
  Clone ID: PAT_MRT3847_101125C.1.pep
FQSSLMESGQQKGGGLIVDYFGRMSYAAHNAHQPQEKDXLAGNLTSHLTARPRLDKASSSKAHISTVDKPLKL

SEQ ID NO: 144091 - protein, 41 aa, Glycine max
  Clone ID: PAT_MRT3847_101126C.1.pep
SYDFLSNFICGREQKTLKIQLLDPLPKATMSSNDTLLFSIN

SEQ ID NO: 144092 - protein, 129 aa, Glycine max
  Clone ID: PAT_MRT3847_101127C.1.pep
CNCCMSKKLVDHICREKGLETNCPICCDFLFTSSESVRALPCGHFMHSACFQAYTCSHYICPICSKSMGDMSVYFDMLDALLASEELPEEYRNQCQDILCNDCHEKGTAPFHWLYHKCGFCGSYNTRLI

SEQ ID NO: 144093 - protein, 70 aa, Glycine max
  Clone ID: PAT_MRT3847_101128C.1.pep
LKGCFKAGGFKMKETSHDTGDTPDSSYPTFNPSQSYSGVNASQFLASTYWDIPSPKQLPKTTTEMKFLFI

SEQ ID NO: 144094 - protein, 58 aa, Glycine max
  Clone ID: PAT_MRT3847_101129C.1.pep
NKMKNSYKTEYHDGGNKEEKNIYQLKSNSISLHVQPRNVLFIRQPNKKARKFPIIKDS

SEQ ID NO: 144095 - protein, 66 aa, Glycine max
  Clone ID: PAT_MRT3847_10112C.1.pep
DGGSQQCYCPQTRNSLHRGSSRSLSFCTLLPQKLHSHHQYCKPTHIVHHDVDMHAILIVRVAARVA

SEQ ID NO: 144096 - protein, 97 aa, Glycine max
  Clone ID: PAT_MRT3847_101130C.1.pep
SSFFFYLFMINSFPFPEQSNRKKPLGNQNEYSWVRFFGLSSFIRIDDIENASIQRTFSSGSLSLSTPCFNRVIYIWSTRELEYINVSFTCRKKKKFG

SEQ ID NO: 144097 - protein, 137 aa, Glycine max
  Clone ID: PAT_MRT3847_101131C.1.pep
KRKRSILQSQRKRERKRETKLGEGMGMGGLGRNIHKQNMLFLPYTSHTTVFPLFLPLPFLSAAFLYQTSFSSLHGNGISLFCLSLNICFCMLAVLYYVVRFYILIYHFSSRRKKYAMNYLSNLDCVDVVNFNFVNKI

SEQ ID NO: 144098 - protein, 109 aa, Glycine max
  Clone ID: PAT_MRT3847_101132C.1.pep
LGKRVKKSSPITWGPSPKKKFSPPFFSPKTHGGFFSQKKGGGKKNFFEQPWGTKFPPPPTKIMGPQAKVWAYLKLLGFDLCGGDSRGTRTQFPAINPVAGKEIVFFWGP

SEQ ID NO: 144099 - protein, 55 aa, Glycine max
  unsure (1)..(55): unsure at all Xaa locations
  Clone ID: PAT_MRT3847_101133C.1.pep
FXXXFFFFFLEVLNTMDFFGQIRKLFLERRHVYIRFMLLSTEYCMGLVLNFLDIN

SEQ ID NO: 144100 - protein, 57 aa, Glycine max
  Clone ID: PAT_MRT3847_101134C.1.pep
HARCHKTRMFDYSTHAWYLLTEAHWTRMLVLKHWSMHNWPTKQIGCQLSGIVLYPMM

SEQ ID NO: 144101 - protein, 122 aa, Glycine max
  unsure (1)..(122): unsure at all Xaa locations
  Clone ID: PAT_MRT3847_101135C.1.pep
CLLCIVQEVIPETALGSTKSKSDYTALHVGAIETIIDSFASTDCNICGDMMMMDNYHTKTDTAFRTNYVDPFTGXMPIGQVTFSNTIVHTVPDINSRFQLESTPTNGHAAQTPDLAMDTAKV

SEQ ID NO: 144102 - protein, 70 aa, Glycine max
  Clone ID: PAT_MRT3847_101136C.1.pep
KKKMGKTSFLIYMERGFEILIWKRGICQLGSLPETGNWSRWAVYKFWGGPTPSQGFVRGGGNLVKPLNGA

SEQ ID NO: 144103 - protein, 58 aa, Glycine max
  Clone ID: PAT_MRT3847_101137C.1.pep
PEVESMNGISFKFFCQDHLPPFKCCLSQSFVNKRVATHVQPGMSSSFNPPIKLLFYLL

SEQ ID NO: 144104 - protein, 80 aa, Glycine max
  unsure (1)..(80): unsure at all Xaa locations
  Clone ID: PAT_MRT3847_101138C.1.pep
LEDSISGAQELNVISANTSLXNQKVMNGLLKIFTCKAPVPGSGTLALQDLGXEGHNGSFGLVKVKVKILLTDCAMQGLKD

SEQ ID NO: 144105 - protein, 77 aa, Glycine max
  unsure (1)..(77): unsure at all Xaa locations
  Clone ID: PAT_MRT3847_101139C.1.pep
KCTAEKPDACYLLLKLHPCHLSLCSSRVSHNGYSFSLSYFNTCHGLSEPXPPPPPLLAHFPRRHAPTLPPFRPPPPS

SEQ ID NO: 144106 - protein, 54 aa, Glycine max
  unsure (1)..(54): unsure at all Xaa locations
  Clone ID: PAT_MRT3847_10113C.1.pep
MRLDVFIFIFLRFLWWFELIVSLEFLFQFRFXXXXXKKXKGKKXXKKKKKKRPL

SEQ ID NO: 144107 - protein, 259 aa, Glycine max
  Clone ID: PAT_MRT3847_101140C.1.pep
QRDTLEWSARQKIAVGAARGLRYLHEECRVGCIIHRDMRPNNILITHDFEPLVGDFGLARWQPDGDTGVETRVIGTFGYLAPEYAQSGQITEKADVYSFGVVLVELVTGRKAVDLTRPKGQQCLTEWARPLLEEDAIEELIDPRLGNHYSEHEVYCMLHAASLCIQRDPQCRPRMSQVLRILEGDMVMDSNYISTPGYDAGNRSGRLWSEPLQRQHHYSGPLLEESLESFSGKLSLDKYKPSYWGDRDKARRASCEDDI

SEQ ID NO: 144108 - protein, 53 aa, Glycine max
  Clone ID: PAT_MRT3847_101141C.1.pep
MGDETCLCTSESVNDGGSDKLCDQISESVLDACLEHDPDSNVACETCTNTNMV

SEQ ID NO: 144109 - protein, 378 aa, Glycine max
  Clone ID: PAT_MRT3847_101142C.1.pep
MIKGKKDTTSKGKSSVSVNSSSHNDQLSLKNKAGQKVLKFSGEVQNDVKDFVKSNVKKLSASTDNSVVMKKIVKSDGTVKEKVTSHCSREIQNATMKVSKSKRKHQMDGTASSHPTKVLKISNGGAYLGASKQVTVASRKSAKSKPLNLCPRSDGCARTSIDGWEWHKWSRSASPAYKARVRGLPCVQNKCIDSENNLSQLSNGKGLSARTNRVKLRNLLAAAEGADLLKVPQLKARKKHLRFQRSKIHDWGLLALEPIEAEDFGIEYIGELIRPRISDIRERQYEKMGIGSSYLFRLDDGYVVDATKRGGIARFVNHSCEPNCYTKVISVEGQKKIFIYAKRHIAAGEEITYNYKFPLEEKKIPCNCGSRKCRGSLN

SEQ ID NO: 144110 - protein, 135 aa, Glycine max
  unsure (1)..(135): unsure at all Xaa locations
  Clone ID: PAT_MRT3847_101143C.1.pep
PFLARVETRTFKLFLVDVEPTKGYMLHLKIXGSKIALCKNSVGGTILLKDLLAGIXTVGKFTASVAMQGTHCVQGTRKMVVTDGIPGKTGIAIAGAMNSVFRGRLMTDINTLRFKDCELWYPLWTKAMPLWFITN

SEQ ID NO: 144111 - protein, 69 aa, Glycine max
  unsure (1)..(69): unsure at all Xaa locations
  Clone ID: PAT_MRT3847_101144C.1.pep
XRXXAYXSXECRLEMXXXXXXGXMGIXFXGXVXRRLXSLDXLLGAXXFXIXVQXXKCLGXDXNLSXEDQ

SEQ ID NO: 144112 - protein, 56 aa, Glycine max
  unsure (1)..(56): unsure at all Xaa locations
  Clone ID: PAT_MRT3847_101145C.1.pep
LWYDKVVMINLXXVCXCGGGGSSFYKKACVXFFVVFLYMMFGWMVVWAVAWVGSGF

SEQ ID NO: 144113 - protein, 84 aa, Glycine max
  unsure (1)..(84): unsure at all Xaa locations
  Clone ID: PAT_MRT3847_101146C.1.pep
LHANXRKLXIXLXTRAEXXRXXXXXRANHXLGKSSXXIXXXILXXXFXXFXXNLACXVASXXSXXDXXFXAXSIXXXVXXAMMS

SEQ ID NO: 144114 - protein, 34 aa, Glycine max
  Clone ID: PAT_MRT3847_101147C.1.pep
YISWLRYACIPRIYNHVASSGGLRIQYQQQRPII

SEQ ID NO: 144115 - protein, 38 aa, Glycine max
  Clone ID: PAT_MRT3847_101148C.1.pep
KMAVQPFKTVLAHVRQSFAVRKDSDERMLCPFVPPPMY

SEQ ID NO: 144116 - protein, 71 aa, Glycine max
  unsure (1)..(71): unsure at all Xaa locations
  Clone ID: PAT_MRT3847_101149C.1.pep
GFSNSTFLRFXXLGFXSXGSVXLALQLAIGQGGCXNXXCTNGNWQLSGXKKKTRYPSQGXPSVQEEKPXVW

SEQ ID NO: 144117 - protein, 110 aa, Glycine max
  Clone ID: PAT_MRT3847_10114C.1.pep
LGYLCEEVSPQVVDQDQVNKILTAVVQGMNASEGNNDVRLAATRALYNALGFAQANFGNDMERDYIMRVVCETTVCPEVKIRQAAFECLVSIAAMYYEKLAPYIQDIYNI

SEQ ID NO: 144118 - protein, 47 aa, Glycine max
  Clone ID: PAT_MRT3847_101150C.1.pep
RTRGLKKKKKKKKKKKKKKKKKKKKKKKKKKKKKKDKKKKKKGGAFR

SEQ ID NO: 144119 - protein, 89 aa, Glycine max
  Clone ID: PAT_MRT3847_101151C.1.pep
HPQYNPSCSTMWKRASPKQIYYGPANRMVMMTILLPQSRISNRSWIDLSSHCTYGDLHNRPPLPRGESVKSFIVIGSIKGPFCVTHIRC

SEQ ID NO: 144120 - protein, 38 aa, Glycine max
  Clone ID: PAT_MRT3847_101152C.1.pep
VAAAAQVGYGGFALHEHHDKKIAKEQDEEAHGKKQHHL

SEQ ID NO: 144121 - protein, 93 aa, Glycine max
  unsure (1)..(93): unsure at all Xaa locations
  Clone ID: PAT_MRT3847_101153C.1.pep
HACYKMDTFILSHKLVLSPRAGHTSYDNVPQLHPILXYYQITSQHMLFSHTKSTVLSYTDQSYPYTSAISTNYHDQPFKPIRDSSQATGCINF

SEQ ID NO: 144122 - protein, 552 aa, Glycine max
  unsure (1)..(552): unsure at all Xaa locations
  Clone ID: PAT_MRT3847_101154C.1.pep
MDVAFRDASVKGPLWEEVSRKLAELGYHRNAKKCKEKFENVYKYHKRTKEGRSGKSEGKTYRFFDQLQALENNPSIHAMQSPTPTPSKPPQTTALLATPVSIVVTTTTTPSTLVSNNATVPSTNTPPLPQAILNITPPSTLNITTPSFPSSNPTTYFPTQTPNPTTNNNPPNTITPASFPNFSADLLSNSSFSSTSSEETTTMGGGGMRRKRKRKWKDFFERLMKEVIEKQEGLQRRFLEAIEKREQERVVREEAWRMQEMQRINREREILAQERSIAAAKDAAVMTFLQKIAEHQQQEINLEPALNNNNNSITVVPQQPVPQTTTTPTPTPQQAQTTIVPEAPQPQQQIVVSNVENNKADNNGENLTMGASSSRWPKMEVQALINLRTSLETKYQENGPKGPLWEEISALMRKMGYNRNAKRCKKKCXNINKYFKKVKESSKKRPEDSKTCPYFHQLEALYREKNKREGQMKPDSMMAPLMVQPEQQWPPQTHVVPPEVTMGDAQNDPMDRRHEEVEEDEADKEIGDEDEDEDDEGSDNYEIVASKPASGE

SEQ ID NO: 144123 - protein, 53 aa, Glycine max
  Clone ID: PAT_MRT3847_101155C.1.pep
VIVRTDNGYDYESLVWKEISRRGGQMQINLNKRNQQLKRRKAKTESKSLGFLK

SEQ ID NO: 144124 - protein, 51 aa, Glycine max
  unsure (1)..(51): unsure at all Xaa locations
  Clone ID: PAT_MRT3847_101156C.1.pep
MEDAQNDPMDRRHEXVEEDEADKEIGDEDEDEDDEGSDNYEIVASKPASGE

SEQ ID NO: 144125 - protein, 164 aa, Glycine max
  Clone ID: PAT_MRT3847_101157C.1.pep
HASAIMVSARSTTFLLVFILLPLRFSSAHTQHQGKKTPVVAKLETKRSPVKVEIHHGVPAVAETDQRNRLLPGRKMMSKGVISKLINAVDSDNGINMAKGVTTKGKARCLNGNCKRETGKRILGLKHKDRKRSNIGRSTKAKMSGLVPLNADYYVPRPHPPKNN

SEQ ID NO: 144126 - protein, 655 aa, Glycine max
  Clone ID: PAT_MRT3847_101158C.1.pep
MLGDSAVLGTGGGGSGDAVAAAPPAASGGAHDGGVDGGDGGGGGSNSGDDRVEEGERSFGGNRWPKQETLALLKIRSDMDVAFRDASVKGPLWEEVSRKLAELGYNRNAKKCKEKFENVYKYHKRTKEGRSGKSEGKTYRFFDQLQALENNPAIHGKQSPTPPKPPPQTTALSATPVSIVVTTTTTTPSSIIMPLPLPPVSNNNNNTTVPSTTSLPMPQSILNITPPSTLNITIPSFPPSNPTTYFPTQTPNPTSNNNNNPPSTITPPSFPNFPADLLSNSSSSSTSSEETPTTEARGRKRKRKWKDFFERLMKEVIEKQEELQRRFLEAIEKREQERVVREEAWRMQEMQRINREREILAQERSIAAAKDAAVMTFLQKIAEHQQQETINLEPALNNNSITVVPQQPVPQATPTSTPTPQQAQTTTVPEAPQVQPLVPQLQQQQQIVVSNVEINKADNNGENLMMEASSSRWPKVEVQALINLRTSLETKYQESGPKGPLWEEISALMRKMGYNRNAKRCKEKWENINKYFKKVKESNKKRPEDSKTCPYFHQLEALYREKNKGEGQMKPESMMAPLMVQPEQQWPPQTTLVVPPEVTMGDTQNDPMDRQYHEENEDDEDDKEIGDEDEDEDDEGGDNYEIVASKPATADASGE

SEQ ID NO: 144127 - protein, 464 aa, Glycine max
  unsure (1)..(464): unsure at all Xaa locations
  Clone ID: PAT_MRT3847_101159C.1.pep
MPLPLPPVSNNNNNTTVPSTTSLPMPQSILNITPPSTLNITIPSFPPSNPTTYFPTQTPNPTSNNNNNPPSTITPPSFPNFPADLLSNSSSSSTSSEETPTTEARGRKRKRKWKDFFERLMKEVIEKQEELQRRFLEAIEKREQERVVREEAWRMQEMQRINREREILAQERSIAAAKDAAVMTFLQKIAEHQQQETINLEPALNNNSITVVPQQPVPQATPTSTPTPQQAQTTTVPEAPQVQPLVPQLQQQQQIVVSNVEINKADNNGENLMMEASSSRWPKVEVQALINLRTSLETKYQESGPKGPLWEEISALMRKMGYNRNAKRCKEKWENINKYFKKVKESNKKRPEDSKTCPYFHQLEALYREKNKGEGQMKPESMMAPLMVQPEQQWPPQTTLVVPPEVTMGDTQNDPXMDRQYHEENEDDEDDKEIGDEDEDEDDEGGDNYEIVASKPATADASGE

SEQ ID NO: 144128 - protein, 51 aa, Glycine max
  unsure (1)..(51): unsure at all Xaa locations
  Clone ID: PAT_MRT3847_10115C.1.pep
LDSAGEIGDRITALHQLVXSAPXLRGEXGHLGTTGLFFLGLIRSYWLYQIP

SEQ ID NO: 144129 - protein, 267 aa, Glycine max
  unsure (1)..(267): unsure at all Xaa locations
  Clone ID: PAT_MRT3847_101160C.1.pep
MKFFNLLKSRHVRSSSSSSSRAWPSCHQPKTLSFRVTTTKINNEEDNNNNNNVVNDVVLKDINSALVSQTPESFFTESPDSASFSTTSELSRGMDPIEAVIRGLRSDRLFFDPDEASCILEAKPTTTSLEPFKNSVVLTMDSEDPHVDFRKSMEEMVETLGVENWESLEDLLCWYLXANTKSNHEYIIGAFVDLLFDLAVPNSPCSQDDDENLHSHSHSRPSSPLSFYNSFFSPSSSCSTPYCIKGEVEEEEVGACSSFFSLAQLNN

SEQ ID NO: 144130 - protein, 142 aa, Glycine max
  Clone ID: PAT_MRT3847_101161C.1.pep
MKAMPLPFEEFQGKGVLDFSSASDLFSVLLHHPQPKWTTDKADYCYVGSSTEPTSVLDSRRSPSPPTSSSTMSSSLGSSSNNSTNPTPPSGNNNNNPPQESSPEKCGIRMEDWEGQDQSILRLIMGDVEDPSAGLSKLLQST

SEQ ID NO: 144131 - protein, 66 aa, Glycine max
  Clone ID: PAT_MRT3847_101162C.1.pep
FLLSFAHSHACLEERTNIYYCKTYPPHNELGYYYLYNDKDELASKFRNWACVIRCMHASEYHSFGP

SEQ ID NO: 144132 - protein, 506 aa, Glycine max
  Clone ID: PAT_MRT3847_101163C.1.pep
MVSTSVCPGVFTSQQQQEFGVGDEKPQVINPQFMLNQNQVQFSENPSFFVPLMYPQVQVQEQQVFSPPHQSKRPLFDTIGHNFQAPRLPLLDSGQEVFGRRQQTQLPLFPHHMQQQQQQQQSMGLPSAKQQKVSSTGDDASHQFQQAIFDQLYKTAELIEAGNPVHAQGILARLNHQLSPIGKPFQRAAFYMKEALMSLLHSNAHSFMAFSPISFILKIGAYKSFSEISPVLQFANFTCNQALIEAVERFDRIHVIDFDIGFGVQWSSFMQELALRSSGAPSLKVTAIVSPSTCDEVELNFTRENLIQYAKDINVSFELNVFSIESLNSASCPLLGQFFDNEAIAVNMPVSSFTNYPSLFPSVLHFVKQLRPKVVVTLDRICDRIDVPLPTNVVHVLQCYSALLESLDAVNVNLDALQKIERHFIQPAIKKIILGHHHSQEKLPPWRNLFIQSGFSPFTFSNFTEAQAECLVQRAPVRGFHVERKPSSLVLCWQRKELISVSTWRC

SEQ ID NO: 144133 - protein, 48 aa, Glycine max
  Clone ID: PAT_MRT3847_101164C.1.pep
YFLDVERNLPFNSDNFTRDVRYFIYDVLLIGSLLRIIRVGRMYAYEPL

SEQ ID NO: 144134 - protein, 451 aa, Glycine max
  unsure (1)..(451): unsure at all Xaa locations
  Clone ID: PAT_MRT3847_101165C.1.pep
CTLRCRNSRFSLSIRRNTISLTPLGTIFKLQGCPFWIQGKKCLVGGSKHSFHCFLTICSNNNNNNQWLCLLLNSRRVSSTGDDASHQLQQAIFDQLYKTAELIEAGNPVHAQGILXARLNHQLSPIGRPFQRAAFYMKEALMSLLHSNAHSFMAFSPISFIFKIGAYKSFSEISPVLQFANFTCNQALIEAVERSDRIHVIDFDIGFGVQWSSFMQEIALRSSGAPSLKVTAIVSPSTCDEVELNFTRENLIQYAKDINVSFEFNVLSIESLNSPSCPLLGKFFDNEAIVVNMPVSIFTNYPSLFPSVLHFVKQLRPKVVVTLDRICDQMDVPLPTNVVHVLQCYSALLESLDAVNVNLDVLQKIERHFIQPAIKKIILGHHHFQEKLPPWRNLFMQSGFSPFTFSNFTEAQAECLVQRAPVRGFHVERKPSSLVLCWQKKELISVSTWRC

SEQ ID NO: 144135 - protein, 134 aa, Glycine max
  Clone ID: PAT_MRT3847_101166C.1.pep
SEADLQAVAVSFPGILSRDVNKLLVPNYAYLKKRGFEDRQIVALVVGFPPILIKSIQNSLEPRIKFLVDVMGRQVDEVIDYPCFFRHGLKRRIEPRYKLLKERSLNCSLSEMLDCNRKKFFMKFGLLEGHALSN

SEQ ID NO: 144136 - protein, 53 aa, Glycine max
  Clone ID: PAT_MRT3847_101167C.1.pep
PLKAIFLFPFKGENEISGRGNYSQIKGNVHFFGIKKTLLIYKGRLSPFFLIPL

SEQ ID NO: 144137 - protein, 68 aa, Glycine max
  unsure (1)..(68): unsure at all Xaa locations
  Clone ID: PAT_MRT3847_101168C.1.pep
PTDKIYTQSSLSHNTSMTCSSVVVSEAPLCLCSLPLYXCAAFCRLVPVRRTSWXXXVRPPEIRTGTAG

SEQ ID NO: 144138 - protein, 110 aa, Glycine max
  unsure (1)..(110): unsure at all Xaa locations
  Clone ID: PAT_MRT3847_101169C.1.pep
FHFNHLEKPQEFKNIIRGMMEEAGRPNVADFFPILRPLDPQRVLARRSIYIKKLFEIIDGIIEECVQELQKLXSMDVLDSLLNNNEETGSLLSRDETIHLFMVRISFSNK

SEQ ID NO: 144139 - protein, 66 aa, Glycine max
  Clone ID: PAT_MRT3847_10116C.1.pep
SYTSHTHVYIHVLQTPISLFILKYTNFSKQYLYNTKGFSYLFIYNPHLPKSLLYAPFTSKILFCPQ

SEQ ID NO: 144140 - protein, 87 aa, Glycine max
  unsure (1)..(87): unsure at all Xaa locations
  Clone ID: PAT_MRT3847_101170C.1.pep
MALRCLVMSXSVLFTLGLARESHARXEDXWXHAXWPNTXIXPSXLRDLLKPGPXASVEIDDSXXXQIEXTQYPKTFFYXEDXHPGKT

SEQ ID NO: 144141 - protein, 119 aa, Glycine max
  Clone ID: PAT_MRT3847_101171C.1.pep
MNSQATSRQKQLQGPKPASLMINRNSTKINKKQKQHLSHHSPVIVHLKSPKVIHVRPEEFMSLVQQLTRNPVSAAFAAPKMDKSSTVVENPIEDFTGCIGHTSNVPVDFQAKMHFVDFF

SEQ ID NO: 144142 - protein, 110 aa, Glycine max
  unsure (1)..(110): unsure at all Xaa locations
  Clone ID: PAT_MRT3847_101172C.1.pep
AQDFLPTDKGRYPDVIVKATLGNQTLMTIISLSRXIIPMWNENFIFLAGDPXDDPLILSVENTISPNKEDSMSKCAVPYHMEDRRLYPKPVNTKXYNIENHIVFMEGLKK

SEQ ID NO: 144143 - protein, 53 aa, Glycine max
  Clone ID: PAT_MRT3847_101173C.1.pep
GFDSGIATAFPIILTCSSVCTEMPHKCRCDSLLSLGYSSKHVYIILRKYSGLV

SEQ ID NO: 144144 - protein, 66 aa, Glycine max
  Clone ID: PAT_MRT3847_101174C.1.pep
MKLIKRMHVLNFNQMLTRYSPLMKDGFMTSLKVVAFFRVVGVNCSTFGHSVLKIPLPSSSEKLNMT

SEQ ID NO: 144145 - protein, 49 aa, Glycine max
  Clone ID: PAT_MRT3847_101175C.1.pep
LMKMMIVMKTKCLILLSLNLQKCSENQNLGDMAFDLNFLPTIRDLLLSF

SEQ ID NO: 144146 - protein, 60 aa, Glycine max
  Clone ID: PAT_MRT3847_101176C.1.pep
FIKEAGRLGSDVLWLGKSITSRSVWLATSCIDDVYALPAVVLGKNMSLSSYKGPSCSGRL

SEQ ID NO: 144147 - protein, 60 aa, Glycine max
  Clone ID: PAT_MRT3847_101177C.1.pep
FAGFSSLAGLSGVPGGWRGTRRLLAWRASSCLCCFLESTGVVVSSGTEPGSRLLEPNSEL

SEQ ID NO: 144148 - protein, 46 aa, Glycine max
  Clone ID: PAT_MRT3847_101178C.1.pep
HDHSQRGVNSRGNIRAAEVETYWRISARSTLLMRNAKFMNRGDLLF

SEQ ID NO: 144149 - protein, 77 aa, Glycine max
  Clone ID: PAT_MRT3847_101179C.1.pep
TSLGLAGHHSVATYAPLKPYRAPGLTNLAHIYRDLLVCLATNSMYSLPWQLLNICAGSVTAETTAAIPCSTYHPTFT

SEQ ID NO: 144150 - protein, 96 aa, Glycine max
  Clone ID: PAT_MRT3847_10117C.1.pep
SRVETGVRTEGGVFRCRCKFRLICKYVSCPACLGRNSSPRALEGSLEGWHPVQMGVMGQDVKHHWGPLSKNVTPHRSHNPRAAVCRIKNKGAQPYL

SEQ ID NO: 144151 - protein, 46 aa, Glycine max
  Clone ID: PAT_MRT3847_101180C.1.pep
LYLKFSYIIPNRNCRRKLKCLLPKVIINGMRVKLYLTIVKFQMLVT

SEQ ID NO: 144152 - protein, 32 aa, Glycine max
  Clone ID: PAT_MRT3847_101181C.1.pep
VAGETVVSDHFLKIGLELWIGFLYFIIYIDVI

SEQ ID NO: 144153 - protein, 126 aa, Glycine max
  Clone ID: PAT_MRT3847_101182C.1.pep
SMEKFNNSPDARVFFGSIKACGEGISLVGASRIIILDVHLNPSVTRQAIGRAFRPGQMKKVFVYRLVSADSPEEEDHNTCFKKELISKMWFEWNEYCGDRAFEVEAVEVKECGDLFLESPLLGEDV

SEQ ID NO: 144154 - protein, 289 aa, Glycine max
  unsure (1)..(289): unsure at all Xaa locations
  Clone ID: PAT_MRT3847_101183C.1.pep
MGFVMQCSSYGTCISICISHRFPQTPLSFHVPAYHWNRFKSARRNQRMMVLCSVDDRSYNLDSPRKIKIVEHVCLLKAKHDLSEEEENDMLGYLYTTQYQMGGVVAISLGRISSPNPERYTHALFMRFQKKENLEKFYENPFYMMILNFTGRTYCHRXCNVDYDXVVADEMLSIFRKGEEFNHGVEFVLLISFNEDALGNQAEHALASLASMMLESPSLIVQFTHGLNFSPSSKEYTHGVVIRFRSVEAFEIFINSKEYKNAWHYKFQPIVHKSFSLHFSVDPVGTEIM

SEQ ID NO: 144155 - protein, 55 aa, Glycine max
  Clone ID: PAT_MRT3847_101184C.1.pep
VGIKHCPKLYKVSLILSCLTIPSLQINLLFLKHLVIMYFRYPSSQCRSVCISDFS

SEQ ID NO: 144156 - protein, 59 aa, Glycine max
  Clone ID: PAT_MRT3847_101185C.1.pep
ASQRRIEDTRSQTTSQYYSKYLLVSVLNVLSDLSQNVVLYCRISHLKVFIVFLSAFVEF

SEQ ID NO: 144157 - protein, 70 aa, Glycine max
  Clone ID: PAT_MRT3847_101186C.1.pep
VMKVHIIEKHYGMKVLTCQISTRFCLIKPPKLSPHKLEHLSLYICIFFSCLIISFKAFHIGTCVVAHYAR

SEQ ID NO: 144158 - protein, 87 aa, Glycine max
  Clone ID: PAT_MRT3847_101187C.1.pep
RLRRQKGTKKEMHAMWVSLKDNVKCGNKLNDVIKQQTNAAKEVAMLQKSEKMNGYDRPLMETPTTSLVVSRPSNALGRLHELSVGDP

SEQ ID NO: 144159 - protein, 330 aa, Glycine max
  Clone ID: PAT_MRT3847_101188C.1.pep
MEAHGGGLRRILVLAFCVAGIWSAYIYQGVLQENVSTKRFNGERFEHLAFLNLAQNVVCLIWSFIMIKMWASGNSGGAPWWSYWSAGITNTIGPAMGIEALKYISYPAQVLAKSSKMIPVMLMGTLVYGIRYTFPEYLCTFLVAGGVSTFALLKTSSKTISKLAHPNAPLGYGLCFLNLAFDGFTNATQDSLKARYPKTSAWDIMLGMNLWGTIYNMIYMFGWPRASGFEAVRFCQQHPEAAWDIFLYCCCGAVGQNFIFLTISRFGSLANTTITTTRKFVSIVVSSLLSGNPLSTKQWGCVFMVFSGLSYQIYLKWQKLQRLQKKRKAV

SEQ ID NO: 144160 - protein, 87 aa, Glycine max
  Clone ID: PAT_MRT3847_101189C.1.pep
NLQASESHISVLCLFTLCFQGFLLTSKMSANCEKMVAIPPTTNQWPQVDDHKVLMGSNGGSSNNNNNKVLEKPGQDQLVQQQQQQQE

SEQ ID NO: 144161 - protein, 104 aa, Glycine max
  Clone ID: PAT_MRT3847_10118C.1.pep
SDQAFRSISFLTLGLICERGLIALSVSGAAIQIAGNYLLYRPSVLTWKHCLLDGHLCLKGVGIFGSVCGLEIYRAPLHYLFDLITMRHTDTIDRATQPKIRFLT

SEQ ID NO: 144162 - protein, 37 aa, Glycine max
  Clone ID: PAT_MRT3847_101190C.1.pep
ENRRFSFVKYMLFVRCLFIIRCDHIIHKVFMDVILLK

SEQ ID NO: 144163 - protein, 45 aa, Glycine max
  Clone ID: PAT_MRT3847_101191C.1.pep
SGVIRVCEKGMRCSADASSSSPREIPLYTSSLIYCPVETAGSTAA

SEQ ID NO: 144164 - protein, 55 aa, Glycine max
  unsure (1)..(55): unsure at all Xaa locations
  Clone ID: PAT_MRT3847_101192C.1.pep
RIGLNLGGRIXFSFSKDDFVSRLYRRSRTVEPGSTAWSNSRRCQAEGCHADLSKA

SEQ ID NO: 144165 - protein, 99 aa, Glycine max
  unsure (1)..(99): unsure at all Xaa locations
  Clone ID: PAT_MRT3847_101193C.1.pep
GRVGFLFILHFSLPLFTRSSGLFHNRAITTFILINPTGIAIYFSHSFKMANPISPIALFILLLAPSALPGHDYXQALTKSLLFFEAHRSGYLPHNQRVN

SEQ ID NO: 144166 - protein, 82 aa, Glycine max
  Clone ID: PAT_MRT3847_101194C.1.pep
SLSLFVVAAMLWKEKPQKNGCQRREATQCLSKGTPFPFPFLSFLPFFSKILKKEKLFCCNFTLFFNLLLCYCLCYWEPPKRI

SEQ ID NO: 144167 - protein, 111 aa, Glycine max
  Clone ID: PAT_MRT3847_101195C.1.pep
MSFSDHIPSFMMSPPSFSTDTDAIEVRLQFPTNNESLEPHSPQDQPPSFKRARTCDSSLSNAMACPPRMIQHPALNKGTSHIFFKTRICAKFRAGACRNGENCNFAHGLED

SEQ ID NO: 144168 - protein, 66 aa, Glycine max
  Clone ID: PAT_MRT3847_101196C.1.pep
HPANFVFLVETGFLHVGQAGLELLTSGDLPTSASQSAGITGVSHWAWPKWWSLKCWNNFFIIPKIN

SEQ ID NO: 144169 - protein, 55 aa, Glycine max
  unsure (1)..(55): unsure at all Xaa locations
  Clone ID: PAT_MRT3847_101197C.1.pep
HGDVNAHKLDAVALKTKNERENLYFCHDAQRIXPRXKVEIWEILSHSKVQVQLRR

SEQ ID NO: 144170 - protein, 48 aa, Glycine max
  Clone ID: PAT_MRT3847_101198C.1.pep
RLDTAILITDTRELGMLKSPYSLRSYQRREIIVPQHLPIDHVGLLLQL

SEQ ID NO: 144171 - protein, 89 aa, Glycine max
  unsure (1)..(89): unsure at all Xaa locations
  Clone ID: PAT_MRT3847_101199C.1.pep
XSXXKSXARVRKLGNSARXGALSLWLSSSSSSFLDLFFLYAARRNHGPEKERVWYRNXSSEPTNXXSVXWNXXXXXLMXXAXGXRPRXF

SEQ ID NO: 144172 - protein, 173 aa, Glycine max
  Clone ID: PAT_MRT3847_10119C.1.pep
MAARRVTKSAVNWTALSERVPEHQRAQFLAFKAKSDGYLRRVLANPEQPPAIDWAYYKSKVPVAGMVEDFQKQYGALSIPYPPDTLKSQLDSLEKEIKNDIEKFKTESNARISEYKKQLAHIASLIPYDQMTMEDYRDAYPEDAIDPINKPTFWPHTPEEQHDYVHKDAQPHH

SEQ ID NO: 144173 - protein, 80 aa, Glycine max
  Clone ID: PAT_MRT3847_1011C.1.pep
LRSSPFKIGKCFRPISRIHHVPLIGVPTTSVSAVGSEQLEFQYAWCARNLRFGWPFPCNIDYYRAISSSERGLNSSGDII

SEQ ID NO: 144174 - protein, 51 aa, Glycine max
  Clone ID: PAT_MRT3847_101200C.1.pep
MSFCRVKWLKKKKEKRNRDINNTMFGSYYIILLQWNLKITSSNKESPQMLV

SEQ ID NO: 144175 - protein, 155 aa, Glycine max
  Clone ID: PAT_MRT3847_101201C.1.pep
MPSAQDPFYVVKQEIQESIDKLKSTFHQWENTADVGERSSLSKEVLASCESIAWQVDELDKAISVASRDPSWYGIDEVEVENRRKWTSDARTQVSTAKKAVQAGKGLNNASLNGMHKELMRLPSSHQTTSNQYAAQDNDDFIESESDSLLKAVMT

SEQ ID NO: 144176 - protein, 58 aa, Glycine max
  Clone ID: PAT_MRT3847_101202C.1.pep
TSYNGLKSMVIEELRSYFRPELLNRIDEVVVFEPLEKSQVREVLVMINSSLVILIVTW

SEQ ID NO: 144177 - protein, 44 aa, Glycine max
  Clone ID: PAT_MRT3847_101203C.1.pep
FWFFIPLNTNQSNHPLASQKRESITLRTKLHSVQKREKKNIFAN

SEQ ID NO: 144178 - protein, 64 aa, Glycine max
  Clone ID: PAT_MRT3847_101204C.1.pep
LFITHYLADGMLLAVIGIFMLPRTFLKEAKLLLNGLFTILFVTVTYFTSYTSSLSDEVNSQIFS

SEQ ID NO: 144179 - protein, 48 aa, Glycine max
  Clone ID: PAT_MRT3847_101205C.1.pep
CSGKCNTYVGCVVDLLLGRCRGSKHTYTCMRRHSSYIESTLYSLLTRP

SEQ ID NO: 144180 - protein, 88 aa, Glycine max
  Clone ID: PAT_MRT3847_101206C.1.pep
PIFLWTSSCRKGPSLSKTNKMCQRVQLVSKYLNKGGTWLTLRGRRLTGGLFFQSCIGGKATLPSEYFFPEGWGDPSRKSCDPPREYHS

SEQ ID NO: 144181 - protein, 100 aa, Glycine max
  Clone ID: PAT_MRT3847_101207C.1.pep
ATILNTWRIWSKTTDQCCCETCAASECRTHRSGEAHSHFMSYSFVKETKQLDGVLSTSVRSFVRPRTVNQHCGVGNRIYSSCCLLSVWNEVRSFVKSLVL

SEQ ID NO: 144182 - protein, 121 aa, Glycine max
  Clone ID: PAT_MRT3847_101208C.1.pep
MGSNKPRGLQAARKLRTSRRENRWADKNYKKRALGKFYKTSPTGGSSHAKGIVLEKVGVEAKQPNSAIRKCVRVQLIKNGKKVTAFVPNDGCLNFTDENDEGLISGFGRRGKAKGDIPGVR

SEQ ID NO: 144183 - protein, 78 aa, Glycine max
  Clone ID: PAT_MRT3847_101209C.1.pep
PPPFQGNSNPGSGFFCPGIGPAPRFLGVPGRSPVSPVFDLLFFFGFFRVLVLVFWAVGPWFDFEPLGFLGGLGVAFVI

SEQ ID NO: 144184 - protein, 78 aa, Glycine max
  Clone ID: PAT_MRT3847_10120C.1.pep
VGDAAAQHSSLQKAGSWPEELLPAEGHDQNLLLGPMDEPGPPSSAPQPAQSTGVAIGHKKRPLHSEDVPLIAGFEEAL

SEQ ID NO: 144185 - protein, 134 aa, Glycine max
  unsure (1)..(134): unsure at all Xaa locations
  Clone ID: PAT_MRT3847_101210C.1.pep
MFSLIEITWDSGKKIKVLVFFYATILVTXQCHAYDMFPLQMNTGYYARTPKVXCACCRLAVETHNIFGFETIPDXCVEATKDYIHDEQYRSDSKTINQQAYFYARDLKVHTKDTFVFNIDDTRLFNIPYYKTHL

SEQ ID NO: 144186 - protein, 82 aa, Glycine max
  Clone ID: PAT_MRT3847_101211C.1.pep
FAQEQDFKDRVEWIPFQSLRNFGDKMRSGTCCPVSASKSLHFCNCGQILDQRFNPSDISGVPKKRRLDMIVDTTSLVNKESR

SEQ ID NO: 144187 - protein, 35 aa, Glycine max
  Clone ID: PAT_MRT3847_101212C.1.pep
ILYYYICFVKLLSLNMIRTGDIMDTMLSMTINLCL

SEQ ID NO: 144188 - protein, 146 aa, Glycine max
  Clone ID: PAT_MRT3847_101213C.1.pep
MKFNPRVSSSRRKSRKAHFTAPSSVRRVLMSAPLSTDLRSKYNVRSIPVRKDDEVQVVRGTYKGREGKVVQVYRRKWVIHIERITREKVNGSTVNVGIHPSKVVVTKLRMDKDRKSLLDRKAKGRAAADKEKGTKFAPEDIMQTVD

SEQ ID NO: 144189 - protein, 284 aa, Glycine max
  Clone ID: PAT_MRT3847_101214C.1.pep
MEISHDIKIKDDKLGGVKEEKIKVEVELKNKSVEKEHTKSKEEKKHKDEDKSKKKKKEKGEEEDEEGEKKEKDVKDKGEDGEEKEKKEKDKKERKKEKKDKDDKTDVEKVKGKEHDGEDAEEKKEKKKKEKKDKDDKTDVEKVKGKEDKEEKKKKEKKVKDDKTDAEKVKGKEDDGEDNEEKEEKKKKKKKEKDDKIDVEKVKGKEDDGEDEGKKEKKKKEKKDKDEETDTLKGKGKNGDGEEKKEKKEKEKKKEKKDKDEETDTLKEKGKNDEGEDDEENKKN

SEQ ID NO: 144190 - protein, 82 aa, Glycine max
  Clone ID: PAT_MRT3847_101215C.1.pep
KMGTICVWKFEEKMRKLNPSKRIHKPNYIIQRYNKCKVKARLSAMPFLLHTWPCSPKEEAIGEIIFKYRLLVNGIQSSGMLW

SEQ ID NO: 144191 - protein, 132 aa, Glycine max
  unsure (1)..(132): unsure at all Xaa locations
  Clone ID: PAT_MRT3847_101216C.1.pep
GSSYTQELLFSPPEGGLDESNFSPDETLWRERLRERVLRETRSEWSMTCSVWGAVMVPLPAGAYIQDVPYATAQLKLPSGSGXPLIEPHLSPDGRMLAYVRDCELHALDLLCDESKQLTHGAKERGSAHGRA

SEQ ID NO: 144192 - protein, 80 aa, Glycine max
  Clone ID: PAT_MRT3847_101217C.1.pep
PRVRIGLRNNVRPFMLLCCTWNWGSTRTGSVPIGTLRLLVFTIRSSGTSSLSSLMPIEVLSSFTHGDALIQLYHKLHHIL

SEQ ID NO: 144193 - protein, 76 aa, Glycine max
  unsure (1)..(76): unsure at all Xaa locations
  Clone ID: PAT_MRT3847_101218C.1.pep
NFLNQGWGRGQGCHHSSHIHSRINYFLNQIFNIXXXXXXXTYLNRGREYPIPDGDMLRSRGQGLGRQYPSPPRCHV

SEQ ID NO: 144194 - protein, 138 aa, Glycine max
  unsure (1)..(138): unsure at all Xaa locations
  Clone ID: PAT_MRT3847_10121C.1.pep
LLCEDDRRGQGGGSQRALGLSPLNTKTLSVFADTPIPAKPKAKAHAKAPHGRLKRKGAGAGRKQSKKAAKEPNMAKRXPPSALFALMSEAREQVQKEDSNNKSAAVDGKAGGDKRKSLFDAEKAPPVGTAEKKKQEYE

SEQ ID NO: 144195 - protein, 89 aa, Glycine max
  Clone ID: PAT_MRT3847_101220C.1.pep
FEAYPPMIHWTSLSQTLLIPGLGIYLAFFSVISGYNKAFRSSPLCFSLSKFFKKNSLLGGYEERSLAEEDADRTDPPPGCDGFRYSFGN

SEQ ID NO: 144196 - protein, 323 aa, Glycine max
  Clone ID: PAT_MRT3847_101221C.1.pep
MDVCVKEEVLETPIVTERRPRNAVVSALPPGLVIELSDSDTDEGDLDSVVANAVNGATVESPSKKRRTSEAGGVVLPVGFLTPLPPAPVPVPPPAAVLSLPAPEWASNSASRVNASKSFSLNSSKQFWKAGDYDGAPLGGSGSSTVGMDHVRVHPKFLHSNATSHKWALGAFAELLDNSLDEVCNGATYVNVDMLINKKDGTRMLLVEDNGGGMDPEKMRQCMSLGYSMKSKMANTIGQYGNGFKTSTMRLGADVIVFSRYPGKDGKRCWLAHLAPGLCRRTWAFSNKVRISRLNGQTMQAVGYVGAGFNERVYSYSQLYQCP

SEQ ID NO: 144197 - protein, 66 aa, Glycine max
  Clone ID: PAT_MRT3847_101222C.1.pep
EPLPFIDFKRTQLYLSIKKLHLVLNQRAKPTLLAKNLSHKIAQKHLENACHLQNFERGPATFAQNL

SEQ ID NO: 144198 - protein, 79 aa, Glycine max
  Clone ID: PAT_MRT3847_101223C.1.pep
NLLILCLEFHRIWRLFFSMTPHLWSSSDLRFEYMRFVALDQYYPAFSSSSSILLSLGSNAYERIRTLRNSSGNGISFEL

SEQ ID NO: 144199 - protein, 50 aa, Glycine max
  unsure (1)..(50): unsure at all Xaa locations
  Clone ID: PAT_MRT3847_101224C.1.pep
LVKSSLCWPGWSRTPDLKXSTQLTFPKCWDDRRETPRPAEDTLLRRGPRR

SEQ ID NO: 144200 - protein, 108 aa, Glycine max
  Clone ID: PAT_MRT3847_101225C.1.pep
HLFYLNLGGGQEVPGKGRRSCGMGPPTQPGFLVLPSIQLGARGGAGASPNGYLINLEGNLKDLNPSTQRSPATVSPGRKPQGRETLPQKRIPEKFNNPHFFFLIIQFF

SEQ ID NO: 144201 - protein, 77 aa, Glycine max
  Clone ID: PAT_MRT3847_101226C.1.pep
RRTIYLSVIIRVPFKCFVFVLYSCWAPGMLPLSFLGESVSVHLRVRYIPPVSIGCLPICGGCRPHLLLRLRPGAHTR

SEQ ID NO: 144202 - protein, 81 aa, Glycine max
  Clone ID: PAT_MRT3847_101227C.1.pep
RVYFYHKCATLQTTLGVISGGYRIGFFERFSYCGITNVGLQHLKTLRILVFHSWKSGRVPPKGIKKLHSPALPIWLGFGPR

SEQ ID NO: 144203 - protein, 79 aa, Glycine max
  Clone ID: PAT_MRT3847_101228C.1.pep
NIYPPPPLQFVLNPLICGDKNGAPQANRFFLHTNKVRYPRLMPRGAPPPPPGGAPCALSLGSSPQLSPKQNGGARVFFS

SEQ ID NO: 144204 - protein, 80 aa, Glycine max
  Clone ID: PAT_MRT3847_101229C.1.pep
LVVLVLATFLSLIYVLLIMLTLVFCFTFYTFTHLSSQISNTKHLYFLSPKIIDRLKSQFNKCIIKSFNIRFFFKKDKTKH

SEQ ID NO: 144205 - protein, 61 aa, Glycine max
  unsure (1)..(61): unsure at all Xaa locations
  Clone ID: PAT_MRT3847_10122C.1.pep
MGKNQAYKAMQRARLGGASAGPDEVEDGMVDGSFHSPEWHAARLASLNTSHTITWEEYXKK

SEQ ID NO: 144206 - protein, 52 aa, Glycine max
  unsure (1)..(52): unsure at all Xaa locations
  Clone ID: PAT_MRT3847_101230C.1.pep
CEAPXXRPXSPLXPXELXANRXXKREESTVESRLXLRXXPXXGCLKPLSLGS

SEQ ID NO: 144207 - protein, 108 aa, Glycine max
  unsure (1)..(108): unsure at all Xaa locations
  Clone ID: PAT_MRT3847_101231C.1.pep
VIYTITHIACILSGTSHNRRYFPTDFLHDQESESSTATDTHLNYKSQNXTLTISSDXASGRFIDTIGTTHITISYGKFEETAVARIIPLIYEETAEKLKKKLNKISGV

SEQ ID NO: 144208 - protein, 72 aa, Glycine max
  unsure (1)..(72): unsure at all Xaa locations
  Clone ID: PAT_MRT3847_101232C.1.pep
CVWAEGSAGVPPPRVLFQVPASRASLYSPCFCFLTFTVSPRTLSVMVLMEQVIPQFNFLSKKKRQTKAXTLE

SEQ ID NO: 144209 - protein, 115 aa, Glycine max
  unsure (1)..(115): unsure at all Xaa locations
  Clone ID: PAT_MRT3847_101233C.1.pep
YLRLDALTSVSAAYSQHCARLLPPHXVACLPNVPSALTALXSAWLLTRYARIFLVNLLSPILVPQNLLHRLHCLDTTFILPPSACAYLFFYLSXTFFFFNXFLLKPTLDTPGAES

SEQ ID NO: 144210 - protein, 78 aa, Glycine max
  Clone ID: PAT_MRT3847_101234C.1.pep
ILSCIFPRLKLTITTPEQKMPSAFSLQYPAHHLNPGVHLSQSLLHWKCTWHSWRNLHQDGCHWSLEQTHCRQTVTKLD

SEQ ID NO: 144211 - protein, 122 aa, Glycine max
  Clone ID: PAT_MRT3847_101235C.1.pep
IRWLLLQSQCGNSSMNTTPFMDKQIMDLTHGHGSSSSSTTQSQSKDFIDLMKEPPQHHHHHHLEDEDNDEEEKARGNGISKDDIVPSYDFQPIRPLSPSNNFDFLAFSRPWNTDSYSFVYFF

SEQ ID NO: 144212 - protein, 73 aa, Glycine max
  Clone ID: PAT_MRT3847_101236C.1.pep
KGFQKTIQLILSHKFHKRKFQWRENWCLLKSLAIQGLTLRALILEEMTEENSTRANPPRNKDGAVFYIYIYLS

SEQ ID NO: 144213 - protein, 78 aa, Glycine max
  Clone ID: PAT_MRT3847_101237C.1.pep
APSRAAFFFFFFFLAPFILGLPRDPSHLEAKKKGLLLLRTTSKELKQPGRSAIIFFVEGGLRLGVVRQKIYNFVNILE

SEQ ID NO: 144214 - protein, 60 aa, Glycine max
  Clone ID: PAT_MRT3847_101238C.1.pep
STLPPGGNKGLSLQVQVIQSKGSCLIKLGPPPTPKIKPMFGGLGFISLKGSVNLFSSFKN

SEQ ID NO: 144215 - protein, 58 aa, Glycine max
  Clone ID: PAT_MRT3847_101239C.1.pep
LLMYSAAIICSSGNLLKDVSPVSRTSLRYILFRDFRVFDNSHVPLWFVIDIIRMFGSL

SEQ ID NO: 144216 - protein, 32 aa, Glycine max
  Clone ID: PAT_MRT3847_10123C.1.pep
AWVLEKKERHRRQGREVRPDTQYTGRKRKPRF

SEQ ID NO: 144217 - protein, 114 aa, Glycine max
  Clone ID: PAT_MRT3847_101240C.1.pep
GGGKLFFFFFFGGENQPNINSPNKAQTGGPTCNNPQIYRRGGKSQVGLGLSSFRGWPQKRNFLPLRKKGKKDPSEGPLLWGPHPWVGGQKNQPEMLFRGKPPKNFGGSPTPRRR

SEQ ID NO: 144218 - protein, 206 aa, Glycine max
  unsure (1)..(206): unsure at all Xaa locations
  Clone ID: PAT_MRT3847_101241C.1.pep
RWLCLFSFLSSNFTQLPLILDLGVSQKDLILSMEFSTMKKKKKKHLHDGRTIALNPETETFLVIRIPDALVLRIVSRSLIVAMVLAALPFLGTVLEGFYFSSSFVPNLDTGSLDVGLLNSILHDFAEEGLLRENDKALIVNSPVPDIFREKIDAVMNSDWESKSLFADESYDFVFTSGAIDAEFIDRILKNDGIVALPLXTKSSNS

SEQ ID NO: 144219 - protein, 155 aa, Glycine max
  Clone ID: PAT_MRT3847_101242C.1.pep
FPPFSRLFSVFFSPWGTPVVPLFFFFFVAGVYSVSRFLRFLGYHSVAPLGPLSQPPFAGLCYFFFFTGLTGFPPWSAARDPSPISVVLGPHWASPVFFFCLPGGFLCDFYFVTFFPRCPLCPLFFPAFFCLMFGSVGAPSGTGPGFPGVPRRSFK

SEQ ID NO: 144220 - protein, 101 aa, Glycine max
  unsure (1)..(101): unsure at all Xaa locations
  Clone ID: PAT_MRT3847_101243C.1.pep
IXAESXXSRWTXRXDSVVTXLHYLXCXVEXSISXNXHLGRTLMXFHXSRSSXFLVXENTPSYSEXYXSXXRWRHXXXESIXELPLAIKCPLRXLLXIARQV

SEQ ID NO: 144221 - protein, 60 aa, Glycine max
  Clone ID: PAT_MRT3847_101244C.1.pep
MSVSLCLQSPSHTFCFIAHTSDKCACVFIICFLKLRCIIVCTCLFRHPHIFFQYLIFIQF

SEQ ID NO: 144222 - protein, 53 aa, Glycine max
  Clone ID: PAT_MRT3847_101245C.1.pep
GPYSLKTLLMYTYNDRHNSHAFMLIKEPTDLSLMGPASIIISTNVSNSAGDRS

SEQ ID NO: 144223 - protein, 155 aa, Glycine max
  Clone ID: PAT_MRT3847_101246C.1.pep
GISNRFFILLFFLFPSSPSSLPKARATPLESFSSETPPFSGSSSQRGCSAISSETPFSDSSSQRGCSAISSETPFSDSSLQRGCSAISSTTSSFNVSATIGSSPFNVSATTASSSLITSSNTFGSSSLITGSGLGSNIFGSSSQTCIAADSHSPT

SEQ ID NO: 144224 - protein, 115 aa, Glycine max
  Clone ID: PAT_MRT3847_101247C.1.pep
MAKGADSDEFVVLSRVRTGLKREFAFAMKAQSEICGGSLGRTRASKNRVEAPVQPPSARKRSRKSEEAKTLEDAMSEEEVKSDVVDLQSDDEPKNNNHVGESESAAMQVCEEEPK

SEQ ID NO: 144225 - protein, 55 aa, Glycine max
  Clone ID: PAT_MRT3847_101248C.1.pep
DKKVKLFSIASIHIWCKKLTNPIHRSQFTSSYFFFNLGSRRFNNHHSKTRTRNIY

SEQ ID NO: 144226 - protein, 66 aa, Glycine max
  Clone ID: PAT_MRT3847_101249C.1.pep
MLLVCGSRPFPPSCFLFVCRTTTLPLLSVIVVIEFCELGLDVCTSGMCMELGLPGVARAIMNNRPN

SEQ ID NO: 144227 - protein, 40 aa, Glycine max
  Clone ID: PAT_MRT3847_10124C.1.pep
LITSVLTLEKYEIMGHTLWNQARNHIKTMTKIIMEHKNME

SEQ ID NO: 144228 - protein, 132 aa, Glycine max
  Clone ID: PAT_MRT3847_101250C.1.pep
MNSEKPVSPEISSEENDHDQEDDTGGTKRSYECTFCKRGFTNAQALGGHMNIHRRDRAKAKQFTLDASPSVNKFNSNNNDSMALPFVSEIMNQPTRPNYSPLESQMNFHPPHAFYYEFCNSRSQPFSLNNQE

SEQ ID NO: 144229 - protein, 25 aa, Glycine max
  Clone ID: PAT_MRT3847_101251C.1.pep
HASDRSLDHYTSSTVLPNHMIGTCD

SEQ ID NO: 144230 - protein, 68 aa, Glycine max
  Clone ID: PAT_MRT3847_101252C.1.pep
NFSSTVFPVVRPKRTAPSQIWKRFYVFHKKGTKPNFRIGEFFFSQKTQSPPQKRDQFKENPKKSGESG

SEQ ID NO: 144231 - protein, 47 aa, Glycine max
  Clone ID: PAT_MRT3847_101253C.1.pep
HVMISLAKMFLAKQLVFPLVVTVMYSISYIFKLSLCTYEEFNQASSV

SEQ ID NO: 144232 - protein, 94 aa, Glycine max
  unsure (1)..(94): unsure at all Xaa locations
  Clone ID: PAT_MRT3847_101255C.1.pep
MAKDVEQVTEQGEYSAKDYHDPPAAHVIDPDELTKXSLYRAAIAEFIATLLFLYITAVTIIGYKRQRDTKIPFYTEWDNXGIPGIPWAFRGMIF

SEQ ID NO: 144233 - protein, 40 aa, Glycine max
  Clone ID: PAT_MRT3847_101256C.1.pep
ADLITLILIMQSRSRGPLLPYQTAGSLILAGAIANAIVQT

SEQ ID NO: 144234 - protein, 104 aa, Glycine max
  Clone ID: PAT_MRT3847_101257C.1.pep
KTKIFPPPPSKKNRVFPFGLDKKAPFGPFNPPRPGFFSLRGKAKLDPLKPFLGKSPGEPKGGSPPKVYPLFETPRHPPLKHFPPPLFFFLVKVPPPLEKNHSRV

SEQ ID NO: 144235 - protein, 48 aa, Glycine max
  unsure (1)..(48): unsure at all Xaa locations
  Clone ID: PAT_MRT3847_101258C.1.pep
XXPSXNXERACXIXIYXXVSXLXXRXFAESKIXGRNXNSHXIXWRLVR

SEQ ID NO: 144236 - protein, 84 aa, Glycine max
  Clone ID: PAT_MRT3847_101259C.1.pep
KILFFSLSLPSKRRFRISLPFLTIDFIFPSDSSFLFYVFFSDVTGVCFVCFSCAPKPLRSLILFCVFGSSCFTFGYGDLRFRFV

SEQ ID NO: 144237 - protein, 64 aa, Glycine max
  Clone ID: PAT_MRT3847_10125C.1.pep
MARARNLIVAVGLVAFAAAGMTFPFYMASSRKPVIDPTKPLPPQATFLGPYINTGSRDVGPQKK

SEQ ID NO: 144238 - protein, 44 aa, Glycine max
  Clone ID: PAT_MRT3847_101260C.1.pep
SKNEPKTFIVCDVKQGRCCKLFSTEYKCKKHNSIYYFMLIVYQI

SEQ ID NO: 144239 - protein, 93 aa, Glycine max
  Clone ID: PAT_MRT3847_101261C.1.pep
KLLNGKNPAFTKLNPLAQNPPFATWLNTKKARTIRPSKNLPTLNGKWNPPCNGPLNPAGLVVTPNFTAKLANALTPAPFPFFPSFPPTFPGFP

SEQ ID NO: 144240 - protein, 113 aa, Glycine max
  Clone ID: PAT_MRT3847_101262C.1.pep
KLNGKTGKKEVIGPFHPQGPKKFLKKKITFFQQTPGITFPRSSHQVPGFIKTMAEKQGFFWSSPPRLLRPKLKISAGGGYQFNLQTGFISDSRVSIDQVSEDILEETPMVEGS

SEQ ID NO: 144241 - protein, 75 aa, Glycine max
  Clone ID: PAT_MRT3847_101263C.1.pep
VLQLPILMERSRGGSFQYLGWVIVGMFVRGGLLFNKLSWLMVCVFRRELCCCNAGVFMVTRFNKTGKSFKFGVHK

SEQ ID NO: 144242 - protein, 157 aa, Glycine max
  Clone ID: PAT_MRT3847_101264C.1.pep
RHIIPLQWLLVIHQRKRRENRSKRFDLQGYRQKITARARAEKTRDGCEKTTEGRLYKAAPNLNTCLMDLYVEKMRYKAVNCMCRSYRPTLPVSYISQVLGFSTGVATNGVSDERETDALEECSEWLKAHGASIITDNNGDMLLDTKVCLISILYSCC

SEQ ID NO: 144243 - protein, 44 aa, Glycine max
  Clone ID: PAT_MRT3847_101265C.1.pep
LLREDDRRGVLTIEQQMETGRVGILKPLLHKRQNSDPLLGWSFE

SEQ ID NO: 144244 - protein, 104 aa, Glycine max
  Clone ID: PAT_MRT3847_101266C.1.pep
PARTVHFTRTQPQYPFSYPPIDPVNFDLIIVHTALSESIITVDSSNDNKTILQLDPHYLYCSHFNSLYLHDITYYLSYPHYLPFDDATTTDYYDRLIIDLHQQP

SEQ ID NO: 144245 - protein, 306 aa, Glycine max
  Clone ID: PAT_MRT3847_101267C.1.pep
KFGILLIQSLAEIVVVVEEKDQNQNQKQDSHSSSTFFGGNNSLFDCIYLGKILQVLELPLGLPRRLTIPVVSEEKWSKPYAVISVTLAPVLLAILFNTQSENVGSRSGIVTYIVAALIGIVLGNMACVTTERCNPPRKSLFPWLAGGFAMSVTWTYIIAEELVSLLVSIGSIIGVSPSILGLTVLAWGNSLGDLIANGAMAMNGGPDGVQMAISGCYAGPMFNTLMGLGLPLVLSAWSEHPEPYVTPKDTSLYETLLFLMGGVLWALVILPKKNMRLDKSLGAGLLSVYMCFLVIRIAMAVGIVKF

SEQ ID NO: 144246 - protein, 109 aa, Glycine max
  Clone ID: PAT_MRT3847_101268C.1.pep
TLPMLRRRVPPAVPGIMFLSGGQSEVEATLNLNAMNQSPNPWHVSFSYARALQNTVLKTWQGHPENVEAAQKSLLVRAKANSLAQLGRYSAEGESEEAKKGMFVKGYTY

SEQ ID NO: 144247 - protein, 390 aa, Glycine max
  Clone ID: PAT_MRT3847_101269C.1.pep
MAMAASAKLNTLSSSQWIAHNSFSPRRGSSSRRVSLPIRASSYQHELVQTAKSIASPGRGILAIDESNATCGKRLASIGLDNTEVNRQAYRQLLLTTPGLGEYISGAILFEETLYQSTTDGKQFVDCLCDQNIVPGIKVDKGLVPLPGSNNESWCQGLDGLASRSAEYYKQGARFAKWRTVVSIPCGPSALAVKEAAWGLARYAAISQDNGLVPIVEPEILLDGDHPIERTLEVAEKVWSEVFFYLAENNVLFEGILLKPSMVTPGAEHKEKASPETIAKYTLTMLRRRVPPAVPGIMFLSGGQSEVEATLNLNAMNQSPNPWHVSFSYARALQNTVLKTWQGHPENVEAAQKSLLVRAKANSLAQLGRYSAEGESEEAKKGMFVKGYTY

SEQ ID NO: 144248 - protein, 150 aa, Glycine max
  Clone ID: PAT_MRT3847_10126C.1.pep
SARAGFPFLTWSSQLKPNFVIPPHFLVRKTRELERHRRLRVIRSLPVWISMLAISAIASLPVLPPLTRGGHCIEQNVASTLSFPRRLQTTNNSISLSSTQLPFGRRARSTQPATIICAAALNARCGAEQTPTGTRQAPTITHVPGKENVP

SEQ ID NO: 144249 - protein, 132 aa, Glycine max
  unsure (1)..(132): unsure at all Xaa locations
  Clone ID: PAT_MRT3847_101270C.1.pep
SLPVWQTPLKPLHVIPHYYGERVLMGNLXQLYAWXSASYQDKCLKPCLKNKEXEMLYLAXIELCSYITHIVFLLSNPIFTGTAKPSVFXCNGKLFKFVAPPITYGTFVGGFNKGNHPFISGAIXTVALDQLL

SEQ ID NO: 144250 - protein, 81 aa, Glycine max
  unsure (1)..(81): unsure at all Xaa locations
  Clone ID: PAT_MRT3847_101271C.1.pep
WLSGQCDAHDESAARYKARWMCVVLTRITILTANSIAIAASVAXTLYRPFSHWTRLVTGMLIMLWDVCHRYPLSYGLIGRI

SEQ ID NO: 144251 - protein, 67 aa, Glycine max
  Clone ID: PAT_MRT3847_101272C.1.pep
ELQEHFTSWDALRAALPVGAVIGAPKVKAMDLIDELEVTRRGPYSGGFGYISFSGEMDIALALRTMV

SEQ ID NO: 144252 - protein, 44 aa, Glycine max
  Clone ID: PAT_MRT3847_101273C.1.pep
MIHYELRLTYAVYKIESKQVWACKRTRLLTYKVVINRSLATFVA

SEQ ID NO: 144253 - protein, 156 aa, Glycine max
  Clone ID: PAT_MRT3847_101274C.1.pep
PVPYIDLDYAAVDPKAEQKSSATADGVVPVQSNFEPFAYGYKYNTTLSQSQMSQSVSSSSMEVGVVPDGNTMSETSNCSYSKVPPVTVTVTAQFSAADREARVLRYREKRKNRKFEKTIRYASRKAYAEARPRIKGRFAKRTDPDPLAGYGVVPSC

SEQ ID NO: 144254 - protein, 80 aa, Glycine max
  unsure (1)..(80): unsure at all Xaa locations
  Clone ID: PAT_MRT3847_101275C.1.pep
KLNKRRQAWKRQAAGRGAQERKQXRKKLRTEGAEEKAEPRRRKKRRGNRGHQGKTDEAGTGEQEQQREEKEERHPDREEA

SEQ ID NO: 144255 - protein, 86 aa, Glycine max
  unsure (1)..(86): unsure at all Xaa locations
  Clone ID: PAT_MRT3847_101276C.1.pep
LHGGAALFLALRRRRQXRPTLHSRTRXLRGXGXNHXLXPPFXXXTFELHSRXSXAESRLLLKQXXXRXAKXXEEXSNGEXRGXSVK

SEQ ID NO: 144256 - protein, 36 aa, Glycine max
  Clone ID: PAT_MRT3847_101277C.1.pep
IQFTVRLFTISLTFKTLSLPYLITFHHIPLSSIFFL

SEQ ID NO: 144257 - protein, 59 aa, Glycine max
  Clone ID: PAT_MRT3847_101278C.1.pep
LLCSIKVCSSHHRNVITLCTQVSTSVPSPFKFISSFRHTPALKCSSGTSFMASFTIAKS

SEQ ID NO: 144258 - protein, 121 aa, Glycine max
  unsure (1)..(121): unsure at all Xaa locations
  Clone ID: PAT_MRT3847_101279C.1.pep
RTGFPWSDPRSPFRAVDKLNGTIVNMLANLIILRQSVVGDLKHLSVGMLYEGKHIPVSNIIARENHVLQIPLMAQEEILPFRARDSRTATASKNCMPQATALHVGAXEIIIERFSKSSTVT

SEQ ID NO: 144259 - protein, 93 aa, Glycine max
  unsure (1)..(93): unsure at all Xaa locations
  Clone ID: PAT_MRT3847_10127C.1.pep
RCGDIRCVVALVAGRPVVITRHLPKIDALVVAWLPGTQGGGVPFVLFXNVSIPATLVCTWFASVDQRSINVGXVSMMLLFPSGYGVRTNISKY

SEQ ID NO: 144260 - protein, 104 aa, Glycine max
  Clone ID: PAT_MRT3847_101280C.1.pep
FSDLRCFPSQEDLNNRSWRRASQPCFIAEDLFATSFSQFPIATCRKLQKRLKLSFHEQRVSPIHDLFFRLQRIKHDRCGCSRPLEWLKIEMMNNLNCSFLDFSY

SEQ ID NO: 144261 - protein, 41 aa, Glycine max
  Clone ID: PAT_MRT3847_101281C.1.pep
MTLCDSFSRPHLGDNAFCCINCVAMNCLCIWLLAFLSVIII

SEQ ID NO: 144262 - protein, 122 aa, Glycine max
  unsure (1)..(122): unsure at all Xaa locations
  Clone ID: PAT_MRT3847_101282C.1.pep
GGNPGKIPGLGSPARPEKHPKGPPKFTTAPTKGSPFPGKPKKKTGEPPKKKIPGPLLLKGPQNQGPLKNKGGKRAGHSPPSKKXPRGGKKKTPPPLKNPSLHLIGGAAKNRPPPPKPLPKKN

SEQ ID NO: 144263 - protein, 33 aa, Glycine max
  Clone ID: PAT_MRT3847_101283C.1.pep
DTHERRNHYYWQKKMLMFLFNHKLSYRFINFYK

SEQ ID NO: 144264 - protein, 207 aa, Glycine max
  unsure (1)..(207): unsure at all Xaa locations
  Clone ID: PAT_MRT3847_101284C.1.pep
MEESLGQKWKQREFALASVSDLSSAPSSASPGNSRVDPRVREEELYEIDVPLKFTATVGARLHGLACWVDVLCNGSEFVTQLFQIHSTARRGVTTAPGSPTTHWDQLRCVLSQPIYVMGGQEITGRMHLIAHTAQSYTIYLKLXAKTWGPGAEQGGILQTSSCELELKEPYYRMCQPRAYPLAQEQQPQPLLQTQEIHIEARKWLEG

SEQ ID NO: 144265 - protein, 82 aa, Glycine max
  Clone ID: PAT_MRT3847_101285C.1.pep
LIRYDVCVMSTGTPRFIISNDPFIVELGSPFFSHLARPLTNNTIWVCACVRYHNLGFKFLQSLTWRNTSLVFHGSCNKLARV

SEQ ID NO: 144266 - protein, 83 aa, Glycine max
  Clone ID: PAT_MRT3847_101286C.1.pep
RAATHASDDIVVIVVVVASVYQLVAPDTDWASSGLLLSRRTGEVFGQVVHRLCCSRRCESRPGHACPQIYVLDRLELKQIRLE

SEQ ID NO: 144267 - protein, 113 aa, Glycine max
  unsure (1)..(113): unsure at all Xaa locations
  Clone ID: PAT_MRT3847_101287C.1.pep
SIVESHFGPKVLVKLVGRLMVKACPANFEIRICGNNAKFPMRVVEFYARDFGYISLEKKYVGKGQSEIEPFPSNHQIWDALGRFEIEATREANVRTFEYQSEPFGAKKKKKXK

SEQ ID NO: 144268 - protein, 171 aa, Glycine max
  unsure (1)..(171): unsure at all Xaa locations
  Clone ID: PAT_MRT3847_101288C.1.pep
MLATVKEGRTTTSVVAAEEYTTEFRAYNDDAWYTVRVLLEGERLIVKYQNFSDENDEAFEPSRFGDCEDLEDFKERFRPLSRQLQDAECRRFGPGARVCACHSFAPDDVRFYDAVIDGVQXNEHSWEIGEEECLCTFLLYWLHGPNARNLTAEPIXYICEVQSAWELDPAV

SEQ ID NO: 144269 - protein, 118 aa, Glycine max
  Clone ID: PAT_MRT3847_101289C.1.pep
MVISSPKQPSLLETVGITILVLGPGPILASNAHDINVRPPNLYPESLTWDPRAQHFLLRSLRQRIIAAVSDTGVVETFMSDTDLPADVDLLGLAVDSPRNRLLGVVHCSYYLPPINAL

SEQ ID NO: 144270 - protein, 101 aa, Glycine max
  Clone ID: PAT_MRT3847_10128C.1.pep
HYALLPASLTHVCCALPCNARHHNKTRCDYLLISPSTYYPRVLNSLSIRCDDHTSLINSLVHTPYLSLPFPSLAHTWALLLLPGISVKSPCPKPTARLFFF

SEQ ID NO: 144271 - protein, 58 aa, Glycine max
  Clone ID: PAT_MRT3847_101290C.1.pep
KRGTYHQMGSCVLKLVYSVLFLFFLLILVDVFIIDSQTWLILSYVPYIFVQLKEQFTQ

SEQ ID NO: 144272 - protein, 57 aa, Glycine max
  unsure (1)..(57): unsure at all Xaa locations
  Clone ID: PAT_MRT3847_101291C.1.pep
SCLSFSYLPLSLYHKTPSTEYLYKKTIVITIMAXIYHNTSNANSNINYISGVNKVHF

SEQ ID NO: 144273 - protein, 320 aa, Glycine max
  unsure (1)..(320): unsure at all Xaa locations
  Clone ID: PAT_MRT3847_101292C.1.pep
MGTSVQVTPLCGVYNENPLSYLVSIDGFNFLVDCGWNDHFDPSHLQPLARVASTIDAVLLSHADTLHLGALPYAMKRLGLSAPVYSTEPVYRLGLLTMYDQYLSRKQVSEFDLFTLDDIDSSFQSVTRLTYSQNHHFSGKGEGIVIAPHVAGHLLXGTIWKXTKDGEDVIYAVDXNHRKERHLNGTVLGSFVRXAVLITDAYNALNNQPYRRQNDKEFGDILKKTLREGGNVLLPVDTVGRVLELILMLESYWADENLNYPIYFLTYVASSTIDYVKSFLEWMSDTIAKSFEKTRENIFLLKYVTLLINKTELDNAPDGP

SEQ ID NO: 144274 - protein, 54 aa, Glycine max
  unsure (1)..(54): unsure at all Xaa locations
  Clone ID: PAT_MRT3847_101293C.1.pep
MAXNKXIATILVXSLLAYSTSFTNXXGTCHPXPTXXHPXXSXXCPKETLQXGVC

SEQ ID NO: 144275 - protein, 116 aa, Glycine max
  Clone ID: PAT_MRT3847_101294C.1.pep
VCSKKTLLQAGNLNYPSFSVLFGRSASNASVTYRRVVTNVGNPQSAYAVKLEQPNGVSVTVEPRKLKFEKVGQKLSYKVTFLSIGGARVAGTSSFGSLVWVSGKYKVRSPMAVTWK

SEQ ID NO: 144276 - protein, 85 aa, Glycine max
  unsure (1)..(85): unsure at all Xaa locations
  Clone ID: PAT_MRT3847_101295C.1.pep
VVRLQEDNRRVGFFIIARVSIGFIVWANTLLHGAFYRALINPYXELGPDTFSWTLTNHWIYWGGPLICGGIASLVYKGEYFRHTH

SEQ ID NO: 144277 - protein, 52 aa, Glycine max
  unsure (1)..(52): unsure at all Xaa locations
  Clone ID: PAT_MRT3847_101296C.1.pep
FGLDFTLHSIASFQCQVNKSANMLLKLRIPPMGSFCVASKKKKKTXKXARAL

SEQ ID NO: 144278 - protein, 59 aa, Glycine max
  Clone ID: PAT_MRT3847_101297C.1.pep
KTQWGSKTCSTFIGIKKKKNPLQLTQGHHPLKHNLPFHKTHPTSRDVQFPQKSNTLQQN

SEQ ID NO: 144279 - protein, 113 aa, Glycine max
  unsure (1)..(113): unsure at all Xaa locations
  Clone ID: PAT_MRT3847_101298C.1.pep
IAAAAAAALCLAAXLVDVAVCQGEVXRHRLMDLHCLQEVQESPLDACRQVXLDRQLNQSGCGGSFRPIRWGTHLRMRCCHQLKDLSHISRCALIRXVRGNNEAIPPLKKGSSP

SEQ ID NO: 144280 - protein, 80 aa, Glycine max
  Clone ID: PAT_MRT3847_101299C.1.pep
MKGNNPYLVVILIQTIYAAMILLSKVAFDHGMDSFIFVFYRQAAATLFLTPFTFFFEWKTAPPMPFWTFCKIFFISLFGI

SEQ ID NO: 144281 - protein, 245 aa, Glycine max
  Clone ID: PAT_MRT3847_10129C.1.pep
MFVIAGGVVASILVVLCLLWVGIEDVGFHSKGTTLNLATLPVAVGLYCYCYSGHAVFPNIYTSMANPNQFPGVLLACFGICTLLYAGAAVMGYTMFGEAILSQFTLNMPKELVATKIAVWTTVVNPFTKYALTISPVAMSLEELIPSNHAKSYLYSIFIRTGLVLSTLVIGLSVPFFGLVMSLIGSLLTMLVTLILPCACFLRILRGKVTRTQAALCITIITVGVVCSAFGSYSALAEIVKSLRG

SEQ ID NO: 144282 - protein, 94 aa, Glycine max
  Clone ID: PAT_MRT3847_1012C.1.pep
WLFSSARLLNSQFAFFPFLFIIIRLDWKRFNCIRDFWRFYILHCLKVLFFHRIRRLRFLYVAVISMPRLGVSDIVLCEFVVDHEFHYHPKGVAW

SEQ ID NO: 144283 - protein, 52 aa, Glycine max
  Clone ID: PAT_MRT3847_101300C.1.pep
LLVFYFVAISFLFGRYIFKRENVVFFFFTKMHLFSFFHSTLVCSFFLIPHYF

SEQ ID NO: 144284 - protein, 106 aa, Glycine max
  Clone ID: PAT_MRT3847_101301C.1.pep
MWFSTLQLAHLAEMEVKHRCNQVLELGFPLGGLAKLFAQDWEGDVTVVMPATPAQYLKIIQNPSYVELQKAANQGRRCTWEKLSAMKANCGIELALDESVAILNHM

SEQ ID NO: 144285 - protein, 41 aa, Glycine max
  Clone ID: PAT_MRT3847_101302C.1.pep
NGLGRFAATIEAAWECHAYEMFPERMNNGYGGRAPEVKCKR

SEQ ID NO: 144286 - protein, 66 aa, Glycine max
  Clone ID: PAT_MRT3847_101303C.1.pep
RMTDSSTRPTTRVRRPWPETPDATTAGGWMLVYSRRLWLPCTGVTATTSTASSMTCSVATHWTYLT

SEQ ID NO: 144287 - protein, 595 aa, Glycine max
  unsure (1)..(595): unsure at all Xaa locations
  Clone ID: PAT_MRT3847_101304C.1.pep
MGICLLKWQWPWLLYVLLIHVVINKSEAITPDGEVLLSFRTSVVSSDGILLQWRPEDPDPCKWKGVKCDLKTKRVTHLSLSHHKLSGSISPDLGKLENLRVLALHNNNFYGSIPPELGNCTELEGIFLQGNYLSGAIPSEIGNLSQLQNLDISSNSLSGNIPASLGKLYNLKNFNVSTNFLVGPIPSDGVLANFTGSSFVGNRGLCGVKINSTCRDDGWPDTNGQSTNSDQNQIGKKKYSGRLLISASATVGALLLVALMCFWGCFLYKKFGKNDRISLAMDVGAGASIVMFHGDLPYSSKDIIKKLETLNEEHIIGIGGFGTVYKLAMDDGNVFALKRIVKLNEGFDRFFERELEILGSIKHRYLVNLRGYCNSPTSNVIIYDYVPIASHQRQSHECMIPLDWDSRLNIIMGAAKGLDWDSRLNIIMGAAKGLAYLHHDCSPRIIHARVSDFGLAILLEDEESHITTIVAGTFGYLAPEYMQSGRATEKSDVPEYMQSGRATEKSDVYSFGVLTLRVSKXKRPTDAAFIEKGQNIVGWSMFRGANNRPRXLLSVAIQCVSSSPEDRPTMHRVVQLLESEVVTPCPSDFYDSNSD

SEQ ID NO: 144288 - protein, 313 aa, Glycine max
  unsure (1)..(313): unsure at all Xaa locations
  Clone ID: PAT_MRT3847_101305C.1.pep
VGSGASIVMFHGDLPYSSKDIIKKLETLNEEHIIGIGGFGTVYKLAMDDGNVFALKRIVKLNEGFDRFFERELEILGSIKHRYLVNLRGYCNSPTSKLLIYDYLPXGSLDEALHERADQLDWDSRLNIIMGAAKGLAYLHHDCSPRIIHRDIKSSNILLDGNLEARVSDFGLAKLLEDEESHITTIVAGTFGYLAPEYMQSGRATEKSDVYSFGVLTLEVLSGKRPTDAAFIEKGLNIVGWLNFLITENRPREIVDPLCEGVQMESLDALLSVAIQCVSSSPEDRPTMHRVVQLLESEVVTPCPSDFYDSNSD

SEQ ID NO: 144289 - protein, 80 aa, Glycine max
  Clone ID: PAT_MRT3847_101306C.1.pep
LQYQKHFLFSKLGTRGEGSIMGLHNTWERIKNIIPEVSWHQISGGVPGTFRYPWGGIHTSPFYWGDMGALTKGVPQDGVP

SEQ ID NO: 144290 - protein, 44 aa, Glycine max
  Clone ID: PAT_MRT3847_101307C.1.pep
KGKYVISAHSLCGVSLSVTGYLVMLFLDFLFYKIVYQNKMSVMF

SEQ ID NO: 144291 - protein, 68 aa, Glycine max
  Clone ID: PAT_MRT3847_101308C.1.pep
RLPGCHCSCVLFGCLRVSATLLTEDPLCHALNSHQGLGQPSTHAFLSLTPRLLSCLHGCRRYAFEIGE

SEQ ID NO: 144292 - protein, 82 aa, Glycine max
  Clone ID: PAT_MRT3847_101309C.1.pep
MYLTLPNYHLQSFKFQPIKESIESREMTRHYMTYMITYSDTDIIIVVSCSSGLSCTYYLSKNLDVSVAIVDQTVSPICSTYL

SEQ ID NO: 144293 - protein, 61 aa, Glycine max
  unsure (1)..(61): unsure at all Xaa locations
  Clone ID: PAT_MRT3847_10130C.1.pep
KNTVGGIILRSDLGKCNFRLRNFQIQHGAFRSFHIIYGFAXGTILRSDLLANFLTEGNFRA

SEQ ID NO: 144294 - protein, 100 aa, Glycine max
  Clone ID: PAT_MRT3847_101310C.1.pep
DNQNKILYITDIYQNFPTASSVEVPSHESGSSNESTDISTPLTHDLGVYNQISSDQNTGSGSCLSTVRPANIHPQVCYCLLGKNRKPNENARNCSRRNKL

SEQ ID NO: 144295 - protein, 89 aa, Glycine max
  unsure (1)..(89): unsure at all Xaa locations
  Clone ID: PAT_MRT3847_101311C.1.pep
SKHLHALYKNNLQATPSISSHTFNYSKDLSTYHHHSQNVFLPSILLCXRXLLHPSLPPPGRLRQLLPGSLQPARTEPEARWAPHCLSPR

SEQ ID NO: 144296 - protein, 98 aa, Glycine max
  Clone ID: PAT_MRT3847_101312C.1.pep
HLLNVDKWVKFMNMRLKVVDGLWLGVFTPQSKLQYTPNEDGLIVERQRLSEEWLFPKPSFITEEVNQDHAIPVTLMTVLTHSEVVYFILFTCAHTLNF

SEQ ID NO: 144297 - protein, 33 aa, Glycine max
  Clone ID: PAT_MRT3847_101313C.1.pep
LLEPQFLKTIFTIKRRYCHQNNISTNLQDHIHI

SEQ ID NO: 144298 - protein, 86 aa, Glycine max
  unsure (1)..(86): unsure at all Xaa locations
  Clone ID: PAT_MRT3847_101314C.1.pep
CYTNSYRLTKLDRASAYPLFLISXILHILHTYACHVEYRTEDEYGLXTHTYCKTCPKPVSIVGKHFKIGYKADNGQETALLRILFH

SEQ ID NO: 144299 - protein, 98 aa, Glycine max
  unsure (1)..(98): unsure at all Xaa locations
  Clone ID: PAT_MRT3847_101315C.1.pep
MAGATPCPRLPRLISCLGRRSFRLFGLSFPAPSTEWLILHSFCEFNDGVCLPIWFQLILNKDLCLFLLECAHSECLLELHNKDTVFLFSKKKKKGGXA

SEQ ID NO: 144300 - protein, 83 aa, Glycine max
  Clone ID: PAT_MRT3847_101316C.1.pep
MTHRSRLDLSWWFTGIGLLSLNARCEHLVELSILGVAAMAHAQNLRKLWLARCKMVTNMAIGCIVMGYTRLKLHVLTVLSSIG

SEQ ID NO: 144301 - protein, 68 aa, Glycine max
  Clone ID: PAT_MRT3847_101317C.1.pep
CKRLGRSARGIGPVQCKAGLVIYRSVQTAGSVSGPFKACMFFRVRFGSSVFLVTGVCLKCVYGFMCTL

SEQ ID NO: 144302 - protein, 115 aa, Glycine max
  unsure (1)..(115): unsure at all Xaa locations
  Clone ID: PAT_MRT3847_101318C.1.pep
DVWIRDRDAGRGLALNIAGGGDSDDIDSERGVGILHQNSXSASSALQGLLRKLGAGLDDLLPSSAMGSASSSHQSGRLQKILFGLRAVGEQGRQVVALPQLCEMLSVGTWEALST

SEQ ID NO: 144303 - protein, 64 aa, Glycine max
  Clone ID: PAT_MRT3847_101319C.1.pep
LGGRPLILITTALLRFLITPVKLFTFPGFKNPRWKGGKFGPYFLLNGSLSFYLTLWITKNWFIS

SEQ ID NO: 144304 - protein, 90 aa, Glycine max
  unsure (1)..(90): unsure at all Xaa locations
  Clone ID: PAT_MRT3847_10131C.1.pep
RPVSYAELKRTVFYDLHADNGEEMVPLDGWRMPFQYEDSXIETAALSCRREXGAQYDVDDMSGLILQGNDSDTMIAKLSIADDASLDSVT

SEQ ID NO: 144305 - protein, 78 aa, Glycine max
  unsure (1)..(78): unsure at all Xaa locations
  Clone ID: PAT_MRT3847_101320C.1.pep
GNIRAKAMAICLAVHWVINFFVGLFFLRXLELIGAQLLYSIFGSCCLIAVVFVKKYILETKGKSLQEIEIALLAQEAN

SEQ ID NO: 144306 - protein, 103 aa, Glycine max
  unsure (1)..(103): unsure at all Xaa locations
  Clone ID: PAT_MRT3847_101321C.1.pep
SVSSATLCVAKPAFQANGKGFSXYKASQAXSSYLPSSTKSVEDCHSVIASQTHAVGSSARYKKGVTDAKLTAAINRFAWIRKNFLRCWHGRKNSPLDVIAIND

SEQ ID NO: 144307 - protein, 94 aa, Glycine max
  unsure (1)..(94): unsure at all Xaa locations
  Clone ID: PAT_MRT3847_101322C.1.pep
XXXSHAXXXDXXXXXYXTXVXKXXPRXTKXXYXLMXXHXCNXLTXXXXXSLPXIXXQXXPXRXXQXXXXXXXXRXEXKXXXMSVXXYTTXXXXX

SEQ ID NO: 144308 - protein, 68 aa, Glycine max
  Clone ID: PAT_MRT3847_101323C.1.pep
CPHQTDNISIYFNIMYKDFPQIIIMKLNIDSIYLNHNYSKDVIGSCNQCRLVNAERNECGLTLHCMQF

SEQ ID NO: 144309 - protein, 428 aa, Glycine max
  Clone ID: PAT_MRT3847_101324C.1.pep
MSDQQEIYAAFPNVPQAPPDSIFQLTARYVADKHPNKINLGVGAYRTDEGKPWVLPTVKKASRQLEENPNIDHEYLPITGLPQFTKAAQGLIFGKQNKAVDEGRVISVQTLSGTGANHLAALFFAKFYEFPTDKEIYISNPTWANHNAIISNVGVTPVSYRYYNKETIALDFDGYLEDLQKAPERSVILVHGCAHNPTGVDPTAEQWDKILDVFLQKKHYAFFDSAYQGFATGDLDRDAGSMRKFAEKRVPMLVCQSFAKNAGLYNERVGALHVVAADTKEAERVKSQLSVLQRSEISNPPAYGAHIVSMILTNPELFDSWKNDITTMSGRIIEMRDALFDLLNDKFKTPPPPGRKDWGHIKEQIGMFSFTGLNPDQTKKLVEEHSVYLTGNGRISMAGLNTHNVETFAKAVDEVVRSTSGTVPGSAL

SEQ ID NO: 144310 - protein, 126 aa, Glycine max
  unsure (1)..(126): unsure at all Xaa locations
  Clone ID: PAT_MRT3847_101325C.1.pep
AYGTGHTRPNRAMEPGGANDSTNKDDLNSPRATIYNQRTTELDSADPXITNILDTNDPTITIPKHDGATRVTRRAKNDGPPGTETARLKVPARPTKTAEPNALKTDNIGEEKSRKKTVEATRPGET

SEQ ID NO: 144311 - protein, 185 aa, Glycine max
  Clone ID: PAT_MRT3847_101326C.1.pep
MSIIEHVVLFKVKEDVAPSEADTMVERINSLASLEQLLHLTVGPLFRIRTSPPSLKFTHFFHTRFNSKDDLRSYVAHPAHVAVVKANTPLVDDAMALDWLAEVPGGTVPPPGSALRVTFFKLKEGVEDRVKDEIVGAMRGFQREFKQAIQLTCGGNFSPARAKGFSIASLEVFPGLSELEAAKEL

SEQ ID NO: 144312 - protein, 169 aa, Glycine max
  unsure (1)..(169): unsure at all Xaa locations
  Clone ID: PAT_MRT3847_101327C.1.pep
RYNYREVRLPSLIAVVGEPELGRETGERRRGRDIIIAIDHGPNTKHAFDWALVHLCRLADTIHLVHAVSDLHNQVVYDITQGLMEKLAIEAFQVLMVKTVARIVEGDPGKVICKEAERIKPAAVVMGTRGRSLIQSVLXGSVGEYCFHHCKAAPVVIVPGKEAGDASIL

SEQ ID NO: 144313 - protein, 179 aa, Glycine max
  Clone ID: PAT_MRT3847_101328C.1.pep
MSIGMERVMEEEEYNYREVRLPSLIAVVGEPELGRETGERRRGRDIIIAIDHGPNTKHAFDWALVHLCRLADTIHLVHAVSDLHNQVVYDITQGLMEKLAIEAFQVLMVKTVARIVEGDPGKVICKEAERIKPAAVVMGTRGRSLIQSVLQGSVGEYCFHHCKAAPVVIVPGKGVPSLP

SEQ ID NO: 144314 - protein, 84 aa, Glycine max
  unsure (1)..(84): unsure at all Xaa locations
  Clone ID: PAT_MRT3847_101329C.1.pep
ESYEATTRXKXEAAXMRQEHRHKDEREADAMETDRGDVWARDNYDAEAQNDSATKGPGTRGLISPEKARPDGPILESHRQRGRV

SEQ ID NO: 144315 - protein, 389 aa, Glycine max
  Clone ID: PAT_MRT3847_10132C.1.pep
GAECIDPDCTWVEQWVHRAGPREKIYYKPEEVKAAIVTCGGLCPGLNDASGQIVITLEIYGVKNIVGIPFGYRGFSDKELTEVPLSRKVVQNIHLSGGSLLGVSRGGPGVSDIANSLEKRGINMLFVLGGNGTHAGANAIHHECRKRRLKVSVIGVPKTIDNDILLMDKTFGFDTAVEEAQRAINSAYIEAHSAYHGIGVVKLMGRSSGFIAMQASLSSGQVDICLIPEVPFNLHGPHGVLSHLKYLLETKGSAVVCVAEGAGQNLLQKTNATDASGNVVFGDIGVYIQQETKKYFKEIGVHADVKYIDPTYMIRAIRANASDGILCTVLGQNAVHGAFAGYSGITVGLCNTHYAYFPIPEVISHPRLVDPNSRMWHRCLTSTGQPDFI

SEQ ID NO: 144316 - protein, 61 aa, Glycine max
  Clone ID: PAT_MRT3847_101330C.1.pep
NVSSKSAKGVYKILGFPYPYKKYAIFLGSTPKQINVLDRLQERQDPSVSFIAFKQKKKKAT

SEQ ID NO: 144317 - protein, 70 aa, Glycine max
  Clone ID: PAT_MRT3847_101331C.1.pep
PPVFPVRLLTPKCGPRSIAAYANGSYLVWSPPFGSPYGEQSWYSFSGSLRFFRGCKFFCMDNIIEHINKG

SEQ ID NO: 144318 - protein, 57 aa, Glycine max
  unsure (1)..(57): unsure at all Xaa locations
  Clone ID: PAT_MRT3847_101332C.1.pep
SYFLAVLAYSYGVLAPSRPHXTVPKVPXSSKNTTPPYCQSSRQVRDALGPYPGTSGP

SEQ ID NO: 144319 - protein, 97 aa, Glycine max
  Clone ID: PAT_MRT3847_101333C.1.pep
GMPIFQGSFLKGKLSFPFPWGFPISLNPPQVKPLEIFFPPKPFFQFKNMKLYYFKKTPPPFFPMEGGSWGKHPQSPGAFYWGFPTPCGAQRVHFAPP

SEQ ID NO: 144320 - protein, 118 aa, Glycine max
  unsure (1)..(118): unsure at all Xaa locations
  Clone ID: PAT_MRT3847_101334C.1.pep
VSEFGSRMLIKSCYEKILRPAQATRTMLRCFRNCDCLGDYGHDNXITVHQSVKPYFMGCKLQSFLAGDNITITEGMDKTSATLQFRKVAHCDVLRRNCNQMSNVLRVAPEDKVSPWSQ

SEQ ID NO: 144321 - protein, 61 aa, Glycine max
  Clone ID: PAT_MRT3847_101335C.1.pep
FLSNNQMKSVFFFFITKTTNISTSTLIVSLLFYNSKQCHHTLWHFIPQYVAIDINLKFKII

SEQ ID NO: 144322 - protein, 99 aa, Glycine max
  unsure (1)..(99): unsure at all Xaa locations
  Clone ID: PAT_MRT3847_101336C.1.pep
ICLKNAANIPAKNHDAATQLDDIIALCXLALMAGVCYHKVSDVTLWGIHSSTHVPDYINAILDSVPCKEEAXDHKWTEEQVTEKAHKRGEALIQKWGRS

SEQ ID NO: 144323 - protein, 69 aa, Glycine max
  Clone ID: PAT_MRT3847_101337C.1.pep
IETQDIQMLGLIFALKEIRAKRVLTDDLGAEALKINALDKVERDLKTPSLRYDKKGMDLLLAEFDKINK

SEQ ID NO: 144324 - protein, 92 aa, Glycine max
  Clone ID: PAT_MRT3847_101338C.1.pep
DNAKQKKQSLDPASPDFLPLPSFEQCFPKSACEHREVTHEETGHVLKAPFRRVHLCGEAGHFVPYDTGGAQNVNPWTGLPKLCGGWVFWREK

SEQ ID NO: 144325 - protein, 178 aa, Glycine max
  Clone ID: PAT_MRT3847_101339C.1.pep
ARGKVQRSLVELENIHNNGQGENLFLPSADGQNHDNKVLKSQLFAEKFTESVQYTFLDYLAGGFELNFMVAVDFTASNGNPRLPDSLHYIDPSGRPNAYQRAIVEVGEVLQLYDSDKRFPTWGFGARPIDGPVCHCFNLNGSCHYCEVEGIQGILMAYTSALLNVSVAGPTLFGPVIS

SEQ ID NO: 144326 - protein, 216 aa, Glycine max
  unsure (1)..(216): unsure at all Xaa locations
  Clone ID: PAT_MRT3847_10133C.1.pep
GSSSSRIGSSGSSSIRNPLVTRSREXMDDNGSDFCEEPCMIAGSHSCTLDRLYAWERKLYDEVKAGEFIKKDFDRKCDLLRHQFAKEEGNKVIDKTRTVVKDLHSRIIVAIYSVDLISKRIERMRDEELFPQLLELTQGLMRMWKAMLECHHAQYITISLAYHSRNSMRTLEGDTRREIMAQLLEEFECFGLSFSNCIDSHTSYIEALNVWLQNCI

SEQ ID NO: 144327 - protein, 177 aa, Glycine max
  Clone ID: PAT_MRT3847_101340C.1.pep
MKGGQEISKTPSSSKRTLSQGSVDIYAAQCKNCLKWREIDTQEEFEEIRSKVAEEPFLCSRKANSSCDEPGDIKYDSSRTWVIDKPNLPKTPQGFKRSLVLRKDYSKLDAYYITPAGKKLRTRNEIAAFLKDNPEFKGVSASDFDFSSPKIMQDTIPEIIEQKDSANKKVKIAKDEV

SEQ ID NO: 144328 - protein, 121 aa, Glycine max
  Clone ID: PAT_MRT3847_101341C.1.pep
KKGPFKSIFFEGVSQTGRNSFPNKFGQERGPSPFGKFRSSNMQHFKYFEGKACPKVWKLNWIPLFSPLGKNYKGPYFQFFPYYQGVVQSCPRSMKKNFFVMKKNPKKRKKLIHVYKKLSCF

SEQ ID NO: 144329 - protein, 44 aa, Glycine max
  Clone ID: PAT_MRT3847_101342C.1.pep
GGPKSGEDPNLIELDHSPQLTLPLLGIYLFAKFLIPNQTLKLSV

SEQ ID NO: 144330 - protein, 506 aa, Glycine max
  unsure (1)..(506): unsure at all Xaa locations
  Clone ID: PAT_MRT3847_101343C.1.pep
MGLNRTPRHNPVLPTKSPILSRSHSRSQTMKTTQIFGVSLSLILINLAAIMERADENLLPSVYKEVSETFNAGPSDLGYLTFVRNFVQGLSSPLAGILVINYDRPTILAMGTFCWALSTAAVGVCHDFLQVAFWRAINGFGLAIVIPALQSFIADSYKDGVRGTGFGLLSLVGNLGGIGGGVLATVMAGQQFWGIQGWRCAFILMATLSALIGFLVLLYVVDPRKRFPTTRDASESSDRDDTVYKGNASAASIWIDSWAATKAVIKVKTFQIIVLQGIIGSLPWTAMVFFTMWFELIGFDNNTSATLLSLFAIGCAMGSFIGGSIADQLSQVYPHSARTMCAQFSAFMGIPFSWFLLKVIPQSVSSFPIFSVTLFIMGLTXSRSSRSSRSSRSSRAAANAPMFAEVVPVKHRTMIYAFDRAFEGSFSSIAAPLVGILSEKMFGYNSKSVDPIKGSSPEALALSKGLLSMMAVPFGLCCLCYTPLYYIFRRDRENARMLAVKEEEMM

SEQ ID NO: 144331 - protein, 77 aa, Glycine max
  unsure (1)..(77): unsure at all Xaa locations
  Clone ID: PAT_MRT3847_101344C.1.pep
LRHPGFGLPWMANLGPHNNGSLFYSTSVTNSCLVFWHVVFGKVLSQXNGVFIFQGGGPPSGAPHSFFVIVASGGLPL

SEQ ID NO: 144332 - protein, 116 aa, Glycine max
  Clone ID: PAT_MRT3847_101345C.1.pep
PFLWEGVYNFFFFLSPFLIAFCELFVPKGKKKRFRKAPCWGSPPTTKGFKFFSPPGGKKRGKPVLTKNPPKGGGAGGKNVFPEGRGGNKPSGRGTGFYRTPKFPYVGPWPREGLEP

SEQ ID NO: 144333 - protein, 76 aa, Glycine max
  Clone ID: PAT_MRT3847_101346C.1.pep
RRQQTGSCFTNTSMDCYTGNLLLQSSHTRIGTLINSPFFTLQWNHTSRFEGRNRSISSWEIQFSRHWALLYKTPTV

SEQ ID NO: 144334 - protein, 187 aa, Glycine max
  Clone ID: PAT_MRT3847_101347C.1.pep
MEIKSRERIQVSIEKVRRDSTVEVEDEEEEDESVVGGEGGLAEDEKKKGGGGSGRRGSSGFFPPSCQAEMCGADLTVAKRYHRRHKVCELHSKAPSVMVAGLRQRFCQQCSRFQELAEFDEAKRSCRRRLARHNERRRKSNAETCNEGCSGSKGQHPTESHCRNADVWGRIQMNIAKNSGYNSFHIR

SEQ ID NO: 144335 - protein, 60 aa, Glycine max
  Clone ID: PAT_MRT3847_101348C.1.pep
CIDSLAALTNAVISRTDISQHAVVLSLELSGVAPDADPKLVTMSRVDIVCVSLLPWQSFA

SEQ ID NO: 144336 - protein, 109 aa, Glycine max
  Clone ID: PAT_MRT3847_101349C.1.pep
CYAATYMSLFYHVMVLQSSSAAYLSVRQSYKFLVKNAFSTPSYGSVQMIFLRMHDHSHDHVDRFVMLAIAFDRVGLFVMLVFSPASDHSWHISDNHAAGLDKSELLWMS

SEQ ID NO: 144337 - protein, 60 aa, Glycine max
  Clone ID: PAT_MRT3847_10134C.1.pep
MSTVITRVYKMWMFFSTVGGCIIGNNKGSHGGEVHIESSPQIYNIYLRVSFMKAISCREQ

SEQ ID NO: 144338 - protein, 71 aa, Glycine max
  Clone ID: PAT_MRT3847_101350C.1.pep
FLIFPVPISVSLRTISVSGLTPFYKNFTQLRLLGGNKKTTTKPLTEREEEGGFGLRTIQVLRSRNPIFTFS

SEQ ID NO: 144339 - protein, 90 aa, Glycine max
  Clone ID: PAT_MRT3847_101351C.1.pep
MDRAIVSKNRSVCEEDFLDETRPLVEVQGEVQINITEPSVLKEQNKMSSGERHIFFRIWFGLRKRELVKIAIGSFAAAFSGISKPFFGIT

SEQ ID NO: 144340 - protein, 97 aa, Glycine max
  unsure (1)..(97): unsure at all Xaa locations
  Clone ID: PAT_MRT3847_101352C.1.pep
LDMCMTCLNXEQVQVFYEKLSASAADMTANIGIXATLPHFDIGDXDFEPLRCSMYSXERADVYTIHVTPEDGFWCACYITVGYDCKADNLDYMVLYL

SEQ ID NO: 144341 - protein, 86 aa, Glycine max
  Clone ID: PAT_MRT3847_101353C.1.pep
LGATMPVGMDFPPPFTMLEDKDSAFVVDDQKSGDIKPMTKGKPPRHASGLRHSVSTTRLLAVADLSLDVGVTGSKSSSEEKTEFLP

SEQ ID NO: 144342 - protein, 40 aa, Glycine max
  unsure (1)..(40): unsure at all Xaa locations
  Clone ID: PAT_MRT3847_101354C.1.pep
PYXLIYKLXXLNIFYLFFFYFIFYYFFYFFINIYITIIFY

SEQ ID NO: 144343 - protein, 82 aa, Glycine max
  unsure (1)..(82): unsure at all Xaa locations
  Clone ID: PAT_MRT3847_101355C.1.pep
CLTYQHTNNFSXARTWGQVISYVRFGRIRSTAKAKVGQVKLIXKEEKVXKALVIMQDIMKKWMTYFYKLLNEGDATITNIES

SEQ ID NO: 144344 - protein, 47 aa, Glycine max
  Clone ID: PAT_MRT3847_101356C.1.pep
SVIMESYSVHSHASYLLSFFSVPEVISLPITGGNLKYLEWIKESTRD

SEQ ID NO: 144345 - protein, 111 aa, Glycine max
  Clone ID: PAT_MRT3847_101357C.1.pep
TTTHYLLPARTPIVQEIQLVHVPKIHSITTTTFFYDDPNKRSLVSRATRSICILSDELSELACPYPTSSQNGLLTRRFIMLHGWTCSCDNGCICCSNIFGRNASTSCCRLV

SEQ ID NO: 144346 - protein, 138 aa, Glycine max
  Clone ID: PAT_MRT3847_101358C.1.pep
PKKIGFLFGYQKNPRVAPTKFFRKKKIPPPYLKNQGPRFIPLEGRKKCFFFPCGKTWAPPLFLNKPPFFFPNQKKKNRALAPFECWGPPLFPGGPLKTPSPSPLGGVQGPSQKFSKPFPRKFFGVFPNTSISPKFFRS

SEQ ID NO: 144347 - protein, 543 aa, Glycine max
  Clone ID: PAT_MRT3847_101359C.1.pep
GDLPQTMSSLSRITTMYLQNNQFTGTIDVLANLPLDNLNVENNNFTGWIPEQLKNINLQTGGNAWSSGPAPPPPPGTPPAPKSNQHHKSGGGSTTPSDTATGSSSIDEGKKSGTGGGAIAGIVISVIVVGAIVAFFLVKRKSKKSSSDLEKQDNQSFAPLPSNEVHEEKSMQTSSVTDLKTFDTSASINLKPPPIDRHKSFDDEEFSKRPTIVKKTVTAPANVKSYSIAELQIATGSFSVDHLVGEGSFGRVYHAQFDGQVLAVKKIDSSVLPNDLTDDFIEIISNISNLHHPNVTELVGYCSEYGQHLLVYEFHKNGSLHDFLHLPDEYSKPLIWNSRVKIALGTARALEYLHEVSSPSVVHKNIKSANILLDTELNPHLSDSGLASYIPNADQILNHNVGSGYDAPEVALSGQYTLKSDVYSFGVVMLELLSGRNPFDSSRPRSEQSLVRWATPQLHDIDALAKMVDPAMKGLYPVKSLSRFADVIALCVQPEPEFRPPMSEVVQALVRLVQRANMSKRTFSSSDHGGSQRGSDEPVLRDI

SEQ ID NO: 144348 - protein, 85 aa, Glycine max
  unsure (1)..(85): unsure at all Xaa locations
  Clone ID: PAT_MRT3847_10135C.1.pep
MKFKSLWDILKARKYICVIILNSICQKXQPRGFEPLKAIHXLEPTPFDMERNLITPTLKLKKPQLLKXHKDSFDQLYKEANGAMA

SEQ ID NO: 144349 - protein, 548 aa, Glycine max
  unsure (1)..(548): unsure at all Xaa locations
  Clone ID: PAT_MRT3847_101360C.1.pep
FNSLTGDLPQTMSSLSRITTMYLQNNQFTGTIDVLANLPLDNLNVENNNFTGWIPEQLKNINLQTGGNAWSSGPAPPPPPGTPPAPKSNQHHKSGGGSTTPSDTGSGSSSIEEGKKSGIGGGAIAGIVISVIVLGAIVAFFLVKRKSKKSSSDLEKQDNQSFAPLPSNEVHEEKSMQTSSVTDWKTFDTSGSINLKPPPIDRHKSFDEEEFSKKPTIVKKTVTAPANVKSYSIAELQIATGSFSVDHLVGEGSFGRVYHAQFDGQVLAVKKIDSSVLPNDLTDDFIEIISXISNLHHPNVTELVGYCSEYGQHLLVYEFHKNGSLHDFLHLPDEYSKPLIWNSRVKIALGTARALEYLHEVSSPSVVHKNIKSANILLDTELNPHLSDSGLASYIPNADQILNHNVGSGYDAPEVALSGQYTLKSDVYSFGVVMLELLSGRKPFDSSRPRSEQSLVRWATPQLHDIDALAKMVDPAMKGLYPVKSLSRFADVIALCVQPEPEFRPPMSEVVQALVRLVQRANMSKRTFSSSDHGGSQRGSDEPVLRDI

SEQ ID NO: 144350 - protein, 52 aa, Glycine max
  Clone ID: PAT_MRT3847_101361C.1.pep
KKPSKLKVGAMLHDYTRLTPEMKGRHNFNSNQINSTKALHKLLKQTATHVIH

SEQ ID NO: 144351 - protein, 136 aa, Glycine max
  Clone ID: PAT_MRT3847_101362C.1.pep
MGRGRGKGKKQSVIAEDPGSGEEDKVPAYRRRGRPVKPLTDEIEEVEVTEIIEKDEENVKGNGSTDDLKTQAITVNKRKRKRSTQVKEKIDPLKEDNGILAKSGPEDSIKTTGFRQNGSRRKNKPHRAAEAGVDCK

SEQ ID NO: 144352 - protein, 75 aa, Glycine max
  Clone ID: PAT_MRT3847_101363C.1.pep
KGYCADGRHACWSMTQGSGLILEYPSMKHLSMRCKWEKYRLYIFSYAEAIRYLGMSFKSRLVSAPTKTCETCPSV

SEQ ID NO: 144353 - protein, 61 aa, Glycine max
  Clone ID: PAT_MRT3847_101364C.1.pep
PNLGRFTNPPDWQEILTYFRGSDLQSYCTRILQACLLAIIKPLYVDHMPSAVQGYVGQVLD

SEQ ID NO: 144354 - protein, 90 aa, Glycine max
  Clone ID: PAT_MRT3847_101365C.1.pep
FKGKVLGPKKGASQVGFGPQTPFCNCCFHQFFFGLTNFTLWVAKVGGGGPPVFLLFFPFENNVSRGTGAKLFFELKANFFPVYHSGGPFL

SEQ ID NO: 144355 - protein, 52 aa, Glycine max
  Clone ID: PAT_MRT3847_101366C.1.pep
RKKFPLSDNKNAKAALGCNGFCYRGIAGLDSCNQISGLTSRRNPKFSHIPIH

SEQ ID NO: 144356 - protein, 157 aa, Glycine max
  unsure (1)..(157): unsure at all Xaa locations
  Clone ID: PAT_MRT3847_101367C.1.pep
GTLSIRMXYDRGRVRRDNLVDISRVRIPDLRRVLAKLLVDAIHLGILLTMLSGLHRGLTNSVKRESSAINTIILSRILSHLQLRHRHLLRLRNLAIQALRNSLLDQYRLSGSLALAFLFLFPSFSSVHFTFSVRGKFLSPSIIFSRPCKHINQPKGS

SEQ ID NO: 144357 - protein, 63 aa, Glycine max
  unsure (1)..(63): unsure at all Xaa locations
  Clone ID: PAT_MRT3847_101368C.1.pep
EAAISRLHSNTALILYISVLIIIGYKRQSDTXSPCKTECDGVGILGIAWAFGGMIFILVYCTA

SEQ ID NO: 144358 - protein, 45 aa, Glycine max
  Clone ID: PAT_MRT3847_101369C.1.pep
LSFPLCFRTSLLFKHYDSFLLKLLLLHYLHCTLPYDRLHYIQHQH

SEQ ID NO: 144359 - protein, 93 aa, Glycine max
  Clone ID: PAT_MRT3847_10136C.1.pep
KEIGVHADVKYIDPTYMIRAIRANASDGILCTVLGQNAVHGAFAGYSGITVGLCNTHYVYFPIPEVISHPRLVDPNSRMWHRCLTSTGQPDFI

SEQ ID NO: 144360 - protein, 112 aa, Glycine max
  Clone ID: PAT_MRT3847_101370C.1.pep
SGSGKSYGYSLLCKSSNSDDKTKQSFQEMKTQLFGERFLEIYGKKQENTYVKRVVFEMRASLFWNSGDFTCSFTLVAVVQLIFNEENFRDGGDASPYHHQFPQPSPKPNGKA

SEQ ID NO: 144361 - protein, 61 aa, Glycine max
  Clone ID: PAT_MRT3847_101371C.1.pep
IKSSMSFMLIQFISNEISLKFSLLKRVEDKSNVRNMKFSHCLHRFCMNSMNTGFIVEIMCY

SEQ ID NO: 144362 - protein, 123 aa, Glycine max
  Clone ID: PAT_MRT3847_101372C.1.pep
STLSYTFLFTSCFCVLPWVWKKNTTPCKKGWVLHQCPRPPPLLKNPTPPKVFYWGTDPLLQQKITIGGPKKPPKKRNYLDGRCPREKTKLGFAPPPPGGKTRADSWTGARIKPKKFFLHPGGG

SEQ ID NO: 144363 - protein, 105 aa, Glycine max
  Clone ID: PAT_MRT3847_101373C.1.pep
RISDPHCPRDHVQRNNMRSIAEAYMTTNASARRENVELEFPEAFESQFRWSPDTLTRQTIMSTSSMNTLASPSLEHVELEFPEEFPSHLLRVQDTLNKKTHQSKS

SEQ ID NO: 144364 - protein, 119 aa, Glycine max
  Clone ID: PAT_MRT3847_101374C.1.pep
LAIYIYRYVPPLFFFIFSHPRHFYLAVDRLQFKMQTVIELVARRPCFLIVVCCSTRNDLDSLCSPLPFCFPNSLLFPPFPFPTCQYSDLGEDERAFILKKFPQGTSLWSTDEDERSYII

SEQ ID NO: 144365 - protein, 361 aa, Glycine max
  Clone ID: PAT_MRT3847_101375C.1.pep
MEIDGNRVVILGGGVAGSVVAKSLQFHAHVTLVDPKEYFEITWASLRSMVEPSFAERSVINHRDYFTNGDIVTSNAVNVTETEVLTADGHRIGYDYLVIATGHADPLPKSRRERLNQFKEDNQKIKSAQSILIIGGGPTGVELAGEIAVDFPDKKLTLVHKGARLLEFIGAKAGDKTLNWLKSKNVVVKLEQSVDLNAFKDGQKIYQTSNGETIEADCHFLCIGKPLASAWLKETVLKNDLDGQGRIKVDEKLRVKGKDNIFAIGDITDIPEIKQGFLAQQQAEVVVKNLKVILEGGRECRMETYKPHSAIAIVSLGRKDAVAQLPFLTIGGRIPGFIKSGDLFVGKTRKQMGLNPDIVQA

SEQ ID NO: 144366 - protein, 94 aa, Glycine max
  Clone ID: PAT_MRT3847_101376C.1.pep
KDQSFAPPKKKNPTPIYPGSVLNRITRAQIGDVLNRFKEAQFQVVLEEDPKIKAFEWSPLDPELPFRETPKGVNPFWEWLLENHPKPLERPPPK

SEQ ID NO: 144367 - protein, 77 aa, Glycine max
  Clone ID: PAT_MRT3847_101377C.1.pep
MEILDPDLNTAARRRQKGSSESELLQYLRIAFECLDERPYRRPTMIQVMAMFKELQVDTDNDMLDSFSLRDNVIDEA

SEQ ID NO: 144368 - protein, 48 aa, Glycine max
  Clone ID: PAT_MRT3847_101378C.1.pep
FELWAELGAYLSACKVAKVIPRQIRTEHLRGAPNKCSGARITQLHHPV

SEQ ID NO: 144369 - protein, 49 aa, Glycine max
  Clone ID: PAT_MRT3847_101379C.1.pep
NGHGRYYETVYEAVNAEPDDGVSEGVIYSHPGGYVQKVNRPLEMRMLCS

SEQ ID NO: 144370 - protein, 86 aa, Glycine max
  unsure (1)..(86): unsure at all Xaa locations
  Clone ID: PAT_MRT3847_10137C.1.pep
MADDTPNEMKDEVXEIGSFDPTKKKTMKNITIXDTADEPVXNMASKTXNLLVSKEGETAFTGLKNKKKNPVDMGNLNDESVDAIDD

SEQ ID NO: 144371 - protein, 56 aa, Glycine max
  Clone ID: PAT_MRT3847_101380C.1.pep
NYFVWRYTRFFHQYFWKPKVSFRIITLIDCALFAQLMHVMEQWYHSCRIGKNVPLL

SEQ ID NO: 144372 - protein, 71 aa, Glycine max
  unsure (1)..(71): unsure at all Xaa locations
  Clone ID: PAT_MRT3847_101381C.1.pep
VTLPSAPPPQVTWSSVKKMSLSLIEFLLTGIEKRTVCLANVTLGGLKIXPPRQQEQEASSPVLSAIAKQHE

SEQ ID NO: 144373 - protein, 71 aa, Glycine max
  Clone ID: PAT_MRT3847_101382C.1.pep
SHVGVTDNVILGLYEGINNALLNRGSSRFPHVVSPQIIVSHQKKLPSLTASTSTPTRVPYSPPPSSICFPS

SEQ ID NO: 144374 - protein, 93 aa, Glycine max
  Clone ID: PAT_MRT3847_101383C.1.pep
MGLKNNMVVLKVCLVQHFLVGGTTNANLRQIKLGLRTTTDHHQYANDDDSSKACCDQCTCTMSNPPQCHCSDIMLNSCHSSCKSCNCALTYPA

SEQ ID NO: 144375 - protein, 36 aa, Glycine max
  Clone ID: PAT_MRT3847_101384C.1.pep
RFECITGLHRSCMLICTRVVAMIVSMPTYIITPSGV

SEQ ID NO: 144376 - protein, 35 aa, Glycine max
  Clone ID: PAT_MRT3847_101385C.1.pep
FPNFPYNSPILPLGNHINTLLHYKISFLLQLNTIP

SEQ ID NO: 144377 - protein, 87 aa, Glycine max
  Clone ID: PAT_MRT3847_101386C.1.pep
APINVSTSPFLSANDSPSGRDVRIRRTIPGRISGTVDWMRNFSEGGTDNVHLSATCAWGCQMGALGSGPCELSWVCRSRSSSLGAAS

SEQ ID NO: 144378 - protein, 62 aa, Glycine max
  Clone ID: PAT_MRT3847_101387C.1.pep
VYYYHLTDYTQGFDYWVQGMIFFYRKVLGLDRTRANKFAHAHTASTFSATYIDRKQYKRFKL

SEQ ID NO: 144379 - protein, 339 aa, Glycine max
  unsure (1)..(339): unsure at all Xaa locations
  Clone ID: PAT_MRT3847_101388C.1.pep
FKDGAAKTIVFQFQCVTWKLEKLMSNLPYDDLDISEEVKEGVDLVRTQLRRATDKYGFMISKMPSHELSQPLAEEISQVLGKSVSRLHKQQSCPENLSELDSIPINDEGKCCSTNPARSRLERTRSIPTEVEGSLNAIEPESQEISETKSLPEVKKTEGIVIPEDYLCPISLELMRDPVIVATGQTYERSYIQRWIDCGNTTCPKTQQKLQHLTLTPNYVLRSLISQWCIEHNIEQPTGLTNGKLKKSDGSFRDVTGDIAAIEALVRKLSCRSVEERRAAVTELRSLSKRSTDNRILIAEAGAIPVLVNLLTSEDVLTQDNAVTSILNLSIYENNXGLY

SEQ ID NO: 144380 - protein, 107 aa, Glycine max
  Clone ID: PAT_MRT3847_101389C.1.pep
ALDLWADLCACLCACLSACVVVKMIVGGLSARDRRDLPPPAATPPPRRPRARPPLYSKTLRRGGNRGRSSVRKRTNCRGGRKTHLHPSHIELIIIDIPATGAVLAKV

SEQ ID NO: 144381 - protein, 639 aa, Glycine max
  Clone ID: PAT_MRT3847_10138C.1.pep
MEPHLAEFGFKQVLRWSKGSSPTRNKWETVTKEELCMDIYKFGEMILEIVTGGRLTNAGASIHSKPWEVLLREIYNENEGTSASSLHEIKQGFDLARLRTQGSLSERQFTSKVLSLPPGLYVDLSKNNFVGGIPSDISQATQLEYFNVSYNPQLGGIIPSQTWSLPQLQNFSASSCGISSDLPLFESCKSISVIDLDSNSLSGTIPNGVSKCQALEKINLSNNNLTGHIPDELASIPVLGVVDLSNNKFNGPIPAKFGSSSNLQLLNVSFNNISGSIPTAKSFKLMGRSAFVGNSELCGAPLQPCPDSVGILGSKGTWKVTRIVLLSVGLLIVLLGLVFGILYLRRGIKSQWKMVSFAGLPQFTANDILTSLSATTKPTDIQSPSVTKTVLPTGITVLVKKIELEARSIKVVSEFIMRLGNARHKNLIRLLGFCHNQHLVYLLYDYLPNGNLAEKMEMKWDWAAKFRTVVGIARGLCFLHHECYPAIPHGDLRPSNIVFDENMEPHLAEFGFKHVSRWSKGSSPTTTKWETEYNEATKEELSMDIYKFGEMILEILTRERLANSGASIHSKPWEVLLREIYNENGASSASSLQEIKLVLEVAMLCTRSRSSDRPSMEDVLKLLSGLKHLEDGRTSKEGQ

SEQ ID NO: 144382 - protein, 66 aa, Glycine max
  unsure (1)..(66): unsure at all Xaa locations
  Clone ID: PAT_MRT3847_101390C.1.pep
VHITHVNPLHQIYXKRXKRTKSTCQFXNKXXRPPLSYPHFHNTEQRPNILQCTPKPPPKQKKKKRP

SEQ ID NO: 144383 - protein, 394 aa, Glycine max
  Clone ID: PAT_MRT3847_101391C.1.pep
HASAHASAETLHEDSIQLTASAGSQVNSYFDDNDLGFINVLYGRSAGKTNVAVSFSCELSTSGSRTQSRFYSSSLSVTVIPDLPLALGVPITWILPPYYTMTSPLPSSSESHSQNDSRNRRGTISYSLLRSLEKNEALQKDAIFIDADRIKTTKSNNLACIQAKDRTTGRTEIASCVKVAEVTQIRIASKEVLLNIINLAVGAELDLPTSFYDALGNPFHEAYNAVPFYAETNYPDVLCVNKTADGKGNVHIKAIQHGKALVRVAISEDLQKSDYVLIRVGAHIYPQNPVLHIGSPLNLSIKGLSDTISGQWFTTNGSVISVDTLSGMAKAIGEGSAQVSFHYGRLRLQTTITVLKGNYIFVNAPKETLTNVPYPSKGYNFSVKFSESLGAPGE

SEQ ID NO: 144384 - protein, 78 aa, Glycine max
  Clone ID: PAT_MRT3847_101392C.1.pep
ISCPLVPTAFAGPLYITHNGYSASLFGRTLPVTCQAIKRHGLPFTRPIWLFLSLSFLPPPPKEGGRHTVMTGNLPGTE

SEQ ID NO: 144385 - protein, 114 aa, Glycine max
  Clone ID: PAT_MRT3847_101393C.1.pep
VFYDMESLSWSLSLTPSSPSSTGIFRSRMDRDAWLSCFCILLVAPSLESVISACYLLFRDGDFGNPFFGTTLKFFPPIFLASLEARPINNCNWDYLGSPFGVFLEPYGRVGRPG

SEQ ID NO: 144386 - protein, 94 aa, Glycine max
  Clone ID: PAT_MRT3847_101394C.1.pep
ATHHQGVHPQTASKRSNNHGPPAAGRTTPKGCKPPNSYDPPKRCKVRRWESRGHDPCEQSQPTIMIRPRDARSRDVNQGNMILGNSHNQLILSA

SEQ ID NO: 144387 - protein, 110 aa, Glycine max
  Clone ID: PAT_MRT3847_101395C.1.pep
TKIMLYCLGFGQNLVSSFGKLKYCDKHKHKPHITKVYSRKQRAREAIIMDHQQQGAQHLRGANHPTVMTHPKGVNHPIVTIHPKSARSEDVNQGDMTIENSHNQSKGHDP

SEQ ID NO: 144388 - protein, 135 aa, Glycine max
  Clone ID: PAT_MRT3847_101396C.1.pep
MGRVRTKTVKKSSRQVIERYYSRMTLDFHTNKKLLEEVAIIPSKRLRNKIAGFSTHLMKRIQKGPVRGISLKLQEEERERRMDFVPDVSAINTDHIEVDKETLDMLHSLGINDIPGITQVDPVPVQQAFPFTRRY

SEQ ID NO: 144389 - protein, 262 aa, Glycine max
  Clone ID: PAT_MRT3847_101397C.1.pep
MHYPHFKEKKMSTGYEVYILEATYKDPVGCAARNVHGFTQEDIEKMSKQWEEAPSLYLQLDVKSLFHGDDLKESRIQEVDMDMEDDLGDALPPFQGKEDDKVVDPPVGEDASFLKAGKNWDAEEEHPTEVRELGKSKWSEDFGEDDIDQTEGMKGNINALSGLIHHYGKERKSVHWGDQGGKTGFSIGAAKKVNALSLVIGPGAGYNLKSNPLPEEDSPTRNSVDSKKHSIFQEQIRAERESFKAIFDRRRHRIGGLDVEED

SEQ ID NO: 144390 - protein, 50 aa, Glycine max
  Clone ID: PAT_MRT3847_101398C.1.pep
AASHARGVFEGYNRAAQHQPAVREHIHQQGSQSDNTQKSKAAPQHYPNTN

SEQ ID NO: 144391 - protein, 59 aa, Glycine max
  Clone ID: PAT_MRT3847_101399C.1.pep
RIENRIRYLTASSYCYHLPVDRRVKTRGRKTFNGYIFRESLQQENEKNNRKKPEKGEEA

SEQ ID NO: 144392 - protein, 100 aa, Glycine max
  Clone ID: PAT_MRT3847_10139C.1.pep
GCSFGFMPFGWGRRSRPGMVFGLFALNFSLARLLLCFTWLLPYGMTPSSMSMGDVFGLGAPRSPGLVAVPTERVVCPLFLGIASLTPFSSSFVDFHFVPR

SEQ ID NO: 144393 - protein, 50 aa, Glycine max
  Clone ID: PAT_MRT3847_1013C.1.pep
KNVCLCGDTHITSLYIMKYLKRHHEILNKKLQMTSYKSSFIKRNCCKLQM

SEQ ID NO: 144394 - protein, 111 aa, Glycine max
  Clone ID: PAT_MRT3847_101400C.1.pep
CRCCVILSTQFVVSICGCFSVVCYLPIVAALVGVFLSFGTLDFRVARLFTILFRHFVCSLCTFFVSLQCFSLSVGFGLCLYSSCIRFFMIVMCMKRCPFASFWFLGYLYFL

SEQ ID NO: 144395 - protein, 190 aa, Glycine max
  Clone ID: PAT_MRT3847_101401C.1.pep
EIRTVGHGDKSEEPWWPNLKTPKDLIDIITTIAWTASAHHAAVNFTQYTYGGYFPNRPNIIRTKIPTEDPSKEEWETFLNNPEQTLLESFPSQIQATTMMLVFNILSYHSPDEEYIGQYLKPSWAEDPTIKASFERFNGRLKEIEGIIDSRNADCNMKNRHGVGVVPYEQMKPFSGPGITGKGIPYSVSI

SEQ ID NO: 144396 - protein, 106 aa, Glycine max
  Clone ID: PAT_MRT3847_101402C.1.pep
GFSILGFGIVKCVEIVTEKHFNPGTDMAMFSPRFKLTPNKERWVALRDRAGIKSRGGEVHSRGPPLFFFFYKFFFVYKIFFFFKFFFNFFHFFILIPPPLLFFFSV

SEQ ID NO: 144397 - protein, 142 aa, Glycine max
  unsure (1)..(142): unsure at all Xaa locations
  Clone ID: PAT_MRT3847_101403C.1.pep
HVFRTIGVVGPGGDATVTRVGNYAGVGCGYTTPMHGIVRHVSTEYQQGGMGVACMGNELFGAVETITRQADSIVLEMGLVQTVXAGTRDREGLVLPGLEQELVTRVAREPKGPVILLIMFGGPGDIXLAKNDPKISAILRVG

SEQ ID NO: 144398 - protein, 70 aa, Glycine max
  Clone ID: PAT_MRT3847_101404C.1.pep
LPCFCHRLECHLPYIFIAGFWVASKEILSLFISQASLQHRKNFLDKSLISCSVIYIYIYIYIYVCVCVCF

SEQ ID NO: 144399 - protein, 57 aa, Glycine max
  Clone ID: PAT_MRT3847_101405C.1.pep
AAAASSFDERTHVSSSSSSATRSSTLSPLPPLSPPPPLGGAIFEITGYSVIVRRHRK

SEQ ID NO: 144400 - protein, 103 aa, Glycine max
  Clone ID: PAT_MRT3847_101406C.1.pep
QLILIFRHPRGPMLKHPLDIMAPLLSSFHRDFFLFLRLWFQRRQRGIALPHESKGVLLIFFLVPEDLERLKKNSFCRGLKKLMGGLILTGTNNLKCSFVQNPP

SEQ ID NO: 144401 - protein, 182 aa, Glycine max
  unsure (1)..(182): unsure at all Xaa locations
  Clone ID: PAT_MRT3847_101407C.1.pep
ARGKQVCGETLRPNLADAVDEGEESHHRSSEDREYAYXKMLMFLASESADGEECSGEEHEVGEHVIMADSEGEAVXIADAHDVERDGMILPYSERFLLTVKPLAQHVPPMLHDKDRISRVFSGNDSFYVLLRLHDTLYETIQSSQIDSSSADRKWKASSDTGSTDXYDMFMNALFQLLDGSF

SEQ ID NO: 144402 - protein, 55 aa, Glycine max
  Clone ID: PAT_MRT3847_101408C.1.pep
NEQSEYQPQTRKHKREENGPNGTKTVIRTKGEMEERTKKPKKMRTVCLLLSFLVV

SEQ ID NO: 144403 - protein, 68 aa, Glycine max
  Clone ID: PAT_MRT3847_101409C.1.pep
TAVALYFLCFFNQSPLKPKTPTPATQATVLRSKAQHKRPSHLSGQVPLDYHHRPNPKSPPDAKQARKT

SEQ ID NO: 144404 - protein, 62 aa, Glycine max
  Clone ID: PAT_MRT3847_10140C.1.pep
LSFVFNVPYLISLRFYNCAHVDFLQLYSVMIIFSMGVLFILSLLNRVPSCPLAVMFLFYLPL

SEQ ID NO: 144405 - protein, 174 aa, Glycine max
  Clone ID: PAT_MRT3847_101410C.1.pep
DHMLSALHCCLLVATVLGFNLVQFVMFCSVEWNTKIMEGLNVYEKVVASLFQVTNARHSGESVFDLSSISSAILVLFVVMMYLPPYTTFLPVREHENDVKRNEKSVVECLVFSQLSYLVIFIILICITESNSLKEDPLNFNVWNITLEVISAYGNVGLSMGYSCARQLKPDATC

SEQ ID NO: 144406 - protein, 59 aa, Glycine max
  Clone ID: PAT_MRT3847_101411C.1.pep
MYQYLPPYARTQPYSNENDCVRSAHTYEHIPFDDLGREPEHSAILYRTRCQTDTDRAHL

SEQ ID NO: 144407 - protein, 41 aa, Glycine max
  Clone ID: PAT_MRT3847_101412C.1.pep
KKTLKIYQKRQIWEQLKKIYNITTQNFIEKIFNYKNKEFHH

SEQ ID NO: 144408 - protein, 68 aa, Glycine max
  Clone ID: PAT_MRT3847_101413C.1.pep
RALMTIDNIYEHIDCDSHSDDLQSLTSLYIGQAYFYDNIFLLMETPSTKATSEAGLIHCAHHMLGVCR

SEQ ID NO: 144409 - protein, 68 aa, Glycine max
  Clone ID: PAT_MRT3847_101414C.1.pep
WPQFSIYSQNFCVHYLNVYINKCLIFPVPVDAFLALVLKIVHLVSMVKTRISSGVFFALSPYRLVCFL

SEQ ID NO: 144410 - protein, 91 aa, Glycine max
  Clone ID: PAT_MRT3847_101415C.1.pep
GSSSYTACFIYIAKSTHRSLAMGCIQPKPAPPAHLSRFNYHTLAAGRTSGRFIFHPPNCWRSQSICTSSEWLSIICQLSSKRTFILQTMEI

SEQ ID NO: 144411 - protein, 59 aa, Glycine max
  Clone ID: PAT_MRT3847_101416C.1.pep
LMNCWLEKYISFKFRGIIKEKVSNGCIDGEVSLIKSSARRNISDIKVGNREYPILFMTC

SEQ ID NO: 144412 - protein, 214 aa, Glycine max
  Clone ID: PAT_MRT3847_101417C.1.pep
MGQQSLIYSFVARGTMILAEHTDFSGNFAEVALQCLQRLPASDNKFTYNADGHTFNYLTYNGFTYCVVAVESVGRQLAMAYLERIMEDFSKRYGGGKATTATAKSLNKEFGSKLKEHMQYCVEHPEEVSKLAKVKAQVSEVQQVMRANIDQVLDRQVKIDVLVGQTEDLRNQAGVFRERGDQIRRKMWYQNMKIKLIVLAIVIAIILIIVLLVT

SEQ ID NO: 144413 - protein, 40 aa, Glycine max
  unsure (1)..(40): unsure at all Xaa locations
  Clone ID: PAT_MRT3847_101418C.1.pep
PRXXSLPPLCXSMGRILHFPADILQLLFVLVLLLLLREYK

SEQ ID NO: 144414 - protein, 60 aa, Glycine max
  Clone ID: PAT_MRT3847_101419C.1.pep
KKVLTGFNQEGIQASMPSFSPQIKPLKFPCFICKPPLMEKSHADKIGIVSPQRAKFQKFC

SEQ ID NO: 144415 - protein, 82 aa, Glycine max
  Clone ID: PAT_MRT3847_10141C.1.pep
HVISGGYNIKTGPGCLIELMKFDMGGSAAVFGAAKALGQIKPLGVEVCHLYHCSLLFILLFHIFCYLANFQSNVKSLCLVTS

SEQ ID NO: 144416 - protein, 107 aa, Glycine max
  Clone ID: PAT_MRT3847_101420C.1.pep
CEKTTEGHHEVVADLVQTSFLFSIPMDGPMSFSTQHVSVQWVLRFEFFTTPKHVDWKKYEHPLLIEGREKTEWVLPITVHAPPPRGAPASGTRSEKLFSLDPMWVHN

SEQ ID NO: 144417 - protein, 115 aa, Glycine max
  Clone ID: PAT_MRT3847_101421C.1.pep
MTQLAAHQETQLSTDHDEFLGTKQRHDDSKLPSNPEEVEDLRRDSAANPLIAFTYDELKIITENFRQDRVLGGVGFGRVYKGFISEELIRKGLPTLDVAVKVHDGDHSHQGHREW

SEQ ID NO: 144418 - protein, 389 aa, Glycine max
  unsure (1)..(389): unsure at all Xaa locations
  Clone ID: PAT_MRT3847_101422C.1.pep
SFCRSNVFELIFLPISEEASLQSLQVLLKRLKSEQNQGTKQRHDDSKLPSNPEEVEDLRRDSAANPLIAFTYDELKIITANFRQDRVLGGGGFGRFYKGFISEELMREGLPTLAVAVKVHDGDNSHQGHREWLAQVVFLGQLSHPNLVKVIGYCCEDNHRVLIYEYMSRGGLENYLFKXPPAIPPLFAFGAAKGLAFLHEAEKPVIYRDFKTSNILLDQEYNSKLPEYNAKLSDFGLAKDGPVGDKSHVSTRVMGTYGYAAPEYLATGHLYIKSDVYRFLTVRKSLDTLRRALEQNFAEWALPVLWEKKKFLNIIDPRLDGDYPIKAVHKAAMLAYHCLNRNPKARPLMRDIVDSLEPLQAHTEVPIGKTLTIISEVPESGLKMKDDAI

SEQ ID NO: 144419 - protein, 67 aa, Glycine max
  unsure (1)..(67): unsure at all Xaa locations
  Clone ID: PAT_MRT3847_101423C.1.pep
SDTKRSXNGISVXISPATLLRFNNTLNHWLDVSVWRGYISTSHRXVRCGSLSRMQHHQXSMTCDSVL

SEQ ID NO: 144420 - protein, 106 aa, Glycine max
  unsure (1)..(106): unsure at all Xaa locations
  Clone ID: PAT_MRT3847_101424C.1.pep
TSARVRKLGIRLXXVXQXXXXYARDLEVHPKDTFXXSIXGXGLXNXPYXXXHGYXVEKFNSTXXXXXVNKGNAPALPXTXKXXNKLXSLGXXIXFXSXRXLDIQXV

SEQ ID NO: 144421 - protein, 149 aa, Glycine max
  unsure (1)..(149): unsure at all Xaa locations
  Clone ID: PAT_MRT3847_101425C.1.pep
MGSSKQSAGILDTLKMQRVRTILTHTYPYPHEHSRHAVIAVVVGCLFFISSDNIHTLVEKLDNNVKWWSMYACLFGFFYFFSSPFIGKTFKPSYSNFSRWYIAWILVAAVYHLPSFQSMGVDMRMNLSLXXTIYLSSIXFFLXFHIIFS

SEQ ID NO: 144422 - protein, 77 aa, Glycine max
  unsure (1)..(77): unsure at all Xaa locations
  Clone ID: PAT_MRT3847_101426C.1.pep
PDLKFISFGTGRRGCPAIVLGSTMTVMLXARLVHAXSWSAPPNVSSVNLVKANNGVMLLEPLVLVAKPRLTPGFYYT

SEQ ID NO: 144423 - protein, 156 aa, Glycine max
  Clone ID: PAT_MRT3847_101427C.1.pep
SGGIIGRKKGAVAIRINYKGIRMVFISCHLSAHARNVEERNSQCRHISHSLFSKFCNPYSRPSHITIWLGDLNYRLQGIDTYPARSLIEQNLHRRLHGKDQLLQEAGRRQIFNGFCEGTLNYKPTYKYNKGSSNYDTSHKIRVPAWTDRILLRIEH

SEQ ID NO: 144424 - protein, 81 aa, Glycine max
  Clone ID: PAT_MRT3847_101428C.1.pep
PNSGGHHWTLRTDCICIQHLRHAGGGMLGPDLSVTLQMIHIPTWAKSSNGDQTVMYEQAHSLDRGVEATTHVGEVSTVIHM

SEQ ID NO: 144425 - protein, 50 aa, Glycine max
  Clone ID: PAT_MRT3847_101429C.1.pep
PRETKHVVNRFGHVFFGNLARSWEGNGYYPFKGGNQCKSGLKIEDAGREP

SEQ ID NO: 144426 - protein, 103 aa, Glycine max
  unsure (1)..(103): unsure at all Xaa locations
  Clone ID: PAT_MRT3847_10142C.1.pep
KKKPFVFHNPPQCPSPLSFLSQNLGCQPCTSTRTKAPAPPPAPPPTKAPGPEPTSSVPTXXPXSPSSPTKPPPTTNHPQPKPPSPIKPXXHHRHHIFYITNQK

SEQ ID NO: 144427 - protein, 97 aa, Glycine max
  Clone ID: PAT_MRT3847_101430C.1.pep
ARPGATCAPRCATAPLGGLHLFAGNFRSTGQCPPRRADGSSSLTGVRCTDAGWPLGCTHRAHAPVRCDSLSGAEGRLSWLAHSRGRHCYTPTHRGAV

SEQ ID NO: 144428 - protein, 78 aa, Glycine max
  Clone ID: PAT_MRT3847_101431C.1.pep
LKSAVEQKSLMRLKFEGLENNEEITKKEGRFFNDKLGYATHNFAYYPCYECKQPYFGGMRRCDQNAGDGHRSFNGKEL

SEQ ID NO: 144429 - protein, 247 aa, Glycine max
  unsure (1)..(247): unsure at all Xaa locations
  Clone ID: PAT_MRT3847_101432C.1.pep
KPLPQASHETIRFPLPQNHHHHHHHHHHRSVLGLGFFAQYDKVFKKIMKGGHKKPAKSDASDPVPPPYAAATVALRXAPSANAVSNHASRISSTPLTLSSGGSIEPVPLFRDAPVAERQNLFLRKLHVCCYVLDFSDTLKNVREKEIKRQALMDLVDFIQSGSGKINENCQEEMIRMISVNIFRCLPPASHENTGQEPTDPEEEEPFFDPSWPHLQLVYELLLRYIGSSDTDTKIAKRYIDHSFVLK

SEQ ID NO: 144430 - protein, 59 aa, Glycine max
  Clone ID: PAT_MRT3847_101433C.1.pep
RFPLLLLGLFLLAFVSVSFGLAFCDKEIPTHTLCLHSLFIDIDSYINPVCLALCFFFMV

SEQ ID NO: 144431 - protein, 71 aa, Glycine max
  unsure (1)..(71): unsure at all Xaa locations
  Clone ID: PAT_MRT3847_101434C.1.pep
GQCLFESPRXGHGKRGGHFQSHPAMLLFLKRCQIQDNFEPFFFAGVRDPLRRQLHRETLFVDINRAFFPNP

SEQ ID NO: 144432 - protein, 78 aa, Glycine max
  Clone ID: PAT_MRT3847_101435C.1.pep
MGDFNLSSTHAETMAGKGEGPAIGIDLGTTYSCVGVWQHDRIEIIGDHQGNRTTPGYVGLTDTERLIGDARNNQVDMN

SEQ ID NO: 144433 - protein, 50 aa, Glycine max
  Clone ID: PAT_MRT3847_101436C.1.pep
IDTLFEEDIVGSVGQESAKIERAEVRVRTRNAIVNDGTTELGMCRNEHRA

SEQ ID NO: 144434 - protein, 70 aa, Glycine max
  Clone ID: PAT_MRT3847_101437C.1.pep
FFMSFQMVALAYEGAVTPCQWSLASAPSIVLVCLFSHPHPYHVSVGEQPTAVKHALSGCPRIYVVHVIVV

SEQ ID NO: 144435 - protein, 92 aa, Glycine max
  unsure (1)..(92): unsure at all Xaa locations
  Clone ID: PAT_MRT3847_101438C.1.pep
XTXXNGTXXTSXXEXXHXQXREKRQXXXQPKXDXXXXXKXAIXXWXXTXXXXXXXXXXXXXQQXXXXAXXRXXXXXPXXVAVVXAXXWXRXV

SEQ ID NO: 144436 - protein, 60 aa, Glycine max
  Clone ID: PAT_MRT3847_101439C.1.pep
LLQRVREREKKGGILLGAVRAKLRKEGVYTYSLKTMIFDLRQCIFGIAHMRVDSLRTWVG

SEQ ID NO: 144437 - protein, 114 aa, Glycine max
  unsure (1)..(114): unsure at all Xaa locations
  Clone ID: PAT_MRT3847_10143C.1.pep
WPYKAESNAPEAGRHQEAGHKSLLQSDAXYQHLTKTSVYPXEPECLKELLEYTDSHALTVMFTYGNQGQLLNMLLKPINAKNTMEIGVYTGYLVHGTAVAVPEDGKIVSMYINR

SEQ ID NO: 144438 - protein, 34 aa, Glycine max
  Clone ID: PAT_MRT3847_101440C.1.pep
MDIHSILLKTFFSRIPISGSTSRFNLFNHLTCIP

SEQ ID NO: 144439 - protein, 115 aa, Glycine max
  Clone ID: PAT_MRT3847_101441C.1.pep
PCHHHHLLLRMLLGLSQILGLILIGCRLMIMDRVLRISVAWRTFILVGLMTLSLVSFLTSILVILVLMSLLVGLRNPSIYLVPKFCYLLWPQVLLVLFFVLFIICEISGICNTNF

SEQ ID NO: 144440 - protein, 139 aa, Glycine max
  unsure (1)..(139): unsure at all Xaa locations
  Clone ID: PAT_MRT3847_101442C.1.pep
MESYYYSGWPLAQFNSAPNSDQLSPFSVPTTTQQTLPLVATSTSDPAAAASLQFGEFPSWPAPIAAEDRAASASKSHSQAEKRRRDRXNAQLATLRKLIPMSDKMDKATLLGSVVDHVKDLKRKAMDVSKAITVPTETD

SEQ ID NO: 144441 - protein, 47 aa, Glycine max
  Clone ID: PAT_MRT3847_101443C.1.pep
MVIVVLKTVCGCNFSRNIKIFGFINYICMAIAIASPISSICMQLSTT

SEQ ID NO: 144442 - protein, 311 aa, Glycine max
  unsure (1)..(311): unsure at all Xaa locations
  Clone ID: PAT_MRT3847_101444C.1.pep
MASSTLAPTLSLSTKSHCYLPNTKHRFSCPRIKLFYSKHRSFSVSASASASTSNSLQALIFDCDGVILESEHLHRQAYNDAFVHFNVRCPSSSSPGPLNWDVQFYDELQNLIGGGKPKMRWYFKEHGWPXTSTLFETPPTNDEDRAKLIDTLQDWKTERYKEIIKSGTVKPRPGVLRLMDEARDAGKKLAVCSAATKSSVILCLENLIGIERFQGLDCFLAGDDVKEKKPSPSIYVTASKKLGISEKDCLVVEDSVIGLQAATQAGMSCVVTYTPSTAEQDFKEAIAIYPDLSNVRLKDLELLLQDVVAAK

SEQ ID NO: 144443 - protein, 101 aa, Glycine max
  Clone ID: PAT_MRT3847_101445C.1.pep
MLARMCHVDSKVPAAWERGLRYVKLMKQSIPAAVHSIVVQTPSGLARTHRFATKTVDLPAQEGERVTVAVAALSNVYRKVGPFKFSPRAPDFYPENTSRSQ

SEQ ID NO: 144444 - protein, 27 aa, Glycine max
  Clone ID: PAT_MRT3847_101446C.1.pep
VPKSYTFLISDLIPIDQICLPNDGIVP

SEQ ID NO: 144445 - protein, 42 aa, Glycine max
  Clone ID: PAT_MRT3847_101447C.1.pep
SPYCKRCDQYANTVTCNVKRSRNRRFASCTSTPRCTTLNPRS

SEQ ID NO: 144446 - protein, 52 aa, Glycine max
  Clone ID: PAT_MRT3847_101448C.1.pep
YNLWVSYQLEQPTKHGYTTIEQQLHFSNCQNNISYHPNPIIHPLPISLPHSL

SEQ ID NO: 144447 - protein, 102 aa, Glycine max
  Clone ID: PAT_MRT3847_101449C.1.pep
VHFLPTSNLPLFLLSQQLQLLPPRLSSNLKANYKINLTAKPPSIGIPEKGILPADNSTGTIGNLLASIIVKTIESNRQALRELLFIAPDVLQYLIGVILFKE

SEQ ID NO: 144448 - protein, 77 aa, Glycine max
  Clone ID: PAT_MRT3847_10144C.1.pep
KPTSHAHPTQMRDNFDILKKMLGAPSNTLTQIQPSSFHFIPKYKFKLFFLIGLKIQSAKRITWLKIMASPNFDQCFN

SEQ ID NO: 144449 - protein, 62 aa, Glycine max
  Clone ID: PAT_MRT3847_101450C.1.pep
GGEKKSRFYSWINPNIDPGGGPFFGKTNFLSKNITFLKMTAFMGNNFLPGGLNSFMLADFCY

SEQ ID NO: 144450 - protein, 67 aa, Glycine max
  Clone ID: PAT_MRT3847_101451C.1.pep
YGCEKTTEGYGCENTTEGRLFEYYTRRFTRLIRSTPIVSPQEERLLGSTLQPRLNIFFPQLLLVKRP

SEQ ID NO: 144451 - protein, 60 aa, Glycine max
  Clone ID: PAT_MRT3847_101452C.1.pep
GPKKKFNWGLWFLQAMEGTGDDFWNPEFYFFGVVKRAKCYQLFLPPGATDWLGEQNPDDF

SEQ ID NO: 144452 - protein, 94 aa, Glycine max
  Clone ID: PAT_MRT3847_101453C.1.pep
TQNIAVLDRPKEHIRTTKHILHITSCPLRWLPGPTENNLHYVNVVKNETILFVSIQLCMTTNVCSLAVINFCSQSCLHTRRLHAPRIEIIGRVN

SEQ ID NO: 144453 - protein, 163 aa, Glycine max
  unsure (1)..(163): unsure at all Xaa locations
  Clone ID: PAT_MRT3847_101454C.1.pep
MFIYLADCFASLTFETIYLGKPYIKIKQMYEMKEELGRGKFGVTNLCVEKATGRAYACKSIAKKKPQKVEDVRREVMILQHLSEQHNIVEFKGAYEDGKNMHLVMELCSGXGNYSEPEATTIIRQIVNVVHVCHFMGVMHRDLKPENFLFATKSSVMNQPKVE

SEQ ID NO: 144454 - protein, 61 aa, Glycine max
  Clone ID: PAT_MRT3847_101455C.1.pep
LVSFILSVVLFSHDCFGIFHHQIYEFNIKNPVYFAGIFYRYSVGVGLIQPSLCNIKCSGLT

SEQ ID NO: 144455 - protein, 263 aa, Glycine max
  Clone ID: PAT_MRT3847_101456C.1.pep
MSRNDSKYFSTTKKGEIPELKEELNSQYKDKRKDAVKKVIAAMTVGKDVSSLFTDVVNCMQTENLELKKLVYLYLINYAKSQPDLAILAVNTFVKDSQDPNPLIRALAVRTMGCIRVDKITEYLCDPLQRCLKDDDPYVRKTAAICVAKLYDINAELVEDRGFLDSLKDLISDNNPMVVANAVAALAEVQENSSRPIFEITSHTLSKLLTALNECTEWGQVFILDALSRYKAADAREAENIVERVTPRLQHANCAVVLSAVKM

SEQ ID NO: 144456 - protein, 147 aa, Glycine max
  Clone ID: PAT_MRT3847_101457C.1.pep
VETFNGLHKCLIYRGDKATQNRTFNGNVRIDRCNKTTGEQSACAYGSLKPSGGQWVNHCPLESKLHLAWNPWRIPAVWDFNCGNLTHTCLSYYPVLLPYWGVTSTSLCTCILYNIVGHMRDQVSSTCLLNGAKMQCMRSVHIIHELS

SEQ ID NO: 144457 - protein, 182 aa, Glycine max
  Clone ID: PAT_MRT3847_101458C.1.pep
MSRNDSKYFSTTKKGEIPELKEELNSQYKDKRKDAVKKVIAAMTVGKDVSSLFTDVVNCMQTENLELKKLVYLYLINYAKSQPDLAILAVNTFVKDSQDPNPLIRALAVRTMGCIRVDKITEYLCDPLQRCLKDDDPYVRKTAAICVAKLYDINAELVEDRGFLESPEDLISDNNPMVVANA

SEQ ID NO: 144458 - protein, 58 aa, Glycine max
  Clone ID: PAT_MRT3847_101459C.1.pep
GRSSLRFPIPIKKDWWNPQQQKYSFNRVWWTLKTKNLWKGGKCAMARTPGKCEKKNFL

SEQ ID NO: 144459 - protein, 97 aa, Glycine max
  Clone ID: PAT_MRT3847_10145C.1.pep
GTLRLENVLTFFAGVLLEKQIVVVCSNLGILSASVLSVIPLIQPYRWQSLLMPVLPNDMLEFLDAPVPYVVGIKNKTSEVQSKFTNVILVDADRNLV

SEQ ID NO: 144460 - protein, 122 aa, Glycine max
  Clone ID: PAT_MRT3847_101460C.1.pep
MSRNDSKYFSTTKKGEIPELKEELNSQYKDKRKDAVKKVIAAMTVGKDVSSLFTDVVNCMQTENLELKKLVYLYLINYAKSQPDLAILAVNTFVKDSQDPNPLIRALAVRTMGCIRVDKITE

SEQ ID NO: 144461 - protein, 100 aa, Glycine max
  Clone ID: PAT_MRT3847_101461C.1.pep
HEAGSEKLRETAVNGNRHLDIDSFPVRTDDTVKKSQTYVTINVPDPDFHNFDLDRDENSFAEDQVWAAYDDDDGMPRYYAKIHKVISMKPFKMRISWLNS

SEQ ID NO: 144462 - protein, 105 aa, Glycine max
  unsure (1)..(105): unsure at all Xaa locations
  Clone ID: PAT_MRT3847_101462C.1.pep
FLGAPLSLLGGYKLFSPPWEGWGXGRVNFGHFWXXHPGLLVPXXXXXXPGLNTPFGGVQMFWNNQQRCKVCPLLKTNFQIHVFFAAKKKKKKKKKKKKKKKKGIP

SEQ ID NO: 144463 - protein, 87 aa, Glycine max
  Clone ID: PAT_MRT3847_101463C.1.pep
DFREWEADILCHPIYDQLESAHVFCLINASPVDQLPRIDAQIKHTYCVNEKYSGLAHNGVDEEKDLDQFMTHYVLMLCAYKEQLYQY

SEQ ID NO: 144464 - protein, 120 aa, Glycine max
  Clone ID: PAT_MRT3847_101464C.1.pep
CDQTRITTSLTVFSKMFSKLHSQHSQQPQPFQFSRECQSSKEDDIPSTCDQNNETTSEIMRRPRGRPSGSKNRPKPPLIITCEPEPVMSPFILEIPGGSGVVEALARFSRRKNTGLCVLT

SEQ ID NO: 144465 - protein, 69 aa, Glycine max
  Clone ID: PAT_MRT3847_101465C.1.pep
NPISWVFNSNSIRPFPSIKICMSPQKSSADCGFTREKGLLPFFFFFQMRGKMSEKLKVSFKRKRFFSFK

SEQ ID NO: 144466 - protein, 78 aa, Glycine max
  Clone ID: PAT_MRT3847_101466C.1.pep
IARETCEFHYRSVHACSALLVHDGTDDGSSDHLRDARTLMHFTAVKDIGVGIRVPDRALIGCLRFSKALLLASIGQRY

SEQ ID NO: 144467 - protein, 321 aa, Glycine max
  Clone ID: PAT_MRT3847_101467C.1.pep
SVGSRRSVDNREGKLSVKLKAGRISRDLHPASHKLSSIEVRVEDAKDTARVQAKKSSELKNSHLLEGGVHVEQPGYCANGKRYEEKVNKDNQESEFSWQKSGKVSSLHSKEKDRKSGSHVGTDKMKISVSETGGYSKKSGKYDSAVDPSNHESGAESKNNAKYISPKSKSEIDCISQKSALRHGPNETGKQTEIKQRDFENSILKMDAQCSTDNNKPIPWQNLTQDFEGENKANLTESRVGKSKVLSSAVDEVKREALSVGSRTVPQHQKGGMSNEHHVHVSGNDDMAKSMRNYADVSNNAGVNYSSGNFAPDQQLTLLSP

SEQ ID NO: 144468 - protein, 56 aa, Glycine max
  Clone ID: PAT_MRT3847_101468C.1.pep
IWPFLENKKLLVLTAERGAGQISQKFWRGSWKVLVVFKPNGSPFFFFFTGLPIIIF

SEQ ID NO: 144469 - protein, 71 aa, Glycine max
  Clone ID: PAT_MRT3847_101469C.1.pep
EILCKVGLIPQDTALPWFRTGVFPPARTYYYWVDSYSLFEFEMALMVFAKHRRFLDWLKPGSMYKQYFLGL

SEQ ID NO: 144470 - protein, 60 aa, Glycine max
  Clone ID: PAT_MRT3847_10146C.1.pep
MQSVEHRSRGNRRRSSAWIWSGRGSFSLRTLVVLESKRLPLSDHSGVREKANSALRGARA

SEQ ID NO: 144471 - protein, 34 aa, Glycine max
  Clone ID: PAT_MRT3847_101470C.1.pep
EFKMENGRALSGLSCTTRLCLVGVMKLKKKHIVR

SEQ ID NO: 144472 - protein, 94 aa, Glycine max
  unsure (1)..(94): unsure at all Xaa locations
  Clone ID: PAT_MRT3847_101471C.1.pep
IXATSXIQQSAFXXQTALKQLNXLVXQTGGAXKGRTNMXRTVKSAPQSXWYGXDXPKXLXXFSXXIXSXLTGEFPGDYGWXXAGLSXXPEXFXR

SEQ ID NO: 144473 - protein, 158 aa, Glycine max
  unsure (1)..(158): unsure at all Xaa locations
  Clone ID: PAT_MRT3847_101472C.1.pep
MALFLLYESASGYALLEAHGLDEIGHTTEAVRNSVSDLNRFGKVVKLRSFNPFTSALDALKQCNAVSEGLLTDELRTVLETNLPKVKEGKKSKFSLGVSDPKIGSQISELTKIPCQSNEFVAELLRGERLHFDRFVRDLKSGDLEKAQLGLGHXYSRA

SEQ ID NO: 144474 - protein, 65 aa, Glycine max
  Clone ID: PAT_MRT3847_101473C.1.pep
SAPSIKSLHSTFSTYAMSRGCAGLSATVATYGQCSRWVIDLVFCKSVAISRKSPPKRVSIQVIAS

SEQ ID NO: 144475 - protein, 49 aa, Glycine max
  unsure (1)..(49): unsure at all Xaa locations
  Clone ID: PAT_MRT3847_101474C.1.pep
IACDEQLLLELIFPELRDNAHSELFKKRELFQDLXPLLWNSFCSIALLL

SEQ ID NO: 144476 - protein, 142 aa, Glycine max
  unsure (1)..(142): unsure at all Xaa locations
  Clone ID: PAT_MRT3847_101475C.1.pep
LDRPTLGGTRVLTLERNIAAPLDPAAFSDSGVQIDLANAGDEERIAKSIYSSDLDFSRDGDTFSVVDGTGGDPPPATTKPDEGDRPPYSIIEGEPERDVIIPFDIYIPKILRRRTCLTXSLESLRILLQSLELVQECVRYKL

SEQ ID NO: 144477 - protein, 87 aa, Glycine max
  Clone ID: PAT_MRT3847_101476C.1.pep
LVCGNIMDTLPYSFMHVLVLKTTPGIDRERPLPLAMATRLPGYIGLGDAPHDISRTVPDSERNPSITHAMAYSNKHHTLLLILVPVY

SEQ ID NO: 144478 - protein, 123 aa, Glycine max
  Clone ID: PAT_MRT3847_101477C.1.pep
ALLYLIMMRFRARTIVSLMVLRDSIVLMSNMPLLSTSLINSYTDLDHRGLLRITSNVVIITLRTRLLPRSVIRGRLGRLHRTGGPGSRVPARDPSPVILLFESPFYHLLTPCKHINQPKGSKP

SEQ ID NO: 144479 - protein, 139 aa, Glycine max
  Clone ID: PAT_MRT3847_101478C.1.pep
KAWLILNLVMEMNSVPGVMSEAEYEEDTFYAEIRRQILLLTSEDNEDLLETRSFNPINVTNGGSNRSAYSFNCASPSASNFSLWERHSSGSPPLWLVNLWKNGKGTGVFIPQVACRKNQRPGRMNNSRRKIYRPVVNKD

SEQ ID NO: 144480 - protein, 254 aa, Glycine max
  Clone ID: PAT_MRT3847_101479C.1.pep
ANPINDNGVSYTNVFDANFDTLVSALEKVGYGNMPILVGEVGWPTDGDKNANVGNAFRFYNGLLPRLAINKGTPLRPGFIEVYLFGLIDEDAKTIAPGNFERHWGIFGYDGKPKFPMDLSGKGQNKLLVGAQNVHYLEPNWCMFNPDAQDLSKLADNINYACTFADCTALGYGSSCNNLDANGNASYAFNMYYQTQDQNYMACNFEGLARLTTSNISTPTCNFIVQINPSLSSSLRPPIVASLFVTLLPLILFL

SEQ ID NO: 144481 - protein, 69 aa, Glycine max
  Clone ID: PAT_MRT3847_10147C.1.pep
MSSSTLSRMVHSSDSSAATTDGLYQLTSIHRGRDSVIDYNDSYLIDIITMHGVDISVSEGESPNSLLII

SEQ ID NO: 144482 - protein, 44 aa, Glycine max
  unsure (1)..(44): unsure at all Xaa locations
  Clone ID: PAT_MRT3847_101480C.1.pep
GNQSLFKGDGANILRAVAGAXVLSGYDKLQFILFGKKSCSDAGG

SEQ ID NO: 144483 - protein, 43 aa, Glycine max
  Clone ID: PAT_MRT3847_101481C.1.pep
KNGVGPSKKPFAQNCEEMQRNSCILLKYPLADHEVTNFNFIND

SEQ ID NO: 144484 - protein, 29 aa, Glycine max
  Clone ID: PAT_MRT3847_101482C.1.pep
ILYLIQNKDDLKFNLFIHDQMVDASKFLV

SEQ ID NO: 144485 - protein, 54 aa, Glycine max
  Clone ID: PAT_MRT3847_101483C.1.pep
VQRIYHRKLRLTHFLLKSKRKFRRPERAGDQPKQAICHSSINHRNKSCLCHVSM

SEQ ID NO: 144486 - protein, 58 aa, Glycine max
  Clone ID: PAT_MRT3847_101484C.1.pep
FMQTIQVKNMPKRVMGNTPKERKNPLNLTHNSLSMKKTKKTILDHRKLKTKTQREIFI

SEQ ID NO: 144487 - protein, 304 aa, Glycine max
  Clone ID: PAT_MRT3847_101485C.1.pep
MALNYNIALAFSAVLTLLLFPLPTVGELVEEQPLVLKYHNGQLLKGRITVNLIWYGTFTPIQRSIIVDFINSLSSAPNAPLPSTATWWKTTEKYKVGGGSSALVVGKQFLHSAYSLGKNLKGKDVLALASKFNELKSITVVLTAKDVAVEGFCMSRCGTHGSTRNVKNAARTAYIWVGNSETQCPGQCAWPFHQPIYGPQTPPLVAPNGDVGVDGMVINLATLLAGTVTNPFNNGYFQGPPTAPLEAVSACTGVFGSGSYPGYPGRVLVDKATGASYNAHGANGRRYLVPAMWDPQTSTCKTLV

SEQ ID NO: 144488 - protein, 114 aa, Glycine max
  Clone ID: PAT_MRT3847_101486C.1.pep
VAVSSMRNSNKKNKRENEFAHMEYMNITVITSNKPYGISDGSNPFFDGLKVPKFNLKKGGVHSGHVQQGLRDKFCFVKNGKGRCQDGYTAEVDGPDSVKVLVATKAKPNRDVRN

SEQ ID NO: 144489 - protein, 489 aa, Glycine max
  Clone ID: PAT_MRT3847_101487C.1.pep
DARSENLVESLSAQERLGSPNLSPASSHSRSLSQPSFFSLDSLPPLSPSPYKEPSFSDSISTDVSAEESLPTSHAPLPNRGHALQLGHSLPPRKGHRRSNSDSPLGIADFIQSAPQYDTCGTWSYCENNAYRGGNSGFEKPIQLVLKEPIKDMDRVDGFGGEPMVGRKEDDALDDLFSAYMNLDNIDGLNFSGMEDKDLDSRTSGSKTVESSDNEVESHANGKVTGSQGASSRCSEERREGVKRSSNGDVAPGSRHRRSFSLDSSIGNFHIGDESPKLPPSQNRFGQHSPSSSIDGKTSETSMEFGNGEFSSEELKKIKENDKLAEIAMADPKRAKRILANRLSAARSKERKMRYISELELKVQTLQTETTTLSTQFTKLQMDNSELKSENNEYKLRIQALEQQSQLKDALNETLDAEVRRLRRTVAELGGESLLSSRMAQQLAISQQVFQLQHQQHPNQLRHVQLDNSHSQEQTQTQSQCHNGKATAY

SEQ ID NO: 144490 - protein, 67 aa, Glycine max
  Clone ID: PAT_MRT3847_101488C.1.pep
SYPWACTSRTTTLLDKNCLHMNSFCLLYLLNFSFVNRSSLGIESFFSLSLAMQYPILIHITNIEYTW

SEQ ID NO: 144491 - protein, 132 aa, Glycine max
  Clone ID: PAT_MRT3847_101489C.1.pep
MATGQLFSRTTQSLFYNYKQLYIQRMLDFDFLCGLYRLYHLDFLLGGLQKMIHLTLIFVLNTNGSSNFVFLGRETPSVSGIISPGSEGFQKLFFGQEEIAIPVHATIEAACAAHPTADVFINFASFRSAAAA

SEQ ID NO: 144492 - protein, 54 aa, Glycine max
  Clone ID: PAT_MRT3847_10148C.1.pep
AEQSQRCPFIKTYKYILNIKPKPSKERASQHIKDEGINLLPVKWLHTNLIFCLS

SEQ ID NO: 144493 - protein, 132 aa, Glycine max
  Clone ID: PAT_MRT3847_101490C.1.pep
YQYLSETSMEFGNGEFSSEELKKIKENDKLAEIAMADPKRAKRILANRLSAARSKERKMRYISELELKVQTLQTETTTLSTQFTKLQMDNSELKSENNEYKLRIQALEQQSQLKDGMHMHFSSTLSISSNLL

SEQ ID NO: 144494 - protein, 50 aa, Glycine max
  Clone ID: PAT_MRT3847_101491C.1.pep
HSLKNRLGLLEMAMSNTKPPLPMFMLPPVCRSKLICKLPGDNVNKSEAHI

SEQ ID NO: 144495 - protein, 38 aa, Glycine max
  Clone ID: PAT_MRT3847_101492C.1.pep
MTYECARGGSVAKDEVSWDAGRGFAVEGVEVAAPQAGE

SEQ ID NO: 144496 - protein, 41 aa, Glycine max
  Clone ID: PAT_MRT3847_101493C.1.pep
DQCVIVLVGIIVWYGIHFALHKPIKKKFHSISKKKRKAAHS

SEQ ID NO: 144497 - protein, 84 aa, Glycine max
  Clone ID: PAT_MRT3847_101494C.1.pep
KPRHLFTVIAGIVLDTNTRFFSTNLKTFASEWTKAIKYAQMLSWSWMLTMNHFSTTSILWFLHITQLSFCISNVIILWLLFAVA

SEQ ID NO: 144498 - protein, 136 aa, Glycine max
  unsure (1)..(136): unsure at all Xaa locations
  Clone ID: PAT_MRT3847_101495C.1.pep
ASSYTSSTITAITISTPSSQKNGSLLKSTKASFLSKEKLKRNSFTAPVKAQSSTTVYSVTKPNKPLVFPVSTPPPXLDNSLPRDCNCNPLSLKSNPKSLRXNVQAELIHYRXTMLETAGIFIPEFLTYINILNTPS

SEQ ID NO: 144499 - protein, 103 aa, Glycine max
  unsure (1)..(103): unsure at all Xaa locations
  Clone ID: PAT_MRT3847_101496C.1.pep
VYYSTYGHVEKLAREIEKGAVSVEGVEAKLWQVPETLPEDVLAHVGAPAESDVSMITRNELPEADGVVVAYPTRLGSMAAQFIALIDATAGRLRTQALAXKVA

SEQ ID NO: 144500 - protein, 103 aa, Glycine max
  Clone ID: PAT_MRT3847_101497C.1.pep
GRVRLLGTKTKEAIPEEAFLLKALLGKTGFLPFFPSLSFQSSIPENERVHFNPHRSCRYSGRERLLGVSVGNSVTFSMMGTFLDVLMLRDSKTRIMFTTVKLG

SEQ ID NO: 144501 - protein, 48 aa, Glycine max
  Clone ID: PAT_MRT3847_101498C.1.pep
YNLNTVYPFRFTRKAFNEFQLNPPIPCLLLGLAAPPFSLQLTILTLGG

SEQ ID NO: 144502 - protein, 116 aa, Glycine max
  unsure (1)..(116): unsure at all Xaa locations
  Clone ID: PAT_MRT3847_101499C.1.pep
QKLLNFVITIIKKNCVRGYQVGVRPYSMQCNRWANRXLIKFNHILCXHYSNFYCFFTXQXMSKXAKMINTLCGGDTKFMRERTHPLFSCXSRIVISKKDVRRVEFLIPSKFPFTDI

SEQ ID NO: 144503 - protein, 68 aa, Glycine max
  Clone ID: PAT_MRT3847_10149C.1.pep
NSKVFFSGLFPSFFFFFWFSFIHFSHLSFDSIHFIHLRSLYYSSCMTKPGQFLSSLKHKDHHNIIFSQ

SEQ ID NO: 144504 - protein, 89 aa, Glycine max
  Clone ID: PAT_MRT3847_1014C.1.pep
GVVAGISYAINRGYQSWGPLFGKLFFAFWVIIHLYPFLKGLMGRQNRTPTIVGVWSILLASIFSLLWVRIDPFTTRVTGPDVEQCGINC

SEQ ID NO: 144505 - protein, 88 aa, Glycine max
  unsure (1)..(88): unsure at all Xaa locations
  Clone ID: PAT_MRT3847_101500C.1.pep
TXPPRFIIKSAPAXITILYLIPXLXIQLLXTKXSPNTXKHFFLFIXQXIIFNLNTTHSLIKSTLTPNLISLSKKPTXXLHLFXSSTIS

SEQ ID NO: 144506 - protein, 41 aa, Glycine max
  Clone ID: PAT_MRT3847_101501C.1.pep
SSKVKNNCRVHPFLEEVTIKADTSRMVLNTMMCFFGAASLF

SEQ ID NO: 144507 - protein, 90 aa, Glycine max
  unsure (1)..(90): unsure at all Xaa locations
  Clone ID: PAT_MRT3847_101502C.1.pep
MMRARFPLLLLGVVFLASKPVSFGIAYWEKHNPSHKKCLRSCSSERDFYRNLACLAGCNLLNAEEEKNXDQGQIXRPRPLHPAREPQRHG

SEQ ID NO: 144508 - protein, 77 aa, Glycine max
  unsure (1)..(77): unsure at all Xaa locations
  Clone ID: PAT_MRT3847_101503C.1.pep
AKLIKFFELNTGAKIPSVGLGTWQAEPGVVTKAVTPAILVGYRHIDCAQTXYNQAQIGSALNKLCDDGVVKRDDLWM

SEQ ID NO: 144509 - protein, 82 aa, Glycine max
  Clone ID: PAT_MRT3847_101504C.1.pep
MPGQQTRQWVLANPPVNDPVIEGKDATFELKTVDLPSPSADQVLIKILYLSNDPPQRGWIQKDMDPERLYVPPVNEGDIMRS

SEQ ID NO: 144510 - protein, 107 aa, Glycine max
  unsure (1)..(107): unsure at all Xaa locations
  Clone ID: PAT_MRT3847_101505C.1.pep
TLKNYNTLSALGFKIVXFLSGRYLDKMDGTEAHLKKAVFHTWQHIILKXPHVITPNALLYKSALRENLLKNIYRNGGIIADQWIDLLEDHRGXSRTFKLPNPMYYIE

SEQ ID NO: 144511 - protein, 67 aa, Glycine max
  Clone ID: PAT_MRT3847_101506C.1.pep
DASSESGSSYQTLTRPLRDQTKGGATNLGPANHLHKRDTTKATPPQQKQPNRAEGATPRSPHSQQPE

SEQ ID NO: 144512 - protein, 215 aa, Glycine max
  Clone ID: PAT_MRT3847_101507C.1.pep
MLSSSSASFLRQLSAKKEGWKERYYNSGSGGWGMSFGGCEASVKLMEGFNMQGNVGRKRVMVVVDDTSHSKHAMLWALTHVANKGDSLTLLHVVPPHRGPESSCSTYLVNYLGSLCKDCKPGVEVEALLIQGPKLATVMSQVKKLEVSVLVLGQKKPSSLLSCLCGSSGSSSTEEFVEHCINKAECLTIGVRKRSQGTNGYLVSTRWQKNFWLLA

SEQ ID NO: 144513 - protein, 51 aa, Glycine max
  Clone ID: PAT_MRT3847_101508C.1.pep
FLLREGALGPKNLFFFFEWVFCNANWLMLVKSQLFAPQVSDAPKNIVQEHF

SEQ ID NO: 144514 - protein, 56 aa, Glycine max
  Clone ID: PAT_MRT3847_101509C.1.pep
KEKTKVKTNFLPTMPIHTIPHQKTDHHFSETHKNMLIRWPPQSSKHDEDQILCCRF

SEQ ID NO: 144515 - protein, 151 aa, Glycine max
  Clone ID: PAT_MRT3847_10150C.1.pep
VPITETPGPPGPSTETPGPSGPSTETPGPPGPTTETPGPSTDTPGPPGPSTETPGPPGPSTATPGPPGPSTETPGPPGPSTETPGPPGPSTATPGPPGPSTETPGPPGPSTETPGPPEPSTETPGPPGPSTETPGPPGPSSETPGPSGPST

SEQ ID NO: 144516 - protein, 102 aa, Glycine max
  Clone ID: PAT_MRT3847_101510C.1.pep
QALYQIAILLTLQFKGESIFGVTSGVNDTLIGNTFVLCQVFNEFNARKMEKKNVFKSIHKNQVVLSLNGLTNILQGGIGEVLKKFGYPKKVNWGPLGILIGL

SEQ ID NO: 144517 - protein, 46 aa, Glycine max
  Clone ID: PAT_MRT3847_101511C.1.pep
LIVLHVLEYLLRNKLFWLRELGCCTRENISYTADNRTSFKSYVLYF

SEQ ID NO: 144518 - protein, 91 aa, Glycine max
  unsure (1)..(91): unsure at all Xaa locations
  Clone ID: PAT_MRT3847_101512C.1.pep
TSRTRVHVPQHRGSLAAYTLNDQHHPRSDTNTPFAPPAAYKLKCGPPPYKYSFPTPPTKKGYMYPSPPPAVYXYKLPPPPVYKARSRPPPP

SEQ ID NO: 144519 - protein, 109 aa, Glycine max
  Clone ID: PAT_MRT3847_101513C.1.pep
KASHILLDNNFHAQVPYFRLSLHAPYGCVYYLSTILMGTFAYVSPQYAMTGHLLDISDVYAYGVALLDLVTGWQPLYMSHPSGRDILGPCARPVLIYQHHLEQLAVSML

SEQ ID NO: 144520 - protein, 57 aa, Glycine max
  Clone ID: PAT_MRT3847_101514C.1.pep
FFNEIVRHEPFINQPNYSAFISSYVIESLNSISILKFMYGHKMFSLCKRQFLTLFYH

SEQ ID NO: 144521 - protein, 58 aa, Glycine max
  Clone ID: PAT_MRT3847_101515C.1.pep
GKTIHSLRVRFRLMEVLADRSLRNVTLMLRGPPWHQPVSRRSMRPPPYRACEPVRVRR

SEQ ID NO: 144522 - protein, 138 aa, Glycine max
  Clone ID: PAT_MRT3847_101516C.1.pep
MAAPTPIHKTEEEWKVILSPEQFRILRQKGTELKGTGEYNKFFEEGIYNCAGCGTPLYKSSTKFDSGCGWPAFFEGFPGAINRTPDPDGRRTEITCAACGGHLGHVFKGEGFKTPTDERHCVNSISVKFVPGNASSSI

SEQ ID NO: 144523 - protein, 52 aa, Glycine max
  unsure (1)..(52): unsure at all Xaa locations
  Clone ID: PAT_MRT3847_101517C.1.pep
GSSGFINFSTSSQKLLLRFSYXNSDKASYIIVQIHSFSLFXFSFKFFFKFLN

SEQ ID NO: 144524 - protein, 189 aa, Glycine max
  Clone ID: PAT_MRT3847_101518C.1.pep
MAKKSVKYYVVDAFTDSAFKGNPAAVCFLEEERDEEWLQAVATEFNVPVTCYLTRIAESHHNLNSFRGTSNIPRFHLRWFTHTNEVKLCGHATLAAAHTLFSYGLVNFNIIEFFTASGVLTTKKIPPINNCTSGSNLQNGVARDGFYIELDLPAHPIIEFNCDESSQISGALNGASICDIKRTLIGDDI

SEQ ID NO: 144525 - protein, 53 aa, Glycine max
  Clone ID: PAT_MRT3847_101519C.1.pep
QRRNIVYIMVQVDPFSCVSATLISLILARRSSEFSISRSSVKTCSTVCPCNCQ

SEQ ID NO: 144526 - protein, 56 aa, Glycine max
  unsure (1)..(56): unsure at all Xaa locations
  Clone ID: PAT_MRT3847_10151C.1.pep
LEPLEPLQPLAXLEPLLLFPTSLTKEYNTQNSSIFILFFLKHKARIVSRPRRWVFP

SEQ ID NO: 144527 - protein, 88 aa, Glycine max
  Clone ID: PAT_MRT3847_101520C.1.pep
ASKRILKELMDLRNDPPTSCSAGPVAEDMFHWQATIMGPADRTYAGGVFLVTIHSPTDYPFIPTKVDFMTKVCHPNIISDARICLIFL

SEQ ID NO: 144528 - protein, 53 aa, Glycine max
  Clone ID: PAT_MRT3847_101521C.1.pep
RSSKNDGWRVIYVPILCSSCTAHSLLCPLAEDGLGPPTRRPYSFPLLSSSRSR

SEQ ID NO: 144529 - protein, 233 aa, Glycine max
  Clone ID: PAT_MRT3847_101522C.1.pep
MALETLNSPTTTAPSFPFDDPTIPWAKRKRSKRCSRDHPSEEEYLALCLIMLARGGTTRRVSTPPPQPTPDPSTKLSYKCSVCNKSFPSYQALGGHKASHRKLAASGGEDQPTTTSSAASSANTASGGRTHECSICHKSFPTGQALGGHKRCHYEGNSNGNNNNSNSSVTAASEGVGSTHTVSHGHHRDFDLNIPAFPDFSTKVGEDEVESPHPVMKKPRPFVIPKIEIPQYQ

SEQ ID NO: 144530 - protein, 57 aa, Glycine max
  Clone ID: PAT_MRT3847_101523C.1.pep
KWYPKMGPGLLYEKPPQNFQIVFPEIIGWIDQKSRYGKTRLEKELKKNPGHLFKSDL

SEQ ID NO: 144531 - protein, 82 aa, Glycine max
  Clone ID: PAT_MRT3847_101524C.1.pep
AAGALDLVTVLDVNNSMSGAQFHMLKRAMRLVISSLGPADRLAVVASSANTKRLLPLRRMTAQGQRAARRVVDRLVCDHGNS

SEQ ID NO: 144532 - protein, 153 aa, Glycine max
  Clone ID: PAT_MRT3847_101525C.1.pep
MDTLSRIRFPPTCYSLQLPKISALSRFPNAFSKTTHQVSVLRVRASRPSVSNADEDVLQIFFKERELNGDFISRASDLLWRRDFRSSGDYDISELTNNTSQQTEQIIETDNDAGFLKLTRTQEWLTGDNSLLESLWRSKQEFSPSHLLNFSTS

SEQ ID NO: 144533 - protein, 268 aa, Glycine max
  unsure (1)..(268): unsure at all Xaa locations
  Clone ID: PAT_MRT3847_101526C.1.pep
RSGAPGRPTRPVLGRLRHCNVVPLRAYYFAKDEKLLVSDYMPNGSLSWLLHXGNRGPGRTPLDWTTRVKLAAGAARGIAFIHNSDKLTHGNIKSTNVLVDVVGNACVSDFGLSSIFAGPTCARSNGYLAPEASLDGRKQTHMSDVYSFGVLLMEILTGKCPSAAAEALELPRWVRSVVREEWTAEVFDLELMRYKDIEEEMVALLQIAMACTVAAPDQRPRMSHVAKMIEDLSGIHVSPSHDALDLVSESPSVPEDACTGGGGASASQ

SEQ ID NO: 144534 - protein, 66 aa, Glycine max
  Clone ID: PAT_MRT3847_101527C.1.pep
MFAACRYFAGVPYREKMKLKSKKGWKSIVPLRLKGKSATHFLLFRKVNCVGYGPGKTPVYLNVCDM

SEQ ID NO: 144535 - protein, 159 aa, Glycine max
  Clone ID: PAT_MRT3847_101528C.1.pep
LTRYVMNYISLISDYKVTLNELIVSKPSTGSRYSGDPGIPDMDLSEFEEKTPLDVHLIWIIVILQFNLDGKSKHYRDASLAHLFVMNNVHYIVQKVRGSPELREMIGDDYLKKLTGKFRQAATSYQRATWVRVLYCLRDEGLHVSGGFSSGVSKSALRE

SEQ ID NO: 144536 - protein, 36 aa, Glycine max
  Clone ID: PAT_MRT3847_101529C.1.pep
WSRKEEREITTFFIAREIGVAAPHRCPRGVRLAPNS

SEQ ID NO: 144537 - protein, 73 aa, Glycine max
  Clone ID: PAT_MRT3847_10152C.1.pep
FCGRLHTCTYELTSSLPNIVFIHDLTFVALPVLNLIKVFLFLSNEASFKNLLCHVVCTLKCPVLLGVDLCCQH

SEQ ID NO: 144538 - protein, 74 aa, Glycine max
  Clone ID: PAT_MRT3847_101530C.1.pep
MLAMMNHTKSYENGEESFEELQQLFEDMLQADIRLDGSPTLASTDSSTSSAYMTYTDKARSNKRNSTEMNIGKA

SEQ ID NO: 144539 - protein, 213 aa, Glycine max
  Clone ID: PAT_MRT3847_101531C.1.pep
MSLRPNARTEVRRNRYKVAVDADEGRRRREDNMVEIRKSKREESLLKKRREGLQAQQQFPAPLQNSTVDKKLESLPAMVAGVWSDDNSIQLEATTQFRKLLSIERSPPIEEVIQAGVVPRFVEFLVREDFPQLQFEAAWALTNIASGTSENTKVVIDHGAVPIFVKLLSSPSDDVREQAVWALGNGAGDSPRCRDLVLSQGALAPLVAPVNEH

SEQ ID NO: 144540 - protein, 83 aa, Glycine max
  Clone ID: PAT_MRT3847_101532C.1.pep
LSTPIGYRKSHKRMVSNHMCFLQLFLLFWPNNPKNPYHSTKLDHHLCTHFDYEYTTTLHFCLHHVFQETRLLLSRVNLSVKKM

SEQ ID NO: 144541 - protein, 157 aa, Glycine max
  unsure (1)..(157): unsure at all Xaa locations
  Clone ID: PAT_MRT3847_101533C.1.pep
EHAHAGKEVSLLRLIGETHPSLSYRIYLPAFSFVEMNEATIDFHPSXKIGEGMYGIAYDGLLPCMHAAIXCHPLMADIVYYXFLHQVSGLSKDIHPCLLSLMAICTHSRSLVYAYINDGFLDIHLAHKEINPLPWLIQISIATDVCSALIFPHSSEA

SEQ ID NO: 144542 - protein, 70 aa, Glycine max
  Clone ID: PAT_MRT3847_101534C.1.pep
PNKVMWQGNLTSQFPFNWPQLSLCKSGYTRKFFDHLVRRGFICTFREIISFLLKQGKLFKGGEKIEASLC

SEQ ID NO: 144543 - protein, 84 aa, Glycine max
  unsure (1)..(84): unsure at all Xaa locations
  Clone ID: PAT_MRT3847_101535C.1.pep
GKDTVCIIEAKAVQVLKGMDQDLNLHLEKVLKSGDIXGFHAECLRHTLIGKDKWAFIDMSARPLXWRPANCGQRVRTESSLPTV

SEQ ID NO: 144544 - protein, 204 aa, Glycine max
  Clone ID: PAT_MRT3847_101536C.1.pep
LEPGTSVGSPEVHLSARLQVTGEAEYTDDTPMPPNGLHAAFVLSKKPHARINRIDDSGAISLPGFVSLFLAKDVPSDNKIGPVVADEDLFAVDYVTCVGQVIGVVVADTHENAKIAARKVIVEYEELPAILSIRDAINARSFHPNTEKCLSKGDVDHCFQSGQCDRIIEREVHMGRQEHFYLEPHSTLIWTVDGGNEVHMISSS

SEQ ID NO: 144545 - protein, 80 aa, Glycine max
  unsure (1)..(80): unsure at all Xaa locations
  Clone ID: PAT_MRT3847_101537C.1.pep
TIFTCRDLDLLGGYYSITTXLKKFFRHSFRXRSDPLVNYIFPTFXMVQLHLRGILRIFLFSGYFYNGDTKSGLKTKKNFV

SEQ ID NO: 144546 - protein, 81 aa, Glycine max
  Clone ID: PAT_MRT3847_101538C.1.pep
GSRILGPILGFITDKGGSVKSDSQPGISGFGSLGPGLPPRDNHQDAVSWGNRFRKDLLPDPKVNGRLREKINPVIRQNNVN

SEQ ID NO: 144547 - protein, 321 aa, Glycine max
  Clone ID: PAT_MRT3847_101539C.1.pep
MMMMMSRSGANRVANTAMFVAKGLSGEVGGLRALYGGGVRSESTLALSEKEKIEKKVGLSSAGGNKEEKVIVSYWGIQPSKITKKDGTEWKWNCFRPWETYKADLSIDLEKHHAPTTFLDKMAFWTVKVLRYPTDVFFQRRYGCRAMMLETVAAVPGMVAGMLLHCKSLRRFEHSGGWIKALLEEAENERMHLMTFMEVAKPKWYERALVITVQGVFFNAYFLGYLLSPKFAHRMVGYLEEEAIHSYTEFLKELDKGNIENVPAPAIAIDYWQLPPGSTLRDVVMVVRADEAHHRDVNHFASDIHYQGRELREAAAPIGYH

SEQ ID NO: 144548 - protein, 121 aa, Glycine max
  unsure (1)..(121): unsure at all Xaa locations
  Clone ID: PAT_MRT3847_10153C.1.pep
FGEIQEKGALKLSQDEFLTARSTQVRTATTVWADGSPYLYAGCHDMLWSTIPCDSVIXGVKLTTINNMRAYGLNTGIXRSRLQGAISNSISQHTARNXTGSARTPLNFDSSKQSLSQNCID

SEQ ID NO: 144549 - protein, 130 aa, Glycine max
  Clone ID: PAT_MRT3847_101540C.1.pep
MCPHTLAPEYLKGVSCKIRSRDFTRQAFRILWINTMISMSDQNTMHDSSPEPLVKSLSLLILNYQHHYNRGTWTHSTTSIWIDHKYKERYRHKHFAKSIHELGPSYCRRCTPSYRLMPADHPTATDCHRY

SEQ ID NO: 144550 - protein, 64 aa, Glycine max
  unsure (1)..(64): unsure at all Xaa locations
  Clone ID: PAT_MRT3847_101541C.1.pep
KIPTTPFPTGQARDATGVAVLKRKMQSTDETMEPMAINCXASSYGNETYVNVECEAASMYDLQN

SEQ ID NO: 144551 - protein, 158 aa, Glycine max
  unsure (1)..(158): unsure at all Xaa locations
  Clone ID: PAT_MRT3847_101542C.1.pep
VIAQLQEYIVAYLLMALVDAYTVPAIKLFFPVAKAHTLVLEIMITLGLVYTVYAAAIDPKKCNLEIICSPRHVVSVAVANHFVGRGFXASAMNPDDTFGHDVIKSPCHSLWMNCLGPLTGGEVSDLHLQLVFITHYHETDSPRSLYRSPIALKKEWNG

SEQ ID NO: 144552 - protein, 84 aa, Glycine max
  unsure (1)..(84): unsure at all Xaa locations
  Clone ID: PAT_MRT3847_101543C.1.pep
XXSSKVSXRPAXSLYLHDXCXXILLLXPQXQFQNVXYQHMNSVTHSNWRGRRAEGRRVXRGXXPXLVRLARYXCVGKLGTXLXT

SEQ ID NO: 144553 - protein, 110 aa, Glycine max
  Clone ID: PAT_MRT3847_101544C.1.pep
ELTIFLFSFFCHSLSIRFLNQLAILICAPQDAMSLVTPEYLTEILEKGTFLNTVGNRIFYSALPLLLWIFGPVLVFLCSIAMLPVFYNLDFVCGRVKAKMVVINDKSDFA

SEQ ID NO: 144554 - protein, 465 aa, Glycine max
  Clone ID: PAT_MRT3847_101545C.1.pep
MGTETPTSGNPIASGGEKVAFPAAEIDKRTAEQKAIDDWLPITSSRNAKWWYSAFHNVTAMVGAGVLSLPSAMASLGWGPGVVILVLSWIITLYTLWQMVEMHEMVPGKRFDRYHELGQHAFGEKLGLWIVVPQQLICEVGVDIVYMVTGGKSLQKIHDLVCQHRKDCKNIKTTYFIMIFASVHFVLSHLPNFNAIFGSSLAAAIMSLSYSTIAWVASVDKRVHNHVDVAVEYGYKASTSAGNVFNFFNALGDVAFAYAGHNVVLEIQATIPSSPEKPSKGPMWRGVLIAYLVVALCYFPVALIGYWVFGNSVDDNILITLNKPTWLIVTANMFVVIHVIGSYQLYAMPVFDMIETVMVKQLRFKPTWQLRFVVRNVYVAFTMFVGITFPFFGALLGFFGGFAFAPTTYFLPCIIWLAIYKPKKFSLSWITNWICIIFGLLLMILSPIGGLRSIILNAKNYGFYQ

SEQ ID NO: 144555 - protein, 76 aa, Glycine max
  Clone ID: PAT_MRT3847_101546C.1.pep
SMCFAISSRTDSIITILLLKQMNHWMHKEHTSVTIHIPIMTVELTTILETTPQQLPACLVYTSEEDANMLVHLLGP

SEQ ID NO: 144556 - protein, 104 aa, Glycine max
  Clone ID: PAT_MRT3847_101547C.1.pep
NSRGGNWGGNLKGNNFSQGKPQAPLFSQPKNRPFKGKGGGPQEPGAKKITGAASPNGGAPPPIGCVCTMCRFYFLIVFFGLLLFGAPAFFFFFFFFFFFFFFFS

SEQ ID NO: 144557 - protein, 101 aa, Glycine max
  Clone ID: PAT_MRT3847_101548C.1.pep
NSLSSSTRLPPNACIRIFIIIITPLLFPGSPAQSDGAQTQVLEMKLSAPLTLLQHNIYSIFFQTPTKRISQLMLSETLPEIQRDLRRGMEAEAVAADDDGG

SEQ ID NO: 144558 - protein, 86 aa, Glycine max
  Clone ID: PAT_MRT3847_101549C.1.pep
IPKMQPCSPEIKTFAMKLGTQKTPKITTSCITFTGLNQQKQKSSNDFHWFKSSWEKHPMLGTKHSFLTGAFSKIHCHKAFGRTTLF

SEQ ID NO: 144559 - protein, 517 aa, Glycine max
  Clone ID: PAT_MRT3847_10154C.1.pep
MNIMSSSRSRSSWCGLWPGSFNMETELTIRGKSFGGIFGSSAKPRSLRVQPSDEDVEDLLPSNISGKPSGTVLPYVGVACLGAMLFGYHLGVVNGSLEYLAKDLGITQNTVIQGWIVSALLAGATVGSFTGGALADKFGRTRTFQLDAIPLAIGGFLCATAQSVQTMIIGRLLAGIGIGVTSAIVPLYISEISPTEIRGALGSVNQLFICIGILAALLAGLPLVGNPIWWRTMFGITVVPSVLLALGMTISPESPRWLFQQGKISEAEKAVKTLYGKERVALVMHDLTAASEGSSEPEAGWFDLFSSRYRKVVSVGATLFLLQQLAGINAVVYYSTSVFRSAGITSDVAASALVGASNVFGTIVAWRLIRDRLPTKSNLRRRQIDISDSLCPFCSIKDETASHLFFECSKIQHLWWESQSWIGTSGAYPINPRHHFLQHNIGMKGGKIYKRWKCWWVALNWSIWQQRNKVIFMNAPFNGSKLLEDALFVAWTWFRAMEENFTIHFNFWSSNLPAGFQ

SEQ ID NO: 144560 - protein, 59 aa, Glycine max
  Clone ID: PAT_MRT3847_101550C.1.pep
PFIKQKVGIALISNLEATSQIEPHNTRIKRIMNTSDDAQQLCIRICLLKPIKEDKKIYY

SEQ ID NO: 144561 - protein, 55 aa, Glycine max
  unsure (1)..(55): unsure at all Xaa locations
  Clone ID: PAT_MRT3847_101551C.1.pep
AGEPGLGHVAWKERVVGWKMKPXKNVAPMSTGQAAFERGAGDIDARTDVPVDDSL

SEQ ID NO: 144562 - protein, 299 aa, Glycine max
  Clone ID: PAT_MRT3847_101552C.1.pep
GDDGNISSHITERFIKVLLTIIEASDDAEAMVTAMGIISKLPQESHMTQWLLDSGALKTILTCLTDQHKHVSHKKQVIENSVQALCRFTVSTNLEWQKRVALEGIIPVLVQLLHSGTPFTKQNAAISIKQFSESSYRLSEPIKKPSIFKCCLVAKETGCPAHLGTCSVESSFCILQANALEPLVRMLADQDDGTREASLNALLTLVDSEAPQSGSKVLANSNAIAPMIQLSSVPIPPSRPRILIALERIFQLDDVRNKYKVVATMHLVEITQGKDSRMRSLAAKCLAQLGELNKQSSYF

SEQ ID NO: 144563 - protein, 73 aa, Glycine max
  Clone ID: PAT_MRT3847_101553C.1.pep
RKIIIDTYGGWGAHGGGAFSGKDPTKVDTSGGWGVRQAANSTLARAFARTCTVPVSYPIHLPEPLSVFVDHYS

SEQ ID NO: 144564 - protein, 146 aa, Glycine max
  Clone ID: PAT_MRT3847_101554C.1.pep
MVLGGGMAAAAVGGDDAVVMQLGAAEGEETVVTVNCPDQTGLGCDLCRTILEFGLRITRADVSTDGHWCFVVFWVVPRSSSIKVRWASLKNRLMSMCPSSYSIPFFYRDVSQPEPGPLQFYLLKLMSPDRKGLLHDVTHILSDLEL

SEQ ID NO: 144565 - protein, 328 aa, Glycine max
  Clone ID: PAT_MRT3847_101555C.1.pep
MAASSSIISISSASLFTPKIQCLPKHNKDHDHVPIPSSSSFTTHASLKISRPTTTFGITTTTTRLNFPPRRLSCSASASSSSTLPSALLFDCDGVLVDTEKDGHRISFNQTFQERELGVTWDVDLYGELLKIGGGKERMTAYFNKVGWPANAPTGEQERKEFIASLHKQKTELFMALIEKKLLPLRPGVAKIIDQAFAQGVQVAVCSTSNEKAVSAIVSFLLGPERAEKIKIFAGDVVPRKKPDPAIYLLAASTLNVEPSRCVVVEDSAIGLAAAKAAGMTCIVTKSGYTADEDFLNADAVFDCIGDPPEERFDLAFCGSLLEKQYVS

SEQ ID NO: 144566 - protein, 290 aa, Glycine max
  Clone ID: PAT_MRT3847_101556C.1.pep
SWSISVFEQVKWIRVLYADFTAFIRDQEKLIFAEKAFDYVEGFVIINRTGLLNNWSSSFNPQDPVQASEFKSDGRTLFCLELAKYYNLEETLLVNQEVEKHLSRLNYIPSTLFLTEVTYVDFLDRVHTSEVKLRSKGLWDVPHPWLNLFIPKTKIHHFAEVVFGNIVTETSNGPVLIYPVNKSKWDNRTSVVIPEEDIFYLVAFLTSAVPSSNGTDGLEHILSQNKRILEFCERAQLGVKQYLPHYNTQQEWRAHFGPQWETFLLRKSVYDPLAILAPGQRIFQKAITFS

SEQ ID NO: 144567 - protein, 324 aa, Glycine max
  Clone ID: PAT_MRT3847_101557C.1.pep
GTGEVLNCSAENNGDLFHGVLGGLGQFGIITRARIVLEPAPTMVKWIRVLYSDFTAFTRDQERLISAEKTFDYIEGFVIINRTGLLNNWRLSFNPRDPVQASHFKSDGRTLFCLEMAKYLNVEEIDAANQEVEEHLSRLSYIPSTLFSTEVTFVDFLDRVHISEVKLRSKGLWDVPHPWLNLLIPKSQILNFAQVVFGNILSETSNGPVLIYPVNKSKWDNRTSVVIPEEDIFYLVAFLTSAVPSSNGTDGLEHILSQNKRILEFCERAQLGVKQYLPHYNTQQEWRAHFGPQWETFLLRKSVYDPLAILAPGQRIFQKAITFS

SEQ ID NO: 144568 - protein, 53 aa, Glycine max
  Clone ID: PAT_MRT3847_101558C.1.pep
ILYIFLYEFNFLYLVYILIEKYEKISYILLLIRNNCTKNRQCNIKFISRTTLI

SEQ ID NO: 144569 - protein, 84 aa, Glycine max
  unsure (1)..(84): unsure at all Xaa locations
  Clone ID: PAT_MRT3847_101559C.1.pep
KIXXXEPXTXXCYXNVLCLXWVWNXIDSKXLTPCSDXCRSSHXSFPQPGIPLSFKCSALHIXXXXHXXKSHXARXXAXHSXKXX

SEQ ID NO: 144570 - protein, 74 aa, Glycine max
  Clone ID: PAT_MRT3847_10155C.1.pep
VSGQPGKKEFEARALNWVPAGVSQSRRYKSTASGFPLRPIKKQVFVFLQGLEPPIFRGDSFPPLKSEKKEGFFK

SEQ ID NO: 144571 - protein, 74 aa, Glycine max
  Clone ID: PAT_MRT3847_101560C.1.pep
THDPLDCGNCKTLLQSIKQKPKNVCQSDLQTWATKYLKGLTPGYNRGPIGCETRGTTNYTAQTRRTAFASSLPE

SEQ ID NO: 144572 - protein, 84 aa, Glycine max
  unsure (1)..(84): unsure at all Xaa locations
  Clone ID: PAT_MRT3847_101561C.1.pep
PSPFWLRHCSVGRSVRAPSLLRPLAYRALCCQSRALGPARVLPVAPPCSXRHASSLPRHFPPAVPSLLRAFQSAPAERPPYSPP

SEQ ID NO: 144573 - protein, 62 aa, Glycine max
  Clone ID: PAT_MRT3847_101562C.1.pep
MAARAPIPREEFVYMANCPEQAERYEEMVEFMEKVSASAESEELPVEERNFFSVAKKNVLGA

SEQ ID NO: 144574 - protein, 375 aa, Glycine max
  Clone ID: PAT_MRT3847_101563C.1.pep
KPPIFISFNLSESETFVIVTMDSSCVPNGDVSGFKDKESMVDPFLVEALENPRHRVTILRMELDIQRFLSNADYQHFEFQHFPSSYLRLAAHRVAQHYGMQTMVQDNGLDGQGTRIMVRKMAESRYPMVRLSEIPAKQLENDKPEKIKIAIRPRPNKISLNEANEAGRKSNPPRSVEERKVEYDRARARIFSSSRSCDSDDTLSQTSTDEKNSLINKDENETSKTPVVYSEQCSIGRDINSTRVAILRDREKDRSDPDYDRNYERYARSIPTSSVNLMPFNLQQVRHPFVQYDNAFNQLSQMSQNQASLGYGPQPSPMMNPFGVTGLNQVPRDAAYVQWPSAAVMYAHSYDQFRQAVFQAPFGQRPLSFDYSQNY

SEQ ID NO: 144575 - protein, 94 aa, Glycine max
  Clone ID: PAT_MRT3847_101564C.1.pep
RDIDKINIFRGMFDSRIFLAIIFATVAFQVVIVEFLGTFASTVPLNWQFWLLSVVIGAVSMPIAAILKCIPVERDTSKQHHDGYEALPSGPELA

SEQ ID NO: 144576 - protein, 84 aa, Glycine max
  Clone ID: PAT_MRT3847_101565C.1.pep
MASFPPLGSLTLCEVNRDLITVDALSDDRANQTYGKILSRPVSQSGERRFRSRWCNDDGDNRRRKRSEEKPGGTLAGFMNSYLG

SEQ ID NO: 144577 - protein, 364 aa, Glycine max
  Clone ID: PAT_MRT3847_101566C.1.pep
GITIRMVTGDNINTAKAIAKECGLLTEGGLAIEGPDFRDLSPEQMKDVIPRIQVMARSLPLDKHRLVTNLRKLFGEVVAVTGDGTNDAPALCEADIGLAMGIAGTEVAKENADVIIMDDNFTTIVNVVKWGRAVYINIQKFVQFQLTVNVVALVINFFSACITGSAPLTAVQLLWVNLIMDTLGALALATEPPNDGLLKRPPVARGANFITKPMWRNIIGQSIYQLIILGILNFDGKRLLGLSGSDATKVLNTLIFNSFVFCQVFNEINSRDIDKINIFRGMFDSRIFLAIIFATVAFQVVIVEFLGTFASTVPLNWQFWLLSVVIGAVSMPIAAILKCIPVERDTSKQHHDGYEALPSGPELA

SEQ ID NO: 144578 - protein, 74 aa, Glycine max
  Clone ID: PAT_MRT3847_101567C.1.pep
GPDSRVDPRVRELALCHLAQHEANARDMISGGAILELVRISRDCSREDIRILARRTLISSPAFQAEIKRLKIDY

SEQ ID NO: 144579 - protein, 493 aa, Glycine max
  unsure (1)..(493): unsure at all Xaa locations
  Clone ID: PAT_MRT3847_101568C.1.pep
AQRGKYKILKVEPFNSVRKKMSVLVGLPNGGVRAFCKGASEIILKMCDKIIDCNGEVVDLPEDRANNVSDVINAFASEALRTICLAFKEINETHEPNSIPDSGYTLIALVGIKDPVRPGVKEAVQTCIAAGITIRMVTGDNINTAKAIAKECGLLTEGGLAIEGPDFRDLSPEQMKDVIPRIQVMARSLPLDKHKLVTNLRKMFGEVVAVTGDGTNDAPALREADIGLAMGIAGTEVAKENADVIIMDDNFMTIVNVVKWGRAVYINIQKFVQFQLKNNALLWFTNLIMSLXFGLCGHTTNLIFLXLVLRIFFTEKWSSKYFRKIRYDHFKLDMINSHISIPMWRNIIGQSIYQLIILGILNFDGKRLLGLGGSDATKVLNTLIFNSFVFCQVFNEINSRDIEKINIFRGMFDSWIFMAIIFATAAFQVVIVEFLGTFASTVPLNWQFWLLSVVIGAFSMPIAAILKCIPVERDASKQHRDGYEALPSGPELA

SEQ ID NO: 144580 - protein, 93 aa, Glycine max
  Clone ID: PAT_MRT3847_101569C.1.pep
APPVGLEKKASFHEIKNAFQGESKGQFKGIFGSPKNNVVSPAFLGESRSSIFFAKGGIAFNKNFLKLVFWGAPEGGYSPRGLDFLGLGAQKFF

SEQ ID NO: 144581 - protein, 85 aa, Glycine max
  unsure (1)..(85): unsure at all Xaa locations
  Clone ID: PAT_MRT3847_10156C.1.pep
DQVDPQLKGAVRQLLLPRARPKPQVRSPQAHDSHPRQLHQGLPPLYSTNEKPLSTPLPRSRSVRLTRAEPLLFSPSSMTLTTPXP

SEQ ID NO: 144582 - protein, 41 aa, Glycine max
  Clone ID: PAT_MRT3847_101570C.1.pep
LVLDRGGRSDLRTSLAASSASSVRPRSHSDSPKSSFTRQDG

SEQ ID NO: 144583 - protein, 50 aa, Glycine max
  Clone ID: PAT_MRT3847_101571C.1.pep
VLGSRELLNLFLLVGVRFLKGKKITLCAGHRLRESFSFPLLVYLLEHSPI

SEQ ID NO: 144584 - protein, 182 aa, Glycine max
  Clone ID: PAT_MRT3847_101572C.1.pep
MKIMESLALIFYSTLVLATISVPATNSRIIHQKNNANLIEETCKQTPHHDLCIQYLSSDPRSTEADVTGLALIMVNVIKIKANNALDKIHQLLQKNPEPSQKEPLSSCAARYKAIVEADVAQAVASLQKGDPKFAEDGANDAAIEATTCENSFSAGKSPLTNHNNAMHDVATITAAIVRQLL

SEQ ID NO: 144585 - protein, 67 aa, Glycine max
  Clone ID: PAT_MRT3847_101573C.1.pep
YSYSFELIALILREEGETKKGAVFAIWVCAVFWRHSMIKHHHHHRHHHHHHHHHHHHHHHVSCHGFC

SEQ ID NO: 144586 - protein, 221 aa, Glycine max
  Clone ID: PAT_MRT3847_101574C.1.pep
MVVGGTADFFYKEAQRLGYVARSAFKLLQIQNQHKIISPGSSILDLGCAPGGWLQVACQSLGPFRGGGSVLGVDTKKVKVPPLHCDSRVQTISADVTTLPHQRLKALSPKEKGFSVILSDMCPLVSGITTKDAALSFELGMRALDLALGSRIHLEPSDCVGVLKVGGHLVIKLLESEDAKEINQISKPLFRKTSWLRPKATRPSSREIYLICQGLKPDAMT

SEQ ID NO: 144587 - protein, 44 aa, Glycine max
  Clone ID: PAT_MRT3847_101575C.1.pep
PISGNHNYYIMAETAYFDRKQCNLDSKTLDYRTYIIHLMSRTSP

SEQ ID NO: 144588 - protein, 137 aa, Glycine max
  Clone ID: PAT_MRT3847_101576C.1.pep
AHFLHTIPFLHFPAMSQHMNSSASTTLLNNPINQTHYDGFTTPLLQLRLQVRVPFLRLSADFPLLWLRTPNPSGSVESTTRVIARGGRVCFPLPSTYFQRKPLRPCPRQGSNARRRCRCRLEKIFYANSGNLIGLPF

SEQ ID NO: 144589 - protein, 61 aa, Glycine max
  Clone ID: PAT_MRT3847_101577C.1.pep
ISEKMKKKIWLNHNKTKCFRIKIIFYCLNTHFIMKLNKNALHNLKKKRRLNRMIHNFLIHC

SEQ ID NO: 144590 - protein, 99 aa, Glycine max
  unsure (1)..(99): unsure at all Xaa locations
  Clone ID: PAT_MRT3847_101578C.1.pep
YHYIETMSRFFRIPQKHAINYSNPQLKLKSIVEVWGKVVKSYIQEGFRFSIPNRKSLPSSKLLMAAWNILERHQLPIVSKSMIERRYNMXRYLIKNRII

SEQ ID NO: 144591 - protein, 110 aa, Glycine max
  unsure (1)..(110): unsure at all Xaa locations
  Clone ID: PAT_MRT3847_101579C.1.pep
AGSHSSYDCPQEDDQXKLNKIDVXLRQILDAQYNEVQAQMEKNLFKLSLDDVETPKGSMLDLKITQSKIALSKNTVGGTILCTDLLTNIVTNGNCKTSVDLHRTHRIIGM

SEQ ID NO: 144592 - protein, 41 aa, Glycine max
  unsure (1)..(41): unsure at all Xaa locations
  Clone ID: PAT_MRT3847_10157C.1.pep
LSLSYFMIRXYSXNLGXXXRXIGXTCXIXTWXNAHXXLQGP

SEQ ID NO: 144593 - protein, 314 aa, Glycine max
  Clone ID: PAT_MRT3847_101580C.1.pep
IERVNEIRFFELNTGANIPSLGLGTWLADPGVVGDVIAHAVEVGYRHIDCAQIYGNQEEIGLALKKLFEEGVVKREDLWITSKLWCTDHAPEDVPEALDRTLRDLQLDYIDLYLIHWPIRMKKGSVGFKAENIVPSDIPNTWKAMEALNKSGKARAIGVSNFSTKKLGELLEYARVTPAVNQSECHPAWRQDKLKAFCKSKGVHFSGYSPLGSPAWLEGDFLNHPVINMIAKKLGKTPAQVALRWGLQMGHSVLPKSSNPARIKENFDIFDWSIPEDMLDKFFEIQQERLLKASFFHEPNGGYLPEDELWDGGI

SEQ ID NO: 144594 - protein, 125 aa, Glycine max
  Clone ID: PAT_MRT3847_101581C.1.pep
EIRFFELNTGANIPSLGLGTWLADPGVVGDVIAHAVEGDVHVGYRHIDCAQIYGNQEEIGLALKKLFEEGVVKREDLWITSKLWCTDHAPEDVPEALDRTLRDLQLDYIDLYLVCVTARYLYNLL

SEQ ID NO: 144595 - protein, 56 aa, Glycine max
  Clone ID: PAT_MRT3847_101582C.1.pep
SPGGRQRHSKVYIKMVVKSLLGGIPKSQVKKQEIQGLIPFFQKQKKRRQKMFIYEL

SEQ ID NO: 144596 - protein, 46 aa, Glycine max
  Clone ID: PAT_MRT3847_101583C.1.pep
VEPKKFGFLANWPRGFPMEVILAHLKKEMGVSQNPKFVHPPKGTPF

SEQ ID NO: 144597 - protein, 420 aa, Glycine max
  Clone ID: PAT_MRT3847_101584C.1.pep
MAHLIIQPESSSDSFFPGGLFLHPHTLPSSFASFIPSDHVTVSCFFWRPKTRLRVEERLCGGAFLSLSLSFNGTGADQRYGRESGEILGQHHKVEDDGVCQEEKEKEKVGLNGSGAMNMTKHLWAGAVAAMVSRTFVAPLERLKLEYIVRGEQKNLYELIQAIAASQGMRGFWKGNFVNILRTAPFKAINFYAYDTYRNKLTRMLGNEESTNFERFVAGAAAGITATLLCLPMDTMHMDTIRTVMVAPGGEALGGVIGAFRHMIQTEGFFSLYKGLVPSIISMAPSGAVYYGIYDILKSAYLHSPEGMKRIQHMKEEGEELNALEQLELGPVRTLLYGAIAGCCSEAATYPFEVVRRQLQMQVRATRLNALATCVKIVEQGGVPALYVGLIPSLLQVLPSAAISYFVYEFMKIVLKVEST

SEQ ID NO: 144598 - protein, 153 aa, Glycine max
  Clone ID: PAT_MRT3847_101585C.1.pep
MSLAGKITTEIGVHATATKWFNLFATQLHHVQNLTDRVHGTKLHQGEDWHHNETVKHWTYTIDGKVTTCLESIESIDEQSKTITYKLFSGDIDHNYKNFKFIFQAIDDNDHGGTIIKWTVEYERLREEVDPPYGHIEYLHKCTKDIDGHLLKA

SEQ ID NO: 144599 - protein, 61 aa, Glycine max
  unsure (1)..(61): unsure at all Xaa locations
  Clone ID: PAT_MRT3847_101586C.1.pep
IKVDKGLVPLAGSNDDSWCQSLNSLASHSATYYHQSTHFAKXRTIMIIPNSPSTLTIKKAT

SEQ ID NO: 144600 - protein, 52 aa, Glycine max
  Clone ID: PAT_MRT3847_101587C.1.pep
DEGTLRSFNDPTMNVHSRLCLEEGSSQGDHESTCRDGSNTGTVVALRRGSGF

SEQ ID NO: 144601 - protein, 80 aa, Glycine max
  unsure (1)..(80): unsure at all Xaa locations
  Clone ID: PAT_MRT3847_101588C.1.pep
XKEEGXXXEVXIARKCYXXKRLIRDKEHVWVEVXIGNVDENGXYNXXLXNFDIXVVLRDQXDGDSGLYRLWHKKKGEVKE

SEQ ID NO: 144602 - protein, 76 aa, Glycine max
  unsure (1)..(76): unsure at all Xaa locations
  Clone ID: PAT_MRT3847_101589C.1.pep
PNFETKGCLPTHPGEIGKRPSFKVCKPREKWPNTFGSSTGHHFGFFRSQKACXGQGPSNGIGAXTPLSNLCPYKAP

SEQ ID NO: 144603 - protein, 66 aa, Glycine max
  Clone ID: PAT_MRT3847_10158C.1.pep
LVQCCTILVIAPYYSSVYYSPMSSSSFQTRFSLHSENNVSLLIISHLVLTAKCRTLDTHKKQFKLL

SEQ ID NO: 144604 - protein, 73 aa, Glycine max
  Clone ID: PAT_MRT3847_101590C.1.pep
HSLYLGRRITIHRSGLATGSFLFFPPSYLRVLPAQSHPRGAFGPNPLLPFKSPLKKKNSSPPIFFTRSSPLSL

SEQ ID NO: 144605 - protein, 51 aa, Glycine max
  Clone ID: PAT_MRT3847_101591C.1.pep
RFRADRTVMQYGEKACLWKESDHSSHHLLKKSNKGKYEKSVTFVVIGSIVA

SEQ ID NO: 144606 - protein, 90 aa, Glycine max
  Clone ID: PAT_MRT3847_101592C.1.pep
HTSNCSQSYFIHAMPYSCRGQYNLQSHEFTMPDEFVKNLKSVNIENLSYIALPRIQNGLSWTTNYQGCAHGYCRRMVPLNIPFTTDSCFP

SEQ ID NO: 144607 - protein, 113 aa, Glycine max
  Clone ID: PAT_MRT3847_101593C.1.pep
FSPAQVPEMMAPHKGLASHWSILDLSETSFSQLCFLNIHYLQNFINSAESGSEGSSDASDENTNQQVYCLSSVLPLYIVKSQLLNINILPKIYLIRSSFYTYFFLFSFLSKST

SEQ ID NO: 144608 - protein, 100 aa, Glycine max
  Clone ID: PAT_MRT3847_101594C.1.pep
RVLWWRPTTSRLWRLLNCIAALLCRGVNTNYHHPSATILGSRPYGLFLCVYRQTDLCTEVLQHLFFLFVFCLLPLLLFYIGCMRLHQVPCSGIAAHLFTV

SEQ ID NO: 144609 - protein, 38 aa, Glycine max
  Clone ID: PAT_MRT3847_101595C.1.pep
MKINPHVHQEHEATCHGVHYTVESWVTCKHGTSVSRAE

SEQ ID NO: 144610 - protein, 52 aa, Glycine max
  Clone ID: PAT_MRT3847_101596C.1.pep
SAACNHSYITIPLTVTLRMSCTSCADIYNFPNPFSFNALDRTSNCESFSTVT

SEQ ID NO: 144611 - protein, 101 aa, Glycine max
  Clone ID: PAT_MRT3847_101597C.1.pep
NGLHNLQVLIAMRGVSLLKVGGKMIYSTCSMNPIENEAVVADVLRRGGGSIELVDVSSELPQLIRRPGLNRWKVCDKGKWFFCCIDVPKLRRNVVFPCMFP

SEQ ID NO: 144612 - protein, 60 aa, Glycine max
  Clone ID: PAT_MRT3847_101598C.1.pep
RKYTYILILSLSSMRLPKLHGGAGLHGVCHDAAPMAQAESLRQVPRMFRLHIFKRRNRPA

SEQ ID NO: 144613 - protein, 108 aa, Glycine max
  unsure (1)..(108): unsure at all Xaa locations
  Clone ID: PAT_MRT3847_101599C.1.pep
ERCEVTKMLFLQTTVLTRRFSPFCDATLHPLSLLNVQNPMLECAHSFSHYSPVPSNRTVKSISCSVSRKSHSKPEPEPPEPEANSNXRAXPKARSRSHQPKDVESSND

SEQ ID NO: 144614 - protein, 104 aa, Glycine max
  Clone ID: PAT_MRT3847_10159C.1.pep
MYTATTKHSPLATHQHGFSVVGPLPVTLLKLKRQPQRQTKECCKLHFGNQGGFHVFPPTLEENAEWRERERERKEKRRVVAALSVGNGMQREREKGGKVPSRSI

SEQ ID NO: 144615 - protein, 155 aa, Glycine max
  Clone ID: PAT_MRT3847_1015C.1.pep
FGTRGNLDILVMDMPPGTGDVQIAMSQNLQLSGALIVSTPQDVALMDARRGVKMFNKVDVPILGIVENMSCFKCPHCGEPSYIFGKGGTQRTASEMGLELLGKIPLEVEIREACDQGHPIVLAAPDSVVSRAYGEVAEKLAQKLKEQQFQPEIIL

SEQ ID NO: 144616 - protein, 75 aa, Glycine max
  Clone ID: PAT_MRT3847_101600C.1.pep
RTLSVFTILVGAVFKGMVFLEEVPVMALRPSQTFLCFPPVRDHPFALVQKMFVPPLVYPPIFSKKIKPSFWVGGT

SEQ ID NO: 144617 - protein, 81 aa, Glycine max
  Clone ID: PAT_MRT3847_101601C.1.pep
LLTPIVLFYFSHMEITHFIQQHRKYRMIGLQDPPLTKPFLWQIKSHVGSSMHRSWQLSSGDSKQVTTPAAKIIAMHMTLKT

SEQ ID NO: 144618 - protein, 93 aa, Glycine max
  unsure (1)..(93): unsure at all Xaa locations
  Clone ID: PAT_MRT3847_101602C.1.pep
DLXLQTLSSFXPILFAXAARNLEENLAQAAMANAFLLHGGDCPPRFXEFTARRLRDXFRAILQMGVALPSGXQPPLINVRRLXXQFAKPRGDI

SEQ ID NO: 144619 - protein, 161 aa, Glycine max
  Clone ID: PAT_MRT3847_101603C.1.pep
LGGGSRYFLCGRVSHTTNTLKVQFSCSYKTQTHTHTHFFFMSMAGEQGDRCSSITIPLLDDEKVHQVNGSEEALVAKTCDLHTAHVGNTSFFKTCFHLINALSGLFCVSSFLFLSLSLLITIYDAPFLAFFFLSFAPFWYLVFFVQLYSSLASLFGSVFED

SEQ ID NO: 144620 - protein, 48 aa, Glycine max
  Clone ID: PAT_MRT3847_101604C.1.pep
VPSFFKSQVKVLSITITLPHSLVPVFYLKRDSNFQATFQNSSSISILN

SEQ ID NO: 144621 - protein, 46 aa, Glycine max
  Clone ID: PAT_MRT3847_101605C.1.pep
QLHDWIIKKSKTQKFPVIRWIQLISNSKFSQTLDILPRWACLLVCL

SEQ ID NO: 144622 - protein, 116 aa, Glycine max
  Clone ID: PAT_MRT3847_101606C.1.pep
MFKNHLDMIGRNEPIQRKAKFWQSYVRSLKGTDDMRAPDPVHSRPRGIFRPLLSELPDLHTTTWPYKSIYDDPTAANERIHVPGYRYVPVSRETYGISPRNIYPPSYYDRYRTGTY

SEQ ID NO: 144623 - protein, 183 aa, Glycine max
  unsure (1)..(183): unsure at all Xaa locations
  Clone ID: PAT_MRT3847_101607C.1.pep
MSDKEVVVNGLSEDQAGQELKLPDLLNSDAVREIHANIEKEWDFLQRSACQTAAGRALWKHAIHDPLADLLAGETYLRNLHXKIKKDILNNARETSGVILAVRTLWFDSRLEDALNSTNGREAQVVLLGAGMDTRAYRLSCLKDSDVFEVDFPQVLDVKTTILQAAKDSSNDSQHIMSKVKSL

SEQ ID NO: 144624 - protein, 96 aa, Glycine max
  Clone ID: PAT_MRT3847_101608C.1.pep
MRAKMTLKTAAVAVAIVCISAFSITVVAEDPYRFFNWNVTYGDIYPLGVRQQGILINGQFPGPDIHSVTNDNLIINVFNSLDQPFLLSWYLLYICN

SEQ ID NO: 144625 - protein, 42 aa, Glycine max
  Clone ID: PAT_MRT3847_101609C.1.pep
SGRPIVGWIGKVTQFSNTLGVSPTPSQEHSRVSEHRTRAAPG

SEQ ID NO: 144626 - protein, 119 aa, Glycine max
  Clone ID: PAT_MRT3847_10160C.1.pep
METTLVSKMQFAAFFCLALWLGFQLEQVHCSVTYDRKAILINGQRRILFSGSIHYPRSTPDMWEDLIYKAKEGSLDVIETYIFWNVHEPSRGNYNFEGRYDLVRFVKTIQKAGLYAHLR

SEQ ID NO: 144627 - protein, 474 aa, Glycine max
  unsure (1)..(474): unsure at all Xaa locations
  Clone ID: PAT_MRT3847_101610C.1.pep
EVRHISVDEDPPLPLLSQQSKSHQVPELPVHYKQLWDTPFNHGLHQCVKPTTKYKAAQGFDRYLTVRSNGGLNQMRTGISDMVAVAHIMNATLVIPQLDKRSFWNDSSVFSDVFDELHFIESLKGDIRIVSELPKNLEGVPRARKHFTSWSGVGYYEEMTRLWSDYQVIHVAKSDSRLANNDLPLDIQRLRCRAMYHLRCRAMYHALRFSPPIENLGKRLVDRLRSHGGRYIALHLRYEKDMLSFTGCAYGLTDAESEELRILRENTNYWKXKKINSTEQRVGGFCPLTPKEVGIFLHALGYPPSTPIYIAAGEIYGGNTHLSELSSRYPNLIFKESLATPEELKDFANHASQTAALDYIICVESDVFVPSYSGNMARAVEGHRRFLGHRKTINPDRKGLVGIFDMLETGELVEGRELSNMVQRMHKNRQGAPRKRHGSLPGIKGRARFRTEEPFYENPYPECICGSKSKLEIT

SEQ ID NO: 144628 - protein, 46 aa, Glycine max
  Clone ID: PAT_MRT3847_101611C.1.pep
KTKYSTLYGGANFVYPGYTKDDGLGADIVWAFLLAYTVFFGTDAER

SEQ ID NO: 144629 - protein, 57 aa, Glycine max
  Clone ID: PAT_MRT3847_101612C.1.pep
VSIISSDKKKTSQSFKSVCISLNDLLYTMTWTQPRLRKDHVSGLFTQRKKGMGIAGD

SEQ ID NO: 144630 - protein, 185 aa, Glycine max
  Clone ID: PAT_MRT3847_101613C.1.pep
PGQIGSGYAPVLGCRSSHIAVKFVELLAQIVRRSGKELRQEPMFLTIAYAGFVKMVPAKPMVVETFCECPPLGRFAVRHMRQAVAVGVVQNVQKKAPSGAKVTKAAQKNKCFVRFGSSGHVVFYGCHKCWFLALVSSFLGGLFFGHSFKSPPSSRIFCSQNWVLDRRWQDSFYHSVLMCCVCANP

SEQ ID NO: 144631 - protein, 58 aa, Glycine max
  Clone ID: PAT_MRT3847_101614C.1.pep
ISPICFYGRKEEVNFLLFPILDLQSSLFDIIKNRKTGPQNSTVFFPGLRLSENGNIIQ

SEQ ID NO: 144632 - protein, 82 aa, Glycine max
  unsure (1)..(82): unsure at all Xaa locations
  Clone ID: PAT_MRT3847_101615C.1.pep
MQEQAFQSCSVTMSAMRWDWLSRSRMLVXGMCNAHPAWLNAMGHAPPATYPRVLATVPTISLPEDVCVQRFYEKYPESKSHD

SEQ ID NO: 144633 - protein, 121 aa, Glycine max
  unsure (1)..(121): unsure at all Xaa locations
  Clone ID: PAT_MRT3847_101616C.1.pep
KSSSRSSNLPLIRLGSSYSRSLSQRSLYNRGVLASAEFLQGHLPAGSLPRLAASAVTLRTRVCPTLGSHPRAXCREYEVKSGGFQMVGNGTWENSLLCQRPRGADGGGAPSPGNPAGTAAG

SEQ ID NO: 144634 - protein, 50 aa, Glycine max
  unsure (1)..(50): unsure at all Xaa locations
  Clone ID: PAT_MRT3847_101617C.1.pep
SDSCFKFQRWVCVISFPMRRRVTVYXNGYRTVSGFLGMVFLISRDQFQRL

SEQ ID NO: 144635 - protein, 59 aa, Glycine max
  Clone ID: PAT_MRT3847_101618C.1.pep
KCFQKSNQTHFHHYFLFSVKMKTENNQIKHPLFNLSESGLGLNFLDEISSLNFGMINFT

SEQ ID NO: 144636 - protein, 99 aa, Glycine max
  Clone ID: PAT_MRT3847_101619C.1.pep
RPPPPPPLFFFFFFFFKRQKLSSPKILNCSGKTTMGRRIVIFNPKSAMQDRGINRDSGGALQVSIHVEYLPAISISKSNNHRQLRGITSFHESWLTMHQ

SEQ ID NO: 144637 - protein, 69 aa, Glycine max
  unsure (1)..(69): unsure at all Xaa locations
  Clone ID: PAT_MRT3847_10161C.1.pep
PEXAQPKRXPFFSSVPGQSCKGFPQSSEFPRKAVRSRRENRFGMDPVNELNATISLVRSLTSMSAARSV

SEQ ID NO: 144638 - protein, 75 aa, Glycine max
  Clone ID: PAT_MRT3847_101620C.1.pep
LESLETNAAISLEPPEQKAGPLSNLIPCTTLSRPFASLNNLDRVCANQYVIRKAHTHDSKRSNSYVCKCHQMLCG

SEQ ID NO: 144639 - protein, 39 aa, Glycine max
  unsure (1)..(39): unsure at all Xaa locations
  Clone ID: PAT_MRT3847_101621C.1.pep
LPCSCLSQLSLQFITFXFWFLASFLGTFISILFLIMYHC

SEQ ID NO: 144640 - protein, 67 aa, Glycine max
  Clone ID: PAT_MRT3847_101622C.1.pep
LPNFLKSYVSGILLCFFCLCGCLCFALPFSLFCINKKQKHKHKQQQQQRKKNKKQNSESPIHYSFGG

SEQ ID NO: 144641 - protein, 85 aa, Glycine max
  Clone ID: PAT_MRT3847_101623C.1.pep
SKCTRLRWSKNIKRRHSCTKSSYDVIQLKPQMQRYDNLCKDFNEIAELAAEFEGVSHFFQNSFHDLKRKVQSMALSTHRPSFLPK

SEQ ID NO: 144642 - protein, 68 aa, Glycine max
  Clone ID: PAT_MRT3847_101624C.1.pep
KAIKLENARELPMNPHNKPPAILFVFMLHDSIFYDRWMLAFVILFIPYICLSFIFFYKFFFFLLLFFF

SEQ ID NO: 144643 - protein, 83 aa, Glycine max
  Clone ID: PAT_MRT3847_101625C.1.pep
GDGDVARSNEATARAWVKHDTRYSEGMIYEAKKPDATSQMRRERLSYCSKLKTGFTLTPSLSPESFKDGVNQTRLNLFSPNGF

SEQ ID NO: 144644 - protein, 157 aa, Glycine max
  Clone ID: PAT_MRT3847_101626C.1.pep
MSENKSEGGAEKKKSGGFNTKKFLLDLASGGTAAAVSKTAVAPIERVKLLLQVQDASIHITADKRYKGIIDVLVRVPKEQGFLSLWRGNLANVIRYFPTQALNFAFKDTYKRVFTHGVDKEKQFLKFFAMNLASGGAAGATSLCFVYPLDFARTRLA

SEQ ID NO: 144645 - protein, 42 aa, Glycine max
  Clone ID: PAT_MRT3847_101627C.1.pep
HPLFRGVRKRRWGKWVFQIREPRKKSRIWVGFFPAPENGGKG

SEQ ID NO: 144646 - protein, 96 aa, Glycine max
  unsure (1)..(96): unsure at all Xaa locations
  Clone ID: PAT_MRT3847_101628C.1.pep
RILDAMRVSSGGANSFGLSSEGLLQSPRVRRVAXFQEVMRDPHVAADGFTYEAEAIRGWLDGGHDNSPMTNSKLAHHNLVPNRALRSAIQDWLQNH

SEQ ID NO: 144647 - protein, 191 aa, Glycine max
  Clone ID: PAT_MRT3847_101629C.1.pep
PFAYVDPEARASRARSPPSDVYSFGIILLRLLTGRPALGITKEVKYALDTGKLKSLLDPLAGDWPFVQAEQLARLALRCCDMNRKSRPDLYSDVWRILDAMRVSSGGANSFGLSSEGLLQPPSYFICPIFQEVMRDPHVAADGFTYEAEAIRGWLDGGHDNSPMTNSKLAHHNLVPNRALRSAIQDWLQNH

SEQ ID NO: 144648 - protein, 45 aa, Glycine max
  Clone ID: PAT_MRT3847_10162C.1.pep
GTCRYDDTDPEAEKKAYIDRIEDIVYWIGWSSVKMSYARDYFQAL

SEQ ID NO: 144649 - protein, 53 aa, Glycine max
  Clone ID: PAT_MRT3847_101630C.1.pep
YTSYFSSEILFKRLQIIAPGRIGHELKSMFPTTKLKNHCCLKCSSPKYYATFL

SEQ ID NO: 144650 - protein, 107 aa, Glycine max
  Clone ID: PAT_MRT3847_101631C.1.pep
TQDTHLSTLHHFFNTSDFFNGNGPILFIVNLNLENPFKAFARLKGMFNVWPTKFPARVMHIYKAIIFCQSHHLICTFEISIRSSKSMRRRCYVEVFILAESIKHHTK

SEQ ID NO: 144651 - protein, 97 aa, Glycine max
  Clone ID: PAT_MRT3847_101632C.1.pep
SPNAEISDIFRTPKCRPLHKLLVTFLVRTLTPFMAIYAMLDHHDREHDERYFFTLTCWVCDLHTGRDFDGPIAVCTFMAAVWTCSLHSKLYDYQQLA

SEQ ID NO: 144652 - protein, 65 aa, Glycine max
  Clone ID: PAT_MRT3847_101633C.1.pep
LYANVIMTSLPLFVTWCYICYVSLVVFVKCMLLYKNECRFRLQLKLAHYIDPLVLRVQHDQHLPC

SEQ ID NO: 144653 - protein, 435 aa, Glycine max
  Clone ID: PAT_MRT3847_101634C.1.pep
MASSLSTKPFSADALSAFASLNSDLGSLSPAYLRLSLRPRLPKRLRIQAAGSTYGNHFRVTTYGESHGGGVGCVIDGCPPRLPLSEADMQVDLDRRRPGQSRITTPRKETDTCKIFSGVSEGITTGTPIHVSVPNTDQRGHDYSEMAVAYRPSHADATYDMKYGVRSVQGGGRSSARETIGRVASGAVAKKILKEFSGTEILAYVSQVHKIVLPEDLIDHDTLTLDQIESNIVRCPDPEYAEKMISAIDAVRVRGDSVGGVVTCIVRNCPRGLGSPVFDKLEAELAKAAMSLPATKGFQFGSGFAGTFLTGSEHNDEFYIDEHGNTRTRTNRSGGIQGGISNGEIINMRIAFKPTSTIGKKQKTVTRDKKETEFIARGRHDPCVVPRAVPMVEAMVALVLVDQLMAQYAQCNLFPVNSDLQEPLVPILRPEEALL

SEQ ID NO: 144654 - protein, 285 aa, Glycine max
  unsure (1)..(285): unsure at all Xaa locations
  Clone ID: PAT_MRT3847_101635C.1.pep
DQKLIRFLQFLISVHFKNTSISASARETIGRVASGAVAKKILKEFSGTEILAYVSQVHKIVLPEDLIDHDTLTLDQIESNIVRCPDPEYAEKMISAIDAVRVRGDSVGGVVTCIVRNCPRGLGSPVFDKLEAELAKAAMSLPATXGFQFGSGFAGTFLTGSEHNDEFYIDEHGNTRTRTNRFGGIQGGNFXNGEIINMRIAFKPTSTIGKKQNTVTRDHASAEFIARGRHDPCVVPRAVPMVEAMVALVLVDQLMAQYAQCNLFPVNSDLQEPLVPILRPEEALL

SEQ ID NO: 144655 - protein, 45 aa, Glycine max
  Clone ID: PAT_MRT3847_101636C.1.pep
KESGYISLLIVKKLNGSLFSACFGRRYSLSKCIRHPENFSKPKLT

SEQ ID NO: 144656 - protein, 44 aa, Glycine max
  Clone ID: PAT_MRT3847_101637C.1.pep
FNLHTNVVCVHKIVTVYKHLNLVGQVVKKVYMLLTLTIHLWCNI

SEQ ID NO: 144657 - protein, 137 aa, Glycine max
  unsure (1)..(137): unsure at all Xaa locations
  Clone ID: PAT_MRT3847_101638C.1.pep
MSGFTDNQRIWRAAHYEAXFNTSIPPYRDAFYTSILEKTPVSKVLXCSFLTNATYPSNPKITGHAERLFGLATDTAGHFTSCATGEIDVALASTHVQKVITDPQFVAAKELLMKTITDSWVPNXWSDEMSTAWKIAY

SEQ ID NO: 144658 - protein, 64 aa, Glycine max
  Clone ID: PAT_MRT3847_101639C.1.pep
ELSDHLFDHESLLFLESHLSLLIFYLIQLLKYAMLYSKSYSTIRNKILFLVKPLSPIFSLSRFV

SEQ ID NO: 144659 - protein, 158 aa, Glycine max
  Clone ID: PAT_MRT3847_10163C.1.pep
MQPTLQQSFSKPNSSDFKMCSFSQNHYVLVLFLVLTVWTSHIMSRRLSEACTSERHEKWMAQYGKVYKDAAEKEKRFQIFKNNVHFIESFNAAGDKPFNLSINQFADLHNEEFKALLINGQKKEHRVGTATETEASFKYDSVTRIPSTMDWRKRGAVT

SEQ ID NO: 144660 - protein, 128 aa, Glycine max
  Clone ID: PAT_MRT3847_101640C.1.pep
MALFSPSSSDNFSFTRPFANLRPKLLNFCSFWPIKNAKCEDRHSSGLTGGFMPRANSEQLLNLFNEYASIEKNEKRFMTASDFIRKYLGLYTEENYNRETVRLLASAADTAKDGLISYEEFSAFEASL

SEQ ID NO: 144661 - protein, 60 aa, Glycine max
  Clone ID: PAT_MRT3847_101641C.1.pep
NKKDGCFIEQSQFISGGKTKLKSPQFSKGPYPKKGGIFGFFFYGFKLLEPGYVLINMSIS

SEQ ID NO: 144662 - protein, 52 aa, Glycine max
  Clone ID: PAT_MRT3847_101642C.1.pep
KAFLNPARSTRHTLLGYGAPTWSSREWRGYIPARHKGMLVVRVEDLLSRTRG

SEQ ID NO: 144663 - protein, 75 aa, Glycine max
  unsure (1)..(75): unsure at all Xaa locations
  Clone ID: PAT_MRT3847_101643C.1.pep
GSYFWQLGSFWWFLTCMLLGFDPFGLDVFDVFQIAGSRFAVFFGAPPLLKIARFFLFLSFNXFVKICSVFRLRPR

SEQ ID NO: 144664 - protein, 106 aa, Glycine max
  unsure (1)..(106): unsure at all Xaa locations
  Clone ID: PAT_MRT3847_101644C.1.pep
KNQPTHADAFSSLNSSYSIFTILIYHGSVFLLTDNLPLSIIFINNIILLFNSTFSKTAXPPSXNPTPSPTPTPYFINLTXLLTXXSPFHNLPLYLXSTKIIYTFQN

SEQ ID NO: 144665 - protein, 41 aa, Glycine max
  Clone ID: PAT_MRT3847_101645C.1.pep
LHEWNYPFIVYYIIILYGWWLNVKNKIPNLSLQGVMLYVLT

SEQ ID NO: 144666 - protein, 83 aa, Glycine max
  Clone ID: PAT_MRT3847_101646C.1.pep
HTCNNDDYEILCKTSHACTCVDIQASSFYGHVTLGLRIHFSLFKSTQCVQNMFFYQYMHLSDSILGVRKNFHSTHPSGVYTLF

SEQ ID NO: 144667 - protein, 76 aa, Glycine max
  unsure (1)..(76): unsure at all Xaa locations
  Clone ID: PAT_MRT3847_101647C.1.pep
SRVFFFFFSSGTLCLHTKNWYLVWCNSLELLVADHTLPYSPFRLMQTNTRLVALCKSXRLVGGYINCHRSGSFVEA

SEQ ID NO: 144668 - protein, 252 aa, Glycine max
  Clone ID: PAT_MRT3847_101648C.1.pep
VVMRYPEIWRRENLIEIPATFVGIINDCIVANKAVVIVKGLDEWPNEYQRQYGTIDLYWIVRDGGLMLLLSQLLLTKESFENCKIQVFCIAEDDADAEGLKADVKKFLYDLRMQAEVFVITMKWDAQMDGGSGSPAQDESMDAFTSAQQRIDDYLTQMKATAKREGTPLMADGKPVVVNEKQVEKFLYTTLKLNSTILRYSRMAAVVLVSLPPPPVSHPAYFYMEYMDLLLEKIPRILIVRGYRRDVVTLFT

SEQ ID NO: 144669 - protein, 202 aa, Glycine max
  Clone ID: PAT_MRT3847_101649C.1.pep
MLYTAQHFVNNSVTLSNNFFAAMASHSAATERTYKESFDSAANKLYADHIIPHILHLYGSCATSRDFEIYAAHASYEDPLMCAHGVKQIKSAFYTLPKVFKESKIVEYSIKENMVSPGKGEILIDNKQYYKFLGKDINMVSLIKLYIEEGKVVRHEDWWEKKPISNRETVKLPLLGRIAEMTRRGSMLATHVLMRFGKDPNV

SEQ ID NO: 144670 - protein, 86 aa, Glycine max
  unsure (1)..(86): unsure at all Xaa locations
  Clone ID: PAT_MRT3847_10164C.1.pep
LCASLMGVILSHSXILMAMAMDGLLSPLFFDIYXSILLPVXSTLVSGLVFSLLAFSMVVSELSSMVSVCTLLAFTMVALFLLILTY

SEQ ID NO: 144671 - protein, 75 aa, Glycine max
  Clone ID: PAT_MRT3847_101650C.1.pep
PIMMSQSTAEKEHNVEEGRQYTHELERCDVSAIPTDHIFGFSWDISCSVPDQGQRGCTLRRINRKPPWFSSSTVL

SEQ ID NO: 144672 - protein, 56 aa, Glycine max
  Clone ID: PAT_MRT3847_101651C.1.pep
YVLGSLLAWGVAWTVVLEFWGWMTWHICGTNHSEKENIETQEKCSLGSHVSQVAHS

SEQ ID NO: 144673 - protein, 33 aa, Glycine max
  Clone ID: PAT_MRT3847_101652C.1.pep
KKIKKAIPSFGFLPWVNGYPRFLGLTQDKLRLV

SEQ ID NO: 144674 - protein, 92 aa, Glycine max
  unsure (1)..(92): unsure at all Xaa locations
  Clone ID: PAT_MRT3847_101653C.1.pep
GLXRLHFSPFSPPAQERPGRAHINGRKPPIAISQEGDRSMAIAHPTPQLRAVLNRGTPTRPCKNGNPKVSVAPTQLDGQNGPTDTPIARECP

SEQ ID NO: 144675 - protein, 58 aa, Glycine max
  Clone ID: PAT_MRT3847_101654C.1.pep
FCWSVYTSILFLTEASQPYSEGLLKSVGGVNVEAAQHTPTTDPENETTGVSKTQETTP

SEQ ID NO: 144676 - protein, 88 aa, Glycine max
  Clone ID: PAT_MRT3847_101655C.1.pep
ARVWIASALYAAVNIGQHPYGGSILNRSTISKRLMPEKGAPEYDAVDNSPEKEFLTTITGKTETVIALTPIERASWHALDEFYRAQRD

SEQ ID NO: 144677 - protein, 154 aa, Glycine max
  unsure (1)..(154): unsure at all Xaa locations
  Clone ID: PAT_MRT3847_101656C.1.pep
AKESIXRVKDLPHXWLHPMFINVGETXEVRGVAFSXHXKNFXPKQTIFESXREPAKLNHQHGPSCQLADLIKRKRAIHENIINLVHEQHQSKSNNEKEEIQLEITPSMEKXIKAACGSNRNPQSFXDEDHYISSIPKNQHMEACLSIKTNEDFS

SEQ ID NO: 144678 - protein, 65 aa, Glycine max
  unsure (1)..(65): unsure at all Xaa locations
  Clone ID: PAT_MRT3847_10165C.1.pep
LNYFREWGPKIDXNVNDELRKLXKFLPGKLKSTLENIVKNFPNKVLGKKGPTGPKVKDNWSGNER

SEQ ID NO: 144679 - protein, 49 aa, Glycine max
  unsure (1)..(49): unsure at all Xaa locations
  Clone ID: PAT_MRT3847_101664C.1.pep
SIPVGYQTHLLRAKNLLCNPTPNIPLYHNSPTNLXXXXRHFIKHXSPTL

SEQ ID NO: 144680 - protein, 100 aa, Glycine max
  Clone ID: PAT_MRT3847_101665C.1.pep
LHQDLPPKHWHLMQVPSIVSHLLFGRQPAQLQFKAFLPRVGTTSKKNPKMIAMIFLMMGGIFCRNEYPEFSKHFFCREWKNIRVKCYIVYTHESHFSILG

SEQ ID NO: 144681 - protein, 84 aa, Glycine max
  Clone ID: PAT_MRT3847_101666C.1.pep
ALQATSLVPTSFSILKKGKNNISLKDSTLFNLSFSKPIKANFSSSTLEYKKKFEQKLYTIKTKTVTTTSPAITKSTPEKKENIR

SEQ ID NO: 144682 - protein, 53 aa, Glycine max
  Clone ID: PAT_MRT3847_101667C.1.pep
IDKPNTHMQPSVGPNIYHTHLKSLTLFQNNKPNAWCNKDRRILPIKPSSYYHL

SEQ ID NO: 144683 - protein, 100 aa, Glycine max
  unsure (1)..(100): unsure at all Xaa locations
  Clone ID: PAT_MRT3847_101668C.1.pep
PRIRAYSNISMTSYELSHGETFKIGAHRFRIPXIFSNPFLVQTNSGMXALQELAHSILGLPQMGIDSINKCDVHILRQLFNTLLHAGGTASMQQLKEHLD

SEQ ID NO: 144684 - protein, 82 aa, Glycine max
  Clone ID: PAT_MRT3847_101669C.1.pep
ALHLFDRDCYKIDPFARSKTLFLIWSHAHKCFMKMHNNGSFEHVPPPLPKRKTANPFSREASKNALTISQLSQPLQSSSTLS

SEQ ID NO: 144685 - protein, 341 aa, Glycine max
  Clone ID: PAT_MRT3847_10166C.1.pep
MSSFSQNPYVLVLFLVLTVWISRVMSRGLITSERHEKWMAQYGKVYKDAAEKEKRFQVFKNNVQFIESFNAAGDKPFNLSINQFADLHDEEFKALLNNVQKKASRVETATETSFRYENVTKIPSTMDWRKRGAVTPIKDQGYTCGSCWAFATVATVESLHQITTGELVSLSEQELVDCVRGDSEGCRGGYVENAFEFIANKGGITSEAYYPYKGKDRSCKVKKETHGVARIIGYESVPSNSEKALLKAVANQPVSVYIDAGAIAFKFYSSGIFEARNCGTHLDHAVAVVGYGKLRDGTKYWLVKNSWSTAWGEKGYMRIKRDIRAKKGLCGIASNASYPIA

SEQ ID NO: 144686 - protein, 65 aa, Glycine max
  Clone ID: PAT_MRT3847_101670C.1.pep
YILLFATGSFTNHVCHPLFLFSNTVITPFDLIKLLLHTINSNLYILNIKIQPYNIIFYCFLLFYS

SEQ ID NO: 144687 - protein, 157 aa, Glycine max
  Clone ID: PAT_MRT3847_101671C.1.pep
MMGFEATTPVVAPFSTTQRPDHWKHFDDSVNAVSFGFVATAILISMFLLLAIFERFLRQRSSEANNVATPIDLERQMHFGRKLENLSPKMTIYGRGVLVLMPGEQIPSFIALPAPAPCCREPMSWPIQVQHNSCFRAPSASRRDYNLTTRNMMVHPF

SEQ ID NO: 144688 - protein, 51 aa, Glycine max
  Clone ID: PAT_MRT3847_101672C.1.pep
SMLAGLNCYLATPHSTAYFDGEAICILLNGRNGDITFLLKKERDGGNIIVA

SEQ ID NO: 144689 - protein, 173 aa, Glycine max
  unsure (1)..(173): unsure at all Xaa locations
  Clone ID: PAT_MRT3847_101673C.1.pep
LAPSTFKTGFLSYTTNSAKVVFLNQRPQTRNFRGSXGNFCGTCDRSLQDPYHFCSLSCKINYLVRTTGSLCNYLFECNYLPLPESGLDDGLMTPDSVLEPAGSARTSSGSGGYGGVDCRTTLACTATTEIVRKKRTGGSTFRPPCRPACSPVSEISAGLMNRRKGNPQRAPLY

SEQ ID NO: 144690 - protein, 71 aa, Glycine max
  Clone ID: PAT_MRT3847_101674C.1.pep
CTTSIKRTFSLHTGSTSWMVRGVLPIHPYSAGALIDRTFGTQRANPSPAIGSTCRNITGRHCTSSGHRQTP

SEQ ID NO: 144691 - protein, 116 aa, Glycine max
  Clone ID: PAT_MRT3847_101675C.1.pep
YKSHHHHHLYSLLFTLARKGHFSFLFFFSERSVTIIIIIIISDFCGKMADWAPVLIGVVLFVLLQPGLLFSFPGNGKQLEFGSMKTNGKAIFIHTLIFFALYSILILAVKVHIYTG

SEQ ID NO: 144692 - protein, 70 aa, Glycine max
  Clone ID: PAT_MRT3847_101676C.1.pep
NLTNINPRFVVGSGYLMHRLCIFLILSQHRYTLHSMALPNQQTVDYPCVILVIYSDGRTRMTTSVLMHLT

SEQ ID NO: 144693 - protein, 80 aa, Glycine max
  Clone ID: PAT_MRT3847_101677C.1.pep
GSCSCNQESYLSDYSRLLLKLNRFLEETHLCLFSSSSSMLLATPRNYALARNRFCQKPCHCPQNVAEVFVNLLFTPSQTW

SEQ ID NO: 144694 - protein, 89 aa, Glycine max
  Clone ID: PAT_MRT3847_101678C.1.pep
DIVDSTLCQSYPPALVLRCIQIGLLRVQENAINRPSMLEVVFMLGNETPLSPPKKPAFLFNENQDLPESSTSGGGSSINEVTATSISAR

SEQ ID NO: 144695 - protein, 81 aa, Glycine max
  Clone ID: PAT_MRT3847_101679C.1.pep
CGLSTPKLLGLLQGKLRVTIRVGKGYWCQMKGHTNKRWPNIKNKSNITMDHKIISLMIKRTNITKHMMRSTVAHITMPPFF

SEQ ID NO: 144696 - protein, 112 aa, Glycine max
  Clone ID: PAT_MRT3847_10167C.1.pep
LRTGRNYLRGSRACSRRPTFILCFFLSNNDHLLPNQKNRYPTKQIKNYLLYLRPNMSVSGWETEPPRIRAGGTRSRAYTGETCGRHRHFCVTGISKNMDLTLFKGNDIHRFS

SEQ ID NO: 144697 - protein, 249 aa, Glycine max
  Clone ID: PAT_MRT3847_101680C.1.pep
LRPIGPRGAVGGANPATGLGSDARFRWPSPTQGFPSSHEVRSVPWLPPVLPVEGLPFDSSYLVFREARSALSFSSQAAAGTVTSPRQAAVSQSKRHRLINEMETESYPSQRSLQRGSASSGENNRIKVHLPQRESRTGSGGGSSTREQQQEDSSLLAHPGELVVCKKRRNDREKSAVKPKTGPVSPSSMRTPGPSSVPKDARLTQQGSHAQGWAGQPSQQPNGSGGPVAWANPVKRLRTDSGKRRPSHT

SEQ ID NO: 144698 - protein, 61 aa, Glycine max
  Clone ID: PAT_MRT3847_101681C.1.pep
CYAINLITYSNTLFTYSRERLNLVVVVFYSESRDYEMCKAKVSCFVSWWFSCFVGAPLNLR

SEQ ID NO: 144699 - protein, 269 aa, Glycine max
  Clone ID: PAT_MRT3847_101682C.1.pep
MGVSNNITAVLNLIATLASIPIIASGIWLASKPDNECVANFRWPIVIIGILILLVSLAGFVGAYWNKQGLLALYLFCMALLIALLLLVLVFAFVVTRPDGAYDVPGRGYKEYRLHGFSSWLRNHVTGSGSWQKIRPCLAASDVCSKLTQDYITADQFFNSHISPLQSGCCKPPTACGYNYVNPILWTNPVNPMADSDCYLWNNDQNQLCYNCNACKAGLLGNLRKEWRKANIILIVAVVVLIWVYVIACSAFRNAQTENLFDRYKQGWV

SEQ ID NO: 144700 - protein, 107 aa, Glycine max
  Clone ID: PAT_MRT3847_101683C.1.pep
HGVAAFFRGLGVSFFLLGKRVFRFENGLWGPPLFWGFGLFFGPPGFSFFVSGLEVLWFFQGITIFLWGPVFPWFRPGFIWLPLGETGSPSGAGPGFPGWPPGSPQGS

SEQ ID NO: 144701 - protein, 83 aa, Glycine max
  unsure (1)..(83): unsure at all Xaa locations
  Clone ID: PAT_MRT3847_101684C.1.pep
GVAPGEVLGRGPEVGRXHRSSILDCGPQECRMAADRYEQEQTLSRMQGGTTQKLQGGTFYPGEAEPLKIGLQQNTIRLELIGN

SEQ ID NO: 144702 - protein, 91 aa, Glycine max
  Clone ID: PAT_MRT3847_101685C.1.pep
QGTGKKGTVPKVKGKKIKTQPPRGKIFLSKQTGGEYHSSGALIPQLKGGLGKTNIKQKGLGKGHFFFHCPPKRKISVLGQTKTKTHWCSKN

SEQ ID NO: 144703 - protein, 62 aa, Glycine max
  Clone ID: PAT_MRT3847_101686C.1.pep
TYFPAQCKSTIRRPTVVLLVRVCVDHDHSTKSSPIGGSGAGKSRSSSCPLDGLPIISPTIIT

SEQ ID NO: 144704 - protein, 65 aa, Glycine max
  Clone ID: PAT_MRT3847_101687C.1.pep
CEESHISLSSSFEQYNLPFFVVGCIWLTVDVYSSNINVLIFFRFSEFYRSLFLRCLYCYISFHNY

SEQ ID NO: 144705 - protein, 66 aa, Glycine max
  Clone ID: PAT_MRT3847_101688C.1.pep
DNLLLVSFLCIDCFILSKFILFLKRKINPVSDIEVYYFSRLTPIFVDEVIFGQIYCQIITNIYNCF

SEQ ID NO: 144706 - protein, 38 aa, Glycine max
  Clone ID: PAT_MRT3847_101689C.1.pep
DFFYYHLTIRIQIIFIRIIFYIMNSNYIYNIKNNPSNT

SEQ ID NO: 144707 - protein, 46 aa, Glycine max
  unsure (1)..(46): unsure at all Xaa locations
  Clone ID: PAT_MRT3847_10168C.1.pep
MRIEEDPRLKRRKFNNWASSNVVFYVLVHNAAFLLIXRNFPEDWAS

SEQ ID NO: 144708 - protein, 70 aa, Glycine max
  Clone ID: PAT_MRT3847_101690C.1.pep
QRTDHPRQVSRKTSEKGNHHFKIEVNILKKNYTQNHDAWTLKNQNIHVSKTLKTSDHRIPRRQKEPKLFL

SEQ ID NO: 144709 - protein, 63 aa, Glycine max
  unsure (1)..(63): unsure at all Xaa locations
  Clone ID: PAT_MRT3847_101691C.1.pep
XXQISFARFYIVGAGKTILIIHSKHIFITCLFLIRTEIMILLKKQIFYILNYTNYILVLVHIL

SEQ ID NO: 144710 - protein, 156 aa, Glycine max
  Clone ID: PAT_MRT3847_101692C.1.pep
FGRRSLLVHWPTVDDSTFLLSSVSPVSPVQQASEYEDHNGIGCLSYWEELPCGIYSVHVDASKTSGYLVGEVKIHEYTNSMLNELIKWERISVEPSSEDLHTFCHKLSLGQHAKHQPSSEAVPNKTGSIQPAIPMPAHILLNALKESVLRRTSMYT

SEQ ID NO: 144711 - protein, 47 aa, Glycine max
  unsure (1)..(47): unsure at all Xaa locations
  Clone ID: PAT_MRT3847_101693C.1.pep
MVFQSPLLGLGNPFLDIFGGGDXNLLKKYYITFNNAILAGDQHQPIY

SEQ ID NO: 144712 - protein, 42 aa, Glycine max
  Clone ID: PAT_MRT3847_101694C.1.pep
REKSLNPLTCSARWMSRYGLWQWTLTRAIISRLSSTASHNLI

SEQ ID NO: 144713 - protein, 50 aa, Glycine max
  Clone ID: PAT_MRT3847_101695C.1.pep
LFKIYGHVWPSSLGLGLFGSIATANVLVMQLSAGVLIKVILRKKKKKKTG

SEQ ID NO: 144714 - protein, 55 aa, Glycine max
  Clone ID: PAT_MRT3847_101696C.1.pep
SYVTMKASSFLALHKDVHHTPIFHVQCSQSYAYFELKQNNCHTLISSGDLCLMTC

SEQ ID NO: 144715 - protein, 97 aa, Glycine max
  Clone ID: PAT_MRT3847_101697C.1.pep
WRPSKQANGPNMLLQPSTVAIITTTVTGMTTHTTTMNALFITEALSMVMAMGHISRVTLTPQNGTTMVVVMVINYLYLIHSICWATSYSMLCCTTHK

SEQ ID NO: 144716 - protein, 68 aa, Glycine max
  Clone ID: PAT_MRT3847_101698C.1.pep
MATTIFSLLMLLALSTCVANATIFHQCSQAPIASTFIAHLPSIVASTCEHPALEPCRIQHAIAASTIP

SEQ ID NO: 144717 - protein, 75 aa, Glycine max
  Clone ID: PAT_MRT3847_101699C.1.pep
LRGFSKWSTTFWWYPRLDPAGPARAAANPGCLAAAIGEALRRKAELADRSVDCMTVCYVCVYVLFAVLLRCERLE

SEQ ID NO: 144718 - protein, 56 aa, Glycine max
  unsure (1)..(56): unsure at all Xaa locations
  Clone ID: PAT_MRT3847_10169C.1.pep
XRRXHAXXSYXIRXEXXIXAXQXEVXXLXTAXSDVFXGAMXCFEXFTXHRLASEXK

SEQ ID NO: 144719 - protein, 177 aa, Glycine max
  Clone ID: PAT_MRT3847_1016C.1.pep
PTRPLFMRWSGVGIDEWWRNEQFWVIGGVSAHLFAVFQGLLKVLAGIDTNFTVTSKASDEDGDFAELYLFKWTTLLIPPTTLLIINLVGVVAGISYAINSGYQSWGPLFGKLFFAFWVIIHLYPFLKGLMGRQNRTPTIVVVWSILLASIFSLLWVRIDPFTTRVTGPDVEQCGINC

SEQ ID NO: 144720 - protein, 69 aa, Glycine max
  Clone ID: PAT_MRT3847_101700C.1.pep
QTVLNLSHFQNLAHPQFKIIHVLIISLISLIVLVTHNVYLSLAISISSFPLPFFPFFQPTYDHLSPSIY

SEQ ID NO: 144721 - protein, 50 aa, Glycine max
  unsure (1)..(50): unsure at all Xaa locations
  Clone ID: PAT_MRT3847_101701C.1.pep
LRAEIHKMLDTYGPYLLKVSVPLQEHVLPMIPRNGSFKDVITXGDGRSRY

SEQ ID NO: 144722 - protein, 74 aa, Glycine max
  Clone ID: PAT_MRT3847_101702C.1.pep
INDFIVILNFSFLSVEVFLLIYSTATRVLLLLSALYFTLTLFPNVWFLFSCFLVFLSVSQTRITSRDGVTHALL

SEQ ID NO: 144723 - protein, 72 aa, Glycine max
  unsure (1)..(72): unsure at all Xaa locations
  Clone ID: PAT_MRT3847_101703C.1.pep
KGSKGCAAADAPRAXTVSAAATSSTAVGACVLTEGTDTTFQPDSEYTDWVWPLLDTCPALSDLCMTNIDTLS

SEQ ID NO: 144724 - protein, 63 aa, Glycine max
  Clone ID: PAT_MRT3847_101704C.1.pep
LLSLKCPPVFFRVDHQGIYKCSKDASKKYIKKTFAAHIICHYLKPLGSPHRKISGIFLERGPN

SEQ ID NO: 144725 - protein, 105 aa, Glycine max
  Clone ID: PAT_MRT3847_101705C.1.pep
MVEPWQRNQMLVMQPLLHDEYRTKHQEGQAVAVPQQKKPKGSQDKQQKGKLLESLYSENPKLSSLCGILFPQNSQSVWSGPPSLIRKTNSARTSSIHAAIRTFME

SEQ ID NO: 144726 - protein, 69 aa, Glycine max
  Clone ID: PAT_MRT3847_101706C.1.pep
FGEPPQHGRPSKEHVDLHDPSHHPNVATGATGTPFLVAVNAGGGVLHCENLYFFLLFPNITPNVVPCVL

SEQ ID NO: 144727 - protein, 38 aa, Glycine max
  Clone ID: PAT_MRT3847_101707C.1.pep
KSKDKGFCQLTFHFYQMLLKLPIEGVFHDAYEHGGQVG

SEQ ID NO: 144728 - protein, 151 aa, Glycine max
  Clone ID: PAT_MRT3847_101708C.1.pep
MEVVVMLALRKVAWRLLQSTQHKCPWLMILLQAVIIAAATTTTTDCLCSGTSLDFWLVGIWCHVPSESGPTLMTSQVPAFNDIYFVRMGLVTTERNSLDPAAAPFAKNPRDIEGLTEGASIIEVVKKIRSHVLLGLSGVGGIFNEEPCFIH

SEQ ID NO: 144729 - protein, 253 aa, Glycine max
  Clone ID: PAT_MRT3847_101709C.1.pep
PSPKPPPYTPYPHPHPYHHPLIVKIVGKVYCYRCYDWKYPQKSHNKKHLKGATVEVTCEVGSKTIKAYGKTKSNGKYSITVEGFDYVKYGATVCKAKLHAPPKDSRCNIPTKLNEGTKLKVKSNVRYEVVLKAKPFAYAPEKSYDCEKPKPKPSPTPYHKPYYYNSPPPPSPSPHPHPPYYYKSPPPPPPTYYYKSPPPPSYYYKSPPPPSPSPAPYYYKSPPPPSPSPPSPYYYKSPPAAHKDPYHAAYYYK

SEQ ID NO: 144730 - protein, 79 aa, Glycine max
  Clone ID: PAT_MRT3847_10170C.1.pep
KQNTLKTADADSATRAPERDAQENLAASDNTQAPAPAPAPATAVGEHCVSDRPTPSGQSSTGEALKLNDVDVYISKPTD

SEQ ID NO: 144731 - protein, 601 aa, Glycine max
  unsure (1)..(601): unsure at all Xaa locations
  Clone ID: PAT_MRT3847_101710C.1.pep
MWKVVRYAAARSRRFSTAIPGPCKVHKRGTDILHDPWFNKDTGFPLTERDXLGLRGLLPPRVISFEHQYDRFMNSYSDLENNTQGQPDRVVSLIQMXRILNRLHDRNETLYYRVLIDNIKEFAPIIYTPTVGLVCQNYSGLFRRPRGMYFSAKDKGEMMSMIYNWPAHEVDMIVLTDGSRILGLGDLGVQGIGIPIGKLDVYVAAAGINPQRILPVMLDVGTNNQKLLEDPLYLGLRQPRLEGEEYLSIVDEFMEAVHARWPKAIVQFEDFQMKWAFETLKRYRERFCMFNDDIQGTAGVALAGLLGTVRSQGQPLTDFVKQKIVVVGAGSAGLGVLSMAVQAVARMSGCSESDAKSQFYLIDKDGLVTTERNSLDPAAAPFAKNPRDLEGLTEGASIIEVVKKVKPHVLLGLSGVGGVFNAEVLKAMRESVSTKPAIFAMSNPTMNAECTAIEAFSHAGENIVFASGSPFENVDLGNGEVGHVNQANNMYLFPGIGLGTLLSGARHITDGMLRAAAECLASYMTEEDVSKGILYPSIDCIRDVTAEVGAAVVCAAVAEKQAEGHGDVGFKELENMSKEETVEYVRGNMWYPEYCPLVHEK

SEQ ID NO: 144732 - protein, 81 aa, Glycine max
  Clone ID: PAT_MRT3847_101711C.1.pep
SVIRSTGHIISEGPKAGAGGTLNGLFPQNGPARALTKRNVNVAIRISYTVHLIVSVLLETFLESRDLRPFLSHPLAIVDWF

SEQ ID NO: 144733 - protein, 72 aa, Glycine max
  Clone ID: PAT_MRT3847_101712C.1.pep
QAFTQAFVTAPKKQKKGNNGILCNPNFKPKDNNFNKISWPLKSTKNGPLENNNAGTTPYLVHHGCIHFAFKF

SEQ ID NO: 144734 - protein, 84 aa, Glycine max
  unsure (1)..(84): unsure at all Xaa locations
  Clone ID: PAT_MRT3847_101713C.1.pep
ILAGKPSRQAGINLYSMDGTGPAXRKXSKGNEXQGGEQARAEGATTKQAKSKKAETTNRHXGGDEKPKXERTHPQKARRPRTAR

SEQ ID NO: 144735 - protein, 65 aa, Glycine max
  Clone ID: PAT_MRT3847_101714C.1.pep
DSSLVRSRRTWLLHHRALLESLPENGNGAWGFIMRSCQNPAKGPRTGKACRVVCSNDTKRTFCLF

SEQ ID NO: 144736 - protein, 55 aa, Glycine max
  Clone ID: PAT_MRT3847_101715C.1.pep
KSGRIFFGTKKLDHGGMVNRLTGGQSIHNHQLSFKPSEVLVGIKKTFQKKAKPPK

SEQ ID NO: 144737 - protein, 91 aa, Glycine max
  Clone ID: PAT_MRT3847_101716C.1.pep
KTKPEGTEAHAQPRTLTAEQKKNTTQRTKKNSPGPIPKRTRPGRSLAHSDPGDARPRILEHHEYQIPPPVRERTKLHRYGPPRLPTTRGSP

SEQ ID NO: 144738 - protein, 42 aa, Glycine max
  Clone ID: PAT_MRT3847_101717C.1.pep
DIRSPLKTSLTPKSCSRRKMDFRSRSITTANTDIHEILAQSA

SEQ ID NO: 144739 - protein, 159 aa, Glycine max
  Clone ID: PAT_MRT3847_101718C.1.pep
MRTSWADSADNSAIGSGITNASACPSRGAYVPPHLRNRALSSEVPLAAASHPAVALGNDRVNHSGPAPHQGGGYFKPDHGRQQQQGYGSGFQSGGGGGWNGRGVGRDRGRREANPFENVEAEDQSFSEQENTGINFEAYDDIPVETKPGRMCQPLGNPF

SEQ ID NO: 144740 - protein, 116 aa, Glycine max
  Clone ID: PAT_MRT3847_101719C.1.pep
DIDVLLYTRKPSRTGPKTRGSNRTRKHPHQKGYRKNKRDTRQNENPGRGENPLGRPGKTNTQDKFKRGTQNKLKLPRACPTWNPGKGVPSPHYQTPTRPRKSKCTRGGTRSLPSTK

SEQ ID NO: 144741 - protein, 114 aa, Glycine max
  Clone ID: PAT_MRT3847_10171C.1.pep
SRSRGYVVKLSQLRLEFGATLGAANDKIIAIQITGTATKKGKGSSSFSSSTRTQKLGSIHTTFPQRFINSKAPTIVWDARDFCGFHLLLKHRSLSGTCHMALHVLHGEGDVVRI

SEQ ID NO: 144742 - protein, 78 aa, Glycine max
  Clone ID: PAT_MRT3847_101720C.1.pep
GRHVLKVEPERSSLSPFSKCYLALESKKEAPKKKPISMPRSNLKAPIPMSALLCISFLKREENSPCRVVWLFPWKLNP

SEQ ID NO: 144743 - protein, 336 aa, Glycine max
  unsure (1)..(336): unsure at all Xaa locations
  Clone ID: PAT_MRT3847_101721C.1.pep
PSRSPTRPLSLYAKQEDDSSLLRFLQSKFGKGPENGPEFFYDPKYALRLCLKEKRMRACVHIYSMMSMHEEAVALALQIDSELAMAEADKVEDDEDLRKKLWLMIAKHVVEQEKGTKRENIRKAIAFLKETDGLLKIEDILPFFPDFALIDDFKEAICSSLEDYNKQIEQLEEEMNDAPHGADNIRNDVSALAQRCTIIDRDEECGVLPFLIYVXQNCTCNSFFGLNPLVHQGKGTLTNPKFGQEVSKAWPRIVSVKGRTRVCQRKILTAGKEFGTGRGYTLVGQMAPFYIFPCGHAFHAECLIAHVTRCTVDAHAEYILDLQKQLTLMGSEARRE

SEQ ID NO: 144744 - protein, 72 aa, Glycine max
  Clone ID: PAT_MRT3847_101722C.1.pep
SSRFWNLRFSKYYLCCRIFHFLFKRFCFFFFSKKRLLDWQFPTKDEVSFAMISQIDSCSIEWSCWLYLLLEM

SEQ ID NO: 144745 - protein, 182 aa, Glycine max
  unsure (1)..(182): unsure at all Xaa locations
  Clone ID: PAT_MRT3847_101723C.1.pep
FTSTFPTKQIWERTRKWSCIIIDRDVERAVCQQKIITWCXVFSTGRGYTLVGQMAPFYIFPCGHAFHAECLIAHVTRCTVEAHAEYILDLQKQLTLMGSEARRESNGTLSPEESIPSMTIDKLRSQLDDAIASECPFCGDLMIREISLPFINPEEEQHVLSSWEIKPSAGSQRNSISLPASA

SEQ ID NO: 144746 - protein, 46 aa, Glycine max
  Clone ID: PAT_MRT3847_101724C.1.pep
FTVYSCSIHFNSSVLPVSGDGDILFMITSRLSKNGFVVPPKRSLVL

SEQ ID NO: 144747 - protein, 173 aa, Glycine max
  unsure (1)..(173): unsure at all Xaa locations
  Clone ID: PAT_MRT3847_101725C.1.pep
SWLIDSGCTNHMTYDRELFTELDEVVFSKVKIRNEAYIDVKGKETVAIXGHTGLKLISNVLYVSEISQNLLSVPQLLKKGYKVLFEDKNCMIKDSESREVFNIQMKGMSFALDFMNKEQAAMHKEVSSTVLWHKRLGHFHHGALMFMKKNNLAKNLLELEEELPTCAICQYGK

SEQ ID NO: 144748 - protein, 70 aa, Glycine max
  Clone ID: PAT_MRT3847_101726C.1.pep
PRVRELHGVRLTMILLWPYWYILSVHVQAQLLLLHEPTQTTPTRATPKAKGKSREEELSEADQVIIVQAH

SEQ ID NO: 144749 - protein, 45 aa, Glycine max
  unsure (1)..(45): unsure at all Xaa locations
  Clone ID: PAT_MRT3847_101727C.1.pep
RNTASPAHTSINYLXNMTQQSKGDGISPSPYLSGGRKPFSKALGH

SEQ ID NO: 144750 - protein, 74 aa, Glycine max
  Clone ID: PAT_MRT3847_101728C.1.pep
RARAIFVFCFFLHRKTISTSRIKSTQHCVSISPLEYAITRFHIKIRGVRAQKRHIFISAFTPLLRDLSHTTIIR

SEQ ID NO: 144751 - protein, 69 aa, Glycine max
  Clone ID: PAT_MRT3847_101729C.1.pep
CPQRNQGIWIHCNTQSVIEAASVAITYHLYKGFHPCAKKKKKEEDWYIVEILLFGREDIVFFFFLALRT

SEQ ID NO: 144752 - protein, 93 aa, Glycine max
  unsure (1)..(93): unsure at all Xaa locations
  Clone ID: PAT_MRT3847_10172C.1.pep
WASPTVAAMIHLSTSVSRHIGVGSTQITPVCVIVTASTASCLFHHASTWMSMWYXPRATSRLQSFPSCKSAPASDCPVTXEYSCQVPPAITAP

SEQ ID NO: 144753 - protein, 92 aa, Glycine max
  unsure (1)..(92): unsure at all Xaa locations
  Clone ID: PAT_MRT3847_101730C.1.pep
XRXAKXIKYSXXXAGRXXQTSWSXGVRXCSXSXLXVSVRPCLVNNLESXLXHGNEXFREXILNREXKRGXXVNXVRIWQXKESDXGKTRCXS

SEQ ID NO: 144754 - protein, 94 aa, Glycine max
  unsure (1)..(94): unsure at all Xaa locations
  Clone ID: PAT_MRT3847_101731C.1.pep
LSHILSLCLFLRFLVREPSGDPLTEGEMGLTFTKLFSRLFAKKEMRILMVGIDAAGKTTILYKLKLGDDRTTITTIGFNVETVVYXNISFTGWD

SEQ ID NO: 144755 - protein, 81 aa, Glycine max
  Clone ID: PAT_MRT3847_101732C.1.pep
VGVGRRKAYINSRTGLGSAPKFRWVQEGAQRPAKRHAKVKSRRNKGACMLIKREPAVSSVGRKVRRGESLFTVRAVRWFGA

SEQ ID NO: 144756 - protein, 82 aa, Glycine max
  Clone ID: PAT_MRT3847_101733C.1.pep
MVLAVDLLNPSPAAEARKHKLKTLVPAPRSFFMDVKCPGCFTITTVFSHANTVVVCQGCSQVLCQPTGGKARLTEGCSFRRK

SEQ ID NO: 144757 - protein, 105 aa, Glycine max
  Clone ID: PAT_MRT3847_101734C.1.pep
MSPPAAIFESSAPAVLGSGIDLNKNLAAKVASVGLDGQAKTLADLEKNWDAFTFAPIRESQVSRAMTRRYFKDLDTYAESDIVIVGAGSCGLSTAYMLASKRPDL

SEQ ID NO: 144758 - protein, 77 aa, Glycine max
  Clone ID: PAT_MRT3847_101735C.1.pep
RTGFKGLKLVFTRDTMNFWVGNQFLKTKWVKPTPSLLQLLKGVLTLHATRKNAGKISWETDEQCLREAEKFQPQSMQ

SEQ ID NO: 144759 - protein, 95 aa, Glycine max
  Clone ID: PAT_MRT3847_101736C.1.pep
VSLIRRTSNLSYSGHTSPKLIRHRQGIAVQPMGLTLLRLTPLVMPREHLWQGTQPPVHDWPNPRVNLRHKRNIRRLLLGRPKHLMYYMLRHNGSR

SEQ ID NO: 144760 - protein, 61 aa, Glycine max
  Clone ID: PAT_MRT3847_101737C.1.pep
NAQRLTTYKDKGAAFPRRAHKVKAGDSSLEELANATQDQGPVLPIVTEKPSDDHVKDTGND

SEQ ID NO: 144761 - protein, 248 aa, Glycine max
  unsure (1)..(248): unsure at all Xaa locations
  Clone ID: PAT_MRT3847_101738C.1.pep
MLSHLVKEHPYYIICCYVGLLLLFLLVCWALWCKNKSSIGIPPGNRGLPFVGETLQFMAAINSSKGVYEFVHARRLRYGKCFKAKLFGETHVFISSRESAKVIVNKENEGGKFSKSYIKSIAELLGRDSLLCAAQQHHKLIRARLFSLFSTDSLSSFVQLFDSLVLQATRTWTCGSVVVIQDETLKLACKAMCKMLISIESGQELVTMHNEVARLCEAMLALPVQXPWTRFYKGLQARXKIMNILEKI

SEQ ID NO: 144762 - protein, 47 aa, Glycine max
  unsure (1)..(47): unsure at all Xaa locations
  Clone ID: PAT_MRT3847_101739C.1.pep
XXXXXLAXLXSXXXXCXXXRXXLVXXXWLKKLTLFKISHNQNLXRXS

SEQ ID NO: 144763 - protein, 82 aa, Glycine max
  Clone ID: PAT_MRT3847_10173C.1.pep
GKHPELCDKVGGLLAFHIDDLRVFAPLWLSKTEEVREDTVEGATNIFVDIYGKGWISERGGDSFGAAEVGLRHKINDNLMVY

SEQ ID NO: 144764 - protein, 139 aa, Glycine max
  Clone ID: PAT_MRT3847_101740C.1.pep
MADTPTYAENLHQLRKRLQLLGRKESGTEESLEGSVMCDIECGELTIEKLKSALKAEREALNVVYAELEEERSASAIAANQTMAVINRLQEEKAAMQMEALQYERMMEEQSEYDQEALQLLNDLMVKREKEKLELEKEV

SEQ ID NO: 144765 - protein, 37 aa, Glycine max
  Clone ID: PAT_MRT3847_101741C.1.pep
FFLPGNCFTLMQASPSCEAGHILCSLKKLFTVQLWDV

SEQ ID NO: 144766 - protein, 77 aa, Glycine max
  Clone ID: PAT_MRT3847_101742C.1.pep
PWPWSPTCSSLRGSRHHHDLDMLNTLERKPPHARHPMHDEELKSMYEQRLVKHGRACTALRENENRIHYFRDNLRFI

SEQ ID NO: 144767 - protein, 77 aa, Glycine max
  unsure (1)..(77): unsure at all Xaa locations
  Clone ID: PAT_MRT3847_101743C.1.pep
AKKALFEADLNKIXKELEKKKAEAAEKIKSKIAAIPKEVEERRAIIXAKKGEDFFKAEGQAAKYKATGPAPKKLLGC

SEQ ID NO: 144768 - protein, 47 aa, Glycine max
  Clone ID: PAT_MRT3847_101744C.1.pep
REFSHHGPSKTKHFNIMTLPKLNIFLHMINLTRCSLGPKLGGEQEFF

SEQ ID NO: 144769 - protein, 116 aa, Glycine max
  unsure (1)..(116): unsure at all Xaa locations
  Clone ID: PAT_MRT3847_101745C.1.pep
KWVKKGNAPELPETRNNYNTLVSLGFKIIVLSRRTLDKQAVTEPTLTKVAXQTLEKLNLNDPHDPSTPNAVSYKTASRETLIKHGYNIHGITVEQWSDILGGHRLKCMTFKLHNPL

SEQ ID NO: 144770 - protein, 123 aa, Glycine max
  Clone ID: PAT_MRT3847_101746C.1.pep
CWLLQGFLFMKELNMPGIVTNGVQDEGGSNEMNGDQDSPFKEPLNLVKSPRGGSVSPGRGQGDDGANFGGDEGGEPSIEQLYENVCDMQRNLSGIELQVESDILSQMTSREEVLFQSFHSRKN

SEQ ID NO: 144771 - protein, 117 aa, Glycine max
  Clone ID: PAT_MRT3847_101747C.1.pep
QLQKSQNPSIIFVLENRQSVPGAVRKVRMALHHGAAGDAGDQGPRATVSAGVLVPWEPALSISCPAVSRDRTRQKGAPASSLCIESRNFPRNLPHMASPILGGSGMSHPWGSFPAMQ

SEQ ID NO: 144772 - protein, 60 aa, Glycine max
  Clone ID: PAT_MRT3847_101748C.1.pep
RVLANRIQSRLAHLAITATVDQMHGTPLICLQQLAVHDLGGIWANGMTHYQNSMNCKSLG

SEQ ID NO: 144773 - protein, 254 aa, Glycine max
  unsure (1)..(254): unsure at all Xaa locations
  Clone ID: PAT_MRT3847_101749C.1.pep
MKFFNLLKSRHVRSCSSPSSWAWPSCHQPKTLSFRVTATNTNNNKNNDDDDNNMRDINLALLSRGVDPIETVIRGLRSDRLFFDRDDASFMLEGKPTTTRATXEPFKNSVVLTMDSEDPHVDFRKSMEEMVETLGVEDWESLEDLLCWYLQANAKSNHEYIIGAFVDLLFYLAARPSPCSQDFEHSHSRPSSPLSFYSSSSSSSPSSSCSTRCNIKGEVEEEEEEVGACSSSFSLAQGKEEITPEDEVASSSNN

SEQ ID NO: 144774 - protein, 116 aa, Glycine max
  unsure (1)..(116): unsure at all Xaa locations
  Clone ID: PAT_MRT3847_10174C.1.pep
XXXXXXHLLCXXXXXLXXXXXTPVLXXIXXXFXXXPPCTXXFXCXXALPDLVTXSLXXDXXXXLDXAXXXFFXXXXXXILXXXXRXXXXLXXXFYXXSXMXCXXXLXXAXXXXXXX

SEQ ID NO: 144775 - protein, 76 aa, Glycine max
  Clone ID: PAT_MRT3847_101750C.1.pep
FPAQGAFEFLKQPAFGNPNQDSFWGGPLYVKSVQLVLIAVPGGCFDPFASSLFPSPPPIMFPAYAPPKNVSILHLN

SEQ ID NO: 144776 - protein, 212 aa, Glycine max
  Clone ID: PAT_MRT3847_101751C.1.pep
MGNRAMLTLLLLLFFSTNLVPSALAIWLTLPTTGTKCVSDEIQHNVVVLADYVVIPSDHAHNLTIAVKVTSPYGNNLHHKENTTHGSIAFTTQEAGNYLACFWVDSPSQGVGEVNVNLDWKIGIAAKDWDSVARKEKIEGVELELRKLEGAVEAIHENLLYLKGREAEMRIVSEKTNGRVAWFSIMSLAMCIAVSGLQLWYLKRYFQKKKLI

SEQ ID NO: 144777 - protein, 46 aa, Glycine max
  Clone ID: PAT_MRT3847_101752C.1.pep
ESFHWMFTRSPVLSIGHLVQHFVKPKARANYKQHCSVSRDVIISKT

SEQ ID NO: 144778 - protein, 148 aa, Glycine max
  Clone ID: PAT_MRT3847_101753C.1.pep
PTRPKTTEGDTILFLFPLSFPTSKSQFLFSFSESQQYPSSFSLRRTRRRLLIPCFLYRSAAPSSCQRRLLVPSLPQPLTTSFHPIFSLIIIINLLPFSLSLSNIFIFLIACCNPLVADPVYDDSLANNKRILKKFVVSQFYPLKIKSS

SEQ ID NO: 144779 - protein, 57 aa, Glycine max
  Clone ID: PAT_MRT3847_101754C.1.pep
ASCPPHSLLLHHVRVLSVASITDSRCSCMVGYVCASGHGCGHSCSSVPFVRERSRLM

SEQ ID NO: 144780 - protein, 66 aa, Glycine max
  unsure (1)..(66): unsure at all Xaa locations
  Clone ID: PAT_MRT3847_101755C.1.pep
MATXXXXXDXSRXCAXKXXVXTGSSGKLNREVTXRPXXCPLLPLSRLXAKXGEWXPXXASPTXLDG

SEQ ID NO: 144781 - protein, 51 aa, Glycine max
  Clone ID: PAT_MRT3847_101756C.1.pep
PRVVLLKMCPCKNEFPLPKSPPFPFKGFFLKFGFPKKKKSIIPIHPIIFKP

SEQ ID NO: 144782 - protein, 63 aa, Glycine max
  unsure (1)..(63): unsure at all Xaa locations
  Clone ID: PAT_MRT3847_101757C.1.pep
MAASTMALSSSSLAGHAIKLAPSTXPELGVGMVSMRKTSSKTVSSGCPLYGTSRVQILGPILR

SEQ ID NO: 144783 - protein, 126 aa, Glycine max
  Clone ID: PAT_MRT3847_101758C.1.pep
MISDLRNSYNAINHGISVRLLEEQLATAESGDDFKRSFVLYVLGTLLCPTARLDVSPSFLHFLTNMDLVHQYNWGKFLLDRLVREVLRFHQGKQRTVGGCLLFLQLFYYENISLEGSSAPVPTIVP

SEQ ID NO: 144784 - protein, 48 aa, Glycine max
  Clone ID: PAT_MRT3847_101759C.1.pep
KLRLFEIKYYELRLVLWIVVAWSLKILQSNDCEIEFRSRGTLYCIRAG

SEQ ID NO: 144785 - protein, 51 aa, Glycine max
  Clone ID: PAT_MRT3847_10175C.1.pep
RVRSIYSLIPNKFPLLIKIVTNNVLIRRNCYNLGSLHIHALGPVNLHVTCS

SEQ ID NO: 144786 - protein, 341 aa, Glycine max
  Clone ID: PAT_MRT3847_101760C.1.pep
GICLQRTLKNYTYVTQFGSLEYYNRWDLGSNNSYRYNHDVYDRFWYIYGDNKDWKQLSASIPADYLNQNDYKPPEIILSTAVTPVNASAPLVISWEPPDQTELYYVYMHFTEIQVLAKNQTREFNIAHNGKPWCPNMSPPYQNVTTIYNKLRTSGKKIEYSLEKTKDSSLPPIINAIEIYRVINFQQSDTHQGDVDAIATIKSVYGMTRDWQGDPCSPVAYLWNGLNCTYRGNENPRITTLNLSSSELSGMIDPSISYLTMLEKLDLSNNNLNGEVPDFLSRLQHLKIINLDNNNLTGSIPSELVKKSKEGFLSLSVGQNLYLCESCQCNETKKKRTLVLP

SEQ ID NO: 144787 - protein, 143 aa, Glycine max
  Clone ID: PAT_MRT3847_101761C.1.pep
PNRRIRLVKTRTNSFDANKHSSDQPSQLSRPGRSPIRRESETVTCRGVSVDSPRMNSSGKIVFQSLERSSSSPSTFNGGPRFKHRGMERSYSANVRVTPVLNVPVCSLRGASKSGFIGFGQLFSSPQKKEGTTTGKGHRSIRN

SEQ ID NO: 144788 - protein, 80 aa, Glycine max
  unsure (1)..(80): unsure at all Xaa locations
  Clone ID: PAT_MRT3847_101762C.1.pep
TRHWITLVQTSPIRDSLXMLLXKKGCLTVNTGMSGNASTTRSGSASLGHVFLXTNSNSTSHFDACXWSQSEPHSWELTSP

SEQ ID NO: 144789 - protein, 56 aa, Glycine max
  Clone ID: PAT_MRT3847_101763C.1.pep
KEPCALLDSTAFLHSSRLQGSEAVMGSVSTLLTLLGAPCMRTLMSHVVVMSASPCK

SEQ ID NO: 144790 - protein, 64 aa, Glycine max
  Clone ID: PAT_MRT3847_101764C.1.pep
RNFHKNKIQIPLTCLKLTPKTIPRPLFSLKFKTTWFSTFWLVMSYKMKDGVKGSKRVTMDVNAR

SEQ ID NO: 144791 - protein, 103 aa, Glycine max
  unsure (1)..(103): unsure at all Xaa locations
  Clone ID: PAT_MRT3847_101765C.1.pep
LGKCYWPFRVLLLLFGRFLWGLLCVYPIAGFLLLSFCVRGSKGEAVASGMTPFSGVGEWVNWRESAFPLXEKVIXWWAFHASETLAACMLEVRSRLARMRASS

SEQ ID NO: 144792 - protein, 73 aa, Glycine max
  Clone ID: PAT_MRT3847_101766C.1.pep
QQHIAVFKMIKLPFGALWLRLTCQKLKWPLKLSYSHLNKWTRGTLTSYGTRPTKLALRMLGAGPCQKGCLGNL

SEQ ID NO: 144793 - protein, 48 aa, Glycine max
  Clone ID: PAT_MRT3847_101767C.1.pep
WDGSTPLLPLSSPRHRLCNLLQPKLFHNMNLTTNTTPSPMLLAPSKTL

SEQ ID NO: 144794 - protein, 333 aa, Glycine max
  Clone ID: PAT_MRT3847_101768C.1.pep
MRSTFCCHLNLSPVMIMKGFSAPISSYVSPRAQAVTEPPARIGFLGLGIMGSPMAHNLLKAGVDLTVWNRTKSKCDPLISLGAKYKPSPEEVAASCDVTFAMLADPQSAVDVACGKHGAANGMGPGKGYVDVSTVDGDTSKLINGHMKSTGALFLEAPVSGSKKPAEDGQLIFLTAGDKNLYEAVGSLLDIMGKSKFYLGDVGNGAAMKLVVNMIMGSMMASFSEGLLLSEKVGLDPDVLVQVVSQGAISAPMYSTKGPSMIQSLYPTAFPLKHQQKDLRLALGLAESVSQPTPIASAANELYKVAKSNGLSDQDFSAVIEALKSKFQHSETK

SEQ ID NO: 144795 - protein, 27 aa, Glycine max
  unsure (1)..(27): unsure at all Xaa locations
  Clone ID: PAT_MRT3847_101769C.1.pep
LHXTXHEXLKXXAKIQDYCFSNIVLVN

SEQ ID NO: 144796 - protein, 60 aa, Glycine max
  Clone ID: PAT_MRT3847_10176C.1.pep
WVHHAGYRVVDVLVGASAPTVTSAARRFSGQSLSYPQATKQEDNGEQDRVTAFTNPLLLC

SEQ ID NO: 144797 - protein, 146 aa, Glycine max
  Clone ID: PAT_MRT3847_101770C.1.pep
MKPIDDKQETVTIRTVSHDEEGKKRVEKTELSTHNIDTIRYVEKKLINKGVQRQDRHPADGIGISRPPPKSGHGGKFTWEGPATVENSELMAAPAAMDEGDPNYVDWEENGEEASELVVGEVEVSKVAQEHDGLARVDVDPRLQVN

SEQ ID NO: 144798 - protein, 149 aa, Glycine max
  unsure (1)..(149): unsure at all Xaa locations
  Clone ID: PAT_MRT3847_101771C.1.pep
YCAGGQPLGEKEAXQPSLNEFPHVYEKEDVAEPGEQDPFVDXISLMADIDYIIYDKSDVIMPSNGGDMVDALHDNTAFAVYSKYITANKXHMLAYEINCFLLSNETSRIIDELHEDALSPPQLLTSKSAMDFSKTAVAECIYLDDVHHN

SEQ ID NO: 144799 - protein, 122 aa, Glycine max
  unsure (1)..(122): unsure at all Xaa locations
  Clone ID: PAT_MRT3847_101772C.1.pep
FLPTRVEAQDEXELAEKDSFEELKNLATASVNGKPIEAESFKRPSQVIDPVKHRGFVAYEREGVQYRDPNARINDWNEVMKETKPGPLLKTQSARCMDCGTPFCHQEKSGPCWKWTVWPGSC

SEQ ID NO: 144800 - protein, 101 aa, Glycine max
  Clone ID: PAT_MRT3847_101773C.1.pep
MDWGTGRGKRTKNGYSPQGGHRKLGKTKIKKYSIGTKNITGVKITKGELKQWAFKKGEAPGAAKRRKKYPKIQGQTFGARARKHKIGIFRGYFKTGRLGMG

SEQ ID NO: 144801 - protein, 192 aa, Glycine max
  Clone ID: PAT_MRT3847_101774C.1.pep
ARVPQPPQTRAPGNPWPQWPRIYRVESGHQEGAAKFGKDPRSYEVLTKRFVGDENGVVKGLEVIRVLWEKDETGRFQFKEIEGSEEILEADLVLLAMGFLGPEPTIAEKLGIERDNRSNFKAEYGRFSTSLKGVFAAGDCRRGQSLVVWAISEGRQAAAQVDSFLTNEDIEHNVAGSPDDKLQHKFAVPNKQ

SEQ ID NO: 144802 - protein, 940 aa, Glycine max
  unsure (1)..(940): unsure at all Xaa locations
  Clone ID: PAT_MRT3847_101775C.1.pep
SAKRNCEQNKIVPSLSWRIINLFFMISEEMTSVVXEIMRLFRCLVWFQGVKLLHTRVFSCSKEVIKSNEKLENIDLSLLLRPAAELRPEAXAQYCVQKQDHGLDMALDNKLIGLSNAALEKGLPVYIESPHXNVNRAVGTMLSHAVTKKYHLNGLPTDTIHIRFNGSAGQSFGAFLCPGGQFLXGEGNFRGMASGRIVGKLPXKEDQDHRKQNIVIGNVALYGATSGEAYFNGMAAERFCVRNSGAKAVVEGVGDHGCEYMTGGIVVVLGNTGRNFAAGMSGGIAYVLDMDGKFLSRCNHELVDLDKVEEEEDITTLRMLIQQHQRHTNSVLAKEVLADFENLVPKFIKVFPKEYKRVLASIKSKEASKDAAESASKHGEEQDEIELVEKDAFEELKKLATASVNGKPIEAESFKRPSQVIDPVKHRGFVAYEREGVQYRDPNARINDWNEVMKETKPGPLLKTQSARCMDCGTPFCHQENSGCPLGNKIPEFNELVYQNRWREALERLLETNNFPEFTGRVCPAPCEGSCVLGIIENPVSIKSIECAIIDKAFEEGWMVPRPPARRTGKRVAVVGSGPSGLAAADQLNKMGHTVTVYERADRIGGLMMYGVPNMKADKVDIVQRRVNLMAEEGINFVVNANIGHDPLHSLDRLREENNAIVLAVGATKPRDLPVPGRELSGVHFAMEFLHANTKSLLDSNLQDGNFISAKGKKVVVIGGGDTGTDCIGTSIRHGCSSIVNLELLPQPPQTRAPGNPWPQWPRIYRVDYGHQEGAAKFGKDPRSYEVLTKRFVGDENGVVKGLEVIRVRWEKDETGRFQFKEIEGSEEIIEADLVLLAMGFLGPESTIAEKLGIERDNRSNFKAEYGRFSTSLKGVFAAGDCRRGQSLVVWAISEGRQAAAQVDSFLTNEDLEHNVAGSPDELIKKKQQPRDTVAVANKQ

SEQ ID NO: 144803 - protein, 135 aa, Glycine max
  unsure (1)..(135): unsure at all Xaa locations
  Clone ID: PAT_MRT3847_101776C.1.pep
MVHIKIMAMANLAQPKAYSVTMSLCRTXLTRRRGFVSISDXNDDMVIDGRPSEYVAAIKAAQLGMXTTCIEKRGPLGGTCLNAGCIRCKALEHSLHMYHXTAKHAFANHGATLSSVQVESSFMMASKDKAALNLT

SEQ ID NO: 144804 - protein, 156 aa, Glycine max
  unsure (1)..(156): unsure at all Xaa locations
  Clone ID: PAT_MRT3847_101777C.1.pep
KPFSAYFIRFVPSTPGTRPKTHVIPTLPNGPHSLPLAPHSPPTTSIPRLHRPPRPRSSPEHPPPSPPPPPPPPPPPPPPPPSPPLPPPLPPPPPPPPLPPPPPRPAPRPPPPPRTPPTPLAXXPPSVPPHXPPPLPPPPPHPPPPCPPPPXPPAPP

SEQ ID NO: 144805 - protein, 79 aa, Glycine max
  unsure (1)..(79): unsure at all Xaa locations
  Clone ID: PAT_MRT3847_101778C.1.pep
XXXXXXXXXXXFXNXXXQYQLXXXXNSXXYXQXXXHXXLNXXFXFFXFYXXXIPIXTXXXNXHNXXXXXYXSXKXHXXP

SEQ ID NO: 144806 - protein, 343 aa, Glycine max
  Clone ID: PAT_MRT3847_101779C.1.pep
MVLKFVYIIIILMIWCMYPLTSAQYENGTITSAQYENKTIASPPGCDSKCGNVSIPFPFGMHDPKCYASNQFEIECRHNNNTSQGHQKPVPHLKYINLEVMYIDIQYGTVGIKNPIFHPGCGKTVTGINLEGSPFVYSQNYNSFVGVGCQNAAIMLSNDTILTACMSVCYEHLEKGNDIDISSCRGSYCCETSLPPYLSAYNISTETVEVKSNIKAECSNYLLIRAEYSNFKYEYDEYNSSYWVPTLGDLKKQKDVPAVLEWEIPIHTPNNSFPEFRTDAYGHGSYNCSYTNVTSSLYSQSGWRCSCRDGFEGNPYIQEGCKFVGMTPILPTSTTILHNNLVN

SEQ ID NO: 144807 - protein, 126 aa, Glycine max
  unsure (1)..(126): unsure at all Xaa locations
  Clone ID: PAT_MRT3847_10177C.1.pep
AAAFFFXIFFFFLGGTPTLYPRGGVGNRGCPQPRPARMGIQKIHRIKLLISAFAQKNHKKILMSSVWAGTNSALFKTIHDMKLNFEKVLFYVLQKSDGTLSFNADSYMRKERFTVQNHSSSNSTKR

SEQ ID NO: 144808 - protein, 45 aa, Glycine max
  Clone ID: PAT_MRT3847_101780C.1.pep
APSECMTQHIGRSVSTLMDYQGSRQAEVRLLACPVRLSLCPFYIL

SEQ ID NO: 144809 - protein, 78 aa, Glycine max
  Clone ID: PAT_MRT3847_101781C.1.pep
MKLVGIPGALAFAWLAIELALKPFLAKARASIDNSDPPRDPDDDALPKTTTDDVPDAADSKPAGDVPPAADTITTDAV

SEQ ID NO: 144810 - protein, 96 aa, Glycine max
  unsure (1)..(96): unsure at all Xaa locations
  Clone ID: PAT_MRT3847_101782C.1.pep
XXHXLGIRLEXRIXXNGXHXXXLXXXRNNXXFGXYQXAXKXXXGNKXFXXXFXXRXNLGSTXVNSPWGXXSVVIXEXXMXXLPXLSKPXNSCALYF

SEQ ID NO: 144811 - protein, 46 aa, Glycine max
  Clone ID: PAT_MRT3847_101783C.1.pep
RGLRFQHNINLGFRSIKNYLWYLDFSILCEPLFIRLSSMDVTYGQL

SEQ ID NO: 144812 - protein, 58 aa, Glycine max
  Clone ID: PAT_MRT3847_101784C.1.pep
TIWERLVTLCTVPGRGISPGLTHFCPNFIDRNRIGFCCFFSSSDSYAMLCIEDLSWEQ

SEQ ID NO: 144813 - protein, 95 aa, Glycine max
  Clone ID: PAT_MRT3847_101785C.1.pep
VKGLFPTPVVVRVRRIHSVIAVIVARSSSGVDKDPIVYLVLLVVKALDKSKPADFPIGSAKGEASSKAHLGGLGRGQKGAVIEAELKVLWAQRKR

SEQ ID NO: 144814 - protein, 136 aa, Glycine max
  Clone ID: PAT_MRT3847_101786C.1.pep
KNIGPNPPPEPGKKLILPRPKGGDLPQKTQNYKNFGGGGKKPNFFKVGKKGPKGKNFWGGYFFHLGTNPGGQAQTQKKNPPALTGGGKPHGGKGDFLNPKYPPGGNGYLSGNNPRQQKKLVDPFPSETGSKKTLGG

SEQ ID NO: 144815 - protein, 48 aa, Glycine max
  Clone ID: PAT_MRT3847_101787C.1.pep
KQEPKICKCTFYSSIDIFIGHVQTPGQNEFRNCTSKLTIVVYQCLMIF

SEQ ID NO: 144816 - protein, 37 aa, Glycine max
  Clone ID: PAT_MRT3847_101788C.1.pep
TPHSTITARPRTSRWTLTAKKVSLSPCLKCDQGPLEP

SEQ ID NO: 144817 - protein, 67 aa, Glycine max
  unsure (1)..(67): unsure at all Xaa locations
  Clone ID: PAT_MRT3847_101789C.1.pep
XVDALEXXXDPKVKXRASEVAKSXXNEDXVSGPVKAFGQQLPQKKPEPDTNAQTYRSLSVGRGFGCS

SEQ ID NO: 144818 - protein, 111 aa, Glycine max
  unsure (1)..(111): unsure at all Xaa locations
  Clone ID: PAT_MRT3847_10178C.1.pep
SATLSYSLPPLTTPTKTTHLSLSVGLKPSRSSLRSKSRFAVSCSQWTPPAPDASLSRRRPAFIPILIPDPDYVRICDTTLRDGEQSPGAXMTSKEKLDVARTLGRAGRRHD

SEQ ID NO: 144819 - protein, 235 aa, Glycine max
  unsure (1)..(235): unsure at all Xaa locations
  Clone ID: PAT_MRT3847_101790C.1.pep
RDARARNAGRDRIAVVRRGDLEDVEEGTEDHKYPRISYKQLREATGGFSASSLIGSGRFGQVYEGMLQDNTRVAVKVLDTTHGEISRSFRREYQILKKIRHRNLIRIITICCRPEFNALVFPLMPNGSLEKYLYPSQRLDVVQLVRICSDVAEGMSYLHHYSPVKVVHCDLKPSNILLDEKMTALVTDFGISRLVQSDENTSINESASXXSTHGFVYDGSVWLYXAPEYGMXKTC

SEQ ID NO: 144820 - protein, 91 aa, Glycine max
  Clone ID: PAT_MRT3847_101791C.1.pep
DTWENYITLWLVIHKLQLFGFFFVSLASLYLVKFWLDVRLMNGRFQPLIQIHSSNVQMSLVSKLRHYLVWIYHGGIDPVLHVYTENYVRCS

SEQ ID NO: 144821 - protein, 64 aa, Glycine max
  Clone ID: PAT_MRT3847_101792C.1.pep
TSLNGGFLTKPKVPEPNKGFWALGLFSTKRKKNLKGPRYSKKGPYQTVPTLANFGKNGTKSFFI

SEQ ID NO: 144822 - protein, 44 aa, Glycine max
  Clone ID: PAT_MRT3847_101793C.1.pep
EVPQGGRASRGKPIVNMFPLQPGEKITVVLPLTGEFRSFPADHY

SEQ ID NO: 144823 - protein, 78 aa, Glycine max
  Clone ID: PAT_MRT3847_101794C.1.pep
MTMVTALFFTLLLCSMLVHAMSIPLEPAFHQESLAKPHQQSVEAVDESCEGVGEDECLMRRTLAAHVDYIYTQKHNNP

SEQ ID NO: 144824 - protein, 47 aa, Glycine max
  Clone ID: PAT_MRT3847_101795C.1.pep
KRGKENPKKQFQKRRLPGWCQPSTKLNGSPRVANPNKSETFCFCYWV

SEQ ID NO: 144825 - protein, 87 aa, Glycine max
  unsure (1)..(87): unsure at all Xaa locations
  Clone ID: PAT_MRT3847_101796C.1.pep
MKKKDLGLLMATIEVACHCHAYNIYSLLMNTGYGARTKEVKSASRRLVVXAHIIFDXETIPEECTESTKEYMHGEQYRSYSKTVNQQ

SEQ ID NO: 144826 - protein, 54 aa, Glycine max
  unsure (1)..(54): unsure at all Xaa locations
  Clone ID: PAT_MRT3847_101797C.1.pep
ARAARAICXCRXYXHRXQTCARVHDSNERSKGCQQQHPHQEVACVIRSCPRLIS

SEQ ID NO: 144827 - protein, 90 aa, Glycine max
  Clone ID: PAT_MRT3847_101798C.1.pep
ASARPDATHPGLLLGLCHSLSSLVLPSDVLENQAMPAPSDSNFPHGPRPRDHHLTPVAVFPPHALHLLQLCLRAPYSQFPHCEAHSLLST

SEQ ID NO: 144828 - protein, 67 aa, Glycine max
  Clone ID: PAT_MRT3847_101799C.1.pep
PAPIPTPPRSKPRSFLTTLLSHTIALMATSKATRAKVLPGTAIDTVQYKSLRSQLMKQKGMFVVRLC

SEQ ID NO: 144829 - protein, 114 aa, Glycine max
  unsure (1)..(114): unsure at all Xaa locations
  Clone ID: PAT_MRT3847_10179C.1.pep
LYPVSQILSEAVVENLTCVTQRGGXAATAWIRFAVNHHSSDIHKMTRTALGXGKENVFLSRVAPWPXVALQDVLFGVKKAFMSSISAHPMPMXLLENCKSLEYVVNQWPFAFVK

SEQ ID NO: 144830 - protein, 125 aa, Glycine max
  Clone ID: PAT_MRT3847_1017C.1.pep
ERRVITRKKGKEKMPCLYISTNINLDGVNIDPIFSQATTAVSTIIGKPEKFVMVILKGSVPISFEGNKEPAAYAEIVSMGGINPEVKRKLINTIGTILQSNLSIPRTRFFLKVFDTTLFRTKSKM

SEQ ID NO: 144831 - protein, 184 aa, Glycine max
  unsure (1)..(184): unsure at all Xaa locations
  Clone ID: PAT_MRT3847_101800C.1.pep
MKSTESKLYVLQAAIAAGARXVAVFASASESFSKSNINCSIEESLVRYRAVTRAAKQLSIPVRGXVVPMLLAVMAVVPAEKLAVHFHDTYGQSLPNILVSLQMGISAVDSSVAGLGGCPYAKGASGNVATEDVVYMLNGLGVKTNVDLGKLMLAGEFIGKHLGRPSGSKTAVAFSRVTADASKI

SEQ ID NO: 144832 - protein, 137 aa, Glycine max
  Clone ID: PAT_MRT3847_101801C.1.pep
GCFEISLGDTIGVGTPGTVVPMLLAVMAVVPAEKLAVHFHDTYGQSLANILVSLQMGISAVDSSVAGLGGCPYAKGASGNVATEDVVYMLNGLGVKTNVDLGKLMSAGEFIGKHLGRPSGSKTTIAFSRVTADASKI

SEQ ID NO: 144833 - protein, 189 aa, Glycine max
  Clone ID: PAT_MRT3847_101802C.1.pep
MEIEASRPVVAKKVWNMVRVLFFMLRKGIAKSKIMVEFHLMLKRGKLALNNLILNHHYYNMQTSFFTCRSHHHSTFISPSDYEFSCSNSPAIPTKRTNRFSTKSLSSVQKVLEILNNENNINSPFPGFGKSPASVRQLRVTDSPFPLKDEEDSQVDVAAEEFIKNFYKDLNLQKKMAYLDSPYHISWNR

SEQ ID NO: 144834 - protein, 68 aa, Glycine max
  Clone ID: PAT_MRT3847_101803C.1.pep
IILSTIAFIASFKKWCPSHILTPTPLSFPLHYLILTLSTPTQLNLTIFIHHPLINFLINSFNTHNLIL

SEQ ID NO: 144835 - protein, 148 aa, Glycine max
  Clone ID: PAT_MRT3847_101804C.1.pep
ATFDEKAAKEQWGFNGYGSMKGLIRLRPGNCDSGAGRFEMVYPNSGEEHKNLDKRVAEQDTHIAQLEEQNLTLKERLLFMERQLDDMRRRVQFLETYGTTSPGGEGGAENFPAAGDVCSVKSYINNSGVDGDNNNVDENNNWEDILQW

SEQ ID NO: 144836 - protein, 38 aa, Glycine max
  unsure (1)..(38): unsure at all Xaa locations
  Clone ID: PAT_MRT3847_101805C.1.pep
GXRRXMQGHDEACLRXLLLLERRHHFVYFXXSRFXWLM

SEQ ID NO: 144837 - protein, 85 aa, Glycine max
  Clone ID: PAT_MRT3847_101806C.1.pep
LALNVFYIATSSSTHGCLCSIILLLNPTCRVGTGPAGSFIFPPRPSTHCPGCRHTNLSCIPTIHLRLLTSDYQGQVLTHLYNPGI

SEQ ID NO: 144838 - protein, 61 aa, Glycine max
  Clone ID: PAT_MRT3847_101807C.1.pep
IGMVLFVIGLRIGAKHLPDVCYNAEYMNVTTGVNVDSSSNLPTYELGRLNLDLAFKRIFSY

SEQ ID NO: 144839 - protein, 106 aa, Glycine max
  Clone ID: PAT_MRT3847_101808C.1.pep
LISAVPTSWTFRAKNFTQGEIEYCESAPDPTASYAGRWAAKEAVFKALGTQSKGAGASLKDIEIVSTDKGPEVKLFGDAASVAGGKTIKVSLSHSDASVVAFAVAQ

SEQ ID NO: 144840 - protein, 37 aa, Glycine max
  Clone ID: PAT_MRT3847_101809C.1.pep
DFVTYLVIAPAFFKVSLCRHMAGAYEFTFLPPNTKRE

SEQ ID NO: 144841 - protein, 71 aa, Glycine max
  Clone ID: PAT_MRT3847_10180C.1.pep
DTTNISLKSVVLHFNCLRFHLATISSSRGYTLRYPCMPRHRSTMLPHKCHSLGVALRHRDGESAGVTPDTH

SEQ ID NO: 144842 - protein, 54 aa, Glycine max
  Clone ID: PAT_MRT3847_101810C.1.pep
YQTKQEHQEANTSIRTRIFLNFLNQFCYNNLFNFVIKIQRTHSGTHAPISLCCL

SEQ ID NO: 144843 - protein, 351 aa, Glycine max
  unsure (1)..(351): unsure at all Xaa locations
  Clone ID: PAT_MRT3847_101811C.1.pep
MENVCDVNHLDADVLLPPRKRLLAGLKKQSSDGDAAASPPLVVASCVTTVSEVASPSLTSYSSEFEARLKNLLGSHSDNPXXPLRRFVEASKAAAVAASKAAKAARAAAEEKAETAAKAVAAAKRALDLVASFSEEAVSSKERSLKKNKLKKHLPVHLLYKKYQPIENCGTDEELARKLHRAMNSSPRISKNSPNSDSKGSKHKKPKNSWSFEMTEVDSEGSIQEVCSNKEDKKSQMEITDNGEAESSQSKEKNTEDLSSVGRKRGRVKLKKLPLSICTSKDRALPKEGVRARSAPLTEMNTGGNHAVGNIPLFPMEPSTDRVIPIEATTTCKCQELKAPACIKQNKAVQS

SEQ ID NO: 144844 - protein, 373 aa, Glycine max
  Clone ID: PAT_MRT3847_101812C.1.pep
MENVCDVNHLDADVLLPPRKRLLAGLKKQSSDGDAAASPPMVVASCVTTVSEVASSSYSSEFEARLKNLLGSHSDNPNLTPEEVVEASKAAAVAASKAAKAARAAAKEKAETAAKAVAAAKRALDLVSSFSEEAVSSKERNLKKNKLKKHLPFHLLYKKYQPIENCGTDEELARKLHRAMNSSPRISKNSPNSDSKGSKHKKPKNSSSFEMTEVSDARMALGQDCLSLNNGHAVMSKVDSEGSIQEVCSNKEDKKSQMEITDNGEAESSQSKEKNTEDLSSVGRKRGRVKLKKLPLSICTSKDRAQPKEGVRARSAPLTEMNTGGNHHPVGNIPLFPMEPSTERVIPIEATTTCKCQEFKAPACIKQNKAVQS

SEQ ID NO: 144845 - protein, 65 aa, Glycine max
  Clone ID: PAT_MRT3847_101813C.1.pep
ECFVNYKSAMLGDYSLLYEIELLHYLCPRMQTLQELRLTFVFQKSLLLSGEHLAMIQNTKQKLYM

SEQ ID NO: 144846 - protein, 219 aa, Glycine max
  unsure (1)..(219): unsure at all Xaa locations
  Clone ID: PAT_MRT3847_101814C.1.pep
MRPRRETEKRRFDFDSANTNNSASSSPKSPRRRPKLLAVLMAGQSRKWMILVATIWIQAFTGTNFDFSQYSSSLKFALNVSQVQLNYLATANDMGKVFGWSSGIALMHLPVSVVMFVAAFMGFFGYGLQWLVITGVVNLPYFLVFLLCLLGGCSICWFNTVCFVLCIRNFPVNRALALSLTXLVPILNQPALDPLPPDAVNRDSVIFLILNFIALLTGL

SEQ ID NO: 144847 - protein, 81 aa, Glycine max
  Clone ID: PAT_MRT3847_101815C.1.pep
SGQGQKLCMLLFAPHVNHVHRTESNYRYYPAFLWKNHGGITHIWLIKKYFLSNEYLEPKNDTRLVLGIYVSGYMNKNIIHL

SEQ ID NO: 144848 - protein, 44 aa, Glycine max
  Clone ID: PAT_MRT3847_101816C.1.pep
WGYVLGVRFEQRRSLINFIVYCTYNNVNMEESNNPFCSSLNGHI

SEQ ID NO: 144849 - protein, 30 aa, Glycine max
  Clone ID: PAT_MRT3847_101817C.1.pep
FLKRYLCSISGVFMSQVLFGKVCIGLCTKL

SEQ ID NO: 144850 - protein, 66 aa, Glycine max
  Clone ID: PAT_MRT3847_101818C.1.pep
YMLFLFFFFPLFSSLFSANYKLMYNYSLLHPRNSCFSEESVYLANSIASCFVPIWVRENGSRVSPF

SEQ ID NO: 144851 - protein, 45 aa, Glycine max
  Clone ID: PAT_MRT3847_101819C.1.pep
GNNIRCLFLIPKRDQRGYKRTMIYVQSRRNDNSGHTRYIHYLANY

SEQ ID NO: 144852 - protein, 80 aa, Glycine max
  Clone ID: PAT_MRT3847_10181C.1.pep
DKDSYHTALFLALLVSFYSLSARCACLTNESPDWSSSDSFFRLLIRQYRQKQLNSIPMATSVDWHSASINYIYYRCDHDS

SEQ ID NO: 144853 - protein, 34 aa, Glycine max
  unsure (1)..(34): unsure at all Xaa locations
  Clone ID: PAT_MRT3847_101820C.1.pep
EFVHNFSHVPFSVTLGSTLVEGFTPESMKLLXAM

SEQ ID NO: 144854 - protein, 54 aa, Glycine max
  Clone ID: PAT_MRT3847_101821C.1.pep
VVVCVQPRHGCTSNLQTRIFSSATDSIVGLVCIAVCMAHSLQICLTFRNSFSGT

SEQ ID NO: 144855 - protein, 58 aa, Glycine max
  Clone ID: PAT_MRT3847_101822C.1.pep
FVKSRYTHGIHTHEIRDQVTNPPIVQKIHHHQSGCELLMSALGDVEQQMEGFHSQIWN

SEQ ID NO: 144856 - protein, 98 aa, Glycine max
  Clone ID: PAT_MRT3847_101823C.1.pep
SDYPEQWPHLLDWVKHNLQDQQVHGALYVLRILSRKNEFKSDEERVPVYRIVDETFPHLLNIFNRLVQIVNPSLEVADLIKLICKIFWSSIYVRFLSS

SEQ ID NO: 144857 - protein, 99 aa, Glycine max
  Clone ID: PAT_MRT3847_101824C.1.pep
MKIPVLPAVVLLSLLVLHSAQGATLGGPEEESTIENYASRPEAFNTPFLNIDKLRSAFKADEFLNWHALFESIKRKLPFLNWDAFPKLKGLRSATPDAQ

SEQ ID NO: 144858 - protein, 396 aa, Glycine max
  unsure (1)..(396): unsure at all Xaa locations
  Clone ID: PAT_MRT3847_101825C.1.pep
MRALQCQCCSPDEVIFGPDFFQSLXCHLLCGLIFREEVEFVSSTFAHSIVHAFRTFEQVWEELCNDIREGVLTRNVTVPSIRMAMSKLLKPNPELANAIHKKCTGLSNWYGLIPELFPNAKYIYGIMTGSMEPYLKKMRHYAGELPLLTADYGSSEGWIAANVNPQLPPEYATYAVLPHIGYFEFIPLLELENTKPLGLTQVKVGQEYEIVMTNPAGLYRYRLGDVVKVMGFHNSTPELKFIRRSSLLLNINIDKNTEKDLQLAVEAAGKLLAEEKLEVVDFSSQVDLSKEPGHYVIFWEISGDASQELLHECCNCLDKSFVDAGYTSSRKVNCIGALELRLVRRGTFQKILDHYLGLGTAVSQYKTPRCVGPTNTRVLQILSENVVNNYLSTAFN

SEQ ID NO: 144859 - protein, 78 aa, Glycine max
  unsure (1)..(78): unsure at all Xaa locations
  Clone ID: PAT_MRT3847_101826C.1.pep
TSTRPPYEDMNEVLNSKHCHTILTRSRSHNAGTYNKNIEDWPLRRAANGXLKIXVDLKHGANARLLNALKLLHANKDK

SEQ ID NO: 144860 - protein, 88 aa, Glycine max
  Clone ID: PAT_MRT3847_101827C.1.pep
LLLGPLMVLSVFRPVLPFLPGYLLGYGGFWFLPWGGPIRFCKNFFSPRITGLVRFLVFISHLAFPEWPFPLVFKAGKGPLFSFFSFLS

SEQ ID NO: 144861 - protein, 70 aa, Glycine max
  Clone ID: PAT_MRT3847_101828C.1.pep
KEMVEKVYSEAGNLKGVVLKEEDLAEAALFLASDESKYVSGVNLVVDGGYSVTNVSVKEAVRKFSGKPKL

SEQ ID NO: 144862 - protein, 107 aa, Glycine max
  Clone ID: PAT_MRT3847_101829C.1.pep
KFSDKSLRPHYLYVILCQFAVSCHTFLKLPDFIYIIRYAACSRDGSESVRSCALLFSLYHNIFGLTNVTSNISAAVGAVVMLHIALGMYIFKAYSKPTEPEKPAKQD

SEQ ID NO: 144863 - protein, 88 aa, Glycine max
  Clone ID: PAT_MRT3847_10182C.1.pep
RSEPHSWERSFPIQVCGPHNGFERWSSERANQLSWRFSFLIDNPKQSTVFENLLGISQDFESAGNILRPAFSVPQATARYSENAGSFA

SEQ ID NO: 144864 - protein, 72 aa, Glycine max
  Clone ID: PAT_MRT3847_101830C.1.pep
ELAFRQHNMSVSSNNNIFWLALTVHNVTHVQILHRHYVLCHITKLLLAHDICYSYMLLHLVLLVFIWSALLQ

SEQ ID NO: 144865 - protein, 55 aa, Glycine max
  Clone ID: PAT_MRT3847_101831C.1.pep
GDQYGRMILVWVSSTRSKRSFRLSGLGQRSFCMNLALTLIGFHVWPPECVHSSYT

SEQ ID NO: 144866 - protein, 164 aa, Glycine max
  Clone ID: PAT_MRT3847_101832C.1.pep
MKKATATCTKPYGLVRKTARKKKKKKKKNSRLVLSSCRIRHEVSLSSPSRVFANAKGIDSAQKAQAVRFPALSRPIQKWPGLVKTRPVRATPEKISEKVEESIKSAEEACSGGGGDAECAAAWDEVEELSAAASHAREKQKQSDPLENYCKDNPETDECRTYDN

SEQ ID NO: 144867 - protein, 45 aa, Glycine max
  Clone ID: PAT_MRT3847_101833C.1.pep
GSRRMCMRVPLMINMLQLSETVILTVSDALCLIDTPGDCIRQNYR

SEQ ID NO: 144868 - protein, 47 aa, Glycine max
  Clone ID: PAT_MRT3847_101834C.1.pep
STSVIWRRITAIISAIWAMKLFMGSLKKGVMKPPSSDEASSESARLV

SEQ ID NO: 144869 - protein, 168 aa, Glycine max
  unsure (1)..(168): unsure at all Xaa locations
  Clone ID: PAT_MRT3847_101835C.1.pep
AVGKNKKISKGKKGGKKKAADPFAKKDWYNIKAPSIFQVKNVYKTLISHTQRTNIASERLKHIXFEVSLADLQRDKYHTFKKIHLRAKDVQRKNVLTNFXRIDFTTNXLKSLIPKXQTLMXSHINIKTTNNYTLEIFYINCTKKHSDRMKETYYAQSSRIRQIRNKMI

SEQ ID NO: 144870 - protein, 50 aa, Glycine max
  Clone ID: PAT_MRT3847_101836C.1.pep
FSALINVCRGQRFLKVQFKMWFGPLIEPIKGIFLSRNILNIGRPNYVPLF

SEQ ID NO: 144871 - protein, 127 aa, Glycine max
  unsure (1)..(127): unsure at all Xaa locations
  Clone ID: PAT_MRT3847_101837C.1.pep
FRTIVENKKNYGIILPGYKRLCFELHCYFQWRQAKEGGGGGCFVVVRLVRRRSCDCCEEGEVMGEEVAMAGVVCTKRKVLGSEKDSLVFSSKMRGVRYTYESAPFKSVIHLLSIQAHKKKHFIFRXX

SEQ ID NO: 144872 - protein, 57 aa, Glycine max
  Clone ID: PAT_MRT3847_101838C.1.pep
RHQELPTGQHLKDLNRSPAPRKFVRQWISWKRDGNSLQIRLINIFDCKFEDIVGGFT

SEQ ID NO: 144873 - protein, 135 aa, Glycine max
  Clone ID: PAT_MRT3847_101839C.1.pep
NYIGAERDQTLPYDTMMSYLFPLASSSYTHYSIINNKATIASACLPSYIIKKPLGFHPSNLHNKCFSKSNASTSTLTCKALSSSTMMDFDLYDLLGIDSSCDQSQVKVAYRSLHQEAMEKANKCSKVSLTCNALS

SEQ ID NO: 144874 - protein, 71 aa, Glycine max
  Clone ID: PAT_MRT3847_10183C.1.pep
KSQKKSFLGPEDPLFQRQRGVKKKRKSCEEEGSQGYHGCSKSQLSLHHVRGTQCVCLWINLCHPNACACVG

SEQ ID NO: 144875 - protein, 501 aa, Glycine max
  Clone ID: PAT_MRT3847_101840C.1.pep
PASVTWSLEAVTEPNSIFPLASSSYTHYSIINNKATIASACLPSYIIKKPLGFHPSNLHNKCFSKSNASTSTLTCKALSSSTMMDFDLYDLLGIDSSCDQSQVKVAYRSLQKRCHPDIAGPAGHDMAIILNEAYSILSDPNARLAYDKEQAKSSEFKGFTGRPIYSVWCGSESEQRAIFVDEIKCVGCLKCALLAEKTFAVESVYGRARVVSQWADSPNKIDEAIESCPVNCISVVERSNLAALEFLMSKQPRGNVRVGAAHTAGARVSNIFVDVEKFQTRFQEAMEKANKCSKETDLQRESRMSAIQAIRSISNWLYWQTPRSSSSSSKSEKGMTRVVNKLPEPDISKLRDAVARKKVRDRTRTKHQTPLNFIHPEEYWTPSTHALPSSTRSTTTPTPLEKPSVTTPGQKKTNASDHETYENRNSPIRWGLPIITALTAVVTVQIPPVESTSKLHQHVGGSLALQIVNSSWLQCTLAAATWYMIGMAITELLSIIGNRNR

SEQ ID NO: 144876 - protein, 43 aa, Glycine max
  Clone ID: PAT_MRT3847_101841C.1.pep
NMGKTRAWVVQLVGIIDSYSPIRSELSHKHQLREKIITILISK

SEQ ID NO: 144877 - protein, 229 aa, Glycine max
  Clone ID: PAT_MRT3847_101842C.1.pep
MDDWEDEHIAPIDLTLKDPVKSNWDDEDVDENDVKESWEDEDEPAPAPAAPAVKTTEKAPKKSSDKATEKKGKTVEPIKEEPLDPVAEKLRQQRLIEEADYKATKELFSGGKEKDEKNLDTFIPKSESDFLEYAELISHKLRAFEKSYHYIGLLKAVMRLSTISLKGADAKDIASSVTAIANEKIKAEKEANAGKKKIGGKKKQLNVDKPDEDFVPADRYDALDDYDFM

SEQ ID NO: 144878 - protein, 137 aa, Glycine max
  Clone ID: PAT_MRT3847_101843C.1.pep
MKSSGPSTTLALFLTINLLVFVMASGCYTCTQPKPNPSPNPFPYPNPSPTAKSCPRDALKLGVCANVLNGPIGAIVGSPPDHPCCSVLEGLLDLEVAVCLCTAIKANILGINLNIPISLSLILNACEKSPPSDFLCN

SEQ ID NO: 144879 - protein, 128 aa, Glycine max
  Clone ID: PAT_MRT3847_101844C.1.pep
CFSLHIHRVDTLPSSIQVSHSVQAEGSVYLSLRNVFSAYENNQFQVLAAQLPPVDCLCSMIRPIMPNCNYILSFSFFISNCFPVVGTTPADFMLICPFGDPLKNLAILCANYKAPLYITSLESWSFLT

SEQ ID NO: 144880 - protein, 32 aa, Glycine max
  Clone ID: PAT_MRT3847_101845C.1.pep
HSATSQPWAWRSFVDDHLHESHSMNQLISSRY

SEQ ID NO: 144881 - protein, 139 aa, Glycine max
  Clone ID: PAT_MRT3847_101846C.1.pep
MIPQQWASPCGNQCTNKYAALTKIPWRVFCKKGCDSDGETWEECLEDCNQICYKDPVLKDQQWSAYIDRSPGAASYSEECFHACVSGCGYKFEVKPEEADKVSPNRQLKPETKPKPQPKPKPQPVCPIDPPSDIPDTSA

SEQ ID NO: 144882 - protein, 104 aa, Glycine max
  unsure (1)..(104): unsure at all Xaa locations
  Clone ID: PAT_MRT3847_101847C.1.pep
SNLQSNVSTEQGYYVFCNKSHTIANISPQNIQSLQLHKRELSKYRSIISWNYLHDGTICLSKQVLXSIYKENNQMTMNVIHYDLLTLYKNFKSNYKLTPTEMAT

SEQ ID NO: 144883 - protein, 81 aa, Glycine max
  Clone ID: PAT_MRT3847_101848C.1.pep
RLLYPDLASMWSHPENSEKIHCRFCLPPHRNDNFGLQDAAIHSPSFFCTAPHLTVTTYPPDPPLISLTIPSSYRRSITVRV

SEQ ID NO: 144884 - protein, 48 aa, Glycine max
  Clone ID: PAT_MRT3847_101849C.1.pep
KTAANELNLKNATQYLFFFYLFFFNFSFFIFFFFFFFIFFFFFFSDAW

SEQ ID NO: 144885 - protein, 85 aa, Glycine max
  Clone ID: PAT_MRT3847_10184C.1.pep
MDGLKVLSACLNLVPKFSSQLAAPLIHLVRAIIELRDDVSKERFGPTRMDNFFKVKFKKPSIFKVDFFGKRSSFGCIKIKKDWRV

SEQ ID NO: 144886 - protein, 60 aa, Glycine max
  Clone ID: PAT_MRT3847_101850C.1.pep
ILYSHFLTLYTEMDAAVLHKFIYHILKNLAVAKDDMPDALTAASNTVCLDLDALNGFYCT

SEQ ID NO: 144887 - protein, 48 aa, Glycine max
  Clone ID: PAT_MRT3847_101851C.1.pep
KATPKKKKQCNCKHSRSLNYQIKLPCSFTPKEIEYLTDRIQNGGTEVV

SEQ ID NO: 144888 - protein, 82 aa, Glycine max
  Clone ID: PAT_MRT3847_101852C.1.pep
NLFSIYSLFFLRIIAKYRGMNDRMRCKRVWVTLQFNVTHIFNKRVVTSPFCALECAIRHLVSLKPQFKYALSVLGQDLDPNP

SEQ ID NO: 144889 - protein, 72 aa, Glycine max
  Clone ID: PAT_MRT3847_101853C.1.pep
ACFAKFLYAVREHINAACYHHRHRHFHLRYKSCGHIHKVAVQSLPNSTPYFSLQRKTPIPTQIYDRMYYTIK

SEQ ID NO: 144890 - protein, 113 aa, Glycine max
  Clone ID: PAT_MRT3847_101854C.1.pep
DETTRDHRAPRGKTGNKRPRYPTPRTYQGRPTPGGTTPQGKENHSPRWPQTSRSTVRPTLRPCAEHSPIRHRTSGQIQTRAAALTAPRGTTSSSWGKPGLALPPLLTGKGPRG

SEQ ID NO: 144891 - protein, 33 aa, Glycine max
  Clone ID: PAT_MRT3847_101855C.1.pep
EVYGFGFQVGAAEWSISPYEGKNKVVSGETIES

SEQ ID NO: 144892 - protein, 41 aa, Glycine max
  Clone ID: PAT_MRT3847_101856C.1.pep
GKNKEMNWFSHLGGGPPLFLSAKHIFWLGLKNFELGEHIIH

SEQ ID NO: 144893 - protein, 97 aa, Glycine max
  Clone ID: PAT_MRT3847_101857C.1.pep
PQLKWVPLFANGFSQAGPGKAIYPVQKKQVYGEKKKMGVWGGGNPRGGIWENGGQEFKRGVQCFFPGGSLKKKVFLASPFSRQSWNLESFYGETPQL

SEQ ID NO: 144894 - protein, 83 aa, Glycine max
  Clone ID: PAT_MRT3847_101858C.1.pep
MGGAPTALLGKGNPGAPIKKKNPPPPGERGYAYRAPGGFFFTPGRGPKGDCPTARARERGPPGAPLGFAPKGKTCGWGGKGGK

SEQ ID NO: 144895 - protein, 988 aa, Glycine max
  unsure (1)..(988): unsure at all Xaa locations
  Clone ID: PAT_MRT3847_101859C.1.pep
ETDEVYAQMTLQPVNKYEKEAILASDMGLKQNRQPTEFFCKTLTASDTSTHGGFSVPRRAAEKIFPPLDYSMQPPAQELVAKDLHDNTWAFRHIYRGQPKRHLLTTGWSVFVSTKRLFAGDSVLFIRDEKQHLLLGIRRANRQQPALSSSVISSDSMHIGILAAAAHAAANNSPFTIFYNPRASPSEFVVPLAKYNKVTYTQVSLGMRFRMMFETEESGVRRYMGTITGINDLDPVRWKSSQWRNIQVGWDESTAGERPSRVSIWEIETVLTPFYIXRPRFLRKKIPRESGVLDGVMFQAPIMIRVGQTLANHVGLSIKITPIPPLFGKVELMNMHNKNQSTSAHLLVEHSINLIKPLPGEVPINSTNPLCSIQITXSFSGEFESRQLHSTDSNHATLKVACVMSXQLQQLQHQLHLKRQQQHRQHQHQLLGIEQQLQVHSLLDVAIYHLQQQREQHLPERQNLAWMCKLAPQLGQKAKXERQVINRMGKFTYNEVPQMSLDGDLGQVPDSNHSFVAVKPARDGTTTNPIQLNVSXNPTELQLQLQLQQKLQQQQQHQQRLLSTSTPLLLSQLLQQQNTHQQNQQLPQPLPPISQHQPQQLGNNAFSTEKLLNSNNLSSYLMQSQKVSMNHPQNTQKSLTITRAPSTLTEGDAPSCSTSPSTNNCQVTPPNLLKRNQQLPATLRGSLIVEPTSNLIQELHSKPDTQIKQEFLNVKGPDQLKYKGTITDQLEASSGTSYCLDPPGNVQQNLPLSNFCMEGDVQSHPRNSLPFDSNLDGLTPDTMLSRGYDSQKDLQNLLSNYGGAPRDIETELSTADISPQSFGVPNMPFKPGCSSDIGINDPGVLNNNNGLWANQTPRMRTYTKVQKRGSVGRCIDVTRYKGYDELRHDLARMFGIEGQLEDPLRTDWKLVYVDHENDILLVGDDPWDEFVSCVQSIKILSSAEVQQMSLDGDLGGNVPIPNQAYSGTDSGNAWRGQYEDNSAASFNR

SEQ ID NO: 144896 - protein, 288 aa, Glycine max
  Clone ID: PAT_MRT3847_10185C.1.pep
MTRLSERLVRLRGLFPKPTRFLALVSLSYLLHLCKFLARFLLSQILPAMDNLFSDYFSDDFDSSPYRPHRRFLQDQDHHRDRDFAALERLYLLPYTWWLEAENEGDRGDAVLYTVSCNSDSDSEILLHLRKEEEPHNNNIGVSARQYALVPEGLWLRALKRHNDFNNAVKDFGSIPYEEDCLPDLFPLQVKIFVSWETSLLVAKISQKENVAAFYEKACDIFNSAYNPVHIWDFSGQTTQFFLNDKSRLPNDSPGQPGKEVVLELQVHGLPDSMGGDGGYEMMLDRSH

SEQ ID NO: 144897 - protein, 62 aa, Glycine max
  Clone ID: PAT_MRT3847_101860C.1.pep
QLVKGPNRRLLSFVGMISLYFSHLIEFDIFFFFSFFLFELYAFCSMEVFWFCISKLSYTGNT

SEQ ID NO: 144898 - protein, 187 aa, Glycine max
  Clone ID: PAT_MRT3847_101861C.1.pep
MILDGIQLAHAAEKYMQILICSFATRAKTYYQGCFKRDGPGSIPVEISELVEKEFLFKVEWKEVTSSRFELSFRVKKMCWDMSIIDLFKESSSKDVVECEDHVTVISSISPQCSNKSLHLFWLDLMNKFSGVGLEMDSQLDENETLDLSKDSDDATPLKNTNEVEGPKVNALVKDVVGFNRLEVSKL

SEQ ID NO: 144899 - protein, 91 aa, Glycine max
  unsure (1)..(91): unsure at all Xaa locations
  Clone ID: PAT_MRT3847_101862C.1.pep
MEIIVLGIFDATILVAWQCHAYDMFPVRMNTGYGAHTPEVKCASWRLDAESHNIXGFDTIPXKCVKSTNEYIHGEQYTSYSRAGYQHPYFY

SEQ ID NO: 144900 - protein, 26 aa, Glycine max
  Clone ID: PAT_MRT3847_101863C.1.pep
KIQYLLKLIENNNFINHMSCLMIFFY

SEQ ID NO: 144901 - protein, 77 aa, Glycine max
  Clone ID: PAT_MRT3847_101864C.1.pep
FCCKCRESLFPNKHCTACLSRFPTLASTVCLKCPNRCQFKTWCNTALCTPYSHSGPCHHHSLEGLTLIRSAPAVGLS

SEQ ID NO: 144902 - protein, 163 aa, Glycine max
  Clone ID: PAT_MRT3847_101865C.1.pep
MNITAFSDWIGDFEWGFRPEDVEFGVDETHEKIGDHDHLHFLGLSWAWNGPENLQPHKVNAKGNDMSVSGDVLNGYQNFDVVFDEGIVVDGSTRGFLSVSHGDYRVQSREVEELRNCTEIECDAEGSVPHDALFFVLGYLGVRDLLSVEGVCRSLCDAVRGDP

SEQ ID NO: 144903 - protein, 70 aa, Glycine max
  Clone ID: PAT_MRT3847_101866C.1.pep
RSEHPDPYVTPKNASLYETLLFLMGGVLWALVILPKKNMRLDKSLGAGLLSVYRCFGFIRIAMAVGIVKF

SEQ ID NO: 144904 - protein, 59 aa, Glycine max
  Clone ID: PAT_MRT3847_101867C.1.pep
LSWTWWELFMPGGVDLIFLLLLLGYLCSFVLPYSQRKALFAFIISLDASTQQLTYFNQN

SEQ ID NO: 144905 - protein, 462 aa, Glycine max
  Clone ID: PAT_MRT3847_101868C.1.pep
MTMLPHSLTMIATLIIIFLAQTLVGVSSLPEADKITNLPGQPRVEFQQYSGYVTVDDQNQRALFYYFVEAEENPSSKPLVLWLNGGPGCSSIGVGAFAEHGPFRPSDNNVLEINDKSWNKVANVLYLESPAGVGFSYSSNESFYALVTDEITARDNLVFLQRWFTKFPEYSNNDFFISGESYGGHYVPQLAQLIVQTKTNFNLKGIAIGNPLLEFNTDFNSRSEYLWSHGLISDSTYEVLTRVCNFSSIRRQMQNGNLRGVCGKANKLLDSEISNYVDEYDVTLDVCLSSVNQQAYVLNQLQETQKIDVCIGDKTTTYLNTKEVQEALHANLVGVAKWSTCSSVLHYDYQNLEIPTIPILGSLVNSGIRVLVYSGDQDSVLPLLGSRSLVNGLAKEIGLDTTVAYRAWFEGKQVAGWTQVYGNILSYATIRGASHEAPFSQPQRSLGLLKAFLEGKPLPGVK

SEQ ID NO: 144906 - protein, 186 aa, Glycine max
  Clone ID: PAT_MRT3847_101869C.1.pep
MTKLLSPSAPPCPCLRVPIPNPTVKYRYAYSHRGQLRVRCSDNSDEEKEKEKKKKKEKRLSQQSSWEAQDAEGRDYLYRLGKEADNMNIAVGQRAGVIDSLFAGNFLGKDSDIVFDYRQKVTRSFQYLQGDYYIAPLFMDKVVCHIVKNYLARVLNTKVPLILGIWGGKGQGKSFQTKLFFSRLWE

SEQ ID NO: 144907 - protein, 53 aa, Glycine max
  unsure (1)..(53): unsure at all Xaa locations
  Clone ID: PAT_MRT3847_10186C.1.pep
FTXTLSXEHRTXEXXXXXAKDXKXLXIXSKMDVYXVXSXXGDQKTKXPXHTTY

SEQ ID NO: 144908 - protein, 56 aa, Glycine max
  Clone ID: PAT_MRT3847_101870C.1.pep
FGTRVADWYKVLHDVSWKDVDACQPIEDVEKQLQEIVLDCVTECRKGKPLSTLWSK

SEQ ID NO: 144909 - protein, 125 aa, Glycine max
  unsure (1)..(125): unsure at all Xaa locations
  Clone ID: PAT_MRT3847_101871C.1.pep
MLASIICSGDDWLTENTLFTGRGLDMWGGYCTMATQFRKFVPRYIRRHVHTFGIYILPYFMTAGIXYGRDLCNIDIYGLFYDXRCRFWAKHEKYLALTDEEQTEVIXNRGIAADDFAERAHECEK

SEQ ID NO: 144910 - protein, 91 aa, Glycine max
  Clone ID: PAT_MRT3847_101872C.1.pep
RLRIRVIPTMALIKDSKTKDFIVGFTDLGNCDDFSTEMLEWRLGTAGVINYSGDLLNPPEKKKKPKTLLGAPKRSIRGRDSDSDIDDEEDL

SEQ ID NO: 144911 - protein, 174 aa, Glycine max
  Clone ID: PAT_MRT3847_101873C.1.pep
YEKVSTCEKKPNQTQIGVLFGNWYWLVFRGCFCCHVHGKSGEEEEQPTTPIHTSPSSYVLLLQIMSKRKTWVCIFVLVYGLLFTSSWNFLKSMISWYKLRADQSSTTSWWPALYASVLLGAVFGVLWMVAALAVVVPAVLVTWIAIVVLLAFFGKPKRTLVAEGRMITKEIFGF

SEQ ID NO: 144912 - protein, 316 aa, Glycine max
  Clone ID: PAT_MRT3847_101874C.1.pep
MMSFAMDSVSVLNPKLSHSHSSLPFSRFPHSLNFHPLLKPRAVNAAVPPNGLAACFLTLHRRKPLTVAFTASHQDSEHREIEVEKERDVHAGSEESQEAWKQVLETFREQAEKFQGVSQEAYEVYSKKAAVILTDATEQLKVLADKTKNELSVAAKEITDEGKEYLSAAADSSPQVREIVETFTSPPEDIQKLSGVRDFYVGVPYGLMLSLGGFLSFMVTGNTAAIRFGVILGGVLLALSILSLKSYKKGRTSPLALKGQAAIASILFLREISSIGKGSSYFTALISGAVVAFYIYRIVLERNHQKSSNLETEPGN

SEQ ID NO: 144913 - protein, 41 aa, Glycine max
  Clone ID: PAT_MRT3847_101875C.1.pep
LEGKGAICASGRFLSYGGGRRCHIPGCREGAYVLTVYCKAH

SEQ ID NO: 144914 - protein, 52 aa, Glycine max
  Clone ID: PAT_MRT3847_101876C.1.pep
RIGGTNTSNDFDAKVLLHVSLAIMATCDFGYIVTVWIAVRAAYALHRPPCYR

SEQ ID NO: 144915 - protein, 52 aa, Glycine max
  Clone ID: PAT_MRT3847_101877C.1.pep
YLGTSLSNCLWIIANGIKALFMGAKAAFTEHVYTWLNIGQLWNPNSCLIAGN

SEQ ID NO: 144916 - protein, 86 aa, Glycine max
  Clone ID: PAT_MRT3847_101878C.1.pep
KPHSDAVLAPSRKEPGAALRDGKEVRPARHMPVKGQSPKGVEEWIIPDPSPINVVDHKGPPALHIASRKGRAQIIKLLLVQFRQIY

SEQ ID NO: 144917 - protein, 71 aa, Glycine max
  Clone ID: PAT_MRT3847_101879C.1.pep
ARAQSHQRSLMTERRYSKSLGALLGLLGAITRISLLGGPTYKTPIVLRSLGTVQLPTDLETAQHTLVYDAC

SEQ ID NO: 144918 - protein, 78 aa, Glycine max
  unsure (1)..(78): unsure at all Xaa locations
  Clone ID: PAT_MRT3847_10187C.1.pep
VMGGVQPLLFALYQGFLKMKAGXDTNCTDTDKAADDTECGDLXIIEWTTLLITPTTLIIMNMEGVDAASQDALNARYA

SEQ ID NO: 144919 - protein, 70 aa, Glycine max
  Clone ID: PAT_MRT3847_101880C.1.pep
WGGISSEELNEALLAETALFGEISNHSSQNFSSLPNLQHHPEQNVDPKTQCLSTSMSQLLNDSRLLKQQQ

SEQ ID NO: 144920 - protein, 56 aa, Glycine max
  Clone ID: PAT_MRT3847_101881C.1.pep
RGYCPSIRYNTLYNCDRESILRYASIHLLNPNRYDDLLSRRHIYTCSLLVYIINVA

SEQ ID NO: 144921 - protein, 56 aa, Glycine max
  Clone ID: PAT_MRT3847_101882C.1.pep
RLIRGSRLRTPPPGEFMLFLIPMMVFGGKFYIVMGIGNSPLYSMNFKRPHVVSLLF

SEQ ID NO: 144922 - protein, 70 aa, Glycine max
  Clone ID: PAT_MRT3847_101883C.1.pep
DGNSRSVSSQFQNFSSAIFEYAERLILWPCRRRSRRTSCPLSEQFDTSSSGNSMSELRVDYELAFFSGSG

SEQ ID NO: 144923 - protein, 91 aa, Glycine max
  unsure (1)..(91): unsure at all Xaa locations
  Clone ID: PAT_MRT3847_101884C.1.pep
KKRGAFFWAGPAFFENFLPYFXGKFFPPLFFGRAKKKNDCFRSKYGKDWKIYLAKGPSRIFPGKFLKMIFENGFFGGPPLKIKNQGPPREV

SEQ ID NO: 144924 - protein, 111 aa, Glycine max
  Clone ID: PAT_MRT3847_101885C.1.pep
MASAFVKLDDSPMFQRQLYSLEETTDELTDRCQKLYKGCKKFMTALGEAYNGEISFADSLEVFGGGQDDPVSVSIGGPVISKFITTLRELASFKELLRSQVEHVLIDRLTE

SEQ ID NO: 144925 - protein, 96 aa, Glycine max
  Clone ID: PAT_MRT3847_101886C.1.pep
NVFPPSHSPEKGAQIKIAWGQKKNLGGGPPPQGFIFPFWGGKKTGYGGGGGPFGFNLIKAFQKGGGGGPKTGERGAKTQIWVWGPPPKKAPPPFFF

SEQ ID NO: 144926 - protein, 228 aa, Glycine max
  Clone ID: PAT_MRT3847_101887C.1.pep
EKSAHASGEKVNISPFKSFVTIQGEGADKTIVQWGDTAQSQPLGTYGSATFAVNSPYFIAKNITFKNTAPIPAPGAVGKQGVALRISADTAVFLGCKFLGAQDTLYDHIGRHYYKDCYIEGSVDFIFGNALSLFEGCHVHAIAQLTGALTAQGRNSLLEDTGFSFVHCKVTGSGALYLGRAWGPFSRVVFAYTYMDNIIIPKGWYNWGDPNREMTVFYGQYKCTGPGA

SEQ ID NO: 144927 - protein, 58 aa, Glycine max
  Clone ID: PAT_MRT3847_101888C.1.pep
LDTLRFQEEVLCERKTFVSASLNFNKFQFSYPSPSLSLTDPVRLCLRLGLYFAKTWDL

SEQ ID NO: 144928 - protein, 46 aa, Glycine max
  Clone ID: PAT_MRT3847_101889C.1.pep
EGRFRSPSHSCGRLYQMAHPFKKGILTKNIYQNGIFRQKKLSHEIH

SEQ ID NO: 144929 - protein, 106 aa, Glycine max
  Clone ID: PAT_MRT3847_10188C.1.pep
KIWVPLNFLFKGKGVIIFQRGGGGKLGRTRRKKRVNRNKMVLNNSHFPGKKTGLKKTFNGINHGKFPWVKRKGLPYGTGETRGEIISFNNRGEGEKTRGKKRGGGS

SEQ ID NO: 144930 - protein, 47 aa, Glycine max
  Clone ID: PAT_MRT3847_101890C.1.pep
PMMPHCIYMIAVRELFKRITYMLLPNTYITINTTRLYEIKYQKAVSI

SEQ ID NO: 144931 - protein, 67 aa, Glycine max
  unsure (1)..(67): unsure at all Xaa locations
  Clone ID: PAT_MRT3847_101891C.1.pep
TCFRTRLLFLPTSLHRGYLVXAPKMAEQLFLEFFTFYAENTRLFINNPSLGAEVVFQGPSLGAEIDS

SEQ ID NO: 144932 - protein, 110 aa, Glycine max
  Clone ID: PAT_MRT3847_101892C.1.pep
LLLQSRPPRLPRRRLTVSLVGPHVAEFLISQTPQSRNLFAKSISACTKPQLMRLLKPAVECGSTDAVADLLNAGADATATTESLMPLAIRVGNLHAVNALEPHVANRRIV

SEQ ID NO: 144933 - protein, 54 aa, Glycine max
  Clone ID: PAT_MRT3847_101893C.1.pep
HGGALLKCIYTNLPYKSNESTNRTGLTSFFFINSTFFTKFKKIFFTQKIFKLEV

SEQ ID NO: 144934 - protein, 62 aa, Glycine max
  Clone ID: PAT_MRT3847_101894C.1.pep
NSNICIPGVSSKVATKVVVEEKGINLEQFLQSSRSSICEVLLSMVYIATAWQFDYHCTLISI

SEQ ID NO: 144935 - protein, 84 aa, Glycine max
  Clone ID: PAT_MRT3847_101895C.1.pep
EIWTTVINFQFFKKARCTHLRRNTLTVDTLLPHQSQFVVVVSFRNRVGCANHRIHHHAGLQPPALRSSPSKPIFFFLLLLFPFF

SEQ ID NO: 144936 - protein, 40 aa, Glycine max
  Clone ID: PAT_MRT3847_101896C.1.pep
YSFHGPEISRSGPAININHWLFIFPDHGTKVSAKILQHNP

SEQ ID NO: 144937 - protein, 86 aa, Glycine max
  Clone ID: PAT_MRT3847_101897C.1.pep
RFSWFNSLIHPRPFQSPSSLSSTSTSAAAVTVGTPAIIVNRGVYIARTKNSPSCPKCPRSHRVAWHGSRNYIMHQGDLIPPHAQHQ

SEQ ID NO: 144938 - protein, 161 aa, Glycine max
  Clone ID: PAT_MRT3847_101898C.1.pep
MAPSDVCPTEDAVQAFIEHLVDPLLPTKATVQGNPTPSQQKLVAKQVRSAVLLYNYYHRKQHPELAYLPFNEFCKLAVVLRPPLLAYMQFMQNLKEEELTDVEKQLSFTEKMIMEACDVWKCLDASKDVPNIEGWPITKVSILLIDQKEGKTAFLLFKFHL

SEQ ID NO: 144939 - protein, 66 aa, Glycine max
  Clone ID: PAT_MRT3847_101899C.1.pep
SMGGHITILWYMMASVSTIPGEICDWSSRYTHPTLCLHMGLLLVLQLILFRARFLRGFCSKLFAVR

SEQ ID NO: 144940 - protein, 134 aa, Glycine max
  Clone ID: PAT_MRT3847_10189C.1.pep
VQRQTLPTISSTDGIETKGIVGGNMASKRKRKAWSEEEDMQLRAAVQRWGEGNWATMAKGDDFPIKRSATQLAQRWSILRKKDGCTNTGTITSTQYTTAEQLATRHSLSLALDMPFKKLTAPGMTDEQTCYPFG

SEQ ID NO: 144941 - protein, 76 aa, Glycine max
  Clone ID: PAT_MRT3847_1018C.1.pep
LPYRVYEVNNPINHHYPLSVIIAIFFFFCFLCIFLLCPPNFLSEFFNRVNLIEDWTQMTKSNLLAKNKISKLRRVT

SEQ ID NO: 144942 - protein, 53 aa, Glycine max
  Clone ID: PAT_MRT3847_101900C.1.pep
EGGAGADMVGRGVERAAHVRHRREQLAAGLAPLRAQHPEIGLAVEPLQRLAIN

SEQ ID NO: 144943 - protein, 69 aa, Glycine max
  Clone ID: PAT_MRT3847_101901C.1.pep
VFHFLTQSTPITKPSPKLKTSKSKFTLLQNLSVILSLHHHGYYHSRARSLITCPALLDYATTTSDDDTE

SEQ ID NO: 144944 - protein, 91 aa, Glycine max
  Clone ID: PAT_MRT3847_101902C.1.pep
SISFIFIIRSWSISFIYKKKKKKKKKREELEFRWLLPFCSVYMSNKHRSLASWSYFQPFPRGMKNHKKPAPPSKISMKPKGHQQLWALSAT

SEQ ID NO: 144945 - protein, 190 aa, Glycine max
  Clone ID: PAT_MRT3847_101903C.1.pep
LRRRSSAAGKASDALPLPLHVTNAFFFTLFFSLAYYLLQRWRDKIRSSSPLHLLSLSDSGAIFVFFASVIYLLGFFGIHFVQSFAARPADEEPSQCASIDRADEDIANSIIEGDAQPSPLCRVDNDMKGKKVIQRAFECTKPILTELISSIDRVDSDNIIADPWINGKEAEQPCLQCAKPILTDLGWGRR

SEQ ID NO: 144946 - protein, 133 aa, Glycine max
  Clone ID: PAT_MRT3847_101904C.1.pep
YGCEKTTEGDAEGHLSTSPNQLDGDKRATNHKSVNLEGSLLVQHLQKKKRVQAFNEAQEALIKVLYEQFKDHRRCSYMIANALDEDGKITAAQVSRKLKQLGLSLPQKSSGGKMHPKDADLMDLSNDRINESD

SEQ ID NO: 144947 - protein, 64 aa, Glycine max
  Clone ID: PAT_MRT3847_101905C.1.pep
AGPGYHAEIVSPYYASLAVASGHLGWQIWTVDLSSRADCNRKFVSNKWFGAIIFGGILAGRLSS

SEQ ID NO: 144948 - protein, 128 aa, Glycine max
  Clone ID: PAT_MRT3847_101906C.1.pep
PTKVSSSILGMQTLALREDPTLVNSENVALKSPIMSIVPRATRHAAVHENGFVTARSRGRSVIYNMARTPYARIYSTSTLKGGGRAVEGEPSSSSQFALDHDVHSGSKLGSVKHRSSILDNDIGSVGP

SEQ ID NO: 144949 - protein, 56 aa, Glycine max
  Clone ID: PAT_MRT3847_101907C.1.pep
PPKFPPKTPPPAPFKRAPLKNQILKSSPPQRGPKKNPESPPLKPKNVIFKPQMGSK

SEQ ID NO: 144950 - protein, 127 aa, Glycine max
  Clone ID: PAT_MRT3847_101908C.1.pep
MEEAIDATATLDYASIQIFPNLKRYEAFVCKGKQSDKVAAGHLEHLLPHLPAINDLHAEGFDTNFDLKLPENLHGAEWFSKATVQRFLHFAKSPDLIHAISSILDEMSQLEDSEEFLVHLYGEGNQD

SEQ ID NO: 144951 - protein, 75 aa, Glycine max
  Clone ID: PAT_MRT3847_101909C.1.pep
APPLGGFFFFCVFSVAFPPLLGGGFKTSFFAVWVVFGSWVGTPLRRLCGRALVWLFEVVLYFAVIYCVVPRLFPA

SEQ ID NO: 144952 - protein, 224 aa, Glycine max
  Clone ID: PAT_MRT3847_10190C.1.pep
KFCLGLFPNDDEFGMSSLWSLPSGSQAGPGFQLFGSDADVSDALVHLQHGPMNCSSSLNGYALAPNTALGSGSILQESSAGRSDADLNGGLVDNPLAFGGDDPSLQIFLPTRPADSSMHNELRDQASVANGVCTEEDWISLSLGGGTGGNNGDASTQNGLNSRHQIPTREALLYLLLNASLLLGMNDVRSDRARRQRSDSPFSFPRQKRSVRPRLYLSIDSDSE

SEQ ID NO: 144953 - protein, 50 aa, Glycine max
  Clone ID: PAT_MRT3847_101910C.1.pep
SLHVIRFVIGLSVDANLACTIDSMVCFNGIRSLNSPSQVEYNFQTSYCLL

SEQ ID NO: 144954 - protein, 77 aa, Glycine max
  unsure (1)..(77): unsure at all Xaa locations
  Clone ID: PAT_MRT3847_101911C.1.pep
YTNFLSXGXFXRXXNXVNSXIVKEXXXXIGXXLDILSSIVHFVXAXXGVXVRLHQSTLWSLLLWWLLPLLRGGCHSC

SEQ ID NO: 144955 - protein, 93 aa, Glycine max
  Clone ID: PAT_MRT3847_101912C.1.pep
SWVRFQCRLLRSTLIETVSIYTCSVNKTSILTLITQYMNTINTTIFTSNNEPLFLLKPTRSNTLPLYHTHKIIMHIRSDHPSYTRVLSEKEFF

SEQ ID NO: 144956 - protein, 136 aa, Glycine max
  unsure (1)..(136): unsure at all Xaa locations
  Clone ID: PAT_MRT3847_101913C.1.pep
QANNISAIQIHGQDKLIDTQATAILKIRVYLRILSLTSSREGVRMHLNQIYAFPQDVDIVAKFRGNSNLHIPYFIRKNSSWSIPSPSLMRIMKLAKYRLKVQVEKDEGLSGEGQSPQVEKDKGPSGEGRXPKWRRT

SEQ ID NO: 144957 - protein, 119 aa, Glycine max
  Clone ID: PAT_MRT3847_101914C.1.pep
TTVKFTMQIPCSWNHHNMVKAVHLPTTACEIHGTNMVCSIIQIHRGLSSNSVDTFNNVIEAVMTKMEAQLDPLLDRFHAPPTFIIYMFLFWAVAIRKQRGIPMSALWMWMTNTSEKDLR

SEQ ID NO: 144958 - protein, 174 aa, Glycine max
  unsure (1)..(174): unsure at all Xaa locations
  Clone ID: PAT_MRT3847_101915C.1.pep
PRPEVLEGFNCTIFAYGQTGTGKTYTMEGECKKAKSGPNGELPPGAGVIPRAVKQIFDTLESQNAEYSVKVTFLELYNEEITDLLAPEELXASLEEKQKKQLPLMEDGKGGVLVRGLEEEIVTSASEIFTLLERGSSKRRTAETLLNKESRRSHSVVSXTIHIQKATPEGEELI

SEQ ID NO: 144959 - protein, 90 aa, Glycine max
  unsure (1)..(90): unsure at all Xaa locations
  Clone ID: PAT_MRT3847_101917C.1.pep
MERNRPQKKKKSEANKKKRDKARRQXGNNPNTKERTGPANRTPSKGNETQRSEQASPDGPTTQPRKSKKAETKNSPGGGDEKKKREKTHP

SEQ ID NO: 144960 - protein, 56 aa, Glycine max
  Clone ID: PAT_MRT3847_101918C.1.pep
APQFYYFSWQGGFHYRAQGKTYKNLQPPLNIFFLFKEYKKILRRGVFGDKTKKGGG

SEQ ID NO: 144961 - protein, 131 aa, Glycine max
  unsure (1)..(131): unsure at all Xaa locations
  Clone ID: PAT_MRT3847_101919C.1.pep
TTPKYSKATDNQILDQLASYFNXVAYNPNEIPCVPIAXWEGNNMIHTCTNLDXYKGPALLEALHQSNEAKKPSDDPLRLAXQDLYKISXIGTAPXGRLDTGIINPXVVCTLWATQRTTHGXSHQNHHGSLT

SEQ ID NO: 144962 - protein, 42 aa, Glycine max
  Clone ID: PAT_MRT3847_10191C.1.pep
LQHLPHSPDASCPVCYVNLVVTDFSPPFSMSFHILPCQNRVI

SEQ ID NO: 144963 - protein, 65 aa, Glycine max
  Clone ID: PAT_MRT3847_101920C.1.pep
AYNFYCPPTLNIVLVSILPLVILLYFSLFLSVFSFIYFKCSIFNFFIPYLFSFVLFFLASFKKFI

SEQ ID NO: 144964 - protein, 86 aa, Glycine max
  Clone ID: PAT_MRT3847_101921C.1.pep
ILLLLHGFNVFLLIIRLSNVCFLPISNKPDCYPGRPWRWAPADACPLITLVRLTYLAYLVPPPPPPPKTGGRHTVMTGNLPWNGIG

SEQ ID NO: 144965 - protein, 47 aa, Glycine max
  unsure (1)..(47): unsure at all Xaa locations
  Clone ID: PAT_MRT3847_101922C.1.pep
LGYNYAMLGFTPYSPLXREIRKLTTIQLLSNHRLELLTELQAHLSQK

SEQ ID NO: 144966 - protein, 53 aa, Glycine max
  unsure (1)..(53): unsure at all Xaa locations
  Clone ID: PAT_MRT3847_101923C.1.pep
HHQGLCXLDXRSMGRESLKXLLLPXLXLXFPLQXYXLXFMFXFFGKQRMNXME

SEQ ID NO: 144967 - protein, 70 aa, Glycine max
  Clone ID: PAT_MRT3847_101924C.1.pep
NITGETNTYDSEQINYCLGTSYFETTWMITWARKMAKMQSLFLVRYLCDLGSRGVFIINTLDDFNNYCLT

SEQ ID NO: 144968 - protein, 225 aa, Glycine max
  unsure (1)..(225): unsure at all Xaa locations
  Clone ID: PAT_MRT3847_101925C.1.pep
EFEGGIPPEFGNLTKLKYLDLAEGNLGGEIPAELGRLKLLNTVFLYKNKFEGKIPPAIGNMTSLVQLDLSDNMLSGNIPGEISKLKNLQLLNFMRNWLSGPVPSGLGDLPQLEVLELWNNSLSGTLPRNLGKNSPLQWLDVSSNSLSGEIPXTXCTKGYLTKLILFNNAFLGPIPASLSTCPSLVRVRIQNNFLNGTIPVGLGKLXKLQRLEWANNSLTGGIPDD

SEQ ID NO: 144969 - protein, 148 aa, Glycine max
  Clone ID: PAT_MRT3847_101926C.1.pep
MESRDLPSSSPSSTTNRDASFATDAEDGVFTVVVALAKDAALHFQSGKFAECVEVLNQLLQKKQDDPKVLHNIAIAEFFRDGCSDPKKLLEVINGIKRKNDELALVLEEQGESVNNVGNKVLGSKGSNASAHQFSGANSTSTSTMYTD

SEQ ID NO: 144970 - protein, 109 aa, Glycine max
  unsure (1)..(109): unsure at all Xaa locations
  Clone ID: PAT_MRT3847_101927C.1.pep
MAPAKALKKPAENKPAAENAPAEKKPEAANTISKEGWSXKKKKHTKKNLETYKIYIFNVLKQVHRDIGIYSKAMGIMNSFINDIFDKLAQEASRLARYYKMPTITSREI

SEQ ID NO: 144971 - protein, 45 aa, Glycine max
  Clone ID: PAT_MRT3847_101928C.1.pep
GSRRSAAHDGEALSDTELCLFISYRLPSHPMMKDVTVETEGGASP

SEQ ID NO: 144972 - protein, 60 aa, Glycine max
  unsure (1)..(60): unsure at all Xaa locations
  Clone ID: PAT_MRT3847_101929C.1.pep
VQGEELEEVMADRRVGEEYILYSTQSRSVSXVFCAAYTFAERGQTKLVRIFISCSDWNHG

SEQ ID NO: 144973 - protein, 426 aa, Glycine max
  unsure (1)..(426): unsure at all Xaa locations
  Clone ID: PAT_MRT3847_10192C.1.pep
YSSAAPSVTKSGAGNSATVQSGINLNVSQTESASGKHVDSGNIVKDQAMRTKTADGRSERTESITVTKSDTXSGHIKLKSSSMVNGLDAQSSLAPSSVQSGMPKSMENPKQVEESINRASDEHGTRSTELRTSAKRSVPASSLAKPSKQDPVKEDGRSGKPVARTSGSLSSDKDLQTHALEGRHTGTTNVPSSNGNTISGSTKGSNPPVKISLDGPGNESKAEVGVAKSSDIRASMVKDDGNDITDNPRGSSSRIVHSPRHENTVVTSKSNDRVQKRASSVEEPDRLGKRRXGYVELREFETELXWMEREKMMDPRVADDKSGFIELGMKTASSLQSEMIKDKGNEVLXRDHRERMDRERGCGAXEILKPEKPTLRESERWRRDRSVESRDRRNMVCTGQVIXKGKDERNRDDRNKLRYNDASAEK

SEQ ID NO: 144974 - protein, 82 aa, Glycine max
  Clone ID: PAT_MRT3847_101930C.1.pep
LKLTLQHVKWRMEKSTAMTALTTMTYLISKLLLRVMVKKLAMATTENDSYFKGDLTVDHTIPSSSGNDCLTKLLGGPVHLYV

SEQ ID NO: 144975 - protein, 179 aa, Glycine max
  unsure (1)..(179): unsure at all Xaa locations
  Clone ID: PAT_MRT3847_101931C.1.pep
PVXXXQLELILXXXLNHTRASEGNVXERLKSLKYCFQTDTLGYHLSVLRPIFPHGLTMLSLFSGLGGAEIALHRLGIKIKVVVSVETSETKRKILERWWRQSGQTGTLVQLEDIQKLTSKKLEGLISKFGGFDLVIYQNPCSYSSSRLQAGVGLSALDFSVFCECVRVLQRVRGMYQRK

SEQ ID NO: 144976 - protein, 91 aa, Glycine max
  Clone ID: PAT_MRT3847_101932C.1.pep
ILRATILIFILYLCRNFGVTTASCFKGKRTIRKGPIPITKFHQLSNTSSKLIPKVGGFSRVPKISDAKLQSESKPERFKVYNPSLLIISWS

SEQ ID NO: 144977 - protein, 48 aa, Glycine max
  Clone ID: PAT_MRT3847_101933C.1.pep
IRLELEPAMLAFVGFWFQAIYTGEGPIENLMAPLADPGHCNIFSAFTR

SEQ ID NO: 144978 - protein, 230 aa, Glycine max
  Clone ID: PAT_MRT3847_101934C.1.pep
MTRVGDDWEISPPPAAVSGLCQEPEAKSSVHDHLFPELVIEQDDDYDQVMSSYVIEVNSNLREESCGTADLDEAIAWAKEKFQSRNSDEESSSRNEGNEQATTGVEGRSDAGECHGDGIGEVKSSKVQTETEKLDRDIRSWSSGKETDIRLLLSTLHHILWPESGWYAVPLPNLIESSQVKKAYQKARLCLHPDKLQQRGATLLQKYIAEKAFSILQDAWTGFISEDVSL

SEQ ID NO: 144979 - protein, 423 aa, Glycine max
  Clone ID: PAT_MRT3847_101935C.1.pep
HASAHASAQLQSERFYYDLCSSGSADNTVNSVNTKKYHSLPDISGYSIPHRAGYVSDKNAPRDGSVGYGSFASRTCYDQSLYLNSGSRTGGHLAFNELPLSEVYNKALSSQLSSGFDTGSLRSRLPYEQFGVAEKIPNVAMEAVGNRPNAIAQETTSFVDIEGKLLQSIRLCIVKLLKLDGSDWLFRQNGGADEDLIDSAAAREKLIYEIETREMNQVIHMDEAHYFPSDRKFGSSMKSNGAYSSGFSVSSVPNCGQGCIWKTDLIISFGVWCIHSILNLSIVESRPELWGKYTYVLNRLQGIIDPAFLKPRSPLAPCFCLQVQQKLSPHLSNGILPPTTTKPGQGKCTTASTLLELIKEVELAISGRKGRTGTAAGDVAFPMGKENLASVLKRYKRRLSNKPVGTNGGTGSRKIPTLAPYNQ

SEQ ID NO: 144980 - protein, 112 aa, Glycine max
  unsure (1)..(112): unsure at all Xaa locations
  Clone ID: PAT_MRT3847_101936C.1.pep
YDKYSWKGLDIVAFPCNHYAAHDPXTTENMVVFACAMFKAXDTINNKEYVNGDYAVTVATSVTYTTRIFSYDITKMIXSKFLSDKDGEVVHRLEPSTHTITIDIDVRNLIDS

SEQ ID NO: 144981 - protein, 74 aa, Glycine max
  Clone ID: PAT_MRT3847_101937C.1.pep
HSTEKYERELKNQRSLRVIVGYAPEHFVIKKYIMLLSSALYLCEHFHYLHPQHLILLTRYTKTHYLLDQKLFTG

SEQ ID NO: 144982 - protein, 75 aa, Glycine max
  Clone ID: PAT_MRT3847_101938C.1.pep
ALTASVTRVFACSGQLRRSTSSTLVQLPSVLPSVALPDRPLSHALAVVVVAKVGLRRTLLSARDSRVTPDVGGPV

SEQ ID NO: 144983 - protein, 68 aa, Glycine max
  Clone ID: PAT_MRT3847_101939C.1.pep
VVCYTLRIFYFKFGQSSSYQLILRVKIGPINYNICIPYFYLKTQSNKMQVNHRFHLRTSPLSPKQFLR

SEQ ID NO: 144984 - protein, 34 aa, Glycine max
  unsure (1)..(34): unsure at all Xaa locations
  Clone ID: PAT_MRT3847_10193C.1.pep
IHQSLKKKKXXXKKKKKKKKKKKKKKKKKKKKKK

SEQ ID NO: 144985 - protein, 197 aa, Glycine max
  unsure (1)..(197): unsure at all Xaa locations
  Clone ID: PAT_MRT3847_101940C.1.pep
MGTYVENFASEEEHVFRSQYSSVPVPDNVTLPEFVLQNAELYADKVAFVDAVTGKGVTFSEVVRGVHRFSKALRSLGLRKGHVVIVVLPNVVEYAIVALGIMAAGGVFSGANPTSHVSEIKKQAESADAKLIVTNVTNYEKVKALELPIILLGDEXLKGAMNWNKLLEAADRAGDDLTREPIQQNDXCAMPFSSGTT

SEQ ID NO: 144986 - protein, 204 aa, Glycine max
  Clone ID: PAT_MRT3847_101941C.1.pep
MALAMVGEALISASVEILLDRITSAEFRDFFANRKLNVSLLDELKIKLLTLNAVLNDAEEKQITNSAVKAWLNELKDAVLDAEDLLDEINTDSLRCKVEGEFKTFTSQVRSLLSSPFNQFYRSMNSKLEAISRRLENFLKQIDSLGLKIVAGRVSYRKDTDRSVEYVVARDDDKKKLLSMLFSDEDENNNHIQVLTIWGMGGLG

SEQ ID NO: 144987 - protein, 42 aa, Glycine max
  Clone ID: PAT_MRT3847_101942C.1.pep
NFKRRTGTRANNNFSETHVYTMFTLTYTLPFIKSNLLNSRDY

SEQ ID NO: 144988 - protein, 64 aa, Glycine max
  Clone ID: PAT_MRT3847_101943C.1.pep
DPIHDVQSLFFRLSLICTSQLHESTFLRICLSSMNLSLLIIYVLVLMSCLVILPSHLEILEHRK

SEQ ID NO: 144989 - protein, 51 aa, Glycine max
  Clone ID: PAT_MRT3847_101944C.1.pep
PLRLLWLKTVLPSVMLNPLYSRRFASYSIGFIWPCAANGGLPPWGFIVGWR

SEQ ID NO: 144990 - protein, 54 aa, Glycine max
  Clone ID: PAT_MRT3847_101945C.1.pep
RTQPYKIDFMSTTVCTRAPLKAVIINTQYLVSYSTSFKYVLHNLTSKHSDIHIC

SEQ ID NO: 144991 - protein, 134 aa, Glycine max
  Clone ID: PAT_MRT3847_101946C.1.pep
DNNGYFPGSQYFSCSLLLPTFDGFTRHFHLNYVSVATTPLTTAGTHCVNSFPTRVTQTLTNTATTPPPELKLSNATTQAPNAGAPTPPLTYHTNSITTILTLPNSTHKFRFEPNTNIESNGDRVRGGWSEALRI

SEQ ID NO: 144992 - protein, 99 aa, Glycine max
  Clone ID: PAT_MRT3847_101947C.1.pep
HASGAVLKADPSFEEAPWPSLSADAKDFVKRLLNKDYRKRLTAAQALSHPWLVNHCDDVKIPFDMIIHKLVKTYICSSSLRKSALGVRTIVWLFSIAYV

SEQ ID NO: 144993 - protein, 55 aa, Glycine max
  Clone ID: PAT_MRT3847_101948C.1.pep
FPFSFLVSQPLKISKNFPPTPSQKKPKKNKFRVYNAGKSKIVNLGVGKRLNWGQE

SEQ ID NO: 144994 - protein, 296 aa, Glycine max
  Clone ID: PAT_MRT3847_101949C.1.pep
MGLRDIGASLPPGFRFYPSDEELVLHYLYKKITNEEVLKGTLMEIDLHTCEPWQLPEVAKLNANEWYFFSFRDRKYATGFRTNRATTSGYWKATGKDRTVFDPATREVVGMRKTLVFYRNRAPNGIKTGWIMHEFRLETPHLPPKEDWVLCRVFHKGKADNSAKLIMYESTVPSLTLASSSPTNQNTTPSIGYNQFLAPFSSSMATHHHNHNHHIPNQSQNNNNNSLMGLLQFSRETNTNNSSTVTQISPKCDDNNGYGFLWDMDLEENSFNDGVASNLDGMRFFELDNNNSVVLL

SEQ ID NO: 144995 - protein, 37 aa, Glycine max
  Clone ID: PAT_MRT3847_10194C.1.pep
HTIRLKLVLVFLPIILHRRSSFILYKINLQHHPSLIN

SEQ ID NO: 144996 - protein, 54 aa, Glycine max
  Clone ID: PAT_MRT3847_101950C.1.pep
LVSQYLKVGSFTTVGVFGGWPWVYRGSSICYLSCYFLFYFFIFFFFLCCYFYFY

SEQ ID NO: 144997 - protein, 56 aa, Glycine max
  Clone ID: PAT_MRT3847_101951C.1.pep
RKTFVFSTFGRKRTARLLLKRFGLSFFLPIERDYGLHLGGWYNQVAREVNRLAAYP

SEQ ID NO: 144998 - protein, 96 aa, Glycine max
  unsure (1)..(96): unsure at all Xaa locations
  Clone ID: PAT_MRT3847_101952C.1.pep
GHNVLRALMVFFFFHLYTADAAGRIFPPPFCWKWSYLCLFYDFHSNVVHTFSPHNQHDFFPRIPLFYLRAWFKNWTGPAGPIGNSVIILVRFMXTW

SEQ ID NO: 144999 - protein, 49 aa, Glycine max
  unsure (1)..(49): unsure at all Xaa locations
  Clone ID: PAT_MRT3847_101953C.1.pep
HNQXPILFTWSNTLSLDKQTLCVGSLEPFYCRRPLVPPLGTWDGIDILP

SEQ ID NO: 145000 - protein, 155 aa, Glycine max
  Clone ID: PAT_MRT3847_101954C.1.pep
YHQGYQQHQNQPSSGLLRFRSAPSSLLSNLTPFVSEDFGSSSFRELQGNNNKGCSKDLSSMNSHKGVYGGGLPPHYPRHRGSSSSAATSSSAMEGSFGLVGSMGMNHETPQNGLGSSLLRHSTSPAGLFSNNNINFQNGFATMKGVWKLWWGEWQ

SEQ ID NO: 145001 - protein, 54 aa, Glycine max
  Clone ID: PAT_MRT3847_101955C.1.pep
QLPMSNEKTIANVRLKILPSIRQKSLSRSTKKNPIDIKQEIPNQRYSKYNLDRY

SEQ ID NO: 145002 - protein, 171 aa, Glycine max
  Clone ID: PAT_MRT3847_101956C.1.pep
MVEFQRLLVCITTCILCWMPNGATAATDPNDAAAVRFLFQNMNSPPQLGWPPNGDDPCGQSWKGITCSGNRVTEIKLSNLGLTGSLPYGLQVLTSLNYVDMSSNRLGGSIPYQLPPYLQRLNLAYNNITGTVPYSISNLTALTDLNLGHNQLQQGLGVDYHNLSTLSTLDL

SEQ ID NO: 145003 - protein, 38 aa, Glycine max
  Clone ID: PAT_MRT3847_101957C.1.pep
DQRFKINKIFEYIIVHGSPLFKPLEFNWVWGITNGFFN

SEQ ID NO: 145004 - protein, 107 aa, Glycine max
  Clone ID: PAT_MRT3847_101958C.1.pep
NFDREEKKSGFVVPFGQANRKGAVLPFCPNLAGGPDTGGSSPFSERQGTGLMVSSFENKRNVLRPPPPVITPFVWFLGPLMFFFPAPGNSKKVFFLHNHAKLNKVFQ

SEQ ID NO: 145005 - protein, 64 aa, Glycine max
  Clone ID: PAT_MRT3847_101959C.1.pep
EDIRSFIRFRMHILFDFITGTSLTWLKNGKSQSTTASVCQRNEKQCVLLQKCTPAPGPPWPYKS

SEQ ID NO: 145006 - protein, 161 aa, Glycine max
  Clone ID: PAT_MRT3847_10195C.1.pep
HASERSQWNGSELKKMTNLKLLSIENAHFSRGPVHLPNSLRVLKWWGYPSPSLPPEFDSRRLVMLDLSNSCNIMGKQLKFMKFESLSEMVLRGCRFIKQTPDMSGAQNLKKLCLDNCKNLVEVHDSIGLLDKITWFTAVGCTNLRILPRSFKLTSLEHLSF

SEQ ID NO: 145007 - protein, 105 aa, Glycine max
  unsure (1)..(105): unsure at all Xaa locations
  Clone ID: PAT_MRT3847_101960C.1.pep
MASFTMTASILGSPAVTNRSAVATQRRSLVVNAAKAVEAEKVSYDNDMDGSNGRRNLMFAAAAXAAVCSVAGMAVADEPKPGTPAAKKKYAPICVTMPTARICRN

SEQ ID NO: 145008 - protein, 77 aa, Glycine max
  Clone ID: PAT_MRT3847_101961C.1.pep
MLKKSLYINHISSVFHKNTTRLNLRGMGGPSFLAVHNIRITDGSDKTSATLQFRKLADCCVLKRNFKQMSNVMWVAP

SEQ ID NO: 145009 - protein, 144 aa, Glycine max
  unsure (1)..(144): unsure at all Xaa locations
  Clone ID: PAT_MRT3847_101962C.1.pep
MNEIRLHGPTTTMPFFFVIYVPYIHPLVHSLVQYSDYIAKMASFTMTASILGGPAVTNRSAVATQRRSLVVNAAKAVEAEKVXMTMTYGSNGRRNLMFATAAAAVCSFAAGMALADEPKPGTSEAKKKYAPVCVTNPTARICRN

SEQ ID NO: 145010 - protein, 104 aa, Glycine max
  Clone ID: PAT_MRT3847_101963C.1.pep
MASFTMTASILGSPAVTNRSAVATQRRSLVVNAAKAVEAEKVSYDNDMDGSNGRRNLMFAAAAAAVCSVAGMAVADEPKPGTPEAKKKYAPICVTMPTARICRN

SEQ ID NO: 145011 - protein, 94 aa, Glycine max
  Clone ID: PAT_MRT3847_101964C.1.pep
SPPAPPLGKSQKTGGPKGLRSRKPDRPPSPKNEREAPPMGPPGVRQKGSPGNRGGHWGGKASVPPKKGKTGVPPRSRTEKKTGGGGPPRSGPPN

SEQ ID NO: 145012 - protein, 76 aa, Glycine max
  unsure (1)..(76): unsure at all Xaa locations
  Clone ID: PAT_MRT3847_101965C.1.pep
ACPKGPHGVPNVVEGSFGQSPVFELPPFASKVRLGKNGVEEVLGLGPFSDFEHQGLESLXPELQSSIGKGIQFSPP

SEQ ID NO: 145013 - protein, 102 aa, Glycine max
  unsure (1)..(102): unsure at all Xaa locations
  Clone ID: PAT_MRT3847_101966C.1.pep
CDLKICDLGLAHTNCCXNQFMTDYVVTLWYKAPKLLLCCDNYRTYIDVMAVECIYXSFLCDNRFSLGNXCLNQLKESINILGSXWVEDINFIDNLMAKNTMQ

SEQ ID NO: 145014 - protein, 38 aa, Glycine max
  Clone ID: PAT_MRT3847_101967C.1.pep
PLHRGCAIYCEGIRNLRNFGESLHRTPLYDLLLGGHSA

SEQ ID NO: 145015 - protein, 95 aa, Glycine max
  Clone ID: PAT_MRT3847_101968C.1.pep
LSHRLATRTGTKTGFRIGFVNLVLSFVPLGGAMGKGKFTSMPPVCPPVYIPADMLDRTSNRPQAFLQVLFCILFRSSFCTSISKQTHHEDEDAEE

SEQ ID NO: 145016 - protein, 227 aa, Glycine max
  Clone ID: PAT_MRT3847_101969C.1.pep
QAIAVSKAMRGHSLQETKNDGRFHVHTKTYLDGAILKEEMERSADVLAAGLLEVSDPSLSSKYFLRQNWMDESEGSTDSILKHKSLWASYNSKYSKKRRKKVKKQGDLQPTYGTRVIPVFVLSLADVDPNLMMEDESMVWTSNDVVIVLEHQNEKIPLSYVSETQRRHALPSQAQRHILAGLASVVGGLSAPYEKASHVHERPVVNWLWAAGCHPFGPFSIHLTSGK

SEQ ID NO: 145017 - protein, 53 aa, Glycine max
  Clone ID: PAT_MRT3847_10196C.1.pep
SDPEPVTFSCTKRLLHVKRRISFSFSPISPLKQFLLSQRGASEERRSTTRDLT

SEQ ID NO: 145018 - protein, 60 aa, Glycine max
  Clone ID: PAT_MRT3847_101970C.1.pep
RFGASFSSFQTLTLLFLFDHHLSIKEILGTCVSVGCTVDGKDPKDLQQEISDGDVEVPLD

SEQ ID NO: 145019 - protein, 168 aa, Glycine max
  unsure (1)..(168): unsure at all Xaa locations
  Clone ID: PAT_MRT3847_101971C.1.pep
MPPKFDPSQIVDVFVRVTGGEVGAASSLAPKIGPLGLSPKKIGEDIAKETAKDWKGLRVTVKLTVQNRQAKVTVVPSAAALVIKALKEPERDRKKTKNIKHNGNISLDDVIEIARVMRPRSMAKDLSGSIKEILXKRTCVSVGCTVDGKDPKDLQQEISDGDVEVPLD

SEQ ID NO: 145020 - protein, 78 aa, Glycine max
  Clone ID: PAT_MRT3847_101972C.1.pep
ISEKFKYRLISILAYGNLYSAASHMKHATLLHALSHAKTNTYSATSATKTYMHQWLNYLGKVCCRLFQTLKHICSRAE

SEQ ID NO: 145021 - protein, 96 aa, Glycine max
  Clone ID: PAT_MRT3847_101973C.1.pep
TSQSTINSADFHVVSLKKSKSRRNPPTPYITSTLQQDAANKLHFTASHTMKLAQKLYEGVELSDGIAVGLITYIRTDGLHISDEVVASIRSLIIER

SEQ ID NO: 145022 - protein, 127 aa, Glycine max
  Clone ID: PAT_MRT3847_101974C.1.pep
GAPPGTVLFLRGHPAGHITENGFPPPPISLFWVCSQTRKGSWFSGLRPFLVKLPFTALPFFKKQSCAGGQMHSLAFQVFFFPLLKMVSPSFRLPFQFLCSALKRALFSFQRFFKFLGFVTHFNLLGI

SEQ ID NO: 145023 - protein, 56 aa, Glycine max
  unsure (1)..(56): unsure at all Xaa locations
  Clone ID: PAT_MRT3847_101975C.1.pep
LIKGSSGFGHQYLEXXXCCXWKXTKXRKXRXXSIXXSNNLXSSSXAPFLRXSCLEX

SEQ ID NO: 145024 - protein, 46 aa, Glycine max
  Clone ID: PAT_MRT3847_101976C.1.pep
SMIIICRIIMIFMRLILTKLYHILLFERRYKSILSILADTIMQDKE

SEQ ID NO: 145025 - protein, 168 aa, Glycine max
  Clone ID: PAT_MRT3847_101977C.1.pep
PRVRYCKPCAKLIKSKQYCGICKKIWHHSDGGNWVCCDGCNVWVHAECDKISSKHFKDLENTDYYCPDCKGKFNCESSTSQTYKSKNISLETGPKPALPENLGVVCNGMKGIYIPNDHMIMCKCCLCGSRTHTLTDWERHAGSKARKWRYSVKVESTMQPLKEWIDEH

SEQ ID NO: 145026 - protein, 134 aa, Glycine max
  Clone ID: PAT_MRT3847_101978C.1.pep
QRVESPDYTSLSSPTYIRSSSYSETGTSDQTSETVEEEVHSTSKPFGIPNENKLKISASNVESSSEELRKSSMGARATDSARVMKFTKVLSETMVKLEKLRGFSWRGVPDYMRPTVWRLLLGYAPPNSYRTEGV

SEQ ID NO: 145027 - protein, 100 aa, Glycine max
  Clone ID: PAT_MRT3847_101979C.1.pep
RDCGYSGRFLRFIGLGVILCVSIGFLKFTYIFCKVPFYHLLTTMPFYHLLTTMPFYHLLTTMPFYHLLPTMPFYHLLTAMPFYHLLTTMQAHKSAQRLQA

SEQ ID NO: 145028 - protein, 225 aa, Glycine max
  unsure (1)..(225): unsure at all Xaa locations
  Clone ID: PAT_MRT3847_10197C.1.pep
MASKPGILTDWPWKPLGSFKYVILAPSVVHSLYSMLAKDKSERDITNFLILPFLLWRMLHNQIWITLSRHRTAKGNGRIVDKGIEFDQVDRERNWDDQILLTGLTYYLSNYIFAGASRIPLWRTDAAVVTILLHMGPVEFLYYWLHRALHHHFLYSRYHSHHHSSIVTEPITSVIHPFAEHISYLFLFATPLLILVFTKTASMMGPCLGYVTYIXDFMNXHGSFA

SEQ ID NO: 145029 - protein, 37 aa, Glycine max
  Clone ID: PAT_MRT3847_101980C.1.pep
LDCRDCIMAVRKVATFIGYTSSLVNDLTCNLGANQPP

SEQ ID NO: 145030 - protein, 78 aa, Glycine max
  unsure (1)..(78): unsure at all Xaa locations
  Clone ID: PAT_MRT3847_101981C.1.pep
MAPGMVSFPGGTTFNHTRSVMEAPFTPLKSTAGFPTSNTNNYITSIVSNXRREQPMHLXPPIVINKSETSSYLPDLYY

SEQ ID NO: 145031 - protein, 54 aa, Glycine max
  Clone ID: PAT_MRT3847_101982C.1.pep
LQPCHFTNHYTINKKTIMKEGNDTMFKIRPTVCKHCWKIINTKRINICFQRNDL

SEQ ID NO: 145032 - protein, 61 aa, Glycine max
  unsure (1)..(61): unsure at all Xaa locations
  Clone ID: PAT_MRT3847_101983C.1.pep
GYCFGGCQIFPNLRYTEXTTTDTLFMQVAPLNAQWDTAXMGALAENDVCICGSNCACIPCT

SEQ ID NO: 145033 - protein, 59 aa, Glycine max
  Clone ID: PAT_MRT3847_101984C.1.pep
SPLLIVYFLLFFFFGIFIFLNYHSIRECLEYSTCMNIHHISEVFLFLKKKSKKKKKTKN

SEQ ID NO: 145034 - protein, 49 aa, Glycine max
  Clone ID: PAT_MRT3847_101985C.1.pep
KVPHKLFARHGRENPSGLGCVKETLRGHQFSDFIRLMGDARKRILMLHK

SEQ ID NO: 145035 - protein, 55 aa, Glycine max
  unsure (1)..(55): unsure at all Xaa locations
  Clone ID: PAT_MRT3847_101986C.1.pep
XASVNXSPGIHSEFAQRKQWXPGEXLIILXFFYSYKRLLFPMFQKTPFHSFFFLQ

SEQ ID NO: 145036 - protein, 91 aa, Glycine max
  Clone ID: PAT_MRT3847_101987C.1.pep
TSSIYKKFSDFNSQLYVCMLWPKFPHIFLIWKLLDYGGTLVTPCFCRSKLHPWRHVYRKNTTILVFLEKPQTYICSFILLLGFVDTRTTNR

SEQ ID NO: 145037 - protein, 50 aa, Glycine max
  unsure (1)..(50): unsure at all Xaa locations
  Clone ID: PAT_MRT3847_101988C.1.pep
MGXXDXXXMLTGSXDPKXXEEEXLVDPLTTVRXHCEQLEKCVKARERLXS

SEQ ID NO: 145038 - protein, 43 aa, Glycine max
  Clone ID: PAT_MRT3847_101989C.1.pep
QSSRNLNIYCYYTFEIIAYVCLLFIWVFFAELVLLVDENRTMG

SEQ ID NO: 145039 - protein, 56 aa, Glycine max
  Clone ID: PAT_MRT3847_10198C.1.pep
YIMVNLASSYIKIVKSANINNAHMFLLLVGISLHKFCYLYSTLLKQSNLHLQTNYQ

SEQ ID NO: 145040 - protein, 208 aa, Glycine max
  unsure (1)..(208): unsure at all Xaa locations
  Clone ID: PAT_MRT3847_101990C.1.pep
MSSDPEKRVTSEVVEDDELSPIEEVRLTGTNTDHPTRPVWTLRMWFLRLLSCSLLSFLNQXFAYRTVPLIITQITVHVATLPIGHFMAAFLPTTTFSIPGFGSKSFSFNPGPFNMKEHVLITIFANAGSAFGSGSPYAVGIVNIIKAFYGRSISFAASWLLIITTQVLGYGWAGLLRKYVVEPAHMWWPSTLVQVSLFRALHEKDDHR

SEQ ID NO: 145041 - protein, 339 aa, Glycine max
  Clone ID: PAT_MRT3847_101991C.1.pep
MADIPRVKLGSQGLEVSKLGFGCMGLSGVYNDPVPEEVGISLIKHAFTKGVTFFDSADFYGARANEVLVGKALRDFPRDQFQIATKFGIVKMENGNVIVNGSPEYVRSCCEGSLQRLGVSYIDLYYQHRVDTTVPIEDTMGELKRLVQEGKIRYIGLSEASPDTIRRAHAVHPITAVQLEWSLWTREIEQDIVPLCRELGIGIVPYSPLGRGFFGGKAVVESIPANSFLAFQPRLRGENFDKNKILYSRIEKLAEKYGCTSSQLALAWILHQGDDVVPIPGTTKIKNLDSNIGSCEVKLSKDDLKEITDAVPISEVAGDRTTDAFVRCSWKFANTPPKA

SEQ ID NO: 145042 - protein, 48 aa, Glycine max
  Clone ID: PAT_MRT3847_101992C.1.pep
MKERFYCFIFLTLFKLIKQNFSPLFCCFSSLILEFKMFYFNLLKYELY

SEQ ID NO: 145043 - protein, 153 aa, Glycine max
  Clone ID: PAT_MRT3847_101993C.1.pep
SEARARQVEADERLARELQEQLYHDDPFEGRGIDEDLAWDLQRAEALMRATIDSHSISQPRQLPRAIRQPRTRFPENPSRRRAMAQASFSNRMSQWRSRATSRTRAPSTSSRGRGPRFPLDMDLDMRLDILEALEDSVGDFSDMGITDGIFNA

SEQ ID NO: 145044 - protein, 85 aa, Glycine max
  Clone ID: PAT_MRT3847_101994C.1.pep
ALQCILYELMDLQKDPPTSCSAGPLAEDMFHWHVTIMGPADTSYAGGVFLVTIHFLSDYSFKPAMVASTTKVLHLDLLLHSVHWS

SEQ ID NO: 145045 - protein, 120 aa, Glycine max
  unsure (1)..(120): unsure at all Xaa locations
  Clone ID: PAT_MRT3847_101995C.1.pep
HCNFILIVIYFKTTNFWRSRATSRTRAPSTSSRGRGPRFPLDMDLDMRLDILEALEDSVGDFSDMGITDGIFNARRDFTDADYEMLLALDEGNHQHTGASSNLINSLPXSTIQTDNFTDA

SEQ ID NO: 145046 - protein, 91 aa, Glycine max
  unsure (1)..(91): unsure at all Xaa locations
  Clone ID: PAT_MRT3847_101996C.1.pep
HASALGEDPVLSTYIIXRGRNYXPKKRPVIPVMLWKPHEPVYPRLIKTTINGLSIKETKEIWKRGLAVPALTKFGMCMHRIVLFRLPVCFL

SEQ ID NO: 145047 - protein, 53 aa, Glycine max
  Clone ID: PAT_MRT3847_101997C.1.pep
SVKTPTNHYWLQPIYKVMRGIAYSIHDMYRVNGSTSIRITWTRQYSRDVTPYI

SEQ ID NO: 145048 - protein, 165 aa, Glycine max
  Clone ID: PAT_MRT3847_101998C.1.pep
MENLLGLLRIHVEKGVNLAIRDVVSSDPYVVIKMGRQKLKTRVVKKNLNPEWNDDLTLSISDPHAPIHLHVYDKDTFSMDDKMGDAEFFIGPFIEAVKMRLSGLPNNTIVTKVLPSRQNCLAEESHIMLKDGKVVQNMVLRLRNVESGEVELQLHWIDIPGSRHL

SEQ ID NO: 145049 - protein, 180 aa, Glycine max
  Clone ID: PAT_MRT3847_101999C.1.pep
KSILLHFIPHIYFSSMENLLGLLRIHVEKGVNLAIRDVVSSDPYVVIKMGKQKLKTRVVNKNLNPEWNDDLTLSISDPHAPIHLHVYDKDTFSMDDKMGDAEFFIGPFIEAVKMRLSSLPNNTIVTKVLPSRQNSLAEESHIVWKDGKVVQNMVLRLRNVETGEVELQLHWIDIPGSRHL

SEQ ID NO: 145050 - protein, 65 aa, Glycine max
  Clone ID: PAT_MRT3847_10199C.1.pep
PLLPVLTFIPSKVNSNSPMTFDILSKTCTYSPQFKTILIPNYSFYKIGSLLQSYPQNYKILAKTS

SEQ ID NO: 145051 - protein, 99 aa, Glycine max
  Clone ID: PAT_MRT3847_1019C.1.pep
MARHVFLTGPPGVGKTTLIHKASEVLKSSGVPVDGFYTEEVRQGGRRIGFDVVTLSGTRGPLSRVGLEPPPGKRECRVGQCMADQPWLKEEEETKVERA

SEQ ID NO: 145052 - protein, 83 aa, Glycine max
  Clone ID: PAT_MRT3847_101C.1.pep
NNLHLISFNFEIYLVKKNFKFLLAGIGPNLKPTLCGGFPFRKRLFVWIRGKKPSTSLKNILLEGIWVVNEPKGPTLGNPDDFP

SEQ ID NO: 145053 - protein, 49 aa, Glycine max
  Clone ID: PAT_MRT3847_102000C.1.pep
TNYQKRHKVTLLECGPYYKHILNTICYSPVYPASTSCLLILIIFLISTN

SEQ ID NO: 145054 - protein, 126 aa, Glycine max
  unsure (1)..(126): unsure at all Xaa locations
  Clone ID: PAT_MRT3847_102001C.1.pep
MRDIVSCFSENAVNVSHSSISGSSYSHNACLSPSSIVVPSPQNSISSVYKLVLSTLKQVLVAVTWCRSHXNQGLTITFNDEDPPLFRLNTNSRFFRKKKGSKILESSDSSSSKVEILWDLLSAKYE

SEQ ID NO: 145055 - protein, 332 aa, Glycine max
  unsure (1)..(332): unsure at all Xaa locations
  Clone ID: PAT_MRT3847_102002C.1.pep
MSYPSLSFQFAPLLSFSLTALSLPPLPVFSKRYSPSSSSPIPKATPSHLLSLLGSKAESSAVNPVVARGLKSCFKFLVPFSPVQPRHRKLGLGLPKLTVPSQREENELIWWPPEPVLELARLAVDSGGDPAAIHRLLDPTIIPHXVPDCEGSKDERCELTRTPYGRRFVCEELNLYLQFLFELIVDRGPSVGLGVTLNRFDLFHGHLFLALDSGRLGILFHAKEYPAYDKQVFPYNMGFCQRGSNVTYDDSMNLRNILWLAPMPGDSGESWVAPGVLVVLDARPDGIIYRDLIPDYVNFARTIYEDDLGDVAVDVNYLNVGSETRNYQIFIC

SEQ ID NO: 145056 - protein, 50 aa, Glycine max
  Clone ID: PAT_MRT3847_102003C.1.pep
LRFQGGLGGGSNVRIGLRSFVMKAAPSDSFVAIWCGPSWGSEGHVLLVVL

SEQ ID NO: 145057 - protein, 88 aa, Glycine max
  Clone ID: PAT_MRT3847_102004C.1.pep
VIEGKEKGPKIVEEAKKQGVALLVLGQKKRSTTWRLLMMWAGHRVTGGVVEYCIQNAHCMAIAVRRKSKKSGGYMITTKRHKDFWLLA

SEQ ID NO: 145058 - protein, 40 aa, Glycine max
  Clone ID: PAT_MRT3847_102005C.1.pep
CLQLDGLSSLKELLCMSMSINIDQACEDYRPLLSSYGQAG

SEQ ID NO: 145059 - protein, 382 aa, Glycine max
  unsure (1)..(382): unsure at all Xaa locations
  Clone ID: PAT_MRT3847_102006C.1.pep
MAPMKVQPIAIDIDSEKVTAAATAAAVVVRNESVLKSRLKSVFVRHRPLNNNKNIAEFEPSSVCLAKMVQVQIEVEEQXPAPPKCGRNRCNCFNANSSDEDDFDLFGAAPAPESSNADAXNHSIKSLIPCASVGERNLLADVARIVEKNGKSFKRKDDLRKVVAEALSSLGYDSSICKSKWEKTSSCPAGEYEFIDAIVEGERLIVDVDFRSEFEVARSTGTYKAMLQSLPFTYVGKSERLTEIVAIVSEAAKQSLKKKGMHVPPWRKRDYMLAKWLSPSSIREKEKENKQPPSSSVQVAAAAAAPETVSDGDAASTTESDCGELELIFGGEMSPETEYGEAKAESAVATKPAWQPPAVKPKSVERGTKVVTGLASLLKDKP

SEQ ID NO: 145060 - protein, 116 aa, Glycine max
  Clone ID: PAT_MRT3847_102007C.1.pep
KKPPPPRFCNFLIGQVLKVFLLWPVALVGYQLFLGGYPFTPPPLSPFFLLMKFASAGFPDENFFFRPIDFLFFPPLFSAPLFEKNVSRSNLLWNFRVSQGPPGFPWTKKMPTSFLF

SEQ ID NO: 145061 - protein, 78 aa, Glycine max
  Clone ID: PAT_MRT3847_102008C.1.pep
GEKLAVADMSSFDAYHDDLNVNSSYTRQHYDDHDNLYGYGSYSCFTGGFYDDGDVAVDHYGIAYPEIYRFTDSNPAYS

SEQ ID NO: 145062 - protein, 99 aa, Glycine max
  unsure (1)..(99): unsure at all Xaa locations
  Clone ID: PAT_MRT3847_102009C.1.pep
HAYADAVGKLAAIMKICRSXEHIFKDHLDGLPTERDKMYNVFDNHIAAXLKMVPMTXHLSMEYIKXLITESDGYQPHLIAPEQGYRSLIESYLITIMGP

SEQ ID NO: 145063 - protein, 148 aa, Glycine max
  Clone ID: PAT_MRT3847_10200C.1.pep
FSWNLLTLDRNNIVAISSSPVDVSSRKYGMAIEKATSNTTWSWSNISSPIFRCSDKVVSLLSSLQCSILSISVKDVHDGQTKGATKHFEAIFVTSKTKNKDVFDPLIVILHGGPPIVYLSHFSKYLAFQSSAGYSLLIVNYRRSVRIW

SEQ ID NO: 145064 - protein, 49 aa, Glycine max
  Clone ID: PAT_MRT3847_102010C.1.pep
WILKFSYKCRGTFLTRVPPSSCSGLGSSGILPIFKRPEDSANALTLTCS

SEQ ID NO: 145065 - protein, 71 aa, Glycine max
  unsure (1)..(71): unsure at all Xaa locations
  Clone ID: PAT_MRT3847_102011C.1.pep
MGXTVLHSSARTGYLEVVKALVXXXPXXAMXXXXKGQTAXHMAVXGXXLEXVDELVXLNPSLAXXVDAXGT

SEQ ID NO: 145066 - protein, 227 aa, Glycine max
  Clone ID: PAT_MRT3847_102012C.1.pep
MFIIVSTTSTCLLLNNSASSPLLLSCCIDSVKYGSFALPKFERRRRSKWRAVDGSGEKQSAVTVAATTTSTFDDDNDVVDSASAVLKNFYGGINAHDVDSVEYLIAENCVYEDLVFPRPFVGRKEILEFFKKFTNSTSKDLQFVIDDLSTEDSSSVGVIWHLEWKGKPFPFSKGCSFYRLEVINGKRQITYGRDCVEPAIKPGDATLAAIRSVTWLLQQFPQLANWL

SEQ ID NO: 145067 - protein, 68 aa, Glycine max
  Clone ID: PAT_MRT3847_102013C.1.pep
TAILIIPKVEAFIYIEESQVRTLPINNLEMLLLRYKIKQHTDISTENYHTQEKLIVFRCWVNLHPKVS

SEQ ID NO: 145068 - protein, 225 aa, Glycine max
  Clone ID: PAT_MRT3847_102014C.1.pep
MLRFEITFAFQMDLGVGAFVLANSLVSRQARNITSVSWKTAIVSTSPLIILGFLRLVTTTGVDYQVHVGEYGVHWNFFFTLAAVSILTSFIQISPQYSGVIGSLVLVGYQFCLVQGLNHYLLSNERGMDIISQNKEGIFSIFGYWGMYLLGVHLGNYLIFGSHSSGFRSSRWVRMRVWVLSILFWLLTVLLDRHVERISRRTCNLPYVTMVVADNLQLMLSQSVP

SEQ ID NO: 145069 - protein, 61 aa, Glycine max
  Clone ID: PAT_MRT3847_102015C.1.pep
VPPSLWRTHSALAEHSCVLMKSHNEYESTDDNLLIYEGLWKTLLVIYVNPVLFSFSPVLTP

SEQ ID NO: 145070 - protein, 82 aa, Glycine max
  Clone ID: PAT_MRT3847_102016C.1.pep
FPQLFFPPLIKKNWSPPGPVPNFPGEPPRLSKKPQGKIGVSGGGFFGPFGPPIKFLLKIQTPLLKKNVFSFPPPPFKLKNLM

SEQ ID NO: 145071 - protein, 91 aa, Glycine max
  Clone ID: PAT_MRT3847_102017C.1.pep
GKLGSLRGPVLNFRVHPRPPEKTPFFKKGWAPHFFGKFSPLFFFLDCPLKIFWAFDFFFSPNFYCIIPRGVALFFFFENSVFFFPPKVNFN

SEQ ID NO: 145072 - protein, 70 aa, Glycine max
  Clone ID: PAT_MRT3847_102018C.1.pep
ERTEGQWGERENPFGSCILRLIPMEVLQRSRAYANGHMKHIESFYGAPRPYDFSLRTYSAFLCTNSIWFF

SEQ ID NO: 145073 - protein, 150 aa, Glycine max
  Clone ID: PAT_MRT3847_102019C.1.pep
TAARRRQKGTLIGATIGLFIPIAYIFEGVFEGDKEGIKAAAPHVFLLASQVFMEGVASSSSQRFSAPVRAFVPAFYNARRIFTIVDWLKSEVYKIDGEHSGSAWKIHVGRALAMANMAYWSFNLFGFLLPVFLPKVLKLYYSSEYNDKDR

SEQ ID NO: 145074 - protein, 993 aa, Glycine max
  Clone ID: PAT_MRT3847_10201C.1.pep
MAPSTGDVQLTSPGAGQDFDDLEDIRLLDSYDKNDVVHDETKRIQVRISGMTCAACSNSVQTALRSVHGVTEASVALLQNKAEVVFIPGLVKDEDIKNAIEDAGFEAEILPDSGAAAHAAASAAVLGQFTIVGMTCAACVNSVEGILRNLNGVKRAVVALATSLGEVEYDPHVISKDDIVSAIEDAGFEGAFVQSNGRDQIVLGVSGVYSLGDAQVLEAMLSGTKGVRQFRFDTAVNELDVVFDPEVISSRSLVDGIQLGSNGKFKLHVRNPYARMASKDGSESSAMFRLFISSLFLSIPLFFMGVICPHIPLVYSLLLWRCGPFLMGDWLNWALVSVIQFVIGKRFYIAAGRALRNGSTNMDVLVALGTTASYVYSVCALLYGALTGFWSPTYFETSAMLITFVLLGKYLECLAKGKTSDAIKKLVELTPATALLIVKDKGGRTIEEREIDSLLVQPGDTLKVLPGTKIPADGIVTWGSSYVNESMVTGESIPVSKDVNASVIGGTINLHGVLHVQATKVGSDTVLSQIISLVETAQMSKAPIQKFADYVASIFVPTVVVLALLTLLCWYIAGALGAYPDEWLPKNGNHFVFALMFSISVVVIACPCALGLATPTAVMVATGVGANNGVLIKGGDSLERAQMVKYVIFDKTGTLTQAKATVTAAKVFAGMDRGDFLTLVASAEASSEHPLAKAISQYARHFHFFEESSPTSGTKNAAEEFKSGWLYDVSDFSALPGRGIQCFIDGRRILVMSFAYPKQVGNRKLLEENGINISTEVESFVVEIEESAKTGILVAYDDILIGVLGIADPLKREAAVVIEGLQKMGVIPVMVTGDNWRTARAVAKEVGIQDVRAEVMPAGKADVVRSFQKDGSIVAMVGDGINDSPALAAADVGMAIGAGTDVAIEAANYVLMRDNLEDVITAIDLSRKTFFRIRLNYVFAMAYNVVAIPVAAGVFFPSLGIKLPPWVAGACMALSSIRCTHWGAIVIVAANSL

SEQ ID NO: 145075 - protein, 65 aa, Glycine max
  Clone ID: PAT_MRT3847_102020C.1.pep
QLKHLKKMKQDRGLLMSWTKRSWLVWLPLGCTQRSSNLKINHGASFWLLGEVLFFIFSLLMLLGC

SEQ ID NO: 145076 - protein, 459 aa, Glycine max
  Clone ID: PAT_MRT3847_102021C.1.pep
MTKNNMNFLTFVTVLLFILPATSSSQYLGNNLLTHRKIFLKKDNIITSYAVIFDGGSTGTRVHVFHFDQNLDLLPIGDSLELNKKITPGLSAYEDDPEQAAESLIPLLEEAESVVPEDLRPNTPVRLGATAGLRLLKGNASEQILQAVRDMLSNRSTLNLQSDAVTILDGNQEAAYMWVALNYLLGNLGKVISKTVGVADLGGGSVQMAYAVSKNTAKNAPQPPEGEESYIKTLVLNGKTYDLYVHSYLHFGKEASRAEMLKVTGDSANPCILAGYNGTYTYSGVKYKALASTSGSNFDKCREVALKALKVNEPCPHQNCTFGGIWNGGGGSGQKVLYVTTSFYYLVIQAGIADASKTSSKVYPAEFKAAAKRACQVKFEDAQSTYPLMMEDALPYICMDITYQYTLLVDGFGLDPWKEIIVANEIEYQGALVEGAWPLGSAIEAISSLPKFNKLMYFI

SEQ ID NO: 145077 - protein, 473 aa, Glycine max
  unsure (1)..(473): unsure at all Xaa locations
  Clone ID: PAT_MRT3847_102022C.1.pep
LLKTAVRYLRERSVLFKYCREEVANMRHNALFRRFISALTRGGPGGLPRPIEVHAHDPLRYVGDMLGWLHQALASERELVAVLLDPDTITDSGPKQFSNNSENGSGKTESDLMFVLDRIFEGVCXPFKLRVEQVLQSQPSLIVSYKLSSTLEFYCYTISDLLGRETALCNTLWALKDAAQKTFFDILKGRGEKLLRYPPLVAVDLSPPPAVREGVSVLLEVIDNYNSMMVPASGQKPAFGPVISAILDPIVQMCEQAAEAHKSKGAGHSSRRSRMSSDSGQLTKSSVDAILSNSSSASSSLTSETPSKIFLINCLCAIQQPLSGYEAVADYVKRLGAMIDNHLCVLVEKEADAILRRCNLSEKMPHFQNSIHKEGDNEVGTPLAEMEDTSPAVLSECLKALFGLILGSESSLPEFEQMQVPRLRSEATIGVARSLAEAYDLIYKAIMDPKNGYPDPRSLARHPPNQIRTILGI

SEQ ID NO: 145078 - protein, 543 aa, Glycine max
  Clone ID: PAT_MRT3847_102023C.1.pep
MDSSSDEEDDHRNLVDNNHRKPPSSPAAVAFHVEDPSPRFRRANFTLQKKYIFAILAILFLLLFFSITDLHKLFSTTSSFRFDSLTDRMKESELRAINLLNQQQQALLTAWNHTLRTNASDPNLLEDLKSSIFKQISLNREIQQILLNPHSTGSNAIEPEFDLNATLNGVVYDRCRTADQNFSQRKTIEWNPKDGKFLLAICVSGQMSNHLICLEKHIFFAALLNRVLVIPSSKVDYQYDRVVDIDHINKCLGKKVVVSFDVFSNLKKGHLHIDKFLCYFSQPQPCYLDDERLKKLGALGLTMSKPEAVWDEDTRKPKKKTVQDVLGKFSFDDDVMAIGDVFYAEVEREWVMQPGGPIAHKCKTLIEPNRLILLTAQRFIQTFLGRNFIALHFRRHGFLKFCNAKKPSCFYPIPQAADCILRVVEMADAPIIYLSTDAAESETGLLQSLVVLNGRPVPLVIRPARNSAEKWDALLYRHNMDGDSQVEAMLDKTICAMSSVFIGAPGSTFTEDILRLRKDWGSASMCDEYLCQGEEPNIVAENE

SEQ ID NO: 145079 - protein, 112 aa, Glycine max
  unsure (1)..(112): unsure at all Xaa locations
  Clone ID: PAT_MRT3847_102024C.1.pep
PLKPSTEEKEEQKSEQKDRSKPHNHTRARGDRAKNNTGHAERXGKNAKPRETENPEDAAGDRRKDEKDPQEKAETKKRNGPXETNKQNGQPRRSTNQXNRARNGEQNRASSD

SEQ ID NO: 145080 - protein, 58 aa, Glycine max
  Clone ID: PAT_MRT3847_102025C.1.pep
QENTRIYHEVFACIPNNQIHSRAALRQSMVHWKRKLGHTTIDMGIAPDKVVCHENGEI

SEQ ID NO: 145081 - protein, 58 aa, Glycine max
  Clone ID: PAT_MRT3847_102026C.1.pep
DKDGDDQNDDEDEDDDYDTKKDEGGEEENEDGAEVKENREDEEGEEEKQLQPPKKRKK

SEQ ID NO: 145082 - protein, 98 aa, Glycine max
  Clone ID: PAT_MRT3847_102027C.1.pep
WYRALRKLLGLCQMDALHLHLHLHRMQHCFPFCDELKALTSATNHSYFMYAPDSYLMHTPDDPAAYSFVKFGLSMKQQAASIFSACPSFCQPFVSEYI

SEQ ID NO: 145083 - protein, 50 aa, Glycine max
  Clone ID: PAT_MRT3847_102028C.1.pep
HSYAHAYVHASYRFLLKMNIVLNRQYCKYLHLQLTKILQHTKKLPHILLC

SEQ ID NO: 145084 - protein, 108 aa, Glycine max
  unsure (1)..(108): unsure at all Xaa locations
  Clone ID: PAT_MRT3847_102029C.1.pep
AERVTLYGRGAVLSYKKGKCNQYPNTXPLSQIERVNTKXYLXVYARGENGYIYNAKRRKEXXHYRCIWGXKVTRGSXNIEVXTFKIQXNLXPXSMGAXVKVLMCPINI

SEQ ID NO: 145085 - protein, 239 aa, Glycine max
  unsure (1)..(239): unsure at all Xaa locations
  Clone ID: PAT_MRT3847_10202C.1.pep
YLECLAKGMTSDAIKKLVELTPATALLIAKDKGGRTVEEREIDSLLIQPGDTLKVLPGTKIPADGISSRIGSSVNESMVTGESIPVSKEVNASVIGGTINLHGVLHVQATKVGSDTVLSQIISLVETAQMSKAPIQKFADYVASIFVPTVVVLALLTLLCWYVAGALGAYPDEWLPKNGNHFVFALMFSIXVVVIACPCALGLATPTAVIVATGVGANNGVLIKGGNSLERAQMVKYVI

SEQ ID NO: 145086 - protein, 72 aa, Glycine max
  Clone ID: PAT_MRT3847_102030C.1.pep
LFGCEKTTEGGNDAGGLKHVFDIGGCDSIVATTDAEVMPAGSSVIIVDGKDINVVDARDPVHLAWEDLRIDN

SEQ ID NO: 145087 - protein, 93 aa, Glycine max
  Clone ID: PAT_MRT3847_102031C.1.pep
IVSADAFENLKPAPDIFLAASRILNVPSNECIVIEDALAGVEAAKAAQMRCIAVRTTLSDEALEPAGPTLIRDNIGSVSLDDILSGGSVGYSM

SEQ ID NO: 145088 - protein, 69 aa, Glycine max
  Clone ID: PAT_MRT3847_102032C.1.pep
GVQIRLPKNFVVPIIWPRVAMPVIWQAVEFHYPRQGFSSFVNRGLPSQGSTMNDRLTVDVNPCFRHLGH

SEQ ID NO: 145089 - protein, 53 aa, Glycine max
  Clone ID: PAT_MRT3847_102033C.1.pep
TKTWIGWLKTHTKKHSLDPLSHNDKLFRLFMTFLWWAHPSGPAEAQNYSLDYW

SEQ ID NO: 145090 - protein, 70 aa, Glycine max
  Clone ID: PAT_MRT3847_102034C.1.pep
RGPHVSPYILLTQKSLGPHWTPPSGLTCYPLTSPGGAQRPLEKKKVWKGISKKWPSPKKKKIIPGPKGFF

SEQ ID NO: 145091 - protein, 75 aa, Glycine max
  Clone ID: PAT_MRT3847_102035C.1.pep
YDAKSSTQVKFVKDLGYRQLSSKHSKTRVGRESANVQMHEETFDDSIKEKKAKKNLGREAPSVQMHGETFDHTIK

SEQ ID NO: 145092 - protein, 66 aa, Glycine max
  Clone ID: PAT_MRT3847_102036C.1.pep
FQDCHHQKGGDCGSNALYESFDDAKELFQESKSSSITVCFSEEIVIQSKQVSRIKESFNYSLFRES

SEQ ID NO: 145093 - protein, 40 aa, Glycine max
  Clone ID: PAT_MRT3847_102037C.1.pep
FEMMSMVCGFVEIEKYLCINKRYILVVRSSYKEWIDCLCP

SEQ ID NO: 145094 - protein, 74 aa, Glycine max
  Clone ID: PAT_MRT3847_102038C.1.pep
KSNKPHTRLNTSGNSETKPFIFYSIQSYIMDPLGKIIPQGPFIFCLLKKNIGHVNIKSNPFYIKNTIFGLLFPN

SEQ ID NO: 145095 - protein, 54 aa, Glycine max
  Clone ID: PAT_MRT3847_102039C.1.pep
ITTSTFCSSFHSFEFFKSILKRSPTDDPVADLNGFEFNFRYQYDGLSGLMRRGA

SEQ ID NO: 145096 - protein, 150 aa, Glycine max
  unsure (1)..(150): unsure at all Xaa locations
  Clone ID: PAT_MRT3847_10203C.1.pep
AGEEFKSGWLYDVSDFSARPGRGIQGFIDGRRILVGNRKLLEENGINISTEVESFVVEIEESAKTGILVAYDDILIGVLGIADPLKREAAVVIEGLQKMGVIPVMVTLDLAKRXKTCAVXVGIQDVRAEVMPAGKADVVRSFQKVMLQLS

SEQ ID NO: 145097 - protein, 42 aa, Glycine max
  Clone ID: PAT_MRT3847_102040C.1.pep
REKTIGPDFHYNGQPRVLSLIPLKISLITLHRWTPQSRKPLA

SEQ ID NO: 145098 - protein, 56 aa, Glycine max
  unsure (1)..(56): unsure at all Xaa locations
  Clone ID: PAT_MRT3847_102041C.1.pep
MHQHVEVEILLTFTNLFXHLFSNDEIRILILVLYAPCKTTILYKLKLGYILSTLPT

SEQ ID NO: 145099 - protein, 101 aa, Glycine max
  Clone ID: PAT_MRT3847_102042C.1.pep
VRPPGPGKSLKPDFGVSGISFFVKARVKWGFLRKGRITGSCLKSWHGGLHPLPWIGFQVLPGLVKALGQLEPPGKSNKNSKENLVFGGSGVIRGTRLFWKN

SEQ ID NO: 145100 - protein, 87 aa, Glycine max
  Clone ID: PAT_MRT3847_102043C.1.pep
ANSVDSLGLRNGFDQNSSFHEAAIHDMSEVPFGGEYNRCVSNISAPEMFNSQLKYGNQMVENGYIHCMPGVDLSSNFSISNDAIMYI

SEQ ID NO: 145101 - protein, 42 aa, Glycine max
  Clone ID: PAT_MRT3847_102044C.1.pep
YKPISIQQKRLTIRIRYPFICTIYCFWARVLKIWLCFEKCLL

SEQ ID NO: 145102 - protein, 230 aa, Glycine max
  unsure (1)..(230): unsure at all Xaa locations
  Clone ID: PAT_MRT3847_102045C.1.pep
LGWRQNVHLLVDHLADWLEGESDKNLVFHTFSNTGWLTYGVILEHLQKQDPTITERIKGCIVDSAPVAYPDPXVWASGFSAAFLKKNSVATKGRVFSDQSGIKVSIGSEDDLGLKPALTEAALLLILKKFFEIILDLPSVNRRLSDVMSMLSSRQPSCPQLYMYSSADRVIPADSVESFVEAQRRAGHDVRACNFVSSPHVDHFRNDPRLYTSQLSQFLEECVVSRCKSY

SEQ ID NO: 145103 - protein, 130 aa, Glycine max
  Clone ID: PAT_MRT3847_102046C.1.pep
HAISRTEGCNRMKCGNCEQYFCYRCNKAIDASDPYGHFRDGSCELFPREMVDSWEERINHRQAVGQLQAELFPQHGLACPSCRQYNPKIGNNNHLFCWACQRHYCYLCKAIVRRGTKHYGPKGCKQHSEG

SEQ ID NO: 145104 - protein, 84 aa, Glycine max
  unsure (1)..(84): unsure at all Xaa locations
  Clone ID: PAT_MRT3847_102047C.1.pep
XXXYXXXXXXXFXXKXYIXLXFYXIXIXXIKQXLXLXPQTLXPXXXPKTFXXSXSPPQXXPXSTNSXXXXPXFFFFFFXQXKTS

SEQ ID NO: 145105 - protein, 180 aa, Glycine max
  Clone ID: PAT_MRT3847_102048C.1.pep
MQEINELKNLVIQSLEGNGVLGQIRAQIRASIFKTIEMQETSTKKNAGFFWENPLCQTIYDNKEGKLALELINDFLEFFKMDYTLSVFSHESNLKDAARRDELLKKLGIKGDTNKPVLFQLINQAHHHEGSPSKENQLSGGPRDLGAAKPKPAAGGANLGAGAGAAGGKTTDFQDNFGQQ

SEQ ID NO: 145106 - protein, 137 aa, Glycine max
  Clone ID: PAT_MRT3847_102049C.1.pep
PQQFGLEFFSHLENGLRQQWPQHQISHLSFTCQANKLFRKCCFTQTTHPMHSNDELFRILQNFLHLIQHWCFGVYCFISFTKWQNHDFRKSIVRNAIKFSIFRDLRNLIISSNLLLSCFLVHGLGLCPRQYNQLHSQ

SEQ ID NO: 145107 - protein, 98 aa, Glycine max
  Clone ID: PAT_MRT3847_10204C.1.pep
HRFTKHGGCENAINDKSLFLDRKRKWLHNFLEDMMLELIELGLADQLAKKGKRTNGLGGRGGSSWICFPLQASLTNKYFLKFGFSFVMGMGRLGLGLG

SEQ ID NO: 145108 - protein, 91 aa, Glycine max
  Clone ID: PAT_MRT3847_102050C.1.pep
NKRPLKGFLLASVSLGPLAPFHWVPFKIMIDRALPIFWGGFKFFWAPPPLTFWSILLPKHVPLAKSPPGLKFLEAQTVSPMEPIFCHSGGF

SEQ ID NO: 145109 - protein, 59 aa, Glycine max
  Clone ID: PAT_MRT3847_102051C.1.pep
AWTTPHPIVGGSLRNSFIPSQRQPLVQSLPQFLFEQPGIKPRPRHNVLRELQSFQDDRQ

SEQ ID NO: 145110 - protein, 70 aa, Glycine max
  Clone ID: PAT_MRT3847_102052C.1.pep
SRGGPIFCQNKYPGQKFWHPQKDGSKGKLLPLGGVQLLEAGTFFTLNKCFLFRGGIQKNGNWAFSWLYFI

SEQ ID NO: 145111 - protein, 69 aa, Glycine max
  Clone ID: PAT_MRT3847_102053C.1.pep
QDNDFDLNALESLKNLPASQPRQSFTSSDHSPRQPRQITTINASGHLTEPSLEASHIDLSPQPPDQRLS

SEQ ID NO: 145112 - protein, 135 aa, Glycine max
  unsure (1)..(135): unsure at all Xaa locations
  Clone ID: PAT_MRT3847_102054C.1.pep
NMSFAPYNPXNWDTRQPWPIFRSLYFRPYFFPSLRNVFQFHIALVCMVDSLSWHRRNCGLKGIWPYLCCRCILSCAYQKQIGLGTQYFYYWDTRHGKFFNEALFYKVIPILGLFEKYFSGGVVFARPQHGMRHLC

SEQ ID NO: 145113 - protein, 49 aa, Glycine max
  unsure (1)..(49): unsure at all Xaa locations
  Clone ID: PAT_MRT3847_102055C.1.pep
XXFXIERXXXAECXXXXSAVXAXXQXRXFAEYMXRAELXXXRKXEYYSL

SEQ ID NO: 145114 - protein, 39 aa, Glycine max
  Clone ID: PAT_MRT3847_102056C.1.pep
GFIVLPFILVSFCLNLNPFFQGCPVCFRPLLFCLVLDRV

SEQ ID NO: 145115 - protein, 332 aa, Glycine max
  Clone ID: PAT_MRT3847_102057C.1.pep
MDLPEKLFFAAFLILSVAIDGTQADTMVTGTVFCDQCKDGQRSLFDYPINGAKVTLSCADSNGQITMSREETTNWFGSYTMRFDGAPDLSGCSAHVSGSGQGSTGCGEVAGPSQNPKLMFRMFDMEMYTVDSLLAQPAQPMQYCSTSSNPVPAPDTPTKPPPHFNLPPVPGFPPLPPLPPLPPLPSLPPLPSLPPLPSLPPLPPVIFAEASACPSEKWTLPEYKCYWRGVNGDTKVAVAFGMVAARRYGTDITLWHGLKGRGDPYRTLLREGITALLNSYNSFQFSYHPLGVVQHMNLALMGSTRSVLLTALRFKRANSGAGNVTCKFTTCK

SEQ ID NO: 145116 - protein, 64 aa, Glycine max
  Clone ID: PAT_MRT3847_102058C.1.pep
LAEANIFETQMKELERICNPFITKMYQGGAGPDKGGAGAGATKNEYAAPSGGSGAGPKNLRKWS

SEQ ID NO: 145117 - protein, 315 aa, Glycine max
  Clone ID: PAT_MRT3847_102059C.1.pep
MDLAEKLFFAAFLILSVAIDGMQADTMVTGTVFCDQCKDGQRSLFDYPVNGAKVILSCADSNGQITMSREETTNWFGSYTMRFNGAPDLSGCSAHVSGSGEGSTTGCGEGAGPSQNPKLMFRMFDMEMYTVDSLLAQPAQPMQYCSTSSNPVPAPDTPPNSPPHFKLPPVPPLPSLPPLPSLPPLPPVIFAEASACPSEKWTLPEYKCYWRGVNRDTKVAVAFGMVAARRYGTDITLWHGLQGRGDPYRTLLREGITALLNSYNSFQFSYHPLGVVQHMNLALMGTTRSVLHTALRFKRANSGAGNVTCKFTTCK

SEQ ID NO: 145118 - protein, 141 aa, Glycine max
  Clone ID: PAT_MRT3847_10205C.1.pep
APSTGDVQLTSPASGEDSDDLEDVRLLDSYDKNDVVHDETKRIQVRITGMTCAACSNSVETALRSVHGITEASVALLQNKADVVFVPGLVKDEDIKNAIEDAGFEAEILPDSGAVAHGGAAAAVVGQFTIGGMTCAACVNS

SEQ ID NO: 145119 - protein, 81 aa, Glycine max
  unsure (1)..(81): unsure at all Xaa locations
  Clone ID: PAT_MRT3847_102060C.1.pep
MAGKXXGXAIXIDLGTTYSCVGVWXHDXXEIIPNDKGNXTTPCXXGFXRTXXRLXXXAXRXQVAMPPXNTVXDXXRLXGXV

SEQ ID NO: 145120 - protein, 184 aa, Glycine max
  Clone ID: PAT_MRT3847_102061C.1.pep
SARVRKLGIRLEKLIEIENFKSYKGRQIIGPFQRFTAIIGPNGSGKSNLMDAISFVLGEKTSNLRVKTLRDLIHGAPVGKPAANRAFVSMVYSEEGAEDRTFARVIVGGSSEYKINNKVVQLHEYSEELEKLGILIKARNFLVFQGAVESIAMKNPKERTALFEEISRSGELAQEYDKRKKEMV

SEQ ID NO: 145121 - protein, 77 aa, Glycine max
  Clone ID: PAT_MRT3847_102062C.1.pep
PIPASFFELSSPSWSIHLIIIKSIISTQSNQTTSYNAQSCQYPPPEFSLSFYVDTSQVLSFNQSNPSQKQKTQIINK

SEQ ID NO: 145122 - protein, 79 aa, Glycine max
  Clone ID: PAT_MRT3847_102063C.1.pep
DILMTERELSQVNDINNLKIVHLTTNILKAKIPSITKKYEFKSLSLVAQSINDQNGDQITCVAKTLLSKSLATEFHFCR

SEQ ID NO: 145123 - protein, 73 aa, Glycine max
  Clone ID: PAT_MRT3847_102064C.1.pep
LRDYLMNGMLDSNATSCILVVIHTVCLELHDSFSQYLMLSHEVVVVLVEQRHGEELIPRTTSPADSLNEAPRN

SEQ ID NO: 145124 - protein, 105 aa, Glycine max
  Clone ID: PAT_MRT3847_102065C.1.pep
SPKLYGFGGDSLAKIKKGATRRKGGWPQKKPVLMYFKAGLQLPVGRIGPSLKTGRHTQHVGTKAPINWPGRLDYIATAVLDFSVNAGKANMHNWIIIKHMLLHVM

SEQ ID NO: 145125 - protein, 111 aa, Glycine max
  unsure (1)..(111): unsure at all Xaa locations
  Clone ID: PAT_MRT3847_102066C.1.pep
ELLSDPQLQAWWKGLREGVLCVLKDKPWRPKMQTGEESVEASFIHIWIASVTHAAVHFGQNPCGGXLILNRPTIIRRFMPEKGFSVYDAVAKIPSKEFLKTISWQKVTLIV

SEQ ID NO: 145126 - protein, 45 aa, Glycine max
  Clone ID: PAT_MRT3847_102067C.1.pep
GDGLQYLLRTTVFVKVYFLGLFSGDGGLYTATVLIQFQVKFVSLD

SEQ ID NO: 145127 - protein, 67 aa, Glycine max
  unsure (1)..(67): unsure at all Xaa locations
  Clone ID: PAT_MRT3847_102068C.1.pep
KLLTVFSVSDYPQFXATQERYNNKGXAYVVLQPPNFKSPIFHXSFQQVTPSPKVNPYYDFKKVIDFH

SEQ ID NO: 145128 - protein, 70 aa, Glycine max
  Clone ID: PAT_MRT3847_102069C.1.pep
KKKSFYVKGVLGPPLFLNSFFFQEFITMCSLLYNVEDPYPSFLFACFIRKWGILIIIMLPPKNLSLFSIP

SEQ ID NO: 145129 - protein, 470 aa, Glycine max
  Clone ID: PAT_MRT3847_10206C.1.pep
QNGNHFVFEWETAQMSKAPIQKFADYVASIFVPTVVVLALLTLLCWYVAGALGAYPDEWLPKNGNHFVFALMFSISVVVIACPCALGLATPTAVMVATGVGANNGVLIKGGDSLERAQMVKYVIFDKTGTLTQAKATVTVAKVFGGMDRGDFLTLVASAEASSEHPLAKAILQYARHFHFFDESSPTSDTKSASEDYKSGWLYDVSDFSALPGRGIQCFIDGRRILVGNRKLLEENGINISTEVENFVVELEESAKTGILVAYDDILIGVLGIADPLKREAAVVIEGLQKMGVIPVMVTGDNWRTARAVAKEVGIQDVRAEVMPAGKADVVRSFQKDGSIVAMVGDGINDSPALAAADVGMAIGAGTDVAIEAANYVLMRDNLEDVITAIDLSKKTFFRIRLNYVFAMAYNVVAIPVAAGVFFPWLGIKLPPWVAGACMALSSVSVVCSSLLLRRYRKPKLTTILEIVVM

SEQ ID NO: 145130 - protein, 64 aa, Glycine max
  Clone ID: PAT_MRT3847_102070C.1.pep
LCSSSFWQQALEGSEPEFIAARQAVSLCWDASHPSFNHGPHFNLKQCFKHQCPHSRFHHHSLVK

SEQ ID NO: 145131 - protein, 74 aa, Glycine max
  unsure (1)..(74): unsure at all Xaa locations
  Clone ID: PAT_MRT3847_102071C.1.pep
CKSLKHNRSTSEHWDAWKWYYXQEPRSWVIEYPIKXCGTNNGSEMGTSERTNHTPWDMSFPIDNSRQTTCLDIL

SEQ ID NO: 145132 - protein, 44 aa, Glycine max
  unsure (1)..(44): unsure at all Xaa locations
  Clone ID: PAT_MRT3847_102072C.1.pep
CELRLLQLSLLLHLPFTEQDPPXSPSRXVPXQLSXXSHSSSLLL

SEQ ID NO: 145133 - protein, 69 aa, Glycine max
  Clone ID: PAT_MRT3847_102073C.1.pep
WCGATFFFKPLWFYHSLKNLVPEVQTEKLLRQKCTNRVSVYLGQSRPMYFRNQLLMQGASASKKRQPQN

SEQ ID NO: 145134 - protein, 54 aa, Glycine max
  Clone ID: PAT_MRT3847_102074C.1.pep
QIAAEEVFNKISRLIDNPQAHHQSCSRAFQLIRASSKSEDLAYLPVFRQTYMVC

SEQ ID NO: 145135 - protein, 70 aa, Glycine max
  unsure (1)..(70): unsure at all Xaa locations
  Clone ID: PAT_MRT3847_102075C.1.pep
FAIFLTKLHLFSLSSSSSLIQFQNPSXSILHFAIQEHSYPNTHVLAKCPLKLPLSSPSSTQPTIPXSAVS

SEQ ID NO: 145136 - protein, 74 aa, Glycine max
  unsure (1)..(74): unsure at all Xaa locations
  Clone ID: PAT_MRT3847_102076C.1.pep
YIVILKTQLXSSINRLHNSIVFTASNFSTTKNCHQSSERGIWVANCEDRKLNLGGGATLGXGFENKEERERRRG

SEQ ID NO: 145137 - protein, 67 aa, Glycine max
  unsure (1)..(67): unsure at all Xaa locations
  Clone ID: PAT_MRT3847_102077C.1.pep
SVFVYMTTCMLQQCVSVLCEVFSCIYLRVIACQCAVXSVFVYMTICYSSVSVCCVKCFHVYMTICVL

SEQ ID NO: 145138 - protein, 107 aa, Glycine max
  Clone ID: PAT_MRT3847_102078C.1.pep
MLVYQDLLTGDELLSDSFRYKEIENGMLSEAEGKWVDKGTVDVNIVANPSAEGGREHEPLDDPHLQEGGIVATLRLQEPPPFDKKPSATFMKRCIKNLTPKLHADQH

SEQ ID NO: 145139 - protein, 100 aa, Glycine max
  Clone ID: PAT_MRT3847_102079C.1.pep
SKSPCKYHALACATCELQWLTHLLNDFGIVYTRSALLFCDNRPILHIVVNPVFHEHTKHIEIDCHIVQEKLHSSLIKLLPIAFAQQLANIYTKALPPRAF

SEQ ID NO: 145140 - protein, 98 aa, Glycine max
  Clone ID: PAT_MRT3847_10207C.1.pep
HTCRDIVPEYSTKVMALASTLFELLSEALGLDRFHLKEMGCDEGLLHLCHYYPACPEPELTMGTSRHTDGNFMTILLQDQMGGLQILHKIGLMDRRHQ

SEQ ID NO: 145141 - protein, 83 aa, Glycine max
  Clone ID: PAT_MRT3847_102080C.1.pep
GLMEPFHQQGIDKKIINCYLTVKRWTLNMSYQVVSSHPHMSTTLQIIVCIFQNEMKNRHYKNSFHNFKMAYMYIINHKKARAE

SEQ ID NO: 145142 - protein, 330 aa, Glycine max
  Clone ID: PAT_MRT3847_102081C.1.pep
DSPKLEVLASESLSEIVRDAVDDDVTSESKVGSEPSTKVLPESSSHLLTKDNSSADLDNSIHQDLSAGSSGGSSVLNEPPVRVPGLEASCCKDADQPSPVSVLESSFTDDVSSCSDCFESLNNDLQGLRMQLQLLKLESDEYVEGPMVVSDEDGGEASTGMLEDKGLRRTEDSWECSYIIDVLSESGIDGAHPDTILELWHSLECPVSLSVFDELEKRYGDWTTCSRSQRRLLFDRINLGIVKINEQCTHALPWVGPVTANVIGSNLNKNGFRDGLLRMLVREGKVKGDALGKVLVMESEWLDLRDDIDVVGREVERMLLDDLVSEIIGT

SEQ ID NO: 145143 - protein, 64 aa, Glycine max
  Clone ID: PAT_MRT3847_102082C.1.pep
NVHKPLIFTMFFKLGGRNNTIFHLLGVGKQRNFYTLCVFKFGRLVNQLFFSLIKDSLFCLKRGC

SEQ ID NO: 145144 - protein, 51 aa, Glycine max
  Clone ID: PAT_MRT3847_102083C.1.pep
LQNCRCRRPHMWRKNAQTSSNGFLEAWISVVPIQFLGTAVRTLGICMIYHL

SEQ ID NO: 145145 - protein, 277 aa, Glycine max
  Clone ID: PAT_MRT3847_102084C.1.pep
GLVNRGAAVANSISYWLNVTILSLYVMFSPSCAKSWTGFSKEALHNIPSFVRLAIPSAVMVCLEMWSFELMVLLSGLLPNPKLETSVLSICLNTTAAAWMIPFGLSGAGSIRVSNELGAGRPWNARLAVRVVLVLAIIEGIIVGTVMILVRNIWGYAYSNEVEVVEYVATMFPILAASNFLDGLQCVLSGTARGCGWQKIGAFVNLGSYYIVGIPSSIVFAFVLHIGGKGLWLGIICALIVQMCSLMIITIRTDWDQEAKKATDRVYNSVTLESLVS

SEQ ID NO: 145146 - protein, 70 aa, Glycine max
  Clone ID: PAT_MRT3847_102085C.1.pep
QSALSYLRDWTMVRTSDVSFLGIRIGAIALQIIPTGTAQSLRLIFSYIMWTLSIPPAIPMPFPRVQYSHR

SEQ ID NO: 145147 - protein, 34 aa, Glycine max
  Clone ID: PAT_MRT3847_102086C.1.pep
GYQKAERKQSIEGSATKRESETQNMHTWDNPAGR

SEQ ID NO: 145148 - protein, 83 aa, Glycine max
  Clone ID: PAT_MRT3847_102087C.1.pep
YLSNAPQVYFVHAHASCPPKFNLKGLIYSFVFEKGGKRRGFFFILTTFPMDYGYGHGWVVITKIASKCNQCSRNYNCDMILEI

SEQ ID NO: 145149 - protein, 109 aa, Glycine max
  Clone ID: PAT_MRT3847_102088C.1.pep
GAKERTPTFGMTMVEEGQYAVDFHANLSPLQAFSICVAILHGNSTFSGAGKAKNQQISRCNSLKMLLEEEVELFINSVPKEGNKNVSKIHKGIFRPYVLNPPLSPIARV

SEQ ID NO: 145150 - protein, 76 aa, Glycine max
  Clone ID: PAT_MRT3847_102089C.1.pep
ILDFMYKFNRHVLMNFKNTVLNAQLVCSLIISLELGLLYLFYFQCSLVNSRMKLLSCLHGDQQKKRPNKKIQEKKI

SEQ ID NO: 145151 - protein, 55 aa, Glycine max
  Clone ID: PAT_MRT3847_10208C.1.pep
EEITSNLQFLVSMTASEDEHSFHLNTLHCTKFSKLVNSSELHFYIALMNSKSEIL

SEQ ID NO: 145152 - protein, 53 aa, Glycine max
  Clone ID: PAT_MRT3847_102090C.1.pep
CSMNYASYSPSPLIMYTCPVKELASNKLLLSLIEQAPLWRQSKLGLRSSFVQQ

SEQ ID NO: 145153 - protein, 48 aa, Glycine max
  Clone ID: PAT_MRT3847_102091C.1.pep
MRWSVFGEEMKRVGYLAGPMINVTLSQYFLQIISMMMVGHLGKLVLSS

SEQ ID NO: 145154 - protein, 53 aa, Glycine max
  Clone ID: PAT_MRT3847_102092C.1.pep
RYLYTGHWYSVHAQELPYLFYSITVRHPLMVVVTADINLIVYNLQNPQFDFKS

SEQ ID NO: 145155 - protein, 149 aa, Glycine max
  Clone ID: PAT_MRT3847_102093C.1.pep
RNGRPGPTHPNKCTRKKGDEEGEEKEENGTDTPPQRRKPPTHAETTTGATGRQDNHKPNPKDTAERSHPTHQSQPHHRRIAKPKKPYAPKRTRGQGHTKRDRDPKRQKRPAPKGAEEEPATQKPTQAQKPDEGTGTKPDAEPKPEPKEE

SEQ ID NO: 145156 - protein, 62 aa, Glycine max
  Clone ID: PAT_MRT3847_102094C.1.pep
KPICFFLLKIKLGDSVLKKVWFRFFSKTVFALLWTKIVYVFCTERARVPGYKQMLLLLSTIR

SEQ ID NO: 145157 - protein, 65 aa, Glycine max
  Clone ID: PAT_MRT3847_102095C.1.pep
FSRHCVWQLGGNAYSWLLHALQSFVALMMWPGHHGHHTYFFVDVNQNYKREDGAFVLEISMDKKL

SEQ ID NO: 145158 - protein, 345 aa, Glycine max
  Clone ID: PAT_MRT3847_102096C.1.pep
AHVSSVLGSRGSVEAAERNKLVFMEGGVYGFGLEDLLRASAEVLGKGSMGTSYKAILEDGTTVVVKRLKDVAAAKREFEARMEVVGNVKHENVVPLRAFYYSKDEKLLVYDYMAAGSLSALLHGSRGSGRTPLDWDTRMKIALGAARGLACLHVSGKLVHGNIKSSNILLHPTHEACVSDFGLNPIFANPVPSNRVAGYRAPEVQETKKITFKSDVYSFGVLMLELLTGKAPNQASLSEEGIDLPRWVQSVVREEWTAEVFDAELMRYHNIEEEMVQLLQIAMTCVSLVPDQRPNMDEVVHMIQDISRSETTDDGLRQSSDDPSKGSDGHTPPQDARTTPRSDTS

SEQ ID NO: 145159 - protein, 69 aa, Glycine max
  Clone ID: PAT_MRT3847_102097C.1.pep
IVDVGNLLDFNQQNDLPTPPKITHVCPIIFILNDEYYKNEFRYPSQPLCQTGGGHPPTDHRIDIVVTVI

SEQ ID NO: 145160 - protein, 75 aa, Glycine max
  Clone ID: PAT_MRT3847_102098C.1.pep
ESAHSKRKTPRPNTTSINISSSPLQIPSPFGMPILLISPNPLSSYLKKVFPTIFDQSINPTQANGDYCFLSTAED

SEQ ID NO: 145161 - protein, 92 aa, Glycine max
  unsure (1)..(92): unsure at all Xaa locations
  Clone ID: PAT_MRT3847_102099C.1.pep
VSTIGFNVATVVDKNIFFTVWVVGCHDKIRPLWKHCFQNTHGLIFVVYTNYMDRVFSCQIXLHIMLNDDELRDVIFLLFSYKQDTSNTMNSD

SEQ ID NO: 145162 - protein, 190 aa, Glycine max
  unsure (1)..(190): unsure at all Xaa locations
  Clone ID: PAT_MRT3847_10209C.1.pep
MGTFFLVQGKKSNPKISIGRGGTAKIIQKEGTEHQKKENAPAKTRGPELFLMGEVQFLLPFPCASPRWKPXPGCPLPPXXXPPPPPPPPPPPPPPPPPPPPPPPPPPPXXSPPPPPPPPXPPPPPPPPPPXPXPPPPPPPPPPPPXXPPPPPPPPXPSPPPXPAXRPPPPPPPXPPPPXPPXPPPPPXPP

SEQ ID NO: 145163 - protein, 72 aa, Glycine max
  Clone ID: PAT_MRT3847_1020C.1.pep
WVRTILQVRHAVGTVSLVTGALASQLPSALSIILQGQCKCRIHPFQARDQNGQSSTQCANHSTILLQTGRPL

SEQ ID NO: 145164 - protein, 47 aa, Glycine max
  Clone ID: PAT_MRT3847_102100C.1.pep
DTEALAPAVKGWGAADKAIIAILGDRNVVHRPEIRKAYEETYQEDLI

SEQ ID NO: 145165 - protein, 133 aa, Glycine max
  Clone ID: PAT_MRT3847_102101C.1.pep
GGRGFFGFFFPPSRGPVIFGFSERLGESQRALFFWLSPPPGRFFSLFLLLICPFSGVCSPFFGVFSSSIGPFLNPFSPFPRGCGETTAPFLFSFSPGVGARSPRVPVLFPPWFVGDRSPVFKEHFPGFFKGFF

SEQ ID NO: 145166 - protein, 111 aa, Glycine max
  Clone ID: PAT_MRT3847_102102C.1.pep
HYHTPPYLIDLFHQRTGRITLQKHEHSPFHKTIIIIKKKLNYRLHPDSLSNKAKNLRLVSVSHANIHQANKLICFYLFEIVKSNNTIWKPQLINSLIQRLKTNVAGPDCQT

SEQ ID NO: 145167 - protein, 325 aa, Glycine max
  Clone ID: PAT_MRT3847_102103C.1.pep
DNSIGTRNKKFRLGVKFLQSTSVSVSVREGRSEAFRVKDKRGEPYKKRDRPSLNDEVWCLKNIRRNGDLHKDLLKNKIKTVKDLLRLNTIGSLREKFGKVKKWDEIIEHAEKCAVDDDGFYMYRYDATVSLVLNCIYKVEAIFYGQHYRSLQSLNLEEQRLVERVKQEAYQNLQNLVPIPTPPPHDIVKTLTGTQYGSPDQGQSELWISTTSTSIVHEAPLNLSGGSQVVPVETYNIDDGTGWDIGQFESYILPNQLLEPVNPCSFPYGDGATSSNHSFFLNPAVYTSSKGKSKTVWQKTRNILKWVIPHVTKWKVFRPQILQHY

SEQ ID NO: 145168 - protein, 64 aa, Glycine max
  Clone ID: PAT_MRT3847_102104C.1.pep
PDALTNAFVVHYYSTFYTNRNLLTNLYQEFSMLTFKFHNIQITSNIFAKLTSITFQHFHHSIST

SEQ ID NO: 145169 - protein, 77 aa, Glycine max
  Clone ID: PAT_MRT3847_102105C.1.pep
LAKRTSLSATWRPMGSNTSNHLGAPLTNMMITSASWAKGDAKEQYEPPVLSCAVNEGPNLNTAHPSFIEPTLSAPTL

SEQ ID NO: 145170 - protein, 71 aa, Glycine max
  Clone ID: PAT_MRT3847_102106C.1.pep
ASYPTPINLKPPQEATSEGTGEDHLVVQERGSILRLPYVGKPASNGTALCSCVDKRTNKVLGLQSKWFNFR

SEQ ID NO: 145171 - protein, 72 aa, Glycine max
  Clone ID: PAT_MRT3847_102107C.1.pep
ALTELAFPKGSHPEWQKGHALWGPIKPGGLSGYPQGDPYNLNALMPRPLDRFPFFFCHFFGFPQEGFKWGAS

SEQ ID NO: 145172 - protein, 59 aa, Glycine max
  unsure (1)..(59): unsure at all Xaa locations
  Clone ID: PAT_MRT3847_102108C.1.pep
GGDIQKECTLLLVXRLLGGLQILGKTMTGKTMPSXDGRSHTIDHGTAMIQHIDGIPPDQ

SEQ ID NO: 145173 - protein, 98 aa, Glycine max
  Clone ID: PAT_MRT3847_102109C.1.pep
MCIGVRCLTVLGEFKPFGLIAEALDGKPPDTVTDKYDYFLFDPEIARDRDADDDCDDVASAPSNRGDHELFIRGNRIIWSTGARVFKRFTLSSDIVKG

SEQ ID NO: 145174 - protein, 69 aa, Glycine max
  Clone ID: PAT_MRT3847_10210C.1.pep
LRGLVCGRVGGPAGGTLKDCMGCEEKDGGEGAGCVIESHQRLRMTTDCVSGLIAELMAGLPGAGYTSAG

SEQ ID NO: 145175 - protein, 65 aa, Glycine max
  unsure (1)..(65): unsure at all Xaa locations
  Clone ID: PAT_MRT3847_102110C.1.pep
SFMRDCVFAARFHHHRHHLQPPRCPLHRRHRLSSRRCSRTLMGRCVGVREPXLGFVGXFXISGXK

SEQ ID NO: 145176 - protein, 138 aa, Glycine max
  Clone ID: PAT_MRT3847_102111C.1.pep
ERKVFGSRGQGLKDEIMGQNPLPSSTSNGKSSNPIKIVKRDAHSVRLKLAVGCLPEKLLTSLHSVHDEHLNEEFALNKCNAVVHQVGKLVEDAENILAQGNQLGSTLANDLQEQENELKQYMVQLENAEAARATLFPS

SEQ ID NO: 145177 - protein, 336 aa, Glycine max
  unsure (1)..(336): unsure at all Xaa locations
  Clone ID: PAT_MRT3847_102112C.1.pep
MNDLFSGSFSRFRSDQSSPDRHHDIEMGATASGGGRGGEVNLDKFFEDVEGVKEELKELEGLAQSLRSSHEQSKTLHNAKAVRDLRARMDGDVSAALKKAKLIKLKLEALERSNAANRNMPGCGPGXSSSLRTRSSGIRGQKGKLLKAMGKYNEFLDDGIYDYRVTVKPLYYSFTGVDSDCGWPAFFEGFPGAINRTPDPDGRRTEITCAACGGHLGHVXKERDSRPQLMNAIASIVFLSNLFREVLLFQYETLLALLEVSIXFVRTGAEQLQTARKYQKNTRKWTCYCIILLLVIILFVVLFTVKPWENSSSGGNGGGQPAPAQTPPSPSPPVNA

SEQ ID NO: 145178 - protein, 73 aa, Glycine max
  Clone ID: PAT_MRT3847_102113C.1.pep
FVRTGAEQLQTARKHQKNTRKWTCYCIILLLVIILFVVLFTVKPWENSSSGGNGGGQPAPAQTPPSPSPPVNA

SEQ ID NO: 145179 - protein, 275 aa, Glycine max
  Clone ID: PAT_MRT3847_102114C.1.pep
MGTLGNEQPGTQIPENAKSFSLFRYNSPFIQIVLIGLVCFCCPGMFNALSGMGGGGQVNSTASNNALTALYTTFAIFGIVGGGIYNILGPHLTLFAGCSTYVLYAGSFLYYNHYQHQFFAIVAGAILGVGAGLLWAAQGAIMTSYPPENRKGTYISIFWSIFNMGGVIGGLIPFILNYNRGDSAATVNDGTYIGFMVFMSVGAVLSLTILPASKVVRNDGTRCTNMLYSNVATESVEILKLFYNWKMLLIIPAAWSSNFFYTYQFNHVNKPQFNL

SEQ ID NO: 145180 - protein, 530 aa, Glycine max
  unsure (1)..(530): unsure at all Xaa locations
  Clone ID: PAT_MRT3847_102115C.1.pep
KRRREASKDLVLHQTVNAVVEIVKENYLVLSIPENDYTIGYASVSDYNAQRFPHKQYQHGQSVVATVMALPSPETSGRLLLLVDVVNETSSSSKRTKKKSSYKVGTLVEAEITDIKTLELKLKFGFGLYGRIHITEVYYGNVLENPFSSYKVGQTVTARIVAKPNESDGNRKGSQWELSVRPEMVTGSSDIDDVSENLEFKIGQCVAGYVYKVESEWVWLTISRNVRAQLYILDSAIEPSELEDFQNRYHVGQPVSGHVLSVNMEKKLLRLVVRPFSTLPCGTSEEPHINVVDKGLTAHFHEGDILGGRVSKILPSVGGLLVQVGPRTYGKVHFTELADTLVPDPLSGYHEEQFVKCVVLEVSHTVKGTIHVDLSLGSSNVKLSQDSAVNANSKCVEKIEDLHPDMIVKGYIKNVTPKGCFIMLSRKIDAKILLSNLSEQYVQEPEKEFPVGKLVIGRVTSVEPLSNRVEVTLKTSTAPNIPKSETMDLSKFHVGDVVSGXRIKRVESLGLFIPLDNTYMVGLCPISEIS

SEQ ID NO: 145181 - protein, 62 aa, Glycine max
  unsure (1)..(62): unsure at all Xaa locations
  Clone ID: PAT_MRT3847_102116C.1.pep
ATNGPKMXHAGSPLNQLEHEHTHLWVYALVLLVNSWAGRRLPLCWLGSFVCSDRTLDSSIEI

SEQ ID NO: 145182 - protein, 135 aa, Glycine max
  Clone ID: PAT_MRT3847_102117C.1.pep
MVKFLKPNKAVIVLQGRYAGKKAVIVRTFDEGTRERPYGHCLVAGIKKYPAKVIKKDSAKKTAKKSRVKAFVKLVNYQHLMPTRYTLDVDLKDAVTPDVLQAKDKKVTALKETKKRLEERFKTGKNRWFFTKLRF

SEQ ID NO: 145183 - protein, 71 aa, Glycine max
  Clone ID: PAT_MRT3847_102118C.1.pep
NVDFPPSVYLMDYHVILQIWGDQYVKPMTEILQQLDHFQCEFPFQLLRQVFVYFSFSRCCVQVFHLLYLML

SEQ ID NO: 145184 - protein, 54 aa, Glycine max
  Clone ID: PAT_MRT3847_102119C.1.pep
WLCLFVISRIHDVFCICICICYAICDLFLLGVVLYVSFSCFLPQCVPIYCCLRD

SEQ ID NO: 145185 - protein, 120 aa, Glycine max
  unsure (1)..(120): unsure at all Xaa locations
  Clone ID: PAT_MRT3847_10211C.1.pep
CFFFFFFFNFLKKXXXXXKKQELNXWKMCMCXAIKRKYQNFQPPLFLFCGGGTHIQQHPKEPLQLMGTKGTFLEGKIRGGLPHKERWLPPVFFFTIRTTKTDFFIWHKLFPNKPRGPLLI

SEQ ID NO: 145186 - protein, 97 aa, Glycine max
  Clone ID: PAT_MRT3847_102120C.1.pep
NPNRRPDAGSSENLGAIRSNEVTSSAPTDGPPPQGRTVQGRQTEGNHIAIQEIAAPRTRLRCEAHKTPKWTPSALRTGNYGTPARTKAMTNAPPQNP

SEQ ID NO: 145187 - protein, 64 aa, Glycine max
  Clone ID: PAT_MRT3847_102121C.1.pep
ATHKTLESNFLCHKEFETMSIYVNDVILVIGPFYLNHRIGYLSQLRSKTAILDQSIERTMLKLQ

SEQ ID NO: 145188 - protein, 139 aa, Glycine max
  Clone ID: PAT_MRT3847_102122C.1.pep
FGTVLVFAPGFGISPIRSLIESGFYSSKRFYVRLYYGARTLQKMAYQDRFKNWESSGVKIVPVLFQPNKSWTGESGYVQAAFSKKKQIFDPLATGAVLFGQKQMPEEVPPIFVAAGVSPYKIFKNFCPKWTFGPCCILF

SEQ ID NO: 145189 - protein, 115 aa, Glycine max
  unsure (1)..(115): unsure at all Xaa locations
  Clone ID: PAT_MRT3847_102123C.1.pep
VGLYAAGYTTFLYYLTLGNIVTTIPTIGFNVXTVEYNNITFTVWHVRCHDNIHPYVIHYFQNTHXLIFFINFNNMYQFFTSXNKLHRIFNEDNLRHTLLIVSAIKHNLSHSINTT

SEQ ID NO: 145190 - protein, 33 aa, Glycine max
  Clone ID: PAT_MRT3847_102124C.1.pep
AKKKSCCFPNPITALFSAYTLRRINPTKNGSNP

SEQ ID NO: 145191 - protein, 116 aa, Glycine max
  Clone ID: PAT_MRT3847_102125C.1.pep
NNFCERVPQKHHSGFLLSLSETESSHFSYRSVAPVKNCCNIDGGVTPFLLPVGKKEVFTWGVPFVIRGVPVMCLSNKLAVKNAFIFIKKPLFPVFGHQRRMIIVNLIIQINQTSIF

SEQ ID NO: 145192 - protein, 71 aa, Glycine max
  Clone ID: PAT_MRT3847_102126C.1.pep
APPAPLFDPGELKSCSFYRALISQFVATFFFLYITVLTVMGFNMAPNKCFSVVIQRISWAFCGMNLSLFYF

SEQ ID NO: 145193 - protein, 74 aa, Glycine max
  unsure (1)..(74): unsure at all Xaa locations
  Clone ID: PAT_MRT3847_102127C.1.pep
RITRSLQALGYVHTLVKVYLQEYKYHNCKICLAYTLFMYLPAITIFNVIPEICFFYKTVQLACRYCEVQGPSRX

SEQ ID NO: 145194 - protein, 99 aa, Glycine max
  Clone ID: PAT_MRT3847_102128C.1.pep
LEISLCFSFGEGLASNHQLARKWMKRAADRGHSKAQFEHGLALFSEGDMMKAVVYLELATRAGEKGAAHVKNAVLHRLSSVSRDHAMHLANSWRALPSS

SEQ ID NO: 145195 - protein, 103 aa, Glycine max
  unsure (1)..(103): unsure at all Xaa locations
  Clone ID: PAT_MRT3847_102129C.1.pep
AGPRPKPACEGCRKDNVVMDSGEIATDADDDYKEIERDTLKNIXLCSYEMRLDAXDNCSDLVNIEQQSPDIDHGVHGHLIIYPEENGAGDHCHMYGYATDETP

SEQ ID NO: 145196 - protein, 168 aa, Glycine max
  unsure (1)..(168): unsure at all Xaa locations
  Clone ID: PAT_MRT3847_10212C.1.pep
SVTIRLVDLILFAXXEXXEXXGGTQEXXXXXXXXPASXGXPPXDDRPTQXXGKRHRRXARATQPXXATXPGPTARXXHAXGXANXXXKPKNHKXDAPXHKQGEPRDRXKXXSXKQPKKEARGTTNQXANHGXQRGKPPPNTDQPAPQTXGAEEETRNPTDSHGXRKHK

SEQ ID NO: 145197 - protein, 32 aa, Glycine max
  Clone ID: PAT_MRT3847_102130C.1.pep
LLFFISFDKLVFVFLIYKTKVVLHKGPNFINL

SEQ ID NO: 145198 - protein, 76 aa, Glycine max
  Clone ID: PAT_MRT3847_102131C.1.pep
RGVEAHFAISINKFMGKKSMSKGGGCSWFIKFVILALVVTTIVFTANMTFSDSGSDKPAPGTGPAGADDQIYYGAL

SEQ ID NO: 145199 - protein, 67 aa, Glycine max
  Clone ID: PAT_MRT3847_102132C.1.pep
AGQALQDKSKGLPGKPVAGPEVAVVALCAAVESLDDVSSYGWFIVYCSSFVISREILFGISSHERRK

SEQ ID NO: 145200 - protein, 152 aa, Glycine max
  Clone ID: PAT_MRT3847_102133C.1.pep
MMGKRVSREHFQPRPCSGKTENLKNTVFIDVDDQVDDVDVVIIDYKEFMSKSHGSGASSRDRVCTPQSVISIDDDDDEESDDAEFPGGVAGGVGELDSDACSSKRSPPDPSGLRNSVHIDVDDDSGVCGKESESDELKSRKACSTNGTGGCR

SEQ ID NO: 145201 - protein, 51 aa, Glycine max
  Clone ID: PAT_MRT3847_102134C.1.pep
TQLTLLKIFDFFILNRICIPSLGDSIMQNMSNFYIRYHPAMELICKRLTPH

SEQ ID NO: 145202 - protein, 132 aa, Glycine max
  unsure (1)..(132): unsure at all Xaa locations
  Clone ID: PAT_MRT3847_102135C.1.pep
SLVANEDFQHILRVLNTKVDGKPKIVFALTSIHGIGRRCANIACYKADVCMRKMAGWWTATELDEEMTAVAIPYVMQRTXWYLNXKXDYADVTDSDSVSDDSALNGSADHERLKNTEDHRGKTHYVRLGARR

SEQ ID NO: 145203 - protein, 143 aa, Glycine max
  Clone ID: PAT_MRT3847_102136C.1.pep
KAGFGVLPFRCFFSMGAVYDIVKSGVGVASMGHAGAGLILCLIQEEREFDELSSQDRISHSRSTPNPHPPTPIVHKHTKSKKKRSDFEKDGSVSCNKCRPHSCDKIFILPLDPIIMASGILMKLDHWKQRDSRRFASSGHSII

SEQ ID NO: 145204 - protein, 67 aa, Glycine max
  Clone ID: PAT_MRT3847_102137C.1.pep
MKGGKSKTDPNTADPKLAANKKGAGTTARKPAGTGKAPKDPNKPKRTPSAFFAPMEESRKALNKEHP

SEQ ID NO: 145205 - protein, 182 aa, Glycine max
  Clone ID: PAT_MRT3847_102138C.1.pep
CDTNQTSPDVLSLGYQGSLAGGLPMSNHSSVSSVHPSAGLNSSLPSSSGIGLSNNLTSSGPLAAPARDSRYGVSRTPPLSVDEQKRIQQYNQMISSRNMPQSTMSVPGSLSGSDLGGVRMLPSGNGMGMLGGINRSIRPGFQGVPSSSMLSSGGMPSSSMVGIPSPVNMHAGVGAGQGNSML

SEQ ID NO: 145206 - protein, 231 aa, Glycine max
  Clone ID: PAT_MRT3847_102139C.1.pep
TMEDFKKLFIYPRRIRHESTVGAGLPVIASLNRIISSGDPVHQIIGSLSGTLGYVMSEVEDGKPLSQVVRDAKSLGYTEPDPRDDLGGMDVARKALILARILGHQINLDSIQIESLYPKEMGPGVMTVEDFLNRGLLLLDKDIQDRVEKAASNGNVLRYVCVIMGSRCEVGIQELPKNSPLGRLRGSDNVLEIYTRCYSKQPLVIQGAGAGNDTTAAGVLADIVDIQDLFP

SEQ ID NO: 145207 - protein, 85 aa, Glycine max
  unsure (1)..(85): unsure at all Xaa locations
  Clone ID: PAT_MRT3847_10213C.1.pep
VIKRGGQANMALSSPSWGGREXNLAPTTPAAGWVSMRKTAPKQVSPGSPGYEGIPNEVLGPILWRRASCLCGELPCDYRCDTGVF

SEQ ID NO: 145208 - protein, 83 aa, Glycine max
  Clone ID: PAT_MRT3847_102140C.1.pep
MEGRENFGVVVGDEAPESFHVAPRIENNLDFSRATVPAPAPPTEGKKKRGRPRKYGPDGKPALGAVTALSPMPISSSIPLTGE

SEQ ID NO: 145209 - protein, 121 aa, Glycine max
  unsure (1)..(121): unsure at all Xaa locations
  Clone ID: PAT_MRT3847_102141C.1.pep
MLKIGCVAAGYVAGPTMSIVGLEXPPSXVAAAHIAHATTAGRNSDQLPIYEPGLDDVVKQCRVSNLSLSTEGETHVYEADIVVAIANTTTITRGVGAGKAAXWTYWESAXRKIADVSKSDK

SEQ ID NO: 145210 - protein, 126 aa, Glycine max
  unsure (1)..(126): unsure at all Xaa locations
  Clone ID: PAT_MRT3847_102142C.1.pep
NRWMGKLTIPHGTSRCGKRTPVSIGGGAGGKKAIFMNMPNAVLTMWRYYVGNLDFEVAKMTCPYIKGTGSLFIALGKLRLMTPSDFEASPHKLIQRDEIXEKDVVKFVQEEFATVWSTQVRATTPM

SEQ ID NO: 145211 - protein, 60 aa, Glycine max
  Clone ID: PAT_MRT3847_102143C.1.pep
LTIGIPRANEGLFQWQGDLKSPCFAVKKTISFPQKPLGGKPLGYLPKYHSRPGTGEKSLS

SEQ ID NO: 145212 - protein, 97 aa, Glycine max
  unsure (1)..(97): unsure at all Xaa locations
  Clone ID: PAT_MRT3847_102144C.1.pep
IVHVGGAENFRSINGLDLXDKLHLGGPLRSXLGIAKDPVQSALIKVKVIKNGRLGMXGNVWFLVSSICLCXGPVEKLAKNKNVPFAPPMLAVCAGSG

SEQ ID NO: 145213 - protein, 85 aa, Glycine max
  unsure (1)..(85): unsure at all Xaa locations
  Clone ID: PAT_MRT3847_102145C.1.pep
PGREQIITIETGGKGGLDSVEIGQGRKFRVELRAXLNRNRPKFEEVGSSTKTFPGEAEVLLKEAIQEQKELLQLQEQVEKKGLTI

SEQ ID NO: 145214 - protein, 154 aa, Glycine max
  Clone ID: PAT_MRT3847_102146C.1.pep
REAWEKLNLREGTLLEGTVRKILPYGAQIRIGETNRSGLLHVSNITRAQITSISDILSVDEKVKVLVVKSVSHDKISLSIADLESEPGLFLSNKERVFLEADMMAKKYREKLPPAFISQRPDGLHNNVLPFENEALYANWKWFKFERCTRNNYP

SEQ ID NO: 145215 - protein, 29 aa, Glycine max
  Clone ID: PAT_MRT3847_102147C.1.pep
VICSVLSDFCYNWLLSDSLGDADFFFLFS

SEQ ID NO: 145216 - protein, 138 aa, Glycine max
  Clone ID: PAT_MRT3847_102148C.1.pep
SRSRTETLKHVCENYVALQKHLNEFSQLRNANFDKEAGTVPSLKRKAESVNLFGINNYTECSTITEEETFKRPKHSTEPKVSKVLTRTDASDTGLYVRDGYQWRKYGQKVTRDNPSPRAYFKCSYAPSCPVKKKVQRS

SEQ ID NO: 145217 - protein, 306 aa, Glycine max
  Clone ID: PAT_MRT3847_10214C.1.pep
GAIGSSGYSSPPISKKRKGQELLFGPTVKDPSVGRQGQQANNVRVPAPSSSLSPIPGARVGPATLGPSKLMYRSLLADIIQPQHLKELCSVLVLVSGQAAKMFTDHKNFMDKHAEDQTETSRASSTQEQLPSQKEANVEKAMADDDCSSANQTDNISPDNSCSDGADVPKGRPMSPGTLALMCDEQDTMFMTAASPVGSRTHACNTSLQPPYGQVMTEVYAEQERIVLTKFRDFLNRVITMGEINETKCSSLARSELESQKGPNMNCSGNDSTETAHQQAATNNNINGVAKAAAGNSILFPGSGSS

SEQ ID NO: 145218 - protein, 156 aa, Glycine max
  Clone ID: PAT_MRT3847_102151C.1.pep
MGKYLESAARLEELSRIVSSAAKPNRSKGTLPRSPNRVATPRIANPIGVKVEPAKKMEPLEWSDTPRQGLSQDCSKRWFQDTLKEAKAGDTTMQVLVGQMYYSGYGVARDPQKGHAWISKASRNRNSVWKLCGKRPGYRASDSDSCELEEKDKYFP

SEQ ID NO: 145219 - protein, 159 aa, Glycine max
  Clone ID: PAT_MRT3847_102152C.1.pep
MGKYLESAARLAELSRIVSSAAKPNRPKRALPRSPNRVATPRSANPFGVKVEPAKKMEPLEEEQQCRTPLAKVVSDCSKRWFQDTLKEAKAGDTTMQVLVGQMYYSGYGVARDPQKGHAWISKASRNRNSVWKLCGKRPGYRASDSDSCELEEKDKYFP

SEQ ID NO: 145220 - protein, 58 aa, Glycine max
  Clone ID: PAT_MRT3847_102153C.1.pep
GSFCSSTNPSSNQAWLKQSLDSTGQDRIQWVQKNYMIFNYCPDPKGFPQGLPPECPIA

SEQ ID NO: 145221 - protein, 172 aa, Glycine max
  unsure (1)..(172): unsure at all Xaa locations
  Clone ID: PAT_MRT3847_102154C.1.pep
GIPFFLFLLIVTGKLLGAWRTLACYNIQNESTLHLCLRIRGGMHIFHXTLTCETMTLEEXSSNTIYNDKAKIXNKEGVPPYHHRLILDYXQLLDGRTLADYNIHKEPTLHLVSRFLGGMHISCKTLTGKTITLEVESFDTIDNVKAKIQDKEGIPPYHHRLTLAGIQLEDGR

SEQ ID NO: 145222 - protein, 72 aa, Glycine max
  unsure (1)..(72): unsure at all Xaa locations
  Clone ID: PAT_MRT3847_102155C.1.pep
DKASSSSCTKPKEAVESDPRQNQAVAQKLLQMVKHPSXDDRHHRGCEHRGRGQQEDPVVFTLEEYENRKAHT

SEQ ID NO: 145223 - protein, 52 aa, Glycine max
  Clone ID: PAT_MRT3847_102156C.1.pep
VENNSYFTKPIANVSGQAARTCGGFNVVENMLWLVKQLTTQLGFCHQLQFKQ

SEQ ID NO: 145224 - protein, 65 aa, Glycine max
  Clone ID: PAT_MRT3847_102157C.1.pep
PTRPPTRPYGCEKTTEGIDFLILLIFLYIMILYTHFSFIIYMYYNFSFSYDIDKKNVIKKLIMRT

SEQ ID NO: 145225 - protein, 87 aa, Glycine max
  Clone ID: PAT_MRT3847_102158C.1.pep
GGPVSIVAPENYVNNSLVCIGNLDINVTQEELNQAFVQLGDNVLVNLGAVPLQLYRMYAVAGVFKWIQVNGVFTTDMDRVINHMFWF

SEQ ID NO: 145226 - protein, 93 aa, Glycine max
  unsure (1)..(93): unsure at all Xaa locations
  Clone ID: PAT_MRT3847_102159C.1.pep
MSGLIEGLPDAVAIXCLAWVPFYLHPKLELVSRAWRAVVRGPELFKARQELGSSEDLVCVCAFEPKNLWQLYDPQRDLWITLPVLPSRIRHLS

SEQ ID NO: 145227 - protein, 150 aa, Glycine max
  Clone ID: PAT_MRT3847_10215C.1.pep
MATVRSNSITVFFVAFIILTTAPSPSQSLSFSSYFRYRNLFSLSHSLLIGVANLRAARGDVAGADRARSIADGLDQGTVFGFLKLLWTLSWTDMSFTDLYGAVSDMNELLRGLTELTRLESVAERSAWVSRNYQSVLTVFKSLSRKLLKA

SEQ ID NO: 145228 - protein, 344 aa, Glycine max
  unsure (1)..(344): unsure at all Xaa locations
  Clone ID: PAT_MRT3847_102160C.1.pep
MSGLIEGLPDAVAIRCLAWVPFYLHPKLELVSRAWRAVVRGPELFKARQELGSSEDLLCVCAFEPENLWQLYDPLRDLWITLPVLPSRIRHLSHFGAVSTAGKLFVIGGGSDADDPLTGDQDGXFATNEVWSYDPVVREWSPRAXMLVPRSMFACCVMNGKIVVAGGFTSCRKSISQAEMYDPEKDVWIPMPDLHRTHNSACSGVVIGGKVHVLHKDMSTVQVLDNAGQWTVEEYGWLHGQMAVIRDALYVISYGLIIKQDKKMRKVVGSASEFRRRIGFAMIGLGDELYVIGGVIGPDRWNWDIKPLSDVDVLTLASDRPTWRQAAPMTRCGGTILGCTLLRI

SEQ ID NO: 145229 - protein, 68 aa, Glycine max
  unsure (1)..(68): unsure at all Xaa locations
  Clone ID: PAT_MRT3847_102161C.1.pep
YYPGGCHFVLSYNCSLEIAEGVRXLTFKPQWWRMGSHMRWWIKVGSHAMVVDEVXELRNLRGRGRERV

SEQ ID NO: 145230 - protein, 172 aa, Glycine max
  unsure (1)..(172): unsure at all Xaa locations
  Clone ID: PAT_MRT3847_102162C.1.pep
MSGLIEGLPDAVAIRCLAWVPFYLHPKLELVSRAWRAVVRGPELFKARQELGSSEDLLCVCAFEPENLWQLYDPLRDLWITLPVLPSRIRHLSHFGAVSTAGKLFVIGGGSDAVDPLTGDQDGCFATNEVWSYDPVVRQWSPRAAMLVPRSMFACCVMNGKIVVAXGGFTSC

SEQ ID NO: 145231 - protein, 100 aa, Glycine max
  Clone ID: PAT_MRT3847_102163C.1.pep
SQCGSDNHELVKSLVRHPYASRLTKDENIIITNMTKSMVKPKNILLTLKEHNVNSYTAIKQIYNARSAYCSSIRGSDTKMQQLMKLLEQDQYIHWHRVKD

SEQ ID NO: 145232 - protein, 249 aa, Glycine max
  Clone ID: PAT_MRT3847_102164C.1.pep
AQLFYDLNYANPAARISVKLVSEAGVGIIASGVVKGHADHVLISGHDGGTGASRWTGIKNAGLPWELGLAETHQTLVANDLRGRTVLQTDGQLKTGRDVAIATLLGAEEFGFSTAPLITLGCIMMRKCHKNTCPVGIATQDPVLREKFAGEPEHVINFFFMVAEEMREIMSQLGFRRVNEMVGRSDMLEVDKEVVKSNEKLENIDLSLLLRPAAELRPEASQYCVQKQDHGLDMALDNKLISLSSAAWK

SEQ ID NO: 145233 - protein, 91 aa, Glycine max
  unsure (1)..(91): unsure at all Xaa locations
  Clone ID: PAT_MRT3847_102165C.1.pep
DIFEVRVGYVEDYGAFAHLRSAAGXCLGCFNVTGLXHLLKGSLEPIQGAIKFLKGGDXMEAQVSGFDWGKSMVNLSILHLEKNPLLKTLDK

SEQ ID NO: 145234 - protein, 77 aa, Glycine max
  Clone ID: PAT_MRT3847_102166C.1.pep
NSKIHAKIINYRLAVTHKVRSLSPVLVQAFLSQSICLLTNNSKCNFTFLFVLCLTYTLAQNHEKKHKFHQNHALNSK

SEQ ID NO: 145235 - protein, 71 aa, Glycine max
  unsure (1)..(71): unsure at all Xaa locations
  Clone ID: PAT_MRT3847_102167C.1.pep
KKNPNNTTEVTLXXXXXXXXXXXXTSIHLXNTLXVRFXLFXLXXFFRNAILLSVLXLPRNGXVXLIXWVPP

SEQ ID NO: 145236 - protein, 90 aa, Glycine max
  Clone ID: PAT_MRT3847_102168C.1.pep
NELEPKFNKNLHNPPTQLRKKMEKCQGFVRIYNLCLLNNLFIPRAKQRVHPPGCDIIEPIQSFFQKWFLANKKPLVTAILKDNYPGLPTY

SEQ ID NO: 145237 - protein, 62 aa, Glycine max
  unsure (1)..(62): unsure at all Xaa locations
  Clone ID: PAT_MRT3847_102169C.1.pep
CASPLPSHRFLCAILLCSTLILFCINFQXDXGCVRGVXXLXPCXCXXXPLXXGXXLXLLLVS

SEQ ID NO: 145238 - protein, 75 aa, Glycine max
  Clone ID: PAT_MRT3847_10216C.1.pep
FGSRLVSHLSPSSSNIFFKNRKSCTFFCYLLVALIYSTDEVNNRLFASFYRRIFFVVILMMETAWGFSTHSCGFG

SEQ ID NO: 145239 - protein, 110 aa, Glycine max
  Clone ID: PAT_MRT3847_102170C.1.pep
FSIYNLEPRSDSADLTIYGRMRWQRRILRILKIILLTNRNDSLCDDGEETKKHILFYRSCALHYSLTQIVYKRANPWPSCNPILWNFLLNNSHSYRFLLTLSDDLMANIT

SEQ ID NO: 145240 - protein, 80 aa, Glycine max
  Clone ID: PAT_MRT3847_102171C.1.pep
TTINGPNCIDVNKVTFHSSRILQSFKFGAKKGATKMTMNENTRRHICINMSNVWMLTSISHHFQTIYFSHKILFIIDNTS

SEQ ID NO: 145241 - protein, 103 aa, Glycine max
  Clone ID: PAT_MRT3847_102172C.1.pep
HSQSDNHLSPLHQIGQEIHQGICVDTVVAIETRILSMHIPQYPVCECTLALSIGFEEGGESEIVKGVGGSVVGIGSGSGSGGVLVHHHLERPDAWADAWAEAS

SEQ ID NO: 145242 - protein, 106 aa, Glycine max
  Clone ID: PAT_MRT3847_102173C.1.pep
MHRHNQIRSSDTKSPTPSEAPQSEKKMHSISEGSIPSHQRTSIEPHDGEVLGSHHGQVHLSKQRHHSFDKSRAGAGVILVGLATTFLVSVFCYIRATRRTKLETTA

SEQ ID NO: 145243 - protein, 78 aa, Glycine max
  unsure (1)..(78): unsure at all Xaa locations
  Clone ID: PAT_MRT3847_102174C.1.pep
NKTKCFEXXEIXGHVXEFSADQYGSXLINKXLKQXIQKKKTXVNXEXRQXALAWRTXXXGDXVXQKXXEXGLXSXRXE

SEQ ID NO: 145244 - protein, 135 aa, Glycine max
  Clone ID: PAT_MRT3847_102175C.1.pep
QNPKFNSHNHKRIIEVSLLPSFPHFQEDYRDMSSQLRRERRDWSRVPPQGATRQEWVPRGAAAASSNVAQPSNLHSNNNADAGSSNQGVAVAAPSSVSRARSNNHGNDSGSSNQGVAVAVVSVSHGRSNNHGTDA

SEQ ID NO: 145245 - protein, 36 aa, Glycine max
  Clone ID: PAT_MRT3847_102176C.1.pep
NRSFGILPVQGEKGYLTKRVELFWGSPLKLEGTFRF

SEQ ID NO: 145246 - protein, 76 aa, Glycine max
  Clone ID: PAT_MRT3847_102177C.1.pep
GVGLFFFFFFFLFFFFFFFFFFFFFFFLRKKNFYLYFRGKRNKKIPQKPRKKGDRRGNPFKFTPQTPPQNFFNQAS

SEQ ID NO: 145247 - protein, 86 aa, Glycine max
  Clone ID: PAT_MRT3847_102178C.1.pep
NKERNSLCTQHRLQHTLVISLTQNFSPTIFLPQLKSHKPQDQKIFQTRFTEISTEPKFPKTEGYCDLAWCMMNTKNKKALNRHEIL

SEQ ID NO: 145248 - protein, 43 aa, Glycine max
  Clone ID: PAT_MRT3847_102179C.1.pep
PFNVFFGKVNNNFSPLLNTVKEVGFVLCHIYYCIMPYILLLLL

SEQ ID NO: 145249 - protein, 107 aa, Glycine max
  unsure (1)..(107): unsure at all Xaa locations
  Clone ID: PAT_MRT3847_10217C.1.pep
MAHSLLTIVITYFVYYLWLTLLKIQKPKXLTQASPDPWKIPIIANLDKMVLTYLLTHHALRKLVSKYGPFMHLQLDEIYTMALYSPKMAMLIMKTHDTAFVQKPELL

SEQ ID NO: 145250 - protein, 504 aa, Glycine max
  unsure (1)..(504): unsure at all Xaa locations
  Clone ID: PAT_MRT3847_102180C.1.pep
MVGEKFCVSEDDKGVLESVLGAEAVAFFISALSNNVFSRVVAPSAGADPALRQRLCQLVEGSKWNYAVFWQVAGLKSEGSGVPCLDGHCSDPKGERNGVGKEDEQEXRKKVLQKLDACFGGSVLKDANHVRLDRVSDLLMFYLSSMCYIFGFDSLCGPGSSFKSGKLIWASDAAGCLNQLESRSFMGKLAGLHTVVFVPLKSGVVELGSFEMVPEEQGVVEMVRTAFGESSPGQAKVFPKIFGHELSLGDTKSQSITISFSPKVEDDPGFTSDSYEVQALGVNHAYGNSSNGTLGDGNEGTLFPQLNQMMAGNFNAQARVPCLDLGNEDSSSIHADERKPKKRGRKPANGREEPLNHVEAERQRREKLNQRFYALRAVVPNISKMDKASLLGDAITFITDLQMKIKVLEAEKNMGNNKDQKLSLPDMDFQEREDDTVVTVRCPLDIHPVSNVVKTFREHQIVAQDSNVSTADDKIIHTFSIRTEGGEAAAIQLKEKLEASLSKS

SEQ ID NO: 145251 - protein, 110 aa, Glycine max
  unsure (1)..(110): unsure at all Xaa locations
  Clone ID: PAT_MRT3847_102181C.1.pep
XHNTCXLXQTDRXSXPVQLXISXRSXXLYLLTXPXCIXXTSXXAYLXTSVNXSHCTXYTIXXXXYIIIIYAIXFSPLNIKXCHLHFLSTXISNXNSSXNYSYXNPQYYXP

SEQ ID NO: 145252 - protein, 116 aa, Glycine max
  Clone ID: PAT_MRT3847_102182C.1.pep
SLLVLVIVCFIWRCKKKKRKQKYYYPDPSQGKASNYYNSGQHPLPSWQAGSGPHGGDHVMRVQQQQGMGMGMGMGMGMGMGPHSGGWGAPPHSMMSSGEMSFNYSLGTSSFLTRPF

SEQ ID NO: 145253 - protein, 75 aa, Glycine max
  Clone ID: PAT_MRT3847_102183C.1.pep
EPAARAPPFVPGVGTPPQEKREAPGEGAGFRKVRRRVPTSCLDRVTLVRPPLCWLMRRVQLPSLGERIPLFRAGG

SEQ ID NO: 145254 - protein, 56 aa, Glycine max
  unsure (1)..(56): unsure at all Xaa locations
  Clone ID: PAT_MRT3847_102184C.1.pep
MTTPSLVESLVLQLHEISAVKFGNFKLKSGIFSPIYIDXRLIISYPSLLQQISQTL

SEQ ID NO: 145255 - protein, 119 aa, Glycine max
  Clone ID: PAT_MRT3847_102185C.1.pep
TSNNIIQIFLLPSSLIIYPAPSEMLAKTNVPHETLSPQKIHVQHVPKCVSDRLLEKFYDESELDFDYEQSGLWSPPVPRTVFLSSPGRIFTEQEMLERLRSKNASRRRGKRFRVCFSVQ

SEQ ID NO: 145256 - protein, 478 aa, Glycine max
  Clone ID: PAT_MRT3847_102186C.1.pep
MTTPSLVESLVLQLHEISAVKFGNFKLKSGIFSPIYIDLRLIISYPSLLQQISQTLISSVSSTSFDLVCGVPYTALPIATCVSLAQNIPMVMRRKEIKDYGTAKAIEGDFKPGQSCLIIEDLVTSGTSVLETAAPLRAVGLKISDAVVLIDREQGGRENLEENGIKLHAIIKLTEMVKILGNHGKLDEEMVGVVTKFLEDNRKVAALAKVEKPVTKVKALPFGERAKLSKNPMGKRLFEIMAEKESNLCLAADVGTAAELLEIAEKVGPEICLLKTHVDIFPDFTADFGSKLLSIAEKHNFLIFEDRKFADIGNTVTMQYEGGVFRILDWAHIVNAHIISGPGIVDGLKLKGLPRGRGLLLLAEMSSAGNLAKGDYTTSAVKIAEDHSDFVIGFISVNPASWPGAPINPSFIQATPGVQMVTGGDALGQQYNTPYSVIHDRGSDIIIVGRGIIKAANPAEIAREYRLQGWNAYLAKCN

SEQ ID NO: 145257 - protein, 139 aa, Glycine max
  unsure (1)..(139): unsure at all Xaa locations
  Clone ID: PAT_MRT3847_102187C.1.pep
GDYGAKGDGLRNDTEAFLEAWKIACSLSGFISVVFPYGKTFLVHPVDIGGPCRSKITLRLNLPHVEISGTIVAPQDPVVWHGLNQRKWLYFHGVNHLTVDGGGXINGMGQEWWARSCKINSTNPCHPAPTAMTFHRCKD

SEQ ID NO: 145258 - protein, 87 aa, Glycine max
  Clone ID: PAT_MRT3847_102188C.1.pep
MLTYAFVVMLIFQFCGGYYADNTDSMFNSIKSYCCNLMKISEIFLCLFLLWRLISFKSSTENDLKIESPILFSIPFLLFSCFVYIIV

SEQ ID NO: 145259 - protein, 137 aa, Glycine max
  unsure (1)..(137): unsure at all Xaa locations
  Clone ID: PAT_MRT3847_102189C.1.pep
KKNPPGGPNNKTPPPRGGGDSLXPEGPPGFPPGKGAGXRPPNNGGGAPPWAPPPFTFMLPAPILGGIVTGNPFPPGTSYAPVXPPPLIRPPKRKSGPPPGPGPKFPGGPPGPPRGPPPGGGKNWGKPQNDQVPRGKN

SEQ ID NO: 145260 - protein, 41 aa, Glycine max
  Clone ID: PAT_MRT3847_10218C.1.pep
IRKIQRFGGNSRIPRRFLTSWDKRAPDPKRGYKRLPQRIQI

SEQ ID NO: 145261 - protein, 86 aa, Glycine max
  Clone ID: PAT_MRT3847_102190C.1.pep
YVLGGIFHRLLSPPGFCPKKLKSLILFWKNLTNPTKVFFLSPGVNLKGPVFWSNLFPKSRVFPPKENLNPQGNSSNHFQFFPPGFL

SEQ ID NO: 145262 - protein, 91 aa, Glycine max
  Clone ID: PAT_MRT3847_102191C.1.pep
YNIVPTGRSSVRLHTSILQAFLQQVGVPKFLPSFCEFPFSVKSTCDQFMSSTFLTQGKELVICILLHSMWLVCVGLFNGTYPFCSLDTSVK

SEQ ID NO: 145263 - protein, 128 aa, Glycine max
  Clone ID: PAT_MRT3847_102192C.1.pep
LAPNVRQVIKLANLLSSWVCSHILGVKDTKQRAGIMKYFIQTSMELRNLNNFSSMASLMAGLNSAPILRLKRTKEFLSAKTNAQKVELDKMLDSTKNFQNYKDMLKTINPPCVPFFGFWLSALVFIED

SEQ ID NO: 145264 - protein, 72 aa, Glycine max
  Clone ID: PAT_MRT3847_102193C.1.pep
PIVFLLLFRQSQKLSHSSMSRPLTFPLELNGLTDSVPINHPITTLFLCCEFINTDGLFAFPPSARGTSDYGM

SEQ ID NO: 145265 - protein, 103 aa, Glycine max
  Clone ID: PAT_MRT3847_102194C.1.pep
AVITTHCTRGSPKAPPCLLRKANPTTRCHAPETTSNPSLKSPNSIRTACFFASPSLNQFLQYAILANGFIINLIQNLCAKFLPKEPFFLTNTPFNILLALNPY

SEQ ID NO: 145266 - protein, 68 aa, Glycine max
  Clone ID: PAT_MRT3847_102195C.1.pep
YQAASKQLKASKSFSFSLKANQINGCPRHRYQFIVSLFPGWVDPVCAPCQLGSACGQINPFQFIRFRY

SEQ ID NO: 145267 - protein, 60 aa, Glycine max
  Clone ID: PAT_MRT3847_102196C.1.pep
PHVRVRTSRVSFMKPPLCKTDESSQHGAPANPKILIQKLTLTSWYAWPKQPLNLVSHPFT

SEQ ID NO: 145268 - protein, 68 aa, Glycine max
  unsure (1)..(68): unsure at all Xaa locations
  Clone ID: PAT_MRT3847_102197C.1.pep
MVPHMASRRIHNELNDLDNYLATSCTAGPVTDEMFDCRAPIMGPADHPYSGXGVFLVTCYSPPEYSFQ

SEQ ID NO: 145269 - protein, 97 aa, Glycine max
  Clone ID: PAT_MRT3847_102198C.1.pep
PPAWGGGGGGGILTNSRKGRKVNAEQKQMKRQKNREPRETNTRLLLKKLQHLPVKCDLQKTELPGQYERSTGCICNRVHRYKIRLTGENLVLPSATL

SEQ ID NO: 145270 - protein, 78 aa, Glycine max
  Clone ID: PAT_MRT3847_102199C.1.pep
TPIRLDSKYYEALINHRGLLTSDQTLYTSQSTRAMVESNAYNAASWAEKFALAMVRMGSIEVLTGSDGEIRKQCSFVN

SEQ ID NO: 145271 - protein, 101 aa, Glycine max
  unsure (1)..(101): unsure at all Xaa locations
  Clone ID: PAT_MRT3847_10219C.1.pep
XXPXXXXRXPXTXXXVXPXXXCXXXXHXXXXXXXIHXXXXXXXXFXXXXXXIXCXXEXSEXLXRPXXXXXXXCXSSXXXXXXFLXXIVXPRXEXXALRPGX

SEQ ID NO: 145272 - protein, 49 aa, Glycine max
  Clone ID: PAT_MRT3847_1021C.1.pep
FQKILDHYLGLGTAVSQYKTPRCVGPTNTRVLQILSENVVNNYLSTAFN

SEQ ID NO: 145273 - protein, 100 aa, Glycine max
  Clone ID: PAT_MRT3847_102200C.1.pep
SQSYKHKHVKQAESYRDTNISNSTLNTTLSIDNNNVLVFTYDQLTKSRFLSFRPQNTVHHRRCNQNPKNLRSRHCSRLRQPPKTHRLPNLPLRPPQPLLW

SEQ ID NO: 145274 - protein, 82 aa, Glycine max
  Clone ID: PAT_MRT3847_102201C.1.pep
VNNNSIGVENCQQSCFIHSIPIFHFLFQVPIGAKNGFLDNICLAFACSEYGKDCTKFEKRDNLSVPSGFTSLTSFILKRVEM

SEQ ID NO: 145275 - protein, 259 aa, Glycine max
  unsure (1)..(259): unsure at all Xaa locations
  Clone ID: PAT_MRT3847_102202C.1.pep
MTRKPDIAAPGVDIIAAWIANDTSEVWKGRKPSLYNIISGTSMATPHVSGLACSVKTQKPTWSASAIKSAIMTSAIQNDNLKAPITTDSGSIATPYDYGAGTITTSEPLQPGQLVYETNTVDYLNYLCYIGLNSTTIKVISGTAPDNFHCPKDSSSDLISSINYTSIAVNFTGKANVVVSRTITNVGEEDETVYFPVVEAPSEVIVTRFPYNLQFTRSIKKXSYQVTFTPKASLKKHLFGSITWNNGKYMVRIPLVLTK

SEQ ID NO: 145276 - protein, 51 aa, Glycine max
  Clone ID: PAT_MRT3847_102203C.1.pep
SQQGRFVFQVAMVSLYGIKEPHIVIKVHLYFAHAPVHATGAEGDDPAIMPG

SEQ ID NO: 145277 - protein, 154 aa, Glycine max
  unsure (1)..(154): unsure at all Xaa locations
  Clone ID: PAT_MRT3847_102204C.1.pep
TLALFDEFLHLEHHDEHDEVLGENLLEKIHGNIHDHYSASYYDNDNDKTCAYDSVKRMVFRLXRIQNPIHHVLGGGKPVYVIIWIYTKIFASTLGLATVIXVLDEXLEYQLLHLLSHFLILGLAVLNVWTNVYTIINKSPPEILQEHIAEKPVL

SEQ ID NO: 145278 - protein, 328 aa, Glycine max
  unsure (1)..(328): unsure at all Xaa locations
  Clone ID: PAT_MRT3847_102205C.1.pep
MSSVQGPVVCPSVRAKQVGFCSIPMIGAVKMNVRRIRSEFWGLNGAKANTRXLSCHINTRKCKTVHCTFNSPSNDSGSTADNFNEKDEYYVISSVIXAVEVKLGAFGLIIKMRDGRHLRCVHNNPQGGHLPDYAPHPAIVLKMEDGTGLLLPIIVLEMPSVLLMAAIRNVPIARPTLYQVVKEMIDKMGYEVKFVRVTRRVHEAYFAQLYLTKVGNDAEYVSFDLRPSDAINIAVRCKVPIQVNKYLAYSDGMRVIESGKLSTQFPGMDGRLFTEMDRPSGQPCAETTEFNLLHNMLKAVVEERYKDAALFRDQLNQLRAGKNMKNRF

SEQ ID NO: 145279 - protein, 139 aa, Glycine max
  unsure (1)..(139): unsure at all Xaa locations
  Clone ID: PAT_MRT3847_102206C.1.pep
VLCKDQLCPSVRAKQVGFCSIPMIGAVKMNVRRIRSEFWGLNGAKAKPGFLSCRINTRKYKTVHCTFNSPSNDSGSTADNFNEKDEDYVNSSVIEAVEVKSGADGFIIKMRDGRHLRCXHNNPXGGHLPDYAPHPAIVL

SEQ ID NO: 145280 - protein, 76 aa, Glycine max
  Clone ID: PAT_MRT3847_102207C.1.pep
TIMVWSQQRLACSQSRYRITPHVFWIDLISPYCKRSSYKISSCSQTIYQIFGLVAVWQDSPSGIILSNWCMDIYER

SEQ ID NO: 145281 - protein, 120 aa, Glycine max
  Clone ID: PAT_MRT3847_102208C.1.pep
FSFPLLFSFFSFLVFISRKKPWGNCDLCKSYLTVSWLKKFPHFCDWDTHFLGKSPTGPIHVYVLGNPIPSNPPNVEPIFKTNFPNYPQGFILVYKSRKKPKKKKVFWFLKKKKKKKKKKG

SEQ ID NO: 145282 - protein, 279 aa, Glycine max
  unsure (1)..(279): unsure at all Xaa locations
  Clone ID: PAT_MRT3847_102209C.1.pep
MLKEVSQEGLQRKDYVDPSSAPLFDLVEIKLWSFYRALIVEFIALLLFLYVTVVTIIGHKKQTGPCDGVGLFRIXWKAFGGMIFVLVYYTVGISGGHINTAVTFGLFLACKVSLIRAMFYMVAHCLGAICGFGLVKAFMKHSYNSLGGGANSVSAAYNKGSALGAEIIDTFVLVNTIFSATDPKRSAPTSYVPVLAPLPIGFAVFMVHLATIPITGTGINPARSLGAAVIYNNGKVWDEHWIFWVGPLVGALAAAAYHQYILRAGAIKALGSFRSNPTN

SEQ ID NO: 145283 - protein, 179 aa, Glycine max
  Clone ID: PAT_MRT3847_10220C.1.pep
MKRMIALGFEGSANKIGVGVVTLDGTILSNPRHTYITPPGQGFLPRETAQHHLQHVLPLIKSALETAQITPHDIDCLCYTKGPGMGAPLQVSAIVVRVLSLLWKKPIVAVNHCVAHIEMGRIVTGADDPVVLYVSGGNTQVIAYSEGRYRIFGETIDIAVGELLGSLCRGLTLSNDPSP

SEQ ID NO: 145284 - protein, 99 aa, Glycine max
  Clone ID: PAT_MRT3847_102210C.1.pep
VVGMDGGQWTPASRNQYNLRDAVARCPTQVYPFSWTAIYIALDNVGMWNLRSEFWARQYLGQQLYLRVYTASTSIRDEFPVPKNAILCGRASGRHTRPL

SEQ ID NO: 145285 - protein, 116 aa, Glycine max
  unsure (1)..(116): unsure at all Xaa locations
  Clone ID: PAT_MRT3847_102211C.1.pep
MPFRSIVRELKEIGEGISNMCRRGGEAKHVHRHGKSHIAPEWSLPPPPSSSSSSSSSSSWQSRWANLPPELLLDIIQRGEASETSWPARXALVACASXCKVGREITKDGGKTPEQG

SEQ ID NO: 145286 - protein, 213 aa, Glycine max
  Clone ID: PAT_MRT3847_102212C.1.pep
MVKSKSVEKPAEEQQRGGVSAYRGVRKRKWGKYVSEIRLPNSRQRIWLGSYDSAEKAARAFDAAMFCLRGSGANFNFPSDRPNIAGGRNMTPSQIQIAAARFANSEPRKECSGKPVESLTSIEETTSFPVNSDTDTSSPLSVVTIQNDTEVATGSFPGIFSGFGSGNFVPEFSDFPSFDDFGHDFFVHELPGFDYGEENLDGLIIQDSFLWNF

SEQ ID NO: 145287 - protein, 171 aa, Glycine max
  unsure (1)..(171): unsure at all Xaa locations
  Clone ID: PAT_MRT3847_102213C.1.pep
MDPGAMMNEGSFANNASGNTAPFSLAEIWQQFPPAISGGGGLGLRSPQFGHGPGGQFGDFTTGPSHGLGPSNSRKRRDSEEDDSAKGVSTSNAVNEGDGKRVKGNRNEGGGDGGNNKGEGEVSSGKPCEXSAKPASEPPKXDYFHVRARKGQATDSHSLAERARRKRLVKG

SEQ ID NO: 145288 - protein, 136 aa, Glycine max
  Clone ID: PAT_MRT3847_102214C.1.pep
DLRVDLKKQKTCKGERDEKNTFRWILFSSIRTSFVLPTKQYLVTDNSSQKYHYGLLCLGYHSVERNHYQCFFLQQLCCFSAGCLGKLEMPFGAFEMGNQTHYIVVYVWENNEKWDGWKNNSGLIYITLINMLHHTN

SEQ ID NO: 145289 - protein, 118 aa, Glycine max
  unsure (1)..(118): unsure at all Xaa locations
  Clone ID: PAT_MRT3847_102215C.1.pep
MVLSFPYLAGKVEKLGPXSPXVGTVNMKKTVTKQVFLGSPWYGPDRVKYXGPFSGKPPSYLTGEFPCNYSWDTADAVADPESFVXTRELNVIHSRWAMLXSLGLGLPGVASCYGVKFR

SEQ ID NO: 145290 - protein, 127 aa, Glycine max
  Clone ID: PAT_MRT3847_102216C.1.pep
SVRSKHTDGFHVAGSFGRLGYASLIPYVEPVVQAQSAEVYCDCFPVEVDSQEGVAHIGELKFGVYDPLPTKTNWVETAKEWQLDLPCDKNSRELTTTDERLVGTEHEGCDPLLGGIKKYASPMMPLD

SEQ ID NO: 145291 - protein, 133 aa, Glycine max
  Clone ID: PAT_MRT3847_102217C.1.pep
MADLFAWLISFFLLIALLVLVMYQLMCLADLEFDYINPYDSSARINMVVLPEYITQAVLCCFYLLTGHWIMALFCLPYLSLNLRLYRQGRHLVDVTEIFNLLSWEKKQRLVKLFYLVFTLFLSVFWMIYTSLD

SEQ ID NO: 145292 - protein, 40 aa, Glycine max
  Clone ID: PAT_MRT3847_102218C.1.pep
GIPRVISYKTNPSRRYRLSETPPPTCIALHITRIKPFSYA

SEQ ID NO: 145293 - protein, 62 aa, Glycine max
  unsure (1)..(62): unsure at all Xaa locations
  Clone ID: PAT_MRT3847_102219C.1.pep
QTGTTXTXAXIFPXIPAAXPRXXPRFRRATXAXXMXXPSKNYXFGXSXGXXXCRFYXXSAFV

SEQ ID NO: 145294 - protein, 60 aa, Glycine max
  Clone ID: PAT_MRT3847_10221C.1.pep
CGHGRFVPAVFYLIQLWLTRHRPSNSSLANCEICISSGSRVKQVGVPALHMTATIGLTVM

SEQ ID NO: 145295 - protein, 111 aa, Glycine max
  Clone ID: PAT_MRT3847_102220C.1.pep
MKNFLVSLYYLFPAIIAIILVLLTPIPSAQLTTSENRILLQVQKLLEYPQALHGWTNLTNFCSLPSSPSLNIVCSNGHVTELTVVGNSSETLLERFSIESFFTVLTKLSNL

SEQ ID NO: 145296 - protein, 113 aa, Glycine max
  unsure (1)..(113): unsure at all Xaa locations
  Clone ID: PAT_MRT3847_102221C.1.pep
KFLTDGKLYEGKHIPVSNISAGKNHEDKIPLMAQEEILTPRASDVRTAPEGKKSMPXATAKHVGAIEIFIDLFASPDCNIVGAMLLVDTYHTXNPEKAVGXIFVAPYQSGKAH

SEQ ID NO: 145297 - protein, 79 aa, Glycine max
  Clone ID: PAT_MRT3847_102222C.1.pep
TKKEFPRKGAKKIGDAVWVFRPAMSGENVNEIKAKVESANKIGAQIGEPISGGSRARSPSGGFPGGEQAPKAKYREVKK

SEQ ID NO: 145298 - protein, 205 aa, Glycine max
  Clone ID: PAT_MRT3847_102223C.1.pep
GSREDGFRGEFNAFVGNIPHQVLLLSSLRVLWAPRANLGGRLPSGWSDLCSLRVLNLAQNYVAGVVPESLGMCRNLSFLDLSSNILVGYLPSLQLRVPCMMYFNISRNNISGTLQGFRNESCGASALDASFLELNGFNVWRFQKNALIGSGFEETNTVVVSHDFSWNSFSGSLPLFSLGDNLPGAYRNVSYTLSLNNNKFNGTLL

SEQ ID NO: 145299 - protein, 83 aa, Glycine max
  Clone ID: PAT_MRT3847_102224C.1.pep
ASSSYLDRTVQGPCHVNVGADVAEGVVGERSRRCVSSTNHHHRVGPNWRTDPRSRMRTTSAKRSLLGAKYRGLASYGYSHLSM

SEQ ID NO: 145300 - protein, 61 aa, Glycine max
  Clone ID: PAT_MRT3847_102225C.1.pep
GGFSSQGRCLKSFAFKGFVCPPNQICFPYPHPFCPFWKGCFFFPNKKKIKIKKKKKKKKKK

SEQ ID NO: 145301 - protein, 106 aa, Glycine max
  Clone ID: PAT_MRT3847_102226C.1.pep
AGYSAGGKRVLNTFEEKDKMESRSSQESDRSSGVGTWKDECEFFELAGMEESRRVTQPTKQSKDLVQGTEAQKHDQMEREASNVQDKHKQVKATAENYRGRSTRKI

SEQ ID NO: 145302 - protein, 61 aa, Glycine max
  Clone ID: PAT_MRT3847_102227C.1.pep
FQHKAPRSGELPGRPQWTLVSIASSDDHQPSIIFSHQKGRGLCPTKNEPGAADERALSHIE

SEQ ID NO: 145303 - protein, 78 aa, Glycine max
  unsure (1)..(78): unsure at all Xaa locations
  Clone ID: PAT_MRT3847_102228C.1.pep
MPTFYRGQEPGAKNAILMNVPGAVLSMRRCCVGDLVSEASNLTSPYIKCPASFXIVSANRAEATVNVEAFIHKPAHFA

SEQ ID NO: 145304 - protein, 92 aa, Glycine max
  unsure (1)..(92): unsure at all Xaa locations
  Clone ID: PAT_MRT3847_102229C.1.pep
VIDPIFPGGSLDPMGPTDDPEALAQLKVQDLMAGRGSMFQHVALSAQTFFRAQGPLKNIAEHLXADPANNSAVVQSHQIGPRTVSVIVHNPF

SEQ ID NO: 145305 - protein, 496 aa, Glycine max
  unsure (1)..(496): unsure at all Xaa locations
  Clone ID: PAT_MRT3847_10222C.1.pep
LRRSPPPLSTHSSRRPPPSSPPSCRRRTAQGSLTVVDERTGKKYQLQVSKRHTANXATVKASEFKKILTGKNDKGLKLYDPGYLNTAPVRSTISYIDGDEGILRYRGYPIEELAEKSTFTEVSYLIMYGSLPSESQLAEWEFAISQHSAVPQGVLDMIQSMPHDAHPMGVLVNAMSALSVFHPDANPALRGLDIYDSKQIRDKQITRVIGKITTIAAAVYLRMAGRPPVLPSNQLSYTENFLYMLDSFGNRSYKPNPRLTRALDIIFILHAEHEMNCSTSAVRHLSSSGVDVYTAIAGAVGALYGPLHGGANEAVLKMLSEIGTVENIPAFIEGVKARKRKLSGFGHRVYKNYDPRAKVLRKLTEEVFSIVGRYPLIEIVVALKKLCTVXDEYFIKRKLYPNVDFYSGLIYRAMGFQPEFFTVLFAIPRMAGYLAHWRESLDDPDTKIMRPQQVYVGEWLRHYAPINQRTASSNTDKLGQLAVSNASKRRLAGSGA

SEQ ID NO: 145306 - protein, 67 aa, Glycine max
  Clone ID: PAT_MRT3847_102230C.1.pep
GVITNVTTSNSPVMTYPLLGNFLKHTSDKKNVKFCPFFVKKPSTSKLFFWLTQPANFGPYVETFLCT

SEQ ID NO: 145307 - protein, 88 aa, Glycine max
  Clone ID: PAT_MRT3847_102231C.1.pep
MGGGGGDHGHGHGHGDFRNKVWSMSGGPYCRPKHWKRNTAIAMVGVVLICIPIAMKSAELEQRPHHPVRPIPSQLWCKNFGTKDYNDP

SEQ ID NO: 145308 - protein, 90 aa, Glycine max
  Clone ID: PAT_MRT3847_102232C.1.pep
MGGGGGDHGHGHGHGDFRNKVWSMSGGPYCRPKHWKRNTAIAMFGVVLICIPIAMKSAELEQRPHHPVRPIPSQLWCKNFGTKDYNDNDP

SEQ ID NO: 145309 - protein, 39 aa, Glycine max
  Clone ID: PAT_MRT3847_102233C.1.pep
LEHVLMFHIRTQLMARIHCFVPCLQTIERSRLPKASLPF

SEQ ID NO: 145310 - protein, 78 aa, Glycine max
  unsure (1)..(78): unsure at all Xaa locations
  Clone ID: PAT_MRT3847_102234C.1.pep
GPENPGRPTRPEPRNQSQQKGRLVEXPTEWQPERPREKTPSAQTTXXERPAGTEHEGHEPPHGGKQKXATPKTPPEEE

SEQ ID NO: 145311 - protein, 99 aa, Glycine max
  unsure (1)..(99): unsure at all Xaa locations
  Clone ID: PAT_MRT3847_102235C.1.pep
NHLPHNAHSTMNIPSNTLYYLXLAYDALHEPVFAVLKTSNPERPFYDFAACCIPHLAITLKIHSAYFRPCPAWTICFLDTPKQQLGDAAAANRSNPEDY

SEQ ID NO: 145312 - protein, 54 aa, Glycine max
  Clone ID: PAT_MRT3847_102236C.1.pep
RTMTFQPSSLSLHCSFLNQHHNYSDSNHRNPVRIFDANTPNTLLLIHAQSNSSN

SEQ ID NO: 145313 - protein, 191 aa, Glycine max
  Clone ID: PAT_MRT3847_102237C.1.pep
MASIPLLSPPTTATNSAVSHLPSSITSTSSSFKPHALHRRRLTRLHVSSPTSSTPSPTTTTTSGETIFFDGGAHYGDLAANLLLGFTLFWLPLTLAAVSRAMYLRYRFTNLRVSVISGLTGQDRSDFGYNVIKDVQVVPRFIGEWGDVVITLKDGTKVDLRSVPKFREIAKYCLLMAQKPLVLNQTGPKAF

SEQ ID NO: 145314 - protein, 148 aa, Glycine max
  unsure (1)..(148): unsure at all Xaa locations
  Clone ID: PAT_MRT3847_102238C.1.pep
MSSCCYAPTKSERFSNCSIKTGPWKLPIIGNILNIVGSLPHCRLRDLSAKYGPLMHLKLGEVSTIVVSSPEYAKEVLNTHDLIFSSRPPILASKIMSYDSKGMSFAPYGDYWRWLRKICTSELLSSXCXQSFQPIRGGELTXFIXRIA

SEQ ID NO: 145315 - protein, 42 aa, Glycine max
  Clone ID: PAT_MRT3847_102239C.1.pep
LERYNSGIDEEREQTLAARLIIKDTYVRKGGAGMEFIKLKLN

SEQ ID NO: 145316 - protein, 200 aa, Glycine max
  unsure (1)..(200): unsure at all Xaa locations
  Clone ID: PAT_MRT3847_10223C.1.pep
FAISQHSAVXQGILDIIQSMPHDAHPMGVLVNAMSALSVFHPDANPALRGLDIYDSKQIRDKQITRVIGKITTIAAAVYLRMAGRPPVLPSNHLSYTENFLYMLDSFGNRSYKPNPRLTRVLDIIFILHAEHEMNCSTSAVRHLASSGVDVYTAXPXAVGALYGPLHGGANEAVLXXLSEIGTVQXIXRXIESVKARKRK

SEQ ID NO: 145317 - protein, 69 aa, Glycine max
  unsure (1)..(69): unsure at all Xaa locations
  Clone ID: PAT_MRT3847_102240C.1.pep
LHRLLLQNLASNSWHLFQNILSCFIGKTCLPITCRLSQSNSSSRLVYKLTNIXXANLSILFFLLYFALP

SEQ ID NO: 145318 - protein, 157 aa, Glycine max
  unsure (1)..(157): unsure at all Xaa locations
  Clone ID: PAT_MRT3847_102241C.1.pep
VNAKGKPEYVLKRAEDLAAAGQKAEAVDFLYEQVTSKRNRTWSKMSEKIMVKFIELCVALQRGKQAKDGLHQYRIITQQIPSSLEVVLKTFLESATAAAXEAQTKAEGILLEVEDLEEDFSAEQLLRAVSGEDTKDRTDRKIVTXWLKFLWETYRTI

SEQ ID NO: 145319 - protein, 147 aa, Glycine max
  Clone ID: PAT_MRT3847_102242C.1.pep
MASYNAHLKLMIIIMAFMPSPLLSSYSQEPIPKVPTLSSSPATLTDPPPSPSSLSPFQELSPDIAPLLPSPGGVLPTPAAGSDIPTIPSNPSPPNPDDIIAPGPLSAFSPFGSPLSSNAPTTSLVASIATAFFAGLAVCWCLHCMRL

SEQ ID NO: 145320 - protein, 60 aa, Glycine max
  Clone ID: PAT_MRT3847_102243C.1.pep
SMFDCCLWPGQPRQGGSFPMPLVPCLVFCQLFCELAPGLLKCWLSLVWGVLLTCVHANRS

SEQ ID NO: 145321 - protein, 83 aa, Glycine max
  Clone ID: PAT_MRT3847_102244C.1.pep
ASLLKSSLVLDKSESTKGQTLRQPSASGVTCNPTTPSGLTIKAGSYADDLCKTPKTSASPGRGILVMDETNATCAKRMASIGL

SEQ ID NO: 145322 - protein, 48 aa, Glycine max
  Clone ID: PAT_MRT3847_102245C.1.pep
EMQTVLSLRDYQSPHLHTHICSSSASPHCVRRVRPLAPLHGISISAGE

SEQ ID NO: 145323 - protein, 191 aa, Glycine max
  Clone ID: PAT_MRT3847_102246C.1.pep
MAGPGKCFLVTGPPGVGKTTLIMKVFESLKVNPSLKLQGFYTREIRRAGQRVGFEVVTLDGRTAPLASIDISTPESLRWPNVGKYKVDVASFESLALPELQVREDTDLFIIDEVGKMELFSSSFFPAVLRVLESNIPVLASIPVPKFGRDIPEVARLRNHAGATCFTLSVSNRDAVREQIRSQLEDMLTKH

SEQ ID NO: 145324 - protein, 111 aa, Glycine max
  Clone ID: PAT_MRT3847_102247C.1.pep
FMCLFVYEIMCDINYVDGPHRYDRGGSLTSPLRLITRAEHTSRTIKMAHLSTSRRSFNLERPISQRKLSSQEMEGLIHVRDTEVASRSNRDKLLVCISVMCGSVISECNRS

SEQ ID NO: 145325 - protein, 84 aa, Glycine max
  Clone ID: PAT_MRT3847_102248C.1.pep
LHELNARFDEDNTKLLQCVSCLSPSSSFEAFDEDNTKLLQCVSCLSPSSSFEAFDVKKLLRMVELYPNLLLSMLCLFENFHTSF

SEQ ID NO: 145326 - protein, 56 aa, Glycine max
  Clone ID: PAT_MRT3847_102249C.1.pep
TITIINIFILDHIIWPDKYAGSLDDAMLMNVKFCFPRVLIFNSYFKSLKTSFCLSS

SEQ ID NO: 145327 - protein, 250 aa, Glycine max
  unsure (1)..(250): unsure at all Xaa locations
  Clone ID: PAT_MRT3847_10224C.1.pep
MTVVGLFLTDTKLAGALFTLTVAANAFSYSRFRKKNLRRFRSPIDESQDTLAHFNIAEGEDEFFFGLATAPAHVEDRLDDAWIQFAEKKSGEGGGDSEGKQRVDAVIGSASGDGGSQPAITSPRSRKPLKVAMEAMIRGIEKYMEVEGKEREEEARPNVTAWHNVPCPEERLRFWSDPETEIKLAKDTXGLPVFRMGIDWTRIMPVEPVSSLNQSVNYAALERYKRTINRGPXMEWKVMLTLFHHSLSPG

SEQ ID NO: 145328 - protein, 67 aa, Glycine max
  Clone ID: PAT_MRT3847_102250C.1.pep
RLREDDRRGGNGYSSPVFNVISDATEASESPLRKQLLSPLNGMLLADHFKGDPLDIGAGIYQSRSKA

SEQ ID NO: 145329 - protein, 43 aa, Glycine max
  Clone ID: PAT_MRT3847_102251C.1.pep
QYYTINNIFKHHRIHTINLSIHFSNLNIKVHFYLKYLNLYAIV

SEQ ID NO: 145330 - protein, 89 aa, Glycine max
  Clone ID: PAT_MRT3847_102252C.1.pep
IGRIVSLACNYSFRCFSACSCWVATHSPCVRHEACQGRCVDRFAGCVGSLCSWLWLGQNFAGIDVHYKWPLLKSRVTRRILPPLMLAYL

SEQ ID NO: 145331 - protein, 59 aa, Glycine max
  unsure (1)..(59): unsure at all Xaa locations
  Clone ID: PAT_MRT3847_102253C.1.pep
AARRRQKGTAARRRQKGTAARRRQKGTAARRRQKGTAXARRRQKGTAARRRQKGYTSGI

SEQ ID NO: 145332 - protein, 68 aa, Glycine max
  Clone ID: PAT_MRT3847_102254C.1.pep
TFESAFLRGPPSRVRSLGRPPNLWQFFLATCPEVAFQTISPGFSCLNVVKSLAYSVLMVIRFYQYVNF

SEQ ID NO: 145333 - protein, 52 aa, Glycine max
  Clone ID: PAT_MRT3847_102255C.1.pep
KQNLESLGTKKIVNPENLKEKGAWFHRMTEIPNFITTIWIFLLVRYYLQSFL

SEQ ID NO: 145334 - protein, 156 aa, Glycine max
  Clone ID: PAT_MRT3847_102256C.1.pep
QYPLTKSQITNIMCRSIHAPLLLVLMCLMNGSNFAYDPFESSLSFEPEPHVDINVLFVSFYNGMAPNNPNVNLFYNNQKDGVYLSPGKGFSKLDNLNGRKSVVMYWNGNCASFFAYDPSAEGNHQKIYWLIKEDGIYHSWDNSSWQKRKSWTFNRC

SEQ ID NO: 145335 - protein, 106 aa, Glycine max
  unsure (1)..(106): unsure at all Xaa locations
  Clone ID: PAT_MRT3847_102257C.1.pep
IXARVRKLXNSXXSXXXXXXGRXXTXQPXPXXXCXAXXNXDXXXNTTTNXXXXFTXPXXXLTXXXIXXFXKEXXEDXKXYXKXDLDVXNXXMXXKLGXXXLLXCGX

SEQ ID NO: 145336 - protein, 69 aa, Glycine max
  unsure (1)..(69): unsure at all Xaa locations
  Clone ID: PAT_MRT3847_102258C.1.pep
VVPXVAPAAXXXFSPSXXXFLLRLFAGGVVLAPLFGAVXGVSPFGKKKKTLIMHAPMLFIFSLSFSLFF

SEQ ID NO: 145337 - protein, 114 aa, Glycine max
  unsure (1)..(114): unsure at all Xaa locations
  Clone ID: PAT_MRT3847_102259C.1.pep
HAKCLPYCVHFKFGGVQFFLILYFCSTLIENLIINSNTRQNSLGQENRKLKERDKRVILWIFLDPNSPRLTSGFPEPPKAFRPKQLARLGELGPSALRTQLAXASCHCPKLLFL

SEQ ID NO: 145338 - protein, 38 aa, Glycine max
  Clone ID: PAT_MRT3847_10225C.1.pep
ENQKIMSMEMMATERVCYVHCNFCNTILAVSVPLQQFG

SEQ ID NO: 145339 - protein, 175 aa, Glycine max
  unsure (1)..(175): unsure at all Xaa locations
  Clone ID: PAT_MRT3847_102260C.1.pep
IGNELVIDAARIPIVDVXDSQDLVTCSAILQSFDLATMKPNEVDFTATATLELKPSTSGTCCWCYGVVLWFDTGFSSRFCRETPAVLSTSPYMPRTHWSQTILTFQEPIAMGFGKENRGKPEAIGTEVYPAVKIDLRVSIVRSTEHRSIDISLEAAGVGPDSHKRSWPAQLFNLQ

SEQ ID NO: 145340 - protein, 95 aa, Glycine max
  Clone ID: PAT_MRT3847_102261C.1.pep
MASSRRRTFGNMRSFVSNSMGGLRGGSNLASWVVAGTLAYFLWIKPSQDFKRQQQEKATLAAAESDSYRKPIPDPQVTGLIYGNKNKDKATKPED

SEQ ID NO: 145341 - protein, 100 aa, Glycine max
  unsure (1)..(100): unsure at all Xaa locations
  Clone ID: PAT_MRT3847_102262C.1.pep
MASSWRRNXGNMRSFVSNSMGGLRGGSNLASWVVAGTLAYFLWIKPSQDLKREQQEKAALAAAESDPYRYVETRKPIPDPQXTGLIYGNKNKDKPTKPEN

SEQ ID NO: 145342 - protein, 92 aa, Glycine max
  Clone ID: PAT_MRT3847_102263C.1.pep
VTGKRPMEPEPTRPPTRPPTRPNNIRSREDALELVDPTIAKHVKEDAMKVLKIATLCTGKIPASRPSMRMLVQMLEEADPFTTTKMIVTIDA

SEQ ID NO: 145343 - protein, 72 aa, Glycine max
  Clone ID: PAT_MRT3847_102264C.1.pep
SYHICHYQLIKHYQYKNFVILFMILNISLCAILFKIFNLRTTINHILLYVRERLIGIIDHTIVQVKKQTETQ

SEQ ID NO: 145344 - protein, 60 aa, Glycine max
  Clone ID: PAT_MRT3847_102265C.1.pep
KISSPPYIPVNASLFSDCGKHRFARSIFMGTKDRQRRLWRALQYLLYATSGRLVKGSLSA

SEQ ID NO: 145345 - protein, 37 aa, Glycine max
  Clone ID: PAT_MRT3847_102266C.1.pep
RKRHVDSLHTDLRPHMKIAPRFSGHNTAMDKHVHSYH

SEQ ID NO: 145346 - protein, 149 aa, Glycine max
  Clone ID: PAT_MRT3847_102267C.1.pep
SSKPNQIDKQLNIIITDKDLTRVPEGTRTEAGFRHNINVGLGYLDNWLRGVGCVPLYNLMEDAATAEISRAQLWQWLKHEAKLEDGRTIDANMVKDTISAEAERRLIRAGSVVNRIPEAAALLEKFATEDELSDFLTLDAYDRLVSEGH

SEQ ID NO: 145347 - protein, 141 aa, Glycine max
  Clone ID: PAT_MRT3847_102268C.1.pep
MTNYGDMNVTNKPNPDGSTNGFQSQLQVQQQNGWEQGSSRLRPTKPYPAPTARYQDIVRDANLFWGTLQAFHKILGTKYKVATVGGTSLDLHRLFVEVTSRGGIEKVIVDRKWKEVILTFNFKDTITSASFVVRKSYLSML

SEQ ID NO: 145348 - protein, 288 aa, Glycine max
  Clone ID: PAT_MRT3847_102269C.1.pep
LRREIAEIVFTISNIRDILRHGEKHPLLQKLCIEILTSLALEEDATERIGGTGGVLKELFNIFFKHNIPENQKHVKIVAGEALAMLALESKSNCHRILKLKVLEKLAEALKDPLLRVNAARILRSKNTYSGKDKIIQLKGVNTATPIILRAIMSEDNKIQEVMIGLAANVFRYMTSHESSIVFEEAGITEAELANKLVQILKKYQYPPTKIPRIRRFVIELAIWMMKDKAENIETFKGLGMEEVLEGVLETTSELESFNVFSGTVGLNRHTLTTQSLVEMALKLMEDS

SEQ ID NO: 145349 - protein, 99 aa, Glycine max
  Clone ID: PAT_MRT3847_10226C.1.pep
CMSLISIFFLVGFFLIEIYTFHESHTRGTYYCIGLSNQYWLFWILEAFCQVMYMLEFRISFDRYSAICFFEKNQLYFRIEKFTNIKLLTILILQVPRPL

SEQ ID NO: 145350 - protein, 96 aa, Glycine max
  Clone ID: PAT_MRT3847_102270C.1.pep
SGACGNPFLKPGFFFVGVRVFWDPLGFLGCWVLTAPFGCFLPPLSPPRFGTKWVLPGKGKSVIPPVLFVLPPNTIFSFWSCPPKIRVFALFQDQRE

SEQ ID NO: 145351 - protein, 66 aa, Glycine max
  Clone ID: PAT_MRT3847_102271C.1.pep
STRLSTDSRKYIIRHSPVQYLGTACSAHASENKEAYRDRRHYIRRTLGCMTLIAENTSVLCHRRLT

SEQ ID NO: 145352 - protein, 64 aa, Glycine max
  unsure (1)..(64): unsure at all Xaa locations
  Clone ID: PAT_MRT3847_102272C.1.pep
FESSGAVPIRASYAPSDVGYFLSPAATPLRFVLSEQGHQAIFLSYKHDMVLPIKKGTSYIXTRG

SEQ ID NO: 145353 - protein, 65 aa, Glycine max
  Clone ID: PAT_MRT3847_102273C.1.pep
TNKRILTRCISRVCNNIQNPRDNGVCLDLTKHNESHKTIVSVHALNLCFIQVGHSYKTIGRCLCW

SEQ ID NO: 145354 - protein, 43 aa, Glycine max
  unsure (1)..(43): unsure at all Xaa locations
  Clone ID: PAT_MRT3847_102274C.1.pep
LSYHSDEHYSLSPTMRIDIEDDLXLVAWDSFNVSPTSQALLKY

SEQ ID NO: 145355 - protein, 62 aa, Glycine max
  Clone ID: PAT_MRT3847_102275C.1.pep
EEMSYYTYRRKWWVDVGLLLNTGSRHITTGVRHYIYDGHILHGRFTILVHKPGIVLRKLLAN

SEQ ID NO: 145356 - protein, 61 aa, Glycine max
  Clone ID: PAT_MRT3847_102276C.1.pep
GHVKGHAQIMSSWSLTRAMLYRRRRNTHPLRGSLPWCRVLLELTQSCYTGVEVSCVNAYVG

SEQ ID NO: 145357 - protein, 105 aa, Glycine max
  Clone ID: PAT_MRT3847_102277C.1.pep
ASPVCLLIKKESRGAIGILYLGPALMSPRRGKVAPVLQAQYIPLFSFRARMYLVFEPPRRWGFWEFKFKACKLFSFRVNFSRFKEFGVAISCSEKPVIVGSRSKG

SEQ ID NO: 145358 - protein, 78 aa, Glycine max
  Clone ID: PAT_MRT3847_102278C.1.pep
VKVTFLERHNEQFQEIGPLIQNELPKSMKCKDNGHIFRIPHNLHRDFISLTNETIPKMDEKMTYNILWYPRITFYWTF

SEQ ID NO: 145359 - protein, 43 aa, Glycine max
  Clone ID: PAT_MRT3847_102279C.1.pep
FKIPRVFPAKSFPTKLKKRKNPFKTILHESNNLKKLKPLHIEA

SEQ ID NO: 145360 - protein, 64 aa, Glycine max
  Clone ID: PAT_MRT3847_10227C.1.pep
FKHHLRVNVHLGGAATMPGSEEDAATTALVLNVLERVHDIGNASQPPETAEIQSPGVCGVSRTR

SEQ ID NO: 145361 - protein, 178 aa, Glycine max
  unsure (1)..(178): unsure at all Xaa locations
  Clone ID: PAT_MRT3847_102280C.1.pep
SLLAIDSSAYQPIRSARAYGRGPHIYDTYTILYTLHICDHRTGDMGADFYLLYIADIDIPTLLWLDSIRFSISWSRIFPNGKADTNPLVVKRSNIVIYEILIDGXKPHVTLLHWDFPHALEDEHXGYRTSNLLADYSGYSNLCSKTLLDRVRYXVSLNEPSLFNLSVYYGGTFAPGIC

SEQ ID NO: 145362 - protein, 32 aa, Glycine max
  Clone ID: PAT_MRT3847_102281C.1.pep
LGSPCRGGNLGAYNKSQIVTVRKNIARKKAFC

SEQ ID NO: 145363 - protein, 55 aa, Glycine max
  Clone ID: PAT_MRT3847_102282C.1.pep
EDVMPIATGHEREELQAELEGGSILQIFSSEGPFCTKEARAAAKSYYHQRISRCP

SEQ ID NO: 145364 - protein, 57 aa, Glycine max
  unsure (1)..(57): unsure at all Xaa locations
  Clone ID: PAT_MRT3847_102283C.1.pep
LVYFLSXVCSQEPXVFXVHXILLCXXGGWXXELSLRALPXVLAMPLSXGGXAGXXXA

SEQ ID NO: 145365 - protein, 131 aa, Glycine max
  unsure (1)..(131): unsure at all Xaa locations
  Clone ID: PAT_MRT3847_102284C.1.pep
LLTHYHHHGKSFENTLITXFLGLHRIKPSSGQXFLFTFLRNTFCTGLKXHRRLDLKCFFLGXSSDKIXTDESTTLMELXLIYSFYLHPSWRECLLEDIVLHSILLEAHHMMDYSLLLRVHYRTAQHLRSNV

SEQ ID NO: 145366 - protein, 366 aa, Glycine max
  Clone ID: PAT_MRT3847_102285C.1.pep
MNESTMSKKKRYYRWLRISIHSSLVLVCGSAAILLGRLYYEKGGKSKWMGTLVQLAGFPIQLPFHFISASKNLTTNSSIHPKQSSASILAFIYVSIGLLLALDCYLYSVGLWDLPVSTYSLICSSQLAFNAFFSYFLNSLKFTPYIINSLVLLTISSTLLVFQNESSSDDDDDSDSTKISKKKYVIGFICTVGASAGYGLWLSLTQLVFKKVIKRETFKVVLDMILYTSLVATLATLVGLFASGEWSGLKNEMKEYELGKASYLLNLTFTAILWQVFTIGCLGDISEVSSLFSNAISALGVPIVPMLAVLFFHDKMDGIKGISMVLAIWGIVSYVYQQYLDDTKSENRNTTSHVPKASSPIEEVHR

SEQ ID NO: 145367 - protein, 348 aa, Glycine max
  unsure (1)..(348): unsure at all Xaa locations
  Clone ID: PAT_MRT3847_102286C.1.pep
MALEAVVFPQDPFTYGCNNKDFLYSLVGGDGGGGGGSHEYGFQASSEDKPHVGIIINNNNIDHTLHANWDSSSPSVLQSVKEQWDSHSSPEACTVDQSLPRAFPLPPSSSSPEAASSATGRRKRRRTKSAKNKKEIENHRMTHIAVECNRRTRINEYLAVPRSLMPPSXVQRGDQASIIGGTSNFVKELEQLLQCMKGQKKRTKEGSGFSDSSPFSEFFMFPQYSTRATQSSSSSSSKGYPGTCEANNNMARNPSSWAVADIEVTLVDGHANMKILCKKRPGMLLKMVVGLLSLGLSILHLNVTTVDDMVLTSVSVKVEEGCQLNTVDEIAAAVHQLSRTVQEEAVFS

SEQ ID NO: 145368 - protein, 51 aa, Glycine max
  Clone ID: PAT_MRT3847_102287C.1.pep
HSCTHYFYFILCQDISVGGCSHTTLPPRDHSPSVDDLTNVSISSSFDVPNI

SEQ ID NO: 145369 - protein, 31 aa, Glycine max
  Clone ID: PAT_MRT3847_102288C.1.pep
LVDKEGGVYRFREWITILVINCPKKKKKSER

SEQ ID NO: 145370 - protein, 55 aa, Glycine max
  Clone ID: PAT_MRT3847_102289C.1.pep
GSPLRGTVRVPAELKIGQVLSSPLVQLAETSDRFIRRVGLERHMFINPPAATAYF

SEQ ID NO: 145371 - protein, 140 aa, Glycine max
  Clone ID: PAT_MRT3847_10228C.1.pep
PPHKLFSHFFFSVLKFGEIKFKTYRGANFFFKKTWVFFFGTSGFQEDQPQNLNLENVKKAFKTKSLGLTLFFFFLHNLGGRGNGPGGLYLGWEITRGLTFGFKKLGGFFTYLGALGHPSSQFFHFDTPKNTPLFPWLPLF

SEQ ID NO: 145372 - protein, 44 aa, Glycine max
  Clone ID: PAT_MRT3847_102290C.1.pep
LHLFCNFISYGVLQGCEKYVTLFTKSTFINELSCYFEISQKPCY

SEQ ID NO: 145373 - protein, 33 aa, Glycine max
  Clone ID: PAT_MRT3847_102291C.1.pep
TQKLILTNRQPNCVLTMTINQPCSINSLTLTTK

SEQ ID NO: 145374 - protein, 65 aa, Glycine max
  Clone ID: PAT_MRT3847_102292C.1.pep
LSFFSFFLFFFEGEEILHYAGGGALYFFSPGFFFEGNKKGPLKKNLGGIIKIFPFYKNFLDPPLA

SEQ ID NO: 145375 - protein, 56 aa, Glycine max
  Clone ID: PAT_MRT3847_102293C.1.pep
VFEAPCRWKGVRGPPVSVTVPSIHRRAEVKGKISVGGIEKRVKRNQRVSTKDGAGG

SEQ ID NO: 145376 - protein, 77 aa, Glycine max
  Clone ID: PAT_MRT3847_102294C.1.pep
YRGGMGLLNLRACPARFIRLYVASYQMWLTSVLASIWPSASILRQIPMVLFLQSFPVVSLCEHSQWVRLPSAAVFEG

SEQ ID NO: 145377 - protein, 60 aa, Glycine max
  Clone ID: PAT_MRT3847_102295C.1.pep
IILFTGSSYANFISFKLLCSFILFKPHDSLFLQQYDFFPTDLGSVSRDSTCCKVILISVR

SEQ ID NO: 145378 - protein, 38 aa, Glycine max
  Clone ID: PAT_MRT3847_102296C.1.pep
KYLTCCHHVIYFYALTHPLPSLAHFPNRSSLSCPTLPP

SEQ ID NO: 145379 - protein, 40 aa, Glycine max
  Clone ID: PAT_MRT3847_102297C.1.pep
SLNIEVGSFIRSSPGFPLEAPFLTQCCYILKYHEVMYLPS

SEQ ID NO: 145380 - protein, 189 aa, Glycine max
  Clone ID: PAT_MRT3847_102298C.1.pep
RAESARALITSLLTHVTPAIPTMSNTIPPTDPVAAVVSDSLPKPVAPAEAIQQPPAAALEPLTKTEGGFLQQARETILPYVEKVQSTAKPYTDAATHKVEELVQKIEGTAPTSATTTDPTATRDLNAPAGTTTTGQTVAEKAQGVFAQVCSAVTSTFQQVTNTIETRTTTDTHPGFITQVTNVVHKGQE

SEQ ID NO: 145381 - protein, 72 aa, Glycine max
  Clone ID: PAT_MRT3847_102299C.1.pep
ASSWMKKVERKLEEKRARALEKMQNDVAKAQRKDEERKASAEAKRGTKVARVLEIANLMRAVGRAPTKRSFF

SEQ ID NO: 145382 - protein, 132 aa, Glycine max
  Clone ID: PAT_MRT3847_10229C.1.pep
MASMGMTPTTPYGHHHFPTHGVQSYEMVVNQTPQWQTTCYVGNLTPYTTQSDLVPLFQNFGYVVETRFQSDRGFAFIKMDTHENAAMAICQLNGYNVNGRPLKCSWGKDRPPTGQFDGYSPAGGPNSAYPPT

SEQ ID NO: 145383 - protein, 81 aa, Glycine max
  unsure (1)..(81): unsure at all Xaa locations
  Clone ID: PAT_MRT3847_1022C.1.pep
YYTCGQLNGDVHNKMLHTSVDDTFYAIXRLRPLVLLQRXTLHFHFCVNNEQNIDCGCGCMELIREDDCQSIMRELSSCSVR

SEQ ID NO: 145384 - protein, 54 aa, Glycine max
  unsure (1)..(54): unsure at all Xaa locations
  Clone ID: PAT_MRT3847_102300C.1.pep
XXGXXSSHVVRSXXXMALTAPQCXXNAXLXMVNXXXILSXXRAEXRADVXVXAT

SEQ ID NO: 145385 - protein, 62 aa, Glycine max
  Clone ID: PAT_MRT3847_102301C.1.pep
RMSRPLHRGVSIRIPDSNNNDLWDSQSKDKSEKEGLDRRGSSGHPSPLRSPFRLLFSDNSYS

SEQ ID NO: 145386 - protein, 61 aa, Glycine max
  Clone ID: PAT_MRT3847_102302C.1.pep
VQSIIVARICFHKWQHLSNEVVDMAEGIDLWACDHVLKEFNQVADSLAKKEFKCGSWSPSF

SEQ ID NO: 145387 - protein, 42 aa, Glycine max
  Clone ID: PAT_MRT3847_102303C.1.pep
LVQCHLPSRAVCDSLALWPKLASWSLRRLSLERRLLRRSRRC

SEQ ID NO: 145388 - protein, 34 aa, Glycine max
  Clone ID: PAT_MRT3847_102304C.1.pep
KILYGRYTLFWIMLLISKLAFSYYVEILPLVGPT

SEQ ID NO: 145389 - protein, 74 aa, Glycine max
  Clone ID: PAT_MRT3847_102305C.1.pep
FQSVQHNTSNMSQKEKGPGIRLFGRKIPVPECQIPANSGPTDTCCSIKKTELKIPSECGENSEQQENSSDSRDS

SEQ ID NO: 145390 - protein, 56 aa, Glycine max
  Clone ID: PAT_MRT3847_102306C.1.pep
VIFKWRKTVFKKMQNKSKKIYMWTKENLHVNRVSISCVNLSSFLCLTTNHLTCSHL

SEQ ID NO: 145391 - protein, 68 aa, Glycine max
  Clone ID: PAT_MRT3847_102307C.1.pep
SSLSGEEYDRYSHQYELIRNLNEVYDNDPGNFNKIVELMQKMQECGQPPNDIVQELAPDFDLASLGQL

SEQ ID NO: 145392 - protein, 142 aa, Glycine max
  Clone ID: PAT_MRT3847_102308C.1.pep
MPFPAKPTRDFDESASPSNNLWVGNLAADVTDADLMELFAKYGALDSVTSYSARSYAFVFFKRVEDAKAAKNALQGTSLRGSSLKIEFARPVCPHLFPFTFSAHPCILLQTNILLLLLLLKMLLFLHSRFCIFFLSLPVVSQ

SEQ ID NO: 145393 - protein, 39 aa, Glycine max
  Clone ID: PAT_MRT3847_102309C.1.pep
NSHKIMYFYHKNDCISSHPNLIFHTLCTSIIKKSLHMVF

SEQ ID NO: 145394 - protein, 77 aa, Glycine max
  unsure (1)..(77): unsure at all Xaa locations
  Clone ID: PAT_MRT3847_10230C.1.pep
GSRSSVSPLILPLQDVIRMXGRATAPVRQAATGVSEPVMAVTFVPTGLPTEVQALEMHHDALTVALTGDHVGFSVQN

SEQ ID NO: 145395 - protein, 78 aa, Glycine max
  unsure (1)..(78): unsure at all Xaa locations
  Clone ID: PAT_MRT3847_102310C.1.pep
AQARSSTHYDPHHNLLXCIVSGCKQVVLWPPSASPSLYPMPIYGEASNHSSVTLENPDYSIYPRAECSMEFAQKAVLQ

SEQ ID NO: 145396 - protein, 59 aa, Glycine max
  Clone ID: PAT_MRT3847_102311C.1.pep
MMGFLCISIVNRMIMIFTNIWGPLDSTTISPLDITLLALLFIGAPWIHTLCIHLLTIYN

SEQ ID NO: 145397 - protein, 122 aa, Glycine max
  unsure (1)..(122): unsure at all Xaa locations
  Clone ID: PAT_MRT3847_102312C.1.pep
HHPQGPCHLDSPTKKNISSHVKLTLDFKVTCHDFHKDSSTLRLHGHNLXSNQHITASCFRTLTVEPHKPFHLCKKLWQNDVVKTLNESTKNSNPNTNSPNLVVVLFHLKLFTYLLIPSTFIF

SEQ ID NO: 145398 - protein, 42 aa, Glycine max
  Clone ID: PAT_MRT3847_102313C.1.pep
DHIQWTPLSSQPYPRLTLERRYKGLIFGSLACFGRQTSIGIS

SEQ ID NO: 145399 - protein, 153 aa, Glycine max
  unsure (1)..(153): unsure at all Xaa locations
  Clone ID: PAT_MRT3847_102314C.1.pep
EKLAPVYDKVAVVESAVKSKVTXTSTGGVGTETKNEVSVKDYLAEKLKPGEEDKALSELISEALHKKKEEPVKNEDGNLDDGNDKMCEEISVKSPGKGVVGKLKGVVGSWFGKAEEKGGEDLSKNTNSGAEVEQVHQVVGEIKSGPIEEQGTG

SEQ ID NO: 145400 - protein, 70 aa, Glycine max
  Clone ID: PAT_MRT3847_102315C.1.pep
WGPAGYSKPGGKTPPPDQKPPGLGKQRKTGFQRVLKAKGAPLRGLSLKGKNPKRGPKRGKKKGEKNLFFF

SEQ ID NO: 145401 - protein, 78 aa, Glycine max
  Clone ID: PAT_MRT3847_102316C.1.pep
RSLRLVYEVPFCVPVKKRFPFFCPLLPNILRKKCWITLPRIHTLAEAPYFGPGSPPDPKAPPGGLLAPKTPHSRPPQV

SEQ ID NO: 145402 - protein, 128 aa, Glycine max
  unsure (1)..(128): unsure at all Xaa locations
  Clone ID: PAT_MRT3847_102317C.1.pep
MDARPPESAAPAASTEDFVHVADLKMESLSESIVRIDEPSEADAAASSAPAESDRRPATLPPELSRNVRVLSCESSAEGGVCDVYLVGTAHVSEESSRESQAIVNFLKPXVVFLELCSSRVAVLTPQI

SEQ ID NO: 145403 - protein, 93 aa, Glycine max
  Clone ID: PAT_MRT3847_102318C.1.pep
INQDIDVDMMKMGSPRAAGVITCSDVKLNEVASTRLPSGEDGHTPMSVAVPEGRVHGGSLMAPLMGSSGLGTSSGRDLLSDQSETIKAGILPQ

SEQ ID NO: 145404 - protein, 109 aa, Glycine max
  Clone ID: PAT_MRT3847_102319C.1.pep
LSLSLSLCACVCEGTCRAVSLRQRKKQFKIVVQFCKKLPIKYFCCCFFFFFSILLLIQPVSFLNHCFSLSLFSLLFSTFLMNELVCLLLLLDIGEDCRFMEIQLNLAFC

SEQ ID NO: 145405 - protein, 54 aa, Glycine max
  Clone ID: PAT_MRT3847_10231C.1.pep
HNKYNFLCSLSKHGAIQQLRTALQCINTYKFHLTPTMASNYFEQKRKRKQHLIV

SEQ ID NO: 145406 - protein, 33 aa, Glycine max
  Clone ID: PAT_MRT3847_102320C.1.pep
MEAVLVCLWIGRSNLWPWHRLPGHPSCLVCWAV

SEQ ID NO: 145407 - protein, 351 aa, Glycine max
  unsure (1)..(351): unsure at all Xaa locations
  Clone ID: PAT_MRT3847_102321C.1.pep
MEIHYSNSYFERRPILKSKAAAVKWXKNEDTLKTLKEKVKEPSVPEPEPEPTTEVLFLCSYDGCGKTFIDAGALRKHSHIHGERQYVCHYDGCGKKFLDSSKLKRHFLIHTGERDFVCPHEGCGKAFSLDFNLRSHMKTHSQENYHICPYPDCGKRYAHEYKLKNHIASHHEKNASVDVTKYTTPPSEKQTKTSKPSGGAYGSASSDRPYACPYDGCEKAYIHEYKLRLHLKREHPGLMADENAEHAQANVDNEMDEASDHDAYVAKRSNGKIQKQSKPKPNLKLPPSKIAKRKLSTPSLTVNKNSWPVKDEPFDEEDSEETEEDRDNVEDGWRYAGGNNEDDDEETEYED

SEQ ID NO: 145408 - protein, 60 aa, Glycine max
  Clone ID: PAT_MRT3847_102322C.1.pep
DKNKLTHWIHHMNVSFIGDSISIQFLVLITVNKRKVLEDPKLVIPFFACHQPQRLGFELT

SEQ ID NO: 145409 - protein, 371 aa, Glycine max
  Clone ID: PAT_MRT3847_102323C.1.pep
MEIHYSNSYFERRPILKSKAAAVKWVKEWVPQDLVTTGGKCMILKWVTEDTLKTLKEKVKEPSVPEPEPEPTTEVLFLCSYDGCGKTFIDAGALRKHSHIHGERQYVCHYDGCGKKFLDSSKLKRHFLIHTGERDFVCPHEGCGKAFSLDFNLRSHMKTHSQENYHICPYPDCGKRYAHEYKLKNHIASHHEKNAPLDVAKYTTPPPEKQTKTSKPSGGAYGSASSDRPYACPYDGCEKAYIHEYKLRLHLKREHPGLMADENAEHAQANVGNEMDEASDHDAYVAKRSNGKIQKQSKPKPNLKLPPSKIAKRKVSTPTLTVNKNSWPVKDEPFDEEDSEETEEDRDNVEDGWRYAGGNNEDDDEETEYED

SEQ ID NO: 145410 - protein, 56 aa, Glycine max
  Clone ID: PAT_MRT3847_102324C.1.pep
RGKAKSEFSYLVAIPVLPCSVYICSVFKCKLCFSILKASGILIRPSFYSQKDHFFP

SEQ ID NO: 145411 - protein, 54 aa, Glycine max
  Clone ID: PAT_MRT3847_102325C.1.pep
MDKSESVTSTSVLDLTHLYSLCHMLINSQLLRVKLKNQDTYLIKIHAIVIYIEY

SEQ ID NO: 145412 - protein, 52 aa, Glycine max
  Clone ID: PAT_MRT3847_102326C.1.pep
ITCLFDSKYIIVCCNHKDLKSRHQLLDMIRGLLCSKCTTMLNILSNDVNASA

SEQ ID NO: 145413 - protein, 41 aa, Glycine max
  Clone ID: PAT_MRT3847_102327C.1.pep
LNWFLIYIIPFKETIYKKRRVPSKKLYFIWLTKQDNQCLIN

SEQ ID NO: 145414 - protein, 143 aa, Glycine max
  Clone ID: PAT_MRT3847_102328C.1.pep
EKWECQAVTGAFPCLQYLSIRYCPKLKGDLPEQLLPLKKLQISECKQLEASAPRALVLDLKDTGKLQLQLDWATLKMLSMGGHSMEALLLEKSDTLKNLYIYCCPIDEMCCDCGMSDDGRDSLKTFPLYFFPALKTCLSGFRN

SEQ ID NO: 145415 - protein, 57 aa, Glycine max
  unsure (1)..(57): unsure at all Xaa locations
  Clone ID: PAT_MRT3847_102329C.1.pep
KGVGAIISSAFRIRFIGXSDPLVLKVHGSADIMLCVRIPTQWSVVEDLPXRPAGKIG

SEQ ID NO: 145416 - protein, 63 aa, Glycine max
  Clone ID: PAT_MRT3847_10232C.1.pep
ALGKRAITLHLIKKKIKNGLLFFQRKKRKVGIFWVRSRAIHGSHPFIFKSRIRLNPRLKIIKL

SEQ ID NO: 145417 - protein, 77 aa, Glycine max
  Clone ID: PAT_MRT3847_102330C.1.pep
PRVRRKKAHAIQKQNTAPRVMSRGGYEYLEKKLMDEKRKKKLEEATQSGSTDTVIDPPSTIKRHLTWKLARTKKLVT

SEQ ID NO: 145418 - protein, 93 aa, Glycine max
  unsure (1)..(93): unsure at all Xaa locations
  Clone ID: PAT_MRT3847_102331C.1.pep
NSTMPGDFVIGVMLTTMNNVCAYGLNPDISXACLVGTIPKPISQQNCWNQMATVRTPLNFDSSKQNFCQFSIDLLGGXILLDKTGDWITLIQN

SEQ ID NO: 145419 - protein, 127 aa, Glycine max
  unsure (1)..(127): unsure at all Xaa locations
  Clone ID: PAT_MRT3847_102332C.1.pep
NVTLQRTRLRKGGAFPKIQRLATHPSFDRCFYREKDLTDRXPCQLIPHAVGKTGRCPELSALSAHPFLATRSYTDKVATALPPDPLAFSNCFMGPPLGCPLKAVGGGVPPRVKFNILRHLYPQPFDY

SEQ ID NO: 145420 - protein, 60 aa, Glycine max
  unsure (1)..(60): unsure at all Xaa locations
  Clone ID: PAT_MRT3847_102333C.1.pep
NRXHAYVSSEFGSSXSXXXVXXSLWXXTSMKKXXCXXIXXCSAXXESQXDRFXXSECXTX

SEQ ID NO: 145421 - protein, 100 aa, Glycine max
  unsure (1)..(100): unsure at all Xaa locations
  Clone ID: PAT_MRT3847_102334C.1.pep
MTLTNIMIVQIVCLLHLFPVEVTADNTDLSFIKTHNSSRXDDNHXSQSCSDLCKCTSSIPLQYTCKNIMLHSSYSXVRSXMYTLSHSLQCRWREQNVFCY

SEQ ID NO: 145422 - protein, 83 aa, Glycine max
  Clone ID: PAT_MRT3847_102335C.1.pep
GSVPLLISSGIFIVESLSVIIQVLYFKMTKGFQGAWWWRFLRIPPFHYGLQLRGFREPNIVLGAYIISSVLALLGGYVGLVSA

SEQ ID NO: 145423 - protein, 92 aa, Glycine max
  Clone ID: PAT_MRT3847_102336C.1.pep
SLSLAYGMAANSTTRRITALGKRVAIRIWTSNAPPPTSTTGAHSSGSMYDMNPDDEIQSGHVPDDVIEAATHSGKYWATHTHYWGTWAPRKK

SEQ ID NO: 145424 - protein, 72 aa, Glycine max
  Clone ID: PAT_MRT3847_102337C.1.pep
DWGVTRYLSYQTSHTHLGVSKSSPLRCPNPYMGQRNRQGSHAELHTFKFSIFALNKSDSTVGLAFLLAPICS

SEQ ID NO: 145425 - protein, 87 aa, Glycine max
  unsure (1)..(87): unsure at all Xaa locations
  Clone ID: PAT_MRT3847_102338C.1.pep
XQWLCXNNVLCIAFIIXLNXGXXSSNXGDLVWXXMAKCXXSSXEDXXXRHHGGXCGDGNLYSXGYGXNXAALSTXSSTXXLATVXVL

SEQ ID NO: 145426 - protein, 98 aa, Glycine max
  Clone ID: PAT_MRT3847_102339C.1.pep
TKQEKGVADRSFNCQNRSRGWWWSRSEFPIEAVVGVGADLSFHSQSFRAGGGADLRVAYGGFGSAASLLHRRQNEMANRNACLTWFISVRFGCFFPSF

SEQ ID NO: 145427 - protein, 123 aa, Glycine max
  Clone ID: PAT_MRT3847_10233C.1.pep
ERSDGAISVLHPLSKLLEGGNTCAANCDTYNEICGSPLSEGLFADQAKKVGIKWKTKLTECKVASRGEEHENPSLQANDVNTAMKNVEKTKPNTIDQLGNASSRGQVSTFEIEDSSRVAEANL

SEQ ID NO: 145428 - protein, 170 aa, Glycine max
  Clone ID: PAT_MRT3847_102340C.1.pep
YGRQHVWLTTTRIHIARTGWFAAALVPTPIAFILLAISGSGAALHIGTALIGLSSGFVFSAAVSITSELFGPNSVGVNHNILITNIPLGSCLYGLLAALVYDSNARKPRHTIWLHKMSMCMGRKCYLQTFVWWSCISMVGLGSSFFLYIRTKQAYENFERNNNRNSVAPE

SEQ ID NO: 145429 - protein, 89 aa, Glycine max
  unsure (1)..(89): unsure at all Xaa locations
  Clone ID: PAT_MRT3847_102341C.1.pep
LVKGSPVGXQHFGRRRQKFKVKNKVAVVEVGGAQSTVGEHLATWGETLLGPTQLCCFPAFCLSFLRIKSRWQDEELNTRLARALNSAKG

SEQ ID NO: 145430 - protein, 83 aa, Glycine max
  Clone ID: PAT_MRT3847_102342C.1.pep
LGDLYQTKLKDNLTLLLTHTTLLSAFHAWHSSNSSCQRHKLHTENKINRRKHQHIPRLCIIGCSHTYSNDVNLAINIHKLEYP

SEQ ID NO: 145431 - protein, 232 aa, Glycine max
  Clone ID: PAT_MRT3847_102343C.1.pep
NDTGNLVLLDGASSSTWESFDDYRDTLLPSQTMERGQKLSSKLRRNDFNIGRFELFFQNDGNLVMHSINLPSEYVNANYYASGTIESNTSSAGTQLVFDRSGDVYILRDNKEKYNLSDGGSISTTQFYLRATLDFDGVFTLYQHPKGSSGSVGWTPVWSHPDNICKDYLSAASSGVCGYNSICSLGDYKRPICKCPKWYSLVDPNDPNGSCKPDFVQSCSEDELSHIDPLFD

SEQ ID NO: 145432 - protein, 118 aa, Glycine max
  unsure (1)..(118): unsure at all Xaa locations
  Clone ID: PAT_MRT3847_102344C.1.pep
TYNIGVPSIDMGEGLGHLAMAPKDIIKWVDPIRAKGGTITGDPGPVKGGTTVIALVKDPEGFPLGLIQRPPVHDPFGKVRLRVGDXKRSIKFNEKALALKVVRKVDNPESKSTLALLG

SEQ ID NO: 145433 - protein, 65 aa, Glycine max
  Clone ID: PAT_MRT3847_102345C.1.pep
AYGWERKHDRGRERASIRWCSFQATTVTAVQQDPRAAQDIVLAWDYPSVLYELRSPHWKGADHVY

SEQ ID NO: 145434 - protein, 135 aa, Glycine max
  Clone ID: PAT_MRT3847_102346C.1.pep
IPIEWVQTIAPHFNSYTIELSLDSAYYILAQLTQEILSLCFCFLVLELSSSKDFNLFFIAAIFALRLVCPMAPPPPVRCILCPSPAAFVELSTVSNMHLSPARRTTNGRLQANLPCIFSLANSASCILTLLCYTG

SEQ ID NO: 145435 - protein, 135 aa, Glycine max
  Clone ID: PAT_MRT3847_102347C.1.pep
IHDALCVIRCLVKKRALIAGGGAPEIELALRLTKYSRTLSGMESYCVRAFADAMEVIPSTLAENAGLNPISTVTELRNRHAQGEKTTGINVRKGGISNILEEMVVQPLLVSVSALTLATETVRSILKIDDVVNTR

SEQ ID NO: 145436 - protein, 60 aa, Glycine max
  Clone ID: PAT_MRT3847_102348C.1.pep
MHIVTYSLLFFSIYSRAALLKMFSPYGKIISEDFLWHTRGPKRGEPRGFAFIQYSTKEVS

SEQ ID NO: 145437 - protein, 104 aa, Glycine max
  unsure (1)..(104): unsure at all Xaa locations
  Clone ID: PAT_MRT3847_102349C.1.pep
IXXHCXCXFLXXITLSXRXGXRXXCFFCXXLXGDXWXLDQXLPMSNVESXXYXYTVYXXXXXXXIEXIIFXXXXAFLXTXSXSXVHVPSSTLACGLXXCELGSV

SEQ ID NO: 145438 - protein, 93 aa, Glycine max
  Clone ID: PAT_MRT3847_10234C.1.pep
GKIVYILLWPSAYTKTEPPWHCSTRTWACLWLVADGAYYTRALSVRVAAPRQVGWPRPGPFSPELQMAILSRLTGVSLAHVFVWAFVAVLRRP

SEQ ID NO: 145439 - protein, 81 aa, Glycine max
  Clone ID: PAT_MRT3847_102350C.1.pep
MLRELDTLTLVDWDWRRLYSNNKMSCFDGNMWKMKLLQMQKQLLRLIDVQTLELHWLNHTSRPQECKTDLLIHQFEDSKMD

SEQ ID NO: 145440 - protein, 26 aa, Glycine max
  Clone ID: PAT_MRT3847_102351C.1.pep
LPVRDYHLSFLSLTIIYVRIPLCMWL

SEQ ID NO: 145441 - protein, 66 aa, Glycine max
  Clone ID: PAT_MRT3847_102352C.1.pep
RLPPFYAGFFVFSFSPLARFVSGQRAVRGHLAFHVSLAHPGRLSVKVPSPGLSGVIPGLHFFPCNS

SEQ ID NO: 145442 - protein, 264 aa, Glycine max
  Clone ID: PAT_MRT3847_102353C.1.pep
MHEFSIVDGFVEISECMAEMTKYVANEPSVGLFFIQQHAQNAVPNIIKVKKNVVEKSHETTLHTEDLEDSVTMVQSMKECGFPIADKMIREIKKSLITMETKQPKRGLIHPASSSHSERASFLGNAAFYAQEGNEKRSNYFSNVLKSAKEKAGSFKWRQLDTRGSIDSTDEKPPMYPNLPLLVTSASITSSFRAAETDELPVSSQVEDESQHKQTDVSDISINLLSVSERFDDFKANKEAKLAEWLDGTGNLDDNCGTGDEKRS

SEQ ID NO: 145443 - protein, 93 aa, Glycine max
  unsure (1)..(93): unsure at all Xaa locations
  Clone ID: PAT_MRT3847_102354C.1.pep
LTRCEKESLHEMNKRXFKHAWELDKLRADHEPRTPIDIVLRASETTKCYCTGIYSHQHKDFIKNMITGTHQHDCAVPMIYSTTNTIETCFAND

SEQ ID NO: 145444 - protein, 84 aa, Glycine max
  Clone ID: PAT_MRT3847_102355C.1.pep
ENKSFDVIILNRCEAFSTYPRTYDLLHAWTVFSDIENKGCSKEDLLIEMDRMLRPTGFAIIRDKQSVIDFIKNHLSALHWEAID

SEQ ID NO: 145445 - protein, 84 aa, Glycine max
  Clone ID: PAT_MRT3847_102356C.1.pep
AEIFLLCGSKYVGPYFSGSKLKSFLYFAFNSMAVGVVITGATLPFGKVADCDFLKRNFKQMSNVLWVAPEDKASLWSLLESKPC

SEQ ID NO: 145446 - protein, 271 aa, Glycine max
  Clone ID: PAT_MRT3847_102357C.1.pep
VDVRVRHRVTLEGSVNGPRVRCYFPSCTIFPCRQCKLSPTHLLQSSTSISLLRVRASQTTQRAITRKSRRLKSDAEIRNDIREFLNSVGLPEDHIPSTKELLLHGWNDLANIVRRRGHKQIQELRTRSSLNDDADFLSAETSLDEGLDAANGFEDPLTGQSEKVDSLVDDIEALTEILLGSSSGSLYVDSSSSLGEGTNIAEEASTNIVEDGLSEVEDHAEVVNDVTEGNFYPTELTSVDNDYDSSIMRTEISGELPFEQCLLENLSLRIV

SEQ ID NO: 145447 - protein, 87 aa, Glycine max
  Clone ID: PAT_MRT3847_102358C.1.pep
GAVSFNKPHAPPPGFIEFEGRTKHCLSLKHTTRLVLPCYKSRRLFHICPTKWLVYMLLHHENNHGATLVSKKAQFSNNGVGVTPRKE

SEQ ID NO: 145448 - protein, 61 aa, Glycine max
  unsure (1)..(61): unsure at all Xaa locations
  Clone ID: PAT_MRT3847_102359C.1.pep
LPYTDQGSLRNTHNQQVSXGTPWVQPDHMEPWNPLYGXLPVYLTGEFPSDYGWDTAGLFAD

SEQ ID NO: 145449 - protein, 516 aa, Glycine max
  unsure (1)..(516): unsure at all Xaa locations
  Clone ID: PAT_MRT3847_10235C.1.pep
MAIELASPNWVPTAAACLAALAALLLFLLRGLRRRKYNLPPGPKPWPIIGNLNLIGSLPHQSIHALSKTYGPIMHVWFGSNPVVVGSSVDMAKAILKTHDATLAGRPKFAAGKYTTYNYSDITWSQYGPYWRQARRMCLMELFSAKRLEEYEYIRKQELRGLLNELFNSANKTILLKDHLSNLSLNVISRMVLGKKYLEESENAVVSPDDFKKMLDELFLLNGVYNIGDFIPWMDFLDLQGYIKRMKALSKKFDMFMEHVLDEHIERKKGVEDYVAKDMVDVLLQLAEDPTLEVKLERHGVKAFTQDLIAGGTESSAVTVEWAITELLRRPEIFKKATEELDRVIGRERWVEEKDIVNLPYVNAIAKEAMRLHPVAPMLVPRLAREDCQVGGYDIXPKGTQVLVNVWTIGRDPSIWDNPTEFQPERFLTKEIDVKGHDYELLPFGAGRRMCPGYPLGLKVIQASLANLLHGFNWRLPDNVKNEDLNMDEIFGLSTPKKIPLETVVEPRLPHHLYSL

SEQ ID NO: 145450 - protein, 36 aa, Glycine max
  Clone ID: PAT_MRT3847_102360C.1.pep
TCCVSSHPSLGFEEGVLSQADPASLHLRLRPETRTL

SEQ ID NO: 145451 - protein, 69 aa, Glycine max
  unsure (1)..(69): unsure at all Xaa locations
  Clone ID: PAT_MRT3847_102361C.1.pep
CPSVPPCLVVMLEPPMQCQIGEDNGHHCPLLFDXALSVSARATDIGGGKSTQIGKEEVKLXLYADVMTL

SEQ ID NO: 145452 - protein, 296 aa, Glycine max
  Clone ID: PAT_MRT3847_102362C.1.pep
MFLLRRQTQNNQENDSSYQDTKVAELKTGLGPLSGRRLKYCTDACLRRYLEARNWNVDKAKKMLEETLKWRATYKPEEIRWAEIAHEGETGKVSRANFHDRLGRTVLIMRPGMQNTTSAEDNIRHLVYLLENAILNLSEGQEQMSWLIDFTGLSLSTNMSVKTSRDIIHILQNHYPERLAIAFMYNPPRIFQAFWKAIRFFLDPKTVQKVKFVYPNNKDSVELIKSLFPTENLPSEFGGKTSLNYDHEEFSRLMTEDDVKTAKFWGLDEKPFNPPKKGHSGAEVAPEPVPVEAVVS

SEQ ID NO: 145453 - protein, 108 aa, Glycine max
  Clone ID: PAT_MRT3847_102363C.1.pep
LALKDQIHNLVVTNSLSCFIPQGTGVKVQSLNGESKLLNSSKYVKCLAHVHGKLYCGCHDSSVQEIHLATGTVNTIQSGYKRLLGKANPIHALQIHGELIYAAGSSLD

SEQ ID NO: 145454 - protein, 39 aa, Glycine max
  Clone ID: PAT_MRT3847_102364C.1.pep
RVMQRTWGKWAAEIREPNIGYMLWLGTFPTVIGAALAYD

SEQ ID NO: 145455 - protein, 62 aa, Glycine max
  Clone ID: PAT_MRT3847_102365C.1.pep
WYQSLSFTCIGLTEVTETHSIYRGLFGPNSQLIISLTDKTQIIYHDCAGCRHSISILSIPST

SEQ ID NO: 145456 - protein, 80 aa, Glycine max
  Clone ID: PAT_MRT3847_102366C.1.pep
SLIRRSLSLPFRTIEFTRKYPSVFEEFLPVASSFASPHVRLTPETLLLDSEEHLLHLSDRFKHHAADRFLKLLMIARITK

SEQ ID NO: 145457 - protein, 184 aa, Glycine max
  Clone ID: PAT_MRT3847_102367C.1.pep
MSSSSIPSSPDHFPHLGLGYSIAIALAFLFLLSTLLLSSYLCCRHNRRRLRHTTAAATSDGGIVLPRVIFVAEDEDEDGSVAVGFDQSVINSYPRFQYDRDNARNNNIINTTCSICLCEYKDSEMLRMMPECRHYFHLCCLDSWLKLNGSCPVCRNSPLPTPLSTPLQEVVPLSQYAADRRRNR

SEQ ID NO: 145458 - protein, 58 aa, Glycine max
  Clone ID: PAT_MRT3847_102368C.1.pep
HSSLYIIKVSQYISELYHMYICSQVYLFLHKRPLRKSLSISATRLHNASLTFSVVRKV

SEQ ID NO: 145459 - protein, 120 aa, Glycine max
  unsure (1)..(120): unsure at all Xaa locations
  Clone ID: PAT_MRT3847_102369C.1.pep
GSRKRDEQSKTITRGNHTTADTDKVSGHNRDAEHEDEQRQRGEHLGEQPGDHNAAATGQHQADEHTPQHQGGXSTKTGRETRAHGTTHQRGERRQREQREAEEEKDERTGHGTTQEMEDS

SEQ ID NO: 145460 - protein, 516 aa, Glycine max
  Clone ID: PAT_MRT3847_10236C.1.pep
MATELASSPNWVPSAATCLAAFAALLLLFLRGLRRRRYNLPPGPKPWPIIGNLNLIGSLPHRSIHTLGKKYGPIMHVWFGSSSVVVGSSVEIAKAVLKTHDATLAGRPKFAAGKYTTYNYSDITWSQYGPYWRQARRMCLMELFSAKRLQEYEYIRKQELRCLLNELFNSANKTVLLKDHLSSLSLNVISRMVLGKKYLEESQNAVVSPDEFKKMLDELFLLNGVYNIGDFIPWIDFLDLQGYIKRMKTLSKKFDMFMEHVLDEHIERKKGIKDYVAKDMVDVLLQLAEDPTLEVKLERHGVKAFTQDLIAGGTESSAVTVEWAISELLRRPEIFKKATEELDRVIGRERWVEEKDIVNLPYVNAIVKEAMRLHPVAPMLVPRLAREDCNLGGYDIPKGTQVLVNVWTIGRDPSIWDNPNEFQPERFLNKEIDVKGHDYELLPFGAGRRMCPGYPLGLKVIQASLANLLHGFNWRLPDNVRKEDLNMDEIFGLSTPKKLPLETVVEPRLPYHLYSL

SEQ ID NO: 145461 - protein, 78 aa, Glycine max
  Clone ID: PAT_MRT3847_102370C.1.pep
SLHVSHYIAHSKRLTSNVCRRLEPLCSILVHSGHPLFQVFGRSVDQRHPGGEGALIRCNAPHPIEASKYCSCHFIEYT

SEQ ID NO: 145462 - protein, 91 aa, Glycine max
  unsure (1)..(91): unsure at all Xaa locations
  Clone ID: PAT_MRT3847_102371C.1.pep
MGCSCRRHADTEASTAERWRCTVMIAWRDSQLLTITDELLXLDRSARTLGLAHNRIEDLPVEVSTAVNVQGLNMTDNVIDRLSVGKGKLQS

SEQ ID NO: 145463 - protein, 97 aa, Glycine max
  unsure (1)..(97): unsure at all Xaa locations
  Clone ID: PAT_MRT3847_102372C.1.pep
TRGKIMRGFRSGSSRVMITTVLLARGYXVQQVSLVMNFDLPAQLEQYLHGIGCSGRFGRKGVVINFVPKYPEKILFAIPKFYNVQVQELRSNVGQVL

SEQ ID NO: 145464 - protein, 207 aa, Glycine max
  Clone ID: PAT_MRT3847_102373C.1.pep
MGRNHFQQQHCADGSMWMESQGQQQSYAFQEESWSPDNNYGHNHKQFPGMHMNMNNNNNNKRLGAFAAVDSDFSMQKHHHGHGNGVGAMHMNMNRHGGKLGGMFQEGMHSDHHGGRKFPFGGHHHGNNNASQHHFPNHGGHHEYFSEESEEYEESYAEEHVGGVTAKVDEMRYERHNWGGGDTRYANPYGMNMNHKPHKFQWTAKGV

SEQ ID NO: 145465 - protein, 214 aa, Glycine max
  Clone ID: PAT_MRT3847_102374C.1.pep
IRRYNDTSYLVVLLHLASSPWVWYRTADDDIEESVPFDLLDDDDPWIRTTDFTPSGAIGRCNFYRISIPPRHGAKLMKAMLYLKGQRVQIQELPLKQTLRTQNEPDFGMPMSDAFFYVHFQKDIAFDIMFLVNAIVHKGIFNQHRLSDRFFELLRNQPKELNVAALKHLCSYKRPVFDATKRLKIVQEWLLRNPKLYQISKQLDDIVEVRRLVV

SEQ ID NO: 145466 - protein, 76 aa, Glycine max
  unsure (1)..(76): unsure at all Xaa locations
  Clone ID: PAT_MRT3847_102375C.1.pep
SSLGRKIKRTTGAIHXLYKYGSDLIPLVQKKSNCSEVTTRKLTSSYRQNLIHIQENSIIVKLKLERRERRGGKYLR

SEQ ID NO: 145467 - protein, 256 aa, Glycine max
  unsure (1)..(256): unsure at all Xaa locations
  Clone ID: PAT_MRT3847_102376C.1.pep
MQISVLNYALNEESAYYHRDLTMAETNHHMDIDSDDHTYTARPDKAKSVVVASNPPAAGKAIPWVEKYRPLSLDDVAAHRDIVDTIDRLTTENRLPHLLLYGPPGTGKTSTILAVARKLYGSQYQNMILELNASDDXIDVVRQQIQDFASTQSLSFGVKSSVKLVLLDEADAMTKDAQFALRRVIEKYTKSTRFALICNHVNKIIPALQSRCTRFRFAPLDAVHVTERLKHVIKAEGLDVDGQGLTSXVRLSNGDM

SEQ ID NO: 145468 - protein, 136 aa, Glycine max
  Clone ID: PAT_MRT3847_102377C.1.pep
GRRGGCAFFRPLFFFFFPARRTASFWRALGFFCIEKCCPPPTKLVLHGRGSCVQPPFFFFGAHFPFFSGGGLLPPSFLFLVPLGVFFFPPLWGGRISFCVLVRGRSAWWRKWVEQSQFDNKKKKKKKKRKKKKKKK

SEQ ID NO: 145469 - protein, 176 aa, Glycine max
  Clone ID: PAT_MRT3847_102378C.1.pep
MEFLCLLLYILVAWCLSSSELVGAELQDQDILHAINQELRVPGWGDGNNSDYCNWQGVSCGNNSMVEGLDLSHRNLRGNVTLMSELKALKRLDLSNNNFDGSIPTAFGNLSDLEVLDLTSNKFQGSIPPQLGGLTNLKSLNLSNNVLVGEIPIELQGLEKLQDFQISSNHLSGLVP

SEQ ID NO: 145470 - protein, 62 aa, Glycine max
  Clone ID: PAT_MRT3847_102379C.1.pep
HCSVLPGIVQPHYINNACTVTATTNNPETSAGAKRYKHLVYLRSKKRRGLKTDASVYSPQPG

SEQ ID NO: 145471 - protein, 98 aa, Glycine max
  unsure (1)..(98): unsure at all Xaa locations
  Clone ID: PAT_MRT3847_10237C.1.pep
MKSTSLFAIHLLCTFIXYLPCDTAQDLLDEDGYPICNDLIYYALSETRRNSCGIERVKLCKDNCPITVLQPSNPNSNGLEINTEFSYPTYYINETLIM

SEQ ID NO: 145472 - protein, 62 aa, Glycine max
  unsure (1)..(62): unsure at all Xaa locations
  Clone ID: PAT_MRT3847_102380C.1.pep
TPLKXXGLVXXRSKGHRYSGRFXTWEYXVRXXNXGXXPIXPXKEMLXTYGRHXHTHNAXXVK

SEQ ID NO: 145473 - protein, 72 aa, Glycine max
  Clone ID: PAT_MRT3847_102381C.1.pep
DTRSLHLHTKDRHKQSNRLKKKRHLIVFCQACQTTIEHQHKQSSTHYQTKHKERNLIPLFDIRVIRTRWFQL

SEQ ID NO: 145474 - protein, 101 aa, Glycine max
  unsure (1)..(101): unsure at all Xaa locations
  Clone ID: PAT_MRT3847_102382C.1.pep
GIXPDQQRLIFAGKQLEXXXTXAXXKFQXESTLHFVLRLRGGMQIXVKXLTGXTXTLEVEXSSELIDKVXGXXSXTXXVSPGTRQXLIFXGKXFXDGXXLR

SEQ ID NO: 145475 - protein, 254 aa, Glycine max
  Clone ID: PAT_MRT3847_102383C.1.pep
MDTFLFTSESVNEGHPDKLCDQISDAVLDACLEQDPESKVACETCTKTNLVMVFGEITTKANIDYEKIVRDTCRSIGFVSGDVGLDADKCKVLVYLEQQSPDIAQGVHGHLTKRPEDIGAGDQGHMFGYATDETPELMPLSHVLATKLGMQLTEVRKNEICPWLRPDGKTQVTVEYANDHGAMVPVRVHTVLISTQHDETVTNDEIAADLKEHVIKPVIPEKYLDEETIFHLTPSGVFVIGGPHGDAGLRVANH

SEQ ID NO: 145476 - protein, 58 aa, Glycine max
  Clone ID: PAT_MRT3847_102384C.1.pep
DVLDLHPLTLKRVSNLLFTKEHSCFISCKLLRHLKTNPYFLISISNFKIVNNFPKLKG

SEQ ID NO: 145477 - protein, 61 aa, Glycine max
  Clone ID: PAT_MRT3847_102385C.1.pep
CRSQTLLDGELLYATSTHYTSLRNPTTLPRLRLTIYPCLEAHIAYTLLKSATTGSSHRGYE

SEQ ID NO: 145478 - protein, 119 aa, Glycine max
  unsure (1)..(119): unsure at all Xaa locations
  Clone ID: PAT_MRT3847_102386C.1.pep
QMFACIGHCAQXNHVTVLAKTAMICXPSVNATELALKRSNVTPQRPMFFKDRVRHTQADVRVGLPCELVGKSHRSTGAXDYASGSIRNIRKPEPXLWRDDIISEGADPGKRAVETSVTA

SEQ ID NO: 145479 - protein, 353 aa, Glycine max
  Clone ID: PAT_MRT3847_102387C.1.pep
KPIRFTDQQLRIATDNYSFLLGSGGFGVVYKGSFSNGTIVAVKVLRGSSDKRIDEQFMAEVGTIGKVHHFNLVRLYGFCFERHLRALVYEYMVNGALEKYLFHENTTLSFEKLHEIAVGTARGIATLHEDCQQRTFHYDIKPGNILLDRNFCPKVADFGLAKLCNRDNTHISMTGGRGTPGYAAPELWLPFPVTHKCDVYSFGMLLFEIIGRRRNHNINLPESQVWFPMWVWERFDAENVEDLISACGIEDQNREIAERIVKVALSCVQYKPEARPIMSVVVKMLEGSVEVPKPLNPFQHLIDWTPPPTDPVQASQTNTDTSICSDSSELVAKSVHVVATPVMTKYEIELASA

SEQ ID NO: 145480 - protein, 165 aa, Glycine max
  Clone ID: PAT_MRT3847_102388C.1.pep
ETQTTERGTEPIGRIRDANRATEQRRDAASDQMSDADQRAPQDGRAKGRATDEPKPTQSASQQSNQGLDSSTYLSESISGRRNVAASAPEWSSSCSRGSGRAMGEGVVDDDRILVQRATGALKRSGVWGKSRAMTATLRTMVRCSSQAHSRRFGGRAVLAGVGGE

SEQ ID NO: 145481 - protein, 32 aa, Glycine max
  Clone ID: PAT_MRT3847_102389C.1.pep
YAGKAWGHHEICGAGPHMGNININVSYTPSCQ

SEQ ID NO: 145482 - protein, 77 aa, Glycine max
  Clone ID: PAT_MRT3847_10238C.1.pep
IVYVFLTLNSRLRVHVNAVKRANDWVHTLDWVHPMRPERHEMHFQPDHWIHDGWAITHLSLYYRSELTIQTKTLFRA

SEQ ID NO: 145483 - protein, 53 aa, Glycine max
  Clone ID: PAT_MRT3847_102390C.1.pep
LARPNPTQIASFLNASFSFFSGTPSSVIFSTLLYICSVQNQKPTIFGSRWIRS

SEQ ID NO: 145484 - protein, 65 aa, Glycine max
  Clone ID: PAT_MRT3847_102391C.1.pep
PRVRGRVGHGHDSEPYYLHAKHMYNLDRMKHQALKMSLSVLAVFSIGVAVPVYAVIFQQKKTPSS

SEQ ID NO: 145485 - protein, 83 aa, Glycine max
  Clone ID: PAT_MRT3847_102392C.1.pep
RKVKCYKSRHNGAPKSALYRAVVQIAFAKGRIKVRKHPSGTTTCFPSRAKRRVLYVATLKSIALGTVVPRPSTNTGRSHHIWQ

SEQ ID NO: 145486 - protein, 52 aa, Glycine max
  Clone ID: PAT_MRT3847_102393C.1.pep
ETPAAAPGMFFTYRTLSFSTFLYTNFDTCFFMLNFVSNYKGGRMLCFSFSAP

SEQ ID NO: 145487 - protein, 73 aa, Glycine max
  unsure (1)..(73): unsure at all Xaa locations
  Clone ID: PAT_MRT3847_102394C.1.pep
MXTPARKRLMRDFKRLQQDPPAGISGAPQDNNIMLXNXVIFGPDDTXXXXXTXKLTLQFTEDXSNXPPTGRFV

SEQ ID NO: 145488 - protein, 39 aa, Glycine max
  Clone ID: PAT_MRT3847_102395C.1.pep
VLDIHHPVMPRIPLSVDPIYLKAHTDPRFRYASMRETTV

SEQ ID NO: 145489 - protein, 33 aa, Glycine max
  Clone ID: PAT_MRT3847_102396C.1.pep
WITNLELKKHAMPHAHFFKCVLHNNGFALELDL

SEQ ID NO: 145490 - protein, 66 aa, Glycine max
  Clone ID: PAT_MRT3847_102397C.1.pep
SLFKIISMPFVIEPRNYLRNALCCRVKAYECLYTYRAYTQESSKLEPWTMLMPNITYDNNLTFYLE

SEQ ID NO: 145491 - protein, 36 aa, Glycine max
  Clone ID: PAT_MRT3847_102398C.1.pep
LKNEILLNLTHVISHQLYHYNYSSTNILHLTLHQLK

SEQ ID NO: 145492 - protein, 127 aa, Glycine max
  Clone ID: PAT_MRT3847_102399C.1.pep
FFKTGKMANHPKINPPSKKLKIGAREIKSTFFKKNFFGKAAFVPLKGGGTKKKTRPHRGLKKPGPFFGKNPFQNQKTRVFPTKNWFGAWAGSSNWKKKGWGPKKKGLPFFILAKKKKPLLYPVAPDL

SEQ ID NO: 145493 - protein, 361 aa, Glycine max
  Clone ID: PAT_MRT3847_10239C.1.pep
MNLETQPGTASYWCYSCTRFVHLSVQSTIACPHCQSGFVEEIRAGAGAEASPRHRLSPFPDDPLLLRRQGFRRRRREASGNRSPFNPVIVLRGPGDDSAAADHDGVSTFELFYDDGDGTGLRPLPPTMSELLLGSGFDRLLEQFAQIEMNGFGRPENPPASKAAIESMPTVEIGETHVETEAHCAVCKEAFELHAEARELPCKHIYHSDCILPWLSMRNSCPVCRHELPSDLETRVPSQIDEETIGLTIWRLPGGGFAVGRFSGGRRTGESHFPVVYTEMDGGLNTNGGAPRRISRSVRSNRVRESRGFGRVISNFFSFFGRIGSRNSSSGHGSVSRSRSHVSSIFNRSSRRHSRTWVMDD

SEQ ID NO: 145494 - protein, 50 aa, Glycine max
  Clone ID: PAT_MRT3847_1023C.1.pep
KGDLVQKAIPVFEYLGNALGKFDNGPFLLGQLSLGEMANIPFVERFQIVF

SEQ ID NO: 145495 - protein, 213 aa, Glycine max
  unsure (1)..(213): unsure at all Xaa locations
  Clone ID: PAT_MRT3847_102400C.1.pep
MATFILRSNKAVHAFGWLCLLLMVHKGASYDFVVGGQKGWSVPNDPSFNPFNQWAEKSRFQIGDSLVFNYQSGQDSVLYVKSEDYASCNINSPYAKYSDGHTVIKLNXPHFFISGNKDNCNKNEKLTVIVLADRNKNTNQTTTTNAXPPSPQTSSSPSSAPTGQDQGQSPTSDTNQTPSPVSEPPPPNAAASAFVSLAGSVGAFMASVLVLSL

SEQ ID NO: 145496 - protein, 387 aa, Glycine max
  Clone ID: PAT_MRT3847_102401C.1.pep
MGLAKETIMGGGGRVAKVEIQQKKPLSRVPNTKPPFTVGQLKKAIPPHCFQRSLLTSLSYVVYDLSLAFIFYIATTYFHLLPHPFSLIAWPIYWVLQGCILTGVWVIAHECGHHAFSKYPWVDDVMGLTVHSALLVPYFSWKISHRRHHSNTGSLDRDEVFVPKPKSKVAWYTKYLNNPLGRAASLLITLTIGWPLYLAFNVSGRPYDGFASHYHPYAPIYSNRERLLIYVSDVALFSVTYLLYRVATMKGLVWLLCVYGVPLLIVNGFLVTITYLQHTHYALPHYDSSEWDWLRGALATMDRDYGILNKVFHHITDTHVAHHLFSTMPHYHATEATNAMKPILGEYYRFDDTPFYKALWREARECLYVEPDEGTSEKGVYWYRNKY

SEQ ID NO: 145497 - protein, 387 aa, Glycine max
  Clone ID: PAT_MRT3847_102402C.1.pep
MGLAKETTMGGRGRVAKVEVQGKKPLSRVPNTKPPFTVGQLKKAIPPHCFQRSLLTSFSYVVYDLSFAFIFYIATTYFHLLPQPFSLIAWPIYWVLQGCLLTGVWVIAHECGHHAFSKYQWVDDVVGLTLHSTLLVPYFSWKISHRRHHSNTGSLDRDEVFVPKPKSKVAWFSKYLNNPLGRAVSLLVTLTIGWPMYLAFNVSGRPYDSFASHYHPYAPIYSNRERLLIYVSDVALFSVTYSLYRVATLKGLVWLLCVYGVPLLIVNGFLVTITYLQHTHFALPHYDSSEWDWLKGALATMDRDYGILNKVFHHITDTHVAHHLFSTMPHYHAMEATNAIKPILGEYYQFDDTPFYKALWREARECLYVEPDEGTSEKGVYWYRNKY

SEQ ID NO: 145498 - protein, 98 aa, Glycine max
  unsure (1)..(98): unsure at all Xaa locations
  Clone ID: PAT_MRT3847_102403C.1.pep
CAVAVLLCALAVSSWVDEAANPILMVATVQTDVILMIRHFQHSLKFAMFMIKFLKSYRNEEYMMHMYXIFSQNLTFIRSHNKNRLPYTLSDNHFAYCT

SEQ ID NO: 145499 - protein, 103 aa, Glycine max
  unsure (1)..(103): unsure at all Xaa locations
  Clone ID: PAT_MRT3847_102404C.1.pep
MRPVLMKGHXRPLTFLKFHRDGEMVXNGDVGADQYHRYREHVETVKDPTCGLIRIVRCWDVXRDSGRVITGSADQTAKLWHVQTRQQMGTFNFDFPARSVDLA

SEQ ID NO: 145500 - protein, 101 aa, Glycine max
  unsure (1)..(101): unsure at all Xaa locations
  Clone ID: PAT_MRT3847_102405C.1.pep
KNNIWVFHIEYNIGLQWKYYNRSGLLKSKYHQSTQIRTDCMIAFYNDIIIYTVISTTRKSLNLNYYAKTCPNVYYIVAKAXKDATDRNKTFPVAILRMHFH

SEQ ID NO: 145501 - protein, 146 aa, Glycine max
  unsure (1)..(146): unsure at all Xaa locations
  Clone ID: PAT_MRT3847_102406C.1.pep
TREFSPHRGLRQGDPLAPLLFNIAAEGLTGLMREAVARNHYKSFAVGKYKKPVSILQYADDTIFFGEATMENVRVIKTILRGFELASGLKINFAKSRFGAISVPDXWRKEAAEFMNCSLLSLPFSYLGIPIGANPRRRETWDPIIR

SEQ ID NO: 145502 - protein, 50 aa, Glycine max
  unsure (1)..(50): unsure at all Xaa locations
  Clone ID: PAT_MRT3847_102407C.1.pep
GFCVPLXRAWLLAGSAFLAVRIVRFREKRXWVSEEFAIGRSPLLSSSRSR

SEQ ID NO: 145503 - protein, 132 aa, Glycine max
  Clone ID: PAT_MRT3847_102408C.1.pep
MEMTRVNAKSNNSNAKTNGVKEKAKKIVRIQVSKTKKPFFFYLNLAKKYIKQGNDVELSALGMAIPTVVIISEILKSNGWAFEKNITTSTVAAKEDKEGREIPKAKLGVLLGKAGDMDQSTVDASLGKNADD

SEQ ID NO: 145504 - protein, 70 aa, Glycine max
  unsure (1)..(70): unsure at all Xaa locations
  Clone ID: PAT_MRT3847_102409C.1.pep
IAHSTSEIELKTAAADVRFPITVQTTHCFTRKIXLQTCMTSMGEDSCQCQKCATEERSLCSGKVVEMWTD

SEQ ID NO: 145505 - protein, 76 aa, Glycine max
  Clone ID: PAT_MRT3847_10240C.1.pep
EQVSLLIDIPSIRVNKLRVLDFIVAGSWVLWHCHACDVLSLRMNTGYGARYPEVTFASWVACSLQYTGSFALIAVL

SEQ ID NO: 145506 - protein, 72 aa, Glycine max
  Clone ID: PAT_MRT3847_102410C.1.pep
FKANFTKIQRLEFLKLSRQYHLFNPKHENSHCLIYFNLEFEEGGWFKILIKLGRISFVFRGKKEKLKSQIDE

SEQ ID NO: 145507 - protein, 281 aa, Glycine max
  unsure (1)..(281): unsure at all Xaa locations
  Clone ID: PAT_MRT3847_102411C.1.pep
MEISHDIKIKDDKLGDVKEEKIKAEAELKHKSVEKEHTKSKEEKIKVEAELKNKSVEKEHTKSKEEKKHKDEDKSKKKKKEKVEEEDEEREKKEKDLKAKGDDGEEKKEKDKKEKKKKENKDKGDKTDVEKVKGKENDGEDDEEKKEKKKKEKKDKDGKTDAEKIKKKEDDGKDDXQKKEKKKKFDKIDSQKVKGKEDDWKDEGNKEKKDKEKGDGDGEEKKEKKDKEKEKKKEXKDKMKKQTHXRKREKMMKVKDDEXEIEKEKGLEGERRITKRKRKDK

SEQ ID NO: 145508 - protein, 189 aa, Glycine max
  Clone ID: PAT_MRT3847_102412C.1.pep
STFLYNIFGFYAQFLPIVLKCIDASRKEVEIELSKLVKLCRWVHGKSYLSIESLKKGRQKLKKLIQKYTDILQEPVSIFFSQEVAQRGAKVQSFHGHQPIYDVLNKGLVDGAFDLTFFGENRFTWFDNCIKGVDSALQNLLLKKSVEEIQSIFRPCGDSQHTIYLKGWKAVWHTIEKIYTTAVDYGDLW

SEQ ID NO: 145509 - protein, 42 aa, Glycine max
  Clone ID: PAT_MRT3847_102413C.1.pep
MAEYDLTPRMAPNLDRHLVFPLLEFLQERQLYDDDHILKAKI

SEQ ID NO: 145510 - protein, 126 aa, Glycine max
  unsure (1)..(126): unsure at all Xaa locations
  Clone ID: PAT_MRT3847_102414C.1.pep
RPRCFGRDKCRMSLALPEPATVTCADITGAKNLYIISGKGITGRLNRLPWAGFDNMVMATEKRGKPDLRNKGXPAVIVRQHKPWRRKDGVYMYLEDNAGVIVNPKGXLKGSAITGPIGKECADLWP

SEQ ID NO: 145511 - protein, 77 aa, Glycine max
  Clone ID: PAT_MRT3847_102415C.1.pep
YNVRICMDLSPLRHLVFVRVVGLSFNEVWEYNYTYGLNITLDKCIRWFRVRLSGVNVLCLLSSLYLFSRPASTNQPK

SEQ ID NO: 145512 - protein, 88 aa, Glycine max
  Clone ID: PAT_MRT3847_102416C.1.pep
VCLNPRLKSSFDSFSTKRSFIFSVKKLSKTHLYLVSKQIQKSQKTDLTCMNFSFGICSSGTDTYFFRENMIAPTHHPIVFCSLLPLLY

SEQ ID NO: 145513 - protein, 66 aa, Glycine max
  Clone ID: PAT_MRT3847_102417C.1.pep
VTNKMCRMGRPRNIKGWIWLTQVKMCRGFKYSIKDDDLWTKSYREAFDLYLLYTRVHTQPRATSTT

SEQ ID NO: 145514 - protein, 139 aa, Glycine max
  unsure (1)..(139): unsure at all Xaa locations
  Clone ID: PAT_MRT3847_102418C.1.pep
LDRRDYDFVGEKKDEENKPHPQAEAIATEFHTVTVSDHGXNQRRLLDKLYRSDSRSSSSCEEEGEDGGKREKKKKEKKGLKERIEEKIEGXHHDDQDEDTGDPAEKADXLMKHAHAAEQTGVLDEITEKLPGHKPTDEA

SEQ ID NO: 145515 - protein, 52 aa, Glycine max
  unsure (1)..(52): unsure at all Xaa locations
  Clone ID: PAT_MRT3847_102419C.1.pep
RIPVDRASVQNCQSEKMXPGFALPLKKLDGFSAWAGGLNPSLLSPTKFRHRP

SEQ ID NO: 145516 - protein, 19 aa, Glycine max
  unsure (1)..(19): unsure at all Xaa locations
  Clone ID: PAT_MRT3847_10241C.1.pep
MFLPKTERLAFFXLWHNIC

SEQ ID NO: 145517 - protein, 73 aa, Glycine max
  Clone ID: PAT_MRT3847_102420C.1.pep
CSSARSQIRSAASSISINLMFKIRGNSYSGSPMGNSQPQLFLYAELESLDCTMSQSSEGSRQSLSEENQCKLQ

SEQ ID NO: 145518 - protein, 129 aa, Glycine max
  Clone ID: PAT_MRT3847_102421C.1.pep
MLKSTFTPIFWVLTPKPKPPKLPPQAITNTFFTSSTTHVRHNAPLNPTTPPPPSSAYIHLPFCRKRWHYCDFPIVALGCGWTQTNDDPRASAYIHWLCREISATNVDQPADASTITPLKTVYFGGGTPS

SEQ ID NO: 145519 - protein, 79 aa, Glycine max
  Clone ID: PAT_MRT3847_102422C.1.pep
KTRPGNNSRGPRLLFGGPPFFFFFVFFFFFFFFYQILPPGLLIITPNITVYISAGRSYCIIYCNIWCDNYQILPPGLLI

SEQ ID NO: 145520 - protein, 100 aa, Glycine max
  Clone ID: PAT_MRT3847_102423C.1.pep
VEKTIGASKETNINPKACDGLYMKGESTSHCFSITETPKMVLSVISFGKKQNHISIKKSKNGKKSGMKERERTCSRHPSEKSRNRNRRSKFDFGELVLCC

SEQ ID NO: 145521 - protein, 60 aa, Glycine max
  Clone ID: PAT_MRT3847_102424C.1.pep
ALANFSWYYFLMNGNLSSSTSQVIIKFSVRMQLGRIYCLRLLLFLSLASLFFFFFFFFFY

SEQ ID NO: 145522 - protein, 178 aa, Glycine max
  Clone ID: PAT_MRT3847_102425C.1.pep
MVGIELAATMKCISVTSACFLLCLCAIRSVSTQNAIMPPRGWNSYDSFNWIISEEEYLQNVNIVSQQLLAHGYQYAVVDYLWYRSLKGDKNSLGFDVIDKWGRMLPDPERWPSSRGGRGFTDVGNKVHRTGLKFGIHLMAGISTQAFNNNTPILDTQTGQPYMESGRVWKARDIGIPS

SEQ ID NO: 145523 - protein, 45 aa, Glycine max
  Clone ID: PAT_MRT3847_102426C.1.pep
DPREEDVKRNQVSRHRQRYASTVLKLCPFTSIGVSKNQKQTRPAV

SEQ ID NO: 145524 - protein, 111 aa, Glycine max
  Clone ID: PAT_MRT3847_102427C.1.pep
VLGGCPIPYCKWGMWFLAFKLVSFPPAATLGLVTQLAPRFFRLMVPAPCVVRSSYRFPFLPRGPLGLLFRQFGFPLAFGLAGLGSGTGPVFAGCGLKPKTRLKSPINRTTL

SEQ ID NO: 145525 - protein, 51 aa, Glycine max
  Clone ID: PAT_MRT3847_102428C.1.pep
NIRSSIARVIWFTGMATLIIIPTNTATLFMLLLSPIYPPKLLLFYTIITLI

SEQ ID NO: 145526 - protein, 35 aa, Glycine max
  Clone ID: PAT_MRT3847_102429C.1.pep
PPKRFRTLTARLRTINYCEEKKRPGPLNAKRGSMS

SEQ ID NO: 145527 - protein, 62 aa, Glycine max
  Clone ID: PAT_MRT3847_10242C.1.pep
EKNPTWEIDSSTVPLKGTFIPPQQGQDNPAKTPKFVIKILQVLGPLLILGLAFVVRPYPKKK

SEQ ID NO: 145528 - protein, 73 aa, Glycine max
  Clone ID: PAT_MRT3847_102430C.1.pep
TVRYGELVALDTSALVVHILQVTFIRLCNMVHYLYYGVPVDWVVEIESDALKWSSRELRKHGRQAMQFIIVNC

SEQ ID NO: 145529 - protein, 355 aa, Glycine max
  Clone ID: PAT_MRT3847_102431C.1.pep
MQGPGGGRDRFFDFGDPFGGFGGFGSFGPPRSLISSFFGGRDPFSDPFFAQPFGGMFESSPFGGPTGFPFPPGMNPSGFLEHPAPGLDPSGFLEHPGMHPSGFLARQNPEPSRQRRGPIIQELDSDEENDDTAEKKENPRKHGRSDGEPSVEHPDDEIEGKKIRQAGNESRINIIGPQPQSHSFCFQSSTVSYGGPNGLYYTSSRTRRSGSDGVTFEERKEADSSTRQASHLISRGIRGKGHSLSRNLNSDGRVDTMQTLHNINEDELAGFEEEWEEKGQKYLPGWTGSVEASGSNRQAVQARRGGWALPSSEHSHAVGTISEARDEVGPRTQERVRTNSTGRNAYRPGVERGRN

SEQ ID NO: 145530 - protein, 204 aa, Glycine max
  Clone ID: PAT_MRT3847_102432C.1.pep
RDRMQGPGGGRDRFFDFGDPFGGFGGFGSFGPPRSLISSFFGGRDPFNDPFFARPFGGMFESSPFGGPTGFPFPPGMNPSGFLEHPAPGLDPSGFLVRQAPEPSRQRRGPIIQELNSDEENEEATEERKGNPRKHGRSDSEPSVEHPDDEIEGKRSRLAGNESRINITGPRPQSHSFCFQSSTVSYGWSKWDVLYPQGKEELES

SEQ ID NO: 145531 - protein, 62 aa, Glycine max
  unsure (1)..(62): unsure at all Xaa locations
  Clone ID: PAT_MRT3847_102433C.1.pep
SGGRIYQNMKTVGRSLXRLTELLLTSTSRVRCQLLGEGDIDRICPSITQIYKRRNKKKQLGN

SEQ ID NO: 145532 - protein, 50 aa, Glycine max
  Clone ID: PAT_MRT3847_102434C.1.pep
INLSIRHVVLFGSLGKVSSFTMLAYLVKFHVHCLNVENYNVSPMFCNSRN

SEQ ID NO: 145533 - protein, 93 aa, Glycine max
  unsure (1)..(93): unsure at all Xaa locations
  Clone ID: PAT_MRT3847_102435C.1.pep
ESEGSIKAHTPASLXSHFLRIESQDSKRDLVLFEEGCCLIXEMSLLSDLINLNLSDTMRSXAEYIWXGGXXIDXGAKQXSPXXXXTFKFPSGL

SEQ ID NO: 145534 - protein, 68 aa, Glycine max
  Clone ID: PAT_MRT3847_102436C.1.pep
GIDPVCMYFAGCEINQLQWSPPQPHWIALAFSHKKQLFKVLGQNKQFPILAPSLWEKKNNFWSLEGLR

SEQ ID NO: 145535 - protein, 51 aa, Glycine max
  Clone ID: PAT_MRT3847_102437C.1.pep
NSQSLALFSKKWANLKGFIWGPLPPYIFKRGGSRLKPNFVKWGEVKLGPGP

SEQ ID NO: 145536 - protein, 56 aa, Glycine max
  Clone ID: PAT_MRT3847_102438C.1.pep
AHREVSYSLRIDVTCLRRYTPPTAAYAYASLRLLCEYECISYSEDRLAPLLWVSLA

SEQ ID NO: 145537 - protein, 96 aa, Glycine max
  Clone ID: PAT_MRT3847_102439C.1.pep
PLPSYTPTHHRHRPTCYPNPNNNMTTTPRSTPPYHHNPPTKLRRTFTPQPPAQLVQTLTTHTPTTSASFVATSTPDLPPPPPKEGGRHTVMTGNLP

SEQ ID NO: 145538 - protein, 52 aa, Glycine max
  unsure (1)..(52): unsure at all Xaa locations
  Clone ID: PAT_MRT3847_10243C.1.pep
PPKFDPSQGVDVFVRVTCGEAGPASSLAPQIGTLGLSPKXIVPDIANETAKD

SEQ ID NO: 145539 - protein, 109 aa, Glycine max
  Clone ID: PAT_MRT3847_102440C.1.pep
PTTKQRKGKESMGLLWWRKGNKTQAQPEAKSNGADSTKPLTEAPGMNGAVEVPRPSNTTVSIFEFGSVAASNDKVTLAGYCPVSEDLEPCRWEILPAVQSNAPQFRVVF

SEQ ID NO: 145540 - protein, 41 aa, Glycine max
  Clone ID: PAT_MRT3847_102441C.1.pep
RIIIYSASSDLSFNNISGSIPPEIGQLQVDSRGSPGTELEF

SEQ ID NO: 145541 - protein, 173 aa, Glycine max
  Clone ID: PAT_MRT3847_102442C.1.pep
SSARRLNSSSWNLEADNGSVPEAESLSPNDLTSIANKTLTAWETLRSGVEKLLLVYPVKVCKYCSEVHVGPSGHKARLCGVFKYESWKGAHFWMKANVDNLVPPKIVWRRRPQDPPVLLNEGRGFYGRVPAVLDLCSKAGAVVPAKYNCMMKVQGLSCQVNNNFFGITRESNS

SEQ ID NO: 145542 - protein, 40 aa, Glycine max
  Clone ID: PAT_MRT3847_102443C.1.pep
MASCSRLTWFPPDDSLLKLRELLLFKEFKAGFKRVGFCPI

SEQ ID NO: 145543 - protein, 159 aa, Glycine max
  Clone ID: PAT_MRT3847_102444C.1.pep
FPPAPLEDAHAYGLMTIQRASFLRKAGVETIVDSDLFLNPANRADLLESAIKNISRYLEACREKDLTESVREGVDTLLMYLYRALNSVEDMERLASSINWCVVEELEQMLEESGHLRTLAFLCASKGMSSKAVHIWRILARNYSSRLWKRPFFGEYYTE

SEQ ID NO: 145544 - protein, 198 aa, Glycine max
  Clone ID: PAT_MRT3847_102445C.1.pep
MWKRTGFEEEAVQLINSDFRDLSLAANRLAHHAIKLGGIGFGASFFGLFAAIAAIYLLILDRTNWKTNILTALLIPYIFFSLPSLIFDVFRGELGKWIAAVAVVLRLFLPRHFPDWLELPGALILLIVVAPSLIASTFRDNIVGVVVCLIIACYLLQEHIRASGGFRNSFTKAHGISNSIGIILLLVYPIWALVVILF

SEQ ID NO: 145545 - protein, 124 aa, Glycine max
  Clone ID: PAT_MRT3847_102446C.1.pep
MWKRRGFEEEAVQLINSDFRDLSLAGIGFGASFFGFFAAIAAIYLLILDRTNWKTNILTALLIPYIFFSLPSLIFDVFRGELGKWIAAVAVVLRLFIPRHFPDWLELPGALILLIVVAPSLIAS

SEQ ID NO: 145546 - protein, 135 aa, Glycine max
  Clone ID: PAT_MRT3847_102447C.1.pep
LPHTHKAKRMILQPIIKLLALTLIWWSSVNVEYAVAATRDTRVINSGCSPINATNTGSFFANVNETFSELRGEIRNQSRHFGTSLKSKGDVNTYTMFQCRNYLSRNDCLACINTAFTQIRDICKIANGARVIYND

SEQ ID NO: 145547 - protein, 79 aa, Glycine max
  Clone ID: PAT_MRT3847_102448C.1.pep
RMMLSCQYNSFHETSQIHSLSYLKCGTSTHLPLHTLRCGQRTGATAPAHGGDFVPARERVTNDVVRVDPRTSTQLAKPA

SEQ ID NO: 145548 - protein, 184 aa, Glycine max
  Clone ID: PAT_MRT3847_102449C.1.pep
SALVRFGEKAKGSDPVWLRRVEHQQATMEPTTSRAGGPTLLTILSERGLCGALFFIGEVLLISRPLIYVLFIRKYGIRSWTPWFLSLAIDCIGNSILSLITSSVAGGKDRMFHLSALEKDEVKRRKLLFVLYLMRDPFFSKYTRQRLESTEKVLEPIPVIGFLTAKLVELIIGAQTRYTYMSGS

SEQ ID NO: 145549 - protein, 52 aa, Glycine max
  Clone ID: PAT_MRT3847_10244C.1.pep
LRRGTRKVLPLSLDQTKMPFTLPPRVKSSALKNRPTPGERCFAFWTLFRFLA

SEQ ID NO: 145550 - protein, 48 aa, Glycine max
  Clone ID: PAT_MRT3847_102450C.1.pep
LYHFREAFWNNVWVMTRVGAGSTNIPGLLSMQTHRPHKGSRKTKRSVK

SEQ ID NO: 145551 - protein, 130 aa, Glycine max
  unsure (1)..(130): unsure at all Xaa locations
  Clone ID: PAT_MRT3847_102451C.1.pep
GGGGGGGWGRFQSRIVFPPGCRCKYAGRDDMEXGIELERRKRENPEAMEEDDTDEVPEIKPAHFEESMKFARRSVSDADIRKYQLFAQTLQQSRGFGSEFRFPDQNENTAAGASDPFSSVTAEGDDDLYS

SEQ ID NO: 145552 - protein, 57 aa, Glycine max
  unsure (1)..(57): unsure at all Xaa locations
  Clone ID: PAT_MRT3847_102452C.1.pep
PSPAPSLTFTGPKKKPDQLQNFNGWAKFPGGFFFGGISGVIWANFPLXVLDLPFYIK

SEQ ID NO: 145553 - protein, 54 aa, Glycine max
  unsure (1)..(54): unsure at all Xaa locations
  Clone ID: PAT_MRT3847_102453C.1.pep
KKKKFTNTSLNXSLHFNTSKTQHLNPPLLIHSINNYPNXLXPPSKKKNNTSTLT

SEQ ID NO: 145554 - protein, 115 aa, Glycine max
  Clone ID: PAT_MRT3847_102454C.1.pep
MDLLATLTADKPVVIFSKSTCAISHSVKALICSFGANPTVIEIDKMTNGQQIERALIQVGCRPTVPAVFIGQQLIGGADEVICLNVQNRLAQLLLRARAIFINMLQLNWFGPVLD

SEQ ID NO: 145555 - protein, 81 aa, Glycine max
  Clone ID: PAT_MRT3847_102455C.1.pep
PFDRAGRLYFSERAALCQSRSSSSTTYFEKTSFVLLHGHHTPHNIMVEIHSPCLLGPTAGHSLSACSQSGLNDYLSSFLAG

SEQ ID NO: 145556 - protein, 48 aa, Glycine max
  Clone ID: PAT_MRT3847_102456C.1.pep
YLSWRLLLLITKLGTYLFDKLNKYSSSKSKLPNDYYIWKYSKLKTIYN

SEQ ID NO: 145557 - protein, 42 aa, Glycine max
  Clone ID: PAT_MRT3847_102457C.1.pep
GTCFKAIYEIKTHYLFSHFFNIEVGVNFDTISLSLSQRRERY

SEQ ID NO: 145558 - protein, 59 aa, Glycine max
  Clone ID: PAT_MRT3847_102458C.1.pep
FVSCVQSIKILSSAEVQQMSLDGDLGGNVPIPNQACSGTDSGNAWRGQYEDNSAASFNR

SEQ ID NO: 145559 - protein, 49 aa, Glycine max
  Clone ID: PAT_MRT3847_102459C.1.pep
GDFSGCSPQYIHITLLSQRVLTLIMPNLLGFRIVLFLGVQSQTKELMMF

SEQ ID NO: 145560 - protein, 68 aa, Glycine max
  Clone ID: PAT_MRT3847_10245C.1.pep
RQSTKGGCGGCNKQLRISSYELAFTYNVTCMHGGHGSFNLLPALNNQYLMPLTSHYYYALLLKPLEAF

SEQ ID NO: 145561 - protein, 109 aa, Glycine max
  Clone ID: PAT_MRT3847_102460C.1.pep
EKKNRGGTPYPQIQILTPRLWGPWVGPPPPKTKKKRGQLQVLTPPGKNKKGINSPKAPQKKTKNPPPPPFKAPRGGFSSKKKGYLQKRKQGNKASGGPKKPGTLLGKPG

SEQ ID NO: 145562 - protein, 122 aa, Glycine max
  unsure (1)..(122): unsure at all Xaa locations
  Clone ID: PAT_MRT3847_102461C.1.pep
MLGMRIEITDRFPIHFLRNTLITLGSGARHDILRLPXEDYMLCTAPGNAYYNDEGXTMWSDVGAGYYGYWKYKHQTEVGHAYELQKKGGAKEENVEVYMCGDIAVDEEDPRSGFVVNSSHCK

SEQ ID NO: 145563 - protein, 90 aa, Glycine max
  Clone ID: PAT_MRT3847_102462C.1.pep
ARVRVQHVGPIRVRQKTVGRKLRGRRRRRRILVLVLEVWPLMLVVGKEKGKMVVNRFHVLEHRNASQTGLAPNGCLPPSVVICQRKGRPG

SEQ ID NO: 145564 - protein, 53 aa, Glycine max
  Clone ID: PAT_MRT3847_102463C.1.pep
ELRPKSVSEGENMKTQNIPVRLVWYIKVILHWKKRLCCFLARLYISCTEERKM

SEQ ID NO: 145565 - protein, 52 aa, Glycine max
  Clone ID: PAT_MRT3847_102464C.1.pep
MEVISASSLNPNTPEWVPLAYPTVQDFSDQWWDLVHSFPWIRDYWLRESFQD

SEQ ID NO: 145566 - protein, 233 aa, Glycine max
  Clone ID: PAT_MRT3847_102465C.1.pep
LLDDNLSKGKRPVAAGQAYFISQTSGVNSFEFLHPLLRSLDYELPKTSLPVDRALVLSRICWAVYTILYPWLNRWWLPQPFILPSEVHKVGVTHYFSYLKAKEEIGYFPMVTSREGMALTISYWQERKRTTLDGPTIYAWLFCVIGMISLFCGAFLPDIGIMSLLRATCLFVFRSMWVTRLVFLLATAAHIAEAIYAWYLAKRMDPANARGWFWQTFALGMFSLRLLLKRARK

SEQ ID NO: 145567 - protein, 94 aa, Glycine max
  Clone ID: PAT_MRT3847_102466C.1.pep
SLCEHLSSCRHHLWSFPLEVTFWDSILWNPLGKCPHVPTIQRSSMNGPPRISKCDGNSLRYLMARKLWNDFKRTILALPSHHVSILLPSALFTQ

SEQ ID NO: 145568 - protein, 613 aa, Glycine max
  unsure (1)..(613): unsure at all Xaa locations
  Clone ID: PAT_MRT3847_102467C.1.pep
MQIFVKTLTGKTITLEVESSDTIDNVKAKIQDKEGIPPDQQRLIFAGKQLEDGRTLADYNIQKESTLHLVLRLRGGMQIFVKTLTGKTITLEVESSDTIDNVKAKIQDKEGIPPDQQRLIFAGKQLEDGRTLADYNIQKESTFHFGTXRQRGGMQIFVKTLTGKTITLEVESSDTIDNXLRAEIQDQXGIPPDQQRLIFAGNQLEDDCTLADYNIXRESILPLVLRLRGVMAIXFLVQTPTGRSITLEVENSDTTDNVKAKIQDKEGIPPVXQRLMFAGKQLEDGXTLADYNIQKESTLHLVLRLRGGMQIFVKTLTGKTITLEVESSDTIDNVKAKIQDKEGIPPDQQRLIFAGKQLEDGRTLADYNIQKESTLHLVLRLRGGMQIFVKTLTGKTITLEVESSDTIDNVKAKIQDKEGIPPDQQRLIFAGKQLEDGRTLADYNIQKESTLHLVLRLRGGMQIFVKTLTGKTITLEVESSDTIDNVKAKIQDKEGIPPDQQRLIFAGKQLEDGRTLADYNIQKESTLHLVLRLRGGMQIFVKTLTGKTITLEVESSDTIDNVKAKIQDKEGIPPDQQRLIFAGKQLEDGRTLADYNIQKESTLHLVLRLRGGF

SEQ ID NO: 145569 - protein, 147 aa, Glycine max
  Clone ID: PAT_MRT3847_102468C.1.pep
MSLREDNEEGRDLKKPFLHTGSWYRMSGRQSSVFGSTQAIRDSSISVFACVLIVALGPIQFGFTAGYTSPTQSAIINDLGLSVSEFSLFGSLSNVGAMVGAIASGQIAEYLGRQGSLMIASIPNIIGWLAISFAKDASFLYMGRLSE

SEQ ID NO: 145570 - protein, 92 aa, Glycine max
  unsure (1)..(92): unsure at all Xaa locations
  Clone ID: PAT_MRT3847_102469C.1.pep
LRSTRPYSAHHNDELLRGILTMICGILGHSHXNGILPQTSMHTMRLADPKMLMTLKKEAKSAMECTKQRRTNSEXYGKTQEVIVEMVTDPTV

SEQ ID NO: 145571 - protein, 59 aa, Glycine max
  Clone ID: PAT_MRT3847_10246C.1.pep
CRSSSSSLSPSSLSSSFYLLFLLSLFSLYLSIFSFSCFFLILNHIHFKKVFDQQDEGKT

SEQ ID NO: 145572 - protein, 79 aa, Glycine max
  Clone ID: PAT_MRT3847_102470C.1.pep
FSLVLFLISVCGSEPTNKNSYAENNVYRYKPKGIMLPTILLKKKKKRSAPTEDVSQTKPIVESGPPMPEPRIGYLAFNP

SEQ ID NO: 145573 - protein, 70 aa, Glycine max
  Clone ID: PAT_MRT3847_102471C.1.pep
KFSNPVLSYLLKNVTVIVSLTTFGTISSKKTKKKSFENGSRITLRNLRYIAHFVYCTIATRSISFNERFF

SEQ ID NO: 145574 - protein, 52 aa, Glycine max
  unsure (1)..(52): unsure at all Xaa locations
  Clone ID: PAT_MRT3847_102472C.1.pep
SPIRISWGITTSPRTVVPGDDLPQVKRAVCMSXNSLSVGKVFTRMLHRLSLM

SEQ ID NO: 145575 - protein, 155 aa, Glycine max
  unsure (1)..(155): unsure at all Xaa locations
  Clone ID: PAT_MRT3847_102473C.1.pep
VHQAQEKDWSEGNFCFDIKSRSRLENVPSTKAQFASGKTCKYDIIGAGSHSPEDFPEKEDQDKPKXIDARLRQRIDPQYNEVQAQMETNSXKLTLDDAETPKGAMWDLKMPQSKIALPKNTDGGTILRSDLLANSLTEGNYRASVDLQRTHTFKG

SEQ ID NO: 145576 - protein, 250 aa, Glycine max
  unsure (1)..(250): unsure at all Xaa locations
  Clone ID: PAT_MRT3847_102474C.1.pep
KSEKQIASTRPRTRGRTRGFVFPRTLEDLEHEGREDDDRLYVQNPVNIASLVSSQLEEFVKGVSFDLSDKEILCVEEQDVFDRVYSLVRGFALLSPSSKLNLLETLRSNLAVLLPNFDSLSRASHDHHVPLASHRNAFKIYTFFLLNIFLLSNNNNASKGXXAPSARKKPAVNSWNWEAQRXRILNLIANSLEINLELLFGSPDLDENYXSFITKNAFFLCLRNATLLKDXDLEDALXRIIGACSTKYHY

SEQ ID NO: 145577 - protein, 104 aa, Glycine max
  unsure (1)..(104): unsure at all Xaa locations
  Clone ID: PAT_MRT3847_102475C.1.pep
NGNHMIQPWEASVSLIFCFEYMILVSTMVSIFVXKYRYYVSSTLTAGHCKXMSVFTFYLQXIRNLHHLSMSMCVHLVASVKNRIPLHHTQKHYENFMNVMVRAA

SEQ ID NO: 145578 - protein, 89 aa, Glycine max
  Clone ID: PAT_MRT3847_102476C.1.pep
HLPFVPYISKFGSVEDAEAFLKALSVKSYPSHIVYVQVFESLFREGRLSEAKDLLYKTPHHIRTHSKICKLFGSSETKSDTQAQLLPDP

SEQ ID NO: 145579 - protein, 123 aa, Glycine max
  unsure (1)..(123): unsure at all Xaa locations
  Clone ID: PAT_MRT3847_102477C.1.pep
DGTNRYHMEGPGWTNRVLSKGNDILRCEYASYEGLITKQVMSMMAXMTNSLXGGDEKLPRERTHLLLACSSRMAILQKDAWRGECGIPSGFPLTGICNSIANEMLIRYSYEKLLRQAKAPRCV

SEQ ID NO: 145580 - protein, 82 aa, Glycine max
  unsure (1)..(82): unsure at all Xaa locations
  Clone ID: PAT_MRT3847_102478C.1.pep
VFLFFSFFFFFFFFFFFFFFFWGKPRKIALNRGGGHHFKKTGPWPWPPKPKYSPSXKIPTAQRKFKPPKHFPKARWKPPPPL

SEQ ID NO: 145581 - protein, 321 aa, Glycine max
  Clone ID: PAT_MRT3847_102479C.1.pep
GSRSNVIIGKLVLFSKSLPSKYEDWEAGTKALLNKESLIGGGSIGTVYRTDFAGGISIAVKKLETLGRTRNQEEFEHEIGRLANLQHPHLVAFQGYYWSSSMQLILSEFVPNGHLDRNLVGFGFPGTSTSRGNRELYWSRRFQIAVGTARALAYLHHDCRPPILHLNIKSSNILLDDNYEAKLSDYGLGKLLPILDNYGLTKFHNAVGYVAPELAQGLRQSEKCDVYSFGVILLELVTGRRPVESPTTNEVVVLCEYVTGLLETGSASDCFDRNLLGFAENELIQVMRLGLICTSEDPLRRPSMAEVVQVLESIRNGLESH

SEQ ID NO: 145582 - protein, 177 aa, Glycine max
  unsure (1)..(177): unsure at all Xaa locations
  Clone ID: PAT_MRT3847_10247C.1.pep
GSAAHCDVDTNCSSLQYNGTSVIYAGNKKSVSRVILIVVPVVVSVFLLCGVCYFILKRSRKRYKTLLRENFGEESATLEALQFGLATIEAATNKFSYERRIGEGGFGVVYKLIMLXGIFPDGREIAVKKLSRSSGQGAIEFKNRILLIAKLQHRNLVTLLGFCLEEEEKKIIYEFVS

SEQ ID NO: 145583 - protein, 55 aa, Glycine max
  Clone ID: PAT_MRT3847_102480C.1.pep
YIQNWNLNKIQWAGRFKGTSFNYPALANHYSSIGTPNSNQLAHVLKSPDWKTLGF

SEQ ID NO: 145584 - protein, 95 aa, Glycine max
  Clone ID: PAT_MRT3847_102481C.1.pep
LLGPYGMKLPQLIPSRIRLISCSRTFDCSKAKDRLGYAPIVTLQEGLRRTIESYTHLRADNEPKTKREGPSKASKYLGSGRGVNNQLYLSNFFAW

SEQ ID NO: 145585 - protein, 60 aa, Glycine max
  Clone ID: PAT_MRT3847_102482C.1.pep
PMVSESLCSCPIPPTLWRTTSTHVVADRQVFQCAMKSSQEIVIMQDTIGTWQHMKSRPKF

SEQ ID NO: 145586 - protein, 80 aa, Glycine max
  Clone ID: PAT_MRT3847_102483C.1.pep
IGSIFMVIPSYGSHKSLKYALVTFLPNSDTFRYSISVTHILIHEQVSLSHVSIPDCSIIIELSTLTYLTKLFPLECVILY

SEQ ID NO: 145587 - protein, 69 aa, Glycine max
  unsure (1)..(69): unsure at all Xaa locations
  Clone ID: PAT_MRT3847_102484C.1.pep
XXRXWXXAXVXCPXXXXXXXXXVPXXXXCCXXXXXXXLXXXXXLXXXXXXXXIQLXAXXXCGRXPXXXV

SEQ ID NO: 145588 - protein, 63 aa, Glycine max
  Clone ID: PAT_MRT3847_102485C.1.pep
LSSALWFFLKFPARALRSQSYLLHEQLELHQWRAIRFLGLVVPRQHIHQHAVPLSSVELPVMV

SEQ ID NO: 145589 - protein, 45 aa, Glycine max
  Clone ID: PAT_MRT3847_102486C.1.pep
GSRESVRVCFGVLRSGAENIVCQLDDFFDEIVEGRKKLLDFCSHR

SEQ ID NO: 145590 - protein, 57 aa, Glycine max
  Clone ID: PAT_MRT3847_102487C.1.pep
NCSSLKNHTDPNQHLLQNKIIFLQRKSNNCMPLGTGDRLMLRMVISQVDGHQIFFFF

SEQ ID NO: 145591 - protein, 157 aa, Glycine max
  unsure (1)..(157): unsure at all Xaa locations
  Clone ID: PAT_MRT3847_102488C.1.pep
AMLGPKMLSTLAVIEMYGIELEALRKESRWKSLNSLFSXLKLIHYMQMVDRLHDQTIPLDLALDYQGLYKADRKDIFWTHVKGRLNIDIISTPYLYSGTXDPELPLALLDHNEDVENLLLLTNXQYLYTDKMMQYSFNICLTNDMGWRDLCDIDIVS

SEQ ID NO: 145592 - protein, 71 aa, Glycine max
  Clone ID: PAT_MRT3847_102489C.1.pep
LEGLKCGSRASPLCSPAWCWPFCSSAVVCPLALWVVPRLCVWWSPVSCPGGFRLFLPEQPPRPPVPPGGRR

SEQ ID NO: 145593 - protein, 115 aa, Glycine max
  unsure (1)..(115): unsure at all Xaa locations
  Clone ID: PAT_MRT3847_10248C.1.pep
MGISRDSMHKMHAIGQMMKACVKKRKYELGRKVXNTNLLGYITIRSDSVRGGNDKWRAXWMDTGIYXWGSXSVTLKTRILEVVDNAXTIEFVGTHNLVKNANVQVDAGXFKQWDP

SEQ ID NO: 145594 - protein, 49 aa, Glycine max
  Clone ID: PAT_MRT3847_102490C.1.pep
NSARASTSHPSFWSLLNLFASIPICVVHIHSSHLSKKPSKATTTASCLG

SEQ ID NO: 145595 - protein, 210 aa, Glycine max
  Clone ID: PAT_MRT3847_102491C.1.pep
MSSHLESLSSHPKLSEEEEAPVVVNIPCVRELHSVGVYFQPVEGGNMAIDFDEKKGIFYLPVLKLDVNSEVIMRNLVAHEALTKPDFLIFTRYTELMRGIIDTVEDVKLLKNAGIIDSSSSLSVEETEELFNGMSKSIGPTKTEKLDETIKKVNKYYHDKRKANLYRTLTEYVYNSWKLFTLLATFVLLAMTALQTFCSAYDCPSYFRPK

SEQ ID NO: 145596 - protein, 71 aa, Glycine max
  Clone ID: PAT_MRT3847_102492C.1.pep
LDLTSSPSNLTNLVAKKSETQLYHCMHLSDSQIDFESPIIYSRRNRIVVTALMLLLSLYALRASYRWTNLL

SEQ ID NO: 145597 - protein, 64 aa, Glycine max
  Clone ID: PAT_MRT3847_102493C.1.pep
RNFIGRKITLCARHRLRESFSLALLGYLLHTLLSEVGLRVRLKLFLSLSQTSAEKQVQAGGTLD

SEQ ID NO: 145598 - protein, 59 aa, Glycine max
  unsure (1)..(59): unsure at all Xaa locations
  Clone ID: PAT_MRT3847_102494C.1.pep
PVWASFFLYMQILNYIVANYYNNFXKKAYVVKIKKLLSLPTAYSFSLLGPHKFAKMISK

SEQ ID NO: 145599 - protein, 49 aa, Glycine max
  unsure (1)..(49): unsure at all Xaa locations
  Clone ID: PAT_MRT3847_102495C.1.pep
SSTSXIPXKVKSXITSPLPXYFQATVINSTTTNPPLCCSSTTCFYRCFA

SEQ ID NO: 145600 - protein, 153 aa, Glycine max
  Clone ID: PAT_MRT3847_102496C.1.pep
MVLAGKLSTELGVKASATKWFNLLTTQLHHVQNLCERVHETKLHDGDDWHGVGNSVKHWTYVIDGKVHTCQESIEAIDEENKTIKFMLFGGDISQHYKSFKLIFEVTDKNDGGAAVKWTLEYEKIKENIDPPHGYMDYFDKSTKEMDAYLVKA

SEQ ID NO: 145601 - protein, 54 aa, Glycine max
  Clone ID: PAT_MRT3847_102497C.1.pep
MASLATLAAVQPAALNGLAGSSLSGTKLSFKPSRHTVQTKKLQSGGVGNKYGDK

SEQ ID NO: 145602 - protein, 56 aa, Glycine max
  Clone ID: PAT_MRT3847_102498C.1.pep
MQPVFAEPRFFLGIPIGYQGGISIANASFIGPGIFMSLFVRSTPRVTRLDLFERMI

SEQ ID NO: 145603 - protein, 266 aa, Glycine max
  unsure (1)..(266): unsure at all Xaa locations
  Clone ID: PAT_MRT3847_102499C.1.pep
MRSAPTISSQNPLETLRAFFSCAKILSSAQQLHAQVIINGLHKKVFYGSNITNVYIQSGSLPLAKKAFDQISVKNLHSWNTIISGYSKRSLYGDVLQLFRRLRSEGNAVDGFNLVFSVKASQRLLLLHNGRLLHCLAIKSGLEGDLFFAPAILDMYAELGSLDDARKLFERYSYRSSVMWGFMIKGYLNFSLESKVFELFSCMTNYFGFKWDAFTMDGLVRACANLLAGREGKASHGGVYKEQIXVNVXLLTSVIDMYMKCGVTHY

SEQ ID NO: 145604 - protein, 76 aa, Glycine max
  Clone ID: PAT_MRT3847_10249C.1.pep
FSQFQSLLASLGTLLESARACNPNTNISTDEDQVFDGKLTARACADAACIKYIRTVFHEITNFDLALALLLIPTTE

SEQ ID NO: 145605 - protein, 143 aa, Glycine max
  Clone ID: PAT_MRT3847_1024C.1.pep
METMMMMSCVSISSSVTRGAISVGSSSSLCFGTPKLFNSARVAVNGRRRNKGLSCNAMFGLGVPELVVIAGVAALVFGPKKLPEVGRSIGKTVKSFQQAAKEFESELKKEPDSTQGDSSEKPIVTVTEQQQEDNEVSTSKETV

SEQ ID NO: 145606 - protein, 79 aa, Glycine max
  Clone ID: PAT_MRT3847_102500C.1.pep
FLSEVVLLEKPLGRPWVIVTSILFSYVKGSLFSCSLHREYVQSSFGPLSLVSWHCCVVSIKLSQVILCFEPHQGLIYRK

SEQ ID NO: 145607 - protein, 42 aa, Glycine max
  Clone ID: PAT_MRT3847_102501C.1.pep
SEMASAVVAHFPELVSADVLLWGICTVLICPCMACSSVFTAS

SEQ ID NO: 145608 - protein, 126 aa, Glycine max
  Clone ID: PAT_MRT3847_102502C.1.pep
PPFLGAPAQEILVFPLCKAPFLFNAKLDPGKFSPWNFSFGASVFSPGGPKIGVLKIFFAQFCPFVSPPPPMFFPFPGWGFFSPPVLGGPPPGLFFFFSKVGPVPPLKGFKKPWGKGACFPPPPLFF

SEQ ID NO: 145609 - protein, 46 aa, Glycine max
  Clone ID: PAT_MRT3847_102503C.1.pep
IRLKSNPSSSSSICAEHHGLTSSIILGYVCDSDDDFRHSHSKEPSL

SEQ ID NO: 145610 - protein, 95 aa, Glycine max
  Clone ID: PAT_MRT3847_102504C.1.pep
MHLMMIRSMSMKIRKNIRKMRFKPIVVICRVYVFVVRCKVMCNVVLFSSRHVKIWLWNLICIMGSVCLSMRLDLVVMREFIFLFDFIMVKIATYD

SEQ ID NO: 145611 - protein, 105 aa, Glycine max
  Clone ID: PAT_MRT3847_102505C.1.pep
RNPTGTRADELTTSSAALFLFFLIKLLVFTRDVIITWVRRDKQPYVLWREYKQFLLLKPSLLFDLCSDSTFESDFSGATDPHSLLNWCPSIIQLPHTAFVSGKRS

SEQ ID NO: 145612 - protein, 52 aa, Glycine max
  Clone ID: PAT_MRT3847_102506C.1.pep
VANEGHIFTDPSQTISLWSELGCFHVQSAEPMGPEHFFYFEQPSPLTNMVFP

SEQ ID NO: 145613 - protein, 64 aa, Glycine max
  Clone ID: PAT_MRT3847_102507C.1.pep
SLSHPAHGGFLKMRLCLLDGEARQHPNAERVWSDDYRFHRHVQVHSPIRSKNSFDGEVMSRFCV

SEQ ID NO: 145614 - protein, 70 aa, Glycine max
  Clone ID: PAT_MRT3847_102508C.1.pep
KFRDRTTKVLHKRVHVELDQEITRHVPEEVQIVSKKPTIIDKEPRTEQETGTGTGSYERNGNNTLGINSI

SEQ ID NO: 145615 - protein, 42 aa, Glycine max
  Clone ID: PAT_MRT3847_102509C.1.pep
LTANIHPSPIYHVPSHVNNVTGLKWFITFIDDHRVAWVCLMM

SEQ ID NO: 145616 - protein, 34 aa, Glycine max
  Clone ID: PAT_MRT3847_10250C.1.pep
LLLWLEDQNGKKDYSDKILLDLTHFADQGQPLFI

SEQ ID NO: 145617 - protein, 78 aa, Glycine max
  Clone ID: PAT_MRT3847_102510C.1.pep
AGRKRPKGGNICCWLIHPQMAVENIKVDEYSNVAPPSLSSQSLCLPYTLCYTWFHTFSYSDGIVFHSLKAQQVQSSCI

SEQ ID NO: 145618 - protein, 64 aa, Glycine max
  Clone ID: PAT_MRT3847_102511C.1.pep
YEEDIGMNIDNLVLSDCMLSKFRPYRLTTSDGYDYNQTVVWESHQSSASGNAVVGTHKNHPIVK

SEQ ID NO: 145619 - protein, 41 aa, Glycine max
  Clone ID: PAT_MRT3847_102512C.1.pep
QLILLIFCPLKKLLIEIFKSDYFKLFFILFKQFFLKFHYFP

SEQ ID NO: 145620 - protein, 32 aa, Glycine max
  Clone ID: PAT_MRT3847_102513C.1.pep
LVELGSFEMVPEEHRVVAMARTGFDRFSPGQA

SEQ ID NO: 145621 - protein, 40 aa, Glycine max
  Clone ID: PAT_MRT3847_102514C.1.pep
ELVALWNKFDAEFKSALRISNFKDEMSLDMINFHQVVMLS

SEQ ID NO: 145622 - protein, 87 aa, Glycine max
  Clone ID: PAT_MRT3847_102515C.1.pep
MSSQTRNLNFVLFPLMSQGHMIPMMDIAKILAQNGVTVTVVTTHQNASRFTSTFSNSQIRLLEVQFPYQEAGLPEGCENLDMLPSLG

SEQ ID NO: 145623 - protein, 45 aa, Glycine max
  Clone ID: PAT_MRT3847_102516C.1.pep
QLAARLRDIVVLRRQIDDLPCQSKVIQYERRLSELYAQIQVHELF

SEQ ID NO: 145624 - protein, 64 aa, Glycine max
  Clone ID: PAT_MRT3847_102517C.1.pep
PKYIEDGLIVRVSRGIGSFGSIIPRPKVLMIIIPPRRSVLGTKENPMDFVLENTWDAKTGMGHS

SEQ ID NO: 145625 - protein, 473 aa, Glycine max
  unsure (1)..(473): unsure at all Xaa locations
  Clone ID: PAT_MRT3847_102518C.1.pep
MRIQVRDVGNRSRQTNMDASSLHIAMFPWFAMGHLTPYLHLSNKLAKRGHRISFFIPKRTQHKLEQFNLFPHLITFYPINVPHVEGLPHGAETTSDVSFSLGPLIMTAMDRTEKDIELLLIELKPQIVFFDFTYWLPNLTRRLGIKSFQYMIISPATVAYNASPPRMQNSVNLTEVDLMQPPLGYPVSSIKLHAHEAKFLASKRNWEFGSGVLFYDRLYGGLSLSDAIGFKGCREIEGPYVDYLEEQFGKSVLLSGPIIPEPPNTVLEGKWGSWLERFKPDSVIFCAXGSEWKLPHDQFQEFLLGLELTGLPFLAVLKVPIGFETIEAALPEGFKERVEGRGIVHSGWIQQXLILEHPSVGCFITHCGAGSLTEALVNKCQIVLLPQVDADHILNARTMATNKVGVEVEKGEEDGLFTKESVCKAVKIVMDDENEVGREVRTNHAKLRNFLVSHNLESACVDGFCQKLRDLLK

SEQ ID NO: 145626 - protein, 167 aa, Glycine max
  unsure (1)..(167): unsure at all Xaa locations
  Clone ID: PAT_MRT3847_102519C.1.pep
DFCRLXYAADQFRAKXTIDDIRQSFTNLCSEYEQSGNSFKNPSALFYCATSNSCMSSVYSNGDDFKTFSRITLSDARRGLDQYIQETSSGQSFKSDLDMYLEEPVYRQKEGHLDNSDILXWWKSFAAKYPVLSQMARDIVAVPVSIIPLDSDARTLNEYLSTMDPST

SEQ ID NO: 145627 - protein, 97 aa, Glycine max
  unsure (1)..(97): unsure at all Xaa locations
  Clone ID: PAT_MRT3847_10251C.1.pep
LVNSKDGPPSFEQPPMTMEKLLTYGNILVHQLENVHRVQWAGENLNLSALENANEDAIGRGTFXNLDLEPKQTWQVNISVPQGCADPRDRRCDRTRV

SEQ ID NO: 145628 - protein, 78 aa, Glycine max
  unsure (1)..(78): unsure at all Xaa locations
  Clone ID: PAT_MRT3847_102520C.1.pep
CGRSIGYKLTYARMRHHISFIXDXKIKSLGAVLQNIDCEKTVVTQINIVSEHTPFSRCRNIEKTRTNIPFQKMCRLNV

SEQ ID NO: 145629 - protein, 182 aa, Glycine max
  Clone ID: PAT_MRT3847_102521C.1.pep
VAWGDFVQGKDRAMVKGNGGCAAVGLTSSYTPTPLVESGQQKDRGLIVEYFGRMSYVAHNVNQTQEKDTLEGNFYFDINSRSRMEKVSSTKAQIRLWKTFKYDTIGAGSHSSEDFLWKEDQEIPKKIDAILRHRIDPQYNEVQAQMETNLFKLSLDDVETPKGYMLDLKISHLKLHSPKHSW

SEQ ID NO: 145630 - protein, 132 aa, Glycine max
  Clone ID: PAT_MRT3847_102522C.1.pep
VAVRHLHVFGCKFFVLNNGKDNLGKFDAKSDEGIFLGYSLQSKAYRIYNKRTMSIEESIHVSFDESNAILSRKNILDDIAESLEQIHIHGQDSKGKGKGSNEDPQEEAKSNDEVPKEWKASKDHPLDSINGD

SEQ ID NO: 145631 - protein, 41 aa, Glycine max
  Clone ID: PAT_MRT3847_102523C.1.pep
KIPKRKRPIDFCFILLKDIFFIIILLFYLFFDFPFCRLLAA

SEQ ID NO: 145632 - protein, 68 aa, Glycine max
  Clone ID: PAT_MRT3847_102524C.1.pep
VITRRFSTVFQDSSFVLRFLQSSMSKYLKPSFSIHFMYPWWSTFCFMYFYSPFYLLFIPPFDVLKPFI

SEQ ID NO: 145633 - protein, 72 aa, Glycine max
  Clone ID: PAT_MRT3847_102525C.1.pep
LREDSRPFFKIHRAFFVFFSLQRVSTSNRAFQFILCTRGGPHFVSCIFIFVFIYFLYPLLAYFSHLFKSFLA

SEQ ID NO: 145634 - protein, 72 aa, Glycine max
  Clone ID: PAT_MRT3847_102526C.1.pep
LREDSRPFFKIHRSFFVFFSLQRVSTSNQAFQFIICTRGGPHCVSCIFILVFIYFPYPLLTCLSHLFKSFLA

SEQ ID NO: 145635 - protein, 36 aa, Glycine max
  unsure (1)..(36): unsure at all Xaa locations
  Clone ID: PAT_MRT3847_102527C.1.pep
WTWRSTVSPVLEMKRCRYRSYAASKDQSEELFIYSX

SEQ ID NO: 145636 - protein, 99 aa, Glycine max
  Clone ID: PAT_MRT3847_102528C.1.pep
KTPKITFFQLKNKGGKKILHIYYKKNYFKKNGHNLRNPKNILQSSIYIPLPHFHWKIHALTTNKIFIPKGSYGGPPKLKHIKLVLWFPPLVKKKLENNF

SEQ ID NO: 145637 - protein, 107 aa, Glycine max
  Clone ID: PAT_MRT3847_102529C.1.pep
NSPHPSPIYREKGRFLPPRGFLRKISKRTPITKFTSLFVLYGKVTEALRKCFGFEFHLFFSSLSPILSEICLPKVFGNFTEALRKPQKPRKPFFKNMEELAAQLLPP

SEQ ID NO: 145638 - protein, 152 aa, Glycine max
  Clone ID: PAT_MRT3847_10252C.1.pep
FPILVSLSALTENQLIQVLTEPKNALGKQYKKMFQMNGVKLHFTENALRSIARKAISKNTGARGLRSILENVLVDAMYEIPDIRTGDDVIDAVVVDEEAVGGEGRGRGAKILYGKDALDRYLSEQKNDSETMEASAADNEADTELPSIVASM

SEQ ID NO: 145639 - protein, 71 aa, Glycine max
  Clone ID: PAT_MRT3847_102530C.1.pep
QGFIHNTRRGKLSSTRAGMKKCTNQKQEELGGAERIKNTTSIRRKTTNTTILPGQSREQQQHLRLGNTLNM

SEQ ID NO: 145640 - protein, 142 aa, Glycine max
  Clone ID: PAT_MRT3847_102531C.1.pep
GIFSRRDALPEVIVTDRDQTLMNAVKTVFPKCTNLLCSFHIKRNVKAKCKSLIGQRNAWEYVMDAWGTLVDCPSEQQFDEWLKKFEMVWSPWSMFVDYVKDTWIIPHKEKFVTVLTNKVMHLGNTTTNRYEIVQLFLLTLMN

SEQ ID NO: 145641 - protein, 154 aa, Glycine max
  Clone ID: PAT_MRT3847_102532C.1.pep
ASSRLIFSLKWRLLSLSLSPFRYHSSSKKQRNPLMKKILGVAMCPFAGERGEAHGCAFQRRKGARSRHQRLFVENVGKTEGNRSKMKILSSGVVFTFEEGISTSHVCLKGQQPIFLELWKLYYLNFYFFLFFEVDKSGALAPTYPPSKEEIRPT

SEQ ID NO: 145642 - protein, 90 aa, Glycine max
  Clone ID: PAT_MRT3847_102533C.1.pep
TQNDIIINETSRVSLMQENLYEDVKTNATGCACLYIKKLNFTNNLYYRKLIIFTGGPRTESHTYLSSGGRLGNGLSKLPWGRKNNRRSFT

SEQ ID NO: 145643 - protein, 56 aa, Glycine max
  Clone ID: PAT_MRT3847_102534C.1.pep
SEIKAKINPQSQARPQKIIKKKDLKSSISQFFLPSKWIIFKVQRLKMITFQVKRIA

SEQ ID NO: 145644 - protein, 461 aa, Glycine max
  Clone ID: PAT_MRT3847_102535C.1.pep
CILGVTFNLCRGHLKFLASFLISIKGFSLCFDFVLAFFHIILHGFTQDVPITAETGHDAEEHESTSSEELDELPISSDMPHLYPRDLITCSDAVSKWQLKGKRNNRNLVKRSVGASEGKCILDGAGADVEGRNGHLRHNRKGPSLHRYKFDFGDTFDDDGQIFGLEDEYSLTSRSISKSGSKIHRGVAWNDLAWGDHLASKGYWDVKAYSPMHGDRYDFGGRVRSMLVDVDLKVQASYRKEHVPFISLMSKLDGRAIVGHPIQVEALKDGSSDILFPATDDFGNDGIAIEGTSVLPPAWRTARRTANFRVPRPHVPSSNGAEVAAELPSSDQEQNFEYRSLNAGSSSHQVSLQKKSGLKSHRSSADKESSKKVPKKSGLSSSQKTRTLSSLSTEHNPARRPAHVRGRRPPVPSSNPVVAAPAPPASIPVQLVFSRLLEKINRRHQKSAQNAALLKSHRSFS

SEQ ID NO: 145645 - protein, 61 aa, Glycine max
  Clone ID: PAT_MRT3847_102536C.1.pep
TPSTSVFVGIEGLVWYVTHLGMGRIVDLPDQSLDEVSSKKPAGVAVVLHYTQAWFKLKHGA

SEQ ID NO: 145646 - protein, 135 aa, Glycine max
  unsure (1)..(135): unsure at all Xaa locations
  Clone ID: PAT_MRT3847_102537C.1.pep
PYEPXFTCVQIGPHQFKVSNRDSIFTERLKFCEVNDKLILNKVLLLGSASQTIIGXPIVPDAAVHAVVEEHALDAKVIIFKKKRRXNXRRTKGHRQELTKLRITDIQGIEKPQNVLPEKPPKPAKKEKEKVAVTA

SEQ ID NO: 145647 - protein, 266 aa, Glycine max
  unsure (1)..(266): unsure at all Xaa locations
  Clone ID: PAT_MRT3847_102538C.1.pep
MASRRCLRALTQTRPFLFRKASSLRSLAVPPFPNSNASSPVFTVRASVFAQWPHLRYFSSDKKDDHSDEDDDGDEDYDDXEEDYVDDDDDDDVPVSRGKKVYTAEEKEAEAAAIGYRVVGPLQKDEDSVFKPYEPVFAVVQIGSHQFKVSNRDSIFTERLKFCEVNDKLILNKVLLLGSASQTIIGRPIVPDAAVHAVVEEHALDAKVIIFKKKRRKNYRRTKGHRQELTKLRITDIQGIEKPQNVLPEKPPKPAKKEKEKVAVTA

SEQ ID NO: 145648 - protein, 305 aa, Glycine max
  Clone ID: PAT_MRT3847_102539C.1.pep
MKNLKVFGEVPLGLSLDSNEETIGFCSFDIERNRIFFLSSHNLIYTSHLSSFHENAVWSPNASLSSSDAVTVDLEPGDAVTSFDYLMEKEALLLGTSNGLLLLHNVDDASDATQVVGKLDGGVNAVSLSPDGELVAVTTGFGQLLVMTHDWDVLYETSLHDDDVPVSEGEFLPVSWRGDGKYFATMSDACGSGSLLKKIKVWDRDSGDLLASSELRSFAGAVLEWMPSGAKIAAVCDGKDGNESPSVVFFERNGLERSRFSVDSKVKLLKWNCSSDLLAGVGECENYDAVRIWGFSDNHWCLKHE

SEQ ID NO: 145649 - protein, 524 aa, Glycine max
  Clone ID: PAT_MRT3847_10253C.1.pep
MLAFRSKPCCSYKETASLALAHFRHLVFNYARAGSSRCPPRAGFGVRRGYIVVASLGDPPEVWSGGGIVVRPGNSNFEVAGGGGAPNSGDSKEGCWGGSNLGNSFPTPKEICKGLDKFVIGQERAKKVLSVAVYNHYKRIFNETSLPKWPAGDSDNSVKVDAADDDRVELEKSNILLMGPTGSGKTLLAKTLARFVNVPFVIADATSLTQAGYVGEDVESILYKLLMVADYNVAAAQQGIVYIDEVDKITKKAESLNISRDVSGEGVQQALLKMLEGTVVNVPEKGARKHPRGDNIQIDTKNILFICGGAFVDLEKTISERRHDSSIGFGAPIRANMRTGKVTEAAVASSLLETVESSDLIAYGLIPEFVGRFPILVSLSALTENQLIQVLSEPKNALGKQYKKMFQMNGVKLHFTENALRSIARKAISKNTGARGLRSILENVLVDAMYEIPDIRTDDDVIDAVVVDEEAVGGEGRGRGAKILYGKGALDQYLSEQKNDSETMEASAADNEADTELPSIVASM

SEQ ID NO: 145650 - protein, 44 aa, Glycine max
  Clone ID: PAT_MRT3847_102540C.1.pep
NNRRTLYIQCPLLFSIIQVRLPILICTFITWISNIICLIEKNKV

SEQ ID NO: 145651 - protein, 79 aa, Glycine max
  Clone ID: PAT_MRT3847_102541C.1.pep
QLQSPSSTTYTNEHTLQDLCLAPHSIPTNYLDSTSECSSTVITQYVTSAMSGSGHQHFRSSVRASSSYHRSHHSRLKKD

SEQ ID NO: 145652 - protein, 65 aa, Glycine max
  Clone ID: PAT_MRT3847_102542C.1.pep
VDESMNITERASPIHSTPTNITLNQYKSSQGVLSSSTHSKETAICITTNNLLWMRCTQKQFPRIN

SEQ ID NO: 145653 - protein, 36 aa, Glycine max
  unsure (1)..(36): unsure at all Xaa locations
  Clone ID: PAT_MRT3847_102543C.1.pep
SLPXYQNIINNPXEFLFKIISSFSLNHLSYNTSIFL

SEQ ID NO: 145654 - protein, 56 aa, Glycine max
  Clone ID: PAT_MRT3847_102544C.1.pep
TEVSWYCIQWACCNVLCWESTPDMAIAPSSLGKGSVDTPAFTKKSSRVISPSVGCL

SEQ ID NO: 145655 - protein, 146 aa, Glycine max
  unsure (1)..(146): unsure at all Xaa locations
  Clone ID: PAT_MRT3847_102545C.1.pep
LFKEGWGPRWPQQETRLFEKALVGLARATPARGLRGAALIPGRTVGDVINQFRELEKDVGVIEXGLIQFPGTTVVDSLTWEGVTNKGLDGLRQFNGVTGKGGASTKPFDQERKKGVPWPKGEPRQFLMGLKKFGKGDWRTIFGNFG

SEQ ID NO: 145656 - protein, 45 aa, Glycine max
  Clone ID: PAT_MRT3847_102546C.1.pep
LVGGTCTIDANSEKVLGRPWVCLWIMSGMSSSPIPFRHLESIQPS

SEQ ID NO: 145657 - protein, 49 aa, Glycine max
  Clone ID: PAT_MRT3847_102547C.1.pep
IHVTHNTMSRYLNHHLQRIHLQNSPTSFLLKVLFLRRIKDLFKCLFFPS

SEQ ID NO: 145658 - protein, 64 aa, Glycine max
  Clone ID: PAT_MRT3847_102548C.1.pep
KKKLGGQSQHCRFQRGPPPTIKTSFKPACFISPFPNQFKTVFGAGHKKTLAVNQASAWRHFNTK

SEQ ID NO: 145659 - protein, 55 aa, Glycine max
  Clone ID: PAT_MRT3847_102549C.1.pep
YLFEHVRGDRCRGHMCALCSSLQRRTSHRARLNELSSLKTHGHAMVQATKGSFYQ

SEQ ID NO: 145660 - protein, 178 aa, Glycine max
  unsure (1)..(178): unsure at all Xaa locations
  Clone ID: PAT_MRT3847_10254C.1.pep
MNPLPFQSPPPWFPILPSEPPNSTSFWDNRNVCDRLRELQHTLNLAKAMQKELEMLMMIKDGKGSSEDLKHASNEPCLSGFVKCLEDKRVSVESQESLAVEAANSLTSKLRAQLEPFRYVADEASPWXEKSSVARLANKVNKSKQNKMWRKKRKRIAEMIAKVVLLGSGLAWFDRLFS

SEQ ID NO: 145661 - protein, 110 aa, Glycine max
  Clone ID: PAT_MRT3847_102550C.1.pep
SHSSSLTFDHSSPQAYDHACGILYAKPWMLIPILCAQFLPPHANTHLLFHNTSPILLNILHHYTFPPTLYPILFVYLLQLFCSLRQKTNSSYLTDRTPMQAIWLYIILIP

SEQ ID NO: 145662 - protein, 74 aa, Glycine max
  unsure (1)..(74): unsure at all Xaa locations
  Clone ID: PAT_MRT3847_102551C.1.pep
VRKKMEDKLERFVWPSDKGNDDPLINPLVEEAQGIXGVACDKDTVTDAEKDILKEXGELYHKMLEXSDWRGNAD

SEQ ID NO: 145663 - protein, 83 aa, Glycine max
  Clone ID: PAT_MRT3847_102552C.1.pep
LLCPSFAALMWMRTWMWTLVVHTSMGPSIRIRILSLMQLHRTDFTLSSHLHSLCFPRLAMARAIHSREWHSYRKLIVNSALVA

SEQ ID NO: 145664 - protein, 153 aa, Glycine max
  Clone ID: PAT_MRT3847_102553C.1.pep
NSNSNLFAIWNLNSFFLQRGNNPMFRPHGFIDFWTKQYWGPLIKKRHFGFCPPQKKWRNGDLPPTGIFFNQGTLNWATGEKKPPTFGFKGWAILDNPLGSYGAFGNPRGGIFCLGGRGKTGGKNKGWDSFFSPVTGGKRNPLVFLLLGGGVGG

SEQ ID NO: 145665 - protein, 60 aa, Glycine max
  Clone ID: PAT_MRT3847_102554C.1.pep
VFKPWFGKNWLGLLPLKSPYPVSKWVGPFKNGFQGPRGPGGNGNYWGPPKNFFPKGRIFR

SEQ ID NO: 145666 - protein, 88 aa, Glycine max
  Clone ID: PAT_MRT3847_102555C.1.pep
FQTKPCLFFSLHNFHFSLSSPMAVPAPFSLSSDPFASKSATSTILGPAVLKIGNFEQTHFGLFTALRRNQGFTLKASMGPAGFTEKLN

SEQ ID NO: 145667 - protein, 40 aa, Glycine max
  Clone ID: PAT_MRT3847_102556C.1.pep
SLRFSLPLLGSKILLPLPKGCAFLMILDNLPEIPPYGIFT

SEQ ID NO: 145668 - protein, 89 aa, Glycine max
  Clone ID: PAT_MRT3847_102557C.1.pep
MALRVIAISVVSTVLSFVGLQFCTDLSLDKLTSDGLVGWNLIHLDNASQDIELPLGLYTTIGLLVNCMINVFILLNLCLRLCFYGVICF

SEQ ID NO: 145669 - protein, 105 aa, Glycine max
  Clone ID: PAT_MRT3847_102558C.1.pep
GTFYAFRDNLRPLVSNALAFRHISLSALVLKVFGASRDRLIPITPEPSTEIGISLFTHSFFFPFFVTAFFSFFSFGNLSRYLMGHTPPTCWAPPPPPPPPPPQGK

SEQ ID NO: 145670 - protein, 254 aa, Glycine max
  Clone ID: PAT_MRT3847_102559C.1.pep
MDNNARSNPFSSYAHASPSTGRGKAFDMRNDRERTRGRGGGSGSGKDKIDSLGRLLTRILRHMASELNLNMRSDGYVKVNDLLKLNLKTFANIPLKLHTIDDIREAVRKDNKQRFSLLEENGELLIRANQGHTVKAVETESLLKPILSAEEFPVCVHGTYRKNLESILGSGLKRMKRLHVHFSCGLPTDGEVISGTRQDLSVLLFPALCPAAADRLERGVPDNKVILTEGFDGVVPAKYFEKIESWPSRQPIPF

SEQ ID NO: 145671 - protein, 83 aa, Glycine max
  Clone ID: PAT_MRT3847_10255C.1.pep
MARTQASSAAQRGRPSTGGKGRPSDAGKSRPSESGKEVTKAPRRSSGGKTPASPGTRKKPRYKPGTVALREIRRYQKSTDLLL

SEQ ID NO: 145672 - protein, 106 aa, Glycine max
  unsure (1)..(106): unsure at all Xaa locations
  Clone ID: PAT_MRT3847_102560C.1.pep
SGSGIATSVATNQNANDETAKRIIAQNAYRGIEPKPLLNXTCKLFRIXWYKELINKPGXSAHAITHHIYNLGPRLEHHLTEKMLDPSYLEGEANTFNNLKGILQSL

SEQ ID NO: 145673 - protein, 33 aa, Glycine max
  Clone ID: PAT_MRT3847_102561C.1.pep
YQFRIYVILIFSLNIRAIQELLMSNLDLLHLNN

SEQ ID NO: 145674 - protein, 68 aa, Glycine max
  Clone ID: PAT_MRT3847_102562C.1.pep
VGSPSPEPKGTVEKFPSFKTKWNVLRPFVPANNPLFLWFLGPEIFFMRLLEIQGGFFCPIRKVYSVFR

SEQ ID NO: 145675 - protein, 159 aa, Glycine max
  Clone ID: PAT_MRT3847_102563C.1.pep
SEFGSRLDDAWKFIQDMPVKPGITVLGAMLGACRIHKNVELGEKTADELFDLDPDDGGYHVLLANMYASASMWDKVARVRTAMEKKGIQKTPGCSLVELRNEVHTFYSGSTNHPQSKRIYAYLETLGDEMKAAGYVPDTNSIHDVEEDVKEQLLSSHSE

SEQ ID NO: 145676 - protein, 101 aa, Glycine max
  Clone ID: PAT_MRT3847_102564C.1.pep
MASFTMTASIFGCPAVTKRSAVAAQRRLLVVSAAKAEGEKVSYDNNDSNGRRNLMFAVAAAAVFSVAGMAVADEPKPGTSEAKKKYAPVCVTNPTARICRN

SEQ ID NO: 145677 - protein, 68 aa, Glycine max
  unsure (1)..(68): unsure at all Xaa locations
  Clone ID: PAT_MRT3847_102565C.1.pep
PTRTPTRPLTHXTHPLVVLRLAVSTTHSPLFELTYNSAHALSRKIYLEWQFAIKRDLEILNFDGAYSS

SEQ ID NO: 145678 - protein, 99 aa, Glycine max
  unsure (1)..(99): unsure at all Xaa locations
  Clone ID: PAT_MRT3847_102566C.1.pep
NTLLLSLTTGLLQSHRVNTLFNNHCIHKENTKKLTIVNELGGQYDDTYHDFNKHILNYFTYIAVRTVLQHLDQMNTPXYTXLYNFVLTNDPADGKHFIP

SEQ ID NO: 145679 - protein, 227 aa, Glycine max
  Clone ID: PAT_MRT3847_102567C.1.pep
PAPNSGPNAARLHNQHVSLFAILSIATILPNPAFATKECVFPAIFNFGDSNSDTGGLAASLIAPTPPYGETYFHRPAGRFSDGRLVIDFIAKSFGLPYLSAYLDSLGTNFSHGANFATSASTIRLPTSIIPQGGFSPFYLDIQYTQFRDFKSRTQFIRHQGGVFASLMPKEEYFDKALYTFDIGQNDLGAGFFGNLTVQQVNATVPDIVNAFSKNIKDIYDLGARSF

SEQ ID NO: 145680 - protein, 109 aa, Glycine max
  Clone ID: PAT_MRT3847_102568C.1.pep
AAVDSLRGVILRRGTGCWGLRDVIFNSEGWGAGWLSGRGQNGTDASRSGLNTAPIATLHIMPSNIINPRTSPMKSEPILPRLLHRLLLSSRYLIQQRFHFFFKNSATPQ

SEQ ID NO: 145681 - protein, 287 aa, Glycine max
  Clone ID: PAT_MRT3847_102569C.1.pep
MLLPPTHMALHSPRLLSLTRRAFSSSPSSFQGGVSMVQGASRGIGLEFVKQILEYDDKEHVIATCRNPSASTGLIHLKDKFADRLKILSLDLTVETSIEASALSIKETYGRLNLLINASGILSIPEVMHPETTLNKVEKSSLMLAYEVNAVGPILVIKHMWPLLKVGGGHGTGRSAAVVASLSARVASIGDNRLGGWHSYRSSKAALNQLSKTASLEFARRKDPVVCILLHPGTVDTDLSKPFQRNVPPDKLFTKEFSVQKLLSIINNVKIHDNGKFFAWDGQEIPW

SEQ ID NO: 145682 - protein, 37 aa, Glycine max
  unsure (1)..(37): unsure at all Xaa locations
  Clone ID: PAT_MRT3847_10256C.1.pep
NXLPEATCGLKIPTPAXYAXRRRWYXHGXRSSRAXAC

SEQ ID NO: 145683 - protein, 32 aa, Glycine max
  Clone ID: PAT_MRT3847_102570C.1.pep
SQQNNITEEHYVTIIIIICKLTDNQSNYISVE

SEQ ID NO: 145684 - protein, 71 aa, Glycine max
  Clone ID: PAT_MRT3847_102571C.1.pep
KTTMIHSNQYRYRQFSMQKVTKCAKEPIFKRTQIEKPPCSTVISTKILNFPLKTKIRKRTQITDGFIHNFI

SEQ ID NO: 145685 - protein, 70 aa, Glycine max
  Clone ID: PAT_MRT3847_102572C.1.pep
NRNRKVRLILIVFNYFFMLYNFTMKHDKKKFKKTETQSSKLKLNLVFNKFKIKNKKITRTDSKNFDNQRR

SEQ ID NO: 145686 - protein, 85 aa, Glycine max
  unsure (1)..(85): unsure at all Xaa locations
  Clone ID: PAT_MRT3847_102573C.1.pep
LSHGLCTATFIMRTPEPYVMDSLGRSSTICLGGTYEPAAYGELVSMGALTPXLIGRLMAGIVCVLETGFFAPSSRYSLEFYDTEG

SEQ ID NO: 145687 - protein, 66 aa, Glycine max
  Clone ID: PAT_MRT3847_102574C.1.pep
NSRPPGHIAQLFLDPPRLPPSVNQGVNQPGDPEYHIDRNVPPRTQQANRSKIVLTTCGLCFPVPCL

SEQ ID NO: 145688 - protein, 164 aa, Glycine max
  unsure (1)..(164): unsure at all Xaa locations
  Clone ID: PAT_MRT3847_102575C.1.pep
MASLSSLVLLLSSLILSPQGVAYYEGAAVYNPPTEKPPFYNPPVDIPPVYKPSIYNPPIYKHTVXKPPVYKPPFXNPPVYKPPVEKPPLYKPPFDKPPVYKPPXEKPPFYNPPFEKPPLYKPPVEKPPVYKPPIEKPPFYXPSVEKPPFYKPPFEKPPFYKPPV

SEQ ID NO: 145689 - protein, 65 aa, Glycine max
  Clone ID: PAT_MRT3847_102576C.1.pep
LLQDEHITEPFSVLGDHSLYEYAKRGACIPLYATKQTAELRDEDYTTRDHGIAEVIIMPAYVSNV

SEQ ID NO: 145690 - protein, 388 aa, Glycine max
  Clone ID: PAT_MRT3847_102577C.1.pep
MMGTLKVSNSSLYIFSKFLVICMVMMISLVDSSYSLCDFEAIFNFGDSNSDTGGFHTSFPAQPAPYGMTYFKKPVGRASDGRLIVDFLAQGLGLPYLSPYLQSIGSDYTHGANFASSASTVIPPTTSFSVSGLSPFSLSVQLRQMEQFKAKVDEFHQTGTRISSGTKIPSPDIFGKALYTFYIGQNDFTSKIAATGSIDGVRGSLPHIVSQINAAIKELYAQGGRAFMVFNLGPVGCYPGYLVELPHATSDYDEFGCIVSHNNAVNDYNKLLRDTLTQTGESLVDASLIYADTHSALLELFHHPTFYGLKYNTRTCCGYGGGVYNFNPKILCGHMLASACDEPQNYVSWDGIHFTEAANKIVAHAILNGSLFYPPFPLHKHCDLQPIG

SEQ ID NO: 145691 - protein, 140 aa, Glycine max
  Clone ID: PAT_MRT3847_102578C.1.pep
PESGWRAALHQLMLDCWQKDRNSRPRFAEIVNTLDKMIRNPASLKTVATITAVPSQPLLDRSIPDFTAFTTVDDWLSAIKMVQYRDSFLTAGFTSLQLVTQMTSEDLLRIGITLAGHQKKILNSIHSMRVQISQSPTAMA

SEQ ID NO: 145692 - protein, 76 aa, Glycine max
  unsure (1)..(76): unsure at all Xaa locations
  Clone ID: PAT_MRT3847_102579C.1.pep
GLLHLXXRCXXXLDMKVXTELXALDPXLLLXXAXFVTIISILTXXXXXLFFVLIXLLVTHAPFSXTPTSVHRFKEN

SEQ ID NO: 145693 - protein, 48 aa, Glycine max
  Clone ID: PAT_MRT3847_10257C.1.pep
RGSLRMEHIAHYASLTPHGSFVREHGHRVTSLTYEHTGFHIMMRLLQS

SEQ ID NO: 145694 - protein, 68 aa, Glycine max
  unsure (1)..(68): unsure at all Xaa locations
  Clone ID: PAT_MRT3847_102580C.1.pep
GVKFGDAVWFKAGAQIFXYGGLVYLCNRHLIHALSILAIWADHDELMGFAERFRIGVGPLGERLVLVY

SEQ ID NO: 145695 - protein, 34 aa, Glycine max
  Clone ID: PAT_MRT3847_102581C.1.pep
PNWTIYGGGEMPLSLTEGRKQLLKPCGPSHKQTR

SEQ ID NO: 145696 - protein, 75 aa, Glycine max
  Clone ID: PAT_MRT3847_102582C.1.pep
SLALLSSTPNTRHHHPWLPPSPMSDLSTELSLNLNGSGPRVSAPSASFFRSSLQKVIRSGSPRQRFPLEASRMML

SEQ ID NO: 145697 - protein, 70 aa, Glycine max
  Clone ID: PAT_MRT3847_102583C.1.pep
QLCTSFVHRKKNCLTKKNAGGKPPRARGELNKKCLWREQHSPLFISKKKGGLTKDEAGMALLPKGPYISY

SEQ ID NO: 145698 - protein, 91 aa, Glycine max
  Clone ID: PAT_MRT3847_102584C.1.pep
FEKKKGEFRVKVVKQILWVNGIRYELQEIYGIRNSTENDQGKCVICLSEPRDTIVLPCRHMCMCSGCAKDLRFQTDRCSICRQPVERLLEI

SEQ ID NO: 145699 - protein, 120 aa, Glycine max
  Clone ID: PAT_MRT3847_102585C.1.pep
NFDPKAYAFLHTTREAHCSLPRTVHRAPMTDHLSSHLRSPDNVRPVPHPGDHGLQGSRRDDNVRGAQGDHGSRLSWVMHIQHIAHHKGEGSPVHREIRPSHVVGCQLQMDNDQGSLIHAQ

SEQ ID NO: 145700 - protein, 65 aa, Glycine max
  Clone ID: PAT_MRT3847_102586C.1.pep
MQYIGNVPGDEPVGRKLLIFLANWLCDNHLKDPLVFLFPLFAPIYFDLFPRLCIHDKYMPLLLFC

SEQ ID NO: 145701 - protein, 52 aa, Glycine max
  Clone ID: PAT_MRT3847_102587C.1.pep
YAFDMILPSSSTLGWHSLKGNVLGQTKNGLWWIPRHPESMKGVVSYYWLCVV

SEQ ID NO: 145702 - protein, 56 aa, Glycine max
  Clone ID: PAT_MRT3847_102588C.1.pep
DRLAQRKTLYGGRMNLVVRFNTIFACNNGPLNISPTMCLSQEGKKNGLQDTECNGI

SEQ ID NO: 145703 - protein, 51 aa, Glycine max
  unsure (1)..(51): unsure at all Xaa locations
  Clone ID: PAT_MRT3847_102589C.1.pep
GNLWGLQQRREGVDTGGMRLEPEPRYIGSDWMPQRGVKVLGGMGRKXQEPW

SEQ ID NO: 145704 - protein, 54 aa, Glycine max
  Clone ID: PAT_MRT3847_10258C.1.pep
VWNQPVLLAEPNDLLHILITAAFFFASEKNVFSAFGLLLPLVLPFSRFFIRSNG

SEQ ID NO: 145705 - protein, 385 aa, Glycine max
  unsure (1)..(385): unsure at all Xaa locations
  Clone ID: PAT_MRT3847_102590C.1.pep
MGLLCSRNRRYNDADAEENAQTAEIERRIELRNERAEKHIQKLLLLGAGESGKSTIFKQIKLLFQTGFDEAELKSYLPVIHANVYXTIKLLHDGSKEFAQNDVDSSKCLTXNENEEIGEQLWEIGGRMNYPCLSKELAQEIENLWKDPAIQETYARGSELQIPDCTDYFMENLQRLSDANYVPTKEDVLYARVRTTGVVEIQFSPVGESKKSGEVYRLFDVGGQRNERRKWIHLFEGVSAVIFCAAISEYDQTLFEDENRNRMMETKELFEWILKQPCFEKTSFMLFLNKFDIFEKKILKVPLNVCEWFKDYQPVSTGKQEIEHAYEFVKKKFEESYFQSTAPDRVDRVFKIYRTTALDQKVVKKTFKLVDETLRRRNLLEAGLL

SEQ ID NO: 145706 - protein, 93 aa, Glycine max
  Clone ID: PAT_MRT3847_102591C.1.pep
LGLQFSPGISPPEIWPFFGFFNPFRGANFRETFFQAQRAFFGALSYKRFVPPGVFQPEGVNSPANIGPEFGPPNCLILGFGGLLKGRAFRSGF

SEQ ID NO: 145707 - protein, 150 aa, Glycine max
  unsure (1)..(150): unsure at all Xaa locations
  Clone ID: PAT_MRT3847_102592C.1.pep
MLSFVTENMGLLCSRNRRYNDADAEENAQTAEIERRIELETKAEKHIQKLLLLGAGESGKSTIFKQIKLLFQTGFDEAELKSYLPVIHANVYQTIKLLHDGSKEFAQNDVDSSKYVISNENKGIXEKVIWNWEAGLDYPISSARELAQGN

SEQ ID NO: 145708 - protein, 365 aa, Glycine max
  unsure (1)..(365): unsure at all Xaa locations
  Clone ID: PAT_MRT3847_102593C.1.pep
MGCGNLFFTLLITFSVALITYNIIISANAPLKQDFPGPSRPSIKVDPLIKMPLHRXSSSSEESKKRLLFHTAVTASDSVYNTWQCRVMYYWFKKLRDGGGDESGMGGFTRILHSGKPDQFMDEIPTFVAQPLPAGMDQGYIVLNRPWAFVQWLQQADIKEDYILMSEPDHIIVKPIPNLARDGLGAAFPFFYIEPKKYETVLRKYFPKEKGPISNIDPIGNSPVIVGKEFLKKIAPTWMNVSLAMKKDPETDKAFGWVLEMYAYAVASALHGVRNILHKDFMIQPPWDKEIGKTYIIHYTYGCDYTMKGELTYGKIGEWRFDKRSYDKVAPPKNLTLPPPGVPESVVTLVKMVNEATANIPNWWS

SEQ ID NO: 145709 - protein, 77 aa, Glycine max
  unsure (1)..(77): unsure at all Xaa locations
  Clone ID: PAT_MRT3847_102594C.1.pep
RGVIIKKRDKLRLQVRINPYSMEWTGLANRLLNEGNDILXCDDASYEGLITKDVMSKIAEVINSLCGGDEKSMRERT

SEQ ID NO: 145710 - protein, 147 aa, Glycine max
  Clone ID: PAT_MRT3847_102595C.1.pep
MGCGNLFFTILITFSVALITYNIIISANAPLKQDFPGPSRPSIKVDPLIKMPLHRKSSSSEESKKRLLFHTAVTASDSVYNTWQCRVMYYWFKKVRDEGGDESGMGGFTRILHSGKPDQFMDEIPTFVAQPLPAGMDQGYIVLNRPW

SEQ ID NO: 145711 - protein, 57 aa, Glycine max
  Clone ID: PAT_MRT3847_102596C.1.pep
GELTYGKIGEWRFDKRSYDKVAPPKNLTLPPPGVPESVVTLVKMVNEATANIPNWWS

SEQ ID NO: 145712 - protein, 236 aa, Glycine max
  unsure (1)..(236): unsure at all Xaa locations
  Clone ID: PAT_MRT3847_102597C.1.pep
TTEINRHTPKINYQNTTTKKHQQPLKXKPNKXHXKPXXKTQKHIPNHPHHPHNPHTNLIYPLHKPPPLQPLPPHHSLTTTPQTPPTTXXXXXXXXXXXXXXXXXXXXXXXXXXXXXXXXXXXXXXXXXXXXXXXXXXXXXXXXXXXXXXXXXXXXXXXXXXXXXXXXXXXXXXXXXXXXXXXXXXXXXXXXXXXXXXXXXXXXXXXXXXXXXXXXXXXXXXXXXXXXXXXXXXXXX

SEQ ID NO: 145713 - protein, 52 aa, Glycine max
  Clone ID: PAT_MRT3847_102598C.1.pep
RTGPTDAAADPSSHSSAHLSEKKVARKVLAAYLEVGLLRLLNGSTSMSNYEF

SEQ ID NO: 145714 - protein, 95 aa, Glycine max
  unsure (1)..(95): unsure at all Xaa locations
  Clone ID: PAT_MRT3847_102599C.1.pep
DSPDTGRGLTLNGKASYGNASSPGKRSSMEDLYETXIDGGDGAICGLSADLDGHGGARAVEYVKPNLFSNXISHTTFIADAKSAITDAYDHTDSE

SEQ ID NO: 145715 - protein, 52 aa, Glycine max
  Clone ID: PAT_MRT3847_10259C.1.pep
CRRCALFHRAESVSCLITNHWLDSLRGMRLIIPYNAFPHIRCQIKFPNCSAL

SEQ ID NO: 145716 - protein, 110 aa, Glycine max
  Clone ID: PAT_MRT3847_1025C.1.pep
TFKLFHSHRTRSLGTCVLYRTRQLYIPSWTSPCSPKSLEGSYQLSKRYSYYKEYIRRRKVIYHNPVPRIQLRLLLRRLTIRSPFCKYPYLARIRRLTLKGRSEPTLRIEV

SEQ ID NO: 145717 - protein, 567 aa, Glycine max
  unsure (1)..(567): unsure at all Xaa locations
  Clone ID: PAT_MRT3847_102600C.1.pep
MTASNKKNPKEKPIRRKEEKPEEPEVPKYRDRAKERREDQNPDYEQTELGFHAVAPPGTVDIRSSDAHKLSIEKSKYLGGDVEHTHLVKGLDYALLNKVRSEIDKKPEAGDDVEGKSRSAKEDQQVSIRTATAKSVYQWIVKPQTISKTNEMFLPGRMTFIYNMEGGYHHDIPTTLHRSKADCPVPEEMVTVNVDGSVLDRIAKIMSYLRLGSSGKILKKKKKEKDAKGKILAVGNGFDKEDKPSKVEGGAKNQTEKEIILPPPPPIKKNPLHSREKQGPAVARAEDDDIFVGEGVHYDVPGKDLSQSPVSEDMEESPRNKEKPSYVTEPTYGPVPPSMVPQGWQETNGYDVMQTQAFDAGYQGEWQEYQYAEQXAYPDQYLQQNMQAYDEQADLNLPQDPRFMSQEEKDRGLGSVFKRDDQRLQQLRERDAREKDPNFISESYSECYPGYQEYNREIVDSDDEDDLSKMDMGGRAKGRLHRWDFETEEEWATYNEQKEAMPKAAFQFGVKMQDGRKTRKQNKDQKLNNDLHKINKILARKKMEKDTNGEGGHHYDDEPTPGKKLRI

SEQ ID NO: 145718 - protein, 81 aa, Glycine max
  Clone ID: PAT_MRT3847_102601C.1.pep
ADSGRPRVGELVGGLAGLSYQSNTLGSEGLYHYQAQMASDGRPGVQLLFCTFFRVLQTLLCCIFLNGRPKTVLEFYEEGAS

SEQ ID NO: 145719 - protein, 182 aa, Glycine max
  Clone ID: PAT_MRT3847_102602C.1.pep
MASGTQSSGMLTREQLYYLFDRFIFLTSQPDVKKRIAEAVQDKQEAVAVTTAIQEEIFLEMGVDPRFGISCLGKVSTVYENDLDLVIQFYKFLSKEEVACDEAELGEEEFTEKMLNQQKLQEQQLEMLKYMRKFHLDDQSAILEKLHQQMENGNYESETSILSAEQIDEIVPRKVSPLYTPR

SEQ ID NO: 145720 - protein, 43 aa, Glycine max
  Clone ID: PAT_MRT3847_102603C.1.pep
MSSALAIKMAVTTVLVMPVHYRQLIGLETDSERFISSLILVLI

SEQ ID NO: 145721 - protein, 75 aa, Glycine max
  unsure (1)..(75): unsure at all Xaa locations
  Clone ID: PAT_MRT3847_102604C.1.pep
MMKADGALDKARXHKKRQLXXTLNLXIKKRREYEDKMREXGXTPVMFSHLXLPRRRTTAXEEERVKHPKPEXSVY

SEQ ID NO: 145722 - protein, 177 aa, Glycine max
  Clone ID: PAT_MRT3847_102605C.1.pep
EFIDAIVEGERLIVDVDFRSEFEIARSTGTYKAMLQSLPFIFVGNSERLTQILAIVSDAAKQSLKKKGMHVPPWRKRDYMLAKWLSPSSIREKENKQPPSSSVQAAAVPEMVFSDNAASTTTESDCGELELIFGGEMSPETECGQVKSATTPAVKPKSVERGTKVVTGLASLLKDKP

SEQ ID NO: 145723 - protein, 27 aa, Glycine max
  Clone ID: PAT_MRT3847_102606C.1.pep
LEPFSIMKFRRKEFTWTDYTAISCLGD

SEQ ID NO: 145724 - protein, 72 aa, Glycine max
  Clone ID: PAT_MRT3847_102607C.1.pep
IDEWVSLPLCPSKPPSLSMYFTRIRQRPPITWTCYVSSPFSFTSSSADHFRFSFVCFVAFNFNVIFVFFIMI

SEQ ID NO: 145725 - protein, 139 aa, Glycine max
  Clone ID: PAT_MRT3847_102608C.1.pep
YPLFKDFNVFCSRLLQSPLPSKDKQVRWHAETNMVICSLCQRLNVFRLRLLKSRLRHPETIKSNGTQRQIWSSAPFVENFNVFRPRLLKSSLRHLLPLLKTQCLSTKTIAISPLPTRDKRVHWHTETTYGHPEIIKSDG

SEQ ID NO: 145726 - protein, 82 aa, Glycine max
  Clone ID: PAT_MRT3847_102609C.1.pep
LSHPAPVQIKHQLQWPHSCNANARAPADATEIRHYHLYPEQTAHTLSGGNMGCLTDSQMPHVIIRSTSCHVELAKINVVSVR

SEQ ID NO: 145727 - protein, 59 aa, Glycine max
  Clone ID: PAT_MRT3847_10260C.1.pep
PKPPPHVPRTPPTTALRSNRVKKQRPIIPSHTFSRSVVPHHRHPIIGGKARTKNQKNYK

SEQ ID NO: 145728 - protein, 53 aa, Glycine max
  Clone ID: PAT_MRT3847_102610C.1.pep
AVLVPVNATSTGLESAGLDNITSSDIDKLSISNVHSTSERFLNHHAVLLQFCC

SEQ ID NO: 145729 - protein, 104 aa, Glycine max
  Clone ID: PAT_MRT3847_102611C.1.pep
YTHSIPRHSLTLCPRSLTKLLAYLPHSLTGCRRYLPRRAAILYSHRHIIFLSDKDLKGVINNTDHHEVGLLVHKEGCQSLIQEDHQIIRLIQLSVQQRDQEEGG

SEQ ID NO: 145730 - protein, 47 aa, Glycine max
  Clone ID: PAT_MRT3847_102612C.1.pep
LLLGGANSKCAPPFADLPYQIQRTHAILFHGPKLHSAPISLHCTDLG

SEQ ID NO: 145731 - protein, 62 aa, Glycine max
  unsure (1)..(62): unsure at all Xaa locations
  Clone ID: PAT_MRT3847_102613C.1.pep
MLTKHGGKAKPLKKPKSDKKDYDXIDRANIQKKKDEEKALKELIAKEQQKGSFGCSGLMISG

SEQ ID NO: 145732 - protein, 194 aa, Glycine max
  Clone ID: PAT_MRT3847_102614C.1.pep
YFLNTISHHNREKKREREMELQDHDFLEELMSLRRETWDTNPCSQENQLFSNGWSFDCFEDQNYHQAFPPNSFSCQQVPQSYNNKGYNYNEIYSSLLHEFSAPQVIDSSSYNTLDTSPFLAQEDYPLSMMEEEDPGFLGEELHCLDLQTTCKMEPSHSTEMPIFNTTSSFVERKNRAKKLQGQPFKNLMAERRR

SEQ ID NO: 145733 - protein, 79 aa, Glycine max
  Clone ID: PAT_MRT3847_102615C.1.pep
HRKGRTILRKSKRMACTPSPIYDPEAQKAFIADIRNNPLILYPTQWPHFLLLIVRPPNVRRIPQRTHHLRNLSQQEWPS

SEQ ID NO: 145734 - protein, 177 aa, Glycine max
  Clone ID: PAT_MRT3847_102616C.1.pep
VDKEQRIIWQSFDTPSDTLLPGQSYVANETLRAATASKNSKASYYTLHMNASGHLELHWESGVIYWTSENPSASNLRAFLTASGALELQDRSLKPVWSAFGDDHNDSVKYRYLRLDVDGNLRLYSWVESLESWRSVWQAVENQCKVFATCGQLGVCVFNASSSAECKCPFDVTWGNK

SEQ ID NO: 145735 - protein, 72 aa, Glycine max
  Clone ID: PAT_MRT3847_102617C.1.pep
LLVIRMKCMLKSIHRCNLQFLSFLFFDQFPFHAILIFYIYFSNFILLSISISSLNSNLFTCCSLLSSHFHIA

SEQ ID NO: 145736 - protein, 258 aa, Glycine max
  Clone ID: PAT_MRT3847_102618C.1.pep
AAAGAYRAATATRFNGISGEAFKSHHPLHHHHSSSPHYGVGLGPSHETSAGLMRSRFLPKLPAKRSMRAPRMRWTSTLHARFVHAVELLGGQLEATPKSVLELMDVKDLTLAHVKSHLQMYRTVKTTDKPAASSGLSDGSGEDDMSPMGSSGGMRQFSDQRSLSDRPLQQDMDYSSGNNTLWSNSSSSRETWQQNNSNDVDGFRPPIFQSQQISGGHQIQECDSTQLKNSLSGSNLECKNPSLEFTLGRPDWNGKGQA

SEQ ID NO: 145737 - protein, 125 aa, Glycine max
  unsure (1)..(125): unsure at all Xaa locations
  Clone ID: PAT_MRT3847_102619C.1.pep
SFVGKPNXITLAISAANQDIATADAIQLSREVDPSRERTLGARTKLDLMDKGTNALDVLQGRPYRLQHPRVSVIYLSQALINKHVDMIDARHKENEYFETRPDYGHLANXMGSVYLAKPVSQHLE

SEQ ID NO: 145738 - protein, 47 aa, Glycine max
  Clone ID: PAT_MRT3847_10261C.1.pep
SPSYTLTISSFYSLSYYSNSSTYFHIFYYYLLPYYYSTYYLNFIIPI

SEQ ID NO: 145739 - protein, 74 aa, Glycine max
  Clone ID: PAT_MRT3847_102620C.1.pep
VNERVVDMLLLLLNYLFFLFNFSITKTEAIDNLQYLNHSCSSNKTFTPNSTYQSNLQTLLTSLSSHANTAQFFN

SEQ ID NO: 145740 - protein, 89 aa, Glycine max
  Clone ID: PAT_MRT3847_102621C.1.pep
KLRSCVCTIHVCWCWLTIPQFGSANCLAIELAPCKVSSRKELLRVYKKVRLAADVDAPAHAGPALANQGVWSFYCRPRWFSNEHLIIYK

SEQ ID NO: 145741 - protein, 53 aa, Glycine max
  Clone ID: PAT_MRT3847_102622C.1.pep
LISEFLHAYTYTITVKNGNESSGNVKFEIKVKIIFSFSFFIYIFSYYKNYNKL

SEQ ID NO: 145742 - protein, 93 aa, Glycine max
  Clone ID: PAT_MRT3847_102623C.1.pep
SIRLCNVTNTIINHEEAQACTRRHKDASRDGSGSSGELEYQANRIDDEKGPSSADQRKQDMAYAEDAPAREEGLASMAVANSITHNTVYSTSG

SEQ ID NO: 145743 - protein, 43 aa, Glycine max
  Clone ID: PAT_MRT3847_102624C.1.pep
EPIKISITYEPLYPIPVLIDDLKNDDLQLLVNSIRMPSTIAHA

SEQ ID NO: 145744 - protein, 176 aa, Glycine max
  unsure (1)..(176): unsure at all Xaa locations
  Clone ID: PAT_MRT3847_102625C.1.pep
ENEDEIQQQSEEKTTIESHEEENKATGPSKKGRDKYVRTKVRLASTLNKFSIVDMVGILMLASRVLNLGLLPSDFADWVATGVIPYHNALATTCADVPEVRDSVKFISRFFQSVMKRHRASTVQIAYSANHLMYHMGLRLPRLNVSLAVHRICATMGFPGKVFRNFQVDLGFMXRT

SEQ ID NO: 145745 - protein, 147 aa, Glycine max
  Clone ID: PAT_MRT3847_102626C.1.pep
MESVAHSRQPPDKKITAGTGGFPAETLYDHVYGGAAKFTAGGHHHSLSPCFEDYGEIFASFHEPRASAIPVLDLPALDAAGEVFFDFRNAARDYSEIFRGFDGLDFWLSYEDLFRHGVSEEEDDDDEEEEDWSPVGNSLIFWRLGAF

SEQ ID NO: 145746 - protein, 67 aa, Glycine max
  unsure (1)..(67): unsure at all Xaa locations
  Clone ID: PAT_MRT3847_102627C.1.pep
ARNSAREXIXXXSYIXQPXIXXHSAXKXTXXAXXCLVRVASLGYAVSTIXTYXFSPXWIGPMPMTTX

SEQ ID NO: 145747 - protein, 89 aa, Glycine max
  Clone ID: PAT_MRT3847_102628C.1.pep
EDQHLQRIRRIREEQSQRNFQLFHISAFVIYRKHQAGRFEDELAIPFPLSLSSDEVISMEEKKVPFDYGSLGSQWQMKTSCFEGYTLWA

SEQ ID NO: 145748 - protein, 97 aa, Glycine max
  Clone ID: PAT_MRT3847_102629C.1.pep
DIKTQHPQCMWCSVSRHVKREGVPIQPIIGLGTGQCKACSSTTGRHKMISASYSQLSISVYGNSPPVHQHMSFVPRRSPLGLGQSRPLNMIQQQHRI

SEQ ID NO: 145749 - protein, 95 aa, Glycine max
  Clone ID: PAT_MRT3847_10262C.1.pep
SIVILVSSRCLAYEYSPFTSICFLVACKFSCIALVKCRQVYQSVLSIQCWIRRTVQRQSLQDYEVSMHECTQLYALSIKSQVGFQHRCRHVHIAS

SEQ ID NO: 145750 - protein, 61 aa, Glycine max
  Clone ID: PAT_MRT3847_102630C.1.pep
LPHNRTTTLTLNFSSRLTSFGWLKFHTISIFTYQIFYNTPINYLTFFYTDTHNIILNSSTL

SEQ ID NO: 145751 - protein, 74 aa, Glycine max
  Clone ID: PAT_MRT3847_102631C.1.pep
PSPPPPYIYKSPPPPSPSPPPPYVYKSPPPPYVYKYPPPPSPSPPPPYVYKSPPPPSHSPPPPYLYNSPPPPVY

SEQ ID NO: 145752 - protein, 84 aa, Glycine max
  Clone ID: PAT_MRT3847_102632C.1.pep
TFYCPLTEVVLFGCFFFLYPLLPPPSGGRKTFGTNWAKKTNPTNGVTFQASPHYCYLGVRENTRGGGSPQMGPGNHEKGGGGGP

SEQ ID NO: 145753 - protein, 136 aa, Glycine max
  unsure (1)..(136): unsure at all Xaa locations
  Clone ID: PAT_MRT3847_102633C.1.pep
LNNLIKMIFPFIFVATTLVAWQYHAGDMYPLRMNTGYTARTPHVKCARCTLAVESHNIYGSYTIPKQCVEAANEYIHDAQYTSYFKSVNQQSYFYATYLKVYSKVTXVINIYCTQLSNISYYKKHSYCLDKFNSTF

SEQ ID NO: 145754 - protein, 40 aa, Glycine max
  Clone ID: PAT_MRT3847_102635C.1.pep
APYLSSFSAPGELRLDYAPNECQPDDSTLGELNEGNLDWL

SEQ ID NO: 145755 - protein, 67 aa, Glycine max
  unsure (1)..(67): unsure at all Xaa locations
  Clone ID: PAT_MRT3847_102636C.1.pep
KSAQRYSHDDDEDPQPCXDLCMCTRXMPDRCIWDHILLSXCCSHRKSCMSTRXHTGQRACLDSDDFC

SEQ ID NO: 145756 - protein, 47 aa, Glycine max
  unsure (1)..(47): unsure at all Xaa locations
  Clone ID: PAT_MRT3847_102637C.1.pep
TGLKIVYMTKDNSVGTLGIGWKVNKELYDPRPPKXESKKRTATLVHK

SEQ ID NO: 145757 - protein, 169 aa, Glycine max
  Clone ID: PAT_MRT3847_102638C.1.pep
PTRPVGLGCIAGVGVHPSWHHDRVRILASKSEELTLKRWWSWSLFPSASAHETHLCRIRARRPRCVPDNREAGAGKEAEEEQQLELEWKLLTRRIGDSGIISSCLVGLLTGVAVVLFNYAVHEIRDLFWDGIPNRGASWLREAPIQTTWARVVLVPAFGGVIVSLLNLL

SEQ ID NO: 145758 - protein, 47 aa, Glycine max
  Clone ID: PAT_MRT3847_102639C.1.pep
TLWHKFTPPVLNRVIPFLASAKTVGFFPSMPRFMEYYSMPKKKKKKQ

SEQ ID NO: 145759 - protein, 129 aa, Glycine max
  Clone ID: PAT_MRT3847_10263C.1.pep
FGMFVYMHVQDKVVTENELFEKMKVEAEKCLTQSERIANERLEFESEIYAKFLGVLNSKKSKLRVLRDKLSKQENSEKSPEEEDTDKTESFDEENDFERSDEDPQKDITSSSKEVMANKPSHPKRIRHK

SEQ ID NO: 145760 - protein, 83 aa, Glycine max
  Clone ID: PAT_MRT3847_102640C.1.pep
GFACLQVGFPLSSLVFPVSYGSVVPWPVFRQVCLFFVSALGLCPGLVFSLLFCVSCALCVLFLVPFSFKTVLFFEGWFLTFLH

SEQ ID NO: 145761 - protein, 78 aa, Glycine max
  unsure (1)..(78): unsure at all Xaa locations
  Clone ID: PAT_MRT3847_102641C.1.pep
VADRLQEVSMETGSSXAFLLENEPHAYAAATATFLAASLSFEVPLLLPSPILPFLFSELSQLFCVKDSNFVVLVCLLY

SEQ ID NO: 145762 - protein, 114 aa, Glycine max
  Clone ID: PAT_MRT3847_102642C.1.pep
LFQFSQQNHTPSASLFLSLPLLIRGVLLPCIFILLSWCEYSLKPMKPFMCTMNNNNLKDSENFHNSSWTIAKLMTSFFLLISIYYLFYFLGFITHSYDCPQKKHYPFSTTTYFF

SEQ ID NO: 145763 - protein, 62 aa, Glycine max
  unsure (1)..(62): unsure at all Xaa locations
  Clone ID: PAT_MRT3847_102643C.1.pep
SLHKFDRKLCKHSRFITDLLSGDEPLSNSFRYKEXKKQGXTGSLXNPXTIGPKKTPPXGGGG

SEQ ID NO: 145764 - protein, 36 aa, Glycine max
  Clone ID: PAT_MRT3847_102644C.1.pep
RRVQNYFFSKIDYNLKQFQVIFKLDLKNFILNFVLT

SEQ ID NO: 145765 - protein, 199 aa, Glycine max
  Clone ID: PAT_MRT3847_102645C.1.pep
MLIMQNRRLSPLSPKSPQSPLPPRGPSLDAVDQKFVKELEELALRKRARVKKMKAVRKMKASKSSSSSTYTSLSAMVITVFFFLVIILHGIKSANSAAVGLMASPEAAIAGDEGLISIQYPMNFNRNEGDAPGSHYTFRQRLVYGNFEGSFPFNVRLGYSFNCLDYVCFFVQSLGILAICQVCLYSDLIGNVNKKRVLL

SEQ ID NO: 145766 - protein, 86 aa, Glycine max
  Clone ID: PAT_MRT3847_102646C.1.pep
VAGYCASRSSSLDSMTRLTDDSCDPAPLPEIGDRLIRMSTLHLSRFCRDAHSGFQKFFDVGTTSGWQNCSSHTATPNACSPNWHRK

SEQ ID NO: 145767 - protein, 49 aa, Glycine max
  Clone ID: PAT_MRT3847_102647C.1.pep
SRSYRLQKNTKRGIFFSITKNTNSSIGNLIFVYKNPVVFQRAHNFLNIS

SEQ ID NO: 145768 - protein, 324 aa, Glycine max
  unsure (1)..(324): unsure at all Xaa locations
  Clone ID: PAT_MRT3847_102648C.1.pep
CISRWELCDLKVRLVADKDTNKPRGYAFIEYLHTRDMKAAYKQADGKKIDGRRVLVDVERGRTVPNWRPRRLSGGLGTTRVGGEEVNQRHSXGEQQQSRSEEPRVREDRHADRDREISRERGRDKDRERERSREHSHERVRDRDHREDRHHRDRDRNRDRDRDRERDRDRGRDRDRTRDRDRERGRDRDRDREYDRHRERDRDYEVGDPDRGRSRDRESDYDRVESKHGERNHDYEPEDDRGRHNQYEHGRRHADPDHDPEHYDHYNHGDDRGDHYNQYPDPDRMEDDYHAGRATSESHEKERSHDVDREYRRSERSHSREYDY

SEQ ID NO: 145769 - protein, 84 aa, Glycine max
  unsure (1)..(84): unsure at all Xaa locations
  Clone ID: PAT_MRT3847_102649C.1.pep
MASPPTLPISSQSSASGGSASQSQPPIATPAFRAFISRISSSLRHAFAQRRPWAELIDRSSMXRPDTLAEAYSRIRXNFGYFRV

SEQ ID NO: 145770 - protein, 46 aa, Glycine max
  Clone ID: PAT_MRT3847_10264C.1.pep
QPLTRQGLFGGWSRVLGCLVNWQTLALDYLSLHRVNLSYCQNIPIT

SEQ ID NO: 145771 - protein, 447 aa, Glycine max
  Clone ID: PAT_MRT3847_102650C.1.pep
MGDNNSNNDAFMRNQNAAVQARTKAQNRSNVLQLKLIGQSHPTGLTANLLKLFEPRPPLEYKPPPEKRKCPPLSGMAQFVSKFAQPGDPEYAPPVPETETPAQKRARIHKLRLEKGAAKAAEELEKYDPHNDPNVSGDPYKTLFVAKLSYETTESRIKREFESYGPIKRVRLVADKDTNKPRGYAFIEYLHTRDMKAAYKQADGRKIDGRRVLVDVERGRTVPNWRPRRLGGGLGTTRVGGEEVNQRHSGREQQQSRSEEPRVRRGPDRDREYRDSEREHSREQHYHEMGIVLLNFNCRVRAFVSLDEGVRDRDWDYDRHRERDRDYEVGDPDRGRSRDRESDYDRVESKHGERNHDYEPEDDRGRHNQYEHGRRHADPDHDPERYDHYNHGDDHGDHYNQYRDHDGMEDDYHAGRATSESHEKERSHDVDREYQRSERSHSREYDY

SEQ ID NO: 145772 - protein, 63 aa, Glycine max
  Clone ID: PAT_MRT3847_102651C.1.pep
LREDDRRDVPCLISLDEISYMHKDILYFIKYNIGLICFLVPENMVHFDFSLQLFFINFGSYKF

SEQ ID NO: 145773 - protein, 54 aa, Glycine max
  unsure (1)..(54): unsure at all Xaa locations
  Clone ID: PAT_MRT3847_102652C.1.pep
XXXXXHSXYGXAXAXIIGDNXSKSXYQCVTLTFXXTIXXCXXSHCDFILGFRSS

SEQ ID NO: 145774 - protein, 76 aa, Glycine max
  unsure (1)..(76): unsure at all Xaa locations
  Clone ID: PAT_MRT3847_102653C.1.pep
LIRIVLPDIITRRLTRLVMAXRLRSVDKPCSQLQLSDLVYFAHSLHEMLRAPITDRPSSHHYESPTAPFKLLLGYN

SEQ ID NO: 145775 - protein, 58 aa, Glycine max
  Clone ID: PAT_MRT3847_102654C.1.pep
MAFSMVFFPGGTNGKRARARMGGSFTGLKIMGGFPTRETNHGLTFIGSNRGRIQCLPV

SEQ ID NO: 145776 - protein, 63 aa, Glycine max
  unsure (1)..(63): unsure at all Xaa locations
  Clone ID: PAT_MRT3847_102655C.1.pep
KKPKKGKFISVHFILIYFHCSDTRDTGVVFMSASPFGKIQWSAIWAVFGTQGQLHFXFCNLVL

SEQ ID NO: 145777 - protein, 524 aa, Glycine max
  Clone ID: PAT_MRT3847_102656C.1.pep
MLHMENPLLQSTNSITFTFFGLLLFLFVLSSIFRNRGAATRKAPPEARGAWPLIGHIHLLGGSKPPHVTLGHMADKYGPVFTLRLGAHKTLVVSNWEMAKQCFTVNDKAFASRPKSVSFELLGYNYSMIGFIPYGSYWRHVRKIITLELLSTHCIDMLKHVMVAEVKAAVKETYKNLKGSEKATTEMKRWFGDITLNVMFRTVVGKRFVGENEENERIRKALREFFDLTGAFNVSDALPYLRWLDLDGAEKKMKKTAKELDGFVQVWLEEHKSKRNSEAEPKSNQDLMDVLLSLVEEGQEFDGQDADTTIKATCLGLILAGSDTTTTTLSWALSLLLNNREVLNKAIHELDTQIGSEKIVEISDLKKLEYLQSIIKETLRLYPAAPLNVPHESLEDCTVGGYHVPTGTRLLTNISKLQRDPSLYPNPLEFWPERFLTTHKDVDIKGQHFELIPFGAGRRMCPGLSFGLQVMQLTLATLLHGFDIVTSDGEHVDMLEQIGLTNIKASPLQVILTPRLSGHIYDEI

SEQ ID NO: 145778 - protein, 82 aa, Glycine max
  unsure (1)..(82): unsure at all Xaa locations
  Clone ID: PAT_MRT3847_102657C.1.pep
MNTIVLTMLSFFLYLLVWLPRVTWGWTAAHATFYGGAYALRTMGGACGYRNLYQIGYGTXTASLSAALFNNGQTFGACIQLV

SEQ ID NO: 145779 - protein, 60 aa, Glycine max
  Clone ID: PAT_MRT3847_102658C.1.pep
RIHRRKQGSHYRGELGDYSNEFSGYLHHDQMLNGSVPHLHTSCENAQTPDLIGRTNLTST

SEQ ID NO: 145780 - protein, 109 aa, Glycine max
  unsure (1)..(109): unsure at all Xaa locations
  Clone ID: PAT_MRT3847_102659C.1.pep
PASGSGVFLGRTHTLQTAAIFVRSIFSRPSPRDYNISKKRVGFILPDIFAYXAAVTVITVEWLHNIQVIMWEEEKVNNELNPYMTKGFKDVKEMCKPHECDPCMGRFHL

SEQ ID NO: 145781 - protein, 47 aa, Glycine max
  Clone ID: PAT_MRT3847_10265C.1.pep
FDPRPTRPATRPYHTFKAERQTFSSVGLCREQNLLMPFLKYIIYLYL

SEQ ID NO: 145782 - protein, 103 aa, Glycine max
  unsure (1)..(103): unsure at all Xaa locations
  Clone ID: PAT_MRT3847_102660C.1.pep
SLHXXXRXXXXXDXFNSPRRPERPXXRXXRXXPAPARPXRRPRXPXXXRPXXXGANTPRKKGXXETXPXGRPAPPXXTXPRRXRXTXQQPRXXXPPSXSNGTQ

SEQ ID NO: 145783 - protein, 63 aa, Glycine max
  Clone ID: PAT_MRT3847_102661C.1.pep
APRKPTPPPPPLLSTTKKNFPLLISNLGDRSTLSPICGAYGVQTAAVSPPTAKKNPPHKQGSV

SEQ ID NO: 145784 - protein, 82 aa, Glycine max
  Clone ID: PAT_MRT3847_102662C.1.pep
SRSTFVRPKCPRRSMLSIASSRPSPLILDMVRVSYSPLTNPEARIQPIHQYRQRGGKFATSSTWRIEMSRRSTDMSYRAGQN

SEQ ID NO: 145785 - protein, 71 aa, Glycine max
  Clone ID: PAT_MRT3847_102663C.1.pep
GQCGLIPMLISNSNNRTPLCNRYPQILLSTFVVFYEHHLWHIVSVIGMAYLLGLLLYLISLLPPFKHIHIG

SEQ ID NO: 145786 - protein, 56 aa, Glycine max
  Clone ID: PAT_MRT3847_102664C.1.pep
ESLSFWEYVIFIIVWLICIKVFMLEIYEVKEVGVLNLLVCRVPLNEPGPWLVMCEL

SEQ ID NO: 145787 - protein, 55 aa, Glycine max
  Clone ID: PAT_MRT3847_102665C.1.pep
ENTRGGLRICALLGITRDMLCPLRFPASNITQNEQYWHHHFLYQYLIPGDQVNLR

SEQ ID NO: 145788 - protein, 61 aa, Glycine max
  Clone ID: PAT_MRT3847_102666C.1.pep
RRQRKTTDFGITPVPSQWGHDLCVPVSSIIYFLFAAPLNHYLKKRGSFYCNQSPYHLLLRP

SEQ ID NO: 145789 - protein, 71 aa, Glycine max
  Clone ID: PAT_MRT3847_102667C.1.pep
IDVLFFCVLTEKILPVVKNQHLLLCTLLICNAAAMETLPIFLDGLVTAWGAILISVTLILLFGEIIPQSIC

SEQ ID NO: 145790 - protein, 56 aa, Glycine max
  unsure (1)..(56): unsure at all Xaa locations
  Clone ID: PAT_MRT3847_102668C.1.pep
VXSXXAXXXXXXAXXXXNPLKXFLXKLXXPDXCGRPXEFREAFPICLKGWFGYREQ

SEQ ID NO: 145791 - protein, 140 aa, Glycine max
  Clone ID: PAT_MRT3847_102669C.1.pep
GSREQWFNQTMAKASKSEEPRHIQWADSIAEEEDDDDEIDSDSENEDDFDMIPLPRRIAQIPVQISAMEVDDDEDEDEFYDDMEDDSELALTQVSSHLQSPDELTYEQESDDESPPTSSQQASMNFFDKDAMLTTSFYDA

SEQ ID NO: 145792 - protein, 116 aa, Glycine max
  unsure (1)..(116): unsure at all Xaa locations
  Clone ID: PAT_MRT3847_10266C.1.pep
LEAIVDLAELFFYLASSVGVSXPKHGGGGSVHSLLHEIKEATTKPVAGGFVILKPDHVKHVSGWGAYGVIVGSAILNVLGEAKSSQYXLNELEVLTLSLKSATFLKNMLFYIFILI

SEQ ID NO: 145793 - protein, 57 aa, Glycine max
  Clone ID: PAT_MRT3847_102670C.1.pep
APENNFNLHCGFYLIRYWDFVWPPHDNDQNLLPEGKKKLPKWGNPTGNRIQDLGVPN

SEQ ID NO: 145794 - protein, 53 aa, Glycine max
  Clone ID: PAT_MRT3847_102671C.1.pep
IHLFFFSGSVNGGNSAELAKQEDIDGFLVGGASLKGPEFATIVNSVTSKKVAA

SEQ ID NO: 145795 - protein, 80 aa, Glycine max
  Clone ID: PAT_MRT3847_102672C.1.pep
KSDDLIGLFMYVIRDDLNDFTNLDLTNFTDFIINFNTSIVILKYELTFFNQIILVSYLYIIDKYIIVNFLIYIKSNRVNY

SEQ ID NO: 145796 - protein, 47 aa, Glycine max
  Clone ID: PAT_MRT3847_102673C.1.pep
SLLSTNRDSQFFVGESMNDDACLVFAYHKDGAADPTFLYFAYPLKEV

SEQ ID NO: 145797 - protein, 218 aa, Glycine max
  unsure (1)..(218): unsure at all Xaa locations
  Clone ID: PAT_MRT3847_102674C.1.pep
MSEGLPGXGHIFGDMAELEHALHAKVIHLHTKIKYRWQGMDETGKVSTRWIETTAGRVMLGNLLPKNPRISYEIINKLMTKREISGVIDQVYRHCGQKETVIFCDRIMALGFYNAFKAGISFGKDDMVVPHGKWKIVDTTRTLAKDFEQQYNDGLITHGEKYNKVVDAWSKATEEIAKAMMKEISATKKTASGADADINSIYMMAHSGARGFPAQMRQ

SEQ ID NO: 145798 - protein, 105 aa, Glycine max
  Clone ID: PAT_MRT3847_102675C.1.pep
MGVIQKFFVGLLVMEAIQIGIIYAFNVKTLFMWSIPIAILYAFDSGFLAVISVNVVIAFYIYLALREPTADKPEPDPKFLAEAKASINQSTGDAQQPSQALKKEQ

SEQ ID NO: 145799 - protein, 104 aa, Glycine max
  Clone ID: PAT_MRT3847_102676C.1.pep
MEYCLEAHASRALEEEKNIKNQQEYFVPWHLPYHRAEISGASAEALAAGLATKDDKKGAVVYNRYYHVFSEGELESLTTEINNAIIVDQFFDKSNWCIILEKTV

SEQ ID NO: 145800 - protein, 65 aa, Glycine max
  Clone ID: PAT_MRT3847_102677C.1.pep
VSYLFMYCPLFFAAFSFPLLIIFSFHFVALLFSQITQRNCSNYFHFSPPFLLLAPLVYSFEITGR

SEQ ID NO: 145801 - protein, 138 aa, Glycine max
  unsure (1)..(138): unsure at all Xaa locations
  Clone ID: PAT_MRT3847_102678C.1.pep
RNFQVRTTPPGDLKLADVRLARXFSNDQKARLTNREITLWYMXPEVVLGTTRNGPAVDMWTVSXILAELLHGKPMFAEKEEPEHLNSLYELGGAPKEGNWPGVCMISYYSMXKPTRAXMMRRLREVFMXFDHDALELL

SEQ ID NO: 145802 - protein, 59 aa, Glycine max
  Clone ID: PAT_MRT3847_102679C.1.pep
GGFVFFFFWGHVASYFFPWLCHGNFLQRCVVLRLFPLNSMASVSGAYFGGVPFLLRPPE

SEQ ID NO: 145803 - protein, 78 aa, Glycine max
  unsure (1)..(78): unsure at all Xaa locations
  Clone ID: PAT_MRT3847_10267C.1.pep
KVAPITVADFSSTPXSNQEGLKGISLTTHVLFKGFYDNKNKHKKSVKQCLTWVESIVLIYVERPCHNQSIINSKTTWP

SEQ ID NO: 145804 - protein, 57 aa, Glycine max
  Clone ID: PAT_MRT3847_102680C.1.pep
NQVIYITIATCPQTENKPITASNKNIVYSYQMKLFRLSSRPKGIGHHWPSPWKVKPH

SEQ ID NO: 145805 - protein, 211 aa, Glycine max
  Clone ID: PAT_MRT3847_102681C.1.pep
IVANPSSQLVWEPLINKFKSKLAKWAQRDISMAGKITLINSVLNALPTYLLSFFRIPQKVATKLISLQRNFLWGGDNDHKKIPWVKWDDICLPKNDGGLGIKDISKFNIALMGRWIWGFASDQQQPWVRILTSKYGGWSEFLNGSDKRGFSHWWKDIRKLYHQEDCSIFKDNLSWKVGCGESIKFWTDTWLGGSIQSAAGVSSVIPYKQTA

SEQ ID NO: 145806 - protein, 74 aa, Glycine max
  Clone ID: PAT_MRT3847_102682C.1.pep
SLLMLGWTPDLCSPITLLQDLDGTTYFQIQGASLGAVLKACENKSNLPAGGQIHSLVVKSSVSHHTLGGMHDAT

SEQ ID NO: 145807 - protein, 90 aa, Glycine max
  unsure (1)..(90): unsure at all Xaa locations
  Clone ID: PAT_MRT3847_102683C.1.pep
PAIFWFFHQPRFSGIPNTFQTKNKTSRPPSDKKVEKFXKNLPKKGFLPTPSPKKGKNFPFGPKLPGFFVFGVHGTSFFPKNRATTNGGMA

SEQ ID NO: 145808 - protein, 54 aa, Glycine max
  Clone ID: PAT_MRT3847_102684C.1.pep
WWFRGSFLGRCPCVCFRCLRGVPPALLFHSPLPVLASRCFIGAVCPSRAVFELR

SEQ ID NO: 145809 - protein, 70 aa, Glycine max
  Clone ID: PAT_MRT3847_102685C.1.pep
GRIDTILYRLQRQLLIFLAYSSVRDGDVIWGAAGSCSVSRVGLCNIFSIPFYWRICLASADHYFYYSAGV

SEQ ID NO: 145810 - protein, 84 aa, Glycine max
  Clone ID: PAT_MRT3847_102686C.1.pep
VGGVPQKTKKFFRGGEGTPPRFLFLGGGENKKKFGVKKEQTLGIMGNTPPWGKVSIKILVPLPPLFSPRLLRVFVGGHFSRGAF

SEQ ID NO: 145811 - protein, 27 aa, Glycine max
  Clone ID: PAT_MRT3847_102687C.1.pep
TQEVKLTTPLNDFVKLCYNYIRGGKII

SEQ ID NO: 145812 - protein, 74 aa, Glycine max
  Clone ID: PAT_MRT3847_102688C.1.pep
LLSITGSSLLPPPNSNSSPFPPSASFFYELKFKGSLATSLDLLFKGDGNLIEGVWFAKRRVGSILILSNASGGP

SEQ ID NO: 145813 - protein, 81 aa, Glycine max
  Clone ID: PAT_MRT3847_102689C.1.pep
TIARPREQTRTNQTLLPDVDGELGIGGNPLKLLCMGGGGHTAILLTSHNLEQHTRVFPGLTGAKSANSQAWIWLGRTVRRL

SEQ ID NO: 145814 - protein, 82 aa, Glycine max
  Clone ID: PAT_MRT3847_10268C.1.pep
EHGQAKAKLLITQQNMVSIFFSDQGPKGVTHLRQRMGVHTSILLPIRFISYQGPTKIKHNNINIPYSSFKIISLHKEMKSDI

SEQ ID NO: 145815 - protein, 49 aa, Glycine max
  Clone ID: PAT_MRT3847_102690C.1.pep
TYLGSSLFGDFPIIVFMRDFFFRKMYTYGHILLLSRFKDVLQKMFVQMN

SEQ ID NO: 145816 - protein, 88 aa, Glycine max
  unsure (1)..(88): unsure at all Xaa locations
  Clone ID: PAT_MRT3847_102691C.1.pep
PVTLSDNPPSPSNLLFRLHPDRYFRRFRVVFWTGCAGTKQXVYSTTLNDRTMAHMTRAHGDTARSPTYILRSTXRLHYHLPLNNQSYL

SEQ ID NO: 145817 - protein, 80 aa, Glycine max
  Clone ID: PAT_MRT3847_102692C.1.pep
MADHDAKEEQRPLNQWSLSKGGFMASMFIFVFSALDNMGFVANMVSIVLYFYGVVHFDLASSANTLTNFMGSTYLLSLVG

SEQ ID NO: 145818 - protein, 45 aa, Glycine max
  Clone ID: PAT_MRT3847_102693C.1.pep
TCFYPLYKNNYVIGCGSNLQTSSLLPSLSLLEPWILKHVHIFRVF

SEQ ID NO: 145819 - protein, 39 aa, Glycine max
  Clone ID: PAT_MRT3847_102694C.1.pep
NSTLILLINYKIYLQNCKLISLINTRTNYKIYFLTNMRE

SEQ ID NO: 145820 - protein, 71 aa, Glycine max
  Clone ID: PAT_MRT3847_102695C.1.pep
RGVGTMDPLLNNCPYFSSRVRGPFLNVFLGRWAILKGSSTKMAIVFRIKFGASRTRASPDFWLKKKSAGSF

SEQ ID NO: 145821 - protein, 52 aa, Glycine max
  unsure (1)..(52): unsure at all Xaa locations
  Clone ID: PAT_MRT3847_102696C.1.pep
SAXXXXXAFCCLXXFPXPSXSFSXLFXXXXLXACPXXXSXXPGCXSXLPLXL

SEQ ID NO: 145822 - protein, 88 aa, Glycine max
  unsure (1)..(88): unsure at all Xaa locations
  Clone ID: PAT_MRT3847_102697C.1.pep
TLTFXXKFSXIANAITXNMFIMNEIFFFFRPKIXFSFSVASKKKFTLPDSYYDYLTKAVXYXVTPFSRHIDHDLPKTFPFHPFLYTPY

SEQ ID NO: 145823 - protein, 53 aa, Glycine max
  Clone ID: PAT_MRT3847_102698C.1.pep
HNRTATCRKLELYGTHGDKANDMISSVHQVPDTSIKDSFIPLPRRAAICYAPT

SEQ ID NO: 145824 - protein, 88 aa, Glycine max
  Clone ID: PAT_MRT3847_102699C.1.pep
FRDQNRARVLGPGERVRSGRRRAMDNPEMQRFLQQEQQKAMMNEMVGKLTSVCWDKCITSAPGSKFSSGESTCLTNCAQRFLDMSVMI

SEQ ID NO: 145825 - protein, 81 aa, Glycine max
  Clone ID: PAT_MRT3847_10269C.1.pep
MCVPPLWFFVVLCVAPPLFCSTPLFFSLFPLGFFFRVRGFRVFCISAVGLFGAVWLLGVTGSCPKICPRSYCVRRGVIIKK

SEQ ID NO: 145826 - protein, 112 aa, Glycine max
  Clone ID: PAT_MRT3847_1026C.1.pep
QSSSVQDHIHAPSLSLSLSLSLTLCLSISLFNSKTLPPSNSNSPSIMGSEGSTVVGQYSTSSLPSSFPNIFFPSLYQLLLWFANYNYEFLVVLDRVYNYCCIWIMMIQMLCV

SEQ ID NO: 145827 - protein, 214 aa, Glycine max
  unsure (1)..(214): unsure at all Xaa locations
  Clone ID: PAT_MRT3847_102700C.1.pep
IGFCLEDEHRLLVYEFMPRGSLENHLFRRGSYFQPLSWSLRLKVALDAAKGXLHFLHSAEAKVIYRDFKTSNILLDSKYXNAKLSDFGLAKDGPTGDKSHVSTRVMGTYGYAAPEYXLATGHLTAKSDVYXSLGVVLLEMLSGKMAVDKNRPSGQHNLVEWAKPYLXNKRKXFRVLDTRLEGQYSTDDACKLATLALRCLSIESKFXPTMKWLQ

SEQ ID NO: 145828 - protein, 422 aa, Glycine max
  unsure (1)..(422): unsure at all Xaa locations
  Clone ID: PAT_MRT3847_102701C.1.pep
MGVCLSAQIKAESPYNTGFNSKYVSTDGNDFGSTNDKVSANSIPQTPRSEGEILRSSNLKSFPLSELKTATRNFRPDSVLGEGGFGSVFKGWIDENSLTATKPGTGIVIAVKRLNQDGIQGHREWLAEVNYLGQLSHPHLVXLIGFCHEDEHCLLVYDFMQRGSLENHLFRRGSYFQPLSWSLRLKVALDAAKGLAFLHSAEAKVIYRDFKTSNILLDSKYNAKLSDFGLAKDGPTGDKSHVSTRVMGTYGYAAPEYLATGHLTAKSDVYSFGVVLLEMLSGKRAVDKNRPSGQHNLVEWAKPYLANKRKIFRVLDTRLEGQYSTDDACKLATLALRCLSIESKFRPNMDEVVTTLEQLQVPNVNGGHQNGSRVRRRSADVNRGYQNPSVNGSRVRRRSADDISPMETPTAYPRPSASPLYT

SEQ ID NO: 145829 - protein, 107 aa, Glycine max
  Clone ID: PAT_MRT3847_102702C.1.pep
MAKRNVAANSSFERSTLASLDQKLAMAKRCSHEGVMAGAKAAVVATIATAIPTLASVRMLPWAKANLNHTAQALIISTVAGAAYFIVADKTVLATARKNSFNPPTNA

SEQ ID NO: 145830 - protein, 60 aa, Glycine max
  Clone ID: PAT_MRT3847_102703C.1.pep
GPRTIRPPHVFRKIINQPSILRDAFPIRWGFPYRLRSKKNKRITPLNSLKDPPCMLYHQR

SEQ ID NO: 145831 - protein, 95 aa, Glycine max
  unsure (1)..(95): unsure at all Xaa locations
  Clone ID: PAT_MRT3847_102704C.1.pep
GYTYANQLCGSLPSPCGEXGMSCYSLXSSMPNITATIGNYLLYSRPXQSILRTGKGLTVGWLSGSIAFDVPTPKGPLRILGDVLHVGXYHTDFDY

SEQ ID NO: 145832 - protein, 96 aa, Glycine max
  unsure (1)..(96): unsure at all Xaa locations
  Clone ID: PAT_MRT3847_102705C.1.pep
MNGGMSNTESKRACAKLAXNKKGAVFITMKPAXKGKVLIDPNKPKXRPSRALFACMEEFRKVFNTEHYYFKTVSAEGKSVGAKCNTIIDXAEKGPY

SEQ ID NO: 145833 - protein, 137 aa, Glycine max
  Clone ID: PAT_MRT3847_102706C.1.pep
RDEKKPKEGGGIFFFPKNKEKKRGQTTPPQPEGPEARTKIQRPKNLKHPMMKFSWTRTEDTDIIEWYNIWLDALDNFGRLYQGRDTAEIIEVKALQLLKGKDQDLKLHLEKVLKSGDYSGFQAECLTDTWIGKDRWA

SEQ ID NO: 145834 - protein, 36 aa, Glycine max
  unsure (1)..(36): unsure at all Xaa locations
  Clone ID: PAT_MRT3847_102707C.1.pep
YPGSDHTTSRHRIDETDRILEXXLSIYVRRCMTNVI

SEQ ID NO: 145835 - protein, 57 aa, Glycine max
  unsure (1)..(57): unsure at all Xaa locations
  Clone ID: PAT_MRT3847_102708C.1.pep
PMFGCTDAXQVLKELEEAKKAYPDAFVRIIGFANVRQVQLISFIAYKPPGCEESGGN

SEQ ID NO: 145836 - protein, 214 aa, Glycine max
  unsure (1)..(214): unsure at all Xaa locations
  Clone ID: PAT_MRT3847_102709C.1.pep
YRFQLTLNSDVCSRFVYSSAEQREAIVAAESRQVEEKVXRIIELKNKVCSGNDSNFVVINQKGIDPPSLDLFAREGIIALRRAGRGYKERIVLASEGEAVNSVDDLTPVWLGWAGLLYEHVLGEDKYISVESVKNPFSXTILIKSHYDPTIAQVXDAVRDGMRTLEYTLEDEFVFLGAGAYESAARQFMMKEVQKTVQGRAQLDVEFFVDGSFL

SEQ ID NO: 145837 - protein, 184 aa, Glycine max
  Clone ID: PAT_MRT3847_10270C.1.pep
MLDEELARAGTVPDVFVVCRIFEKSGSGPKNGAKYGAPLDEKEWDVEDEQEEEEENEQKDVAPLLVPHNAVAPPPPLSVVADNAEAHPPLTATVDNKYMVAPPPSFQANFDDEVFNAGAYVETNDLDMELNWNDIIGSDTFPSLNYHHGECSSHAEYSKVFIKDQEPSAGTFGISRPEMSGLLI

SEQ ID NO: 145838 - protein, 307 aa, Glycine max
  Clone ID: PAT_MRT3847_102710C.1.pep
MSLRVLNPNAEVLNKSAALHMNINAAKGLQDVLKTNLGPKGTIKMLVGGAGDIKLTKDGNTLLKEMQIQNPTAIMIARTAVAQDDASGDGTTSTVIFIGELMKQSERYIDEGMHPRVLVDGFDIAKRATLQFLEKFKTPVVMGGEPDKEILKMVARTTVRTKLYESLADQLTDIIVDAVLCIRKPEEEIDLFMVEIMHMRHKFDIDTRLVEGIVLDHGSRHPDMKRRAENCYILTCNVSLEYEKSEVNSGFFYSSAEQREAMVAAERRQVDEKVKKIIELKNKVCSGNDSNFVVLNQKGIDSPSLDL

SEQ ID NO: 145839 - protein, 161 aa, Glycine max
  Clone ID: PAT_MRT3847_102711C.1.pep
MMSPCNVILSIFFLVCTRTPLLSLAQNTPQDFLDVHNQARAEVGVGPLSWNHTLQAYAQSYANKRIPDCNLEHSMGPFGENIAEGYAEMKGSDAVKFWLTEKPYYDHHSNACVHDECLHYTQIVWRDSVHLGCARAKCNNDWVFVICSYSPPGNIEGERPY

SEQ ID NO: 145840 - protein, 85 aa, Glycine max
  unsure (1)..(85): unsure at all Xaa locations
  Clone ID: PAT_MRT3847_102712C.1.pep
RGALPPRPGKKLSNPPKIQKMGAPLTLGRNRAKSGLKNKRFAWAFFXTAGGHKLEAHRFKXPRDRPTQSLAKKKSELSSDAKAAV

SEQ ID NO: 145841 - protein, 39 aa, Glycine max
  Clone ID: PAT_MRT3847_102713C.1.pep
IILFTDDMHTLILYISFYRTFICFYLTKSSSCNMCTTVY

SEQ ID NO: 145842 - protein, 59 aa, Glycine max
  Clone ID: PAT_MRT3847_102714C.1.pep
HASGNAKPSAWITVLVWLLRIRISVDKEVVVLLWFGDLIDIRQFAAVGQVYMFKLMLQN

SEQ ID NO: 145843 - protein, 97 aa, Glycine max
  unsure (1)..(97): unsure at all Xaa locations
  Clone ID: PAT_MRT3847_102715C.1.pep
LLEDAVGNFFTDAVFFAHNQVMELYQLQLNNIXLRPAFTHGGAIGLASGWAQSLVFGCKALVPWDTRMCVSXSHVGLPTGLEEHNALSFATLARVEP

SEQ ID NO: 145844 - protein, 84 aa, Glycine max
  Clone ID: PAT_MRT3847_102716C.1.pep
IRCTLNLKVSLHIWLSLNLVITLIQLSDWIIRFLFILKKSDYFFYDNNIDIKIILLKLVINFCLKTVKVQDRYFMLNTIYSIPK

SEQ ID NO: 145845 - protein, 144 aa, Glycine max
  Clone ID: PAT_MRT3847_102717C.1.pep
SMEDICKRWTEYFDSTRSRVNHPQSINCDFCGEEHFNDNCHLYSTKNSWGGQELYPYNQYEESTPNLESVFTKFTAYHPSSTANQNSMQNQEIQVGKSYSMENYQWEQELQPYNQYEEERTSNLDNLLMQFKEVNEYTQQAFKS

SEQ ID NO: 145846 - protein, 249 aa, Glycine max
  Clone ID: PAT_MRT3847_102718C.1.pep
MTHTLARNNTMCTLEKRGPLFVLTLTSEFDDQHRLNPTLLSSLLAALSEVKSQATAGSALLTAAHGRFFCNGFDFRWAQAAGDQPSARLRLRRMSDALRPVLAALLSLPIPTVAAVSGHAAAAGAIFALAHDYVLMRADRGVIYFPEVDLGITLPEYFAAVAGAKIPAAALRDVVLAGRKVRAEGAVEMGIVHSAHDSAEGTVEAAMRLGEELARRKWVGDAYAEIRKSLYPEVCAALGLTPKTIVSKI

SEQ ID NO: 145847 - protein, 205 aa, Glycine max
  Clone ID: PAT_MRT3847_102719C.1.pep
PLREVLGQSEPWLNWGPVWRILSSVSSTFSQALPAAPSPFSSPRIHTKQIIKGYKYDKEAKVVVNVTVEGGPGPVQTMVKLGSSVEDTIKRVVDKYTEEGRSPQIDANMASSFQWLPYLFDLLTAFGTLCFAHSEDIQMPRRLWATSINAWKSQRLCGCAPASPPLHSTLLIIYYTLLNISDIYFRICIIVRRAHRLWKILVCSQ

SEQ ID NO: 145848 - protein, 68 aa, Glycine max
  Clone ID: PAT_MRT3847_10271C.1.pep
AISKQIFIFFPFAIFSLSFFSSSPFSFFHYLLPMTLNFILLQALHSFIHDRYEIYQRRWLGHHFRIWV

SEQ ID NO: 145849 - protein, 130 aa, Glycine max
  Clone ID: PAT_MRT3847_102720C.1.pep
FFFFSQYLTRCGYLASYRRMSLAFALFAVVLAAVSDLCHRPLQLLHDALNHSNLFTFMCRGQTVLPHVQLSFVAFLHPLLEPAQLAEAPQQTSQLVLRIATRKLLEQLGLLIGSGRRDELGYEEGRCRRI

SEQ ID NO: 145850 - protein, 74 aa, Glycine max
  Clone ID: PAT_MRT3847_102721C.1.pep
LKYIHSTSFPHAEMSKFVKGHNNQDQNQNHSQKSRSLQRIHNSHNHHQTRNLCQKSQMSLHQVIHNQHQLQRGS

SEQ ID NO: 145851 - protein, 44 aa, Glycine max
  Clone ID: PAT_MRT3847_102722C.1.pep
IPINFPLTHHNSLTNVSHPDSIFHVFSSPHLLFMKKIYSSPSLE

SEQ ID NO: 145852 - protein, 147 aa, Glycine max
  unsure (1)..(147): unsure at all Xaa locations
  Clone ID: PAT_MRT3847_102723C.1.pep
PIDVSHKLPPNPPLAARILLTMLDSIPFVHSSILSTKLPPPSALIVDMFGFAAFPMARDLGMLIYVYFATSAWFSAXPYTFPPWTXKMIESHGGKXEPLVILGCEAVRFEXDTLEPFLSPIGEMYQGYLTAAKEIVTADGILMNTWQ

SEQ ID NO: 145853 - protein, 72 aa, Glycine max
  Clone ID: PAT_MRT3847_102724C.1.pep
KHDFNLFYFPFFTFLCLFTPFFFFFFLGGDKGVSLAPMHSSIVIRKSDLRSSLRTERWLNYFYPFFARYIFD

SEQ ID NO: 145854 - protein, 264 aa, Glycine max
  Clone ID: PAT_MRT3847_102725C.1.pep
MHQFFSAVFLFLLLPLCSNAQTARQANNTGFTCNFTRTCTSYAFYRATAPNFTDLASIGDLFSVSRLMISTPSNISSSSLNTPLLPNTPLFVPLTCSCNPVNASFGSLSYANISYTINPGDTFFLVSTIKFQNLTTFPSVEVVNPTLLATNLSIGQDTIFPIFCKCPPNSQGTNYMISYVVQPEDNMSSIASTFGAEEQSIIDANGGETTLHDYDTIFVPVARLPALSQPAVVPPAPPPVIGSNNDDRTRTVRGLGVGLGIVGF

SEQ ID NO: 145855 - protein, 174 aa, Glycine max
  Clone ID: PAT_MRT3847_102726C.1.pep
MELLCTANAILPSRSLSIPTPYSLPLKTSLPFPRFNFPKIERLRGLQPCVSVSEGSSAEAEVLEESRIRRVCDKLIGVFMVDKPTPTHWRRLLAFSREWSNLRPHFFARCLERADAAEEDPAMKEKLLRLARKLKQIDEDVQRHNDLLEVVRRDPSGISEIVSKRRKDFTEEFF

SEQ ID NO: 145856 - protein, 74 aa, Glycine max
  unsure (1)..(74): unsure at all Xaa locations
  Clone ID: PAT_MRT3847_102727C.1.pep
HAYVHNLYKQLVSSGHALGAKRWVATLYLQFXILASAMSSNIPTVNVCVITNQDGRNIMMHLAEKTVISLCARL

SEQ ID NO: 145857 - protein, 45 aa, Glycine max
  Clone ID: PAT_MRT3847_102728C.1.pep
DYHKSNTTYNTIKAYYYDPQKLTNTTNNNVSYLTSRPPTRPLRRE

SEQ ID NO: 145858 - protein, 86 aa, Glycine max
  unsure (1)..(86): unsure at all Xaa locations
  Clone ID: PAT_MRT3847_102729C.1.pep
SYINHQHKSITGDSYVGRVDPVITFIFATSSLWTIFHTRSSNRSVLYIYLQLVYYLLLAKSNVQNFHTAMNYIHITLQADXYMLIL

SEQ ID NO: 145859 - protein, 78 aa, Glycine max
  Clone ID: PAT_MRT3847_10272C.1.pep
SKRPPYRLGVMFSCLRKNMNNFSFLITLYVIFFPWQDISENVSLLLRFSYGLGETAYIIKTGLEITNSLQLIVRDGRQ

SEQ ID NO: 145860 - protein, 157 aa, Glycine max
  Clone ID: PAT_MRT3847_102730C.1.pep
MALSPLSMLVVIATIFLPSVAVAKEFVVGDGHGWTIGFDYAAWAADKTFQVGDVLGKFNYAVGEHNVFKVNGTAFQSCTIPPASEALSTGNDRIVLAIPGRKWYICGVEDHCSAGQKLVITVQPQTLPPTLPPSPTPAPSPRQHRPHFGRWVPNIFH

SEQ ID NO: 145861 - protein, 85 aa, Glycine max
  Clone ID: PAT_MRT3847_102731C.1.pep
PVFVVFHITKAFFHGQHGFFFPRRQNFPRSNFLKQPLLGESLLLRQQLLKIRVCFKFRVPGASAQKRERLLAFSDPFAGKNQMET

SEQ ID NO: 145862 - protein, 194 aa, Glycine max
  Clone ID: PAT_MRT3847_102732C.1.pep
MVKEHKVRFEYEKQSQVRAALAEELAMLKQVNEFAAKGRGPPRKNGFARASSMSPNARMARIASLENMLSISSNSLVASAITFQNSVDKKNYIRIKVVNFGTTAVNLKISLDGLEPNSLQLSGSTKTVLTSANVMDENSFSQPKKVVPIQSLLQNVGKDMNVTVPPRSFTSFDLVKQSSTLKMAGSDSSTRSSI

SEQ ID NO: 145863 - protein, 204 aa, Glycine max
  Clone ID: PAT_MRT3847_102733C.1.pep
LDAPFAALAEAGFLIGLEKNSDVIQMASYAPLFVNANDRRWNPDAIVFNSFQLYGTPSYWVQVFFSESSGATLLSTSLQAPSSNSLVASAITFQNSVDKKNYIRIKVVNFGTTAVNLKISLDGLEPNSLQLSGSTKTVLTSANVMDENSFSQPKKVVPIQSLLQNVGKDMNVTVPPRSFTSFDLVKQSSTLKMAGSDSSTRSSI

SEQ ID NO: 145864 - protein, 64 aa, Glycine max
  Clone ID: PAT_MRT3847_102734C.1.pep
WMPSACPRSRCCMNRCTSGMGTCCIFSSSSGPWTHFRVCQVPPKLDTASMSAQSNTLAASEGDD

SEQ ID NO: 145865 - protein, 273 aa, Glycine max
  Clone ID: PAT_MRT3847_102735C.1.pep
ARGAYPDIQIISNCDGSSRPLDHPADMYDYHVYTNANDMFSRAYGCEKTTENGPKAFVSEYAVTGKDAGTGSLLAALAEAGFLIGLEKNSDVIQMASYAPLFVNANDRRWNPDAIVFNSFQLYGTPSYWVQLFFSESSGATLLSTSLQAPSSNSLVASAITFQNSVDKKNYIRIKVVNFGTTAVNLKISLDGLEPNSLQLSGSTKTVLTSANVMDENSFSQPKKVVPIQSLLQNVEKDMNVTVPPRSFTSFDLLKQSSNLKMAGSDSSTWSSI

SEQ ID NO: 145866 - protein, 267 aa, Glycine max
  unsure (1)..(267): unsure at all Xaa locations
  Clone ID: PAT_MRT3847_102736C.1.pep
YCTDDGLGYYEFXPLPEDLGASPIWVFNNGVSHNDQVDTSAVLPLVQEALDGIEFARGDPTSKWGSLRAAMGHPEPFDLRYVAVGNEDCGKKNYRGNYLKFYSAIKSAYPDIQIISNCDGSSRPLDHPADMYDYHVYTNANDMFSRANTFDHTSRNGPKAFVSEYAVTGKDAGTGSLLAALAEAGFLIGLEKNSDVIQMASYAPLFVNANDRRWNPDAIVFNSFQLYGTPSYWVQLFFSESSGXTLLSTSLQAPFSNALXASAITFQ

SEQ ID NO: 145867 - protein, 572 aa, Glycine max
  unsure (1)..(572): unsure at all Xaa locations
  Clone ID: PAT_MRT3847_102737C.1.pep
RSLPITEAEYPMSETAGDSREMDEVAKEWEHTLLQNSMDRELHELNKRLQQKESEMKLFGISDAEVLKQHFGRKIMELEDEKRVVQRERDCLLAEVENLAANSDGHTQKLEDIHAQKLKALEAQILDLKKKQESQVQLMKQKQKSDEAAKRLQDEIQSIKAQKVQLQHRIKQEAEQFRQWKASREKELLQLKKEGRRNEFERHKLQALNQRQKMVLQRKTEEAAMATKRLKELLEARKTSSRETLVTMNGSGTNGQSNEKSLQRWLDHELEVMVKEHEVRFEYEKQSQVRAALAEELAMLKQVNEFAAKGRGPPRKNGFXASYMSPNARMARIASLENMLLEKNSDVIQMASYAPLFAEERERAFSNRGRWNQLRSMGEAKNLLQYMFNSVADARCQLWEKDMEIREMKDQIKELVGLLRQSEMKRKEVEKELKVREQAVGTTLATPPSGDSPNPSKQYAEDMKGLLSPVSMPVPKQLKYTPGVANGLVRESAAFVDQGRRMVPIGQLSMKKLAIVGQASGKLWRWKRSHHQWLLQFKWKWQKPWRLSEWIRHSDETIMRTKPRSQALSRIR

SEQ ID NO: 145868 - protein, 99 aa, Glycine max
  Clone ID: PAT_MRT3847_102738C.1.pep
LFPHTFHCRKTRVLILCRRVTLLIVFLVMLLRWKRSIIQISQINHQEYIIGLVENLTVGVGCIIMRTFQTLSLQHLFAYHLTFADVDVRIIQIVVFLIT

SEQ ID NO: 145869 - protein, 288 aa, Glycine max
  Clone ID: PAT_MRT3847_102739C.1.pep
MDDSKQQQQRKKNYRKRSAPTDEDELPQSQSNNESDDERERRMALEEIKLLQKQRERKSGIPANPSLQVQSGTGGGLAAKAAEKNDGDGGDKDELVLQDTFAQETAVMDEDPNMVNYIEHELAKKRGRKIDAADQAENELKRAEDELYKIPEHLKVKRRNSEESSTQWTTGIAEVQLPIEYKLKNIEETEAAKKLLQEKRLMGRTKSDFSIPSSYSADYFQRGRDYAEKLRREHPELYKDRNHQDDSSGSKKNDSSTDAAGAVQRQAATDEFMLERFRKRERHRVMRR

SEQ ID NO: 145870 - protein, 41 aa, Glycine max
  Clone ID: PAT_MRT3847_10273C.1.pep
NIYEILTNFNNKNINFSSTKLLFNILFTYFSNVILFHIMKF

SEQ ID NO: 145871 - protein, 39 aa, Glycine max
  Clone ID: PAT_MRT3847_102740C.1.pep
CSGSNIYTQLIDFIFVYCINSTHCHGYADKLVTQAIPLK

SEQ ID NO: 145872 - protein, 117 aa, Glycine max
  Clone ID: PAT_MRT3847_102741C.1.pep
RSLIHRLILGYYMGGLMSRTSSAPMSVLLFTQNIARHPITWDPTQQRPTQEVIHAVHSALHFALDTCVDHPDEPLSFDVQDSVLVIPNRKDLKQRESPKSGWEVNAKLFIYTARKES

SEQ ID NO: 145873 - protein, 82 aa, Glycine max
  unsure (1)..(82): unsure at all Xaa locations
  Clone ID: PAT_MRT3847_102742C.1.pep
XLCLCNSAGXXCXXXLXXXLXSPNLXFGPKQSQKRVXLPLRLNSIANAXNKERAXLRTLRELXSAXVHGGVPHMEXHVSDRA

SEQ ID NO: 145874 - protein, 107 aa, Glycine max
  Clone ID: PAT_MRT3847_102743C.1.pep
GTYLIAVISMRHHHIHLHRHTLNNHTCSLLIERMDKQTVSGERLDMVMLNSLHVNMTDNLLSCPRAADSSILSDALYTRYVDHSPKMYYGTILCYDHVSQPSQHCYD

SEQ ID NO: 145875 - protein, 105 aa, Glycine max
  Clone ID: PAT_MRT3847_102744C.1.pep
PTHKIKKKKRREKEPDPQIQVRGERFTFPNSNSIIAPSVLLLITTTAKVLPSINPTDFNPITGPTSTTLHSSHRTRDPSIRGFPFSSSELNPMEKRGNWSEKGEN

SEQ ID NO: 145876 - protein, 57 aa, Glycine max
  Clone ID: PAT_MRT3847_102745C.1.pep
FWHQLERLPSGLRKKSIPKKIYAIVKREFTLFNIHHQICASVIHFSLRIYILSKKIM

SEQ ID NO: 145877 - protein, 266 aa, Glycine max
  Clone ID: PAT_MRT3847_102746C.1.pep
PAPPKSQGVRFSAVYSSPLDRARSTAVSVCKEVNFSEEQIQSTDALAEISQGNWEGCLRSEIYTPEIQGLIDRFQPDFTAPSGESLRQVEFRMIHFLNGTVLALHEKLLDLSSHQNDNQAFAQNNSHALLTNSLHDQDGPSLPPNQWDLLNRHRPPFSRKKSGKSRLQFVTTTGDEIEDEISSGNVNHGSSLHNSGFSSFSPTVSCIGLFTHSLPIKCLLTGLLGCSPLMSHKFCIEDSSVTVLQHSLRTGWQIKRLNDTAHLRLL

SEQ ID NO: 145878 - protein, 74 aa, Glycine max
  unsure (1)..(74): unsure at all Xaa locations
  Clone ID: PAT_MRT3847_102747C.1.pep
MTXALSAQAEAAGGLKALIEQNGDTGSDTRGEPHLELLEPATVGKQVPESGEQAQGGEEQLPGNGXQAPTPVAD

SEQ ID NO: 145879 - protein, 76 aa, Glycine max
  Clone ID: PAT_MRT3847_102748C.1.pep
KKKGLFVLCSFCFFSCVVMNDYAKERERRRRGCCSVVQVGWLGCGCECAEEQVEIDKKIDFISEQKLEPNGLNTHH

SEQ ID NO: 145880 - protein, 84 aa, Glycine max
  Clone ID: PAT_MRT3847_102749C.1.pep
EILESYGCINTINRKNPFYISEIIIILTNNNMLRVLIGLSYAITQSFFVKIKVVDPKMFQLIYNMISQFYFVNNFSKQKGFGTL

SEQ ID NO: 145881 - protein, 38 aa, Glycine max
  unsure (1)..(38): unsure at all Xaa locations
  Clone ID: PAT_MRT3847_10274C.1.pep
RAGPTSXTAAIRLQVSTCFISIFEVIVQLRGDHFFYTS

SEQ ID NO: 145882 - protein, 85 aa, Glycine max
  Clone ID: PAT_MRT3847_102750C.1.pep
APPSPFFFKLMIFLAIKIHFTGKTLGTVIIFTQQPKPSKPFLPKLKSMNGHFSSLNNSLNIIQSPNIRYPLNSLSLCKSIYSHTK

SEQ ID NO: 145883 - protein, 60 aa, Glycine max
  Clone ID: PAT_MRT3847_102751C.1.pep
KTQPLVVRPSETSGMNHHRLHELMGVDPGTTPVCHFLGSKAILWVPNLFMDTAYQPNVVV

SEQ ID NO: 145884 - protein, 102 aa, Glycine max
  Clone ID: PAT_MRT3847_102752C.1.pep
INDRRGMQQASQHLTYDSILGTFNADVKPVGSNVISVDGTESTVVSDRSPANLPWDDLGIDLVIEGTGVFVYREGAGKHIQAGSNNVLINAPVTGDILTYIV

SEQ ID NO: 145885 - protein, 83 aa, Glycine max
  Clone ID: PAT_MRT3847_102753C.1.pep
NTQESIQPSIVVHDTKKFIQPSNHVVHNMKEFIHPSNVVHDMSDEELLWRASMTPKIREYPFDRVAKVAFMFLVRGPVPLAIF

SEQ ID NO: 145886 - protein, 233 aa, Glycine max
  Clone ID: PAT_MRT3847_102754C.1.pep
LCVSMCGVSLCSFFSVCFIVIVFPCFSRSFCFGLLLLWRSFVAFCSSSCLCFLLFGLCSVVPLRILLVLLFRLSFVCLVCSLFGFLCSFSAFLGCSRICFVFCYLFVLSCARSRSISLVLFFFRGFFFSSFFGMFCFFLFVFLWLVYFLLRYLVRLSCGVFFFFCFCCFFFFVVVRLCPRFHASHSSSVASNGGNVIVGLPGGEASHGLEASEWSNHAGTGTVDSGNSWGRDH

SEQ ID NO: 145887 - protein, 104 aa, Glycine max
  Clone ID: PAT_MRT3847_102755C.1.pep
NKNYKKFSRIPSYITHKILHSPSLEDGGLLIPPYNLTILFTLSPNFTSLPVLLHPPYYPNSSLSPPLLPLPTPLPSSSPPTFPNPPPPLPLTFLHLLLFSPLLP

SEQ ID NO: 145888 - protein, 118 aa, Glycine max
  unsure (1)..(118): unsure at all Xaa locations
  Clone ID: PAT_MRT3847_102756C.1.pep
TRPLVLDRDLELVEIDPYDRSYILYXNIGLIHTSNGEHTKALEYYFRALERNPFLPQAFNNMAVICHYVREQALXQGDSEVAESWFNQAAEYWKQAIALTPGNYIEAQNWVKITGRFE

SEQ ID NO: 145889 - protein, 72 aa, Glycine max
  unsure (1)..(72): unsure at all Xaa locations
  Clone ID: PAT_MRT3847_102757C.1.pep
IWKRSKVKYELYKKSGLIKIDRVLYSSFVFSHNYRFIPHTIYEDXDPLYVFIIILYPIPFLMIIARPKSICS

SEQ ID NO: 145890 - protein, 42 aa, Glycine max
  Clone ID: PAT_MRT3847_102758C.1.pep
WAPARAGPESEVRARPTGLLWFLVLLQGDILFFPYVFANSEN

SEQ ID NO: 145891 - protein, 61 aa, Glycine max
  unsure (1)..(61): unsure at all Xaa locations
  Clone ID: PAT_MRT3847_102759C.1.pep
RTISLTCVNATLDYGSSNLDWAANKVDSKFDEWXATLKKKLRSRKYPRQSGEXKRGTKGPK

SEQ ID NO: 145892 - protein, 110 aa, Glycine max
  Clone ID: PAT_MRT3847_10275C.1.pep
KKPGGAPGPGELPTVSCVPGKGTAPQKKTHLPPWVLGPKTQSRSGGLPKRFFLVKQLIHSPHPWGQGGGGAIHGAPKRLTSPPPLFSTKNWPKQGFGFKPEGEHNLGFPT

SEQ ID NO: 145893 - protein, 147 aa, Glycine max
  Clone ID: PAT_MRT3847_102760C.1.pep
MILAVLFANAEGNILIERFHGVPAEERLHWRSFLVKLGADNLKGVKNEELLVACHKSVYIVYTVLGDVSIYVVGKDEYDELALSEVIFVITSAVKDVCGKPPSERLFLDKYGRICLCLDEIVWQGYLENTEKDRIKRLIRLKPPTEF

SEQ ID NO: 145894 - protein, 89 aa, Glycine max
  unsure (1)..(89): unsure at all Xaa locations
  Clone ID: PAT_MRT3847_102761C.1.pep
SSVFASPFRRLSLLAPAIFLPWVVRYIPVSCPPGSPVPPVWVWGPPSLSLVLLVRAFAPRLFSLAWSWRLPLIFFSPVXAPLLLVPRTR

SEQ ID NO: 145895 - protein, 169 aa, Glycine max
  Clone ID: PAT_MRT3847_102762C.1.pep
IEFWNACNVSLVHRTFFFFLFKGEPSDSIYMEVELRDLSYLTQTFSQGNQTVEDGRTLTPELSMRYLRKERQMLSKQMHKRLSKYDRQNLYLKWGLRLSSKHRSLQLAHQLWSDTKDMDHVRDSASIVAKLVGLVEPEQAFKEMFGLNFTPQPTSRKSFSWTASVRHIL

SEQ ID NO: 145896 - protein, 279 aa, Glycine max
  Clone ID: PAT_MRT3847_102763C.1.pep
MFWKLASLSASSPVETILDKENFTLEELLDEEEVIQECKALNSRLINFLRDQAQVEQLLRYIIEEPPEDAENKRAFKFPFIACEIFTCEIDVILKTLVDDEELMNLLFSFLEPNRSHSTLLAGYFSKVVVCLMIRKTVPLMKYVQAHQNVFRQLVDLIGITSIMEVLVRLVGADDHMYHNFIDVMQWLAESNLLEMIVDKLSPSSPPEVHANVAETLCTITRVASSTLAIKLSSPSFVAKILGYALEDSQSMSSLVNSLSVCISLLDPKKSATASPLFH

SEQ ID NO: 145897 - protein, 122 aa, Glycine max
  Clone ID: PAT_MRT3847_102764C.1.pep
GNQTVEDGRTLAPELSMRYLRKERQMLSKQMHKRLSKYDRQNLYLRWGLRLSSKHRSLQLAHQLWSDTKDMDHVRDSASIVAKLVGLVEPEQAFKEMFGLNFTPQPTSRKSFSWTASVRHIL

SEQ ID NO: 145898 - protein, 59 aa, Glycine max
  Clone ID: PAT_MRT3847_102765C.1.pep
PSIKTDSRTLPLSMLPVRNLERKKKTMEKGLLLQHFNSQAIKGNTFIVGVIYFKRYNCC

SEQ ID NO: 145899 - protein, 103 aa, Glycine max
  Clone ID: PAT_MRT3847_102766C.1.pep
QHVNTMSFWTPFAAVTVSIGDARVFTAPKCSPTTHSPHRNLIATRASIITGSPLLSRRNHGRNGACNAVPVSIEREHSTQDGNSLDDVARHCCHGRARRNHHW

SEQ ID NO: 145900 - protein, 56 aa, Glycine max
  Clone ID: PAT_MRT3847_102767C.1.pep
TRKLNEICHKKGIIKMARPHDISGPYPIQWVLGSSNKTFPIILSNQGVIIICGHLK

SEQ ID NO: 145901 - protein, 46 aa, Glycine max
  Clone ID: PAT_MRT3847_102768C.1.pep
QFHFQIDMLTEILDWSVYHITINTSLLSLCIHHFNGFCLHIRFTPS

SEQ ID NO: 145902 - protein, 107 aa, Glycine max
  unsure (1)..(107): unsure at all Xaa locations
  Clone ID: PAT_MRT3847_102769C.1.pep
VTETQLKVPIIRFGMIGTNSSKSCDWSHDSDLDVLAIHDTGGVKQAYHLLIYDSILRTLDADVNPVVTNVISLDGXVIIVVSDRIPAYLPWNDFAIDLFIEGTCVIV

SEQ ID NO: 145903 - protein, 70 aa, Glycine max
  Clone ID: PAT_MRT3847_10276C.1.pep
DNIQNITISAAHVIADKVGHTACYAPHLTGEKAPLVYRLMKAIWRTPRAEVTILGALQLNLALMEALTIN

SEQ ID NO: 145904 - protein, 43 aa, Glycine max
  Clone ID: PAT_MRT3847_102770C.1.pep
IRRMKYFFFLISMRDIVCFDIDYANGFEKEPHSLLREVECKRL

SEQ ID NO: 145905 - protein, 153 aa, Glycine max
  Clone ID: PAT_MRT3847_102771C.1.pep
KIECCRKKNRITTQIKRSRISPEFPSTHASAHLESRMDGKRTLTGVIFQILSPIMHFQIDMILQNPLLSVRMISPRTLNISSQINFTTRKVISIVLVRTGKTLHLLWLLVITYQASAIYQCILLCILDCESASKQACLGVILLLLSLLILLVS

SEQ ID NO: 145906 - protein, 89 aa, Glycine max
  unsure (1)..(89): unsure at all Xaa locations
  Clone ID: PAT_MRT3847_102772C.1.pep
ERKRRSKEGHIRVNKNXMCRKKNRITTQIKRSRITHLESEMGGKRTLPRSHIADSFPNNAFSDRYNPSQSLGICEDDISSDSKYIKSIR

SEQ ID NO: 145907 - protein, 42 aa, Glycine max
  Clone ID: PAT_MRT3847_102773C.1.pep
SKVQCFYNTFHNHHHLCSQSLKNYFLFQKKRNYLSICSEKQS

SEQ ID NO: 145908 - protein, 57 aa, Glycine max
  Clone ID: PAT_MRT3847_102774C.1.pep
SSTVNVVSLHNFAVITYQASAIYQCILLCILDCESASKQACLGVILLLLSLLILLVS

SEQ ID NO: 145909 - protein, 58 aa, Glycine max
  Clone ID: PAT_MRT3847_102775C.1.pep
QLSIIESELDDDFISVHGGTIRVGEVTFNDMNHSPSSLQPSQRKQQQAVLCFCEKEIH

SEQ ID NO: 145910 - protein, 120 aa, Glycine max
  Clone ID: PAT_MRT3847_102776C.1.pep
RPNQNRKTSYAQTAQVRAIRKKFIHIAQRESNCDLNELVNKFIPEIIGKEIEKATQGIYPLQNVFIRKVKTLRAPKVDVGKLLESHGGADAVSSDVGKPVERAAEPAKTDKKPAKPAKKA

SEQ ID NO: 145911 - protein, 99 aa, Glycine max
  unsure (1)..(99): unsure at all Xaa locations
  Clone ID: PAT_MRT3847_102777C.1.pep
VFPQIFGFSFAHPRVVPIHALLGVDQFLFPHVIVVEPCARWQPVWHIFVCSQFLLLPITLHHYFVLNMVVLTHKKLXQIMCMIFFSRCVSLSQHFNGFV

SEQ ID NO: 145912 - protein, 113 aa, Glycine max
  Clone ID: PAT_MRT3847_102778C.1.pep
LPQVTFICDAPRRSPDTDTTGSRRWPSSHFGSHRASPTQLNPCYTLCLRKRSKSRPSMWFRHEGTCPSLPRMKNRAGPAKVLLPLGPRARVPQAIPLLGSLGLAPGCSSKPHS

SEQ ID NO: 145913 - protein, 199 aa, Glycine max
  Clone ID: PAT_MRT3847_102779C.1.pep
MAEIQILNLGGPPSLSRRKLPCHSNSQNWTCLQHKLKCNGRFLCLFSNNRKEEQARKALEGALSGKKNEFDKWNKEIKRREELGGGGDTGGGGWFGWGKRFGWSNDDNFWQEAKQAILTILGLVLVYLLVAKGDVLLAVIFNPLLYALRGVRNGFGFISSKVLKNTSTSNQPDFGGLSQKKAYQHTSAMENVVRKWGSD

SEQ ID NO: 145914 - protein, 142 aa, Glycine max
  unsure (1)..(142): unsure at all Xaa locations
  Clone ID: PAT_MRT3847_10277C.1.pep
SSLKSNKKVSSLVDKWKAATEELLEEEEELIVXYEVLERKRQREIEEWHAKQIASGEAKDNANFQPLGGDWREKVKRRRAQAAKESVSTPQDAIEHNQQQPDPSEHSKGLPTNWQAYWDDSTKQIYYGNTVTSETTWTKPTR

SEQ ID NO: 145915 - protein, 162 aa, Glycine max
  Clone ID: PAT_MRT3847_102780C.1.pep
MAPPPPLPTLLLTTLLSLFSSSTSAPPTTTACRDTCGSTQVKYPFGTGHGCGSPLFSPYVTCGSNGTGDQLFLKSHTGSYPVSSISYTTSTITLSPPSMSTCSSMHPSSTNFGLDWTSPFQIASSTFLLLSCQPPTTSLSSPICDPSFDYLCASLYSCPAVV

SEQ ID NO: 145916 - protein, 119 aa, Glycine max
  unsure (1)..(119): unsure at all Xaa locations
  Clone ID: PAT_MRT3847_102781C.1.pep
QNGECEKRRRCCESIAVSNAILIELMIFCVRYVTTATSMKRKKHHTEKSRIIGLLVVSFLRSRILHRTLMIAIYGSLLLLFALFSLFAPSPVNEINLQTQNNDQVRSRFEVLAVXEDAA

SEQ ID NO: 145917 - protein, 50 aa, Glycine max
  Clone ID: PAT_MRT3847_102782C.1.pep
SITLSPKWSLKSKKYLSSQVFEIILISLPNVKESFSNWFLNFTQICQLKD

SEQ ID NO: 145918 - protein, 48 aa, Glycine max
  Clone ID: PAT_MRT3847_102783C.1.pep
HSYPKCPHSYNYTNTQIPILLFSHLFFQLILYINNILNSLQLIYYISP

SEQ ID NO: 145919 - protein, 79 aa, Glycine max
  Clone ID: PAT_MRT3847_102784C.1.pep
IVAFQKSKIKEKPFLKNIKKKTKKKRGGPPLLHLSPRILFRARSLRGTQFSLWGGILKLGETKGITVPRGKLFPVQISP

SEQ ID NO: 145920 - protein, 84 aa, Glycine max
  Clone ID: PAT_MRT3847_102785C.1.pep
LGRRVLLCSSFAYAPCSFVPSSSFSRPPVCLSSCSPPLGDKHSSGAMLSPPVRSYALSRFSCGDNGAGCLNVPPSVVFSQVSNA

SEQ ID NO: 145921 - protein, 85 aa, Glycine max
  Clone ID: PAT_MRT3847_102786C.1.pep
RSHERASLLIGVDNAELLLRKHTQTPTSPPSTTCLSQLSLPDLVQSTHASLFLSKFGISICFNLIHLAWGLGFVAFTPILISVYL

SEQ ID NO: 145922 - protein, 183 aa, Glycine max
  Clone ID: PAT_MRT3847_102787C.1.pep
MQKATNTNTNAVALHNTHVKLLAFDLLSLTQSPFPSSDATTSFFRRGIPISRVETVGTITLRDLKHDRFLRFAVDDGTACVPCVLWLNDANSPSVARRRRHELAARFAALVKLGAVARVRGRLSRFRGTLQVTVPDVAIERDPNAEIFHRLDCILLARNCYNILPPPSSYTPPQPPLPLPPPK

SEQ ID NO: 145923 - protein, 66 aa, Glycine max
  Clone ID: PAT_MRT3847_102788C.1.pep
NAKRMDPQGAPRIIPAVVLSLETIRVSSLVVVDRNWSKFWFESDWTVVVEAFKNASLVPWKVAFFL

SEQ ID NO: 145924 - protein, 87 aa, Glycine max
  Clone ID: PAT_MRT3847_102789C.1.pep
ALSNGRYKSCLHRAVVNSQTTRKSLAFFLCPRSDKVVSPPCELVDNLSPRLYPDFTRPMLLEFTQKHYRADMKTLEAFANWLQRKSN

SEQ ID NO: 145925 - protein, 86 aa, Glycine max
  Clone ID: PAT_MRT3847_10278C.1.pep
LHSFAREVLFRYLFSRQNFTFPENHSTLLWLRNPKQVKSRIEKAKVCSKQPALSARSRCTQNRYRKMIWSSRRKRYTPPNITMKNI

SEQ ID NO: 145926 - protein, 60 aa, Glycine max
  Clone ID: PAT_MRT3847_102790C.1.pep
SNSFGPTNVANLLTNIATLTRPLSRPTTSTLPPCAFLFSCFQILREFICFFHFFLMWIEE

SEQ ID NO: 145927 - protein, 60 aa, Glycine max
  unsure (1)..(60): unsure at all Xaa locations
  Clone ID: PAT_MRT3847_102791C.1.pep
MGRKFFXGGXWXLXGXNEEVKXIXXTLNEAKXAXXDXVEVVVRXPYVFXXXXXVCCPCFG

SEQ ID NO: 145928 - protein, 133 aa, Glycine max
  unsure (1)..(133): unsure at all Xaa locations
  Clone ID: PAT_MRT3847_102792C.1.pep
MAKKVNIMRLKVDLGCHKCYKKVKKILCKFPQXIRDQVYDEKNNIVTIAVVCCNPEKLRDKICCKGYGTIKSIEIXVEPPKLKPRLKPKPPPPPPVSVPIGLCCVPCFDGYGALPPVMTLIMIVTAVGAGLVT

SEQ ID NO: 145929 - protein, 60 aa, Glycine max
  Clone ID: PAT_MRT3847_102793C.1.pep
LALMSRTMNNAGFMDIDVSCQRSCPSILSIKIVIYSASPLLSSHIELWGCCHCLLHHQYA

SEQ ID NO: 145930 - protein, 43 aa, Glycine max
  unsure (1)..(43): unsure at all Xaa locations
  Clone ID: PAT_MRT3847_102794C.1.pep
ATGRRPQKGIAMLIDQFMALQRMGIVDHYERIPHFSLXLVGVG

SEQ ID NO: 145931 - protein, 106 aa, Glycine max
  Clone ID: PAT_MRT3847_102795C.1.pep
ESLKQADLDTQHKKSSPLLDLVNVIHSIFQSVQRIPITKEELLHKILVNTLDFVEIRAVEEQIESLEKLVPDWICKKLVATGDTMYCINKVSDLDSVRSRLSSNVV

SEQ ID NO: 145932 - protein, 82 aa, Glycine max
  Clone ID: PAT_MRT3847_102796C.1.pep
HEILLTVEKGSIGGFGSHVSQFLSLSGILNGPLKWRAIMLPDKNIEHGSPQVQIKKAGLSSKQIAAPVLFFMERPNKAFLFK

SEQ ID NO: 145933 - protein, 539 aa, Glycine max
  Clone ID: PAT_MRT3847_102797C.1.pep
MEQNACEELSKIASDFKCEKKVLETVDESIVCPTPQKNEEPLIVKFREGQTNLPEKYSALVDLFGHTSCSLRLLRLCKKSPTFQNVCRQVEVLSKREFSHAHLAQMKYILPKSVCIDKVLVHDKKSLCMVPDMKITLRFEVVKDCSGESDDLALRRYFKSKLIDFFDMHPEVADIPEAPLPEPFGKKTCRLNFEEFTGQSPHVNSSTELLSISNQTEMLPEQLQLYPSFRRHFSRKNNTDQAEKAQCFLPTKTSPSSHASDCLDNEESEKTLQKECVPLFDGVANPITERGHQKESFSMSLQPSFINTPVQMIRPPYSVTCSNSESPDMKNISCVADSFIAETPAQSAPARLLPISDVKLQDMPTQKSTSSHKPAKRVLDFSLMGDNDGLGIGVDKLESSRALHEFDSFPESSRGCYEDCNSFGSVSAPQEAEESLKQADLDTQHKKSSPLLDLVNVIHSIFQSVQRIPITKEELLHKILVNTLDFVEIRAVEEQIESLEKLVPDWICKKLVATGDTMYCINKVSDLDSVRSRLSTNVV

SEQ ID NO: 145934 - protein, 86 aa, Glycine max
  unsure (1)..(86): unsure at all Xaa locations
  Clone ID: PAT_MRT3847_102798C.1.pep
PRWQAGTIQINYTFFREPRLDDTNQSAIAKAWTMRAPEVCIELQETTLNETANIEMLLERXNLGDPCPIDGPGGILGHAYAPTDGR

SEQ ID NO: 145935 - protein, 56 aa, Glycine max
  Clone ID: PAT_MRT3847_102799C.1.pep
RLNASNEGLVFTILFVRSFSDGIVFSWVHMGVVFSQHGFVGRVNYVSQSLQVSVGG

SEQ ID NO: 145936 - protein, 55 aa, Glycine max
  Clone ID: PAT_MRT3847_10279C.1.pep
GNKFAKIMNLRQRVVGDLKLLTDGKVYEGKHIPCSNISGRENHVVQIPLKAQEGI

SEQ ID NO: 145937 - protein, 71 aa, Glycine max
  Clone ID: PAT_MRT3847_1027C.1.pep
YIFEIIISSYRYVLYSIHVSYIFIIDNRKSSLSMTVVVIWMLQRCHIFTPLRINNSKGKAMYATSEGTLSV

SEQ ID NO: 145938 - protein, 56 aa, Glycine max
  Clone ID: PAT_MRT3847_102800C.1.pep
ITPDNDAFFWAFRVLLKHGTKDKTFNTVIKDTAQSCYNRDPRIFCFCFLCNNNKIL

SEQ ID NO: 145939 - protein, 69 aa, Glycine max
  Clone ID: PAT_MRT3847_102801C.1.pep
FGSSASRNLFCTMISRLGAVTSRRRRISRMLMTSTIKTMSHFLLSRLGSLSPTTLLLVSLSLFDHQLLH

SEQ ID NO: 145940 - protein, 90 aa, Glycine max
  Clone ID: PAT_MRT3847_102802C.1.pep
IFISFFFFFFFFFFFFSGNLRGNLLKPQPKIKILNYPLLNKLRLIHIHGCLKFDFFPPFPLCFLFATGDKELGIFNQSQCLTLSSKRRVF

SEQ ID NO: 145941 - protein, 93 aa, Glycine max
  Clone ID: PAT_MRT3847_102803C.1.pep
LGRTRRRNVVYPRCHTSLTFPLRIIIQQHSNTDAEDGAHVPDAHATQLANEFQAQGDELALVSCFLFTLTHVVCFRFCCLFIFGEGKGGLRKN

SEQ ID NO: 145942 - protein, 35 aa, Glycine max
  Clone ID: PAT_MRT3847_102804C.1.pep
CPTTGLGICCFPDLCSQMALGIVGIPAFPFLISSG

SEQ ID NO: 145943 - protein, 63 aa, Glycine max
  unsure (1)..(63): unsure at all Xaa locations
  Clone ID: PAT_MRT3847_102805C.1.pep
XXESHQTXKNXKIPHIVVXCXWXKCLTAXXTKNXRTKGQERTKEKXKREXSSSNNTTYEWVKL

SEQ ID NO: 145944 - protein, 61 aa, Glycine max
  unsure (1)..(61): unsure at all Xaa locations
  Clone ID: PAT_MRT3847_102806C.1.pep
PRVRVSKLLQFYSELITNKTGGCLFNEERPPNXKPTHYTTPFNINLFPSTLTYTTISFYLP

SEQ ID NO: 145945 - protein, 95 aa, Glycine max
  Clone ID: PAT_MRT3847_102807C.1.pep
HLRSSHPSHSLISYFLVESSSLSDHHMTVSFSVIFPNKKKKTNTPPLSSLRSWRLFLLRELPLIFLFHVVFAFVGFFDRLLSFLLDSLFCFPSPS

SEQ ID NO: 145946 - protein, 34 aa, Glycine max
  unsure (1)..(34): unsure at all Xaa locations
  Clone ID: PAT_MRT3847_102808C.1.pep
YFFXVYFFFLFLYNLKSFYYFFFFNIFFFFLYFF

SEQ ID NO: 145947 - protein, 69 aa, Glycine max
  Clone ID: PAT_MRT3847_102809C.1.pep
VCCCCIACVNYNWLFSTLKVCKLTVSEDMNISIINNNNNNDETCLLMRLSVILIISLFIYYCSAFFLSW

SEQ ID NO: 145948 - protein, 165 aa, Glycine max
  unsure (1)..(165): unsure at all Xaa locations
  Clone ID: PAT_MRT3847_10280C.1.pep
MLPSLTNKKPKGTTITLAKAKKAEAQAVAVEPQSFPNLKEALNSKPKKKKGTTITLSEFNHGGFSQGLMCDEMLALPTGPKEHSTEEMQXQPLGGGFSSYDRSGGRSRDCSNNEGSWGXGGRRSYGGFNEERKGPNPRVSVLVFAISEWSLIDGREAVHRVRLTR

SEQ ID NO: 145949 - protein, 508 aa, Glycine max
  unsure (1)..(508): unsure at all Xaa locations
  Clone ID: PAT_MRT3847_102810C.1.pep
MASILCPSLTIVTSYAFSNEPKLVSKFTAVTGNSYSPLWLSCTRPGNPARNHFQLKSSNGLPQNAVSSNDGLAGSSLAKEDGKPQPLEGPFPFPDSEYTGSNLSITVVGASGDLAKKKIFPALFALFYEDWLPENFLVFGFARTKMTDEELRNMISKTLTCRIDKRENCEDKMDQFLKRCFYHSGQYNSEDHFSELDSKLREKEGGKLSNRLFYLSIPPNIFVDVVRCASLKASSKDGWTRVIVEKPFGRDSESSSELTKSLKQYLTEDQIFRIDHYLGKELVENLSVLRFSNLVFEPLWSRNYIRNVQIIFSEDFGTEGRGGYFDHYGIIRDIMQNHLLQILALFAMETPVSLAAEDIRNEKVKVLRSMRPLELENVVVGQYKGHSKGGKSHPAYTDDPTVPKGSLTPTFAAAALFIDNARWDGVPFLMKAGKALHTKRAEIRVQFRHVPGNLYKRNFGTDLDKATNELVLXRVQPDEAIYXKINNKVPXVFGMRLDKSDPGFAFSS

SEQ ID NO: 145950 - protein, 92 aa, Glycine max
  unsure (1)..(92): unsure at all Xaa locations
  Clone ID: PAT_MRT3847_102811C.1.pep
FDXKSSLXXFXXXTRWLXKVMMXEKXRXGSXKIAXVGWLGWXXLDQPNYSAGKKQGVIXLTKNXCRRNMPVGNIXGXXVXSRVNASDMDWPS

SEQ ID NO: 145951 - protein, 91 aa, Glycine max
  unsure (1)..(91): unsure at all Xaa locations
  Clone ID: PAT_MRT3847_102812C.1.pep
QTLQAQHHLCMKPPPKADIKNLYEEHSWMTPKPMPNXSPASNQLLRTPPKAXGMIIPXCHPPFQPTAIHWPTHMAGTMSNTTTEAHAGEPG

SEQ ID NO: 145952 - protein, 161 aa, Glycine max
  Clone ID: PAT_MRT3847_102813C.1.pep
RDTRHTVNMPIRDYYIFWFLCALFFKFLSDTEPSRWQLARCIRRKETPAIISLSISNQKIKISVDATITTERRESVLAKTLGVPPRKTTTCGPRPSVASHRFIFGIGRGGEMDDAVKGVTGLVAGGQPWGRFHFLQGDQRPRRDLGAHPWPRQAELVAGGG

SEQ ID NO: 145953 - protein, 245 aa, Glycine max
  Clone ID: PAT_MRT3847_102814C.1.pep
MSEKTTADKLIENLVDTFVDKKKSVSFFEDDKSDSVSSQFNRLFGRQKPVHHILGGGKSADVLLWRNKKISASVLSTATAVWVLFEWLNYNFLTILFFVVALGMLGQFLWTNASGLFSRKPSKVPRFVLPDDIFVNIATAVGAEVNRGLRFLQDVSCGGNLKQFLIVIVSLWAGAVIGSWCNFLTVMYIGFVAAHTLPVLYERYEDQVDNFVYKVFDQLQNHYQKLDTGLLSKIPKGKLKGKKYE

SEQ ID NO: 145954 - protein, 52 aa, Glycine max
  Clone ID: PAT_MRT3847_102815C.1.pep
SKVKGPCRLSMYTRVPVSRTCDVLILRDDKTLWVVVLFPNYERCACVHVDLE

SEQ ID NO: 145955 - protein, 312 aa, Glycine max
  unsure (1)..(312): unsure at all Xaa locations
  Clone ID: PAT_MRT3847_102816C.1.pep
TRPPPLCSICQHKAPVFGNPPRWFTFSELQLATGGFSQANFLAEGGFGSVHRGVLPDGQVIAVKQYKLASTQGDKEFCSEVEVLSCAQHRNVVMLIGFCVDDGRRLLVYEYICNGSLDSHLYRRKQNVLEWSARQKIAVGAARGLRYLHEECRVGCIVHRDMRPNNILLTHDFEALVGDFGLARWQPDGDMGVETRVIGTFXYXAPEYAQSGQITEKADVYSFGIVLLELVTGRKAVDINRPKGQQCLSEWARPLLEKQATYKLIDPSLRNCYVDQEVYRMLKCSSLCIGRDPHLRPRMSQVLRMLEGDILM

SEQ ID NO: 145956 - protein, 99 aa, Glycine max
  Clone ID: PAT_MRT3847_102817C.1.pep
ITEKADVYSFGIVLLELVTGRKAVDINRPKGQQCLSEWARPLLEKQAIYKLVDPSLRNCYVDQEVYRMLQCSSLCIGRDPHLRPRMSQVLRMLEGDILI

SEQ ID NO: 145957 - protein, 225 aa, Glycine max
  unsure (1)..(225): unsure at all Xaa locations
  Clone ID: PAT_MRT3847_102818C.1.pep
MPLSTVVSPFCSSSATFLSTVIARSSLPPKRNVSPSPFSTLSRRGIALLSFLSLSLSLSAPASAIEIGPKNWLKDQKKKASKYLLAPIDASRQILRSAYLTLTETDAAYTDEDLEKIQQLFISAARDCVPQDRNSFVTFQANTGVEVCTFXVKNAASLLGNKDPVKLKAEALLDNLIRSFTSVSGLASETNIQLASDRKKIADAVSDTISDLDKFEQGIRDCLET

SEQ ID NO: 145958 - protein, 105 aa, Glycine max
  Clone ID: PAT_MRT3847_102819C.1.pep
QNIKNQNYRLTCICCNRHHIPIQTQIRCNQEFNTFPQSANCNPLDENQTNHILSPKSNLKKKMHLKFKPSDLHPTTVLFHYCMKATNLSRVPFISITKHRQENIA

SEQ ID NO: 145959 - protein, 91 aa, Glycine max
  Clone ID: PAT_MRT3847_10281C.1.pep
NTKCANYNTSRFTSSTNSIGLGKSPRERGKPDYDSLGHPGGNQDEKGTSAKGGVYPYKNLTQRPITPIKAPIPTPGNSGGMEGQPPLGGLF

SEQ ID NO: 145960 - protein, 58 aa, Glycine max
  Clone ID: PAT_MRT3847_102820C.1.pep
YSPDRLYKLAREAPIITTRVFICPKCDINLRLPHYRHNKIFHLCSERVNILSTNISMH

SEQ ID NO: 145961 - protein, 165 aa, Glycine max
  Clone ID: PAT_MRT3847_102821C.1.pep
MTGKFHKAVSVLRFAVMNKYPLDTVAYTVGICALLRGRRTQEACTLYDQMKNDGLKPSVHTYNMMLFTFCKERDLQMIKQILQEMIDSRIYLSGRNFSNLCKYMCRSDTHLSLLKLLAEIRDLRLLSAKALHFLNFDRHADGVQAKHKHQAEDNTEWNLILDTSS

SEQ ID NO: 145962 - protein, 125 aa, Glycine max
  unsure (1)..(125): unsure at all Xaa locations
  Clone ID: PAT_MRT3847_102822C.1.pep
TWITSSEEVGDAADPAADIPGEPIDMTTDLQPVLKKALTYGGLARGLDQGPNVIAKHAEQLSVLAXTXDQHYYDKLYKALCAEHNANLITGPSAKTLAKWAGXCTIDCKRKAKRDTGSSSVGAKV

SEQ ID NO: 145963 - protein, 71 aa, Glycine max
  Clone ID: PAT_MRT3847_102823C.1.pep
GAHQFLFILGKGNGWLFFQGRFLATIFLGLNFFFCKKLTRLTSLIAGRGFIKNGGPLSLKIRASIFLFLFA

SEQ ID NO: 145964 - protein, 81 aa, Glycine max
  Clone ID: PAT_MRT3847_102824C.1.pep
MRHFKCVMFGSRGIAKGIRRITAVTTDRAYDAMKVADEFDQQVDDAAKLEGSLLEEVGLCVCIHLNFYSIRLICFFPFYSS

SEQ ID NO: 145965 - protein, 70 aa, Glycine max
  Clone ID: PAT_MRT3847_102825C.1.pep
GQVVVNLYISTQNNHLKCFFLLRKIFLTVFLIYNSPRKRTKKNLLLESTIHIIIYLKGDIHWLKKESIKH

SEQ ID NO: 145966 - protein, 64 aa, Glycine max
  unsure (1)..(64): unsure at all Xaa locations
  Clone ID: PAT_MRT3847_102826C.1.pep
SAAGXXXEENNESVQTDXGVXXASXXXAEEQAAXEPAXEKXLKRQTFXVXXXIVEKXTXFXXSL

SEQ ID NO: 145967 - protein, 39 aa, Glycine max
  Clone ID: PAT_MRT3847_102827C.1.pep
FHLPSHNLSQEGHITPFRFCNPAHSCFCLLLIFRSVFHS

SEQ ID NO: 145968 - protein, 71 aa, Glycine max
  Clone ID: PAT_MRT3847_102828C.1.pep
MENQQVKGVALEKFTWKVEGFTKLNTKKQSSKAFKVGGYKWKIVLYPKGRNVEYLSLYMKVADSLPPYGWS

SEQ ID NO: 145969 - protein, 63 aa, Glycine max
  Clone ID: PAT_MRT3847_102829C.1.pep
VERRCLEKIMCLTILVEDGQFNERYIVWLNFGSYDVNTIHYYLASMNLRTAARGYFPGRINGR

SEQ ID NO: 145970 - protein, 97 aa, Glycine max
  Clone ID: PAT_MRT3847_10282C.1.pep
IIAVITPYMVAENRGNLKSSVFFIWGGLCTCAFVYSYFLVPQPKGLSLEQVDTMMEETTPRSSAKWKPHTTFAETMGAGEILEKKAVPKAEHDDSAV

SEQ ID NO: 145971 - protein, 142 aa, Glycine max
  Clone ID: PAT_MRT3847_102830C.1.pep
MKPRIEVVGIDCLMVRLFEVIAEENMPWMLAAGERLRAGFAGHLIDLVPSYTTLMVHYDLLALSPSQARELIAEALTDLTPSTGAGGQCHVLPVWYDPSVGPELGLLAERSGWSVSEVIRCHSEREYQVFALGFAPGFAFMG

SEQ ID NO: 145972 - protein, 60 aa, Glycine max
  unsure (1)..(60): unsure at all Xaa locations
  Clone ID: PAT_MRT3847_102831C.1.pep
QSIAEIIMDARXYCSNSQKXWSLFCVCNITVFIMSLCAYYITCVTDISSRYSQCRKNRIK

SEQ ID NO: 145973 - protein, 33 aa, Glycine max
  Clone ID: PAT_MRT3847_102832C.1.pep
TMTAPAQLTVVTTRKVIIEKAISLFPVHNDLFL

SEQ ID NO: 145974 - protein, 217 aa, Glycine max
  unsure (1)..(217): unsure at all Xaa locations
  Clone ID: PAT_MRT3847_102833C.1.pep
MKRDHRDSCGGGGGGSVKGECSSMPSNGKANMWEEQQQQQQGMDELLAALGYKVRASDMADVAQKLEQLEMVMGCAQEEGISHLASDTVHYDPTDLYSWVQTMLTELNPEPNNNNNSLLGPSSLLIDNNTAPVFNDDSEYDLRAIPGIAAYPPPPPQDNNNNNNNLDEIETANNINKRLKPSPVESADSASEPTRTVLLVDHQEXGVRLVHTLLACA

SEQ ID NO: 145975 - protein, 153 aa, Glycine max
  Clone ID: PAT_MRT3847_102834C.1.pep
MKRQRGVHVNAVRPIMNNNPPNVEDVAAAAMGKKKVKKEGEQKVGNIMVEEEEIKESSTSRDSMVGGYLQQHQQGGMLMGWNWEENMNMPLVGGVVDEQMSWGSTWFPGWDMDLLGGDAFTALYNDVLWDDDIWNLNNQIPIPLDTTKRFHLE

SEQ ID NO: 145976 - protein, 82 aa, Glycine max
  Clone ID: PAT_MRT3847_102835C.1.pep
SRAEPQLSVAIYVVCELSPLIMQNSLPLCVKVDGSIKFTHMIDDLNHLYGLLRCPSLHVTNTQFLNRKSDVCKCSSLCVVED

SEQ ID NO: 145977 - protein, 37 aa, Glycine max
  Clone ID: PAT_MRT3847_102836C.1.pep
LQFQRLSIPGTSSSFINNPFHSTPRFHLFWTIMGFES

SEQ ID NO: 145978 - protein, 126 aa, Glycine max
  Clone ID: PAT_MRT3847_102837C.1.pep
MRGPSPSSVEPRHRSSSSFSEDTGKRRSQRIKDFKDVEKALHIPFQDRIITCRPNWKLVLVIIVLGTLVTIFHPPAVYNTDHLSNSLSRPTFINNWKGGFNGIDSRYASLLNIEWDQVSNVLENLK

SEQ ID NO: 145979 - protein, 52 aa, Glycine max
  Clone ID: PAT_MRT3847_102838C.1.pep
VVCVHIQTMHCLSLSTFDYSFRFQAPSIRPFLNISRSFDCSTAPSGSNTNAS

SEQ ID NO: 145980 - protein, 76 aa, Glycine max
  Clone ID: PAT_MRT3847_102839C.1.pep
IPNHNTFNHQIILCYRLRKQFSHCTASEYFCIVFNKFRYSIINIRRMRIECISNTLNFCFKILIMQSIMYVYPHIF

SEQ ID NO: 145981 - protein, 49 aa, Glycine max
  unsure (1)..(49): unsure at all Xaa locations
  Clone ID: PAT_MRT3847_10283C.1.pep
FLYLCRSIDHSGDVSSCTYXDECGVSHDLAAFKAQKPADLDWHCPSFKS

SEQ ID NO: 145982 - protein, 134 aa, Glycine max
  Clone ID: PAT_MRT3847_102840C.1.pep
ASGTNDGQPPHIMIDNFFYDMESTTSPSSSSDSDSSSVVKAPKLPTDVVLKQDFAPKLDQNPTPAKVSSSSGRVFERHSKSRSVSPRKEVSSSQKSNAASASAQKLLSARGDLKKNRRRSLNGDKSATAPKGWV

SEQ ID NO: 145983 - protein, 150 aa, Glycine max
  unsure (1)..(150): unsure at all Xaa locations
  Clone ID: PAT_MRT3847_102841C.1.pep
VSAXXTXXXXXGXTSXXXXQXXXWXVMXXXXXCXXXXXXXXVTXXEXVXXAXXTXXXDXXXXXXXXQXSXNXXXXEXXXXXXXXXXXXXRXLXXRXTXXXXXSSCXXEPKIXRVQMRXXVEXXXXTRXXVXRXXXXRRXXXXXXXVXDXX

SEQ ID NO: 145984 - protein, 135 aa, Glycine max
  Clone ID: PAT_MRT3847_102842C.1.pep
MPPKKQVQEVKLPLGRPGNNLKTGIVGLANVGKSTLFQAITKCSLGNPANFPYATIDPEESRVIVPDDRFDWLVEHYKPKSVVPAHLTIYDIAGLTRGASTGAGLGNAFLSHIRAVDAIFQVVRCFDEPEIIHVE

SEQ ID NO: 145985 - protein, 93 aa, Glycine max
  Clone ID: PAT_MRT3847_102843C.1.pep
WTRPQGGLGLVFFKTPWGAGSPQVGDFGPVFFVFQLKPPGRAVLGYNKFLTPLFRFCLGGYSKKIDIFLRKFPFFYTPEVNLYFWFENPPPLV

SEQ ID NO: 145986 - protein, 623 aa, Glycine max
  Clone ID: PAT_MRT3847_102844C.1.pep
MLEQLLIFTRGGLILWTCKELGNALKGSPIDTLIRSCLLEERSGAAAYNYDAPGASYTLKWTFHNDLGLVFVAVYQRILHLLYVEDLLAMVKREFSQVYDPKTTAYPDFDETFRQLKMEALARTEDLKRSNSNPVAGNAKKQVQGNDKSGFEGGNKKKKSGGGADGDDGKRKLENGHSNGNFLVAKDTNLSRDVNGRHNGSPNVGAFDVHKLQKLRTKGGKKTDTVVAKASKAEPNKKVTKKNRVWDEAATTETKLDFTDHSGEDGERNIDFVVAADQGESMMDKEEIVSSESEQEEEDEDEEDAGKNRKPDAKSKGWFSSMFQSIAGKANLEKSDLEPALKALKDRLMTKNVAEEIAEKLCESVAASLEGKKLASFTRISSTVHAAMEEALIRILTPRRSIDILRDVHAAKEQRKPYVVVFVGVNGVGKSTNLAKVAYWLLQHKVSVMMAACDTFRSGAVEQLRTHARRLQIPIFEKGYEKDPAVVAKEAIQEASRNGSDVVLVDTAGRMQDNEPLMRALSKLIYLNNPDLVLFVGEALVGNDAVDQLSKFNQKLADLATSPNPRLIDGILLTKFDTIDDKVGAALSMVYISGAPVMFVGCGQSYTDLKKLNVKSIVKTLLK

SEQ ID NO: 145987 - protein, 59 aa, Glycine max
  Clone ID: PAT_MRT3847_102845C.1.pep
SPQSPSSPLSLVLSFSFLLAGFCEAKACKILRIRETDFVLFAVNCFVGSVEIKGGKKIH

SEQ ID NO: 145988 - protein, 43 aa, Glycine max
  Clone ID: PAT_MRT3847_102846C.1.pep
HTQFIYELSQTPKGEDSKDLTFCRMPADRDSYFMHCSTKMTPI

SEQ ID NO: 145989 - protein, 137 aa, Glycine max
  Clone ID: PAT_MRT3847_102847C.1.pep
VRFESRCEETVASRTHFFCFNFLSFLFFFFFFFFFYYFLPPPSIIFSRPCPSIIFSRPCPSIIFSRPCPSIIFSRPCPSIIFSRPCPSIIFSRPCPSIIFSRPCPPIIFSRPCPSIIFSRPCKHINKHINQPKGSKP

SEQ ID NO: 145990 - protein, 66 aa, Glycine max
  Clone ID: PAT_MRT3847_102848C.1.pep
HILLHGPDNRSHQLQSQMVDYDLCEFLRFGLIRHYVIDRHICGLIMHLTVHINADATRLVGSRRLS

SEQ ID NO: 145991 - protein, 38 aa, Glycine max
  Clone ID: PAT_MRT3847_102849C.1.pep
KTPFRGSTAGYNIGSGPTLLNITYIQFYNPPFFFHLFT

SEQ ID NO: 145992 - protein, 287 aa, Glycine max
  Clone ID: PAT_MRT3847_10284C.1.pep
KRIHVYIATGNLYSAPLRIRQCRERQINGTEPTQPDACVEPENHSDSMLALDLDSGKIKWYRQLGGVVIWLFDCVDPSTPNCPPQGINPDADFAEAPMMLTTYVNRTKKDIVVAGQKSGIVWALDRNNGNLVWSKQAGPGGVTGGATWGASTDERRVYTNIANSEARNFTLAPSNITTTAGGWVAMNASNGRVLWSIANPSNSTAHGPVSVANDVVFAGSTDRNGSIFAIDAKSGKILWSYQTGASVYGGMSISNGCIYVGHGYSVWGPDLFNFSGGIWLFGFCVEF

SEQ ID NO: 145993 - protein, 203 aa, Glycine max
  Clone ID: PAT_MRT3847_102850C.1.pep
MAFTFSPSIRNSISWPTMLVPDMPDINISLRNKGIYKGKRNINLRDLTKANVASPSLPLIAPPTPEERPGITHDCHHHHHHVAWTSIPQERWEGELQVQGQIPLWLEGTYLRNGPGMWHIGDYNFRHLFDGYATLVRLGFRNGRLVAGHRQIESEAYRAAKKNKKICYREFSEVPKAANFLAYVGELASLFLGASLTDNANTR

SEQ ID NO: 145994 - protein, 258 aa, Glycine max
  Clone ID: PAT_MRT3847_102851C.1.pep
MSFAAPSLGSAGGRSARRAFEFGRTYVVRPKGKHQATIVWLHGLGDNGSSWSQLLETLPLPNIKWICPTAPTQPISIFGGFPSTAWFDVGDISEDAPDDLEGLDASAAHVANLLSTEPADIKLGVGGFSMGAATALYSVSCFTAGKYGNGNPYPANPSAAVGLSGWLPCSKTLSNKLQGVDEATRRAQSFPVLLCHGKVDDVVPYKFGEKSSKCLSSTGFQDVTFKAYNGLGHYTIPEEMDEVCAWLTSKLGLEGNIA

SEQ ID NO: 145995 - protein, 121 aa, Glycine max
  unsure (1)..(121): unsure at all Xaa locations
  Clone ID: PAT_MRT3847_102852C.1.pep
MVTTLLCAGVLMWSLEEAGLNPKTSCGGTSQEMVCPGGERAFITRIIEDSTQLKDQFRWFTSMVGKKSNLKYLTSKLWEVGVAVXNTTEFVQSRTCRWGLAWSFLTPLQKTPVSLPDKKNT

SEQ ID NO: 145996 - protein, 69 aa, Glycine max
  unsure (1)..(69): unsure at all Xaa locations
  Clone ID: PAT_MRT3847_102853C.1.pep
FVLVPTRSGAAVEGVXFFHPFHAACTGARSSLXXFPSSXXXLSLCFFFSLLHVPVFSAFNHRNTXHPFT

SEQ ID NO: 145997 - protein, 53 aa, Glycine max
  Clone ID: PAT_MRT3847_102854C.1.pep
IIFFSLFPYLLTVQIHEAKLLERLLQPVHFFSYQAAKFALGLLSKDKEMKRRI

SEQ ID NO: 145998 - protein, 189 aa, Glycine max
  unsure (1)..(189): unsure at all Xaa locations
  Clone ID: PAT_MRT3847_102855C.1.pep
LTRGRTRGRTRGADLREEVLLTSSEAVLSALPSPLLAEAQILRDRAMSHYQARSLFGSSHRLNNRRNGLGFDQRPVMDRGVGVTIGRRSVLTDSLKVKEIEGEPLLDGNALKALIRLLRLSQXRPATLNSQRLFGCHSNTVYGRSQLLDGLPPLVFRRILEILTYLATNHSAVAKMLFHFDQSVIPDSS

SEQ ID NO: 145999 - protein, 492 aa, Glycine max
  Clone ID: PAT_MRT3847_102856C.1.pep
MGGSKKRKRKRNEEQRGGTVYSERENPPDFALLASLYPEFHPFVQFLHSHSRPTIDWTDFNATRQLTRVLLHHRHALTWWIPDGNLCPTVPNRCNYIHWLQHLLSSDIIPNTISSDGKFRGFDIGTGASCIYPLLGASLHGWSFVGSDVTNVAIEWAERNVNSNPHISQLIEIRKVQDNASDPCVEVEESVTGDSIALCGSTDVEVAPLPLDLHACENRNYHGPPILVGVVRGDEKFDFCMCNPPFFESLEEAGLNPKTSCGGTSREMVCPGGERAFITRIIEDSTQLTEQFRWFTSMVGKKSNLKYLTSKLWEVGVAVVKTTEFVQGRTSRWGLAWSFLTPLQKTPVSLPDKKNTSFTLEGLQRQHGAINLLEAVNSYFSSHGLFCTLNTSSFTVDVAASKDDCDSILRNELHIINKSINCQPTQKTSNGSSLNLSSERLCFRISVFQQIPGTLLVKGSLQDRNCAVSGAFSVIFQKLEEALRNNFCTKSA

SEQ ID NO: 146000 - protein, 76 aa, Glycine max
  Clone ID: PAT_MRT3847_102857C.1.pep
GASHCWSIKPMYISKKKSLSFLEKARSSGFALGSVHSRNVSGLQVPEKIPLLGERVRVTRSIFPRVLHSYPALAKG

SEQ ID NO: 146001 - protein, 66 aa, Glycine max
  Clone ID: PAT_MRT3847_102858C.1.pep
NFSFLYHPNILSHPFNILPLLYINLITINLPKFNNNKSNKTLNIPNLISLQHINLSTPVKLTIKPK

SEQ ID NO: 146002 - protein, 1104 aa, Glycine max
  unsure (1)..(1104): unsure at all Xaa locations
  Clone ID: PAT_MRT3847_102859C.1.pep
NFLIFLVALPPDTQSVVLVQQRAQRVAQQAEGQPVDMDNASIIATFPADLREEVLLTSSEAVLSALPSPLLAEAQILRDRAMSHYQARSLFGSSHRLNNRRNGLGFDRRPVMDRGVGVTIGRRSALTDSLKVKEIEGEPLLDGNALKALIRLLRLSQPLGKGLLQRLLLNLCAHSVTRATLIYLLLDMIKSEAEGSVGRPATLNSQRLFGCHSNTVYGRSQLLDGLPPLVFRRILEILTYLATNHSAVAKMLFHFDQSVIPDSSSPVKVHMNEKGKEKVIEGGPSPNSSGAQTGDVPLVLFLKLLNRPLFLRSNAHLEQVMGLIQVVVDTAASKLESQSQSEKGMADTQNLSASEAPSNTEKDAALVESDSNQQDKHADVNPCPSEGKKNVDMYNIFLQLPQSDLRNLCSLLGREGLSDKMYMLAGEVLKKLAFIVSSHRKFFTLELSESAHALTGSAISELVTLQKTNMLGLSAGSXAGAAILRVLQALSSLTSLNTLGDMDMENDVDQHDDQATIWNLNTALEPLWQELSNCISAAEMQLGQSSFSSNMSNINVAENLQGSSTSPPLPPGTQRLLPFIEAFFVLCEKLQANESFMQQDHCNATAREVKESAGCSASTSVKIGGDPQRKYDGAITFTRFTEKHRRLSNAFIRQNPGLLEKSLSMMLKAPRLIDFDNKRAYFRSRIRQQHDQHLSGPLRISVRRAYILEDSYNQLRMRPTQDLKGRLNVQFQGEEGIDAGGLTREWYQLLSRVIFDKGALLFTTVGNNATFQPNPNSVYQTEHLSYFKFVGRVVRSTNVFCMWSRDKIEPPSPQSPSFILLDFRYIKATYGTGITLKVGKALFDGQLLDVYFTRSFYKHILGVKVTYHDIEAVDPDYYKNLKWMLENDVSDIPDLTFSMDADEEKHILYEKNEVTDYELKPGGRNIRVTEETKHEYVDLVAEHLLTNAIRPQINSFLEGFNELVPRELISIFNDKELELLISGLPEIDLDDLKANTEYTGYTVASNVVQWFWEVVKTFNKEDMARLLQFVTGTSKVPLEGFKALQGISGPQRFQIHKAYGAPDRLPSAHTCFNQLDLPEYTSKEQLQERLLLAIHEASEGFGFG

SEQ ID NO: 146003 - protein, 71 aa, Glycine max
  Clone ID: PAT_MRT3847_10285C.1.pep
IVNRRGSGSLGCGEINSECFRWDIPRQQMLDPFSQVQLGACCKPLKHWASEVVTNLHQPQGRTSFCQQPQN

SEQ ID NO: 146004 - protein, 1843 aa, Glycine max
  Clone ID: PAT_MRT3847_102860C.1.pep
MLVQPVSLTIMPNGLDCTVIEENATHDENVEIAQAFVNSSINSDAAIQCESGADVPTSIHNVPVESMECNGSSNADGQPPNVELGDSGFETLNPGDSHASSIYASADVDMGGTDAEGNQSEQPTVSEDRRDEMLSTQNTEVAPDATQADQVSANNEASGANTIDPTFLEALPEDLRAEVLASQQAQSVQPPAYAPPSAEDIDPEFLAALPPDIQAEVLAQQRAQRVAQQAEGQPVDMDNASIIATFPADLREEVLLTSSEAVLSALPSPLLAEAQILRDRAMSHYQARSLFGSSHRLNNRRNGLGFDQRPVMDRGVGVTIGRRSVLTDSLKVKEIEGEPLLDGNALKALIRLLRLSQPLGKGLLQRLLLNLCAHSVTRATLIYLLLDMIKSEAEGSVGRPATLNSQRLFGCHSNTVYGRSQLLDGLPPLVFRRILEILTYLATNHSAVAKMLFHFDQSVIPDSSSPVKVHMNEKGKEKVIEGGPSPNSSGAQTGDVPLVLFLKLLNRPLFLRSNAHLEQVMGLIQVVVDTAASKLESQSQSEKGMADTQNLSTSEAPSNTEKDAALVESDSNQQDKHADVNPCPSEGKKNVDMYNIFLQLPQSDLRNLCSLLGREGLSDKMYMLAGEVVKKLAFIVPSHRKFFTLELSESAHALTGSAISELVTLQKTNMLGLSAGSMAGAAILRVLQALSSLTSLNTLGDMDMENDVDQHDDQATIWNLNTALEPLWQELSNCISAAEMQLGQSSFSSNMSNINVAENLQGSSTSPPLPPGTQRLLPFIEAFFVLCEKLQANESFMQQDHCNATAREVKESAGCSASTSVKIGGDPQRKYDGAITFTRFTEKHRRLSNAFIRQNPGLLEKSLSMMLKAPRLIDFDNKRAYFRSRIRQQHDQHLSGPLRISVRRAYILEDSYNQLRMRPTQDLKGRLNVQFQGEEGIDAGGLTREWYQLLSRVIFDKGALLFTTVGNNATFQPNPNSVYQTEHLSYFKFVGRVVGKALFDGQLLDVYFTRSFYKHILGVKVTYHDIEAVDPDYYKNLKWMLELGVQSHQWGERDESVGSERDRVTWRQHNDVSDIPDLTFSMDADEEKHILYEKNETNSYEFSYPLLLPSPKILKQVTDYELKPGGRNIRVTEETKHEYVDLVAEHLLTNAIRPQINSFLEGFNELVPRELISIFNDKELELLISGLPEIDLDDLKANTEYTGYTVASNVVQWFWEVVKAFNKEDMARLLQFVTGTSKVPLEGFKALQGISGPQRFQVHKAYGAPDRLPSAHTCFNQLDLPEYTSKEQLQERLLLAIHEASEGGSTICVSNLSFGGQTSLSSKKRKRKRNEEQRGGTVYSERENPPDFALLASLYPEFHPFVQFLHSHSRPTIDWTDFNATRQLTRVLLHHRHALNCPMGYEDSDTDTDTPIKHTKFNPDTGVGVGVGVGHRTRQGTRVWIPDGNLCPTVPNRCNYIHWLQHLLSSDIIPNTISSDGKFRGFDIGTGASCIYPLLGASLHGWSFVGSDVTNVAIEWAERNVNSNPHISQLIEIRKVQDNASDPCVEVEESVNGDNIALCGSTDVEVAPLPLDLHACENRNYHGPPILVGVVRDDEKFDFCMCNPPFFESLEEAGLNPKTSCGGTSQEMVCPGGERAFITRIIEDSTQLKDQFRWFTSMVGKKSNLKYLTSKLWEVGVAVVKTTEFVQGRTCRWGLAWSFLTPLQKTPVSLPDKKNTSFMLEGLQRQYAAINVLEAVNSYFSSHGLSCTLNTSSFTVDVAAAKDDCDLILRNGLPIINKSIDCQPTREASSGSSLNLSSERLCFCISVFQQIPGTLLVKALCLEIDLEECVLCLCFRDILIGHK

SEQ ID NO: 146005 - protein, 193 aa, Glycine max
  Clone ID: PAT_MRT3847_102861C.1.pep
MPSNDGIVIVVMGVSGAGKTTIGQMLEKELKYKYLDADDFHLESNKEKMRMGIPLTDEDRMPWLESLCYAIKEYLNNKKGLVLGCSALKKEYREILRSGDTSYNWGTYASAVNFILLDAPAEVLSVRVNKRAAEGKHYMPASLLQSQLDLLKIDESEGVLRVDATLRPQDIVNTILNMNQFQGCFNVDFVEPH

SEQ ID NO: 146006 - protein, 56 aa, Glycine max
  Clone ID: PAT_MRT3847_102862C.1.pep
EPFRGKIGMSPGICPELMIGTKTYISHSGLEWSPASASVRLKVDSFVSSLSHYNSS

SEQ ID NO: 146007 - protein, 128 aa, Glycine max
  unsure (1)..(128): unsure at all Xaa locations
  Clone ID: PAT_MRT3847_102863C.1.pep
KILNAITNQSLLLHFSTTIYLHQTISYFAEGLASKPPLNLNIPYFKNSHSQPNXLPIIISLFYTSXLPINSIINSYHPCNTITLSSYYSLLXKYPITENHLHHFINPYPYYLTFYSHPYTIQMISNTI

SEQ ID NO: 146008 - protein, 136 aa, Glycine max
  unsure (1)..(136): unsure at all Xaa locations
  Clone ID: PAT_MRT3847_102864C.1.pep
MANNAAACAERATSDMLIGPDWAINIELCDIINMDPREHHVLGTGSKFIVGVLGDLCMLREYHTDNLGSANITDIYFPLKIFMXRRIVCWQAKDAIKILKKRLXPDLRVREKELILIDTWAEACGGPRGKNPQDLA

SEQ ID NO: 146009 - protein, 87 aa, Glycine max
  Clone ID: PAT_MRT3847_102865C.1.pep
AHGLVDASSSFVCYEARRVGRTCGRFGRGRALRRDKATRLTDAQSVVAAQAESRQDSPLVNSMLHVLCCDVRMSAGTDADRGVCTRV

SEQ ID NO: 146010 - protein, 581 aa, Glycine max
  Clone ID: PAT_MRT3847_102866C.1.pep
ARARAESARGGNSDSASAQSPSSSSGEAQSRTDRIVFKLFGKEPNDFPLVLRAQILDWLSHSPTDMESYIRPGCIVLTIYLRQAEALWEELCYDLTSSLNRLLDVSDDTFWRNGWVHIRVQHQMAFIFNGQVVIDTSLPFRSNNYSKILTVSPIAAPASKRAQFSVKGVNLIRPATRLMCALEGKYLVCEDAHMSMDQSSKEPDELQCVQFSCSVPVMNGRGFIEIEDQGLSSSFFPFIVVEEDVCSEICTLEPLLELSETDPDIEGAGKIKAKNQAMDFIHEMGWLLHRSQLKLRMVSSVDLFPLKRFKWLIEFSMDHDWCAAVRKLLNLLFDGTVNTGDHPSLYLALSEMGLLHKAVRRNSKHLVEWLLRYVPENISDKLGPEDKALVDGENQTFLFRPDVVGPAGLTPLHIAAGKDGSEDVLDALTNDPCMVGIEAWKNARDSTGSTPEDYARLRGHYAYIHLVQKKINKRQGAAHVVVEIPSNTTESNTNEKQNELSTTFEIGKAEVIRGQGHCKLCDKRISCRTAVGRSLVYRPAMLSMVAIAAVCVCVALLFKSSPEVICMFRPFRWENLDFGTS

SEQ ID NO: 146011 - protein, 94 aa, Glycine max
  Clone ID: PAT_MRT3847_102867C.1.pep
FALPLLSWGFSLASLCPSVLCPCVWPGSPSVASWSASSVAGPGVSVPCSLSWPSPLFLASGSPAPGVVPLPVGVVSGLCFFSAPLRAFPLLVLR

SEQ ID NO: 146012 - protein, 299 aa, Glycine max
  Clone ID: PAT_MRT3847_102868C.1.pep
MEELFVAVLSMLLVAALIPLYLWKRRQDSKPPPPHRDEAPQAPRRETVARATATRRMRRRPTASGASTSADPPATQEESAGESDDEAAGGGYYEAKAPKKKETKKQEREARRQAEEAARESRQAKQDRYSEMRRLKDEEREAEERKLEEEARAQKAKEEEAAALEFEKWKGEFSVDDEGTLEEVQGNTEDLLGNFVEYIKKHKCVPLEDLAAEFKLRTQECINRITSLESMGRLSGVMDDRGKFIYISQEEMKAVADYIKRQGRVSISHLASKSNQFIDLEPKVQYSEDINIAEEITVN

SEQ ID NO: 146013 - protein, 62 aa, Glycine max
  Clone ID: PAT_MRT3847_102869C.1.pep
ILLHKIQTHFNYKLVFFFHYSILTVIIKSYYPITLSYMIIISHSTFYTLPSLIYTTTSYISH

SEQ ID NO: 146014 - protein, 394 aa, Glycine max
  Clone ID: PAT_MRT3847_10286C.1.pep
MGWGRLGRHGSDSVDGAVAGPSTSATEPRRFPLAAQPEMMRAAEKDDQYASFVYEACRDAFRHLFGTRVAVAYQNETKLLGQMLYYVLTTGSGQQTLGEEYCDITQVAGPYGLPPTPARRALFVVYQTAIPYIAERISSRIASRGIVLADYESAEGFGENAHRSHSAQISGTSPSSSSGQSVTTLSRLKGKMSAFWLHLVQRWPTMLPFVRELLQLVLRANLMLFYFEGLYYHISKRAAGIRYVFIGKASNQRPRYQILGVFLLIQLCIIAAEGLRRRNLTSITGSVHQASFATHDRSAGHGLPVLNEEGNLATPDIDKRSWVSESSSSEYHATSGVSKCTLCLSNRQHPTATSCGHVFCWNCITEWCNEKPECPLCRTPITHSSLVCVYHSDF

SEQ ID NO: 146015 - protein, 46 aa, Glycine max
  Clone ID: PAT_MRT3847_102870C.1.pep
STRTSKHWPTHSRTVVLQASCYYESLSSKETGTYVWWMNHDRVIRA

SEQ ID NO: 146016 - protein, 60 aa, Glycine max
  Clone ID: PAT_MRT3847_102871C.1.pep
VSVPGVLFSQGGWAGFFQTSQYKGGFAVFYQPNFHLVEGSHHSNAVWFLEGSPTILFPGH

SEQ ID NO: 146017 - protein, 638 aa, Glycine max
  unsure (1)..(638): unsure at all Xaa locations
  Clone ID: PAT_MRT3847_102872C.1.pep
LEEEEKSVFLDIACCFKGCELEEVEDILHAHYGDCMKYHIGVLIDKSLLKLSVHGTMVTLHDLIEDMGREIVRQESPKDPGKRSRLWFHEDIIQVLEDNTGTSEIEIICLNFPLLDKEDIVEWNRKAFKKMKNLKTLIIKSGHFCKGPRYLPNSLRVLEWWRYPSHDLPSDFRSKKLGICKLPHCCFTSLELVGFLTKFMSMRVLNLDKCKCLTQIPDVSGLPNLEKLSFQHCQNLTTIHSSIGFLYKLKILSAFGCTKLVSFPPIKXTSLEKLNLSRCHSLESFPEILGKMENIRELQCEYTSIKELPSSIHNLTRLQELQLANCGVVQLPSSIVMMPELTELIGWKWKGWQWLKQEEGEEKFGSSIVSSKVELLWASDCNLYDDFFSIGFTRFAHVKDLNLSKNNFTMLPECIKEFQFLRKLNVNDCKHLQEIRGIPPSLKHFLATNCKSLTSSSTSMFLNQELHETGKTQFYLPGERIPEWFDHQSRGPSISFWFRNKFPGKVLCLVIGPMDDDSGMLISKVIINGNKYFRGSGYFMMGMDHTYLFDLQIMEFEDNLYVPLENEWNHAEVTYEGLEETSTPKECGIHVFKQESSMKDIRFADPYGKRKLGNDRNSLESQNQQLLKKHRFVDMEVS

SEQ ID NO: 146018 - protein, 46 aa, Glycine max
  Clone ID: PAT_MRT3847_102873C.1.pep
TQVHTGRVNYSFNLDREPCCIRSILTSLGYMTHAHLYENRLVSECL

SEQ ID NO: 146019 - protein, 83 aa, Glycine max
  unsure (1)..(83): unsure at all Xaa locations
  Clone ID: PAT_MRT3847_102874C.1.pep
XXVLXLXSVXXINRXIXLXXSXGLHXLKXPINSPSRQYDLLWXSRXTISQQLXDXXLQQQLVLXRXHPRQRHQNQXPXSIXNL

SEQ ID NO: 146020 - protein, 70 aa, Glycine max
  Clone ID: PAT_MRT3847_102875C.1.pep
NLPPFNSLPHGKGSLNLDPLVASQFCEFHRSRSAPSKSLREQRLGGKGHRRKILGNFVSYLSHEFSSLVT

SEQ ID NO: 146021 - protein, 83 aa, Glycine max
  Clone ID: PAT_MRT3847_102876C.1.pep
GVERTVVTWTLLMKCYCRQGRVDEAERLLRRMKEDEGVVVDDRVYGVLVNGYCQVGRMDDAVRIRDEMARVGLRVNVFVCNAL

SEQ ID NO: 146022 - protein, 130 aa, Glycine max
  Clone ID: PAT_MRT3847_102877C.1.pep
MKKHFLFVFLFQPPNERVHQIISRTATFVSKHGSQSEIILRVKQGDNPTFGFLMPDHHLHAYFRFLVDHQELLKVDKDDGSSTEDMNRTLGLDQTGGALSLLGSVYGSGEDEDATTENTCDVEKKECEGA

SEQ ID NO: 146023 - protein, 78 aa, Glycine max
  unsure (1)..(78): unsure at all Xaa locations
  Clone ID: PAT_MRT3847_102878C.1.pep
KQKRTLGIRXNVKSRTRYKLEYVFVANLIQYIRTKKRTRVKSLYKYLICLYNRNCRSRDIRAKKSTRLQTRKTSNICL

SEQ ID NO: 146024 - protein, 120 aa, Glycine max
  unsure (1)..(120): unsure at all Xaa locations
  Clone ID: PAT_MRT3847_102879C.1.pep
ISDIPCLISNNIYEEFFKDFNPLNISDYNSIFFIEHPSVSAILHPVEPNILLKPEKMKGTKHEIIEYANIAIAXDLNILNDMMINFSDDIIKNTAERLLWTALEGLESGASIETVALLTV

SEQ ID NO: 146025 - protein, 58 aa, Glycine max
  Clone ID: PAT_MRT3847_10287C.1.pep
PDHKESAQKWVEATINGGLALVSYELDDAGARAQSASKRLTLVEFQIKTYLEVKGTGT

SEQ ID NO: 146026 - protein, 80 aa, Glycine max
  Clone ID: PAT_MRT3847_102880C.1.pep
MGKRAFLIVHAFFVLFSFGSSKAEMVSAVYVFGDSLVDVGNNNYLTLSIAKANHRHYGVDFPVPYNIKGQQKQCILHGWC

SEQ ID NO: 146027 - protein, 362 aa, Glycine max
  Clone ID: PAT_MRT3847_102881C.1.pep
MGKRAFLIVHAFFVLFSFGSSKAEMVSAVYVFGDSLVDVGNNNYLTLSIAKANHRHYGVDFPTHKPTGRFSNGKNAADFVAEKLGFPTSPPYLSLITSKANKNNASFMDGVSFASAGAGIFDGTDERYRQSIPLRKQMDYYSIVHEEMTREVRGAAGLQKHLSKSIFVVVIGSNDIFGYFESSDLRKKSTPQQYVDSMAFSLKVQLQRLYDHGARKFEIAGVGTLGCCPDFRLKNKTECFIEANYMAVKYNEGLQSMLKEWQSENGGIIYSYFDTFAAINDLIQTPASYGFSEVKGACCGLGELNARAPCLPLSNLCPNRQDHIFFDQFHPTEAAARLFVNKLFDGPSTYTSPINMRQLVAA

SEQ ID NO: 146028 - protein, 584 aa, Glycine max
  Clone ID: PAT_MRT3847_102882C.1.pep
MEALKLCNLTWSPLKHFFHSHAFRRTPPVLVLRACSSSTAAADTRAAGRGRRSSESSSTTSTSDRDAIRAIRLKKVEELRSKGLDPYAYEWNKTHGANQLQDIYRDLGNGEEKNSENDHVSVAGRIVARRAFGKLAFLTLRDDSGTIQLYCDKERLIGDQFEQLKAHVDIGDILGVRGTIKRTEKGELSVSVLSFAILTKSLLPLPDKYHGLTDIDKRYRQRYVDMIANPEVADVFRRRAKVVSEIRRTMDSLGFVEVETPVLQGAAGGAEARPFITYHNSLGRDLYLRIATELHLKRMLVGGFEKVYEIGRIFRNEGISTRHNPEFTTIEMYEAYSDYQSMMNLAEEIVTRCALAVHGKLTIDYQGVEICLEKPWRRETMHNLVKETAGIDFNELANDLEVAKRVTLDTLGKNLDNKDKGSIEACQSVGHLLNEVFESFVEPKLIQPTFVLDYPIEISPLAKPHRRSTGLTERFELFICGRELGNAFSELTDPIDQRGRLEDQIRQHEKKRAAVSTNDDKKEGTEDDDDSYEVTLDDDFLTALEYGMPPASGMGLGIDRLVMLLTNSPSIRDVIPFPVLKVQQ

SEQ ID NO: 146029 - protein, 72 aa, Glycine max
  Clone ID: PAT_MRT3847_102883C.1.pep
SRQTNARSSALVPLSIKTITGPIRPKSLRTHNDQNMEIDNANQFLELEHSSFMNSMATPANAHLPNIPPNST

SEQ ID NO: 146030 - protein, 63 aa, Glycine max
  Clone ID: PAT_MRT3847_102884C.1.pep
MMSSGSGSGSSSGSPCGACKFLRRKCIPGCIFAPYFDSEQGTSHFAAVHKVFGASNVSKLLLS

SEQ ID NO: 146031 - protein, 60 aa, Glycine max
  Clone ID: PAT_MRT3847_102885C.1.pep
RCRCTLYRRCPTQHMLHHLCLCMIFTLRTSTTGSGMLHLERKINVWFDQVHGIGLDSSRL

SEQ ID NO: 146032 - protein, 60 aa, Glycine max
  unsure (1)..(60): unsure at all Xaa locations
  Clone ID: PAT_MRT3847_102886C.1.pep
LHHHSHSQXYPSGRTLRQEDKLVPLYKRNKTHTDPRTDSYARIKIPRRASRQIPETAPAP

SEQ ID NO: 146033 - protein, 58 aa, Glycine max
  Clone ID: PAT_MRT3847_102887C.1.pep
NVSLITNYCLHHRTGYNKAENEAQMRRVWSRREINNYIILCCFILQSLWNASSWIHIL

SEQ ID NO: 146034 - protein, 43 aa, Glycine max
  Clone ID: PAT_MRT3847_102888C.1.pep
VNSNYVRYTRAFVMKERAHKHGAFEETAHDLYMDHISYLIALI

SEQ ID NO: 146035 - protein, 78 aa, Glycine max
  Clone ID: PAT_MRT3847_102889C.1.pep
NTIKILIYNLFKIYKESRIIKECNGLSAGIPESDCHPYLGLITQLVWDSPSFQICHQGSLKHSVTEEVLASNLSQFSV

SEQ ID NO: 146036 - protein, 54 aa, Glycine max
  Clone ID: PAT_MRT3847_10288C.1.pep
KRGPNHLFRKGPTRKKPKYLALPKYKHRSEDTINWENTLPPKHNPLRRKPVGPG

SEQ ID NO: 146037 - protein, 67 aa, Glycine max
  Clone ID: PAT_MRT3847_102890C.1.pep
VSIPIPFAYPDDNLTARVSVPYKPSYTNVSFTRYITYSTWNNTLSLSLYRDAFYLFDKHNEPNITSF

SEQ ID NO: 146038 - protein, 56 aa, Glycine max
  unsure (1)..(56): unsure at all Xaa locations
  Clone ID: PAT_MRT3847_102891C.1.pep
KITPHLPYTDSPPTDPWDRGGAPVKAQSEGAKRGVPAEXNGYKCGPNCSCNPCTSK

SEQ ID NO: 146039 - protein, 73 aa, Glycine max
  Clone ID: PAT_MRT3847_102892C.1.pep
NMIHFFQKPYQRVFCVRIIIMFLLYLSSITLVFGLKFNNEAIIFFMKSKHLRCEFQEFCRLAFPYNYVLSIVL

SEQ ID NO: 146040 - protein, 153 aa, Glycine max
  Clone ID: PAT_MRT3847_102893C.1.pep
EFEQITRGSSRVDLQLELKLNSILNDQMAYLDDWAVLESDHIDSLSGAVEDLEASTLRLPLTGGAKADIEHLKHAIYSAVDGMQAMGSAICPLLSQVEGMNNLISEVAVVSSREKAMLDECEALLNFATAMQVEEYSLRTHLMQIKQAFVVNK

SEQ ID NO: 146041 - protein, 120 aa, Glycine max
  Clone ID: PAT_MRT3847_102894C.1.pep
SSQAGTNPHTRERTGPANTPPRKDNDTQSREHASPDGPTTNQATSKTAEKTNSPRGGDERPKPERTHPPQPSRTRTATRKKDDRRAESKTPSGTPLTETSKSHSKRDSPTDTAMKKHCAR

SEQ ID NO: 146042 - protein, 80 aa, Glycine max
  unsure (1)..(80): unsure at all Xaa locations
  Clone ID: PAT_MRT3847_102895C.1.pep
EALNSLPYYEQKHLLPIIXVGSVSFVPLLIKPQLLQFYQYDVLIVGNLLFLXQLLPFSRLGLVGPRKRCFQQPFIGGAFF

SEQ ID NO: 146043 - protein, 68 aa, Glycine max
  Clone ID: PAT_MRT3847_102896C.1.pep
RPPDNKLNYAHSEVGKMVFGHEYGPTMVHKKVEFMCLYSGGVGGPNSVGLFTLSGTRCSPRNKKVGVC

SEQ ID NO: 146044 - protein, 46 aa, Glycine max
  Clone ID: PAT_MRT3847_102897C.1.pep
SIDGNHSPEMLLDRCLVTDMTESLRSVVCASMGFRGSIASADSSCK

SEQ ID NO: 146045 - protein, 90 aa, Glycine max
  Clone ID: PAT_MRT3847_102898C.1.pep
TAARTTEGTPLILLDFLYLYCIVNFTICDFLFSSFIHGFDYELMETLFGYSSNNQSHEKNRCLSTTAKSNSNTPTQLFILDPRKSQNIAT

SEQ ID NO: 146046 - protein, 58 aa, Glycine max
  unsure (1)..(58): unsure at all Xaa locations
  Clone ID: PAT_MRT3847_102899C.1.pep
GIFSSSVVSPPEELVAAGSRTSTSKTTAXKLLNRLEDSMASAVSLQVGEHVQLAYTHH

SEQ ID NO: 146047 - protein, 85 aa, Glycine max
  unsure (1)..(85): unsure at all Xaa locations
  Clone ID: PAT_MRT3847_10289C.1.pep
VQRTNDKHNSSFFFSSPAYTTCNFSXTGVVAPFTVLNSMTDFPTIKTNIYITSIASNSLRVQFMHMFPPFFTKKLYTFSYLPDLL

SEQ ID NO: 146048 - protein, 66 aa, Glycine max
  Clone ID: PAT_MRT3847_1028C.1.pep
LSVHQRMDSMKLVDHSNRGPCAISLRFDAPCFVSLDGHDIFPFGLGYQEVLLSNGPPFCRLLAGEQ

SEQ ID NO: 146049 - protein, 259 aa, Glycine max
  Clone ID: PAT_MRT3847_102900C.1.pep
VCAIHALEDSCIYLGNLQAALGRILQGSSQSGPVLTPAEVLIAIHGIDPEKDGIPLKKVTDACNACFEQWQTFTQEVLARVLNQLVEQIPPPLLFMRTVLQAIGAFPTLVDFIMGILSRLVMKQIWKYPKLWVGFLKCVQLTKPQSFGILLQLPPAQLENTLNRIAALKAPLIAHASQPDIQSKLPRAMLVVLGLASDSQVLSQAQTTQTQTSQTQTSQTQTTQTQTSQTQTSQTQTGETSNSDKDTATEKSKESSTAS

SEQ ID NO: 146050 - protein, 44 aa, Glycine max
  Clone ID: PAT_MRT3847_102901C.1.pep
SFYAIKDFFSDCFVSTFLVYPDFYVFLELVCKTYNEYLCSLSTF

SEQ ID NO: 146051 - protein, 45 aa, Glycine max
  Clone ID: PAT_MRT3847_102902C.1.pep
TKYISEGTPKLLTTMYYLILPKLKGKKRKVNLDNKLVVDPLTIKN

SEQ ID NO: 146052 - protein, 161 aa, Glycine max
  Clone ID: PAT_MRT3847_102903C.1.pep
TPALAQSFRVLERMANLNTYDDIAMDYQYWEDAGDDFRDGKGVLLPLWRFSGLANAGASKMTTGLCWSHQYVDFFAVGYGSYDFVRQGIAGAPTGFSQPNANGGSSSSGAGGAGGSGAGHSSGSAGGNGAGASGSGGSGAGSSSGGNGAGPNGQVTKLEEK

SEQ ID NO: 146053 - protein, 134 aa, Glycine max
  Clone ID: PAT_MRT3847_102904C.1.pep
ARVPPLGYASPAWSQVCSRGLSMRMAGMRRVAPLARLVCILPLLPGFLSSGLYQGLECSRCAGAFTRSLLSLQVVGKLMAFLCLQVKVMECFALLLSRPRVFFFPRKKSKAGPMKYFFCAISKVIMGSARCTVF

SEQ ID NO: 146054 - protein, 78 aa, Glycine max
  Clone ID: PAT_MRT3847_102905C.1.pep
TTSSSHLLLLLTPPNPSSSLTPNPEIGWPVRTIKSCLTSMAAMLTLMSTFLSRLLSPRGDRTQRSNQGDRGGKQVLDP

SEQ ID NO: 146055 - protein, 485 aa, Glycine max
  unsure (1)..(485): unsure at all Xaa locations
  Clone ID: PAT_MRT3847_102906C.1.pep
MPFIHNFRMAAPAIVSKTLLLFLILHAILMSLATSQPNFVKHYCFDQNGNYTANSTFQANLNTLLSNLSSNTEIDYGFYNFSNGQNTDKVNVIGMCRGDLKPEACRSCLNNSRILLTQLXPNQKEAIGWYDQRMLRYSTLSIFGIADSSPLYDQRMLRYSTXNQNETNVDQXNEVVGDLLRILGNRAAAGDSHRMYAQANKTGPSFQTVFAHVQCTPDLLELECNQCLFGNLISYIPKCRQFXCFHAHNGSKYFIEINSDSCEYPLVTSRALCFWIGPSSXSFAFVALLIKGKSNSWKTAIAIIVPIVSILILFTFMCFFLRRRKPTKYFKSESVADYEIEPTETLQLDFQTIIDATNNFADVNKLGEGGFGPVYXRLPNGEEVAIKRLSKDSGQGDIEFKNELLLVAKLQHRNLARVLGFCLETGERILVYEFLPNRSLDYFIFDPIKRLNLDWERRYKIIQGIARGLLFLPVASWGRIIHRDL

SEQ ID NO: 146056 - protein, 87 aa, Glycine max
  Clone ID: PAT_MRT3847_102907C.1.pep
RAPKSYAPNEYTVHMPYSLLDSKISQFIRLSLACQWIQLQSERLTYFGNPRIHVYFQLPEACRRLPHRSSSIDASVSTISPEPNPLE

SEQ ID NO: 146057 - protein, 53 aa, Glycine max
  Clone ID: PAT_MRT3847_102908C.1.pep
QNNDHMIYPHLDSCSSLVVRGYYTVSTRRRGKIKSIQGSYAGGPYDSGKFRHD

SEQ ID NO: 146058 - protein, 62 aa, Glycine max
  Clone ID: PAT_MRT3847_102909C.1.pep
TPFSLYLLGPPPPPSRTTLIMFDFKPNPIPIYTYPIFLIAPLRVAVVLHIYLREIGGNIWAL

SEQ ID NO: 146059 - protein, 95 aa, Glycine max
  Clone ID: PAT_MRT3847_10290C.1.pep
SLCFQTSEGETPCRDQLVIFRANGTKSPQRKNFSPTTHRKKEREDDAGKAEDRSAEAKRREESEGKGLSARGQSRWPQSHLPHLQGPTCKSKPTG

SEQ ID NO: 146060 - protein, 65 aa, Glycine max
  Clone ID: PAT_MRT3847_102910C.1.pep
MHSLLFTEPHSRSKWSYMKNTCPLEQMLAMIMCCGHNRLTEKTFFTGRVWGHIWCEYDTIATQFR

SEQ ID NO: 146061 - protein, 116 aa, Glycine max
  Clone ID: PAT_MRT3847_102911C.1.pep
KGISQKRLQKNNRKQRPEPNPRRNGPPQTQRSETTERRQETPGKRKTTRATARRAEAPPTEPHKTTRKKRGRAKRERKKKGRQKPRRQEARKATCATKPPGAKKKRREPKQKREHR

SEQ ID NO: 146062 - protein, 63 aa, Glycine max
  Clone ID: PAT_MRT3847_102912C.1.pep
EILSRHASDEIYVGMTDRDDWTGDPMAMETLAKFGTLLNDIEAYFPSRNKDSRLRYRYGPVNM

SEQ ID NO: 146063 - protein, 124 aa, Glycine max
  Clone ID: PAT_MRT3847_102913C.1.pep
IVMSGNAVSLKRVIGPTLVQVFLAPSTSTERFYACKWAKSEPHSWELIFPIKVCGLNNGFPMWNSEWANQISWHLSFFIANPNQSSVFDILLGIFQDFESAGEILMPAFSVPQAPARCSINAGP

SEQ ID NO: 146064 - protein, 85 aa, Glycine max
  Clone ID: PAT_MRT3847_102914C.1.pep
NSDAEAVFKDMKRVGITPTMKSHMVLLSAYSKMGSVNKCEEILNQMCKSGLKLDTYVLNSMLNLYGRLGQFGKMEEVLRVMEKGS

SEQ ID NO: 146065 - protein, 69 aa, Glycine max
  Clone ID: PAT_MRT3847_102915C.1.pep
DCFVRGRSMGCHLTSPSMRCHTSSAVLSKLSSWEVPLKFHSRDIAVDPHFRRRAAHPPVASCGTYQQFR

SEQ ID NO: 146066 - protein, 82 aa, Glycine max
  unsure (1)..(82): unsure at all Xaa locations
  Clone ID: PAT_MRT3847_102916C.1.pep
ILYLFILISFFLAINLLFFINKRFTFNKPPXXKNFFLYDSYTTKFYFFYSNSTQXXLYYTQHILALFYSQKHTLTNKNWVSP

SEQ ID NO: 146067 - protein, 231 aa, Glycine max
  Clone ID: PAT_MRT3847_102917C.1.pep
QTLSLFVPSKNHHMGDLKDLNSLRGNLEILHLERLKLSASDEKDKYVRDKKHLNCLTLRWDHEEEEEEEEEKDKGNDVDHKDGKSLECLEPNPNLKVLCVLGYYGNMFSDWLSSMQCLVKFSLNDCPKCVFIPPLDHLPHLRVLELRRLDSLEFISADAKGSSSSTFFPSLKELTISDCPNLKSWWKTPKWEDDRPFFNCISKLHVQCCPNLHCMPLYPFLDEEWCLWIPA

SEQ ID NO: 146068 - protein, 30 aa, Glycine max
  Clone ID: PAT_MRT3847_102918C.1.pep
AGADLDPLTNSELDEEDAVLDCNNDIDEAD

SEQ ID NO: 146069 - protein, 68 aa, Glycine max
  unsure (1)..(68): unsure at all Xaa locations
  Clone ID: PAT_MRT3847_102919C.1.pep
RGXCMKXXXXTVYYGQXLKTVXXEKXKKMWKVKLLXGVWLXKXYNEXFLLXXFNEXIIXSGXFXXXXR

SEQ ID NO: 146070 - protein, 76 aa, Glycine max
  unsure (1)..(76): unsure at all Xaa locations
  Clone ID: PAT_MRT3847_10291C.1.pep
LIGVIKRKKHIKRKKHIARCSNNTLVNPHTHQXCDFGSAKVLVKGEPNISXICSRYYRAPELIFGATEYTTARCIG

SEQ ID NO: 146071 - protein, 275 aa, Glycine max
  unsure (1)..(275): unsure at all Xaa locations
  Clone ID: PAT_MRT3847_102920C.1.pep
HAITQVVNWPLDEEKSIEKHQEEAGNILARDRTRRAIEQPERYGYANLIAFALVAASEVLEEDPKTLKVVLASKEKEKWLSSMSEEIKFLHDNYTLELIKKKXGSRVAXCKWIFKKKEGIQXVEXDRFKARSNARGFTQKDGIDFNEVFSPRVKHMSIIILMAMVAEFDLVLEQMHVKTTFLYGKLDEVILMKQPEGFEVRGKEDYVXKLNKSMYGLKQSPRQWNRRFDEFMAHIKFHRSHYDNCVYFKFPSKVEFVILLLYVDDIPFCRLLAAV

SEQ ID NO: 146072 - protein, 70 aa, Glycine max
  unsure (1)..(70): unsure at all Xaa locations
  Clone ID: PAT_MRT3847_102921C.1.pep
QSKEFLALXKIIQRSDSKAKEDXIVLYEIVILKTLLXKPNMPKQQMKEYIVHLLYMKMLGHYASYRYTHC

SEQ ID NO: 146073 - protein, 60 aa, Glycine max
  unsure (1)..(60): unsure at all Xaa locations
  Clone ID: PAT_MRT3847_102922C.1.pep
KSKFQKCGICPQQQAVKVAIEEVKSKLGVFMRNVEDLGXQDDTCSRDIIRLRSVVVQTIV

SEQ ID NO: 146074 - protein, 55 aa, Glycine max
  Clone ID: PAT_MRT3847_102923C.1.pep
LMKKKKKNCLSEKKKKKKKKKKKKKKKKKKKKKKKKKKKKKKKKKKKKKKGAPPT

SEQ ID NO: 146075 - protein, 76 aa, Glycine max
  Clone ID: PAT_MRT3847_102924C.1.pep
QESSFYRKPVTIHHFLAGAKRMLNLTLEFHQPLRCMVTGGRLELNEQPPVTVDIVLVTNLPTLHILVLRITKWVLR

SEQ ID NO: 146076 - protein, 138 aa, Glycine max
  Clone ID: PAT_MRT3847_102925C.1.pep
LTWILKEIMTKQISSKKFDRAPSFRQLFPPKNIEESNGCDTCSAQFINHQCDTPESRIHQCYSSKPLMLEHGTPTPEIPYLLFLPIPSNMLYQYINQLIGQVLLRFHLFKLMITWILNTLILLNPPQVHFWPSEINYQ

SEQ ID NO: 146077 - protein, 145 aa, Glycine max
  Clone ID: PAT_MRT3847_102926C.1.pep
AQASTLFVGGSPNPLKKGFLWNPGFLGCPIKKFYCWGWVFRGGWVPKKWGFFLDDVAFFFGKRFFLDKFFVSPLLCQVFFLKKVFFSSGAKKVFFTRVSVGGGGGNPPVLFFLGPGVSGLFRGGVVWFFLRQLFFLGVSPKTGPS

SEQ ID NO: 146078 - protein, 37 aa, Glycine max
  Clone ID: PAT_MRT3847_102927C.1.pep
LITFSLKLQPPHLLFNQPRPKRCATHCYIARNILCHQ

SEQ ID NO: 146079 - protein, 81 aa, Glycine max
  Clone ID: PAT_MRT3847_102928C.1.pep
IVYPFKFVVAGIGMFIVLPNIDMRFMTMLSGEYVSNVIVIYGESVRSWIGAFLCSLQSAYRIDAKIAILRKMHAIMTGLPR

SEQ ID NO: 146080 - protein, 433 aa, Glycine max
  unsure (1)..(433): unsure at all Xaa locations
  Clone ID: PAT_MRT3847_102929C.1.pep
MAQILAPSTQWQMRISKXSSPNASPITSNMWSSLLWKQNKKVSPTSSAKFRVMAIKSDNSIINRLEGLLNLDITPFTDKIIAEYIWIGGTGIDVRSKSRTISKPVEHPSELPKWNYDGSSTGQAPGDDSEVILYPQAIFKDPFRGGNNILVICDSYTPQGEPIPTNKRHRAAEIFSNPKVQAEVPWYGIEQEYTLLQTNVKWPLGWPVGGYPGPQGPYYCSAGADKSFGRDISDAHYKACLYAGINISGTNGEDLNAWGEYQVGPSVGIEAGDHIWASVEIHPRENDRASLVLCPLATHMDPYVMRAXLEETTSTKSMREDGGFEVIKKAILNLSLRHKDHISAYGEGNERRLTGKHETASINTFSWGVANRGCSIRVGRDTEKNGKGYLEDRRPASNMDPYVVTSLLAETTLLWEPTLEAEALAAQKLALKV

SEQ ID NO: 146081 - protein, 68 aa, Glycine max
  Clone ID: PAT_MRT3847_10292C.1.pep
NLKTNYGGVDYKIQLSQNNANVITSAQRSSPESYSLHPATVILLPRTRFVKHYCNQICYNHICYNQNY

SEQ ID NO: 146082 - protein, 74 aa, Glycine max
  Clone ID: PAT_MRT3847_102930C.1.pep
FRYEERSDLWWTLLVRDNLRGGSSLIRRRSLFFSGRFNVISSVSLPSYRRSHYPRSGSGYLYKHPLWEKVPTRT

SEQ ID NO: 146083 - protein, 244 aa, Glycine max
  Clone ID: PAT_MRT3847_102931C.1.pep
MGDLSKSGAEKSSLEDKQRTEKKIREAKEHKFTPRGEPIPTNKRHRAAEIFSNPKVQAEVPWYGIEQEYTLLQTNVKWPLGWPVGGYPGPQGPYYCSAGADKSFGRDISDAHYKACLYAGINISGTNGEVMPGQWEYQVGPSVGIEAGDHIWASRYILERITEQAGVVLSLDPKPIEGDWNGAGCHTNYSTKSMREDGGFEVIKKAILNLSLRHKDHISAYGEGNERRLTGKHETASINTFSWG

SEQ ID NO: 146084 - protein, 93 aa, Glycine max
  Clone ID: PAT_MRT3847_102932C.1.pep
RAMKSGLLPPTPFISSPLPDTQNPWVIFVITFPMGYKHRRYIGLLPLLRVRMLPTSPPLLLMGSLLGPPPPPPPPPPQRRRTSYSDDGKPSLN

SEQ ID NO: 146085 - protein, 171 aa, Glycine max
  unsure (1)..(171): unsure at all Xaa locations
  Clone ID: PAT_MRT3847_102933C.1.pep
MSVDLNKTASNGHDKMVISQEHQAKITKVRGLIGPLSDKESVYCSDASISRYLRARNWNVKKAAQMLKQSLKWRKEYKPEEIWEEVAAVAEKGXYRPNYSDKYGRPVIVMRPCTRLSXINTIKYAPFPXFQSGKMQTLFVYCMENAIINLPPHEEQLAWLIDFPGVKMSDV

SEQ ID NO: 146086 - protein, 73 aa, Glycine max
  unsure (1)..(73): unsure at all Xaa locations
  Clone ID: PAT_MRT3847_102934C.1.pep
AKKAFLKGFKPLGGFFGNQPFFGGEPLGVGEXALIPFKGGFKTKEPLGTFKGGGGYPNFFFWPKKSIQKKSFF

SEQ ID NO: 146087 - protein, 61 aa, Glycine max
  Clone ID: PAT_MRT3847_102935C.1.pep
GTKLMEGNKISEDIEDAGSGADLNSFRYDSSKGLVKVERGDHGEEAICRNVICRINCGSAP

SEQ ID NO: 146088 - protein, 528 aa, Glycine max
  unsure (1)..(528): unsure at all Xaa locations
  Clone ID: PAT_MRT3847_102936C.1.pep
MAKKKEKKVNVSGKPKHSLDVNRSNDAKKESRSAATVRRLKMYNTRPVRDRKGKVLSHELQSKELPSTRIQPDRRWFGNTRVVNQKELEFFREELQSRMSSNYNVILKEKKLPLSLLNDHQKQARVHLLDREPFQDAFGPKTKRKRPSLMAADYESLLKKADGSQDAFEQKYGSSVSAEANDEDGFRDLVRHTMFEKGQSKRIWGELYKVIDSSDVVVQVLDARDPQGTRCYHLEKHLKENCKHKHMVLLLNKCDLVPAWATKGWLXLACHANINKSFGKGSLLSVLRQFARLKRDKQAISVGFVGYPNVGKSSVINTLRTKNVCKVAPIPGETKVWQYITLTKRIFLIDCPGVVYHNNDTETDVVLKGVVRVTNLKDAADHIGEVLKRVKKEHLERAYKIKEWDDENDFLLQLCKSSGKLLKGGEPDLMTAAKMILHDWQRGRIPFFVSPPRVEYLSEXPNVNGVSLDDSVDGNEASAAMKAIADVLSSQQQTSVPVQNDLYSENELKGEAADQYPNTNANEEINGP

SEQ ID NO: 146089 - protein, 46 aa, Glycine max
  Clone ID: PAT_MRT3847_102937C.1.pep
SFDYINNKEYAKERSANSTLFNLFLNTYSPLRLKCIEKYKIRRKNN

SEQ ID NO: 146090 - protein, 169 aa, Glycine max
  unsure (1)..(169): unsure at all Xaa locations
  Clone ID: PAT_MRT3847_102938C.1.pep
SIKPATGGHXXMFKELKRXKGDPKSVGWLXPGXQYFKLKTKMQILPWPIGGVGXVSAYVSYTXPEIAASYGVGLVGSLVYMRMLGNSIDGMADGARGVIKGAIGQPRLLVPVALVMIYSRWNGIVVPEYGLMHLELIPMLVGFFTYKIATFTQAIEDAITVVSNDVQID

SEQ ID NO: 146091 - protein, 165 aa, Glycine max
  unsure (1)..(165): unsure at all Xaa locations
  Clone ID: PAT_MRT3847_102939C.1.pep
MYGSKASQLVKEFASGEKGQLTTYNNDLIREVVAECTQHHLDFQSLIRKMQEEGLDIQTAKNADHYGALIHHLAVVRNKRCLMAYMYNRAEIIRNLLWKIGHVLPQEIKVKLCNTEEEHFKNHSKALKNYMLKVEVDWTVHLVPXNDPSIKLGVIDEIKQRITLT

SEQ ID NO: 146092 - protein, 86 aa, Glycine max
  Clone ID: PAT_MRT3847_10293C.1.pep
RALSYLHIRTYYIIRNSKFEELTLDTLEAKFLHLMPCFKPLRYVGHLVGMARILLLNWVMGTFNIDTSWNLSVLWNRCISEDLLHS

SEQ ID NO: 146093 - protein, 31 aa, Glycine max
  Clone ID: PAT_MRT3847_102940C.1.pep
GCDSVMVSNTFHYILQAAGVQEDQDHTYAGR

SEQ ID NO: 146094 - protein, 66 aa, Glycine max
  Clone ID: PAT_MRT3847_102941C.1.pep
MYGSKASQLVKEFASGEKGQLTTYNNDLIREVVAECTQHHLDFQSLIRKMQEERLDIQTAKNADHY

SEQ ID NO: 146095 - protein, 75 aa, Glycine max
  Clone ID: PAT_MRT3847_102942C.1.pep
TLWLYKKNFIIIIMSSHSNIEQEAPGESLLYHSKRSYFGTIKHAWFPVLYFHFIQIDRPSLHAQYSVMSTLSSLN

SEQ ID NO: 146096 - protein, 177 aa, Glycine max
  unsure (1)..(177): unsure at all Xaa locations
  Clone ID: PAT_MRT3847_102943C.1.pep
MDAQRALLDELMGAARNLTEEERKGYKEVSWDDKEVCGFYMVRFCPHDLFVNTRSDLGPCPRIHDPKLKESFEKSPRHDAYVPKFEAELSQFCEKLVMDLDRRVRRGRERLAQEVEPAPPPPLTAEKSEQLSVLEEKIKNLLEQVESLGEAVKVDEAEALMRRXETLNAEKTALTQP

SEQ ID NO: 146097 - protein, 85 aa, Glycine max
  Clone ID: PAT_MRT3847_102944C.1.pep
MMKGQCMPRLKSSSCKNKTPSPMTLLERFREAVLRLMMLSALSKATNHRRSGDGERQNRHFNSPHDPHHSEAVADCIRVIKKKAA

SEQ ID NO: 146098 - protein, 52 aa, Glycine max
  Clone ID: PAT_MRT3847_102945C.1.pep
LHFFKIPYFATFFGCHRKHHHENIFFLVNLSLKTRIRTLCFSTQENLIRVYP

SEQ ID NO: 146099 - protein, 45 aa, Glycine max
  unsure (1)..(45): unsure at all Xaa locations
  Clone ID: PAT_MRT3847_102946C.1.pep
EPYSKQMEAVGVANRWGGRYTNLPQNPKSPFTKTQKLXXSIHPPL

SEQ ID NO: 146100 - protein, 141 aa, Glycine max
  unsure (1)..(141): unsure at all Xaa locations
  Clone ID: PAT_MRT3847_102947C.1.pep
LVMGLNPHTDGGSLTILLQLNEVXGLQIKIDGSWIPIKPLPNAFIVNLGDMMEIMTNGIYRSVEHRATVNLEKERLSIATFYNPGMEVKLGPAPSLLTPTTPAVFKTISVPEYYRGYLSRELRGRSYLDSMKIQNEDENSS

SEQ ID NO: 146101 - protein, 65 aa, Glycine max
  Clone ID: PAT_MRT3847_102948C.1.pep
ARWLSGIIYAIILIPDSFHRIHFNFLYTLVLKLSEKLQIKLYIEIVTEFIHSAFLKRLQNDSWKF

SEQ ID NO: 146102 - protein, 49 aa, Glycine max
  Clone ID: PAT_MRT3847_102949C.1.pep
TRLPPFRQARKENTISSLSHQKFKTNPILSFHLKFGFLCHLFFFSFVLI

SEQ ID NO: 146103 - protein, 79 aa, Glycine max
  Clone ID: PAT_MRT3847_10294C.1.pep
LTGLCRGFLLRMFGSIMINKLVLICKLGLADGADDFEANGSGLELRALSLLIPLCVSLLRFDLLLSPRHLLSLFFFPRA

SEQ ID NO: 146104 - protein, 101 aa, Glycine max
  Clone ID: PAT_MRT3847_102950C.1.pep
LHSKSLWRRSQAYDMKGLAKESLMDCLMFISNRFGSSTQRKGFKIPHYAARMVNKQMNATWLFASAKSSWKKVAREEVKEFMVQNKIDSLRLRKKTRRRTS

SEQ ID NO: 146105 - protein, 53 aa, Glycine max
  Clone ID: PAT_MRT3847_102951C.1.pep
DWMGFGFGHFDTKRFNLSFCDVGAKRRQFKTERRYGVSISSPTKSTLLTGVRN

SEQ ID NO: 146106 - protein, 158 aa, Glycine max
  unsure (1)..(158): unsure at all Xaa locations
  Clone ID: PAT_MRT3847_102952C.1.pep
PRVRSSFXLLHSPLSACSHPHXYLLTAPPSSLSNNASSPSLRATPTLTPFPPPPFYCPXQLPLFVWAIVPCDPSLQTXSVPRDHPHVPHPPFRPPQHPXQSRCPGLPQTLKHLRPLQYPLRHLRPWXLNQVSPSTGVQVGGAGGAAXTNPLFPSPPYP

SEQ ID NO: 146107 - protein, 75 aa, Glycine max
  Clone ID: PAT_MRT3847_102953C.1.pep
VSQLRSKRFGVDRYHYGASISQHRWFRGGRNSIKTVVAVFALSMIHSIGCGITAGRGHGGRTTVLLCDRELWITS

SEQ ID NO: 146108 - protein, 47 aa, Glycine max
  Clone ID: PAT_MRT3847_102954C.1.pep
IYLLKLFNCYLKFFFLLSFLIQLSYLIFLKYIYSNYNKVIRHKCLIC

SEQ ID NO: 146109 - protein, 120 aa, Glycine max
  Clone ID: PAT_MRT3847_102955C.1.pep
GQRGATQAIGCLLGLCSVPLTIGPFVAGLLYDHLGSYQLPFLLAGVPPVVCSVLMFAVRCVPDDAKDEASENGLMVKSCSPLEPVGDKLNGHHHGAAATIRAAGQATGAAADKLLSNLDS

SEQ ID NO: 146110 - protein, 78 aa, Glycine max
  unsure (1)..(78): unsure at all Xaa locations
  Clone ID: PAT_MRT3847_102956C.1.pep
DYSGGVYGQAECIFNPGWVTGGDRLSAFACERARQGHVXGLETLGCIPSANGVFELGSTQSILQNPDLMIQGEGSCSI

SEQ ID NO: 146111 - protein, 65 aa, Glycine max
  Clone ID: PAT_MRT3847_102957C.1.pep
MVSEGCILFPSLEWMNIRSPRMRLYRARQLVVAQGLLNFMSGRGWHFHYCECFCFLAYVQEIFLS

SEQ ID NO: 146112 - protein, 40 aa, Glycine max
  Clone ID: PAT_MRT3847_102958C.1.pep
LRATIILLLFEIIFFIIHNIDDTVHFLRLKRDYHLLLHHC

SEQ ID NO: 146113 - protein, 94 aa, Glycine max
  unsure (1)..(94): unsure at all Xaa locations
  Clone ID: PAT_MRT3847_102959C.1.pep
ILIGSVKKECFGGFLVLQVVYDVLAVIIECLKCKVECKYGLVYMKEXVGFILVRGHSIICVLIRRIRPFQDVRLFFILNIIFLKRYVVWCSFKY

SEQ ID NO: 146114 - protein, 49 aa, Glycine max
  Clone ID: PAT_MRT3847_10295C.1.pep
ARRMNVPSTFTTTTPNLVVCPFPEPCFFRKSTHLYGAAREITLLSLALS

SEQ ID NO: 146115 - protein, 64 aa, Glycine max
  Clone ID: PAT_MRT3847_102960C.1.pep
KPNYHSNCTCLYVGPSYFDFLPRNTHLHLNKKNVFCQLRPSHTKRFMFLYQEKYCSPILQPVQV

SEQ ID NO: 146116 - protein, 75 aa, Glycine max
  Clone ID: PAT_MRT3847_102961C.1.pep
SKAKPLTINLMQKMERENEKKKIENFIQVWSNNLHRFTDSINQREQKDHPKAKLHREKLSQDAEKLSKFNFPTSK

SEQ ID NO: 146117 - protein, 55 aa, Glycine max
  Clone ID: PAT_MRT3847_102962C.1.pep
LTQQNLFKFFMKLTGEYFFIFIWLWTLFIHVFSLLSSNYTHVCYGAKPPFFKLTY

SEQ ID NO: 146118 - protein, 71 aa, Glycine max
  Clone ID: PAT_MRT3847_102963C.1.pep
FWTKTLMPLGFTKSWIPLRIQMERSPVMNEKQPVLALQVDYTTGAVFGYTDVRKGTCCNCILTFYVGAGFS

SEQ ID NO: 146119 - protein, 75 aa, Glycine max
  Clone ID: PAT_MRT3847_102964C.1.pep
NIQGPWFCFSRRDLFFPFLKIVGTLVTGVRGGVGEPMFYVKKVVLILLGKQGNKEIFFLKKKKKKKKKKKKKKKR

SEQ ID NO: 146120 - protein, 39 aa, Glycine max
  Clone ID: PAT_MRT3847_102965C.1.pep
DNTTVNTPHSDKPPFNNTLHSETSSTQHMRINLPTFLPI

SEQ ID NO: 146121 - protein, 58 aa, Glycine max
  Clone ID: PAT_MRT3847_102966C.1.pep
SPMGWLISWWPLVQGLRTLLGFVKRRYHNGWFGCNYGMVEAPFLGFNSWPELLWGFGF

SEQ ID NO: 146122 - protein, 109 aa, Glycine max
  Clone ID: PAT_MRT3847_102967C.1.pep
VSVPCTSLFKTVTVRCGHCTNLLSVNMRGLLLPSANQLHLGHSFFTPQNLLEEIRNAPSTNMMMNQLPNPNDLVMSTMRGGPEETPKPPSANRPPEKRQRVPSAYNRYR

SEQ ID NO: 146123 - protein, 55 aa, Glycine max
  Clone ID: PAT_MRT3847_102968C.1.pep
GDWKQCDATERQCLLGWHMHAYDMCRLRYEDWIWCPYSRRVMHTLYACCGHRQHL

SEQ ID NO: 146124 - protein, 252 aa, Glycine max
  Clone ID: PAT_MRT3847_102969C.1.pep
SVNPINQIKSSERKERKEKKKKKRESTKRGTTAISNMSSSSTSFSPDQQHLSPSDQLCYVHCNFCDTVLAVSVPCTSLFKNVTVRCGHCTNLLSVNMRGLLLPSANQLHLGHTFFTPQNLMEEIRNAPSTNMMMNQLPNPNDLVMSTMRGGPEETPKPPSANRPPEKRQRVPSAYNRFIKDEIQRIKAGNPDISHREAFSAAAKNWAHFPHIHFGLMPDNQPVKKANVRQEAEDVLMKDGFFAPANVGVSPY

SEQ ID NO: 146125 - protein, 57 aa, Glycine max
  Clone ID: PAT_MRT3847_10296C.1.pep
QTKYYITTISINASYITPKETAFSVKSSLEGWVHYSPMECGDYCNMGLTKFISCLHL

SEQ ID NO: 146126 - protein, 207 aa, Glycine max
  Clone ID: PAT_MRT3847_102970C.1.pep
LNNQEDQIHRKFYLSITKTATDQSIPSIKSNQIIRKKRKEKKRKKEINKKRNNMSSSSTSFSPDQHLSPSDQLCYVHCNFCDTVLAVSVPCTSLFKTVTVRCGHCTNLLSVNMRGLLLPSANQLHLGHSFFTPQNLLEEIRNAPSTNMMMNQLPNPNDLVMSTMRGGPEETPKPPSANRPPEKRQRVPSAYNRFIKDEIQRIKAGNP

SEQ ID NO: 146127 - protein, 90 aa, Glycine max
  unsure (1)..(90): unsure at all Xaa locations
  Clone ID: PAT_MRT3847_102971C.1.pep
MGDIRLTRVEQGQTKIRNVPIAVTPEGFWCCPTPVGFQKSLKPQNPLNKLKPSSPPPKPSSQXKAVSESQRKTVPSPSRLAVPDAQQCND

SEQ ID NO: 146128 - protein, 168 aa, Glycine max
  Clone ID: PAT_MRT3847_102972C.1.pep
SVNPINQIKSSERKERKEKKKKKRESTKRGTTAISNMSSSSTSFSPDQQHLSPSDQLCYVHCNFCDTVLAVSVPCTSLFKNVTVRCGHCTNLLSVNMRGLLLPSANQLHLGHTFFTPQNLMEEIRNAPSTNIMMNQLPNPNDLVMSTMRGGPEETPKPPSANRRENFL

SEQ ID NO: 146129 - protein, 515 aa, Glycine max
  Clone ID: PAT_MRT3847_102973C.1.pep
MGDIRLTRVEQGQTKIRNVPIAVTPEGFWCCPTPVGFQKSLKPQNPLNKLKPSSPPPKPSSQKKAVSESQRKTVPSPSRLAVSDAQQCNDDPERPPTSTSVPAQRAPKKVAIEFGEPGTFDMKLLLLGKQGFCVKLSVHRDVLIEKSSFFADKLSEQSSLSCLQVDDCEDVEIYVETVGLMYCKEMKQQLMKQSVSRILRILKVAEFLGFSSCIQSCLEYLEAVPWNGKEEEEKVIATVLRLQGEGIGVNPVLKRVSPDISNAPKDTLSHIVELVLKSNEERGRREMKSIVLKLLRENNSLPSSSGSADLCNDMINKSCRRCMDSLLCLFNQVAEPGFSDNKEPVVKHIALEADNLSWLLEILVDKQAAEDFALMWANQQELAALHGKLPIAFRYHVSCISGRLYVGIGRGEVLPSKNTRQLLLQTWLQPLINDYNWLQHGCGSFDRKLVEEGIGRTILTLPLEDQQSILLSWVGSFLKTGDGCPNLQRAFEVWWRRTFIRPYVEGQTINVMPDT

SEQ ID NO: 146130 - protein, 46 aa, Glycine max
  Clone ID: PAT_MRT3847_102974C.1.pep
SHKNLSSFKWGGGKWHLSHHFMFRSGSILKTRGQKGFLNLKKGLQF

SEQ ID NO: 146131 - protein, 165 aa, Glycine max
  unsure (1)..(165): unsure at all Xaa locations
  Clone ID: PAT_MRT3847_102975C.1.pep
EADNCPWLLEILVDKXKAAEDFALMWANQXELAALHGKLPIAFRYHVSCISGRLYVGIGRGEVLPSKNTXRQLLLQTWLQPLINDYNWLQHGWRSFDRKLVEEGIGRTILPLPLEDQQSILLSWVGSFLKTGDGCPNLQRAFEVWWRRTFIRPYVEGQSNAMPDS

SEQ ID NO: 146132 - protein, 83 aa, Glycine max
  Clone ID: PAT_MRT3847_102976C.1.pep
HPKWLTPLLISRRHKVPIFETKCPQSPKHLLLPSLSSEAIQIRIGIYFTFLVPTTRQYHESQYLIYGIFRHLSVIHCITESKQ

SEQ ID NO: 146133 - protein, 182 aa, Glycine max
  Clone ID: PAT_MRT3847_102977C.1.pep
VSVPCTSLFKTVTVRCGHCTNLLSVNMRGLLLPSANQLHLGHSFFTPQNLLEEIRNAPSTNMMMNQLPNPNDLVMSTMRGGPEETPKPPSANRPPEKRQRVPSAYNRFIKDEIQRIKAGNPDISHREAFSAAAKNWAHFPHIHFGLMPDNQPVKKANVRQEAEDVLMKDGFFAPANVGVSPY

SEQ ID NO: 146134 - protein, 37 aa, Glycine max
  Clone ID: PAT_MRT3847_102978C.1.pep
LGHMWKAKLLTSCQIRDDMFMIHEYILEWFWNLNFLF

SEQ ID NO: 146135 - protein, 75 aa, Glycine max
  Clone ID: PAT_MRT3847_102979C.1.pep
FGFQTFFYIPLHTRTKTASLHQLCPYSNQNAIYLNSVPSNRNLTCTSITPMTSIINNTSETASNQQGFYTKLKQI

SEQ ID NO: 146136 - protein, 106 aa, Glycine max
  unsure (1)..(106): unsure at all Xaa locations
  Clone ID: PAT_MRT3847_10297C.1.pep
DKEGIPPDQDRLIFTGKQLEDRRPLSDYNIQKEXTLHWVSLLRGGMQIILKILTGKTITRQEESSDTIDNEKAKIHDKERMPPDQHRLIFAGKHPEDGRTLAVYNI

SEQ ID NO: 146137 - protein, 82 aa, Glycine max
  Clone ID: PAT_MRT3847_102980C.1.pep
QLVNGKSRKLTKHWSYYEKPLKTHVVSNVLFKLRALKMIEEELKSLPSREPVNTELQGGIMSLVWTLFNLCGRVGRTREIPD

SEQ ID NO: 146138 - protein, 219 aa, Glycine max
  unsure (1)..(219): unsure at all Xaa locations
  Clone ID: PAT_MRT3847_102981C.1.pep
MCIINQEAIKQLQSLMENLDEQQKNTFQIMHRGYPTETLVRFLKARDGNVVKAHKMLIDCLQWRVENEIDNVLSKPIPPDLYRRLRDSQLVGMSGFSKEGLPVIAVGVGLSTFDEVFDKYYVQSHIQMNEYRDRVMLPTATKNHGRHIDTCVKVLDMTGLKLSALSQLKLLTAISTIDDLNYPEXTDAYYIVNGPYVFSACWKVVKPLLQXRTRRKVTY

SEQ ID NO: 146139 - protein, 50 aa, Glycine max
  Clone ID: PAT_MRT3847_102982C.1.pep
IIHRSDLGRNSQRVIQGKINRGRNQQLRSEASRVFITRLLYCVGMEPPAA

SEQ ID NO: 146140 - protein, 98 aa, Glycine max
  Clone ID: PAT_MRT3847_102983C.1.pep
MAFCNKVGNVLRQGAARSTQAPVSSMLNYIRCMSSSKLFIGGLSYGVDDQSLKDAFSGFGDVVDGKFSLLSLLSHGVQFQPPVSLTLPYVLQFPLMSL

SEQ ID NO: 146141 - protein, 72 aa, Glycine max
  Clone ID: PAT_MRT3847_102984C.1.pep
HKTPGRNGKAGGFLNQTPGMSKREKARSSGNTKLNQYRSILLNAQNHGNKQPLSIIELLPCHQTKKKTKNLL

SEQ ID NO: 146142 - protein, 124 aa, Glycine max
  Clone ID: PAT_MRT3847_102985C.1.pep
VVAFTLTNKFHKEFPHVKQKAVSNLLRAKQYIIPNYPLPPGEEKTEILRVVVRKSLSLTMIDRLVTDICGVTEMLMKTDAVDLSAFQPGASPSIEKQHANKGLRKEHKHKAQRPSSDGVYRTVC

SEQ ID NO: 146143 - protein, 87 aa, Glycine max
  unsure (1)..(87): unsure at all Xaa locations
  Clone ID: PAT_MRT3847_102986C.1.pep
PNHTSSTTXGTIPTKTKHCRRLNQTASIRRRAPSLTVLLVVVSATHMHAINASAPSPTSPSSIISSSFAVSFLTVVIALVFESSLRI

SEQ ID NO: 146144 - protein, 108 aa, Glycine max
  unsure (1)..(108): unsure at all Xaa locations
  Clone ID: PAT_MRT3847_102987C.1.pep
RLHCAVLMCMAVMSAPMMVHAVSCTDVSVNLPPCLSYLMHSGHVSGGVVTQMRNIPCSARTSLDRRPACNXCLQQAAHNYGIPPELAHALRGQCNGSGPWAITRSTNC

SEQ ID NO: 146145 - protein, 117 aa, Glycine max
  unsure (1)..(117): unsure at all Xaa locations
  Clone ID: PAT_MRT3847_102988C.1.pep
YXNLFDWRFLRLILPCLLSXQDKEKFYEDHGPFQKLPFNLGKRGAPRGVSNLKNPFCNKTRVCPQPQKKGGGVSLSKTFGPPQTGCPPPPFLTPPLDPKMGGSYKYNRFFFYKIWHF

SEQ ID NO: 146146 - protein, 49 aa, Glycine max
  unsure (1)..(49): unsure at all Xaa locations
  Clone ID: PAT_MRT3847_102989C.1.pep
LTFSTFKMQIFVKTLTGKTIXLWWRVRYIDNVSQDHAGGITDRRLFVEH

SEQ ID NO: 146147 - protein, 106 aa, Glycine max
  Clone ID: PAT_MRT3847_10298C.1.pep
SKPTARAGSLTPVRLRRHAGKRAPHQAIVAVDPGSVQVAAPCVALLVTGVSTHPPAETPGQAVMLSRASSLRRPDCIQRRGRESGNACDPRARAHPDRLLVRWPLA

SEQ ID NO: 146148 - protein, 54 aa, Glycine max
  Clone ID: PAT_MRT3847_102990C.1.pep
IQRPSRPAAYVVSVVGQLYVRRQCTFSVGLSSYAGHIGGPPSYPAFECTTLSIL

SEQ ID NO: 146149 - protein, 144 aa, Glycine max
  unsure (1)..(144): unsure at all Xaa locations
  Clone ID: PAT_MRT3847_102991C.1.pep
MFLLRRQTQNHHENDSSYQDTKVAELKTALGPLSGRQLKYCTDACLRRYLEARNWNVDKTAEMLRQKGEWRATYRPEEIRWAEIAHEGETGKVSRANFHDRHGRAXLIMSSVMQGAASAEDNIRHLVYLLGGARRNLSEGQEQT

SEQ ID NO: 146150 - protein, 57 aa, Glycine max
  unsure (1)..(57): unsure at all Xaa locations
  Clone ID: PAT_MRT3847_102992C.1.pep
PKKMVKVLEYVGPAPKGSLRGQNFLKKAAKGLVXGGKKKIFPPMYFFLARKPDSNRN

SEQ ID NO: 146151 - protein, 60 aa, Glycine max
  unsure (1)..(60): unsure at all Xaa locations
  Clone ID: PAT_MRT3847_102993C.1.pep
MDAGGKIKKGAGGRKGGGPKKKPVSRSVKAGLQFPVGRIGPYLKKGRXPQRVGPGPPYTG

SEQ ID NO: 146152 - protein, 98 aa, Glycine max
  Clone ID: PAT_MRT3847_102994C.1.pep
MTMGPTDKELEEQLLDAGNKLLLDPPSSAEELLPLLDQVECCLSRVEQSPIDSMQNALSPSLKALIADKLLSHSDDDVKVAVASCISEITRITAPEAP

SEQ ID NO: 146153 - protein, 48 aa, Glycine max
  Clone ID: PAT_MRT3847_102995C.1.pep
EHHFPFYVLFSVNNARMGVLINTLKTTSFECWKYWNWNTSYNLPLVLS

SEQ ID NO: 146154 - protein, 56 aa, Glycine max
  Clone ID: PAT_MRT3847_102996C.1.pep
LIYLFQLFFYLRSHIKVCFCLTKLYSPAICSIFSVILFLLLSTSYDIVQNKKKKGR

SEQ ID NO: 146155 - protein, 182 aa, Glycine max
  Clone ID: PAT_MRT3847_102997C.1.pep
RTTPQQTGKAREHRPRDGISEHHGDNHTVIGPRPARRRADRRLGRRPCWTEGRADKAGPHLGRLVRERSGARARQAGGQQRRGVLPERHPLRADTVKNPDEPELLDIYSSELDFETVFDARRPTKVAVHGWLSDGLGLIQLRKAFLATSDVNYIAVNWTDIDTIVYPLARYHVSSIAQRVAF

SEQ ID NO: 146156 - protein, 111 aa, Glycine max
  unsure (1)..(111): unsure at all Xaa locations
  Clone ID: PAT_MRT3847_102998C.1.pep
TRPPHFPTSLSLLFFIATPPSRHTLSSFLHRGTTTAPHPLFFSSSRQPWRHHHRATLPLLFFIATPPWGHHHRAMHHHRDSIXPHRHAPVDSFFTKPVLQLKGPHELGNQS

SEQ ID NO: 146157 - protein, 69 aa, Glycine max
  unsure (1)..(69): unsure at all Xaa locations
  Clone ID: PAT_MRT3847_102999C.1.pep
GSSFLDPKGRGGSTGYDNAVSLSCWGRGDEEELQKENIKNADCSTGNITLSVTKSDLYTGEVICXFYSL

SEQ ID NO: 146158 - protein, 67 aa, Glycine max
  Clone ID: PAT_MRT3847_10299C.1.pep
NLNYYIFRYMLLSFFFLFCIADIKFQDNYYIILKTKIWNTQKKVGISLGYCISNCRLLYNELRNIIK

SEQ ID NO: 146159 - protein, 48 aa, Glycine max
  Clone ID: PAT_MRT3847_1029C.1.pep
AASSYAMQSNLANRMIRISSRSRGSSYGVPAYDMRRNVGLIVKSMAEE

SEQ ID NO: 146160 - protein, 76 aa, Glycine max
  Clone ID: PAT_MRT3847_102C.1.pep
KRKHNQSHLDSMNLSIACYFCCERFLKGKKITLCADHTLRESFAFTFLVDSLNTLLFDIGLPVTYKLVLIVSHIYV

SEQ ID NO: 146161 - protein, 120 aa, Glycine max
  unsure (1)..(120): unsure at all Xaa locations
  Clone ID: PAT_MRT3847_103000C.1.pep
RKFIKLAFVFLLSPEDYPWSRTQGATLIIWSDLSFFNGGHRTFRCLRGSPQGRYGQTRCSQTSIAAAQTFMASKLDVIIRILNSMVPRXPSPSSVSMKSPPVLSLXXRVTNPSSSSAKLP

SEQ ID NO: 146162 - protein, 43 aa, Glycine max
  Clone ID: PAT_MRT3847_103001C.1.pep
GRVHSRNRPYKHSNPIGDWYVCSPPNGDNRKITHLKKDILVTY

SEQ ID NO: 146163 - protein, 99 aa, Glycine max
  Clone ID: PAT_MRT3847_103002C.1.pep
NAVCPPQVMVVSSLIRRHRCCCFRFRLGRSVVLCKVNIFCPVNPLSACLRQAMSCLPYRKTWFSCRYRAVITLKVGTSYSQRAPVFFLSSSRFVLFLFF

SEQ ID NO: 146164 - protein, 48 aa, Glycine max
  Clone ID: PAT_MRT3847_103003C.1.pep
IAGINNIFLGVKCPSCEASKHITTIYTQGIHPAPVLTTLHTNLKYIKS

SEQ ID NO: 146165 - protein, 131 aa, Glycine max
  Clone ID: PAT_MRT3847_103004C.1.pep
PTRPANRAHSVIGTDEFMATDLYEEEYNVLDDIYACGMCLLELVTVEYPYIECTNAAQIYKKVTSGIKPASLAKVADLEVKAFIEKCIADVSERLSAKDLLIDPFLQSDYDNDSVGRSSRSQTHHSGNNSH

SEQ ID NO: 146166 - protein, 84 aa, Glycine max
  Clone ID: PAT_MRT3847_103005C.1.pep
YIKVPLITLGYESNYDVFVKAEGGGLSGQAQAISLGIARALLKVSEDHRVPLRQEGLLTRDSRVVERKKVGLKKARKAPQYSKR

SEQ ID NO: 146167 - protein, 207 aa, Glycine max
  Clone ID: PAT_MRT3847_103006C.1.pep
MAVSLSALTTSLSSLSFSSHISQRPNTLSFARTESLSVSVSRFPKTPSSLVVSATALAEPETEDLKNYVKSRLPGGFAAQTIIGTGRRKSAIARVVLQEGTGKFIINYRDAKEYLQGNPLWLQYIKVPLITLGYESNYDVFVKAEGGGLSGQAQAISLGIARALLKVSEDHRVPLRQEGLLTRDSRVVERKKVGLKKARKAPQYSKR

SEQ ID NO: 146168 - protein, 580 aa, Glycine max
  unsure (1)..(580): unsure at all Xaa locations
  Clone ID: PAT_MRT3847_103007C.1.pep
MAASSSSSDEPSRSVFLGVDVGTGSARAGLFDEEGKLLGSSSSXIQIWKDGACVEQSSTDIWLAVCAAVKAACSKAKVAPTEVKGMGFAATCSLVAVDSDSSPXVSFSWSGDSRRNVIVWMDHRAIEXADRIYSSKSTVLEKCXYGPNTTNLTXSVLNLGGSLQESWSMVFXWMDLSDLVSHTGQSGDDTRSLCTTVCKWTYLGHAHMQHVNDKESRDMEACGWDDDFWEEIGLGDLIEGHHAKIGRSVAFPGHPLGSGLTPTAAKELGLVPGIPVGTSLIDAHAGGVGVIESVPPSEAEEHDMEAICNRMVLVCGTSTCHMAVSRSKLFIPGVWGPFWSAMVPEYWLTEGGQSATGALLDHIIENHAASARLANQAATQKISLFELLNKMLETMIVELNLSFIAALTEDVHVLPDFHGNRSPIADPKAKGVIYGLTLDTSDKQLALLYLATVQGIAYGTRHIVEHCNAHGHKINTLLACGGLSKNPIFMQEHADIIGCPIILPRESESVLLGAAILGAVATRKYHSLSEAMKALNAAGQVIHPSKDPKVKKYHDAKYKIFRGLYEQQFSYRSTMAQALS

SEQ ID NO: 146169 - protein, 70 aa, Glycine max
  unsure (1)..(70): unsure at all Xaa locations
  Clone ID: PAT_MRT3847_103008C.1.pep
WLGTICRGGSTEVHNVITGDWTGYALNKIKFKGRAYDAGYGFCXESPYLNGLEGKNNFIQRMDHEVTDRA

SEQ ID NO: 146170 - protein, 227 aa, Glycine max
  Clone ID: PAT_MRT3847_103009C.1.pep
MAASSSSSDEPSRSVFLGVDVGTGSARAGLFDEEGKLLGSSSSPIQIWKDGACVEQSSTDIWLAVCAAVKAACSKAKVASTEVKGMGFAATCSLVAVDSDSSPVSVSWSGDSRRNVIVWMDHRAIEQAERINSSKSPILEYCGAAVSPEMEPPKLLWVKENLQESWSMVFRWMDLSDWLSYRATGDDTRSLCTTVCKWTYLGHAHMQHVNDKESRDLEACGWDDDFW

SEQ ID NO: 146171 - protein, 41 aa, Glycine max
  Clone ID: PAT_MRT3847_10300C.1.pep
NSLFYENRINRHREVVLRNMEEVEGQTEELIFDHLHSTRFQ

SEQ ID NO: 146172 - protein, 153 aa, Glycine max
  Clone ID: PAT_MRT3847_103010C.1.pep
DHSYQERNGDQFHESQQNGTEQLFPQISETHDDQLIDQNQSKSEEEQQISRQQSSQLSSSSSPISSSSTEQNNTNHHFAPRAKLFVGRLPENCSSKHLEDLFCKYGTVTECDVVGRYGFVHMSKPEEAEECVKKLNRYSFMGSLLTVEFSTSK

SEQ ID NO: 146173 - protein, 77 aa, Glycine max
  Clone ID: PAT_MRT3847_103011C.1.pep
GKTQLNPLFCFFWAPSLPPLKGFIFLGGWGPGGQNQVSLGERPNFPLPRWFPLNHLFGGPWGKIHREPYPPPPPWGL

SEQ ID NO: 146174 - protein, 114 aa, Glycine max
  Clone ID: PAT_MRT3847_103012C.1.pep
SNCNSHSQRKKQKKLLEINFHNHFAVLLCNHGLYFSVLPFFPSEACPQIKVSKFPHHHASLPSNLPPLPPLIHSIPLSLSIYFIPNPQIQIMNLSSFYHPPEPKTHNFNSGHSN

SEQ ID NO: 146175 - protein, 199 aa, Glycine max
  unsure (1)..(199): unsure at all Xaa locations
  Clone ID: PAT_MRT3847_103013C.1.pep
MATGPERSKPLHNFSLPCLKWGTQRLLRCVNADLDHRRSSRFHAPQNDAVRITNKRKIDEVGGLREEEAAAAGGAAGGANNAMMPWNLRTXRRAACKAPPQNNEEERRLXRHEVFFAAGEGEEEGGGXAGNNNNEKVKFSVSLSKEEVEQDFWALLGARPPRRPKKRPRIVQRQLNTLFPGLWLAEITAESYKVADVPE

SEQ ID NO: 146176 - protein, 92 aa, Glycine max
  Clone ID: PAT_MRT3847_103014C.1.pep
AKKLANCAHCNKLLSSPVPSKPNKAIRGNLTNRIVSLTQYPDNLGPYNYDTGTTFNLELYYLRWPFDFIAQRPIMLDPTILKSLHPWENWLK

SEQ ID NO: 146177 - protein, 93 aa, Glycine max
  Clone ID: PAT_MRT3847_103015C.1.pep
PYLLNVNIPNLPYGEIRGIRAARLGKRHESEPVIRTQDPRGREIFWIGPAGKAKDVGEGTDFHVVAKGYVSITPLQIDLTHASQLEILKKGLQ

SEQ ID NO: 146178 - protein, 72 aa, Glycine max
  Clone ID: PAT_MRT3847_103016C.1.pep
SSTSPLRGSFLKIKTDGNVKALGPGPNVNTHGQGSPQEGFTTKFLDPYKLTLKINEGKSLIKSPQTRPQKQG

SEQ ID NO: 146179 - protein, 34 aa, Glycine max
  Clone ID: PAT_MRT3847_103017C.1.pep
SIERNTEEWQVARCMHRVGVHILLFEGKFNYLKV

SEQ ID NO: 146180 - protein, 70 aa, Glycine max
  Clone ID: PAT_MRT3847_103018C.1.pep
RITAHPWTNIIQNKTLWVLKDQRNFIITFSPKSLQINQTNFVRQLPFISFGKDKPPKPNFFFFFKQRRIA

SEQ ID NO: 146181 - protein, 542 aa, Glycine max
  Clone ID: PAT_MRT3847_103019C.1.pep
ELLRPPGVPAGAKFLFSALAFDRSKVKELSLQFQMVELGWWLEGNCSCSNNASCTEVNHGGGKLGFRCRCDEGFVGDGFKDGDGCRRVSECKASTLWSGGCRKAVKIGVFVGGIIVGAILVAALSLVCYFNRRRSSWLRKQVTVKRLLREAAGDSTVPLYPYKEIERATSFFSEKHRLGTGAFGTVYAGHLHNDECVAIKKIKYRDTNSVDQVMNEIRLLSSVSHPNLVRLLGCCIEGGEQILVYEYMPNGTLSQHLQRERGGVLPWTIRLTIATETANAIAYLHSANDHPIYHRDIKSSNILLDYNFQSKVADFGLSRLALTETSHISTAPQGTPGYVDPQYHQNFQLSDKSDVYSFGVVLVEIITAMKVVDFARPRSEINLAALAVDRIKKGAIDDIIDPFLEPHRDAWTLYSINKVAELAFRCLAFHSDMRPTMIEVAEELDLIRRSGWATMEETICMASSVGSVCSSPRNGSVNSLRGVSFERAAGLGSETLIVPHKTDVFLQSIEEVKDSSPVSVHDSWLSGTSSPSTNSLLGHVVQ

SEQ ID NO: 146182 - protein, 72 aa, Glycine max
  Clone ID: PAT_MRT3847_10301C.1.pep
HLHRHAHQVYKLGLVQLMVTFCGCNPSMFQNMFRMGNQTENYTSDEHSRRIKVKNKYQRKLFLCFENLGFIG

SEQ ID NO: 146183 - protein, 55 aa, Glycine max
  Clone ID: PAT_MRT3847_103020C.1.pep
ILFLLLSRTITYVCCLITCFLSILVFDVSVHYHELIFYIILLYIFFLFNFYSLYF

SEQ ID NO: 146184 - protein, 80 aa, Glycine max
  Clone ID: PAT_MRT3847_103021C.1.pep
GVFLSKPCRLTDSSLTKTTTTTFFRNTTFFLRGETAILGRTKLRTSKTNLITPLELVKFPDVSSVPERTTTISTTDRTVL

SEQ ID NO: 146185 - protein, 81 aa, Glycine max
  unsure (1)..(81): unsure at all Xaa locations
  Clone ID: PAT_MRT3847_103022C.1.pep
MADDGNRSNYFQSILGLQNECTELELMNAYKKHAEKWYPDRCSARGNSDLVEXATKKFHEIPEAYSILSEANKALMYDMGV

SEQ ID NO: 146186 - protein, 300 aa, Glycine max
  Clone ID: PAT_MRT3847_103023C.1.pep
MVARRFQVIHDESDFDLHYDTDDGFEVFQFQLYSLSSVPPHQQKIFGAEQDTPVVNDSDLVAISDKLRLVSVNDSEPEPSAADLLKSDEELARLLQAEEEALMLQQYVASENPREFDSRVRPHVSQVRMYEDATRQEAARKSVPMEELEEKALVSLAKEGNFKPSKIEQDHAFLLQLLFWFKRSFRWVNSPSCHDCGNETVGQGMAPPLPSETLYGASRVELYRCTVCSQLTRFPRYNDPMKLVETREGRCGEWANCFTFYCRAFGYESRLILDFTDHVWTECFSQFLGRYNLSRSCWRS

SEQ ID NO: 146187 - protein, 171 aa, Glycine max
  Clone ID: PAT_MRT3847_103024C.1.pep
VLFFNVKAERDERVMPYQNSVHSDDAEFSVGQEMKQLSGIFPAVGCQGNDFFNCEDGVTIATTQKAKYYQDGVDGAANNFPGNMGNLNLKPLDKSLYNAQTSIASGKQYNCVMSEGEGKVIEHRSIDSHLSKGSIETSNTEDINHPALISRSAELGNSLITSESSRGGYTH

SEQ ID NO: 146188 - protein, 57 aa, Glycine max
  Clone ID: PAT_MRT3847_103025C.1.pep
LGSLSTITQESECGVIYVNLDPESKTIFLIQIGYGIHVANHPVYWSYCLKKKKNPFN

SEQ ID NO: 146189 - protein, 147 aa, Glycine max
  Clone ID: PAT_MRT3847_103026C.1.pep
MGSLTRSHVMHADDIMIFCKGTSRNVHNLINFFQLYKDSFGQVISKHKSKIFIGSIPGQRLRVISDLLQYFHSDIPFNYFGVPIFKGKPTRRHLYCVADKIKCKLASWKGSILSIMGRIQLVNSVIHGMLLYSFSVYAWQVLSFERH

SEQ ID NO: 146190 - protein, 45 aa, Glycine max
  Clone ID: PAT_MRT3847_103027C.1.pep
LRVSLGVPASVLLSPGLRLVYPGLKMCCVLGPVSGLAFACVCRHS

SEQ ID NO: 146191 - protein, 114 aa, Glycine max
  unsure (1)..(114): unsure at all Xaa locations
  Clone ID: PAT_MRT3847_103028C.1.pep
QCPDTTQLNRIASHSRLVRWYKREQDRSDCPSEALPNRREERDPPWSITLSAGGGXATRSGSARLGPTVRPVPLTHFLSFLAPRVCSPSYALKAGLTVGIQCIAVPRLEPNRLG

SEQ ID NO: 146192 - protein, 36 aa, Glycine max
  Clone ID: PAT_MRT3847_103029C.1.pep
KQCFENECPCFRLGYNYSSMAMPYVPYVPFPNEHCL

SEQ ID NO: 146193 - protein, 107 aa, Glycine max
  Clone ID: PAT_MRT3847_10302C.1.pep
MALPKAKEIVSSNSVVVFSKTYCPFCVDVKKLFGDLGANYKAIELDTESDGKELQAALVEWTDQRTVPNVFIGGNHIGGCDSTTALHTQGKLVPLLISAGAVAKSTA

SEQ ID NO: 146194 - protein, 204 aa, Glycine max
  unsure (1)..(204): unsure at all Xaa locations
  Clone ID: PAT_MRT3847_103030C.1.pep
MQIFVKTLTGKTITLEVESSDTIDNVKAKIQDKEGIPPDQQRLIFAGKQLEDGRTLADYNIQKESTLHLVLRLRGGMQIFVKTLTGKTITLEVESSDTIDNVKAKIHDKEGIPPDQQRLIFDGKQLEDGRTLADYNIQNESTLHLVLRLRGGMQIFVKTLTGKTITXEVESFDNIDQLKGXIQDKGGIPPEPQKLIFARKQLED

SEQ ID NO: 146195 - protein, 307 aa, Glycine max
  unsure (1)..(307): unsure at all Xaa locations
  Clone ID: PAT_MRT3847_103031C.1.pep
MQIFVKTLTGKTITLEVESSDTIDNVKAKIQDKEGIPPDQQRLIFAGKQLEDGRTLADYNIQKESTLHLVLRLRGGMQIFVKTLTGKTITLEVESSDTIDNVKAKIQDKEGIPPDQQRLIFAGKQLEDGRTLADYNIQKESTLHLVLRLRGGMQIFVKTLTGKTITLEVESSDTIDNVKAKIQDKEGIPPDQQRLIFAGKQLEDGRTLADYNIQKESTLHLVLRLRGGMQIFVKTLTGKTITLEVESSDTIDNVKAKIQDKXKGIPPDQQRLIFAXGKQLEDGRTLADYNIQKESTLHLVLRLRGGF

SEQ ID NO: 146196 - protein, 128 aa, Glycine max
  unsure (1)..(128): unsure at all Xaa locations
  Clone ID: PAT_MRT3847_103032C.1.pep
SSNQISFTPFHLIYRLKSCKPXYAQSSNSLFNLIHYTLYLQIKIAIILTEISLPNIISERPLDQYLKSTYIKNSHANRVTQFQNNTQMQNKGKRFNKCRKTASKTFKNISTRKLSYLSAENLQRTALS

SEQ ID NO: 146197 - protein, 305 aa, Glycine max
  Clone ID: PAT_MRT3847_103033C.1.pep
MQIFVKTLTGKTITLEVESSDTIDNVKAKIQDKEGIPPDQQRLIFAGKQLEDGRTLADYNIQKESTLHLVLRLRGGMQIFVKTLTGKTITLEVESSDTIDNVKAKIQDKEGIPPDQQRLIFAGKQLEDGRTLADYNIQKESTLHLVLRLRGGMQIFVKTLTGKTITLEVESSDTIDNVKAKIQDKEGIPPDQQRLIFAGKQLEDGRTLADYNIQKESTLHLVLRLRGGMQIFVKTLTGKTITLEVESSDTIDNVKAKIQDKEGIPPDQQRLIFAGKQLEDGRTLADYNIQKESTLHLVLRLRGGF

SEQ ID NO: 146198 - protein, 59 aa, Glycine max
  Clone ID: PAT_MRT3847_103034C.1.pep
MATSERQGPPPTPAADIAGNALVDQFCHLLHESPRLAHMIYQDVTKPGHPEQNGIMGLT

SEQ ID NO: 146199 - protein, 50 aa, Glycine max
  Clone ID: PAT_MRT3847_103035C.1.pep
MNMIFPYFYNLLKINNNNNNKAYFPKTNMYDDDDFLSFVMMKNENDVKVG

SEQ ID NO: 146200 - protein, 152 aa, Glycine max
  unsure (1)..(152): unsure at all Xaa locations
  Clone ID: PAT_MRT3847_103036C.1.pep
INALENKIKQVLQGILEIQKRYRGHQARGKFCELKNEMPSXQSLIGELNTIRRHGAMGRSSITINSRHLEEIHAIMLIQSVIQGRLVIRHASHVNRSKRYPENAKPSRKSLMKIIPRVKQDLSKEPVQNMLSALAGLPRRVDKADAIVEQKK

SEQ ID NO: 146201 - protein, 278 aa, Glycine max
  Clone ID: PAT_MRT3847_103037C.1.pep
MLEGLDEEGCVEEAGHHSEKKRRLNVDQVKALEKNFEVENKLEPDRKVKLAQELGLQPRQVAVWFQNRRARWKTKQLERDYGVLKANYGSLKLNFDTLQQDNEALLKQIKELKSRLVQEENNNNTESDVSVKEEMIATLQDSNPLCESAIPGSDSKELSYECFNKSDEVGGGSVFPVDFKDGSSDSDSSAILNEENNNHSPNNNAAISSCGVLQSHGLLSSPSSSSMNNCFQFQKQYQTTTQYVKMEEHNFLSADEACNFFSDEQAPTLQWYCSEEWS

SEQ ID NO: 146202 - protein, 274 aa, Glycine max
  unsure (1)..(274): unsure at all Xaa locations
  Clone ID: PAT_MRT3847_103038C.1.pep
MLEGLDEEGCVEXPGHHSEKIRRLSVDQVKALEKNFEVENKLEPDRKLKLAQELGLQPRQVAVWFQNRRARWKTKQLERDYGVLKANYESLKLNYDTLQQDDEALLKEIKELKSRLVQEENNNNTESDVSVKEEMLTTTLCETAIPGSDTKELSYECFNKSDEVGGGSSVFHVDFKDGSSDSDSSAILNEENNNHSPNNNAAISSCGVLQSHGLLSSPSSSSMNNCFQFQKQYQTTTQYVKMEEHNFLSADEACNFFSDEQAPTLQWYCSEEWS

SEQ ID NO: 146203 - protein, 268 aa, Glycine max
  Clone ID: PAT_MRT3847_103039C.1.pep
MAEHLASIFGTEKDRVNCPFYFKIGACRHGDRCSRLHNRPSISPTLLLSNMYQRPDMITPGVDPQGQTLDPRKIQQHFEDFYEDIFTELAKFGEIESLNVCDNLADHMIGNVYVQFREEDQAAKALHALRGRFYNARPIIADFSPVTDFREATCRQFEENSCNRGGYCNFMHVKLIGRDLRRRLFGRNHRGGSGTYHRVSRSRSRSRSASPRYRRERRESDSRGGRRSRERDGSGGRRRQHGSPPAREGSEERRARIEQWNREREENK

SEQ ID NO: 146204 - protein, 58 aa, Glycine max
  Clone ID: PAT_MRT3847_10303C.1.pep
LRWLFLFNVSDLIGGGGQKPRLKGIFGLIDPLRDGLSKRQLLFGPFPSQDLPTRKLTV

SEQ ID NO: 146205 - protein, 150 aa, Glycine max
  Clone ID: PAT_MRT3847_103040C.1.pep
FGSRADEDERAQESQIDFLNSVIVDLQRKNQDLKMKVEMMSEAALNGNGDDLNNYDSDDQEKQSKKKPRLFCDICDCFDLHDTEDCPTQAQMSEDPPHSTHHGSRDECTMRNSTLIILDFLITKKKMKDLKAPEQFIDQFESIYLHLNVF

SEQ ID NO: 146206 - protein, 184 aa, Glycine max
  Clone ID: PAT_MRT3847_103041C.1.pep
MIVRTPPPPKRPRADGDDGQLVIYEDPPESSPPSEQMLCTYQCRQMVKSDFIDALSKAENQARHYQSKFETLEPHFRKVESERKKFQDQFLYAQQELAAAKGREQALQDQLLKEATQSQERLRKQIQLNTQLQVKLQNETDLRQKADSHAASTEEKAASLEGKLGHLSESIEREKSDFMMSIHN

SEQ ID NO: 146207 - protein, 76 aa, Glycine max
  Clone ID: PAT_MRT3847_103042C.1.pep
FPMKQALRLEHGIGELSRSVDAVQNVYIFVLENNEEFREDHQYNLSPDIEFRILTATVCLSITLPHSRGEKVSAYV

SEQ ID NO: 146208 - protein, 48 aa, Glycine max
  Clone ID: PAT_MRT3847_103043C.1.pep
ITNIGILYLWQNALISSSIKLNARVDFFCALGTFYLFCASRLNIVYLF

SEQ ID NO: 146209 - protein, 66 aa, Glycine max
  unsure (1)..(66): unsure at all Xaa locations
  Clone ID: PAT_MRT3847_103044C.1.pep
QGCHPLLKRVATAHGDNPLSLHFHLLAFLKASFXXVLCHQQWLPPMADTTVVEQFLXXHHHGGALE

SEQ ID NO: 146210 - protein, 59 aa, Glycine max
  Clone ID: PAT_MRT3847_103045C.1.pep
YTLDIARVQSCQSIQVIHILDICSHHKYGFIYVNRFYFCTKYVSGHVLITAISFTHITY

SEQ ID NO: 146211 - protein, 53 aa, Glycine max
  Clone ID: PAT_MRT3847_103046C.1.pep
PRRPFFILKSGNLSYTLKQRGMAFHSLSYQFITSPITKSTSRTLSLNYSNATA

SEQ ID NO: 146212 - protein, 84 aa, Glycine max
  unsure (1)..(84): unsure at all Xaa locations
  Clone ID: PAT_MRT3847_103047C.1.pep
FCSVAXSSVWSASVRLLXCAWXVGVSXCLWPALGVFFFPLAVVPLVVGAVGGFLCSGXVCFCFRFCGAASCVRGFSFFPXAWAE

SEQ ID NO: 146213 - protein, 506 aa, Glycine max
  Clone ID: PAT_MRT3847_103048C.1.pep
VHHILLQCFLGPHILCFNIVVRGTIFGALYIILGKRIWFFPNILAEEATLRELFRFWPKKDEEEKPKWTTRLFYAGVAVLFILLLRHHAPDEAARARQVLNIVDGIYPSIFSLNSFLVGSINVYQFVTKDVRKIEERERERRVAEKEKMKKSSGSAADKKRVRRSSALDPTSDAPPRKQAVKKDVFRVFAEKVRDHKELVSRWAVLQETRVEYFRGKDFVSFLKSHPELKDVLELDRILETEEIANILLAKNLLVRCDRVVKTVRPGKKKLSTWPAHLEIFPEQVFSENDAFFAWTFVKRHPLWQTLLSFFWPVLTLAICLFPVYPHRCKLLILYSCAGILFLILSLLLIRGTIFGALYIVLGKRIWFFPNILAEEATLRELFRFWPKKDEEEKPKWTTRIFYAGVAVLFILLLRHHAPDEAARARYQKRVSNIIDDVLEWSPTLALSGMMDKQQNVANATGSADASKNGPEDAAPADGDDAKDFMEQDNNTEEVINDVDDDKHHD

SEQ ID NO: 146214 - protein, 54 aa, Glycine max
  Clone ID: PAT_MRT3847_103049C.1.pep
AVRTTGSPAYFDFFFRNLGNKLGLDYKRLFLRKNPLYQKLKLSIWVYINKGALP

SEQ ID NO: 146215 - protein, 70 aa, Glycine max
  unsure (1)..(70): unsure at all Xaa locations
  Clone ID: PAT_MRT3847_10304C.1.pep
LQSYAELWGWXLSAHSSFLGSTRVLDSRSGTSASCNTASFLPPLVRSRGGGGWLQAPPDLSVHIFKHRVA

SEQ ID NO: 146216 - protein, 136 aa, Glycine max
  Clone ID: PAT_MRT3847_103050C.1.pep
MGKTIELYGFPTSVNVSDVKTFVEQYTGEGTVFAIKLRHGKGRVPRAFAIIQFTTANSATSMMSRANNILRTLRYGTSYLKAREMERDIPRVFLHSLDDVKLSFGCQISKGSSVMEKAGCIMGGERCFHTIQTEHI

SEQ ID NO: 146217 - protein, 395 aa, Glycine max
  Clone ID: PAT_MRT3847_103051C.1.pep
VVTQRQAQTFSWRPLPDEKRGFTLPIKEKDKSCILNSYLDYIMEKASDIRRKNQDRLLYTNSRGGSLDSRGHPWESVPFKHPSTFDTLAMDPHKKKQIMEDLQDFANGQSFYHKTGRAWKRGYLLYGPPGTGKSSMIAAMANFLGYDIYDLELTEVHNNSELRKLLMKTSSKSIIVIEDIDCSINLTNRKNNNSSSSVSASTGYYDSEIRGGGGGCAEEGGNNITLSGLLNFTDGLWSCCGSERIFVFTTNHIEKLDPALLRSGRMDMHIFMSYCSFPALKILLKNYLGCEECELEESILKRLEEVVDVARMTPADISEVLIKNRRKREKAVEELLETLKLRAEMNEKNGVLRVNNGVEEEEEQEKRALDSESPKQESEIEDNCKEEEEEEEKIK

SEQ ID NO: 146218 - protein, 137 aa, Glycine max
  unsure (1)..(137): unsure at all Xaa locations
  Clone ID: PAT_MRT3847_103052C.1.pep
MSSFQFHLRVLSLLISVSYLLTCLGNNDIPVQLNDDVLGLIVFKSDLDDPSSYLASWNEDDANPCSWQFVQCNPESGRVSEVSLDGLGLSGKIGRGLEKLQHLTVLSLSHNSLSGSISPSLTXSNSLERLNLSHNAF

SEQ ID NO: 146219 - protein, 53 aa, Glycine max
  unsure (1)..(53): unsure at all Xaa locations
  Clone ID: PAT_MRT3847_103053C.1.pep
VXRLLDXQVXXSSIIQXXXXPNXGIXXHRPRXEWSERLLXTKGLDAXWVAAPL

SEQ ID NO: 146220 - protein, 42 aa, Glycine max
  Clone ID: PAT_MRT3847_103054C.1.pep
FWEAVGSSSICLCKDGDKRFVSSQPQGNRSESPSYVKTHGQR

SEQ ID NO: 146221 - protein, 56 aa, Glycine max
  Clone ID: PAT_MRT3847_103055C.1.pep
PLLQKHCLEQKSYVSKTEFLKPKIILFDQGTYSIRLAGITILEDPPTHWERRKKSI

SEQ ID NO: 146222 - protein, 48 aa, Glycine max
  Clone ID: PAT_MRT3847_103056C.1.pep
FKINFLFFFIFIKNKKKKKKKKKKKKKKKKKKKKKKKKKKKKKKKKKK

SEQ ID NO: 146223 - protein, 78 aa, Glycine max
  Clone ID: PAT_MRT3847_103057C.1.pep
TTADGLGQKRYEDKLAIWLGLPLQLGPVRWQPCSSFFNIPNLKPNAIGVTWCKAMISNPALIHYACITPFGDYPWGAS

SEQ ID NO: 146224 - protein, 61 aa, Glycine max
  Clone ID: PAT_MRT3847_103058C.1.pep
MGRPSLVFLYLKLSSKKVFIALLSILWQCHPLYPDVHHQHHWHDIKACQHHYSSPCSLFFA

SEQ ID NO: 146225 - protein, 208 aa, Glycine max
  unsure (1)..(208): unsure at all Xaa locations
  Clone ID: PAT_MRT3847_103059C.1.pep
HQVKSVFCGSNFTAVVCLHKWIPSVDHSACVGCRNLFNFRRKRHNCYNCGLVFCKSCTSKKSIKASLAPNSNKPXRVCDDCYLKLRKAAIESVPSVQTPSLRCVSLQDNRITKIQGTLLRLASFGSIIQTESSQSKLPDSQDSHLFPSLNGKLQMRDFAPSESSHSLSMDSKTHLSVSEPAARISCQSMSPVSSKSSPRQSYEDINDD

SEQ ID NO: 146226 - protein, 28 aa, Glycine max
  unsure (1)..(28): unsure at all Xaa locations
  Clone ID: PAT_MRT3847_10305C.1.pep
SLKFQLLLKLKXLANHLFTRETWKAAKN

SEQ ID NO: 146227 - protein, 72 aa, Glycine max
  Clone ID: PAT_MRT3847_103060C.1.pep
GFRSFMRNACLAKSGTTAPPSCKNTARVLGYFRTSYTQTYVNRRVSLDTEPRYTMLKLIRKDWLRFIIELMW

SEQ ID NO: 146228 - protein, 95 aa, Glycine max
  Clone ID: PAT_MRT3847_103061C.1.pep
LFWGPGVLKPIRKNFFFHRISPFFLFIPKPFYVSILGHLNNAPFTGYIKNQKRFFFPTAGAKNQIFFFSKKGPVSPPGTRFMGFLFGTPGSGGGF

SEQ ID NO: 146229 - protein, 76 aa, Glycine max
  unsure (1)..(76): unsure at all Xaa locations
  Clone ID: PAT_MRT3847_103062C.1.pep
CRVSSLXXXXLTSEPFXGSAXIPXLXXXRKXNGXGRAELSTWDLPXISVKAEVEXVSXVXTYPPSXKVPQTLXXXX

SEQ ID NO: 146230 - protein, 90 aa, Glycine max
  Clone ID: PAT_MRT3847_103063C.1.pep
LGIRLEQYANKYRLPEGLKEQMLAHMQLKFQTAELQQEVLQDLPKTIRSSIARHLFQNIVETTYLFKGVSDDFITQLVKLFPLFSFIFVF

SEQ ID NO: 146231 - protein, 72 aa, Glycine max
  unsure (1)..(72): unsure at all Xaa locations
  Clone ID: PAT_MRT3847_103064C.1.pep
VLCWVVIVTILLHFITEFDGAXSYQDRLMVIXLPVRIHGGMWFVHFSHSAIMSCQLVAHVLHKSCVAPFLQV

SEQ ID NO: 146232 - protein, 92 aa, Glycine max
  Clone ID: PAT_MRT3847_103065C.1.pep
YHMVVRVYISFFKAAIVHLFVIFNVCFSVFQKLAVVIDKQCRPGVEVGHSLLRSIVIPWEQYLKLEMKLVLLAHRRGYLGQIQVVGMHTVQE

SEQ ID NO: 146233 - protein, 101 aa, Glycine max
  Clone ID: PAT_MRT3847_103066C.1.pep
TLCKEKMNPTFSHDLIVEILLRLPIKSLLRFKCVCKSWLSFISDPHFVKSHLVAAPTNQTLLDYDFSICPNPSGMHIWGIKFFSCKTNSEGRKLRVTLGIH

SEQ ID NO: 146234 - protein, 74 aa, Glycine max
  Clone ID: PAT_MRT3847_103067C.1.pep
INSWRVLQTLGLENLVYKTWEHVKQNLAYRLESVKEIFLPIGKKLSRGPKLLFKKSNMGGVHIPNGILLQPFRE

SEQ ID NO: 146235 - protein, 45 aa, Glycine max
  Clone ID: PAT_MRT3847_103068C.1.pep
PGRPRVRKSYTQTQFPRTLIQGKMRDILRIREGIADAIPERPSER

SEQ ID NO: 146236 - protein, 83 aa, Glycine max
  Clone ID: PAT_MRT3847_103069C.1.pep
PTGEADKYPSPPPPGHTYPPHVPTPVYHSPPPPPYEKPYQDQSTPPPGHCTPFFSGGGKHPLHLTTTREDFLFIPPHGCVQKG

SEQ ID NO: 146237 - protein, 40 aa, Glycine max
  Clone ID: PAT_MRT3847_10306C.1.pep
IQSLSLCSVVKCAIVAIVSRSFADRIGRGLCPAQINNGSI

SEQ ID NO: 146238 - protein, 78 aa, Glycine max
  unsure (1)..(78): unsure at all Xaa locations
  Clone ID: PAT_MRT3847_103070C.1.pep
SCCSGNCGCGSSCKCSNSCGSCNMYPDLIYTXSTTTNTLIIKVTPIKAQFKDTKINIPAKNNNYKYKPNCSYNPYTYK

SEQ ID NO: 146239 - protein, 60 aa, Glycine max
  Clone ID: PAT_MRT3847_103071C.1.pep
QRAMFRCMLHICRAKSSLKIQFTMCVRHPHRADNLFVPNPKRSLNPLTLFFSAFCGARYV

SEQ ID NO: 146240 - protein, 96 aa, Glycine max
  Clone ID: PAT_MRT3847_103072C.1.pep
DRTKQTACMHIGGKAPRKQLATKAARQLVFFFGGVKKPHRYRPVSLALREICMCHNSRERLLHKLPCLRLVREIARDCMTDLRCKTSAVSALLEAA

SEQ ID NO: 146241 - protein, 150 aa, Glycine max
  unsure (1)..(150): unsure at all Xaa locations
  Clone ID: PAT_MRT3847_103073C.1.pep
ARGREGNRYGGGRFFGSEENEANCRGRRVSLSMEDNRNRXTLSQTLQPGDIFAPSFDDEEVTSDGEFGDGQDWGRREPEIIRRHYRSCNMPGLNTTTLSTSVLGKLACNLVTAPEVARFXKGVRKQILVPIHGSKIKYERGAAVVFNDRA

SEQ ID NO: 146242 - protein, 431 aa, Glycine max
  Clone ID: PAT_MRT3847_103074C.1.pep
MEASPPPSPSPSPRTTILAKYQLTRFLGRGNFAKVYQARSLLDGATVAVKAIDKSKTVDAAMEPRIVREIDAMRRLHHHPNILKIHEVLATKTKIYLIVDFAGGGELFSKLTRRGRLPEPLARRYFAQLVSALRFCHRHGVAHRDLKPQNLLLDAAGNLKVSDFGLSALPEHLHDGLLHTACGTPAFTAPEILRRVGYDGSKADAWSCGVILYNLLAGHLPFDDSNIPAMCRRISRRDYQFPAWISKSARSLIYQLLDPNPITRISLEKVCDNNKWFKNNSMVEVKESVWESDLYNKCCDGGYKSGMNAFDIISMSSGLDLRGLFETTSQKGRRREKRFTSDKKVETVEAKVKEVGEKLGFRIEIGKNGAIGLGKGKVGVVVEVFEIVADLLLVAVKVVDGGLEFEELHWDDWRIGLQDLVLSWHDVGLEL

SEQ ID NO: 146243 - protein, 68 aa, Glycine max
  Clone ID: PAT_MRT3847_103075C.1.pep
SRKAFGAPTILNVVKGTPNKDGEVFHEKSPRRGPFDVNFNRDLRLGEYRAWNVFTPWNQNTVRWKTGI

SEQ ID NO: 146244 - protein, 101 aa, Glycine max
  Clone ID: PAT_MRT3847_103076C.1.pep
MDDWEDEHIAPIDLTLKDPVKTNWDDENVDENDVKESWEDEDEPAPAPAAPSVKTSVKAPQKSFYKDHDKKGQTVEPIKEEPLDPVAEKLRPPRLIGAADY

SEQ ID NO: 146245 - protein, 134 aa, Glycine max
  unsure (1)..(134): unsure at all Xaa locations
  Clone ID: PAT_MRT3847_103077C.1.pep
MKLKVLEFFGATIQVAWQCHAYDMFPIRMNTGYGARTLEVKGASWRLAAEAHNIXGFETIHEECVEATKEYIHGEQYRSDCIAGNQQAYFDARDLEVDAKDTLVFSIDGSPLSNIAYYKKHGYSVEKFNSTLND

SEQ ID NO: 146246 - protein, 54 aa, Glycine max
  Clone ID: PAT_MRT3847_103078C.1.pep
SLMKFYSDNYSHLSYNQLIFFRKFSNHQLIANLDINTAVSRMSQSTQYAVFMAK

SEQ ID NO: 146247 - protein, 42 aa, Glycine max
  unsure (1)..(42): unsure at all Xaa locations
  Clone ID: PAT_MRT3847_103079C.1.pep
NLLQXSEAMISIDMPAGPSEVLVMXDKHAIPSHVAADXLSQV

SEQ ID NO: 146248 - protein, 56 aa, Glycine max
  Clone ID: PAT_MRT3847_10307C.1.pep
PSPCYFPSLNTDLAAFWHPKIGSDPPIVQRSGVYLTLSSRPRGSTIPTDNESHACR

SEQ ID NO: 146249 - protein, 53 aa, Glycine max
  Clone ID: PAT_MRT3847_103080C.1.pep
NRAGTNSCPVIHQSSYTLRGPLCAESLYRSHKTYSNESLLSSGLYRWRLHTLG

SEQ ID NO: 146250 - protein, 222 aa, Glycine max
  Clone ID: PAT_MRT3847_103081C.1.pep
PKTPPRTKSSHSDTHISPAEVSSVATCNRAVTPSHCTVISTKRVMVSPAKQMAYIEMSHCISPVKTNSATGRKRDHVRSRLNFDAADVPGSLDNPLPNEISTSESEKELDIFDIDFPNFDALGMDFSFTEMLNDLDFSCEGIDFSCHPTSSPSMDNASGSSHECNGDHATPELSTVAEVICEKDMKVLGPECMTAMKFVTKSITVISPEKNRQQFVDPENCT

SEQ ID NO: 146251 - protein, 76 aa, Glycine max
  unsure (1)..(76): unsure at all Xaa locations
  Clone ID: PAT_MRT3847_103082C.1.pep
VTSSPNXPSLSNPPHTXIHLVSLSKSYKTPITTIIIFLSNHFLFYLLSTFYLNLHFNFIPXTIFSFLQKIIPIYFF

SEQ ID NO: 146252 - protein, 195 aa, Glycine max
  unsure (1)..(195): unsure at all Xaa locations
  Clone ID: PAT_MRT3847_103083C.1.pep
FAALLMELAAQTSRGINHVTSHVEEQLSPIRKSDSKNENKTDEIQKTEHTPRGFPKSSTLVKLPFWPILEGLWLILSSTYLLHVSLFIWLSAVVSSFFYFQKVSVIATTVTSSLGRRKLFAQINSFIAVFILVGQLSLTYXGRILTVAGVTTAICSAPFVGLLNLVALAVWPKWVVVAICETLRKVIMTCKYWFL

SEQ ID NO: 146253 - protein, 95 aa, Glycine max
  Clone ID: PAT_MRT3847_103084C.1.pep
RRNPVAHASPRRRLPFNHALKTHILAASLKPLFAALCRPSTPATCRTQLARSAGRDTGPGSLLSARDGRTSDGANCVGQTVSLKWSCEPLLSCKP

SEQ ID NO: 146254 - protein, 65 aa, Glycine max
  unsure (1)..(65): unsure at all Xaa locations
  Clone ID: PAT_MRT3847_103085C.1.pep
KRFVVHVKEGRYLXNIDLDKNTWNVFIFIHRIDKTRLLCSRYFMYGTSTFETANFYVKGTAYIDK

SEQ ID NO: 146255 - protein, 83 aa, Glycine max
  unsure (1)..(83): unsure at all Xaa locations
  Clone ID: PAT_MRT3847_103086C.1.pep
MHPKVTTEFNHXIHNLAHLRRAHXQLVQEGPTSILHDIGLVTVWSAPNYXYRCRHVPSILSINVNIXRELKSFTETDDNTQMI

SEQ ID NO: 146256 - protein, 49 aa, Glycine max
  unsure (1)..(49): unsure at all Xaa locations
  Clone ID: PAT_MRT3847_103087C.1.pep
EKLTGSNILQNQSLSSARNRXLSIMNSERRRRGPEKHVTDDRRLDPSGC

SEQ ID NO: 146257 - protein, 133 aa, Glycine max
  unsure (1)..(133): unsure at all Xaa locations
  Clone ID: PAT_MRT3847_103088C.1.pep
QLLLMLVGHEDSXHGHMTDHLVYIVERVVERVIKRSDKKTTKTNKRACKLAWLLAERKAGRTIGIALDNALTNKDSSTDYGAPVDAHVLRNMITNTFTATCAADSTDLTTDGTKAGFEADGPTDEHTLEQATL

SEQ ID NO: 146258 - protein, 70 aa, Glycine max
  Clone ID: PAT_MRT3847_103089C.1.pep
RDQIHSFPISYYPFQCLVVEENMSNLTSASSEIGASSGIRNDNGSSLYAQYSSTSISQEPQPKKKRSLPG

SEQ ID NO: 146259 - protein, 93 aa, Glycine max
  unsure (1)..(93): unsure at all Xaa locations
  Clone ID: PAT_MRT3847_10308C.1.pep
LRVREWFGWVDEEDSFGEVLLSAPLNGVEGLDYMERIPLVTSEGFPHVLXRTYGERGNRGLVSVDGAEMTLITGTSGVARYNTLMVVLEKSVA

SEQ ID NO: 146260 - protein, 68 aa, Glycine max
  Clone ID: PAT_MRT3847_103090C.1.pep
YFSNLFNLPFFSLPIFFFFFSPPFFLLLPASRTRMCPFPAYLNLKHKTESLTTISRFSHQPTTAKHLV

SEQ ID NO: 146261 - protein, 92 aa, Glycine max
  Clone ID: PAT_MRT3847_103091C.1.pep
LKSRILRTTSYVKILHCVMKPRHGIRHGYHTTRIQRYGKFLKIKDTIGLRYVNKKLLKELYMYANMIIYSSEEANLRVALELTLSSNSCRHY

SEQ ID NO: 146262 - protein, 73 aa, Glycine max
  Clone ID: PAT_MRT3847_103092C.1.pep
LFIHKPEEPRFQASVQYPPSLFEYCQPACCVSNIQPDHVCHVTLCIMSIMRHACDCSRWDSSILTGSCLFHIH

SEQ ID NO: 146263 - protein, 107 aa, Glycine max
  unsure (1)..(107): unsure at all Xaa locations
  Clone ID: PAT_MRT3847_103093C.1.pep
PRLPPPSQKIFLYPKSLISFLKIPNFCRFNPSIFKKILKKTLNPLDTDYINLLQIHSPHRYLTFFCXFSYYYSKWRSIVPFIYQLQTFQELINETKVRYICVSNYTS

SEQ ID NO: 146264 - protein, 49 aa, Glycine max
  Clone ID: PAT_MRT3847_103094C.1.pep
SDVSSQLFFFSIPLQLKFKKQRTPLMKKIQGLHAPMELHHVVSRASSYR

SEQ ID NO: 146265 - protein, 48 aa, Glycine max
  Clone ID: PAT_MRT3847_103095C.1.pep
SVTLSMVPAHKCSGIVTYRVPKKGQYSASIDGVFTSNSGSTLPLVGLV

SEQ ID NO: 146266 - protein, 81 aa, Glycine max
  unsure (1)..(81): unsure at all Xaa locations
  Clone ID: PAT_MRT3847_103096C.1.pep
LITTDIRARDIYVQQVMVVINYDLSRNHELYISVIGRWGTFXQMGVDLMCENSEDMRILRDIEHYYFTHIDNMRKIVVDLI

SEQ ID NO: 146267 - protein, 37 aa, Glycine max
  Clone ID: PAT_MRT3847_103097C.1.pep
KDIQRPQPLLLHPKTCSRPCNKNSYKTDLTISTDQHF

SEQ ID NO: 146268 - protein, 79 aa, Glycine max
  Clone ID: PAT_MRT3847_103098C.1.pep
PRPKANPGGGISFFLFILFHIHIVAHPLNHNEFVAHLSNSDESETPPPNSDNLVKHLPNHDEFRAHPHESVAHPPISGD

SEQ ID NO: 146269 - protein, 217 aa, Glycine max
  Clone ID: PAT_MRT3847_103099C.1.pep
MGSEGPRAITIHVTGFKKFQGVPENPTEAIVNNLKEYVERRGLPAGVTLGSCTVLDVAGDGALPQLYQTMESAISKTDSVSNANVVWLHLGVNSGAVRFAIEHQAANEATFRCPDELGWQPQQLPIVLEDGGISQTRKTSMHVDAILKSLKKGAYDVMISGNAGRFVCNYVYYHSLRFAEQKGNKSLFVHVPLFARIDQETQMRFTASLLDAIASAC

SEQ ID NO: 146270 - protein, 74 aa, Glycine max
  unsure (1)..(74): unsure at all Xaa locations
  Clone ID: PAT_MRT3847_10309C.1.pep
TTDALRDVEAALDGFTPPXLDPHTPSPIFGGSTGGLLRKAQVEELYVIPWGSPLQQIFGLPTGGAAIMREGPSL

SEQ ID NO: 146271 - protein, 79 aa, Glycine max
  Clone ID: PAT_MRT3847_1030C.1.pep
LHPAPDYSLRGEVTPVSCMMCGMLSLSGHAMRALSRQFLPVFPAVRWDRYRPATPRAPGCSHIAGQLAETHPGGCGPVG

SEQ ID NO: 146272 - protein, 132 aa, Glycine max
  Clone ID: PAT_MRT3847_103100C.1.pep
QQLDYGLVQCQALVLAPTRELAQQIEKVMRALGDYLGVKVHACVGGTSVREDQRILQAGVHTVVGTPGRVFDMLRRQSLRPDCIKMFVLDEADEMLSRGFKEEWKLETLCDLYETLAITQSVNFVNTRPQGG

SEQ ID NO: 146273 - protein, 413 aa, Glycine max
  Clone ID: PAT_MRT3847_103101C.1.pep
MAGLAPEGSQFDARQYDSKMNELLSADGQEFFTSYDEVYDSFDAMGLQENLLRGIYAYGFERPSAIQQRGIVPFCKGLDVIQQAQSGTGKTATFCSGILQQLDYGLVQCQALVLAPTRELAQQIEKVMRALGDYLGVKVHACVGGTSVREDQRILQAGVHTVVGTPGRVFDMLRRQSLRPDHIKMFVLDEADEMLSRGFKDQIYDIFQLLPSKIQVGVFSATMPPEALEITRKFMNKPVRILVKRDELTLEGIKQFYVNVDKEEWKLETLCDLYETLAITQSVIFVNTRRKVDWLTDKMRSNDHTVSATHGDMDQNTRDIIMREFRSGSSRVLITTDLLARGIDVQQVSLVINYDLPTQPENYLHRIGRSGRFGRKGVAINFVTTDDSRMLSDIQKFYNVTVEELPSNVADLL

SEQ ID NO: 146274 - protein, 58 aa, Glycine max
  Clone ID: PAT_MRT3847_103102C.1.pep
HTLSCLDCAESKHHNSNVASLGSYRYQLHLILTVIYVLQHQHMLQLLIRQDSSLIFLA

SEQ ID NO: 146275 - protein, 84 aa, Glycine max
  Clone ID: PAT_MRT3847_103103C.1.pep
TCTLTYSVAYFTGLLDPWSPMRSMRQILDTMDRIFEDTMTFPGRNVGAGEIRAPWDIKDEEHEIRMRFDMPGLANEDVNVSVED

SEQ ID NO: 146276 - protein, 413 aa, Glycine max
  Clone ID: PAT_MRT3847_103104C.1.pep
MAGLAPEGSQFDARQYDSKMNELLSADGQEFFTSYDEVYDSFDAMGLQENLLRGIYAYGFERPSAIQQRGIVPFCKGLDVIQQAQSGTGKTATFCSGILQQLDYGLVQCQALVLAPTRELAQQIEKVMRALGDYLGVKVHACVGGTSVREDQRILQAGVHTVVGTPGRVFDMLRRQSLRPDHIKMFVLDEADEMLSRGFKDQIYDIFQLLPGQIQVGVFSATMPPEALEITRKFMNKPVRILVKRDELTLEGIKQFYVNVDKEDWKLETLCDLYETLAITQSVIFVNTRRKVDWLTDKMRSNDHTVSATHGDMDQNTRDIIMREFRSGSSRVLITTDLLARGIDVQQVSLVINYDLPTQPENYLHRIGRSGRFGRKGVAINFVTLDDARMLSDIQKFYNVTVEELPSNVADLL

SEQ ID NO: 146277 - protein, 413 aa, Glycine max
  Clone ID: PAT_MRT3847_103105C.1.pep
MAGLAPEGTQFDGRQYDAKMSELLSTDGQEFFTSYDEVYDSFDAMGLQENLLRGIYAYGFERPSAIQQRGIVPFCKGLDVIQQAQSGTGKTATFCSGILQQLDYGLVQCQALVLAPTRELAQQIEKVMRALGDYLGVKVHACVGGTSVREDQRILQAGVHTVVGTPGRVFDMLRRQSLRPDHIKMFVLDEADEMLSRGFKDQIYDIFQLLPGQIQVGVFSATMPPEALEITRKFMNKPVRILVKRDELTLEGIKQFYVNVDKEDWKLETLCDLYETLAITQSVIFVNTRRKVDWLTDKMRSNDHTVSATHGDMDQNTRDIIMREFRSGSSRVLITTDLLARGIDVQQVSLVINYDLPTQPENYLHRIGRSGRFGRKGVAINFVTLDDARMLSDIQKFYNVTVEELPSNVADLL

SEQ ID NO: 146278 - protein, 63 aa, Glycine max
  Clone ID: PAT_MRT3847_103106C.1.pep
THSHKTLEFEIELNVICKLLRSLFKFKVKLEKHAIKASTLRSDTGIWGKTLRLDSYISLSSSN

SEQ ID NO: 146279 - protein, 413 aa, Glycine max
  Clone ID: PAT_MRT3847_103107C.1.pep
MAGLAPEGTQFDGRQYDAKMSELLSTDGQEFFTSYDEVYDSFDAMGLQENLLRGIYAYGFERPSAIQQRGIVPFCKGLDVIQQAQSGTGKTATFCSGILQQLDYGLVQCQALVLAPTRELAQQIEKVMRALGDYLGVKVHACVGGTSVREDQRILQAGVHTVVGTPGRVFDMLRRQSLRPDCIKMFVLDEADEMLSRGFKDQIYDIFQLLPSKIQVGVFSATMPPEALEITRKFMNKPVRILVKRDELTLEGIKQFYVNVDKEEWKLETLCDLYETLAITQSVIFVNTRRKVDWLTDKMRSNDHTVSATHGDMDQNTRDIIMREFRSGSSRVLITTDLLARGIDVQQVSLVINYDLPTQPENYLHRIGRSGRFGRKGVSINFVTTDDARMLSDIQKFYNVTVEELPSNVADLL

SEQ ID NO: 146280 - protein, 241 aa, Glycine max
  unsure (1)..(241): unsure at all Xaa locations
  Clone ID: PAT_MRT3847_103108C.1.pep
LTYLFLFCINNYTVLTTGYVYLGARTTDELIANADYIGTAGKGILAADESTGTNGMRLTSITVKNIEYNKRALKELIFTDPGVLKYFSGVILYEETLYHSTIASQPFVNVLNEAGELTGINVDKGTVELAXTNGETTTHGLDGLDQRCAKYYXAGARCAKWTAKLQIVPNXPSELSMHENSYGLLRYTGICQENRLITIVEPEILGERPHDIDKCSRVTEQLLTLCYKAMNDHHVLIEGTL

SEQ ID NO: 146281 - protein, 33 aa, Glycine max
  Clone ID: PAT_MRT3847_103109C.1.pep
KSLLVITLFLEYYVEDAINKSYVYIQSHNIWFN

SEQ ID NO: 146282 - protein, 44 aa, Glycine max
  Clone ID: PAT_MRT3847_10310C.1.pep
GETSQIWGMSYLIASTKNKVLPKLRKFKSYVVACASKIEKSHTW

SEQ ID NO: 146283 - protein, 127 aa, Glycine max
  unsure (1)..(127): unsure at all Xaa locations
  Clone ID: PAT_MRT3847_103110C.1.pep
VRRHGRGNCXAMLRDPKGGFSKYKASEDLSVRWEEEQVKVFXGPPFPAQRSFKTTKSTKSAHFPISDGMMERALHGSKFLLPPKFQNHLTDMKLGIGDSASSLSHFSTLDRPSLQNDHFIPLPSWSY

SEQ ID NO: 146284 - protein, 91 aa, Glycine max
  Clone ID: PAT_MRT3847_103111C.1.pep
YGNFCYDHGNKTLILYVAKDGQGHHPLRSNTDFYLQCITHQNLYSQKIDTKCNKLYHLDNFLPSCNYKQILRILKSTGKQYTQFPRQNKDQ

SEQ ID NO: 146285 - protein, 56 aa, Glycine max
  unsure (1)..(56): unsure at all Xaa locations
  Clone ID: PAT_MRT3847_103112C.1.pep
SQGNLSSKRFSVDFANXXDTFKPCPLEMRXASTFQPIIXXQTLSLXTKNASLWNGD

SEQ ID NO: 146286 - protein, 68 aa, Glycine max
  unsure (1)..(68): unsure at all Xaa locations
  Clone ID: PAT_MRT3847_103113C.1.pep
YKKPNPSFFQDGQMLTKFMSGNPNSLRKLGQTFLETNERGFWETSKDNIXKLSHLFSEVEDKIKGIVR

SEQ ID NO: 146287 - protein, 37 aa, Glycine max
  unsure (1)..(37): unsure at all Xaa locations
  Clone ID: PAT_MRT3847_103114C.1.pep
MARXVKKXXKRXNAPKXWMXXKLGGAFAXKPSSGXXX

SEQ ID NO: 146288 - protein, 34 aa, Glycine max
  Clone ID: PAT_MRT3847_103115C.1.pep
TRPLAFANSTSLVLGSQSLLVLVQRVRGLYIPLL

SEQ ID NO: 146289 - protein, 51 aa, Glycine max
  Clone ID: PAT_MRT3847_103116C.1.pep
SPPPPLPPNDCGSPPPPVTQGYGICYLQTLIYSGSHVIPLKTPPPIGSSSW

SEQ ID NO: 146290 - protein, 84 aa, Glycine max
  Clone ID: PAT_MRT3847_103117C.1.pep
AKMWGPGAEQGGILQTSSCKLDLKEPYYRMSQPQAYALAQDQQPQPLIQTQDIHIQSQDWDEPEIVQQPLPNSCAQIDSLMRNV

SEQ ID NO: 146291 - protein, 61 aa, Glycine max
  Clone ID: PAT_MRT3847_103118C.1.pep
IICSFLKALIDSLFFQYKTKLTSLHYYWHIFNLVDLIILSSCLVSGRRKNVHVQLFYYSIA

SEQ ID NO: 146292 - protein, 83 aa, Glycine max
  Clone ID: PAT_MRT3847_103119C.1.pep
SGWWILVMALYPELALYRGLYELAQFSFEGSSSETGGMKWQNLSESTNGMKEVLIIMFVEWIMMLFAAFYVDQVLSSGSRKGP

SEQ ID NO: 146293 - protein, 165 aa, Glycine max
  Clone ID: PAT_MRT3847_10311C.1.pep
EFPLTSYEDSLFPINKTSSSARGSSGFPSHSNHSTVIDKCTVEVYGTASNKPGCMDAWQGIKQSMLKEIDEDKSGSSDQNATAGASSHTSFDLRRRQFDPSSFQQRAEALEGLLEFSARLLQQARYDELGVLLKPFGPGKVSPRETAIWLSKSFKENTFNPEESM

SEQ ID NO: 146294 - protein, 83 aa, Glycine max
  Clone ID: PAT_MRT3847_103120C.1.pep
EFGSNISVLVRTCIQIWAKRRVSKISRGQRITKRKANVANGDSNRWVLRTADSEHRKPQGRHFSRRPSNAGSRCSLSSAGSSN

SEQ ID NO: 146295 - protein, 134 aa, Glycine max
  Clone ID: PAT_MRT3847_103121C.1.pep
WAVGKDRESPGTQWALNLLHPQPLQAEVLLGDCPRLGASLNRAGRFLGNDQGSYRDCFLLWTGQLHRIIQGLIHQPNLNWAEGRRREDVIRQCTSPIIWHPEGTGGQELLCTLCSYWASQVHTGCSTRPPSTWQ

SEQ ID NO: 146296 - protein, 83 aa, Glycine max
  Clone ID: PAT_MRT3847_103122C.1.pep
TARTKTRKGGLNKTNDWRDSIRGEHTQFTTGLTANVTLQSLDLGLAWANSNNARPKCLLNLHETSFNAPLSTTERQEHREDLD

SEQ ID NO: 146297 - protein, 35 aa, Glycine max
  Clone ID: PAT_MRT3847_103123C.1.pep
MICTFAKSIIHTLLPANLHPATVILDPYLLDTFRN

SEQ ID NO: 146298 - protein, 52 aa, Glycine max
  Clone ID: PAT_MRT3847_103124C.1.pep
VLGYMVGSGLPSNVKKVFHPIICCALSADLTAFAFGYFSKSGLEPVLGYYLT

SEQ ID NO: 146299 - protein, 81 aa, Glycine max
  Clone ID: PAT_MRT3847_103125C.1.pep
KTLSRWVGFLPPGYKILIEGLKSLHLQKPGPYLGVAGAFGPPKFLKTLFPPPSISFGLSVLSRFTIKNPFNFQPPKNITKI

SEQ ID NO: 146300 - protein, 63 aa, Glycine max
  Clone ID: PAT_MRT3847_103126C.1.pep
LFSIAVNSIVFSARKLAMCSVEMFVDRKSCIIVVFVAVSCMISASFMLLRFIYKERAITLGMF

SEQ ID NO: 146301 - protein, 87 aa, Glycine max
  Clone ID: PAT_MRT3847_103127C.1.pep
GRPFFFFFFFFFFFFFFFGFFFFFFLDQPIPREIKTQQHPGRGPKAQAQRSKKKTGTKKKKKGDPGGDQKIRDRNPKAAQISLMGAL

SEQ ID NO: 146302 - protein, 72 aa, Glycine max
  Clone ID: PAT_MRT3847_103128C.1.pep
LLVRVLRCSLILWIPDSLLWSNLLALLAWECLRLGSSSTRQCKSALTLFRLATRDVKNVHAALSRCSRLERH

SEQ ID NO: 146303 - protein, 59 aa, Glycine max
  Clone ID: PAT_MRT3847_103129C.1.pep
KKLVHSRTSSYIILTQLIKSQFHANDILKIYIYISFAKEPIERQQDITLEFTTCRERAP

SEQ ID NO: 146304 - protein, 97 aa, Glycine max
  Clone ID: PAT_MRT3847_10312C.1.pep
PPGGNRASFRECPSFRNLNLQLTYKTPFATKDSVSKGITQPGMSQQRPLAKKEIKRPTAKARINRAYIPKHEGLGITYFQKDTGHSRYQDNEAPKPL

SEQ ID NO: 146305 - protein, 76 aa, Glycine max
  Clone ID: PAT_MRT3847_103130C.1.pep
LDILNNLVLLYKWISEMPTSVIDGCQQRFISNTMRHESVCLDVQSITQLSTDYNLLLLIIKSSTYYLQTPRNDIKL

SEQ ID NO: 146306 - protein, 93 aa, Glycine max
  unsure (1)..(93): unsure at all Xaa locations
  Clone ID: PAT_MRT3847_103131C.1.pep
QATISXIHWXXLYRHAFKLLNVFGHRSWKDXPWFMTTRNHYTRQIFEVKNSFWICAPHLLQFWEVVYKNQPQICVYPSRCIYLAENLGFQKSL

SEQ ID NO: 146307 - protein, 178 aa, Glycine max
  Clone ID: PAT_MRT3847_103132C.1.pep
MGSQCGGDNSGKHSQLQPLVPQNSMYSLTLDEVQNHLGDLGKPLSSMNLDELLKNVWTVEANQSTGVDIEGTAQTRQAALQRQASLSLTSALSGKTVDEVWRDIQQSKDNKDKKSQERQSTLGEMTLEDFLVNAGVVAEASTRKNTGATIGVDSNVVAPQFPQHGPWIQYPQPQYQHP

SEQ ID NO: 146308 - protein, 246 aa, Glycine max
  Clone ID: PAT_MRT3847_103133C.1.pep
MGRGKVELKRIENKINRQVTFAKRRNGLLKKAYELSVLCDAEVALIIFSNRGKLYEFCSGHSMAKTLERYHRCSYGALEVQHQPEIETQRRYQEYLKLKSRVEALQQTQRNLLGEELEHLDVNDLEQLERQLDSSLKQIRSNKTQQMLDQLSDLHRKEEMLLETNNILRNKLEEINVALQPTWEAREQNAPYNCHPPQTEGYYETATAHCSSTLRIGYDSSGLNEAGGAAGASAQNASEFMHGWMN

SEQ ID NO: 146309 - protein, 244 aa, Glycine max
  Clone ID: PAT_MRT3847_103134C.1.pep
MGRGKVELKRIENKINRQVTFAKRRNGLLKKAYELSVLCDAEVALIIFSNRGKLYEFCSGHSMAKTLERYHRCSYGALEVQHQPEIETQRRYQEYLKLKSRVEALQQTQRNLLGEELEHLDVKDLEQLERQLDSSLKQIRSNKTQQMLDQLADLHRKEEMLLETNNILRNKLEEINVALQPTWETREQNAPYNYHPSQSEGYYETAHCNSTLRIGYDSSGLNEAGGAAGTSAQNASEFMNGWMN

SEQ ID NO: 146310 - protein, 29 aa, Glycine max
  Clone ID: PAT_MRT3847_103135C.1.pep
HYTIYNFAAIARPKEVFAVSHCLHTRQGT

SEQ ID NO: 146311 - protein, 64 aa, Glycine max
  unsure (1)..(64): unsure at all Xaa locations
  Clone ID: PAT_MRT3847_103136C.1.pep
QEQVEPXYKDTSFTRKKTAGYELHETLGPSFLIGSQRLKTGRESIARSQRRFFFRGVFPHPSAS

SEQ ID NO: 146312 - protein, 129 aa, Glycine max
  Clone ID: PAT_MRT3847_103137C.1.pep
RPAARKRQKGVASEAEKRASHRTRSALSEQKKRRPEKPRAHTQPPPHTKTEPAQPPTRPAPRWKPQRAKQTPTGQPNSPNQPRRKTPAKRQPTQQAGAHPPPPQLPPTPPHAEEAPPPATPAAEEKNKE

SEQ ID NO: 146313 - protein, 107 aa, Glycine max
  unsure (1)..(107): unsure at all Xaa locations
  Clone ID: PAT_MRT3847_103138C.1.pep
GCKFMLGLKVALXFCEFLRIREANTVAFTVNDHRVELYIKFYSSAFDXDEVCILEKIGKVGLFHKMLNKAGISYNRRNFFGLWFIDLQKLGYILWKCMLIKIVGLLF

SEQ ID NO: 146314 - protein, 54 aa, Glycine max
  Clone ID: PAT_MRT3847_103139C.1.pep
VEISVQNHNSGADPGTLPERPKATHTNPNDRTCAGLAFPAQRLMSLPPPPHASP

SEQ ID NO: 146315 - protein, 50 aa, Glycine max
  Clone ID: PAT_MRT3847_10313C.1.pep
IKFPYLGYNLNVQNIHWSLVKDTGKCHTLKGHHHHDHMSQWPNSRKLVWN

SEQ ID NO: 146316 - protein, 110 aa, Glycine max
  Clone ID: PAT_MRT3847_103140C.1.pep
LILPTEYTYMETSMHNSDNHHHLCNTTHITRNKENASAQFSRAPRRSSLPPLRAHLNPILPEKLPLHIIPPETLPKNRNPMYGVDRDLPPLRALLRVLSRRLLSPGGPST

SEQ ID NO: 146317 - protein, 136 aa, Glycine max; identical to SEQ ID NO: 143601
  Clone ID: PAT_MRT3847_103141C.1.pep

SEQ ID NO: 146318 - protein, 159 aa, Glycine max
  Clone ID: PAT_MRT3847_103142C.1.pep
MSRPGDWNCRTCNHLNFQRRESCQRCGEPRSGGGGDYGGGFGGGRGSSSFGFTTGPDVRPGDWYCTVGNCGAHNFASRSSCFKCGAPKEDSSAGPFDADMPRMRPYGFGGGSSARPGWKSGDWICTRSGCNEHNFANRMECYRCNAPRDSSSARSPYSS

SEQ ID NO: 146319 - protein, 96 aa, Glycine max
  Clone ID: PAT_MRT3847_103143C.1.pep
MHHSNSNYEERRRSRRGVRRRAQNENEKMVDLPQELIHEILLRLPVKSLIRFKTVCKSWLSHISDPHFTASHLGAAPTETLLSIAREFLSIDFNES

SEQ ID NO: 146320 - protein, 99 aa, Glycine max
  Clone ID: PAT_MRT3847_103144C.1.pep
PGPVLHKNGRGPAPVSKKGLYPTGQGIGPAWAGFKLGKGPNPKGAIKPTTLGKGGGEATSAKLKGKKKGPATKKTGSPPPPPKKNLGWLFIEKNNLPRD

SEQ ID NO: 146321 - protein, 49 aa, Glycine max
  Clone ID: PAT_MRT3847_103145C.1.pep
YRIFPMMYHYVCVSLIYVVCIGEISLSSQVSHLMINPLYVFVVVLMIKK

SEQ ID NO: 146322 - protein, 143 aa, Glycine max
  unsure (1)..(143): unsure at all Xaa locations
  Clone ID: PAT_MRT3847_103146C.1.pep
HVSNSESNVVSPTLVESTTNTLGVLKNMKVFVYELPPKYNTDWLANERCSSHLFASEVAIHRALLTSEVRTFDPYEADFFFVPVYVSCNFSAVNDFPAIGHARTLISSAVNLVSTEYPFWNRSRGSDHVFVASHDFXACFHNP

SEQ ID NO: 146323 - protein, 38 aa, Glycine max
  Clone ID: PAT_MRT3847_103147C.1.pep
MMFLFQGPCCSCFCFMKPKQGKAKVKEVKETKVEEKKV

SEQ ID NO: 146324 - protein, 127 aa, Glycine max
  Clone ID: PAT_MRT3847_103148C.1.pep
RVRRTTVEEEGGATWAHVVCALFVPEVFFLDPEGREGIDFSKVPKKRWEERCYLCGSCEGCALVCSEPKCGLGFHVTCALKEELWIEYREGKKGGTIVAGFCKNHTQVWEKQQQSGKYKIVAVEDKK

SEQ ID NO: 146325 - protein, 125 aa, Glycine max
  unsure (1)..(125): unsure at all Xaa locations
  Clone ID: PAT_MRT3847_103149C.1.pep
IHKILVVLNRWLGKLTFPQGTYRSVKRQPLSIRGGAGAKNALLMNMPYAVLSMWRYFAGDHVVEVCKTSSPXIKCTVSLLIAFGNVADDTINFAAFSHTVVHFGEIHDKACFAFSQEEIITAWST

SEQ ID NO: 146326 - protein, 116 aa, Glycine max
  Clone ID: PAT_MRT3847_10314C.1.pep
FSFFFFFFFFFFLFFFLGGGGKRLTIFPCFKPKQKRVSRFSPIQNQDHPPLKVQYNFFNRTLNLINPQKNDRSLPVLPSMTCLASKPLSRMVGSLKTTKPNPLGLPEFSSRMAEGP

SEQ ID NO: 146327 - protein, 79 aa, Glycine max
  Clone ID: PAT_MRT3847_103150C.1.pep
NWKRNKRWEKQGQKGYPGEKGKPHKSPKPKNPKAKREKPGGPKNGPNPSKCGGPHGPLTNRKTGRPSGQKKRQKTGKGG

SEQ ID NO: 146328 - protein, 300 aa, Glycine max
  unsure (1)..(300): unsure at all Xaa locations
  Clone ID: PAT_MRT3847_103151C.1.pep
SCRIRHAPLVRVLSSSDQPRMATPYRGMRLAAGFAGARSPCCVVSGTVPKLGPLEMAGAIVWDWMRHGVLPDPFVVCIFLYVFADAGCLFQAVTALGVTKPAGAPAXSVPSYSLIKLYAKIDNLEKAQEAYKLLQLSEEGPNVYSSNCMIDLYVKQSMVGQAKQIFDTLKKNGGANEFTFAMMLCLYKKIERFDEAIQIAKQIRKLGPLTELSYNNVLDLYAIAGRPKEAIETFKEMVRASIQVNDCSLRSLGNLLLRYGVSRLAVGKLEALVKKDASNGLQAWMLALSSVLEVDDYDHD

SEQ ID NO: 146329 - protein, 67 aa, Glycine max
  unsure (1)..(67): unsure at all Xaa locations
  Clone ID: PAT_MRT3847_103152C.1.pep
DNVAPAYRLGDSCDLTRCSHVRIVKAASECDARRSEHYSPVVQQTACRLPXYAAGRSGVECIREAHR

SEQ ID NO: 146330 - protein, 90 aa, Glycine max
  Clone ID: PAT_MRT3847_103153C.1.pep
KKASICMKRVWTMSILQSQGNPMSPSALRSSHPVVFRLGAPGSMINMPHAVALLLYLQLLHSPGILHSDFDTVQGPKTCLGGVGRPGIPG

SEQ ID NO: 146331 - protein, 88 aa, Glycine max
  Clone ID: PAT_MRT3847_103154C.1.pep
TPLVIVSLLLALSFTVGTYVPQSTPCSYRSSLVSLFTVPPIPHHACRRYPFSWGLSPSSFPRSTSLPPPAPPPPPPPPPPPPSRRHSY

SEQ ID NO: 146332 - protein, 57 aa, Glycine max
  Clone ID: PAT_MRT3847_103155C.1.pep
WVKQLCCMGRWCSTSSVLKSSVYSFKCLLDHLVHFLTGKFVFLIGQHGYYSYWFPQL

SEQ ID NO: 146333 - protein, 68 aa, Glycine max
  Clone ID: PAT_MRT3847_103156C.1.pep
GQIWAGTPPGNLRELPNEEKDVLEKSTLRSKVSLRFTLKRPNSHSDQSLMTWMTKLNKSILTPKSSLY

SEQ ID NO: 146334 - protein, 86 aa, Glycine max
  Clone ID: PAT_MRT3847_103157C.1.pep
RDSRKAVYLQHGVFDSSMGWVSNGVVGSPAFAAYDQGYDVFLGNFRGLVSREHVNKNISSRQYWRYSINEHGTEDIPAMIDRIHEV

SEQ ID NO: 146335 - protein, 170 aa, Glycine max
  unsure (1)..(170): unsure at all Xaa locations
  Clone ID: PAT_MRT3847_103158C.1.pep
DIYNYIYNKSXYELGXRRVWXXSTLPXXCLPGGRTVAGGPLRICAPFANLFAQTFNGQLSSAVNSIRTTLPNYDIRFIDVYTPLFNLINNPQPEGFVDVSEGCCGTAPFGVSGICSLFSLCPNPSSYVFWDSAHPTERAYKFVVSTILQSHTNNVSSSFAFAPFNSSLSN

SEQ ID NO: 146336 - protein, 199 aa, Glycine max
  unsure (1)..(199): unsure at all Xaa locations
  Clone ID: PAT_MRT3847_103159C.1.pep
GHDFRSLGYAPFIGMPHARMALPLEMAQEPVXELPYVNAKQYQGILRRRQARAKAELERKLIKSRKPYLHESRHQHAMRRARGTGGRFAKKTEGEGSNHRXEKDNGTDSVLSSQSISSSGSEPLHSDSAETWNSPNMQQDARGSQVHDRFEERNYANVLQSSSTFCLHSGERVEEGDCSGQQRGSILSEHTSQRRLAIQ

SEQ ID NO: 146337 - protein, 85 aa, Glycine max
  Clone ID: PAT_MRT3847_10315C.1.pep
SSQSLIFFISKPESGFSFPFLSFPLFPHPKLKGTCNCDTGIYTLPPQYHLPAAHQILCSNFVYMITHVPSFLQGVLFPRKKFSSI

SEQ ID NO: 146338 - protein, 173 aa, Glycine max
  unsure (1)..(173): unsure at all Xaa locations
  Clone ID: PAT_MRT3847_103160C.1.pep
MQSKSETANRLRSDPHSFQPGSVYSEPWWRGIGYNPVAQTMAGANASNSSSLECPNGDSESNEEGQSLSNSGMNEEDDDATKDSQPAAPNGTGNYXASGQEQQGMQHTASSAPSMREECLTQTPQLELVGHSIACATNPYQDPYYGGMMAAYGHQQLGYGSXIGMPHARMPLP

SEQ ID NO: 146339 - protein, 85 aa, Glycine max
  unsure (1)..(85): unsure at all Xaa locations
  Clone ID: PAT_MRT3847_103161C.1.pep
MLPLRRKKAWFSAYSVVESKKIQEAIKYVTFNVQFNEEDFEVQCECHLFEFKGILCRHILSLLKLIRXTESVPSKYVFSHWRKDL

SEQ ID NO: 146340 - protein, 56 aa, Glycine max
  unsure (1)..(56): unsure at all Xaa locations
  Clone ID: PAT_MRT3847_103162C.1.pep
XSGLRMYEIVACLPYXCANSICFGDSSLRGRVSFNGRYSDNLHGRRVTNECVYVIH

SEQ ID NO: 146341 - protein, 103 aa, Glycine max
  Clone ID: PAT_MRT3847_103163C.1.pep
FAFEVIRQGLSTWKESFSPRAPFVNFFDRGVFRHQLPLVFKKSAERVSGGLFSSACQWVHLGFSSVFEVLALSLWLLSWLEGSSSFVSPSLYPVKAALLVSCV

SEQ ID NO: 146342 - protein, 71 aa, Glycine max
  Clone ID: PAT_MRT3847_103164C.1.pep
FLEFISHQDFDVMETDIGYYSGYLFTYAYATLLRVSKSLHMLAFYGSVAKHHSLIFEGLIIAEPSWSTSWH

SEQ ID NO: 146343 - protein, 205 aa, Glycine max
  Clone ID: PAT_MRT3847_103165C.1.pep
MATTISCDFSSMESIQHYLLEPEHDSNALMNISNHEVCYSATYNAFPSPTFSLEGVVHDANDSLACKREHPREEREVHAPPVWKHYRGVRRRTWGKFAAEIRDPKKNGARIWLGTYETEEAAGLAYDRAAFKMRGSKAKLNFPHLIGSHAPPQPVRVTKALKRNSPEKRKNLADLLNRLAKNRSQILIQVLEMGLHANYVNVEQW

SEQ ID NO: 146344 - protein, 80 aa, Glycine max
  Clone ID: PAT_MRT3847_103166C.1.pep
GSKNKNDSILVYHERTTNSTQYHDAEYVKTSIGILQGMPPFCRFLAAVPFCRLLAAVPFCRLLAAVSSRSSRFGSSSSRI

SEQ ID NO: 146345 - protein, 114 aa, Glycine max
  Clone ID: PAT_MRT3847_103167C.1.pep
FLSHVQFGLMGDEEKETKIFRNTQNLGLGANSTPQNQILRRGLANSRQCGTNPPPLSIQLKQAPKRPQLKQGRDDRNYGRFAAQSNRYEFGYWLLQRAGKDTFLLDTGGFLASL

SEQ ID NO: 146346 - protein, 380 aa, Glycine max
  Clone ID: PAT_MRT3847_103168C.1.pep
SRADSARGIAFQVRDVDCKQQQHLIKEQKGNGLALWPGLSPVAPAGQAYLQSSATKAPDWLEAAIRASKMDSMETSTCSSRGSIFIPKRSWKKCAAHVHISHIIKSLEVPKTQVFKETEFFECHQMREHEGPKRGVLLKVHSSNEMKNGITSTVRNPHESKNIILRQQCHYRNISQAAPTPVVQYGHQKQQNFNFLSLSAGSNGLKLENNYNKIGSMLEPLSKLQVPYLQSLAPLHGGIPIPAVQRQYASTSYLDQLSVAGPEVRLQQPHYFGNPLYGTHYGSTVSHKQQEHQSFWGVQQAEQGRSTVNFNILRTQYPNWQSGRHDSSALSPCAQAILPCSPASQEIFGSKITSISGQQKQLLAPFQDKWTRPSSSPFIM

SEQ ID NO: 146347 - protein, 34 aa, Glycine max
  Clone ID: PAT_MRT3847_103169C.1.pep
PWESTGNPLGRVNLSFLRFPITRSGIPLSGPCPR

SEQ ID NO: 146348 - protein, 241 aa, Glycine max
  Clone ID: PAT_MRT3847_10316C.1.pep
TSSKAMVARGDLGAELPIEEVPLLQEDIIRRCQIMQKPVIVATNMLESMINHPTPTRAEVSDIAIAVRQGADAIMLSGETAHGKFPLKAVKVMHTVALRNESSVQSGVSYPSQLSSHESHMGEMFAFHATTMSNTLNTPIIVFTRTGSMAILLSHYRPYSTIFAFTNEARIKQRLALYHGVMSIYMQFSNDVEETFSRALKLLLSKSHLHEGQHVTLVQSGAQPIWREESTHHIQVRKVHG

SEQ ID NO: 146349 - protein, 260 aa, Glycine max
  Clone ID: PAT_MRT3847_103170C.1.pep
MDITAFKSLNIPFPTFPSKFSPFRPFSFFHFKPFRTPSSPRFISHCSLNGSAEITSKEGTLPRGVGEAVNEASSSKILQVVLVSPQIPGNTGCIARTCAASAVGLHLVGPLGFQVDDTKLKRAGLDYWPYVVVKIHDSWEDFHNYFRQQEGEKRLLAFTKRGTKIHSEFSYRKGDYLIFGSETSGLPPEALLDCKTEPFGGGTIKIPMVETYVRCLNLSVSVGIALYEASRQLNYESLQVPSESCIDTTEESFIAEDIFA

SEQ ID NO: 146350 - protein, 77 aa, Glycine max
  Clone ID: PAT_MRT3847_103171C.1.pep
SYTTAITGPFKDTFNIMWSEYHDTTYNAKHILYHPLNPVTECVLQTLQPYISRCFNTKLTLALRDSAVDVTSYTLLS

SEQ ID NO: 146351 - protein, 107 aa, Glycine max
  Clone ID: PAT_MRT3847_103172C.1.pep
GGNKDHNLAPFQGVLGIFQSQSLKKKIIKIFALSLIKQFGGENMLDNIAVKCKPAPLFLGGKGFKNPPLRKKPFPFFFRYKKKKRGKPREKPRSNWGKILGTLGPHL

SEQ ID NO: 146352 - protein, 59 aa, Glycine max
  Clone ID: PAT_MRT3847_103173C.1.pep
PRFLPLSRAQRVRDNHLFPFSLVKKNPPWAPNTQPPSPRGLPFSLMQGAPRFPPVKRGQ

SEQ ID NO: 146353 - protein, 95 aa, Glycine max
  Clone ID: PAT_MRT3847_103174C.1.pep
EKLTPFKEGRKGRPFPIPWADHLTVDQIWEFREAFSLFVRVGDGCITPKGLGPVLRSWGQNPPEAGLQALINEVIAVGNGPMAFPGFLNLMVGRM

SEQ ID NO: 146354 - protein, 72 aa, Glycine max
  Clone ID: PAT_MRT3847_103175C.1.pep
VKSPDKAHCHIATIATAGRVKSVVKYSVVCPGSELFSFSKACKSAKSSNYGISGTTECPHRMITVGQHLESH

SEQ ID NO: 146355 - protein, 142 aa, Glycine max
  unsure (1)..(142): unsure at all Xaa locations
  Clone ID: PAT_MRT3847_103176C.1.pep
GKNPPGEGFFPPTLVGGGLYTGDPPFGGGPLPPVGGGPKLIKAPPLGPQLFGVEGGSPPFGPRVKVFPPGVKLSGPMGSGGFPRKNGGENQNCLPFFKAMGVFPGPPFFFFRDGPLXGGFVGFGKGGLFGGIFRAPGVCVPF

SEQ ID NO: 146356 - protein, 62 aa, Glycine max
  Clone ID: PAT_MRT3847_103177C.1.pep
PCLVHKLVSRLQLKWVLLLLLHISLSIFPSSLPLVTCKTIIQTILRKTTPYSTPVTILYLTR

SEQ ID NO: 146357 - protein, 63 aa, Glycine max
  unsure (1)..(63): unsure at all Xaa locations
  Clone ID: PAT_MRT3847_103178C.1.pep
LEPDIISPTVKXLFSSVLVADPFSIITISVIITIFFFFFYFDIFFSLTLERNRASFLPFFLSL

SEQ ID NO: 146358 - protein, 162 aa, Glycine max
  unsure (1)..(162): unsure at all Xaa locations
  Clone ID: PAT_MRT3847_103179C.1.pep
MVRSKTAYQTDVSDHSTFAYRYDRTYLARDKIAEESILEEAAYQIIHDQLMLDGNSRLNLAAFETTWMEPERDKVIVADIDKNDDHMDEDPVSTELQNRSXNMIPHLFNAPLXRXHTAIGGGTVGSSEAIMWDGLAFHRXWRNRKTLDGKPYDIPNIVTGAN

SEQ ID NO: 146359 - protein, 73 aa, Glycine max
  Clone ID: PAT_MRT3847_10317C.1.pep
CPSNFKTLNFSWVENHLASLLYRIKYNLINVVTILVAPREFHLELAKFKNKLTIRDFTTWIQECLVKTSQAKQ

SEQ ID NO: 146360 - protein, 93 aa, Glycine max
  Clone ID: PAT_MRT3847_103180C.1.pep
PRVRPRVRPKPNPRTSGSSCDIHILLIICTFHIYFQSKYMIYRMLFPRQTTTYSKLFETHKLARMQYANEEYFVHNPLPTLARGDRFLFHSGS

SEQ ID NO: 146361 - protein, 109 aa, Glycine max
  Clone ID: PAT_MRT3847_103181C.1.pep
VCTVHILVVLSSITFTHFTPQSCASFTMSNIMSSSHMSSQVSSTSMLSLSHVSTATIMPPVSTFSPGNRLCLRFLLCLIIQLVSSLIRYQNQCTEAAQEENDIGIHVCN

SEQ ID NO: 146362 - protein, 238 aa, Glycine max
  Clone ID: PAT_MRT3847_103182C.1.pep
MRGVVKAFAGNLLFHGRKTQTQCIRSYSLIPMVIEHSSRGERAYDIFSRLLKERIICINGPISDDTAHVVVAQLLFLESENPSKPINMYLNSPGGAVTAGLAIYDTMQYIRSPVNTICMGQAASMGSLLLAAGAKGERRSLPNATIMIHQPSGGYSGQAKDIAIHTKHIVRVWDSLNELYAKHTGQSVEVIQTNMDRDNFMTPKEAKEFGLIDEVIDQRPMALVSDAVGNEGKDKGSN

SEQ ID NO: 146363 - protein, 52 aa, Glycine max
  unsure (1)..(52): unsure at all Xaa locations
  Clone ID: PAT_MRT3847_103183C.1.pep
MASRAVLLLAMCVLPAMVVAIRPAKNPFCVKGRVYCDPCRAGFETSATTVXX

SEQ ID NO: 146364 - protein, 51 aa, Glycine max
  Clone ID: PAT_MRT3847_103184C.1.pep
MVGSRLNLREKQTSTSMSGRGKGGTGLGKGGAVRHRKDLRNGIQDFIKPAI

SEQ ID NO: 146365 - protein, 49 aa, Glycine max
  Clone ID: PAT_MRT3847_103185C.1.pep
KFLIVVKVEFCKSFVRVKGMGCGWLPGFNFAFYKKETKLYIYAFPPTRS

SEQ ID NO: 146366 - protein, 267 aa, Glycine max
  unsure (1)..(267): unsure at all Xaa locations
  Clone ID: PAT_MRT3847_103186C.1.pep
MATNENLPPNVIKQLAKELKNLDESPPEGIKVVVNDDDFSTIFSDIEGPAGTPYENGVFRMKLLLSHDFPHSPPKGFFLTKIFHPNIANNGEICVNTLKKDRNPTLGLRHVLIVVKCLLIEPFPXESALNEQASVLNMLACKMLLENYEEYARHARLYTGIHAKPKPKFKSGAISESTTALNVDQTNTSVISGDIKTTPASAALPVPVLATTTTRGNNQEQAAAVNGSSAATVISAASAPPKKEGGQAKAQADKKKIDARKKSLKRL

SEQ ID NO: 146367 - protein, 250 aa, Glycine max
  Clone ID: PAT_MRT3847_103187C.1.pep
MATNENLPPNVIKQLAKELKNLDESPPEGIKVVVNDDDFSTIFADIEGPAGTPYENGVFRMKLLLSHDFPHSPPKGFFLTKIFHPNIATNGEICVNTLKKDWNPSLGLRHVLIVVRCLLIEPFPESALNEQAGKMLLENYEEYARHARLYTGIHAKPKPKFKSGAISESTTALNVDQTNTSCCIASASAAATATRGNNQEQAAAAVNGSNAAATVISAAASAPQKKEGGQAKAQVDKKKIDARKKSLKRL

SEQ ID NO: 146368 - protein, 66 aa, Glycine max
  Clone ID: PAT_MRT3847_103188C.1.pep
HTFLSLAYSDNNLITLNLNIDPNTFVFLSKCLHIISNHISSSSSYNANLNKNSILPRITINSKTYI

SEQ ID NO: 146369 - protein, 71 aa, Glycine max
  Clone ID: PAT_MRT3847_103189C.1.pep
KRLSLQSSFLTRHQSSKLSFISSCLLVTFRLWTSVITSMQANTSFLSLNSSSWPTAYSSMEPAIESVRMLE

SEQ ID NO: 146370 - protein, 71 aa, Glycine max
  Clone ID: PAT_MRT3847_10318C.1.pep
SGCDRMVGVSRVNRCNVSCVDVSSVRVDHKNDVDETVDARGILKIVSTEPQDRSIESPRIFTVYLVSGSII

SEQ ID NO: 146371 - protein, 259 aa, Glycine max
  Clone ID: PAT_MRT3847_103190C.1.pep
EWWVSKRRLPQGFRQRVRNYERMRWAATRGVDECRLIKNLPEGLRRDIKYHLCLDLVRQVPLFQHMDDLVLENICDRVKSLVFTKGETIAREGDPVQRMLFVVRGHLQSSQVLRDGVKSCCMLGPGNFSGDELLSWCLRRPFIERLPPSSSTLITLETTEAFGLEAQDVKYVTQHFRYTFVKEKVKRSARYYSPGWRTWAAVAIQLAWRRYKHRLTLTSLSFIRPRRPLSRSSSIGEDKLRLYTALLTSPKPNQDDFDF

SEQ ID NO: 146372 - protein, 63 aa, Glycine max
  Clone ID: PAT_MRT3847_103191C.1.pep
DNKGGLFNPPPGAARLVKFVFFWDPGLFKRAPPVADVFSQQGFSPGLLTPLFFFLFSPVFFFC

SEQ ID NO: 146373 - protein, 84 aa, Glycine max
  Clone ID: PAT_MRT3847_103192C.1.pep
RRPFYLTPRGNWNLPPTFGESHFTQKNTLGNPFFIPVKLEIRFLHFFTEKFFVQQKYKGLKKKFPPLFLHAPYMFKDLYNPRGG

SEQ ID NO: 146374 - protein, 264 aa, Glycine max
  Clone ID: PAT_MRT3847_103193C.1.pep
STTAASDLSLKELGAYFISSAMKRASEWAYSHEIPSDVTIQVGEVSFSLHKFPLVSKSGYIGKLVSESSDAFIELYDVPGGAEAFELATKFCYGINFEISIENIAMLRCVAEYLDMTEDYSVGNLVGRADSYLNEVALKTISGAVSILHMSERFLPIAEKAKLVSRCIDAIAFIASKETQFCSPMRGDIIGTDGMASHQRPVVHWWAEDLTVLRIDIFQRVLIAMMARGFKQFALGPIIMLYAQKSLRGLVRLKPLTPKVLTYK

SEQ ID NO: 146375 - protein, 132 aa, Glycine max
  unsure (1)..(132): unsure at all Xaa locations
  Clone ID: PAT_MRT3847_103194C.1.pep
LKLTAVASTXLVCESPVLLDPPASVSWGKMVDSIVTLLSRPKKDRVQEEPDMPDITENAGYSTTFVLLYNAGKKKKDPLKDIRDPREFFVASLSRLFALSPGRYPKVISENVDPANQAALLQLCNTYNLSIV

SEQ ID NO: 146376 - protein, 56 aa, Glycine max
  Clone ID: PAT_MRT3847_103195C.1.pep
YSSTGTEIELTLSITHLKKVADTLYIVQTKSYGGSESGDRDCYTTVITCDTIAGDS

SEQ ID NO: 146377 - protein, 60 aa, Glycine max
  Clone ID: PAT_MRT3847_103196C.1.pep
KKKKAPLKNIRDPRDFFGASLSRLFALSPGRYPRVISENVVPANQAALLQLCNPYNLSIV

SEQ ID NO: 146378 - protein, 675 aa, Glycine max
  unsure (1)..(675): unsure at all Xaa locations
  Clone ID: PAT_MRT3847_103197C.1.pep
RNSEENQYVMTLLGRVSASANLSRLVISVFNFLSAVRTTVHHTMFAIDGLIPLFCQCMLILNVSLREDDEVLFVLNXIEFIRRDMEGSDLDTRRRIACELLKGIAMYYGDAVKSIVSAQIQNLLSSYAANPGTNWKDKDCAIYLVVSLATKKAGASVVSTELVDVQSFFESVIVPELQSADVNGYPMLKAGALKFFTMFRTQISKPVALKFFPDLVRFLTAESNVVHSYSASCIEKLLLVKDEGGGARYTSADINPIFPVLMNNLNSARELPESEENQYVMKCIMRVLAVADISIDVARVCVEGLGSLLAEVCRNPKNPTFNHYLFESVAILVRRACERDPSLVSXYEASLFPRLEIILTNDVTEFLPYTFQLLAQLVELNRPPIPPIYMQIFELLLSPETWKRASNVPALVRLLQAFLQKAPNEITQGDRLTKVLGIFDTLIQASSTSEQGFYVLNTVIESLEYNAIKPYISHIWAALFRELQKRRTVKLIKSLLIFMSLFLIKHGAANVVDTMNSVQPDIFVVILNQFWIPNLKLITGAIELKLTAVASTRLICESPVLLDPAASVSWGKMVDSIVTLLSRPEEDRVQEEPDMPDITENAGYSTTFVLLYNAGKKEEDPLKDIRDPKEFFVASLSRLSALSPGRYPKVISENVDPANQAALLQLCNTYNLSIV

SEQ ID NO: 146379 - protein, 130 aa, Glycine max
  Clone ID: PAT_MRT3847_103198C.1.pep
FLGERGTRFVNPFVLSLFFVFLTTMSSSQHLNNVGEDSSSRDMSFFPPSSRYVGSSQTQTPPLSLSHGNGVEGSNSNPEMGLLIFASTVFQQPQECRGTKRAIDEEEEEEEEDEEEEEGVDEIENTRTCV

SEQ ID NO: 146380 - protein, 63 aa, Glycine max
  Clone ID: PAT_MRT3847_103199C.1.pep
EDYRRGRNVTITARNPGTTERSEKKRPEREREEMNDIRQSNTKARPCALSEAALRYFTNNKTI

SEQ ID NO: 146381 - protein, 38 aa, Glycine max
  Clone ID: PAT_MRT3847_10319C.1.pep
HTMMIYYSLHFAMPAIIVETCTRTLNSTLYKQNLFIST

SEQ ID NO: 146382 - protein, 76 aa, Glycine max
  Clone ID: PAT_MRT3847_1031C.1.pep
ELYCCSLLRLSCTSNKLRHIFIYIIYIEVSNQCKALLLASHRLFERKSIGMIHLYLGIKELIGGPILLLHRERQDY

SEQ ID NO: 146383 - protein, 77 aa, Glycine max
  unsure (1)..(77): unsure at all Xaa locations
  Clone ID: PAT_MRT3847_103200C.1.pep
GLEVYEQWSKLNPLSTPNLAYLLKILVRQVLLLEFFSTPLLLVCQYILFNFSGLPLLYTHHHSWNNTCSWASPXRKK

SEQ ID NO: 146384 - protein, 131 aa, Glycine max
  Clone ID: PAT_MRT3847_103201C.1.pep
FHRFTFSSASGSIQFSSNQQKDAFTRAKLNAISERLTLEDSNSETWTPLSVLFKPHHNVLTGNYDINVLIAALEEKGKTVVWHDRRKGASSIDVDAPEDVLMGFVINVAVTRFAGIWRSRHWIALRKNYWV

SEQ ID NO: 146385 - protein, 38 aa, Glycine max
  Clone ID: PAT_MRT3847_103202C.1.pep
VSNIDFDSFFTVDLVFTPISSNPLTIRSVFSAYAEEYG

SEQ ID NO: 146386 - protein, 48 aa, Glycine max
  Clone ID: PAT_MRT3847_103203C.1.pep
GQNQFLTELHSCIYHTHCLGDDFLMCCLLLLSSRVFLGCRMILRVPTT

SEQ ID NO: 146387 - protein, 228 aa, Glycine max
  unsure (1)..(228): unsure at all Xaa locations
  Clone ID: PAT_MRT3847_103204C.1.pep
MQQSSASGSLMKQLSVKEAWKSTSSRWSGKDKYSSVGGGSIEGCEASLSQMEGFSMYGNEDNNGVVMXKKRVMVVGEDHXSHSKHAMMWALTHVANKAHLLTLLHVVPTHRGSESSCSTYLVNHLGSLCKDCKPEVEVEALVIQGPKLATVMSQVKKLEVSLLVLGQKKPSPLLSCLCGSNSISSSEEFAEHCINNAECLTVGVRKRSQGNNGYLISTRWQKNFWLLA

SEQ ID NO: 146388 - protein, 120 aa, Glycine max
  Clone ID: PAT_MRT3847_103205C.1.pep
LEEEPEQLVRRLRKGKACARPEDEETETNIPRLGLLGERLNRPLSIESPSREVDTRSPPVVIPPSREANTRSPPVVIPPPRPKQNGEVPHPVEIPPPPAKHIERERFFQENKDGSNLSGH

SEQ ID NO: 146389 - protein, 46 aa, Glycine max
  Clone ID: PAT_MRT3847_103206C.1.pep
PYQSTVSHWEIVCWEQHIELHPTNLNFSHLIDKNSLSPNAWSNAWV

SEQ ID NO: 146390 - protein, 65 aa, Glycine max
  unsure (1)..(65): unsure at all Xaa locations
  Clone ID: PAT_MRT3847_103207C.1.pep
NLXPGXVGTPLDFQIXXFXPWRINVCWCSNIXITFITTSDQRLCWSCLCQXCLQIKDHLRFHHQL

SEQ ID NO: 146391 - protein, 105 aa, Glycine max
  Clone ID: PAT_MRT3847_103208C.1.pep
RRRLFFFFFFFFFFFFFFFFFFFFFFFFLKWLYKRKEKNQKGIENKFEHRNKNKNGGAGFNSGKRQHWGEEGGKGRKKETTRGLGGTWVVTQKGELQGKKKEEPI

SEQ ID NO: 146392 - protein, 76 aa, Glycine max
  Clone ID: PAT_MRT3847_103209C.1.pep
MAKISFTIIFAFALIFTVISRTSGAMMTDDKCSKVLDPNNCDLTKCRANCIQQYHGIGHCIGRNPYKCICIYDCSS

SEQ ID NO: 146393 - protein, 385 aa, Glycine max
  Clone ID: PAT_MRT3847_10320C.1.pep
MKIPNTILKLFLFILLNPSQIAIALASIEACLDSVCQTHEPVIRFPFRIEGEQENSCGHPGFSVSCNHNGQTLLNLSYCGEELRIQRINYAAQQLWVNDPNNCLPKRLLSLNLSASPFDAVYRQKFTFFNCSFNLEYLVRRYRPISCLSDSPKYLVFATPSSTVFGHLSSVCDLVATVTVPVQSPFNDRVTSSELSDDLRFSWDSPSCGRCESHGGRCGFKSNETFELDCSLVPSKGISHGARYAIVICIGATALLCCMGVLRCIHSWLRIGNQDGPWANETVPDFEALAGSRPTTVTGLDRPTIESYPKIVLGENRGLPKKGDKTCSICLSEYIPKETVKTIPECGHCFHAQCIDEWLPLNASCPICRTSPRKLPQPRARSSPQ

SEQ ID NO: 146394 - protein, 67 aa, Glycine max
  Clone ID: PAT_MRT3847_103210C.1.pep
VICDASNSHGHLHCSRCCALLQVRILVCNAVLFCRRESDVSHACKKKYAVQIVQRDMIWWGRLYSPM

SEQ ID NO: 146395 - protein, 111 aa, Glycine max
  Clone ID: PAT_MRT3847_103211C.1.pep
TLGAFSRAVSPPFMDDSLKVFPSRFSHWNTAINVNSIPLWAPPPLAPQALALIFRVFLWGEIFPQDPFTQQAFSELYYALLYMKLFIGKRGPPAISGSELPGGPPCPPKGP

SEQ ID NO: 146396 - protein, 127 aa, Glycine max
  unsure (1)..(127): unsure at all Xaa locations
  Clone ID: PAT_MRT3847_103212C.1.pep
RVQSIRVWPPVGKKKFXSFSSRPAFFDAQLAKEVKSLFRKGGFPSLEFELGPGFLSREPPGSPGFSDGPFWPLWNPPLFGSPDPSRVLKGLQGVKFASPPGFFGFLGFATVPQVRGFSFFASKPPGF

SEQ ID NO: 146397 - protein, 153 aa, Glycine max
  Clone ID: PAT_MRT3847_103213C.1.pep
MASGENQFPRQKQDTQPGKEYLMNPPPQYNSPDYKPSNKLHGKVAVVTGGDSGIGRAVCNLFSLEGATVIFTYVKGQEEIDARDTLEIIRKAKTEDAKDPMAVAVDHLGYEENCKRVVDQVVNAYGSIHILVNNAAVQYESDSLEEIDDKRLE

SEQ ID NO: 146398 - protein, 67 aa, Glycine max
  Clone ID: PAT_MRT3847_103214C.1.pep
DEASDYTPPPGPLMSSNQRGPKGNVYIYVSAPFFRKISYEPNGATFPTFPSSEGLLDIQLGEDATMF

SEQ ID NO: 146399 - protein, 147 aa, Glycine max
  Clone ID: PAT_MRT3847_103215C.1.pep
MSMDMMATERVCYVHCNFCNTTLAVSVPCSSLLTIVTVRCGHCANLLTVNMGASLQTFPSQDTTQRFSTVGKLQRQHLSVQEACSKELGSSSKCKTFETVDHDQQPTIPPIRPSEKRQRVPSAYNRFIKEEIQRIKASNPDISHREA

SEQ ID NO: 146400 - protein, 167 aa, Glycine max
  Clone ID: PAT_MRT3847_103216C.1.pep
FGHGDGPDSYVSVPCSSLLTIVTVRCGHCANLLTVNMGASLQTFPSQDTTQLQRQHLSVQEACSKELGSSSKCKSFETVDHEQQPRIPPIRPPEKRQRVPSAYNRFIKEEIQRIKASNPDISHREAFSTAAKNWAHFPHIHFGLKLDGNKQAKLDQGDGTQKSNGFY

SEQ ID NO: 146401 - protein, 59 aa, Glycine max
  Clone ID: PAT_MRT3847_103217C.1.pep
KGKIIFPSLVVAPLIPVGLPKGFFGLFPPPPPPPPPPPPPPPPPPPPPKTVAVLTCSTV

SEQ ID NO: 146402 - protein, 175 aa, Glycine max
  Clone ID: PAT_MRT3847_103218C.1.pep
RLYRIQKILMKNMEATSGIEVNQRGWNLKNVISLTQNGCHNGAQQNPMLNFDLESPAKEDMAEADSDGVLEVTNETEIELTLGPSSYKRKKVETPLTSDSAHRLSSSSTGSSLINKTRLKTRHSSYSAAEELSGGLIGLVHVRHSTAGCQSGIRRSYEIEERSRDERTKQPPWFF

SEQ ID NO: 146403 - protein, 116 aa, Glycine max
  unsure (1)..(116): unsure at all Xaa locations
  Clone ID: PAT_MRT3847_103219C.1.pep
WGSSHCADRHHAQTIVRNTAGWRLNGGNIGPGIVSQLCFVDDSQAFMFAPXPCPRYFHNRLKPSKLTXTALXAQQQIQDIAQESVRNMTRASKIPYSRSIVGATLXSNQKKRAEEP

SEQ ID NO: 146404 - protein, 159 aa, Glycine max
  unsure (1)..(159): unsure at all Xaa locations
  Clone ID: PAT_MRT3847_10321C.1.pep
FDCVDEQDTFGEGSVNAGLNGDGGMDYMERITVDTYEGESNELSRKNGQKGHRRVVTGEGEXMTTVYPTIVEEAYNKANPLNYMXTGTLQRTDTESSKDQKLTRIEISDTPXTRCLTILHTEYNIDVRQRNIQFERIIMKKRDKLSCSGGINPYSMEWT

SEQ ID NO: 146405 - protein, 153 aa, Glycine max
  unsure (1)..(153): unsure at all Xaa locations
  Clone ID: PAT_MRT3847_103220C.1.pep
RYTSNPWCCAAXENWTXVIKDMLNVRNLYIIEXGVFHQAMMAVLHYXDHSVTSNLAQEKEIILREPPYLHYEWLLLRYMVITCGLIGIAPXNGDIAHSPMHTISVATLMHQSLRYRLAATAQSSMTKLESLXHVYGGMQDADWKMHTHLAHHE

SEQ ID NO: 146406 - protein, 77 aa, Glycine max
  Clone ID: PAT_MRT3847_103221C.1.pep
RGDLIQEKDSMGPKTTQGFKKKDGVKEKSKVKFKMENLSSLSMDVVRVGQVPRVPGQPIPIFGGQKKISGFGHSKNF

SEQ ID NO: 146407 - protein, 126 aa, Glycine max
  Clone ID: PAT_MRT3847_103222C.1.pep
FWPRGKRGPPVWRGSKNPFGGVPPFFPQKKRPPVFFKRGVALFFLSFFAKRFNLFFSKRGVLQEPPSKVGGPKENPRYIQLYPQGLVLQGVLNLGGLSFLPKKKSPDFGSPFTRSLKKEPLLALPF

SEQ ID NO: 146408 - protein, 105 aa, Glycine max
  Clone ID: PAT_MRT3847_103223C.1.pep
LALTTLNFFKGNRHRRARTRASLGTRRRHSARPRKGGPEAPDPGLPPPGRGGDPDVRNPQNSQRGPKLKEAFFKLAKQTLKSTLVWRLGIYPRACLGHPGHWPIP

SEQ ID NO: 146409 - protein, 541 aa, Glycine max
  Clone ID: PAT_MRT3847_103224C.1.pep
SSITTSEHFHCFYLTGSIDITSITMAEVAPPKKENPNLLLGRFELGKLLGHGTFAKVHHARNIKTGEGVAIKIINKEKILKGGLVSHIKREISILRRVRHPNIVQLFEVMATKTKIYFVMEYVRGGELFNKVAKGRLKEEVARNYFQQLVSAVEFCHARGVFHRDLKPENLLLDEDGNLKVSDFGLSAVSDQIRQDGLFHTFCGTPAYVAPEVLSRKGYDGAKVDIWSCGVVLFVLMAGYLPFHDRNVMAMYKKIYKGEFRCPRWFSSELTRLFSRLLDTNPQTRISIPEIMENRWFKKGFKQIKFYVEDDRVCSFDEKLLLHHDDDLATSDSEVEIRRKNSNGSLPRPASLNAFDIISFSQGFDLSGLFEEKGDEARFVSSAPVSKIISKLEEVAQLVSFSVRKKDCRVSLEGCREGVKGPLTIAAEVFELTPSLVVVEVKKKGGDKAEYEKFCNSELRPALENLGMEESASSSSSCHQSTHTQSEFQQHRTLSDSALNRHSDNECLFERELGLADETSISQHGESKFECQQENMAMFTI

SEQ ID NO: 146410 - protein, 175 aa, Glycine max
  unsure (1)..(175): unsure at all Xaa locations
  Clone ID: PAT_MRT3847_103225C.1.pep
EEKSASAHSKSHSGKTSSSVDNLEKTGRLKDKNGIRELPDLNLSVGKSAIQAPKSENVLKKDGSTARPKITTLEKAIRELEKIVAESRPPTMENXEPDTTPQGVKRRLPREIKLKLAKVARLAQASQGKVSKELLNRLMSILGHLIQLRTLKRNLKIMISMGLSAKQEKDVRFQQ

SEQ ID NO: 146411 - protein, 528 aa, Glycine max
  Clone ID: PAT_MRT3847_103226C.1.pep
MAEVAAPKKENPNLLLGRFELGKLLGHGTFAKVHHARNIKTGEGVAIKIINKEKILKGGLVSHIKREISILRRVRHPNIVQLFEVMATKTKIYFVMEFVRGGELFNKVAKGRLKEEVARKYFQQLVSAVEFCHARGVFHRDLKPENLLLDEDGNLKVSDFGLSAVSDQIRHDGLFHTFCGTPAYVAPEVLARKGYDGAKVDIWSCGVVLFVLMAGYLPFHDRNVMAMYKKIYKGEFRCPRWFSSELTRLFSRLLDTNPQTRISIPEIMENRWFKKGFKQIKFYVEDDRVCSFDEKQLQHHDGDDYLATSDSEVEIRRKNSNCNSTSNGNSLPRPASLNAFDIISFSQGFDLSGLFEEKGDEARFVSSAPVSKIISKLEEVAQLVSFTVRKKDCRVSLEGCREGVKGPLTIAAEIFELTPSLVVVEVKKKGGDKAEYEKFCNSELKPALENLGMEDSASSSSSCHQSTHTQSEFQQQHRTFSDSALNRHSDNNECLYDQELGLAEETSIPQLGEPKFEFQQENVPMFTI

SEQ ID NO: 146412 - protein, 54 aa, Glycine max
  Clone ID: PAT_MRT3847_103227C.1.pep
PKYSLTIQSFLLPYVNRYMIYQQGSFTIGTVLRLANYFSYNNKVAPVLVVCSEI

SEQ ID NO: 146413 - protein, 50 aa, Glycine max
  Clone ID: PAT_MRT3847_103228C.1.pep
IPGLSWGPGGVTVKKTGAALIIGIYDEPMTPGQCNMVVERLGDYLIDQGL

SEQ ID NO: 146414 - protein, 56 aa, Glycine max
  Clone ID: PAT_MRT3847_103229C.1.pep
MVVISVFIFIIQGPGGVTVKKTGAALIIGIYDEPMTPGQCNMVVERLGDYLIDQGL

SEQ ID NO: 146415 - protein, 93 aa, Glycine max
  Clone ID: PAT_MRT3847_10322C.1.pep
KKLFLNWSIGPPIFYRPAFFFAFPKKIGCLEPSGDLNPPRKSGRVGLPAKMPSSFLNLFLGNDFLKRPLKGPRGPMGQSLQKRTGPWDRSPWG

SEQ ID NO: 146416 - protein, 79 aa, Glycine max
  unsure (1)..(79): unsure at all Xaa locations
  Clone ID: PAT_MRT3847_103230C.1.pep
FQLIFQIINYYPFIPIYTKYPIFFFPPSTLYPTKPFLPPFIHYPFLKSNFDSLNLIQNPHXXXIHQFPTLPQPYLNNFL

SEQ ID NO: 146417 - protein, 143 aa, Glycine max
  Clone ID: PAT_MRT3847_103231C.1.pep
LLQYAATASFLSKLYSDYLDHLKMSGASCKTDAFSVEMLHDFATSQVSYILGQNPMKMSYLVGYGDRFPLQVHHRSASIPWNNQPYRCEDGKKWLNSKDPNPQVLLGAMVGGPDTNDNFVDHRTNQKFTEPNITSNAGLIATL

SEQ ID NO: 146418 - protein, 79 aa, Glycine max
  unsure (1)..(79): unsure at all Xaa locations
  Clone ID: PAT_MRT3847_103234C.1.pep
MPPSRRKGGKKSAGGAAACRQFKLGDLVLAKVKGFPAXPATVSEPQKWGYSADRKKVFVCFFGAAPQIAFCNPADVESI

SEQ ID NO: 146419 - protein, 173 aa, Glycine max
  Clone ID: PAT_MRT3847_103236C.1.pep
MEDDGSNSIRRMSSRTRKVASKMAAALASADNRTQAALARLDALENDNAGFEIADANNDDDDASLDEEDQFYMQKKQSKGTKRKTRQAKALEARRAPRTFLELLHEANLESLPPHVPSYWKAAVGPPSSTSRRHFCTVCGFSANYTCVRCGMRFCSHRCQNVHNDTRCLKFVA

SEQ ID NO: 146420 - protein, 67 aa, Glycine max
  Clone ID: PAT_MRT3847_103237C.1.pep
SQLSQADKCIWLAESSKKISISLAYHVLLMLQVDFQQSQFTRLWKLDLPPKTKFLLWRVALNKLAMR

SEQ ID NO: 146421 - protein, 70 aa, Glycine max
  Clone ID: PAT_MRT3847_103238C.1.pep
RDGSDLFGLVSQKRKIAQFVQRRSPGEKIITSISTSPCTLQFRHLMIRHMILAKKKKKIGTLARNLNTLW

SEQ ID NO: 146422 - protein, 65 aa, Glycine max
  unsure (1)..(65): unsure at all Xaa locations
  Clone ID: PAT_MRT3847_103239C.1.pep
SRYVQIVTEISKEINIDEVYHIVSSXIGSLKSVGDXNAVWVPSSRPLNLEETMLEGETQVNRWTR

SEQ ID NO: 146423 - protein, 44 aa, Glycine max
  Clone ID: PAT_MRT3847_10323C.1.pep
LLLYSLIKQSFSGIDLIKEEHRSLSLAPIKRGGNKLISLTTQNP

SEQ ID NO: 146424 - protein, 58 aa, Glycine max
  unsure (1)..(58): unsure at all Xaa locations
  Clone ID: PAT_MRT3847_103240C.1.pep
PTRSXTRTPTHAFGFLNTTMGRVTLSLPCIIAPSTDSKLNTQYHTGIHIKKYFVNRHH

SEQ ID NO: 146425 - protein, 126 aa, Glycine max
  Clone ID: PAT_MRT3847_103241C.1.pep
PTRDDYINQNLTPSPASDERACPICYENWNADTEQIIRTHCNHTFHRECFIAWLGKENVNSANSCPSCRAICYPKVEHQKETRLTLDMSFLYRTMRSEYITRISLARQSRAKKHTNQRRYDDEDGF

SEQ ID NO: 146426 - protein, 35 aa, Glycine max
  Clone ID: PAT_MRT3847_103242C.1.pep
FLLQDLQVKSSPPVQPTPQVNNDPAIIQVDEKFFI

SEQ ID NO: 146427 - protein, 123 aa, Glycine max
  unsure (1)..(123): unsure at all Xaa locations
  Clone ID: PAT_MRT3847_103243C.1.pep
VTSENTNVHGVELIQTATITNELAAVGCKKGXLVRTIAPSNIYLDMNDIXAKFVHVKETGYTYTMPMDILKXAICIAHLXHKICXRQGGGRNTDNDMGEDNRCNETPPQWGTHYHHHLPSALS

SEQ ID NO: 146428 - protein, 86 aa, Glycine max
  unsure (1)..(86): unsure at all Xaa locations
  Clone ID: PAT_MRT3847_103244C.1.pep
WLWGSRTYSSASNYDVFLSFRGEDTLYAFTGHFYIVFHDRGIHTVIDDEEAXRGERITRALMXGIQESRVAITCAFLKLWLLSGFG

SEQ ID NO: 146429 - protein, 85 aa, Glycine max
  Clone ID: PAT_MRT3847_103245C.1.pep
QLYIKCNTLPMNGMIHFFVPNLSIVGPNFDSFAIDICNRPMTQESIIHLIMDQITKVKTTIWLMEQITSFQLETNQPPLRFLSMY

SEQ ID NO: 146430 - protein, 64 aa, Glycine max
  Clone ID: PAT_MRT3847_103246C.1.pep
LGILLYVGTFFRVNGYIYHRLYNSYFHCFIFIHPVYVYHASLSERSSSYPCPQYMFWSVLLIHS

SEQ ID NO: 146431 - protein, 393 aa, Glycine max
  Clone ID: PAT_MRT3847_103247C.1.pep
MATLQFTFTDSTTLFRPSLPSTRTFSRNRSLIVKASSSSSDDFSKSRRRFIAETAALSVSLPQLAARAEDALSEWERVYLPIDPGVVLLDIAFVPDDPNHGFLLGTRQTILETKDGGNTWAPRSIPSAEDEDFNYRFNSISFKGKEGWIVGKPAILLYTSDAGDSWERIPLSAELPGDMVYIKATGEKSAEMVTDEGAIYVTANRGYNWRAAVQETVSATLNRTVSSGISGASYYTGTFNTVNRSPDGRYVAVSSRGNFYLTWEPGQPFWQPHNRAVARRIQNMGWRADGGLWLLVRGGGLYLSKGTGLTEEFEEVPVQSRGFGILDVGYRSTDEAWAAGGSGILLRTTNGGKSWIRDKAADNIAANLYSVKFIDEKKGFVLGNDGVLLRYLG

SEQ ID NO: 146432 - protein, 65 aa, Glycine max
  Clone ID: PAT_MRT3847_103248C.1.pep
AGARTLVFTPLRFMTPSFSGLAMVGVSFYCVGRFMFDIGVPRHVFKVPVERLIASPGLNVPEKTT

SEQ ID NO: 146433 - protein, 55 aa, Glycine max
  Clone ID: PAT_MRT3847_103249C.1.pep
FSSQCVWSFRLYALSMLWYTVSQVRTSGIIFLTSLCNYGGIPNVELCVMYSVVSL

SEQ ID NO: 146434 - protein, 61 aa, Glycine max
  Clone ID: PAT_MRT3847_10324C.1.pep
FLNFSLLVCMLCKLSMAPLAFSFFFILITFFSSSSGNIILSVSTYTKLISSFIYIFWCIFL

SEQ ID NO: 146435 - protein, 36 aa, Glycine max
  Clone ID: PAT_MRT3847_103250C.1.pep
THKMGYHPAMRVHECFKTRSPPMSSYHMGKRRNMFR

SEQ ID NO: 146436 - protein, 102 aa, Glycine max
  unsure (1)..(102): unsure at all Xaa locations
  Clone ID: PAT_MRT3847_103251C.1.pep
TLQETARFEVDKMMLTDAPLLFPPGQLALAALRNSNAFHRVIDFDRLEXYKSPSEKELKHINRKLKSCWGHHSHDEGKKREKKSKHKSKKSSNEAQNMPSIA

SEQ ID NO: 146437 - protein, 158 aa, Glycine max
  Clone ID: PAT_MRT3847_103252C.1.pep
SPYRSVEGFINDMEEFFNAGDNQLEMLKTLQETARFEVDKMMLTDAPLLFPPGQLALAALRNSNAFHRVIDFDSYLRGIFSRENSMHTMSELSESLDAIDSWVRKYKSPSEKELKHINRKLKSCWGHHSHDEGKKREKKSKHKSKKSSNEAQNMPSIA

SEQ ID NO: 146438 - protein, 77 aa, Glycine max
  Clone ID: PAT_MRT3847_103253C.1.pep
PFVRTVIHTRVGALLHPNTVQTLHGLANIRLGDHPICQSCKRKSSRCRCTIPIMTPLRLVFPRQTTALHGSESAHRE

SEQ ID NO: 146439 - protein, 73 aa, Glycine max
  Clone ID: PAT_MRT3847_103254C.1.pep
HLQFVNNYFILPQVSIPAVIGSCWIKSYCKCIETPMDECYFLSLFPAGSWMKKVIGSVFPVLFFCIIFQEIYL

SEQ ID NO: 146440 - protein, 51 aa, Glycine max
  Clone ID: PAT_MRT3847_103255C.1.pep
LFKNQTLPGLGFGSFQASSNNIGLPLRVKGDIKQAFYFYPIWFKIFLIKGV

SEQ ID NO: 146441 - protein, 56 aa, Glycine max
  Clone ID: PAT_MRT3847_103256C.1.pep
KSFGNIGRKICFNLDMPQFACKYEFNLAQALSITSRRWLLFQCPYFRARVKSIQFN

SEQ ID NO: 146442 - protein, 91 aa, Glycine max
  Clone ID: PAT_MRT3847_103257C.1.pep
NCHSPASVHAYVMIIKKIEPQQQLCETVPSSFFFFFELRDLMSEVLWYELSKKSDQKRCMGKVLETRTGFNLGYLHAEQCWQVVYEPVTRY

SEQ ID NO: 146443 - protein, 73 aa, Glycine max
  unsure (1)..(73): unsure at all Xaa locations
  Clone ID: PAT_MRT3847_103258C.1.pep
FTSLSLVLKDPKVVGRVLCIMARLNAXFQNDAVTQEREMREMHACLRKSLIQQELCSHISWTWFRSLEADFSN

SEQ ID NO: 146444 - protein, 89 aa, Glycine max
  Clone ID: PAT_MRT3847_103259C.1.pep
YAADPVIPGGTHAREAVNVNTLHAAGAGYSFMGALLCKSGEEQSILKEEPRVREVLKCPNACGAITTTQRGAIPSLARRGDTLKLSKGA

SEQ ID NO: 146445 - protein, 155 aa, Glycine max
  unsure (1)..(155): unsure at all Xaa locations
  Clone ID: PAT_MRT3847_10325C.1.pep
SRSPIHHQIGXKVTVRDIFDHPXTIRGIHDNVMVKLVPHNVPQFQAEQQTVLGDAPLLPIQTWFLSKSLQHPSHWNHTFYLRTPELDVTTLSTAVAELQLYHDAFRMRLRQIDGRTVQCFADDISPVQLRVLNDKDVDGSAAIDQQLQKYQSEID

SEQ ID NO: 146446 - protein, 261 aa, Glycine max
  Clone ID: PAT_MRT3847_103260C.1.pep
MAKSSELAIEELKKLLRDKEEFDAVAAAKVEELIAELQGCGPRPYEPAVQRIVDGFTHFKINNFDKNSDLYSQLANGQSPKYLVFSCSDSRVSATTILNFQPGEAFMVRNIANMVPPFNQLRYSGVGAAIEYAITALKVPNILVIGHSRCGGIQRLMSHPEDGSSPFDFIDDWVKIGLPAKLKVLKEYEGYDFKEQCKFCEKESVNNSLVNLKTYPYVEKGIRNKNIALLGGYYDFVIGEFKLWKYESHITEPISIPLCTH

SEQ ID NO: 146447 - protein, 89 aa, Glycine max
  unsure (1)..(89): unsure at all Xaa locations
  Clone ID: PAT_MRT3847_103261C.1.pep
WVKIGLPAKLKVLKEYEGYXFKEQCKFCEKESVNNSLVNLKTYPYVEKGIRNKNIALLGGYYDFVIGEFKLWKYESHITEPISIPLCTH

SEQ ID NO: 146448 - protein, 122 aa, Glycine max
  Clone ID: PAT_MRT3847_103262C.1.pep
MAKSSELAIEELKKLLRDKEEFDAVAAAKVEELIAELQGCGPRPYEPAVQRIVDGFTHFKINNFEYTLTYILTLHYYASLLIISLCDSDIFYYDILCNLIRFMHASFSYIWQQEPRSVQPTC

SEQ ID NO: 146449 - protein, 81 aa, Glycine max
  unsure (1)..(81): unsure at all Xaa locations
  Clone ID: PAT_MRT3847_103263C.1.pep
ETEVYAIYTDGSDDELPDSELNGTNDTDECDSAYDTDXESFMVVLSALIACEXFQGIAASETGFSKVLHSGSDAGPKAVNI

SEQ ID NO: 146450 - protein, 96 aa, Glycine max
  Clone ID: PAT_MRT3847_103264C.1.pep
LCKGVSVECDVDVAVIWQTFIPLDNRGVIRDHLSLRLVLTARDRLPYLISLCFWQREYRKDSSHGGTIPELGAPSCVAFTSPSLVCTGQSVVIALL

SEQ ID NO: 146451 - protein, 60 aa, Glycine max
  Clone ID: PAT_MRT3847_103265C.1.pep
IPGRARVRPDSLYYSLGCARSVMNRITRPGIPDHFHKYLKPGALGRIRDSSISARSHRLN

SEQ ID NO: 146452 - protein, 76 aa, Glycine max
  unsure (1)..(76): unsure at all Xaa locations
  Clone ID: PAT_MRT3847_103266C.1.pep
LXVDQGXHFEXAXXXRXAYXVVYXXFGSIXQLAXILSLXXLXRGLXXSGQXFMMGCEEKRXXRXGWXPEGXSXXNR

SEQ ID NO: 146453 - protein, 63 aa, Glycine max
  Clone ID: PAT_MRT3847_103267C.1.pep
VCSTLLCALCLWAKTRLCIDLYTLMGALLAFRMQQAIMEQERHRQLQKWGLNKGSEPSKEPSG

SEQ ID NO: 146454 - protein, 83 aa, Glycine max
  unsure (1)..(83): unsure at all Xaa locations
  Clone ID: PAT_MRT3847_103268C.1.pep
VFLRHLVATSVKFGRSATRSMATFDRTKPHVNVGTIGHVDHGKTXLTAAITKVLSETGGAEFTSYADIDKAPEERARGITIST

SEQ ID NO: 146455 - protein, 56 aa, Glycine max
  Clone ID: PAT_MRT3847_103269C.1.pep
PSISWMWTTPCSGSLKLFTAMPMVVAVKRVTLLYTSSGHVGSRAKKYRCFWSRLEP

SEQ ID NO: 146456 - protein, 50 aa, Glycine max
  unsure (1)..(50): unsure at all Xaa locations
  Clone ID: PAT_MRT3847_10326C.1.pep
XILXMAIYXXXDNGNYIFKNYIIXLTILATTRPKFCISHQLTNVLKYNFX

SEQ ID NO: 146457 - protein, 89 aa, Glycine max
  Clone ID: PAT_MRT3847_103270C.1.pep
FCDFQQILVNNSVLEGVLLIFFLPSINFIITRPPAETYKTHMQCYTINRSSLASLFLSLSKLKSMTKISWQKVLVSFSASPYKKQYAHI

SEQ ID NO: 146458 - protein, 90 aa, Glycine max
  Clone ID: PAT_MRT3847_103271C.1.pep
MPHRRSSVTNMLKGTTPVTVPKNRNFYNPTCSKNANTIFHFTHNDSFLASDDEDTSFFLVDGKPPLHPKFGPKWRFQQQCKLPQDMERAR

SEQ ID NO: 146459 - protein, 133 aa, Glycine max
  unsure (1)..(133): unsure at all Xaa locations
  Clone ID: PAT_MRT3847_103272C.1.pep
ETFLFTSQLLNXGHPDKLCDQFCDAALHACLEQDPHRKVAXETCTKTNLVMVFGEITINANVDYEKIVRDTCSNIDCVSNDVRLDACYCKGLDNIDQLSPDIAQGVHWHLTKIPVYIVCYDQRHHVCYATDET

SEQ ID NO: 146460 - protein, 62 aa, Glycine max
  Clone ID: PAT_MRT3847_103273C.1.pep
KEFRERINVKHFILQMLCVRDWEKEKVLKCECDDAVQVMNLCCHFLWKKGKKINTCAIYREM

SEQ ID NO: 146461 - protein, 76 aa, Glycine max
  Clone ID: PAT_MRT3847_103274C.1.pep
LRNIRFSDKNEEERHWVSETTRGCSEVEGLGLSKKKTRSHEPGIFVVTAALGLLTNFEDIYRLWALLSRFLDADFV

SEQ ID NO: 146462 - protein, 95 aa, Glycine max
  unsure (1)..(95): unsure at all Xaa locations
  Clone ID: PAT_MRT3847_103275C.1.pep
TILFTPNSTXHXRGXNLTSNPLRPSFFNXLKHHSPLHNFQNVPLLHFQFXSLNHKKSLSLTFSSESSPHFINLFPVKPKXPHHPIKFTAERFKLF

SEQ ID NO: 146463 - protein, 31 aa, Glycine max
  Clone ID: PAT_MRT3847_103276C.1.pep
TRLHFKRRKDLNGLVHKSSVILHFQNCYKSV

SEQ ID NO: 146464 - protein, 80 aa, Glycine max
  Clone ID: PAT_MRT3847_103277C.1.pep
KAKTEAAKQKLEMKLEKKRASSMDKIMTKLRLAQKKAPEIRSSALAPHPHHVSRTPPKGLFFSKARPMGSLRGCFPRHAF

SEQ ID NO: 146465 - protein, 55 aa, Glycine max
  Clone ID: PAT_MRT3847_103278C.1.pep
ICLFNYNLLIFIPKFIFKTQKLCGFCFIYVLFRLLHRIILLEDKKKSLQIMIIKM

SEQ ID NO: 146466 - protein, 90 aa, Glycine max
  unsure (1)..(90): unsure at all Xaa locations
  Clone ID: PAT_MRT3847_103279C.1.pep
LIILLELEAINLQPLHQVNISNLSNRSLXXGVAPPSLVVGVFYNIIFFQIWLYTYTILLLLIAGLQPHLHLLHHVLQPSYNSLLHIQLHQ

SEQ ID NO: 146467 - protein, 62 aa, Glycine max
  Clone ID: PAT_MRT3847_10327C.1.pep
CVAKHLCIMSVMVFVPSGVMCYPNLLRIKWSCLAFQQVQVFCPCHGCVKLMVASLILFFNVW

SEQ ID NO: 146468 - protein, 88 aa, Glycine max
  Clone ID: PAT_MRT3847_103280C.1.pep
KSRIRTVPIGNLLGCWKHVYMYYCCQILPIVDQLASQWYGINFPNSPDPTRAHATAAHLRSKSTTNNAHTLVDPIPLSFSPISMHPTN

SEQ ID NO: 146469 - protein, 51 aa, Glycine max
  Clone ID: PAT_MRT3847_103281C.1.pep
VSAHACTRLREDNEKVLLVCECYMLEHRHVIMKVCVCFVAALSPETWFLHC

SEQ ID NO: 146470 - protein, 49 aa, Glycine max
  Clone ID: PAT_MRT3847_103282C.1.pep
QLQARWHAPGTRTEGFFLFLSTQFPEVRLIEIIKIDIRIKFSELTVSCF

SEQ ID NO: 146471 - protein, 140 aa, Glycine max
  Clone ID: PAT_MRT3847_103283C.1.pep
MDKLSQYKRVFNQFDENGDSKISPSELRQCVEAIGGELSEKDAEVAVTLLDRDGDGLVGFEDFVRFLEEGKEEEKEDDLKEAFKRYEMDGSGCITPRSLKRMLSRLGESRSLDECKVMIARFDLDGDGVLTFDEFKVMML

SEQ ID NO: 146472 - protein, 606 aa, Glycine max
  unsure (1)..(606): unsure at all Xaa locations
  Clone ID: PAT_MRT3847_103284C.1.pep
MAFSCKLDSFILSAYKPQNSILPLSIQPSSFLPSPSSLKPQKLPFRIRYGSTIRATSSSSTPSATIAEPDGIKIKSIXTSPIDGHRYWIMLNSXSREQVELCIKVCTMIRGYANWKAAEILNQIAVGFXTEGCSLNRKVFVQCXAISLVIRSGKENGGFIMSASYNPSGPEYDWGIKFNYSSGQPAPESITDKIYGNTLSISVIKIADILDVDISKVGVTKFGSFSVEVIDPVSDYLELLETVFDFQLIKGLLSRPDFRFIFDAMHAVTGAYAKPIFVDKLGASLDSISNGIPLEDFGHGHPDPNLTYAKDLVNILYAENGPDFGAASDGDGDRNMILGRSFFVTPSDSVAVIAANAREAIPYFKNGVKGLARSMPTSGALDRVAKKLNLPFFEVPTGWKFFGNLMDAGNLSVCGEESFGTGSDHIREKDGIWAVLAWLSIIAHRNKDKNPGEKLISVSDVVMEHWATYGRNFFSRYDYEECESEGANKMIEYLRDILSKSKPGDQYGSYVLQFADDFTYTDPVDGSVVSKQGVRFVFTDGSRIIYRLSGTGSAGATVRVYIEQFEPDVSKHDVDAQIALKPLIDLAISVSKLKDFTGREKPTVIT

SEQ ID NO: 146473 - protein, 44 aa, Glycine max
  Clone ID: PAT_MRT3847_103285C.1.pep
CRIYSVLVAGKYPPLQDNRSPGLSYMKEKNIIIFPRSRNCNNKY

SEQ ID NO: 146474 - protein, 216 aa, Glycine max
  Clone ID: PAT_MRT3847_103286C.1.pep
MAFSCKLDSFILSAYKPQNSILPLSIQPSSFLPSPSSLKPQKLPFRIRYGSTIRATSSSSTPSATIAEPEGIKIKSIPTKPIDGQKTGTSGLRKKVKVFMQDNYLANWIQALFNSLPPEDYKNGLLVLGGDGRYFNQEAAQIIIKIAAGNGVGKILVGKEGILSTPAVSAVIRKRKANGGFIMSASHNPGGPEYDWGIKFNYSSGQPAPESITDKI

SEQ ID NO: 146475 - protein, 179 aa, Glycine max
  Clone ID: PAT_MRT3847_103287C.1.pep
VVSNYRAVLAWLSIIAHRNKDKNPGEKLISVSDVVMEHWATYGRNFFSRYDYEECESEGANKMIEYLRDILSKSKPGDQYGSYVLQFADDFTYTDPVDGSVVSKQGVRFVFTDGSRIIYRLSGTGSAGATVRVYIEQFEPDVSKHDVDAQIALKPLIDLAISVSKLKDFTGREKPTVIT

SEQ ID NO: 146476 - protein, 34 aa, Glycine max
  unsure (1)..(34): unsure at all Xaa locations
  Clone ID: PAT_MRT3847_103288C.1.pep
AWKNIYTMESXESPSDISQLASDMVWDIWDFLPL

SEQ ID NO: 146477 - protein, 72 aa, Glycine max
  Clone ID: PAT_MRT3847_103289C.1.pep
RCNHIIISCCNLIQRHLTRDQNLFRRWSHPLVLGNRVMNHIGHSFYTTHYKNLNKTHAQQVSPMVTIIYDTP

SEQ ID NO: 146478 - protein, 51 aa, Glycine max
  Clone ID: PAT_MRT3847_10328C.1.pep
QPLSQPKTFFNPFFLHGKPSSMRGPPHPHQTLPLSPPLIPLLQRRPPAYGA

SEQ ID NO: 146479 - protein, 53 aa, Glycine max
  unsure (1)..(53): unsure at all Xaa locations
  Clone ID: PAT_MRT3847_103290C.1.pep
YIAVVIFDPFLFPTHXITKTPFFFFFFWEKKXLXTRWVRPRVIXXTRVPSRXV

SEQ ID NO: 146480 - protein, 95 aa, Glycine max
  Clone ID: PAT_MRT3847_103291C.1.pep
ISKYSITLIFKFSTLCSDQLHKKKHHGHYKLSHISCSLFRVLRNGFSISNSTRCMRTNVRITIRKVTTDLNGVVILVTLPLHLVCLRLRLICGEN

SEQ ID NO: 146481 - protein, 61 aa, Glycine max
  unsure (1)..(61): unsure at all Xaa locations
  Clone ID: PAT_MRT3847_103292C.1.pep
PCRADEISKIMRERIEQCGTERKIGDTGAVLEGGDGVARVCGVDEXVGGELGEWERGLWGL

SEQ ID NO: 146482 - protein, 59 aa, Glycine max
  Clone ID: PAT_MRT3847_103293C.1.pep
SSHDAHFFSIYMSVGAPLVVQSIARVEELVIDDSRSGPFGVWAWAVLAAWPWQLRVRGR

SEQ ID NO: 146483 - protein, 35 aa, Glycine max
  Clone ID: PAT_MRT3847_103294C.1.pep
LVDMIFGHWIYPLEDDPFQGSANILAAQLVLVSLD

SEQ ID NO: 146484 - protein, 90 aa, Glycine max
  unsure (1)..(90): unsure at all Xaa locations
  Clone ID: PAT_MRT3847_103295C.1.pep
SIETMKSTHAMCDALKGVTXAILQMNWQVYMPXLQKSMQVFERQNEKMEWTYEMMGDAVDDAXLGDVDEEETVDLCYQVLDVILIDIYQD

SEQ ID NO: 146485 - protein, 69 aa, Glycine max
  Clone ID: PAT_MRT3847_103296C.1.pep
MYTDELVNMFIARASPWFQRGLTIQPMALPHKLRKANTEPLSSENPYPARTHLTTTIIAPDMIGSIIGV

SEQ ID NO: 146486 - protein, 76 aa, Glycine max
  Clone ID: PAT_MRT3847_103297C.1.pep
KTLQPLKMGILFPLLLAWSSGYYFCSLLLLRCLILPLSFIAMQIAGSTLLVATGPSTKSFRNQESYLYALLGLSKL

SEQ ID NO: 146487 - protein, 75 aa, Glycine max
  Clone ID: PAT_MRT3847_103298C.1.pep
NYFLININSLGILVLLVCVKKILNISHYVMKEEALCTRSVKYLFMFSLNHKLSCISLLTFIILSKSNNKDDICLP

SEQ ID NO: 146488 - protein, 275 aa, Glycine max
  unsure (1)..(275): unsure at all Xaa locations
  Clone ID: PAT_MRT3847_103299C.1.pep
MLDCNGISTPMVSSYKLSKFGSELLPNAHQYRDIVASCQYGTLTRPNIAYNVNKVSEFMSSPLQSYXLTVKRILRYLSGTVTQGLLLQPAHMDAKISLRAYNDSDWGSDPAEMRSTSGSCIFSGSNLIAWSSKKQTLVARSVQKQSIKXLANSTSDLVWVQSLLHELNVQIXQPTLLYINLSAVMIAYNPILHSRTKHLDLDIHFVHEKVATKSLVVQHMPSNMQLADALTKPLPTSKFLDLRPKLKVVLSLSLRGGGGDNRVCASLVIVSVSQS

SEQ ID NO: 146489 - protein, 59 aa, Glycine max
  Clone ID: PAT_MRT3847_10329C.1.pep
QIKNLGRLIYFLGLKFHFQQKGFFVNHYKYIQNLIHLVGLTNSTPIDTTMEINLKLQQI

SEQ ID NO: 146490 - protein, 87 aa, Glycine max
  unsure (1)..(87): unsure at all Xaa locations
  Clone ID: PAT_MRT3847_1032C.1.pep
CPETNEEARRIGSXGRNKGHKXKGNPAKTRKNGTXTNSSTREKGGNGTGTNSKGGDADTXTAXEXHNTNQXXRATKXDGHGKGKAGK

SEQ ID NO: 146491 - protein, 44 aa, Glycine max
  Clone ID: PAT_MRT3847_103300C.1.pep
DDCFTLQPIVKGKKNSKGHNIWTTTIDSKTFNNYWACMSYCGRV

SEQ ID NO: 146492 - protein, 101 aa, Glycine max
  Clone ID: PAT_MRT3847_103301C.1.pep
FLRTLYVAPMRGGRLKRMAPFSNSIERIEPDMMPRFDPLSTTTDGDFGHGNDVPMIKVKATRAGTGSTSSDTTTPLMESGLQKDRGSTDGYFGRRNYVAHN

SEQ ID NO: 146493 - protein, 211 aa, Glycine max
  unsure (1)..(211): unsure at all Xaa locations
  Clone ID: PAT_MRT3847_103302C.1.pep
LWPICVLGTGPGREAVPLVFRRPSPAKLACVPGSVVLQYLSCPHTPLLDTRAAPAPLCTPVEPIMLFFRLPHWQGSFVMAARNXTGAASMEVWELVSRPHMIVGIQEGEEARFSFLKGGYVEDFENQACISSENVEEERETLALVNATEKALQLRNNSNVLMKGSARSGAEFLANRSYQGLNMSSENTSPEPYLIGRRGRASGYEDEKNKQ

SEQ ID NO: 146494 - protein, 92 aa, Glycine max
  Clone ID: PAT_MRT3847_103303C.1.pep
MGFRLPGIRRSSFAVTKAASKAVEVPKGYLAVYVGEKMKRFVIPISYLNQPLFQQLLSQAEEEFGYDHPMGGLTIPCSEDAFLDLTSRLNGL

SEQ ID NO: 146495 - protein, 59 aa, Glycine max
  Clone ID: PAT_MRT3847_103304C.1.pep
RGHLYGPSSLSRIRVLSLNFSGPFSLSFLSRNIFLSLQTNFGILQNLLVFPSWIAISQQ

SEQ ID NO: 146496 - protein, 81 aa, Glycine max
  Clone ID: PAT_MRT3847_103305C.1.pep
VTPFLKCAKRGWRNFQIIGGPKGVLLYQFFPGGGFYFFFKKFFLSLSGSGKKKNFLEGKKGGGKFFFFPPIFEKKIFFFFS

SEQ ID NO: 146497 - protein, 51 aa, Glycine max
  Clone ID: PAT_MRT3847_103306C.1.pep
MSPWLSLPHPSSVCSSAKDQVSPDRHFFQGVLPVLLGRTRCLLRIESRSTC

SEQ ID NO: 146498 - protein, 60 aa, Glycine max
  Clone ID: PAT_MRT3847_103307C.1.pep
DWMPNSNCSNKKTFPLLVNAASTVRDMLKRLNDTQNGMRDPHARVKREAHTGETLNETSH

SEQ ID NO: 146499 - protein, 60 aa, Glycine max
  Clone ID: PAT_MRT3847_103308C.1.pep
TPFIKGLFKHTFDEEKEKGYFNIGLLLLTILVKFSLIFPGETHRPQTKKNNGGGKKPLFF

SEQ ID NO: 146500 - protein, 71 aa, Glycine max
  Clone ID: PAT_MRT3847_103309C.1.pep
KHILNSICYLSVYFVFLSCFLILLIFVRSTDVVVAPPFVYIDQVKNSITDRIEISAQNSWVGKSGAFTGEI

SEQ ID NO: 146501 - protein, 72 aa, Glycine max
  Clone ID: PAT_MRT3847_10330C.1.pep
RVRFSIEELKEATKNFDLSTYIGQGSIGKVPFNHSKCCLKLWIFFFFFLILREDILLRWVLLFYQVILRKQN

SEQ ID NO: 146502 - protein, 64 aa, Glycine max
  Clone ID: PAT_MRT3847_103310C.1.pep
LTDSLSSDRTILRAVSNDSPADILFCTHTTEDTGYIISATGPKTVPNPKKAIPMTIFHKIRAPY

SEQ ID NO: 146503 - protein, 54 aa, Glycine max
  Clone ID: PAT_MRT3847_103311C.1.pep
CAKLLTLLLPSFFFLSFVLKPLKLRRVNLILMVTQFLPNHNSPPTFVSVWKKIH

SEQ ID NO: 146504 - protein, 134 aa, Glycine max
  unsure (1)..(134): unsure at all Xaa locations
  Clone ID: PAT_MRT3847_103312C.1.pep
MRNLYRKAATLRCYAGSRCYSASAVIWSLLGCLLLFHLYSNIHHKHKEGREVPLHVTNHPQSRELQQVEGEIIRLQPKGKRSPRAAKCRHKQVTGNGSYYYYPXRIWLDTDGXPIQAHGRXILYDERSRTYYWY

SEQ ID NO: 146505 - protein, 313 aa, Glycine max
  unsure (1)..(313): unsure at all Xaa locations
  Clone ID: PAT_MRT3847_103313C.1.pep
MSMEAQQILSRFCPKPSSVPSIPIVKQQFSPKFPRLPSSSLYPSSQSQNLNVPSGAFHPISIVHKEVCSSSCKRIWCSSSSSSTAEPKEGHEVRAQVTVRHASATRPVSGGGSNFRAIHEASKRGSLHGDVLVLVTNKSDCGGAEYARNNGIPVILYHISKDESNPSDLVDTLRKFEVDFILLAGYLXNLYQWNXDPSLQKIYIQHSSITSSSFWRQGIXGMKVHKAVIASGARFSGPTIHFVDEHYDTGRILAQRVVPVQANDTVEELAARVLKEEHQLYVEVVEALCEERVVWRQDGVPLIQSKENPNEFR

SEQ ID NO: 146506 - protein, 164 aa, Glycine max
  unsure (1)..(164): unsure at all Xaa locations
  Clone ID: PAT_MRT3847_103314C.1.pep
MSMEAQQILSRFCPKPSSVPSIPIVKQQFSPKFPRLPSSSLYPSSQSQNLNVPSGAFHPISIVHKEVCSSSCKRIWCSSSSSSTAEPKEGHEVRAQVTVRRKKLAVFVSGGGSNFRAIHEASKRGSLHGDVLVLVTNKSDCGSAEYARNNGIPXVILYHISKDE

SEQ ID NO: 146507 - protein, 78 aa, Glycine max
  unsure (1)..(78): unsure at all Xaa locations
  Clone ID: PAT_MRT3847_103315C.1.pep
GPTIHFVDEHYDTGRIXLAQRVDTVLANDTEKELAARVLKEEHQLYVEVVEALCEERVVWRQNGVPLIQSKENPNEFR

SEQ ID NO: 146508 - protein, 46 aa, Glycine max
  unsure (1)..(46): unsure at all Xaa locations
  Clone ID: PAT_MRT3847_103316C.1.pep
ESLCTNVRKPDRRTIVVQLVKGLNLYNPCNMFEGPCIESGXYSITK

SEQ ID NO: 146509 - protein, 78 aa, Glycine max
  Clone ID: PAT_MRT3847_103317C.1.pep
EDSVTKKTLREYSRPECSITTFTTFILQVNFVWHLIYYRLKKWAAAEVGQNDYLAISSSRPGCILLEILMYCFFGVLF

SEQ ID NO: 146510 - protein, 196 aa, Glycine max
  unsure (1)..(196): unsure at all Xaa locations
  Clone ID: PAT_MRT3847_103318C.1.pep
NFQEAERLNQSDRHLQDLLCHSVVGIDLNENNGKASXLCETARLLQDLLSQIESLKKENVTLLSESNYMTMEKNELKEENCSLETQIEKFQGQIQARLAQCKPDLNVPPHLELEPLEQTNFPGQNLQLHTIEPNLQQGSAILVVPCNPDLPPSFPAPNVTGVMPKSTSVVSKPHARYPTPADSWPSQLLGKQPTSS

SEQ ID NO: 146511 - protein, 85 aa, Glycine max
  Clone ID: PAT_MRT3847_103319C.1.pep
GQREQVIHGLKNFGLVYRFNASVSDPEKKCLSLQLKDVNPITFYHVLLLMNTRLVNLPNQVFASTIKPVNVPVVHCSHNRNISQG

SEQ ID NO: 146512 - protein, 78 aa, Glycine max
  unsure (1)..(78): unsure at all Xaa locations
  Clone ID: PAT_MRT3847_10331C.1.pep
GKRRQSTKGAPKSKXRAGXXQRRDGENPGXTQXKRRAAQTXXASGXKSEKARTXRXXQQXRNXKGERDAPXSGAKSAA

SEQ ID NO: 146513 - protein, 141 aa, Glycine max
  Clone ID: PAT_MRT3847_103320C.1.pep
DPDPDPTPPSPPRQEPQHSPRQSPPQRERHRRPNPKERQRLQAPASRHLLRLRPQLTLARVKQGRTHLSPIIFPQQCKHVFAWVRKTIEEGNSQRKGLQQDQILCVGCKYFGPLVFCKLSLLEPKMATFLLERYLVTLSHA

SEQ ID NO: 146514 - protein, 49 aa, Glycine max
  unsure (1)..(49): unsure at all Xaa locations
  Clone ID: PAT_MRT3847_103321C.1.pep
WVGERLTARFLYGHPVMFALIFHFTRGGIRKASCGINLSEAXFAGFNSS

SEQ ID NO: 146515 - protein, 66 aa, Glycine max
  Clone ID: PAT_MRT3847_103322C.1.pep
HGSGGGFQPNVPNLEQVIFHKRMAPFHNPKTAEGIDNYKYGFFHQFWFCPKTDSTQYKIPTEMKGC

SEQ ID NO: 146516 - protein, 95 aa, Glycine max
  unsure (1)..(95): unsure at all Xaa locations
  Clone ID: PAT_MRT3847_103323C.1.pep
HVVQITLMAQGNSVSSAXFQNAMVSRNSKPQATAMHVGAIEIIIDSFASPDCNIVGAMLLVDTYHTNPDNAVRSIFVAPFRCGMPIRVVTLSNTI

SEQ ID NO: 146517 - protein, 62 aa, Glycine max
  Clone ID: PAT_MRT3847_103324C.1.pep
CLRSIFYAFLETLIISFFYQGVGNTLKRHYETYLLEYELSHDDVDGECCLMCHSSAAGDWVN

SEQ ID NO: 146518 - protein, 234 aa, Glycine max
  unsure (1)..(234): unsure at all Xaa locations
  Clone ID: PAT_MRT3847_103325C.1.pep
MEQKHVLFSALSVGVGLGVGLGLSTGQAVXKWVVGSCESDEISGEQIVLELNNRVIDGKNSEVTFDKFPYYLSERIRFVLTSTGYVYLKQDFSKHLRNLHPASRAILLSGPAEPYQQNLARALAHYFKSKLLLLDITDFLLEMQRKYGCPRKEPCFQRSISEVTLERVSGLFGSLSVLPSTGRTRGTLHRQSSEIENSSNPPKLRRNASTACDTISTSQYAPFECTSGFCXDEK

SEQ ID NO: 146519 - protein, 88 aa, Glycine max
  Clone ID: PAT_MRT3847_103326C.1.pep
MAHSFISAGILCSRLVNLFYLESKSSTLAIWRPKAMLPLFFSVAFSAVPLILYIPPLRSLNLFVETIEDMARESRIHTNRIYPRLRVA

SEQ ID NO: 146520 - protein, 74 aa, Glycine max
  Clone ID: PAT_MRT3847_103327C.1.pep
GTLKTPFFRFGKNFTSTGQKESPTKGFSLSWQKSFFDNKKKELREIAFLQRRGGVFSTFRNLTITQKLFNFPKS

SEQ ID NO: 146521 - protein, 102 aa, Glycine max
  Clone ID: PAT_MRT3847_103328C.1.pep
GPIIPIPHRIYFSEMKVFYYNECAPPPYQVPPVFINALFRPPTIIFFFTPPFFLLGLDGPKILSLQKKLQILFFRVFGPNAHNDSPASTSFFLSPLFLLRQV

SEQ ID NO: 146522 - protein, 97 aa, Glycine max
  Clone ID: PAT_MRT3847_103329C.1.pep
RTLGITKGGEINKPKDSLFNKNFPCAPKQYLQKPPISFSMEFAAFKHRGEMKWKIFAQKKLWGLYPWCACTKIKKGIIFSINFTSYWGFVTFKIGKI

SEQ ID NO: 146523 - protein, 149 aa, Glycine max
  Clone ID: PAT_MRT3847_10332C.1.pep
MGNCCATPSTDETANKKGKKGKKENPFAIDYGFNAAAAANGSKLTVLKSPTGREIEARYELGRELGRGEFGITYLCTDKETGEELACKSISKKKLRTAIDIDDVRREVEIMRHLPQHPNIVTLKDTYEDDNAVHLVMELCEGGELFDRI

SEQ ID NO: 146524 - protein, 64 aa, Glycine max
  Clone ID: PAT_MRT3847_103330C.1.pep
KEPNFLLKSGKWELGLFFWPKNFFFRPCPKNPSPKENGVATLLPFFKNCFYLGDFRGGFFFPNF

SEQ ID NO: 146525 - protein, 78 aa, Glycine max
  Clone ID: PAT_MRT3847_103331C.1.pep
PLHRSNCVSKVEKTLTVKIFYIGSSIYCSHVFGFGPPFDADHSKTTNIACAFFPCNVILWKNVVQPVSNKLSSGNQIY

SEQ ID NO: 146526 - protein, 69 aa, Glycine max
  Clone ID: PAT_MRT3847_103332C.1.pep
SVIFYSLIIKIISTFVDKYSISLFIIFIVEILYFFSFKTKYLGFIFLIYFSFYNSLLLKGYIHGTRNVA

SEQ ID NO: 146527 - protein, 33 aa, Glycine max
  Clone ID: PAT_MRT3847_103333C.1.pep
VNILSLQVCRVKIDLFRYSQILHPTLIRFTQFC

SEQ ID NO: 146528 - protein, 74 aa, Glycine max
  Clone ID: PAT_MRT3847_103334C.1.pep
FSFFNSFPIHNFFQGFNVLIIKMSIPLLESFFYYFFFLFVNLHTFFSVSIYFLQKPSFIQNFFYLSLNAYFFSI

SEQ ID NO: 146529 - protein, 133 aa, Glycine max
  unsure (1)..(133): unsure at all Xaa locations
  Clone ID: PAT_MRT3847_103335C.1.pep
AHSLTHLLLLPLRTHIRWLPEHVASPTFTKPGTLPRRAYTTFLAGNGVYVKCDDGLAKGXLKAKTGFPGLVADRKDMPKNQRMQRYSLGTVVRVNNAFEDSTYQMEWGMSTSSMKHCEMRLWMLEAITQLNIL

SEQ ID NO: 146530 - protein, 91 aa, Glycine max
  Clone ID: PAT_MRT3847_103336C.1.pep
SLERARKAFGPDEDLFFILGEHPVTVIFFLCNYPMMSIPLLSTKALFCNDFPVMLMLFFFFFFASLCILVATLSLLFIYIPISLYKKKKKD

SEQ ID NO: 146531 - protein, 81 aa, Glycine max
  unsure (1)..(81): unsure at all Xaa locations
  Clone ID: PAT_MRT3847_103337C.1.pep
SLKXQGXKXXGESIKETATNIGASAKAGMEXTKATXQXXAXRMTAXHPVQKELATXXLDAKMNQAXXDKQAAXQXNTXAKQ

SEQ ID NO: 146532 - protein, 53 aa, Glycine max
  Clone ID: PAT_MRT3847_103338C.1.pep
LLLQHHYFIIIPSLNIHQYSPFTPSLSLIKLSLSILINLYLSILTPLTLYFTI

SEQ ID NO: 146533 - protein, 403 aa, Glycine max
  Clone ID: PAT_MRT3847_103339C.1.pep
MASSSLFLSLSLTLCLVSSLCYAHKSSLTLPVTKDDSTHQYLTTLSYGTPVESAKFVLDLGGSILWADCASRTTPSSTLAPIFHRSIRCLTAKGPEIETHRWLSSLANPIDQDQPCQIPAENSISGKRVTEGELVEDLVINRSHELLFTCSPTLLLNGLATGAKGMVGLDRSRTSFSSQVFHSLGTQRKITLCLSSSSGIVQFGNVAHESQPGSEIFRSLTFTPLVANQDQTQTHPSINVNSVKINGKKVSFDTPLGGGAQLSTVVPYTTLQTSIYANFESAYLKAASSMSMKRVDPVSPFGLCFESNGVGSSQVGPNVPVIDLVLQSEMVKWSIHGRNSMVQVNDDVMCLGFVDGGENPRNPIVIGGYQLEDVLVQIDFDTSMVGFSPSLLTKHATCSHFKP

SEQ ID NO: 146534 - protein, 223 aa, Glycine max
  Clone ID: PAT_MRT3847_10333C.1.pep
NSARGHDSIHLPQSSNQETSREKTREELLAEERDYKRRRMSYRGKRTNQSPLQVMRYMIEDFMDQIKQAGDFESHVKMSEKSGLFPSKPPDRDIPMEANNSRKICNNSPTVTISNLRCSEQQSDSNCCDQSKSLEDAFSRDYKQRKHEHHRSHYCREDQQNADQGKYHRDRHSISPERYSSYSRSREHSSHHNKQDYYPNRKKHNSSRIKDGWQKDTHRSHIS

SEQ ID NO: 146535 - protein, 126 aa, Glycine max
  Clone ID: PAT_MRT3847_103340C.1.pep
NFESAYLKTASSMDMKRVDPVSPFGLCFESNGVGSSQVGPNVPIIDLVLQSEMVKWSIYGRNSMVQVSDDVMCLGFVDGGENPRNSIVIGGFQLEDVLVQIDFDTSMVGFSPSLLTKQASCSDFQP

SEQ ID NO: 146536 - protein, 73 aa, Glycine max
  unsure (1)..(73): unsure at all Xaa locations
  Clone ID: PAT_MRT3847_103341C.1.pep
CXXLXFXKEXLXFLLMRTSLLLRSQNCLQGSXDXLXLSPSSIXSQRXVTQTLAXXXSRXAXGSXRXXPLWXGG

SEQ ID NO: 146537 - protein, 78 aa, Glycine max
  Clone ID: PAT_MRT3847_103342C.1.pep
SLSQWKLHTLTDPLQSKTILDIVHTCSLQEDLIYTTISIMHFLKVEPDEILTQCIVRHSYIIYMSTSRHTISLALNTD

SEQ ID NO: 146538 - protein, 62 aa, Glycine max
  Clone ID: PAT_MRT3847_103343C.1.pep
KILIPKHISLHFYFPHQVKCRNHIGIFVSKYSFSFLSGIFGTKCSYVFDSWTTQILLSLDSL

SEQ ID NO: 146539 - protein, 94 aa, Glycine max
  Clone ID: PAT_MRT3847_103344C.1.pep
RTTLSPLACSPYCSNSDAKPSYTTGITGGPFISLQATPGLDLSHKAGFILDQIDHLMQTQPQTFVPHPPPLYKDYFAHYPHLHFWTTHFRFHFA

SEQ ID NO: 146540 - protein, 48 aa, Glycine max
  Clone ID: PAT_MRT3847_103345C.1.pep
LLNLNIDKEKFNSCYLRFRIQLNANNQNNTETNVFSVTILKNPTWLCP

SEQ ID NO: 146541 - protein, 113 aa, Glycine max
  unsure (1)..(113): unsure at all Xaa locations
  Clone ID: PAT_MRT3847_103346C.1.pep
PVNIKKTVFIFIGVESFDLDLKEQKVPVKGNVEPNXVFQTVFKFGKKTAFWVDEAPPFKNKPLKSAPVASKNKPSKTATVASTEPENKPSKTAIVYSTEPENKPSNTVVETVA

SEQ ID NO: 146542 - protein, 75 aa, Glycine max
  Clone ID: PAT_MRT3847_103347C.1.pep
KYHLRIRAPNYIRPFVLKKAFSDGALLLMNMDDEKLPSPMNFDVVKQYYACYWGQFERSLFGCPKDSLRSLCFKL

SEQ ID NO: 146543 - protein, 123 aa, Glycine max
  Clone ID: PAT_MRT3847_103348C.1.pep
GAGAFEVAARQYLMNEVKKTVQGRAQLGVEAFADALLVVPKTLAENSTRPTQDVIIALTGEHDKGNIVGLSLNTGEPIDPAMEGIFDNYSVKRQIINSGPVIVSQLLVVDEVIRAGRNMRKPT

SEQ ID NO: 146544 - protein, 321 aa, Glycine max
  Clone ID: PAT_MRT3847_103349C.1.pep
MELGIRSPVHATLFHHFSNSLLFPARLTLLNTTSSSFMATHLHVSSEEFDPSPSLAIGQHDLLIVGPGILGRLVAHNWRQEYSGCQVFGQTATTNHHRELTEIGINPSLKWTKASLKFPYVIFCAPPYQSSDYLGDLRLAASCWNGEGALLFTSSSAPYDCNDNGLCHEDSPVVPTGRSPRTDVLLKAEKIVLEFGGSVLRLSGLYKVDKGAHAYWLEKGIVESRPDHILNLIHYEDAASLSVAILKKQFRGRIFLGCDNHPLSRQEVMDLVYKSGKFSKKFEKFTGTDDPLGKRLNNSRTRQEVGWEPKYSSFAHFLETI

SEQ ID NO: 146545 - protein, 82 aa, Glycine max
  unsure (1)..(82): unsure at all Xaa locations
  Clone ID: PAT_MRT3847_10334C.1.pep
PHLALERESSYLGTLIDDLITKDLRXPYRMLTTRXEHRVLLRSDTAXDAVFTLLCREIGLINDRLWKLYQDKQALISDENKR

SEQ ID NO: 146546 - protein, 124 aa, Glycine max
  Clone ID: PAT_MRT3847_103350C.1.pep
MTQQPDFSWMVPIEVMLGALYHGQVQACSISSVTDELRSPNEAAFKPKEVSIGPLHRGTTRHVQLMEETKWHYMREFLDRRGTQEQNRRSERRLRECGTDILKLDKIIMACYGGNIRSEPQELA

SEQ ID NO: 146547 - protein, 164 aa, Glycine max
  unsure (1)..(164): unsure at all Xaa locations
  Clone ID: PAT_MRT3847_103351C.1.pep
MFPPEVSPTLQQQSWAMPPVHSFNSNPVHYINNNNTNPVHHHHEQAPFLVPPPTTPSPYASFFSSRRVVPSLQFAYEGPSSHLDHHHHLRIISDTLGPMVQPGSAAPFGLQAELGKMTAQDIMEAKALAASKSHSEAERRRRERIXNHFAKLRSLFXNTTKTDK

SEQ ID NO: 146548 - protein, 70 aa, Glycine max
  Clone ID: PAT_MRT3847_103352C.1.pep
IRLEGHLIRTEMLTSFTIRNSIMANLIMGRLQSSWMRLILHLLIMILVMQILDAHYSFYSSQHAHDAVHI

SEQ ID NO: 146549 - protein, 46 aa, Glycine max
  Clone ID: PAT_MRT3847_103353C.1.pep
NTRLRITNEYTLISKHFNSTDYSLNFTKVFTNLNTTIDSTFSYLCI

SEQ ID NO: 146550 - protein, 90 aa, Glycine max
  unsure (1)..(90): unsure at all Xaa locations
  Clone ID: PAT_MRT3847_103354C.1.pep
MCWLLLRDYLWRRSLEIRNQSNGSSYTDLCXAQLSSRRLHRLSTDEPFWNRIMSSDYPQCQSHTNACSSTSSSKSLYRQRYQFIRLSIPK

SEQ ID NO: 146551 - protein, 46 aa, Glycine max
  Clone ID: PAT_MRT3847_103355C.1.pep
KWWDFFQHYTIFYFGIGLHIILLLTNFRLFQIFNGEFYFIGMVKIG

SEQ ID NO: 146552 - protein, 67 aa, Glycine max
  Clone ID: PAT_MRT3847_103356C.1.pep
HCQRGFDQQWLSLTFSKAIFLGNGLVAILSGLFGNVLVDTLALGLVAPFDAASCFLAIGVAIALGRF

SEQ ID NO: 146553 - protein, 272 aa, Glycine max
  Clone ID: PAT_MRT3847_103357C.1.pep
EFGTRDDFPFNYAFFDGVDNPVNDNGTPYTNVFDANFDTLVAALKSVGFGDLPILVGEVGWPTEGDKNANAGNALRFYNGLLPRLAANRGTPGRPGYIEVYLFGLIDEDAKSIAPGNFERHWGIFRYDGQPKFPMDLSGQNQNKFLIGAQNVKYLAPRWCMFNPDAKDLSKLPDNINYACTFGDCTALGYGSSCNNLDANGNASYAFNMYFQVQNQNPMACNFQGLAKLTTDNISTPTCNFIVQIVNSSASSLMMPSLVAILFVSLFLILFS

SEQ ID NO: 146554 - protein, 115 aa, Glycine max
  Clone ID: PAT_MRT3847_103358C.1.pep
DSSQHYFPLWIYDQFKEEKDVDMEDVSEEDKILTKRMFIVALWCIQLKPGDRPSMNEVVEMLEGKIESLEMPPRPSFYPHEMSEPNAIISSDQTTWSDSSSMDTYHGEPINIGCA

SEQ ID NO: 146555 - protein, 35 aa, Glycine max
  Clone ID: PAT_MRT3847_103359C.1.pep
KNENVKMNVWLHNRVQDTKSFYMGRYLHCIGLRKR

SEQ ID NO: 146556 - protein, 245 aa, Glycine max
  Clone ID: PAT_MRT3847_10335C.1.pep
IYMMPVFSQKGDLRLCRAFNWPWRWRRPKVVMKKPLVDSFVINHGGRYWLFGSDHSGFGTQKNGQLEIWYSNSPLGPWNPHKKNPIYNIDRSLGARNGGRPFKYEGNLYRMGQDCGDTYGRKLRVFKIETLTIDEYKEVEVPLGFVESNKGRNAWNGARYHHLDVQHLPSGGWVGVMDGDHVPSGDSVRRFTVGCASVAVAAILIVLLGVLLGFGNCIVPLNWFIHNSGKRNFTVLSWERPNVFC

SEQ ID NO: 146557 - protein, 77 aa, Glycine max
  Clone ID: PAT_MRT3847_103360C.1.pep
FDKYYLHSFGFQKKNHYTTKFRSSTFNRRQPNSLLHVSDKYKLQKVNALHKGSRCRRRSCSLHLPISLKQHYYIEYL

SEQ ID NO: 146558 - protein, 57 aa, Glycine max
  unsure (1)..(57): unsure at all Xaa locations
  Clone ID: PAT_MRT3847_103361C.1.pep
MLAMSDLVVIRLIRSGFLQRLSFSTLLGRQAGDAELGFGLKTXPRDRGQRTTLRNTT

SEQ ID NO: 146559 - protein, 48 aa, Glycine max
  Clone ID: PAT_MRT3847_103362C.1.pep
ASYMKSLFLFPIPYPSKNIELLSSVSIQYSCQRRSQQFRKPQGHSVIF

SEQ ID NO: 146560 - protein, 76 aa, Glycine max
  unsure (1)..(76): unsure at all Xaa locations
  Clone ID: PAT_MRT3847_103363C.1.pep
MGGEEEIFCLRGADCNIICTHPRLVSALYAAARISADXGDSLAEAAGYQIRLESKRSAXTRLLFCTXGVLLRQQAY

SEQ ID NO: 146561 - protein, 81 aa, Glycine max
  Clone ID: PAT_MRT3847_103364C.1.pep
PSPVMGRSNNFGSVIMSGFHENYMSPYHHQQHRQVHTDALSSIGILSSSSSRNATFPQEPALLSAYRLLQDVASSHMLKED

SEQ ID NO: 146562 - protein, 109 aa, Glycine max
  Clone ID: PAT_MRT3847_103365C.1.pep
MTTPGVLNDYPMDLCLTDIKNGIYGTVEFKMYTFKVTSCSRAYSYDWTEGPFFHPGENARPRDPRQHHYGWLPCPEFRKASCLTGDACEHAHGIIECLAYPDQHRPLFF

SEQ ID NO: 146563 - protein, 507 aa, Glycine max
  Clone ID: PAT_MRT3847_103366C.1.pep
MILILKLGRKLKRTELSLNIPRGPWKLPIIGNLHQLVTSTPHRKLRDLAKIYGPMMHLQLGEIFTIVVSSAEYAEEILKTHDVNFASRPKFLVSEITTYEHTSIAFAPYGEYWRQVRKICAMELLSPKRVNSFRSIREEEFTNLVKMVGSHEGSPINLTEAVHSSVCNIISRAAFGMKCKDKEEFISIIKEGVKVAAGFNIGDLFPSAKWLQHVTGLRSKLEKLFGQIDRILGDIINEHKEAKSKAKEGNGKAEEDLLAVLLKYEEGNASNQGFSLTINNIKAVTSDIFAGGIDAVATAINWAMAEMIRDPRVMKKAQIEVREIFNMKGRVDESCMDELKYLKSVVKETLRLHPPAPLILPRECAQACEINGFHIPVKTKVFINVWAIARDPNYWSEPERFYPERFIDSSIDFKGCNFEYIPFGAGRRICPGSTFGLASVELILAFLLYHFDWKLPNGMKNEDFDMTEEFGVTVARKDDIYLIPVTYNPFLGNGADSREVSSASKEG

SEQ ID NO: 146564 - protein, 87 aa, Glycine max
  unsure (1)..(87): unsure at all Xaa locations
  Clone ID: PAT_MRT3847_103367C.1.pep
CCALCGVPSLCLSSRGGVRAPPVWSRPVLRRFLPGVFRFSVPPFPVFGPSVPACVGFWGRGSGFFVCCRARRGGXCVRLDRERPQAF

SEQ ID NO: 146565 - protein, 42 aa, Glycine max
  Clone ID: PAT_MRT3847_103368C.1.pep
GFILVQFTKISTPSLVAILAMIHMELNNTQCIYSLYVRGSGW

SEQ ID NO: 146566 - protein, 49 aa, Glycine max
  Clone ID: PAT_MRT3847_103369C.1.pep
SRLAGIYCQFIRNKCYGANLWGFDSHSFLLYLTPPPSDRKHEVYDNLTY

SEQ ID NO: 146567 - protein, 58 aa, Glycine max
  Clone ID: PAT_MRT3847_10336C.1.pep
QRRTRRLPRRQPQQPRPPLQSLRLRICHRRRLGRCGRLDDVDPVVVYGLGFYFMIIVI

SEQ ID NO: 146568 - protein, 82 aa, Glycine max
  Clone ID: PAT_MRT3847_103370C.1.pep
NTRPPPPFFFFEGKPIIVLIFPQHQDACSPKKNKKPKKDFFFPLQNGIPTKGGKPPNFREKGGGSPLFPRSQRVQNLNFPPH

SEQ ID NO: 146569 - protein, 133 aa, Glycine max
  unsure (1)..(133): unsure at all Xaa locations
  Clone ID: PAT_MRT3847_103371C.1.pep
SPSRPQKKXKXEGNFFSGNXKFRSRLEKGRSTKAQFICGKTPKYDINGAGSHYSEDFSAKEDLEKPIKSDARLRQRIDPQYNEGHAQMETKLFKNGLGEGGTPKGTMLDLKNFKSKNALSKNTDGGTTLGGEL

SEQ ID NO: 146570 - protein, 175 aa, Glycine max
  Clone ID: PAT_MRT3847_103372C.1.pep
MRGVVCGDGKRVKTSESGKGEGETSSGKLAEQSGKPPSEPAKQDYIHVRARRGQATDSHSLAERARREKISERMKILQDIVPGCNKVIGKALVLDEIINYIQSLQRQVEFLSMKLEAVNSRLAPRIEVFPPKDFDQQTFDTTGMPFASQATREYSRGSSPEWLHMQVGGGYERAT

SEQ ID NO: 146571 - protein, 60 aa, Glycine max
  Clone ID: PAT_MRT3847_103373C.1.pep
KPLFTQFKAKRAKNKAIRKRKLARRKERLAQGPIHNTFSAPSAPVAKAPQFTQAPKKFKN

SEQ ID NO: 146572 - protein, 164 aa, Glycine max
  Clone ID: PAT_MRT3847_103374C.1.pep
FGSRQYTSLCAQPSTLQGDYNPFFLSPFFHSLSHSETAHKFLLFRERQMDPAAIMNGAANTTSFHLSEIWQFPPPNSPDALGLRRPHFAHGSFADFAPGPTRDADPASIAHKKPRHAAGEEEESAKGASTTNAVDEGGGGDGNRIKASESGEGGRKNRSGKPAE

SEQ ID NO: 146573 - protein, 64 aa, Glycine max
  Clone ID: PAT_MRT3847_103375C.1.pep
KKNFYFWGQKGEKFHFKGESFQRKGRQLKRKMGSQNLQIKLLVGGGTPFLIKILGGIACGGFKC

SEQ ID NO: 146574 - protein, 53 aa, Glycine max
  Clone ID: PAT_MRT3847_103376C.1.pep
NIPIANHFFQEISTNIPNAHLFINLQIDPNFQQNGIKPIVTNHQHIFFTYSFF

SEQ ID NO: 146575 - protein, 44 aa, Glycine max
  Clone ID: PAT_MRT3847_103377C.1.pep
RFLQMNSEIYRCLGYKQTMFLLAHIMKNGTGSYNRYHGKEDSSG

SEQ ID NO: 146576 - protein, 41 aa, Glycine max
  Clone ID: PAT_MRT3847_103378C.1.pep
GTFAFYSFRIHQVRLGIRDRDTSRWPLNSKQHGCQLEEKLP

SEQ ID NO: 146577 - protein, 119 aa, Glycine max
  unsure (1)..(119): unsure at all Xaa locations
  Clone ID: PAT_MRT3847_103379C.1.pep
HIRHXIVNLKFVRQILSRRFEHEKHKLQLNTGSKDLSAFAENSAACCSFTPVMLCEKSVFEAWQDTFLPVDYTSLFWDMKLLQKLTSIHLDDLEELHQVMLTTISCLFFNQIFCIAAPW

SEQ ID NO: 146578 - protein, 80 aa, Glycine max
  Clone ID: PAT_MRT3847_10337C.1.pep
AGSSYLDRTVQGPVTQRERTTDTSSSNVLSALAAGDYGGGASTAPFSLHLRIRILIHGTFAWLLSMVPLKLVNVAAMKCN

SEQ ID NO: 146579 - protein, 45 aa, Glycine max
  Clone ID: PAT_MRT3847_103380C.1.pep
IPMHTHMQIKSIIVTIHIRSNCGFTHLILQSHNKLVISLVRMYAI

SEQ ID NO: 146580 - protein, 83 aa, Glycine max
  Clone ID: PAT_MRT3847_103381C.1.pep
AFHPLWLGSTTLRGWLAVYPLQLIPCEAVATGRVCVHHILLLSGLFLLYSILFLHRLLSCWGHLDRFTCDSHYLARFILFVTS

SEQ ID NO: 146581 - protein, 117 aa, Glycine max
  Clone ID: PAT_MRT3847_103382C.1.pep
HRRHGARRHRPAPLPPPAACLSCKSASHGACDGLTTPCKSSQISHMAAVKSPYTTTKRRRYDDTDQKRSAALGRQGHAAGHWGVGGSHPRHLCRRLAPALALSPVLHCYRDLHLDGE

SEQ ID NO: 146582 - protein, 79 aa, Glycine max
  Clone ID: PAT_MRT3847_103383C.1.pep
SYDKEGGFMLAHLEFMFSKYAREVLDKLTLKKLWHMFKGTRVAYDFFGWGASKFNWEVCYVLARDDQGYLSKEDVRGLI

SEQ ID NO: 146583 - protein, 105 aa, Glycine max
  Clone ID: PAT_MRT3847_103384C.1.pep
YDRGVGVPFGRPRGPSRPGGGITHHLTVHPTFMTADPLEDSPHFLLSKLTQSSLTQIHLTTHLLLPLPPEPSDPSQTPRPLTPDRVLASHTLRHSRRSYTRSCLS

SEQ ID NO: 146584 - protein, 44 aa, Glycine max
  Clone ID: PAT_MRT3847_103385C.1.pep
MHWSGSGRSWIRISYNGPGGGESIGAPIYLYAGSFFSRKIFPLI

SEQ ID NO: 146585 - protein, 74 aa, Glycine max
  Clone ID: PAT_MRT3847_103386C.1.pep
PGSGPCAGEVFCYVPRGLLAFLVVSRWAFPRFPFFFFFLFWGFLARFFLPPVLVSGLGALVLVVVGLLNVSLVP

SEQ ID NO: 146586 - protein, 86 aa, Glycine max
  unsure (1)..(86): unsure at all Xaa locations
  Clone ID: PAT_MRT3847_103387C.1.pep
MPPINFSYPFIHSIRFYGILFFAEKFRYCISIHIDHVGIQVGNACWELYCLKHGNHPDGHMPSDNIVSGXYDAFIKFVSETGAGKH

SEQ ID NO: 146587 - protein, 68 aa, Glycine max
  Clone ID: PAT_MRT3847_103388C.1.pep
GSFKPYNFFFWVPCLMGRGVFTKFPFGKTPTSLPLKFTTGRGENLVFKNNLQKSSKLGGSPTTLGGRG

SEQ ID NO: 146588 - protein, 62 aa, Glycine max
  Clone ID: PAT_MRT3847_103389C.1.pep
LSDMIVMPQTPSELKETEDLPESTILTRLQLVSSNGVSTKSKCYTRTCYGGDAEHDSSHVER

SEQ ID NO: 146589 - protein, 43 aa, Glycine max
  Clone ID: PAT_MRT3847_10338C.1.pep
TTHREPQQNLHAYQRSYHALRVGDVPPFISTLLDLEIYPSYVP

SEQ ID NO: 146590 - protein, 100 aa, Glycine max
  unsure (1)..(100): unsure at all Xaa locations
  Clone ID: PAT_MRT3847_103390C.1.pep
SHYLVNRIAIPHTLHSSPFLSFCCELELTLSACXSIISPSVPLAALFAAKAGTKSSQCCLLAGAHKARFPRLVGQVSHVRXQRRTRHCGALHATCIGDKI

SEQ ID NO: 146591 - protein, 152 aa, Glycine max
  Clone ID: PAT_MRT3847_103391C.1.pep
VLASRMGLYSHMYAKVVAFSKVPLPNYRYDRDDRRPQREVSLSITMYTQVNVYFEEYLGQKSRMNKSFSDLSSARSSSNGSIGTDEGLFELPEPLASSNAYMEKILRQRSLQMRDQQQAWQESPERRKMLEFRRSLPAYKRKKQYYQSYQGN

SEQ ID NO: 146592 - protein, 38 aa, Glycine max
  Clone ID: PAT_MRT3847_103392C.1.pep
STFIPNLHGKFLATENYFYTSKVLFCMLNICSSYCNLV

SEQ ID NO: 146593 - protein, 144 aa, Glycine max
  unsure (1)..(144): unsure at all Xaa locations
  Clone ID: PAT_MRT3847_103393C.1.pep
ENPGGEDRKTRNDPRPRNKNRPKPHQEGGAQKNDARATRPTRKRGGGKADAEEQGPXPTRRAHPRHPEHPEKGRAKKADPPENGTTADEEAAPPETGNREQRVREQHPGQSQELLQKFREKNXDPAAHNGQEETGPPTANPTGN

SEQ ID NO: 146594 - protein, 122 aa, Glycine max
  unsure (1)..(122): unsure at all Xaa locations
  Clone ID: PAT_MRT3847_103394C.1.pep
RSQAAPTYYYWSSQSXWVVPAEVHKVAGGLGWITGVDHELCLRVRVLKEDTWVRVYVQRVGIQEDACQLGWSVLPCTVQGSVDMGVMGNSTFRTLVRGIRSAPSFRIVSAILGRYSPVSAIG

SEQ ID NO: 146595 - protein, 73 aa, Glycine max
  Clone ID: PAT_MRT3847_103395C.1.pep
TLFSRKDSFITHRAFCDALAEESSRLTSVASTSLNFMSEDTTMMNTQASLSSSGLINGQGMQSVSILVHMGFV

SEQ ID NO: 146596 - protein, 183 aa, Glycine max
  Clone ID: PAT_MRT3847_103396C.1.pep
GSNKEVRKKVYICPEKTCVHHDAARALGDLTGIKKHYSRKHGEKKWKCEKCSKKYAVQSDWKAHTKTCGTREYKCDCGNLFSRKDSFITHRAFCDALADESSRLTSVASTSLNFKSEDATMINTQASLSTRGLITDHGMQNVSQFGPHGFRLMNMGTDQQRPNLSLWLNQGDHHINNPLDVAL

SEQ ID NO: 146597 - protein, 125 aa, Glycine max
  Clone ID: PAT_MRT3847_103397C.1.pep
MAHKRFIIEVERANEATDGRPSRGPVYRSLFAKDGFPAPIQGLECCWDLFRLSVEKYPSNPMLGRQEIEDGKPGKYKWLTYKEVYDQVMNDGNSIRSCGYGKGVKSGIYGANSAEWIMSMLVPGL

SEQ ID NO: 146598 - protein, 155 aa, Glycine max
  unsure (1)..(155): unsure at all Xaa locations
  Clone ID: PAT_MRT3847_103398C.1.pep
MSQTKKLTPNLDQQSTKVLNLTVLQRIDPYIDEILFTAAHVSFYDFNIESNQWSRKDVEGSLFVVKRNSQPRFQFIVMNRRNTDNLVENLLDFEYELKKPYLLYRNAAQEVNGIWFYNPDECEEVANLFNRILNAYPKTPSTTIPXVNISESEEL

SEQ ID NO: 146599 - protein, 132 aa, Glycine max
  unsure (1)..(132): unsure at all Xaa locations
  Clone ID: PAT_MRT3847_103399C.1.pep
MSQTKKLTPNLDQQSTKVLNLTVLQRIDPFIEEILFTAAHVSFYDFNIESNQWSRKDVEGSLFVVKRNSQPRFQFIVMNRRNTDNLVENLLDFEYELKRPYLLYRNAAQEXNGIWFSIQXECEEIANLFYRI

SEQ ID NO: 146600 - protein, 268 aa, Glycine max
  Clone ID: PAT_MRT3847_10339C.1.pep
NESNVIGSSMSPNNVESGTTDDTEVVGQQQRHSPIHDIALQIQTQAPVETHGLYQTNDVHTRPMGMAVIDAILPPQNPSSLMSFKEAVVSNARRIPLKTLVTLLLVCVGIMDHLAKELSIQFLLELINSHAATQAPLSLGEAFQGFRTVIAYEMAIMLVFLLALLLSCPQPLCGMVMVTISFLGLFVHIPDLVGKAPGIAVTSGFFRMPLICFTTIVAFVLTLVFVFLAVFFAYLTYGCARGAGISTGGELEVAMQDSLGNVEKGGVN

SEQ ID NO: 146601 - protein, 235 aa, Glycine max
  unsure (1)..(235): unsure at all Xaa locations
  Clone ID: PAT_MRT3847_1033C.1.pep
MAFQHYISRDLKTIPNAATETENSNGCFDCNICLDFAHEPVVTLCGHLYCWPCIYKWLHVQSDSLAPDEHPQCPVCKADISNSTMVPLYGRGHAATTAEGKTASCDVFIPPRPSASCAQALLATSSQRGQHLPYRNPYQGHYFSSHPYQEEDDATSQMLQSWIPSPPCDWGCLGEMVYAXGVFGNPENLYAYPNSYQLMGSATPRLRRQEMQAHKSLNRISIFLFCCFLLCLVVF

SEQ ID NO: 146602 - protein, 82 aa, Glycine max
  Clone ID: PAT_MRT3847_103400C.1.pep
VLKKLGGKFIPQMIGKEIEKAPFSVYPLQKGFLRKVKTPKAPKFDLGKLMEGPGDSSKNVGAQGDTPPHEPLAEEPPQVVGA

SEQ ID NO: 146603 - protein, 383 aa, Glycine max
  unsure (1)..(383): unsure at all Xaa locations
  Clone ID: PAT_MRT3847_103401C.1.pep
MSQTKKLTPNLDQQSTKVLNLTVLQRIDPFMDEILFTAAHVSFYDFNIESNQWVRTFLSFSSLLPTFFSHLLFYSFXSRKDVEGSLFVVKRNSQPRFQFIVMIRRNTDNLVENLLDFEYELKKPXLLYRNATQEVNGIWFYNPDECEEVANLFNRILNAYPKTAPTTVLPVNISESEELQPVSIIPESPLESSSATASAIDAVEDPAITNFFSTLKVTGNYASNMENFRQHSATVTSAPSGLFSTAPAVQIPSASHSTSSISGFPLDSLETAKSGNQIINLVKPSTFFASTSSSSLLVPPISSSVQPSAAVQHSLNLPRQYGTPVLQPFPPPNPPLSLTPISSSTPNRPVFSRDNVRDALLSLVQEDQFIDMMFQALLKVSHS

SEQ ID NO: 146604 - protein, 93 aa, Glycine max
  Clone ID: PAT_MRT3847_103402C.1.pep
HSYYCGTAQYRLRTKTLCLLVKTWLCLPCRPLSVRVPLSSSGWVATNKASYAPQSYLLAVWGFNSMHHELHINLRGTGAYVWVIMVIPSALTT

SEQ ID NO: 146605 - protein, 37 aa, Glycine max
  Clone ID: PAT_MRT3847_103403C.1.pep
SLDKHLKLKNFWKNPWEKPYERGWFPLKNPPKDLNPK

SEQ ID NO: 146606 - protein, 94 aa, Glycine max
  Clone ID: PAT_MRT3847_103404C.1.pep
GGSDAGGTNLEDDDDTNLGLHHRCERLLFSGGVEGTRPSTRSDEGEGMSLYIIIINVAVAKNTTNCKGKPSKSIMLMVLTSIDGNDLIDALFHS

SEQ ID NO: 146607 - protein, 85 aa, Glycine max
  Clone ID: PAT_MRT3847_103405C.1.pep
KHKLFYRPTLLSKKKIPANFLKGKKHRLGHLTVFARFTIKTYSLTTLFLNKKKIWIKKNHSEPPIIIFKTPPPPPTLRPLPTNFF

SEQ ID NO: 146608 - protein, 167 aa, Glycine max
  unsure (1)..(167): unsure at all Xaa locations
  Clone ID: PAT_MRT3847_103406C.1.pep
HEDIQSGVAHLKKALHMFPNCSLIRNLLGYLMVSSKELNNCHVATRCCKLDHLDLSDQKGFKSASDIHGAGAVACYTTGNSIPKFTFPTCTKQCSNHPGAIRHLQKCFHQKPWNHDSRYLLVLNYLQRAREQRFPHHLCRILNRLTHAALSNDXYSRTEMLYRYRYF

SEQ ID NO: 146609 - protein, 67 aa, Glycine max
  Clone ID: PAT_MRT3847_103407C.1.pep
HSRHIWAGSFRAEWICYLPLLFILRLILSSLSWSLLKGRVESLPSSPYCSPPPPPPPPPPPPPPPPP

SEQ ID NO: 146610 - protein, 198 aa, Glycine max
  Clone ID: PAT_MRT3847_103408C.1.pep
MTNLQIQTEEPPLSQTPLLISIQQQLENENEGNHHHNNNYNENKKDQDVQVDGEIVEESLVRLERFLTLLGFNQDSPLSLVVSWSVFAAVGVVTPLVALSMCECPECDRYEIQSFEMAIVAFQASLAAVSLLCLSHNLRKYGLRRFLFVDRYSGKLHCFHRDYVAQISVSLRMLFLWVLPCFILKTVREIIRFQVIPI

SEQ ID NO: 146611 - protein, 213 aa, Glycine max
  unsure (1)..(213): unsure at all Xaa locations
  Clone ID: PAT_MRT3847_103409C.1.pep
HASGNSNNNNNNNVNKKNEDVQVDADGEIEEDQSKVEASLVRLDRFLTVLGFNQDSPLSFVVSWSVFAAVGVVAPLLALSMCDCPECDRYEIQSFEMAIVAFQASLAAVSLLCLSHNLRKYGLRRFLFVDRYSGKMHCFHRDYVARISGSMRMLFLWVLPCFILKTVREIIRIFYVQHGSWWLSLAILSAXIISWTYMSTISLSACILFHLVC

SEQ ID NO: 146612 - protein, 76 aa, Glycine max
  Clone ID: PAT_MRT3847_10340C.1.pep
PWVSTGALCLYLQGNIMYWTMTLLLSYYLCIIRCPRFHVVGRHLQVLKNIACVSVDHYSEDSNIKSKASENYKREN

SEQ ID NO: 146613 - protein, 67 aa, Glycine max
  Clone ID: PAT_MRT3847_103410C.1.pep
KVTWLLTWSIDVMVIAHETGCFCGCKMVGILGDWGVDFVVLMWVRAIDMFYSGPCYAAVIQTLLWEG

SEQ ID NO: 146614 - protein, 61 aa, Glycine max
  Clone ID: PAT_MRT3847_103411C.1.pep
PFYSASISKEQLDAVLLINLHANNWAVLSVFGKGRARYHSLLLECHRLVNVLQTPFKCSHQ

SEQ ID NO: 146615 - protein, 49 aa, Glycine max
  Clone ID: PAT_MRT3847_103412C.1.pep
FCHVWSSHGRVSYRRDTGCLANGDSARWVFLPNEDTIRRMPGQRNLRVR

SEQ ID NO: 146616 - protein, 272 aa, Glycine max
  Clone ID: PAT_MRT3847_103413C.1.pep
MAERGGGDRAGFGRGFGGRGRGGDRGRGRRRAGGRRDEEEKWVPVTKLGRLVKEGKIRSLEQIYLHSLPIKEHQIIDTLVGPTLKDEVMKIMPVQKQTRAGQRTRFKAFVVVGDNNGHVGLGVKCSKEVATAIRGAIILAKLSVIPVRRGYWGNKIGKPHTVPCKVTGKCGSVTVRMVPAPRGSGIVAARVPKKVLQFAGIDDVFTSSRGSTKTLGNFVKATFDCLLKTYGFLTPEFWKETRFSKSPFQEYTDLLAKPTGKALILEEERVEA

SEQ ID NO: 146617 - protein, 49 aa, Glycine max
  Clone ID: PAT_MRT3847_103414C.1.pep
SFFYVGGSSSRIDSVSRVEGNFNFIFLWIVRIYGMVPEHPNKTKLRGSI

SEQ ID NO: 146618 - protein, 106 aa, Glycine max
  Clone ID: PAT_MRT3847_103415C.1.pep
SASREVMIPCIETTDGPELDDPLKDTKDEVLMQNQAAKEEWHGFIDYDGTKESIEEDKFISDVQVSEPDPHENAMHNEHSTWMSCSTLKPNVPRKKRKISASKRFC

SEQ ID NO: 146619 - protein, 122 aa, Glycine max
  unsure (1)..(122): unsure at all Xaa locations
  Clone ID: PAT_MRT3847_103416C.1.pep
KALFPFYVFKMMEEGNLKRVLVPKIIFFXKNKRVGAAFKVAFWGKQNKVSLGPPMTKEAQMLDGLCPDPDPPPLSQWGAYSAFMKLGRGEAFSWGRGSFFSKGPMSWVQFSGPRWAQVQVAK

SEQ ID NO: 146620 - protein, 75 aa, Glycine max
  unsure (1)..(75): unsure at all Xaa locations
  Clone ID: PAT_MRT3847_103417C.1.pep
FPLESLCHHRGSRFTQIRXXXSXPGLXSIRPXVXSXLXNPXRSTXKSQYRIRLXDKXXXXXXYGXXXRQLLXYVR

SEQ ID NO: 146621 - protein, 73 aa, Glycine max
  Clone ID: PAT_MRT3847_103418C.1.pep
NPVDWEILVVTKLNPFAVCTIFANCRTNGTSHHGGPLKTVVEPALQRGLTLFGCIIYPHCDGYTRQFLITCHF

SEQ ID NO: 146622 - protein, 69 aa, Glycine max
  Clone ID: PAT_MRT3847_103419C.1.pep
SMHSSSTTTSMKSDHSSNGEKSKLQDSQPHQQQFQIIALASHYYNIKKTDELLFYWCNLSYSFDGGLVI

SEQ ID NO: 146623 - protein, 450 aa, Glycine max
  Clone ID: PAT_MRT3847_10341C.1.pep
MREIISIHIGQAGIQVGNSCWELYCLEHGIQPDGMMPSDSSFGVAHDAFNTFFSETGSGKHVPRAVFVDLEPTVIDEVRCGTYRQLFHPEQLISGKEDAANNFARGHYTVGKEIVDLCLDRVRKLADNCTGLQGFLVFNAVGGGTGSGLGSLLLERLSVDYGKKSKLGFTIYPSPQVSTAVVEPYNSVLSTHSLLEHTDVAVLLDNEAIYDICRRSLDIERPTYTNLNRLISQIISSLTTSLRFDGAINVDITEFQTNLVPYPRIHFMLSSYAPVISAAKAYHEQLSVPEITNAVFEPASMMAKCDPRHGKYMACCLMYRGDVVPKDVNAAVATIKTKRTVQFVDWCPTGFKCGINYQPPSVVPGGDLAKVQRAVCMISNNTAVAEVFSRIDHKFDLMYAKRAFVHWYVGEGMEEGEFSEAREDLAALEKDYEEVGAEGAEDDEEGEDYS

SEQ ID NO: 146624 - protein, 106 aa, Glycine max
  unsure (1)..(106): unsure at all Xaa locations
  Clone ID: PAT_MRT3847_103420C.1.pep
MKMKVLVILPSTILVXCQCHAYNXFTLTMNTCYTLLTLQVKCAAHTLAFQLYYXFGFETIIAHFEIKTNLYMHGNQYISYSKAFQXPFYFYAKYLTFHPDVTLTFS

SEQ ID NO: 146625 - protein, 55 aa, Glycine max
  unsure (1)..(55): unsure at all Xaa locations
  Clone ID: PAT_MRT3847_103421C.1.pep
XSXGTTXRISVLVQTPQVHSRPYEKVLSGECXNHGRNTHIANNSTALEAMMLVTD

SEQ ID NO: 146626 - protein, 69 aa, Glycine max
  Clone ID: PAT_MRT3847_103422C.1.pep
RCLGIWLHHGALIDLLHSWSEMVFPALVLFSICTFKDVHAPFVLQPWMDAHRVVLKKLQFLSFCPKKKV

SEQ ID NO: 146627 - protein, 130 aa, Glycine max
  unsure (1)..(130): unsure at all Xaa locations
  Clone ID: PAT_MRT3847_103423C.1.pep
AYDQEALQLANDLMVKRDKEKLELEKEVEIYTKKVHEYEVREMAMSRRESHMRSRTAPSCSNALDSDELSIDLSRDLKEKNGNYTHQDFSNQNAYEDAVLYLEESLENFEEERXLILKQLNMLEEKLCYI

SEQ ID NO: 146628 - protein, 60 aa, Glycine max
  unsure (1)..(60): unsure at all Xaa locations
  Clone ID: PAT_MRT3847_103424C.1.pep
IXXKPFQXXQMDPXVLSLLGLXVXTLQPGVXHARILRERRSSLKYSXLLKVTYTKLXXCX

SEQ ID NO: 146629 - protein, 251 aa, Glycine max
  Clone ID: PAT_MRT3847_103425C.1.pep
MTQNSILNHSRALEGVHGVQVAPNSPFDLTETNQSGDFRTSTGGASTTEANQLLLMQRLWQQRPACLRPIHCGISCHGDQTLAETVANVLTSIPFIALGIHAPRKNLNSKLYANSLIGVGVASSIYHSSRGRLRKFLRWVDYTMIATTTICLSMALRNENPKLLMAASAICLPVNPMMVSVIHTGMMEVAFARRALKDPDLRMAHTVHKTSSLLGGMLFVADDLFPKTPYLHAAWHLAAAVGVGTCNKLLE

SEQ ID NO: 146630 - protein, 174 aa, Glycine max
  unsure (1)..(174): unsure at all Xaa locations
  Clone ID: PAT_MRT3847_103426C.1.pep
XIRKXGYXVXXGHPCXGVXFSXSXTGXXXHANCHYXGLTLFTAQVSXXDMXXSSHXCDVPHVXXAXSQLIDIDXXXFLNLLTEXXXTQGXPXSYLLNXDSAYTVLXDXXXEXLGTLXXSXMSAXGXXXICXRXDXGPKFLNCWLFSFMRQLYIVCMDPVKTDPSYFIPGCYQTV

SEQ ID NO: 146631 - protein, 67 aa, Glycine max
  Clone ID: PAT_MRT3847_103427C.1.pep
NLLITIQLGNRLIRSESKIMFSSKCKPMRENVIKCTANISQKDLKLLVLLHEMQECNAFYIYMKTLM

SEQ ID NO: 146632 - protein, 75 aa, Glycine max
  Clone ID: PAT_MRT3847_103428C.1.pep
GKSYGICNVMTHFKQTWSLYLLLIKSFLLKRPILLFLDGFQSWRLTIYLLINALKLKIKSRNELKQVSNTEVCGT

SEQ ID NO: 146633 - protein, 119 aa, Glycine max
  Clone ID: PAT_MRT3847_103429C.1.pep
NIIVDIEYFKEALSKVDSQMKNLPATAQVAAQQGVYLADCFNRMEECEKYPEGPLRFRGVGRHRFRPFRYRHLGQFAPLGGEQTAAQLPGDWISIGQSTQWLWYSVYTSKQVSWRTRFL

SEQ ID NO: 146634 - protein, 85 aa, Glycine max
  unsure (1)..(85): unsure at all Xaa locations
  Clone ID: PAT_MRT3847_10342C.1.pep
ERMAXRAGFNAPRLXXXXLDLLSXXXNXGIQSPXLTIPPGLSPXTLLDSPVXLXNSLAQXXXTTGKFLVMXNGXMRHSELSSDAE

SEQ ID NO: 146635 - protein, 154 aa, Glycine max
  unsure (1)..(154): unsure at all Xaa locations
  Clone ID: PAT_MRT3847_103430C.1.pep
HSVRPLLHKTLWHVQDRTLLHLRSRSSSHQNLHIVTYIGRFLSVFQGPLPYILETGYVGSGXKLNLMSSHXLFYYFMDPYIHPIGNPLLLWLTGGPGCSAFSGPVFDKGSLAFLNEEYYESLPRTTVKPQSWTDVTAITCVDLPEATGSSYPKT

SEQ ID NO: 146636 - protein, 82 aa, Glycine max
  unsure (1)..(82): unsure at all Xaa locations
  Clone ID: PAT_MRT3847_103431C.1.pep
PQRANRDFRCRDLCLIVDIAGHKSLVLAYSSRAGSRVTCVGIHGEGHLDQTHGCSLDDKQIDSSCGLTXVAQPMTDHGMDTH

SEQ ID NO: 146637 - protein, 89 aa, Glycine max
  unsure (1)..(89): unsure at all Xaa locations
  Clone ID: PAT_MRT3847_103432C.1.pep
RSNTSLDTLVVHIHTSSTQDADALEQAFKGWGXDDKAIIPVLGHSNVHQRQCIRKAYQEIYXNRISASTFXSDISGDFAKSIYRWMLQP

SEQ ID NO: 146638 - protein, 768 aa, Glycine max
  Clone ID: PAT_MRT3847_103433C.1.pep
MAAVSEIGNKTLVSMMTIVTQIMDACLKPLGQSSLVSQILGGRCCLAPQCWGTKTSGANLFPVKGAVVLETVASFGLYTEKLAITVGISVFAFTLVIPTGLAILLRKYATMDSSLAQALPFMALSQTLTVFISIAVLLKDLKVLNTDMGRLTMSAAMFADIAGFTLTVIIFAVLQNQSGSFLTLAGLLLSVVALFLAVIFVMRPAILWTVKYSGGGSVNESCVVCIFLLVLLSAFISELIGQHFIMGPIILGLAVPEGPPIGTALLSKLETICMGFLYPIYLAVNGLQTDIFKIDLQSLWIVGLILMVAFVVKIGAVMLPGYFYNLPMKQCCVIGLLLNGRGIAELTMYNMWIGSKLISEQEFALMVASIVVVNAILAPIVKYTYDPSEQYQTGRRCTIQHTGRDMELRVMVCIHNNENLPTILNLLEASYASRESKIGVTALVLVELQGRARPILVDNQNQLHDELRSMSCNASHIENALRQYGQQNEGYVSVQSFTSISTFETMYDDICRISLESGSNILILPFHKRWEIDGTVEISHRTIQTMNINVLQRAPCSVGILVDRSILNPSPSLLMARAAFYVVVFFIGGQDDMETLAYATRMARHECVYVTVVRFLLFGEENSKDRKRDSDLIDEYRYYNARNRRFEILEELVKDGIEMSTCIRRLIDYFDLVMVGREHPESVIFQGHDEWSECQELGIIGDMLASPDFVTKASLLVVQQQRIRGRLVTHNVNATPVPNQRDQLVHDVPIHETFSPSCTISVDKYDKM

SEQ ID NO: 146639 - protein, 785 aa, Glycine max
  Clone ID: PAT_MRT3847_103434C.1.pep
MAAVSEIGNKTLVSMMTIVTQIMDACLKPLGQSSLVSQILGGVLFGPSMLGNKNILGQTLFPVKGAVVLETVASFGLMFFFFIWCVKMDVATLMKTEKLAITVGISVFAFTLVIPTGLAILLRKYATMDSSLAQALPFMALSQTLTVFISIAVLLKDLKVLNTDMGRLTMSAAMFADIAGFTLTVIIFAVLQNQSGSFLTLAGLLLSVVALFLAVIFVMRPAILWTVKYSGGGSVNESCVVCIFLLVLLSAFISELIGQHFIMGPIILGLAVPEGPPIGTALLSKLETICMGFLYPIYLAVNGLQTDIFKIDLQSLWIVGLILMVAFVVKICAVMLPGYFYNLPMKQCCVIGLLLNGRGIAELTMYNMWIGSKLISEQEFALMVASIVVVNAILAPIVKYTYDPSEQYQTGRRCTIQHTGRDMELRVMVCIHNNENLPTILNLLEASYASRESKIGVTALVLVELQGRARPILVDNQNQLHDELRSMSCNASHIENALRQYGQQNEGYVSVQSFTSISTFETMYDDICRISLESGSNILILPFHKRWEIDGTVEISHRTIQTMNINVLQRAPCSVGILVDRSILNPSPSLLMARAAFYVVVFFIGGQDDMETLAYATRMARHECVYVTVVRFLLFGEENSKDRKRDSDLIDEYRYYNARNRRFEILEELVKDGIEMSTCIRRLIDYFDLVMVGREHPESVIFQGHDEWSECQELGIIGDMLASPDFVTKASLLVVQQQRIRGRLVTHNVNATPVPNQRDQLLHDVPIHETFSPSCTISVDKYDKM

SEQ ID NO: 146640 - protein, 72 aa, Glycine max
  Clone ID: PAT_MRT3847_103435C.1.pep
KRAIKTDRSRVIQNTRPTYDHPSTSTSKSTTHDASIYLCGYYSTGVSIYFHYLTLDIYTYILANSPKYKDAV

SEQ ID NO: 146641 - protein, 139 aa, Glycine max
  unsure (1)..(139): unsure at all Xaa locations
  Clone ID: PAT_MRT3847_103436C.1.pep
GLHGVGVLGLHSSTRVPLETDSNVSSTVTCHKCGDQFNKWEAAEAHHLSKHAVTELVEGDSSRKIVEIICRTSWLKSEKQCGRIERVLKVHNMQKTLARFEEYXRELVKIKASKLPKKHARCLADGNELLRFYGNHCAC

SEQ ID NO: 146642 - protein, 101 aa, Glycine max
  Clone ID: PAT_MRT3847_103437C.1.pep
TKELFFTKHQEIMGILGAKTHFLCALIFFLMLLANDNCVCATRPNFQSMEQENNKKGASVMLMDSGKSSNFPLAKGIIPPSGPSHFHNLHYPGRPFNNKSH

SEQ ID NO: 146643 - protein, 164 aa, Glycine max
  unsure (1)..(164): unsure at all Xaa locations
  Clone ID: PAT_MRT3847_103438C.1.pep
MMSSPANLNTGGEEKKLEIEKVVESQVEVADTESKRIQPWKEQITVRGLVVSTVLGIIYSIIAMKLNLSAGIVPNFNVSAALLAFLFVRSWNKVLHKAGFISKPFTRPENTIIQTCVVSCYSXLNTWTNELLGVGTERNNPRVVRDPGYAWMTAFLLRSWICLD

SEQ ID NO: 146644 - protein, 131 aa, Glycine max
  Clone ID: PAT_MRT3847_103439C.1.pep
QTKLMKSVAGSLKLYLAQYREVAAFAQFGSDLNASLRYLLNRGSRLTKLLKQPQYNLMPTEVMAPLIYAGVNGMLDNVPVDKIGAWERSFTEQLKSTHSAFLEKLTGGVLTKEIEEEMKKIIGAHVSDFSA

SEQ ID NO: 146645 - protein, 449 aa, Glycine max
  Clone ID: PAT_MRT3847_10343C.1.pep
MREIISIHIGQAGIQVGNSCWELYCLEHGIQPDGMMPSDSTFGVAHDAFNTFFSETGSGKHVPRAVFVDLEPTVIDEVRCGTYRQLFHPEQLISGKEDAANNFARGHYTVGKEIVDLCLDRVRKLADNCTGLQGFLVFNAVGGGTGSGLGSLLLERLSVDYGKKSKLGFTIYPSPQVSTAVVEPYNSVLSTHSLLEHTDVAVLLDNEAIYDICRRSLDIERPTYTNLNRLISQIISSLTTSLRFDGAINVDITEFQTNLVPYPRIHFMLSSYAPVISAAKAYHEQLSVPEITNAVFEPASMMAKCDPRHGKYMACCLMYRGDVVPKDVNAAVATIKTKRTVQFVDWCPTGFKCGINYQPPSVVPGGDLAKVQRAVCMISNNTAVAEVFSRIDHKFDLMYAKRAFVHWYVGEGMEEGEFSEAREDLAALEKDYEEVGAEGAEDDEEGEDY

SEQ ID NO: 146646 - protein, 160 aa, Glycine max
  unsure (1)..(160): unsure at all Xaa locations
  Clone ID: PAT_MRT3847_103440C.1.pep
MRTELKKRPICSQDIQVLFGEILAIEFCLFGKMMMEGVVCRMFVGTWNVGGKSPNEGLNLRNWLMLPSPADIYVIGFQEIIPLNAGNVLGPEDSGPASTWLNLIHQALNSNTSSSGENSPTSSXSVEGNANEQHYYCLAASKQMVGIFLCVWVRADLTSM

SEQ ID NO: 146647 - protein, 162 aa, Glycine max
  unsure (1)..(162): unsure at all Xaa locations
  Clone ID: PAT_MRT3847_103441C.1.pep
PLPKAPREAKYLLVVIDYFTKWIKARPLWEITANEVENFTXKHLICSYGLPYAIVVDNDTQFEAXLLNXFLTRIGIKHLVTFVEHPQTNGWVETTNRVILRALHSRLNKSMGLWKEDLTILLWAYHYAPXTTTNETPYQLTYDINAMILVEVRESSTRRLLF

SEQ ID NO: 146648 - protein, 36 aa, Glycine max
  Clone ID: PAT_MRT3847_103442C.1.pep
CFKTKHRPKSGCFPDWLINTPKPNHALFVKFNSFRR

SEQ ID NO: 146649 - protein, 146 aa, Glycine max
  Clone ID: PAT_MRT3847_103443C.1.pep
PSTETAFPHRPGNLWKIQYQANWFEAGKEVAKYHINLVRELHKYMTPFVSQNPRQAFICYKDLELGINHHGYYGYFEGSAYGVQYFDDNFRRLVQIKTRVDPSNFFRTEQSIPVHSHVEFFRMVTEKSLVSVLFGLFALNWIRNLK

SEQ ID NO: 146650 - protein, 81 aa, Glycine max
  Clone ID: PAT_MRT3847_103444C.1.pep
PVYSVTHNKCRWPDITLHRIARPLPIPVTWRNINCRFYELASKESRRDQILHPYISLLGQGKATVQRALIIATGLPLAVRT

SEQ ID NO: 146651 - protein, 578 aa, Glycine max
  unsure (1)..(578): unsure at all Xaa locations
  Clone ID: PAT_MRT3847_103445C.1.pep
MDTRTLLLKLLITLVALSGCSSSASDHLVNVSKLEKFVDELPHMPKILGYHLSDGVPKSKSLKIGMFKKKWKFHRDLAPATVYAFGTTKHTATVPGPTIEAIYGVDTHVRWQNHLPPKHILPWDPTIPTAMTNSTRGIPTVVHLHGGIHAPESDGNANAWFTSKYNERGPTWTKKAYHYPNNQQPGNLWYHDHAIWITKXDNCRDGLLGAXSVRHSHIEDTLCLXPSGNYIRSNAGSSFDRSFRMYXSLFKSSNGNNPKIHPQWQPEYFGDAIIVNGKAWPRLTVRRRKYRFRIINASNARFFRFFFTNGLRFTHVASDSAYIEKPVTTNETLVGPSEITDIVVDFSQSKSNLAILANDAKYPYPAGDPVNEANGKVIKFIIVPDQEVDTSRVPKRLLEYPVVDLSSVAHTRYVAMYEYASDIDEPTHLYLNAKPYEAAATETPKVGSTEVWYVINLTEDNHPLHIHLGLFKVLDQTALVKPDDEFRECMKKINDAVKCHVDKYARGKKIEVPAHEKGWKNVFKMIPGHVTKIAVRFSYIHTNASYVFDATTEPGYVYHCHVLDHEDNAMMRPLKIIK

SEQ ID NO: 146652 - protein, 53 aa, Glycine max
  Clone ID: PAT_MRT3847_103446C.1.pep
YYSWPSSFTCELPRCYFPPSRDHLMYLFSTCIRTRLRPAPWVGYGLVLHRHTL

SEQ ID NO: 146653 - protein, 114 aa, Glycine max
  unsure (1)..(114): unsure at all Xaa locations
  Clone ID: PAT_MRT3847_103447C.1.pep
KVCLKEEDXVXXMXRXDXXXVLILFXEVXXYXXXKIDWXELVKKXXIEIXXXREYXMXWXXLEYXNFLXEIXEDGDEXLXXXXDDDSXXECEXEXFXXVSVECXXEXXXCVKVM

SEQ ID NO: 146654 - protein, 93 aa, Glycine max
  unsure (1)..(93): unsure at all Xaa locations
  Clone ID: PAT_MRT3847_103448C.1.pep
ENKNPFSPQSPXGHSTPATVSLSYLLFVCFAHTYPPFFFCINKKLKTQTIFFFFSQSKNTHKSTFVFHRLLHTLLHLSPTEIYTTPSHQSVQV

SEQ ID NO: 146655 - protein, 113 aa, Glycine max
  unsure (1)..(113): unsure at all Xaa locations
  Clone ID: PAT_MRT3847_103449C.1.pep
MGLDVESCLKRRKKMHTVLWGGAVFVTTMNICWYSSDAYKHVLALQTGLLCNXFXSWIINASVRLWQPIVEEIYRQELRDDHSEYDRESYNSNFSGFQAQTLTTPLVVTTSIV

SEQ ID NO: 146656 - protein, 162 aa, Glycine max
  Clone ID: PAT_MRT3847_10344C.1.pep
NCINLIKIHDSVGFLGNLEELTTIGCTSLKIIPSAFKLASLRELSFSECLRLVRFPEILCEIENLKYLNLWQTAIEELPFSIGNLRGLESLNLMECARLDKLPSSIFALPRLQEIQADSCRGFDISIECEDHGQPRLSASPNIVHLYLSSCNLTTEHLVICL

SEQ ID NO: 146657 - protein, 48 aa, Glycine max
  Clone ID: PAT_MRT3847_103450C.1.pep
DSFTIISWHKGSLKVKKIGASCNYMSAYVTKTVKPICIRLCNSKFITI

SEQ ID NO: 146658 - protein, 167 aa, Glycine max
  Clone ID: PAT_MRT3847_103451C.1.pep
RFHNSHSTEILPANKRSNLIFYLRLSPLLILSFPSRENIDKPLVLKEIRKLWEKAEPDLPWEKGEFNESNTLLLDDSPYKALMNPRHSAIFPYSYRYYHTRDSELGREGDLRVYLKGLAKAENVQNYVSENPFGQRPIREANPSWGYYRRVIESLQRSQNDGPSLPR

SEQ ID NO: 146659 - protein, 81 aa, Glycine max
  unsure (1)..(81): unsure at all Xaa locations
  Clone ID: PAT_MRT3847_103452C.1.pep
DQMQDPEGIPTDHDRNNLAGXHLDDGRTLSXDYNIQNESTLHLVLTLRSGVQKSVTTLTGKTKTQEVERSNTVENKRATTH

SEQ ID NO: 146660 - protein, 734 aa, Glycine max
  unsure (1)..(734): unsure at all Xaa locations
  Clone ID: PAT_MRT3847_103453C.1.pep
MLVAVGASWDLNWFLQLLLSVIVVAVGVHYFVKATASKYFLVDANFEGDHHALAAADPMPGALAAAVDPLCAVCATPAPKKCSRCKAVRYCSQACQQSHWMSGHKTVCMNFHGTNARSSAQNGVINRGFKTSAAGGKGSSSIALIPDCGDGAISRPIKQAKDVLFPYDGXMRFLVVLLNHLMCPFLKQTVIWGMXDMGRSLEETSGCKEEQDDTDMVSSGLCSGPPNDNSFDKHPSVSRDHQNMEEDSEHIDVVNCIGGTXGYGKQEDAHEFMRFSIDTMQSVCLDEFGGEKAVPPNLQETTLIQESGNISRHLDAICTKCDKISNQYENMMDLTVEIHGDAASLEECLDQFTAKERLDGENMYKCEGCKDYVKAWKRLTVKCAPNILTIALKRFQSGRFGKLNKRVAFPETLNLSPYMSEAGDGSDIYKLYGVVVHIDMLNASFFGHYICYIKDFQGNWYRIDDWKVMTVEVEEVLSQGAYMLLYSRCSARTSSFQIQTSESSGIAEVQTEVEVEMEVEPGQTEQDECLSNMKALTCSRGSEVLPSDASPELKVSSSYDCESFAGLNSPVKREQFNDVDMMDVDSTGIVNEISCGAVESSYVPISQTDSDLGDVDMGRSLEETSGCKEEQDDTDMVRSGFCSGPPNGSSFFDKHPSVSRDHQNMEEHSEHIDVVNCKLITAKDNACYGNGYVSANDSSMPVEDAGSQFSGISSFPTENDKGNGIKKVEISADI

SEQ ID NO: 146661 - protein, 73 aa, Glycine max
  unsure (1)..(73): unsure at all Xaa locations
  Clone ID: PAT_MRT3847_103454C.1.pep
ILIPALMRSGRLDCKIXFPPPSGEAKARFSQIPSRERNVPPDVHFEELARATNXFKGAPQKAVCVRRASWLNP

SEQ ID NO: 146662 - protein, 34 aa, Glycine max
  Clone ID: PAT_MRT3847_103455C.1.pep
LSFHSPHTSFLASCDFQQCSTSRVEPSAYVAHAR

SEQ ID NO: 146663 - protein, 58 aa, Glycine max
  unsure (1)..(58): unsure at all Xaa locations
  Clone ID: PAT_MRT3847_103456C.1.pep
MKNIGSFFLVEEATFEEAATAGSFYQDFEITRGGERAKIYENWNLLTLSLDRAXCSGF

SEQ ID NO: 146664 - protein, 74 aa, Glycine max
  Clone ID: PAT_MRT3847_103457C.1.pep
MAVERSGIAKDVTELIGKTPLVYLNKLADGCVARVAAKLELMEPCSSVKDRIGYSMIADAEEKGLITPGKVGIP

SEQ ID NO: 146665 - protein, 174 aa, Glycine max
  unsure (1)..(174): unsure at all Xaa locations
  Clone ID: PAT_MRT3847_103458C.1.pep
GSRIITTRDKHLFTGLKVDYVHEMKEMHANESLELLSWHAFREAKPKEDFNELARNVVAYCGGLPLALEDLGLYLTNRTTNEWRSALSKLETTPNPHVQEILKISFDGLNDEKEKDIFLDXCCFFIGKDIAYVTEILXGCGLHSDCGIPVLMDRSLIKLKEHKLECIFCTRMGE

SEQ ID NO: 146666 - protein, 74 aa, Glycine max
  unsure (1)..(74): unsure at all Xaa locations
  Clone ID: PAT_MRT3847_103459C.1.pep
MAVERSGIAKDVTESIGKTPLVYLNKLADGCVARVAAKLELMEPCSSVKDXIGYSMIADAEEKGLITPXKVGIP

SEQ ID NO: 146667 - protein, 76 aa, Glycine max
  Clone ID: PAT_MRT3847_10345C.1.pep
NCCSLINQLTEQGNFVIYIISPKGKGIFYLLNSQKVNRDQGVPKDYQLVLTQAVPLFTFPTLNMKSHGQVVRGHLI

SEQ ID NO: 146668 - protein, 83 aa, Glycine max
  unsure (1)..(83): unsure at all Xaa locations
  Clone ID: PAT_MRT3847_103460C.1.pep
AFFIVHYSATTAALSGTXVSXSFMRXQPMTTKSLKTFPNALFGLXGGRGGRXTCMASYXVKLITPXGXVEFXCPDXVFLLTRL

SEQ ID NO: 146669 - protein, 54 aa, Glycine max
  Clone ID: PAT_MRT3847_103461C.1.pep
ACNGVILLFQVFFSQSNFSFSKLRIFYRFPFSSTKKLRIFIFYSKSSLIKSHFI

SEQ ID NO: 146670 - protein, 362 aa, Glycine max
  Clone ID: PAT_MRT3847_103462C.1.pep
IRLDLIFKIAACFMVELGYAKPDAKEVLKGLFVPGLKGSGATGLAISLLGAMGMPHNLFLHSSLVLSWKILRSVLGFRATSRFYMIESAFALKVTFLINICVISVSGTVCNSSNLNAENQLSCLDLDLNKASFLLRNVLGKWSSKLFGIALLASGQSSTITGTYAGQYVMQGFLDLRLEPWIRNMLTRCLAIVPSLIVAVIGGSAGAGKLIIIASMILSFELPFALVPLLKFTSSKTKMGTHVNSTMISAVTWIIGTLLMAINIYYLITGFIKLLLHSHLKIVAKVFLGILGFSGMAMYLAGTTYLVLRKNKEATHLLALTAPENQQMTNELGNGSIYSLPREDIVSMQLPQRSTPAPADVD

SEQ ID NO: 146671 - protein, 64 aa, Glycine max
  Clone ID: PAT_MRT3847_103463C.1.pep
TPHIICKFYILKRYINLTFIPFLHHIEKMAVYKKVLIKKMHIFISNLMKHGKFNLKESSTRKKT

SEQ ID NO: 146672 - protein, 72 aa, Glycine max
  unsure (1)..(72): unsure at all Xaa locations
  Clone ID: PAT_MRT3847_103464C.1.pep
RVRDLGNRAQAPIELIRCLRSRKVHAFEASESPVVVALEDLLAPDLHAXVAEMVDHTFDSCTQMLLESESRG

SEQ ID NO: 146673 - protein, 44 aa, Glycine max
  Clone ID: PAT_MRT3847_103465C.1.pep
REGAGPLSQAGYWLVVPLSSEGFSMVYSNKLLCKIEADCHQEYL

SEQ ID NO: 146674 - protein, 76 aa, Glycine max
  unsure (1)..(76): unsure at all Xaa locations
  Clone ID: PAT_MRT3847_103466C.1.pep
IYLYLXIFFAAFFGFFLGVFTGSTQLTKPLKLAALNKKGHPGATPPTPQAKTNHTPHFRPGRHKPHAGDPQGEKPG

SEQ ID NO: 146675 - protein, 78 aa, Glycine max
  Clone ID: PAT_MRT3847_103467C.1.pep
HGSYAVLMPMMRHMQLLVIVVISISTQPIDVVVEVHAHVQAPGLFVVVTIAEACAPRLISYGIVVLLGMTLNPHAAPP

SEQ ID NO: 146676 - protein, 71 aa, Glycine max
  Clone ID: PAT_MRT3847_103468C.1.pep
QNNWWLQTYEMGQNNTTTTTILPAITLIQHKVFYIFITWGGNTYLLFLQGEQHIISHGTIFRRRGPFKDYT

SEQ ID NO: 146677 - protein, 148 aa, Glycine max
  Clone ID: PAT_MRT3847_103469C.1.pep
MKRQRGVNVNAVRPIMNNPPSVEDVAAAAMGKKKVKKEGEQKVGKRVVEEEERKESTRDMVGVGGYLQQQQQGGGMMGWNWEENMPLVGGVVDEQMSWGSTWFPGWDMDLLGGDAFTALYNDVLWDDDIWNLNNQIPIPLDTKRFHFG

SEQ ID NO: 146678 - protein, 45 aa, Glycine max
  Clone ID: PAT_MRT3847_10346C.1.pep
SCFMKKKGHSGWNLHPLLLSKKEKNHFYNNTHLLNAMKYFISTYG

SEQ ID NO: 146679 - protein, 142 aa, Glycine max
  Clone ID: PAT_MRT3847_103470C.1.pep
TRSYTQAEVSQKLKDQLGYKLNVKPSQISHKDSGQGLFLDGAADVGAVIAFYPGVVYSPAYYQYIPGYLDEQNPYLITRYDGTVIDAQPWGCGGEGPERFNGRKMLERKLDNEGAEKGSDRMSKPLEGSQVENDNENDDVER

SEQ ID NO: 146680 - protein, 54 aa, Glycine max
  Clone ID: PAT_MRT3847_103471C.1.pep
ILTRCTLLSSDSAPAEPYSLQFLHNEWRVTCRESSVFRLLELISKSTLESKIGF

SEQ ID NO: 146681 - protein, 97 aa, Glycine max
  unsure (1)..(97): unsure at all Xaa locations
  Clone ID: PAT_MRT3847_103472C.1.pep
XXXXXXXXXXXXXXXXXXXXXXXXXXXXXXNIXHXNXYXHXXXNSXXYSLXXXXLXXXXXXXXXIPXXXXXLXFFLLLXXXXXXLINSXLXYXXXXL

SEQ ID NO: 146682 - protein, 55 aa, Glycine max
  Clone ID: PAT_MRT3847_103473C.1.pep
APRDEEGRSMRLNALQSLKRGAVQSSTLSRFPKNCCCIHGQSCDISVNCSILLVS

SEQ ID NO: 146683 - protein, 94 aa, Glycine max
  Clone ID: PAT_MRT3847_103474C.1.pep
KKFPRWFYPPIYQNFSPHFFLDPYGPPGKGLSQKKPKKGSLPLFFFSGFIWVKYYYFFFGKRRGLLPFNFLRGCFSRARLCKGKGLLPPGNRSG

SEQ ID NO: 146684 - protein, 125 aa, Glycine max
  Clone ID: PAT_MRT3847_103475C.1.pep
VRNFLFAMEELKLPAFEAADLEKDNLEMGSAAKVVDCILALKSFQELKQMNNQNGYIKHIKSPLPMRMHTRAAAFSSDACRHLDLSSKLEKMPPAECNFPKREEIVELLAKQLVDRMFDAKENID

SEQ ID NO: 146685 - protein, 42 aa, Glycine max
  Clone ID: PAT_MRT3847_103476C.1.pep
KGYHWEQLTEGPPFILEYINSVQHPREWKETFRNHYWFYSDA

SEQ ID NO: 146686 - protein, 51 aa, Glycine max
  Clone ID: PAT_MRT3847_103477C.1.pep
FPRTILCILFNVKQILVVCLDRCFELKSNPKETQKLFSQSHQLLARSGLVV

SEQ ID NO: 146687 - protein, 74 aa, Glycine max
  unsure (1)..(74): unsure at all Xaa locations
  Clone ID: PAT_MRT3847_103478C.1.pep
SYNSFRTCVSLRVYGDENSMSAHEYVKPDFSGSKLNSYLAGHNSTITDGNDTASATLHLESXADRDRIKRDYKL

SEQ ID NO: 146688 - protein, 154 aa, Glycine max
  Clone ID: PAT_MRT3847_103479C.1.pep
MSLIPSIFGGPRSNVFDPFSLDMWDPFKDFHVPTSSVSAENSAFVNTRVDWKETQEAHVLKADIPGLKKEEVKVQIEDDRVLQISGERNVEKEDKNDTWHRVERSSGKFMRRFRLPENAKVEQVKACMENGVLTVTIPKEEVKKSDVKPIEISG

SEQ ID NO: 146689 - protein, 48 aa, Glycine max
  Clone ID: PAT_MRT3847_10347C.1.pep
FSSPSSPPHLCRLIPHVSFSPLLLMIKIFNYFVKEINNYILCEVSLTF

SEQ ID NO: 146690 - protein, 153 aa, Glycine max
  Clone ID: PAT_MRT3847_103480C.1.pep
MSLIPSFFSGPRSNVFDPFSLDVWDPFKDFHFPTSVSAENSAFVSTRVDWKETPEAHVLKADIPGLKKEEVKVQIEDDRVLQISGERNLEKEDKNDTWHRVERSSGKFMRRFRLPENAKVEQVKASMENGVLTVTVPKEEIKKPDVKAIEISA

SEQ ID NO: 146691 - protein, 153 aa, Glycine max
  unsure (1)..(153): unsure at all Xaa locations
  Clone ID: PAT_MRT3847_103481C.1.pep
MSLIPNFFGGRRSNVFDPFSLEVWDPFKDFHFPSSVSAENLAFVSTRVDWKETPEAHVLKADIPGLKKEEVKVQIEDDRVLQISGERNLEKEDKNDTWHRVERSSGKFMRRFRLPENVKVEQVKASMENGVLTVTVPXEEVKKPDVKAIEISA

SEQ ID NO: 146692 - protein, 153 aa, Glycine max
  Clone ID: PAT_MRT3847_103482C.1.pep
MSLIPSIFGGRRSNVFDPFSLDVWDPFKDFHFPTSLSAENSASVNTRVDWKETPEAHVFKADIPGLKKEEVKVEIEDDRVLQISGERNLEKEDKNDTWHRLERSSGKFMRRFRLPENAKVEQVKASMENGVLTVTVPKEKVKKPDVKAIEISG

SEQ ID NO: 146693 - protein, 55 aa, Glycine max
  Clone ID: PAT_MRT3847_103483C.1.pep
PLIQDLCLLHAGVSKLVIGRQAHFTWPGPLDHHHGVMYFTSSKVPSTTHNISATS

SEQ ID NO: 146694 - protein, 154 aa, Glycine max
  Clone ID: PAT_MRT3847_103484C.1.pep
MSLIPGFFGGRRSNVFDPFSLDMWDPFKDFHVPTSSVSAENSAFVSTRVDWKETPEAHVFKADIPGLKKEEVKVQIEDDRVLQISGERNVEKEDKNDTWHRVERSSGKFMRRFRLPENAKVNEVKASMENGVLTVTVPKEEVKKPDVKAIEISG

SEQ ID NO: 146695 - protein, 103 aa, Glycine max
  unsure (1)..(103): unsure at all Xaa locations
  Clone ID: PAT_MRT3847_103485C.1.pep
TGTGLGAEIIGTFVLVYTVFSTTNPNRNAKDSHVPILTPLPIKFTIFIFHLTTIPLTNTIINPTINLKTTIIYNQYNPXITIKSFXIQPFIETAIRTFYHQFI

SEQ ID NO: 146696 - protein, 160 aa, Glycine max
  Clone ID: PAT_MRT3847_103486C.1.pep
MSLIPNIFGGRRSNVFDPFSLDMWDPFKDFPFPNSVSTSFPEFSRENSAFVSTRVDWKETPEAHVFKADIPGLKKEEVKVQIEDDKVLQISGERNVENEDKNDTWHRVERSSGKFMRRFRLPENAKVNEVKASMENGVLTVTVPKKEVKNHDVKAIEISG

SEQ ID NO: 146697 - protein, 107 aa, Glycine max
  unsure (1)..(107): unsure at all Xaa locations
  Clone ID: PAT_MRT3847_103487C.1.pep
TRPRQLSIHDTRAAAASGWSNGSAGMSMXSSPRSSSGPGDDWRSAFDAAANGPVSRSGSSRSGSNGHSRHSSDAAQNGDVNSGSNSSSRRTPNRLPPAPPGSSGYKY

SEQ ID NO: 146698 - protein, 72 aa, Glycine max
  Clone ID: PAT_MRT3847_103488C.1.pep
QLDKHGALHLAEYQGSYVRHIKLCPAQRHQSVDRVSTSLDKPTPHFHKHETRGRTAWVNPGTGPGGVPALTI

SEQ ID NO: 146699 - protein, 698 aa, Glycine max
  unsure (1)..(698): unsure at all Xaa locations
  Clone ID: PAT_MRT3847_103489C.1.pep
GPAKTSDIPWIALIGQSVSIATAQSGSAGSEDSLKTAWRAESESLKSILTGAPPSKLGRIALVDALAHQIQNRMKLRLPNLLSGLQGKSQIVQDELARLGESMVTTSEGTRAIALELCREFEDKFLQHITTGEGAGWKIVSCFEGRFPDRMKQLPLDRHFDINNVKRIVLEADGYQPYLISPEKGLRSLIKGVLELAKEPSRLCVDEVHRVLIDIVSSAANATRGLGRYPPFKREVVAIATSALEGFKNESKKMVVALVDMERAFVPPQHFIRLVQRRMERQRREEELKGRSSKKGQDAEQSILNRASSPQTGGSMKSMKEDKKEKEKDKSGLAEKEGQEGSGLKTAGPEGEITAGFLLKKSAKTNGWSRRWFVLNEKTGKLGYTKKQEERHFRGVITLEECNIEEVADEEDPPSKSSKDKKSNGPDSGKVNLVFKITSRVPYKTVXLKAHSAVVLKAESAADKIEWIKKISQVIQAKGGQIRISSDGAPTMRHSLSDGSLDTMARRPADPEEELRWMSQEVRGYVEAVLNSLAANVPKAVVLCQVEKAKEDMLNQLYSSVSAQSTAKIEELLLEDQNVKRRRDRIQKQXSSLLSKLTRQLSIHDNRAAAASGWSNGSAESSPRSSSGPGDDWRSAFDAAANGPVSRSGSSRSGSNGHSRHSSDPAQNGDVNSGSNSSSRRTPNRLPPAPPGSSGYKY

SEQ ID NO: 146700 - protein, 76 aa, Glycine max
  Clone ID: PAT_MRT3847_10348C.1.pep
IVFFCFFVILNQFEEELMSGTLLLTQNLQIAHKTFVVHTLNHQRDHFAIRNRASSQHLYYFVCIFGRIYVTSHQRS

SEQ ID NO: 146701 - protein, 88 aa, Glycine max
  Clone ID: PAT_MRT3847_103490C.1.pep
FMNRMEQILTQNGYQSNLSSANPRDQLVELPSNVQGLPTLEALSTVLHRAEQLLGGQAVAALSVINTSHLLIFMFTLMIKISFYYLQL

SEQ ID NO: 146702 - protein, 99 aa, Glycine max
  unsure (1)..(99): unsure at all Xaa locations
  Clone ID: PAT_MRT3847_103491C.1.pep
PIPVNELADRVGSYVHLCTLYWWLKPFGCGVILRGYDRDXPLLYMVESCGVSYTYSCATIDKGLXADNTNIEYVILAALTCRLRVMALALKCVEHMMMK

SEQ ID NO: 146703 - protein, 54 aa, Glycine max
  Clone ID: PAT_MRT3847_103492C.1.pep
LSKITSSVVRLDHKPYFCVSPDGPNHSLFLVSHTAPFGVERNRELNIIKYRAYA

SEQ ID NO: 146704 - protein, 198 aa, Glycine max
  unsure (1)..(198): unsure at all Xaa locations
  Clone ID: PAT_MRT3847_103493C.1.pep
HASAETQYAIRSLTESVFLVVCTLDSNLIGVVVKGKKKFSVFVVSYQNSEVIILNIFKQGFSQHIDTRMLRLSIQRVRKLNFLSPQISALGRSHLSTAAEPSSSKSNPPRVPNLIGGSFVDSKASTVIDVINPATQEXVVSQVPLSTDEEIHEAVSXSWKACSSWRTTXITTRQRFMLKLQXLIPRDMDKLALNWTTE

SEQ ID NO: 146705 - protein, 540 aa, Glycine max
  unsure (1)..(540): unsure at all Xaa locations
  Clone ID: PAT_MRT3847_103494C.1.pep
LFSSNTVVHSIWIRGCCGLSIQRVRKLNFLSPQISALGRSHLSTAAEPSSSKSNPPRVPNLIGGSFVDSKASTVIDVINPATQEVVSQVPLSTDEEFKEAVSAAKKAFPSWRNTPITTRQRVMLKLQELIRRDMDKLALNVTTEQGKTLKDAQGDVFRGLEVVEHACGMATLQMGEYVSNVSHGIDTYSIREPLGVCAGICPFNFPAMIPXLWMFPMAITCGNTFVLKPSEKDPGASVMLAELALEAGLPEGVLNIVHGTHDIVNAICDDDDIKAISFVGSNVAGMHIYSRAAAKGKRVQSNMGAKNHAIVMADANVDATLNALVAAGFGAAGQKCMALSTVVFVGGSKPWEDKLLEHAKALKVNAGTEPDTNLGXPVISKHAKERIHRLVQSGVESGARLLLDGRNIXVVPGYESGNFIGPTILSDINANMEADSLEEAINIINSNKYGNGASIFTTSGVAARKFQTEIEAGQVGINVPIPVPLPFFSFTGNKASFAGDLNFYGKAGVNFYTQIKTITQQWKDSTGGSKINLAMPTSQK

SEQ ID NO: 146706 - protein, 210 aa, Glycine max
  unsure (1)..(210): unsure at all Xaa locations
  Clone ID: PAT_MRT3847_103495C.1.pep
MEKGRKAARGSKRKRRSFKDKDHYISSIPKNQHMEAGLSVKANEDFASNRLEAAVLDLVADDGAGIXEQRSMYHWDKKGKKCIKLNNGDXRVAANGKNKTKSGAKTKANKTGIYKKWKERSHVRISLKGTNNGDPQDSTSLTGFYQKGRSNFKGSKKQHSMPNAHVRSELKDMDQIRKERQTKANRVSYIKSKSTKGKRFGKNGKKKKGK

SEQ ID NO: 146707 - protein, 78 aa, Glycine max
  unsure (1)..(78): unsure at all Xaa locations
  Clone ID: PAT_MRT3847_103496C.1.pep
MKGPGLYSDIDKRSRDLLFKVLWNDHNFTITPYTSTGVXITSSEVMKGKMYSADGITNVKNKIITPDVKMDTISNLHT

SEQ ID NO: 146708 - protein, 440 aa, Glycine max
  unsure (1)..(440): unsure at all Xaa locations
  Clone ID: PAT_MRT3847_103497C.1.pep
CLTRKSKLFVKGVERVEKDGQTGLANSFVSPDPITCFVDLXRFLCSPIKPAPTEEEFLQDMDGVLSRCEQAMANRETIYGRFPQKVIDLVSDRVREIIDTSAELELLQRTCKNAFRLYSKTKPLPAKESIRRVKDLPHEGLHPMFMNVLETGELTALAFSEHLKKFRPKQTILEAEGEAAKLKHQQGPSGQWVDVMKRKRAIHENIINLVREQQQSKSNKEKEEIQSEISPSMEKGRKARGSKRKPQSFKDEDHYISSIPKNQHMEAGLTVKANEDFASNRLEAAVLDLVADDGAGIQKQRSMYHWDKRGKKYIKLNNGDRVAANGKIKTESGAKTKANKTGIYKKWKERSHVRISLKGTNNGDPQDSTSLTGSYQRGRSNFKGSKKQHSMPNAHVRSELKDMDQIRKERQTKANRVSYIKSKSTKGKRFGKNGKKRKGK

SEQ ID NO: 146709 - protein, 71 aa, Glycine max
  unsure (1)..(71): unsure at all Xaa locations
  Clone ID: PAT_MRT3847_103498C.1.pep
EDSSATSQYLASYTXSALAEYYMCRERNTLIMNDNLSKLAHAYLQMSVLLRRPPALXDYPRDRFYLHTRLL

SEQ ID NO: 146710 - protein, 91 aa, Glycine max
  Clone ID: PAT_MRT3847_103499C.1.pep
RGTGFLASSTTSAWSPLSVTSLLAQSESVLIFLCNRSRYQFSLRTHSHSCFLVAFAHSSSARVWCAYYHHQYCQCKKEIHVDPMHRANNPR

SEQ ID NO: 146711 - protein, 34 aa, Glycine max
  Clone ID: PAT_MRT3847_10349C.1.pep
QNFTRDDPSPRAYFECSYACSCPVGEKLDSISSN

SEQ ID NO: 146712 - protein, 117 aa, Glycine max
  unsure (1)..(117): unsure at all Xaa locations
  Clone ID: PAT_MRT3847_1034C.1.pep
DRPLSFQARALQPQLCSLLSLAPTTFPIQWHHFLIPARLVLSRRPSFFRLGASXHASRWGWSAPPPPILGVVGRPLSCPAALSPSLPGSPLGVVGSLPPXGLLAPPLLLFGGPRPPS

SEQ ID NO: 146713 - protein, 206 aa, Glycine max
  Clone ID: PAT_MRT3847_103500C.1.pep
MSESHSTGKCSSMTSILLLFMLLITNTGTTGAQSGVCYGRVGNNLPSPQEVVSLSKQYDFRRMRIYDRNQQVLQALRGSSIELLLDLPNIDLQRVASSQDNANRWVQDNVKKFGNVRFRYFSMRNEVKPWDSFARFLVLAMQNIQRPISSVGLGNQIKVSTAIETGALAESYPPSRGSFRSDYRTAYLDGVIRFLVNNNAPLLVNV

SEQ ID NO: 146714 - protein, 86 aa, Glycine max
  Clone ID: PAT_MRT3847_103501C.1.pep
FAEELELETLPPSYPPPHPVHSPAPAPLHAPANAPAPHQQQHQHHPPAPAPARAPVPSPSDHNYPPTPAAAKPPSHHHQHHPPAPV

SEQ ID NO: 146715 - protein, 75 aa, Glycine max
  unsure (1)..(75): unsure at all Xaa locations
  Clone ID: PAT_MRT3847_103502C.1.pep
DQTKSRSPGFGIRFGKKDEPVRGASFNPRQQXHPQXEKLELEQEVLGRFTASAALYSPTVVGDVALYPPKQPFIR

SEQ ID NO: 146716 - protein, 100 aa, Glycine max
  Clone ID: PAT_MRT3847_103503C.1.pep
AMGLAPVWNPLWVLCVLNMPLTPSKTRGFPLELGIETKSREIILIRCFLIVVYNPPFLIQSFGKLVNHFSINLGASIPFCVSYSYYDERAHLVIFPKKWS

SEQ ID NO: 146717 - protein, 40 aa, Glycine max
  Clone ID: PAT_MRT3847_103504C.1.pep
HNFWPLKHFKIIFSHSIKTLLPLLPIPHIPIPSLYIKTTP

SEQ ID NO: 146718 - protein, 126 aa, Glycine max
  Clone ID: PAT_MRT3847_103505C.1.pep
HHVRLCMDLSPLRQPLFVTFIFPGISVFRRVRSPVSRGPARNGGRLGVCFYAGGCRWVVGCLWYLRWAFVRCVGSSCVRRSVRDFSRFLWGKTGPLFFRCPFPPIWSSWTRTSRSLLSSSHDHAST

SEQ ID NO: 146719 - protein, 38 aa, Glycine max
  Clone ID: PAT_MRT3847_103506C.1.pep
ANPKRQRVQLYTGMVPSPHGQTQEEASLRIAAALVHLD

SEQ ID NO: 146720 - protein, 79 aa, Glycine max
  Clone ID: PAT_MRT3847_103507C.1.pep
RGGVACATQAGQLWGRASRADRCGPYTRLETRGREVQCQSRRVTIGVPPGLHRCKTSAQCSAVKVTQDDTIGRRMRALP

SEQ ID NO: 146721 - protein, 89 aa, Glycine max
  unsure (1)..(89): unsure at all Xaa locations
  Clone ID: PAT_MRT3847_103508C.1.pep
VSATKWFNFYECRNYLVFLIRAXXLKPKGEMTIANSVGXIPNSTIFNEIKEATNRSIYEFGINLFVLLGPILEAKGNEDRNSLGGTELE

SEQ ID NO: 146722 - protein, 75 aa, Glycine max
  Clone ID: PAT_MRT3847_103509C.1.pep
GSTRTSLTKRKRHSHCQRVNRLAQHSQLRHKNSIITLIDQIIPQFLLSISKFLTSNWSTSAIHSAMTRCAYSWMR

SEQ ID NO: 146723 - protein, 256 aa, Glycine max
  Clone ID: PAT_MRT3847_10350C.1.pep
MSQEQPRRPKGQNPIKYGDVFVVSGDLAQKPVAPEDAAMMQSAETRVLGQTQPGGAASVMQSAATRNEQAGLVGHRDVTDVTGDRGVTVTETKVPGRRIITEAVGGQVVEQYVEATPVEAGRSSAIKENAITIGEALEATAQTVGQKAVDQSDASAIQAAEVRATGSNVITPGGLAAMAQSAAAYNADCKLDQDKVKLADILAGATAKLPADKAATLQDAEGVACAEVRNNPDATATPGGVAASVAAAARLNENVK

SEQ ID NO: 146724 - protein, 90 aa, Glycine max
  Clone ID: PAT_MRT3847_103510C.1.pep
WVFFFFFFFLGTQLASCTIKLECREHQIRAKWQQYQDLQLFINKIHLKREEKNSVNFIPQQILGQVKTLQELFITSTKLTSCTRSVISNS

SEQ ID NO: 146725 - protein, 90 aa, Glycine max
  Clone ID: PAT_MRT3847_103511C.1.pep
FKGQNYDNWKQRIIELFDACHIDMWDVVENGNYIPIDEKGGENPRSAWTKDHQTKYFLYSKARNTRPSNNCLDNSKVQNIMNNLRSLSKT

SEQ ID NO: 146726 - protein, 59 aa, Glycine max
  Clone ID: PAT_MRT3847_103512C.1.pep
SMNCIISRLLTCSLEVVSNSASFSFEQSSNIDAWCMSWYAASSCCKSVGILYLEIESWA

SEQ ID NO: 146727 - protein, 215 aa, Glycine max
  Clone ID: PAT_MRT3847_103513C.1.pep
MAAAEPTISPSNTRVGWIGTGVMGQSMCAHLIRAGYTLTVFNRTPSKAQPLLDLGAYFAPSPHAVAARSDVVFSIVGYPSDVRSVLLHPSSGALSALRPGGVLVDMTTSEPSLAVEIADAATAKGCHSIDAPVSGGDRGAKNGTLAIFAGGEESTVKRMEALFSHLGKVNYMGGSGKGQFAKLANQVTIASTMVGLVDRGMVHAHKEGPGCWTWP

SEQ ID NO: 146728 - protein, 89 aa, Glycine max
  Clone ID: PAT_MRT3847_103514C.1.pep
QIKRMLSSLADPYTRFLSPDEVIFHVSFLLCLLITSISVGKSHISASIPVVQLICLLVISSLCVSPSPVLASRHLWKGSKLRIEPNSIL

SEQ ID NO: 146729 - protein, 58 aa, Glycine max
  unsure (1)..(58): unsure at all Xaa locations
  Clone ID: PAT_MRT3847_103515C.1.pep
EKDLLTSAINTSVQNSLFLKQFLSLISLXSLSSDVLGQALNCFCFYILFGWCFAGLIH

SEQ ID NO: 146730 - protein, 93 aa, Glycine max
  Clone ID: PAT_MRT3847_103516C.1.pep
EYLKYQVGLALESYLDSNQGGMPPMTPSCVAGGLAQSSSHSGIFFQGDGQSQNAWNSDLSSSFVNSSSTVSGAGRSNLGPVSGRMNNAVLNSV

SEQ ID NO: 146731 - protein, 52 aa, Glycine max
  Clone ID: PAT_MRT3847_103517C.1.pep
QQAWILSHYKEVVVSGIFHRGCFRTTRGGPILRHPMWPLKISILSRGVSRQL

SEQ ID NO: 146732 - protein, 60 aa, Glycine max
  Clone ID: PAT_MRT3847_103518C.1.pep
LDILNLFQYKFSKRKNNFEKKLKSHPGYRNKQEKIRTIHSEPITVSYSPKKINYFLITSN

SEQ ID NO: 146733 - protein, 103 aa, Glycine max
  Clone ID: PAT_MRT3847_103519C.1.pep
AFYGSLQGVDPSRRTLQRISGGQIFYINRFAWILHYLSFFLHFLAYYNYLNLILNQLSCVKLSRLRQLNFSIFLYIKTIVLVVMICSQFRTKHGIPPLNLSSL

SEQ ID NO: 146734 - protein, 45 aa, Glycine max
  Clone ID: PAT_MRT3847_10351C.1.pep
TKFQSSRNLFNGQIIISKLMCSKKPINYVCDGIRPFWCFVLNEHP

SEQ ID NO: 146735 - protein, 138 aa, Glycine max
  Clone ID: PAT_MRT3847_103520C.1.pep
VALDIPSFQICRSKDLSSFPGNPVPAIYRLSPVNHNARDTKHPSLLPSPSPSPSKITSIVQRCKMCCDKDSLKKLKSSVPSRRSDFLIDNVEEDESETLIFCMTSFSDQFCLGEENDLSSSSTLRRKKDGQRTERSEG

SEQ ID NO: 146736 - protein, 59 aa, Glycine max
  Clone ID: PAT_MRT3847_103521C.1.pep
NVYSHPIINWFRQKSISLLNLPHKKAWGLHLKKSLKLIVKNTKNFWINKKGQKRDCFPI

SEQ ID NO: 146737 - protein, 84 aa, Glycine max
  Clone ID: PAT_MRT3847_103522C.1.pep
FYCIFFSERVCPFTGKKSNRANKVSFSNHKTKKLQFVNLQYKRIWWEAGKRYVKLRLSTKALNSIEKNGLDAVPQKDNNDFRKK

SEQ ID NO: 146738 - protein, 136 aa, Glycine max
  Clone ID: PAT_MRT3847_103523C.1.pep
MATASASCAVSFRNSFGVSKPSDLGFLSSRLNGLRICFPKLPPTPLTASPFPTPLPIVAKRVCPFTGKKSNRANKVSFSNHKTKKLQFVNLQYKRIWWEAGKRYVKLRLSTKALKTIEKNGLDAVAKKAGIDLRKK

SEQ ID NO: 146739 - protein, 220 aa, Glycine max
  unsure (1)..(220): unsure at all Xaa locations
  Clone ID: PAT_MRT3847_103524C.1.pep
MGGDSAVEESEGVNVNINVRCSNGSKFSVQIAVDSTVSSFKDAAACSCDIPAEQQRLIYKGRILKDDQTLXSYGLEADHTVHLVRGSALANPTGGTNTSSTDTNTNTNIPTDNARVAGANEGEGLGGLGFGASLFPGLGVNGTGGNGLFGEGFPDLEQMQQPFISNPNLVREIMNSPTMQNLINNPEIVRNLIMNNPQMQELMXSNPELAHILNDPSTLR

SEQ ID NO: 146740 - protein, 255 aa, Glycine max
  unsure (1)..(255): unsure at all Xaa locations
  Clone ID: PAT_MRT3847_103525C.1.pep
MGGDSAIEESEGVNVNINVRCSNGFKFSVQIAVDSTVSSFKDVVARNCDIPAEQQRLIYKGRILKDDQTLRSYGLEADHTVHLVRGSAPANPTGGTNTSSTNTNTTTNNARGAGANEGGGLGGLGFGASLFPGLGVNGTGGNGLFGEGFPDLEQMQQPFISNPNLVREIMNSPTMQNLINNPEIVRNLIMNNPQMQELMDRNPELAHILNDPSTLRQTLEATRNPEIMREMMRNTDRAMSNIESFPXGFNMLRRM

SEQ ID NO: 146741 - protein, 78 aa, Glycine max
  Clone ID: PAT_MRT3847_103526C.1.pep
MLERIMKRLRSVAVVPIVIASVQISALVAPLVDYVASPGAAEAVLYSPDTKVPRTGEVALRKAIPANANMKAIQDTLE

SEQ ID NO: 146742 - protein, 199 aa, Glycine max
  Clone ID: PAT_MRT3847_103527C.1.pep
LEVLGRGALSCVFRGRVGIWRTSVAIKRLDKEDKECAKAFCRELMIASSLHNTNAVPLVGFCIDSEEGLFLVYKYVSGGSLEHHLHGRKKGRSSPLPWSVRYKVAIGIAEAVAYLHHGTERCVVHRDIKPSNILLSSKKIPKLCDFGLASWTSAPSVPFLCKTVKGTFGYELNPFILIQKFNLWDLFGYLPYFFSYYDH

SEQ ID NO: 146743 - protein, 38 aa, Glycine max
  Clone ID: PAT_MRT3847_103528C.1.pep
WQDVGPDTIRVIASTQKLRMLQVTYLLIVKISNYKGHL

SEQ ID NO: 146744 - protein, 47 aa, Glycine max
  Clone ID: PAT_MRT3847_103529C.1.pep
IIMLHITKCQGVSPAIKGKGPYQTSICQPTDDTRNLQVPLNMRYLHL

SEQ ID NO: 146745 - protein, 358 aa, Glycine max
  Clone ID: PAT_MRT3847_10352C.1.pep
LRLRENDRRGPQNQTKQNPFPSTYTLLQSHPKKTCNKPKTMLDESVSSTPTFLGSLYSWFTPTVFFLLLQLVIGTIFIISNLANTHKHQQQEPQQAHDFPHHHLPRSPSMLQRLKSINFYPSSPFRSQDLQNPHFHNAHENEQPQLARSPSVLQRLKSINLYSYFPTEPFTSKLTPDQHVPEKPYVREQNQPQQVVETDEEKEEGYDDYVVEDDNNIIMSTHNYNYNLGVSEEGGAGSSSLDEIYCKLQQQGQEGHFERTHSDTKPASGEVPVKLPRKMKKSASSKSAFSHFKEDDIVETRRPATVREAKVTGGAAEDDAEVDAKADDFINKFKQQLKLQRLDSIIRYKEMIGRGSAK

SEQ ID NO: 146746 - protein, 48 aa, Glycine max
  unsure (1)..(48): unsure at all Xaa locations
  Clone ID: PAT_MRT3847_103530C.1.pep
HHYNLRAPIEHAXKSKQFDRMTISVEEPKIYDKRFIKFLRETVFPKTP

SEQ ID NO: 146747 - protein, 71 aa, Glycine max
  Clone ID: PAT_MRT3847_103531C.1.pep
LFQTQALLFGPSPIEGSECYSYAPTVCMREKTFVMKRAFRGGWFPHECKSSILLQSKSKRNVPCCSLVRSF

SEQ ID NO: 146748 - protein, 252 aa, Glycine max
  Clone ID: PAT_MRT3847_103532C.1.pep
DLRIATPQIIINYAYFLEEHKYFEDATRPYERGVKIFKYPHVKDIWVTYLSKFVRSQGKNKLERARELFENAVESAPADQVKPLYLQYAKLEEDYGLAKRAMKVYDQATKAVPNNEKLSMYEIYIARAAEIFGVPKTREIYEQAIESGLPDKDVKTMCLKYAELEKSLGEIDRARGIFVFASQFADPRSDPEFWNKWHEFEVLHGNEDTFREMLRIKRSVSASYSQTHFILPEYLMQKDQTVNLDEAKDKLK

SEQ ID NO: 146749 - protein, 83 aa, Glycine max
  Clone ID: PAT_MRT3847_103533C.1.pep
LFLRFHMVTTYARSASVIMFQLLIYRMIVCARPVAALVCPYLVLSPSRLQPFLIFDRTLPLASPVIFTLRGLSSYRLPSASDD

SEQ ID NO: 146750 - protein, 45 aa, Glycine max
  Clone ID: PAT_MRT3847_103534C.1.pep
IYDQSTSWHRRFSDSSVQSDIKLWPFKVIPGAADKPMIVVNYKGK

SEQ ID NO: 146751 - protein, 57 aa, Glycine max
  unsure (1)..(57): unsure at all Xaa locations
  Clone ID: PAT_MRT3847_103535C.1.pep
TKELNKNHWGLGSLLLDPVLKIIFXQPYIQSSKDWRFKLHQCWETKGSTTIRLKILP

SEQ ID NO: 146752 - protein, 66 aa, Glycine max
  Clone ID: PAT_MRT3847_103536C.1.pep
TCAHNCMGLKYKSTVLRIAIDVYKCVMYRKWKQWTMCWAWANYRGKHVRPCFVCFTCKGSSRRLSP

SEQ ID NO: 146753 - protein, 196 aa, Glycine max
  Clone ID: PAT_MRT3847_103537C.1.pep
MSTARFIKCVTVGDGAVGKTCMLISYTSNTFPTDYVPTVFDNFSANVTVDGSTVNLGLWDTAGQEDYNRLRPLSYRGADVFLLCYSLISKASYENISKKWIPELRHYAPNVPIVLVGTKLDLRDDKQFLIDHPGSARITTAQGEELKKMIGAVTYIECSSKTQQNVKTVFDAAIKVALRPPKPKKKPRKKKTCPFL

SEQ ID NO: 146754 - protein, 67 aa, Glycine max
  Clone ID: PAT_MRT3847_103538C.1.pep
IFIGFSFYISYHVQWVIGKFLNGDHLSKIKKLELCYCAFRATWVHFIKPPASILFSVLSRKQLRLQV

SEQ ID NO: 146755 - protein, 135 aa, Glycine max
  unsure (1)..(135): unsure at all Xaa locations
  Clone ID: PAT_MRT3847_103539C.1.pep
LAVSGCSFTNRGLINYGGDTSIDNPAVYQAHQNVNEMHSGPSDDYMSLTLEAHIFEWLFAIRGPRNTDLCGGMYHXPLQLPSEYPIKPPSFMLLTPTSRFETQSMMCLSTSDHHPEHWHPSSSITTALLALIAFM

SEQ ID NO: 146756 - protein, 140 aa, Glycine max
  Clone ID: PAT_MRT3847_10353C.1.pep
LGEYKPISLIGCMYKIVAKVLANRIRRVLPAIIEETQFAFIEGRHLLQSVLITNEIIDEARKNHKPCLIFKIDFEKAYDSVSWEFLLYMLRRFGFNSRWMTWIEGSLKSMSMSVLVNGSPPNQFIPQIGIRQRDPLRTRG

SEQ ID NO: 146757 - protein, 120 aa, Glycine max
  Clone ID: PAT_MRT3847_103540C.1.pep
MFGETVPRPQFMQSEPRMSTTEALTDDEFTMQSSSTASPMSPYYYEQGRLSGEGSPMTMSPWNQTTNSPFSKPQWSQEQNSVPQNALVGSLVREEGHIYSLAASGDLLYTGSDSKNIRVW

SEQ ID NO: 146758 - protein, 84 aa, Glycine max
  Clone ID: PAT_MRT3847_103541C.1.pep
LSRKALHQNDTVHHDCDLKERTHSKVRCKLHIDDDIDTLGYQIMLLNVIICFPSESVSASLPMACFGANFDTTGLISSIMVIPS

SEQ ID NO: 146759 - protein, 339 aa, Glycine max
  unsure (1)..(339): unsure at all Xaa locations
  Clone ID: PAT_MRT3847_103542C.1.pep
MDRRWPWKKKSSDKAVLEKAAAELDSAAGAAATQKPSYIQISVESYSHLTGLEDQVKTYEEKVQTLEDEIKELNEKLSAANSEINTKESLVKQHAKVAEEAVSGWEKAEAEALALKNHLETVTLAKLTAEDQASQLDGALKECMRQIRNLKEEHEQKIQEVTLTKTKQLDKIKGEFEAKIVNFEQELLRSAAENGTLSRSLQERSNMLIKLSEEKGHAEGEIELLKGNIEACEREINSLKYELHVVSKELEIRNEEKNMSMRSAEAANKQHMEGVKKITKLEAECQRLRGLVRKKLPGPAALAQMKLEVESLGRDFGESRLRKXPVKPATPNLSLPDFS

SEQ ID NO: 146760 - protein, 376 aa, Glycine max
  Clone ID: PAT_MRT3847_103543C.1.pep
MALVSSLSPATPSSVQTNTLNPLGWTDDQILEKVYITHVHTAERYDVESLFNVTANIIKRSTALADSVAVKTGTPVGLIEDKVPLSTFDPPFLKLKHIASQMMNTPHGEHHAHSTAMSILDQLRTYTWDGKAILVLAALALEYGNFWHLVQTPSGDHLGRSLAQMSRVHIVERNRQAVADYNSLVKNLLIAVECITELERLSTKGYDLKDVPALAEAMQEIPVAVYWAIVTTVVCANHFDFLLGESDSRYEIANFDDKLAAVISKLKANLTRSRKKIGDLEDYWRRKKLLQTPTEIVEVLKVLIYHNEVHDPHVYDGLTRQMVSIEVFKKKHVLLFISGLDSIRDEVRLLQSIYEGLQEDPREVKGYRKEDFKILW

SEQ ID NO: 146761 - protein, 155 aa, Glycine max
  unsure (1)..(155): unsure at all Xaa locations
  Clone ID: PAT_MRT3847_103544C.1.pep
MLLFTPSPVTVTVSLCPRITRYWLHCFPRYSAKPISRNSFTCALTHSPTHKHVYPDPVPEFAEHVRDSSNLNSKLWAGLGSNLHSGADVCXEIFSEFLHKEYGGPGTLLVEPFTDMMVALKKKKLPGAALAARESLLWLQNFVDKDWEVWNSKLK

SEQ ID NO: 146762 - protein, 234 aa, Glycine max
  Clone ID: PAT_MRT3847_103545C.1.pep
MAPNHLVFTFTNHNPTLPSSLSSSLLTFQRAATLRSAMNSREQPQPQQPPQPQPPNMTVGPTMYPSMLSPVTARFPFSSSSNNNPPPSEPLNNDTNDNDNSAFEALKPCALAASESSKKKRGRPRKYSPDGNIALGLGPTHAPASSADPPAKKHRGRPPGSGKKQMDALGIPGTGFTPHVITAEVGEDIAAKLVAFCEQGRRTVCTLSANGAIRNVTIRAPDMPAGILAYEGQF

SEQ ID NO: 146763 - protein, 80 aa, Glycine max
  Clone ID: PAT_MRT3847_103546C.1.pep
SWISMANAKHTSLAILIGNLLLYPLFFVLFNVDLLINTLFILFLIRFYDLLAFVVGTIPLLCFPNAFVIITTANLEYFVS

SEQ ID NO: 146764 - protein, 78 aa, Glycine max
  Clone ID: PAT_MRT3847_103547C.1.pep
MVEKRQLFLRSYQFCRKKSLTERIKGSLVRAKKIVWLRLRSACKLRRSFKCAFYYRRRRFFQLLHSNNRKTESSSCLW

SEQ ID NO: 146765 - protein, 157 aa, Glycine max
  Clone ID: PAT_MRT3847_103548C.1.pep
QHETNSYDQRHRPEVKKYFWEKPSLTRRHYRPVAGGAPFVTCHKCLKLLQLPADFLLFKRVYHQLKCGACQEVLKFSLQNRSHIVSYAPNALEPPSSSSNLDDRNEVIDGSNPHSVSHADHISYSDDYGHSVGKSYSSEGDPVSAAPLHPLHDSAYD

SEQ ID NO: 146766 - protein, 575 aa, Glycine max
  Clone ID: PAT_MRT3847_103549C.1.pep
MAVSPILLLLAIFSLIYGNGILPIEATHHVYRNLQTLSSDSSDQPYRTAYHFQPPKNWINDPNGPMRYKGLYHLFYQYNPKGAVWGNIVWAHSVSKDLVNWTPLDHAIYPSQPSDINGCWSGSATILPGGKPAILYTGIDPNNHQVQNLALPKNMSDPLLREWVKSPKNPLMAPTSANMINSSSFRDPTTAWLGKDGYWRVLIGSKIHTRGMAILYKSKNFVNWVQAKQPLHSAEGTGMWECPDFYPVLNNKPSSTIGLDTSVNGDNVRHVLKVSLDDKKHDHYLIGTYDIAKDIFTPDNGFEDSQTVLRYDYGKYYASKTIFEDGKNRRVLLGWVNESSSVSDDIKKGWAGIHTIPRAIWLHKSGKQLVQWPVVELESLRVNPVHWPTKVVKGGEMLQVTGVTAAQADVEISFDVNEFGKGEVLDQWVDPQILCSRKGAAVKGGLGPFGLLVFASRGLQEYTAVFFRIFRYQNKNLVLMCSDQSRSSLNKDNDMTTYGTFVDMDPLHEKLSLRTLIDHSVVESFGGEGRACITARVYPTIAINEKAQLYAFNNGTAAVKITRLSAWSMEKAKIN

SEQ ID NO: 146767 - protein, 95 aa, Glycine max
  unsure (1)..(95): unsure at all Xaa locations
  Clone ID: PAT_MRT3847_10354C.1.pep
TVYATPVAPKKGNLEIIAPIAIGFIVGRSILLGGTFXEQHMNPVVTFGPPVVTWAWTNHWIYWAGPIIGGATAGLIHEXVFISHTHEXQLPSTDY

SEQ ID NO: 146768 - protein, 85 aa, Glycine max
  unsure (1)..(85): unsure at all Xaa locations
  Clone ID: PAT_MRT3847_103550C.1.pep
VYFFHPLSNLPYSFNLIDISLLSDXSTYRNFLHIDPNFISLLSPHPNILLIFHFYYYFQYLSIVXYPFQPHTLFYLIFYLPIHDS

SEQ ID NO: 146769 - protein, 42 aa, Glycine max
  Clone ID: PAT_MRT3847_103551C.1.pep
MRVEFRLVLIVLQEVRAVFGVVQLLFEKVVGDDPHVAVTHRE

SEQ ID NO: 146770 - protein, 78 aa, Glycine max
  Clone ID: PAT_MRT3847_103552C.1.pep
SFISCWFFHANRLKASVFSPPCPLSSWWWTSVFFCAFSGGWVPLPCMALCSRGFLGRCVYNGRKNAWRAAAGRPQLGS

SEQ ID NO: 146771 - protein, 83 aa, Glycine max
  Clone ID: PAT_MRT3847_103553C.1.pep
ISKTILSNQAKYTDARADFTQIQSIAESSSSKPIYCTNLFLRSSHVKNSTISPSNRITELTIAALRRGNESKVQRTRTERARK

SEQ ID NO: 146772 - protein, 343 aa, Glycine max
  Clone ID: PAT_MRT3847_103554C.1.pep
MTDEQREPQASPSNGVHKLERKQIAERERKQIAGRDRSVFRGRRPRPGFSDSFSSTDLEALEIEEGSPRSQGSETPSSRASTSDSESQGSFAGAPNTNNQWRGFFKLLKKGSQMPFQPFHPLKNVPKLTRRKSKRIREDLIPSLNSPALHASFDAEFGCFKSSWKNFTLAEIQAATNDFSHENLIGEGGYAEVYLGKLEDGNFVAIKRLTRGCQEEMTADFLSELGIIVHVDHPNIARLIGYGVEGGMFLVLQLSPHGSLSSILYGPREKLNWNLRYKIALGTAEGLRYLHEECQRRIIHKDIKASNILLSEDFEPQISDFGLAKWLPDQWTHHTVSKVVGTF

SEQ ID NO: 146773 - protein, 111 aa, Glycine max
  unsure (1)..(111): unsure at all Xaa locations
  Clone ID: PAT_MRT3847_103555C.1.pep
RFWLQRXRXQHNDVFAQMETHSFKXSLDDVETPKGSMLDLKISQSKIALSKNTVGGTILRSDLLANFLTEGNFRASVDLQRTHRIRGMIKTAATARIPEKTRIALAWAMNS

SEQ ID NO: 146774 - protein, 105 aa, Glycine max
  Clone ID: PAT_MRT3847_103556C.1.pep
FLGDSVLDYLITWHLYNKYPGMTPGQLTDMRSASVNNDCYAWSAIKHGLHKHVLHASQELHMHVSATLNKFEELSSLSTFGYEAETSLPNELGQKRGYKIWRDSV

SEQ ID NO: 146775 - protein, 35 aa, Glycine max
  Clone ID: PAT_MRT3847_103557C.1.pep
AILSYICCSVTPTGCPALSCAMKSVIMMRACWVHP

SEQ ID NO: 146776 - protein, 59 aa, Glycine max
  Clone ID: PAT_MRT3847_103558C.1.pep
CCALSRQYHLEHRRPCHLDHRSRSGSSRCPYHHPSRPRQREHHRRVVVMSQIGFSYRLK

SEQ ID NO: 146777 - protein, 69 aa, Glycine max
  Clone ID: PAT_MRT3847_103559C.1.pep
HSMIFFFFIWQKADLGGLLITYQPTPWLEVFCGEKSRYKSHYFYIQNFSERFLNFLTQPLVGPSILFLL

SEQ ID NO: 146778 - protein, 40 aa, Glycine max
  unsure (1)..(40): unsure at all Xaa locations
  Clone ID: PAT_MRT3847_10355C.1.pep
YVGGPTMADIALKCSSIEVAVDDSSXSRIAAWNSDQRSIY

SEQ ID NO: 146779 - protein, 56 aa, Glycine max
  Clone ID: PAT_MRT3847_103560C.1.pep
PRVRPFFLFKKKNKKKKGREGRTQGGAPEIDQPEPAGLPAYPIGRGIKTCNKQAHS

SEQ ID NO: 146780 - protein, 75 aa, Glycine max
  unsure (1)..(75): unsure at all Xaa locations
  Clone ID: PAT_MRT3847_103561C.1.pep
GCIWGLKXXCYLFLSFGPPPKCDKMVNSSAPVHFVHSSLVLWREMFSFQSKCMFASKISVYGSFFFSPPGPGFCN

SEQ ID NO: 146781 - protein, 44 aa, Glycine max
  Clone ID: PAT_MRT3847_103562C.1.pep
IRIVPPVIRQPIIIPYLRYMRPADLFGCSTFLVNPAEHSPYFHS

SEQ ID NO: 146782 - protein, 70 aa, Glycine max
  Clone ID: PAT_MRT3847_103563C.1.pep
SSLIVSRPSRRFVLPLLVRSSSLTSNRSLLLLLATGHFSNSSLPNGPGLGSMTSELDSFPCFPGRFSVSY

SEQ ID NO: 146783 - protein, 62 aa, Glycine max
  Clone ID: PAT_MRT3847_103564C.1.pep
MRIHQTSVASIPNYASLECVLGLCFNVISILLQLAYEYIVHSQILVIVFMGRPSTFDACIAW

SEQ ID NO: 146784 - protein, 219 aa, Glycine max
  Clone ID: PAT_MRT3847_103565C.1.pep
WLLQQWRSTPISNSRANATLNNQDTDKANWGWSWLERWMAAKPWESRLMEQTHHANATEKTPPPPPKKCVDSSNSKTSEPCNVKIRKNNVSTRISARPPLIWQANHLSSSPSSEFHYDESSNSSSICTSTTPISGSAALPCDRTEDTNNTRPSYMNLTESTKAKQKTNNHQYNRSHRQQSMDEFQFLKRTAVFSNGASDPSTNFCRPLYLPTYMDKRSQ

SEQ ID NO: 146785 - protein, 59 aa, Glycine max
  Clone ID: PAT_MRT3847_103566C.1.pep
SEAIILNRMGVVFHAHIFVTGAIFLYLVNGSSLCFASVMPFACQGKAFRQILFHPNNFF

SEQ ID NO: 146786 - protein, 35 aa, Glycine max
  Clone ID: PAT_MRT3847_103567C.1.pep
VRPRVRALVRLKPLSLSSKSYLCPVVLSLQQAKYM

SEQ ID NO: 146787 - protein, 698 aa, Glycine max
  Clone ID: PAT_MRT3847_103568C.1.pep
TPHESDTAIALRSNSPIHWISMKNKNSRANRKARSVKPPDSCLSSSNSNKKWMVPYKFYDVKGPNSESNPNVDSSSWVLCTEVQLETILLKNIEIIYNDTVPKLVALGYSEEIAVKAILYNGHCYGANDLATNVLHNSLACLTTGTLDLSESSPAFPDMKKLQEYSLMNLVSLLKEVRPDLSRGDAMWCLLMSNFHVLKAGAIPVPVGNTCPPPPPPLPELENTGWRFAKEGGLGFPLNGLFSDTDMTIRLQRDIEFPKRFDLTPAMKSLLKRNVAMFADGFRANSKQVQPQASEFPRTGSVSKLGSSSASGTAAVLGEQPGDSHNQNDQEDLNSVMSKFLDLNIDDNVEFVPEDDKEEVIVTLVNQIKDLEKQVKERKDWAHEKAIQAAKKLSSDLIELKKFKMEREENKKLPKETGAAEELDNPTMMRLSEMENALRKTSGQMDQATAAVRKLEAEKAEIKAELEASKLSASESVTSCLQVAKREKKCLKKLLTWEKQKVKIHQDISDEKQKILEIQEELAQIKQCAKETEVTRKEELKAKEEALALIEEERRSKEAAEANHKRNLKALRLKIEIDFQRRKDDLPKAGAEIHALKAPARSTTLPTSESEDAEPQRETLAKLLLELDNVKDFSGKEINGDRECIICGKDEVSVIFLPCAHQVMCARCGKEYGKKGKAVCPCCRVPIEERIPIFGACS

SEQ ID NO: 146788 - protein, 61 aa, Glycine max
  Clone ID: PAT_MRT3847_103569C.1.pep
KRAKNMSGKSFFDKLFGGLLRAFENSLRNNPKNNGGTLKGGSSICFWMPKFFITKGEKTFQ

SEQ ID NO: 146789 - protein, 52 aa, Glycine max
  unsure (1)..(52): unsure at all Xaa locations
  Clone ID: PAT_MRT3847_10356C.1.pep
ALVGLLEVGRVGVCLLAGSDSLLSSCSFRXLKVYFFSGSLEKYAGVLYGLGV

SEQ ID NO: 146790 - protein, 51 aa, Glycine max
  unsure (1)..(51): unsure at all Xaa locations
  Clone ID: PAT_MRT3847_103570C.1.pep
LEIGDLQYWMVXNYFYTCSAHTGGVTWVKVIQNKQTTQSEGDGFIEFNSHA

SEQ ID NO: 146791 - protein, 88 aa, Glycine max
  Clone ID: PAT_MRT3847_103571C.1.pep
PQGKNPRGGGVESFTPIRKRLKNRYFCITLCKKKKSFVTRVSVSTKKRAAHSLKFFSPEPSQKLSFVNSPTQVVLKQKSGIMGEKAFS

SEQ ID NO: 146792 - protein, 172 aa, Glycine max
  Clone ID: PAT_MRT3847_103572C.1.pep
MEFGSGSPGDHHHHHDGSSDSQRRKKRYHRHTANQIQRLESMFKECPHPDEKQRLQLSRELGLAPRQIKFWFQNRRTQMKAQHERADNCALRAENDKIRCENIAIREALKNVICPSCGGPPMNDDCYFDEQKLRLENAQLKEELDRVSSIAAKYIGRPISQLPPVEAIDICC

SEQ ID NO: 146793 - protein, 270 aa, Glycine max
  Clone ID: PAT_MRT3847_103573C.1.pep
FAWRWRTEIFSLSQHNLSLAIQNETTFVPPPSTARSVSMRDMGTEMTPIASQEPSRTGTPVRATTPMRSPNSSRPSTPPRASPASTLTDLHSDNLNLNMNELSEKELQMKTRREIMVLGTQLGKMNIAAWASKEEEDKDASTSLKTKAELPKSVVEARAAAWEEAEKAKYMARFRREEMKIQAWENHQKAKTEAKMRKIEVEVERIQGKAQDKLTNKLAAARHKAEEKRAAAEANRNHQAAKTEEQAEYIRRTGHVPSSYLSFSCCNWCS

SEQ ID NO: 146794 - protein, 84 aa, Glycine max
  Clone ID: PAT_MRT3847_103574C.1.pep
ALLKPITVNQTNKTIHHHHHRHQQSHFSLFFFSLKYKLLSCLPLHPLTLDPHPPLSVPFHQVSIWIHFFHTQYFLFQPLYSSPR

SEQ ID NO: 146795 - protein, 59 aa, Glycine max
  Clone ID: PAT_MRT3847_103575C.1.pep
KRLSISNTSLKEIQSHYNCHGIPQKKVIVAQESNNRVIQQKPTLSSLRCWLMNPYIKSE

SEQ ID NO: 146796 - protein, 37 aa, Glycine max
  Clone ID: PAT_MRT3847_103576C.1.pep
VIINSISSAHNYVRTHNMSETICNSLRIFYCSISTCS

SEQ ID NO: 146797 - protein, 204 aa, Glycine max
  unsure (1)..(204): unsure at all Xaa locations
  Clone ID: PAT_MRT3847_103577C.1.pep
HERSNPQEAIPCICCGKAHIPVSILQYVDDTIXFGETTLQNIKVIKAILRSFELASGLKINFAKSCFMAFGKSDQWTKEAADYFNCSIMTLPFIYLGIPIGANPRHNELWDPVVRKCERKLSTWKQRCLSFGGRVTLIQSTLSSIPIYFLSFFRLPSETAAKLIKIQRRFLWGGGSDQRKIAWMKWESVCLPKEKGGLGIKDTQ

SEQ ID NO: 146798 - protein, 50 aa, Glycine max
  Clone ID: PAT_MRT3847_103578C.1.pep
KLYKACPTYLKYNNRILPEVQTPNPDPLFYLKAFIANRSCEGQHINAEHQ

SEQ ID NO: 146799 - protein, 82 aa, Glycine max
  unsure (1)..(82): unsure at all Xaa locations
  Clone ID: PAT_MRT3847_103579C.1.pep
LIIQGEPNMIGDNDIKLYIGSGNVDVWQGDKNEKRSNNNEVNEGFKYRGLKYLFTRSPGCXGLFCTDNKRYPDISPPARAEF

SEQ ID NO: 146800 - protein, 259 aa, Glycine max
  Clone ID: PAT_MRT3847_10357C.1.pep
YGCEKTTEGFVTVGERGIVRIWNSKGAGCIFEQKTSDVTAGMDEDGSRRGFTSAVMLASDQGLLCVTADQQFLFYSLDFTEQLLQLNLTKRLVGYNEEIVDMKFIGDDEKFLALATNLEQIRVYDLSSMSCSYVLSGHTEIVLCLDSCVSSSGKPLIVTGSKDNSVRLWESESANCIGVGIGHMGAVGAIAFSKRKQDFFVSGSSDHTLKVWSMDGLSDNMTMPINLKAKAVVAAHDKDINSVAVAPNDSLVCSGSQDR

SEQ ID NO: 146801 - protein, 79 aa, Glycine max
  Clone ID: PAT_MRT3847_103580C.1.pep
VNGVDLDDSVDGNEASAAMKAIADVLSSQQQTSVPVQNDLYSENELKGEAADQYPNTNANEDILAPDSNTSEEDPTNVS

SEQ ID NO: 146802 - protein, 94 aa, Glycine max
  Clone ID: PAT_MRT3847_103581C.1.pep
FLPSPPHPLLPLFFFFSPFFSHPTHLSFLRSHPSSPIVCHAPSPSPISPSSNPMVLHPDLPSNRHQPNAAATSEKMTMTLHAPDQTSLQPRRRR

SEQ ID NO: 146803 - protein, 91 aa, Glycine max
  unsure (1)..(91): unsure at all Xaa locations
  Clone ID: PAT_MRT3847_103582C.1.pep
TKGRRXRXTXQKKGRAEXXXKXXDXXXXXXXQXRNNPAKGXXXRNKXRXXXAXQXKKTTQNXXXRAHGQTEXXRHEKRKXXXXRXXGRGXQ

SEQ ID NO: 146804 - protein, 32 aa, Glycine max
  Clone ID: PAT_MRT3847_103583C.1.pep
NNSFYFHVNYLTIMTFFNAIMLITHPFSLIIL

SEQ ID NO: 146805 - protein, 113 aa, Glycine max
  Clone ID: PAT_MRT3847_103584C.1.pep
MTATTESEKKKREEEEEPEQVVNPWEVSAKGKIDYDKLIDRFGCQKLGEALISRLEQLTSRTPHVFLRRGVFFAHRDFAEILDAYERGDKFYLYTGRGPSSEAGHLGHLIPVM

SEQ ID NO: 146806 - protein, 36 aa, Glycine max
  Clone ID: PAT_MRT3847_103585C.1.pep
VFRICSPHSLTCVISTPVCVLLDQQLLFRKSLFYVL

SEQ ID NO: 146807 - protein, 410 aa, Glycine max
  Clone ID: PAT_MRT3847_103586C.1.pep
MAATTESEKKKQEQEEVQEQDEVQEQVVNPWEVSAKGKIDYDKLIDRFGCQKLDEALISRLERITSRTPHVFLRRGVFFAHRDFAEILDAYERGDKFYLYTGRGPSSEALHLGHLIPFMFTKYLQDVFKVPLVIQLTDDEKFFWKNLSIDECRRLARENAKDIIACGFDISKTFIFSDFNYVGGSFYKNMCEVGKRVTYNQAVGIFGFVGEDHIGKVSFPPVQAVPSFPSSFPHLFSGKENLRCLIPCAIDQDPYFRMTRDVAPKMGFHKPALIESLFFPALQGETGKMSASDPNSAIYVTDSAKDIKNKVNKHAFSGGQDSIEKHRQLGANLEVDIPVKYLTFFLEDDDELEHIKKEYGEGRMLTGEVKQRLIQVLTELVERHRRARASVTEEMVDAFMAIRPLPHMFD

SEQ ID NO: 146808 - protein, 81 aa, Glycine max
  Clone ID: PAT_MRT3847_103587C.1.pep
FKQAAQQATALTPTFCQARKLSYQKNLLRVRETHGSTFMSVGAHPRTGEWAALLYLSNYQNAKLLGENFNSCLILYRLLSS

SEQ ID NO: 146809 - protein, 275 aa, Glycine max
  unsure (1)..(275): unsure at all Xaa locations
  Clone ID: PAT_MRT3847_103588C.1.pep
GSSSSRIGLSGSSGSSGSRAFRGDYETCLVYTEEMKERCVEQFKQGTVCMEQLAAVEGLCELVRKAVGAAESVRRYHVNLSIFTSVPDAWGIDQVFPIIPIHRLEEKPSVRGILSDLTCDSDGKIDKFINGESSLALHEMEEGSYYLGMFLGGAYEEALGGVHNLFXGPSVIRVSQSDGPHSFAVTRAVPGPSCGDVLRVMQHQPELMFETLKHRAQEYVSHDNAAAVLAAGLARTFDRMPYLLPLSSFVADDVAAAAAVPAGEDDEEQWSYICA

SEQ ID NO: 146810 - protein, 52 aa, Glycine max
  Clone ID: PAT_MRT3847_103589C.1.pep
PPPPMIDIHGWQVKLTMHVGKKRDCKSKSIILHQRVTSYKINSHKFIAEQKV

SEQ ID NO: 146811 - protein, 223 aa, Glycine max
  Clone ID: PAT_MRT3847_10358C.1.pep
MRQWLFLRRFSLWSMKKEPDLESALSRNRRWIVNNQIKNIILRYPNNEIPIHTLQNKFKTLDLQGKALNWLSKYPCCFQIHDNRCRLTKRMMNLVAEEQSLLDSLEPLFARILAKLLMLSLTKRLTVLKINEFKRSFGFPDDYILRIVPKYPNLFRIVNESGRRSSMAVELLHWDPDLAVSTIEASAKKLGTPPRFSCSLPSSWVKSWERFHEFESIPYFSPY

SEQ ID NO: 146812 - protein, 56 aa, Glycine max
  unsure (1)..(56): unsure at all Xaa locations
  Clone ID: PAT_MRT3847_103590C.1.pep
MAXHLXFIXRTXMVHXGXVXXXYRTLNXILTTDGLXXXIXXRXXYETPXPXXQRES

SEQ ID NO: 146813 - protein, 39 aa, Glycine max
  unsure (1)..(39): unsure at all Xaa locations
  Clone ID: PAT_MRT3847_103591C.1.pep
MSETAALVSWSNGLCGCFSDCNTXCLTFWCPCARFGRIG

SEQ ID NO: 146814 - protein, 83 aa, Glycine max
  Clone ID: PAT_MRT3847_103592C.1.pep
FINQFCRVGFPIGNPGVPPFHLGWVFFFIFYPKTFSLWFRFVFCFGLCVKSPSLRKKRWPSLPRAVFPVVYGGLEKMKVKERN

SEQ ID NO: 146815 - protein, 55 aa, Glycine max
  Clone ID: PAT_MRT3847_103593C.1.pep
MARLKVLSALDTARTQYYHFKAIIIAGMGLFTDAYDLFSITLIIKIIGRVYYGHR

SEQ ID NO: 146816 - protein, 45 aa, Glycine max
  Clone ID: PAT_MRT3847_103594C.1.pep
PRVVAPASLKVAGDVWFGTGVFPPGKVGFVSKPGVELEVPSGVAF

SEQ ID NO: 146817 - protein, 42 aa, Glycine max
  Clone ID: PAT_MRT3847_103595C.1.pep
YVDNVNRNHSYNHNRFSTIAICLSSSHGYRCQSSYQGMNARP

SEQ ID NO: 146818 - protein, 198 aa, Glycine max
  Clone ID: PAT_MRT3847_103596C.1.pep
ISREMIELQGGEIGVRSRPGKGATFAFYIAARTADAPPPSVQQSLSSPALMSGRRPSENTRARYSILVVEDNLVNQKILRMQLQKLGHEVHVVSHGREALDFLETTSCWEGGTASHTHVSIILMDIEMPVMNGLECTRRIREAESEGRVKRHLPIIAVSANAREGQVRYAMECGVDDAISKPFRVADLMPIIERLALV

SEQ ID NO: 146819 - protein, 72 aa, Glycine max
  Clone ID: PAT_MRT3847_103597C.1.pep
ILEPRQFIFKPEAWAYYMKDPYISGLSPPCSQIDGQMAPKKTGGFPLLKAMLQFWLICTPLFLKNYIRIKLL

SEQ ID NO: 146820 - protein, 171 aa, Glycine max
  unsure (1)..(171): unsure at all Xaa locations
  Clone ID: PAT_MRT3847_103598C.1.pep
MHLYCSRTLADYNIHKESXLLLALRLRGGLQIFVNTLTGKTITLEVESSDTILNVKAKIQDIEGVPPNQQQSIFAGKQLEDGRTLADYNIHNESTLHLVLRIRSGMQILVKTLTSKTITLEFESYDSIDDAKANIQDTEGNPPYQXRLIFAGKQLEDRRTLADYNIQKEST

SEQ ID NO: 146821 - protein, 100 aa, Glycine max
  Clone ID: PAT_MRT3847_103599C.1.pep
FEFEKKKNRPEKYARNLAENVLKALLKIDKIRVSRGESPLKTRMKGKKEKFFKEPVKELDQGPSLVKAPFVFHQDPSFPFPKIKVKVSPPQSEENHPMEG

SEQ ID NO: 146822 - protein, 194 aa, Glycine max
  unsure (1)..(194): unsure at all Xaa locations
  Clone ID: PAT_MRT3847_10359C.1.pep
LEPIRLEKAQKEVFESNKQDITVAMMKTYPLLLRKFISDKAKVSSLVEIVLHMNLEYYSLKRQEQNFKNLLQLVKEAFFKHGDKDPLRACVKAIDFCCIESQGELQDFARNKLKELEDEIIAKLKSAIKEVLDGGDEYSLLVNLKRLYELQLKRSVPINSLYEDIVTVLRGNRDMEDEXLXGFLLLNMYLHLAW

SEQ ID NO: 146823 - protein, 71 aa, Glycine max
  Clone ID: PAT_MRT3847_1035C.1.pep
SALGPGLHPQWFAFPRKMAERNAWKRSSGTIWTPFQSKRWGSGRIIELVPSDKSQTQKELNLRKGMVSSET

SEQ ID NO: 146824 - protein, 86 aa, Glycine max
  unsure (1)..(86): unsure at all Xaa locations
  Clone ID: PAT_MRT3847_103600C.1.pep
SISLQIHSPFPNMSQRYDNNVFKSHINNIQLAPGITETLHLPPPLQTEXTIRGKQNGKSKGPRNAKSANADSPNSTAVNNCRYDSS

SEQ ID NO: 146825 - protein, 186 aa, Glycine max
  unsure (1)..(186): unsure at all Xaa locations
  Clone ID: PAT_MRT3847_103601C.1.pep
HASEEMFKVETAIQKDEMHKSDEAHKERKESKEQFELKNEKSRDDVEYKQDQVTEDILNTGPPAKKKRNGKEKSGEESLSKANLINDFNVDSTSHHILEDQQKIKNSNADQSAEHFDDTNPPRTSVRGRRKKGKINSSNPYETXCSXLLPGKMKKQIVPVFKGGVQKEISEDGLSSKESWYEQSYY

SEQ ID NO: 146826 - protein, 93 aa, Glycine max
  Clone ID: PAT_MRT3847_103602C.1.pep
MNMEKGKPFSAYHHSSSYHDFRAGLEGRTISYSFNGPRSSKRDVLATNGNPELKRRKRVASYNMYTVEAKLKSSFRSSFKWIKNKLCRPLLSL

SEQ ID NO: 146827 - protein, 53 aa, Glycine max
  Clone ID: PAT_MRT3847_103603C.1.pep
LLSFQKKKTLKNKKCFRVFLSNLYGKKLLRIKGLKNKLYPITPFSFKIKGQFV

SEQ ID NO: 146828 - protein, 113 aa, Glycine max
  unsure (1)..(113): unsure at all Xaa locations
  Clone ID: PAT_MRT3847_103604C.1.pep
SXMTSFYIKCTXSLWXSFEKEAAHSIHFXAFPHKLVHLGEIQEKVVLKFSQXEFLTARSTQVHPXATSLFADGSPYXLYAMVHDNSASTIPCDFVIDVKLTTINNMCAYGLNP

SEQ ID NO: 146829 - protein, 60 aa, Glycine max
  unsure (1)..(60): unsure at all Xaa locations
  Clone ID: PAT_MRT3847_103605C.1.pep
TEDEVTKDGTEAKNALGKQNKKLYRMKNVKIQXTKNGGRRRAKIFLEKKTGARGLRGVLE

SEQ ID NO: 146830 - protein, 107 aa, Glycine max
  Clone ID: PAT_MRT3847_103606C.1.pep
FPCGRPRDIAEVPKKYPTPTPQRPTTKGNNGTPKRQQQPQAHHQTQQWEKKPPNPQRNPTEAPRQHTHRPNKPKRTHTEKPRNSNHGRQPEPAKGQNPAHPRRASKH

SEQ ID NO: 146831 - protein, 82 aa, Glycine max
  Clone ID: PAT_MRT3847_103607C.1.pep
LILMNFINFIVHLTLFVFCVAFAPVTMCLLIYYHCKCKYVIINYLYFIPKTSAFPMRFFVPKTFAFPIHFFVMVLLVVIIIN

SEQ ID NO: 146832 - protein, 59 aa, Glycine max
  Clone ID: PAT_MRT3847_103608C.1.pep
PPGKSPKIKKAQNVFNLPGKCLDIMKAIKKKKSCPRQGGSPVKNPSEPSPCQGKVGLSS

SEQ ID NO: 146833 - protein, 92 aa, Glycine max
  Clone ID: PAT_MRT3847_103609C.1.pep
SFKFGPGMGGAGGAFEKIGGGFQFPSTFWLEMAALEPGEEKIARSFQIGRKKIWGPSMVIMEGLPGPYEVEGDFLREVIYSNKGVGILPWLF

SEQ ID NO: 146834 - protein, 93 aa, Glycine max
  unsure (1)..(93): unsure at all Xaa locations
  Clone ID: PAT_MRT3847_10360C.1.pep
QVKSGTLFAKVLITDDPEXAQQLXEETWGKHKDXRRQPFKRLXKKREEEESKDGPVDFDADEEKEDSYETGNDSHAESKTETGEDPKEEGVHY

SEQ ID NO: 146835 - protein, 56 aa, Glycine max
  unsure (1)..(56): unsure at all Xaa locations
  Clone ID: PAT_MRT3847_103610C.1.pep
XRKYPADQPFQFNLFNFFRFQLIRFFKSKRRTLTFYNSPPSIFNRVEKVNFLKFFL

SEQ ID NO: 146836 - protein, 135 aa, Glycine max
  Clone ID: PAT_MRT3847_103611C.1.pep
KLVFNILFFLSVFGFLDQMEESKKNPSQLNRFQDDGMHDLDIVEWKKKRKLQSDQLDLIRPKHKCWVGSFSSEHASVFDKNPVLESMHNHTVESSKHESAKDSNSFMEDCDTAMSVNEEPQLIFASADTEEIVDA

SEQ ID NO: 146837 - protein, 174 aa, Glycine max
  unsure (1)..(174): unsure at all Xaa locations
  Clone ID: PAT_MRT3847_103612C.1.pep
MMEDVHCGEFILLQGENYVGITDSEASNQSMKRTFYLVNKKNDSAIAFVDGALEFVRKPGSPIKFKVFNDITAAYGVSETASYPRMAPQTTLRTDEESTSWQGGKHPXIDIRIEKISLNIVHELSDTEYLFPLICLFINNTQLIIQTLATKSRVISTSSAVAHYFDAERNLWLV

SEQ ID NO: 146838 - protein, 162 aa, Glycine max
  Clone ID: PAT_MRT3847_103613C.1.pep
PQIDVTFDIDANGNVTVSAKDKSTGKEQQITIRSSGGLSEDEIEKMVKEAELHAQKDQERKALIDIRNSADTTIYSIEKSLGEYREKIPSEVAKEIEDAVSDLRQAMSGDNVDEIKSKLDAANKAVSKIGEHMSGGSSGGSSAGGSQGGDQAPEAEYEEVKK

SEQ ID NO: 146839 - protein, 52 aa, Glycine max
  Clone ID: PAT_MRT3847_103614C.1.pep
NELVYRNVHLTSKKKKKKKKKKKKKKKKKKKKKKKKKKKKPNNLSKQFNTPQ

SEQ ID NO: 146840 - protein, 63 aa, Glycine max
  Clone ID: PAT_MRT3847_103615C.1.pep
QNLSVFKNSMQQASFFTPAYNNYDNSNALFIINSLYYNLTCKECYNQDNFSDFIPNLTLLESL

SEQ ID NO: 146841 - protein, 65 aa, Glycine max
  Clone ID: PAT_MRT3847_103616C.1.pep
KRPPTQKHNENIHTDKLWLCPLRRGAERQKRVGEEVTLPTETNSGLSLYFLFQLFDSTRFDPFFV

SEQ ID NO: 146842 - protein, 72 aa, Glycine max
  Clone ID: PAT_MRT3847_103617C.1.pep
HGKNPGSRSGELIHFSRGFLHLGDKYRITIPMENLRKSACLLSNWIGGSLLLLALTQLVHWKPLDKDRTARI

SEQ ID NO: 146843 - protein, 52 aa, Glycine max
  Clone ID: PAT_MRT3847_103618C.1.pep
KKASKVEEWLEALVVSSNQKPRLLVHFQVSFKSPVWVINKLSHHYGSFPVNQ

SEQ ID NO: 146844 - protein, 139 aa, Glycine max
  Clone ID: PAT_MRT3847_103619C.1.pep
RHASERDKQGLPPFQQGLIYFGEQLADGRTLADYNIHKELTLHLVLRMQGGMQTFAKTITGKTMTSEEASYDTIDNVKDKNRDKEGLPPDQQRVKHAGKQLAYGHTLTDNNIHKESTLHLVLRLQSCMQTFAETTTAKT

SEQ ID NO: 146845 - protein, 61 aa, Glycine max
  Clone ID: PAT_MRT3847_10361C.1.pep
NTSEPLSGFVVINSEWRIMTRDQMEDSDTPKANDIPRRACHVWSSYTEAPQTIRYFHNAIH

SEQ ID NO: 146846 - protein, 92 aa, Glycine max
  Clone ID: PAT_MRT3847_103620C.1.pep
SGIAETPWKNSYARLVLAYGSLWIAKAFGASGTQGGYVVIETSWTGYQERLTDPSYAVQGGLMTHPHIANNGIKLDDDESLQCVLAGLDVIR

SEQ ID NO: 146847 - protein, 308 aa, Glycine max
  unsure (1)..(308): unsure at all Xaa locations
  Clone ID: PAT_MRT3847_103621C.1.pep
MGDGSIVGHLPEEILLNVFSAVSDTRTRNALSLVSWSFYHLERKTRTSLTLRGNARDLHLIPTSFKHVTHLDLSFLSPWGHALFCSSSATVGHQSLLAQHLRAAFPRVTSLAIYARDPYTLRLLLLSAWPELSAVKLVRWHQRPPTSANEADFAELFKKCRSLASLDLSSFYHWTEDIPKVLAANPISAATLRRLNLLTTSLPEGFKAHEIESITASCPNLEHFLVVCTFHPRYIGFVSDDTLVAIPSNCPKLSLLHLADTSSFLNRREDEGFDGEDASVSRAALLTXFSGLPLLEELVLDVCXNVKR

SEQ ID NO: 146848 - protein, 84 aa, Glycine max
  unsure (1)..(84): unsure at all Xaa locations
  Clone ID: PAT_MRT3847_103622C.1.pep
MSTYISHGANSEMPESYNLYAGWYESPLIDRVVTSXEMIXTYDNAIHGXATRLTGGESRLLRRQTAILSAQPDTMYHLCTTRWP

SEQ ID NO: 146849 - protein, 62 aa, Glycine max
  Clone ID: PAT_MRT3847_103623C.1.pep
TMNLMLEDFLWTTNTHIQIVEGQLLVINKNMYFFKITTCEVKDFQFFQYVMIDLYSNVRLCM

SEQ ID NO: 146850 - protein, 36 aa, Glycine max
  Clone ID: PAT_MRT3847_103624C.1.pep
MFYFCFFKYQITAGKCIIKSDCITYISFHSHSILNQ

SEQ ID NO: 146851 - protein, 75 aa, Glycine max
  Clone ID: PAT_MRT3847_103625C.1.pep
LLAWKHFGANFLKSGLGGQLSLVAAVPKPKPLELHCVDLSLGLPLPPLLGCLKLVPAFIEVPIVMVVVPFCGLLA

SEQ ID NO: 146852 - protein, 53 aa, Glycine max
  Clone ID: PAT_MRT3847_103626C.1.pep
VLTFSSLDHPCFSFAESIPRCTSVSVVCKITPRWSKSCSSRFGSTSSQLEPNS

SEQ ID NO: 146853 - protein, 92 aa, Glycine max
  unsure (1)..(92): unsure at all Xaa locations
  Clone ID: PAT_MRT3847_103627C.1.pep
MVLGWRRRKGCNNNRRKGGKSITELVIPNHFRCPIYLDLMKDPVTLSTGITYDREMTXSWFDNYDRACVVANHCERNLVMMPNHSLRIMIQD

SEQ ID NO: 146854 - protein, 91 aa, Glycine max
  Clone ID: PAT_MRT3847_103628C.1.pep
TPRGFRGPVIVGHHAGSTKGVALCPGDVPLGSTSVFSWYRKFWGRFKPSLGHVDLALGIQGAYSVNSPLSSVSLCYSRRVYITLAILCWCP

SEQ ID NO: 146855 - protein, 60 aa, Glycine max
  Clone ID: PAT_MRT3847_103629C.1.pep
LLYRFSLTNLPLSNFYPKHYIVPFYLHNSTLPLIYTYTITIYQSTLQNIFHTYHNTLYYS

SEQ ID NO: 146856 - protein, 97 aa, Glycine max
  Clone ID: PAT_MRT3847_10362C.1.pep
TSFKAFQSHPFSNHFFLCWHNFNNLFFVLDLTMAHLALSQMAVTVPVGSDLSLRRSAVKAPNFNFWDKSWAPVFTLYLKANNSSLRSRHVVFMSVQQ

SEQ ID NO: 146857 - protein, 48 aa, Glycine max
  Clone ID: PAT_MRT3847_103630C.1.pep
HHQAMFLETIHLDGFPEGSIHLQCGSSVHSQFDTRTSRVFFSNKCYLP

SEQ ID NO: 146858 - protein, 73 aa, Glycine max
  Clone ID: PAT_MRT3847_103631C.1.pep
GLVLEEAAAFVLFEVGFAVITPVLELGPVGLLLHVFVETGTALLVLGGDLPCVGGGGAFVSGHFDSLIGGLIE

SEQ ID NO: 146859 - protein, 79 aa, Glycine max
  Clone ID: PAT_MRT3847_103632C.1.pep
LFTLKSDSGASHIAMLENEQRKLSRNSNGHNFSHGGQIRAHNMSRCSTLNNRSSRGIQMVITFHTEVRFGHIICRDARN

SEQ ID NO: 146860 - protein, 114 aa, Glycine max
  Clone ID: PAT_MRT3847_103633C.1.pep
NLFLFFFFFFYFFFFFKGQNPGPNLIKGKKKTRNPPPQNREALSMPIFSKGDTKTGGQSPVILKNTKLFPPPDEGGGPCVPFKRGPILRRKTKKKIAPLGKNRTNKSSVPGPTR

SEQ ID NO: 146861 - protein, 126 aa, Glycine max
  Clone ID: PAT_MRT3847_103634C.1.pep
EAKEIIEVESEGNKPPKETLVNATAKVSEETQSIGSIQLKEALIEPSEEGKPSGGSERNASETKKPETPIVTEVGPMPEERVIEEIPTDAKSVEKVTKEAASSTEEKSHNGVENAPKAVDAGTEIH

SEQ ID NO: 146862 - protein, 127 aa, Glycine max
  Clone ID: PAT_MRT3847_103635C.1.pep
KTSLGAKKPAASLRAVADSLRPVAGPVFPLENGHFGLRNLCGFGPSLGAPGFTFYASGLYFLGHGWRVTLSPGKLVCPRVPPALIWLPLGKIGSPVGHGSKFPGPTPGSPPGPENAFAGIIFFWAVP

SEQ ID NO: 146863 - protein, 123 aa, Glycine max
  unsure (1)..(123): unsure at all Xaa locations
  Clone ID: PAT_MRT3847_103636C.1.pep
TWLAFSSSSISSSSSSSSSSDASGSWTLCGSSSSSSYSSSSDASGSWTXCGSGATLLGAXGGGEWAVSKSSSSSSSSSSSSSEPEPEAVSSEEAAGGGGGGGGAERLGAISAAAPRVRDLASW

SEQ ID NO: 146864 - protein, 150 aa, Glycine max
  Clone ID: PAT_MRT3847_103637C.1.pep
LLGHSAREKINEEVRDWVNGSTGRFSPDYCRGADGLVWVRKFSRGDEKECDCSALEHVLSTVPGVKRMVMGHTIQTVGINGVCDDKAIRIDVGLSKGCGDGLPEVLEISGSSGLRILTGNPLYQNKGNVDVGKEQGLGEHGGPRQVEVKA

SEQ ID NO: 146865 - protein, 51 aa, Glycine max
  Clone ID: PAT_MRT3847_103638C.1.pep
ARATSVFLDGQHSTDVFPVFTTTTASQLISGLSLGTFSYRLTRRTAMTIKL

SEQ ID NO: 146866 - protein, 111 aa, Glycine max
  Clone ID: PAT_MRT3847_103639C.1.pep
DGCQYYRGASTPTCSQLKDESGVAGVAIYSPKLREGSCNHRGLDHFLFPLQIINDQWATFTLHLLADRKINIYLGKNMIKVYKAFSVLTEIYFPLWAYVIVKELLHPAHSF

SEQ ID NO: 146867 - protein, 119 aa, Glycine max
  unsure (1)..(119): unsure at all Xaa locations
  Clone ID: PAT_MRT3847_10363C.1.pep
FSRSEILDTIFEVGVAVFFVKKKKKKKKKKKKKKKKKKKRKDEKKEPNLPNASMQRNTSFLGKPKYNQRAGVXQRRAGENPGGPHLNGLADHPPLAGWRIREGAAPDRPSHQWRTLNGE

SEQ ID NO: 146868 - protein, 75 aa, Glycine max
  Clone ID: PAT_MRT3847_103640C.1.pep
PIFFSQGKELVNNFTNQAHYFNKRNLYPTTPNKNFVWTLPFFQLRLWFSPYKNNLSFDHFRPSFLNFFLTCRPLQ

SEQ ID NO: 146869 - protein, 244 aa, Glycine max
  unsure (1)..(244): unsure at all Xaa locations
  Clone ID: PAT_MRT3847_103641C.1.pep
YRVISNEWQSSPKGACCCIGTDHTFSTHLMTATGNFNSKNILGQGGFGVVYKGCLANKMLVAVKRLKDPNYTGEVQFQTEVEMIGLAVHRNLLRLYGFCMTPDERLLVYPYMPNGSVADHLRETCCEKPSLDXRTGECVLHEQCNPKIIHRDVKAANILLDESFEAVVGDFGLAKLLDQRDSHVTTAVRGTVGHIAPEYLSXGQSSEKTDVFXGLAYSLLGLITGHKALDAGXGQVQKGMILVG

SEQ ID NO: 146870 - protein, 90 aa, Glycine max
  Clone ID: PAT_MRT3847_103642C.1.pep
LTTTMSMLISLLVVQQCILGAWYVILLISIFLKESAVLLIYLVCPFLNHSILKSNARLILHVPDNLFAENMRCQKFSRLEPTTVTADGRS

SEQ ID NO: 146871 - protein, 167 aa, Glycine max
  unsure (1)..(167): unsure at all Xaa locations
  Clone ID: PAT_MRT3847_103643C.1.pep
MGLYEHPDVVQWGINLFDSDPAYSPGYYSDIIQHDTGDVYNGHYYHNHYDTESNQIQNDEIIARALQEEFSRLDIAECSGYSQTDEEQFHASEPTYDWNNTSMMNYCSGXDYAYNGVGDIEPSSSSCCSPCEPEESSLELTDNYPLDDEXGRRLSQMGPTPHGPKIN

SEQ ID NO: 146872 - protein, 62 aa, Glycine max
  Clone ID: PAT_MRT3847_103644C.1.pep
IREGFEPLHRRSNLLPLDLEIIGLDVETASLLTQWDEGSLHLVYFSWCGIISTLSGRRLSDF

SEQ ID NO: 146873 - protein, 180 aa, Glycine max
  Clone ID: PAT_MRT3847_103645C.1.pep
MEEPSSLSSVERNVHIASVVEAMAVDTILAAAKSLICFFILTGSLLTDVNHSVSPKLTPMDGRFPFDDLCKGKHTYLLNKDASDSDEDGDEEEDDDDADDQDDEEGDEDFSGEGEEEADPEDDPEANGAGGSDGDDDDDGGDDDDDDDNGDDDGEDEEEGEDEDEEDEEDVPQPPAKKRK

SEQ ID NO: 146874 - protein, 179 aa, Glycine max
  Clone ID: PAT_MRT3847_103646C.1.pep
MTMEELSSLSSVERNIHIASVLEAMAVDTIFAAAKSLLCFSILTGSLLTDINHSVSPKLTPMDGRFAFDDLCKGKHTYRLNKDASDSDEDEDEEDDHDTNDQNDEEGDEDFSGEGEEEADPEDDPEANGAGGSNDDDDSDEDDDDDNDGDDDGEDEDEKEGEDEEDEEEVPQPPTKKRK

SEQ ID NO: 146875 - protein, 79 aa, Glycine max
  Clone ID: PAT_MRT3847_103647C.1.pep
ANTLICLPEPTWADPDNIRRDAGLPRKTYRCYYPESTRSDYSGLMDDIQNAPDGSFFLLHACAHTPTGVYPSEHPRREI

SEQ ID NO: 146876 - protein, 39 aa, Glycine max
  Clone ID: PAT_MRT3847_103648C.1.pep
GFKIYVYDVLVLRSVRKLSLVQPLQVFDSGVPKEWFNDS

SEQ ID NO: 146877 - protein, 63 aa, Glycine max
  Clone ID: PAT_MRT3847_103649C.1.pep
GPRKGARPPFYKVFFFFFFFFFFFFFFFFFFFFFFFFLIQCKRRRTSFSFYNNVSTLKFAIPR

SEQ ID NO: 146878 - protein, 510 aa, Glycine max
  Clone ID: PAT_MRT3847_10364C.1.pep
MVMELHNHTPFSIYFITSILFIFFVFFKLVQRSDSKTSSTCKLPPGPRTLPLIGNIHQIVGSLPVHYYLKNLADNYGPLMHLKLGEVSNIIVTSQEMAQEIMKTRDLNFSDRPNLVSSRIVSYNGSSIVFSQHGDYWRQLRKICTVELLTAKRVQSFRSIREEEVAELVKKIAATASEEGGSIFNLTQSIYSMTFGIAARAAFGKKSRYQQVFISNMHKQLMLLGGFSVADLYPSSRVFQMMGATGKLEKVHRVTDRVLQDIIDEHKNRNRSSEEREAVEDLVDVLLKFQKESEFRLTDDNIKAVIQDIFIGGGETSSSVVEWGMSELIRNPRVMEEAQAEVRRVYDSKGYVDETELHQLIYLKSIIKETMRLHPPVPLLVPRVSRERCQINGYEIPSKTRVIINAWAIGRNPKYWAEAESFKPERFLNSSIDFRGTDFEFIPFGAGRRICPGITFAIPNIELPLAQLLYHFDWKLPNKMNIEELDMKESNGITLRRENDLCLIPIARQP

SEQ ID NO: 146879 - protein, 46 aa, Glycine max
  unsure (1)..(46): unsure at all Xaa locations
  Clone ID: PAT_MRT3847_103650C.1.pep
MESSKIYAYLFLCMLFLSSATPILGCGYCXKPPKKHKPXXTPKTPQ

SEQ ID NO: 146880 - protein, 67 aa, Glycine max
  Clone ID: PAT_MRT3847_103651C.1.pep
PFPSRSLLADQCRFGASANIRGLSVGSGWPPGVLHYPPRHSTHYGLVHAPWSQYRRRDRVPSGFGVR

SEQ ID NO: 146881 - protein, 29 aa, Glycine max
  Clone ID: PAT_MRT3847_103652C.1.pep
IRHEVPLHTIIEIQMGVTGVQEKRYKLMD

SEQ ID NO: 146882 - protein, 62 aa, Glycine max
  Clone ID: PAT_MRT3847_103653C.1.pep
SKITPLVFSSNVNIGGHSQDFGHHQHCCPNPEIVFWFAQGNLCNFILPILDILYTPSDESRT

SEQ ID NO: 146883 - protein, 39 aa, Glycine max
  Clone ID: PAT_MRT3847_103654C.1.pep
YTKAYFVNTLLYTNHISIRLLKGLKKNHLHRFCLNDQSS

SEQ ID NO: 146884 - protein, 79 aa, Glycine max
  Clone ID: PAT_MRT3847_103655C.1.pep
SMLLGFLSFDLLSSRINDSINKVFHGFSAPTSLSAHRLQGWSATTFTPRVLLSSLVSKTSAEMYENAEALVSGSSIVDR

SEQ ID NO: 146885 - protein, 131 aa, Glycine max
  Clone ID: PAT_MRT3847_103656C.1.pep
SLLLNLKSLFQFIHFPHFLLILTLFLIFFLITYLILIINFFNNQFIISIFLHSITFINIILPFIHTNFFLFLFTYLFLYNLSLFSSSIFFIFFFHPLLYSHLFFHYFLLHYYFLFSFFFKIFFSFIFILIF

SEQ ID NO: 146886 - protein, 42 aa, Glycine max
  Clone ID: PAT_MRT3847_103657C.1.pep
VLSSDVFHHVVPILIEHKFIFSSGFHFTSNITSIQDFASLMV

SEQ ID NO: 146887 - protein, 274 aa, Glycine max
  Clone ID: PAT_MRT3847_103658C.1.pep
MPKKKNKRIKNIGHKPTVPRTKKEKEPTKGGPSGRRKRVTCSPLPPTTPKGTPWFSEEHYEASYKFSYAKKEMIQPKYVNLVWLRSEGFPFLELIEHHGLKKLVEMKGTYYTDLVKVFYTTTHIDGDTEFLCVEVKGQQIVMTPKVWFGIVGLSSKGVMANQLGLKEARFSFNKVEKYKSMMNNPSTYDVVVTKSKGKECFGTRPLMLQHRLLAYVVAWIITPRGRNHAQLIEEDLLLISLMQGKLKINWVNIIFDIMLKTKRIGFFKYPYAIL

SEQ ID NO: 146888 - protein, 194 aa, Glycine max
  Clone ID: PAT_MRT3847_103659C.1.pep
AKQLLIYSGESNMKRVWLEAGGKSPNIVFADAPDLQAAAESAASAIAFNQGEVCTAGSRLLVERSIKDRFLPLVIEALKAWKPGNPLDPETNVGALVDTQQMNTVLSYIESGHADGAKLVAGGKRTLQETGGTYVEPTIFDGVSNAMKIAQEEIFGPVLSVIAFHSVEEAISIANDTPYGLAAAVWTANISQAH

SEQ ID NO: 146889 - protein, 51 aa, Glycine max
  Clone ID: PAT_MRT3847_10365C.1.pep
RWRSLPWEPINVNRPLDKSKLSFFISFCHLYWEMRHPPPQNSIIKFSLNCL

SEQ ID NO: 146890 - protein, 91 aa, Glycine max
  Clone ID: PAT_MRT3847_103660C.1.pep
YMYGEQAEVLLWVNLELHALSGLCREIQQICMCLKSLSSGHEVQYIKLAIHESVYHMHLDRSIATFNGRIMVTYGIRYRVALPIVCQVGRN

SEQ ID NO: 146891 - protein, 81 aa, Glycine max
  Clone ID: PAT_MRT3847_103661C.1.pep
RIFSTSPRLGAFARLCTPCSPTTPTACTRWRTKGAERERPIDVFRQHRGRTHEDIFAKHGLVRRGTVVVALAIMVVGGVVD

SEQ ID NO: 146892 - protein, 87 aa, Glycine max
  Clone ID: PAT_MRT3847_103662C.1.pep
STMMLLRRNSITCKRKSPHPVRRSIMNPLPCDDRVGGHLGSIATASAAQGYDDELGVLWESPLVNAATFSQHVDDHITKRVHDHHNQ

SEQ ID NO: 146893 - protein, 53 aa, Glycine max
  Clone ID: PAT_MRT3847_103663C.1.pep
CLILNQVGRMFHEIVSFIVTPAFTSYLVSNVTGSARVPPPRRIGSNTIARFAE

SEQ ID NO: 146894 - protein, 71 aa, Glycine max
  Clone ID: PAT_MRT3847_103664C.1.pep
RSLVGYSNAFIIISIHFATLCCILYQPLSNKPNTLTISISFHLLNKTIFQQHTSYTLYSTGVVPLISLTLS

SEQ ID NO: 146895 - protein, 103 aa, Glycine max
  Clone ID: PAT_MRT3847_103665C.1.pep
RGYLKSPATLKVINLETLHHEFSSCRGDSDEGEAFTPLFCKHFFHSEGINICLKLLQVGPRSRTLGSAYWGNLVDDLTNVLALKMEKIFAKKKGKRPYFNIIP

SEQ ID NO: 146896 - protein, 43 aa, Glycine max
  Clone ID: PAT_MRT3847_103666C.1.pep
FEAQEILNRSNSSLWLQIHEKQVLIASEKTELEGWKKKTRSLT

SEQ ID NO: 146897 - protein, 329 aa, Glycine max
  Clone ID: PAT_MRT3847_103667C.1.pep
EKSFNLKYDEIHTGSHLSGSQKSKATDEVKKSIVKGKRSSVSTAHSRQLKGVKSLGNLSSSANDKGEKDDSSFSLMKVSSTNQGGPLNRGKPRRKMEKPKPMVQQDLVVSRNIFSSQHKKSIASLQDGSYSQKGKLINCLSSYQMRRWCTLEWFYSAIDYPWFSKREFVEYLDHVGLGHVPRLTRIEWGVIRSSLGRPRRFSEQFLIEEKNKLNQYRESVRSHYAEILSGTKEGLPTDLAQPLIVGQRVIAIHPKTREIHDGSVLTVDHCRYRVQFDQPELGVEFVMDIDCMPLYPFENMPTSLIQHNISSAQMKLLLFELLKPRKLGE

SEQ ID NO: 146898 - protein, 45 aa, Glycine max
  Clone ID: PAT_MRT3847_103668C.1.pep
YTLNNHSPGQPNMNTHQPTKFSQLGQIRCVGQQHGRRLGVHICRH

SEQ ID NO: 146899 - protein, 74 aa, Glycine max
  unsure (1)..(74): unsure at all Xaa locations
  Clone ID: PAT_MRT3847_103669C.1.pep
TIXKNXQYIQIPFCFVYKMCPLTPSDLKRIFNXVDMNGDGLLSLEELKMLLEXTGFSYSIEELESLVGKKSLDF

SEQ ID NO: 146900 - protein, 82 aa, Glycine max
  Clone ID: PAT_MRT3847_10366C.1.pep
NYHGILDYIIGKLFFLYIHNFIQLISSGFPTIAPVHCKINNAGFWHEPRNEHPYSPCSDDGGVKCKCPSSFKGHCVKNFKNI

SEQ ID NO: 146901 - protein, 173 aa, Glycine max
  Clone ID: PAT_MRT3847_103670C.1.pep
MQTTQGEQSNNASAVHWERFLPRMVLRVLLVEADDSTRQIIAALLRKCGYKVMSSHDSVSMVFKCMLKGAADFLIKPVRKNELRNLWQHVWRRHAISRPPQNLTLPEIELGFAAENHAASNDSSGSVASTPKDDECSEKTEAHDILQLKSSSNLSNIDTVKHENSTKCERESD

SEQ ID NO: 146902 - protein, 247 aa, Glycine max
  unsure (1)..(247): unsure at all Xaa locations
  Clone ID: PAT_MRT3847_103673C.1.pep
MNKRLSFLSHNEKSKMKDSTETDAISDSLELLSTFLDSELPSVRNFKGKWSLARVKLTQLQTHLTDFSAEFPNASTTNPLSLHLLHSIFKTLNDAVSLSRSCQPQTLPNGKLKTQSDLDSLLATLDRHVSDCDILFRSGLLLENDAVSVSVSVSSKREAIRSESRNLITRLQIGSPESKASAMDSLLGLLQEDDKNVTIAVAQGXVVPVLVRLLDSPPSTKRETVAAISKVSTVESAKSVLLAEGLL

SEQ ID NO: 146903 - protein, 563 aa, Glycine max
  Clone ID: PAT_MRT3847_103674C.1.pep
MKDSTETDAISGSLNLLSTLLDSELPSVRNFKGKWSLARVKLTQLQTHLTDFSAEFPNASTSNPLSLHLLHSISQTLNDAVSLSKTCQPETLPNGKLKTQSDLDSLLATLDRHVSDCDILFRSGLLLENSVSVSVSKREAIRSESRSLITRLQIGSPESKASAMDSLLGLLQEDDKNVTIAVAQGVVPVLVRLLDSSPSETKEKTVAAISKISTVESAKSVLLAEGLLLLNHLLRVLDSGSGFAIEKACIALRALSLTKENARAIGSRGGISSLLEICQAGTPGAQASAAAVLRNLAAFEEIRVNFVEENAVVVLIALASSGTAVARENAVGCLSNLTNSGSSEEADGLLNLRVMVVKEGGVECLKNYWDSGNQIQSLEVAVEMLRHLAESDPIGEVLVGEGFVQRLVGVLNCEVLAVRIAAVRAVYALGLNSGRARKEMGELGCVLGLIKMLDGKGVEEKEASAMALSVLLMHPANRRIFRKDERGVVSAVHLLNPSLQGLDKKYPVSLLALLVHSKSCRKQMVAAGACVHTQKLVEMDVPGSKKLLESLGRGKIWGVFARP

SEQ ID NO: 146904 - protein, 54 aa, Glycine max
  Clone ID: PAT_MRT3847_103675C.1.pep
SVNMVDSSAFYSRSIRHTIFIHHCRSSILALKYNSFFLFHKWSLSAFFIPSTNT

SEQ ID NO: 146905 - protein, 64 aa, Glycine max
  Clone ID: PAT_MRT3847_103676C.1.pep
KKNKKKKKKKKKGKKKKKKKKKKKKKKKKKKKKKKKKKKKKKKKKGGPPPLWALHPGNKFRPGP

SEQ ID NO: 146906 - protein, 64 aa, Glycine max
  Clone ID: PAT_MRT3847_103677C.1.pep
HLDCGESFMSDSQDWNLIYPLVHYQSNDLYLYVYISPSVYIFVHHTRAICIDLFFYMHTACCSH

SEQ ID NO: 146907 - protein, 55 aa, Glycine max
  unsure (1)..(55): unsure at all Xaa locations
  Clone ID: PAT_MRT3847_103678C.1.pep
NTXPXQKLNTRHKMPFIRLSTLLNKLSSNETLSSIYNATIDAFYPLSNNALMYIT

SEQ ID NO: 146908 - protein, 78 aa, Glycine max
  Clone ID: PAT_MRT3847_103679C.1.pep
MARGSRSVTSSSKWRYCNPSYYLKRPKRLALLFIVFVGVSFIVWDRQTLVREHQVEISELRKEVTGLQNLLDDLNNKQ

SEQ ID NO: 146909 - protein, 38 aa, Glycine max
  Clone ID: PAT_MRT3847_10367C.1.pep
KTSERYFFLFTTLILRCENQDTILLIMESNLQPLILHP

SEQ ID NO: 146910 - protein, 115 aa, Glycine max
  unsure (1)..(115): unsure at all Xaa locations
  Clone ID: PAT_MRT3847_103680C.1.pep
DYEGYDPFVGGGQKYATPMVPLDEEILSKVAQHMDEERFDCADEEDSFAYDCLRAPLSGVEGLVYLDRLPHATXEGIAHELSRKHCENGLPRFDSGECEKNTLFPIAKSEKFFNK

SEQ ID NO: 146911 - protein, 100 aa, Glycine max
  Clone ID: PAT_MRT3847_103681C.1.pep
PRVRKDGYNSSVESFCHGTNAVVVAGGVEKGTPLTEKNGEIKSGGKVGTMDNKSLASPEERKDTITNHQSDGILKGSGNSQGSLSTSECEAVGVNEECVS

SEQ ID NO: 146912 - protein, 64 aa, Glycine max
  Clone ID: PAT_MRT3847_103682C.1.pep
MATAEDAPVLPEDLIVEILSWGEVKNLMRFRCVSKSWNSLIFNPTFIKLHLQRSSQNIHIPVNI

SEQ ID NO: 146913 - protein, 253 aa, Glycine max
  Clone ID: PAT_MRT3847_103683C.1.pep
MASSPTFALRTISSFSVKPVTTTRSSLTTSSTTTLLPFTSTNSSLPRTLKLNTSSPHPHLSLPHKSFTCRSQAEPSSDSAKVQELSVYEINERDRGSPAYLRLSQKTVNSLGDLVPFSNKLYSGCLQKRVGITAGICVLIQNKAEKKGDRYEAIYSFYFGDYGHISVQGSYLTYEDTYLAVTGGSGIFEGAYGQVKLHQIVFPFKLFYTFYLKGIKDLPQELLSQPVEPSPAIEPSPSAKACEPHAVIAGFTD

SEQ ID NO: 146914 - protein, 63 aa, Glycine max
  Clone ID: PAT_MRT3847_103684C.1.pep
RRQLKNQAVGSEYSKSSKILPSSGDGQKKWTTLVHNGVIFPPPYQPHGVKMLYKGRPGDLTPE

SEQ ID NO: 146915 - protein, 762 aa, Glycine max
  unsure (1)..(762): unsure at all Xaa locations
  Clone ID: PAT_MRT3847_103685C.1.pep
ARALAKKLYRNPNLGTTSSNRDDSDQKKPISKIQKERQNGAGLSNKKXRPSPLPAKRPLDNSDSLHASVKKPKVSDPVASIKTKPVSVKHELKVEDDDDDIPISQRIKKSAMSGDKSSATKKLLTKVTKVNKSGSKPFKKQIKKTXKNQAVVQNIPNLQSFFLALVMGRXKWTTLVHNGVIFPPPYQPHGVKMLYKGRPVDLTPEQEEVATMYAVMRDTEYMQKDKFKENFWNDWRKLLGRNHVIQNLKDCDFTPIYDWYQSEKDKKKQMTTEEKKALKEEKMKLEEKYMWAIVDGVKEKVGNFRVEPPGLFRGRGEHPKMGKLKKRIHPGDITINIAKDAPIPECPIPGERWKEIRHDNTVTWLAYWSDPINPKLFKYVFLAASSSLKGQSDKEKYEKARTLKDYIGNIRSAYTKDFTSKDITKQQIAVATYLIDKLALRAGNEKDDDEADTVGCCTLKVENVTREPPNKLKFNFLGKDSIKYENTVEVELPVYNAILKFQKDKKPGDDLFDKLDTSKLNAHLKELMPGLTAKVFRTFNASITLDVMLNKETKDGDVGEKIVVYQHANKQVAIICNHQRSVSKSHTAQMSKLTEKIDELQAVLKELKTDLDRARKGKPPSKSSDGKRKKNLSPEMLEKKISQTNAKIEKMQRDMKTKEDLKTVALGTSKINYLDPRITVAWCKRHEVPIEKIFNKSLLXNSAGQWMWILTSDSEIYRMEPCYDGWGKTFLFYLFLFYKIFFFISSILAEIDVVSPSNLIMG

SEQ ID NO: 146916 - protein, 46 aa, Glycine max
  Clone ID: PAT_MRT3847_103686C.1.pep
ELKIARLAMSSIISYILQAIVTGTGPSDTLADHLADPININASAYV

SEQ ID NO: 146917 - protein, 103 aa, Glycine max
  Clone ID: PAT_MRT3847_103687C.1.pep
KSLYSNTQFYLGPERKPCALRGQVAWPFSESVSQQMHGVYNFDHQTRLQGNQNYRAYLLDCDPKKVFSGWWPIAWALDARIVSSAFLLKGNCSNPHPLPTGMG

SEQ ID NO: 146918 - protein, 196 aa, Glycine max
  Clone ID: PAT_MRT3847_103688C.1.pep
ARGGARAEIPACFGFGFEGGNNISLSVLLNGTDNLWSCCGSERIFVFTTNHIEKLDPALLRSGRMDMHIFMSYCSFPALKILLKNYLGCEACELEESILKQLEEVVDVARMTPADISEVLIKNRRKKEKAVEELFETLKLRAEMNEKSGVLRGKNVVEEEEEEEEQEKRALDSESPKQESEIEDNCKEEEEEKKIK

SEQ ID NO: 146919 - protein, 373 aa, Glycine max
  unsure (1)..(373): unsure at all Xaa locations
  Clone ID: PAT_MRT3847_103689C.1.pep
MNFQQDLLCLFRDWNSDKGSESNSPAIHVTRSGSIRNTLNSVSEKFQRGLESSSEGIKRFRKSFKSLPYNRVLSRNFSSRKKILDPQGPFLQKWNKIFVLSCLIAVSLDPLFFYVPVIDDNKKCLSMDRKMEITATVLRSFSDIFYIIHIIFQFRTGFIAPSSRVFGRGVLVEDAWAIAMRYLSSYFLIDILAVLPLPQVAILIIIPKLSGSESLNTKTLLKFIVCFQYIPRFLRIIPLYKEVTRTSGILTETAWAGAAFNLFLYMLASHVIGAFWYLFSIERETTCWQDACRRNSTCNTTAMYCDNHQVLGTMSAFLNASCPIQDQNTTLFNFGIFLDALQSGVVESRDFPHKFFYCFWXWGLRNLSSLGQN

SEQ ID NO: 146920 - protein, 129 aa, Glycine max
  unsure (1)..(129): unsure at all Xaa locations
  Clone ID: PAT_MRT3847_10368C.1.pep
MAIDHENDLKDDKNPGPLDEDDIALLKTYGLGPXYSTSIRQAHESHRDMAWTVNDXCGMKEXSDTGLAAPSLRDLDSEXQMMQEEHPLQEARSTEIINPDPVDAQYVINVEHIAEIGAGLGDKAYHTVI

SEQ ID NO: 146921 - protein, 39 aa, Glycine max
  Clone ID: PAT_MRT3847_103690C.1.pep
NLLSPFMNIYSKNVEEVQMLESMKLFRRKARIIGTPICM

SEQ ID NO: 146922 - protein, 59 aa, Glycine max
  Clone ID: PAT_MRT3847_103691C.1.pep
SSRAYEELLSFVTEKLMGNMTSSLTDHIWRLMDLGSLGLLFYSQIFVWPLMEEDRGGWA

SEQ ID NO: 146923 - protein, 108 aa, Glycine max
  Clone ID: PAT_MRT3847_103692C.1.pep
KKGQTGGRAFIIWGPITQTGVIRDKNKFFYPLQIHNLNIPKGGRNQIPFISHLFKAGDRSSTTIKPLNKNTGGNPFKRQSLLPKRIEQRGGDFTRPIGGSKGPIMGLL

SEQ ID NO: 146924 - protein, 77 aa, Glycine max
  Clone ID: PAT_MRT3847_103693C.1.pep
ISKHFSPMDRLMSKGLANLKILLPKHPQLFVVPGVIYFRRNFTFLALSTAVFQILIFFGNPDVIAPRIFPKLVLLTM

SEQ ID NO: 146925 - protein, 159 aa, Glycine max
  Clone ID: PAT_MRT3847_103694C.1.pep
SFVHQNRTCSWGSYYYSRQRAHASAHASGGYELNLSSSNRNISSIGSKYGKSIKRGIISFLNVDDSRFTRADEIEFAPYFSKHKWGLFRRKTKLLCRKCCNHIGYAYNDRTSSFFPFVSNRTEPSPPTEASNSSPMKYDIRIRALQPSSSQEHGITVLA

SEQ ID NO: 146926 - protein, 134 aa, Glycine max
  unsure (1)..(134): unsure at all Xaa locations
  Clone ID: PAT_MRT3847_103695C.1.pep
MARQQDFKKNKMMKKEESNKTLPFHKLFSFADSRDYLLMFVGTISAAGNGMTKASTNIVMGEAIEAFRRSGNTKQVVHEVSQVSLKFALLGAISFLAAFLQVAXXWVSTXERQAARIRGLYLXAVLRQDISYFD

SEQ ID NO: 146927 - protein, 148 aa, Glycine max
  Clone ID: PAT_MRT3847_103696C.1.pep
GLLGWVSGSGPGFFGPPHLFCFGSPVAWARGFKFGLAPISALDSVQVPLSSGREFVLSLSRVSASQQCLIPGSLFGPCLYFSVRFQVCALWSSHVYEPDWPFWLVFLGFLLRLEAMVFFLIECFVLTFTPPPIYIAIRWVQKRKNKYI

SEQ ID NO: 146928 - protein, 81 aa, Glycine max
  Clone ID: PAT_MRT3847_103697C.1.pep
GLLQHLEVCILFESDVLLQDAAIHYHYMLRVSEKLASDDDGLDYLVDGIGNQLEIENIISSLLALTQGPDPAHYREPALRA

SEQ ID NO: 146929 - protein, 255 aa, Glycine max
  unsure (1)..(255): unsure at all Xaa locations
  Clone ID: PAT_MRT3847_103698C.1.pep
MTNPKELIEQVYILLPLLTTTTTTTLVSCLNHEGLYLYQLKLSFDDPDSRLSSWNSRDATPCNWFGVTCDAVSNTTVTELDLSDTNIGGPFLANILGRLPNLGXVNLFNNSINETLPSEISLCKNLIHLDLSQNLLTGPLPNTLPQLLNLRYLDLTGNNFSGPIPDSFGTFQNLEVLSLVSNLLEGTIPSSLGNVSTLKMLNLSYNPFFPGRIPPEIGNLTNLRVLWLTQCGVVGVIPTXPRRVGKLQDXDLALN

SEQ ID NO: 146930 - protein, 110 aa, Glycine max
  Clone ID: PAT_MRT3847_103699C.1.pep
SSVRMHYPLGSPCPQRYFLPNSLTQCCFIQPLDLLCPIIAVSWLAVSVVSTRTHFLYEFFNLLLIAPQKPVQGGVTRLDVGFIISFIPHYPLTNMTRKSHFFCGRHPQLE

SEQ ID NO: 146931 - protein, 48 aa, Glycine max
  Clone ID: PAT_MRT3847_10369C.1.pep
LREIGSQVATAEMRKGVEVTQTPTQLMRPKGRPHKSHPTPPPRYVARV

SEQ ID NO: 146932 - protein, 116 aa, Glycine max
  Clone ID: PAT_MRT3847_1036C.1.pep
SCRIRHEAIRGSESIRVRPHREGGRLVLQLTKVPSCFQAQRSPGRLRLCFWTDIQTQEHEDEEDDDGRGWEHTKGCNSWVENNYERQISRCKEEGHDHENNDFLINWGESRLVATS

SEQ ID NO: 146933 - protein, 68 aa, Glycine max
  Clone ID: PAT_MRT3847_103700C.1.pep
CVALTLESFKALAYLSKLIFIHSYRISQGTLFSGAEFNLCLPRHHYPNYSYQLSTHFVILVENRVSST

SEQ ID NO: 146934 - protein, 238 aa, Glycine max
  unsure (1)..(238): unsure at all Xaa locations
  Clone ID: PAT_MRT3847_103701C.1.pep
LGKLRYFLGIKVAQSKDGVVISQRKYALDILEETGLLNSKPVGTPMDPSVKLSPDQVEPFSDPGRYRRLVGKLNYLAVTLPDIAFAVSVVSQFLNSPCQDRWNAVSXILKXTKSAPGKGLIYEDKGHSQIIGYSDADXVGSPSDRXSGYCVLIGGNLISWKSKKQSVVAKSSAEAEYRAMALVTCELIWLKQLIXELKFEEDTQMTLICDNQAALHIASNPIFHXRTKHIEVDCHFIR

SEQ ID NO: 146935 - protein, 43 aa, Glycine max
  Clone ID: PAT_MRT3847_103702C.1.pep
PQNGGGKTSWLRLEEFLDRCQNIILKRLSFISQDLHKKCFWRV

SEQ ID NO: 146936 - protein, 47 aa, Glycine max
  Clone ID: PAT_MRT3847_103703C.1.pep
MGVGPNISTKVIPFIFPPPPPPPPPPPPPPPPPPPPPPPPPPPPPPK

SEQ ID NO: 146937 - protein, 81 aa, Glycine max
  Clone ID: PAT_MRT3847_103704C.1.pep
IKVNGLHSPDLSLTDVTTGSTSRLVLEAESSMGSALAWGIVPSTGAGRPRGLTARHAHCCYWQCCSQGASCIPGASERRLC

SEQ ID NO: 146938 - protein, 89 aa, Glycine max
  Clone ID: PAT_MRT3847_103705C.1.pep
KLDLFQRVFSFYFGLKKEGIFFKLSKNPRLKTLIGDVFLFFARPFPLNCFFSKRGPLQSPQIYFIIRDPLFNLIGVFANHPPPKKKTPL

SEQ ID NO: 146939 - protein, 120 aa, Glycine max
  Clone ID: PAT_MRT3847_103706C.1.pep
MNSLKLHKLLGVSDASKVIKQPRTLLAPRRSFNQETLNKNLRASNLERKLERAGGLSNWLTSLGLGQFVRIFQGNSLSKYQLVNLTMKKLKDMGASAVGPRRKLIHAMDCVCQPYCFEAL

SEQ ID NO: 146940 - protein, 35 aa, Glycine max
  Clone ID: PAT_MRT3847_103707C.1.pep
WMFIRLYNVERLINEFAVNKYSIALILANLLILSY

SEQ ID NO: 146941 - protein, 159 aa, Glycine max
  unsure (1)..(159): unsure at all Xaa locations
  Clone ID: PAT_MRT3847_103708C.1.pep
KSKMPSSKTPKLSLSNNKSLPSLQLPFHTTDISPTTPSIYTTYNYYLHLPQLRKLXNSTDFPNXNNEPILKPILQTLKITFHFLSIILSNPRPYSNHRKXTHRIESLITHQIXIITILCXNEKQNSDTRDTTPTTNLXXSNSSINXXYXXTNLLPQLST

SEQ ID NO: 146942 - protein, 42 aa, Glycine max
  Clone ID: PAT_MRT3847_103709C.1.pep
IKHKTQFVSFSLILSRTNNWTRTRKKGSENTTNCVIFYLDFG

SEQ ID NO: 146943 - protein, 41 aa, Glycine max
  Clone ID: PAT_MRT3847_10370C.1.pep
HSPGYGDRIDLFTQYSHSGFSNSGSGVIRVAQRVDSHVSAN

SEQ ID NO: 146944 - protein, 345 aa, Glycine max
  Clone ID: PAT_MRT3847_103710C.1.pep
MKFPAGYELHEALGPSFLKGSKCFNWAAEANQDVKNAEMSDEISCSQLTSEFRPEHLLEAMVANISHSNNNVNSELSFSTSMQAAIASGRNPEGSVHTINSEGCSIDQLPFVKEDKHYSLSSSGICGVMSPKGFSSTCPSSCSEQFERSSEPTKNSKKRARPGESCRPRPRDRQLIQDRIKELRELVPNGAKCSIDSLLECTIKHMLFLQNITKHADKLNKFADTKTKLHHMEKDIPGQQGSSWAMEVGGHLKVSSILVENLNQNGQMFVEMVCEECSHFLEIADAIRSLGMTILNGATEAHGEKTFVCFVVEAGSEVRNNSRSIRQTNCRSIVTLLHAKSTTCS

SEQ ID NO: 146945 - protein, 70 aa, Glycine max
  Clone ID: PAT_MRT3847_103711C.1.pep
TCIYIVNCGKLYKLYSMHFLDRVLTEPASPQNRQTKVELTGANRTLMQHPKYLTFCSKQGVPSGLACYLL

SEQ ID NO: 146946 - protein, 340 aa, Glycine max
  Clone ID: PAT_MRT3847_103712C.1.pep
MDLCAAHAKNLFHTNSFYHRPIPSNLGRSRVFEITVSRRNPYSKGYRLFVVSATGKNNHDHNSSSSGNDEWSIPEEDGTRGNNSSDGNKSDNNSEKCHHTNLDWREFRAKLYRDELKEISDADTHNQGGTLPISKPLGAQWAHPIPVPETGCVLVATEKLDGVRTFERTVILLLRSGTRHHQGGPFGIVINRPLHKKIKHMKPTNHDLLTTFSDCSLHFGGPLEASMVLLKTEEKMKLPGFEEVIPGLCFGSRNSLDDAAGLVKKGILKPHDFRFFVGYAGWQLDQLRDEIESDYWYVAACSSSLLCGALSDSSESLWEEILQLMGGHYSELSRKPKQDM

SEQ ID NO: 146947 - protein, 130 aa, Glycine max
  Clone ID: PAT_MRT3847_103713C.1.pep
MDLCAVHAKNLFHTNSFCHRPISSHLGRTRVFEITVSRRKPYSKVGYRPFVVSATGKKNHGNSSSSGNEERSIPEGDGTRGNNSSDGNKSENNSEKCHHTNLDWREFRAKLYRDELKEISDADMHNQGGT

SEQ ID NO: 146948 - protein, 110 aa, Glycine max
  unsure (1)..(110): unsure at all Xaa locations
  Clone ID: PAT_MRT3847_103714C.1.pep
MGTTSRNLREVLDVRWGLIVIAVITPPRMALSFLQRDHSSTYDHDEYPKPCYDLCICSRSMPTESSCENLKMNSCHSDCXICLCTRSQPGHRLRLDNNNFCYKPCKSTDD

SEQ ID NO: 146949 - protein, 51 aa, Glycine max
  unsure (1)..(51): unsure at all Xaa locations
  Clone ID: PAT_MRT3847_103715C.1.pep
VLXTTKNSRTGAEFYPFILQPKFSLLPSCPIMSFIKTWRNKPHNPFLYEIP

SEQ ID NO: 146950 - protein, 54 aa, Glycine max
  Clone ID: PAT_MRT3847_103716C.1.pep
LINNTFHNLWWRTKFFNKLTNIIFIREFFEQILWLIIYQGATCNTPHTLELYLA

SEQ ID NO: 146951 - protein, 112 aa, Glycine max
  unsure (1)..(112): unsure at all Xaa locations
  Clone ID: PAT_MRT3847_103717C.1.pep
QHLLRVDPVIDVLHDKKALQPVLYPAEVEAVCDAPFEVYLMDNNRRHDDMEWMVDKYXWHSLDYGMGHRIYLXWSATAGIXIRXASFAHQQVPALPKQNPKHKLPQDVSKDT

SEQ ID NO: 146952 - protein, 67 aa, Glycine max
  Clone ID: PAT_MRT3847_103718C.1.pep
KHCITDKLVISLILLQPQLFPYLIWFDYYRKHVCGYNTTISKSFLQFVCCAFGKIPILYFSLINFSY

SEQ ID NO: 146953 - protein, 88 aa, Glycine max
  unsure (1)..(88): unsure at all Xaa locations
  Clone ID: PAT_MRT3847_103719C.1.pep
LVFDVSRMTFAYIKCSASLLIVIENQDDYTIRDHAKPRKLHQIVESQLXGVLNFLHQYFITPRSIQVLTETTLSGDRGSYLKALVHDR

SEQ ID NO: 146954 - protein, 116 aa, Glycine max
  unsure (1)..(116): unsure at all Xaa locations
  Clone ID: PAT_MRT3847_10371C.1.pep
VPIYVNCLYAXDNNLQKLYLGNATCGCGRGGLPTSACLSSAISIWSRLLNEGTVTVLGSGNKGGSVTTGELFSVASPTDLWGVMTIHMSCSGSKIIMSRFFVNCTSTTSSVCEWDA

SEQ ID NO: 146955 - protein, 89 aa, Glycine max
  Clone ID: PAT_MRT3847_103720C.1.pep
TLKSSHNINYFQPEHYSVGNKDKIDFSNEKTTNIMKQEKKGDLVKTKGDYPPKNSSYLIFFFFLGKKETYIHLTQKECLVKSGGGGIKK

SEQ ID NO: 146956 - protein, 68 aa, Glycine max
  Clone ID: PAT_MRT3847_103721C.1.pep
ICFTKYVGCHQSVWLVKKQMCKRGTMLILWAIRAGNPILWASAHGASLFILRNIVKSLSLSRFSLSFR

SEQ ID NO: 146957 - protein, 233 aa, Glycine max
  unsure (1)..(233): unsure at all Xaa locations
  Clone ID: PAT_MRT3847_103722C.1.pep
TRPHLHAHVLKSGFLADRFVANSLLSLYSKLSPHFSQARALFDALPFKDVIAWTSIISGHVQKAQPKTAVHLFLQMLGQAIEPNAFTLSSILKACSQLENLHLGKTLHAVVFIRGFHSNNNVVACALIDMYGRSRVVDDARKVFDELPEPDYVCWTAVISTLARNDRFREAVRVFFAMHDGGLGLEVDGFTFGTLLNACGNLGWLRMGRXECMGKVVTLGMKGNVFVESSLLD

SEQ ID NO: 146958 - protein, 137 aa, Glycine max
  unsure (1)..(137): unsure at all Xaa locations
  Clone ID: PAT_MRT3847_103723C.1.pep
PPPPKGPQWAPLIKECQGGPPQRTLWGGPFLKAGPFRHPKIPGQTGFFPAGGRVGSPPLSLPIXGVSFFKKGDPSPPPSLPLGGPKKGPHQLPNFSGGPILRGFFPGALGVFGALPPWVCPPLYKTREERGNNLRSL

SEQ ID NO: 146959 - protein, 31 aa, Glycine max
  Clone ID: PAT_MRT3847_103724C.1.pep
LELPNRLELEPISFKVKTASCGGTQCVNTFG

SEQ ID NO: 146960 - protein, 73 aa, Glycine max
  Clone ID: PAT_MRT3847_103725C.1.pep
FCRFLSMCPKSDGIRSGSHITLQLAIIVVIQYRCSYVRTIVKCALILLKSHNLTRHDSNTMTTSQNPGNLIIS

SEQ ID NO: 146961 - protein, 72 aa, Glycine max
  Clone ID: PAT_MRT3847_103726C.1.pep
GPAPLCVSGQRTRVTPALCCSPTAGVPLRRWGRSNRWSRFCARRVMHVGAGRAGEGCRWRHVIAFFYYRKNK

SEQ ID NO: 146962 - protein, 96 aa, Glycine max
  unsure (1)..(96): unsure at all Xaa locations
  Clone ID: PAT_MRT3847_103727C.1.pep
LESHTINYMIDDHXPNSGIFLPNVRKNILPTIFXYCEKHPLAPNPENKQCDDHINASDTEFAKVDKGTLFYLILYAHYLGMNTLLDLISLTVANMI

SEQ ID NO: 146963 - protein, 745 aa, Glycine max
  unsure (1)..(745): unsure at all Xaa locations
  Clone ID: PAT_MRT3847_103728C.1.pep
MAAPTPSWQPQNSARKEICGLLEQQISHSSSADKAQIWQHLQRYSHLPDFNNYLAFIFSRAEGKSVEVRQAAGLYLKNNLRNMFKSMQPAYQQYVKSELLPCLGAADKHIRSTAGTIISVVVQIEGVVGWPELLQALVSCLDSNDLNHMEGAMDALSKICEDIPQYLDSDVPGLAERPINIFLPRLFRFFQSPHASLRKLSLGSVNQYIMLMPSALYVSMDQYLQGLFILANDPVAEVRKLVCAAFVQLIEVRPSFLEPHLRNVIEYMLQVNKDTDDEVALEACEFWSAYCDAQLPPENLREFLPRLIPVLLSNMAYADDDESVIEAEEDGSQPDRDQDLKPRFHVSRFHGSDEVEDDDDDVVNTWNLRKCSAAALDILSNVFGDEILPTLMPIVQAKLSAGGDDAWKDREAAVLALGAIGEGCINGLYPHLLEIVAFLGPLLDDKFPLIRSISCSPAARFSKFIIQGIGHPKGYEQFDNVLMGLLRRILDDNXRVQEAACSAFATLEEEAAEELAPRLEIILKHLMTAFGKYQRRNLRIVYDAIGTLAEAVGGELNQPVYLDILMPPLIEKWQQLSNSDKDLFPLLECFTSISHALGTGFTQFAEPVFRRCINIIQTQQFAKADPAATTGVQYDKEFIVCSLDLLSGLAEGLGSGIESLVAQCSLRDLLLHCCVDDAPDVRQSAFALLGDLARVCSVHLDSRLSEFLEAAAKQLEISKVKEAISVANNACWAIGEIAVKVHSEI

SEQ ID NO: 146964 - protein, 110 aa, Glycine max
  unsure (1)..(110): unsure at all Xaa locations
  Clone ID: PAT_MRT3847_103729C.1.pep
MHRKLVPSTNKGHLNFDCDKYSSYPTIHGGVTEQVFEGNPSKAQLMEALCHFQTRARKAGEAAKQACAEKENTIALFFIQASQLFAYKQWFQLLXLEALNSQVKKQGSIN

SEQ ID NO: 146965 - protein, 36 aa, Glycine max
  Clone ID: PAT_MRT3847_10372C.1.pep
RSTTNQQPLLGPWDHPIFKKATPPRNKRSRFWPFLV

SEQ ID NO: 146966 - protein, 124 aa, Glycine max
  Clone ID: PAT_MRT3847_103730C.1.pep
LDLMMTPDHIYSMNWSARSDTTNSLTIAFLPCRTRTSGASMRHASTTPTGQIRSDPIISPWRIPTLRQHRSPSPRKNDIAPSYWLRHPTASGLDRSLNPPVHSSPPLLFQNKNSHWEPHMSIHW

SEQ ID NO: 146967 - protein, 59 aa, Glycine max
  Clone ID: PAT_MRT3847_103731C.1.pep
HIVVANIIEKCYMVQNKFFFSFSLLLLLFALKVIFTKDSYHKKYGNFIFLNNKLFSFCH

SEQ ID NO: 146968 - protein, 33 aa, Glycine max
  Clone ID: PAT_MRT3847_103732C.1.pep
PRRGSWSPSALSAEMMDILRLIIAVAAERREAV

SEQ ID NO: 146969 - protein, 81 aa, Glycine max
  Clone ID: PAT_MRT3847_103733C.1.pep
FNSNNFKNAYLLSLSKGLRPRYRMLLNLYLTFRNLFEKWVDMHLLSQCKDLMGPESGATNTSTVNIMLIMGNEIGHHVHMH

SEQ ID NO: 146970 - protein, 314 aa, Glycine max
  Clone ID: PAT_MRT3847_103734C.1.pep
VGDIGAFHGLASFYRRFVLSFSTIASPFNELVKKNVAFTWGEKQEQAFALLKEKLTKAPVLALPDFSKTFELECDASGVGVGAVLLQGGDLYALDEHFSPIYESCGKKAQDGFYLAEGYLFKEGKLCIPQGSIRKLLVKERHEGGLMGHFGIDKTLVILKENFYWPHMKKDVHKHCTRSLSTLLRALLKGNHKSWDEYLPHDRFPTQRKSKLSPRGDGPFQVLERINNNAYRLDLPEEYGVSTTFNISDLIPFAGGADIEEEELTDLWSNPLLGEGDDATLPRKGPVTRAIIKRLQEDWARAAEEGPRVLMNLR

SEQ ID NO: 146971 - protein, 129 aa, Glycine max
  unsure (1)..(129): unsure at all Xaa locations
  Clone ID: PAT_MRT3847_103735C.1.pep
QFWPLLPNPNASPNSTSPLATLSXATRLRHRAISAVVNASQPXSPSAPAPRAITDYDEHSHSLPCIQNIRGKSIVVKYGGAAMNAPELQACEINYLVLLSCVGLRPVLIHGSGPDINSCLGRLNIPDDF

SEQ ID NO: 146972 - protein, 76 aa, Glycine max
  Clone ID: PAT_MRT3847_103736C.1.pep
HSRVPYLMIRSPTLSILGFHLLAIMVQVQVECTVATVELCAPQLFVVNRQTAIPGRIPSRCPGYDVDRQVTTVPLP

SEQ ID NO: 146973 - protein, 96 aa, Glycine max
  Clone ID: PAT_MRT3847_103737C.1.pep
HAFGLKPKFNSASGNFSRNSSIFLSNQTSSLARASERPRANDGRKQGLTHASVSGSSFLNLASPAVHQVLVLPLFSLHLDCCPVHSCRLLNEYQHF

SEQ ID NO: 146974 - protein, 71 aa, Glycine max
  Clone ID: PAT_MRT3847_103738C.1.pep
ILDQPAISASNYKYRCNMSTPNVCTTTLLQNSQIKTRWTSYNWPKICKRLYSVCYQENYFLEKRTMSFNKP

SEQ ID NO: 146975 - protein, 44 aa, Glycine max
  Clone ID: PAT_MRT3847_103739C.1.pep
PPKLVDKVFKHGQKRRKRIKAAGIYYESPEIVGNIQPAPKKIKF

SEQ ID NO: 146976 - protein, 293 aa, Glycine max
  unsure (1)..(293): unsure at all Xaa locations
  Clone ID: PAT_MRT3847_10373C.1.pep
RQKIILSLEDYARGLVEGKAREEAGRVLIRMKDRFTMLFSHDSDSMPRVWTGKEDIRAITKTARSSSLKLLSVMAAIRLDDDDTDNIEKVLAVALVDSSPSSNATRSITMVDPLASSSWEQVSSSKTLITPVQCKSLWRQFKTETEYSVSQAISAQEANKRNNNWLPPPWAIVALVILGFNEFMTLLRNPLYLGVIFVGFLLIKALWVQLDVSGEFRNGALPGIISLSSKFIPTIMNLMKXLAEEGQNPAANNPQRTPSKSSYNEGHAVSSSASSNLTRLDNGTEYASPLKDD

SEQ ID NO: 146977 - protein, 75 aa, Glycine max
  unsure (1)..(75): unsure at all Xaa locations
  Clone ID: PAT_MRT3847_103740C.1.pep
TRGTRGVEGALIVNIGDMMERWTNCLYRXAFFFDPASDCVVECFESCCSESSPPRFSPIRSGDYLNERFRLTSKM

SEQ ID NO: 146978 - protein, 318 aa, Glycine max
  Clone ID: PAT_MRT3847_103741C.1.pep
MVATLSLPIIDLSSPHRLSTANSIRQACVEYGFFYLVNHGVDTDFVSKVFDQSCKFFSLPVQRKMDLARKEYRGYTPLYAETLDPTSLSKGDPKETYYIGPIEDTSIAHLNQWPSEELLPNWRPTMKSLYWKLLAAGKSLLSLIALSLNLEEDYFEKIGALNKPASFLRLLHYPGELGSDEQICGASPHSDYGMITLLMTDGVPGLQICKDKVNQPQVWEDVPHVEGALIVNIGDMMERWTNCLYRSTLHRVMPTGKERYSVAFFFDPASDCVVECFESCCSESSPPRFSPIRSGDYLNERFRLTYGSEKDLKCDLSS

SEQ ID NO: 146979 - protein, 141 aa, Glycine max
  Clone ID: PAT_MRT3847_103742C.1.pep
NCLCVKMPRAARADSARARAAFTHPKHSDKEINQRYKKLNFIIPNDTGSAMVHGFAGYFDATLYKDVHLGIEPSTATPNMFSWFAIFFPLRTPICVDPGSTLEVHFWRCCGSTKVWYEWCVASPASSPMHNSNGRSYWVGL

SEQ ID NO: 146980 - protein, 107 aa, Glycine max
  Clone ID: PAT_MRT3847_103743C.1.pep
CHKKLNFVIPHNIWSAMVHGFAGYFDATPTRPVHLGIEPSTATPNMFSWFAIFFPLRTPICVDPGSTLEVHFWRCCGSTKVWYEWCVASPSSSPIHNSNGRSYWVGL

SEQ ID NO: 146981 - protein, 61 aa, Glycine max
  Clone ID: PAT_MRT3847_103744C.1.pep
QLRDIGAQAVIDAGLADQTHIEYLFESVWYPWIPTPYWAPLPNAPTSPSRLLAWSSYPAVP

SEQ ID NO: 146982 - protein, 38 aa, Glycine max
  Clone ID: PAT_MRT3847_103745C.1.pep
FIVLTNNFICSCEIRLVVAHVDTVIAINHFLSISLSIT

SEQ ID NO: 146983 - protein, 124 aa, Glycine max
  Clone ID: PAT_MRT3847_103746C.1.pep
MHILGKLPSLQVLKLSSQTNDTRFDLHCATGGFLQLQVFEMIAIKVKNWRLDKGSMPRIRRLDVRSCKSLTELPKELWSLTSLREVQVLWPCTELVKRLQNLVVNNGCKLVVYPLSTNDELDFL

SEQ ID NO: 146984 - protein, 32 aa, Glycine max
  Clone ID: PAT_MRT3847_103747C.1.pep
CSVNRLANSISSLQLIQPSRYNRYFFTKTMFS

SEQ ID NO: 146985 - protein, 150 aa, Glycine max
  Clone ID: PAT_MRT3847_103748C.1.pep
DYAKRKIQCPKRDITLLDEETYIFFAGKLMYANTKERRDLLFRKKKPLKKGFPPEKKPDLKTGARPHGCPPKLEPKAPGMATGRPFLGGPQIEITGRFLTGGERGKPGGPPKKETGKKTPFRRGGKKKKEPHGSPFRKFTHPKGGGGPPL

SEQ ID NO: 146986 - protein, 100 aa, Glycine max
  unsure (1)..(100): unsure at all Xaa locations
  Clone ID: PAT_MRT3847_103749C.1.pep
KWLVSLVAEEVLEAWPCLGPGYQRFPFRMKTGFGNRPSGVKCPSFRLAVEAHNIXRAFKTIPEEVREPTXDYXYGEQFRSDSKTVNQQAFFYASEREVHH

SEQ ID NO: 146987 - protein, 34 aa, Glycine max
  Clone ID: PAT_MRT3847_10374C.1.pep
DPNTCHALMLYIDGETTILHVISQCDHNIDAEGR

SEQ ID NO: 146988 - protein, 43 aa, Glycine max
  Clone ID: PAT_MRT3847_103750C.1.pep
YGNCLFIRFGTLEHTKGSQAIIRVENYIEHKDSISAFSTVEEQ

SEQ ID NO: 146989 - protein, 60 aa, Glycine max
  Clone ID: PAT_MRT3847_103751C.1.pep
MISLNLTQTRLLRMASIRGQGGIQQLLAAEQEAHRIVNAAKNEKLARLNQAKEEAEKEIA

SEQ ID NO: 146990 - protein, 74 aa, Glycine max
  unsure (1)..(74): unsure at all Xaa locations
  Clone ID: PAT_MRT3847_103752C.1.pep
PITYTRKIANXGTHSQSGRHISFYNQILCRFKKKKKKLCISNKPMSYITRDNIDPCVPIFDVWTIYHHSIFMIS

SEQ ID NO: 146991 - protein, 49 aa, Glycine max
  Clone ID: PAT_MRT3847_103753C.1.pep
PTHDFCLGFGFIECHERCQEDVALVMWFRRMITVKRFHTPNLLFYLLAN

SEQ ID NO: 146992 - protein, 137 aa, Glycine max
  unsure (1)..(137): unsure at all Xaa locations
  Clone ID: PAT_MRT3847_103754C.1.pep
VHPFQIVMHGSTLCVMITEHLCMKLLAQHVXNWKKPKEQKXMRMMILMAPLNAGDSYAGWINCFEREAPSIFLDSVKECCESLVIAKFLGLMSTYLNMSLRGNIGPCETKGRRVRRALRMTAVGSWRCGGWAMKRWG

SEQ ID NO: 146993 - protein, 71 aa, Glycine max
  Clone ID: PAT_MRT3847_103755C.1.pep
FRDQNESDSKRGMYYKANRCFPEKVFLAAWQPPRRGRFQVVFGDSCPNNLSPFIQSNQTQLVVLHPYHGNS

SEQ ID NO: 146994 - protein, 73 aa, Glycine max
  Clone ID: PAT_MRT3847_103756C.1.pep
PIYISCYRHDLQILAMFFNSLTFLLCYIHNLVSFCGTITTCYLVFSMHPSTDCHYNNIWIIISSYRKPMIHQQ

SEQ ID NO: 146995 - protein, 68 aa, Glycine max
  Clone ID: PAT_MRT3847_103757C.1.pep
EKTEDPPVCSFSNETRVLTPAPEDESQRHGGSGSRSINAELGGEHCEKSECDSHWGTGSVHRPVNPEL

SEQ ID NO: 146996 - protein, 76 aa, Glycine max
  Clone ID: PAT_MRT3847_103758C.1.pep
TVRDLVFSSFLYSFFRVCRPYRCRKKAVQLKRVYFQSGRKEGQPSHLYSSRRNAGSHILRGATIRASTPKLIGPTP

SEQ ID NO: 146997 - protein, 96 aa, Glycine max
  Clone ID: PAT_MRT3847_103759C.1.pep
SGGVGNHMTWKRSSFFLFPFLTFLAFSLSQIPLSSKVQGYHSKYKIFFKIDCGYGLLGVLVWHYSAATKAHSSLEAFGENYLHCLFLQGLIWVCCY

SEQ ID NO: 146998 - protein, 106 aa, Glycine max
  Clone ID: PAT_MRT3847_10375C.1.pep
NRKTSPSYLSLSHHRLAQLRVGYQTKVGGRKMSWISQNARTKNVVNKSKREVEEECGNSDTLKVKNKKKDDEGEQLAMEHVKEMTKLENSSFGPLYPPLELGKEED

SEQ ID NO: 146999 - protein, 109 aa, Glycine max
  unsure (1)..(109): unsure at all Xaa locations
  Clone ID: PAT_MRT3847_103760C.1.pep
SCDLLCCSNNECTMLLYEYMPNGNLDDLLHAKNKGDNLVADWFNRYKIALGVAQGICYLHHDCDPVIXHRDLKPSNILLDAEMKARVADFGVAKLIQTDESMSVIARSY

SEQ ID NO: 147000 - protein, 43 aa, Glycine max
  Clone ID: PAT_MRT3847_103761C.1.pep
GAQNIHWGSLKMLLTLFQHATRHPKNNYYNPDLIPPPLNELYY

SEQ ID NO: 147001 - protein, 41 aa, Glycine max
  Clone ID: PAT_MRT3847_103762C.1.pep
KIQVLLVVLSPLGYVCVGQGFRSTQPFLLLCKQVNMGLIRI

SEQ ID NO: 147002 - protein, 67 aa, Glycine max
  unsure (1)..(67): unsure at all Xaa locations
  Clone ID: PAT_MRT3847_103763C.1.pep
LWVSSCNIRRWSCVQSSRTFPMSDRARFDNSSAVSSIRNLHLYAGQVRYSLSYSXGRDILCAVTAFT

SEQ ID NO: 147003 - protein, 52 aa, Glycine max
  Clone ID: PAT_MRT3847_103764C.1.pep
VYSGIRPPAWNPPSRICISSFGLSLAYGKPPICIVADQILPCDPLWLVNPTI

SEQ ID NO: 147004 - protein, 100 aa, Glycine max
  Clone ID: PAT_MRT3847_103765C.1.pep
MALRKSSKLPQTALIKQILKRCSSLGRKDDQGLLDVPKGHFVVYVGENRSRYIVPISFLSRPEFQTLLHQAEEEFGFDHEKGLTIPCEEDVFESLTSTLR

SEQ ID NO: 147005 - protein, 210 aa, Glycine max
  Clone ID: PAT_MRT3847_103766C.1.pep
IDVDSLKGLPYLRTLSFMNNDFEGAWPEIQHLIGLKSIYLSNNKFSGEIPSRTFEGLQWLKKVHLSNNHFTGAVPTSLVLLPRLIELRLEGNKFNGPIPYFSSHNKLKSFSVANNELSGQIPASLGAMPVSSFSGNERLCGGPLGACNSKSSTLSIVVALVVVCVAVIMIAAVVLFSLHRRRKNQVSVENPASGFGGNKGRVRELGSESM

SEQ ID NO: 147006 - protein, 50 aa, Glycine max
  Clone ID: PAT_MRT3847_103767C.1.pep
KMFLLKFKVKLKLRSYIQYNNFLYVINDYLPLFFCTSPHVKSFCMINKEE

SEQ ID NO: 147007 - protein, 82 aa, Glycine max
  Clone ID: PAT_MRT3847_103768C.1.pep
RPRVRPRVRTAARRLQKGTRVNWGISSLLLPSSPKIKTPLLCCCERKTHRQIQRVVIELREWGELAINKYVLRRCNFFHNYF

SEQ ID NO: 147008 - protein, 47 aa, Glycine max
  Clone ID: PAT_MRT3847_103769C.1.pep
TGGSISPLKTGFCHRVEMSYYSKKKACGNPPLFEDGSPSHKYIQLLF

SEQ ID NO: 147009 - protein, 83 aa, Glycine max
  Clone ID: PAT_MRT3847_10376C.1.pep
FCFWLYGVSCTTAFSSCEIFVVPSEIFNIILQIKREIKILQNLCGGPNIVKLLDIVRDQHSKTPSLIFEYVNSTDPFCRLLAA

SEQ ID NO: 147010 - protein, 41 aa, Glycine max
  unsure (1)..(41): unsure at all Xaa locations
  Clone ID: PAT_MRT3847_103770C.1.pep
ADHWKCPRTYSSPEAIQMTELYVYSXVVGYSQLTLHPFQPY

SEQ ID NO: 147011 - protein, 242 aa, Glycine max
  unsure (1)..(242): unsure at all Xaa locations
  Clone ID: PAT_MRT3847_103771C.1.pep
MAEEMKMVEPGRGKRKFFKTQGHKKSSKKAKVMPQHLGQVRGNFVKSMAILSAWSAGVLPPQHGQKKVKIDKKMKKLFRKRAREYNSDDEEDDEATVPATLEPKSLASITNKRNDEDDTESEDRSEDEGAAGPQKTWNKNATDMNNHSSDDEGEDDNEIQPGITKFTEGCRAFKMAFKNIMQKSVPDDMLGPILSGQRKLVVDKLAEEEAESKVKGEAKKEKKMLAXEKGHVKPATYLDSHE

SEQ ID NO: 147012 - protein, 104 aa, Glycine max
  unsure (1)..(104): unsure at all Xaa locations
  Clone ID: PAT_MRT3847_103772C.1.pep
MGDNKDHDFFSHKFPTTSQVMEEMKELWGMALPITAMNMLVFVRAVVSVLFLGRLGSLELAGGALSIGFTNITGYSVLVGLAAGLEPXCSQAFGSKNWDLLSLS

SEQ ID NO: 147013 - protein, 124 aa, Glycine max
  unsure (1)..(124): unsure at all Xaa locations
  Clone ID: PAT_MRT3847_103773C.1.pep
GSSNRSLLLLRHRHHHNHHPFPYSSSATSLSPFSRSRYLCSTPFSMATDYPSPVTAQNINPKGLKCEFADGGEAVTLAQNLQKDIXAHPGAHPSDEILYCNIGKPQSLGQQTTTIFREAFAPCD

SEQ ID NO: 147014 - protein, 66 aa, Glycine max
  unsure (1)..(66): unsure at all Xaa locations
  Clone ID: PAT_MRT3847_103774C.1.pep
MLEYTHTTCEWTDMTIRLMKTGNDFLXGDCASLGGWSTKQVMSLMVYMMNCDCGGEEKXMRDRTHL

SEQ ID NO: 147015 - protein, 234 aa, Glycine max
  Clone ID: PAT_MRT3847_103775C.1.pep
DAWVCKSNDVPVYRRDPDQGVDVVGKSGGNHAVSGLKFRILREFLQLGYSVLLSDVDIVYLQNPFDYLYRDSDVESMSDGHNNKTAYGYNDVFDEPSMGWARYAHTMRIWVYNSGFFYIRPTLPSIELLDRVATRLSNDPKSWDQAVFNEELFFPSHPGYDGLHAAKRTMDMYLFMNSKVLFKTVRKDAKLKKLKPVIVHVNYHPDKFARMKAIVEFYANGKQDALDHFPDGSD

SEQ ID NO: 147016 - protein, 89 aa, Glycine max
  unsure (1)..(89): unsure at all Xaa locations
  Clone ID: PAT_MRT3847_103776C.1.pep
MSSFIKPLQMQIILILNLLFEYVPXTMYPVSKFYTNSNQSIPLIYPKLYMHHISISLVYIHTVPAGRHKYSKPQNILIDPLTHQFQIFY

SEQ ID NO: 147017 - protein, 113 aa, Glycine max
  Clone ID: PAT_MRT3847_103777C.1.pep
GTFFFFFFFFCFLSQNGGFLVAHSSSWGGGGQAGMFPSGLLSEGGYLRATWAAQLTKGGIRDKPPPPQGQASWVAALGAKSFPGRGSQVPTFPELGGPWGGTPQREKRAPPTP

SEQ ID NO: 147018 - protein, 45 aa, Glycine max
  Clone ID: PAT_MRT3847_103778C.1.pep
GSSASLPLQSPRLELPDTATSGHGDRFPLSLCDVQLRVVGEAHNP

SEQ ID NO: 147019 - protein, 65 aa, Glycine max
  Clone ID: PAT_MRT3847_103779C.1.pep
AKLAAMSKDKDATNLSRTFKYLLATQFLSRGIPFIFNTWIVRHLTQEDYALYAVAVHLLVTCILF

SEQ ID NO: 147020 - protein, 361 aa, Glycine max
  Clone ID: PAT_MRT3847_10377C.1.pep
MASQLLRRTFGSRILANPRAFSFSSAASTPIRATLFPGDGIGPEIAESVKQIFQAADVPIEWEEHYVGTEIDPRTQSFLTWESLESVRKNKVGLKGPMATPIGKGHRSLNLTLRKELNLYANVRPCYSLPGYKTRYDNVNLITIRENTEGEYSGLEHQVVRGVVESLKIITRQASLRVAEYAFHYAKAHGRERVSAIHKANIMQKTDGLFLKCCREVAEKYPEITYEEVVIDNCCMMLVKNPALFDVLVMPNLYGDIISDLCAGLIGGLGLTPSCNIGEGGIALAEAVHGSAPDIAGKNLANPTALLLSGVTMLRHLNLHDKAEQIQKAILNTIAEGKYRTADLGGSSKTTEFTKAIIDHL

SEQ ID NO: 147021 - protein, 56 aa, Glycine max
  unsure (1)..(56): unsure at all Xaa locations
  Clone ID: PAT_MRT3847_103780C.1.pep
PTNSIIITFLNTNYHITRKLKQNKSYLYFDFSFPSYRKLXLPDETFLXAXVLHNNR

SEQ ID NO: 147022 - protein, 66 aa, Glycine max
  Clone ID: PAT_MRT3847_103781C.1.pep
TSITISPNKNNLIIHSLFYYKNHLLQNLIQFITIIYIQLTPKNPLNQKHPYSNQILPHLPINQNSF

SEQ ID NO: 147023 - protein, 203 aa, Glycine max
  Clone ID: PAT_MRT3847_103782C.1.pep
ILPFFILVFMLIINIVWRSKTKNSNSKLPPGPRKLPLIGNIHHLGTLPHRSLARLANQYGPLMHMQLGELSCIMVSSPEMAKEVMKTHDIIFANRPYVLAADVITYGSKGMTFSPQGTYWRQMRKICTMELLAPKRVDSFRSIREQELSIFVKEMSLSEGSPINLREKISSLAYGLISRIAFGKKSKDQEAYIESMKGGTDTG

SEQ ID NO: 147024 - protein, 112 aa, Glycine max
  Clone ID: PAT_MRT3847_103783C.1.pep
QGSDVRKDLIIELDNAKATLDGILALKAKVLTENNKIKRAIEDVKCRENEFKPELKAADITALEEECTALISDKAGEAEYLQSLEKQVEKLEQIRHVVKCACGEEYTVAVNM

SEQ ID NO: 147025 - protein, 46 aa, Glycine max
  Clone ID: PAT_MRT3847_103784C.1.pep
SARVRKLGIRLEMGSVEEAVQALIELHNHDLGENHHLRVSFSKSTI

SEQ ID NO: 147026 - protein, 91 aa, Glycine max
  unsure (1)..(91): unsure at all Xaa locations
  Clone ID: PAT_MRT3847_103785C.1.pep
TILPMEFNLVVRXKFLNFVXFIMXKRXXXSXXXXXNXNXXXWTXGLAXXLLXKGNDIPCXDYAXSFDGLITKQVMSKMAXMINSLCGGDEK

SEQ ID NO: 147027 - protein, 33 aa, Glycine max
  Clone ID: PAT_MRT3847_103786C.1.pep
MIFECDQEANLQASDNHVLQAVFPKRDICHQLK

SEQ ID NO: 147028 - protein, 69 aa, Glycine max
  Clone ID: PAT_MRT3847_103787C.1.pep
RGCEKTTEGGSSFPESDTMGRAVLLLGHNSLPTWIFPEILCTRGVATGGKNKACMKKRKYDLWLQSVNT

SEQ ID NO: 147029 - protein, 82 aa, Glycine max
  unsure (1)..(82): unsure at all Xaa locations
  Clone ID: PAT_MRT3847_103788C.1.pep
YNKLIVXXEXSXPTLVGIECPXDEXXPRXXIFXKPXTRCXAILPMEXNLVVRQKFLXFVRFIMXXRDKLSCQVGINPXSMSF

SEQ ID NO: 147030 - protein, 52 aa, Glycine max
  Clone ID: PAT_MRT3847_103789C.1.pep
FPCFNRPLWLKAFPSCASGQSPQVSYNLLYTRPHKEQSPPPYKLGMTDFLIG

SEQ ID NO: 147031 - protein, 56 aa, Glycine max
  Clone ID: PAT_MRT3847_10378C.1.pep
YILCQISWSFMIYNILSFGFPRNETSFHVSNIINKKNGSIRVPNSKTIIVSKELYS

SEQ ID NO: 147032 - protein, 43 aa, Glycine max
  Clone ID: PAT_MRT3847_103790C.1.pep
SKSLSNSHTNSHTRATSKSPYNLQLIRIRVTLTQMQTSALSNF

SEQ ID NO: 147033 - protein, 53 aa, Glycine max
  Clone ID: PAT_MRT3847_103791C.1.pep
TVLQDYQPWPKIPLLRGGLNERQTRRLTPRCGTTLSQFVLRFSNCDLDFDSSR

SEQ ID NO: 147034 - protein, 99 aa, Glycine max
  unsure (1)..(99): unsure at all Xaa locations
  Clone ID: PAT_MRT3847_103792C.1.pep
RXXFLVXKAEQEQRQKIVQAEGEAEAAKMLGXALSKNPGYXQTSQDXRSPDISKTIATSQXRIYLTADNLVLNLQDESFTRGSDSLXRNELVTKNSTPR

SEQ ID NO: 147035 - protein, 66 aa, Glycine max
  Clone ID: PAT_MRT3847_103793C.1.pep
TLTYYIPYDILQDEFYQIRQSIMNDLIYYTFIDITGIFSDLLRYEPCHNTLTITSIPRSNAFYNGL

SEQ ID NO: 147036 - protein, 242 aa, Glycine max
  Clone ID: PAT_MRT3847_103794C.1.pep
DSTYNSLVKGFCKAGDLVGASKILKMMISRGFLPSATTYNYFFRYFSRCRKIEEGMNLYTKLIQSGYTPDRLTYHLLVKMLCEEEKLDLAVQVSKEMRHNGYDMDLATSTMLVRTQGFGSRRLRETTEGEDMIRRGIVPQYLTFQRMKADLKKQGMTEMAQKLCKLMSSVPYSPNLPNTYGEVREDAYARRKSIIRKAKAFSDMLKDCKDPSELRKHRSSSENTVSSTNSLIEDIERKRNTG

SEQ ID NO: 147037 - protein, 66 aa, Glycine max
  Clone ID: PAT_MRT3847_103795C.1.pep
FAVSDLDCISYLQIPSSLARIHTCRHRIIPPRSHKDFPNQANTNLNPQKPPKENESQLDQISQLVN

SEQ ID NO: 147038 - protein, 82 aa, Glycine max
  Clone ID: PAT_MRT3847_103796C.1.pep
YNARYVKSLDTPYANVYNLLQINNGRWDWLPDKFVYVTPATYAIRPPHAVTTPPSPSRLRLTLVVMGLYGYLPQPCIPALLF

SEQ ID NO: 147039 - protein, 103 aa, Glycine max
  unsure (1)..(103): unsure at all Xaa locations
  Clone ID: PAT_MRT3847_103797C.1.pep
DMQSKSETANQLRSDPRSFAPNQSYSEPWWRGIQCNPVPQAMSGVNISNSSSLERPNGDSESSEEDDDATKETTPTAPNQPGNYGPDHXALQHSSSSAPLVRD

SEQ ID NO: 147040 - protein, 64 aa, Glycine max
  unsure (1)..(64): unsure at all Xaa locations
  Clone ID: PAT_MRT3847_103798C.1.pep
PPPLGFSNKALGIMTSFFHAIFEKVAPEFFKIGRSNKKPPLPSREIXPPVRVFLPGEMAKPPVF

SEQ ID NO: 147041 - protein, 141 aa, Glycine max
  Clone ID: PAT_MRT3847_103799C.1.pep
EEEFEEYIRDVEKRLGREIESGRGNARCLRLSLDKIEMSHRSLFWYLVSIIPGSTNAIFIQGLQCVFVVDSIASARLLYYNFDYHRTPRRHYFSVFPIRPHNLFANTRSPSSKITYWHRPHTAKTKLPILFIHGIGIGLYP

SEQ ID NO: 147042 - protein, 195 aa, Glycine max
  Clone ID: PAT_MRT3847_10379C.1.pep
MASQLLRRTFGSRFLANPRAFSSAASTPIRATLFPGDGIGPEIADSVKQIFQAADVPIEWEEHYVGTEIDPRTQSFLTWESLESVRKNKVGLKGPMATPIGKGHRSLNLTLRKELNLYANVRPCYSLPGYKTRYDNVNLITIRENTEGEYSGLEHQVVRGVVESLKIITRQASLRVAEYAFHYAKAHGRERGSAI

SEQ ID NO: 147043 - protein, 60 aa, Glycine max
  Clone ID: PAT_MRT3847_1037C.1.pep
SAGALLEVPISGSEGDHFIGRSTILEWSEGPTLADAPYPIIAPPKPICRAPKLSLHDEYP

SEQ ID NO: 147044 - protein, 292 aa, Glycine max
  Clone ID: PAT_MRT3847_103800C.1.pep
NSSVAMSKIPNIKAGGVSTTKDIFVSAVRFAVSIEGPCFPFGDELRISAQEQIDYMLGEDGDTTIIMSDDEVQSVVRMGFYNIIHSFEMDLSSLLLGTTLELEGVYDRIMKRVSDLEWMCNVLPKMDLMKNFVSDWSAISSKILGIIEDKKLDHVMWGLKVKLIEVACKVLEAVGYGSVILPAPCRVQLLKTWFPYVRKMKPLLDSKAVEETGFPYKMDEDLCQAIEGAIVSLILTLPSNDQADILADWIKNREVGYPDLSEAFEVWCYRTKSAKRRLVEDLDGQSDAAVSP

SEQ ID NO: 147045 - protein, 112 aa, Glycine max
  Clone ID: PAT_MRT3847_103801C.1.pep
LLLLYKPKKTRIVQFKRGRHTKKGRLYITYNGRFKNINHIFSIKQLDQNHLHKHTESLSHHITLIFTYHPNLLNLIDYCAENNQNFQFIHNILPILQNHPNDISPAKNNLLN

SEQ ID NO: 147046 - protein, 62 aa, Glycine max
  Clone ID: PAT_MRT3847_103802C.1.pep
TYYSAYRTPTLCTQIYCTSIKQNHPINPDWSIISLHYLAKNIEFVHYSHLLNSLHYQILSTS

SEQ ID NO: 147047 - protein, 88 aa, Glycine max
  Clone ID: PAT_MRT3847_103803C.1.pep
HRHGGMVLPLTKFILIRNHFFRKFSPLHRIFQGHVCFEQFPFLQKFSTFGHCERLSWERSNREILLGKLKFALRNHQVLEAWESFHDF

SEQ ID NO: 147048 - protein, 85 aa, Glycine max
  Clone ID: PAT_MRT3847_103804C.1.pep
MTQKANLFKGKAKKKSIPPNRHGKVPVTRKGKRFVKPSKVTKDMDTDREVSKFINHCNEIKAATLATKDGGQLGIIKPPQEPASK

SEQ ID NO: 147049 - protein, 84 aa, Glycine max
  Clone ID: PAT_MRT3847_103805C.1.pep
ISCGDHYLWLTMYVTAPSCTLESFPALPALSTYNLPSLLRCIHHPRIMISYWHVCCEGRLRVSSTIRSILQPVRHVACTAVIIL

SEQ ID NO: 147050 - protein, 64 aa, Glycine max
  Clone ID: PAT_MRT3847_103806C.1.pep
LQVRCATNAINITIIEIYRERLCDVRATISSTIMCGSECAYVQNYYKVGLRGNLRCVTDAWGQP

SEQ ID NO: 147051 - protein, 322 aa, Glycine max
  Clone ID: PAT_MRT3847_103807C.1.pep
GPDSRVDPRVRLAKDVLSRPLSDADRIKIKKALRGVKVEVTHRGSVRRKYRVSGLTSQPTRELVFPVDENSTMKSVVEYFQEMYGFTIQYTHLPCLQVGNQKKANYLPMEACKIVEGQRYTKRLNEKQITALLKVTCQRPRDRENDILRTVQHNAYDQDPYAKEFGIKISEKLASVEARILPAPWLKYHESGKEKNCLPQVGQWNMMNKKMINGMTVSRWACINFSRSVQDSVARTFCNELAQMCQVSGMEFNPEPVIPIYNAKSEHVEKALKYVYHVSTNKTKGKELELLLAILPDNNGSLYGDLKRICETDLGLISQCCL

SEQ ID NO: 147052 - protein, 81 aa, Glycine max
  Clone ID: PAT_MRT3847_103808C.1.pep
INKFIFSGKKIYIHLNMTDYSCWNMFINKYKNINRQGTWQKNQGPPPKRREIGSKPLKKHEGNLDMNLTRKLTGDTTLTIG

SEQ ID NO: 147053 - protein, 618 aa, Glycine max
  unsure (1)..(618): unsure at all Xaa locations
  Clone ID: PAT_MRT3847_103809C.1.pep
SCYGWDTFHCVNCVWLRISSKLCVFFACAGADQGERKNMDGKLKGKVNIVYSLMFSYFTLVFLILLRSLGSDVDLLVRDGEWTLHSMKILSLRYGRYHYSSDNPCSSIYDAGLALEALAGVISLASSEIDQSRVNTVKNDILKLFDSIEKYDDGTFYFDEKFVGGSEHQGSLSTTSSVVRGVTAFAAVTSGKINLPGDKILGLANFFLGIGIPGDAKDFFNQVESLAFLENNXFSIPLIFSLPATVYSLSKKDQLKVILNTVLGSVAPXLTKNLVRAYRPDATDSRFIASKELPYVFSSPVKVLEQLLNNADVGXSSFVFLIVRHDSGXEKVYDYWQGLNXVPIYVTGIIKVSNAEIAVLDSDLGSVETQKTLDLAGNDVVSLSANHLQKLRFSFQLTTPHDHAFKPLQAFFKLKHETKHEHIFVVGNTGKKFEIILDFLGLVEKFYYLSGRYDIELTVGDAVMENSFLWLLGQVDLDLPEAPEKAARLPPLPVDPYSRYGPKAEIAHLFRAPEKRPPQELSLTFLGLTLLPFIGFLVGLLRLGVNLKNFPSSAVPAAYAILFQLGIATVLLLYVLFWLKLDLFTTLKTVGFLGAFLLFVGHRILSHLASTSSKLKSA

SEQ ID NO: 147054 - protein, 74 aa, Glycine max
  Clone ID: PAT_MRT3847_10380C.1.pep
VHGSAPDIAGKNLANPTALLLSGVTMLRHLDLHDKAEQIQKAILNTIAEGKYRTADLGGSSKTTEFTKAIIDHL

SEQ ID NO: 147055 - protein, 78 aa, Glycine max
  unsure (1)..(78): unsure at all Xaa locations
  Clone ID: PAT_MRT3847_103810C.1.pep
MEGKRYFVAVHVGAGYHXPSNDKALRSAMNRACLAAASVLSNGSGTRLDAVVAAIQVLEDDPCTNAGXGSNLTEDGGV

SEQ ID NO: 147056 - protein, 110 aa, Glycine max
  Clone ID: PAT_MRT3847_103811C.1.pep
GKSLTTNYWVHHHLKNLQKLECDQKPRLRQLKIDLRRATLLVIHIKNNELNDACSAAIKSPQRAPLPANWKKMTTIVPSQLYLSNYIHAGTTGGSKGEYPPPFFAGYKAL

SEQ ID NO: 147057 - protein, 513 aa, Glycine max
  Clone ID: PAT_MRT3847_103812C.1.pep
ARNSAREETVGLEGSSVGQWWLDMIGKTLDEGSTFERIGSRQLAGLVIAVWVKTNIRFHVGDVEVAAVPCGFGRAIGNKGAVGLRIRVYDRIMCFVNCHFAAHLDAVGRRNADFDHVYRTMSFSRPTNLLNTTAAGTSSSVPTFRGTNSAEGMPELSEADMVVFLGDFNYRLDDISYDEARDFVSQRCFDWLRERDQLRAEMEAGNVFQGMREAIITFPPTYKFERHQAGLAGYDSGEKKRIPAWCDRILYRDSCTSLVSECSLECPIVSSVLQYEACMDVTDSDHKPVRCIFSTDIARVDEPIRRQEFGEILESNEKIKYLLKELCKIPETIISTNNIILQNQDTLILRITNKCAEGNALFEIICEGQSTVTGDQKATNHQLRGSFGFPRWLEVSPATGIIRPDQIVEVSVHHEEFQTLEEFVDGVVQNSWCEDSRDKEAILVVKVHGNYTIQPRNHRVRVHHCYSSKKKPMIDSQPDSSRHIQGTVLHRSDFQPFSSSCDVVDQLQKLHSP

SEQ ID NO: 147058 - protein, 32 aa, Glycine max
  Clone ID: PAT_MRT3847_103813C.1.pep
CRCLRILSWFKKSVCCLWSKKWCLKGLYISRF

SEQ ID NO: 147059 - protein, 226 aa, Glycine max
  Clone ID: PAT_MRT3847_103814C.1.pep
LHPCFSFLVYEFLEGGSLDKLLNDDTHATLFDWERRVKVVKGVANALYHMHHGCFPPIVHRDISSKNVLIDLDYEARVSDFGTAKILKPDSQNLSSFAGTYGYAAPELAYTMEVNEKCDVFSFGVLCLEIMMGKHPGDLISSFFSSPGMSSASNLLLKDVLDQRLPQPVNPVDKEVILIAKITFACLSESPRFRPSMEQVYNEFVMPTSSSVNLFSMVTLSQLVDN

SEQ ID NO: 147060 - protein, 80 aa, Glycine max
  Clone ID: PAT_MRT3847_103815C.1.pep
GAPMVKDVCLLNGVGLVVAPPLGGVIVMLTTADGAFVFLRADFLFFPVGVCCSFPFFGNERPFLLPSRRGPPFCVPYLIN

SEQ ID NO: 147061 - protein, 91 aa, Glycine max
  unsure (1)..(91): unsure at all Xaa locations
  Clone ID: PAT_MRT3847_103816C.1.pep
MYEQWLXRHGKEYTALGENDNRIQSLGTXARIRDHNSPDDRTCMLCLDRFADLTNXDYKDKHLGSNIDTNLMLCXTLCNRCTQRVGDRLPE

SEQ ID NO: 147062 - protein, 74 aa, Glycine max
  Clone ID: PAT_MRT3847_103817C.1.pep
KVKNRDKIWWTRFDNGHPLPNSNNPFVINSGYSIFFGFNKQKVKKKNKYLKISGRLKTMDNHTAQLYSSNQTKR

SEQ ID NO: 147063 - protein, 67 aa, Glycine max
  unsure (1)..(67): unsure at all Xaa locations
  Clone ID: PAT_MRT3847_103818C.1.pep
RTRGKKKNVYNIYPKKDLQLIIILAICAIQAFQKLTRFFKSLXVKAIFDTNCSRDLNLFGFCVEGII

SEQ ID NO: 147064 - protein, 51 aa, Glycine max
  Clone ID: PAT_MRT3847_103819C.1.pep
ITRPILSRQPQNNHTSRQQLVLSRFAAYYRHNRSFVVLKHTHCRRHLLAHC

SEQ ID NO: 147065 - protein, 411 aa, Glycine max
  Clone ID: PAT_MRT3847_10381C.1.pep
MQPQRLRQQAMMQPSLYHHPALLTPPQIEPILSGNLPPGFDSSSCRSVYVGNIHPQVTDSLLQELFSTAGALEGCKLIRKEKSSYGFVDYFDRSSAAFAIVTLNGRNIFGQPIKVNWAYASSQREDTSGHFNIFVGDLSPEVTDATLYACFSVYPSCSDARVMWDQKTGRSRGFGFVSFRNQQDAQSAINDLTGKWLGSRQIRCNWATKGASASDEKQTSDSRSVVELTNGSSEDGQETTNDDTPEKNPQYTTVYVGNLAPEVTSVDLHQHFHSLNAGTIEDVRVQRDKGFGFVRYSTHAEAALAIQMGNARILFGKPIKCSWGSKPTPPGTASTPLPPPTSANVSGFSLASLAAYERQMALSKMGGAHALMHQQGQHALKQVAMGMGAPGAGYDARFQNVATTQHLMYYQ

SEQ ID NO: 147066 - protein, 89 aa, Glycine max
  Clone ID: PAT_MRT3847_103820C.1.pep
FRVRQKCWQFFARPRSFLYNLLVNLLGFKFGSSFYSRFFPHRAHFFSRFPPDDPPSFFTGPAGSKFKVVFRPLGFPLVTPLMPASTPPQ

SEQ ID NO: 147067 - protein, 76 aa, Glycine max
  Clone ID: PAT_MRT3847_103821C.1.pep
SRNLTGTVPGTAQISFGLTLRMVLVTPNHSIFYCAMGTNGTLSLASLRHVPPHSILASLPPTDCLLFVFIHTAPVT

SEQ ID NO: 147068 - protein, 71 aa, Glycine max
  Clone ID: PAT_MRT3847_103822C.1.pep
EQDLFCIYSEIPGTSKQVTVPLRKAPASAHVVSALQEVSIRAHALQVGTDLRCYIAGYVIVFFGIKEGSRI

SEQ ID NO: 147069 - protein, 117 aa, Glycine max
  unsure (1)..(117): unsure at all Xaa locations
  Clone ID: PAT_MRT3847_103823C.1.pep
MFQFAKFXKSKERRLAAELGYGFPIGDPWITDGISPWPFASESVLPSQCPGIHPMHSFRSCTQTNECANAAFASIPCLFASHRLHKRYTEDQPNLDENQYTQLHLQIQRASERTLCH

SEQ ID NO: 147070 - protein, 87 aa, Glycine max
  Clone ID: PAT_MRT3847_103824C.1.pep
MSVSVVITAGDDDDGNNAIGRVCETLCPFRFGDGRVCETLCPFRFGDGGCRWPNGGCAQLGSQYVGLKANFDAFDKLSIDDSYFKSE

SEQ ID NO: 147071 - protein, 33 aa, Glycine max
  Clone ID: PAT_MRT3847_103825C.1.pep
ILTRGFNIQYGRTGLIAHQYASSLRSIHPLLSK

SEQ ID NO: 147072 - protein, 53 aa, Glycine max
  unsure (1)..(53): unsure at all Xaa locations
  Clone ID: PAT_MRT3847_103826C.1.pep
XXVXIXXXRTXXGTYXXISXLXXXXXXXATXHXXXXXXEPNSEALTFTRCXQT

SEQ ID NO: 147073 - protein, 147 aa, Glycine max
  unsure (1)..(147): unsure at all Xaa locations
  Clone ID: PAT_MRT3847_103827C.1.pep
MDSAFARTRSMFFAASLLLYIFAVTTTTFASIHIYDHEPFRELGNSYLLAGGSEGIVTSQPYSVHDDGRSYIRFENITFRRTKASAKXRGSVPVHIIIFEAADRNDIGGSAYGGQRAICCTPDLAKMGVCKQGEIIXRPSATDINWP

SEQ ID NO: 147074 - protein, 74 aa, Glycine max
  Clone ID: PAT_MRT3847_103828C.1.pep
NPLLGISRSVQTAGWQPGPFKACMCFRLMLSSCVFVVTGVCLLCVYGFLCTLKPSCYDCFTIFCYFSIRVFPFS

SEQ ID NO: 147075 - protein, 91 aa, Glycine max
  unsure (1)..(91): unsure at all Xaa locations
  Clone ID: PAT_MRT3847_103829C.1.pep
RQLLALTVAIYEACVNGLVPLTVVADVPAAVLELSQTLFNTRPHIXLFVSRTVLHTDLMGILCLLNVRCCIMHTVRDRHVPASVATYMNDH

SEQ ID NO: 147076 - protein, 134 aa, Glycine max
  unsure (1)..(134): unsure at all Xaa locations
  Clone ID: PAT_MRT3847_10382C.1.pep
STSSGVRGEDVVSFGNQSELSPQRAIFGCENDETGDIYNQRADGVMGLGRGDLSIMDQLVEKKVISDAFSLCYGGMGVGGGAMVLGGISPPSDMVFTHSYPVRSPYYNIDLNEIHVSVKRLHLNPXVFDGKHGT

SEQ ID NO: 147077 - protein, 44 aa, Glycine max
  Clone ID: PAT_MRT3847_103830C.1.pep
MAMVNPGKVYLSPFPRWYNHNATCAYHGGALGHSIEQCMVFKHK

SEQ ID NO: 147078 - protein, 159 aa, Glycine max
  Clone ID: PAT_MRT3847_103831C.1.pep
PSSLFPLTITLITPTKNQTKNLLGDDMVKSAWKEMEMKGVVEVRGVFQEGSLCNILESVFGSNDKSEELGDMVRERYELIAMLNLEDYFPLKFMDFHGVKRRCHKLAAKVGSVVGQIVEDRIREGEFVVKNDFLSTLLSLSKEDRLADSYMAAILWEMV

SEQ ID NO: 147079 - protein, 39 aa, Glycine max
  Clone ID: PAT_MRT3847_103832C.1.pep
SRRVFTQCLRGLVLPNCVQRLVDQELHDTLPLLQMRSER

SEQ ID NO: 147080 - protein, 295 aa, Glycine max
  Clone ID: PAT_MRT3847_103833C.1.pep
MKPTATFFFLVPSTTLVVCLCLGIGTTTLFITLLAISLNYWLVPGGFAWRNYHSYHTNEKPNKKLTGPMGWPILGSLPLMGSLAHQKLAALAATLNAKRLMALSLGPTPVVISSHPETAREILLGSSFSDRPIKESARALMFERAIGFAPSGTYWRHLRRIAAFHMFSPRRIQGLEGLRQRVGDDMVKSAWKEMEMKGVVEVRGVFQEGSLCNILESVFGSNDKSEELGDMVREGYELIAMLNLEDYFPLKFLDFHGVKRRCHKLAAKVGSVVGQIVGDRKRERSFVVKNDFLST

SEQ ID NO: 147081 - protein, 49 aa, Glycine max
  Clone ID: PAT_MRT3847_103834C.1.pep
ENNLLAITLPNNSSTVRLRHIGKNLIQKNIKLYTYTVNNTESLHANGST

SEQ ID NO: 147082 - protein, 76 aa, Glycine max
  Clone ID: PAT_MRT3847_103835C.1.pep
SQTTPSILMFLSTVQSRVTLKLIYLYFENEKVATGVVLEKSQCAIGPLFHNLVSKYLKLNKKSPTYRGKKKEEELP

SEQ ID NO: 147083 - protein, 90 aa, Glycine max
  Clone ID: PAT_MRT3847_103836C.1.pep
QGLNATKKPNRQHQHTTICSHSNCTQLQTYSRLLNFANTTTNPPPLLLQKHTDDDYHQTILIGTAILTLPNNQHRYSYRLQSVNTLRVLS

SEQ ID NO: 147084 - protein, 122 aa, Glycine max
  unsure (1)..(122): unsure at all Xaa locations
  Clone ID: PAT_MRT3847_103837C.1.pep
GNACAKGKPVAHVSCSNFSGGEKHASRPKQYSNSSEQLSAPITSELNVPKSFSSNLKSFSLNDLKEATKNFRQENLIGEGXGFGRVFKGWIDENTYGPTKPGTGIVVPIKNLKPESFQGHKE

SEQ ID NO: 147085 - protein, 45 aa, Glycine max
  Clone ID: PAT_MRT3847_103838C.1.pep
GLELLFLKPFFHQIPIPYSCYNSKIPFFTPTPDFHFSSTMNSCLI

SEQ ID NO: 147086 - protein, 35 aa, Glycine max
  unsure (1)..(35): unsure at all Xaa locations
  Clone ID: PAT_MRT3847_103839C.1.pep
QCKEDRTRFQVSNHCRWLVCVPXIRCREGNCRFRX

SEQ ID NO: 147087 - protein, 67 aa, Glycine max
  Clone ID: PAT_MRT3847_10383C.1.pep
GRGSNWDQGILSLSHDLQNWNREVFGNIFPNRVSLSKFRDWKRAWAPPFLMISFTDNKSCGRNRSKC

SEQ ID NO: 147088 - protein, 58 aa, Glycine max
  Clone ID: PAT_MRT3847_103840C.1.pep
VRLREDDRRVRVGEDHRRVRVGKGHRRGPVARSHQRDPVAKSQQRGPLNKILNNEKTF

SEQ ID NO: 147089 - protein, 44 aa, Glycine max
  unsure (1)..(44): unsure at all Xaa locations
  Clone ID: PAT_MRT3847_103841C.1.pep
AYHPGXYXXPHIXGMASXELXANMXRIEXLXDPXKGXXMYLTAG

SEQ ID NO: 147090 - protein, 59 aa, Glycine max
  Clone ID: PAT_MRT3847_103842C.1.pep
GAFQHSRFLAGAATTAAGRLVDQKGELEAIWPYPASYHPPQENLKDFISFLDEHKVDLS

SEQ ID NO: 147091 - protein, 59 aa, Glycine max
  Clone ID: PAT_MRT3847_103843C.1.pep
PGIPRTVNCWGEGIRPYFFWCSPVYLLKVQTYFFTCLGGQNKPKFKVILNSWNTKKFFL

SEQ ID NO: 147092 - protein, 64 aa, Glycine max
  unsure (1)..(64): unsure at all Xaa locations
  Clone ID: PAT_MRT3847_103844C.1.pep
PSKDKLETKSTLWANTLSKELDNLNIFGPKTNPLANIGVDFEPXNRKEKKMETPTSTAFTSTEL

SEQ ID NO: 147093 - protein, 51 aa, Glycine max
  unsure (1)..(51): unsure at all Xaa locations
  Clone ID: PAT_MRT3847_103845C.1.pep
KSXLDLYXEIRCITSPTLITMSSFSSKGGAINIYTEYVIYNAIFTHITLSG

SEQ ID NO: 147094 - protein, 283 aa, Glycine max
  Clone ID: PAT_MRT3847_103846C.1.pep
MDGYSGKRAIDGVVVPRKGMGLAFRDTANARDRNGQVCSRITCSSRVNTPKGTQIGSCEKGKSLKPSIQSSSAGKEAIGSSSRTCSKTSSPGKPPVKPRKSPSSQLETDSSETSSVQDDSEASKLTSPPQKSQTGGQAELENTVSGNVMMEVGSSSIVSNTRSRRNFHPNSGLRGQEIKSSGSVTRAGTSRYGLRNLKCNTISDVIPAGCSPSDSTLNRRKDVIKKRNCEGEGSSTTRGKKMSGSSLEARNSGPRNGISISDTRISRNTQRDRSDSNMAPVRT

SEQ ID NO: 147095 - protein, 88 aa, Glycine max
  Clone ID: PAT_MRT3847_103847C.1.pep
WAGNPAKFLRKLADEQKAFISQSATNYTNLAQVHAAENSKPFDEIDFEKVLRKKFARIDEEYDSMLGVVREIPPELIFPDKAEKALQK

SEQ ID NO: 147096 - protein, 114 aa, Glycine max
  Clone ID: PAT_MRT3847_103848C.1.pep
GVSGFFFFGALSRIPGWAFGAPFFFWCLFGGFLCSGCFCLYTRGSRPPNVFFCFGGGAPAIFRFGPRALLLGFVGSPPRFFRALWPFFFKADGPPRKIGGCRVLFFSREILTPP

SEQ ID NO: 147097 - protein, 61 aa, Glycine max
  Clone ID: PAT_MRT3847_103849C.1.pep
PVIWHCLARVSPLEVNHAMIVEKSVMRNYFVYLLMGSLPFLWLPVSTIMLQAAAFRFDECF

SEQ ID NO: 147098 - protein, 187 aa, Glycine max
  Clone ID: PAT_MRT3847_10384C.1.pep
FLRYACVVREKVRVVKTMASQLLRRTFGSRILANPRAFSFSSAASTPIRATLFPGDGIGPEIAESVKQIFQAADVPIEWEEHYVGTEIDPRTQSFLTWESLESVRQNGVGLKGPMATPIGKGHRSLNLTLRKELNLYANVRPCYSLPGYKTRYDNVNLITIRENTEGEYSGLEHQVNFTTIYARTII

SEQ ID NO: 147099 - protein, 138 aa, Glycine max
  Clone ID: PAT_MRT3847_103850C.1.pep
MHLKESSLSQSTTLKGTNDSGLLQYNVAQTSVYHWPSIEKIETFGASHLDSKSAFVIFSPSMHVHAGNILYIWVGRSFSCDASQVHLDIDKQSDVGAVDWNQIGCDLLARFSLPKNSVIKVVKENEEPSEFLALLSSL

SEQ ID NO: 147100 - protein, 298 aa, Glycine max
  Clone ID: PAT_MRT3847_103851C.1.pep
THLPARESSWSVRRKVSHGNMKEVVSVPRLSFPRVYSDSMLCLRTSANAILSPSSSLSSSSSSISSSSSPSFVSPDSITSDSSIHSKFLSEVSPVSSSLSNFSNLSITSYSTPKTVSNSTDVLGVKLSHPWSQSASLPLKKSSTSLAERRGNLSKFLKLPLMNDKTQVTDKSSTSHASREYDILVNGNVSYLQQSDNKDYFCKSNNHAKDGGVNSIQKCELALCPSIAGSMDLKEFSQSTLKRTNESGLLQCNVAQTWVYHWPSLQKIETFGASHLDSKAAFVIFFSPMHVLPGNNLY

SEQ ID NO: 147101 - protein, 45 aa, Glycine max
  Clone ID: PAT_MRT3847_103852C.1.pep
ELMVNNIFYGPKGLALIILTFGRPLLIAYTRTLYVVNELVTSTVS

SEQ ID NO: 147102 - protein, 45 aa, Glycine max
  Clone ID: PAT_MRT3847_103853C.1.pep
VTHVDFNFLIFMLSGKCKGIYILRVAHFHKSLKFTAQRHEKATVS

SEQ ID NO: 147103 - protein, 152 aa, Glycine max
  Clone ID: PAT_MRT3847_103854C.1.pep
IHEESKSVVAGGGAVEAALSIYLENFATSLSSREQLAIAEFAKSLLVIPKTLSVNAAQDATDLVAKLRSYHNSSQTKVDHANLKWIGLDLTEGVVRDNRKAGVLEPAISKIKSLKFATEAAITILRIDDMIKLQPSPKEQQSYRQAYEAGEL

SEQ ID NO: 147104 - protein, 240 aa, Glycine max
  Clone ID: PAT_MRT3847_103855C.1.pep
MESKVVVNVEHDNDKLRVELNVSKRDDFNYQMHFAISERAYALLTVMIGRALMLPRGTVFSCYEILELIGDDVYADIYDDEVAVGYYLRYALSYRDISEILRGRGVNVHHSTVYRWVQEYAPILYQIWKKKHKKAYYKWRIDETYIKIKGKWSYLYRAIDAEGHTLDIWLRKQRDNHSAYAFIKRLIKQFGKPQKVITDQAPSTKVAMVKVIKAFKLKPDCHCTSKYLNNLIEQDHRHIK

SEQ ID NO: 147105 - protein, 94 aa, Glycine max
  Clone ID: PAT_MRT3847_103856C.1.pep
PFLVGFLISPEKTRHRAHAIPSLKTYVNLTIQMTPACERSAWHQHHSLIHAKLQAVKADGKGEVKRKQGFFNQKSARPERDPRTNANSALPVAT

SEQ ID NO: 147106 - protein, 51 aa, Glycine max
  Clone ID: PAT_MRT3847_103857C.1.pep
CFPPRYHLGSWCGTFCQAHKMFGYLCPRNILRTWFFGIKLCLLLVFVVINW

SEQ ID NO: 147107 - protein, 71 aa, Glycine max
  unsure (1)..(71): unsure at all Xaa locations
  Clone ID: PAT_MRT3847_103858C.1.pep
ERTDECLYHACDIAHDAGSAGRQSLSGGTQKXATVLITLAGIRASCHYVTKLWIASMCTNWCTTGARLQKF

SEQ ID NO: 147108 - protein, 192 aa, Glycine max
  unsure (1)..(192): unsure at all Xaa locations
  Clone ID: PAT_MRT3847_103859C.1.pep
MEVPIKYPAKLTLRVVLTCIMAATGGLIFGYDHGVSGGVTSMDSFLKKFFPSVYEKESNVKPSSNQYCKFNSQILTLFTSSLYLSALAAGLGASSITRMLGRRATMIMGGIFFVAGALLNGLAVSIWMLIVGRLLLGFGIGCANQSVPIYVSEMAPYKYRGALNMCFQLSITIGIFVXANLFNYYFFKILNG

SEQ ID NO: 147109 - protein, 57 aa, Glycine max
  Clone ID: PAT_MRT3847_10385C.1.pep
LPIFITHYSPNTRYLPSFIFYTYISVCSPVFLTNCPRLIAIHYYSSHYISKPLHHFT

SEQ ID NO: 147110 - protein, 48 aa, Glycine max
  unsure (1)..(48): unsure at all Xaa locations
  Clone ID: PAT_MRT3847_103860C.1.pep
VIHGPTTILXNVNMAANXISAAEIKKGIPVTKLFKKLPQMQEWADKVT

SEQ ID NO: 147111 - protein, 134 aa, Glycine max
  Clone ID: PAT_MRT3847_103861C.1.pep
MKHTKVFKSTNVQTKPNEGNYKHRTSKLVVTLYAKALSIHHLAPPSCFGHLQEAKSTSKSTTRSSITKPRTPKDANKMPLILNVPHMTSNPDAAATNTDKQYRRERHSIEMIGTLKAKDQTTINVYTKLLARTR

SEQ ID NO: 147112 - protein, 51 aa, Glycine max
  Clone ID: PAT_MRT3847_103862C.1.pep
FNKMVYFSIKNDNLIKLTNFFNKYEVCLFLYEKNYVWLKNNFFYIYKIIQF

SEQ ID NO: 147113 - protein, 131 aa, Glycine max
  Clone ID: PAT_MRT3847_103863C.1.pep
MSWQAYVDDHLLCEIEGNHLTHAAIIGHDGSVWAQSANFPQFKAEEITAIMNDFNEPGSLAPTGLFLAATKYMVIQGEPGAVIRGKKGPGGVTVKKTGAALIIGIYDEPMAPGQCNMVVERLGDYLIEQGL

SEQ ID NO: 147114 - protein, 131 aa, Glycine max; identical to SEQ ID NO: 147113
  Clone ID: PAT_MRT3847_103864C.1.pep

SEQ ID NO: 147115 - protein, 70 aa, Glycine max
  Clone ID: PAT_MRT3847_103865C.1.pep
RACWLAKYIQVAPSLCQVKNRLCHPERYQHDIFGESAADASCYALCGTGALTILTASWRQMVGTTIRGRE

SEQ ID NO: 147116 - protein, 47 aa, Glycine max
  unsure (1)..(47): unsure at all Xaa locations
  Clone ID: PAT_MRT3847_103866C.1.pep
STXLASQLTCFVLCDCSLYEISRIDPEIYFGWLAVKKTLVLTTCLIK

SEQ ID NO: 147117 - protein, 154 aa, Glycine max
  Clone ID: PAT_MRT3847_103867C.1.pep
MSFRHSIMNALPILLFFLFVSALVSAKKTGDVTELQIGVKHKPVSCEVQAHKGDRVKVHYRGKLTDGTVFDSSFERNNPIEFELGTGQVIKGWDQGLLGMCLGEKRKLKIPSKLGYGEQGSPPTIPGGATLIFDAELVGVNDKSLGEGKGNNEL

SEQ ID NO: 147118 - protein, 147 aa, Glycine max
  Clone ID: PAT_MRT3847_103868C.1.pep
MNALPILLFFLFVSALVYAKKTGDVTELQIGVKHKPASCEVLAHKGDRVKVHYRGKLTDGTVFDSSFERNNPIEFELGTGQVIKGWDQGLLGMCLGEKRKLKIPAKLGYGDQGSPPTIPGGATLIFDTELVGVNDKSLGEEKENSEL

SEQ ID NO: 147119 - protein, 66 aa, Glycine max
  unsure (1)..(66): unsure at all Xaa locations
  Clone ID: PAT_MRT3847_103869C.1.pep
XEXXIXIXXXXLGKSLRXXLKLCRXXQIHVLXFXXLMFSSXIXYFVLNIXFIXXVMXTQXVRXFLP

SEQ ID NO: 147120 - protein, 166 aa, Glycine max
  Clone ID: PAT_MRT3847_10386C.1.pep
MSKPAESHEVKISQALPNKQILQSQLDVIELSDGLPVQQLPEQQINFAYKNDMSKPAELHEVKISQAQSNKQIQPSQIQVIELSDDDDEENEKPSTAKLVPSVQSDTLMWHYRDPMGNVQGPFSLISLKRWSDAGYFPRHFKVWKSGNRQDEDVLLVNILAQFFPL

SEQ ID NO: 147121 - protein, 49 aa, Glycine max
  Clone ID: PAT_MRT3847_103870C.1.pep
SSRLAQEKFSGTASESEDDNERYDAAEEETDDDDNAFFDTRDIRSSSPF

SEQ ID NO: 147122 - protein, 58 aa, Glycine max
  Clone ID: PAT_MRT3847_103871C.1.pep
TSKEGGPVPPRFKLGETGVIAQPVHSLEKYPVLFSTNPDTFGSDENRRRQNGGRRNSI

SEQ ID NO: 147123 - protein, 63 aa, Glycine max
  Clone ID: PAT_MRT3847_103872C.1.pep
NPREPTCIRGFPPFSPLKNRTLLYHFQRWLNPYRVNISPNRGGPFLGEKINLGLIYPAPGAAP

SEQ ID NO: 147124 - protein, 46 aa, Glycine max
  Clone ID: PAT_MRT3847_103873C.1.pep
MEFKLVNQGGLYPLAFQAKDGGWFPAPGLYSLFILLESIFFFIEGF

SEQ ID NO: 147125 - protein, 42 aa, Glycine max
  Clone ID: PAT_MRT3847_103874C.1.pep
MKFLLTITLFKRLCQGTRLMPHASAGKYMLIHKSNSGHLDLD

SEQ ID NO: 147126 - protein, 206 aa, Glycine max
  unsure (1)..(206): unsure at all Xaa locations
  Clone ID: PAT_MRT3847_103875C.1.pep
LTKRLDNNAGIGRGRLELHPGSRXRINHSGLRDGNILLDNDMNPKHTESGGARRLGGARAGGPRNLLRGTXVISFGVIVLEIISGRKNRGFCDPHNHLNLLGHAWRLWIEKRPLELMDDSADNLVAPSEILRYIHIGLLCVQQRPEDRPNMSSVVLMLNGEKLLPEPSQPGFYTGGRDHSTVTNSSSRNCEAYSLNEMSDSLLKPR

SEQ ID NO: 147127 - protein, 92 aa, Glycine max
  Clone ID: PAT_MRT3847_103876C.1.pep
RLREDHRGGSLERSYFKLSGSFLSIYRFGLSAAVLRLHHRHRRSHFLNLRGALLLGGPVVSLSSLLLSGPNHSYDPLSRNSVIPLVVGCVGD

SEQ ID NO: 147128 - protein, 47 aa, Glycine max
  Clone ID: PAT_MRT3847_103877C.1.pep
WTAFAILWPDQENAQQYEQIFHLRLASHLLHKENLRFSYPIVECFLI

SEQ ID NO: 147129 - protein, 92 aa, Glycine max
  unsure (1)..(92): unsure at all Xaa locations
  Clone ID: PAT_MRT3847_103878C.1.pep
FRYCFRMQIQIARTIQTARKSTGGKASRNEVATKAARKSDPTTGGVKKPHRXRSGTVDLREIMKFQKSTELLIRKLPFQRLVREIAQDFKTD

SEQ ID NO: 147130 - protein, 129 aa, Glycine max
  unsure (1)..(129): unsure at all Xaa locations
  Clone ID: PAT_MRT3847_103879C.1.pep
EPGRRIFRIMKSAYNVEPDIKHYGFMVDLLGRAGLLEEAEEMIRSMPMKADIVIWGTLLAACRTHGDVNIGERAAESLAGLAPSHGGGKVLLSNIYAXDAGRWEDVSLVRRAIQNQRMERMPGCSGVIR

SEQ ID NO: 147131 - protein, 62 aa, Glycine max
  Clone ID: PAT_MRT3847_10387C.1.pep
DFQRNLNRCNTYERTSFVRRTFFLRKNFFCRLLRKNFFHKKVSNFFYFLINFLYKLSFISLF

SEQ ID NO: 147132 - protein, 61 aa, Glycine max
  Clone ID: PAT_MRT3847_103880C.1.pep
SLLDRTRPTFPSFMSSTVSLSLNYKSIGYLISWCHLISTNQLPYTITFNKPKFIINYYDSY

SEQ ID NO: 147133 - protein, 181 aa, Glycine max
  Clone ID: PAT_MRT3847_103881C.1.pep
MGNCQAIDAATLVIQHPNGKVDKFYAPLSATHVMKTNPGHYVALLISTTFCPTKDIQNCPNKSDIKNKNANNPVHITRIKLLKPTDTLVLGQVYRLIKTQEVMKGLKEKQKAKMRQNVPESAHKPDLEKEKVARRSEMEDNKVITKPERARPRITAPTNNGATAKTRFWQPSLQSISEAAS

SEQ ID NO: 147134 - protein, 69 aa, Glycine max
  unsure (1)..(69): unsure at all Xaa locations
  Clone ID: PAT_MRT3847_103882C.1.pep
DNATDHFICYARVDDELYDLDGKQAVPISDGTSXPRSLLRDAAKAVHSMIQRNTHSFNYYVIAKGMKFG

SEQ ID NO: 147135 - protein, 58 aa, Glycine max
  Clone ID: PAT_MRT3847_103883C.1.pep
TPQMLVPRVPNKPKTIIHYKETIQCKQKIVSLKKSLTIMYKLLNMKVQFLNPNLSCYI

SEQ ID NO: 147136 - protein, 310 aa, Glycine max
  unsure (1)..(310): unsure at all Xaa locations
  Clone ID: PAT_MRT3847_103884C.1.pep
MLKHFNMNIFFTLLIVVTLASFYVPHLKPSLSITIPFCMVATLAYQFIMRTPNKIYLVDFACFKPSLECLCSKEMLLDRAKRVGFLSDENYKLVNKILDRSGLGPWTYVPEGLLEIPPRLTLEEARKETDTVLFGAVDELLEKTXLKPKTLGILVVNCCLFNPTPSLSDSIVNRYKLRGNILAYNLSGMGCSAGVLAVDFAKQLLQAHPNSYALVLSTENEISSMYWGNNPSMLLVNCLFRMGGSAALLSSHLSDRQRSKYELFHTLRTHVGADDNSYKCVFQEEDDENKXGVSLSKELMNVARDALKVH

SEQ ID NO: 147137 - protein, 186 aa, Glycine max
  Clone ID: PAT_MRT3847_103885C.1.pep
MLKHFNFNMNIFFTLLIVVTLASFYVPQLKPRPSITIAFCMVATLVYQFIMRTPNKIYLVDFACFKPSLACLCSKEMLLDRANRVGFLSEENYKLVNKILDRSGLGPWTYVPEGLLEIPPRLTFEEARKETDTVLFGAVDELLEKPVVEAKDIGVLVVNCCLFNPTPSLSDSIVNRYKLRGNILGL

SEQ ID NO: 147138 - protein, 67 aa, Glycine max
  Clone ID: PAT_MRT3847_103886C.1.pep
KGNGDGFPPPRGWPMGGPPRSLLYLGPPPIWGGQYAINGPRAIFGAPKINFLGGIPFFPVFGGTFPN

SEQ ID NO: 147139 - protein, 53 aa, Glycine max
  Clone ID: PAT_MRT3847_103887C.1.pep
ALEIGRLCTFPDHLSIGKDFKSHHAYALEVGELCTLLGHLLIGARFLAFWCSC

SEQ ID NO: 147140 - protein, 59 aa, Glycine max
  Clone ID: PAT_MRT3847_103888C.1.pep
AWRFASQCLTSLLLVVVFNVAQWQPLVPALFIFGDSVVDLRNDSHLYTVVVAHFPHFGR

SEQ ID NO: 147141 - protein, 49 aa, Glycine max
  Clone ID: PAT_MRT3847_103889C.1.pep
SHIQMNEYRDQVILPTTTKNHGRHIDTCVKVLDMTGLKLSALNQLKICQ

SEQ ID NO: 147142 - protein, 112 aa, Glycine max
  Clone ID: PAT_MRT3847_10388C.1.pep
ASMHLRSQKTERWLVHCIISISESSHQDPYSLCAWIQAIQRGVVVGWTDVRHARPWVIHSQMYTHKNVNISIRRSSRGTSSSVFSRACAKIQFNFYKRSPAGSHHPGSRRYK

SEQ ID NO: 147143 - protein, 71 aa, Glycine max
  Clone ID: PAT_MRT3847_103890C.1.pep
LSQFSIPPPTYNNSLKRPRLQNCPSIIKHVHHTHSLRGMPLGSKFFPQKKKIRTLAQGHLFFAVKDKKMLI

SEQ ID NO: 147144 - protein, 44 aa, Glycine max
  Clone ID: PAT_MRT3847_103891C.1.pep
LAVVLKRGIWKNLGVTKFNRFEGNSLLASWRISKKARTNCLSKQ

SEQ ID NO: 147145 - protein, 104 aa, Glycine max
  Clone ID: PAT_MRT3847_103892C.1.pep
LSINFASLHQPSWPRKRSPEHYSSDVVLPSSTLKIRNFGIRFSFFPFESLPWPLFKLFLICWTFLIPAEFAFTSIPFFGDINLRGMDSPFNDIPSKLVWFNFGF

SEQ ID NO: 147146 - protein, 1830 aa, Glycine max
  unsure (1)..(1830): unsure at all Xaa locations
  Clone ID: PAT_MRT3847_103893C.1.pep
MENSGKWKVEKSLYNNPKIAIEKESRNCNRKEKERFEMIFQSFILDNLVFLCMKIINSIVVVGLYYGFLTTFSIGPSYLFLLRARLVEEGTEKKISATTGFITGQLIMFISIYYAPLHLALGRPHIITVIALPYLLFQFFGNNHKNFLNYGYKNPNSIRNFSIQRIFFHNLIFQLLNPFFLPSSILIRLVNIYLFRCNNKFIFLISSFIGWIIGHTFFMKWIEFILVRIQQTNSIKSNVRIQSNKYIMSEFRNSMLKIFLVFLFITCLYYLGRVPPPFFSKKLSEIQETHEIYKKGKKIDVEKNLQRVQTKQKQKRSNNKEGFLSLFSKNENNFYKIDEEKYKLGFVKKPLVNILFNYKRWNRPFRYIKNNRFENVVKNEISEFFFHTCQSDGKERISFMYPPNLSTFHKMMETKFYLFTKDKISYDELSNYWSYTNEEKRNKLSNEFVNRAKVMDKELISLDILENRIRLSNDETKTKYLTKIYDPFLNGRFRGQIENVFSTSIQYEKNXKKNTILINKIHGILISNNTYKKNNSNYPELEKKXNIFDRKSLVTTFFFFNLISKFSKKLVSSLSFEALSLFPEHEQVKINYEEEKKQIIKILFDAIRTDLNEKTIVNGNRTKCIRINEIRKKVPRWSYKFIDELEQLEGKNEAENYQIRSRKAKRVVILTNKSKFFKKYDTYNPTGDTDNAEKKKNELALIRYSQQSDFRRDIIKGSIRAQRRKTVTWKFFQKRVHSPLFLDKIEKPLFFSFDSFKSMKIFFMFKIWMRKKEEFEISSYTEERAKESSKKEEEKKKENEERKRIEIAEAWDSIIFAQVIRGILLITQSILRKYILLPSLIITKNIARILFFQFPEWSEDFRDWKREMYIKCTYNGVQLSEREFPKKWLTDGIQIKILFPFRLKPWHKSKLRSNEKKKDLMKKKNFCFLTVWGMEVDLPFSGSPQKNRFSSFFDPIFKELKKKXKQFQFFTFRVLKVLSEKLKLFLTILIEKAKRISKSIIESILKSILKSILSLTKIKQFFKLLFIKFKFKKIDELSENKKDSTIYKNNPMISETTISIQSINSVNCSLXKKKKIKDLNAKRKAVIKKIEKIKKGLVISETNIHSNKTTYDSKRVEFEKKKLQILQRRRNARLTRKSHSFLKFFMKRIYRDIFLYISCIPRINIQLFLELTKKFLNKSIYDNEANAERIYKTNQSIIRFISILHKYFHTRNPNSHNSCDISFLSQAYVFFNLLHTRIININIYKLRSVFQYHGIFFFLKNEIKDSFFGAQGIFHYKLKHNNPLNSVINQWTNWLKDHYYQYDLSKSRWSRLVPQKWRNRITEYRIAQNKDLTKCNSYEKSQLILYKEQQVNALKKKIRKQYRYDLLSYNFINYADKKDSYIYGYRSLFQVKKNQVISSNYNTYKKELLDIIDNLFIKNYISEDAILDMEKNMYRKYFDWMGINREILNRSISNPEFWFFSKFVIFYDAYRGNSQVIPIKLLFFSSNVNQNVSENKKNITRKKKNESLELELETRNRAKAEYPDQRNLESSISNQEKDIENDYVGSDSEKNSKGIKKKKDKNKMEAELNFLLRNFLILHLNWNNFLGQRIFNNVKVYCLLIRLKNLREITIASIQRGELGLDIMMIQNQKNLILLGLRKKKNNKFMKKEIFVIEPVRLSRKNNKQFFMYQTIGLSLIQKNKRKIYHKYPEKIHVNKKNFYKYITRTRDQKITEKKEKDNSDLLVPENILSARRRRELRILICLNPNNINSMHRNTIFYNPNKVQNGFPLLTKKRKYFEKDKKXLMNFKIFLWPKYRLEDLACINRYWFNTHNGSRFSIVRIHMYPRMKIR

SEQ ID NO: 147147 - protein, 57 aa, Glycine max
  Clone ID: PAT_MRT3847_103894C.1.pep
GLPNPILFYKWPGLVFPDQISLEIIPNREGPIFISFKTMAPSKKEKKGIPFLLKMPG

SEQ ID NO: 147148 - protein, 64 aa, Glycine max
  Clone ID: PAT_MRT3847_103895C.1.pep
VLSSKLSSHFVRMPSDTCTQPHCTSVLDTDDDPFQNGDSYYMSPVKIRKGGPFHMDSHVIAYAT

SEQ ID NO: 147149 - protein, 43 aa, Glycine max
  Clone ID: PAT_MRT3847_103896C.1.pep
MPSTRGAARGGMKLGRTGNTNCPDTDRQDQSQSFRGPQNKRST

SEQ ID NO: 147150 - protein, 74 aa, Glycine max
  Clone ID: PAT_MRT3847_103897C.1.pep
GLVNSGPFKYSRVFGIFFIEAVLWSIFFCPGLPLVVFQTPISPLRLMPFVPWSPLFVGNGSSFPFFPLPMLVAR

SEQ ID NO: 147151 - protein, 63 aa, Glycine max
  Clone ID: PAT_MRT3847_103898C.1.pep
PRVHTHVPDVRTIECVYFKRKIELGKYILQITVNNTYSCALHVPLFIFFFLKKVSYKSRSLLL

SEQ ID NO: 147152 - protein, 47 aa, Glycine max
  Clone ID: PAT_MRT3847_103899C.1.pep
YHISVAPWCGVVYERLIITTFARAAGGNINNYSSPKQTFLYPKFPFK

SEQ ID NO: 147153 - protein, 81 aa, Glycine max
  Clone ID: PAT_MRT3847_10389C.1.pep
RKEIIGGQFIPKAIPISLAKTVPLKWAADNTRFVSCSQSLRQVHYQLKSTSDHVLVGLKAMSYHLQELHVVYPLLVTWSHS

SEQ ID NO: 147154 - protein, 60 aa, Glycine max
  Clone ID: PAT_MRT3847_1038C.1.pep
IIFILSSALFVSAKSLGGVGISTMIQRIAKKEYTGCENLCTCSTYILEFGFRIQFQGLNN

SEQ ID NO: 147155 - protein, 82 aa, Glycine max
  Clone ID: PAT_MRT3847_103900C.1.pep
RAATALCPSRESLRCINSQCPIVEQIHIISDQVISLEAMYSHPHECIHSHMSYDPESHTYWQVLTADTAQNMYSRNHVTSII

SEQ ID NO: 147156 - protein, 160 aa, Glycine max
  Clone ID: PAT_MRT3847_103901C.1.pep
MEAALCSALALSPNQVFNAANPGDKNVPLKYSKDRSVVMTVAATGILGKGGGLLERPTIETTSPGRESEFDLRKSRKTSPPYRVLLHNDNFNKREYVVQVLMKVIPGMTIDNAVNIMQEAHYNGLAVVIVCAQVDAEDHCMQLRGNGLLSSIEPADGGGC

SEQ ID NO: 147157 - protein, 59 aa, Glycine max
  Clone ID: PAT_MRT3847_103902C.1.pep
LPNAVFLTWRYCGGELESEDLKETSSYIKSSVFFFIAYGNLADDTINFGAFTHKLVQVG

SEQ ID NO: 147158 - protein, 106 aa, Glycine max
  Clone ID: PAT_MRT3847_103903C.1.pep
SSLFPLTLSVSLLCNGPGSWSDVPAPIGIPHNLPYNRLFISSQTHGPTDKLTVLTIHRSTNHRAVGKKVMICCGLVLLTSPGCSFDLQLSGTIVLKIHLPDIVCGR

SEQ ID NO: 147159 - protein, 62 aa, Glycine max
  Clone ID: PAT_MRT3847_103904C.1.pep
WQETLNLILLIHVVHSNCFDIESWFKTALFIPLCMGSKSIIHPKFVCGVINDNNKLEIYMND

SEQ ID NO: 147160 - protein, 45 aa, Glycine max
  Clone ID: PAT_MRT3847_103905C.1.pep
ENPDARTRPPTRPHTLKFIFHVNYIKILRVLQAGVSVATHNFHHY

SEQ ID NO: 147161 - protein, 287 aa, Glycine max
  Clone ID: PAT_MRT3847_103906C.1.pep
ARHSARARAARADSARATPIVLPSMTLADNNVTGLIECGDDWELIVHDARFGKTRLSESIANYVALTPTETKEGASIFGSKKDTMFEVDAKTGALVRTHYDLDNASNVVLSGDDRLQRVTTTKNNELVDPAQLDSPEFLLKITRSDYVLKSLGKAGIVLWTMNVAEFKARLICQHNENPSGRDSFDAEDGYVVDRGLDFAMPYACWDMKLNEVYRQRKNFLLHPADPGRLSGIYQENIMLPFHTSELMLPSQPDMDGFILGQGGNMMLPLPISNSLPSLQQKLDFCE

SEQ ID NO: 147162 - protein, 119 aa, Glycine max
  unsure (1)..(119): unsure at all Xaa locations
  Clone ID: PAT_MRT3847_103907C.1.pep
RDRSHPQEKDIQRGLEILIFTRLKIGYEPDTSFVLHEVVEHHKKIFLFHHSAKLAATYGILMTKPGKXPIRIVKNILLCGDCHAFLKYASIVTKRDIFLRDSSGFHCFSNGQCSCKDCW

SEQ ID NO: 147163 - protein, 75 aa, Glycine max
  Clone ID: PAT_MRT3847_103908C.1.pep
FLFCVLISIMSNSPCFCYRNSIVLCIEISASRLPIPQSLDRPFFPPTSCEFFNLILDFRAIHVHIIISSRLAPNN

SEQ ID NO: 147164 - protein, 145 aa, Glycine max
  unsure (1)..(145): unsure at all Xaa locations
  Clone ID: PAT_MRT3847_103909C.1.pep
DITPQEFSKKYWQAHIDVSQEITVANKKMKNEQYSXDHPPASWDGMKKGVMTQVKYQGGCRSQXRCSCHVNQRSRHALDAGDVESLCEQELRDXVEGSEGXYDGXHYQYDEXVIEHDEIAADDEDAHVANDGRCEISRHHVQGYD

SEQ ID NO: 147165 - protein, 85 aa, Glycine max
  unsure (1)..(85): unsure at all Xaa locations
  Clone ID: PAT_MRT3847_10390C.1.pep
TPLCGLFNTIYLAINDERKPNNSYCMNQECLQHTLHTVCQFMYGGDSLNDQGWHPSDRKQTGIXGQTKQRFLIQVGTTHKIELVL

SEQ ID NO: 147166 - protein, 157 aa, Glycine max
  Clone ID: PAT_MRT3847_103910C.1.pep
MSSDLYRFAVSSHFSSFPKSFSLRKKVPWWYQILDPRSRFVARWNRTFLYVCIVALFLDPLYFYFPITGDKACMQTDIVLGVFVTFSRTIADLFFLFHMVLKFRTAFVSPLSSVYGRKDLVTDPRQIASRYLRSDFAIDLFATLPLPHRFSGSTSVG

SEQ ID NO: 147167 - protein, 87 aa, Glycine max
  Clone ID: PAT_MRT3847_103911C.1.pep
KIGFFPTPNSGVKTFKSGEKKNHFPNFPKSGAPVAGTPPIVVASVTKKNSGAAGTFKTPHNYFSQRAFWVSEGFPPSTKTAPHFGQN

SEQ ID NO: 147168 - protein, 56 aa, Glycine max
  Clone ID: PAT_MRT3847_103912C.1.pep
SCQGGLLIVWKPIGKIPYIAHLGILGDFYRDTEWIVTSGKLEDRPIRISCLQLEQW

SEQ ID NO: 147169 - protein, 27 aa, Glycine max
  unsure (1)..(27): unsure at all Xaa locations
  Clone ID: PAT_MRT3847_103913C.1.pep
FXSLSLILLCLLTYFFSLLDYCFTLTH

SEQ ID NO: 147170 - protein, 280 aa, Glycine max
  Clone ID: PAT_MRT3847_103914C.1.pep
MIKSSSMASIAKMLEGKVAIITGGASGIGAATAKLFVQHGAKVIIADVQDELGQFHCKTLGTTNIHYVHCDVTSDSDVKNVVEFAVSKYGKLDIMYNNAGISGDSNRSITTSDNEGFKNVFGVNVYGAFLGAKHAARVMIPAKRGVILFTSSVASLLGGETTHAYAVSKHAVVGLMKNLCVELGEHGIRVNCVCPGGIPTPMLNNALKMNKKETQEVLCKVAVLKGTVLEAEDIAKAAVYLCSDEAKFVSGVNFVLDGGYSITNNSFTSALNALINNNHA

SEQ ID NO: 147171 - protein, 104 aa, Glycine max
  Clone ID: PAT_MRT3847_103915C.1.pep
RDFFKIERAQAGHKDCTPQKIDAIYGLEAQDLFLCFQVMSIRVNVPSTGLIHHLHRRRRHLSPGSVGLRELLSVLKDETFNERSISYKRCQNIQSSSSSAYKNL

SEQ ID NO: 147172 - protein, 52 aa, Glycine max
  unsure (1)..(52): unsure at all Xaa locations
  Clone ID: PAT_MRT3847_103916C.1.pep
KSLLLNASFFLXXLCTEDISFLLIILFFLSFFYLFLRLSLSFYTRCTFNIFP

SEQ ID NO: 147173 - protein, 82 aa, Glycine max
  Clone ID: PAT_MRT3847_103917C.1.pep
GLYSPENRRNLRPRGPGSLPLLPGHEHPRQRPQHRPHPSSTSTSASPLPVENTERMLRRKLLRIRVGDPKSQKVFEKKLKTR

SEQ ID NO: 147174 - protein, 148 aa, Glycine max
  Clone ID: PAT_MRT3847_103918C.1.pep
MSTLCMAENMKEVEVEDGYVLKEEIHLTVLKTSLFFAGDGFSVYDCKGQLVFRVDSYGPDTRDIDELVLMDPNGRCLLTVRRKRPSLHQRWEGFKGERMDGDKPIFSVRRASIIGRSRASLTVEMYDNPGEEVQIEGCFSQRCCTGFN

SEQ ID NO: 147175 - protein, 219 aa, Glycine max
  Clone ID: PAT_MRT3847_103919C.1.pep
MTLCMAAENMSEVEEEHGYVFKEEIHLTVFKTSLFFAGDGFTVYDCKGQLVFRVDSYGPDTRDRDELVLMDPNGRCLLTVRRKRPSLHQRWEGFKGERMDGDKPIFSVRRASIIGRSRASLTVEMYDNPGEEYQIDGCFSQRCCTVFNVTKESVAEIRRKVDPTTSVVLGKEVFSLCVKPGFDAAFAMGFVLVLDQINGEDYVDDRATTEPAVHPATED

SEQ ID NO: 147176 - protein, 95 aa, Glycine max
  Clone ID: PAT_MRT3847_10391C.1.pep
KNWIELMSHEMKPQGFFSFQNWSQPDLESQLATFNFSFTRSSEMVPNQGEIGFLRDSGVICSNRFHNPARRYHPIPPWSSVVKWRPWRRHGGVLV

SEQ ID NO: 147177 - protein, 69 aa, Glycine max
  Clone ID: PAT_MRT3847_103920C.1.pep
TSCGVYISIIAGTQFCVHRMHACQKQKLFMLPPRMLSLSPSVRNAKMQMWYAPKTSPQTPSNPCAVIVS

SEQ ID NO: 147178 - protein, 173 aa, Glycine max
  Clone ID: PAT_MRT3847_103921C.1.pep
PPGYVGHEEGGQLTEQVRRRPYSVILFDEVEKAHVAVFNTLLQVLDDGRLTDGQGRTVDFRNTVIIMTSNLGAEHLLAGMVGKNSMKVARDLVMQEVRRHFRPELLNRLDEIVIFDPLSHEQLRKVARLQMNDVAVRLAERSIALAVTDAALDMILSLSYDPVYGARPIMRWI

SEQ ID NO: 147179 - protein, 68 aa, Glycine max
  Clone ID: PAT_MRT3847_103922C.1.pep
YLIVPLDIDHCHKRTLGRSRITYAPYCALSRPISHNLYRPALLRACKSDTTTDIQVERINLLLFCVRI

SEQ ID NO: 147180 - protein, 103 aa, Glycine max
  Clone ID: PAT_MRT3847_103923C.1.pep
PRVRAIVEEGGIAALVEAIEDGSVKGKEFAVLTLLQLCVDSVINRGFLVREGGIPPLVALSQTGSARAKHKVSHTLIKPLFDHTNKPHIIIFSNRQMLMVSFC

SEQ ID NO: 147181 - protein, 77 aa, Glycine max
  Clone ID: PAT_MRT3847_103924C.1.pep
IYTKEAYPVSVNDSVLKDEKKGLFWYFATRSHILHGGSAHKDCINGIHIGGETCSFNWAVGFFFRGEKQRERLLSKI

SEQ ID NO: 147182 - protein, 53 aa, Glycine max
  Clone ID: PAT_MRT3847_103925C.1.pep
KKGLFLNPRKGPPASRLPRNSGALNCKVGSPFYPNWLPLIVGAVGFFFLPPFF

SEQ ID NO: 147183 - protein, 211 aa, Glycine max
  Clone ID: PAT_MRT3847_103926C.1.pep
MAYSSHKLFFLLFAIFFSHASAVNSSDASTTIHTNLSSIKSFCTTTAYPEVCFNSLKLSISINISPNIINYLCQSLQVAISETTKLSNLFHNVGHSKNIIEKQRGSVQDCRELHQSTLASLKKSLSGIRSSNSKNIVDARSYLSAALTNKNTCLEGLDSASGTMKPSLVKSVINTYKHVSNSLSMLPKPEMGTPKVKKNNNQPLKNAPKWV

SEQ ID NO: 147184 - protein, 55 aa, Glycine max
  Clone ID: PAT_MRT3847_103927C.1.pep
RDPFVGINEPLGGPGLYFKNLTQLLGVHKNNKWANNKSLLLKKPRKNKLFAEKFK

SEQ ID NO: 147185 - protein, 86 aa, Glycine max
  unsure (1)..(86): unsure at all Xaa locations
  Clone ID: PAT_MRT3847_103928C.1.pep
GESSNTRGIFLTLAETCLLPFGGGGGGGGAALDAAMGGGAGGDGATLGSCKITGSFSTLPFKNQGRRMQSRXDXAGLGAEPNSELR

SEQ ID NO: 147186 - protein, 89 aa, Glycine max
  Clone ID: PAT_MRT3847_103929C.1.pep
QRRQGDEKTQMKKKKWFNQSRNAELSERWSFTLYLFIFILFLFPIIIIWIHIPSLFIFVIFAQFSFLFIYSCSHPLMFLFGLERMAGLF

SEQ ID NO: 147187 - protein, 44 aa, Glycine max
  Clone ID: PAT_MRT3847_10392C.1.pep
NPQTPSCLLLFCQGSVLRSCIRMAFDLLLIVEYLLTLSQLVSLG

SEQ ID NO: 147188 - protein, 61 aa, Glycine max
  Clone ID: PAT_MRT3847_103930C.1.pep
ELQSERSPESMTNSATGLYCITTEIGNYMGTLLKTYEHKNSGEENNWLPERNLQMGGKNYY

SEQ ID NO: 147189 - protein, 94 aa, Glycine max
  Clone ID: PAT_MRT3847_103931C.1.pep
MLSQIKGKLRYLKGGVQSKQKLQFESPTSSSFTRETTATPNSTEEKDALLSKSDDETCPICQEKLGKQKMVFQCGHVTCCKCKNYMRKLYIIIL

SEQ ID NO: 147190 - protein, 59 aa, Glycine max
  Clone ID: PAT_MRT3847_103932C.1.pep
PRVRKKKKKKKKKKKKKKGKKKKKKKKKKKKKKKKKKKKNKRGGLFKGSNFTSPCFQMY

SEQ ID NO: 147191 - protein, 74 aa, Glycine max
  Clone ID: PAT_MRT3847_103933C.1.pep
ARGGHSNPAMAYTEQGVAGDQADPSSAKNAAGTTTYARENGTRVRQDKWDDQPDTAHSIKQLVSSGADTGTELR

SEQ ID NO: 147192 - protein, 105 aa, Glycine max
  Clone ID: PAT_MRT3847_103934C.1.pep
LVSVLPEPGADRTETWQILPFTARRGSTKHAPVECRIDREITEQTQDDGTFAVHEPDCEKPNLAKACCIRPFRLWKDRIWIAYPKGRTMNKYTQNGATPYHTHLH

SEQ ID NO: 147193 - protein, 90 aa, Glycine max
  Clone ID: PAT_MRT3847_103935C.1.pep
VCMVYALVHFLPDGPFGCIVHDSDLVVCLICGQGVVILKVVILLLLQPFPLPRVLHRSKFVSTHLLRIRYEQRGGVYSLGWRDQQTMVRG

SEQ ID NO: 147194 - protein, 114 aa, Glycine max
  Clone ID: PAT_MRT3847_103936C.1.pep
NGFSPLKPWLQIWAHLFLQPLQLGVWCWGSQFLAKIALFLGLFFTFYGDLKTFVFCLGGVSGPLVFFFSPPSLKWSGFFFPFPKVKGFGLFLGGLRPRLVFFFFFFLRVGEWSL

SEQ ID NO: 147195 - protein, 207 aa, Glycine max
  Clone ID: PAT_MRT3847_103937C.1.pep
MATREGTLQIAKKKVPLIPLLSILCFISIFFLLSQFKSTSTSHHSLPTFQIEKHEYHRGSCDYSDGTWIHDPSRTPRYDNTCKEIFKGWNCLSAHKSNAPHLSTWRWQPRLCDLPQFDPAEFLRTHTHTNIGFVGDSLNRNMFVSLFCSLKSVSDGQIKKWRPAGADRGFTFLAYNLTIAYHRTNLLARFGSWAATDKRGALETLGF

SEQ ID NO: 147196 - protein, 88 aa, Glycine max
  unsure (1)..(88): unsure at all Xaa locations
  Clone ID: PAT_MRT3847_103938C.1.pep
LILKTSPCFTLNHNQLNQHQPHHPQRLVTQPPLYHPRLLAPTKIEPXPRANMPPWYYPQTYPKPYVANIHTQLTVSPDDHHLPRTRST

SEQ ID NO: 147197 - protein, 71 aa, Glycine max
  Clone ID: PAT_MRT3847_103939C.1.pep
IDVVWNDRLGKKVLVNCIDDDTIGDLKNLVAAHTVTRVDGILFQKCYTVYKDHITIKDYEIHDCMGLALYY

SEQ ID NO: 147198 - protein, 163 aa, Glycine max
  Clone ID: PAT_MRT3847_10393C.1.pep
MDDTETKGRIEETVRRILQESDMDEVTESKIRKQASEHLGLDLSQPYFKAFVKQVVKAFLQEEEQRQKQQQQDEDEEEELGGASKGKEYDDEGDLIICRLSDKRRVTIQDFRGKTLVSIREYYKKDGKELPTSKGISLTEEQWSAFKKNVPAIEKAIKKMESS

SEQ ID NO: 147199 - protein, 51 aa, Glycine max
  Clone ID: PAT_MRT3847_103940C.1.pep
SPDNCQKTNCYPLINRIAFVIFGLQYNFWQIYCPKMTKLYKCRTLLHMSTG

SEQ ID NO: 147200 - protein, 56 aa, Glycine max
  Clone ID: PAT_MRT3847_103941C.1.pep
HQTFAITFQFNPTLNFSISTSITSIHFLTLFLIPTYNRLSLCLQLLYPLLHTLNPT

SEQ ID NO: 147201 - protein, 89 aa, Glycine max
  Clone ID: PAT_MRT3847_103942C.1.pep
VSRIKKNHSNIPKFNPGALRTSTKVSHGLLNQASANPPSRDRSCLKSSSPTKSNPQSSTISAPFRFRSEERAVKRKEFLQRMDETKSKE

SEQ ID NO: 147202 - protein, 131 aa, Glycine max
  unsure (1)..(131): unsure at all Xaa locations
  Clone ID: PAT_MRT3847_103943C.1.pep
NEGQELNKLNNHKNKXXEKNKKQKKKLNXLKKNQHXTKKKKPIKKKKKTLKKKXNKKKTKQLYIXQRNKQKKKKKKKTTTYTNPSPRPKNLPPKHPPNNTKPPPLYPTPATNTKNNPETQSPTPQPTPTTP

SEQ ID NO: 147203 - protein, 73 aa, Glycine max
  unsure (1)..(73): unsure at all Xaa locations
  Clone ID: PAT_MRT3847_103944C.1.pep
GHHLKRLCCCVGXSIRRGDPSSKSSLTRSSSSEPSDQEVVITTSSIIVFDMANSTIFIIRLEQQQDPPCSYSS

SEQ ID NO: 147204 - protein, 93 aa, Glycine max
  Clone ID: PAT_MRT3847_103945C.1.pep
TFQPSSSSGVSIFFIEITVWQMRDHQILPAVMLDGYIILEDKEVLYSKEEVEGHALLLDNEDYDYIREEAQQNDRCFLDAFSFFLLYVLLGLI

SEQ ID NO: 147205 - protein, 869 aa, Glycine max
  Clone ID: PAT_MRT3847_103946C.1.pep
MGKIEKNKNTLLTPPFLSSFKSSSLMMPILLVILLALFSPSLGLPLASFQPKDNFLIDCGAENTATLPDGRHFKSDPQSRSFLQADDEYKVSANDVNLPSPVYSNARIFIQEAKYSFHLVQPGFHWIRLHFYPIKNNIFDLQKATFSVYTDTYVLLHSFNVNNTDKPIMKEYLINATEPQLTMSFIPLKNSAAFINAIEVVSAPDNLIFDTGAGLFPVGEIGGLTTYGFQPVYRVNNGGPLITSSNDTLGRTWESDEHFLTNKNLAKSASVATSAVKFPQDNPSISPMIAPQTVYASATEMGDAGVNQPNFNVSWKFDVDTSFGYLVRLHFCDIVSKGLNELYFNVYVNGKVAINNLDLSAITGALSTPYYKDIVVNATLMSEGLTVQVGPANADGGNANAIMNGIEVLKMSNSVNSLDGEFGVDGRSVSGSNRGTVAAVGFAMMFGAFVGLGAMVIKWHKRPQDWQKRNSFSSWLLPLHAGDTSFMSKNSMGKSNFFSSSMGLGRYFSFAELQEATKNFDSKNIIGVGGFGNVYLGVIDEGTQVAVKRGNPQSEQGITEFQTEIQMLSKLRHRHLVSLIGYCDENDEMILVYEYMPNGHFRDHLYGKNLPALSWKQRLDICIGSARGLHYLHTGTAQGIIHRDVKTTNILLDENFTAKVSDFGLSKDAPMGQGHVSTAVKGSFGYLDPEYFRRQQLTEKSDVYSFGVVLLEALCARPAINPQLPREQVNLADWAMQWKRKGLLDKIIDPLLVGCINPESMKKFAEAAEKCLADHGVDRPSMGDVLWNLEYALQLQEAFTQGKPEDESKSASAAVPTSPTPPTPSDDRPAAPAVPARPEAANNASSEVNSIDDHSGTAMFAQFSNLNGR

SEQ ID NO: 147206 - protein, 465 aa, Glycine max
  Clone ID: PAT_MRT3847_103947C.1.pep
LKMSSSVNSLDGEFGVDGRSVNGSNRGTVAAVGFAMMFGAFVGLGAMVIKWHKRPQDWQKRNSFSSWLLPLHAGDTSFMSKNSMGKSNFFSSSMGLGRYFSFAELQEATKNFDSKNIIGVGGFGNVYLGVIDEGTQVAVKRGNPQSEQGITEFQTEIQMLSKLRHRHLVSLIGYCDENDEMILVYEYMPNGHFRDHLYGKNLPALSWKQRLDICIGSARGLHYLHTGTAQGIIHRDVKTTNILLDENFTAKVSDFGLSKDAPMGQGHVSTAVKGSFGYLDPEYFRRQQLTEKSDVYSFGVVLLEALCARPAINPQLPREQVNLADWAMQWKRKGLLDKIIDPLLVGCINPESMKKFAEAAEKCLADHGVDRPSMGDVLWNLEYALQLQEAFTQGKAEDETKSSSAVPTAAVPTSPAPPTPPISSDDRPAAPARPEVNNNTSSDVHSIDDHSGTAMFAQFSNLNGR

SEQ ID NO: 147207 - protein, 36 aa, Glycine max
  Clone ID: PAT_MRT3847_103948C.1.pep
GNIPAIDESHDIYIKHMITKTLVFAAYSIFSLLAEL

SEQ ID NO: 147208 - protein, 80 aa, Glycine max
  Clone ID: PAT_MRT3847_103949C.1.pep
LRYGMKYVLQSDLLHEVHHIGARRVYATFCMSSVIDTQVFLECMADVFGVRRLSRLFYKLGVVMQNALKSNVIEHNKVVN

SEQ ID NO: 147209 - protein, 208 aa, Glycine max
  Clone ID: PAT_MRT3847_10394C.1.pep
MGWLSRFITAVAFLAIGVIFSPETLGSKSTTLSTYLKLAHLLCFSTAFGAALWVTFIGGIIMFKNLPRHQFGNLQSKMFPAYFSMVGVCCAVSVASFGYLHPWKTSSTTERYQLGFLLSSFAFNLTNLFVFTPMTIEMMKQRHKVERENNIGEEVGWSKNVEVAKSNPKLAAMNKKFGMIHGLSSLANIMSFGSLAIHSWYLAGKIDL

SEQ ID NO: 147210 - protein, 100 aa, Glycine max
  Clone ID: PAT_MRT3847_103950C.1.pep
CHPSFYFSFEHAASYQNPQGAQNEHDPNNTTIFVGNLDPNVTDDHLRQVFGHYGELVHVKIPAGKRCGFVQFADRSCAEEALRVLNGTLLGGQNVRLSWG

SEQ ID NO: 147211 - protein, 57 aa, Glycine max
  Clone ID: PAT_MRT3847_103951C.1.pep
PLTPKRKLNMGKNIKDQIRSIEKSHEIVPSKNTEIRISRLESSFRHPKLLTSLTSVC

SEQ ID NO: 147212 - protein, 67 aa, Glycine max
  Clone ID: PAT_MRT3847_103952C.1.pep
MSKINLEFKLDTSRVSPLINLLLKPGRNHTILNFEKRIPHRRLFTSNSKGIKHKLIHILEQFKFYNH

SEQ ID NO: 147213 - protein, 79 aa, Glycine max
  Clone ID: PAT_MRT3847_103953C.1.pep
SNITSGPTLADVWPFVAFIESARGARGQHSPQARSVARLHSQMSVCSSPQPQNQPISPRIPSTKAPPPKLTSPATKTKH

SEQ ID NO: 147214 - protein, 98 aa, Glycine max
  Clone ID: PAT_MRT3847_103954C.1.pep
PETKGQELGGLTDGHGAATSVRTNNFVGFVVGDQTKGGISVLGLGGVIRAKQQGVAGGNYSIPWEAKDGLIKNEFEPKVWVREWLTSKGWLEFKPANV

SEQ ID NO: 147215 - protein, 67 aa, Glycine max
  Clone ID: PAT_MRT3847_103955C.1.pep
MLDCSGIDHMSIFRATSQPYCDSSEHSKCHYEGSSTSQASGEDSEVILYPHDHSMETFERGHKILDI

SEQ ID NO: 147216 - protein, 103 aa, Glycine max
  Clone ID: PAT_MRT3847_103956C.1.pep
YRSQHSSREPSNDHHPCDGPPPSAGRLVVILPQTIAGSVRLVTMRMRILLINIPLDTLKSHHQPYDPDKVARSHYDGDHHIACSALSSEVYRESTKTIGFTEL

SEQ ID NO: 147217 - protein, 81 aa, Glycine max
  Clone ID: PAT_MRT3847_103957C.1.pep
FFFNKKLKGKKYFACISLGTDLLINHCQRKKKKKNCPLEKRKYIPRPFFHLLTQHAKVEGRLLNWLPICKFVGNGKPLSFG

SEQ ID NO: 147218 - protein, 39 aa, Glycine max
  Clone ID: PAT_MRT3847_103958C.1.pep
GGKLVKLDHGHSTISPYISQDRTVKSSRLFVFLKVNSEL

SEQ ID NO: 147219 - protein, 80 aa, Glycine max
  Clone ID: PAT_MRT3847_103959C.1.pep
TCNYAYNSQRTRRSLNLTRSPISYSRVFSKSAKNGKENDSLSLWPAQRVIIFPLSNRTQKSRKKFIDSWNQVSDCLCFRF

SEQ ID NO: 147220 - protein, 213 aa, Glycine max
  Clone ID: PAT_MRT3847_10395C.1.pep
PRVRPRVRGRVGKEEDPACGPLVDSVALRTLYPPRATNQNILKNGGFEEGPYVFPNSSWGVIIPPNIEDDHSPLPGWMVESLKAVKYIDSGHFSVPQGKRAVELIAGKESAIAQVARTIPGKTYVLSFSVGDASNSCEGSMIVEAFAGKDTIKVPYESKGKGGFKRAALKFVAVTPRTRIMFLSTFYTMRSDDFSSLCGPVIDDVKLVSLRKP

SEQ ID NO: 147221 - protein, 56 aa, Glycine max
  Clone ID: PAT_MRT3847_103960C.1.pep
IFLGFSFLKQSNYLVLCANFTYEFFFCGSFHCFFSQNKEPKNSGIIKSLIVKMLIF

SEQ ID NO: 147222 - protein, 122 aa, Glycine max
  unsure (1)..(122): unsure at all Xaa locations
  Clone ID: PAT_MRT3847_103961C.1.pep
SFSIEGCEIQRNTIVYVDGWSIQRYFEACRMPREFYPERFLSYXMLFKGQEFEFSPSGAGRRICPGISLDIASVVLKAANLFNSFQWEMHQGIKLEHIITEGMPEIARRKEHHLCFVANKRM

SEQ ID NO: 147223 - protein, 89 aa, Glycine max
  Clone ID: PAT_MRT3847_103962C.1.pep
LLPLRAGIFTLTLLIKTTINSLVQQYDLALLFDISEFRSELFVYKVGANHSFVSWKMKCAFPVTAFVLHCYYLLDVAPIHIKLVCSKFY

SEQ ID NO: 147224 - protein, 170 aa, Glycine max
  Clone ID: PAT_MRT3847_103963C.1.pep
MATDQITALAPPERGAGGKLRNLPPRKPPPSPYARPPEATRRRWISKLVDPAYRLITGGATRILPSFFSATAAAPPPSLLPCPTSAAGDQDKWQIADRHQDYLRRSDIHLLASKSSEMASTDDISGKLKSSSDLVMSRQDKQVDKSDKNGLSDIEQLVQGKKFSRDEFDR

SEQ ID NO: 147225 - protein, 88 aa, Glycine max
  Clone ID: PAT_MRT3847_103964C.1.pep
FHIGGFDLGFLFGAFQDEVGYCGYFIWVDQLIEALGVDDSLGTFSMEQRRQFGREEDKTMWKAQVNSKLDCIGIPSVVYSTDAWADEW

SEQ ID NO: 147226 - protein, 83 aa, Glycine max
  Clone ID: PAT_MRT3847_103965C.1.pep
SASSSCAQIKYLIYCLENAIWNISSNQEEQMVWLIDFQGWSTACLSLKIVRDTAQILQAHYPERLGLAIFYNPPKVFESFWTV

SEQ ID NO: 147227 - protein, 149 aa, Glycine max
  Clone ID: PAT_MRT3847_103966C.1.pep
ARSVSSVGVAWLWSFACAFHVAFLAVACSFLSVCACVGLFVPSLSASPPRVCLASCAYTMASFLLGWPLVFPGLVVAVLAMWGMGLRVVVCAVRGGVCWSVAFWCCSWLVVCGAALFFSPLLLCVVALLIRPRGSPRVFRPGPRGGLSF

SEQ ID NO: 147228 - protein, 59 aa, Glycine max
  Clone ID: PAT_MRT3847_103967C.1.pep
FEGGLVGFVPKFSAFLFLVLSVEWLRVELEVEGVKANLKREERVKARAGVVARSGGFPT

SEQ ID NO: 147229 - protein, 45 aa, Glycine max
  Clone ID: PAT_MRT3847_103968C.1.pep
SFSCFKVFVFLLQWFYGVFTLRCSYQMMLFALSGVQHNEKPPNHP

SEQ ID NO: 147230 - protein, 73 aa, Glycine max
  unsure (1)..(73): unsure at all Xaa locations
  Clone ID: PAT_MRT3847_103969C.1.pep
RGKALMCCYRATIDGFSATTFXTECCDLEGPCVIDRLYSTRLSTLGAFIPEGDLSTDHYYDTLDAFLYVLIDT

SEQ ID NO: 147231 - protein, 106 aa, Glycine max
  Clone ID: PAT_MRT3847_10396C.1.pep
SKHGLIVKQGGGEERWVDSREGLCEAVYEMASVANAHLEKARKLTEGVPPEALPVLLPAVPAQVLLDSLRKVQFDVFDSKLTRGVLGIPPLWYQLKLKWTSWRRKY

SEQ ID NO: 147232 - protein, 142 aa, Glycine max
  Clone ID: PAT_MRT3847_103970C.1.pep
NLKHSKDEMPPPASLLGKKGHHMGDFIPPEELEKFLATCNDAAAQKAAMEAAERAKIQADNVGHRLLSKMGWKEGEGLGGSRKGIADPIMAGNVKKNNLGVGAQEPGEVSAEDDIYEQYKKRMMLGYRYRPNPLNNPRKAYY

SEQ ID NO: 147233 - protein, 459 aa, Glycine max
  Clone ID: PAT_MRT3847_103971C.1.pep
MSESNGNSRRRNVEDQDLGLYFLEACRGREMKEEEEEEEAPRELNTINSSGGFVVVSTDKLSVKYTSVNLHGHDVGVIQANKPAPTKRLMYYFEIHVKDAGVKGQIAIGFTSETFKMQRQPAWEANSCCDHGDDGLLYRGHGKGGEPFGPTYTSGDVVGAGINYAAQEFFFTKNGHVVGSVYKDMKGPLFPTVAVHSQNEEVHVNFGQKPFTFDLKEFETQERMKQQLKIEEISVPPNVSYGIVRSYLLHYGYEDTLNSFDVASKSTVPPIYIAQESGIDEQEITYALNHRKTLRQLIRNGDIDVAFGKLREWYPQIVEDNTSATCFLLHCQKFIELVRVGALEEAVKYGRMELSSFYDLPVFKDLVQDCVALLAYERPLESSVGYLLKDSQREVVADTVNAMILSANPNMKDSKHCLHSYLERLLRQLTACCLERRSLNGEQGEAFQLQRVLSSSRRG

SEQ ID NO: 147234 - protein, 164 aa, Glycine max
  Clone ID: PAT_MRT3847_103972C.1.pep
MSESNGNSRRRNVEDQDLGLYFLEACREMKEKEEEEEEEEEEEAPRELNTINSSGGFVVVSTDKLSVKYTSVNLHGHDVGVIQANKPAPTKRLMYYFEIHVKDAGVKGQIAIGFTCETFKMRRQPGWEANSCGYHGDDGLLYVDMQGGGASYLERVSDTCCRFY

SEQ ID NO: 147235 - protein, 104 aa, Glycine max
  Clone ID: PAT_MRT3847_103973C.1.pep
SFYDLPVFKDLVQDCVALLAYERLLESSVGYLLKDSQREVVADTVNAMILSTNLNMKDSKHCLHSYLERLLRQLTACCLVRRSLNGEQGEAFQLQRVLSSSRRG

SEQ ID NO: 147236 - protein, 116 aa, Glycine max
  Clone ID: PAT_MRT3847_103974C.1.pep
PLLLPPVHPLPTKRLPLQHSLLAQAAPAPLKRLQQLIPKPGAHLHRAPIPAGGIIIHNHKAYHNLAVRPTPKLGASLPLVVLQTFNQVQRLARVRRLPFPPVLLQVLVVLILHFNA

SEQ ID NO: 147237 - protein, 117 aa, Glycine max
  Clone ID: PAT_MRT3847_103975C.1.pep
NFTKKHITNPHKHHVLFFLPLPPIPKHPDSTQKKTSPLPPFLPFSKIYLKQKKQKKIPLLFLTKTKPINPNVTFQFSTPPSNSPIYFQLPLVNLHTPPPLQCFFIKNPTITLTLTFL

SEQ ID NO: 147238 - protein, 39 aa, Glycine max
  Clone ID: PAT_MRT3847_103976C.1.pep
KNPKFPQLSRLAPYPPFALWRISEKAHDGPLAHHCNSLN

SEQ ID NO: 147239 - protein, 87 aa, Glycine max
  unsure (1)..(87): unsure at all Xaa locations
  Clone ID: PAT_MRT3847_103977C.1.pep
CWPPPSFFCFFFLPLVLLLSRVSSVVAAFFPSLLFLASLVFACSLCAASAPFLRSPLGGFSLRFWVARCSLFSLFLRALVXPFCLWR

SEQ ID NO: 147240 - protein, 61 aa, Glycine max
  Clone ID: PAT_MRT3847_103978C.1.pep
LSDSPYTCLFTPSLSHPLIPHFLFLPSPTTIRLFFMTLMPSKFTLLKNWIMADPLVYILTL

SEQ ID NO: 147241 - protein, 53 aa, Glycine max
  Clone ID: PAT_MRT3847_103979C.1.pep
SNPAAPPPPVGYPPKDDVPSQQNVPIKTFFRGDGFWKGCCAGLCCFCALDCCF

SEQ ID NO: 147242 - protein, 366 aa, Glycine max
  Clone ID: PAT_MRT3847_10397C.1.pep
MKGRFMFLSVLLCATFHVSFSIIDGLVANGNFELGPKPSALKGTVVVGGSHSIPEWEISGFVEYIKSGQKQGDMLLVVPEGAYAVRLGNEASIKQRIKVIKGMYYSITFMVARTCAQEERLNISVTPDWGVIPIQTLYTSSGWDPIAFGFKAESETVEMLIHNPGKEEDPACGPLVDSVALRTLYPPKATNQNILKNGGFEEGPYVFPNSSWGVIIPPNIEDDHSPLPGWMVESLKAVKYIDSGHFSVPQGKRAVELIAGKESAIAQVARTIPGKTYVLSFSVGDASNSCEGSMIVEAFAGKDTIKVPYESKGNGGFKRAALKFVAVTPRTRVMFLSTFYTMRSDDFSSLCGPVIDDVKLVSLRKP

SEQ ID NO: 147243 - protein, 57 aa, Glycine max
  Clone ID: PAT_MRT3847_103980C.1.pep
VASMALMRPNLLIKSTVPVVMLVVLVFYGWIMAVLISPAFNLKAKSSYFLNRSPNFL

SEQ ID NO: 147244 - protein, 198 aa, Glycine max
  Clone ID: PAT_MRT3847_103981C.1.pep
MESSHTNTTLLTNLLVFNNTLQPELMRSVHVYRRGDGEKREVEREFVFSESGSYGEMQATPIPGLVKSRVSEVCEGHRNGVWLCVFAFHADHTPQFCRIPPVLLVTRNPKLKMIPNLLDDLHVIYKLDRKEEDSDIAQDYTGEERQGNSNNCQPSWKVFPVLDQDLNCLPYEDDESESLDNETDVESSPGSESMLSVI

SEQ ID NO: 147245 - protein, 43 aa, Glycine max
  Clone ID: PAT_MRT3847_103982C.1.pep
CVFNFDISFRFCLNMVFVRVLPKYTGPARYISLLPKKPTTFDV

SEQ ID NO: 147246 - protein, 107 aa, Glycine max
  Clone ID: PAT_MRT3847_103983C.1.pep
GGCKSCCKSLNIHFRFPRIKYTICAHFLFHLVTFIQPIFQFKMTQQPDFSWMVPIEVMLGSLYHGQVQACSISSVTDELRGPNKAAFKPKEVSIGPLHRATTRHVQL

SEQ ID NO: 147247 - protein, 80 aa, Glycine max
  Clone ID: PAT_MRT3847_103984C.1.pep
QTRKKSRMTHAQHRTNRGKAKATPPRIKEGRMISITNGRRQKEKAKAGNRHTSAALNKSPGATILPNDKASAHSSVSRLE

SEQ ID NO: 147248 - protein, 158 aa, Glycine max
  unsure (1)..(158): unsure at all Xaa locations
  Clone ID: PAT_MRT3847_103985C.1.pep
IRLENKFKHIMRELQGAIIIGSAFQTLLGYTGLMWLVVRLINPVXISPTIAAVGLSFYSYGFPLVGTCIEIGAVQILVVIGFSLYLRKISVLGHRIFLIYAVPLGLAITWAFAFLLTEAGVYSYKGCDVNIPASNMVSEHCRKHFSRMRHCRVVLFKH

SEQ ID NO: 147249 - protein, 96 aa, Glycine max
  Clone ID: PAT_MRT3847_103986C.1.pep
AELRKLTTLKTIDEGESSKLQRTLSMPSTPTTPMTATSSTRPGSIRKADNVWRIVFHTGNDSATKTIGAQMLDKPLPSTPTDYEWLRRAETTSMHR

SEQ ID NO: 147250 - protein, 69 aa, Glycine max
  unsure (1)..(69): unsure at all Xaa locations
  Clone ID: PAT_MRT3847_103987C.1.pep
XVLFAHRAWNGTVYGIYFALRHSIRIYYHHEHCVLVCLVEVVSLKWAHTSSDSCQLAFTVVQQDLDQIL

SEQ ID NO: 147251 - protein, 162 aa, Glycine max
  Clone ID: PAT_MRT3847_103988C.1.pep
MRRDRKESFRSERVRDGKDGGEVANAKMVKFLKPNKAVIVLQGRYAGKKAVIVRTFDEGTRERPYGHCLVAGIKKYPAKVIKKDSAKKTAKKSRVKAFVKLVNYQHLMPTRYTLDVDLKDAVNPDVLNAKDKKVTALKETKKRLEERFKTGKNRWFFTKLRF

SEQ ID NO: 147252 - protein, 57 aa, Glycine max
  Clone ID: PAT_MRT3847_103989C.1.pep
FLLTLFQTHTKRKGGRENTYNSRVLQMRKDVCALLTQLTCTYQNLVSRKAVGFERTI

SEQ ID NO: 147253 - protein, 375 aa, Glycine max
  Clone ID: PAT_MRT3847_10398C.1.pep
MGSFSAQFPATLTRAQQNRGSTQSFFILFVKQKKTEIRFSCRAGPTRPVSFRETKENKRLGFVMSGMERLQRMFAGAGGALGHPPPDSPTLDSSEQVYISSLALLKMLKHGRAGVPMEVMGLMLGEFVDEYTVRVVDVFAMPQSGTGVSVEAVDHVFQTNMLDMLKQTGRPEMVVGWYHSHPGFGCWLSGVDINTQQSFEALNQRAVAVVVDPIQSVKGKVVIDAFRLINPQTMMLGQEPRQTTSNLGHLNKPSIQALIHGLNRHYYSIAINYRKNELEEKMLLNLHKKKWTDGLTLRHFDSHSKTNEQTVQEMLSLAAKYNKAVQEEDELPPEKLAIANVGRQDAKKHLEEHVSNLMSSNIVQTLGMMLDTVVF

SEQ ID NO: 147254 - protein, 83 aa, Glycine max
  Clone ID: PAT_MRT3847_103990C.1.pep
DPISESQGSRELPGAVQMGQPHGTHGSMEKPGDGACERQIPGSCRVTARDLQTSVHVPLEVDDKGKPLPYSRMMTAHVPLHLK

SEQ ID NO: 147255 - protein, 91 aa, Glycine max
  Clone ID: PAT_MRT3847_103991C.1.pep
LEVSAMPDYDNLHARTATQAKTLRDAFDVIRVGAGGSGQRASGLAHVTGLHGMAIRVDDADPAALYNAYCYLLFYVNRVVCEHRIWSWTGC

SEQ ID NO: 147256 - protein, 100 aa, Glycine max
  Clone ID: PAT_MRT3847_103992C.1.pep
MSTALFTHSSACVSCRKDMSPILGNCICYTCQNHTKAYINHLFNVHEMLAQILLEIHNTHHYLTFFHVIRESIKDGRFEKFRQTFIESRRAHQEREAVCA

SEQ ID NO: 147257 - protein, 61 aa, Glycine max
  Clone ID: PAT_MRT3847_103993C.1.pep
CIWRRFRFRAGLGAMGTPEGGGLVLFVSCSSRASLDSGWIAYFWFFLQIRTLGFLVFRYIL

SEQ ID NO: 147258 - protein, 219 aa, Glycine max
  unsure (1)..(219): unsure at all Xaa locations
  Clone ID: PAT_MRT3847_103994C.1.pep
LWQNRTYDRLKLHLPKQFCQLPNFPFPEDFPEYPTKFQFISYLESYAKHFNISPQFNETVQSAKYDETFGLWRVKTIRKIKKLGEASSGCCGAVECEVEYICRWLVVATGENSEKVVPEFEGLXESLGGHVMHACDYKSGEGYGGQKVLVVGCGNSGMEVSLDLCNHNANPSMVVRSSVHVLPREAFGKSTFELAVMLMKRXPLWMVDKILLVLARLIL

SEQ ID NO: 147259 - protein, 73 aa, Glycine max
  Clone ID: PAT_MRT3847_103995C.1.pep
LPDTSISPAATLSSYFLYFLVLFFFIYLLYFFIYFFLFLYIFFFILIIYFLTHFLLVTLFYTNLYYYLNNLFN

SEQ ID NO: 147260 - protein, 145 aa, Glycine max
  Clone ID: PAT_MRT3847_103996C.1.pep
MDGSGGTRRLMVNVIEPQFNLHSEDANGRFLLAAVSGRVLARSFHSILHVGYEMIEQVLATKDVQINEYQPEMTWKRMEFSVMLEDVQAHVAPTDVDPGAGLQWLPKILKSSPKILRTGALLERVFMPCDMYFRYTRHKGGTPEL

SEQ ID NO: 147261 - protein, 46 aa, Glycine max
  Clone ID: PAT_MRT3847_103997C.1.pep
SERRKINPKVYPRSPNAYSRVGALIPDFTSLDRVIIHITEKETEEV

SEQ ID NO: 147262 - protein, 122 aa, Glycine max
  Clone ID: PAT_MRT3847_103998C.1.pep
PRVRSFGNRGIEDEHEGEKVGNGNPKTMPPASVMTRLILIMVWRKHIRNPNTYSSLIGLTWSLISFRWNVKMPAIIAKSISILSDAGLGMAMFSLGKYCIEYRHTSSFLSLKILHTALTGKP

SEQ ID NO: 147263 - protein, 335 aa, Glycine max
  Clone ID: PAT_MRT3847_103999C.1.pep
MALQILVDKSLITIFDGRIYMHSLLRDLGKCIVREKSPKEPRKWSRLWECEDLSKVMSTNMEAKNLEAIVVDDKSWMFFNTIMRVDALSKMKNLKLLKLPEYDSLYGDEEEELCTYTKKDFFSGNLNYLSNELGYLIWQCYPFNSLPQCFQPHNLFELDLSWSSIQHLWDSTQPIPNLRRLNVSYCKYLIEVPNFGEALNLYWLNLERCERLKRFHPSVGFPRNLTYLNLRGCNSLVELPHFEQALKLEILDLRRCELLKQLPSSSGRLRKLTPSLELGGCKSLTDLPHFVEDLNLLKKLNLERCEQLRQIHPSIGLLRNLIVLNLRDCKSLVSF

SEQ ID NO: 147264 - protein, 39 aa, Glycine max
  Clone ID: PAT_MRT3847_10399C.1.pep
DKLQGSLLSMNHRCSPLVTYKVVPVVFTFQICHRARSGY

SEQ ID NO: 147265 - protein, 124 aa, Glycine max
  Clone ID: PAT_MRT3847_1039C.1.pep
MESKSKIQLFFLTLFLFTLTLHAETLGTYIVQLHPHGITSTSFTSRLKWHLSFIQQTISSDEDPSLRLLYSYRSAMDGFAAQLTESELEYLKNLPDVISIRPDRKLQLQTTYSYKFLGLNPARE

SEQ ID NO: 147266 - protein, 38 aa, Glycine max
  Clone ID: PAT_MRT3847_103C.1.pep
KLNTIPKKFITSIHFIQSSNPMKFYSIKQAYEIYILPS

SEQ ID NO: 147267 - protein, 103 aa, Glycine max
  Clone ID: PAT_MRT3847_104000C.1.pep
ADSSREENVFMAKLAEHADRYEEMVEFMEKVAKTVEVEELTVEDRNLLYAAYKNAIAARRALPTTTSSIDRKEETPCAEDHLAMVEEPSGTLAAYIPAICRVR

SEQ ID NO: 147268 - protein, 47 aa, Glycine max
  Clone ID: PAT_MRT3847_104001C.1.pep
LERRKREEEKRKWIRFRDPVHVPLFILSISNPHHVVSIYEHDLCVNF

SEQ ID NO: 147269 - protein, 86 aa, Glycine max
  Clone ID: PAT_MRT3847_104002C.1.pep
SCMYTVNNNAKHIRTPKAHSVYIQYPSQATLPPYPAELRKTSREMAKKQNSSSYLEWLSVLHHIVSASTSGIMHPTCQMACQVMIH

SEQ ID NO: 147270 - protein, 122 aa, Glycine max
  Clone ID: PAT_MRT3847_104003C.1.pep
MGEALFDLEQVLMSKKEILTPQEADILLSCKSKSLRDFTAGALAAGTAAWAATWKLSKPFRINLSAGAGAFCGLWMLSRSLYSCADQILTMDGSILQKELANIMVTKYQSDPSLMQLISKHF

SEQ ID NO: 147271 - protein, 97 aa, Glycine max
  Clone ID: PAT_MRT3847_104004C.1.pep
FFWKVLPEHSKVIRKNPYSGNFPEELLLPESCRNKVFWKLSGRSVLLDDLWLLSEESFFRKVSRTPSSGSSGRSLRGSSRRHHCNHSFPHFFRRLLP

SEQ ID NO: 147272 - protein, 119 aa, Glycine max
  Clone ID: PAT_MRT3847_104005C.1.pep
GRDAYNIKLTSPLFKPPNCVNGNTDGPCDKIHGADADMLFAGLYLRAVSVRGIKGSLPPHGAVQCDENTPDGRKLTSAFYNYFVVRLLCGASIAETQVEWIEYNKGLKWCDKESSASIT

SEQ ID NO: 147273 - protein, 98 aa, Glycine max
  unsure (1)..(98): unsure at all Xaa locations
  Clone ID: PAT_MRT3847_104006C.1.pep
XXXXXXLXXFXXXXXXXXXXXXXXXXXFVCXXXXXFXXXXXXVXXVXFVXXFXFXVVXVLLXXXXXXXVCGXXXXXCXXGVXXVVARAEXRAXVRCVL

SEQ ID NO: 147274 - protein, 102 aa, Glycine max
  unsure (1)..(102): unsure at all Xaa locations
  Clone ID: PAT_MRT3847_104007C.1.pep
SPAXKKEPXFIXXKEEVVVXCREXGXCXFXREXGXSSVSREEGRXSXXREEGSCSVGREEGSGSDSRREEGSCSAXREEGSGSDRRKERSGSDRREEGNRSD

SEQ ID NO: 147275 - protein, 169 aa, Glycine max
  Clone ID: PAT_MRT3847_104008C.1.pep
DRTKTACRAVPVSETNETQHPLHLSLNPLSLSLKATTKEETKLYNNRNPSTQNQNPHYIRSINFLHFATNFPSFHRIKFGRRKAEPANRWISGSRRGLEGRGGGARDGIEIGWIDWKKKHFRSGGGGDEKKKRRRGNNGSRIGESESFSHLNLGAAFSLARSFFVVSFC

SEQ ID NO: 147276 - protein, 35 aa, Glycine max
  Clone ID: PAT_MRT3847_104009C.1.pep
HLCYKKKKKKKKKKKKKKKKKKKKKKIKKKKKNNK

SEQ ID NO: 147277 - protein, 87 aa, Glycine max
  Clone ID: PAT_MRT3847_10400C.1.pep
PKANSGGGVLKGHNGENLGGPQIKWHETYAHCAKWGKNEKGLTDGPYQKERKLNGKGDPPCAGCLNAAEGGVTSGRNAAIAGVLKPV

SEQ ID NO: 147278 - protein, 66 aa, Glycine max
  Clone ID: PAT_MRT3847_104010C.1.pep
KICSKKATIKDFCCCQKCQCTNTTLESTVQCTPGLYDRANCSNHQCIGSLVKKNIAMQCMTWFLFK

SEQ ID NO: 147279 - protein, 59 aa, Glycine max
  Clone ID: PAT_MRT3847_104011C.1.pep
VEKLGKDSLINFDETRVNLKIIGAVYHLLFIIVSYAAFNVKMTKDARDEKNVIQGINIY

SEQ ID NO: 147280 - protein, 69 aa, Glycine max
  Clone ID: PAT_MRT3847_104012C.1.pep
PLHKTRLKASLLIMANRVWQDPNDFWEPMIGYFIISIMLQLILFNMNFYCQYHLCAHPSQFMRAKYPRL

SEQ ID NO: 147281 - protein, 94 aa, Glycine max
  Clone ID: PAT_MRT3847_104013C.1.pep
NVGWKFKYNYRMDGTSTDRCQLALNFSFRSIAAMLILSVTVTSTDHVLNVSLSGHLEMIQHSIASTFCEYSLRRCKMDLPKRDTHLTVAVTNIH

SEQ ID NO: 147282 - protein, 44 aa, Glycine max
  Clone ID: PAT_MRT3847_104014C.1.pep
LACRTSRWNLVTTATNADTQATRFVKRNIALRTTHHRWRHPVDD

SEQ ID NO: 147283 - protein, 72 aa, Glycine max
  Clone ID: PAT_MRT3847_104015C.1.pep
GPGGTPSAKKKGMSRNILFILALAKGSLDQKGRSCPSQGSLWWPSREGCRWVPYFLVDTRISCINFFYSGVL

SEQ ID NO: 147284 - protein, 89 aa, Glycine max
  unsure (1)..(89): unsure at all Xaa locations
  Clone ID: PAT_MRT3847_104016C.1.pep
LTLSCKAADFVPGLDIGLTVAAVLDLSXRYTPPALEHALMCLTCPTLYITRKHXADQELDMVVNVRHDLMTKSREIAFHCAHAATVMYA

SEQ ID NO: 147285 - protein, 71 aa, Glycine max
  Clone ID: PAT_MRT3847_104017C.1.pep
DVDEKQSIHCLLFLVSCYAMTRHKYFDEGNQWMNATSKTLRFLSIFQSSPRNCCASEGGMSNHISESDITS

SEQ ID NO: 147286 - protein, 49 aa, Glycine max
  Clone ID: PAT_MRT3847_104018C.1.pep
EQFILIKAELFYAYKKGYREKFINLDAKLDNNSIILVFLPKKVKFYISN

SEQ ID NO: 147287 - protein, 93 aa, Glycine max
  unsure (1)..(93): unsure at all Xaa locations
  Clone ID: PAT_MRT3847_104019C.1.pep
GAHPGLLKYILFLNISLLTLTIQTLAPCFLXMIPTNTXIPTNKSHLFTTYHHQHTTFFTSLFXSHKTLTNNSHLLFKSHLSQIPPTPNHTPQI

SEQ ID NO: 147288 - protein, 45 aa, Glycine max
  Clone ID: PAT_MRT3847_10401C.1.pep
GNDYDPTSKLIYSNLHYFKSFYFTEKNCLEKKKYKEILLLYYISI

SEQ ID NO: 147289 - protein, 74 aa, Glycine max
  unsure (1)..(74): unsure at all Xaa locations
  Clone ID: PAT_MRT3847_104020C.1.pep
HSASYESPYPMYGMNFFPSHPHRLALGRFKAEYSNRVEILXLDPDTLYINPNPSVFFEHPYSXTQLMCHPRNTA

SEQ ID NO: 147290 - protein, 124 aa, Glycine max
  Clone ID: PAT_MRT3847_104021C.1.pep
RSITCDYCDKLFQDTPADRKRHVQGIQHHQAKARWYDSFKQQQIPPIPNRPLCFHFVNTGFCRYGDSCKYLHPVPNNNVQQPPIVTTPSPSPAARGGKWSLWTYSSKALLVFVNILSFSSLFLS

SEQ ID NO: 147291 - protein, 106 aa, Glycine max
  Clone ID: PAT_MRT3847_104022C.1.pep
KRENAGEEVLLRLLRQAIPRHTSRSETTRSGHSTPPSQSSLGFCRYGDSCKYLHPVPNNNVQQPPIVTTPSPSPGSVVGVSFGNLPPSLQPPPDGVYLHLPFLDWG

SEQ ID NO: 147292 - protein, 60 aa, Glycine max
  Clone ID: PAT_MRT3847_104023C.1.pep
SDDQRCLGRLNPLKKVEKRDTMEVFTLNHGHYRKGSSRNLGLILYLFRNNKSEFVSKNSK

SEQ ID NO: 147293 - protein, 282 aa, Glycine max
  Clone ID: PAT_MRT3847_104024C.1.pep
SKDDKKSKEKVAPSEIVLKVFMHCEGCARKVRRSLKGFPGVEDILTDCKSHKVVVKGEKADPLKVLERVQRKSHRKVELLSPIPKPPAEEAKKPQEEEKPKPEENKQEPQVITVVLKVHMHCEACAQEIKRRIEKMKGVESAEPDLKKSEVSVKGVFETAKLVEHVYKRTGKHAVIVKEEPEKREEEEEEEAKEEKKAEEEVEKKTEKGSGEGEENKEKKGEGEAKAEEESKEETAVLELKKSEYYYNPPPRYGMEFYASYPGPSYPPQIFSDENPNACSVM

SEQ ID NO: 147294 - protein, 127 aa, Glycine max
  Clone ID: PAT_MRT3847_104025C.1.pep
MPVKKYYCDYCDKLFQDTPADRKRHVQGIQHHQAKARWYDSFKQQQIPPIPNRPLCFHFVNTGFCRYGDSCKYLHPVPNNNVQQPPIVTTPSPSPGSVVGVSFGNLPPSLQPPPDGVYLHLPFLDWG

SEQ ID NO: 147295 - protein, 43 aa, Glycine max
  unsure (1)..(43): unsure at all Xaa locations
  Clone ID: PAT_MRT3847_104026C.1.pep
HVHGQGLWSRXSTQIMLDLADTAESTAEATGSDCDAPYMTHIQ

SEQ ID NO: 147296 - protein, 57 aa, Glycine max
  Clone ID: PAT_MRT3847_104027C.1.pep
AFLNFARSLPFQPFSPSAFFAFEKCIRRLAHFIIEISFHFHVRRSVILELFLIVLRL

SEQ ID NO: 147297 - protein, 703 aa, Glycine max
  unsure (1)..(703): unsure at all Xaa locations
  Clone ID: PAT_MRT3847_104028C.1.pep
MAQNGSGDRVVVDNGFESIDDAYDHEHKLSQKGSTKVKEEEVSVERVFQHLLVPSWRNQLTVRAFVVSFALSILFSFIVMKLNLTTGIIPSLNVSAGLLGFFFVKTWTKFLEKSNMLRQPFTRQENTVIQTCVVASSGIAFSGGFXGSYLFGMSEEIAKQSSDPSHFKDPKLGWIIGFLFVVSFLGLFSVVPLRKIMVIDFKLTYPSGTATAHLINSFHTPQGAKLAKKQVKMLGKFFSLSFFWGFFQWFYTATDQCGFQAFPSLGLKAYENKFFFDFAAIYVGVGMICPYIINISVLLGGIISWGIMWPLIKTKEGDWYDKGLGEGNLHGIQGYRVFIAIALILGDGLYNFIKVLTHTLWGLYHQIREKQRENVLPVADQDSPSNSHLSYDDQRRTQLFLKDQIPTWFAISGYVAIAAISTATLPHIFPELKWYYIIVIYLIAPTLAFCNAYGCGLTDWSLASTYGKLAIFTIGAWAGSSNGGVLAGLAACGVMMNIVSTASDLMQDFKTGYLTLASPRSMFVSQIIGTTMGCIISPCVFWIFYKAFPDLGRSTSEYPAPYAIIYRNMAILGVQGFGHLPKNCLLLCYIFFAAAVAINLIKDFLGKRGRFIPLPMAMAIPFYIGPYFAIDMCVGSLILYVWERINKAKADAFAPAVASGLICGDGIWTLPASILALAGVKPPICMKFLSRAANARVDTLLGN

SEQ ID NO: 147298 - protein, 56 aa, Glycine max
  Clone ID: PAT_MRT3847_104029C.1.pep
HYLAFGSRQAYIGIRCKPPYSATTVLHEMTLSTPTRNHTSTPHRHDDSDLPTAGCQ

SEQ ID NO: 147299 - protein, 50 aa, Glycine max
  Clone ID: PAT_MRT3847_10402C.1.pep
LDCTCTRAWTVSSARPPFFWINETSWASFAWSLIIQIYLDYEIKCPRCPC

SEQ ID NO: 147300 - protein, 248 aa, Glycine max
  Clone ID: PAT_MRT3847_104030C.1.pep
PVPPQSSHQSSPQLGYQQSVPHDFSGTTNGNQIVPMVGNSFPGGHNNAVVKNEVFPQPTAYAPTAGCSSQEPSGFNPSRQLEYGQNDMYLNAQVPQPNHQFQQGNPPFAQRHAHPAPPQNPPNLYSYSNPTVQQHLPHSFHPPFPLPSLPDGRRQFVADEQWRVSSSEFKTNNQHGVWRGRNPSSCPGPPYGQEGHFRPSLERPPVSTVGFQRPISGNLPVAPIAGHGVPQMMPCRPDIPAVNSWRPT

SEQ ID NO: 147301 - protein, 53 aa, Glycine max
  Clone ID: PAT_MRT3847_104031C.1.pep
VSISYRCSILTGTIQVALSLVSFLPYHVFCRHWMHQLPVSTFTKCEHLPYLNV

SEQ ID NO: 147302 - protein, 80 aa, Glycine max
  unsure (1)..(80): unsure at all Xaa locations
  Clone ID: PAT_MRT3847_104032C.1.pep
QVLRFGSRHRWLVRSKPRKSTGGKAPRKQLATKAAXKSAPTTGGVKKPHRYRPGTXALREXRNXQXXPEXXXGKXLGSPG

SEQ ID NO: 147303 - protein, 44 aa, Glycine max
  Clone ID: PAT_MRT3847_104033C.1.pep
RMKMVKNCFQGNELVEALLQNFHCARNEAVDIGKQLSKKHFIHH

SEQ ID NO: 147304 - protein, 276 aa, Glycine max
  Clone ID: PAT_MRT3847_104034C.1.pep
GADIFAEWNRGELESFLIEITADIFKVKDEDGEGFLVDKILDKTGMKGTGKWTVQQAAELSIAAPTIAASLDCRYLSGLKEERESAAAVLKEAGLSDELGRVNVSGVDKKRLIDDVRQALYASKICSYAQGMNLLRAKSNEKGWNLNLGELARIWKGGCIIRAVFLDRIKKAYQRNPNLASLIVDPEFAREMVQRQAAWRRVVGLAVSAGISTPGMCASLAYFDTYRRARLPANLVQAQRDLFGAHTYERVDRPGAFHTEWTKLARNSGAGVGALN

SEQ ID NO: 147305 - protein, 421 aa, Glycine max
  unsure (1)..(421): unsure at all Xaa locations
  Clone ID: PAT_MRT3847_104035C.1.pep
MDINEIDVPSFFLCPISLEIMKDPVTVSTGITYDRESIETWLFSKKNTTCPMTKQPLIDYTDLTPNHTLRRLIQAWCTMNTSHGIERIPTPKPPINKNQISKLLKDASHSPLTCLRRLKSISSGSETNKRCMEASGVVEFLASIVINTNRNIDSSHEADSNDGSGFEXKQSACDEALSLLHNLHLSEQGLKTLLSFRNGEFIESLTRVMQKGFFESRAYAVFLLKSISEVAEPVQLLHLRQELFVELVQVLKDQISQKTSKATLQTLIQFSPWGRNRIRAVEAGTVPVLIELLLDCKERKPCEMMLVLLEILCQCAEGRAELLNHAAGLAIVSKKILRVSTLANDRAVKILLSVSRFSATPHVVQEMLKLGVVAKLCLVLQVDSGNRAKEKAREILKLHARAWRNSPCIPNNLLNSYPNYV

SEQ ID NO: 147306 - protein, 282 aa, Glycine max
  Clone ID: PAT_MRT3847_104036C.1.pep
MSVHAKLKHHPMNLASPSSHFEDDPPCKTKTKTQRRLLRIIITDHDATDSDSSDEEQQQQQQKTRRVNREITQINMQLPLSHNSSFSPSSSYYSSASTSSEQNLKCKRPNKKPPPSSAEARRRNKFRGVRQRPWGRWAAEIRDPTRRKRLWLGTFDTAEEAATEYDRAAVKLKGPNAVTNFPLAPEATAQSPPLAADNLSSDGGASYSDLVASPTSVLAYECDSTPFDGFRYLDVDAFGFHIDAPLSLPEVNVNVALTCHHGKKQEEAFDEFDLDEFMTWPY

SEQ ID NO: 147307 - protein, 92 aa, Glycine max
  Clone ID: PAT_MRT3847_104037C.1.pep
TRRIVDVPVLSRGGQIVSSRISSVLWVLSGRCCMFAEGNVLESHEWFYECLGFGHEVIEFEAVYIRRRSAPRQQESVRSCLELVYFTYGQPS

SEQ ID NO: 147308 - protein, 179 aa, Glycine max
  Clone ID: PAT_MRT3847_104038C.1.pep
FGCQSKLKSLHLKGSAIERLPASINNLTQLLHLEVSRCRKLQTIAELPMFLETLDVYFCTSLRTLQELPPFLKTLNVKDCKSLQTLAELPLSLKTLNVKECKSLQTLPKLPPLLETLYVRKCTSLQTLPELPCFVKTLYAIYCTSLKTVLFPSTAVEQLKENRTRVLFLNCLKLDEHSL

SEQ ID NO: 147309 - protein, 68 aa, Glycine max
  unsure (1)..(68): unsure at all Xaa locations
  Clone ID: PAT_MRT3847_104039C.1.pep
IIAHSHVYHWSRGLNEQPGGSDSILIIDATDCTXQFDAIHSNTSKPLPVYYSIEALVSTGYTSDSSTN

SEQ ID NO: 147310 - protein, 60 aa, Glycine max
  Clone ID: PAT_MRT3847_10403C.1.pep
QNLPYTQIILQTFSFKYTNVLINYCTQYNIQIKSNSLLKFSQFLFSISIFFIYYITQLNI

SEQ ID NO: 147311 - protein, 66 aa, Glycine max
  Clone ID: PAT_MRT3847_104040C.1.pep
MRICIIINQAINTFKLRNCGVAEHWRISCCPVIVLAIISPHALLSWPLYIVVGLCLCNRNYVDASI

SEQ ID NO: 147312 - protein, 74 aa, Glycine max
  Clone ID: PAT_MRT3847_104041C.1.pep
KMKNPPSKEGLKEAFRVFNKDQNGFIFAGEPPHVMKNFGEKLPNEEVYKMIREAHVDGDGQINYEELVKVMMAK

SEQ ID NO: 147313 - protein, 48 aa, Glycine max
  Clone ID: PAT_MRT3847_104042C.1.pep
PNKTSLTVLIGEINKWDRRKTSSFYYQISTGSVSRENTLLFHLNDTYP

SEQ ID NO: 147314 - protein, 159 aa, Glycine max
  Clone ID: PAT_MRT3847_104043C.1.pep
MFLLWEQVVGWPPIRSFRKNSMATQPQKNDDNAEAKSVCLYVKVSMDGAPYLRKVDLKNFGTYMELSSALEKMFSCFTISQCGSHGVCGRDKLTENRLMDLLHGSEYVLTYEDKDGDWMLVGDVPWEMFTDSCKRLRIMKSSEAIGLAPRAMEKCKSRN

SEQ ID NO: 147315 - protein, 93 aa, Glycine max
  unsure (1)..(93): unsure at all Xaa locations
  Clone ID: PAT_MRT3847_104044C.1.pep
LSLDLPDQACCGDAGTPSGVANDSDISLPAADALTGVTQDMTDXSTTTVGCLPIYKVLYNLLGWGGPYLVEITVGNIYARPHGYNTLPVPRDR

SEQ ID NO: 147316 - protein, 70 aa, Glycine max
  Clone ID: PAT_MRT3847_104045C.1.pep
GTVQKGLNQSYKIFCLSSQASVYNMKHPFSLNLHRVTYRNQTLYPGEKISLGNPSRVGIQDQPLPALGSF

SEQ ID NO: 147317 - protein, 47 aa, Glycine max
  unsure (1)..(47): unsure at all Xaa locations
  Clone ID: PAT_MRT3847_104046C.1.pep
LLMYVQLRVLXRLVXFXLMLGKVFFNFRGYEVTNIXMVCLIYRREIE

SEQ ID NO: 147318 - protein, 69 aa, Glycine max
  Clone ID: PAT_MRT3847_104047C.1.pep
RHNEEESTNSKQSRKSKEKDLNIRTCTTQVTNSDQKLSTLNLFLKSQKPNGPRFFHQFSKKQGEKLGKQ

SEQ ID NO: 147319 - protein, 151 aa, Glycine max
  unsure (1)..(151): unsure at all Xaa locations
  Clone ID: PAT_MRT3847_104048C.1.pep
MNERHLKKRIKRLKDMVEPDKNCETRVEDVAWLCSLSESEIDMLISLKLLIIQREKRMXVTCFLTKFNLKMIRAIALVLMGHLKEEIKDSSLIPNMVKSTSFLDACNLLKCSNEVDANIDELSTSLGADIETFLRSPPTSKQKKQKVGSRE

SEQ ID NO: 147320 - protein, 118 aa, Glycine max
  Clone ID: PAT_MRT3847_104049C.1.pep
MRVTAPRTLLLLLWGAVALTETWAGSHSMRYFYTAMSRPGRGEPRFITVGYVDDTLFVRFDSDATSPRKEPRAPWIEQEGPEYWDRETQIFKTNTQTYRENLRTALRYYNQSEARSHI

SEQ ID NO: 147321 - protein, 89 aa, Glycine max
  Clone ID: PAT_MRT3847_10404C.1.pep
DLQIIIPIFDNELDKNLFLDHILNHRAGIIEFEVVVLVIEELVEAEISLRGFKFDSKKIGIDGLICSSKSLLLSRLTPSDMAGLIAADA

SEQ ID NO: 147322 - protein, 197 aa, Glycine max
  unsure (1)..(197): unsure at all Xaa locations
  Clone ID: PAT_MRT3847_104050C.1.pep
MKTNNNVSGERKSRKRRNGGSDYVEDTLEKWKEYNRQQQLGSRENGVEVIHKAPAKGSRKGCMRGKGGPQNSDCKFRGVRQRIWGKWVAEIREPINGKLVGEKANRLWLGTFSTALEAALAYDEAAKALYGPCARXLNFSESIDSNGSSSSSGSDKKSPSGSSENGGDVAIAEELEVNHRRCHEDRPRFSKVGVLRK

SEQ ID NO: 147323 - protein, 44 aa, Glycine max
  Clone ID: PAT_MRT3847_104051C.1.pep
SLTMPHLKQCRRMLLPSKTSVMAPSPAETSKFYSEVRDSMDPEW

SEQ ID NO: 147324 - protein, 52 aa, Glycine max
  unsure (1)..(52): unsure at all Xaa locations
  Clone ID: PAT_MRT3847_104052C.1.pep
HNPHKEAMLALLHRVTKLLCHHYKVTRHPFRHRLHSPLXEYRVTRHQFLRRL

SEQ ID NO: 147325 - protein, 63 aa, Glycine max
  Clone ID: PAT_MRT3847_104053C.1.pep
IYVTEIDQNHEHMMVYDHLIITHIHDQRYSTISTIKVMATQIKANHNGTNHQLVLSGCNLSAT

SEQ ID NO: 147326 - protein, 45 aa, Glycine max
  Clone ID: PAT_MRT3847_104054C.1.pep
PHFLENHYSFKRGFTCDRYWIYRSSKSCVDRRTTYMIPSFSALNA

SEQ ID NO: 147327 - protein, 133 aa, Glycine max
  Clone ID: PAT_MRT3847_104055C.1.pep
MGRAPCCDKANVKKGPWSPEEDEKLREYIEKHGTGGNWIALPQKAGLKRCGKSCRLRWLNYLRPNLKHGEFSEGEDRIICTLFASIGSRWSIIASQLPGRTDNDIKNYWNTKLKKKMMGVEMNPFSTEETSPS

SEQ ID NO: 147328 - protein, 36 aa, Glycine max
  unsure (1)..(36): unsure at all Xaa locations
  Clone ID: PAT_MRT3847_104056C.1.pep
RXPPIKLYNMIKIKHNANPYNNIWFLSGVLYNYKGP

SEQ ID NO: 147329 - protein, 117 aa, Glycine max
  Clone ID: PAT_MRT3847_104057C.1.pep
MAIGPINQGDANGFNPFASWGQFVDFSFPSFIFGFFPGLEFGFRFRSFLNTPVDWKETSKTHLWKLVLSGFFNQDLLVELQKQKVLQVNVENGNFLTKVKGPDHRYLKQLKSHMPYR

SEQ ID NO: 147330 - protein, 52 aa, Glycine max
  Clone ID: PAT_MRT3847_104058C.1.pep
MKKGDWVWPNAFGNGFQCPRAVWGGNKSHPPPLYGPWADCLYRSPVSHPPPL

SEQ ID NO: 147331 - protein, 169 aa, Glycine max
  Clone ID: PAT_MRT3847_104059C.1.pep
MNARARTTLHSMKPPLNETKGKMETGGGKRAMGGGHKNGRRSNRERKMALIQDVDKLKRKLRHEENVHRALERAFTRPLGSLPRLPPYLPPYTLELLAEVAVLEEEVVRLEEQVVNFRQGLYQEAVYISSKRNAENLNDPIDQNTIRSSKHQRSKSMSQSEFNSNFDDG

SEQ ID NO: 147332 - protein, 503 aa, Glycine max
  Clone ID: PAT_MRT3847_10405C.1.pep
MAFRGGTMLILTMMALLEIQICSSEINRGNFPNGFVFGTASSAFQYEGAVKEDGRGPSVWDTFSHTFGKIIDFSNADVAVDQYHRYEEDIQLMKDMGMDAYRFSISWSRIFPNGYGQINQAGVDHYNKLINALLAKGIEPYVTLYHWDLPQALENKYSGWLNASIIMDFATYAETCFQKFGDRVKHWITFNEPHTFATQGYDVGLQAPGRCSILLHLFCRAGNSATEPYIVAHNVLLSHATVADIYRKKYKKIQGGSLGVAFDVIWYEPLTNTKEDIDAAQRAQDFQLGWFLDPLMFGDYPSSMRTRVGSRLPKFSQSEAALVKGSLDFVGINHYTTFYAKDNSTNLIGTLLHDSIADSGAVTLPFNGTKAISERASSIWLYIVPQSMKSLMIYIKQKYGNPPVYITENGMDDPNSIFISIKDALKDEKRIRYHTGYLSYLLASIKDGCNVKGYFVWSLLDNWEWSAGYTSRFGLYFVDYKDNLKRYPKQSVEWFKNFLKPTK

SEQ ID NO: 147333 - protein, 183 aa, Glycine max
  unsure (1)..(183): unsure at all Xaa locations
  Clone ID: PAT_MRT3847_104060C.1.pep
SLKGKMETGGGKRAVGGGHKNGRRSNRERKMALIQDVDKLKRKLRHEENVHRALERAFTRPLGSLPRLPPYLPPYTLELLAEVAVLEEEVVRLEEQVVNFRQGLYQEAVYISSKRNAENLNDPIDQNTIRSSKHQRSKSMSQSEFNSTXMMGRPQPSLARSAXSRKLMFSDAVNDHTRELVHG

SEQ ID NO: 147334 - protein, 69 aa, Glycine max
  Clone ID: PAT_MRT3847_104061C.1.pep
TPVALRWVLSAQISVGKSKHNLWDSVLVLVHLTQKSQLLPFLFGAKIGLPLFLFLFSWKFLFKSKWLDS

SEQ ID NO: 147335 - protein, 100 aa, Glycine max
  unsure (1)..(100): unsure at all Xaa locations
  Clone ID: PAT_MRT3847_104062C.1.pep
HANGAWRVISDIATGHTCTVHVYRETEDSTAHKAEYSAVSAIGPLXGVAMDEHYXTLXGDIDRQHLSARKNSSTYCYDLTLALDTDLRQSWAIQQAGFRR

SEQ ID NO: 147336 - protein, 94 aa, Glycine max
  unsure (1)..(94): unsure at all Xaa locations
  Clone ID: PAT_MRT3847_104063C.1.pep
KCCWWFFFLVGVQVAPLDLTSLKSVQSXSIIDIKFSNPSWDLCMCTPSMLPKCTCEDIRLNSCHSDCKSCMCTRSQPGQCLCLDTNDFCYKPCK

SEQ ID NO: 147337 - protein, 76 aa, Glycine max
  Clone ID: PAT_MRT3847_104064C.1.pep
MADRTLTSAPVIDGEWVCLRDNRTAESHERYEADIRSGSRPDLWGWLLLPSHMTTLITGSWWKEIICSRMTWGPTM

SEQ ID NO: 147338 - protein, 49 aa, Glycine max
  Clone ID: PAT_MRT3847_104065C.1.pep
MFMSPTSQPITRKNSNGRLNCLCSPTTHAGSFRCRHHRSSGIRRGKIRG

SEQ ID NO: 147339 - protein, 37 aa, Glycine max
  Clone ID: PAT_MRT3847_104066C.1.pep
NTNSIHYKLRCTFRSNVQFNSLKTSESHLKKHRHNWS

SEQ ID NO: 147340 - protein, 92 aa, Glycine max
  Clone ID: PAT_MRT3847_104067C.1.pep
AYRSRFWSNKSRGNGFRDDRLLYGRRRNLYFLSYEYVKERSLGNLLLPVLLLFFPLRNCPLLFVFSFFKGPEVGEVRLEVPFLSLRSQQQPH

SEQ ID NO: 147341 - protein, 51 aa, Glycine max
  unsure (1)..(51): unsure at all Xaa locations
  Clone ID: PAT_MRT3847_104068C.1.pep
RRIHLKANCYTDQSFPGEIDFQDEKNWTMDEFEISFKHLGXGNCYASLSAS

SEQ ID NO: 147342 - protein, 69 aa, Glycine max
  unsure (1)..(69): unsure at all Xaa locations
  Clone ID: PAT_MRT3847_104069C.1.pep
CSKFNXYGPGNPEFFNDLLGNLHFVNALRSWILLICTTHYNTHIHLFFTTLPYIRVLAFFVYMKISFLN

SEQ ID NO: 147343 - protein, 95 aa, Glycine max
  Clone ID: PAT_MRT3847_10406C.1.pep
FKTKQSPWGFHPWTSENFIFWDDLAPLPTSQQFSGFNFFLEEKNPFAFQSSIKDGFSFFSSLGNFAQKAKHCLNFMGKSKLLNFKGGFFLGGKLQ

SEQ ID NO: 147344 - protein, 75 aa, Glycine max
  unsure (1)..(75): unsure at all Xaa locations
  Clone ID: PAT_MRT3847_104070C.1.pep
RFHPDRVTSWRASKGLGPLSCQNPCKTSKLAAPAFKWNKNFSKISSSGRGLSQGGAPIKGVSPIRGSREXXLWPL

SEQ ID NO: 147345 - protein, 157 aa, Glycine max
  Clone ID: PAT_MRT3847_104071C.1.pep
QQQLFARIVGGLGGRAAKKIIFGGPEVPPGAAGDFQQIPGLAKPMGTPFGRFDIGPWAPMGAPAQSGGVFFRMMARDSMSERLAEDLDAALQGVSDGAFGIALAPLRDPRGGVAKIVEVLLGKGALPGDEFRAILFGVAEIPVENRVPPSTPGPAPV

SEQ ID NO: 147346 - protein, 74 aa, Glycine max
  Clone ID: PAT_MRT3847_104072C.1.pep
GNMEEVQRERVSAWNSYSPCHFMEQVVKAFSNCLGLYTTSTKDGGVTSTTSRAMRRPPKPPLSAGRTQINLLSS

SEQ ID NO: 147347 - protein, 119 aa, Glycine max
  unsure (1)..(119): unsure at all Xaa locations
  Clone ID: PAT_MRT3847_104073C.1.pep
CTRGWLQTADVPTIAQIEEPHSMQRMMKAPDSNDNIDLLLSIDWMGIQGASIALTNKTAFDDKLXVLANTQESFDGNFXVDSWLPKLENCLYAGRQLPSEAVVVNDTCDRGRGGDLPQC

SEQ ID NO: 147348 - protein, 127 aa, Glycine max
  Clone ID: PAT_MRT3847_104074C.1.pep
MSEKITAENLLNTLVETLTEKQKSGSFFEEDKSSSVSYQFNRLFGRQKPVHHILGGGKSADVLLWRNKKISASVLSAATAIWVLFEWLNYNFITILFFVVALGMLGQFLWTNVSGLFSRKPSKVPRF

SEQ ID NO: 147349 - protein, 77 aa, Glycine max
  Clone ID: PAT_MRT3847_104075C.1.pep
LVIPCKKGGGGLGLLGEKKQNSGGWASDFHFIGKTPPKSCISGRWELYIGPGLCFPLAQQEQTRGYTLTYHREPRLS

SEQ ID NO: 147350 - protein, 267 aa, Glycine max
  Clone ID: PAT_MRT3847_104076C.1.pep
DGVRERLYALSPIGQYFASDDDGGSLGPLSSLFHRGYFHVLKDVKDAIMDPNNNDHFQNVHGMPPYQYMKTDEELNKLFNKALAQTGPPAMKMLLKLYKGFEQVSTLVDVGGGVGETLKQIIFEYPSIKGINFDLPQVVQDAPPYPGIEHVEGDMFESVPKGDAILLKLVCHNWLDEDCVKFLRNCHKALPQHGKVIVIDYIIPEVPDSSKISMQTCVADSLMFLVTSGKERTEKEFESLCRNSGFSRFHVACRDSPSVLSVIEFYK

SEQ ID NO: 147351 - protein, 196 aa, Glycine max
  Clone ID: PAT_MRT3847_104077C.1.pep
MARSEFTKKFKSKARIMNSNICNWKQNQVLPTEEAKGDDTYLSALTLCFSRIFPAILNAAVDLNLFDIIAKAESSSLSASEIASLLLPNPHPQLANRLERILPVLASYSLLNCSIRTNEDGVRERLYALSPIGQYFACDNDGGSLGPLSSLFHRGYFHVLKDVKDAIMDPNNNDHFQNVHGMPAYQYMKTDEEPYN

SEQ ID NO: 147352 - protein, 114 aa, Glycine max
  Clone ID: PAT_MRT3847_104078C.1.pep
DMFESVPKGDAILLKLVCHNWLDEDCVKFLRNCHKALPQHGKVIVIDYIIPEVPDSSKISMQTCVADSLMFLVTSGKERTEKEFESLCRNSGFSGFHVACRDSPSVLSVVEFYK

SEQ ID NO: 147353 - protein, 70 aa, Glycine max
  Clone ID: PAT_MRT3847_104079C.1.pep
CSIRFILWVCSSADSFVSSHFGTYPSCSHLKRVLSGCSFPRLQCCVCSFELGPAVVISPPHGRVGGRLIL

SEQ ID NO: 147354 - protein, 48 aa, Glycine max
  Clone ID: PAT_MRT3847_10407C.1.pep
LNYTSTAIAIWHQSSNCCKRHKPQHSVKPAKMGLDFALSYRKLVLKSP

SEQ ID NO: 147355 - protein, 105 aa, Glycine max
  Clone ID: PAT_MRT3847_104080C.1.pep
MSKSSQVKGSLVGRGTERPQVARRGSFMYGGAEIMVTRRNAAVNHRESSFPTLLPLVQLESDPADVMVVTSALMALPAYSVHPKLSLTESEMTCLTVLYGSAGAL

SEQ ID NO: 147356 - protein, 85 aa, Glycine max
  Clone ID: PAT_MRT3847_104081C.1.pep
IFKFGHATHHFDPIGTVKGLRCSWDIGHCHFITPETLERRLIKEIKDFNDRLKKGVHLKIYTRYFAPIDSALVTERLNFAFLSFS

SEQ ID NO: 147357 - protein, 96 aa, Glycine max
  unsure (1)..(96): unsure at all Xaa locations
  Clone ID: PAT_MRT3847_104082C.1.pep
HITKEKQTTNTIKFTKESKNAPQHXTLPKSHHWKVKHTTRNNFLQPVSSNSMVVMLCLAHRFCAFGGTKAMKKTTHYLRSVSFAFRLSTRRRRLRQ

SEQ ID NO: 147358 - protein, 72 aa, Glycine max
  Clone ID: PAT_MRT3847_104083C.1.pep
QSIPYFFPQLFLLHFHPGFLGNSLMPKNTHCTSILIHHQYHLLLTWRHQHNLFKIITKDQGKTTTPSYIAFT

SEQ ID NO: 147359 - protein, 99 aa, Glycine max
  unsure (1)..(99): unsure at all Xaa locations
  Clone ID: PAT_MRT3847_104084C.1.pep
XXSLPFXFXLXLXPSNXSFXPSXXPXNSLPXLXCIXHXXXLXPXIXHXXXXXXSXXXXLSHYXLSFXSPXXQXSLXFSSPXYXXXXXSXPXFXPXYXXS

SEQ ID NO: 147360 - protein, 124 aa, Glycine max
  Clone ID: PAT_MRT3847_104085C.1.pep
HEDLIALAFFLCSTMGCFLHCFGSSKSTKPRRKAHHHHRLARDRLEQCSIQDYSETVVIGTASQEVQAKPLEQINVSPKKKVTFDVNVKTYEPDEVADFQLEKSEEGGEESALVEKLSRTKSYS

SEQ ID NO: 147361 - protein, 472 aa, Glycine max
  Clone ID: PAT_MRT3847_104086C.1.pep
MATGKTVMCSLSQLRPLTCASTSASRLVPQPPDLIKWVTREGGFVHRAVKITQLDSSNGLGLVAKEEIPRGSDLIVLPHHLPLRFTSLQQDPSLLHHLARQVPEELWAMKLGLKLLQERAKVGSFWWPYISNLPETYTVPIFFSGEDIKNLHYAPILHQVNKRCRFLLDFEREVKRTLVSLTQDKHPFGGQEVDASSLGWAMSAVSSRAFRLYGEKDPNGIRIDIPMMLPLIDMCNHSFNPNARIVQEQDTSNSRMQVKVVAETAIKEDDPLLLCYGCLNNDLFLLDYGFVMHSNPYDCIELKYDGALLDAASTAAGVSSPNFSAPVPWQELILSQLNLAGETADLKVSLGGQETVEARLLAALRVLLSSNVETVQKYDLSTLQSLDAEAPLGVANEIAVFRTLIALCVIALGHFPTKIMDDESLLKQGASGSTELAIQYRIQKKSVIIDVMRNISRRLKLLSSKETATAEG

SEQ ID NO: 147362 - protein, 179 aa, Glycine max
  Clone ID: PAT_MRT3847_104087C.1.pep
MGCFLHCFGSSKSTKPRRKAQHHHHRIARDRLEQPTACCSVQDYSETVVLGTASQEVQAKPLEQINVSPKKKVTFDVNVKTYEPEPDEVADYQLVRSEEGREESAFVEKLSQTKSYSEVSSVTSARSYPTNHRYHSCTCSDDEDGAMEYWDSDVTDEDEDDDDDGDSDMGEEYDEVEEF

SEQ ID NO: 147363 - protein, 42 aa, Glycine max
  Clone ID: PAT_MRT3847_104088C.1.pep
VLMYKSFNGGLCNCHCLILYMIIDRPDNVHKLALMPVLFIRL

SEQ ID NO: 147364 - protein, 69 aa, Glycine max
  Clone ID: PAT_MRT3847_104089C.1.pep
MPKQIHEIKDFLLTARRKDARSVKIKRSRDVVKFKVRCSKYLYTLCVFDPEKADKLKQSLPPGLSVQDL

SEQ ID NO: 147365 - protein, 209 aa, Glycine max
  Clone ID: PAT_MRT3847_10408C.1.pep
MGRAPCCDKANVKKGPWSPVGDAALWAVFESSGTAGLWVALPQFAGLKRCGKSCRLRWLNYLRPNIKHGGFTEEEDNIICSLYISIGSRWSIIAAQLPGRTDNDIKNYWNTRLKKKLLGRRKQSNLSAKDTNNGIEENSYSNALSSSALERLQLHMQLQSLQNPFSFYNNPALWPKLHPFQEKMIQSLQSLNDGSSPVMQNALPNSHMS

SEQ ID NO: 147366 - protein, 128 aa, Glycine max
  unsure (1)..(128): unsure at all Xaa locations
  Clone ID: PAT_MRT3847_104090C.1.pep
TTAGYSTDSQILTPTNHPLPETIIYQPVLRELPRPPGGGFKGTLRGGIWGKTISFGFILGGNKGFLKKKNPGGGFFCWGKKLGGGGPSFFFKKKRXALVFFFLPPKKNFWFLKRGCSTKSFFSFLHEK

SEQ ID NO: 147367 - protein, 130 aa, Glycine max
  unsure (1)..(130): unsure at all Xaa locations
  Clone ID: PAT_MRT3847_104091C.1.pep
FNELKSMAGLPTRKTNIAITLIASIGAREQCMQLWSTLDKKKLETILYLTDLNYMKLKKEVEYLIWXGWIAFLEFELKHSFVYRKHNTSPEYYARLYCTIPKLTMLGCTDAFHVMKELKETKIAYPNGLI

SEQ ID NO: 147368 - protein, 63 aa, Glycine max
  Clone ID: PAT_MRT3847_104092C.1.pep
VVWKKGGAPFPENGCPVKKEIKGPPRLFWLAPKKKKKKKKKKKKKKKKKKNKKKKKKKKIKKK

SEQ ID NO: 147369 - protein, 45 aa, Glycine max
  Clone ID: PAT_MRT3847_104093C.1.pep
NKKERKIQLQSSGFLLNYTNTCLVCFLFILIIRRNRVEIMSFLSS

SEQ ID NO: 147370 - protein, 73 aa, Glycine max
  Clone ID: PAT_MRT3847_104094C.1.pep
LLLTLFHDVSYLQMGSVQESMFAPRCTFGLHIKPVWQAARLSSDRSLWPDEPAEIGSPRARPAKILAARVNGQ

SEQ ID NO: 147371 - protein, 155 aa, Glycine max
  Clone ID: PAT_MRT3847_104095C.1.pep
HPDLIHAFQAAAVAGGSGSSGASANKSLNAAVMGEALPRGRGIDERAARAAAEVRRKAAARGLMIRPHGVPVQALPPLTQLLNIINPGVTSDAVDNGNADRVKKEANDIPPSDLIDTKKGQTTPVQQQEQAPVGLGKGLSSLDAKKQKSKPKTGA

SEQ ID NO: 147372 - protein, 152 aa, Glycine max
  Clone ID: PAT_MRT3847_104096C.1.pep
MGNVQTSSIANQLLPFESYIVEIPELKYVASLGATRFMKVARVEHFSKGPLVVKVFVIIDQQVAVEPYRDQLLQISRRLIKHPNFAPVNRVFLTSRAAILCRPFYKSTLYDRLSTRPYLTGIEKRWIAFQLLKALAQLRIAMVRHGDIKPQN

SEQ ID NO: 147373 - protein, 202 aa, Glycine max
  Clone ID: PAT_MRT3847_104097C.1.pep
MSFSPLHSPLHFPQRPLFTSIRPIPNRTFISNPRRTPRTPLSLAPITFAAKSTPSPNDDVLFKRLVRALFCFAVGFSALGAFRAPPPAFAIAAPWTYWGKRGAEKERAKSHQYSDCTDRLLETVSFLLKTVDEVREGNGEVNEVEAALEAVKSKKEELRKEINGRLYPALKRLRRERKALWKRSGEIVGEILKATAEYEKLK

SEQ ID NO: 147374 - protein, 45 aa, Glycine max
  Clone ID: PAT_MRT3847_104098C.1.pep
GSTHASDIYNPNIHQLDEWISKLWYTPITQLLKRIRKTYVRLPKI

SEQ ID NO: 147375 - protein, 73 aa, Glycine max
  Clone ID: PAT_MRT3847_104099C.1.pep
MSAETASGPTEDQVEILEYNFNKVDKHPDSTTLCLIAAEAGLSEEETQKWFKQRLAKWRRSEGLPSECRSVTD

SEQ ID NO: 147376 - protein, 74 aa, Glycine max
  unsure (1)..(74): unsure at all Xaa locations
  Clone ID: PAT_MRT3847_10409C.1.pep
MESDYSECSSAADRSASCCRSLAIACSXYGTEDYPFTLLTVIILKASGIIIPMYIVIKIMGAIQNSIQPYQESV

SEQ ID NO: 147377 - protein, 46 aa, Glycine max
  Clone ID: PAT_MRT3847_1040C.1.pep
HTILLNLLSFILSLILFEIIHLSKFFYIISIQTLLFFIFIHLNTNI

SEQ ID NO: 147378 - protein, 203 aa, Glycine max
  Clone ID: PAT_MRT3847_104100C.1.pep
METSSSMSVETTRSVQVDEWQKNYCVVTSSICTPKQKADAYRALLLHIQYAYANSEISQVFATNLFKRYTEKYSAIIDSDNVVTGLNNYAESIFALAGSRQADSNKWQSGLSIDNVFKMSCVQEMMQAGKKFEESLLEPADASVVLCKEPTAFEVPQLSVCGGSEDADILSSSRHDTDKTQAIPGSSLRCSPFQSARLPKETN

SEQ ID NO: 147379 - protein, 47 aa, Glycine max
  Clone ID: PAT_MRT3847_104101C.1.pep
FLSLFLLDILNTLKPNRSFLNVTHNHSPLPFPKHLPICSFPPTITNY

SEQ ID NO: 147380 - protein, 96 aa, Glycine max
  Clone ID: PAT_MRT3847_104102C.1.pep
SLPYVSHRGTLYFSGSGSGISLDICLASPFAPIRYHLGMCMPYPLDNFLWSTFWGRAFSSPGSLCFAGIMQTRSRLYKCWVMSHLVRPGNFIKFIS

SEQ ID NO: 147381 - protein, 299 aa, Glycine max
  Clone ID: PAT_MRT3847_104103C.1.pep
SFSKFACNAHTICDSELRPVGTGLYPVISIINHSCLPNSVLVFEGSSALVRAVQHIPSGTEVLISYIETAESTMTRQKALKEQYLFTCTCPRCSKVGQYDDIQESAILEGYKCKSEKCGGFLLRTTDGKGFQCQGCGLIRDKEEIKRITTEIKLLSEDASKPSATCNYQEAISIYKRIEKLQTELFHPLSINLMHTREKILKSLMELEHWTEALAYCKLTIPFYQRVYPAVHPLPGLQYYTCGKLEWYLGDTEEAVKSLTKAVDILRITHGTNTPFMKDLLMKLEEARTEASYKFSSKE

SEQ ID NO: 147382 - protein, 62 aa, Glycine max
  Clone ID: PAT_MRT3847_104104C.1.pep
IFLLGLINVIASIRHQYYNTLTISPAVFMLGQIPSMQLQCILMSSLQHAHATLTLTSARSFP

SEQ ID NO: 147383 - protein, 253 aa, Glycine max
  unsure (1)..(253): unsure at all Xaa locations
  Clone ID: PAT_MRT3847_104105C.1.pep
TLALGRLSSSFNKPLRPLFNAGSVYYKSSLPAEAAYDNEKSCDTGLELIPSENFTSVSVMQAIGSIITNTRNEGYPGARYYGGNEYIDMAETLCQKRALEAFRLDPAKWGVNVQPLSGSSANFQVYTALLKPHDRIMGLDLPHGGHLSHGYQTDTNKVSAVSLFFETMPYRLNENTGHIDYDQLESTAKLFRPKLIVAGATAYARLYDYARIRKXVCDKQKAVLLADMAHISGLVAAGVIPSPFDYADVVTTT

SEQ ID NO: 147384 - protein, 244 aa, Glycine max
  Clone ID: PAT_MRT3847_104106C.1.pep
TRPPTRGAMALGRLSSSIDKPLRPLFNAGSLYYKSSLPAEAAYDNEKSCDTLNAPLEVVDPEIADIIELEKARQWKGLELIPSENFTSVSVMQAIGSIITNTRNEGYPGARYYGGNEYIDMAETLCQKRALEAFRLDPAKWGVNVQPLSGSSANFQVYTALLKPHDRIMGLDLPHGGHLSHGYQTDTNKVSAVSLFFETMPYRLNENTGHIDYDQLESTAKLFRPKLIVAGATAYARLYDYARI

SEQ ID NO: 147385 - protein, 92 aa, Glycine max
  unsure (1)..(92): unsure at all Xaa locations
  Clone ID: PAT_MRT3847_104107C.1.pep
KFDLCAVVVDAFVDVAEVWPMADAVTCSPTXWIACIPVIAYXAEPYTACXTKLKLLIPCLCGYLNNASWKQYVNSSNARNTVAYCGIPFPTC

SEQ ID NO: 147386 - protein, 31 aa, Glycine max
  Clone ID: PAT_MRT3847_104108C.1.pep
MMKPSMLRSLHSSATLGASHVSRRGYTSEPV

SEQ ID NO: 147387 - protein, 106 aa, Glycine max
  Clone ID: PAT_MRT3847_104109C.1.pep
NTVPGDKSALKPGGLRMGTPAMTTRGFQTGDFKRVADIVDRAVNITKTLDAKAKETAEKNGRKNPGSVAAFKEYVKEGEEVVEIIELRREVEDWVGTFSLPWTESS

SEQ ID NO: 147388 - protein, 220 aa, Glycine max
  Clone ID: PAT_MRT3847_10410C.1.pep
MAEVVLLVDDLKLLSASPRCRICHEEEFESVETLEAPCACSGTVKFAHRDCIQRWCNEKGNTTCEICLQQYEPGYTAPPPKKSKINDETMSIREEEEPSNARIEIMVEGVEMESDYSECSSAADRSGSCCRSLAIAFTLVLLVRHLFPVLTNGTEDYPFTLLTVIILKASGIIIPMYIVIKILGAIQSCIQHYKDADYDTSMSEEDDEDEIHHNVNPRHL

SEQ ID NO: 147389 - protein, 243 aa, Glycine max
  unsure (1)..(243): unsure at all Xaa locations
  Clone ID: PAT_MRT3847_104110C.1.pep
MGKSGGRRKKGGSNANQGGGVDNSGSGAAAPTANGGVEVKKANELKEEGNRRFQNKDYAGALEQYESALRLTPKTHPDRAVFHSNRAACLMQMKPIDYEAVIAECTMALQVQPRFVRALLRRARAFEALGKYEMSVQDVQFLLAADPSNRDALEIAQRLRTAFGAQQDLHSRPSPAAXWCFGCPWCPYCWIXPCLPARPVAKKGAHSAVGSXVSPNNTNQTSHSQFYQLKMVLTPSPSCQNWY

SEQ ID NO: 147390 - protein, 101 aa, Glycine max
  unsure (1)..(101): unsure at all Xaa locations
  Clone ID: PAT_MRT3847_104111C.1.pep
PPSTPPAPPPPPLPPPPPPPYPPTAAPPSLPTPCPPAPPLPPPPPEPPPPPXPPTPTPTPISPCTPPPMVRSVLAAEHMPTPNSTKKTMLRTFEVPIWKSI

SEQ ID NO: 147391 - protein, 222 aa, Glycine max
  Clone ID: PAT_MRT3847_104112C.1.pep
MGKSGGRRKKGGSNSNQGGAVDNSGSGAAAAPTANGGVEVLDSSIFLKKANELKEEGNKRFQNKDYAGALEQYESALRLIPKTHPDRAVFHSNRAACLMQMKPIDYEAVIVECTMALQVQPRFVRALLRRARAFEAVGKYEMAVQDVQFLLAADPGNRDALEIAQRLRTALGPRQEAQQDLHSRPSPAALGASAVRGAPIAGLGPCLPARPVGKKGAIRWDL

SEQ ID NO: 147392 - protein, 55 aa, Glycine max
  Clone ID: PAT_MRT3847_104113C.1.pep
DVNRNYLSSHIAYPVTLGYEIGIPSRITTPHDQEIWMPYCPYINWNLYFHILSLS

SEQ ID NO: 147393 - protein, 89 aa, Glycine max
  unsure (1)..(89): unsure at all Xaa locations
  Clone ID: PAT_MRT3847_104114C.1.pep
XGSREXLPXAGQXSQXXSLLRLNXQXPPLXPLGXPNPLLRPPXAXGXXDPRPPHHRSXXXXVLPQXSPLPPXQLLPPVPPPLLPPGXAP

SEQ ID NO: 147394 - protein, 80 aa, Glycine max
  Clone ID: PAT_MRT3847_104115C.1.pep
WVLDGYFHRLVYRSGDIVIQNCHVMIPEAECFLVVFKGLQGNNLGKCFHPLLCLDCGFLALIWSIDKLLHIGCFFHDISG

SEQ ID NO: 147395 - protein, 367 aa, Glycine max
  Clone ID: PAT_MRT3847_104116C.1.pep
GLGSTSGPEFPSRPTRPARTNNTNSLVPARQKSMKHHSSNASSNGGHAQHSVPQVSIAATGSRNSSPKDHTQRSGFASNDHPQQRNSFRNRNGGQHQRGDGSHHHNYGNRRDQEWNNNRSFGSRDTHVPPRVAPRFIRPPPPPPPNSAQFFHPSPMRPFGSPIGFHELAPPLVFVAAPPPPPDSLRGVPFVPPMPHHPLFFTGPDPQLHSKIVNQVDYYFSNENLVKDAFLRQNMDDQGWVPIKLIAGFNKVMHLTDNIQVILDAIQTSSVVEVQGDKIRRQNDWRRWIMHPPVQFSNATTIGVLNPDKLAEQVQNIALETSNYDGAGGLDVQPDTSQHRSTFGDLQQLSTSQVGIQGSDHFIPARN

SEQ ID NO: 147396 - protein, 165 aa, Glycine max
  Clone ID: PAT_MRT3847_104117C.1.pep
QVDYFFSNENLVKDTFLRQNMDAQGWVPIKLIAGFNKVMHLTDNIQVILDAIRTSSVVEVQGDKIRRRNDWRRWIMHPPVQFSNATTIGVLNPDMLAEQVHNIALETSDYDGAGGPDVLPDTSRHRSTFRDLQLSTSEGPGPGQVGIQEAQITPFQEEIRAVNVL

SEQ ID NO: 147397 - protein, 188 aa, Glycine max
  unsure (1)..(188): unsure at all Xaa locations
  Clone ID: PAT_MRT3847_104118C.1.pep
RIFLIIAVVVDCENVGLLGLTHIGSRRVVQISXWFVLKFGAFFASIPLPIFAGIYCVLFGIVAATGISFIQFANTNSIRNIYVLGLTLFLAISIPQYFVMNTAPDGHGPVRTDGGWFNDILNTIFSSAPTVAIIVGTLIDNTLEGKQTAVDRGLPWWGPFQNRKGDVRNDEFYRLPLRINEYMPTRFL

SEQ ID NO: 147398 - protein, 68 aa, Glycine max
  Clone ID: PAT_MRT3847_104119C.1.pep
GLNIWVQGFSPSRGGVTKPKSHLCKSLEKKMGVVIKALNTGSGYFQTGGDFLPKIKKQGVTMFFSREA

SEQ ID NO: 147399 - protein, 126 aa, Glycine max
  unsure (1)..(126): unsure at all Xaa locations
  Clone ID: PAT_MRT3847_10411C.1.pep
ITFEEFKADVLKLDTKLYDCEVWXGGGAYDVDXNETMDYIEXITATMHMNRMDREDHLYKASEYFDNDKSGYITMEELESALKKYNMGDEKTIKEIIAEVDTHNDGRINYDEFVAMMRKWIPSITH

SEQ ID NO: 147400 - protein, 121 aa, Glycine max
  unsure (1)..(121): unsure at all Xaa locations
  Clone ID: PAT_MRT3847_104120C.1.pep
HRLRLRILSNNLTNLFDNCSENVGLLGLTHIGSRRVVQISCGYMIFFSIFGTLFQLKHMWADFPSSFXIPAVIILLSLSGKFGAFFASIPLPIFAAIYCVLFGIVGRCCCYYCIDYNNFDQ

SEQ ID NO: 147401 - protein, 112 aa, Glycine max
  Clone ID: PAT_MRT3847_104121C.1.pep
TSWMCLQTSLPSTSRVSLLQRTTFFNSSKVKFFFFFFISLCLRHTHLVPSTLNFPIFFRIFPLLISFLFVYSILFLEIPPPPPLLCRLPAILPPKCLNFITHYYSIIFMFFS

SEQ ID NO: 147402 - protein, 548 aa, Glycine max
  Clone ID: PAT_MRT3847_104122C.1.pep
MGEEHHNHPPPPVQAPPAGPPPPNLALSRGPVWHPAEQLSQLHYCIHSNPSWPVAILLGFQHYIVMLGTTVLIATTLVPAMGGDHGDKARVIQSLLFMSGLNTLLQTWFGSRLPTVMGGSFAFLLPVLSIINDYTDRTFPSEHERFIYTIRTIQGSLIVSSFVNIFLGFSKTWGNLTRLFSPIIIVPLVCVAGLGLFARGFPLVANCVQIGLPMLILLVIIQQYLKRLHHAALQVLERFALLLCIAVIWAFAAILTVAGAYNTAKSQTQVSCRTDRSYLMSSAPWIKVPYPFQWGTPIFRASHVFGMMGAALVSSAESTGAFFAAARLSGATPPPAHVLSRSIGMQGIGMLLEGIFGSIVGTTVSVENVGLLGLTHIGSRRVVQISCGFMIFFSIFGKFGAFFASIPLPIFAAIYCVLFGIVAATGISFIQFANTNSIRNIYVLGLTLFLAISIPQYFVMNTAPDGHGPVRTGGGWFNDILNTIFSSAPTVAIIVGTLVDNTLEGKQTAVDRGLPWWGPFQNRKGDVRNDEFYRLPLRINEYMPTRFL

SEQ ID NO: 147403 - protein, 57 aa, Glycine max
  Clone ID: PAT_MRT3847_104123C.1.pep
GSSFYFHLNQALVDVASEPTTEKPILVLGINHLSYFGIMLEHVLAKIISRNNRLIYL

SEQ ID NO: 147404 - protein, 69 aa, Glycine max
  Clone ID: PAT_MRT3847_104124C.1.pep
QLFNKAILCIGMALDSMVLIFSESTDRTAKKKKKKKKKKKKNKKKKKKKKLKTMSRKPWSTFMLPLQLS

SEQ ID NO: 147405 - protein, 67 aa, Glycine max
  Clone ID: PAT_MRT3847_104125C.1.pep
SRYLNTLIKKTIVAFFIPTGSQPAQNTDLPSSPPVSLTHQAFFYVYKSHSHSLKISIHSSHSNNRIS

SEQ ID NO: 147406 - protein, 509 aa, Glycine max
  Clone ID: PAT_MRT3847_104126C.1.pep
WLGKDIMATAAVIGLSGGKRLLSSSYHYSDIIEKLSYGSDFGSTHYQIVPTKSLIAAKKSSNYTPTFPASNQQNQSIKALKEHVDDAPTIADSWFQSCNSNDLEVESSEMGYSVEALLLLQKSMLEKQWNLSFEREVLTEHSSKGKKCKKVAVTCSGVSARQRRMNTKRKTAIKTCGAMQLKSKISPELLQHRLKGYVKGIVSEELLSHAEVVNLSERIKVGLSLEEHKSRLKERLGCEPSDDQMAISLKISRTELRARMIECTLAREKLAMSNVRLVMSIAQKYDNLGAEMGDLVQGGLIGLLRGIEKFDSSKGFKISTYVYWWIRQGVSRALVENSRTLRLPAHLHERLSLIRNAKFRLEERGITPTIDRIAKYLNMSQKKVRNATEAISKTISLDREAFPSLNGIQGETHHSYIADNRVENIPWNGVDEWALKDEVNRLINVTLVEREREIIRLYYGLEKEGLTWEDISKRIGLSRERVRQVGLVALEKLKHAARKRQMEAMLLKH

SEQ ID NO: 147407 - protein, 83 aa, Glycine max
  Clone ID: PAT_MRT3847_104127C.1.pep
ARAARDHPLPPLHKPLLALFFSKTIQIQHSISTTFPLLLLTSPIPTTAQNHRSHRHRRGPCRTRRRHPPELPEHSLSPPGKPR

SEQ ID NO: 147408 - protein, 160 aa, Glycine max
  unsure (1)..(160): unsure at all Xaa locations
  Clone ID: PAT_MRT3847_104128C.1.pep
NINWAKRTKCNICNTNKPGHNEGGVRGGRGGGYKELDEEEFXQVREDDRREAEDDGELYDEFGNLKKKFRAKTQQAEAARGLPGSGRAGWEVEELGIDRDARESRDRGRERNDGESRNRERSEKERPSSWNRERGRDRDWDYVDRDRDYGRDRDRSRHRY

SEQ ID NO: 147409 - protein, 83 aa, Glycine max
  unsure (1)..(83): unsure at all Xaa locations
  Clone ID: PAT_MRT3847_104129C.1.pep
SADWGPKIDVVGFCFLDLASNYVPPKSLVDWLEEGEKPIYVGFGSLPLQEPEKITRIIIQALEETGQRGIINTGXGGLGLWQN

SEQ ID NO: 147410 - protein, 144 aa, Glycine max
  Clone ID: PAT_MRT3847_10412C.1.pep
KHSAMNCFLRPSFEWTILGPIHQTTTYMNHRVQIEAGKIGRSIIYVHPQNHASTIAAASSSVESTVAIFSVTLSLVESTVAISSVTYPLITSDSCIFSVSALRSFSLSFISSSSNALRFSARKFFRASLPRKPMFVIVKHGTSL

SEQ ID NO: 147411 - protein, 51 aa, Glycine max
  Clone ID: PAT_MRT3847_104130C.1.pep
TQCNFVLQIIVLKSFLNNFLEGNPSLPNVKFTGSPGLRGWFFWGSKFSKIF

SEQ ID NO: 147412 - protein, 101 aa, Glycine max
  Clone ID: PAT_MRT3847_104131C.1.pep
MLSRTRTFPLISLASKVCAPPLEALYSTHIVGDKPVLVRDFIHSALYHPLHGYFSQRSRFVGVLPNAIKFNQLQGRKAYMKYLDNIYKQSDISWFTPVGLF

SEQ ID NO: 147413 - protein, 68 aa, Glycine max
  Clone ID: PAT_MRT3847_104132C.1.pep
IKNFSLKCHAVAFKDVAGDILERNFLFTDNICPACQMSLLLVFNNGSSVSIAKANLDESFVYLCMSFC

SEQ ID NO: 147414 - protein, 56 aa, Glycine max
  Clone ID: PAT_MRT3847_104133C.1.pep
DILLQILMQTLHYSKFEDFSIVHLFPQRWPDSKPLMLRHLGMITCSLQWLFVIECC

SEQ ID NO: 147415 - protein, 75 aa, Glycine max
  Clone ID: PAT_MRT3847_104134C.1.pep
TTKWMYTLLELIHKRCIPLLFLNITPPSRCTFYLCYKGCTLQCVKTKNSQTVSSLNLCKGKQKISQAASPLKSFI

SEQ ID NO: 147416 - protein, 287 aa, Glycine max
  Clone ID: PAT_MRT3847_104135C.1.pep
TSQRSATPTLRSSTPSRAFGASAPPTRPSSVSKARPGPLVAKNHASARGSSPSVRSRPWEPSQIPGFSLDAPPNLKTSLSDRPASATRTRPGALNSRSSSVDASSNAKSRRQASTPSKGRTTTGLVHNNHTSMQVLSRARFTDGDDESPVVIGPTRPERVVNMRKLAPPKHEDHHSSRDNSYGKSSSGSSGFGTTLSKKSLDMAMRHMDIRRSIQGNLRPLVTSIPASSMYSVRSGSSSKSRTVSASDSPLATSSTTSSEPSVNTNSMSYDGSGAEENDFACEKGNS

SEQ ID NO: 147417 - protein, 83 aa, Glycine max
  Clone ID: PAT_MRT3847_104136C.1.pep
GSVQTILVTQTRLNKAHNMSRGTLLLYHNSSRHRDNAPLYYKLSSLAHLFGNMVSHEYIYIHTHVCVCVCCLLYHIQIKWQEQ

SEQ ID NO: 147418 - protein, 87 aa, Glycine max
  unsure (1)..(87): unsure at all Xaa locations
  Clone ID: PAT_MRT3847_104137C.1.pep
LFIHMAKYTAALLLLVLLVVAILNGSDASRRRLPEKDDLVYESQXFGXIPIXLHWKFCLLHPLLCLWRPKDHHVSAEIETLALPDYS

SEQ ID NO: 147419 - protein, 38 aa, Glycine max
  Clone ID: PAT_MRT3847_104138C.1.pep
LICFLFYFYIYLSVHGRLAIINEQNTWSKDITYRPPKI

SEQ ID NO: 147420 - protein, 49 aa, Glycine max
  Clone ID: PAT_MRT3847_104139C.1.pep
IYLYIYIYIYTYTNHNITISNSSTLLSLHSLTKIHTYKTTNQNHTPFNS

SEQ ID NO: 147421 - protein, 90 aa, Glycine max
  unsure (1)..(90): unsure at all Xaa locations
  Clone ID: PAT_MRT3847_10413C.1.pep
GVNKPHRFRPGTMALKEIKKYQKSTELLIRKLPFQYLAREIAXDFKTDLMLQSSSVAALQEAADADLVGLCEDTNLCDIIPXRVTVMPTD

SEQ ID NO: 147422 - protein, 106 aa, Glycine max
  Clone ID: PAT_MRT3847_104140C.1.pep
LGFFFTNYLHFLTTLYRLNPPSGNSHFNYHPLTGKPGTVHLPILAGNACLWRVYIDMRGLASKEHLPSLGAIPNYDQQRITVNYTKGSGYHHTFSGEQKSRPPAHA

SEQ ID NO: 147423 - protein, 55 aa, Glycine max
  Clone ID: PAT_MRT3847_104141C.1.pep
DASFMFMKHDNNCIGVACKGNGSSKTERKFMEYIHLHFGVVLVTDESDHMLLFYL

SEQ ID NO: 147424 - protein, 120 aa, Glycine max
  Clone ID: PAT_MRT3847_104142C.1.pep
EEKDCEEARGMETRASPRQLSTCQRANSLGDLYAQKNSGVTANGGPGSKFAGYCRNLVSDIPNLANHKMPPAAAEETPPYSNYNTLPCRKSHCLSEGATNPQISHSNSMQGRRAKTTQVK

SEQ ID NO: 147425 - protein, 83 aa, Glycine max
  Clone ID: PAT_MRT3847_104143C.1.pep
SRLLNIIGISYLHCHFNIILCCVFYHLNLKETMRLFENLLGSEHVIHIIYRNSETIYNGFPIIRERIKDLQDFQPNWLIMYRK

SEQ ID NO: 147426 - protein, 414 aa, Glycine max
  Clone ID: PAT_MRT3847_104144C.1.pep
MASFRRTLSPAYPDRQYLNGSFSVSSPSHKLPSSNAKYSSPLPELVAAFLRLAGGVFTRRHGRKGQWRRVVVRCVLCFFVGFLLGMFPFGHVSEDVRSHEISFEMKPPPLPRAANNAQQLLLEDRVLRNRVEREGLVIDPVSLSAEWERRSERFDFTPRKPLIVVTPTYDRAFQAYFLNRLGQVLRLVPPPVVWIVVEMKAASMETAEVLRKTGVMYRHLVCNRNSTDVKDRGVHQRNTALEHIERHRLDGIVYFADDDNVYSLELFDALRDIRIRFGTWPVAMLAPSKNKAILEGPVCNASQVIGWHTNEKSKRLRRFHVDMSGFAFNSTILWDPKRWRRPSSNPVRQLDTVKEGFQETTFIEQLVEDESQMEGSPPGCSKILNWHLHLAANNIVYPKGWVLQKNLDAVIPVK

SEQ ID NO: 147427 - protein, 62 aa, Glycine max
  unsure (1)..(62): unsure at all Xaa locations
  Clone ID: PAT_MRT3847_104145C.1.pep
MLDYQDLTTGHELLADSFRYKEIXNGMLXELSGTRALTXARDADIGANPSAADLEEDERDDA

SEQ ID NO: 147428 - protein, 80 aa, Glycine max
  Clone ID: PAT_MRT3847_104146C.1.pep
HCVFNQTIDPSKHKATTSYCCPAQKSVLYEKSSNVIYNIPSFKTFSSQSFSFVVSKIYTCINFSIFSQNSTSFTLYLFLS

SEQ ID NO: 147429 - protein, 192 aa, Glycine max
  Clone ID: PAT_MRT3847_104147C.1.pep
MLLRGAISTPLPPSLRLRASPAARRTVAVASSSPSGGGDYPLSVSDTALESRGFSLRRGAEGLDLELLNSVFAAVGFPRRDPEKIRVALEHTEAVLWVEHRKTRRPVAFARATGDGVFNAIIWDVVVDPSFQGIGLGKAVIERLLRELRGKGISNIALYSEPRVLGFYRPLGFVADPDGIRGMVYSRKQKKK

SEQ ID NO: 147430 - protein, 155 aa, Glycine max
  Clone ID: PAT_MRT3847_104148C.1.pep
MAAYREPMNMNMSDRAPVSPQQPHSPWHSPVPYLFGGLAAMLGLIAFALLILACSYWKLSGYLEGNGETERDLEAGETEQDQKPAKPYEEKILVIMAGQEKPTFLATPSVSSCSTSRSSSFGDNTSTCTCEENRKSLEMAQAGTGTTETAHSSSD

SEQ ID NO: 147431 - protein, 164 aa, Glycine max
  Clone ID: PAT_MRT3847_104149C.1.pep
MAAYREPMNMNMSDRAPVSPQQPHSPWHSPVPYLFGGLAAMLGLIAFALLILACSYWKLSGYLEGNGETERDLEAGETEQDQKPAKPYEEKILVIMAGQEKPTFLATPSVSSSCSTSRTSSFGDNTSTCTCEENRKSLEMAVKEGSAAGTGTTETAHTSSDQNL

SEQ ID NO: 147432 - protein, 56 aa, Glycine max
  Clone ID: PAT_MRT3847_10414C.1.pep
RGQTPQFGVFMAPHFYFPFFPLDIYGYTHPYTNNKGRGPFNFLNEKYVCKLKRGPH

SEQ ID NO: 147433 - protein, 273 aa, Glycine max
  Clone ID: PAT_MRT3847_104150C.1.pep
MVCLAFLATMAFNSTYIGLTPMLAVDYLEPFRSSAFEVSSLLQGPNGTSVTIQVKHGNCGPVESIEVQRQLVARTPVFYRLEQLDNGVTSVGYIRLKEFNALARKDLVIAMKRLQDMGASYFILDLRDNLGGLVQAGIEIAKLFLNEGDTVIYTVGRDPQLQKAIVTDTSPLIQAPIVILVNDKTASASEIVASALHDNCRAVLVGKRTYGKGLIQSVFELDDGSGVVITVGKYVTPNHKDINGNGIEPDFQKLPAWDDISRHLKKCSMSQQG

SEQ ID NO: 147434 - protein, 48 aa, Glycine max
  Clone ID: PAT_MRT3847_104151C.1.pep
LLKLIRVVAFNFSALINHALLFTKTLFTEALRWPSSGMPLQMLKFSRI

SEQ ID NO: 147435 - protein, 487 aa, Glycine max
  Clone ID: PAT_MRT3847_104152C.1.pep
MASQEPQLHFVLFPLMSPGHLLPMTDLATILAQHNIIVTVVTTPHNASRLSETFSRASDSGLNLRLVQLQFPSQDAGFPEGCENFDMLPSMGMGLNFFLAANNFLHEPAEKVFEELTPKPNCIISDVGLAYTAHIATKFNIPRISFYGVSCFCLSWQQKLVTSNLLESIETDSEYFLIPDIPDKIEITKEQTSRPMHENWSEFVDKMAAAEAVTYGVVVNSFEELEPAYAGDFKKIRNDKVWCVGPVSLRNRNQLDKAQRGNKASSDAHSCMKWLDLQKPNSVVYVCLGSICNLIPLQLIELGLALEASEKPFIWVIRERNQTEELNKRINESGFEERTKGVGLLIRGWAPQVLILSHPAIGGFLTHCGWNSTIEAICAGMPMLTWPLFGDQFFNEKFIVQVLRIGVRVGVETPVNWGNEEKSGVLVKKQHVLKAIQVLMDEGNEREERRKRARELAEMAKKAVEGGSSHFNVTQLIQDIMQQSNKD

SEQ ID NO: 147436 - protein, 85 aa, Glycine max
  Clone ID: PAT_MRT3847_104153C.1.pep
RSFNLTLSLTSSSRVFSKVSNSGKDSDSQSLWPAQRVAIIPLISRTQSSTQRRRDPWNQASIPLATGFKVRHPVRPPELKFRPQY

SEQ ID NO: 147437 - protein, 50 aa, Glycine max
  Clone ID: PAT_MRT3847_104154C.1.pep
HFKLNSPHPNMLLLNKKIMHRQKKSSMSCYCLFFKGHTNCPKRIFFFERK

SEQ ID NO: 147438 - protein, 65 aa, Glycine max
  Clone ID: PAT_MRT3847_104155C.1.pep
KKTPFLATHKQRGRVTNQQNPPQNLTTENSILQFHSPHVTNRKTLHFIQIHNRQYTPHSHINVKS

SEQ ID NO: 147439 - protein, 56 aa, Glycine max
  Clone ID: PAT_MRT3847_104156C.1.pep
LIWDWCSSMCQCRSSVCIALFKLINGCSVAAKSAIIIRCSVVRYPVLVVLHNVMPA

SEQ ID NO: 147440 - protein, 94 aa, Glycine max
  unsure (1)..(94): unsure at all Xaa locations
  Clone ID: PAT_MRT3847_104157C.1.pep
MRTLLPLIEAEQAAQKSEGKVNSYTTLGHGFKNITGVKPNSGCXSGEGNTQVATNNYGGGPAINNSGNFQGHGNEGFIGGKSKASTRNSSLTYV

SEQ ID NO: 147441 - protein, 94 aa, Glycine max
  unsure (1)..(94): unsure at all Xaa locations
  Clone ID: PAT_MRT3847_104158C.1.pep
PHXSLYTIMLHAYAQNHRLREXIDLFRRIPFKDVVSWNSIIKGCLHCGDIVTARKLFDEMPRRTVVSWTXLVDGLLRLGIVQEAETLFWXMEPM

SEQ ID NO: 147442 - protein, 90 aa, Glycine max
  unsure (1)..(90): unsure at all Xaa locations
  Clone ID: PAT_MRT3847_104159C.1.pep
KPTRARTTIHIPSMNVDKADLVADVLIKNPNPVPIPLIDIDYSGDSDSRSXRFRMTPDARTIHAHGEQTGKIPATWPYDDIKPTNAYLKT

SEQ ID NO: 147443 - protein, 82 aa, Glycine max
  Clone ID: PAT_MRT3847_10415C.1.pep
SKFFVYHACDLNPQANFHLRKIIWHTCFEKYTTRLHRKKKTPALSYSFSHSILLIVATNALYETDLCFFPCRHIINLMICSF

SEQ ID NO: 147444 - protein, 103 aa, Glycine max
  unsure (1)..(103): unsure at all Xaa locations
  Clone ID: PAT_MRT3847_104160C.1.pep
MTGNQFRFFLACDISXPATLRVQRLGGNLALPNTKPPELXTNVPTENRTQELLVECASYIEGAPPGPPMRTWSESXRPSQXRNELITSTSKYRDLTAQSHLTF

SEQ ID NO: 147445 - protein, 69 aa, Glycine max
  Clone ID: PAT_MRT3847_104161C.1.pep
PFHYLVPHSPYYTNNLQITRSLPSLNVSSYLCRCSFVPLLISPSLLSLVSLPTASFSWGLRRLLLFEHL

SEQ ID NO: 147446 - protein, 129 aa, Glycine max
  unsure (1)..(129): unsure at all Xaa locations
  Clone ID: PAT_MRT3847_104162C.1.pep
AFAALKLGKXLHCAILKKDWESKVNVXSAITYMYPQCGRLDLAYEFVRRMFERDSVCWNSMISSFSQNGKPEMAIDLFSQMGMRGAKFDSVSLSYALSASANLTVLHYGKEMHGYVIRNAFSSDTFLME

SEQ ID NO: 147447 - protein, 108 aa, Glycine max
  unsure (1)..(108): unsure at all Xaa locations
  Clone ID: PAT_MRT3847_104163C.1.pep
LTSXLXXXHXXXPXXTXXXXXSXLXXTXXXXXXXXXXSYLFXLPXXXXXXXXYXFXXLSXIXSXXRXXYXXXXXXLAXFFXSAXXXIXXXXXXFHXFPYFPPXFFSXX

SEQ ID NO: 147448 - protein, 71 aa, Glycine max
  Clone ID: PAT_MRT3847_104164C.1.pep
KKKPRLQTFLPQWLRKIPSGVSGYNKNMVNPVCRGFKKCGFHTCGPDFHQKGLGFLSCTKSNWYKGYSMRL

SEQ ID NO: 147449 - protein, 71 aa, Glycine max
  Clone ID: PAT_MRT3847_104165C.1.pep
IVFGQSISPSFPLFNQELGPCLCPGKNLFTWFLPHFIPPNWPGYVLKKNPFVLKMVRLSSCFQLKKTQKYF

SEQ ID NO: 147450 - protein, 55 aa, Glycine max
  Clone ID: PAT_MRT3847_104166C.1.pep
RTKILFNTISIKTPLLIYYSLTHITNLTVQYLLFPHKILFAIKYLNQSITHTTLN

SEQ ID NO: 147451 - protein, 67 aa, Glycine max
  Clone ID: PAT_MRT3847_104167C.1.pep
TTTARARQRGNPRAAGPIKKRPRVIFKTQGASPGGAGGGAKTKERAQTPRRAGKLKNSNLYQQNKRR

SEQ ID NO: 147452 - protein, 57 aa, Glycine max
  unsure (1)..(57): unsure at all Xaa locations
  Clone ID: PAT_MRT3847_104168C.1.pep
LYRLAIKLDIYRMFSNALAVTVISSVAWIGYEVYYRLQXSFNERWQSAXIINAFWEF

SEQ ID NO: 147453 - protein, 65 aa, Glycine max
  Clone ID: PAT_MRT3847_104169C.1.pep
YQLNLLESYVKKTLLDHKANILLTFNFNLLRYQILVKSGIEMFTHSSFLIQKNELIINAKDPIFY

SEQ ID NO: 147454 - protein, 200 aa, Glycine max
  unsure (1)..(200): unsure at all Xaa locations
  Clone ID: PAT_MRT3847_10416C.1.pep
CFGSGGTXSQEQMDELALGLELSGHRFLWVLRPPSSVANAAYLGGANDDGVDPLKFLPSGFLERTKGQGLVVPLWAPQVQVLGHRSVGGFLSHCGWNSTLESVLQGVPLIAWPLFAEQRMNAILLCEGLKVGLWPRVNENGLVERGEIAKVIKCLMGGEEGGELRRRMTELKEAATNAIKENGSSTKALAQAVLKWKKLA

SEQ ID NO: 147455 - protein, 53 aa, Glycine max
  Clone ID: PAT_MRT3847_104170C.1.pep
VWEIYMSRNISVGCLITLSLPYSNYFGSSAQVFARLQFRQCPLQVLKLAAQND

SEQ ID NO: 147456 - protein, 52 aa, Glycine max
  Clone ID: PAT_MRT3847_104171C.1.pep
LGFLKRSDNKGSDKTLRLAYTGKHEFHHLNLVWPGLRAEKIQSQHCSALVLG

SEQ ID NO: 147457 - protein, 55 aa, Glycine max
  Clone ID: PAT_MRT3847_104172C.1.pep
YLNNCVKECSSLLDAFLDLSLHVTSFFWMLRFNCFYVLDCIDMPFEVLKYKYNMW

SEQ ID NO: 147458 - protein, 76 aa, Glycine max
  Clone ID: PAT_MRT3847_104173C.1.pep
SHTHPTFSSSSTSSSTTRLQPPPLPPMLCRLNRGDNCDFDLHPNHSCDYCDCDRDFKRCHNPSRYSPLSLPRWSPP

SEQ ID NO: 147459 - protein, 182 aa, Glycine max
  unsure (1)..(182): unsure at all Xaa locations
  Clone ID: PAT_MRT3847_104174C.1.pep
MATTDPENKSPTLPLPPAEVDYSKVDVILRFLLLAASVVALAVIVSSDQTEQVLFQDVLLPQPAKFKYSPAFVYFVAAFSVSGLYALVSALASISVXQDSNCFIFWDALILGITASATGAAGSVAYIGLKGNXHVGWIKVCNIYDKFCRHLAGSIAVALFGSIVTVLLIWLSAFTIHSRVPK

SEQ ID NO: 147460 - protein, 90 aa, Glycine max
  Clone ID: PAT_MRT3847_104175C.1.pep
RDECRGGAKDKEGQTTRQGAETREREATAEYLPKHNADTYPKDNDGSPPRDIRESNWPRMQHAGGEANRQTARPPAAATGQHNHLPKSLK

SEQ ID NO: 147461 - protein, 44 aa, Glycine max
  Clone ID: PAT_MRT3847_104176C.1.pep
QKAQENDFKIESTSSKSRLISSFMRRNQEDSRIKRSLISRFKRR

SEQ ID NO: 147462 - protein, 42 aa, Glycine max
  Clone ID: PAT_MRT3847_104177C.1.pep
SCQMILCFVSDFLLSFGLLFVVYGNYSFHPSSMDIWLKAIKM

SEQ ID NO: 147463 - protein, 175 aa, Glycine max
  Clone ID: PAT_MRT3847_104178C.1.pep
MEAVGSRLSRASSRYGAPTVFSGPVRKWKKKWVHVTPSSLPNNSSHSHTNNSTTTSSASSRLLLRRWTPATVDDAAGAVSDEPPRRKFRYTPVVVLEEQKKMNVVKAEHEPTIETDQLAARKTNVTHEMQGKLNMNEMLEETKDSNIGNLDLGSDFQSNTGGNSQNSDAQLENSM

SEQ ID NO: 147464 - protein, 55 aa, Glycine max
  Clone ID: PAT_MRT3847_104179C.1.pep
MARINVYKLQQITKADLFNQLIDLKAELALLHIATVNGCAPNKLSHINVVTLNIA

SEQ ID NO: 147465 - protein, 127 aa, Glycine max
  Clone ID: PAT_MRT3847_10417C.1.pep
NSFFLNTCAVSELADVQSASFKIVNKCRHTIWPGLLSGATSPPLPTTGFTLESGKSRIVKIPKSWSGRIWARTLCGQDSDGKFSCATADCGSGKVQCVGGAKPPATLAEFTLNGADGLDFYDVSLVD

SEQ ID NO: 147466 - protein, 124 aa, Glycine max
  Clone ID: PAT_MRT3847_104180C.1.pep
EAPGGGGPFTLSVGLRVCNAPGGVLVAIHAACHLPVWSQDCSVGLPRGFSLPGGSTGGPGMCCLGASFWDFTVFPAVLRFGPRAGPPLFVVPIDWFFSLVGLCSFAWIFYGRPALFFSFFFYRF

SEQ ID NO: 147467 - protein, 75 aa, Glycine max
  Clone ID: PAT_MRT3847_104181C.1.pep
LCYSCDSTHPVQVVISNMETVTSNDPQADEFKLLVDEALTVGEFYLAIDLYTHAILLLSRNAIDSSILAFAHLYL

SEQ ID NO: 147468 - protein, 194 aa, Glycine max
  unsure (1)..(194): unsure at all Xaa locations
  Clone ID: PAT_MRT3847_104182C.1.pep
MKFSGKGSFPVGIALRSVNNPSPDSDLEPAKPFLRRNPRTPGTRLRRHGGKRSRPETPLLKWKIHDDPLEDDQKSSVAGSRRRTCRSAKKQAEVAVSARRLAAGLLRLHLPETATGDGRKGLEHKHGIGHPGLQFLGHPNGMTHGSDLKKNSSQSPRSIFGTRNGHFCEPESFQLPNNEMEGATKXDPLCSKTS

SEQ ID NO: 147469 - protein, 83 aa, Glycine max
  Clone ID: PAT_MRT3847_104183C.1.pep
SWELIFPIKVCGPNNGFEMWSWMWANQTLWHLSFLIDNPNQSTVFDIPLGISQDFEIAGNAVTPAFSVPQVTARFSENAESLA

SEQ ID NO: 147470 - protein, 56 aa, Glycine max
  Clone ID: PAT_MRT3847_104184C.1.pep
NLESAVTTDQTIPQLNLLGRARPFFFFFPLINKNDTGDQPKDFLTLQIHSCKLLVI

SEQ ID NO: 147471 - protein, 66 aa, Glycine max
  Clone ID: PAT_MRT3847_104185C.1.pep
LLHQMGWLQSLVSPLKKFWLRLNSTQKKRRGIYILYEDVKSCPYEDVHVLWSILVESHSPSLPSKK

SEQ ID NO: 147472 - protein, 47 aa, Glycine max
  unsure (1)..(47): unsure at all Xaa locations
  Clone ID: PAT_MRT3847_104186C.1.pep
MHMLAAMINSGDNRLTVKTIFTCRDWDIXGAYYTIATHDRNFLPYYI

SEQ ID NO: 147473 - protein, 36 aa, Glycine max
  Clone ID: PAT_MRT3847_104187C.1.pep
KILQDHVLTLTWNLKSINDLEKTQDYSNWHHCCILI

SEQ ID NO: 147474 - protein, 89 aa, Glycine max
  Clone ID: PAT_MRT3847_104188C.1.pep
VPCRSIRDISRDFKRSPASPWYVSLEQLISTSDVVGAVMTSNVECTGIFIWLMRQYVVWFHHWLRHISVLSVVFNHLAHECSANELASL

SEQ ID NO: 147475 - protein, 77 aa, Glycine max
  Clone ID: PAT_MRT3847_104189C.1.pep
VARPSPELAPVIAPKPFLNVINLFGVLLATAGESVDSDQVFSAQSNCSRSFWPLNVQDVQLVLVGYVAELPDKCGRP

SEQ ID NO: 147476 - protein, 133 aa, Glycine max
  unsure (1)..(133): unsure at all Xaa locations
  Clone ID: PAT_MRT3847_10418C.1.pep
FYASGSLSQKRIDDGYLLLVKIAMKAXKSPTQNTYLKLIDNLLEIGKFEEALDLWCLMISHTFTPFSEPLCXYISKFGSVVDAVKFLKAWSKGSPQSRFAYLRVFKSLLGKGRHRESKYLLNRLVHRLDCISQ

SEQ ID NO: 147477 - protein, 62 aa, Glycine max
  unsure (1)..(62): unsure at all Xaa locations
  Clone ID: PAT_MRT3847_104190C.1.pep
RHFSTVGSGSFHCXXTXCYHCXNRGXTXYXRCGSXXTGFVTVXXKVXVHXIXXXXTRVXGRL

SEQ ID NO: 147478 - protein, 167 aa, Glycine max
  Clone ID: PAT_MRT3847_104191C.1.pep
QPCGRFSFQKKKTPGAQYHKPLSAPGGGFFYHWGPKHFPPLTGGWGVTQLFGFFPFSGPPAFPPFISGPFFCVVCWGDPIFSRNPLFPPASPLFYRPLFCKCVFFPRHAANFFLLPPWAGGAPLFFFSVFFGSPPRLLIFPIFFRVFFFFFFSRIKNKNQKKKKKIL

SEQ ID NO: 147479 - protein, 39 aa, Glycine max
  Clone ID: PAT_MRT3847_104192C.1.pep
KYVIRNYIILPGSDHEDPRPHLTVRSLYKQNQVVPALEP

SEQ ID NO: 147480 - protein, 51 aa, Glycine max
  Clone ID: PAT_MRT3847_104193C.1.pep
IIVKTQPIWMTTSLEELVFVLLVLKPKEPKLVSLFPPGEGFLKAHCYCNDK

SEQ ID NO: 147481 - protein, 52 aa, Glycine max
  Clone ID: PAT_MRT3847_104194C.1.pep
LGSKNSDLNRHQPWLRFSQQKLRSAMFVLNGLQTCSGYRHSFPQPLLSTIVC

SEQ ID NO: 147482 - protein, 191 aa, Glycine max
  Clone ID: PAT_MRT3847_104195C.1.pep
DGGVVAVVDELLYIEILMSSTNCKVRTVGQEFTKSGWGFAFQRDSPLAVEMSTAILQLSENGDLQKIHDKWLLKHDCSAPDNDADLNKLSLSSFWGLFLICGIACLLALVAFSIRVLCQYTKFSPEPEQDDEETSPNRPTKGKRLFRSTTSFRDLIYFVDKKEKEIKEILRQKSKKRRRSLSSDGQSSSPT

SEQ ID NO: 147483 - protein, 58 aa, Glycine max
  unsure (1)..(58): unsure at all Xaa locations
  Clone ID: PAT_MRT3847_104196C.1.pep
PXSGXTNQPRRRLIALELATRYTHNFSLKKKSLTHTXQDREKGKRERERERERERERN

SEQ ID NO: 147484 - protein, 43 aa, Glycine max
  Clone ID: PAT_MRT3847_104197C.1.pep
LRSHCLDCPPTKLRNHTQERNHIASPTASNSVYRSGFGHSHQS

SEQ ID NO: 147485 - protein, 143 aa, Glycine max
  unsure (1)..(143): unsure at all Xaa locations
  Clone ID: PAT_MRT3847_104198C.1.pep
KWIFNWCSWAYIVVPRCLINNDATESIGNTPMAYLCLIVGGCVARIAAKLELFQXCCCDTYMNGLSMIEDAEIKGLIITWKDLLXGSTNENTGLGLAFIXSLEGYELHVTMPSYVSLERIEMLRASAARTILQTLPKELMAPF

SEQ ID NO: 147486 - protein, 777 aa, Glycine max
  unsure (1)..(777): unsure at all Xaa locations
  Clone ID: PAT_MRT3847_104199C.1.pep
MPEGPPPKDFLLKETQPXLEGGKVSGDKLTSTXYNLIEQMXISIVRVVKAKDLPAKDVTGSCDPYTEVKLGNYKGTTRHFEKKSNPEWNQVFAFSKDRIQASILEVTVKDKDVVKDDFIGRVLFDLNEIPKRVPPDSPLAPQWYRLEDRKGDKAKGELMLAVWMGTQADEAFPEAWHSDAATVSGTDALANIRSKVYLSPKLWYLRVNIIEAQDLQPSDKGRYPEVFVKATLGNQTLRTRISQSRTINPMWNEDLMFVAAEPFEEPLILSVEDRVAPNKEESLGRCAIPLQMVDRRLDQKPVNTKWYNIEKHIVIMEGEKKKEIKFSSKIHMRICLEGGYHVLDESTHYSSDLRPTAKQLWKSSIGVLELGILSAHGLMPMKTKHGLGTTDAYCVAKYGQNWVQNRTIIDSFDPGGXHASVWEVFDPCTVITIGVFDNCHLHGGDKPGGAKDSKIGKVRIRLSTLETDRVYTHSYPLLVLHPNGVKKMGEIHLAVRFTCSSLLNMMHMYSLPLLPKMHYIHPLTVSQLDNLRHQATQIVSMRLSRAEPPLRKEIVEYMLDVGSHMWSMRRSKANFFRIMGVLGGLIAVGKWFDQICNWKNPITTVLIHILFIILVMYPELILPTIFLYLFLIGVWYYRWRPRHPPHMDTRLSHADSAHPDELDEEFDTFPTTRPSDIVRMRYDRLRSIAGRIQTVVGDLATQGERLQSLLSWRDPRATALFVIFCLVAAIVLYVTPFQIVALFTGIYVLRHPRFRHKLPSVPLNFFRRLPARTDCML

SEQ ID NO: 147487 - protein, 78 aa, Glycine max
  Clone ID: PAT_MRT3847_10419C.1.pep
IMKCTRQGDASVACDNQDRKLSIISESARTIVLYDWMPNNSEEPEYQDRYTLPSFQQILYSCEEMVTTVVALHGSSYK

SEQ ID NO: 147488 - protein, 312 aa, Glycine max
  Clone ID: PAT_MRT3847_1041C.1.pep
MLVANSFDLWRKDGFFSAAEEVQESADIMESAYRAWLREKRERSTPEELNELCRELQTALGTAKWQLEEFDKAVRLSYRHHGDDNTSTRHRQFISAIESQITQVEAALRESYIEEGKQPLRWVNLDEEERDDLAAFLSGTCQTTQSTNDDCMEVKQAKKEDKIVDINTFRNRDISASEKNKADAVSRSNDDLVSQTDRTTSTRKTWSPPNYGALKIVIADEGEQRDKPTRTVDATPKEKGFRNLFWKQKFEDYPQATRVVRMFNQRFGGIGICQSQRQFQSPLHLRYGCSVQVTLALMLTIFLIVPFVLYST

SEQ ID NO: 147489 - protein, 75 aa, Glycine max
  Clone ID: PAT_MRT3847_104200C.1.pep
CIKLAQGRKEMPMPSLQHPRGSNPRRHLMVPISTRNITRASRLIPGTPLVRHLCSLRHPPRGKLPKFQIQTQLAR

SEQ ID NO: 147490 - protein, 430 aa, Glycine max
  Clone ID: PAT_MRT3847_104201C.1.pep
MLTAQVSELQGHRNTDTSNTNNNDLTLKTQLQFLKTKDGKGTTDAYCVAKYGQKWVRTRTIIDSFAPRWNEQYTWEVFDPCTVITIGVFDNCHLHGGDKPGGSKDSKIGKVRIRLSTLETDRVYTHSYPLLVLNPNGVKKMGEIHLAVRFTCSSLLNMMHMYSLPLLPKMHYIHPLTVSQVGSLKKGATQIVSMRLSRAEPPLRKEIVEYMLDVGSHMWSMRRSKANFFRIMGVLGGLIAVGKWFDQICNWKNPITTVLIHILFIILVMYPELILPTIFLYLFLIGVWYYRWRPRHPPHMDTRLSHADSAHPDELDEEFDTFPTTRASDIVRMRYDRLRSIAGRIQTVVGDLATQGERLQSLLSWRDPRATALFVIFCLVAAIVLYVTPFQIVALFTGIYVLRHPRFRHKLPSVPLNFFRRLPARTDCML

SEQ ID NO: 147491 - protein, 102 aa, Glycine max
  Clone ID: PAT_MRT3847_104202C.1.pep
EIEEWMELQKRMRIYELGSLPPFLLVFAGRIAAVDHRWNQHGLGGDNFRGLCRDLHPGPVSLLHWSGKGKPWARLDAGRPCPLDALWAPYDLLETRFAALQA

SEQ ID NO: 147492 - protein, 76 aa, Glycine max
  Clone ID: PAT_MRT3847_104203C.1.pep
MMINNFALWLEAKKKKKKKKKKKKKKKKKKNRAANKKRIKNTIHKHTKKKTIKKCKKKSDFLGGGAIGGPQFNPPA

SEQ ID NO: 147493 - protein, 63 aa, Glycine max
  Clone ID: PAT_MRT3847_104204C.1.pep
FVKKKNSHQKAEETSVEVPKKSKSKSGRRTWFEDVVGREDSPTNRTLHFALLNCKCSLIYFSS

SEQ ID NO: 147494 - protein, 45 aa, Glycine max
  Clone ID: PAT_MRT3847_104205C.1.pep
HTYDHVLLSTTTNNSWGQENLSSWSCWKLDYISNAVAISSKRTTG

SEQ ID NO: 147495 - protein, 87 aa, Glycine max
  Clone ID: PAT_MRT3847_104206C.1.pep
ESASTPPTVGHCAKNRTQGDPSRGTIPAAKRNKRPPGRDSRPEVGATNERAKRVQRAREHTTRRSVTQATEERREPNPKRTRNEEDA

SEQ ID NO: 147496 - protein, 116 aa, Glycine max
  Clone ID: PAT_MRT3847_104207C.1.pep
PLKTMAANLDQIVPATPALESEVLGEQASTKNSPLFGIMIPSLWGAKNFCIMSVKVFGPPGVFCLTTPPKKKGSCFPLHQVQVFWTFDGGVKPQGASFFFFLKVGKWAPLYKVRLI

SEQ ID NO: 147497 - protein, 66 aa, Glycine max
  unsure (1)..(66): unsure at all Xaa locations
  Clone ID: PAT_MRT3847_104208C.1.pep
SDSLGFQLLDAIRKQLDILMSANRIGEVRVVNRKXYDRDGCRLYLDGLWTHELSQVLKMDIGPGTK

SEQ ID NO: 147498 - protein, 110 aa, Glycine max
  Clone ID: PAT_MRT3847_104209C.1.pep
CYHQAPAIATFFGFLFGAVSWLRNIIIEDNSPLRVIVIQDSLQLLGNGTIPCITLLLGGNLTQGLKSSNVKPLTLISIIIAPLFLLPAILLNEEKIPEGSHAAGSAAGSE

SEQ ID NO: 147499 - protein, 82 aa, Glycine max
  Clone ID: PAT_MRT3847_10420C.1.pep
SAGGGLETGSDPAGLKKAFEVFSPDPAGRISAEELFRVFKAPGPERGPLKEARRIKKGVAKNGGGFVCFEAFFRMRAPHRGR

SEQ ID NO: 147500 - protein, 147 aa, Glycine max
  Clone ID: PAT_MRT3847_104210C.1.pep
TLQKALSKRQSLGAAKNLKVRSSPQSSLSTGVWTGGSGMKETVELGANLLSEMQMWFLRFVEESLDAGFKVFGECTADGKKALPLDGGSIAVVLSHLKRVNAWLDRVVSKGDDSLTEKIEKLKRKIYGFVIQHVGTTFDSSASSASS

SEQ ID NO: 147501 - protein, 178 aa, Glycine max
  unsure (1)..(178): unsure at all Xaa locations
  Clone ID: PAT_MRT3847_104211C.1.pep
MEGNNNNNNNNADVFRPSVGPSSSPNSRRYSGILSASNLIQAPLSALLEYSGILPSRSSNQHSQPSSDAANNDGEVSIRIIGPAEQEQREEQQLQQTPPPGLVVGLSHSQNDTVLASGSPRGDAEGAAXTEGAAAGGDGAGRDSSYQRYDIQHAXRWIEQVLPFSLLLVVVFIRQHLQ

SEQ ID NO: 147502 - protein, 219 aa, Glycine max
  Clone ID: PAT_MRT3847_104212C.1.pep
MRTVLSRLIQGGPSISRLNATAVSISGRNLWTDSNKVAQPFKVEEAETVNVPSPPTELFLSVLKLTSPLIYTMSAYKDQDTRLHGIKTKIRVVPNFPKSGIEARGFIFGPPIALAIGAKFVPLRKPKKLPGKVISQEYILEYGRDCLEMHVGAVEPGERALVVDDLIATGGTLCAAMDLLGCSGPEIFFCCSYVHKSSSCQRLVSLRSTPIYDGMKGKT

SEQ ID NO: 147503 - protein, 742 aa, Glycine max
  unsure (1)..(742): unsure at all Xaa locations
  Clone ID: PAT_MRT3847_104213C.1.pep
MWRLKIADGGKDPYIFSTNNFVGRQTWEFDPEAGTPEERAQVEAARQNFYNNRFKVKACGDLLWRFQILREKNFKQSIPSVKIEDGEEITYEKVISTLRRAAHHLSALQTSDGHWPAQIAGPLFFLPPLVFCMYITGHLDLVFPEEYRKEILRYIYYHQNEDGGWGLHIEGHSTMFGTTLNYICMRILGEGPNGGHENACARGKKWIHDHGGVTHIPSWGKTWLSILGVFDWCGSNPMPPEFWIIPSFLPMHPXFVGPITPLILQLREELFTQPYEKVNWKKVRHQCAKEDLYYPHSLIQDLVWDSLYMFTEPLLTCWPFNKLIREKALQVTMNHIHYEDENSRYITIGCVEKVLCMLACWVEDPQGDAFKKHLARVSDYLWVSEDGMTMQSFGSQEWDAGFAVQALLATKLIDEIGHSLAKGHDFIKKSQVRDNPSGDFKSMYRHITKGSWTFSDQDHGWQVSDCTAEGLKCCLLLSKLSPEIVGEKVKPERFYDSVNILLSLQSKKGGIAAWEPIGAQEWLELLNPTEFFEDIVIEHEYVECTGSAIQALVLFQKLYPEHRKTEIKNFIVNAVQFLEDTQTTNGSWYGCWGVCYTYGSWFALGGLAAAGKTYTNCNAIRKAVKFLLTTQREDGGWGESYLSSPKKIYIPLEGSRSNVVQTAWALMGLIYAGQSERDLTPLHQAAKLLINSQLEEGDWPQQEITGVFLKNCMMHYPMYRNIFPMWALAEYRRRVPLPSTEG

SEQ ID NO: 147504 - protein, 175 aa, Glycine max
  Clone ID: PAT_MRT3847_104214C.1.pep
MSAYKDQDPRLHGIKTKIRVVPNFPKSGLMFLDITTLLLDPKAFKDSIDLFVERYKGKNISVVAGIEARGFIFGPPIALAIGAKFVPLRKPKKLPGKVISQEYILEYGRDCLEMHVGAVDDLIATGGTLCAAMDLLERVGAEVVECACVIELPELKGRERLNGKPLCVLVEYVDI

SEQ ID NO: 147505 - protein, 282 aa, Glycine max
  Clone ID: PAT_MRT3847_104215C.1.pep
IRLGKKKRFIVDISSGTMKFEDLAEGCMAKILSYTTRADVCRLSLVSKAFHSAAEANTVWDCFLPSDLSSIISPSSSVPPFRSIKDLYLYLSDRPTIIDQGIKSFQLEKRTGNKCYMLSARDLSIIWGDTTHYWEWTTLPESRFEEVARLRAVCWFDITGRMNTRVLSPNTNYAAFLVFKMIDAGGFHYDPAVLSVGILGGNSSTKNVCLDPNLVDNRLDDRFHGLQRPTVRSDGWLEIEMGEFFNPGLEEDELQIKVSETTSNWWKRGFILEGIEVRPKHV

SEQ ID NO: 147506 - protein, 51 aa, Glycine max
  Clone ID: PAT_MRT3847_104216C.1.pep
CHGSNNNSLLIYIPIGGYGTLEELLEIITWAQLGIHDKPVRFRKPKNSLSF

SEQ ID NO: 147507 - protein, 42 aa, Glycine max
  Clone ID: PAT_MRT3847_104217C.1.pep
GSIKKKQIFYNHEKKKTQLLPTGNLGQALLSQLKPSSNSSNF

SEQ ID NO: 147508 - protein, 101 aa, Glycine max
  Clone ID: PAT_MRT3847_104218C.1.pep
MSTSKSVSGSSEADNQLGRGPWTVGDDHLLYQYIVKDGGGRSIMLSKHTRLKRTGTSSRSWRLNFLMPAMKRSNLTPQEQLIILELHSKLGNRFLSWALHS

SEQ ID NO: 147509 - protein, 79 aa, Glycine max
  Clone ID: PAT_MRT3847_104219C.1.pep
LLSRGHATFETHALAADIRCFSFARESSDRSLNQTVFGVIESREVRPGLRLVVQDLLDLLEHLRCKLGQDVKGLQVDDN

SEQ ID NO: 147510 - protein, 83 aa, Glycine max
  Clone ID: PAT_MRT3847_10421C.1.pep
CSLLYGAEDPSIVGMMLDSAFSNLYDLMMEPVDVYKIWLPKFTVIPLSLTFSLWMPTPFVVNAHSKEEKKDCVWFLPNNHVVI

SEQ ID NO: 147511 - protein, 112 aa, Glycine max
  Clone ID: PAT_MRT3847_104220C.1.pep
QRASRSTIADARYPPSRNDLPGHLYCLDHGFEPDGHIPRDQTIAGSDDAYSTCFNHTAAGEHLPLTRLEDLEPTVIDEVSTETNRQACHPYHLILRKENAHNSYFLRHYTIR

SEQ ID NO: 147512 - protein, 53 aa, Glycine max
  Clone ID: PAT_MRT3847_104221C.1.pep
NKEPKESGEEHTSWPFVFTGSKIVQPQNSLKKMKNILLPVKATNKAYQCWIQP

SEQ ID NO: 147513 - protein, 49 aa, Glycine max
  Clone ID: PAT_MRT3847_104222C.1.pep
WCCLTSIQTTYYTSCYKVFLIKRIIESHLYKGLLVIINLKLGVCKGWTL

SEQ ID NO: 147514 - protein, 65 aa, Glycine max
  Clone ID: PAT_MRT3847_104223C.1.pep
RESDNLVWSWKYIKAQDMITSNLWINFFFFLYFLQLYPISVKVENLDHLHLFKIHLLNYLLLFPH

SEQ ID NO: 147515 - protein, 43 aa, Glycine max
  Clone ID: PAT_MRT3847_104224C.1.pep
LLPTYKYVMQAKAICYRFSVKVRTSSAYVNLIPNCGRRFGLLL

SEQ ID NO: 147516 - protein, 55 aa, Glycine max
  Clone ID: PAT_MRT3847_104225C.1.pep
HHPQRRHKVITRVVVFLGSAVELGMILCNHESSTVVLHVRGPLENDITNAFLSVL

SEQ ID NO: 147517 - protein, 42 aa, Glycine max
  Clone ID: PAT_MRT3847_104226C.1.pep
VLHNLLFSVKISVVLQVLLISQTIICKYFSVLLNVLLDFCCL

SEQ ID NO: 147518 - protein, 63 aa, Glycine max
  Clone ID: PAT_MRT3847_104227C.1.pep
RLLLEMLTSMLFRGDLSSTLELEAKQTRQVNTSNPQVKELSKWLEVVMALACNIFSILNVLGP

SEQ ID NO: 147519 - protein, 125 aa, Glycine max
  Clone ID: PAT_MRT3847_104228C.1.pep
KKSSSKPSYPLHLEEPFPIIWQQAFRTSGTFHLPTNLNLCDYFFGPDIPTGMGFSQLPNLSSRGSQPLQLLRKGWLRICHSFQCEKQNNKKKKNTGFESVDKTSNIVNANGEGGHVLKTVFQILS

SEQ ID NO: 147520 - protein, 119 aa, Glycine max
  unsure (1)..(119): unsure at all Xaa locations
  Clone ID: PAT_MRT3847_104229C.1.pep
PKQIHSVVVSYNNNSMNKLVLACVLLIAFTYGAYGTSSIKFVNNCSAGVNVYSTTNNQASVSVCGTIAHGGSCVKSYASGAINFKXGPAGKTLFEISPNSWNNLDFYDLSVIVGFDSTM

SEQ ID NO: 147521 - protein, 128 aa, Glycine max
  unsure (1)..(128): unsure at all Xaa locations
  Clone ID: PAT_MRT3847_10422C.1.pep
MTGKYEKLSQAQSAFEHLKAALSSAPVLTLPNFQFPFTVETDASDVGMGAVLSXCGHPIAYFNKPFSPKLLRASTYIRELFTITAAIKKWNQYLLGQRFTILTDHRSLKELLTQVIQTSEQHMYLARL

SEQ ID NO: 147522 - protein, 53 aa, Glycine max
  Clone ID: PAT_MRT3847_104230C.1.pep
IRFHLLVEFDDGKRSCRRRLAGHNERRRKPQFDYMTGKQHKILQSYQGMKNAF

SEQ ID NO: 147523 - protein, 77 aa, Glycine max
  Clone ID: PAT_MRT3847_104231C.1.pep
KFGLWYIAFGGFLNPEMKRTCSLRIPCLGNFVNFGRKLVTRNKNCFSPSKGKFNLPFVFCEKQNYGLNLLNKSCLLM

SEQ ID NO: 147524 - protein, 30 aa, Glycine max
  Clone ID: PAT_MRT3847_104232C.1.pep
VIYEKKKKKEADDMQALYMIQAYLHVHATL

SEQ ID NO: 147525 - protein, 89 aa, Glycine max
  Clone ID: PAT_MRT3847_104233C.1.pep
MGRSPPPFSDIGKKARDLLTKDYNFDHKFTLLLPNSDGMGLTATGLKRDQIFIGDIKTLYKSGKTTGDVKIDTDSNVSTKMTVTDILPT

SEQ ID NO: 147526 - protein, 95 aa, Glycine max
  Clone ID: PAT_MRT3847_104234C.1.pep
MKTSYATLCIMLTLLLLGQSELLCMAAVTCNALQLSACASAITSSTPPSALCCSKLKEQRPCLCQYLKDPNLKKLVNSPNARMVANACGSPFPTC

SEQ ID NO: 147527 - protein, 170 aa, Glycine max
  Clone ID: PAT_MRT3847_104235C.1.pep
VSEGQFSQVLLYEMDAIRRACASLQEDYMPRVTFVVVQKRHHTRLFPAEHGSRDQTDKSGNILPGTVVDTQICHPREFDFYLNSHAGIQGTSRPTHYHVLFDENNFTADELQMLTNNLTYTYARCTRSVSIVPPAYYAHLAAFRARYYMEGETSDSGSASGGRTANFEAG

SEQ ID NO: 147528 - protein, 125 aa, Glycine max
  Clone ID: PAT_MRT3847_104236C.1.pep
RLSVPSTPSSSPPPSSPTGSSSSPPSLLAPPSSLSPSPAVTSPSPTWTSSSTVSPSRLPSSPPGTSRTACSSSPPTTRSPRSSRSSLSPRRAATRPSRSSLLVTCATAVSSSVSRWRVHDEKLLF

SEQ ID NO: 147529 - protein, 62 aa, Glycine max
  unsure (1)..(62): unsure at all Xaa locations
  Clone ID: PAT_MRT3847_104237C.1.pep
ICXMSIAHENTVFRGIVSCXEHLSLGSMLCTSMMGLILTSSCQFNGFKIQNYLSSHQIFTVI

SEQ ID NO: 147530 - protein, 75 aa, Glycine max
  unsure (1)..(75): unsure at all Xaa locations
  Clone ID: PAT_MRT3847_104238C.1.pep
SISWPGDTTVNRAGAGMDAPFTGLKSMAGLPTRXTYNDITSIGCNCXRVQCMQVWPPIGXKKYETLSYLPDLDDA

SEQ ID NO: 147531 - protein, 94 aa, Glycine max
  Clone ID: PAT_MRT3847_104239C.1.pep
LEDKFKSNNLEREQEQLDRIVKESGGKLTRRLVNSQCEFERRKPDGTTTLGLLHPVDPIVGEPGYCPVRLGMTTGRLQSGVNTLQGFKEDKRNK

SEQ ID NO: 147532 - protein, 31 aa, Glycine max
  Clone ID: PAT_MRT3847_10423C.1.pep
KPMKESLSGYKNKTLKEAIHRITKISSNYRI

SEQ ID NO: 147533 - protein, 116 aa, Glycine max
  unsure (1)..(116): unsure at all Xaa locations
  Clone ID: PAT_MRT3847_104240C.1.pep
RRPYVESSCSKEKLNALVDKCKDRTSLTYMAVNXDGSWKSNVGQTDVNAVTWGVFPAKXIIQPTIVDPVSFNVWKDEAFEIWSRGCITLRXTSYFLVSLVDNDYINGDLFTVFADF

SEQ ID NO: 147534 - protein, 56 aa, Glycine max
  Clone ID: PAT_MRT3847_104241C.1.pep
LNYEWNLLSFISLIKAVFEYYVINIPLNKKFVINIYVEPKLLQVDSRGSPGTELEF

SEQ ID NO: 147535 - protein, 595 aa, Glycine max
  unsure (1)..(595): unsure at all Xaa locations
  Clone ID: PAT_MRT3847_104242C.1.pep
MKIIEKIRAASADPNRVVFSFEFFPPKTEDGVDNLFERMDRMVAHNPXFCDITWGAGGTTADLTLEIANKMQNIVCVETMMHLTCTNMPVEKIDHALHTIKSNGLQNVLALRGDPPHGQDKFVQVEGGFACARDLVQHIRAKYGDYFGITIAGYPEAHPDVIESDGLATPEGYQNDLAYLKSKVDAGADLIVTQLFYDTDIFLKFVNDCRQIGITCPIVPGIMPINNYKGFIRMTGFCKTKIPADIMAALEPIKDNEEAVKAYGIHLGTEMCKKILAHGINTLHLYTLNMEKSALAILMNLGLIEETKVSRSLPWRRPANVFRVKEDVRPIFWANRPKSYISRTIGWDQYPHGRWGDSCNPSYGALSDYQFMRPRARDKKLVEEWAVPLKSIEDIYERFRLYCLGKLRSNPWSELDGLQPETKIINELLEKINTKGFLTINSQPAVNGEKSDSPTVGWGGPGGYVYQKAYVEFFCSKEKLDALVDKCKDRTSLTYMAVNKDGSWKSNVGQTDVNAVTWGVFPAKEIIQPTIVDPVSFNVWKDEAFEIWSRGWASLYPEGDASRKLVEEVGGSYFLVSLVDNDYINGDLFTVFADF

SEQ ID NO: 147536 - protein, 99 aa, Glycine max
  Clone ID: PAT_MRT3847_104243C.1.pep
MEKYFGNAYRGDPGVPHSDPDRFVNIWVGSAAFAVLTYFNPYMWQLSNQFNWHDKAMLYEQYHWKQARKKNQPYEFMWNKTWDKNHREHYYYNWPIYFP

SEQ ID NO: 147537 - protein, 50 aa, Glycine max
  Clone ID: PAT_MRT3847_104244C.1.pep
LSRPILSPHRARQRTLGSWVLSSYERSRASIISAFKRHRPNSLVAPFIKV

SEQ ID NO: 147538 - protein, 125 aa, Glycine max
  unsure (1)..(125): unsure at all Xaa locations
  Clone ID: PAT_MRT3847_104245C.1.pep
LXXLLXPPXWPPFARVLLGFAXXLFXLXXGVXXXLVAXXXXXRRXRXXLVLXXGXXLVXLLXLVVGPPPXVLAVXXLVXXXALXXLGGSXXLCXALLXAPAPXXXGXCXGXGXRPCFCPGXVLRG

SEQ ID NO: 147539 - protein, 273 aa, Glycine max
  unsure (1)..(273): unsure at all Xaa locations
  Clone ID: PAT_MRT3847_104246C.1.pep
RKGPYNQSKVAFQMGVIGQQLDIDFVISTGDNFYHSGLTGIDDPVFDSASSLQKQWLCVLGNQDLHXLLACKSKGSVFKDTQDIGVMLRHNXSCPHKSFFFVDTTPFVDKYFIEPKDHVYDWSGILPRKQYISNLLKDVDLALQQSNAKWKIVVGHHTIRSAGVHGNTDELVKQLLPILEANNIDLYINGHDHCLQHISSFDSAIQFLTCGGGSKAWRGVVNWWKPEEMKFYYDGQGVMSVKVTETEIDIVFYDVYGHVLHKWNTSKQLHASW

SEQ ID NO: 147540 - protein, 104 aa, Glycine max
  unsure (1)..(104): unsure at all Xaa locations
  Clone ID: PAT_MRT3847_104247C.1.pep
SFXPGGPFFLLPHSSASPFASPTRGGCASPARATASPSFECASSILPRGSALLFFIKVRSIVPFLVXXCFHCCFQKKHSVGSNKKKLLTPCIEMGTVQRMMXXN

SEQ ID NO: 147541 - protein, 56 aa, Glycine max
  Clone ID: PAT_MRT3847_104248C.1.pep
PEAALLLNLGRNSRLPRTFSLYLHKEDLSWYKSFGDVSDTAANMTVPSPRVTMAPK

SEQ ID NO: 147542 - protein, 56 aa, Glycine max
  unsure (1)..(56): unsure at all Xaa locations
  Clone ID: PAT_MRT3847_104249C.1.pep
FHRKFLQDDSSMLKIKTIXKFHLISHTKRKDQHYYPSTDYEKPSPIKAPQMYIRLL

SEQ ID NO: 147543 - protein, 96 aa, Glycine max
  Clone ID: PAT_MRT3847_10424C.1.pep
TETRAELEPFVEFRVLYYMDARSACRSSIRRSDTEMQHLIKLLERDQYIYWHRLKDKDVVRDIFWCHPDTVKLVNACNLVFFIDSTYKTNRYKLPL

SEQ ID NO: 147544 - protein, 55 aa, Glycine max
  Clone ID: PAT_MRT3847_104250C.1.pep
TLSSLLYILDYGYDLTFTGSLGFFYYSCADQCDYWASSNHCNYHIYELTCRYSHS

SEQ ID NO: 147545 - protein, 72 aa, Glycine max
  unsure (1)..(72): unsure at all Xaa locations
  Clone ID: PAT_MRT3847_104251C.1.pep
GMLXRGNVLPLFHKSPWPEKMSPTGTLQNFPFVFVCSLIFQLTMQVVRTRGQRPRTQEAPAGRSVAVPHPWP

SEQ ID NO: 147546 - protein, 72 aa, Glycine max
  Clone ID: PAT_MRT3847_104252C.1.pep
QVKTNHNSRSSNSKNRALRGSGFKRRGIFRGKERVVVEQQELSSFLAYLTRKVRKILNTLTAVTCRLNPLLK

SEQ ID NO: 147547 - protein, 79 aa, Glycine max
  Clone ID: PAT_MRT3847_104253C.1.pep
FAASAVDVRHSSVCTAAGDGNSTCSSVLLLFELFLSVTVITCAFRECSYVNVNASCNRLLVCFDISRCYAVYCCIVRRR

SEQ ID NO: 147548 - protein, 101 aa, Glycine max
  unsure (1)..(101): unsure at all Xaa locations
  Clone ID: PAT_MRT3847_104254C.1.pep
RRGTMVFMHKNVFYVNSATSVEGIIGQFLDLLCSTLDTFTAFLVRSAFLHLISATKALAYGYWKLAXATFFEGIITLLPTVGAYQFAFKINSNWYDPSYYS

SEQ ID NO: 147549 - protein, 105 aa, Glycine max
  unsure (1)..(105): unsure at all Xaa locations
  Clone ID: PAT_MRT3847_104255C.1.pep
XXXSXXXMLXXGXEPXDXVXXXXKXXXCAXXXXXPGXLAXXXXEXEHIVXXXLXCYPXXSXRGKHXXXLXXXXXXXXRXXKXXXPPXVVFXXXXRAEFRAYVRVX

SEQ ID NO: 147550 - protein, 77 aa, Glycine max
  Clone ID: PAT_MRT3847_104256C.1.pep
LFFFFFFFLVWGFFFFFFFFFEKKKSKFFSQKNRLVCIKNANNFHPLNPREPWLAFKPIRLRDLILNLAKFSKTFPN

SEQ ID NO: 147551 - protein, 135 aa, Glycine max
  unsure (1)..(135): unsure at all Xaa locations
  Clone ID: PAT_MRT3847_104257C.1.pep
TPPGGPPGISAPAPGGDPVFPMGGPIKPGRNPGQSFSPGKIVFPSKFPPKYNPEPXGKTPGPPKGGPPPFIGVPPPAPFPAGNPVGPLFLKNPPPPGEGRFVFCPPGCFFFSPGKRPPVGSPSPPAPKKIQKAPP

SEQ ID NO: 147552 - protein, 79 aa, Glycine max
  unsure (1)..(79): unsure at all Xaa locations
  Clone ID: PAT_MRT3847_104258C.1.pep
LIPNYSYLNETLFDIDCVPRIGGYLTEEERIVAAINGRAPRSARLMLDGKHIDGYIXRSGLVANLKPSKVYHLAGSVFG

SEQ ID NO: 147553 - protein, 54 aa, Glycine max
  Clone ID: PAT_MRT3847_104259C.1.pep
TVTGSVSFPVAASAIAPRLPQVGWQHERCHIASRFRRGLPCMSSTTAAVAKGSV

SEQ ID NO: 147554 - protein, 60 aa, Glycine max
  Clone ID: PAT_MRT3847_10425C.1.pep
AGQFSLSTVQDHSIENREFIPSQLFGQSQFNSNIRDGSGGGLASRQSLFAPATGAYACAI

SEQ ID NO: 147555 - protein, 33 aa, Glycine max
  Clone ID: PAT_MRT3847_104260C.1.pep
LKCMVIRLFNPNHIGASLEYVLNRVPLRDSCVP

SEQ ID NO: 147556 - protein, 136 aa, Glycine max
  unsure (1)..(136): unsure at all Xaa locations
  Clone ID: PAT_MRT3847_104261C.1.pep
PFPPGYRDPPPGVSIREGLPYNPXFPGGAIPLHELVNYGAVXYEHGTPVSEAEMGKHAVSFLAWAAEPKMEERKLMGFQGIFDLSVAKLQAAYYPGLRWSVIKSRNQGSLCCQLGSLLVSFSLEQSSLLANNWSDE

SEQ ID NO: 147557 - protein, 223 aa, Glycine max
  Clone ID: PAT_MRT3847_104262C.1.pep
ETVKLESKAEKPSEETHINEPDKKTVIVESEAKKPSEETHINEPVKETVIVEAGKPSEETHINEPAKETVIVESEAQKPLEETHINEPAKKTVKPDSEAEKPSEVNNESSKPLNEEFVQAMEILSEETQSNGLIKLKEVPIEPSEEGKPSGESERNASETEKPETSIVTEVAPMPEERVIEEIPTDAKSVEKVTKEAASSTEETSHNGVENAPKVVDAGTEIH

SEQ ID NO: 147558 - protein, 52 aa, Glycine max
  Clone ID: PAT_MRT3847_104263C.1.pep
VVIFKHGFHGVGRVNVRCHQQHISSHMLFRTAIRAISPPKGKSITALFVMLG

SEQ ID NO: 147559 - protein, 124 aa, Glycine max
  unsure (1)..(124): unsure at all Xaa locations
  Clone ID: PAT_MRT3847_104264C.1.pep
LPDLYLHSPEEAGQLRRKALSRMEWLQKAAVPTIAQFEEFHSMQRRMHAPDSNDNIDLLLCTDTSXLTXAGEAIANNXVFDDKLALANTQXEDCDGNYPDHTWIPMFVTRVLPVSQSPSEARLV

SEQ ID NO: 147560 - protein, 66 aa, Glycine max
  unsure (1)..(66): unsure at all Xaa locations
  Clone ID: PAT_MRT3847_104265C.1.pep
IPSSSLSFAWSTFLILPPMALHDLPFTPMNTIALCMILRAPLSTPXHSALTXTCHKLNPTYYNCPS

SEQ ID NO: 147561 - protein, 56 aa, Glycine max
  Clone ID: PAT_MRT3847_104266C.1.pep
FLIRETVEAKDFPIMVYLKLCASAYYDTVILYSVFRVVKMDRARLVISYSLEGSSP

SEQ ID NO: 147562 - protein, 132 aa, Glycine max
  unsure (1)..(132): unsure at all Xaa locations
  Clone ID: PAT_MRT3847_104267C.1.pep
PGELGTQGFEELKMGFECMGGTIPYNDPLQEHDGIYAIKYAFTNVITLFDTADVYGANANVLLVGKAXKQLPRKKIQIATKFVITSRGFSDMKIKGYTVYVPSCLXASLKRLNVEYIDLYYHHRLDTSVPIE

SEQ ID NO: 147563 - protein, 41 aa, Glycine max
  Clone ID: PAT_MRT3847_104268C.1.pep
FCQHVGSKGGLMGMKTALRIAGDEKNTFYDPNQGLGECCHK

SEQ ID NO: 147564 - protein, 116 aa, Glycine max
  Clone ID: PAT_MRT3847_104269C.1.pep
MRQSFDPSSLGPSKIPSIKIPGKAGNGAWEALSGSDSYHASSDASLFSSSLPVRPHEKLNLNETANGYQSIDDISSGFKKLHQDADGNGSLEDGDTHAIGPALPDDEEELLAGVTG

SEQ ID NO: 147565 - protein, 60 aa, Glycine max
  Clone ID: PAT_MRT3847_10426C.1.pep
ESATSAFKYWWGFLVKGTISAEFYFVVFNAPYGSLDNYGICNLVVLQEPLVILVSKGCYP

SEQ ID NO: 147566 - protein, 452 aa, Glycine max
  unsure (1)..(452): unsure at all Xaa locations
  Clone ID: PAT_MRT3847_104270C.1.pep
MKTEGPGETLVLTGSGERVLAPKMSKLIFVFLALIPLLCTSFSXEKPSDRRILVLLDDFAIKSSHSLFFNSLKSRGFDLQFHLAXDPKIALQRYGQYLYDALILFSPTIERFGGSIDAAAILDFVDSGHDLIVAADSNASDLIREIATECGVDFDEDPAAVVVDHSAYAVXDHTLIASDDFIKXDVIFGSKKIEAPVLFQGIGHSLNPTNSLVLKVLSASPSAFSANPKSKVTSPPSLTGTSISLVSIIQARNNARILISGSLSLFSNRFFRSGVQKAGSPTKHEKSGNEQFLNELSKWIFHERGHLKAVNVQHHKVGEANEPAIYRINDNLEYSVEVYEWSGTAWEPYVADDVQVQFYMMSPYVLKTLSTDGKGRYFTSFKVPDVYGVFQFKVEYEKLGYTSLSLSKQIPVRPFRHNEYERFIPAAYPYYGASFSMMVGFFIFTAVHLYSK

SEQ ID NO: 147567 - protein, 55 aa, Glycine max
  Clone ID: PAT_MRT3847_104271C.1.pep
YVLKLKLKKNGRILSHFSKNIQFEIFVSTIIYLYYYFRSLLLLLNIFHNDINNFA

SEQ ID NO: 147568 - protein, 52 aa, Glycine max
  Clone ID: PAT_MRT3847_104272C.1.pep
GRKQPKGGSPPGPLNNPNPIFYKARIHSRAKSTLTQKFYKTQPLYAPKHHIP

SEQ ID NO: 147569 - protein, 67 aa, Glycine max
  Clone ID: PAT_MRT3847_104273C.1.pep
MSELHDHVTTAFDPFADANADDSTAESKEYVHIRVQNPNGRKSLTTGQGLQKEFSYDTILLDVKKEF

SEQ ID NO: 147570 - protein, 156 aa, Glycine max
  unsure (1)..(156): unsure at all Xaa locations
  Clone ID: PAT_MRT3847_104274C.1.pep
XXLXXXXPSXLXSXXLXXXSXXXXXLXLXPLPXXLXGXHXXXXXSXXXXXXXPXXXTVSXXXXXXHIPTPSXXXHXXXITXPPXXTIXQXQXXXLTXHSXSXYXXXXXXXYTXXXRXTXRXXDSRXXXAHAXXXXXXXLDALYXXXSLSXHSRXRX

SEQ ID NO: 147571 - protein, 97 aa, Glycine max
  unsure (1)..(97): unsure at all Xaa locations
  Clone ID: PAT_MRT3847_104275C.1.pep
MLPVSQSPKPNQKKMETLVPKFFLLFLFXYLFGYFIIFRKWSPKIRPEASSCFIFIFHGTPATLLAAAAILSAADRGFAAENTKFQSLVLDFSVAYF

SEQ ID NO: 147572 - protein, 115 aa, Glycine max
  Clone ID: PAT_MRT3847_104276C.1.pep
MAGNSSNSVKEENMEDIERHQIEMDEGEFSDGLPYKPSLMDQSTNNQQSEDFFAELGEIEADPLDLLFTQGFGGADDQRESKALDPFHLFDWSGDNNTNTNTSSSFEEPNNKRRL

SEQ ID NO: 147573 - protein, 70 aa, Glycine max
  Clone ID: PAT_MRT3847_104277C.1.pep
KGLTNQSFQRFERVSIYKMNRVEANTPRAFKRKLGEPNPKALHKVYFSKGKNSPRSDFFWRFNIYKWRLE

SEQ ID NO: 147574 - protein, 52 aa, Glycine max
  Clone ID: PAT_MRT3847_104278C.1.pep
QWINREIHSHTHNTKRNWTVSALLHRQAFSTTSLGHLSYQFALKNIKSTVVL

SEQ ID NO: 147575 - protein, 95 aa, Glycine max
  Clone ID: PAT_MRT3847_104279C.1.pep
VTHRDKFIIEMIANVVMLIRLDKNANKILFLNVNVNNLLLDENVNIFYWRKMLVIFFGSKRQYIPFDQNVNKLSLLEENFSYFLLDLNINMFLLD

SEQ ID NO: 147576 - protein, 81 aa, Glycine max
  Clone ID: PAT_MRT3847_10427C.1.pep
KKQVFGTGSGGGETSPHGKTKQSFERIKYISPHKRGLDPNIRRGNKSGLGGYIPLSGEIPKRQKGPQKNKQNPHISAAPAF

SEQ ID NO: 147577 - protein, 28 aa, Glycine max
  unsure (1)..(28): unsure at all Xaa locations
  Clone ID: PAT_MRT3847_104280C.1.pep
DFXYSXXXSLSSVXSIGEPLQPNYIARH

SEQ ID NO: 147578 - protein, 128 aa, Glycine max
  Clone ID: PAT_MRT3847_104281C.1.pep
IETAGAMVLIKNTACVVLVFLSAAWLSTARMNPKSVAVSEISYIKATIAFSVPKSTTVKSLAAIDEGNLNKLSEKLLMSKSGKVISAPNIKAKRNNARSCLSDEVNGDPLAFTADYRRPVHHPPKNNK

SEQ ID NO: 147579 - protein, 101 aa, Glycine max
  Clone ID: PAT_MRT3847_104282C.1.pep
SVPLCVFFLLSCFSLSSFWFVLLSFSFLASLRLGALSLSSLAGATGGGCSVASAGLPCSGAWSGSGFPGVVLRALCLVAVLMLGLWCFSYGCFARSRLLVP

SEQ ID NO: 147580 - protein, 82 aa, Glycine max
  Clone ID: PAT_MRT3847_104283C.1.pep
AGSRSKGSSIMSHKFNSMSPPFMTSKLRSLCHIIYIIRLAKNLPFAILITMQQSLISRPSEQLYRLNGIAHPTCYEALIANG

SEQ ID NO: 147581 - protein, 80 aa, Glycine max
  Clone ID: PAT_MRT3847_104284C.1.pep
FLPTTIFPGPIKIVFQNVGPRQNQQKLSRAWVFWFGSLHWFNKCWGGGWINIAPCLFIRPGIRILLRGVLLLLLGASHHP

SEQ ID NO: 147582 - protein, 64 aa, Glycine max
  Clone ID: PAT_MRT3847_104285C.1.pep
FKSRPTVDDSETSTFYQIQNTPEPILVNSAKWIIGYLVTVMRSSTRTYSISTLEGTRVCNSLNG

SEQ ID NO: 147583 - protein, 165 aa, Glycine max
  unsure (1)..(165): unsure at all Xaa locations
  Clone ID: PAT_MRT3847_104286C.1.pep
GRARGVLKSQQPVRNEGCPPKNPPQEGGSVFQRTGVLCPVYSSPPPPWGEPPFWRGLHVAPPLLLFVLGGFGPWPGFLKGPVGFPPPAPPGLVRGPLPPPPSFLPLGPGGPPPHVGVXSPPIPGPPPGGAPAQNFPGGSPPKGPGPPPPKGAVFFSPTAPPLLFF

SEQ ID NO: 147584 - protein, 87 aa, Glycine max
  Clone ID: PAT_MRT3847_104287C.1.pep
FSSLSTLSLPKTFFFLLAADQPRHSPATPFSFSICSFLQIARYFLCFIVKRIVWWLSRGFDLDNKRRLRFSAGRSGWYVLSVNAART

SEQ ID NO: 147585 - protein, 134 aa, Glycine max
  Clone ID: PAT_MRT3847_104288C.1.pep
MLQRAYVGMQCFWGVESSFASMAGVLHTRVGYAGGTSPAPTYANIGDHTEVTELQFDPSCCSYELILDWFFDHHDPTQRHKKQYASAILWVDESQHQTAEKAMEKANAKYGGRVQTYLKKLDQFHQAEDYHQKY

SEQ ID NO: 147586 - protein, 71 aa, Glycine max
  unsure (1)..(71): unsure at all Xaa locations
  Clone ID: PAT_MRT3847_104289C.1.pep
ILHACDIPWYKHTEKLPLRMKXTGFGARSLGVKXCPAFKLAVEAHIIRSFNTIPGECVEPTKDYINGEQLI

SEQ ID NO: 147587 - protein, 80 aa, Glycine max
  unsure (1)..(80): unsure at all Xaa locations
  Clone ID: PAT_MRT3847_10428C.1.pep
MSWQLEGWKKEHNQARLTQQHQLLLATVKFXHXWIXXXEGIDGDSMLCGSSSQSNHLGIRQIEQRDDSRRPIMVAGPWXL

SEQ ID NO: 147588 - protein, 49 aa, Glycine max
  Clone ID: PAT_MRT3847_104290C.1.pep
FNKGSSMRAVDAPKSKIIFRLALSTPMLMTPLIFINCFSSPLQSSSHNC

SEQ ID NO: 147589 - protein, 53 aa, Glycine max
  Clone ID: PAT_MRT3847_104291C.1.pep
FFLLKSITGLKYKLTFLKGNFSKRKRLCFDQLKYFYNAKATKIPGAVKIYPPK

SEQ ID NO: 147590 - protein, 77 aa, Glycine max
  Clone ID: PAT_MRT3847_104292C.1.pep
CSPFLSADPYFPRFPPISLVSPSFKLARSPERLFPSRDRSRVARSPPPFLGRDFFPCILGSGFVPPPFQLASKKTYT

SEQ ID NO: 147591 - protein, 66 aa, Glycine max
  Clone ID: PAT_MRT3847_104293C.1.pep
RELGRKHMEGKPYTEEDFREIHYYTKFFLFMLIFPPSRSSVVGKLLAGCGFIKTTFSNKDSDFTTV

SEQ ID NO: 147592 - protein, 523 aa, Glycine max
  Clone ID: PAT_MRT3847_104294C.1.pep
MCTMKPTLRFILVLLTLLLVLRFNVASEVEDELEELLAVDEEVEQEAEKGGEKLSEAEVLSKAQRIVIELNNDNTERVVNGNEFVLVLGYAPWCPRSAELMPHFAEAATSLKELGSPLVLAKLDADRYSKPASFLGVKGFPTLLLFVNGTSQPYSGGFAADDIVIWAQKKTSTPVIRIGSVTEAEKFLRKYQTFLIGRFDKFEGPDYEEFVSAAQSDNEIHCVETNQVELAQVLYPDIKPTDQFLGIVKSEPERYTAYDGAFTMNKILEFVDYNKFPLVTKLTEMNSIRVYSSPIKLQVLVFANIDDFKNLLETLQDVAKTFKSKIMFIYVDINDENLAKPFLTLFGLEESKNTVVAAFDNAMSSKYLLETKPTQSNIEEFCNNLVQGSLSPYFKSQPIPDNTESSVHVIVGKTFDDEILSSEKDVLLEVFTPWCINCEATSKQVEKLAKHYKGSSNLIFARIDASANEHPKLQVNDYPTLLLYRADDKANPIKLSTKSSLKELAASINKYVKVKNQVVKDEL

SEQ ID NO: 147593 - protein, 81 aa, Glycine max
  Clone ID: PAT_MRT3847_104295C.1.pep
TGRISCCLERSAKDSANMLVYLDLLTGDEHLYDSFRSRKLRMECCGKMTGCGLVMEQVMIHWWNPSAQGEGEDELADDATC

SEQ ID NO: 147594 - protein, 49 aa, Glycine max
  Clone ID: PAT_MRT3847_104296C.1.pep
RVRLCLIFQVNDYPTLLLYRADDKANPVITSQDSNFGDRNSVYVITTLL

SEQ ID NO: 147595 - protein, 433 aa, Glycine max
  Clone ID: PAT_MRT3847_104297C.1.pep
MKISDENSSKPINPTSFQGGIECVGNRKMGQNRRALSVINQDLVAEGRPYPCVVNKRALAEKHNVCEKKQADPGHRPITRRFAAQIASTQKNRAEGTKKSNLGNSNSNGFGEHIFVDEEHKSTTDDQPVPMSLEKTEPMHSESDQMEEVEMEDIIEEETVLDIDTCDANNPLAVVDYIEDLYAHYRKLEGTSCVSSDYMAQQSDINERMRAILIDWLIEVHDKFDLLHETLFLTVNLIDRFLAKQTVARKKLQLVGLVAMLLACKYEEVSVPVVGDLILISDKAYTRKEVLEMEKLMVNTLQFNMSVPTAYVFMKRFLKAAQADRKLELLAFFLVELSLVEYEMLKFPPSLLAAAAVYTAQCTIYGFKQWSKTCEWHSNYSEDQLLECSTLMAAFHQKAGNGKLTGVHRKYCSSKFSYTAKCEPARFLLENPL

SEQ ID NO: 147596 - protein, 119 aa, Glycine max
  Clone ID: PAT_MRT3847_104298C.1.pep
FAFRRFAAQIASTQKNRAEGTKKSNLGNSNSNGFGEHIFVDEEHKSTTDDQPVPMSLEKTEPMHSESDQMEEVEMEDIIEEETVLDIDTCDANNPLAVVDYIEDLYAHYRKLELSEYCI

SEQ ID NO: 147597 - protein, 80 aa, Glycine max
  unsure (1)..(80): unsure at all Xaa locations
  Clone ID: PAT_MRT3847_104299C.1.pep
LFWRGXPKXRXPXXXXXPXPYXXLPEGDLLGXGXHHGXPFPLLXLMGXXXRPSQTKDGDEXQPXKXLLPXFXSXMSFALC

SEQ ID NO: 147598 - protein, 171 aa, Glycine max
  Clone ID: PAT_MRT3847_10429C.1.pep
MSGRGGGRDRFRRDYPSRHEDNRGNGISGRDNRNSNSNNPPSRHLWVGNLSHNIVEEELAHHFLRYGPLENVAFQPGRSYAFINFRMDEDAIDALRALQGFPLAGNPLRIEFAKAISVAHLLLLVTFPADYMNLPQKFNSVQFYLFNPGHSIGFEIDQHNLHRKKMMEYYT

SEQ ID NO: 147599 - protein, 179 aa, Glycine max
  Clone ID: PAT_MRT3847_1042C.1.pep
MLVANSFDLWRKDAFFSAAEEVQESADIMESAYRAWLREKRERSTPEELNELCRELQTALGTAKWQLEEFDKAVRLSYRPHSDDNTSTRHRQFISAIESQITQVEAALRESYIEEGKQPLRWVNLDEEERDDLAAFLSGTCQTTQSTNDEYMEVKQAKKEDKIVDIYTFRNRDISASEK

SEQ ID NO: 147600 - protein, 53 aa, Glycine max
  Clone ID: PAT_MRT3847_104300C.1.pep
MRPVTYEFDNVKNNYVYINITRSLGPCTFVDRCMFIVLSISCGQSFSPFLCIV

SEQ ID NO: 147601 - protein, 89 aa, Glycine max
  Clone ID: PAT_MRT3847_104301C.1.pep
LKFPPSLLAASAVYTAQCTIYGFKQWNKTCEWHSNYSEDQLLECSTLMADFHQKAGNGKLTGVHRKYCSSKFSYTAKCEPPRFLLEKPL

SEQ ID NO: 147602 - protein, 97 aa, Glycine max
  unsure (1)..(97): unsure at all Xaa locations
  Clone ID: PAT_MRT3847_104302C.1.pep
VRKLGIRLEVTALXXXXXXCXXEXXRXLLHWXXXXXXMXTXXXXVADXLFXTXLGEVLTXELAEDXXXGVXVRVXXVAHRDHHQXHXSPSRLXDNGW

SEQ ID NO: 147603 - protein, 59 aa, Glycine max
  Clone ID: PAT_MRT3847_104303C.1.pep
FFYVTQSTVLELPITPRHVRISGESHRVFATSDLRPAGSFWIYVVPLETTNNENLEALY

SEQ ID NO: 147604 - protein, 41 aa, Glycine max
  Clone ID: PAT_MRT3847_104304C.1.pep
PPPLMYGVLNPTAPNLYMLQETSTSMVGAFLFSDFTCRFMA

SEQ ID NO: 147605 - protein, 49 aa, Glycine max
  unsure (1)..(49): unsure at all Xaa locations
  Clone ID: PAT_MRT3847_104305C.1.pep
LKRGNVLIWACFMDYYLIIWLTLAHPLFNIMLQYHVFFVPXLKKKTXLX

SEQ ID NO: 147606 - protein, 74 aa, Glycine max
  Clone ID: PAT_MRT3847_104306C.1.pep
RLHFSMPGESKGLINYLHAQNIAQNIFLLLKKQQTMALMVKLIVIMNDVVHNSVPISFTSKFNDENCAAKCSNI

SEQ ID NO: 147607 - protein, 51 aa, Glycine max
  Clone ID: PAT_MRT3847_104307C.1.pep
AFLFCPAPFCWRGWMPFLAGMCVLSFLLPHSVVLSYSISSIVPMKHALRTL

SEQ ID NO: 147608 - protein, 76 aa, Glycine max
  Clone ID: PAT_MRT3847_104308C.1.pep
KTQRGPKIKKFLKKGPPPPPIFTKKTQTPQGATPIQAPPQNSQGPFKNGPLKNGKRPKPGKKFFFFPTPHIFFSQN

SEQ ID NO: 147609 - protein, 46 aa, Glycine max
  Clone ID: PAT_MRT3847_104309C.1.pep
TRSGDLQPPRSTIASTSMNISWTLSHPSLVSSPHSLYSKRYHMTSN

SEQ ID NO: 147610 - protein, 73 aa, Glycine max
  Clone ID: PAT_MRT3847_10430C.1.pep
KEALAVLIESNEYNHPYRMLNFHSKHKNSLEALHTNSKSSTHWDLLTYSRIHKNRRLVLLCVESITGLETAHP

SEQ ID NO: 147611 - protein, 164 aa, Glycine max
  Clone ID: PAT_MRT3847_104310C.1.pep
MAAFSGDETAPFFGFLGAAAALVFSCMGAAYGTAKSGVGVASMGVMRPELVMKSIVPVVMAGVLGIYGLIIAVIISTGINPKAKSYYLFDGYAHLSSGLACGLAGLSAGMAIGIVGDAGVRANAQQPKLFVGMILILIFAEALALYGLIVGIILSSRAGQSRAD

SEQ ID NO: 147612 - protein, 164 aa, Glycine max; identical to SEQ ID NO: 147611
  Clone ID: PAT_MRT3847_104311C.1.pep

SEQ ID NO: 147613 - protein, 164 aa, Glycine max
  Clone ID: PAT_MRT3847_104312C.1.pep
MAPFSGDETAPFFGFLGAAAALVFSCMGAAYGTAKSGVGVASMGVMRPELVMKSIVPVVMAGVLGIYGLIIAVIISTGINPKAKSYYLFDGYAHLSSGLACGLAGLSAGMAIGIVGDAGVRANAQQPKLFVGMILILIFAEALALYGLIVGIILSSRAGQSRAD

SEQ ID NO: 147614 - protein, 73 aa, Glycine max
  Clone ID: PAT_MRT3847_104313C.1.pep
PLNTLTTDLLLKHRNTYTKCIHPPDPLRISCNRKHLNLLIHSIHYVNASLVCTIITKYISHNLLANCIHLPVF

SEQ ID NO: 147615 - protein, 162 aa, Glycine max
  Clone ID: PAT_MRT3847_104314C.1.pep
STDRLGKEVYLFLPAAVFLPVINEVLISLEECTTDIERAIVANNFFCVSVHYLYVNEIDCDLVGLHVLDVLKGHPRLRFIHGRIVLYIRPVIDWDKGMAVTFLLESLGLNDWVDVLSIYIVVDLTDEHAFLVLREVNVVYAILLSSPPKETNAIYSLRDPSQ

SEQ ID NO: 147616 - protein, 44 aa, Glycine max
  Clone ID: PAT_MRT3847_104315C.1.pep
SRKRHLTSQHSKISKIQNINIGKDCSPIIVSKNTKGNKYLSVIL

SEQ ID NO: 147617 - protein, 73 aa, Glycine max
  Clone ID: PAT_MRT3847_104316C.1.pep
PGASRNSFPKDNDEPLRKLPLHVNADHHVPLLPATPFNSSRRLIPTKSKANKTISPLRTTKTHRKPSKSHYEP

SEQ ID NO: 147618 - protein, 114 aa, Glycine max
  unsure (1)..(114): unsure at all Xaa locations
  Clone ID: PAT_MRT3847_104317C.1.pep
VEVDKPLVLKIVITFGLVXGTNATPITPKKGNLGIIAPIAIGFIVGANILLGGASSGAPINPAVTFGPTVVTWTCTNXHWIKWAGPLIGGGIAALVKEVVFISHTPEQLPPPDY

SEQ ID NO: 147619 - protein, 87 aa, Glycine max
  Clone ID: PAT_MRT3847_104318C.1.pep
ISSFGIIIVRKPVCFPNNLVASFVFDIFLQMSNEGNILGCRHSSRHSKPQNHRHSGVSNSIGSTSKLCQIKTPLGYSLRIILYASCQ

SEQ ID NO: 147620 - protein, 96 aa, Glycine max
  Clone ID: PAT_MRT3847_104319C.1.pep
FKYKGRGGEFVKGMSVREGYPPFDIYIGVKSCVCRVWKERSFLRRALKSRVVFGVHKNTPHRGFRGGLKEQRVYNFLRGAFPLFLAESVVCVPRGT

SEQ ID NO: 147621 - protein, 128 aa, Glycine max
  Clone ID: PAT_MRT3847_10431C.1.pep
LCFIFLFPLLLFFYLSRLLFSHLFGSFVFPSLCSIFYFSFVLFLASSFVIHKLVISFVNLHSINVLSNVCCRIASGVPFIIVLSTAFLIFISCILYDSVYSSTSSFFNVILFSALYKYRMKFSYATFS

SEQ ID NO: 147622 - protein, 21 aa, Glycine max
  Clone ID: PAT_MRT3847_104320C.1.pep
KNLNYFINFTLHYISYFNIPI

SEQ ID NO: 147623 - protein, 478 aa, Glycine max
  unsure (1)..(478): unsure at all Xaa locations
  Clone ID: PAT_MRT3847_104321C.1.pep
MLLSCFSFPPSKMPSSHILFSLLSFLSIIITTFSSSTPNTITLHLSPLFTNHPSSSSHPFHTLKLAVSTSITRAHHLKNHKPNKSLETPVLTKPSTNYSIVLEFYSPSHTXIVVLETRMRLVWLPCSSHYLCSKCNSSSNTPKFIPKNSSSSKFVGCTNPKCAWVFGPDVKSHCCRQDKAAFNNCSQTCPAYTVQYGLGSTAGFLLSENLNFPTKKYSDFLLGCSVVSVYQAAGSAGFGRGVILGNSQLNLIYVSYDLDSHRFGXGVRVAERASIKIMSLENNNNXIYSVSDLQKNPTTQKNPAFGAYYYITLKRIVVGEKRVRVPRRLLEPNVDGDGGFIVDSGSTFTFMERPIFDLVAQEFAKQVSYTRAREAEKQFGLSPCFVLAGGAETASFPELRFEFRGGAKMRLPVANYFSLVGKGDVACLTIVSDDVAGSGGTVGPAVILGNYQQQNFYVEYDLENERFGFRSQSCQTNV

SEQ ID NO: 147624 - protein, 95 aa, Glycine max
  Clone ID: PAT_MRT3847_104322C.1.pep
MLTASSLRRDWNTVGALLVGDTYHTNAERASRRIFVGPFIGRWPIRVVTFPNSIQQMVPDMNSRLQLLSTTTNGASGQGEDLAMVKDNVACAVVD

SEQ ID NO: 147625 - protein, 148 aa, Glycine max
  Clone ID: PAT_MRT3847_104323C.1.pep
MLEKVGEFNMDKVIQEFELLTRDAERVQRETLKRILEDNASAEYLQSLGLNGRTDPESFKACVPLVTHKELEPYIYRIIDGDASPILTGKPITTMSLSSGTTQGKPKYVPWNDELYETTMQIYLTSFVFRNREFPIKNGKALSFIYGS

SEQ ID NO: 147626 - protein, 90 aa, Glycine max
  Clone ID: PAT_MRT3847_104324C.1.pep
KKSVLRKILPRFFLSSYVPEEEASPSTEDNVIWGTLLIWQELKPKTFSLTKSGSIVKLVIVALQIFTMFAKIIVVIIYLIRFQCLLLRYN

SEQ ID NO: 147627 - protein, 91 aa, Glycine max
  Clone ID: PAT_MRT3847_104325C.1.pep
MGFAVIITLPPHNDDAVINKTIDNKFPFSHAVYLTKQKKINSDNCSLMIFIYLAYLPSLIPQANFMCYKKISGKAVFNYLLRHIYYPPRFL

SEQ ID NO: 147628 - protein, 71 aa, Glycine max
  unsure (1)..(71): unsure at all Xaa locations
  Clone ID: PAT_MRT3847_104326C.1.pep
MAAASSMVLSSASLAGKAAKLSPSSPEVARSGMRKTGTKQAYSESTXCGPNRVKXCCPFSDEPPSYLTGEY

SEQ ID NO: 147629 - protein, 95 aa, Glycine max
  unsure (1)..(95): unsure at all Xaa locations
  Clone ID: PAT_MRT3847_104327C.1.pep
ATSTKLAIAISLSIRVAWMSNLALGKLKETNVEQYPYLXTCILQCQQLRQYTESDKRSCLQHCDMYEARAIDTHLXETRQKDEELHEQHEEEDDL

SEQ ID NO: 147630 - protein, 75 aa, Glycine max
  Clone ID: PAT_MRT3847_104328C.1.pep
PFRFYWKALNLNLPVFFWGVEKLTFFSTVLNLLNGGGNIFCLLKNINMTNCLQGLVGKKSPVNMGILLGLNQTWA

SEQ ID NO: 147631 - protein, 110 aa, Glycine max
  unsure (1)..(110): unsure at all Xaa locations
  Clone ID: PAT_MRT3847_104329C.1.pep
SXYVQKSFIDYHISVSVFFLGGLSVLPQMLHSHSHHHHLLFSSLPLCLSLTTTHHNSSLPSLHFLHRPIITTTTTTTSVLAILSTAALLCIAHNTKTLPTFELSSFPSFY

SEQ ID NO: 147632 - protein, 71 aa, Glycine max
  unsure (1)..(71): unsure at all Xaa locations
  Clone ID: PAT_MRT3847_10432C.1.pep
SXPPPKLQQPHSQPHSKPXFKAXTTMPKNTTTPITKKSPPPPPKHPRENNYTSLRERKKERENHRDFHIPT

SEQ ID NO: 147633 - protein, 400 aa, Glycine max
  Clone ID: PAT_MRT3847_104330C.1.pep
MGNKLGRRRQVVDEKYTRPQGLYNHKDVDHKKLRKLILESKLAPCYPLDEETAYDREECPICFLYYPSLNRSRCCTKSICTECFLQMKVPNSTRPTQCPFCKTANYAVEYRGVKSKEEKGLEQIEEQRVIEAKIRMRQQELQDEEERMHKRLEMSSSNVNVAVADVEYSSNAVSSSSVSVAENDEIGSSQDSCATSVVRANATTRSHIFVDDEFDVDLEDIMVMEAIWLSIQENGRRRNLSFVDATSGHYVADGRYVSSVSSVSSVMGPPTGSSSSPSGGLACAIAALAERQQMAGESSMSLTNENMPSFNTLPGSRRFYNRLGRDMANYPPATSYTNSVAAEDRGELSSLPRSDDNDGSLQSATEPIVPESFEEQMMLAMAVSLAEARAMSSGQSASWQ

SEQ ID NO: 147634 - protein, 236 aa, Glycine max
  Clone ID: PAT_MRT3847_104331C.1.pep
LESKLAPCYPGDEETAYDREECPICFLYYPSLNRSRCCTKSICTECFLQMKVPNSTRPTQCPFCKTANYAVEYRGVKSKEEKGLEQIEEQRVIEAKIRMRQQELQDEEERMHKRLEMSSSNVNVAVADVEYSSNAVSSSSVSVVENDEIVSSQDSCATSVVRANATTRTNRDDEFDVDLEDIMVMEAIWLSIQENGRRRNLSFVDATSGHYVADGRYVSSVSSVSSVMGPPTGSSS

SEQ ID NO: 147635 - protein, 39 aa, Glycine max
  Clone ID: PAT_MRT3847_104332C.1.pep
LISILLKLIKFLDKCQNLILKKLFLISQNLHNKCILFSF

SEQ ID NO: 147636 - protein, 71 aa, Glycine max
  Clone ID: PAT_MRT3847_104333C.1.pep
EDAGQLNGNGAYRAQGPATVADMYSCQDVASWSRFGFENLAQVQNRRAPWLGALYAPRCRYCQALWESYVD

SEQ ID NO: 147637 - protein, 99 aa, Glycine max
  Clone ID: PAT_MRT3847_104334C.1.pep
KKKKIDRPRKELEKRKKFTPRGAGLRTMEPEGYHLKKPRSQSPATEPPPECPPPPQQMLKKRKGGKKLRPPREKNSGESATKQTPWAGGGATQGDQTTL

SEQ ID NO: 147638 - protein, 58 aa, Glycine max
  unsure (1)..(58): unsure at all Xaa locations
  Clone ID: PAT_MRT3847_104335C.1.pep
PPPVVLWGALSQVQRAVCIISTSPRVAXVFGPLVPQFFFLFSQRAFFPWSVGGGMEKG

SEQ ID NO: 147639 - protein, 131 aa, Glycine max
  unsure (1)..(131): unsure at all Xaa locations
  Clone ID: PAT_MRT3847_104336C.1.pep
LSWARLAIHDVHVDKVIVPAGTTAMVNMWAISHDSSIWKNPWAFXPEKFMKENVSIMGSDIRLAPFGAGRRVCPGKTLGLATVHLWLAQLLHHFIWIPVQPVDLSECLKLSLEMKKPLRCQVIRRFNTISS

SEQ ID NO: 147640 - protein, 38 aa, Glycine max
  unsure (1)..(38): unsure at all Xaa locations
  Clone ID: PAT_MRT3847_104337C.1.pep
LPSCTXLPMXGSLXIXXQXIGTXSXQXVGXLLPEAPTC

SEQ ID NO: 147641 - protein, 83 aa, Glycine max
  Clone ID: PAT_MRT3847_104338C.1.pep
SGAAGDRFLGQLLLFMEQPFDSLTLENKILLISELLRKASPNTLEEVQHVTHLEANIDICSGGALQPIKKVKMPAEKSTAQAM

SEQ ID NO: 147642 - protein, 58 aa, Glycine max
  Clone ID: PAT_MRT3847_104339C.1.pep
MAFKDTGKTPVEPEVAIHRIRITLTSRNVKSLEKVCADLIRGAKEKNLKVKGPVRMPT

SEQ ID NO: 147643 - protein, 247 aa, Glycine max
  Clone ID: PAT_MRT3847_10433C.1.pep
MLLRTAAASASSLSLFSPNAEPPRSVPARGLVVRAAKGSTNHRALTGVIFEPFEEVKKELDLVPTVPQASLARQKYVDESESAVNEQINVEYNVSYVYHAMFAYFDRDNVALRGLAKFFKESSEEEREHAEKLMEYQNKRGGKVKLQSIVMPLSDFDHADKGDALHAMELALSLEKLTNEKLLNLHSVATKNGDVQLADFVETEYLGEQVEAIKRISEYVAQLRRVGKGHGVWHFDQMLLHEGGDAA

SEQ ID NO: 147644 - protein, 89 aa, Glycine max
  Clone ID: PAT_MRT3847_104340C.1.pep
MQRQGFQQQNNPYDVPSANCQNVNSVYAGREQFPFNSNKFSNVQPLLQSSGFTPSLYATAAAYMSSANPFYTNMQASGIYTSQLCCRYT

SEQ ID NO: 147645 - protein, 86 aa, Glycine max
  Clone ID: PAT_MRT3847_104341C.1.pep
VTLEANCPRHIHRASMSYKPQTDIDAQDFFVESSFALWDTGYKIDEDACPCLYKPDKPCSGALCRTFPGTSRSFDLGTDACLANPV

SEQ ID NO: 147646 - protein, 73 aa, Glycine max
  unsure (1)..(73): unsure at all Xaa locations
  Clone ID: PAT_MRT3847_104345C.1.pep
LKLNLKRLLAFAYLTCSSISLQVVARFYELSPKESMQGSTSTLYCSFTMSFSFLSLQPXNVYPSDVNIKACFI

SEQ ID NO: 147647 - protein, 139 aa, Glycine max
  Clone ID: PAT_MRT3847_104346C.1.pep
PPIRKAAPWVIKQNQRGMPSPGVPPKEVFPPVGVQVGMVGPALSWKPTQLLKDWVPQKQEPGVDPPQGNNIRVRKDGFLLPRKEKKSLVEERGITLSFCYPGGKFGTLINGLVFKAEISFSRKALQSVKIFPASFFFQD

SEQ ID NO: 147648 - protein, 85 aa, Glycine max
  Clone ID: PAT_MRT3847_104347C.1.pep
GFPGWPNPSFIYPFGLGGLALLGLVGHLAPGAFGWVQLVGGSVQKEASGTSSLSSSSRLGSRRFPAGDALYNISHFITDLRRNNL

SEQ ID NO: 147649 - protein, 91 aa, Glycine max
  Clone ID: PAT_MRT3847_104348C.1.pep
MCAKGYAACVSGVGSRMHMFLEHGPLSVASCPFLQSGGSAYTSSDECQLNKACRRKYILLSIRRGYGIEDIDVVYATSRICPTHSYASRCE

SEQ ID NO: 147650 - protein, 60 aa, Glycine max
  Clone ID: PAT_MRT3847_104349C.1.pep
ILGPFWFLKKMEKNRGEANLSVKTYQTVKGLILVCCPALNCTQNYPLKNMVETINRFFAF

SEQ ID NO: 147651 - protein, 249 aa, Glycine max
  Clone ID: PAT_MRT3847_10434C.1.pep
MLLRTAASAASASSLSLFSPTSEPLRSVPARGLVVRAAKGSTNHRALTGVIFEPFEEVKKELDLVPTVPQASLARQKYVDESEAAVNEQINVEYNVSYVYHAMFAYFDRDNVALRGLAKFFKESSEEEREHAEKLMEYQNKRGGRVKLQSIVMPLSEFDHADKGDALHAMELALSLEKLTNEKLLNLHSVATKNGDVQLADFVETEYLGEQVEAIKRISEYVAQLRRVGKGHGVWHFDQILLHEGGDAA

SEQ ID NO: 147652 - protein, 68 aa, Glycine max
  Clone ID: PAT_MRT3847_104350C.1.pep
IRVARRLSGRETGCCSYLIFELGPYFSLGPHRQFAVGNIAHPGKVRNLNFLSPAQKSTKEKKNQDTQK

SEQ ID NO: 147653 - protein, 211 aa, Glycine max
  Clone ID: PAT_MRT3847_104351C.1.pep
VNDALDKGAEIVARGNLGHIGEDAVDQYFPPTVIVNVNHTMRLMQEEAFGPIMPIMKFSSDEEVVRLANDSKYGLGCAVFSGNQSRAREIASQIHAGVAAVNDFASTYMCQSLPFGGVKHSGFGRFGGVEGLRACCLVKAVVEDRWWPFVKTKIPKPIQYPVAENGFEFQESLVEALYGLGIWDRLRALVNVLKMLTEQNPGGSSNKRRND

SEQ ID NO: 147654 - protein, 93 aa, Glycine max
  Clone ID: PAT_MRT3847_104352C.1.pep
NVITYAHKSQFDLYGYRLQLSLIIMTSIMQDGLTFSSPTQADRISHIFPQSPAEGKEEESNHKMTNLGLRKACLPLPCGSSSIYLAHESNRSL

SEQ ID NO: 147655 - protein, 102 aa, Glycine max
  Clone ID: PAT_MRT3847_104353C.1.pep
QVKFSKREFNLILKHLILFNKMFAQSNHPRSYGPQPHTVGSDKRLVEGLMDESSGDKVDGFVLKTCTVEHLKLLWLRLSKTNCIAFVYSYIIIVFTIWRKLW

SEQ ID NO: 147656 - protein, 268 aa, Glycine max
  Clone ID: PAT_MRT3847_104354C.1.pep
MGELYALDFDGVICDSCGESSLSALKAAKVRWPGLFDGVDSTTENWIIDQMHTVRPVVETGYENVLLVRLLLESRTPTIRKSSVAEGLTVEGILENWSKLKPIIMEEWDEKRDDLIDLFGKVRDEWLEQDFATWIGANRLYPGVSDALKFASSRVYIVTTKQSRFADALLRELAGVTIPPERIYGLGTGPKVEVLKQLQKKPEHQGLTLHFVEDRLATLKNVIKEPELDQWNLYLGNWGYNTQKEREEAAAIPRIHVLELSDFSKKLK

SEQ ID NO: 147657 - protein, 294 aa, Glycine max
  Clone ID: PAT_MRT3847_104355C.1.pep
LEFGSDETRAKGIRFIQSNGTLDETYEAYINKAKNSSSKGDVILAAGALGSPQLMMLSGIGPKEQLRRFNISIVHEMKGVGQGMQDNPCIAVLVDSKPQNRLPDPPQIAGITDDFKIIVEASILPLTSNSSRVNVAAKIAMPTSKGMLELNNTDPRLNPSVRFNYLASDDDMEECVKMTKLLERIARSKSIAFFLGESKQEKLTSTDIDLRNFCKKNVRTIYHYHGGCTVGSVVDEHYKVYGIKGLRILDGSTFSESPGTNPMASLLMLGRYQGPKIVRERNAESGLNAKEHRK

SEQ ID NO: 147658 - protein, 57 aa, Glycine max
  Clone ID: PAT_MRT3847_104356C.1.pep
RSNYNYTDLPLAAYAGLAAALVSFGEDTTTDIHTNILFSPVLSMSPTPPPTPSPWKP

SEQ ID NO: 147659 - protein, 39 aa, Glycine max
  Clone ID: PAT_MRT3847_104357C.1.pep
SIIGWSHCGMFKLREASFSYVWHQARVSFHSSLVAYFLF

SEQ ID NO: 147660 - protein, 80 aa, Glycine max
  unsure (1)..(80): unsure at all Xaa locations
  Clone ID: PAT_MRT3847_104358C.1.pep
INNNCFLDLIXYXLSIAAYCVGAGDSSLPHIPIAFLERINEDFTKKYSGRKASTAAAQSLNIEFGPKFNEQIQYCVYHPQ

SEQ ID NO: 147661 - protein, 47 aa, Glycine max
  unsure (1)..(47): unsure at all Xaa locations
  Clone ID: PAT_MRT3847_104359C.1.pep
KPNPLIPGTTYFNIRNYICQHLNCCVWTXKVPSTNLILFLLXLFILT

SEQ ID NO: 147662 - protein, 182 aa, Glycine max
  unsure (1)..(182): unsure at all Xaa locations
  Clone ID: PAT_MRT3847_10435C.1.pep
DPRVRPRVRTAAKRRQKGIECRRVLKWTYAYGFYLPEHEHAKKQFFEYLQGEAESGLERLHQCAEKERXAFLSADDPSREFNDFRTKLAGLTSVTRNYFENLVRALENGLSDVGSNGAAFSKATSSKNAAGSSKGRAGRGKGTFRSSTPSKMNDDSHWCCEHCTYANAKSASTCQMCYQQRR

SEQ ID NO: 147663 - protein, 38 aa, Glycine max
  Clone ID: PAT_MRT3847_104360C.1.pep
HALYTHRHSNIIQPSSRAITESFARIIAPRIAVARTRG

SEQ ID NO: 147664 - protein, 36 aa, Glycine max
  Clone ID: PAT_MRT3847_104361C.1.pep
ALYLKESITNLQSPIIKIRNEILIRIGVCLDFRLVC

SEQ ID NO: 147665 - protein, 56 aa, Glycine max
  unsure (1)..(56): unsure at all Xaa locations
  Clone ID: PAT_MRT3847_104362C.1.pep
ASALLSXXVXXXXXXXCASXXXXXXXSAXHXPXXRXLXXXSXXXXSLLXRLCXXXS

SEQ ID NO: 147666 - protein, 90 aa, Glycine max
  Clone ID: PAT_MRT3847_104363C.1.pep
ADNQEWMDKYSKAVFFLILLLDSNNLKNSRCNLKCCETILFDYLWRIKTCIHTFRNILPGKKSRLGLFIIFFSEYNLSKHIAPFLFILAR

SEQ ID NO: 147667 - protein, 77 aa, Glycine max
  Clone ID: PAT_MRT3847_104364C.1.pep
FHVYRYNESVQPSHHAVNFFSLQNGLLVVMGIFELTSSELSIAWVLNTDSSVSINLLRKDPRGKLGLMRTLSISVEG

SEQ ID NO: 147668 - protein, 83 aa, Glycine max
  Clone ID: PAT_MRT3847_104365C.1.pep
GTVQTANLMLKVTIVGTRKRFFPLKNSLVPQTSIAALEQIKLKFIDTSSKFEHGRFQTREEKTKFFGPRAKAVAPTSPAPTNA

SEQ ID NO: 147669 - protein, 55 aa, Glycine max
  Clone ID: PAT_MRT3847_104366C.1.pep
TFFRLIRSLTHPLISSQNSIYIHISIAINSSTIAHSYQTRTCLLKFKMVLPPHHN

SEQ ID NO: 147670 - protein, 45 aa, Glycine max
  Clone ID: PAT_MRT3847_104367C.1.pep
NDKRKNIDRKKTNKKRKVTMGAATSESLHTREIWYLGSKDHQSHT

SEQ ID NO: 147671 - protein, 70 aa, Glycine max
  unsure (1)..(70): unsure at all Xaa locations
  Clone ID: PAT_MRT3847_104368C.1.pep
TFIKKKKKKKKKKKKKKKKKKKKKKKKKKKKKKKKKKKKKKKKKKKKKKKKKXGGPPFKKTNFTPPGLEK

SEQ ID NO: 147672 - protein, 70 aa, Glycine max
  Clone ID: PAT_MRT3847_104369C.1.pep
YIINKIQHMYQSYEGLMATRWKWWWLALTWSIGEHRNSIIFSGSTFNANQMMEDAVSLLWTWLRHLEKGF

SEQ ID NO: 147673 - protein, 585 aa, Glycine max
  unsure (1)..(585): unsure at all Xaa locations
  Clone ID: PAT_MRT3847_10436C.1.pep
MESEDDMHDANDIESLDDDFYSGETEDAPLDYYSDDDADDYFDDAERIESRRPEQNFTILKESDIRLRQEDDVARVATVLSISRVSASLLLRHHNWSVSRVHDTWFADEERVRKAVGLLEKPIVQHPNARELTCGICFENYPRARIEMASCGHPYRISCWEGYISTSINDGPGCLMLSPDPXCGAATGRSSRFGSRSDEDKQKYARYLLRSYIEDNKKSKWCPAPGCEYAVTFDAGSTGNYDVSCLCSYGFCWNCTEEAHRPVDCGTVAKWILKNSAESENMNWILANSKPCPKCKRPIEKNHGCMHMTCTPPCKFEFCWLCVGAWSDHGERTGGFYACNRYEAAKQEGVYDDTERRREMAKNSLERYTHYYERWASNQSSRQKALADLQQMQTVHIEKLSDIQCQPESQLKFITEAWLQIIECRRVLKWTYAYGFYLPEHEHAKKQFFEYLQGEAKSGLERLHQCAEKELQPFLSADDPSREFNDFRTKLAGLTSVTRNYFENLVRALENGLSDVGSNGAAFSKATSSKNAAGSSKGRAGRGKGTFRTSLSSKLNDDSHWYCEHCTYANVKSASTCQMCYQQRR

SEQ ID NO: 147674 - protein, 168 aa, Glycine max
  Clone ID: PAT_MRT3847_104370C.1.pep
VIAELRERLQSHSMKSYRSRFQRIYDLFMSDDFSSFSRIEQQFPHLKQWLGFKAAGTVELGHIVESPVIRTATSIVPLGWNDGLGAKNGEPLKVDITGFGLHLCTLVHAQVNGNWCSTTVESFPSPPNYSSNQGIQPELQKLRIFVGPPLRSPPKHQTVLDSLMPAFT

SEQ ID NO: 147675 - protein, 77 aa, Glycine max
  Clone ID: PAT_MRT3847_104371C.1.pep
SLQETDIVLWYVFGITHIPRLEDWPVMPVERIGFMLMPHGFFNCSPAVDVPPSASDLDDKENGMSAKPIQNGMIAKL

SEQ ID NO: 147676 - protein, 264 aa, Glycine max
  Clone ID: PAT_MRT3847_104372C.1.pep
MDSNSKAVCFITHQAIFNAVRCGDLEGLKEQLKNKGEEGVSEVMSMQNDAGETMFYIAAEIGLREVFSFLFGLCDMEVLKIRAKSDLNPFHVAAKGGCLDIVREILSTWPEVCTLCDSSNTSPLYFAAIGDHLDVVNAILDVDVSSMMIVRKNGKTALHNAARYGILRIVKALIARDPGIVCIKDRKGQTALHMAVKGQSTSVVDEILQADLTILNERDKKGNTALHMATRKCRPQVVSILLTYTALNVNAINNQKETALDFAR

SEQ ID NO: 147677 - protein, 508 aa, Glycine max
  unsure (1)..(508): unsure at all Xaa locations
  Clone ID: PAT_MRT3847_104373C.1.pep
WRDMEVNNWHKELTYDEWVPITVSGARPAARYKHATAVVDEKLYIAGGSRNGRYLSDVQVFDLRSLMWSSLKLKANVGKDDDDSSQEILPATSGHNMIRWGEKLLLLGGNSRESSAELAVRYIDIETCQFGVIKTSGDVPVARVGQSATMVGSRVILFGGEDMSRKLLNDVHVLDLESMTWEMIKTTQTPPSPRYDHSAAIQGERYLLIFGGCSHSIFFNDLHLLDMQTMEWSQPQTQGDLVSPRAGHAGITIDESWFIVGGGDNRSGCPETLVLDMSKLVWSVLTXVKQKDPWLSSEGLSVCSATIDGEKYLLAFGGYNGRYSNEVFVMRPKAKDTMRPKIFQSPAAAAAAASVTSAYALSKSEKLDFMQLDDINSKLSVNGHHKDDVVDKVEAIKEEKRLLELSIAEVRAENSKLGDEIEEINNTHAELTKELQSVQAQLVAERSRCFNLEAKIAELQKLLESMQSVEDEVQALREKKSALDQEMELAATAERKSSGWRWFGGSET

SEQ ID NO: 147678 - protein, 146 aa, Glycine max
  Clone ID: PAT_MRT3847_104374C.1.pep
HLSLVTEYWTDMEVNNWHKELKYDEWVPITVSGARPAARYKHAAAVVDEKLYIAGGSRNGRHLSDVQVFDLRSLTWSSLKLKANVRKDDDDSSQEILPATSGHNMIRWGEKLLLLGGNSRESSAELTVRYIDIETCQFGVIKTSGD

SEQ ID NO: 147679 - protein, 103 aa, Glycine max
  Clone ID: PAT_MRT3847_104375C.1.pep
WRDMEVNNWHKELTYDEWVPITVSGARPAARYKHATAVVDEKLYIAGGSRNGRYLSDVQVFDLRSLMWSSLKLKANVGKDDDDSSQEILPATSGHNMIRWGEK

SEQ ID NO: 147680 - protein, 126 aa, Glycine max
  unsure (1)..(126): unsure at all Xaa locations
  Clone ID: PAT_MRT3847_104376C.1.pep
QALALLHSSEPVPKKSGAMRSFLWKIDTILPHYCPPASRLSCLLGMIWQSRAKTTXEVNVGDFSAGSYATILGAEISRRVKQVPLAFFKATPSSLFSETDFAGWTFKCEETPKMINDNNDSTKDLS

SEQ ID NO: 147681 - protein, 141 aa, Glycine max
  Clone ID: PAT_MRT3847_104377C.1.pep
QFKIKGDLKQFFPCLKEYWTDMEVNNWHKELKYDEWVPITVSGARPAARYKHAAAVVDEKLYIAGGSRNGRHLSDVQVFDLRSLTWSSLKLKANVRKDDDDSSQEILPATSGHNMIRWGEKLLLLGGHSRESSAELTVRYI

SEQ ID NO: 147682 - protein, 259 aa, Glycine max
  Clone ID: PAT_MRT3847_104378C.1.pep
MALSSLFVLMTQYGLEYPNFYEKLYALLVPSIFMAKHRARFFQLLDSCLKSPLLPAYLAASFAKKLSRLLLSVPPSGALVITALIHNILRRHPSINCLVHREDGVDEGKGDHRTDEGMATNSDNAKTVAMPSQKSGIDHFNSSETDPKKSGAMRSSLWEIDTILHHYCPPASRFALSLGNDLTVRAKTTEVNVGDFSAGSYATILGAEISRRVKQVPLAFFKATPSSLFSETDFAGWTFKCEETPKMINDNNDSTKDLS

SEQ ID NO: 147683 - protein, 330 aa, Glycine max
  unsure (1)..(330): unsure at all Xaa locations
  Clone ID: PAT_MRT3847_104379C.1.pep
MSSSEAIQNFRVFAATWNVGGQCPTGNLDLNDFLQVRNEPDMYVLGFQEIVPLNAGNVLVLEDNEPAAKWLALINQSLNGSSDLASXRDLEXASFGGPLFSQKPSLKKIKKTFKKLNGKRLRSCNCVLEMERKAGKDFCFRCQESNFNSDDSSTEEEDENFPIPVALATSQMKYSLVTCKQMVGIFVSVWMRRELVQYVGHLRICCISRGIMGCLGNKGCISVSMSFYQTSFCFICSHLASGEKEGDELRRNLDVIEILKNTQFPRICKTPHSRMPDKILDHDRIIWFGDLNYRISLSHDDAKRLVEKRDWPALFNKDQLKMEREPGRVF

SEQ ID NO: 147684 - protein, 99 aa, Glycine max
  Clone ID: PAT_MRT3847_10437C.1.pep
YATAHASGYPEERSGNGWEEESRQEREKGPNKRRAEPTSFAPNAETAMTIDEHSGGQDQDLVIEADGQATRSIDTERGRLRPHEQRTVEAIVEAKKGPL

SEQ ID NO: 147685 - protein, 169 aa, Glycine max
  Clone ID: PAT_MRT3847_104380C.1.pep
QELRDGLLLSWIIVNKKIKQSANLASWSPLDGQRHWPTDKDFVFRFGSVLSAKGILPSEAVQCILIMKFRVVHIEEEGVQTNLKATELSMQLEDMECAHVNGRNSLLILKEALSCRRSNNFSEVLESCLMYSKVQNKLKEEKIKNESRLDTLCILSGIVAVMTFWYYVL

SEQ ID NO: 147686 - protein, 85 aa, Glycine max
  Clone ID: PAT_MRT3847_104381C.1.pep
INNTHVEFTKKLQSVQGQLVAERSRCFNLEAKIAELQKLLESMQSVEEEVQALREKKSALDQEMELAATAESKSSGWRWFGGSEK

SEQ ID NO: 147687 - protein, 58 aa, Glycine max
  Clone ID: PAT_MRT3847_104382C.1.pep
LLAIVCRCQRSSQSPMCGQPISLRDATSQELLEAAQLERSLRDTPSRNAAIYHHPTLG

SEQ ID NO: 147688 - protein, 45 aa, Glycine max
  Clone ID: PAT_MRT3847_104383C.1.pep
ATQTTTILILVSLIHQSGLGLQITERYTHLILWRLSQFTLTMASL

SEQ ID NO: 147689 - protein, 177 aa, Glycine max
  unsure (1)..(177): unsure at all Xaa locations
  Clone ID: PAT_MRT3847_104384C.1.pep
FSLPIFKPILLIKIGLLIFFSILGLGVYPILIAGXSSNSNFSLIGGIRALAQTISYEVSLIFIILRNIILNNSINFFKLIEVQKIFVYIFFIFNFLLXIISCTAELNRTPFDFAEGESELVSGFNTEYRRGTFAIIFIAEYIIILFFRRFSTIIFFGFYISELKYFITVILFIFFFV

SEQ ID NO: 147690 - protein, 343 aa, Glycine max
  Clone ID: PAT_MRT3847_104385C.1.pep
MMMAGAAKTLTNLCPSFPFPTKPQNQLTTSHAFPSTRLRHRAISAVANAAQPPLAAATATEGQYRVDVLSESLPFIQKFRGKTIVVKYGGAAMKSPELQASVINDLVLLSCVGLRPVLVHGGGPEINSWLGRLNIPAVFRDGLRVTDADTMEIVSMVLVGKVNKTLVSLINKAGATAVGLSGMDGRLLTARPAPKAADLGYVGEVARVDPAVLRSLIDTSHIPVVTSVAADESGQPYNINADTVAGELAASLGAEKLILLTDVAGILEDRNDPDSLVKKIDIKGVKKMMEDGKVGGGMIPKVNCCVRSLAQGVITASIIDGRVPHSLLLEILTDEGAGTMITG

SEQ ID NO: 147691 - protein, 39 aa, Glycine max
  Clone ID: PAT_MRT3847_104386C.1.pep
FPTTLGVVSFVRFGTKSTLPMDRKKWISLSSKEDVLLVC

SEQ ID NO: 147692 - protein, 130 aa, Glycine max
  unsure (1)..(130): unsure at all Xaa locations
  Clone ID: PAT_MRT3847_104387C.1.pep
SSFHLSTHVGFKVNTCLNLLTTNASSDQSMVEDEISPNSEXKETKKEMADLQGDLERIKRENQKLRDTLDEVNTNYNALXMHFMNMMQERKGEEGEXQQXVSDGKVKXXKQGQSGGGVLVSRQFMDLGLA

SEQ ID NO: 147693 - protein, 68 aa, Glycine max
  unsure (1)..(68): unsure at all Xaa locations
  Clone ID: PAT_MRT3847_104388C.1.pep
PAPGRPEFPXPPTPPTTHSFCLCKSIARTPNGVGGQHNSRASLNISYLTKTAKRHLLTLILKNHRNNC

SEQ ID NO: 147694 - protein, 73 aa, Glycine max
  unsure (1)..(73): unsure at all Xaa locations
  Clone ID: PAT_MRT3847_104389C.1.pep
RELVSSFSFSYFFPSPASNNHLINIVQFFSPLLKSILSCMKXGYWCIPHEMLFLFQRRTACCSMLHHDDETLV

SEQ ID NO: 147695 - protein, 45 aa, Glycine max
  Clone ID: PAT_MRT3847_10438C.1.pep
RLLITRKRFTRRGTLHSHFQTKYVMSQIRFSCIRNCLSSTKNIFF

SEQ ID NO: 147696 - protein, 65 aa, Glycine max
  unsure (1)..(65): unsure at all Xaa locations
  Clone ID: PAT_MRT3847_104390C.1.pep
EKAIGCAISVEKSTCEAILIINLDNALDRDTTHRYGPNSLNHHMLPXPRTHQVLALSGTNVIWNY

SEQ ID NO: 147697 - protein, 107 aa, Glycine max
  unsure (1)..(107): unsure at all Xaa locations
  Clone ID: PAT_MRT3847_104391C.1.pep
AEIVYPGSWFDPNGEYMDAFMHLVTEIASDSGTWXLWKGSVTVLSGKSPFNLHRQVISSFESGQKYDRVDGVGFIRLYGLTIRVRAMLEQGIKVFIFFRNVLCFNVL

SEQ ID NO: 147698 - protein, 110 aa, Glycine max
  unsure (1)..(110): unsure at all Xaa locations
  Clone ID: PAT_MRT3847_104392C.1.pep
PSSQTHPGPRGNGYAPSLDCXTCHIDAKIAELMTDIDRRCGXELEKEPKILTNGDAGXLTRCHTKPMGAATFSEYSSLGQYADRDTRPTVADGVMRNVAKKDPTGAKVTK

SEQ ID NO: 147699 - protein, 240 aa, Glycine max
  Clone ID: PAT_MRT3847_104393C.1.pep
MDSLRVYASSIHLCPSRNRQHNPSNHFRFLLPSIPPPPPHLRPLHLRLPPLISAVSSSPQTQTRDDQDQEQEQEQEQGKNKSLKNKVRLQVRLDHQVQFGDHVVIRGSTKELGSWTNSVPLNWTQNGWVCDLEFEQGQGTLHIEFKFVTVNKDDTLVWEAGENRVLKVPGAGNFATVATWDATQETLELHSLDDDEQVQDADINESVSESEASPLCGQWQGKPISFMRSNEHRSMKQNGM

SEQ ID NO: 147700 - protein, 76 aa, Glycine max
  unsure (1)..(76): unsure at all Xaa locations
  Clone ID: PAT_MRT3847_104394C.1.pep
FALVYCTAGISGGHINPAVTFVLFLASKLSLLRAIFYIVMQCFGAICGAGVVKGFEGKIKYGALNGGAXFVALGYT

SEQ ID NO: 147701 - protein, 82 aa, Glycine max
  Clone ID: PAT_MRT3847_104395C.1.pep
VGLRFHLLWSVPPRFLPSFACRTPAPALDLGASTLFFDFACTRFLSWIIYDGTHSPFCCLLTPVPFCSCPLCGLFSRVLTRV

SEQ ID NO: 147702 - protein, 150 aa, Glycine max
  unsure (1)..(150): unsure at all Xaa locations
  Clone ID: PAT_MRT3847_104396C.1.pep
PGLLTPKEVKVGETVMLQAGSQIFSSGGLEYLGNSSVIHAQSFFAIWASQVIIMGTFEGXRFSGGPLGEVGDPIYPGGKVVPLALGDIPKAFAEFKGKNLKNGRLAKFPRFAFFVXAIMPGKGPLEPLEDHLTAPVDHNTWAYCPKFFPG

SEQ ID NO: 147703 - protein, 47 aa, Glycine max
  Clone ID: PAT_MRT3847_104397C.1.pep
KINCRSLRIVFWTSVFLLFNHPREEVMKSGQKGRDIICLRQTLAKPL

SEQ ID NO: 147704 - protein, 99 aa, Glycine max
  Clone ID: PAT_MRT3847_104398C.1.pep
RRQPTPQRETSMLLLQDYTLGQSSLFHSYVISRHDAVVLRLHRFTPLSQRHILAGDSSLDIRSTFCKIAYAEAHDLNSSEAFPLIRVANRVILVQQHHS

SEQ ID NO: 147705 - protein, 73 aa, Glycine max
  unsure (1)..(73): unsure at all Xaa locations
  Clone ID: PAT_MRT3847_104399C.1.pep
MIGLCLILDMSLLSNLINLNLSDITAKVIAEYIWIGGSGIDLKSKSRNLPXPFSDSSELPKWNYDGSSIGQTP

SEQ ID NO: 147706 - protein, 87 aa, Glycine max
  Clone ID: PAT_MRT3847_10439C.1.pep
TKAIGPRSYTLQRLADYLYCDRTFYDTVTLAMGTLTSTGNDQASTHAYYVVLQRPTHLLIRSTSTSLCNPCCTKTLPARDNETVPRR

SEQ ID NO: 147707 - protein, 329 aa, Glycine max
  Clone ID: PAT_MRT3847_1043C.1.pep
MLVANSFDLWRKDGFFSAAEEVQESADIMESAYRAWLREKRERSTPEELNELCRELQTALGTAKWQLEEFDKAVRLSYRHHGDDNTSTRHRQFISAIESQITQVEAALRESYIEEGKQPLRWVNLDEEERDDLAAFLSGTCQTTQSTNDEYMEVKQAKKEDKIVDINTFRNRDISASEKSSKDVISVNKDTDYVIEIKADAVSRSNDDVVSQTDRTTSTRKTWSPPNYGALKIVIADEGEQRDKPTRTVDATPKEKGFRNLFWKLKFEEYPQAMRVVHMFNQRFGRIGICQSQRQFQSPLHLRYGCSVQVTLALMLTIFLIVPFVLYST

SEQ ID NO: 147708 - protein, 33 aa, Glycine max
  unsure (1)..(33): unsure at all Xaa locations
  Clone ID: PAT_MRT3847_104400C.1.pep
IHIGQAGIQVXNACWELYCLEYGIXPDSQMPSY

SEQ ID NO: 147709 - protein, 46 aa, Glycine max
  Clone ID: PAT_MRT3847_104401C.1.pep
PLPRKSFINSVSKKLGRLSPFSRGNAATTLLKGHVKPDKNRRHSIS

SEQ ID NO: 147710 - protein, 54 aa, Glycine max
  Clone ID: PAT_MRT3847_104402C.1.pep
RMEDATILVPFINLHYLPYASLNTTGHENVSNLHKNVCKHYNLIYRIIFNERVD

SEQ ID NO: 147711 - protein, 48 aa, Glycine max
  Clone ID: PAT_MRT3847_104403C.1.pep
VRIPRHPASKVYSYCVANFTALMLPYTHFYKWKSRIKVVFFSSLHFYL

SEQ ID NO: 147712 - protein, 120 aa, Glycine max
  unsure (1)..(120): unsure at all Xaa locations
  Clone ID: PAT_MRT3847_104404C.1.pep
NFTYFNQYVLQILGKGLEFLAFPSNELGAQEPXLRHSIVVLACTRYKADFAIIDTENANGDDADTLYKVMPSNXGVLFTDTIKWNLFKFPGDKDRNVPDPYAPTSSTITIEKDIKKLLNA

SEQ ID NO: 147713 - protein, 55 aa, Glycine max
  Clone ID: PAT_MRT3847_104405C.1.pep
GISTIVTNNLRVTEHRDTIPNHLGITDSSMTTRTHPLFYVVSDRFQQTEVTADPF

SEQ ID NO: 147714 - protein, 122 aa, Glycine max
  Clone ID: PAT_MRT3847_104406C.1.pep
METDRPDGRTPNQLRPLAYSCSILHRAHGSASWAQGETKVLAAVYGPKAGTKKNENPEKASIEVIWKPKTGQIGKMEKEYEMILKRTLESICIRTIYPNTTTSVIVQVVHDDGAVSYLKIQF

SEQ ID NO: 147715 - protein, 109 aa, Glycine max
  Clone ID: PAT_MRT3847_104407C.1.pep
SAPRWRCRHRQLARRDHRRILTPVTFSYTDGPRARPGRQIVAATSPCAHGGSRPPSPTHNLKHKAGPRERFPVAHRRAPRAAHAQSFLRAAMTSLWTPPTNGGRRNYTH

SEQ ID NO: 147716 - protein, 243 aa, Glycine max
  Clone ID: PAT_MRT3847_104408C.1.pep
METDRPDGRTPNQLRPLACSCSILHRAHGSASWAQGETKVLAAVYGPKAGTKKNENPEKASIEVIWKPKTGQIGKLEKEYEMILKRTLESICIRTIYPNTTTSVIVQVVHDDGALLPCAINAACTALVDAGIPLKHLAVAICCSVTDSGCIILDPTKEEEEKMKAYINLVFPNTIVSVLPERSSQVGSEPMAHGIMTSVTQGAMSVDDYLHCLDRGRAASARLSEFVRKNIGPKSTCEASKAG

SEQ ID NO: 147717 - protein, 91 aa, Glycine max
  unsure (1)..(91): unsure at all Xaa locations
  Clone ID: PAT_MRT3847_104409C.1.pep
NTPPNPLLPNASFIFTPTPCSTKNTHPYCPGTVALCVTTKYPNSTELLINTLSIQRLVREIPHDFNTYLLTHTYAVLAXQDAADAYLVGLF

SEQ ID NO: 147718 - protein, 96 aa, Glycine max
  Clone ID: PAT_MRT3847_10440C.1.pep
LYPLAVRPVSWAYGPVCLSTVASLWVLCALLLCLGIIRFLLFPSSGGWPCLPALSRESNVLTLFPLLSAFYLPVSVASFFICFPCVSLTLAQKYDV

SEQ ID NO: 147719 - protein, 71 aa, Glycine max
  Clone ID: PAT_MRT3847_104410C.1.pep
ADGSETDLEESSTDNDSDDDINNSDDYLDDGNNSEKPSSLVQKSISSKDNIHGKTKGNGHSKKRPRIVELS

SEQ ID NO: 147720 - protein, 42 aa, Glycine max
  Clone ID: PAT_MRT3847_104411C.1.pep
PNQPPPPAPPPMPPPSPLPSPPTPPPRPPPGGSQVHHAQSLS

SEQ ID NO: 147721 - protein, 62 aa, Glycine max
  Clone ID: PAT_MRT3847_104412C.1.pep
AAPPSDASTVRRMVRTSAAGSRWIECSPIPVLLNQIQPSGSISLASMVVLPVYNLPKFRSVA

SEQ ID NO: 147722 - protein, 64 aa, Glycine max
  unsure (1)..(64): unsure at all Xaa locations
  Clone ID: PAT_MRT3847_104413C.1.pep
XXNCERXKLXXRTXLCPXLAHAIXRLPXGKXXXHXGTXPELXPGSNEXTSRLEXNSELTXACXX

SEQ ID NO: 147723 - protein, 41 aa, Glycine max
  Clone ID: PAT_MRT3847_104414C.1.pep
TDLVSHRSYEAFGSFVLWSLYNIVADLASHQGVVKGYKKVV

SEQ ID NO: 147724 - protein, 71 aa, Glycine max
  unsure (1)..(71): unsure at all Xaa locations
  Clone ID: PAT_MRT3847_104415C.1.pep
KEPKFLKNGXAGMDNMVPTKPMVGVTLFQYPPLGRSAVRDMRQTEAVGVIKSVSNKVPTEAKVSKAAAKKK

SEQ ID NO: 147725 - protein, 189 aa, Glycine max
  Clone ID: PAT_MRT3847_104416C.1.pep
MSNLSFLQFHSSNSLGHSSFQPNSPNPNNNIKSSKQTSNVGCNIQPKSEEMKWVFDKFDTNKDGKITLEEYKAAVRTMGWGIEGTETDESFQVMDSDGDGFIDFKEFMDMFNVEERVKETEIKSAFQVFDLNGDGKISAEELSQVLKSLGESCSLSACKKMVMGVDRNGDGFIDLNEFMRMMMSCKKLT

SEQ ID NO: 147726 - protein, 198 aa, Glycine max
  Clone ID: PAT_MRT3847_104417C.1.pep
MGMDEGVASMKKGEVAIVGYKSRGAGEDYSKGKGFHELEYRERKGDFMSVVSQTLTYEPQNNSNVEQRKVLRLESLNQSLNLLGDHIVNYNRKLLVDKERDDVIVAMDFGKKMGMFYGGNVVRMLSYNVRRLGDKVKYRFIIELVVKEKVQVGAVGDDVSFTSRNLKITSKPTILLKADIFGSLVLCFIFYYISHALW

SEQ ID NO: 147727 - protein, 81 aa, Glycine max
  unsure (1)..(81): unsure at all Xaa locations
  Clone ID: PAT_MRT3847_104418C.1.pep
SFFSPNLTGPSSWQSLYFSSLILSNNFTFSFLFFLPFTLFHLYHITYPQTISLLFPIINSLMFAHSVKAVXHSXTRRTFTV

SEQ ID NO: 147728 - protein, 95 aa, Glycine max
  unsure (1)..(95): unsure at all Xaa locations
  Clone ID: PAT_MRT3847_104419C.1.pep
XTRAXNHARSALLSRNDVVLDDRRSAAFSHSLLPFRGYTFTNMPLLLNPIIGSLIALIRNCRSVVDWGLELSCYEIWFHAMSCLVLVLTISIGKG

SEQ ID NO: 147729 - protein, 49 aa, Glycine max
  Clone ID: PAT_MRT3847_10441C.1.pep
DHEQIMAELPQMINTRTTTPTYADTMSALSRIISVQSSTTHSMLNIIII

SEQ ID NO: 147730 - protein, 93 aa, Glycine max
  Clone ID: PAT_MRT3847_104420C.1.pep
MSTSTFATSCTLLGNVRTTQASQTAVKSPSSLSFFSQVTKVPSLKTSKKLDVSAMAVYKVKLVGPEGEEHEFDAPDDAYILDAAETAGVELPY

SEQ ID NO: 147731 - protein, 135 aa, Glycine max
  unsure (1)..(135): unsure at all Xaa locations
  Clone ID: PAT_MRT3847_104421C.1.pep
FLLGSRSASCPCGVVGLSVSVDLCSLRCFRSHFLPEGLSSALLRRCHRVCPAFFISSVSALGVVFSGCLWGMQIVILNRWDVMSVLVCGLCLDYLFVFQARFLGFGLIRYFSFGPKQFFACVFXLXSRAASXLRR

SEQ ID NO: 147732 - protein, 56 aa, Glycine max
  Clone ID: PAT_MRT3847_104422C.1.pep
QQLGYEHSLITYLGLDCKLYMSMTWRCLNIWGRGLYHYQICHVWHTLKKVNTASVL

SEQ ID NO: 147733 - protein, 100 aa, Glycine max
  Clone ID: PAT_MRT3847_104423C.1.pep
SRKTMKIFHWVHKTFHHHNALKDGFASNMKKTEPTINNADSQALLKQVALTESLGGWEDGILTIGTLGYDPLKNINPHKEYFDLEIEVEQEDGEGENIMV

SEQ ID NO: 147734 - protein, 53 aa, Glycine max
  unsure (1)..(53): unsure at all Xaa locations
  Clone ID: PAT_MRT3847_104424C.1.pep
PWXXNHYSXXWPKLRTYXRWEXXKFMXHXLLNAITXNXPXSDLXSAXGXTVQX

SEQ ID NO: 147735 - protein, 258 aa, Glycine max
  Clone ID: PAT_MRT3847_104425C.1.pep
MAMVAESPESDSDNNSSKTNNPQTLNETAPFLDYALAQAQLYHKAFNDAVDSTIDTAKSRFSQIRSTSSAHFHQTLDSLDDLKSQYTAYEGLLFGKIKEGVVVAASHPVITCGATASLGLLVLKRPRRVLYYNTLRLFVSEESMISRAHAEVKELRQSIELLKAEGEKLEKSALHAEEQFLHGRTKLRHAGKQIRNVIQSAYKIEIRAGGLKDILGELPKRETSLFRSQVSKLASEAKKEKNTMSKEISKISNYGISV

SEQ ID NO: 147736 - protein, 70 aa, Glycine max
  unsure (1)..(70): unsure at all Xaa locations
  Clone ID: PAT_MRT3847_104426C.1.pep
EQLLIVCELLKANLIVFYKFNTESGGVVYFTMPRLQSMTIQRVEAIKVTHXLGLIHCDWKPENISGKRYR

SEQ ID NO: 147737 - protein, 113 aa, Glycine max
  Clone ID: PAT_MRT3847_104427C.1.pep
MWKLTYYAAHGALGLKITYHEPSFTNTKPYFNDWSNHESKSSLLLYYMCQCRLYIYSIAAILTWDTRMKDFSKTFTYHVITALLIGISYLTSIFRDGYIILALHDARDVFMEA

SEQ ID NO: 147738 - protein, 82 aa, Glycine max
  Clone ID: PAT_MRT3847_104428C.1.pep
LISLRLTHGLWHTFCFSLTTTNSAFVFTFLIRSKSSSFLGAAYQHWESESSCFIVIPVLICCSTNSAFVFTFLIRSKSSSSS

SEQ ID NO: 147739 - protein, 90 aa, Glycine max
  unsure (1)..(90): unsure at all Xaa locations
  Clone ID: PAT_MRT3847_104429C.1.pep
DGSWKGLEWISADQMKAAKEQGNLKVGSSXEMLSHIRTGTTRLEIAYYGLNDLSLRPQGNHILVHMTDYVNVHDALHDSQHVDVDVDTGY

SEQ ID NO: 147740 - protein, 50 aa, Glycine max
  Clone ID: PAT_MRT3847_10442C.1.pep
LASVLQHRDWKNTSVTQINRLSKKPPFNKWGKKKKAPTDRLFKKLPNLNV

SEQ ID NO: 147741 - protein, 113 aa, Glycine max
  Clone ID: PAT_MRT3847_104430C.1.pep
TIKRHFNQNPNPTIQRLSTKEPPFRNPSLKLMPGKARHDPVYQKNWAHIKKKNANLGWVYPKEFPNSFHHTIPCLFFFFPPNKPTAKYSFFLPPEGIKKGLSEFFTYRAFATK

SEQ ID NO: 147742 - protein, 119 aa, Glycine max
  Clone ID: PAT_MRT3847_104431C.1.pep
RFPWATGEKATQNFGVWNTKPIRKNGKSVVILNCGQNQSVNACMVTMEQYYMPYDDVGLYVVAKIRHKMGHGFVVEVDGPFKRSVVYLDEVISLTFHTGVWSPNAFSHSNGANRSHGEE

SEQ ID NO: 147743 - protein, 679 aa, Glycine max
  unsure (1)..(679): unsure at all Xaa locations
  Clone ID: PAT_MRT3847_104432C.1.pep
RFGSGMSSLDFILMEPAEVAGVNGGKWTDQETLLLLEALELYKENWNEIAEHVGTKTKAQCILHFVQMPIEDTFVDCDDDVDAGCKETADPVATKSDSSMDKDASECIENHTSDGIKDSEKTSKAEDLEVKVNEKETPKLQEGSDEKASEETSKSEDAVKVKIDQEADNDCAINALKXSICFFWFSPGPEGPSSFADVGNPVMALATFLAHLVGSDAAVASAHSSIKSMTRNSPGTELAARCCFLLEDPPDSKKEPTSSERDSKSEGDQDEVNVNQDKSTLEDKDLPNDHNNKKIESNALEDKGKPASTDDGALEKPISSKEQAVVNNECGLDKGHDLNNAKLPNDQAPGTLHNSGGSTSKAEIPPSSDKAQEETLIEEPCPSVKDKHVSDSLLSDKSKDAEMVSNAIPSTKSKPQNPESTNPAHESLETTDSVMDVDGVSNSLPLEKIDSQPLITSKSSQCNGTEKDVEVMSPSNPVRSNSSAENGPNTGAGKDNADNGAKVEDDGTKTKQDSSFEKVKRAAVSTLAAAAVKAKLLANQEEDQIRQLTSLLIEKQLHKLETKLAXFNDVENVVMRAREHVERSRHKLYHERALIIASRLGIPPSSSRGVPPSIPTNRIPTNIANSLPRPQMMMNPPRPLISRPAGTVATIQNPLTPSTAAGNSVRPSNQEKLSSVGTK

SEQ ID NO: 147744 - protein, 64 aa, Glycine max
  Clone ID: PAT_MRT3847_104433C.1.pep
INFLLRRQQEGLILLKVAQDALPMHMITDPIHSLYEPHPTNHMILVLKRKGEGFRNGILNTTIP

SEQ ID NO: 147745 - protein, 143 aa, Glycine max
  unsure (1)..(143): unsure at all Xaa locations
  Clone ID: PAT_MRT3847_104434C.1.pep
PGKKAPGGEKVPGGDKGPAGKKPKAGKKLPKKGGPPGKGKKKKRPPKGGGATQIFFFKVLKGGPPPLGFSSRALGFINSFFKDIFEKVAPGFFKIARSTKKPPPPSRGIXPPVRVFLPGELAQPPVFWGAKGVPQFPRFWTGY

SEQ ID NO: 147746 - protein, 59 aa, Glycine max
  Clone ID: PAT_MRT3847_104435C.1.pep
PSLIVSASPVNPSSSYYVPLRHFFLSSGHLGRRVFLISLSICLPSLFFWSFLSFFSCCP

SEQ ID NO: 147747 - protein, 52 aa, Glycine max
  Clone ID: PAT_MRT3847_104436C.1.pep
MKSCNSNIDSLANLGPAQSVVWDAMVPSKKRTCVGRSKPSSVEKLTKDLCTI

SEQ ID NO: 147748 - protein, 90 aa, Glycine max
  unsure (1)..(90): unsure at all Xaa locations
  Clone ID: PAT_MRT3847_104437C.1.pep
STTFSAHAVIDNKATEEXXQTKKGTXXXXXAXXGHKEXXQQRDHKXXRNXXEEADKGRDREEGGPTGXRTERQDEKAARRHTQGTEEHTP

SEQ ID NO: 147749 - protein, 71 aa, Glycine max
  unsure (1)..(71): unsure at all Xaa locations
  Clone ID: PAT_MRT3847_104438C.1.pep
GLANRANLVKFINSSLSHLADHFLPWGSKPIYTCRIPLLSLTLIVHAPLWQGRVSSEGEAEPKKKKKKKPX

SEQ ID NO: 147750 - protein, 49 aa, Glycine max
  Clone ID: PAT_MRT3847_104439C.1.pep
NTFYFMLLHHFKRAGLITCKGGISQHGKINLCFEPVCICFIQETTYDIF

SEQ ID NO: 147751 - protein, 51 aa, Glycine max
  Clone ID: PAT_MRT3847_10443C.1.pep
EKRESFETLPQKVLEHTDLRAAAEESDTTLFIFMIIIFSFSTPFCRLLAAV

SEQ ID NO: 147752 - protein, 114 aa, Glycine max
  Clone ID: PAT_MRT3847_104440C.1.pep
TFISLKKKFTKKKTGRGGGFREPKFTCPSFPFQKFFIVAPKSKPMALANKCADWKNPGTTQINRLENIPFWPVWGKTKKALTRSPFPKFPYLNGKWNPPCTALLITEYVGVSLK

SEQ ID NO: 147753 - protein, 62 aa, Glycine max
  Clone ID: PAT_MRT3847_104441C.1.pep
IVTPSYILRDRSSSICKHALPSLCGMASFITLDYMSAVAIFTHVVARSPSVTKLANKAIHRW

SEQ ID NO: 147754 - protein, 49 aa, Glycine max
  Clone ID: PAT_MRT3847_104442C.1.pep
IHVLLKKGILVGPQIPTAVVNPPLNNLWPPALISNLLVRGPKKPVWNFF

SEQ ID NO: 147755 - protein, 108 aa, Glycine max
  Clone ID: PAT_MRT3847_104443C.1.pep
MIHFSNRKDVWRFVHELGYSNESSSKTKGELYSVVCSPIDAALVATAGGDDRGFLWKIGQADWAFELQDYGPIVSGKIADYASRRVAMGFLKVFCIFGSLIIAFSKLT

SEQ ID NO: 147756 - protein, 97 aa, Glycine max
  Clone ID: PAT_MRT3847_104444C.1.pep
RQQLPTKLPSRISSWWWKFKFFFKYAWDKWLLLWFIMYEPRIVSIEEKKTQEEFISQLFDPTSGLLTQDTMYRNRKGHAIIAPVGQLLERKANDFKI

SEQ ID NO: 147757 - protein, 156 aa, Glycine max
  Clone ID: PAT_MRT3847_104445C.1.pep
EYANTFRTESYTEFWTRVLAYSKDESSTCLSRESTTSARLPSYRLFAEHLLDPDQSTVTRALSEAQCRPIIHSLLSDYFAHTANASLLCSHLLKEIDRVRVKYRSLKTILQCVPTNQIPSPMIMIHLTEFSNFLNPFGASSSPSARIRATQCQCSD

SEQ ID NO: 147758 - protein, 106 aa, Glycine max
  Clone ID: PAT_MRT3847_104446C.1.pep
FGQEPPVAQPVRQLPKRPRNSDALQEALMTVASSIRRLADAMEQSKCSFDASELLHAVMEIDGLEEGKQMYAFEYLNADPVKARAFLTYNARMRKTYLFRQFWWWR

SEQ ID NO: 147759 - protein, 109 aa, Glycine max
  Clone ID: PAT_MRT3847_104447C.1.pep
GGTVANISACSSIQPFPQFSSFPIPTLIGGNHASSLLIPFIRNITSIPANLPSLKISNSAPFTPPLSSPRSSKRKAYFYSLHNAFLLHPFFATFAPFNPFRLHHLATFT

SEQ ID NO: 147760 - protein, 63 aa, Glycine max
  Clone ID: PAT_MRT3847_104448C.1.pep
WQGTRPLNFSPPLAPRKNVIFIKKGVSKKKLGIKKKPFMFPPKGRQLSQVYFCVVKQLGSPTA

SEQ ID NO: 147761 - protein, 82 aa, Glycine max
  Clone ID: PAT_MRT3847_104449C.1.pep
KKTGAKKEGAPFSYKRERVSIIKGAINKYASERGLFFGGEAGAPFPESWFIGGPPKKRDANGNAHAEPPKRGVLKPLPLEPK

SEQ ID NO: 147762 - protein, 40 aa, Glycine max
  unsure (1)..(40): unsure at all Xaa locations
  Clone ID: PAT_MRT3847_10444C.1.pep
STKRLXMKITFEVNCILLRLRTVTMLGANLPVEKHSDYHT

SEQ ID NO: 147763 - protein, 188 aa, Glycine max
  Clone ID: PAT_MRT3847_104450C.1.pep
FVEKDFHGKSLTTKAVGVRTIIYPGAGAEANFEANKYLRILHLTHSTFETLPPFIGKLKHLRCLNLRKNKKIKRLPDSICKLQNLQFLFLKGCTELETLPKGLRKLISLYHFEITTKQAVLPENEIANLSYLQYLTIAYCDNVESLFSGIEFPVLKLLSVWCCKRLKSLPLDSKHFPALETLHVIKCD

SEQ ID NO: 147764 - protein, 110 aa, Glycine max
  Clone ID: PAT_MRT3847_104451C.1.pep
DERPFIRAYKGEFQPTYGCANVISNVIRAKFDEPAPSWLKVSVDLRDRWFGEFKKEYRWHPQEEQAIRAVFETKGSRILKSAMNKIRNGQDKGKWITTNVRVALDEHWGS

SEQ ID NO: 147765 - protein, 49 aa, Glycine max
  Clone ID: PAT_MRT3847_104452C.1.pep
PATHHHLHNQCKNLKKSLTFYKNQLVLNTNTAIILYKTNITIAKLLYYF

SEQ ID NO: 147766 - protein, 138 aa, Glycine max
  unsure (1)..(138): unsure at all Xaa locations
  Clone ID: PAT_MRT3847_104453C.1.pep
MSGGFFRGTSADQDTRFSNKQAKLMKSQKFAPELEHLVDMTKVNMEVIKPWITRRVTELLGFEDEVLINFIHSLLDAKEVNGKEVQIQITGFMEKNTGKFMKELWMLLLSAQXNASGVPQQFLDARGEELXEKKLKVI

SEQ ID NO: 147767 - protein, 180 aa, Glycine max
  Clone ID: PAT_MRT3847_104454C.1.pep
GGFFFFYFFILFFFFSFLFWFLLFFLVGKTNRQSVNLKPAKNVKKGRGANPKSQGGRGGTQKSPRGRQKKKGRAPRAQKKPHRLGIREPIPTRKGEGPQKKTNPGEETRGAPHPPALKRRGRKNPQKRTLGGRGGTRKTPQRSSSGEPPHFAQGKHARRPGPRPPPTPLGGRPAIRGPGP

SEQ ID NO: 147768 - protein, 94 aa, Glycine max
  Clone ID: PAT_MRT3847_104455C.1.pep
QPRKVTNQKSKMVHQHQVRASLTCFILFLLVLATTSFTSVHSRNTLLIHEDQAHELHKTWPRKTRMNHGSHRGAKKHLVNPTIDHPFQAREFPV

SEQ ID NO: 147769 - protein, 59 aa, Glycine max
  Clone ID: PAT_MRT3847_104456C.1.pep
FSSTTILTSFFIPLGGVQLSQTHDISLSKDDLFVCYFELYSDYNIDINFYPCDCAARIR

SEQ ID NO: 147770 - protein, 106 aa, Glycine max
  Clone ID: PAT_MRT3847_104457C.1.pep
GHEISQLDGPEALGGDWTWGNGQATFGHLIGGYDAGYYGYLSSQVYSTDMFYSVFKDDPMNGKEGRRYRHTVLERGGSMEEMDILEEFLGRKPSTEAFYKELGIAK

SEQ ID NO: 147771 - protein, 56 aa, Glycine max
  Clone ID: PAT_MRT3847_104459C.1.pep
FTRSQYPQLMTTAPYMVNQFNSRTNQASGPRRLTLVRKYMHSLRKRGQLQAIIGKT

SEQ ID NO: 147772 - protein, 50 aa, Glycine max
  Clone ID: PAT_MRT3847_10445C.1.pep
ARGKYGAENTCTSGNTLSRAALSFAQAHAQIEKERGNLLKALGTQVVYTC

SEQ ID NO: 147773 - protein, 50 aa, Glycine max
  Clone ID: PAT_MRT3847_104460C.1.pep
DTNYNAKLTRIGLAGDGRSGDESHVSTRGMGTRGYAAPEESTTGDLTTKS

SEQ ID NO: 147774 - protein, 433 aa, Glycine max
  unsure (1)..(433): unsure at all Xaa locations
  Clone ID: PAT_MRT3847_104461C.1.pep
RLLRVLELVECVVEVGDEEMDWMSCFPESDAQTHLESLVFDCVECPVNFDALERLVARSPLLRKLRLNRYVSMSQLHRLMHRAPQLTHLGTGSFSASELDQELDFASAFASCKSLVCLSGFREFWADYLPAIYPACANLISLNFSFADISADQLKSVIRHCHKLQTFWVLDTICDEGLQAVAETCKDLRDILVFNCLVLGCLRVFPVNTREEIEGPVSEVGXEAISRGCRKLQSFLFFCQRMTNAAVVAMSNNCPDLVVXFQLCIIGRYRLDPETLEPMXDEGFGAIVMNCKKXLTRLAVSDLLTEPGFSGISLMGNWVGSLSAGFAGDTDLGLQYVLQGCPNLQKLEIRDSPFGDGALHSGLHHFYNMRFLWMSSCKLTRQACQEVAQTLPHLVLEVINSEEDKADGIEILYMYRSLDGPRDDAPKVVTILC

SEQ ID NO: 147775 - protein, 179 aa, Glycine max
  Clone ID: PAT_MRT3847_104462C.1.pep
KNCPDLVVFRLCIIGRYRPDPVTEEPMDEGFGAIVMNCKKLTRLAMSGLLTDRVFEYRGMAGKSVRTLSVAFAGDTDVGLKYVLEGCPNLQKLEIRDSPFGDGALRSGLHHYYNMRFLWMSSCKLTRQACQEVARALPNLVLEVINNNNEENAGDEEENAGDEVETLYMYRSLDGPRDD

SEQ ID NO: 147776 - protein, 319 aa, Glycine max
  unsure (1)..(319): unsure at all Xaa locations
  Clone ID: PAT_MRT3847_104463C.1.pep
MAPKDRILVLGPTGAIGRHIVWASVKAGNPTFILVRDTPASVNKPRLVTAANPETREELIQSFQNSGVTLIQGDMNDHESLVNAIKQVDVVICSFGRLLIEDQVKIIAAIKEAGNVKRFFPSEFGLDVDRHDANLTQRXEVFEEKAKIRRVIEAEGIPYTYLCCHAFTGYFLRNLAQIDITVPPRDKVFIQGHXNVKGAYITEADVGTFTIEAANDPRALNKAVHIRLPNNYLSLNDIISLWEKKIGKTLEKIYVSEEEVLKQIKETSFPNNYLLALYHSQQIKGDAVYEIDPAKDLEASEAYPHVEYSTVSEYLDQFV

SEQ ID NO: 147777 - protein, 320 aa, Glycine max
  unsure (1)..(320): unsure at all Xaa locations
  Clone ID: PAT_MRT3847_104464C.1.pep
SSRAAAFEACRSLVCLSGFREIWADYLPAIYPVCSXLTSLNVSYADVNTRPDQLKSVICHCHKLQIFWVLDSIRDEGLQAVAATCKDLRELRVFPVDAREETDGPVSEVGFEAISQGCRKLESILFFCQRMTNAAVVAMSKNCPDLVVFRLCIIGRYRPDPVTEEPMDEGFGAXIVMNCKKLTRLAVSGLLTDRAFEYIGMYGKLVRTLSVAFAGDTDVGLKYVLEGCPNLQKLEIRDSPFGDGALRSGLHHYYNMRFLWMSSCKLTRQACREVARMLPHLVLEVINSEEDKADDIEILYMYRSLDRPRDDAPKVVTILC

SEQ ID NO: 147778 - protein, 61 aa, Glycine max
  Clone ID: PAT_MRT3847_104465C.1.pep
TIKQLLGVVQIQEKGWYPSLSKVVKSWDKRHQMVCTWMLPHFFSNVFVLNHIMSSMSTYLR

SEQ ID NO: 147779 - protein, 305 aa, Glycine max
  unsure (1)..(305): unsure at all Xaa locations
  Clone ID: PAT_MRT3847_104466C.1.pep
KRRVRAPSLADLTLVDELLRRLRREGMRVRERVSVPKAGLTQEVMEKIHKRWRKEELVRLKFHEELAEESCLIGCSVQRRTGGLVTWRSGSVMMVYRGIDYQGPDSRKELNEKKGDGFFVPDVSKREDSTATSTSEKSEVVVREREHPENMSEAEAEYNALLDGLGPRFFGWWGTGILPVDADLLPRTVPGYKTPFRLLPTGMRSRLTNAEMTNLRKLAKSLPCHFAVGRNRNHQGLACAILKLWEKSLVSKIAVKRGIQNTNNELMAEELKMLTGGTLLLRNKYFIXIYRGKDFVPTSVAAVLA

SEQ ID NO: 147780 - protein, 72 aa, Glycine max
  Clone ID: PAT_MRT3847_104467C.1.pep
YGCRRRQKGPHVLYSLKLLSLNMIFFFVAALLEKTTKVRGQYLNHPYKELHKKKKLVILRHGYMNMTLKHIF

SEQ ID NO: 147781 - protein, 99 aa, Glycine max
  Clone ID: PAT_MRT3847_104468C.1.pep
GYDRVRLAWAEKREVRHTCLNGPDNNNYGAYRWVVQFVTNANQLEKIFFPIFWGLMTLRQLAIRRCSCSLLLVTCRYIQIHNHLLRRKETYQGIQVSFL

SEQ ID NO: 147782 - protein, 391 aa, Glycine max
  unsure (1)..(391): unsure at all Xaa locations
  Clone ID: PAT_MRT3847_104469C.1.pep
MKESSDGFVRADQIDLKSIDEQLERHLSKVLTIEKKKRSEGEEDADHVHLHVHTTSATASPKFSHASSAARVNFKKKKQDWEIDPSKLIIKTVIARGTFGTVHRGVYDTQDVAVKLLDWGEEGQRTEAEIASLRAAFTQEVAVLNILDHAKDAKFIGATMGSSELQSTNXNGLIGMPSNVCCVVVEYLAGGNLKQYLIKNRRRKLAFKVVIQLALDLARGLSYLHSQKIVHRDVKTENMLLDKTRTVKIADFGVARVEASNPNDMTGETGTLGYMAPEVLNGNPYNRKCDVYSFGICLWEIYCCDMPYPDLSFSEITSAVVRQNLRPEVPRCCPSSLANVMKKCWDASPDKRPEMDEVVSMLEAIDTSKGGGMIPHDQQQGCFCFRKHRGP

SEQ ID NO: 147783 - protein, 288 aa, Glycine max
  unsure (1)..(288): unsure at all Xaa locations
  Clone ID: PAT_MRT3847_10446C.1.pep
MEQLKTIGRELAMGSQGGFGQSKEFLELVKSIGESRSKAEEDRIVLREIETLKRRITPXEPDIPKRKIKEYIIRLLYVEMLGHDASFGYIHAVKMTHDDGLLLKRTGYLAVTLFLSDDDDLIILIVNXTIPKDTDIRNYLVVCAALNAVCRLINEETIPAVLPRVVDLLNHSKDAVRKKAVMSLHRFYLKSPSSVSHLMSLHRFHHKSPSSVSHLISNFRKKLCDNDPGVMGATLCPLFDLIAVDPSPYKDLVVSFVSILKQVAEHRLPKSYDYHQMPVPFIQVCFSD

SEQ ID NO: 147784 - protein, 167 aa, Glycine max
  Clone ID: PAT_MRT3847_104470C.1.pep
TLATCIAPFLGRFSFQPFNENPLLGPSLITLRKMGALDANKVVHRHQGWRLITCMWLHGGVFHLVANMFGLLVVGIQLEKEFGFVLIGLLFVISGFGGSLLSALFIGEKVSVGASGALFGLLGGMLSELLTNWSLYEKKLGALFTYVFVIAINLAVGVLPHVDNFAH

SEQ ID NO: 147785 - protein, 69 aa, Glycine max
  Clone ID: PAT_MRT3847_104471C.1.pep
MSKIRLCQRILLLSLFFLSVVAPLVFVSHRLNLLTLLGRREFLEDLYRATYRGDPLKLNAVEQGGADGL

SEQ ID NO: 147786 - protein, 287 aa, Glycine max
  unsure (1)..(287): unsure at all Xaa locations
  Clone ID: PAT_MRT3847_104472C.1.pep
EGQSKNAMKPKYSRFSQQELHAWQPILTPSWVVEVPFRYDDECLPPDHKNDAVAYIKDVGSNKTCTKKLXYVKSRDDKQLRSKAAENDVGSCSPEDYTPNDMGHKPIVPCGLIAWSLFNDTYKLTSNNKDLVINKKNIAWKSDQNGKFGSDVYPKNFQAGGLIGGARLNESLPLSEQEDLIVWMRTAALPTFRKLYGKIETDIEVNDVVLVIENNYNTYEFGGRKSIVLSTTTWVGGRNNFLGMAYILIGGISLLLAAAFLLLYVMQPRPLGDPSYLSWNKNPGSLR

SEQ ID NO: 147787 - protein, 72 aa, Glycine max
  Clone ID: PAT_MRT3847_104473C.1.pep
LAADFIESKDVCKNYAEAKDVILGMFLYEYARRHPDYSVVLLLRLAKTYETTLEKCCAAAAPHECYAKVSMI

SEQ ID NO: 147788 - protein, 209 aa, Glycine max
  unsure (1)..(209): unsure at all Xaa locations
  Clone ID: PAT_MRT3847_104474C.1.pep
MSVENSSTSVSVAEGQSKNAMKPKYSRFSQQELHAWQPILTPSWAISIFTVIGLIFIPVGLASLFASESVVEVPFRYDDECLPPDHKNDAVAYIKDVGSNKTCTKKLTVKNKMKAPVYVYYQLDNFYQNHRRYVKSRDDKQLRSKAAENDVGSCSPEDYTPNDMGHKPIVLGPYCWSLFNDTYKLTSNNKDLXSTKRTXAWKSDQNGKF

SEQ ID NO: 147789 - protein, 59 aa, Glycine max
  Clone ID: PAT_MRT3847_104475C.1.pep
LNPFLSPVNRAVLPVISVPVQVHLSSETRIRTLITWILASILACSYCADPMQLYPTNVF

SEQ ID NO: 147790 - protein, 114 aa, Glycine max
  Clone ID: PAT_MRT3847_104476C.1.pep
AQGILPLWAPPVILMGAVEGYRIAGGPPGGVPDPISPGGSFDPLGPADAPGAFFGLKGKEPQTGGLARFSRVGVFVRALVPGKGPLGTPFGPLGGPVNNNGWAFAPNFVPGKWA

SEQ ID NO: 147791 - protein, 52 aa, Glycine max
  Clone ID: PAT_MRT3847_104477C.1.pep
LIISFEGILCQQSGASVSSNPPKLRRNASASYDISSTSSQCGPTFPGYTLEL

SEQ ID NO: 147792 - protein, 71 aa, Glycine max
  Clone ID: PAT_MRT3847_104478C.1.pep
FCVLCKLESQNSICKYGWFACSNMNSVVSTIMTSDAPNLAITQPKSRENPQKTSPSSIPEQLKLNPGKRKS

SEQ ID NO: 147793 - protein, 137 aa, Glycine max
  Clone ID: PAT_MRT3847_104479C.1.pep
EPPDENGDHSLLESCQQDDIATENEEAGETFVYEKTELDCSPESLQSKYSTEGECGSLIGSPENLVCEEDLYCEFPPKGNIEKSKSGQSSNSSAKKGSKRTRGLLQPVIHATVAVDKKGISNLSRIDSRSERIEAWR

SEQ ID NO: 147794 - protein, 31 aa, Glycine max
  Clone ID: PAT_MRT3847_10447C.1.pep
IIFFGGILVFASNFFFFLEVIGCFYDFIENT

SEQ ID NO: 147795 - protein, 102 aa, Glycine max
  Clone ID: PAT_MRT3847_104480C.1.pep
RSCHVGGLISPGQCFSRGGATATALLPGVPFLFFVLGFVSCILSAYLPLKLLAPYALSLTVVLNLIPVYRYHTSEFYTNFVLPVAFYVSPPPPPPKKEDVIQ

SEQ ID NO: 147796 - protein, 99 aa, Glycine max
  Clone ID: PAT_MRT3847_104481C.1.pep
TSDRARDLKKTIPFSILYIDLSDWLALLVVVLTKAHSTYTVLFTFNKFNPHQPNIMLQKDASISSSGVLQLTKVGSNCVPTSGSLRRALYSTPDPDLPH

SEQ ID NO: 147797 - protein, 107 aa, Glycine max
  unsure (1)..(107): unsure at all Xaa locations
  Clone ID: PAT_MRT3847_104482C.1.pep
SIGPTPHTLQELQDTTLGSFLAGLMPNWDPPQRRFPLKKGGPSPWGPNGNEKRGPXIGLPKDQSPSPYKKPHDLKKAWKGGVFTAVIKHMFPDIGQICKLGREAKWL

SEQ ID NO: 147798 - protein, 63 aa, Glycine max
  Clone ID: PAT_MRT3847_104483C.1.pep
TCQESNNPSEAFISSHWYTTLMLFSPTERTTQKEWSLHISNTIYTYIRLGHFTAYCIFNDPPL

SEQ ID NO: 147799 - protein, 72 aa, Glycine max
  Clone ID: PAT_MRT3847_104484C.1.pep
HLLKIPHSMGHNVFLVSFYKLLECSHIINIIHISKGWRYVSMLQIIHFLEELTCIKDIFQDMVVTQQRRQYP

SEQ ID NO: 147800 - protein, 138 aa, Glycine max
  unsure (1)..(138): unsure at all Xaa locations
  Clone ID: PAT_MRT3847_104485C.1.pep
FGSRHHPFHIGKTTTLSFLTCSSLHYGVEVYTMWQALFNIDFSILLIATVLVVSGSLTAXDNLGQIGISLFDPKMILTTFVFLVSIXNYFLRASSVSVSXYLLTKYKFLSPLLLTLIXLLSLFGHIFIILWYLQTHLF

SEQ ID NO: 147801 - protein, 41 aa, Glycine max
  Clone ID: PAT_MRT3847_104486C.1.pep
GRCVIIYPGDHNDYPHHCTLEHGPPKPCHLDAFLITATNTS

SEQ ID NO: 147802 - protein, 193 aa, Glycine max
  Clone ID: PAT_MRT3847_104487C.1.pep
APRACGGFKGFLSFPYDGPPPPVFFGGGVKIGFPPKAKVKPPPGGAPFFGLGPPCEKEPVNFSLGTLLPSPFFKNGLVTQPLSLKGGSFAFVKGFFWLWGLPFGPAPPFSVKNVAPLFPWNPPGPCLRVGGFPKREANPPSPPFVFFKNFFFWTFGRGFPKKKKKKKKKKKKKKKKKKKKKKKKKKKKKKKKR

SEQ ID NO: 147803 - protein, 143 aa, Glycine max
  unsure (1)..(143): unsure at all Xaa locations
  Clone ID: PAT_MRT3847_104488C.1.pep
LSTTYSHGRKPXLHIRNEYFFHVHVKPLQEENVLPDVLKVNGSDILSTYLTCAADPETTLGIXLPILVVLVNNLKKYFTFEIRVXDDKKAXRRTRASTFQDVTPKXPYICTMPLSMAEAXAPNQXNQVDYPQTPYGSNQVQTL

SEQ ID NO: 147804 - protein, 37 aa, Glycine max
  Clone ID: PAT_MRT3847_104489C.1.pep
YVVCLVSSRLHHLMELEIVIRYHSMCIDDCRIPRRIG

SEQ ID NO: 147805 - protein, 53 aa, Glycine max
  Clone ID: PAT_MRT3847_10448C.1.pep
LPFLLLWPAYRGKLFTTSTNRTQTELSITGQLPSSQTRLILKGGYKPITRDIC

SEQ ID NO: 147806 - protein, 171 aa, Glycine max
  Clone ID: PAT_MRT3847_104490C.1.pep
FLGRMVSLVRALLYMIAQCAGAICGAGLAKGFQKSYYNRYGGGVNTVSDGYNKGTALGAEIIGTFVLVYTVFSATDPKRSARDSHVPVLAPLPIGFAVFMVHLATIPVTGTGINPARSFGPAVIFNNDKAWDDQWIYWVGPFVGAAVAAFYHQYILRAAAIKALGSFRSNT

SEQ ID NO: 147807 - protein, 133 aa, Glycine max
  unsure (1)..(133): unsure at all Xaa locations
  Clone ID: PAT_MRT3847_104491C.1.pep
IKITYSFIQFTSIKVLAPLPIGFAVFMVHLATIPVTGTGINPARSFGPAVIFNNDKAWDDQVSKPXLLDKLRFIFYMKKYIYLLTPITYDCDCSFXWIYWVGPFVGAAVAAIYHQYILRGSAIKALGSFRSNA

SEQ ID NO: 147808 - protein, 72 aa, Glycine max
  Clone ID: PAT_MRT3847_104492C.1.pep
PIYFTYRMKIKPKRAILLFKKLFTGVNIKHKRLGFRKLPSKKQPPNFIIKESRGRVIFPSCFFPDDEHQKPF

SEQ ID NO: 147809 - protein, 41 aa, Glycine max
  Clone ID: PAT_MRT3847_104493C.1.pep
PCEKAPQVLVLWPHRIRKLSLNINELISSFLKRNFTHQLRI

SEQ ID NO: 147810 - protein, 43 aa, Glycine max
  Clone ID: PAT_MRT3847_104494C.1.pep
QILASMKSIVLQTLLLAKIRKVSNSTYAEFTTPVSLQCILSCF

SEQ ID NO: 147811 - protein, 220 aa, Glycine max
  unsure (1)..(220): unsure at all Xaa locations
  Clone ID: PAT_MRT3847_104495C.1.pep
MKYDQGSLKALYHVLPMTHVSVTKLQSLLEGXRKLGIRLELLFSLSVFSWLLSMPAVRXGKRVIHSELTERKFIEVQKALSATEAMDVDHCEPNSKFKKTGFHLNGSNYDVSTCGVLHSIGSDLTRMKVTSETNYSDSGSGQKTIKAKEPGNTPISRPVISRESFAQGKENGRTNGIENQGDEADTIICSKSSQDKRPRKTSAVKEPINQNMKRQRSEAQ

SEQ ID NO: 147812 - protein, 357 aa, Glycine max
  Clone ID: PAT_MRT3847_104496C.1.pep
MMKSSSHLSAIFLLFFLLTALSPSDGVSFSSFLKQLKQKLEKSPTLKDFLKPTTIGDIYYTLNFTEIFSSEERSAPPVSLIKDYLSNYGYIESSGPLSNSMDQETIISAIKTYQQYFSLQPTGKLNNETLQQMSFLRCGVPDINIDYNFTDDNMSYPKAGHRWFPHTNLTYGFLPENQIPANMTKVFRDSFARWAQASGVLNLTETTYDNADIQVGFYNFTYLGIDIEVYGGSLIFLQPDSTKKGVILLDGTNKLWALPSENGRLSWEEGVLDLESAAMHEIGHLLGLDHSNKEDSVMYPCILPSHQRKVQLSKSDKTNVQHQFANVEDSAGHVGRLGVSLITTLSLGFAYLLLLLY

SEQ ID NO: 147813 - protein, 298 aa, Glycine max
  Clone ID: PAT_MRT3847_104497C.1.pep
MSLLLPPPKPHRSSGNSPGDSIPDWISESINGGSLRRVDLNSGTNGWASPPGSVFSLRSESYFQNRQKSPAGDYLLSPAGMDWLKSAAKLDHVLSRADNRVMHALRRCQTLGRSLKSFVFAVNLQIPGAKEHHSAVFYFATEEPDPVRTGSLLNRFVHGDDAFRNQRFKLVNRIAKGPWIVKKAVGSHSACLLGKALNCAYYKGSNYLEIDVDIGSSAIANAILHLALGCVTTVTIDMGFVVEAQAEDELPERLIGAIRVCQMEMASATVVEALHVPRGVGWAKVNHHKSADELALDD

SEQ ID NO: 147814 - protein, 46 aa, Glycine max
  Clone ID: PAT_MRT3847_104498C.1.pep
GSLAAFPVMVQFNDCTCYSIRSRSLHYISAALQLLCYDQIHIHCMV

SEQ ID NO: 147815 - protein, 191 aa, Glycine max
  Clone ID: PAT_MRT3847_104499C.1.pep
MAIVIKVAALSGSLRKASYHSGLIRAAIELSKGEIEGIEIEFIEISELPMLNTDLEINGTYPPIVEAFRQKILQADSILFASPEYNYSVTALLKNAIDWASRPPNVWAGKAASIVSAGGDFGGGRSHYHLRQIGVYIDLRFINKPEFFLLAFKPPPKFNDDGDLIDEEAKDKLKQVLLSLRAFTLRLQGKN

SEQ ID NO: 147816 - protein, 100 aa, Glycine max
  unsure (1)..(100): unsure at all Xaa locations
  Clone ID: PAT_MRT3847_10449C.1.pep
IRXEIPXTXTPXXXTLXSSXXXLPIGNXEXTEXXXHHHXXXIXVRCXXGCLXXXXXXFXXXXXXXIXXXGSVXSXXXXXLEXXGXXPXXLCEXEXXNPNX

SEQ ID NO: 147817 - protein, 42 aa, Glycine max
  Clone ID: PAT_MRT3847_1044C.1.pep
VIKRGQWFCHFNYISISENCSVQMYLFMMCFILFGTFLKLFH

SEQ ID NO: 147818 - protein, 486 aa, Glycine max
  Clone ID: PAT_MRT3847_104500C.1.pep
MFLRLTELTVTPNNHHHHHHRQSKSKPPTPPSTMDSIPTTPPLSPSRPPFTRLHHGLHRRSSATRRRPPFPASPVAVPPPRTPLARGRHVYAFPRARPAPPKPNLRFPRPRSRGSLPTTSAPLPAMPAPSRAAPRCADRTATHPSHCCAFPFLFLFLFSLSLSLSSNPNFLFPMPDFHDSLFTTPPPQPSRPVPVREDCWSEEASATLVDAWGRRYLELNRGNLRQKDWQDVADAVNALHGHTKKTHRTDVQCKNRIDTIKKKYKIEKARVSASNGTLSSSWPFYERLDALIGPNFSAKKSTSSPSPSPPVALPLLPHRKNQNQNQNPSSSPAIAVPPTAVALPQKRSSAAAMDEGYFRRNYSAVAAAAAAAEADEDDEEEDEEEAEDLEEEEEEECEEEGRGSEVEEGDKEREGMRRLAKAIERFGEVYERVEAQKLRQMVDLEKQRMQFAKDLEVQRMEMFMDTQVQLERIKRGKRSGSNDMYS

SEQ ID NO: 147819 - protein, 155 aa, Glycine max
  Clone ID: PAT_MRT3847_104501C.1.pep
MMMIMVAAIELSKGEIEGIEIEFIEISELPMLNTDLEINGTYPPIVEAFRQKILQADSILFASPEYNYSVTALLKNAIDWASRPPNVWAGKAASIVSAGGDFGGGRSHYHLRQIGVYIDLRFINKPEILLLAFKPPPKINDDGDLIDEEAKDKLK

SEQ ID NO: 147820 - protein, 84 aa, Glycine max
  Clone ID: PAT_MRT3847_104502C.1.pep
YSAYYLFKNMYNTDLKIKILIYFLISPPPGVEKKKNKTKHNNRYAPLFPKKINPPPHKYLLSITLIKKNYFFFLPPPPPPPTRP

SEQ ID NO: 147821 - protein, 94 aa, Glycine max
  Clone ID: PAT_MRT3847_104503C.1.pep
GKNQIMFLGEFIGKEMLFWFFGKNLILFIFYIKRGNPLLELRQGKPENILTQKAFGFYSPNEKFLRALPLEKKGEKKPLRPKSCVQGPFATLYL

SEQ ID NO: 147822 - protein, 131 aa, Glycine max
  Clone ID: PAT_MRT3847_104504C.1.pep
MSWQAYVDDHLLCEIEGNHLTHAAIIGQDGSVWAQSTNFPQFKPEEITAINNDFNEPGSLAPTGLYIGGTKYMVIQGEPGAVIRGKKGPGGVTVKKTGAALIIGIYDEPMTPGQCNMVVERLGDYLIDQGL

SEQ ID NO: 147823 - protein, 236 aa, Glycine max
  Clone ID: PAT_MRT3847_104505C.1.pep
MMNGGGRRRIVLITGVGKGLGRALALELAHRGHTIIGCSRSQDNLNSLQSQLSFSSSNHLLLNADVSSNENVQEMARVVMDNRSVPDIIVNNAGTINKNNKIWEVPPEDFDAVMDTNVKGTANVLRHFIPLMIAAKKMEAVIVNMSSGWGRSGAALVSPYCASKWAIEGLSKSVAKEVPEGIAVVALNPGVINTDMLASCFGPSALLYQQPQAWALKAATMILNLTPADNGASLTV

SEQ ID NO: 147824 - protein, 131 aa, Glycine max
  Clone ID: PAT_MRT3847_104506C.1.pep
MSWQAYVDDHLLCDIEGNHLTHAAIIGQDGSVWAQSTDFPQFKPEEITAIMNDFNEPGSLAPTGLYLGGTKYMVIQGEPGAVIRGKKGPGGVTVKKTGAALIIGIYDEPMTPGQCNMVVERLGDYLIEQGL

SEQ ID NO: 147825 - protein, 113 aa, Glycine max
  Clone ID: PAT_MRT3847_104507C.1.pep
PSSRGRYRFRHCPCLSPFGCPSAGLSPGFSAWLRPPPRRIYGVFPTIVVGGLLVGLLVILTLRGLLVHSVFSYVAKSFPPQGIDNSPLHVHLGGHLGGYVPLKSSIQMQNLDV

SEQ ID NO: 147826 - protein, 631 aa, Glycine max
  unsure (1)..(631): unsure at all Xaa locations
  Clone ID: PAT_MRT3847_104509C.1.pep
TRPVEKMFKQEQEEFEANIKTAVAKKGDPDQAAFKLLSLNRLMWDLLLQSYVWVRRLYPLHSPDGLRLESDVSEKVMHEHDYSKVEGIASRETGSMGNFMEDGDANVKIMFGSSVQVNELPIKEIPISGPFLXSSDQNLNLSLDVIPTHLEVGENSPVSTDIQTNHLVADLKVLNKISSFHSPISNMLDSNDWFWKPFADIRQIGIKEFQKRLLPKFEFVSSSIAEYIPTAHQLITEEGTRLHIPLKTDNHVVSDFEGEPSSIIACALALLKDAYEVSEIDDEDDRNESGITSNSTENSDSVHSAGSTSSEESRASRATENHSIEIAMGYAKSLGREKYSVICHYXSSSRELRNWCCPSELDFIASLSRCRNWDAKGGKSKSYFAKTLDDRFIIKEIKKTELDSFLGFSSLYFKHMRESFEFGSQTCLAKVLGIYQVTKRHVKSGKEVKYDPLMVMENLTYNRNITRQYDLKGALYARYNSAADGAGDVLLDQNFVNDMNSSPLYVSHKAKRVLQRAVWNDTSFLNSINVMDYSLLVGVDSQKHELLVCGIIDYLRQYTWDKHLETWMKSSLVVPKNVLPTVISPKEYKKRFRKFMSTYFLSVPDHWCSQKSSNPCKLCGSGEDDPSQQKP

SEQ ID NO: 147827 - protein, 72 aa, Glycine max
  unsure (1)..(72): unsure at all Xaa locations
  Clone ID: PAT_MRT3847_10450C.1.pep
VIXXIPTXEDQQVGYLKPYKKKKKGKKALSYIERKRLALFMRGLFNFFIPNWVIITPTKKFYTTMTIIQHKE

SEQ ID NO: 147828 - protein, 46 aa, Glycine max
  unsure (1)..(46): unsure at all Xaa locations
  Clone ID: PAT_MRT3847_104510C.1.pep
HVPQLRGRSSSIGAQRVKNXACIAFHHFCEEQNADACLRCLQRVNQ

SEQ ID NO: 147829 - protein, 104 aa, Glycine max
  Clone ID: PAT_MRT3847_104511C.1.pep
FLWAPRFLPLVSSVRLRSPILLLHGLSFLCPFDFGSLYWQALLPGYASGSTQVPWYFAHCKVVFVYGVVMLLSPLAFPRAPPWEVCVRQDPTLLFFFGSRAPPP

SEQ ID NO: 147830 - protein, 63 aa, Glycine max
  Clone ID: PAT_MRT3847_104512C.1.pep
LRLRVGWKKKNILRFSDGVWALVELNCMLRLQVFNSMHSIAVLVRILVRAISYYLKSLLERKP

SEQ ID NO: 147831 - protein, 137 aa, Glycine max
  Clone ID: PAT_MRT3847_104513C.1.pep
MKMKMKKRIEEEVRENEEEVATRAPKPEQENVGKKRVRGGALMEGSRCSRVNGRGWRCCQQTLVGYSLCEHHLGKGRLRSMTKYPLGNDAENNDEKKPVIVTKRRMKLGMVKARSISSLLGQTNTEIVSIAEDNDNK

SEQ ID NO: 147832 - protein, 67 aa, Glycine max
  Clone ID: PAT_MRT3847_104514C.1.pep
RSKNKLAFLGGVLKTFSLSWITALPPFFGLLPWVGAPTCLHNIVINTMNMPFYPILTFLHRSFWNKK

SEQ ID NO: 147833 - protein, 37 aa, Glycine max
  Clone ID: PAT_MRT3847_104515C.1.pep
RSAITWHERGGKLGTARVGYFCALIKRVKLPGDQPLY

SEQ ID NO: 147834 - protein, 80 aa, Glycine max
  Clone ID: PAT_MRT3847_104516C.1.pep
LRMTTEGLLINGGYWCEKGRDFPLKGRHKSLSTVVYTIVRTMNHHQKKIYIIFLKIISYIPQIKLTCLIFQEIILLIAIE

SEQ ID NO: 147835 - protein, 130 aa, Glycine max
  unsure (1)..(130): unsure at all Xaa locations
  Clone ID: PAT_MRT3847_104517C.1.pep
GVRIIQKIYHGPAYHRYTHPSFHCRRDWRVRNWNIRLRHQNIAYYTQHCVVLVNLPSKRISTAATMEAPPFAYSASTSSLFSLRNKPLSSPTITHLGNTKPSKSFSVGASSSRDSVVTXLDYGAGNVRSV

SEQ ID NO: 147836 - protein, 131 aa, Glycine max
  unsure (1)..(131): unsure at all Xaa locations
  Clone ID: PAT_MRT3847_104518C.1.pep
TVHAYVGAGSHTCEDTSEPEAQEKPTRIDAXLRQRIHPEYREVQAQMETLWAKQTLDDAETPTGSMXDLNTLQSKIGLPKNTXGGTILRKDLLAYHVTEGNIRAXCDQPRTHGMKGMIRLVDTCGIPENTG

SEQ ID NO: 147837 - protein, 150 aa, Glycine max
  Clone ID: PAT_MRT3847_104519C.1.pep
LSRYESQKRRDWNTFGQYLRNQSPPVPLSQCNFNHVLDFLRYLDQFGKTKVHLHGCIFFGQPTPPAPCACPLRQAWGSLDALIGRLRAAYEEHGGSPETNPFGGGAIRVYLREVKECQAKARGIPYKKKKKRNPILKGTQRAKDIEQQAS

SEQ ID NO: 147838 - protein, 58 aa, Glycine max
  unsure (1)..(58): unsure at all Xaa locations
  Clone ID: PAT_MRT3847_10451C.1.pep
ILLAVTKLLHHVVTWSAGPLQDXMTGTSLPYTSQYGGLDNIQGSVTAATSSQRVSSRL

SEQ ID NO: 147839 - protein, 60 aa, Glycine max
  Clone ID: PAT_MRT3847_104520C.1.pep
LEALVYAATDLMFYLRSLSQLGGDSLETFILFDKWYNKPFYRHLTRNTEGHPDKLSYLML

SEQ ID NO: 147840 - protein, 123 aa, Glycine max
  Clone ID: PAT_MRT3847_104521C.1.pep
MAASSIPIRVAGIQPCSTSGHRRTDPDRRRASSTSWWTPLFGWSSEPDYIDSNNRASSLQRTKPEPVTAATESKAPRPRFAGCFTEEKAKQLRMMTSKSFHDTMYHSAIASRLASDFKARSDP

SEQ ID NO: 147841 - protein, 92 aa, Glycine max
  Clone ID: PAT_MRT3847_104522C.1.pep
FFFSKFKSSSGNCFLHSCFLHLPKLTEHLIGNVKLHSVRCRKQLSQFSISFKISGPLASLFSTEIIWPTIALEAQIRKVGLLLQHPFRPTNH

SEQ ID NO: 147842 - protein, 123 aa, Glycine max
  Clone ID: PAT_MRT3847_104523C.1.pep
MAATSIPIRVAGIQACATSGRRRADPDRRRASSANWWTPLFGWSSEPDYIDSNNKASSLQPAKPEPVTAETESKAPRPRFAGGFTEEKAKQLRMMTSESFHDTMYHSAIASRLASDFKSRSDL

SEQ ID NO: 147843 - protein, 64 aa, Glycine max
  Clone ID: PAT_MRT3847_104524C.1.pep
NKSNCSLISRIYHLPPTFLVDENLRERKLLSVLVTDFSDSLPFRTLSFICRTSSPFDNKLYCHI

SEQ ID NO: 147844 - protein, 435 aa, Glycine max
  unsure (1)..(435): unsure at all Xaa locations
  Clone ID: PAT_MRT3847_104525C.1.pep
MSCRAYSASLEEFGGVGDGTTLNTKAFQAAIDHLSQYASSGGSQLYVPPGKWLTGSFNLTRSFXLVLHKDAVIXLASQDENDWPVIDPLPSYGRGRDTQGGRFSSLIFGTNLTDVIITGDNGTIDGQGDLWWQKFRKGELKYTRPYLIEIMYSDNVQISNLTLVNSPSWNVHPIYSSNLVVQGITILAPVTSPNTDGINPDSCTNTRIEDCYIVSGDDCVAVKSGWDEYGIAYGMPTKQLVIRRLTCISPFSAVIALGSEMSGGIQDVRAEDIVAINSESGVRIKTAVGRGGYVKDIFVRRMTMKTMKWAFWMTGNYGSHADDNYDPNALPVIQNINYRDMVAENVTMAARLEGISGDPFTGICISNVTIQLAKKAKKVPWTCTDIAGISSDVTPAPCGLLPDQGEEKIGACTFPEESLPIEDIKVQTCTYRRNL

SEQ ID NO: 147845 - protein, 157 aa, Glycine max
  unsure (1)..(157): unsure at all Xaa locations
  Clone ID: PAT_MRT3847_104526C.1.pep
MDVLLLLLLCVLLVGLPNLAIVESRRAPVLDYFEYCAMSCRAYSASLEEFGGVGDGTTLNTKAFQAAIENLSQYAASGGSQLYVPPGKWLTGSFNLTSHFTLFLHTDAVILASQDENDWPVIDPLPSYGRGRDTQGGRXASLIFGTNLTDVIITGDN

SEQ ID NO: 147846 - protein, 60 aa, Glycine max
  unsure (1)..(60): unsure at all Xaa locations
  Clone ID: PAT_MRT3847_104527C.1.pep
QMTTAWTIXQSKVLEQNGRDFYEGRTNLRNAVASWQTSFDPQINNMGNPDVRSFLSLYIG

SEQ ID NO: 147847 - protein, 40 aa, Glycine max
  Clone ID: PAT_MRT3847_104528C.1.pep
TESLLYYLELILTDINSDSREECASATSTSETSQYVSIRC

SEQ ID NO: 147848 - protein, 87 aa, Glycine max
  unsure (1)..(87): unsure at all Xaa locations
  Clone ID: PAT_MRT3847_104529C.1.pep
VPLRRPTVHVTTIARIEGLLSSLRVMIASALNDNXDPMLSIDMLSLQGAGIVFPPMIAFVDKLALATTKRTCGGYHPWDIWLTIVVN

SEQ ID NO: 147849 - protein, 103 aa, Glycine max
  unsure (1)..(103): unsure at all Xaa locations
  Clone ID: PAT_MRT3847_10452C.1.pep
EVFRSSTEDNDIGPVVAENSHEFAQEXQQKPEFAELMLSLGALGDGNQYEGIPSAEEWEAAYLYMSVAQRMRRQPDTTQQSGRRKRRSMHMLDEDIMYITTDD

SEQ ID NO: 147850 - protein, 54 aa, Glycine max
  Clone ID: PAT_MRT3847_104530C.1.pep
QLPITLMAMNIKRKCISRASDATNGNPTMHVKATPFRLASDHGKNRYLITHHTL

SEQ ID NO: 147851 - protein, 69 aa, Glycine max
  Clone ID: PAT_MRT3847_104531C.1.pep
QAVLCLSPWSYRVTICLSVPIPSSCGVGASSSSYISKIKSKTPPFCASSAELSYMFWVWACHVCISRVD

SEQ ID NO: 147852 - protein, 119 aa, Glycine max
  Clone ID: PAT_MRT3847_104532C.1.pep
MARPLLSNLLLSSMPIPTLFLAILSVLCVFSIITFLCGSDKLKNLHKEAEKATTRSSNSKEHKLISKLNSNINNRALSMVKMISWRKVREGEVEGDYSDQDEEALWRKNILMGEKSPVS

SEQ ID NO: 147853 - protein, 28 aa, Glycine max
  Clone ID: PAT_MRT3847_104533C.1.pep
ELKCKLQELKNILIKFQKLKNSLIKYKN

SEQ ID NO: 147854 - protein, 214 aa, Glycine max
  Clone ID: PAT_MRT3847_104534C.1.pep
LCSNVLNDAFPISHDGEFGTINNFRLGRLPKIPVEWDEINAAWGQACLLLHTMCQYFRPKFQYRIKIIPMGSYPRITDTNNSTYELFGPVNLFWSTRYDKAMTLFLACLKDFADFAKSKDQENNIPPEKCFKLPYKIENDKVENYSITQSFNKQENWTKSLKYTLCNLKWALYWFVGNTNFQPLSAMVSSHAEVPAVGPLYTKRGVDAKSESRN

SEQ ID NO: 147855 - protein, 233 aa, Glycine max
  unsure (1)..(233): unsure at all Xaa locations
  Clone ID: PAT_MRT3847_104535C.1.pep
MKHRVEGDAKGNQYPERESLPFKENSHEAQDMVKFRFDNGEKEHESNAGGTETKELTELKDRHNSRNLDHREDAFSRPPQEAIKKIDTDKVKAALEKRRKAAGHITKKTDVMDDDDLIERELEDGIELAPQSEKNKDKRQSWSKPSDRSDYDNMRGRHQDHEDEQYHGVKGLSSYEPDLSAVEEGEYPHLMTXSPKSSNRKRKAGSSPERGVEGKRHNYGPGPHHNNRFDYMG

SEQ ID NO: 147856 - protein, 70 aa, Glycine max
  Clone ID: PAT_MRT3847_104536C.1.pep
SLEAPQDLKIQSWHSQPSRCPLAYNVLRKPRVYVVGQGIQFESMVITADLYYKCLSRKLEIQLDKLSAKP

SEQ ID NO: 147857 - protein, 114 aa, Glycine max
  unsure (1)..(114): unsure at all Xaa locations
  Clone ID: PAT_MRT3847_104537C.1.pep
MALTLTHLPKSQVNEGHPDXLRDHVYDARLXARLEQDPDSXDVCETCTKTNCGMVXFREITTKADVDYXKIVRDTCKNISFASNDARLDADDCNDLFNIEQHNPDIAQGGHGPL

SEQ ID NO: 147858 - protein, 138 aa, Glycine max
  Clone ID: PAT_MRT3847_104538C.1.pep
FFFCFICFFLFSGRAIYTSQGSAALSLSSPAHINKENIFFDKLVREHLYAISTINLVAPLHSYSKCDGRWNTFPTGMTGPQWQISMVIEVCGGERVSDLLPCLWNWASIFLLPPQCALPWRLMRFISRGQADFLPLRC

SEQ ID NO: 147859 - protein, 90 aa, Glycine max
  Clone ID: PAT_MRT3847_104539C.1.pep
SFLRIKVSVRLRLEKDSLLPLQHTLRNNFGENMGQRASDEGVTSFITTAKATHQRLKLLIHGTTTNHHQRPHTQSRYDKAPHQRICYVKG

SEQ ID NO: 147860 - protein, 46 aa, Glycine max
  Clone ID: PAT_MRT3847_10453C.1.pep
GAPPLFFFFFFFFFFFFFFFFFFFFFFLLKYILYFYLHSVPAIINS

SEQ ID NO: 147861 - protein, 75 aa, Glycine max
  Clone ID: PAT_MRT3847_104540C.1.pep
AEYVHIDEFSSVISRPREITLKFEHQDTGKNKYMGEGAHSAVKVPSLTTCWTREANKILHPTLCTTHSYVNAVKF

SEQ ID NO: 147862 - protein, 91 aa, Glycine max
  Clone ID: PAT_MRT3847_104541C.1.pep
LAMGERIGYVTGGHKEDELGLYIGRVKPSSSNGASEHRQDTKPSVCQYEYQSAHELGRFKCDRSCHFRFIRQWHVHNNFCPGCKQEDVVWH

SEQ ID NO: 147863 - protein, 146 aa, Glycine max
  unsure (1)..(146): unsure at all Xaa locations
  Clone ID: PAT_MRT3847_104542C.1.pep
VISLPPPIVFPHAAAHTTGGFINSLRGGAEKXMRERTHAACWPCCSRMAICQKDVRRAACGTPSGFPLTAMCDSIFNEMLIRYSYEQSLRQAQAPSMFVQSCKNFVSLSVYGDDNXISVHDYVMPYSNGSKXKSFLTGHHITIPDG

SEQ ID NO: 147864 - protein, 148 aa, Glycine max
  Clone ID: PAT_MRT3847_104543C.1.pep
HQGLIFTNGAQAVEVFTRERPQLVLMDALMPVMDGFEAARRIKQLAGEALVPIIFLTSLRESEALAQCLDAGGDDFLPKPYNPLILAAKINAMDRLRRLQATVLRQRDQIARHHDYLLHEQRAAKAVFDKVAHSGCINAAPNIRYLQS

SEQ ID NO: 147865 - protein, 58 aa, Glycine max
  unsure (1)..(58): unsure at all Xaa locations
  Clone ID: PAT_MRT3847_104544C.1.pep
TVRCRCXNTATLGXRQNVNXPGXVVXXPTXXXKXXXDILGXGVPXXIDXIXLXFVXKG

SEQ ID NO: 147866 - protein, 49 aa, Glycine max
  Clone ID: PAT_MRT3847_104545C.1.pep
CPTPRFTVLLRTKTRRDSSNRNYPLSLSFQALNEINRVKNGKKGAPFLV

SEQ ID NO: 147867 - protein, 45 aa, Glycine max
  unsure (1)..(45): unsure at all Xaa locations
  Clone ID: PAT_MRT3847_104546C.1.pep
LSYALLATVRSSHLSSVPLPFSLSRTSILVSDIHYXLTYELLHCL

SEQ ID NO: 147868 - protein, 56 aa, Glycine max
  unsure (1)..(56): unsure at all Xaa locations
  Clone ID: PAT_MRT3847_104547C.1.pep
LNYYYAVARPKRQIHAKTGYPLKTLLLSHRQSTTMDHHSLKIQNGAAVIPKQLNEX

SEQ ID NO: 147869 - protein, 97 aa, Glycine max
  Clone ID: PAT_MRT3847_104548C.1.pep
MAKRLIPLFNRVLVEKIVPPSKTTAGILLPEKSTKLNSGKVIAVGPGFHSKDGKLIPVAVKEGDTVLLPEYGGTEVKLDNKEYHLFRDDDILGTLHD

SEQ ID NO: 147870 - protein, 81 aa, Glycine max
  Clone ID: PAT_MRT3847_104549C.1.pep
DAELGEFAYDYVEVIREIKPGMQDHSDLHTIEGDGRSMRTLSHVSESEYPLHSQQQQETKDGYPLRDFSRESRPVEVGNAS

SEQ ID NO: 147871 - protein, 65 aa, Glycine max
  Clone ID: PAT_MRT3847_10454C.1.pep
SKIKKEKSVVRQYFWCGNGNTMKLQCHFFPTIFCSHELLYRLQKTHTQINCLGQCWHYCRGYYSP

SEQ ID NO: 147872 - protein, 52 aa, Glycine max
  Clone ID: PAT_MRT3847_104550C.1.pep
PFLYKGPPKGVTHLTNKHLLRKLVDLIINIKFINNFYYLVKIIVTHHLILFT

SEQ ID NO: 147873 - protein, 86 aa, Glycine max
  Clone ID: PAT_MRT3847_104551C.1.pep
TDTCSRQLMAQLKPHVYGLREDPVPFPSLPCESYRGCLSLSRYKVNCHVYAPSYMASSNSPPRGVPGSSFPSRNSDWLYALVLRIR

SEQ ID NO: 147874 - protein, 68 aa, Glycine max
  Clone ID: PAT_MRT3847_104552C.1.pep
QKHYSGSLKPNPWENPLNPSNLKNSPKFQKPPKGTEDQQKGLLRLNRFFLNKKFLAKGPNTGTLSNPF

SEQ ID NO: 147875 - protein, 129 aa, Glycine max
  unsure (1)..(129): unsure at all Xaa locations
  Clone ID: PAT_MRT3847_104553C.1.pep
RMATSTPKTNFFFIDTNLDTDFSLVGPSSTLSPTSKRLFCLXHPLCFPKIGKIQIHVIKVERKEYFYHLTDSIPVIIAFNGVNYSSFLTIYVSVLKNCSHNDQLFYLDIANNALTVDFSSKMGCTLLQF

SEQ ID NO: 147876 - protein, 58 aa, Glycine max
  unsure (1)..(58): unsure at all Xaa locations
  Clone ID: PAT_MRT3847_104554C.1.pep
LPHPTSVLGRASGKNLXXXXXXXXVCWVIVIGFLSSFKVFDTMSILISSSFSFIGFVN

SEQ ID NO: 147877 - protein, 60 aa, Glycine max
  Clone ID: PAT_MRT3847_104555C.1.pep
DGALQSSEGLCCKVAFLRAMVSGTVGCGSVVVPTRVVVPCVDEHAGHGRHAPSALDHVSD

SEQ ID NO: 147878 - protein, 43 aa, Glycine max
  Clone ID: PAT_MRT3847_104556C.1.pep
KKKPTFPSILCNIKEGGDFLKGGEILHEGGIPNFFFYFKKKRG

SEQ ID NO: 147879 - protein, 148 aa, Glycine max
  Clone ID: PAT_MRT3847_104557C.1.pep
FSARPYGYISFPQGGGGFLGPPLKRAPREVFPWVGGAPRGRGKGPPPPALNFFFLPQVKKAQNFIFSPGFPGEFPPPPFCCPSLTCLFLPLGLSFSPPPKFLVSNPRGVFCFVYKKAFPWGVKKKKKKKKKKKKKKKKKKKKKKKKKK

SEQ ID NO: 147880 - protein, 155 aa, Glycine max
  Clone ID: PAT_MRT3847_104558C.1.pep
ANMKQKIVIKLQMDCDKCRNKALKIAAEVRGVTTVSLEGDDNDRVAVSGVNVDMVCLANQLKKKFSSVTILTVVDLVKEEEAKKKKDEEEKKKKEEAEKKRKEEEESAFPKPPSPCPKWSNCHKCYVPYQQPCYYPYPPQVVCYDTCPDSPCSIM

SEQ ID NO: 147881 - protein, 94 aa, Glycine max
  unsure (1)..(94): unsure at all Xaa locations
  Clone ID: PAT_MRT3847_104559C.1.pep
IKLWHAASSMALSSPSLAGKAVKLGPSAPEVGRVSMTNTVTKHVSSXSTWYCPDXSQVIGPXFSGELSYYLIGEFPSDYGWETAALSAYPKIFA

SEQ ID NO: 147882 - protein, 74 aa, Glycine max
  Clone ID: PAT_MRT3847_10455C.1.pep
GNRTQKQEKGEKKKKKKIKKSGFSEDLSPCMCVRDATVSSQRYSNLTYRLLPHNASIGKISVPFNPTVPYYTFS

SEQ ID NO: 147883 - protein, 311 aa, Glycine max
  unsure (1)..(311): unsure at all Xaa locations
  Clone ID: PAT_MRT3847_104560C.1.pep
MAGDSKSKILFIGGTGYIGKFIVEASAKAGHPTFLLVRESTLSNPAKSPLIDNFKGLGVNLVLGDLYDHQSLVSAIKQVDVVISTVGHLQLADQDKIISAIKEAGNVKKFYPSEFGNDVDRTHAVEPAKSAFATKAKVRRAIEAEGXIPFTYVSSNFFAGYFLPNLSQPGATAAPRDRVIILGDGNPKAVFNKEEDIGTYTINSVDDPRTLNKILYIRPPANTLSFNELVTLWEGKIGKTLERIYVPEEQLLKQIEESAPPVNVILSINHSSYVKGDHTNFEIESSFGVEASALYPDVKYITVDEYLNQFV

SEQ ID NO: 147884 - protein, 114 aa, Glycine max
  Clone ID: PAT_MRT3847_104561C.1.pep
EDIGTYTINSVDDPRTLNKILYIRPPANTLSFNELVTLWEGKIGKTLERIYVPEEQLLKQIEESAPPVNVILSINHSSYVKGDHTNFEIESSFGVEASALYPDVKYITVDEYLN

SEQ ID NO: 147885 - protein, 95 aa, Glycine max
  Clone ID: PAT_MRT3847_104562C.1.pep
MAGDSKSKILFIGGTGYIGKFIVEASAKAGHPTFLLVRESTLSNPAKSPLIDNFKGLGVNLALGDLYDHQSLVSAIKQVDVVISTVGHLELADQD

SEQ ID NO: 147886 - protein, 81 aa, Glycine max
  Clone ID: PAT_MRT3847_104563C.1.pep
RGYILFLFKIYLQGFIVPTISFFGLVFKHTRRDLRMSLGRLIVCVSPLLSKETIFPRMSSNGQNPMPEIDTTPCMMKLYVL

SEQ ID NO: 147887 - protein, 85 aa, Glycine max
  Clone ID: PAT_MRT3847_104564C.1.pep
VVARKLQLLAMAMPGSLYIWSIVVGICYAVPLAITLPTASELFGLKNYGLIYNILNFKLPFGSFLSSGLPAGILYDLEATTTARR

SEQ ID NO: 147888 - protein, 120 aa, Glycine max
  Clone ID: PAT_MRT3847_104565C.1.pep
MSQQGQIPINPMVPPQNPMATMQVPMPMHMQMQMQMQMPMPMHMPLPMQMQMQMPLPMPLQIPFSVQDTAPSSGKRRRDDENSGTASAPEQSAAKRAKGQDVILRIVVPWGQDREVIVKE

SEQ ID NO: 147889 - protein, 232 aa, Glycine max
  Clone ID: PAT_MRT3847_104566C.1.pep
MSEPKIRDVLISCAEDTHQGFVGHLFKSLTDLGFSVKVVSGDHRDLKEEEIECFRVFIIVFSHHYATSSSRLDKLTEIINKYGAAEDRRIFPFFFEVEPNHVRFQSGSFEIAFDSHANRVESECLQRWKITLKKVTDFSGWSFNRSEKTYQYQVIEKIVQKVSDHVACSVGLHCRVEKVNDLLKSESDDTVRVLVYGESGIGKTTVVRGVCRSNGGKFAYYCFLEKVGENLR

SEQ ID NO: 147890 - protein, 81 aa, Glycine max
  Clone ID: PAT_MRT3847_104567C.1.pep
EPNLAKSLQPYTLRLVTRNFFYLTVHNISFSWFSYNFGSNCLDFNSLLKLSFLFYNSALLIEGFFLSVSIFGARNKRLTYF

SEQ ID NO: 147891 - protein, 60 aa, Glycine max
  unsure (1)..(60): unsure at all Xaa locations
  Clone ID: PAT_MRT3847_104568C.1.pep
MAERGGGDRCSDRCGFXRGFGGRGRGGYRGRGRLRGPCREEXEKWVPVTKLCLLFKDGRI

SEQ ID NO: 147892 - protein, 166 aa, Glycine max
  Clone ID: PAT_MRT3847_104569C.1.pep
SNSLPFLSVIVLLLHVSNSLTTPTRESIHDTFLHCLQSHTTNQPDHVSNIVYAQTNTSYTSVLRAFARNARFSAPSTQKPLLIVTPLSENQVQATVVCAKSIGLQLKIRSGGHDFEGVSYISQVPFIILDMFNFQDVTVDVHNEIAVIQAGASLGQVYYRIWEKSK

SEQ ID NO: 147893 - protein, 28 aa, Glycine max
  Clone ID: PAT_MRT3847_10456C.1.pep
RQGSFMITSCSLSLPSNTAIVITFITYS

SEQ ID NO: 147894 - protein, 109 aa, Glycine max
  Clone ID: PAT_MRT3847_104570C.1.pep
TWGIIKISIVIPISTNKTIIFLLSSSRSINNDSFSFHTCNKNIYYYIYLFPLKFPISNLFPLFKHYLYNFLNFHTLRTSYIPYLQLPTFHHSLSLFHSLHHSFNTPKFF

SEQ ID NO: 147895 - protein, 96 aa, Glycine max
  Clone ID: PAT_MRT3847_104571C.1.pep
QLRSATHNKKVRDMIDDEALGAIANFLGIFIFALVIAYHLVTADPKYEAKWDLDSFPGWFYSMNPTPKPRSSDPTYLQLRSDLWSYAGETEIARTL

SEQ ID NO: 147896 - protein, 153 aa, Glycine max
  Clone ID: PAT_MRT3847_104572C.1.pep
MGNCLLGGMSDPDTIIKVTTSNGCIMEFYAPITVSFITSEFPGHGIFLSHDLFCKPLSQFDELVAGQSYYLLPLNNQPEHPSASGHIGGDNRAIRLGHVRSHSVPTTPYPPPYRMSLDYQHHQGMRFLNKTSTEPFSCRTSTIKRSKITTSSK

SEQ ID NO: 147897 - protein, 88 aa, Glycine max
  Clone ID: PAT_MRT3847_104573C.1.pep
YFIFFYFFFLHQKKGRCLALYKNTSLGVEGIKKEEKRASVQKTKKNLPFDMTYSNCKGLPSSPFKSFWGASISSLHFDMELGGGKKTP

SEQ ID NO: 147898 - protein, 112 aa, Glycine max
  Clone ID: PAT_MRT3847_104574C.1.pep
KGIFPPQVKNWVRSGKSNTKSFCILTNMNFSQYLGNNVELAKTVGSFKEGSPLSNFFLVMGGSQNPKKKPSSVRFAVPPLRFFFFQTHQKHHKKDLQKNRKKRGKSGSTFFL

SEQ ID NO: 147899 - protein, 38 aa, Glycine max
  Clone ID: PAT_MRT3847_104575C.1.pep
GTWCKLISPLIWGGLYPTFTSPLLPCNRPFRLPLSYKA

SEQ ID NO: 147900 - protein, 63 aa, Glycine max
  unsure (1)..(63): unsure at all Xaa locations
  Clone ID: PAT_MRT3847_104576C.1.pep
TLIRQQQERSXRNKQAEVDTTYTAAGTIXDRXALLRKQQMGRTTQLTQLXGSATRVYKTLAKY

SEQ ID NO: 147901 - protein, 108 aa, Glycine max
  unsure (1)..(108): unsure at all Xaa locations
  Clone ID: PAT_MRT3847_104577C.1.pep
XXHAYVSSEFGSXQXXXXXXXXXXXXXXRSXLXKPXFXXSXXXXXXXLXXLXMXXXXSXXXXQAXIXVXXACXXXXXXXXXXXPXXXXXXXXTXXQSXXXYXXXXSEX

SEQ ID NO: 147902 - protein, 150 aa, Glycine max
  Clone ID: PAT_MRT3847_104578C.1.pep
MCDFIPKLIHDGVIDSYGVPIRRQEIQLSPNMPMMDTENFPWRGHDKLHFDHLVQEMQTMRLGEWWLCNSTCNLEPAAFFISPRLLPIGPLMGSESNKSSFWEEDTTCLEWLDQQLPQSVVYVSFGSMAVMDPNQFNELALGLDLLDKPF

SEQ ID NO: 147903 - protein, 575 aa, Glycine max
  unsure (1)..(575): unsure at all Xaa locations
  Clone ID: PAT_MRT3847_104579C.1.pep
INLRRLEFVDTEIIKVPPHLGKLKNLQVLMRGFIVGKSSDFTIQQLGELNLHGSLFMELQNIKNPSDALAADLKNKSGRVKLEFRWNSHGKHDDHAKERDVVVIENLQPSKHLEKLSIINYGGKQFPNWLSDNSLSNVVSLELDNCQSCQHLPSLGLLPFLKNLEISSLDGIVSIGADFHGNSTSSFPSLEILKFSSMKAWEKWECEAVTGAFPCLKYLSISKCPKLKGDLPEQLLPLKKLEISECKQLEASAPRALELKLELEQQDFGKLQLDWATLKNLSMRAYSNYKEALLLVKSDTLEELNIYCCPKDGMDCDCEMRDDGCDSQKTFPLDFFPALRTLDLNGLRNLQMITQDQTHNHLEFLTIRRCPQLESLPGSTSLKELTICDCLRVESFAEGGNPSHLKEMHLXKCSSVLVASMEGSLGDNRSPSSLKKMQHDKISVPTHGLLPICFARXPSLDVLSLTELDLECLCHHAFLKLFILGHCPNFHLLPEKVLHKAICHLXLGKDCPILTSLTRTQEXEDCPNISHIPTEDVDWTKVVLLIYKNYNETFSFLVHMNYHEPSTSFVLQGNY

SEQ ID NO: 147904 - protein, 68 aa, Glycine max
  unsure (1)..(68): unsure at all Xaa locations
  Clone ID: PAT_MRT3847_10457C.1.pep
PLPGRVLFFGEHSCRRFLMGGTIYAGFNVSLCPLIGTKAGLSIEYGMIFNFXXTQPKKKKKKKKKTKP

SEQ ID NO: 147905 - protein, 49 aa, Glycine max
  Clone ID: PAT_MRT3847_104580C.1.pep
EQVLRKSTLSPKAKTPSKHLIRYMSHSAFFHLLHIGKLVPLMPSMLHQS

SEQ ID NO: 147906 - protein, 95 aa, Glycine max
  Clone ID: PAT_MRT3847_104581C.1.pep
VELDPINRENYLELVHDHFPQCYSKTFCNLRCMDGHRNRHDYSIQHHRQGSSSLMTRGGTTMNRISTTSRHGQYNRHRHVHDNRHRHDLGNPLHS

SEQ ID NO: 147907 - protein, 79 aa, Glycine max
  unsure (1)..(79): unsure at all Xaa locations
  Clone ID: PAT_MRT3847_104582C.1.pep
YIITYDALVDNEIINITRLVNMGYMKSEIIGYQRGILNINIFCYNMMMKYNHSSFVELKIRIFLLFSQYIYQLRXXRTX

SEQ ID NO: 147908 - protein, 65 aa, Glycine max
  Clone ID: PAT_MRT3847_104583C.1.pep
SFRSEKNSVNIRTVQYLLTGDELFSYSFRYKLIPNDMLLKVEGKCFINRAVNLYIIANPPAENET

SEQ ID NO: 147909 - protein, 79 aa, Glycine max
  Clone ID: PAT_MRT3847_104584C.1.pep
PYPVPSCSIMVVLQACCVALPIKSVSDSIWPNCDMPQNMGLQSVCFFPVWWCHSWTGIVKGPLLREQIKKVRVYDSARA

SEQ ID NO: 147910 - protein, 156 aa, Glycine max
  Clone ID: PAT_MRT3847_104585C.1.pep
QIFWFGDLNYRINMMDGEVRKLVALKNWDELMNYDQLSNELRSGHVFDGWKEGLINFPPTYKYDFNSDKYIGENPKEGEKKRSPAWCDRILWLGKGIKQLQYRRSENKLSDHRPVNSIFAVDVEVFDHRKLQRALNFTNAAVHPEVFLKEDGDWSY

SEQ ID NO: 147911 - protein, 75 aa, Glycine max
  Clone ID: PAT_MRT3847_104586C.1.pep
FSHQSVIYGYIYLWCGWNKEGKEDIKFRYPNYHSKIPQMISVCTLKLKYKHLACGSHTLVTILECQQKLANFPNT

SEQ ID NO: 147912 - protein, 53 aa, Glycine max
  unsure (1)..(53): unsure at all Xaa locations
  Clone ID: PAT_MRT3847_104587C.1.pep
XXQXKXNQXLXLETSXNTYSXGGXXFXEXVRGTWLRCCXLGXLFXFPEKXTRX

SEQ ID NO: 147913 - protein, 249 aa, Glycine max
  Clone ID: PAT_MRT3847_104588C.1.pep
MKFNIANPTTGCQKKLEIDDDLKLRAFWDKRISQEVVGDALGEEFKGYVFKITGGCDKQGFPMKQGVLTPGRVRLLLHRGTPCFRGYGRRNGERRRKSVRGCIVSPDLSVLNLVIVKKGENDLPGLTDVEKPRMTGPKRASKIRKLFNLSKEDDVRKYVNTYRRTFTTKNGKKVSKAPKIQRLVTPLTLQRKRARIADKKKRIAKAKSEAAEYQKLLASRLKEQRDRRSESLAKRRSKLSSATKQAATA

SEQ ID NO: 147914 - protein, 100 aa, Glycine max
  Clone ID: PAT_MRT3847_104589C.1.pep
IPGSTPRVRDDRRGKIHQIPLQVVYCREFINYLSNLKLVLDMETTLTREYITLHGSLPTNVFHVFTYMSINSSCNKCDNDKNQQPMCFRTVSFLIKCGNT

SEQ ID NO: 147915 - protein, 85 aa, Glycine max
  Clone ID: PAT_MRT3847_10458C.1.pep
RVRTLGILLERSSSNLFALVDNASSGPDQHMRCHRSPILADRTPPTWFARDERCQAIARCFPVLALEPLAPGLRTEDVLRELCLC

SEQ ID NO: 147916 - protein, 57 aa, Glycine max
  Clone ID: PAT_MRT3847_104590C.1.pep
NRKCFGNSKNALSLSSRCWQISLFGLSLTLQSIPQGLRTCHHCILPFYGNLKSLIFV

SEQ ID NO: 147917 - protein, 123 aa, Glycine max
  Clone ID: PAT_MRT3847_104591C.1.pep
DMEERNHDGEKLDEVMLPGFRFHPTDEELVGFYLKRKIQQRPLSIELIKQLDIYKYDPWDLSKMATTGEKEWYFFCPRDRKYRNSARPNRVTGAGFWKATGTDRPIYSSEGSKCIGLKKSLVF

SEQ ID NO: 147918 - protein, 100 aa, Glycine max
  Clone ID: PAT_MRT3847_104592C.1.pep
NTGEAKQCTTTPTTSPRHVHKPPVSATAPAPQPLFSLFKLAACDKVSIASTTKPSTLQPPAPSNAPNAPILSLKSLRRSWSSLRRRASGLTNLKFHFIFR

SEQ ID NO: 147919 - protein, 313 aa, Glycine max
  Clone ID: PAT_MRT3847_104593C.1.pep
MSDERAVHPDCRNASNPYHECSDYCFRVIAEAKIRSQQQESEVGQASGGNNSKQAIPDESYVEKEIHNGRPDLEENSDSDPDQPAVQEAEQEVDYTKLSARQKKWMELRSKMQEAKKRNQIEIAAEKKRMEAPTESRGVSKQKWLEDRKKKIGKLLDANGLDMTKAYMLDTQEAAEEKYKKWEKDPAPFGWDVFNQKTLYNAYKKRTKNVEVDVEEYNRMKEADPEFYRDASSLQYGKAPKISEEKIDRMVRELKDRDEKRNSFSRRRRFHEEKDIDSINDRNEHFNKKIERAFGKYTLEIKNNLERGTALPD

SEQ ID NO: 147920 - protein, 71 aa, Glycine max
  Clone ID: PAT_MRT3847_104594C.1.pep
QIKNPVEHQCKNRSLLFPSLYCQSSSLHFSSMSNSCMGIGLIPTCPIGDLAEDWPIVCPWECVKLFLVKTP

SEQ ID NO: 147921 - protein, 132 aa, Glycine max
  Clone ID: PAT_MRT3847_104595C.1.pep
PTRPPHASVEMDDHNNKPHHHNFGLTDLGQGGNNGPGPANTTFPSMRPNPTGEFFPGHHNRNLTLLPTNNPKHHQNFRVLMLGQDIMPPGFNNFVSTPNDFVVVTTTITLPIQPVTCGFNAVEGAGCIGGDP

SEQ ID NO: 147922 - protein, 51 aa, Glycine max
  Clone ID: PAT_MRT3847_104596C.1.pep
FDSVFICIYKRSMRKVYACIELGWMYLNSLKNLHLGTKKLHSRNSTEKDTR

SEQ ID NO: 147923 - protein, 65 aa, Glycine max
  Clone ID: PAT_MRT3847_104597C.1.pep
IVLTSVIIYTIIHRSLMHVLCITAELCTYVKNKIKCCCCKKKKKKKKKEKKKKKQKKTKITNRTT

SEQ ID NO: 147924 - protein, 53 aa, Glycine max
  Clone ID: PAT_MRT3847_104598C.1.pep
GIYYLWLPLPLSLTTLIWIEVILIGYLHFHKNAQLDPYNRLLPGGNYCNPLGL

SEQ ID NO: 147925 - protein, 64 aa, Glycine max
  Clone ID: PAT_MRT3847_104599C.1.pep
WIFGWWCQFFAVSSIYRTSIDNSYRCSNCKELAAQPDVDGFLVGGASLKPEFVDIINAATVKKN

SEQ ID NO: 147926 - protein, 53 aa, Glycine max
  Clone ID: PAT_MRT3847_10459C.1.pep
LHVSRDMYMLLYSLFLQHSDAIHTVHRRSRVYRGESSTRVYNGDETYPCEIRD

SEQ ID NO: 147927 - protein, 253 aa, Glycine max
  Clone ID: PAT_MRT3847_1045C.1.pep
MDNNTSACAYPQLESEEASSEHKSETQTSKKRKMVEKTVVAVRVGEKVGKLKNEGLPSDFWSWRKYGQKPIKGSPYPRGYYKCSTSKGCSAKKQVERCRTDASMLIITYTSTHNHPCPTPITTKSTTTKEEDQEHIELEEEEEQRDNNNNKPSDEVTNEENFHYLQSPIRCSSQDIIIEQEDPFKLNTEKSHDRMDLLLEEEPLCFAQLKNLSASKNEELDFFDELEELPMSSSLLHFTRNIFSDERIPVGPS

SEQ ID NO: 147928 - protein, 72 aa, Glycine max
  Clone ID: PAT_MRT3847_104600C.1.pep
KKKKKKKKKKKKKKKKKKKKKKKKKKKKKKKKKGGPFKRTKFNNRGLETKNFFFGAPKINFGGGVLKRGGGE

SEQ ID NO: 147929 - protein, 98 aa, Glycine max
  Clone ID: PAT_MRT3847_104601C.1.pep
TFYYTGVNVRMIFMYKMKGCGHIILLIIFNITNKNDSMSRIFSPTDTMNFLIRFLATFLSFKSYFFFLLDPSLVENSFPTCSYFSFSKTFFLPKPMFK

SEQ ID NO: 147930 - protein, 46 aa, Glycine max
  Clone ID: PAT_MRT3847_104602C.1.pep
MESGFTSKDTYLSHFNPRDYLEKYYKFGSRHSAESQILKHLLKNLF

SEQ ID NO: 147931 - protein, 72 aa, Glycine max
  unsure (1)..(72): unsure at all Xaa locations
  Clone ID: PAT_MRT3847_104603C.1.pep
LRIMRFFVLSGIRCYESYXICVPSAATXAXQIEXQFPISEXCLLCGIIKXKIVVYXVVTXXPLXEXTLGNSK

SEQ ID NO: 147932 - protein, 78 aa, Glycine max
  Clone ID: PAT_MRT3847_104604C.1.pep
YVTQCKLSQIYFKGIHRQNHIGRCCCCFFLAKSHTRAREASFFLSIPLFQRRLGLAAFWGPIILPFYNPFRLRPVRGK

SEQ ID NO: 147933 - protein, 88 aa, Glycine max
  Clone ID: PAT_MRT3847_104605C.1.pep
LTLYTATGLKRGAATPTLPNGAYKTLLSRIGYYQIPISLWHAAALGLEGKLLHRGLLKPKINLSTCHCLNQAAPFCGICFECPCAALG

SEQ ID NO: 147934 - protein, 96 aa, Glycine max
  Clone ID: PAT_MRT3847_104606C.1.pep
QGSRCVSPCLFSLQWEKNKGFIRHQENWAGIVGSPLGAFISPAFRSRNTVNKEGFHGTQKIPPFCSLPPVLRWAGKKSCLLRPSLEVVGLVDAINV

SEQ ID NO: 147935 - protein, 207 aa, Glycine max
  unsure (1)..(207): unsure at all Xaa locations
  Clone ID: PAT_MRT3847_104607C.1.pep
MATKNPPFKIILGSSXKARREILSEMGYEFTVMTADIDEKCIRREKPEDLVMALAEAKADAIVQRLPTGGPLEEDASTTLLITADTVVVYRGVIREKPTSEKEARDFIKGYSGSHAAVVGSVVVTNLATGKRXGAWDSAEVYFLEIPDEVIDNLEILIDEGITFNVAGGLMLEHPLTLPFVDAVVGSTDTVMGLSKALTEKLLLEAL

SEQ ID NO: 147936 - protein, 31 aa, Glycine max
  Clone ID: PAT_MRT3847_104608C.1.pep
VQRDDAKFEMILLYFSYWTVFLYNSELQCPL

SEQ ID NO: 147937 - protein, 125 aa, Glycine max
  unsure (1)..(125): unsure at all Xaa locations
  Clone ID: PAT_MRT3847_104609C.1.pep
PRVRDPMASLNWPSWRYGLRHXYRLFKQRITKEGQEDVAEDWIEKYSPWDVVRHDILYPIRVYAHVEVNPDXSRKWVVREVAHALAYEVPITGYHTKITISLGLSNAKASAEDFNKYGYNDAHHD

SEQ ID NO: 147938 - protein, 81 aa, Glycine max
  Clone ID: PAT_MRT3847_10460C.1.pep
RAESARDGCEKTTEGGVCSVYVCVAYVMLVSGPPLTQRQRESIKVHSNFDIKKMRKKKMSFDLINRLETCPFTSLFQTFNL

SEQ ID NO: 147939 - protein, 443 aa, Glycine max
  Clone ID: PAT_MRT3847_104610C.1.pep
GICKTRISPEDLLGVLRVIWNDVLLIDEVLQEFTLSNHSLEAAKVAVTSFVRSTFSHLLQDISDSLLQILKKDGAEQCTLDVVLDASTKAVLQGGLNVLLDFRKILDDDSGILVRLRELITDWVQEGLQDFFRQLEDQFLLFSGRNNSSIQVHALAEGAQGYKAFAGLVLVLAQLSVFIEQTVIPKVTEEIAASFSGGSVRGYESGPAFVPGEICRKFRSAGEKFLHLYVNMRTQRVSLLLKKRFTTPNWVKHKEPRDVHMFVDLFLQELEVIVNEVKQTLPQGRRKHHRTDSNGSSVSSRSNPLREEKLGRSNTQRARSQLFETHLAKLFKQKVEIFTKVEYTQESVVTTIVKLGLKSLQEFEVKQILNQGRRKHHKTDSNGSSASSRSNPLREEKMVRSNTQRVGAKLLGCLDPIPLEPPILDKPKRANTQESVVLTIISS

SEQ ID NO: 147940 - protein, 40 aa, Glycine max
  Clone ID: PAT_MRT3847_104611C.1.pep
VVTNSLQLSSSLEKKKKRKMYFSPCYLTWSFTFPVNNYFT

SEQ ID NO: 147941 - protein, 405 aa, Glycine max
  Clone ID: PAT_MRT3847_104612C.1.pep
MSENLMEKVSALGERLKIGGVEVGRKMSEGMSSMSFKLKEFFQPGPNQADKLVEDATSEALDEPEWALNLDLCDLVNTDKLNCVELVRGIKKRIILKSPRVQYLALVLLETLVKNCEKAFSEVAAERVLDEMVKLIDDPQTVVNNRNKALMMIEAWGESTGELRYLPVYEETYKSLRSRGIRFPGRDNESLAPIFTPPRSVSSAPEADVNLQQQFEHDIPEQFHHDVPVLSFTPEQTKEALDVARNSIELLSTVLSSSPQQDALQDDLTTTLVQQCRRSQTTVQRIVETAGDNEAVLFEALNVNDEIQKVLTKYEELKQPATTPLHPEPAMIPVAVEPDESPYHSKEDALIRKPAGSRTGVEGGSNDDMMDDLDEMIFGKKGGEASDGGHETKKQPSSKDDLISF

SEQ ID NO: 147942 - protein, 69 aa, Glycine max
  unsure (1)..(69): unsure at all Xaa locations
  Clone ID: PAT_MRT3847_104613C.1.pep
MDNNNILGLLKLRIKRGINLAIRDARASDPYVVVNMGDQKLKTRVXKKNCNPDWNEELTLSVKDIKTPI

SEQ ID NO: 147943 - protein, 60 aa, Glycine max
  Clone ID: PAT_MRT3847_104614C.1.pep
EYEGTNTRKIFVNGPQANHTNEFDITFNPKPFEALGLHFFHLYKLSNLLIPTNLGLHLYI

SEQ ID NO: 147944 - protein, 58 aa, Glycine max
  Clone ID: PAT_MRT3847_104615C.1.pep
RGCQTLHFFLNAVGCFFLTEIPHEMKPSEGAPIIITFRTMAPSKKKKKDFPFLFNMRA

SEQ ID NO: 147945 - protein, 38 aa, Glycine max
  Clone ID: PAT_MRT3847_104616C.1.pep
KIINHDLFKKIIMKLDKYIEDQNERNIKLENRNLHLKK

SEQ ID NO: 147946 - protein, 272 aa, Glycine max
  Clone ID: PAT_MRT3847_104617C.1.pep
MKPKPFIFAKRFPILDLFSFPFSPQQQRFLFSTHNRHSFDEAVPGCSAVYQHVLKFQRPPTIRWSPHLENTASFIGTVAREPTRVNSTTGKFGVYTVLKVPKSNQSNSSFFRYYLLLMMRNNVAKLASEHLKSNDFIHVLGSLGSFTKPDANGILRLNYKLEVKEFEFVAQRSGYLGDKKLESVEDAGMQKNQNRLHLWQVFFSNPNEWWDQRKSKRNPKQPDFKHKDTGEALWLSEYDPPWVKRQLQLFDSKIAGGSAGRRSRVTNWVYDE

SEQ ID NO: 147947 - protein, 59 aa, Glycine max
  Clone ID: PAT_MRT3847_104618C.1.pep
GLHPCWQGPVLVVASPTVKNPLVALLARAHAYVNIRACESHGDVGLGSSLRCSVCRLRC

SEQ ID NO: 147948 - protein, 42 aa, Glycine max
  Clone ID: PAT_MRT3847_104619C.1.pep
SSSLTQGASICKIILPLEPRRLVSSTCVFYKEGATAGTETVN

SEQ ID NO: 147949 - protein, 177 aa, Glycine max
  Clone ID: PAT_MRT3847_10461C.1.pep
MLTCIACTKQLNNGSLRQEEGEEAVHTPSTKQAIKALTSQIKDMAVKASGAYKSCRPCSGSSNGNRNRKYADSDMGSDSARFNWAYRRTGSSNSTPRMWGKEVENGGRVKGLSSGEGTPASVSGRTESVVFMEEDEPKEWIAQVEPGVLITFVSLTQGGNDLKRIRFSREMFNKWQA

SEQ ID NO: 147950 - protein, 210 aa, Glycine max
  Clone ID: PAT_MRT3847_104620C.1.pep
MDHHFTSETSLIILLLITSLSSLATATNINILHHDLQSDITEFCKKTTNPALCAETIHPHFLKNRIEPFKALDIEVDATLAKAKKTLANIQTLESKTGTTKSSKDSFDICKDQYKSMLDAIKETKAAIANKDIITAKFKFSAVLSFQAACKDAFEDGKIPFFEDSDAVYNLGGNCLDIIADMEKAQGPQKMPPVQQSAPSAFSNVIGTVS

SEQ ID NO: 147951 - protein, 78 aa, Glycine max
  Clone ID: PAT_MRT3847_104621C.1.pep
LSIELLFCFSLEGLSIDFSFCPASVSFDVLSLCQMVLLLPLLALMLALNSWKKIEKANVDRRLLGAMHHCRTYTLICF

SEQ ID NO: 147952 - protein, 104 aa, Glycine max
  unsure (1)..(104): unsure at all Xaa locations
  Clone ID: PAT_MRT3847_104622C.1.pep
HTNIPLQPQDHHVPQPHGQVVVQDEWSFLESFEXQFGTKHPFFYAFRFVESMKLAEXDHKFLFIYLHSPDHPXFCKETLCLEPVIQFLDVNFVCWGGLADRGEG

SEQ ID NO: 147953 - protein, 94 aa, Glycine max
  unsure (1)..(94): unsure at all Xaa locations
  Clone ID: PAT_MRT3847_104623C.1.pep
MSGASCGTISNPYSTVKAAKLEPSDPEYCRVSMTXTVTKQAYSGSPXYCPDRVTYLYPLSSXPPYYLTGQFPRDXCWDTGGLSADPKTLARNRE

SEQ ID NO: 147954 - protein, 37 aa, Glycine max
  Clone ID: PAT_MRT3847_104624C.1.pep
LEPAVGENGYYKICRRPTVCGLDSMVSTVDAPYPSSH

SEQ ID NO: 147955 - protein, 86 aa, Glycine max
  Clone ID: PAT_MRT3847_104625C.1.pep
LPNYVEFIDNFRVKKVLIAAKLSGKDIKAIPQLPPTNLFPLGQAPAFDDGKVCLFGAEAISKYLLGTGSIYLPQVLIFITQFICIF

SEQ ID NO: 147956 - protein, 55 aa, Glycine max
  unsure (1)..(55): unsure at all Xaa locations
  Clone ID: PAT_MRT3847_104626C.1.pep
IRYSRLSRPATKYQDGKHFRDLPKLNRNPGKVLKVSVXLEGCLQPESCVPIKPWH

SEQ ID NO: 147957 - protein, 97 aa, Glycine max
  Clone ID: PAT_MRT3847_104627C.1.pep
WGKRQEGKLASYRSKVFRVTRRAMGALHHGPVEFYHLTRPYPPCNKACWFAAMDRDDMATQDSKLDGRRPPLVSFKFFPLSFFFFWFIIKMFFISRA

SEQ ID NO: 147958 - protein, 36 aa, Glycine max
  Clone ID: PAT_MRT3847_104628C.1.pep
LIFNCKLMHFCLPDFHGWSQEGLTHLRCIFLKRVII

SEQ ID NO: 147959 - protein, 63 aa, Glycine max
  unsure (1)..(63): unsure at all Xaa locations
  Clone ID: PAT_MRT3847_104629C.1.pep
MRECIPIHIGQAGIQVGNACWELXCLEHGIGPDGQMPSDKTVGTGDDAFNTFFSETGAGNQCH

SEQ ID NO: 147960 - protein, 141 aa, Glycine max
  Clone ID: PAT_MRT3847_10462C.1.pep
PDYVAKEMKDPYYHQTTYSDVGSDKNRGLYTTEADRISGGSQYEPPRGVGTTTTTTSSTTTEEGGILQSAKETISSAYNAVAAKIFETAEVAKEKIDHYMHPDQPHVVTEKTEYTPKVGEEYSTRPPGNVSNLSEKDKHKL

SEQ ID NO: 147961 - protein, 70 aa, Glycine max
  unsure (1)..(70): unsure at all Xaa locations
  Clone ID: PAT_MRT3847_104630C.1.pep
GSXXXXXXXACGXKVACYKKKYCFSLKXHPFKSXVXSIPSHXXGSKPLXXSPNPXXWXXKKKKKRXXALE

SEQ ID NO: 147962 - protein, 75 aa, Glycine max
  Clone ID: PAT_MRT3847_104631C.1.pep
RTTLTAINLIQIGLTLTDADDNLPDLSGNLFIWEFNTRDFDVTRHTYALDFIDVLPHKGIYTLHYAIEHVNSTHF

SEQ ID NO: 147963 - protein, 84 aa, Glycine max
  unsure (1)..(84): unsure at all Xaa locations
  Clone ID: PAT_MRT3847_104632C.1.pep
FXARXXTSXVPXXXFPMPLLRLXXCATTXXVCYVFIXTVSTXVAWFXYYLLNXLFXXSFSHXKXXLXNPFGHPRNRRNHFXXLE

SEQ ID NO: 147964 - protein, 109 aa, Glycine max
  unsure (1)..(109): unsure at all Xaa locations
  Clone ID: PAT_MRT3847_104633C.1.pep
XXXXXXXVXXVNCXXXAXSEVVRSXXSXXPGLXNXXXXTXXXXXXXIXXXGXXXXXXXXWXATXXXXLAGPXSYTMVXDGLRSXXGVXXVXXIXXXXRAEFRAXVXVXA

SEQ ID NO: 147965 - protein, 62 aa, Glycine max
  Clone ID: PAT_MRT3847_104634C.1.pep
NAKRSAPAQCRVYSESSRGPRVYSQPRIHVQQQSPPQCMSHHRCVYSVVLMLPFTVRSATPS

SEQ ID NO: 147966 - protein, 312 aa, Glycine max
  unsure (1)..(312): unsure at all Xaa locations
  Clone ID: PAT_MRT3847_104635C.1.pep
MAAKSKILVLGGTGYIXGKFIVKASAEAGHPTFALVRETTLSHPEKSKLIESFKKPLELTLLYGDVNDHESLVKAIKQVDVVISTLGGQQIDDQVKVIAAIKEAGNIKRFLPSEFGLDVDHHNAVEPVASFFNKKVKIRRAIEAEGIPYTXLCSYAFAGYFLPTLGQQNVTAPPRDKVVILGNGNXKGVYVTEEDVGTYTIKAVDKTQEPLNKTLHQKPPANVLTFNELVXSLWENKIKTTXFDKIYVPEDQILKKIQESSFPANFLIALGHAMLVKEAFNNEIDPSVSVEASELYPEVKYTTVDNYLNAFV

SEQ ID NO: 147967 - protein, 152 aa, Glycine max
  unsure (1)..(152): unsure at all Xaa locations
  Clone ID: PAT_MRT3847_104636C.1.pep
VHATFVTYVSSITRSGGCTDDVGIXHHPTNVCGGDTGXLTLSCGYDGDTNNHYGTTAVYTDYIHTHYVSTGCYSLHIHPHQLVTTGDFAGLICTLHLKIMIYFYGIYAVDTDSAALSGTICGTSYXRTASADYVTTAGTGDGSGTVSGELTG

SEQ ID NO: 147968 - protein, 142 aa, Glycine max
  Clone ID: PAT_MRT3847_104637C.1.pep
ALHLRSSRVMKILEESQNERFQQLTNFEKKFKEEVEREEEQALEKIAEILAALTSKKTAMVSEASRHMQDTSMQQSKRLQLEMLNMQQVSKDGTKEVGEYVENVKSHYVQQIFSASDIKATMENCLLECSKTVDNSKKHISF

SEQ ID NO: 147969 - protein, 48 aa, Glycine max
  Clone ID: PAT_MRT3847_104638C.1.pep
GPTWVTFNRGQPPLTTKIGNQEQPRWNLPTGTGLHNEWPPNRNPRLRK

SEQ ID NO: 147970 - protein, 57 aa, Glycine max
  Clone ID: PAT_MRT3847_104639C.1.pep
DCKGFLCTQWQQRISYELDMVFSMISQLIQQHETSLILLVEVDHVPNYVIDNQIRVI

SEQ ID NO: 147971 - protein, 83 aa, Glycine max
  Clone ID: PAT_MRT3847_10463C.1.pep
RCDDSYVQLASPLQVKMFAKFEMLHNGWVQYIRYGIERIPQAYEQNAKPLEASVNKWTSSRTIAAGSPIQSLSIHRNFIRSFP

SEQ ID NO: 147972 - protein, 88 aa, Glycine max
  Clone ID: PAT_MRT3847_104640C.1.pep
PESDLNPIQRQTDYRAGVGSTKCTSRCDKATCTLHAHYERLDWCTVMPALAFTHQNTSAWPFNGVLCTEGRAYGRGDLMYMPLCSDNF

SEQ ID NO: 147973 - protein, 58 aa, Glycine max
  Clone ID: PAT_MRT3847_104641C.1.pep
QFYRDEFHHAWNNKILATTLFIPIDGATVALRYLPIEVLRQPCATKEDPGCDGDNHRL

SEQ ID NO: 147974 - protein, 73 aa, Glycine max
  Clone ID: PAT_MRT3847_104642C.1.pep
FLPLENGECSSKRWSLETAWFSPSLRSTSRASDGFSLTQGRGKFSCPQNASIVIPKENGPSPSSRHKYPKMFT

SEQ ID NO: 147975 - protein, 137 aa, Glycine max
  unsure (1)..(137): unsure at all Xaa locations
  Clone ID: PAT_MRT3847_104643C.1.pep
SSNNYLSMETEQELEWAEAQNMVFLSEDLVATAKQQLLFLAEVDRNRCLYDGPVLHRANYRYKYCWLPLLAKHAESHVTQDPFVVPLDCEWIWHCHRLNPVRYKTDCMELYGRILXDRNVVSSLREPARGSEKLWET

SEQ ID NO: 147976 - protein, 59 aa, Glycine max
  Clone ID: PAT_MRT3847_104644C.1.pep
STYINKRMCSSLGKGKKSGCVTRLDPFSVTLLTVGLEAQNERRSINAANAILTLLRKNW

SEQ ID NO: 147977 - protein, 79 aa, Glycine max
  Clone ID: PAT_MRT3847_104645C.1.pep
YQIITTYLLDDADKIYIKNRYCTYLLAYRQPSLRQYPLISHLSCCHTPEGDPCEHALGQLRYCPSYSPVYSSYPIVSPY

SEQ ID NO: 147978 - protein, 127 aa, Glycine max
  Clone ID: PAT_MRT3847_104646C.1.pep
QRSLFSLHSTLSQPPGTYQRNATLRYATLAPPIFNFTFRFYLIGFDFFFLLFSFLQSLTRRANHNGRVNYRKPNNRFSVKASAKEIAFDQHSRSAMQAGIDKLADAVGLTLGPRGGLFCISRFVLFF

SEQ ID NO: 147979 - protein, 69 aa, Glycine max
  unsure (1)..(69): unsure at all Xaa locations
  Clone ID: PAT_MRT3847_104647C.1.pep
MAEKDATTLKLKPRRLKGHDDSTTCCIASRERSHLIVTSGDDGRVCWFDLRCPDXAELVMDVSVEPVSS

SEQ ID NO: 147980 - protein, 66 aa, Glycine max
  Clone ID: PAT_MRT3847_104648C.1.pep
RKKYYGGLTAPYYYFKAIPEMIDFSTYFKNLVWETKTNPGPKWIPPISRDFKKPGNQWLQNLHLPF

SEQ ID NO: 147981 - protein, 50 aa, Glycine max
  Clone ID: PAT_MRT3847_104649C.1.pep
TNTRSNVNNTCYNKKNEQIGWSLFYLNKMIAIHMTNTPSVVFSQPYGRVG

SEQ ID NO: 147982 - protein, 63 aa, Glycine max
  Clone ID: PAT_MRT3847_10464C.1.pep
PVSAISVSMKGEKVTEMGAPGPHSQFIPYPATLSNLSGQAFENSFPLSWFPHLRQAQFTKCLL

SEQ ID NO: 147983 - protein, 111 aa, Glycine max
  Clone ID: PAT_MRT3847_104650C.1.pep
SNSPFNTFGGGGGSTLKPRTYKHEGGRTLHLFVLKFKRTEPKKITLYKRKTKKMQFPPKSIQKRRLNAGALRRLDNLPGRGNPHFLLQLGHHDPHGELPLPICKKSKILWP

SEQ ID NO: 147984 - protein, 134 aa, Glycine max
  unsure (1)..(134): unsure at all Xaa locations
  Clone ID: PAT_MRT3847_104651C.1.pep
RTKQTDRESTGGKARRKLLATKGALKSAPSTGGVNKPHRCRPGSGALRXIEIYQRSTGRWIRKLPLQRLVWEIAQDCKTDLNVHSHAVLRLHEACDAYLGGLLEDTNVWAMRAXRVSVMPIDMHVARWILGERA

SEQ ID NO: 147985 - protein, 171 aa, Glycine max
  unsure (1)..(171): unsure at all Xaa locations
  Clone ID: PAT_MRT3847_104652C.1.pep
YITLKRWSCVDSCXWFAGLICSIWWFLLFLYNAMPASFPQYVAEAITGPLPDPPGVKLRKEGLTVKHPVVFVPGIVTGGLELWEGRQCADGLLRKRLWGGTFGELYKRPLCWVEHMSLDNETGLDRPGIRVRPVSGLVAADYLAPGYFVWAVLIANLARIGYEEKTCYGCY

SEQ ID NO: 147986 - protein, 47 aa, Glycine max
  Clone ID: PAT_MRT3847_104653C.1.pep
ALVGALVRAQALIFCCLKILLLCFCCWCLLIYFSNKICMYLQHLHDC

SEQ ID NO: 147987 - protein, 78 aa, Glycine max
  unsure (1)..(78): unsure at all Xaa locations
  Clone ID: PAT_MRT3847_104654C.1.pep
VTSFSFNIEKRNVYSTXRYDIYRLIIAQQSGINQKKKKRPYLCLYGYRVHVCMSALPYADFAISKQLHSRQKNSNKIK

SEQ ID NO: 147988 - protein, 199 aa, Glycine max
  unsure (1)..(199): unsure at all Xaa locations
  Clone ID: PAT_MRT3847_104655C.1.pep
MNANMASSPTLIPFLLIFFLFHFHFHRSSSLPLSVENPEDDVIVSSPKGTFTAGFSPVGENAYCFAIWFSTQATTKTVVWMANRDQPVNGKRSTLSLLKTGNLVLTDAGQFDVWSTNTLSSKTLELHLFDTGNLVLREQSNQSAVLWQSFSFPTDTLLPGQIFTRFTKXASSRSEGNHSSGFYNLYFDNDNVCAYSLRW

SEQ ID NO: 147989 - protein, 135 aa, Glycine max
  Clone ID: PAT_MRT3847_104656C.1.pep
HQQTQPARGPADPGWADPTPARWSQQAPQTDLKARGSVAQTRKLRQKRGQHFPFKLANATHTLLTRSRRILQTGPHHKARMGANETRSASLQAGTARLVRRQAPQTTCGSVSGKEEQHIGVDAATHGERCVGVEP

SEQ ID NO: 147990 - protein, 82 aa, Glycine max
  Clone ID: PAT_MRT3847_104657C.1.pep
KGGSTLKGASPFLEPPQGTGPVNCAFLTPPLRSLKRSKGYPLRFPKFQILSPSPGGFFFPNTRFWPPPPSFWGVPPWGFFFN

SEQ ID NO: 147991 - protein, 84 aa, Glycine max
  Clone ID: PAT_MRT3847_104658C.1.pep
SLSMASSVSTTPPLYFDEKWKLSKKEGSTRSRSSSTPFIKNSSSQRRCAFASKCARLVKEQRARFYIMRRCVTMLICWRDYSDS

SEQ ID NO: 147992 - protein, 181 aa, Glycine max
  Clone ID: PAT_MRT3847_104659C.1.pep
MEAERKRLKPRLERRNAMKNIDYQLKDEDADADADAAYLNQRSFRVKGIDGEFDRILRSLGLSGPEDFAIPAAAWEEARAHKARSSVQPREGGIKGVRPPVLEPPLVTSAWTSQQQTERVPPSDSVSRDDDVAVEAQTEEVSGFADDHGSFDIHNLSPMEVGISGSWQKGDILGKGSFGTV

SEQ ID NO: 147993 - protein, 46 aa, Glycine max
  Clone ID: PAT_MRT3847_10465C.1.pep
GFPPELFKGPQIGIKCFSERTRAKDLLSQNHHLGWFKAKNCDQFGC

SEQ ID NO: 147994 - protein, 134 aa, Glycine max
  Clone ID: PAT_MRT3847_104660C.1.pep
KINFPGSDVTIAEALMAPTVIYVKQVLDLISKGGVKGIAHITGGGFTDNIPRVFPEDLGAVIYDGSWEVPAVFKWLQEAGKIEDSEMRRTFNMGIGMILVVGPEAANRILENRGETEKFYRIGEIISGKGVTFS

SEQ ID NO: 147995 - protein, 391 aa, Glycine max
  Clone ID: PAT_MRT3847_104661C.1.pep
MSFSTCAEISRCFAAATAAASAKPNSGKSNGTATTSLSFLTPIGRYGAVSSVSRSNKTNRIVVEATQGLTYRDAGVDIDAGSELVRRIAKMAPGIGGFGGLFPLGDSYLVAGTDGVGTKVMLAFETGIHDTIGIDLVAMSVNDIVTSGAKPLFFLDYFATGHLDVDVAEKVIKGIVDGCKQSDCVLLPTETARRPQKGKEGEYDLSGCAVGIVKKDSVINGSNIVAGDVIIGLPSSGVHSNGFSLVRRVLAQSGLSLKDQLPGSDVTIAEALMAPTVIYVKQVLDLVSKGGVKGIAHITGGGFTDNIPRVFPEGLGAVIYDGSWEVPAVFKWLQEAGKIEDSEMRRTFNMGIGMILVVSPEAANRILENRGETEKFYRIGEIISGKGVTFS

SEQ ID NO: 147996 - protein, 88 aa, Glycine max
  Clone ID: PAT_MRT3847_104662C.1.pep
GFRSLGASARTSREATPEATPRTSPITSPVLEVSNEEDGAADADYAVDMIAAQSTWDPWPVTAQDISQPVQDAPSSPLDEPIAAQEEP

SEQ ID NO: 147997 - protein, 79 aa, Glycine max
  unsure (1)..(79): unsure at all Xaa locations
  Clone ID: PAT_MRT3847_104663C.1.pep
KRQPIGTYSQGHLDYXEPPLTPLLEPDKLKIRPFYRPGIAEFVDTLLLLYYARSTVMGVNRLPSKCTSVDIQRIACAFD

SEQ ID NO: 147998 - protein, 157 aa, Glycine max
  unsure (1)..(157): unsure at all Xaa locations
  Clone ID: PAT_MRT3847_104664C.1.pep
MSFSTCAELSRCFAAASAKPNSGQSNGTSTTSLSFLTPIGRYGAVSSVSRSNKTNRIVAEATQGLTYRDAGVDIDAGSELVRRIAKMAPGIGGFRGLFPLGDSYPRAGTDGVGTKVMLAFETGIHDTIXIDLVAMSVNDIVTSGAKPLXFLDYFATG

SEQ ID NO: 147999 - protein, 123 aa, Glycine max
  Clone ID: PAT_MRT3847_104665C.1.pep
NSSLKIKFPHGLQFLVMLLLLPQVTESLYTPSFISDPNLIPQSLQHSLITECSHPHYYQQTQQFPYYPQHERLTLVISFGPMVINLKTLIPSRITVPNIFVSGIYYKKKVCLFTYLVCFITCF

SEQ ID NO: 148000 - protein, 112 aa, Glycine max
  Clone ID: PAT_MRT3847_104666C.1.pep
GKKLINHSMKVNTGFVSMSCTGTCFSKGKGVKNSSSDACTCRKLDGGVAIASWLCQSVASAFFASLEWCSCFHVDTINDIDGPPDDGDSSSTFAPFILNAEKEDSLLLVPKS

SEQ ID NO: 148001 - protein, 69 aa, Glycine max
  unsure (1)..(69): unsure at all Xaa locations
  Clone ID: PAT_MRT3847_104667C.1.pep
ADEDDEDVQIPSHPPRRPSHCQRDRYDDEDEDAHKPRRSXPSLGKRERVQDQDEDADEDEDQPRKIREW

SEQ ID NO: 148002 - protein, 77 aa, Glycine max
  unsure (1)..(77): unsure at all Xaa locations
  Clone ID: PAT_MRT3847_104668C.1.pep
SCXSTGGXALXAACLRTXEXHIXERSGLSXXXDSALFPXLLFKXCQXSXSSVTYXIXSPNXEAWVXSLGQEXGLQEQ

SEQ ID NO: 148003 - protein, 57 aa, Glycine max
  Clone ID: PAT_MRT3847_104669C.1.pep
CFCSFHLLEYDLDDSLIRRIFWPVSVFQSFCPVCDRALVCCHFFSDSRSLLLFACVK

SEQ ID NO: 148004 - protein, 130 aa, Glycine max
  Clone ID: PAT_MRT3847_10466C.1.pep
KEYFNDTFFVFVYCFHISFLLHIPRLVLSSDGLALLALKSAVDEPSAAAFSDWNNGDPTPCAWSGIACANVSGEGEPRVVGISLAGKSLSGYLPSELGTLRFLRRLNLHDNAFSGVLPAQLSNCTALHRL

SEQ ID NO: 148005 - protein, 77 aa, Glycine max
  unsure (1)..(77): unsure at all Xaa locations
  Clone ID: PAT_MRT3847_104670C.1.pep
SRKHTRTFKNSLTPSNTSEHKRELIMLPHLMPYFMISLMXLFLSFLPSFLPLIISLLSHTFNPMSHSFNLSYTLLKL

SEQ ID NO: 148006 - protein, 50 aa, Glycine max
  unsure (1)..(50): unsure at all Xaa locations
  Clone ID: PAT_MRT3847_104671C.1.pep
MLSLEAYNVIKWHTVPVDXDXYIPDNVLGDQSRSDSKIVNQQTXFYAKSL

SEQ ID NO: 148007 - protein, 68 aa, Glycine max
  Clone ID: PAT_MRT3847_104672C.1.pep
TSKMVNWLPNVCIMLLFDGCIHPKFNKDVICLSCNRKILTKDVSHVSGNLRNLISLLLEIYSTFLEFH

SEQ ID NO: 148008 - protein, 91 aa, Glycine max
  unsure (1)..(91): unsure at all Xaa locations
  Clone ID: PAT_MRT3847_104673C.1.pep
AEVFLVLTYMHLWGEEXKRGGKTFFAFGFGAKNNFWYFVNYLGFDLKSLSGPVSATFYLGYSLLRGLANMLFTGTMGALFSFWVGHYWYFF

SEQ ID NO: 148009 - protein, 30 aa, Glycine max
  Clone ID: PAT_MRT3847_104674C.1.pep
KQLAVLPKFLHVMFSKRQRMCLILWKTELG

SEQ ID NO: 148010 - protein, 50 aa, Glycine max
  Clone ID: PAT_MRT3847_104675C.1.pep
SYSRCLATSMYVVYQSRRKREDKEGPPGVKGIRIKDFLRYRFASTVKILV

SEQ ID NO: 148011 - protein, 101 aa, Glycine max
  Clone ID: PAT_MRT3847_104676C.1.pep
TLAGMMEFFFTEAPWSMRGLATALSWASLAMGYFLSTVLVSTINKVTGAFGSHTPWLLGANLNHYHLERFYWLMCALSGLNFVHFLFWANSYKYRCSTKPG

SEQ ID NO: 148012 - protein, 83 aa, Glycine max
  Clone ID: PAT_MRT3847_104677C.1.pep
VTNIYFMEIMEGYSVYAFLDLALSNQYFILDLSCFKLIVVKFCQILLHILHFFSLSYKPVLLITDHINLDLNFELMMCQCDNF

SEQ ID NO: 148013 - protein, 164 aa, Glycine max
  Clone ID: PAT_MRT3847_104678C.1.pep
EILAPIKTVRLTRYRVQGAKTMKSLLKHGDLVVCPEGTTCREPYLLRFSPLFSELCVEIIPVAIDCHVTMFHGTTAGGLKCLDPFFFLMNPTPSYSGQLLEKVSPFITASNVINDDYAGFAVANHVQTQIGKALEFECTQLNRKDKYLILAGNEGIVSTTKSGK

SEQ ID NO: 148014 - protein, 52 aa, Glycine max
  Clone ID: PAT_MRT3847_104679C.1.pep
SYISYYIYTCFFSLILCLVNKGVPSHITLITLSLFIRDLASRISISNTQYIH

SEQ ID NO: 148015 - protein, 42 aa, Glycine max
  Clone ID: PAT_MRT3847_10467C.1.pep
THNIFSTKWGQTRYHIKTTHNTNSLLIIKVHKLLSHSHDAIK

SEQ ID NO: 148016 - protein, 55 aa, Glycine max
  Clone ID: PAT_MRT3847_104680C.1.pep
ALISLLSYLFFFIWHSTRRSCSYLIAGHPTIYRSQFSTLTSHNVLLLSFQIHHHC

SEQ ID NO: 148017 - protein, 100 aa, Glycine max
  Clone ID: PAT_MRT3847_104681C.1.pep
HNQGFKKWFTPAIVVPSSKFLESLQLYIMTVIVAAFVHISHNIKDSHVRPQPQLKTFLLIAGMLDIFSSLQFFGLTNEVHNVRGPKIALSVFRCIQNAIG

SEQ ID NO: 148018 - protein, 78 aa, Glycine max
  Clone ID: PAT_MRT3847_104682C.1.pep
MQPNIEWDVTLQEADTNEFEKVDAALMSLINHKSSSIDNFQSHMENLGMCIENLEVGVECLSRQLIRTRVSLLNIFNH

SEQ ID NO: 148019 - protein, 135 aa, Glycine max
  Clone ID: PAT_MRT3847_104683C.1.pep
EKSSSLSQTPSAARPLVPPGFASTKLERNLATKTSLNTHSTEVGRPAPGDTGVLEASDDNGFIQLNAEVKGKEAMGAFNPDNSNSILYKLFGNASTLDNDKSTSIVEQPDQKADETWSPHAFQSSKFAHWFVEEE

SEQ ID NO: 148020 - protein, 318 aa, Glycine max
  Clone ID: PAT_MRT3847_104684C.1.pep
MTSNVAHTTIDNSEQLYKSDKPEVLPAVLTCEDLEQSILSQVGENGSSRPRPIQDKDFDAKTEQLTPVDNHASQHLLSLLQKGTSLNDMELSSILDSSDKVLKLKGVTTGNVLDNPREANVDVSNSSKTLTLETLFGSAFMKELQSVGAPLSVQRGSVASAGPDVSQALLFPFPTSDNVHPPTGELTLNKHGSGVLPSEQTNQPKSNRFEEQWLGYVDITRKLAALNPAFRDDRLVTRNQEGLAFPRGPYDMREPGIPYQNLNVQRSPQIHPQLNHGGPMFNQLDSHPPHISSYMKLPTPEGMVHHDSPPNHQFPGNM

SEQ ID NO: 148021 - protein, 45 aa, Glycine max
  unsure (1)..(45): unsure at all Xaa locations
  Clone ID: PAT_MRT3847_104685C.1.pep
LLXCXSIGXRXRCGXXFXXFXSXIXXXXDLXPXSELXXAXXRFPP

SEQ ID NO: 148022 - protein, 59 aa, Glycine max
  unsure (1)..(59): unsure at all Xaa locations
  Clone ID: PAT_MRT3847_104686C.1.pep
HIEGCTELTIEVFHRAPQLKGTILFALFLFCAFSSSXLPSAIADFVLDTASRPLEYGRT

SEQ ID NO: 148023 - protein, 431 aa, Glycine max
  Clone ID: PAT_MRT3847_104687C.1.pep
EKLKISYTRDFLLSLSGLDICRELPSGFDRSLLSEFEDASQDRQRSTGGLSVHSFSRRIEYSSSPPTRGDSFSRGIHGKWETRSSGRSDKDSDSQSELDSDSGKRFGNQLRRSWQGPEHDGLLGSGSFPRPSGYTPGLAALKFRANDNYQLNRSNEPYHPPRPYKAPHSRRETNDSLNDETFGSLECTSEDRAEEERKRRASFELMRKEQHKAFQEKHKLNPDKNNDDFDITSLADNDEKRVVNRSNEYVEPNVTLSVLSNDEKSSSLSQTPSAARPLVPPGFASAKLERNLATKTSLNTHSTEVGQPAPGDTGGNHVFSINSDNKEGKLLTKQVNNDQQNLQNTNLNISINYEKENILNLPSILDIADIKIGMGDQLRKRSALSVVLEASDDNEFINLNAEVKGRYFRVKFPKLVVSRGLVIFTFQKKIA

SEQ ID NO: 148024 - protein, 95 aa, Glycine max
  Clone ID: PAT_MRT3847_104688C.1.pep
SLQEADLFAEFENVNDIQEDMLNDIYDKATEEPSQSMHNSGKAEITEEQRARMEANRLKALERRAEITEEQRARMEANRLKALERRAALSQASQL

SEQ ID NO: 148025 - protein, 89 aa, Glycine max
  Clone ID: PAT_MRT3847_104689C.1.pep
DDHLLSEIYCNQLTNAYIMRQYRSLRIQSTNFPNFKPEEITAINTDYNEPGSLAPTGLYIMVTKYMSIQSEPAAVILRKKDPGVVTVNK

SEQ ID NO: 148026 - protein, 57 aa, Glycine max
  Clone ID: PAT_MRT3847_10468C.1.pep
QNQLPKTLLGTSSKGAILLGDLGTYLLFSKNHLPHLYQLMLQPSLNIKYIFPQSISS

SEQ ID NO: 148027 - protein, 371 aa, Glycine max
  Clone ID: PAT_MRT3847_104690C.1.pep
MAKASIFIYILVAAALLIFLSHSPDKHSGHRHRRLKLRSNFTLAPSRHHAVAFDPLVAELERHREDKEWEKKIIHQALPELESDPAPAHESQPEWEDFMDAEDYLNDEDKFNVTNRLILLFPKIDVDPTDWFVTEHELIQWNLQQAQREVLHRTQREMELHDKNHDGFVSFSEYDPPSWVQNADNESFGYDMGWWKEEHFNASDADGDGVLNLTEFNDFLHPADSKNPKLHQWLCKEEVRERDTDRDGKVNFKEFFHGLFDLVRNYDEESHNDTHNSDNSMDAPARVLFAQLDKDGDGYLSDVELQPIIGKLHPSEHYYAKQQADYIISQADEDKDGRLTLTEMIENPYVFYSAIFNDDEDDDSDYHDEFR

SEQ ID NO: 148028 - protein, 57 aa, Glycine max
  unsure (1)..(57): unsure at all Xaa locations
  Clone ID: PAT_MRT3847_104691C.1.pep
MMRARFPVLWLKVVFVASVSGSCGIAYRVXQSPSHNNCLRXSCNSGKDSYRNQACHA

SEQ ID NO: 148029 - protein, 106 aa, Glycine max
  Clone ID: PAT_MRT3847_104692C.1.pep
QTRVETFIGSPTVWENYLAPLDLFDFKSMAKITFSFLFSFFFFLLSSFLFFFLSQPILLLPLYPSFSNSELFGNHSKPTPIEQTRSSSSLSREKLEKCGRVGGRVG

SEQ ID NO: 148030 - protein, 274 aa, Glycine max
  Clone ID: PAT_MRT3847_104693C.1.pep
PTRPVQNKVSINWLLDQGPSLGIVRVHGVGLLHTELVSGIPVIFFQFVANLPAFHQVLVFLCIKHVPVPHVKAKERFLVGRIGPKEFRIYRCIVRYGYHDVHRDDFEFENDLICSIAEFIRTERTESNSPNDEPLKDDRMAVVGTCSTHSLLMSEDKVDNVENVDLPGPSELKEIKSLKVTQQQKKRVRFLVPESPKIDTRVMEELEELMEAREAGVAYIIGQTHMRAKPGSSMLKKIGINLVYEFLRRNSRAPSFVTGVPHASSLEVGMMYQV

SEQ ID NO: 148031 - protein, 50 aa, Glycine max
  Clone ID: PAT_MRT3847_104694C.1.pep
VLNYEDESTLSTYSRRWFFHRIGSISHYVIGRDCELVSLASSDLIWMLFM

SEQ ID NO: 148032 - protein, 219 aa, Glycine max
  unsure (1)..(219): unsure at all Xaa locations
  Clone ID: PAT_MRT3847_104695C.1.pep
MEEEQNGGRFDLIILGASGFTGKYVLREALKFLNTPSSPLKSIAIAGRSPQKLTQALQWASRPNPPPSLPILTADTADPSSLRSLCARTGLLLNCVGPFRLHGEPVVAACAAAGCDYLDISGEPEFMERVEAAHHERAVETGALVVSACGFDSVPAELGVMFNSRQWMGPAAPNRVEAYVALESEKRIEGNFATYESGGLGGANAHQLQQLRKSRPXKT

SEQ ID NO: 148033 - protein, 61 aa, Glycine max
  Clone ID: PAT_MRT3847_104696C.1.pep
YYAEYMNYGPGAGVANRVKWQGYHVMNDSSQASNFTVSQFIEGNLWLPSTGVTFTAGLGVV

SEQ ID NO: 148034 - protein, 137 aa, Glycine max
  unsure (1)..(137): unsure at all Xaa locations
  Clone ID: PAT_MRT3847_104697C.1.pep
PRPTPGFSPRGRRARRPPPSQAXXAXXXSRAPTRASAKXPXXPXAPXXGRSXPTXXXPXSGAATTXPKPXNARNAPXTTXXPXPXAXXSAAKPPXTPRPRAPXARPTRAAPXPXPPXPPTPATXXTAAPTGRGATPP

SEQ ID NO: 148035 - protein, 332 aa, Glycine max
  unsure (1)..(332): unsure at all Xaa locations
  Clone ID: PAT_MRT3847_104698C.1.pep
IILQEGCKGLLYMVLHARVVLDLCEYLEQEISFEQVEGDFDSFRGKXWIFEQLGKHHTLLKYSVESKMRKDTFLSEAIMEEVIYEDLPSNLSAIRDYIENMNASKFSEVCEQNMNSGQQIVSSGSQKDDNSGSAEEVPHCDVRCSSQQRSKVPGLQRNIKVLESELLKFIAEHGQEGFMPMRKQLRLHGRVDIEKAITRMGGFRKIATILNLSLAYKHRKPKGYWDNLENLQEEISRFQRGWGIDPSFMPSRKSFERAGRYDIARALEKWGGLHEVSRLLSLKVRQRSRQDNLAKDKRSGDHTDSEMKTPCISQDTQKWLTKLKHLDINWFE

SEQ ID NO: 148036 - protein, 66 aa, Glycine max
  Clone ID: PAT_MRT3847_104699C.1.pep
PAIAHPSLTARFISGVAPFLSLSSHYHSTLTVSDPTLSQPLITLVQPPLITVVTTHNHHHLPSTNA

SEQ ID NO: 148037 - protein, 145 aa, Glycine max
  unsure (1)..(145): unsure at all Xaa locations
  Clone ID: PAT_MRT3847_10469C.1.pep
MKLNSKSLRLSCKSHNPGIKISTCTLPNFLIRILLLCLCCFLVPASCSRKPPPLPILPLPTTFLLQWQLDGMALFFHFGTNTFTDSEWGTGHANPTVFNPTKLNASQWIRVGKDSGFSRVILTVKHHDGXFCLWPCGYTHYAGPV

SEQ ID NO: 148038 - protein, 112 aa, Glycine max
  Clone ID: PAT_MRT3847_1046C.1.pep
FKKGPVSFFLNLIQGSKGKMPFSPLDRPKLVYQFQNPSGFFQRLVFPKNGYLEPWESSSSGPKLPNFGGRTSSHGERKRGSFIPFGSKGGPLNPMNRAPQKGPSDGQSSQFN

SEQ ID NO: 148039 - protein, 94 aa, Glycine max
  Clone ID: PAT_MRT3847_104700C.1.pep
TPVSPGTRCGIGIRDPSMGTIRSHPRKTTPRPKAAPFGVPRRKQSTFTFPPNGKGLPSTSTFVTSPVKLLSPAASIAFVATGAHTSPNVLYPTP

SEQ ID NO: 148040 - protein, 68 aa, Glycine max
  Clone ID: PAT_MRT3847_104701C.1.pep
CIMGMGHDLFSFFKKIILLSMNIKSTCTVIVITTAPPSFHKLPPSQALLPNKKEGALGATPPFNFKKI

SEQ ID NO: 148041 - protein, 227 aa, Glycine max
  unsure (1)..(227): unsure at all Xaa locations
  Clone ID: PAT_MRT3847_104702C.1.pep
SHGTARTRKPLLEGGPALFFLLFIYFILFLFLFFFIFFFLFFFFFFFFFFFLKKNNPRNPKGNGAKKKPLKPTKKPRGGQTPQKKTGHLKGPGPGKPWGKKRAPPXGGKKPQGDRTTKGGEKRKKGPEKRAKNGPALKSKKSRSGXGPREALGSPQGKGKRPLGPPGGASQEGKKGNKPPGEGKTRGRNPLWGQRGPGKPPNFGNARPPPPGGKPPPKGFRGPQSYR

SEQ ID NO: 148042 - protein, 87 aa, Glycine max
  unsure (1)..(87): unsure at all Xaa locations
  Clone ID: PAT_MRT3847_104703C.1.pep
LIYFLILDFTSFILALFFNLFYKIFFLFIIIFFFYIFFSFLFFFFIYFFFIFFYIFLIVFFYIYXFFYSFFFFFIFFFYLLFFMFFY

SEQ ID NO: 148043 - protein, 270 aa, Glycine max
  Clone ID: PAT_MRT3847_104704C.1.pep
MAHLFRDLSLGHSKRDSTPPLPPPPIMPPKPSAVTAADDLPSPLGQLSASLSDSDLALTAYEIFVAACRTSSGKPLSSAANHSSTNSPSQNSPNSPALQRSITSTAASKVKKAFGLKSPGSASRKSPGSGSGQGKPKRPLTVGELMRNQMRVSEAMDSRVRRALLRISAGQVGRRIESVVVPLELLQQLKASDFTDHQEYDDWQKRTLSFLEAGLILHPHMPLDKSNSAVQRLRQIVHAALDKPIESLHSSLKPLLTFFARAAMHVASDA

SEQ ID NO: 148044 - protein, 53 aa, Glycine max
  Clone ID: PAT_MRT3847_104705C.1.pep
TITHDKIFNFYNNYFKNDIYYDYLFFRQCIFFLLTVYILLINNWLAIYENFKL

SEQ ID NO: 148045 - protein, 47 aa, Glycine max
  Clone ID: PAT_MRT3847_104706C.1.pep
MQISLKNNMVVLNVSLMLLVLVDNTAARINLSLLKSDQLSSYDDYDC

SEQ ID NO: 148046 - protein, 204 aa, Glycine max
  unsure (1)..(204): unsure at all Xaa locations
  Clone ID: PAT_MRT3847_104707C.1.pep
YDXCXXVXDSDXXXXXCXXNVXXXHVDXCIRGNKFGVVMTSSDKCRSILEEVSPNSVVLLSPNSLVLXTSNSQCKDLAIYEIRSEGQSIVKNDGQASDYSPRGGFGFPRWLEVTPAAGIIKPEQSVEVSVRLEDLHTSEESANGIPQNWWSEDTRDKEVILVVHVQGSSSVQTSCQQIHVRHCMSAKTVRIDSKSNSARRNQIS

SEQ ID NO: 148047 - protein, 61 aa, Glycine max
  Clone ID: PAT_MRT3847_104708C.1.pep
GQANYFLLINYFQAIDTDHGGVIIKWTVEYEKIDENVDPPYGYIEYLHSGSKQIDGNLLKP

SEQ ID NO: 148048 - protein, 148 aa, Glycine max
  unsure (1)..(148): unsure at all Xaa locations
  Clone ID: PAT_MRT3847_104709C.1.pep
TKIDKSILEQQEEKMHSLILLSLFDEVLYKVSKEKIAFVLWLKLXKLFMTKSICNKLLLKQHLFGLYXKEGKPLEDHLDELNSVLFXLCDIDVKLEDEDLAMILLAXSPNSYENFVNSHSVGKDCITLEEVKFSLYSRELHHIAFGKW

SEQ ID NO: 148049 - protein, 97 aa, Glycine max
  unsure (1)..(97): unsure at all Xaa locations
  Clone ID: PAT_MRT3847_10470C.1.pep
LFPFESVVEMSLDGSSSQRLDIDHSNYYALIILYIRSAGTLLSSASGAYRFIPRHRRRREPLKTNLLLFFFFCYTRIPCLGKGAVNINRVYYSXYGP

SEQ ID NO: 148050 - protein, 463 aa, Glycine max
  unsure (1)..(463): unsure at all Xaa locations
  Clone ID: PAT_MRT3847_104710C.1.pep
MRLFLTITLLLISVSVSPLQQVSYKNIYPTTGETTQTSFLSKVVNFLCSSAGSGYQHTWPDIEFGWRMIXCGGIVGHLLSAIGCLYYCXWILSALHFDXKGMITGGAAATVFYNLRQKHPTLDMPVIDYDLALLFQPVLVLGISIGVAFNVIFADWMITVLLLIIFVGIATKAFLKGVETWKKETIIKKETARQSQFNGTERTAEVAYEPLPGGPNTSNHKEPKKSKETTVRLRHHKGSVLENVRWKALGVLFTVWVLILASEIAKSHTTTCSVEYWVLNLLQVPVALGATSYQAVLLYTGKRVIASKGDQRTQWRAHQLIMYCSCGICAGIVGGLLGLGGGFILGPLFLELGIPPQVSSATATFAMTFSASMSVVEYYLLKRFPIPYTLYFVAVSTFAAFVGQVLVRKLVAILGRASLIIFILSSTIFVSAISLGGVGISNMIQRIANKEYMGFENLCTYSA

SEQ ID NO: 148051 - protein, 481 aa, Glycine max
  unsure (1)..(481): unsure at all Xaa locations
  Clone ID: PAT_MRT3847_104711C.1.pep
VFAPQRQRGKRNANNDGCERITTTVGHEISFDNYSSFNLGLCFCSSTRKXKNINPTTVETTQTSFLGKVVNFLWSSSGSGYQHTWPDIEFGWRIITGTIIGFLEXSFCHQSAIGLVKIXINFRCSVPIKVLRXMITGGAAATVFYNLRQKHPTLDMPVIDYDLALLFQPVLVLGISIGVAFNVIFADWMITVLLLIIFVGIATKAFLKGVETWKKETIIKKETARQSQFNGTERTAEVAYEPLPGGPNTSNHKEPKKSKETGSILENVRWKALGVLFTVWVLILASEIAKSHTTTCSVEYWVPVALGATSYQAVLLYTGKRVIASKGDQRTQWRAHQLIMYCSCGICAGIVGGLLGLGGGFILGPLFLELGIPPQVSSATATFAMTFSASMSVVEYYLLKRFPIPYTLYFVAVSTFAAFVGQVLVRKLVAILGRASLIIFILSSTIFVSAISLGGVGISNMIQRIANKEYMGFENLCTYSA

SEQ ID NO: 148052 - protein, 177 aa, Glycine max
  unsure (1)..(177): unsure at all Xaa locations
  Clone ID: PAT_MRT3847_104712C.1.pep
IPSRLEEVNKLIIARDGLLATLRENLXSLKISCEQXTNKRRRDIEYVVGDXVFLKMQPYRRRSLAKRINEKLSPRFYAPFQVFNKVGTIAYKLDLPSHIKIHPVFHVSLLKKASPNXLPPMLSEDWKLQTYSDSVLDSRELQPGNVKVLIQWKNLPPSENSWESVAKLQEIFSIYHL

SEQ ID NO: 148053 - protein, 95 aa, Glycine max
  Clone ID: PAT_MRT3847_104713C.1.pep
LYLIRRGFNSLGNLLSTMSTLRHTALAACYHAYLLYRHRRILRICRVARYSPDLLCTAYTCFLFCMSARVFIFDFRYYIFPSVFLCYLTRPYHAR

SEQ ID NO: 148054 - protein, 49 aa, Glycine max
  unsure (1)..(49): unsure at all Xaa locations
  Clone ID: PAT_MRT3847_104714C.1.pep
XVPYAXWLXXSXSSXLDLXFLYXARSKXWPEKEKXXLSESXSEAHXLGW

SEQ ID NO: 148055 - protein, 70 aa, Glycine max
  unsure (1)..(70): unsure at all Xaa locations
  Clone ID: PAT_MRT3847_104715C.1.pep
VSTSTEAANMMQSELALASDHNFCVFSLLPFDPXPCSVKWPEEWCPNVDNLTYQHRAPMHVFGLRLQTSG

SEQ ID NO: 148056 - protein, 56 aa, Glycine max
  Clone ID: PAT_MRT3847_104716C.1.pep
LFYLLSNKRKIFYCSYFRFFLIQTCFLSSNRANNVFNLQFLKKVKFPFPPYVQKES

SEQ ID NO: 148057 - protein, 103 aa, Glycine max
  Clone ID: PAT_MRT3847_104717C.1.pep
MDPYKHRPSSAFNSPFWTTNSGAPIWNNNSSLTVGARGPILLEDYHLVEKLANFDRFARRWVDALSDPRVTHEIRSVWISYWSQADRSLGQKIASHLSTRPNI

SEQ ID NO: 148058 - protein, 91 aa, Glycine max
  unsure (1)..(91): unsure at all Xaa locations
  Clone ID: PAT_MRT3847_104718C.1.pep
LVIISPLXMVLXKLVQXCXXEXSXLXXSQEDFKXSLVFCXVAXXANXXFVXHXFVXVRVSIXKSXXLXXSIXXCLTRXVFAQXGRSXXLRG

SEQ ID NO: 148059 - protein, 105 aa, Glycine max
  unsure (1)..(105): unsure at all Xaa locations
  Clone ID: PAT_MRT3847_104719C.1.pep
SSPRSRNTDSWDEPFSPAAAKLRLMCSYXGHIVPRPHDKCLCYICCDSRIIAYEPPTSLPDLSTRLSXTLLNGRPFTLQYHVPNQDLYSLICVTTDEDLQNMIDS

SEQ ID NO: 148060 - protein, 112 aa, Glycine max
  Clone ID: PAT_MRT3847_10471C.1.pep
MESQQANREELDEKARQGETVVPGGTGGKSLEAQEHLAEGRSRGGQTRKQQLGSEGYHEMGTKGGQTRKEQMGREGYQEMGRKGGLSTMDKSGGERAEEEGIEIDESKFKIT

SEQ ID NO: 148061 - protein, 101 aa, Glycine max
  unsure (1)..(101): unsure at all Xaa locations
  Clone ID: PAT_MRT3847_104720C.1.pep
MNFIHRDERLNYFLQRYDPVRHAETFXIPPAICSGRREKCGIEKENNFKQPGERYRSWAPDALSDPRVTHEIRSVWISYWSQADRSLGQKIASRLSMRPNI

SEQ ID NO: 148062 - protein, 78 aa, Glycine max
  Clone ID: PAT_MRT3847_104721C.1.pep
LRQSLPQLTKTQVFYKQASSTHGTMTHRHNGYMPHRNLTHRVRNNIASIYFAFMGHALMWRTSVNLTKLNAIKALCGG

SEQ ID NO: 148063 - protein, 92 aa, Glycine max
  Clone ID: PAT_MRT3847_104722C.1.pep
MLPILISARRYEQLYFLMQCGIEKENNFKQPGERYRSWAPDRQDRFNRRWVDALSDPRVTHEIRSVWISYWSQADRSLGQKIASHLSTRPNI

SEQ ID NO: 148064 - protein, 97 aa, Glycine max
  Clone ID: PAT_MRT3847_104723C.1.pep
GGRGKLFFKKKKHGVILPPKTRGESWRWIEPDISFIAPRGKKNNKLKSGAPPKIFFFATGDKHISKRVPYYGGAKKNFFFPQKGPKRGNLETSKSSA

SEQ ID NO: 148065 - protein, 187 aa, Glycine max
  Clone ID: PAT_MRT3847_104724C.1.pep
ILTNKNIDNFFAENEQLAFCPAIVVPGVYYSDDKMLQTRIFSYADSQRHRLGPNYLQLPANAPKCAHHNNHHEGFMNFIHRDEEVNYFPSRYDPVRHAERFPIPPAICSGRREKCGIEKENNFKQPGERYRSWAPDRQDRFARRWVDALSDPRVTHEIRSVWISYWSQADRSLGQKIASHLSTRPNI

SEQ ID NO: 148066 - protein, 492 aa, Glycine max
  unsure (1)..(492): unsure at all Xaa locations
  Clone ID: PAT_MRT3847_104725C.1.pep
MDPYKLRPSSAFNSPFWTTNSGAPVWNNNSSLTVGARGPILLEDYHLVEKLANFDRERIPERVVHARGASAKGFFEVTHDISHLTCADFLRAPGVQTPVIVRFSTVIHERGSPETLRDPRGFAVKFYTREGNFDLVGNNLPVFFVRDGMKFPDMVHALKPNPKNHIQENWRILDFFSHFPESLHMFTFLFDDLGVPQDYRHMDGFGVNTYTLINKAGKAVYVKFHWKTTSGIKCLLEEEAIKVGGANHSHATQDLHDSIAAGNYPEWKLFVQTIDPEHEDKFDFDPLDVTKTWPEDIIPLQPVGRLVLNKNIDNFFAENEQLAFCPAIVVPGVYYSDDKMLQTRIFSYADSQRHRLGPNYLQLPANAPKCAHHNNHHEGFMNFIHRDEEVNYFPSRYDPVRHAETFPIPPAICSGRREKXGIEKENNFKQPGERYRSWAPDRQDRFNRRWVDALSDPRVTHEIRSVWISYWSQADRSLGQKIASRLSMRPNI

SEQ ID NO: 148067 - protein, 168 aa, Glycine max
  Clone ID: PAT_MRT3847_104726C.1.pep
MATATYPPPPPYYRLYKDYLQDPNSAPDPPPPIEGTYLCFGANYTTSDVLPTLEEQGVRQLYSKGPNVDFKKELRSLNGELQLHVLELADILIERPSQYARRVEEISTVFKNLHHLLNSLRPHQARATLIHILELQIQRRKQAVEDIKKRREEARRLLNESLATLDGH

SEQ ID NO: 148068 - protein, 493 aa, Glycine max
  unsure (1)..(493): unsure at all Xaa locations
  Clone ID: PAT_MRT3847_104727C.1.pep
MDPYKHRPSSAFNSPFWTTNSGAPIWNNNSSLTVGARGPILLEDYHLVEKLANFDRERIPERVVHARGASAKGFFEVTHDISHLTCADFLRAPGVQTPVIVRFSTVIHERGSPETLRDPRGFAVKFYTREGNFDLVGNNLPVFFVRDGMKFPDMVHALKPNPKNHIQENWRILDFFSHFPESLHMFTFLFDDLGXVPQDYRHMDGFGVNTYTLINKAGKAVYVKFHWKTTSGIKCLLEEEAIKVGGANHSHATQDLHDSIAAGNYPEWKLFVQTIDPEHEDKFDFDPLDVTKTWPEDIIPLQPVGRLVLNKNIDNFFAENEQLAFCPAIVVPGVYYSDDKMLQTRIFSYADSQRHRLGPNYLQLPANAPKCAHHNNHHEGFMNFIXRDEEVNYFPSRYDPVRHAERFPIPPAICSGRREKCGIEKENTFKQPGERYRFWAPDRQDRFARRWVDALFDPRVTHEIRSVWISYWFQADRFLGQKIAFHFSTRPNI

SEQ ID NO: 148069 - protein, 85 aa, Glycine max
  unsure (1)..(85): unsure at all Xaa locations
  Clone ID: PAT_MRT3847_104728C.1.pep
XNNXLXKFXLTGIPPAPXXXPQINVCFXIDANGIHNVSAEDKTAXVKNKITIXNDKXRXXKEEIXKMLKDXXRXKXAEXXEVKXK

SEQ ID NO: 148070 - protein, 76 aa, Glycine max
  Clone ID: PAT_MRT3847_104729C.1.pep
GNLALEAKNSQQLQLTLSFIHLQSLLIVLHVIAVYIITKSNNDAYIYIYIYIYIYIYIIKDKDKDLAPPKYRMHHL

SEQ ID NO: 148071 - protein, 59 aa, Glycine max
  Clone ID: PAT_MRT3847_10472C.1.pep
RFLHIHLIRIHFIFTSSYPFFLQDHIILSLNVCKNVKIFYTDKCISIKITIHVTLKVHI

SEQ ID NO: 148072 - protein, 102 aa, Glycine max
  Clone ID: PAT_MRT3847_104730C.1.pep
SSCCFASRCACSSFVPVGLSFRFGCSPSCGAGCLFFFCPGLLFRLSRGLFFAFFLPVVRSLFSLRFAWGFRGAFCLIVPPCVVSSLVSHRVGPPALSCLPPP

SEQ ID NO: 148073 - protein, 33 aa, Glycine max
  Clone ID: PAT_MRT3847_104731C.1.pep
RLRVFHTIYDVVGFVLYMHQQIPSTVQDMSVEF

SEQ ID NO: 148074 - protein, 131 aa, Glycine max
  Clone ID: PAT_MRT3847_104732C.1.pep
HGSGLLKLNLLIPGQLNGLGPLFFFPRMFFFFPRVLLRVCLIKTGSHPKPPGTPFSSKSFFAPFKPPWGLGKCFFQISKIFPPGGVLWPPFFIFFSGAPILEHFSRKKKPFANNVIGPLPKYPFLFKKGFP

SEQ ID NO: 148075 - protein, 136 aa, Glycine max
  Clone ID: PAT_MRT3847_104733C.1.pep
VDPAFFLAEIRSHRKHLLAREAEAARWSQRKQLLGAAGAGRGGGSKREVNPWLAPTMGFPPMSPMHHFIFLYVWGHHNMDQSFMHMWPKHPPYSPSPPAWPPRTAPSPPSPDPLYWHQHQLVNSFDFENSPLFSFF

SEQ ID NO: 148076 - protein, 84 aa, Glycine max
  Clone ID: PAT_MRT3847_104734C.1.pep
VLEGEKETRAISLASWVSLYAKAKSSKGSTAAEDRSTSECLYEWTTWAMPKANVITHYGILPCVIVIDINSDPKPPLSQLLIPG

SEQ ID NO: 148077 - protein, 55 aa, Glycine max
  Clone ID: PAT_MRT3847_104735C.1.pep
ILFGPHMKSTMLYLDFPLGGGPPPGVITNNSLRIRNPPLFFVFSFQTNRTHLCCK

SEQ ID NO: 148078 - protein, 99 aa, Glycine max
  Clone ID: PAT_MRT3847_104736C.1.pep
LFWPLPTFNPAPAPKLVLVFLTPPGRPGRGPSSAHLSVPRWKFQTQTRGVPLQALTRLPTAGGPLFSGFGLRNGGPPYSWFWAGFLRAGRVPISPPGWT

SEQ ID NO: 148079 - protein, 49 aa, Glycine max
  unsure (1)..(49): unsure at all Xaa locations
  Clone ID: PAT_MRT3847_104737C.1.pep
FIEFIALSRFAMDPIGLWLSRWFTYVMMYWGLHPLITFNIGLXPKPNQR

SEQ ID NO: 148080 - protein, 83 aa, Glycine max
  Clone ID: PAT_MRT3847_104738C.1.pep
ELSRLCLHLHLSNDNNDEHKIQTRQAHSMAGPFELGSSKKKPGDGVNDLLTFNAENMQSNMKIIYYRFVLAADLFNALLNEFI

SEQ ID NO: 148081 - protein, 203 aa, Glycine max
  unsure (1)..(203): unsure at all Xaa locations
  Clone ID: PAT_MRT3847_104739C.1.pep
MVAGKYPSPTYFILLLITITRLISTVGKTSQWMKALTPPPELASVSLDDTIFSKLRNDPEALQGRASRDYGNLVREVPSAVFHPTSSSDIARLIKLSYNGSVPFKIAARGQGHSTRGQAMVRDGVVVDMAGFRERGNGEGIRVVMSVVVDPYNKNGYGXYYADVGGEQLWIDVLNATLEHGLAPMSWTDYLYLTVGGTLFNAG

SEQ ID NO: 148082 - protein, 30 aa, Glycine max
  Clone ID: PAT_MRT3847_10473C.1.pep
HTFENAGLSAPGGLLMGTAGLPNTTQLGGF

SEQ ID NO: 148083 - protein, 103 aa, Glycine max
  unsure (1)..(103): unsure at all Xaa locations
  Clone ID: PAT_MRT3847_104740C.1.pep
GTLLKIYNCHCSHTIISIWSRGMIIMVDTVGISENTCIALSXAMNSIIRGRAMADIYTMCSXQDCELWNPVCTEAMTVSFNTNPRSDAWSVEFLNLTILYCDI

SEQ ID NO: 148084 - protein, 431 aa, Glycine max
  unsure (1)..(431): unsure at all Xaa locations
  Clone ID: PAT_MRT3847_104741C.1.pep
MEIPESLRFNGHVVAMPFPSRGHVNCMMNLCKLLAAASSSSPFIITILVTEEWLGFIGSEPKPSNVRFATIPNVIPFQSXIASDIPAFFKAVVTNMEPPFDHLLRRLHPPVTALVADVELHFPVAVARRSNIPVALLWTMSASFYLTLHQLGSLVRNHSLXDDYEEHIPGISAAQLADLRTVLRENDLRFLQLELECISVVPKADCLIVNTVQELEAEVIDSLRAMFHFPICRIAFPYFKHETCHFVTNDSDYNVDYLNWLDHQPSMSVLYISLGSFLSVSCAQMNEIVSALNTSGVCYLWVVRGEVSWLKEKCGDRGLVVPWCDQLKVLSHPSVGGFWSHCGWNSTLEAVFGGIPMLTFPLFLDQVPNSRQILEEWKNGWELKRSDLGSAELITKDEIVQVIREFMDLGKRKEIRDRALEFKGICDRAVA

SEQ ID NO: 148085 - protein, 109 aa, Glycine max
  Clone ID: PAT_MRT3847_104742C.1.pep
STALFHSAPDSQRWLVDLQMASSFSVSRFVWIAPQCSSDRPCQIAVRCKDPVGSRLDMCYVRSGTLSPRSCRRTFSGFFAGDIMMIDYYSIQICQPKTKVPTLTFGRVG

SEQ ID NO: 148086 - protein, 78 aa, Glycine max
  unsure (1)..(78): unsure at all Xaa locations
  Clone ID: PAT_MRT3847_104743C.1.pep
LXSSKMXWQLXISFXGWRXWPLGLXMSSPLNXRKDIESHXXLRQGSTXVXXMXXQWERXGSXLXXXXPXXXSXXGFXP

SEQ ID NO: 148087 - protein, 52 aa, Glycine max
  unsure (1)..(52): unsure at all Xaa locations
  Clone ID: PAT_MRT3847_104744C.1.pep
EEREAXXERRIXSPXTXLKSKXXXQLSSLCYGINFVLIXXFCFAPQXSISGP

SEQ ID NO: 148088 - protein, 195 aa, Glycine max
  Clone ID: PAT_MRT3847_104745C.1.pep
MPSPKSSRSGQIESHRRGRSSSFHGQCAMSVGQLHRPKTVSDLPSLRSLAGTAPAPMPEGLPRQPPKMLLKVTVLRSLAPVQVLMTPGSTVRDLIAAAVRQYVKEGRRPILPSSEVSEFDLHYSQFSLESLDRKEKLLELGSRNFFLCPRKPATTVEDGVTTSFASCAKEAEKEREGYGGGGGGFAWFKLMQFMM

SEQ ID NO: 148089 - protein, 69 aa, Glycine max
  Clone ID: PAT_MRT3847_104746C.1.pep
KLIACFESWKVPQLQKEQPALLSLFSPKFCGFAFSLCQRIFCFEFHGLIWNFVGCELKLSYVLINFILN

SEQ ID NO: 148090 - protein, 195 aa, Glycine max; identical to SEQ ID NO: 148088
  Clone ID: PAT_MRT3847_104747C.1.pep

SEQ ID NO: 148091 - protein, 78 aa, Glycine max
  Clone ID: PAT_MRT3847_104748C.1.pep
MITLEKMVAVTGIENIGKGLIRDGTGFVTFPVKYQCVVFRPFKGEILQAVVTMVNKMGFFAVASTRVPIIFSLTSLSF

SEQ ID NO: 148092 - protein, 77 aa, Glycine max
  Clone ID: PAT_MRT3847_104749C.1.pep
VERKSNPMKRSFSFMIRFIYLYSLKHDFNGAIFTANSDGRLCYHLAGSSQFADTFFFWLIYCSTNILDSCNHFGLVS

SEQ ID NO: 148093 - protein, 102 aa, Glycine max
  Clone ID: PAT_MRT3847_10474C.1.pep
LVMSLKSSERKIMRRGFMCRSQASTAVCMSTRDPRSVVVPKKLERRVFLDDTRLINYAKYSKLVEPPRSNPVPKIKLRGQDQVQANEPRELLKTQTDNNVFQ

SEQ ID NO: 148094 - protein, 46 aa, Glycine max
  unsure (1)..(46): unsure at all Xaa locations
  Clone ID: PAT_MRT3847_104750C.1.pep
MSRVNIDNVTXLFNNGSFVTLFKFEISYECITALKDDLEWNLIYVG

SEQ ID NO: 148095 - protein, 369 aa, Glycine max
  Clone ID: PAT_MRT3847_104751C.1.pep
MGAAGSKLEKALGDQFPEGERYFGLENFGNTCYCNSVLQALYFCVPFREQLLEYYANNKSITDAEENLLTCLADLFSQISSQKKKTGVIAPKRFVQRLKKQNELFRSYMHQDAHEFLNFLLNELVDILEKEAQAAKNDQETSPPSEKAANGPKNSLANGAKKEPLVTWVHKNFQGILTNETRCLRCETVTARDETFFDLSLDIEQNSSITSCLKNFSSTETLNAEDKFFCDKCCSLQEAQKRMKIKKPPHVLVIHLKRFKYIEQLGRYKKLSYRVVFPLELKLSDTAEDADIEYSLFAVVVHVGSGPNHGHYVSLVKSHNHWLFFDDENVEMIDESAVQTFFGSSQEYSSNTDHGYILFYESIGSGNRN

SEQ ID NO: 148096 - protein, 369 aa, Glycine max
  Clone ID: PAT_MRT3847_104752C.1.pep
MGAAGSKLEKALGDQFPEGERYFGLENFGNTCYCNSVLQALYFCVPFREQLLEYYANNKSIADAEENLLTCLADLFSQISSQKKKTGVIAPKRFLQRLKKQNELFRSYMHQDAHEFLNFLLNELVDILEKEAQSAKNDQETSPPSEKAANGPKNGLANGAKKEPLVTWVHKNFQGILTNETRCLRCETVTARDETFFDLSLDIEQNSSITSCLKNFSSTETLNAEDKFFCDKCCSLQEAQKRMKIKKPPHILVIHLKRFKYIEQLGRYKKLSYRVVFPLELKLSDTAENSDIEYSLFAVVVHVGSGPNHGHYVSLVKSHNHWLFFDDENVEMIDESAVQTFFGSSQEYSSNTDHGYILFYESIGSGNRN

SEQ ID NO: 148097 - protein, 196 aa, Glycine max
  unsure (1)..(196): unsure at all Xaa locations
  Clone ID: PAT_MRT3847_104753C.1.pep
MGAAGSKLEKALGDQFPEGERYFGLENFGNTCYCNSVLQALYFCVPFREQLLEYYGNNKSILDGEENLLTCLADLFSQISSQKKKTGVIAPKRFVQRLKKQNELFRSYMHQDAHEFLNFLLNELVDILEKEAHAAKTDQETSPPSEKAVNGPKNGQAXNGVHKEPLVTWVHXXFQGILTNETRVLACETVTARDET

SEQ ID NO: 148098 - protein, 114 aa, Glycine max
  unsure (1)..(114): unsure at all Xaa locations
  Clone ID: PAT_MRT3847_104754C.1.pep
LGIRIEGVAAGLWHTVCTSADGDVYAXGGNQFGQLGTGGDQAETIPRLLDCPSLENVNVKRISCGARHTALIXQLGLGDVIDRNIPSEVTIEGCVAKNVACGWWHTLLLAEPPT

SEQ ID NO: 148099 - protein, 55 aa, Glycine max
  unsure (1)..(55): unsure at all Xaa locations
  Clone ID: PAT_MRT3847_104755C.1.pep
KHDPASSASSTNKVTHXATDTAHKSKDYANDIAQKSXDYTGDTAHSSXDYNGDAA

SEQ ID NO: 148100 - protein, 473 aa, Glycine max
  Clone ID: PAT_MRT3847_104756C.1.pep
MNGEGSEAMQVEKESLVYMWGYLPGALPQRTPLLTPLLVRVPPSGYFWKDVCGGGCGFAMAISEPGKLITWGSTDDLGQSYVTSGKHGETPEPFPLPTEVTIVKAAAGWAHCVSVTDCGEVYTWGWRECVPSGKVFGESLTGVSPEKDVPRRQSSFLTEQVSPRSQGSKSTGGTASGTSGEESSKRRRVSSAKQTAETSSSSDDTQTALPCLVTLNPGVRIASVAAGGRHTLALSDIGQVWGWGYGGEGQLGLGSRIRMVSSPHLVPCINSSSYGKDMARVSISSDGQNFRVPGSYIKGIACGGRHSAVITDAGAVLTFGWGLYGQCGQGSTDDELSPSCVSSLLGIQIEGVAAGLWHTVCTSVDGDVYAFGGNQFGQLGTGGDQAEQTIPRLLDCPSLENVNVKRISCGARHTALIADNGKVFCWGWNKYGQLGLGDVIDRNIPSEVTIEGCVAKNVACGWWHTLLLAESPT

SEQ ID NO: 148101 - protein, 82 aa, Glycine max
  unsure (1)..(82): unsure at all Xaa locations
  Clone ID: PAT_MRT3847_104757C.1.pep
AGRYMTSYLVDMHTKWGYALYRTADSETVRDIKXELCYISYDYRRDINCGLDTTILVKNYTLLDVRVIKVGTESIEAPDALF

SEQ ID NO: 148102 - protein, 153 aa, Glycine max
  Clone ID: PAT_MRT3847_104758C.1.pep
CHLVLEKCGQGSTDDELSPSCVSSLLGIQIEGVAAGLWHTVCTSVDGDVYAFGGNQFGQLGTGGDQAETIPRLLDCPSLENVNVKRISCGARHTALIADNGKVFCWGWNKYGQLGLGDVIDRNIPSEVTIEGCVAKNVACGWWHTLLLAEPPT

SEQ ID NO: 148103 - protein, 57 aa, Glycine max
  Clone ID: PAT_MRT3847_104759C.1.pep
RCEVTESGSPGQLNFDSQAAPAFHPHSLPEFHDGLANSVHHILPRWQQTSISKHRKE

SEQ ID NO: 148104 - protein, 119 aa, Glycine max
  Clone ID: PAT_MRT3847_10475C.1.pep
RHTHTTPVGERLTNTIKRGMVVSRITTQGLTQRAKFPSENPYDNTHNHYRCDFCLTARHKRRCGKTWQEEVRTHERPVPRRNGDAPMGCLIYPPCRHKKGNDRERNRGQGATWAYPPKA

SEQ ID NO: 148105 - protein, 60 aa, Glycine max
  Clone ID: PAT_MRT3847_104760C.1.pep
SVACCATAMFKMGYACSRGQMFSCTDASKYVFWNSFHPTEMTNSIVAKYVVLRVLYQFLQ

SEQ ID NO: 148106 - protein, 45 aa, Glycine max
  Clone ID: PAT_MRT3847_104761C.1.pep
NKSTPLIFVNFKLLSPIHISNPPFFHHIIQPHKLLNHSYTITTNK

SEQ ID NO: 148107 - protein, 162 aa, Glycine max
  Clone ID: PAT_MRT3847_104762C.1.pep
MNGEGSEAMQVEMEIEKERLVYMWGYLPGALPQRTPLLTPVLVRVPPSGYSWKDVCGGGCGFAMAISEPGKLITWGSTDDLGQSYVTSGKHGEIPEPFPLPTEVTIVKAAAGWAHCVSVTDCGEVYTWGWRECVPSGKVFGESLTGVSPEKDVPGKQSSFLT

SEQ ID NO: 148108 - protein, 292 aa, Glycine max
  unsure (1)..(292): unsure at all Xaa locations
  Clone ID: PAT_MRT3847_104763C.1.pep
CSSRIGSRADAVGSVFAILDKYTKIEPDDDIDGYKPEKLTGKIELHDVHFAYPARPNVMIFQGFSIKIDAGRSTALVGQSGSGKSTIIGLIEXRFYDPLKGIVTIDGRDIKSYHLRSLRKHIALVSQEPTLFGGTIRENIAYGASNNNNKVDETEIIEAARAANAHDFIASLKDGYDTSCRDRGVQLSGGQKQRIAIARAILKNPEVLLLDEATSALDSQSEKLVQDALERVMVGRTSVVVAHRLSTIQNCDLIAVLDKGKVVEKGTHSSLLAHGPGGAYYSLISLQRRPAN

SEQ ID NO: 148109 - protein, 81 aa, Glycine max
  unsure (1)..(81): unsure at all Xaa locations
  Clone ID: PAT_MRT3847_104764C.1.pep
ARAFSLCLSRRGLVAVASAATPREECECVAKXGQAERCEEMVEFVEKVSASAESEELTVEERDLLSVAXRGLCFGARRASW

SEQ ID NO: 148110 - protein, 60 aa, Glycine max
  Clone ID: PAT_MRT3847_104765C.1.pep
FPTTHFILLKHHQSHCYHNIIHQLKINYIMHMLSSNYIAFFQQISCYKHSTHITINLHLH

SEQ ID NO: 148111 - protein, 54 aa, Glycine max
  unsure (1)..(54): unsure at all Xaa locations
  Clone ID: PAT_MRT3847_104766C.1.pep
QGRGVHLALSCVDNYEARMAGNQACXELSQTWMESGASEDAGSGHIXLFIPGET

SEQ ID NO: 148112 - protein, 103 aa, Glycine max
  Clone ID: PAT_MRT3847_104767C.1.pep
TKLKTLTNQILRLPYSPMGVVKAMFGRRRNVGARRRHLRRRSSSFEPYVYRRRRFAVQKKQSGRRRSRSCVRICYVDLHVPHGFPRLHAWIFSKSGDLSSISI

SEQ ID NO: 148113 - protein, 91 aa, Glycine max
  Clone ID: PAT_MRT3847_104768C.1.pep
RGSNPHFLTLSQISSTDGQFWPRSKAYSSFRSTSNIPSAHTAATTTIRESCFCNGNVSACSKDLLCSHKSHCISGRCDQSNLSPKMMLPLI

SEQ ID NO: 148114 - protein, 49 aa, Glycine max
  Clone ID: PAT_MRT3847_104769C.1.pep
GYKEPYTASSVQTIHFNHGNSPTLVVNRESKWIPNKSRKALVLKYFFLK

SEQ ID NO: 148115 - protein, 162 aa, Glycine max
  Clone ID: PAT_MRT3847_10476C.1.pep
LAKEKDNSRRMLTDKEREMAEIRDQMQQQLNDYEQLLDVKLALDMEISAYRKLLEGEEERLKLSPSPSSRVTVSRASSSRSVRTTRGKRKRVDVEESEASSSVSISHSASATGNVCIEEIDVDGKFIRLKNTSEQDQPMGGWEMIRKIGDTSVSYQYTLRYV

SEQ ID NO: 148116 - protein, 63 aa, Glycine max
  Clone ID: PAT_MRT3847_104770C.1.pep
YEADAVIQSPYSTVSYTWVYICDAECGYKSHCCTSYLAYGCSTLEAIYGALHAHHGGTFLARL

SEQ ID NO: 148117 - protein, 533 aa, Glycine max
  Clone ID: PAT_MRT3847_104771C.1.pep
GSSSGSIPPQQSFQSPNKNALLMTSLPQDSQFQQQIDQQASLLQRQQQQQTQLQSSPLQLLQQSLSQRASQQPQMTQMCQQNSSEQQPQLQMLQKLQQQQQQQQQQQQQQLLSTSSPLLQSQLLQQQNTHQQNQQFPQLPLSQGHQPQQLGNNAFSMEKLLNGNNYSTSSLMQTQQLSVNQPHNTQKSLTNTRAPSTLTDGDAPSCSTSPSTNNCQISPNLMKRNQHVPATLGGPSVLEPTNHLMQGLHSKSEMQIKHELPSVRGTDQLKFKGTVADQMEASSGTSYCIDPNNIHQNFPLPNFCMDGDVQSNPRNNLPFASNLDGLTPDTFLSRGYDSQKDLQNLLSNYGGAPRDIETELSTAALSPQPFGVPGIPFKPGCSSDIAINDPGVLNNGLWANQTQRMRTYTKVQKCGSVGRCIDVTRYKGYDELRHDLARMFGIEGQLEDPQRTEWKLVYVDHENDILLVGDDPWEEFVSCVQSIKILSSAEVQKMSLDGDLGHVPVPNQACSGTDNGNAWRGQYEDNSAASFNR

SEQ ID NO: 148118 - protein, 106 aa, Glycine max
  Clone ID: PAT_MRT3847_104772C.1.pep
GYDELRHDLARMFGIEGQLEDPQRTEWKLVYVDHENDILLVGDDPWEEFVSCVQSIKILSSSEVQQMSLDGDLGHVPVPNQACSGTDNGNAWRGQYDDNSAASFNR

SEQ ID NO: 148119 - protein, 67 aa, Glycine max
  Clone ID: PAT_MRT3847_104773C.1.pep
LSSLYETSLDSDETRFINSTMIDAPTKSHLVHIHTIVIHKQNLISNNHKFKYKNKKKSKRIYQKIYY

SEQ ID NO: 148120 - protein, 78 aa, Glycine max
  Clone ID: PAT_MRT3847_104774C.1.pep
TLTSIRILDTIADAAVTCDIIQCTLTEHALPTWKRHIPLLYPSSLATFSGVIQPIACIMAPTNASLDRLLPRDDVPCR

SEQ ID NO: 148121 - protein, 194 aa, Glycine max
  Clone ID: PAT_MRT3847_104775C.1.pep
QEFCFFHPLSNDMTISINSNDLDKFFKSISGDPSYVDFEANPPVGKDQPPDLAALVPSGTINLPDQPEKQPSSQPTEGNHVSVDEPKIISAKVVKSCVSGKNTKEKAVNKAHSSGNFADVELFVEEILHKTSRLLLSEIKEDTITQHGENLGTVVSDNLRKGLSSDLENLTMIFKNTAYTEGFHAGSRHQPRRF

SEQ ID NO: 148122 - protein, 122 aa, Glycine max
  Clone ID: PAT_MRT3847_104776C.1.pep
NKPGGESPLGFLLGGNPIFGPPGNPFNLWGFDAPPSMAGVFLTPFFSPFLLKKPQKFGPHCWVGGPPQKTGLKVMGGFFFLGGNRVDKGIKRVFLKGDPFGHTKPSFLGDFFFRALRVFQFF

SEQ ID NO: 148123 - protein, 88 aa, Glycine max
  Clone ID: PAT_MRT3847_104777C.1.pep
EVEKHLSRLNYIPSTLFLTEVTYVDFLDRVHTSEVKLRSKGLWDVPHPWLNLFIPKTKIHHFAEVVFGNIVKETSNGPVLIYPVNKSK

SEQ ID NO: 148124 - protein, 54 aa, Glycine max
  Clone ID: PAT_MRT3847_104778C.1.pep
VSERRKVQSHRLLLSELAFADRSSLLSSFSFTDCQRWAMLRIFNPLFVTMELEW

SEQ ID NO: 148125 - protein, 60 aa, Glycine max
  Clone ID: PAT_MRT3847_104779C.1.pep
LSFNNILCTTLYRSSTAFLQHLGFIIIVIVVINHHVSATHVLLFEAPISIGKIEWVAGNS

SEQ ID NO: 148126 - protein, 239 aa, Glycine max
  Clone ID: PAT_MRT3847_10477C.1.pep
GRLWGRTLCSYNITGSFTCVTGDCISSTVECGGATAPVTLAEFTLNGTGGLDYFDVSLVDGFNLPLVVEPRSAIGAENCRATGCRRNLNKKCPVELQVIKEGEGVVGCKSSCEVHEPCSNNSNLFSHFLKTRCPDAYHNASFTCVSADFTITFCPAFSKRKFPAGVVERSSHYVLLLLMKILIPIVFSVSILSCCACNIWYRSPNRECRINMFFGRAKAKTHDPQQNTANSIVEMVDGH

SEQ ID NO: 148127 - protein, 189 aa, Glycine max
  unsure (1)..(189): unsure at all Xaa locations
  Clone ID: PAT_MRT3847_104780C.1.pep
MASFRRTLSPAYPDRQYLNGSFSVSSPSHKLPSSNAKYSSPLPEIAAAFRRLAGGVFTRRHGRKGQWRRVAFRCVLCFFVGFLLGMFPFGHVSEDVRSHEISFEMKPPPLPRAAANNAQQLLREERVLRNRVEREGFVVDPVSLSADCEWQSERFDFAPKKPLIVVTPTYERTFQAYFLNRXGQVLRLV

SEQ ID NO: 148128 - protein, 265 aa, Glycine max
  Clone ID: PAT_MRT3847_104781C.1.pep
MRVGKLSIGDDKPAASGFDICPPKQAGSVVLKPPLFLKNREKRQSSNSRSNVVVSLRPGMVFLKGYLSLSDQEMIVKRCRELGVGSGGFYQPGYGEDTKMHLKMMCLGKNWDPQSGQYGDRRPFDGAKPPQIPPEFHSHVHSALKDSNALLPSISPDICIVNFYSQTGRLGLHQDKDESPDSLRLGLPVISFSIGDSADFLYADHRDLDQPQKLLLQSGDVLIFGGPSRNTFHGVASIHPNTAPNLLLQHTNLRPGRLNLTFRRY

SEQ ID NO: 148129 - protein, 78 aa, Glycine max
  unsure (1)..(78): unsure at all Xaa locations
  Clone ID: PAT_MRT3847_104782C.1.pep
RXWAEYRVXLCSGXXGQXIYLXYXTXLMXLNHVXGCVPXSLCMHXRLISRPXSHQCXXCXYXXIITLLYKKXXKGXXP

SEQ ID NO: 148130 - protein, 399 aa, Glycine max
  Clone ID: PAT_MRT3847_104783C.1.pep
MPELPEVEAARRAVEYNCVGKRITKCVVADDSKVIHGVSPSDFQASVLGKLIVAAHRKGKNMWLQLDSPPFPSFQFGMAGAIYIKGAAVTNYKRSAVKDEDEWPSKYSKIFIELDDGLELSFTDKRRFAKVRLLKDPTSVPPISELGPDALFEPMTLEKFTESLHKKKTEIKALLLDQSFISGIGNWVADEVLYQARIHPRQVASSLSNESCSNLSKCIKEVIHLAVEVGADCSRFPPDWLFHSRGGKPPVFIGGGKKIDFITAGGRTTAYVPELQKLSGSLDVKETGKPNKRQASKKVRVDDDTEKPTNGEVDDLGSVKSKKGTKAGAKGRKPSKKKKSGGSDEDKDSSDVGTDYDSDQVEKKNPGNVASRKQAGGEKQSNRRVQSNQTSWSAKRKAK

SEQ ID NO: 148131 - protein, 158 aa, Glycine max
  Clone ID: PAT_MRT3847_104784C.1.pep
MDDSAFKRDGHFNRTYSCSSQRDVRYSCGTCGYELNLSSSNRNTASIGSKYGKSIKRGIISFFSIDLSRFTQVDEIQCVPHFDKHSWGLFRRRTKLLCRKCGNHIGNAYNGYTSSFPLVTDGAESSPSSKVVSHTKYDIRICALQPSSSEESGIPVFA

SEQ ID NO: 148132 - protein, 261 aa, Glycine max
  Clone ID: PAT_MRT3847_104785C.1.pep
MTTTTMLLRSSSTPILNSRIPHSNLNPKDSPHEPEILHRSPRTRSLTLSASLSSLSPSRMTRALSETDLSARSKTASFGSALFSFYESDDGDVAVVEGGGVGGGGGGWDNGDGGGSGFWDSNNGNDSTDLYYRTMIEANPGNPLFLGNYARYLKEVRGDYVKAEEYCSRAILANPNDGKVLSMYADLIWESQKDASRAETYFDQAVKAAPDDCYVLASYAHFLWDAEEEEDDEVQEDYSEISPSFLHGAAPPPPPPLAAAS

SEQ ID NO: 148133 - protein, 36 aa, Glycine max
  Clone ID: PAT_MRT3847_104786C.1.pep
HKGSKSFCSAAWANRNMNYKLLAISCKSGQLYDKKR

SEQ ID NO: 148134 - protein, 55 aa, Glycine max
  Clone ID: PAT_MRT3847_104787C.1.pep
LTLFNKKKIRLRDCLLFQISVNCVIMSWDLFDREKEKVLESCHIFLSWREVIPFR

SEQ ID NO: 148135 - protein, 102 aa, Glycine max
  Clone ID: PAT_MRT3847_104788C.1.pep
MGVGDYWSDLMGSGNGNHQHNNKNKNKKQLQTVELKVMMDCDGCVLKVRKTLSSLDGVESVEINRKQQKVTVTGYVEPNKVLKKAKSTGKKAEIWPYVPFNM

SEQ ID NO: 148136 - protein, 59 aa, Glycine max
  Clone ID: PAT_MRT3847_104789C.1.pep
RSSRSSGSSSLQQNTGEGKVVSSSSSNVRNTIHEFLVTITNPLVVSPCCVNLFPAIKGR

SEQ ID NO: 148137 - protein, 57 aa, Glycine max
  unsure (1)..(57): unsure at all Xaa locations
  Clone ID: PAT_MRT3847_104790C.1.pep
MGKGTRSFCXRKNKTHTFCVRGGRTYFHIQKSRCALCALPAGRTXKYYWSVNATPRK

SEQ ID NO: 148138 - protein, 82 aa, Glycine max
  Clone ID: PAT_MRT3847_104791C.1.pep
LYPSYPFCYFSYFINHPGISHFFPFPLMCMFVHMCRSFPFSYHSHHLQYYLNKHNFYPVPNNEYVSSSVSFLSIFLFSSRDE

SEQ ID NO: 148139 - protein, 51 aa, Glycine max
  Clone ID: PAT_MRT3847_104792C.1.pep
KSESTNKKIKAVLKFKAKENHSTLPYFFSVLVFPRFLFFSLQLISRDMFRI

SEQ ID NO: 148140 - protein, 72 aa, Glycine max
  unsure (1)..(72): unsure at all Xaa locations
  Clone ID: PAT_MRT3847_104793C.1.pep
SSQEEVTLLGATGSPFVCRVHIALKLKGXVQYKYVEENLRTKSELLLKSTPLQKXSXVFIHNENLTKFFGNC

SEQ ID NO: 148141 - protein, 54 aa, Glycine max
  Clone ID: PAT_MRT3847_104794C.1.pep
YGGEISDEGEMEGDIDMSAADDDAAVKELDEMKRRLKEMEEEAAALREMQAKVL

SEQ ID NO: 148142 - protein, 58 aa, Glycine max
  Clone ID: PAT_MRT3847_104795C.1.pep
FNFGANGSPSLVSQGHPARMHKTQKLELSLQRTTTVNPHKPRGSSFTLIHLCHACLDP

SEQ ID NO: 148143 - protein, 117 aa, Glycine max
  unsure (1)..(117): unsure at all Xaa locations
  Clone ID: PAT_MRT3847_104796C.1.pep
VHEYSSAKAYISSKRNLVICFLLNPDDRPEYASIQAILYGPYLLVGHTIGGDXDLKARAKHADWITSYDSQQVFVFQQFEKSTFVLANLNQXLAMLKFPKSGTDLALQATFRLVSLS

SEQ ID NO: 148144 - protein, 68 aa, Glycine max
  Clone ID: PAT_MRT3847_104797C.1.pep
QVSVDKHSPSYRGGTVKMYSVIKGLCMWPLHNLCVIKTNTQGLVNVDSSLWMPSSVWSKLIKPGPCML

SEQ ID NO: 148145 - protein, 80 aa, Glycine max
  Clone ID: PAT_MRT3847_104798C.1.pep
CDSVVATSEPAMAAVAAADLSLRRYPPTGAWTSAAPPLWQDRIHHLLGDLLGIVAAVALGRLVRIYMRVPAVSMDHAERL

SEQ ID NO: 148146 - protein, 133 aa, Glycine max
  Clone ID: PAT_MRT3847_104799C.1.pep
KNHLSISKRQPNQHWCIRPRPYFPYLHLIGGTRNESFYSAPYITPENACLSVKECIALQVADSIPLHHSSVMSGSIFGLAQLSKYRLSSWVYTCSRFLHTCFFKASILLPLTNLAWWVFLQRERFPNSHFQED

SEQ ID NO: 148147 - protein, 411 aa, Glycine max
  unsure (1)..(411): unsure at all Xaa locations
  Clone ID: PAT_MRT3847_10479C.1.pep
MVSLISTSPPSSSFNIHPFFSPSFNILLLHETRFFSPFFLPPRHRSVQFHHTRRNFVNYKRKTARCGVTSADASTPLSTSLAKEPHKYFDHVIITVRSGDGGHGAVLNQQQQEQEQQGKTKLKKGKGSLKRDFDGSLILPMGGHGGDVLLYADESKDTLLEFHNKSRYHAKRGGNVDAMGVLTSMLRDGLAAPTLRIPVPXTVVKSKRGKMLADLAQPWDEVLVARGGQGGISLLEMPQHKRKKMMALTTNVMRDDSDKVLIHGQPGEEVKLELILRVVADVGLIGLPNAGKSTLLAAITLAKPDIADYPFTTLMPNLGRLGGDPSLGAGMYSSEATLADLPGLIEGAHLGKGLGRNFLRHLRRTRLLVHVVDAATGNPTNESRHVLDRLRLWRRKGPDPAAVSPSQKAAV

SEQ ID NO: 148148 - protein, 54 aa, Glycine max
  Clone ID: PAT_MRT3847_1047C.1.pep
THTSGNRYPTRPSRSLCQNSILSMPDELHQYHINHLPYRLTRALTISWSWLHTA

SEQ ID NO: 148149 - protein, 83 aa, Glycine max
  unsure (1)..(83): unsure at all Xaa locations
  Clone ID: PAT_MRT3847_104800C.1.pep
MISIGKNLKVLALLLLLSICTSQVKSRKLHDASMYERHEQWMEKYAXKRFLIFENNVEFIESFNAAGNKPYKLSIPFCRLLAA

SEQ ID NO: 148150 - protein, 93 aa, Glycine max
  Clone ID: PAT_MRT3847_104801C.1.pep
EEHTAGDVVATEAPLQMLRPRLLPLPRVDRGRAAARVLLVRAASLLAHRDQGESRQVRRVRGRYGHARLDPRSYRVSHARSGISRGAVTSASL

SEQ ID NO: 148151 - protein, 100 aa, Glycine max
  unsure (1)..(100): unsure at all Xaa locations
  Clone ID: PAT_MRT3847_104802C.1.pep
NSHTGVLSRSXRYRSSSRHKSPVTTVQYRSFSLLARGPVLLTCTQDGNLSFFSVALEIKGYLTLRCSLQLAPRIHKIQASFCPLLSLEKGEFIGMLISFL

SEQ ID NO: 148152 - protein, 45 aa, Glycine max
  Clone ID: PAT_MRT3847_104803C.1.pep
KIGVQNNIEHKPSPVPTIYTPIMSTIMRTLKRKRKTLTKNNKESN

SEQ ID NO: 148153 - protein, 191 aa, Glycine max
  Clone ID: PAT_MRT3847_104804C.1.pep
DRAIKEIVSSIVQRSVSIATQTTKELVLKDYAMESDETRILNAAHLMVASLAGSLAHVTCKEPLRASISGQLRTSLQNLNIANEILEQAVQLVTNDNLDLGCAVIEQAATDKAINTIDTEIGQQLSLRRKHREGMGSTFFDANLYPQGSMGGGPEPLRPKPGQLSLSQQRVYEDFVRLRWQKQSSPSSHSM

SEQ ID NO: 148154 - protein, 32 aa, Glycine max
  Clone ID: PAT_MRT3847_104805C.1.pep
YIQLILIHKNLHYMQFHKYFWYCVSIRIIGTT

SEQ ID NO: 148155 - protein, 68 aa, Glycine max
  unsure (1)..(68): unsure at all Xaa locations
  Clone ID: PAT_MRT3847_104806C.1.pep
MREIQLPLSQTQKVRLXKALEQLESLSTKXNFDASVIXADSIXVXXXNXVLKGHGTXQLNGEVVXTLC

SEQ ID NO: 148156 - protein, 30 aa, Glycine max
  unsure (1)..(30): unsure at all Xaa locations
  Clone ID: PAT_MRT3847_104807C.1.pep
LXQEAHVYTCILLSAIFRSFLKASDLQSXF

SEQ ID NO: 148157 - protein, 34 aa, Glycine max
  Clone ID: PAT_MRT3847_104808C.1.pep
SKQKVYPSVVAGEGCNGEEAKGVRLVRKRSHPAS

SEQ ID NO: 148158 - protein, 312 aa, Glycine max
  Clone ID: PAT_MRT3847_104809C.1.pep
MQLEPRDYARKVVENKARDEAGKILIRMKDRFSTVFNHDNDSLPRVWTGKEDVRAITRDARSASLKLLSDMAAIRLDEKPDRIESALYSSLIDKTSAATSSQYLTREASVDPLASSTWEEVSPEDVLITPVQCKALWRQFQGETEYTVTQAISAQEAYKRSNNWLPPPWAIMAMVILGFNEFMLLLKNPLYLMFIFVAYLLGKAIWVQMDIAGEFRHGTLPGLLSISSKFLPTFMNLIKRLAEEAQGNQTPQESQGSASQTQIFRNQVHKPDSVSTSISNVSSVGLSVDDNEYSTTNLSQRRRTNAPEAEFS

SEQ ID NO: 148159 - protein, 52 aa, Glycine max
  Clone ID: PAT_MRT3847_10480C.1.pep
FGSMASLPQMSTTLGACMSSNKTINPRPCIAQLNNNNNNKRSTPFSNLIVNH

SEQ ID NO: 148160 - protein, 78 aa, Glycine max
  unsure (1)..(78): unsure at all Xaa locations
  Clone ID: PAT_MRT3847_104810C.1.pep
LVYQDLLTGDELLSDFFRYKEIENGMLREVDGKWVVKXAIYVDIGANPSVVGGGXHDGFDNACDGAIVLDDTLRFTEQ

SEQ ID NO: 148161 - protein, 91 aa, Glycine max
  Clone ID: PAT_MRT3847_104811C.1.pep
GPLSISSKFLPTVMTLIKRLPEEAQGNQTPQESQGSTSQTQIFRNHVPKPDSVSNSISNVSSVGSSVDDNEYSTANLFHRRRTNAPEAEFS

SEQ ID NO: 148162 - protein, 30 aa, Glycine max
  Clone ID: PAT_MRT3847_104812C.1.pep
CTTMKNLSIAGYLLIVGCNIFYKRTVILSD

SEQ ID NO: 148163 - protein, 119 aa, Glycine max
  Clone ID: PAT_MRT3847_104813C.1.pep
TKKGKNKPKTPGGKRGNPPIFPLKNKGGKKPPPAKFFFAKKKTKPLTKKQQNFPAKAKNPLPKGHYKPPGPMGGGFSIFFKKTTSAPRANKGKKKYPYPHIKTPEYPPGPKANQIGGGH

SEQ ID NO: 148164 - protein, 105 aa, Glycine max
  Clone ID: PAT_MRT3847_104814C.1.pep
AGTEPQFPARPTCFSHVNKTLTGLVQFICPHAPRSLRSCPISRAFPLFSLNSDFNTRNLKLRYFPQLSFIPFPILQRHPFNFVFKLLLAALVIYSLFFFFLPFLA

SEQ ID NO: 148165 - protein, 103 aa, Glycine max
  unsure (1)..(103): unsure at all Xaa locations
  Clone ID: PAT_MRT3847_104815C.1.pep
DAEDPSQLISSDQLXASAAASPARAAAKNAPAHQNXPSXLPTKPPTPAHAVRDARNEPVRGGRGXDYVGDVDLDCVRGFSRDSSNDENSFPTTIAPYNQGPVE

SEQ ID NO: 148166 - protein, 372 aa, Glycine max
  Clone ID: PAT_MRT3847_104816C.1.pep
MKEENGIEELWREVRDLSLGNGGRVERLESPPTPVQFLRDFITPNKPCIISNAITHWPALSSWTNPSHLSQSLSGATVSVHLTPTGAADALAPLRSSLCFASAHVQRVPFPHALDLISFSEPSKLVAYAQQQNDCFRSEYSSLADDCDPHFGWATEAIGSEPEAVNLWIGNQHSRTSFHKDHYENLYAVVTGEKHFLLLPPTDVHRLYIRDYPAATYSYSSDTGEFDLELEKPTRYVPWCSVDPYPSLETMDNEMTKFPLYFNGPRPFECTVKAGEVLYLPSMWFHHVRQGVDDGGLTIAVNYWYDMQFDIKYAYFNFLQSIRYRSAPSAMISDKLSFRIDSDSDDYDSHFFYQPTIFDEFKGMIIPKVKGT

SEQ ID NO: 148167 - protein, 59 aa, Glycine max
  Clone ID: PAT_MRT3847_104817C.1.pep
RTTWVLIIRLVTHRIQISVAESLVRDVRIAVVMCIEDLGVICVHTDSCASVYRIITDEA

SEQ ID NO: 148168 - protein, 209 aa, Glycine max
  unsure (1)..(209): unsure at all Xaa locations
  Clone ID: PAT_MRT3847_104818C.1.pep
LAXQVYEGLRREASSLMIQRYFRMHVARKAYKELYSSAVSIQTGMRGMAARTELRFRKQTRAAIVIQSHCRKYLAQHHFTNLKKAAIATQCAWRGKVARRELRQLKMAARETGALQAAKNKLEKQVEDLTLRLQLEKRLRIDIEESKTQENEKLQSALQAMQLQFKETKLLLKKEREAAKREAERAPFIQEVPVVELQFVEQVVSSKGA

SEQ ID NO: 148169 - protein, 64 aa, Glycine max
  Clone ID: PAT_MRT3847_104819C.1.pep
GVQRKVRFLGRLVPGCRKEPLPVILEEAIDYIPALEMQVRAMSALFNLLSGGGAASTSAPPSSS

SEQ ID NO: 148170 - protein, 259 aa, Glycine max
  unsure (1)..(259): unsure at all Xaa locations
  Clone ID: PAT_MRT3847_10481C.1.pep
MAEASIGSKSSRWSLQGMTALVTGGSKGIGYAIVEELAQLGATVHTCARNEAELNESLNEWNTKGYRVTGSVCDVASRAERQDLIARVSNEFNGKLNILVNNVGTNVPKHTLDVTEEDFSFLINTNLESAYHLSQLAHPLLKASEAANIIFISSIAGVLSIGIGSTYGATKGAMNQLTKNLACEWAKDNIKIXTPLGDKHFKEEKLNNSLIARTPLGRIGEAEEVSSLVAFLCLPAASYITGQTICVDGGFTVNGLYIS

SEQ ID NO: 148171 - protein, 47 aa, Glycine max
  Clone ID: PAT_MRT3847_104820C.1.pep
KSGRYLHDIPPASLFSNGFLGTISSPSCAPSRYKILPPSYKDGLCVS

SEQ ID NO: 148172 - protein, 72 aa, Glycine max
  unsure (1)..(72): unsure at all Xaa locations
  Clone ID: PAT_MRT3847_104821C.1.pep
LQRKRMTLKPGPLSKTGAYWCWRLSMSAPTLKRPYFIKSFLFFQHYKPISLQIFFLNPNGASXXXXXXXXXX

SEQ ID NO: 148173 - protein, 72 aa, Glycine max
  unsure (1)..(72): unsure at all Xaa locations
  Clone ID: PAT_MRT3847_104822C.1.pep
SFRPAHFEAFGNPSTDVRKTVVFCLVXTYIMLGKAFRPYXQGLSSTQSDLVTSYASPISQARSGKAMDPVRD

SEQ ID NO: 148174 - protein, 56 aa, Glycine max
  Clone ID: PAT_MRT3847_104823C.1.pep
WWFFLLGKQAMNLRQLNEPPIRERARLQLVQVGKRSIKKAICFSFLVLNYLFFCCP

SEQ ID NO: 148175 - protein, 150 aa, Glycine max
  unsure (1)..(150): unsure at all Xaa locations
  Clone ID: PAT_MRT3847_104824C.1.pep
VLLARLIYSTSTRVRRRRSSSHTHHSMAPARFHNLYLNERNRYIIGVLTNVIHQPVRSATLAGVVSHLTLLYYIQNXLFINDNCLYTDHFMYCCKNDTLTTLHVLTLRFIPQQCRYLNQPSLFTDGGLFNNDLGDSFVVVTHNPDHHTLW

SEQ ID NO: 148176 - protein, 81 aa, Glycine max
  Clone ID: PAT_MRT3847_104825C.1.pep
IFESKGQPRDASLSALRGHMRAKRARHKLWGVFETPNPSVASRGVFNLRNSRFSSSMLPLSLHPSLSAFSSYPHISGAFFT

SEQ ID NO: 148177 - protein, 37 aa, Glycine max
  unsure (1)..(37): unsure at all Xaa locations
  Clone ID: PAT_MRT3847_104826C.1.pep
ERTTYRVRHGXCQXLPNIVATXENTGXFIFHHHCFLV

SEQ ID NO: 148178 - protein, 447 aa, Glycine max
  Clone ID: PAT_MRT3847_104827C.1.pep
MEDISKYAHSPAHVAVARRDHAALRRLVSTIPRLAKAGEVNTEAESLAAELKADEGSAVIDRRDVPGRETPLHLAVRLRDPVSAEILMCGGADWSLQNEHGWSALQEAVCTREEAIAVIIARHYQPLAWAKWCRRLPRIVASAARIRDFYMEISFHFESSVIPFIGRIAPSDTYRIWKRGSNLRADMTLAGFDGFRIQRSDQTFLFLGEGYASENGNLNFPPGSLLALAHKEKEVTNALEGAGTQPTEAEVNHEVSLMSQTNMYRPGIDVTQAELVPHLNWRRQEKTEMVGNWKARVYDMLHVMVSVKSRRVPGAMTDEELFAVDDGESMVNGDNNDDQYDDVLTAEERMQLDSALRMGNSDAICQDEEPGGGFDGHENGSNGGGVKEKKVWFGWNKKNMKGGDEPEDLKTTKKFSGDQQKPQPQSEFVKEDPAETKKGKDKNIRRT

SEQ ID NO: 148179 - protein, 45 aa, Glycine max
  Clone ID: PAT_MRT3847_104828C.1.pep
ELPHLAKQVVRLLVGHSNPLPLHHSWLPPLEVNLIFPQVIPQLYL

SEQ ID NO: 148180 - protein, 77 aa, Glycine max
  Clone ID: PAT_MRT3847_104829C.1.pep
QDQRDSNNSRPSYMNLTESTKAKQKTSNHQYNRSQRQQSMDEFQFLKRTAVFFNAFDPSTNFFRPLYLPTYMDKSSR

SEQ ID NO: 148181 - protein, 72 aa, Glycine max
  Clone ID: PAT_MRT3847_10482C.1.pep
ITLAKPDIADYPFTTLMPNLGRLGGDPSLGAGMYSSEATLADLPGLIEGAHLGKVSNIFVLVKCPHFKPLRC

SEQ ID NO: 148182 - protein, 53 aa, Glycine max
  unsure (1)..(53): unsure at all Xaa locations
  Clone ID: PAT_MRT3847_104830C.1.pep
RDGQELGCHDAEVELCQRTSRLYIIQFEQRPLKGSSMTHGAXMTQCLGSIGGH

SEQ ID NO: 148183 - protein, 68 aa, Glycine max
  Clone ID: PAT_MRT3847_104831C.1.pep
AIPSEVTRASHSGAATAAKPWSFGDPESKRRKRIAKYNVYAVEGKVKATLRDGIRWIKHTCSRIVHGY

SEQ ID NO: 148184 - protein, 124 aa, Glycine max
  unsure (1)..(124): unsure at all Xaa locations
  Clone ID: PAT_MRT3847_104832C.1.pep
MDGYGYTVGADNRALLNLNGAGAGATAPRAAVIGTTLEXVIASRVPNSKVCGGSYKIAAAEEKTEIDETPQDDXDRWEGLAYDISDDPQDITRGKGLEDSLFQLXQDAGTHYAXMSFYEYLSTG

SEQ ID NO: 148185 - protein, 96 aa, Glycine max
  unsure (1)..(96): unsure at all Xaa locations
  Clone ID: PAT_MRT3847_104833C.1.pep
RQTRSHADVWYTSQRVLSRLWYVISTIKIVFITSLLYRAVAAALRGCLDAKTPRSITNYYXFHIQXDIEALIDCLWIQQVFLVAHDWGAIISWYVC

SEQ ID NO: 148186 - protein, 29 aa, Glycine max
  Clone ID: PAT_MRT3847_104834C.1.pep
ISYLSKFILMVVFKNELPFIFCILFYYLR

SEQ ID NO: 148187 - protein, 295 aa, Glycine max
  unsure (1)..(295): unsure at all Xaa locations
  Clone ID: PAT_MRT3847_104835C.1.pep
MDQYEKVEKIGEGTYGVVYKARDRATNETIALKKIRLEQEDEGVPSTAIREISLLKEMQHRNIVRLQDVVHSEKRLYLVFEYLDLDLKKHMDSSPEFVKDPRQVKMFLYQILCGIAYCHSHRVLHRDLKPQNLLIDRRTNSLKLADFGLARAFGIPVRTFTHEVVTLWYRAPEILLGSRHYSTPVDVWSVGCIFAEMVNRRPXLFPGDSEIDELFKIFRILGTPNEDTWPGVTSLPDFKSTFPKWPSKDLANVVPNLDAAGLNLLSSMLCLDPSKRITARSAVEHEYFKDIKFVP

SEQ ID NO: 148188 - protein, 146 aa, Glycine max
  Clone ID: PAT_MRT3847_104836C.1.pep
PITPKIKRVSFSDSVKLSTYEDMPETTTEDAIDDKGTKSEQIMELTSSVVNSINIDCIEKNEGAKNKIGHLGEVYSSVVSSTNIDSIEKNEGSKNKIGHSGEVYSSGVSSTNIDSIEKNEGAKNKIGHSDEVYSRNGTISRKDDRI

SEQ ID NO: 148189 - protein, 139 aa, Glycine max
  Clone ID: PAT_MRT3847_104837C.1.pep
LASMGDNVVVSNMELERLLSMKGGKGEGSYANNSQAQAIHAKSMHHLLKEALDGVQLQAPNIPFVVVDLGCSCGSNTINVVDLIIKHIIKRYEALGLDPPEFSAFFSDLPSNDFNTLFQLLPPLANYGVSMEECLAANN

SEQ ID NO: 148190 - protein, 106 aa, Glycine max
  unsure (1)..(106): unsure at all Xaa locations
  Clone ID: PAT_MRT3847_104838C.1.pep
SEPVVVYVTCASARGGFPPAAWISSAVPYRSSDISQWVRPALGLGKFIVFRLVFDXCPCSSVLCLLGVWILFLSSTAPDPXMLTRLPENCKSLIFLVDXCPFAFVA

SEQ ID NO: 148191 - protein, 42 aa, Glycine max
  unsure (1)..(42): unsure at all Xaa locations
  Clone ID: PAT_MRT3847_104839C.1.pep
SVLDPHKGHPNISISRPLGTFFQKKKKIIFAGXKKKKKKKPK

SEQ ID NO: 148192 - protein, 40 aa, Glycine max
  Clone ID: PAT_MRT3847_10483C.1.pep
CSLSPSKFAWISTEFISQTHSYFYDTDRRTITIGSIRVGD

SEQ ID NO: 148193 - protein, 120 aa, Glycine max
  Clone ID: PAT_MRT3847_104840C.1.pep
LWLILSYYYLFTISLEAFVLTAFTLQLKSPVVSRKPLQPDNKKHPDDDDSCSVASITAASVRSIKSRTTVASAPVPRSSQRAEKRMEFYTRLEDKHHAMEAAKNQSEARTMEEMEEAIKQ

SEQ ID NO: 148194 - protein, 310 aa, Glycine max
  unsure (1)..(310): unsure at all Xaa locations
  Clone ID: PAT_MRT3847_104841C.1.pep
MTTRESLLFFFCTSFHSFLFFKSRNSAMTTREILQKMKVKVGLGSSDPDSGKGKSKMSKNITHGYHLVKGKSYHDMEDYVVAQFKQIDNNELGLFAIFDGHAGQNVPNYLRSHLFDNILHEPDFWKEPADAVKRAYSKTDSNILDMSGELGRGGLTAVTAILVNCQKLIVANIGDSRAVLCKKGVAKQLSVDHEPTAEHEDIKNRGGFVSNFPGDVLCVDGRLAVSRAFGDKSLKKHLSSEPFVTVENIGDDAEFVILASDGLWKVMSNQEAANCIXNIKDARSSAKRLTEEAVNRKSTDDISCIVVKFQ

SEQ ID NO: 148195 - protein, 233 aa, Glycine max
  Clone ID: PAT_MRT3847_104842C.1.pep
RTRGRTRGRTRGLAADYESLLKKADGSQDAFEEKYGSSVSAEANDEDGFRDLVRHTMFEKGQSKRIWGELYKVIDSSDVVVQVLDARDPQGTGCYHLEKHLKENCKHKHMVLLLNKCDLVPAWATKGWLRVLSKEFPTLAFHANINKSFGKGSLLSVLRQFARLKRDKQAISVGFVGYPNVGKSSVINTLRTKNVCKVAPIPGETKVWQYITLTKRIFLIDCPGVVYHIIDSE

SEQ ID NO: 148196 - protein, 59 aa, Glycine max
  Clone ID: PAT_MRT3847_104843C.1.pep
GELGQFTLHTKDDGASDQSHMFGYATDETHEYMPLSHVLATKLGARLTEVRKNGTCAWL

SEQ ID NO: 148197 - protein, 54 aa, Glycine max
  Clone ID: PAT_MRT3847_104844C.1.pep
RGRSKSFWMKLIGFQQNSTTVMRTYTDVTSDITTLESLISQSRERTNRYTDETD

SEQ ID NO: 148198 - protein, 77 aa, Glycine max
  Clone ID: PAT_MRT3847_104845C.1.pep
KKSIFLGPMKVSFLLIFSFHINGEKLIFQSRLPTLLIHFASFYPKQRTYQMCIFSILFIEVTFSFYFQFYSRLPTKC

SEQ ID NO: 148199 - protein, 36 aa, Glycine max
  Clone ID: PAT_MRT3847_104846C.1.pep
PLVRLHSVVGRVPAVDYDPSINSEPKLSKGREGETE

SEQ ID NO: 148200 - protein, 434 aa, Glycine max
  Clone ID: PAT_MRT3847_104847C.1.pep
MVDSNPSSGSPEETQNPNPDGNAPVESDLALENLAQKVQESLSLEKRHKFWETQPVGQFKDIGDSSLPEGPIELPIPLSEVKQEPYNLPDHYEWVTCDINSEETCDEVYNLLAHNYVEDDENMFRFNYSKEFLRWALQPPGYFKSWHIGVRVKSSKKMVAFITGVPARIRVHDEVVHMAEINFLCVHKKLRTKRLAPVMIKEVTRRVHLENMWQAAYTAGVVLPTPIATCQYWHRSLNPKKLIDVGFSRLGARMTMSRTIKLYKLPESTITPGFRKMEIHDVPAVTRLIRNYLSHFVVAPDFDENDVEHWLLPRDGVIDSYLVESPETHEVTDFCSFYTLPSSILGHLNYKILKAAYSFYNVSTVTPLLQLINDALIVAKHKDYDVFNALDVMQNETFLRELKFGPGDGKLHYYLYNYRIRHALKPSELGLVLL

SEQ ID NO: 148201 - protein, 511 aa, Glycine max
  unsure (1)..(511): unsure at all Xaa locations
  Clone ID: PAT_MRT3847_104848C.1.pep
MWRLKIGDGGKNPYIFSTNNFLGRETWEFDPETSTIEERTQVKAACENFYKNRFKTRACGDRLWRFQFLREKNFRQTITSVKIQDDEEITNEKTTNTLKRAIHYLSALQTSNGYWPAQFSGPLFPTALFVMCMYITGHLDSIFPEEYRKEILRYIYFHQNEDGGWGLNIDGHSTMFSTTLNYICMRILGEGPNGGHNNACAKARKWIHDHGSVTHIPSWGKFWLSVLGVVDWCGSNPLPPEFWILPTFSPMHPAKMWCYCRLIYMPMSYLYGKKFVGSITPLVLNLREELFTQPYDEDSWQKARHKCAEEDLYYSHPWIQDLIWXDSLYLFVEPLLTRWPLNKLIREKALQVTMKHIHYENENSRYLDMACVEKSLCMLACWVEDPNGDAFKKHLARIPDYFWVSEDGMIVQPVIGSQSWDIGFIVQALLATDLIEEFGPTLAKAHDFIKKSQLTDNPLXDCKSMYRHISKGAWTLSHRDDGWQVSDCTAEWLKWCLLLSLMPQEIVGEKM

SEQ ID NO: 148202 - protein, 92 aa, Glycine max
  Clone ID: PAT_MRT3847_104849C.1.pep
ILGKDSSAIIMEVLPSLNDLCGITKNISDTILDKLNITVESLFEEKQNRLEKLHHLGKALSNLWNLMDTPYSERQSFSHVINLLYVSSAEVT

SEQ ID NO: 148203 - protein, 97 aa, Glycine max
  Clone ID: PAT_MRT3847_10484C.1.pep
KSHFQKNGLYTRRVHEAGFPPPGEVFLGGWMFPVPPKGFSKVTRSGGGSPKRGFHLGGGSRGGTFPFPGGPIGEKEAPKSPNSRWKNPMGPPPKANV

SEQ ID NO: 148204 - protein, 153 aa, Glycine max
  Clone ID: PAT_MRT3847_104850C.1.pep
MEHNLTMKCRRNENLLTSGTHLPESPRVPMEFLSRSWSASSLEVSKALTLPPPPPLSSYIPSKPPNAPSSVTNSISEETSEEFSTMCGNQFSFASSATSQLVLDRIMSQSAREEVSPLTSGRLSHSSEPLNGGASLTGTDSPPISPSDEFDDV

SEQ ID NO: 148205 - protein, 116 aa, Glycine max
  Clone ID: PAT_MRT3847_104851C.1.pep
INHNHTNTGTAHTKGNTGLYKLILAGLCSHMLTLFCLPVKLRLSNYYHNQSNGYLGPRGNLLYQSLPYVYLVLRHFQWCTLYNRYTFLVPHTNTFSPLTPASKYTPSIYRLFPTGP

SEQ ID NO: 148206 - protein, 212 aa, Glycine max
  Clone ID: PAT_MRT3847_104852C.1.pep
MFSFTYPPPRLVRGFKLSYPTIILATKPKPTWLLLLSPSSPTTKMAESGSQKKKEELRKLFSTFDKNGDGFITKQELRESLRNIGIFMADKEVDDIVVKYDSNSDGLIDFEEFCLLTSECVGGDHHEKEGGVMGNEEVDLKEAFDVFDKDNDGLISVEELALVLTSLGLREGRKIEECKEMIKKVDMDGDGMVNFNEFKRMMMNGGKFFFNA

SEQ ID NO: 148207 - protein, 86 aa, Glycine max
  Clone ID: PAT_MRT3847_104853C.1.pep
HCLSDVPRSVAGPLVTTFSCPLVHGDAMGSPVYPSKRSCFARDALTTNARAGLWLASLCALRSRPAQRHFVLGGPPTDNRFRLFSF

SEQ ID NO: 148208 - protein, 54 aa, Glycine max
  Clone ID: PAT_MRT3847_104854C.1.pep
STHFLKRSMMTLLKSCSSHSGVDINSLVYNNQFQWWYDQAVIVFTTPPNKQSST

SEQ ID NO: 148209 - protein, 54 aa, Glycine max
  Clone ID: PAT_MRT3847_104855C.1.pep
SLFKSLFTIKSLFCSGGKWLVSGHCLHLLAIGRQTNRMRGPKQSLVFTQMSQFL

SEQ ID NO: 148210 - protein, 66 aa, Glycine max
  unsure (1)..(66): unsure at all Xaa locations
  Clone ID: PAT_MRT3847_104856C.1.pep
SVVQVGSLRVRVVAGRLGFAGGGVGKDHDWVECRVGGAALGVEDDCPGGVWGVRKESXEARVETRA

SEQ ID NO: 148211 - protein, 48 aa, Glycine max
  Clone ID: PAT_MRT3847_104857C.1.pep
SPLRFRLGPTIARSFHWILIIEGVLSYISKSSTQTGGGVNDRNQEISR

SEQ ID NO: 148212 - protein, 140 aa, Glycine max
  unsure (1)..(140): unsure at all Xaa locations
  Clone ID: PAT_MRT3847_104858C.1.pep
MFTSMYHLTWVFQFLTLLLGNMGFILLGGKALKAINSEFSDSPLRLQYYIVITGAAYFLYSFFIPTISAMRNWLGASAVLTFTYIILLLIXLVKDGKSRSNRDYDLSGNEVSKVFNAFGAISAIIVANTSGLLPEIQSTL

SEQ ID NO: 148213 - protein, 57 aa, Glycine max
  Clone ID: PAT_MRT3847_104859C.1.pep
FHNVRISLTCLSLSQLVLNIRTQSICHVCFFFPVEIILSFYNAVFNRVFLCPRVVDR

SEQ ID NO: 148214 - protein, 46 aa, Glycine max
  Clone ID: PAT_MRT3847_10485C.1.pep
TKRTDNSLNVLINIKMTTHTRTHTHEAHSNLNFGHYQKYHISYIGL

SEQ ID NO: 148215 - protein, 64 aa, Glycine max
  Clone ID: PAT_MRT3847_104860C.1.pep
EAPKQEWVWFQPGKIFFYRWAPFLNNYFLGETILFFPPTDRTYEGFFRGKLSELGETQGGGPPF

SEQ ID NO: 148216 - protein, 58 aa, Glycine max
  Clone ID: PAT_MRT3847_104861C.1.pep
IGKASLEWRLAMMMTNHGRAHHARGRGLGSLMNISLITIMTKVTTRTSRSRLYSLEDA

SEQ ID NO: 148217 - protein, 71 aa, Glycine max
  Clone ID: PAT_MRT3847_104862C.1.pep
VIMDDSLISEPVTPGSFVSVTRDKNELCGLASCHSRPDATVPDNQSLKRCAFGFSDILSGMDPDGILITAV

SEQ ID NO: 148218 - protein, 151 aa, Glycine max
  Clone ID: PAT_MRT3847_104863C.1.pep
PHHQHHCPPIYMMVVMASRLGLRLLFCAPDLAKQRTSQARGTPSWAALLLQESALLCEHNSRVLPQMEHPCGHTIGAWFYLPFFNYCLVCDFGHCAVHFFLRVLHCFKKFIVTYPIVVSFHCVFCSPPLSHHSFSGKELSSHLLCHCPFPA

SEQ ID NO: 148219 - protein, 105 aa, Glycine max
  Clone ID: PAT_MRT3847_104864C.1.pep
GKKLFIFQINDGKRGATKKGGNPPTLFLGPLGKKKTAPPIKNCFPFCSPQKTWGFFLQWGQIKGRGFFFLKRAQFFPKCPPVCFCRWGPPPEGVLTLGPKKMPLA

SEQ ID NO: 148220 - protein, 170 aa, Glycine max
  Clone ID: PAT_MRT3847_104865C.1.pep
PTRPAARRAGRAARLTADLLVLATLLASIWIYISWHFNYWEKRGVKYNNPFSFFGDRGAGLPFGKPFWSLLDPVYNKYRGKERFVGTFQARQPVLVVLDPDLVKTILTKEFNAFQGPGQPFDEEGDPLSANLFNLVGPRWKNLRSKLSPTFTSGKLMLMVPLMTDIIKRA

SEQ ID NO: 148221 - protein, 109 aa, Glycine max
  unsure (1)..(109): unsure at all Xaa locations
  Clone ID: PAT_MRT3847_104866C.1.pep
LLSYSGYSCIIALEGNSMGEEAXFMPVSGGFILMAGHWVDESLGFMAGWNFFFYEALLIPFEITALNIVLRYWRDDIPLAAVCAAVIVLYAACNILAVKAYGEREILLF

SEQ ID NO: 148222 - protein, 116 aa, Glycine max
  unsure (1)..(116): unsure at all Xaa locations
  Clone ID: PAT_MRT3847_104867C.1.pep
YTINLHKRLHGCTCNKKALNAINEITKFAENAMSTNDARVDVKLNKHIWSMGIMSVPRRIKVRIAGLRDADEDAKEELYSVVTVAEIPAXGLNGLGTKVIVEEDRFVICSREEVVR

SEQ ID NO: 148223 - protein, 60 aa, Glycine max
  Clone ID: PAT_MRT3847_104868C.1.pep
YFRLNLSSCIRYPSNCLSRTREFHGIGFQRLYIIIIHCHAKHAGTVINIIIMFGSRGRPG

SEQ ID NO: 148224 - protein, 104 aa, Glycine max
  unsure (1)..(104): unsure at all Xaa locations
  Clone ID: PAT_MRT3847_104869C.1.pep
TCAGPAKXSAVALRVRVDHAAMHLXSTLAWYQGSCYVHCHRQSYRECNIYGTVDFICADADAVIHNCIIDALQTMAXHNITITGENMTDPYYYTGVSLHNGRIL

SEQ ID NO: 148225 - protein, 163 aa, Glycine max
  Clone ID: PAT_MRT3847_10486C.1.pep
IKSFHILFIGMNACVEGNKSQLPPWMMQKVGASATATHVSDSVETNSSTKKGDIIKANATKKDTHKSEPSNLRAKCEVKERKKLDQQEGKVTQKKRKGDKSKDRDQRSSIKKRKKLEDPSHGCYDVNPVRDDAMDLTVEDLMAIAEQYVKDYENKDRKERSSR

SEQ ID NO: 148226 - protein, 76 aa, Glycine max
  unsure (1)..(76): unsure at all Xaa locations
  Clone ID: PAT_MRT3847_104870C.1.pep
VNPLENQDLRTCDELFSDYFRYKEIENEKLXEKAGAKGAEQRAVDGNNGANLNADGGGPDKEHKQTAGKAGDMDDP

SEQ ID NO: 148227 - protein, 115 aa, Glycine max
  unsure (1)..(115): unsure at all Xaa locations
  Clone ID: PAT_MRT3847_104871C.1.pep
FLNPIGNIPGPPPRGLSLSQPLSTYDVLVQLLWLYCGGGFGLLFKTLTLPPAYILFSSXSAVPFFFVRPLRGATLAARMSIWRLLVPRPXFFICACVLGAPWVFLRLGPPRSFLL

SEQ ID NO: 148228 - protein, 99 aa, Glycine max
  Clone ID: PAT_MRT3847_104872C.1.pep
KGPPLFFIFFFFFLFFFLFFVIFFVFFFFFFFFFFFFFFFFFFFYNGRQQRITFIITEVQQKIDNQLKHHHKYGMYAYGREQRITFTITSSPTENRQSA

SEQ ID NO: 148229 - protein, 64 aa, Glycine max
  unsure (1)..(64): unsure at all Xaa locations
  Clone ID: PAT_MRT3847_104873C.1.pep
MANSMISCPGVTTFIRADSLMVDPFXTGLKYMAGFTTRKTSNDIPSIASNSRSVQCMHVWTRLY

SEQ ID NO: 148230 - protein, 143 aa, Glycine max
  Clone ID: PAT_MRT3847_104874C.1.pep
MESNQAASSMEVETVPSEAKLLPPKPKFEPLKPHEMSDGQARRVELKTRPDTPDISNLQKCADFVHAFMLGFDVIDAIALLRLDELYIESFEIKDVKTLRGDHLSRAIGRLSGKGGKTKFAIENASKTRIVIADTKIHIFGSF

SEQ ID NO: 148231 - protein, 71 aa, Glycine max
  Clone ID: PAT_MRT3847_104875C.1.pep
LVLLRAFLFNIFGAMRCNCFLNDREVSFFLSLSPFIFYSLSWFHGRDEEEEETTNNGGCTKIHTLTLSLSL

SEQ ID NO: 148232 - protein, 169 aa, Glycine max
  unsure (1)..(169): unsure at all Xaa locations
  Clone ID: PAT_MRT3847_104876C.1.pep
MRQHKQVSSLNRRPTVLYLLCAAAFFSLLLFYIQSSFFSGTVSSDSPTKDTVSSDRDSETIRVLSNVQSSVKQCVDNRGLGLTAHIIDHCKLILKYPEGTNSTWYNAQFKKFEPLEYNYDLCETILLWEQYRNMTRVTDHXYLDARPGGLDGLCSXRIAQLGQRNALTD

SEQ ID NO: 148233 - protein, 220 aa, Glycine max
  Clone ID: PAT_MRT3847_104877C.1.pep
MESNQAASSMDVDTVPSEVKLLPPKPKFEPLKPHEMSDGQVQFRKVNVPPHRYTPLKKAWMDIYTPIYEQMKIDVRMNLKGRRIELKTRPDTPDISNLQKCADFAHAFMLGFDVIDAIALLRLDELYIESFEIKDVKTLRGDHLSRAIGRLSGKGGKTKFAIENASKTRIVIADTKIHILGSFSNIKIARDSLCSLILGSPAGKVYSKLRAVTARLAERF

SEQ ID NO: 148234 - protein, 135 aa, Glycine max
  Clone ID: PAT_MRT3847_104878C.1.pep
MRQHKQVSSINRRPTVLYLVCVAALFSLLLFYTQSSFFSGAVSSDSSRIDAVSSDRDSETIHVLSNFQSSVKQCVDNRGLGLTAHVIDHCKLILKYPEGTNSTWYNAQFKKFEPLEYNYDLCETILLWEQYRNMT

SEQ ID NO: 148235 - protein, 220 aa, Glycine max
  Clone ID: PAT_MRT3847_104879C.1.pep
MESNQAASSMEVETVPSEAKLLPPKPKFEPLKPHEMSDGQVQFRKVNVPPHRYTPLKKAWMDIYTPIYEQMKIDVRMNLKARRVELKTRPDTPDISNLQKCADFVHAFMLGFDVIDAIALLRLDELYIESFEIKDVKTLRGDHLSRAIGRLSGKGGKTKFAIENASKTRIVIADTKIHILGSFANIKIARDSLCSLILGSPAGKVYSKLRAVTARLAERF

SEQ ID NO: 148236 - protein, 98 aa, Glycine max
  Clone ID: PAT_MRT3847_10487C.1.pep
AATHPPFSEEMEAQSCDARPHLKATFRLGSESYSVQANKGSLSEQLVSLKEESMTILKDFITKHNVPHDVPDEPLEASSDDDDIPEKPQGKSKKTKLT

SEQ ID NO: 148237 - protein, 38 aa, Glycine max
  Clone ID: PAT_MRT3847_104880C.1.pep
LGSLPISFLIVIYSITRAHAHANRERTDVLCRNCEWRV

SEQ ID NO: 148238 - protein, 220 aa, Glycine max
  Clone ID: PAT_MRT3847_104881C.1.pep
MESNQAASSMEVETVPSEAKLLPPKPKFEPLKPHEMSDGQVQFRKVNVPPHRYTPLKKAWMDIYSPIYEQMKIDVRMNLKARRVELKTRPDTPDISNLQKCADFVHAFMLGFDVIDAIALLRLDELYIESFEIKDVKTLRGDHLSRAIGRLSGKGGKTKFAIENASKTRIVIADTKIHILGSFANIKIARDSLCSLILGSPAGKVYSKLRAVTARLAERF

SEQ ID NO: 148239 - protein, 185 aa, Glycine max
  unsure (1)..(185): unsure at all Xaa locations
  Clone ID: PAT_MRT3847_104882C.1.pep
MPVRQMKESSEQHLVIKPHLQNPMNQAKKTTKAAQNGKGPPPQENHNQTSPHSKNKGRRRGRGGRKPDQGDVMMRPSCRPCTATLTSTANENAENGCISDMGFPTSSKSLTFAPRPGYGQVGTKCIVKANHFFAELPDKDLNQYDVTITPEVSSRTVXRSIIAELVRLYKESDFGMRLSAYDGRK

SEQ ID NO: 148240 - protein, 171 aa, Glycine max
  unsure (1)..(171): unsure at all Xaa locations
  Clone ID: PAT_MRT3847_104883C.1.pep
FKKSFPKESNLRAKKLLELIHTDGGPIKTSSLDKSNHFXLFIDDFSRKTWVYFFKHKLEVFENFKKFKAIVEKESGFKIKAMRSDRGGEFXSNEFQKYCDDHGIRRPLMVLRSPQQNGVAERKNRTILNMARSMLKSKRXHPKEFWAKAETCVVYPSTRSPTRNVWGKTPH

SEQ ID NO: 148241 - protein, 63 aa, Glycine max
  Clone ID: PAT_MRT3847_104884C.1.pep
ILKMQVVNKATTYHSKTIIRKQQEGVLLHCHWIYKHQCKNTSLRYARITEINFEVPTLSQNRI

SEQ ID NO: 148242 - protein, 86 aa, Glycine max
  unsure (1)..(86): unsure at all Xaa locations
  Clone ID: PAT_MRT3847_104885C.1.pep
MALRMWPLSTAMPLNFFLASKLISWPPFSFSKCXIFRLDWTKVPYSHEWVKXKGSVATIGITDIAKNIFDKLGMLSCPEPVGPVSQ

SEQ ID NO: 148243 - protein, 94 aa, Glycine max
  Clone ID: PAT_MRT3847_104886C.1.pep
SPRLRFCLITPAYPIFRPPCPSLKPISHSPTLAPQSHAHWATKIAPPKLGWSHSSTLGTLCPFGLVDPDDFLSVTSRQFFSGYFSPLLRRGTFH

SEQ ID NO: 148244 - protein, 43 aa, Glycine max
  unsure (1)..(43): unsure at all Xaa locations
  Clone ID: PAT_MRT3847_104887C.1.pep
XSSXFGSXANXXXQXCXLXCFXFSFXSLTGXXYRHFRXLRXXX

SEQ ID NO: 148245 - protein, 80 aa, Glycine max
  Clone ID: PAT_MRT3847_104888C.1.pep
NVYPWNKQGLRFEPTWKALPTHSLTKRVWVKRRKLPYRKIRNFRSSFTSFSPELARFQCCGRWALPRAILMCATASVVSS

SEQ ID NO: 148246 - protein, 146 aa, Glycine max
  Clone ID: PAT_MRT3847_104889C.1.pep
NKTHTYHPFLSKKYTFLFPHLNPLNSPFFSYYHILKTHSLSLFYSLALFTLFSLLPFYTIPSPYFPLYHLIISHEYFNTPYLLPFHTVVTPFTSYLTSPLSFSLTPNHFLSFSTFPASFPVFPTPSLFYSLPLFLQLNPFFPPYPL

SEQ ID NO: 148247 - protein, 100 aa, Glycine max
  Clone ID: PAT_MRT3847_10488C.1.pep
RQLPSEAVVVNVTCGSGRGGLPTTAWISSAANNRSSDINKKIRTALVKGKKIDMLTRDDPFTVALLAVLFGVLNEILSSNATNAMLTRLFENCKSLKYLV

SEQ ID NO: 148248 - protein, 108 aa, Glycine max
  unsure (1)..(108): unsure at all Xaa locations
  Clone ID: PAT_MRT3847_104890C.1.pep
XXXXSXPFXXMXXVIXXPXIXIXPYPSSXCSTXTXXXXVPXWXXIXXLXXYXXFFXXTXXVIXLHIQXYYXPYXXIFXIXHYXXNKXVXXXXXXXXSLGLFRXXXELX

SEQ ID NO: 148249 - protein, 55 aa, Glycine max
  Clone ID: PAT_MRT3847_104891C.1.pep
ESDQRRNKRKLRKIMKHEKEIDRNKVRVGIEGSEFVEMESSVVTSPLLISFAVAV

SEQ ID NO: 148250 - protein, 49 aa, Glycine max
  Clone ID: PAT_MRT3847_104892C.1.pep
AQGWLYLFVSSLATNLSTSKGVKSWMLFFGHSLTLYSSRLLLALLIFSL

SEQ ID NO: 148251 - protein, 241 aa, Glycine max
  Clone ID: PAT_MRT3847_104893C.1.pep
MRDPNLELQESGWEELRKEARKIEGDLDVKLSSYAKLGARFTQGGSGYVDSGSPPIGSSRSWKSMEMEIQSLLEKLLDINDSMSRWRSLDPRRFRLTQKLARHRDILHEFTQEFRRIKGNINSMREHAELLSSVRDDITDFKTSGSMSPRMQLLRERAAIHGSISHIDDVISQAQATRAVLGSQRTLFTDVQGKVKVLGDKFPMIRSLLGSIRRRRSRDTLILSAVIAACTLFLIIYWLSK

SEQ ID NO: 148252 - protein, 70 aa, Glycine max
  Clone ID: PAT_MRT3847_104894C.1.pep
RQIFNMALSTFERMASVSKRITLTEATRVNVTHITKMLSLLLMATDGILLNLRNPRNKALQIIQWPYLFL

SEQ ID NO: 148253 - protein, 28 aa, Glycine max
  Clone ID: PAT_MRT3847_104895C.1.pep
TKLVSHYHNLYYNNKSLILIKDIIKWTI

SEQ ID NO: 148254 - protein, 76 aa, Glycine max
  Clone ID: PAT_MRT3847_104896C.1.pep
RVKTIPSSGPSTTTGITEDAIQYVRSYFLTYASNSKPLDTCFHAHRVLFLCVFHLIHLFLFLFVMTKSTRAQQMWC

SEQ ID NO: 148255 - protein, 55 aa, Glycine max
  unsure (1)..(55): unsure at all Xaa locations
  Clone ID: PAT_MRT3847_104897C.1.pep
GIRARSLILSFLEGSIYSGDQKKKLTPPXQNSFRYCGGTSKKGXWIKVPKNLKEN

SEQ ID NO: 148256 - protein, 87 aa, Glycine max
  Clone ID: PAT_MRT3847_104898C.1.pep
SPRLMLCYPKFPPNLKLEKSQTKIGTHQFQHHVVLVKQTVFFDFGILSNFEGTFLIVGRFFLLNFKHFLAGWAPPTRGFFSVPLKIF

SEQ ID NO: 148257 - protein, 43 aa, Glycine max
  unsure (1)..(43): unsure at all Xaa locations
  Clone ID: PAT_MRT3847_104899C.1.pep
XCRVXXXXILPLXTAXGXXFVXXXXSIXAPSSSRVSTXXLRRA

SEQ ID NO: 148258 - protein, 52 aa, Glycine max
  Clone ID: PAT_MRT3847_10489C.1.pep
GTRLPKFFISWKTIFYLFHHPIITTTISFKFLNSNTIQNDSEFHAYASYITG

SEQ ID NO: 148259 - protein, 150 aa, Glycine max
  unsure (1)..(150): unsure at all Xaa locations
  Clone ID: PAT_MRT3847_1048C.1.pep
MDNNTCASSQLESEEASFEHKSETQTSKKRKMVEKTVVAVRTGENVGKLKNEGLPSDFWSWRKYGQKPIKGSPYPRGYYKCSTSKGCSAKKQVERCRTDASMLIITYTSTHNHPCPTAITTNSPQQPXELSESETTPDLSATTKEEDPRL

SEQ ID NO: 148260 - protein, 90 aa, Glycine max
  Clone ID: PAT_MRT3847_104900C.1.pep
TMLPPCFMKRSNWDSSRSIDRSSSGFRIGLISNRMTPIHVWTCLPRYFVIMWHWNSARNSDLISFGFRIGLIRTLIIAIHILHMAASAMS

SEQ ID NO: 148261 - protein, 96 aa, Glycine max
  Clone ID: PAT_MRT3847_104901C.1.pep
LGFTLTYVVNVTTQRSFLSLYFLFCLSFRLRNLQKQKPAMYYWVDDHKEIISREVHKIHHESSSSFELLFYNIIVLSILLHFQSYYYQHNSIILLQ

SEQ ID NO: 148262 - protein, 47 aa, Glycine max
  Clone ID: PAT_MRT3847_104902C.1.pep
VVFFFFFFFWDIKNMGSFRVLDFQLCNEQKILAAFDLFCNAFDKLKT

SEQ ID NO: 148263 - protein, 119 aa, Glycine max
  Clone ID: PAT_MRT3847_104903C.1.pep
FSFCRFIRIKKHPLHALSFVTLPGSSYTLPLLMARPGSLNGSQHVIEIAGSAYASTSSASHHDRHFNGTDVTQHEERISGARMPPLSQPSVSATSVSNGSNSRNSSFIRRGDTRRNRSP

SEQ ID NO: 148264 - protein, 63 aa, Glycine max
  Clone ID: PAT_MRT3847_104904C.1.pep
RPHDRPRGRLLLEDDRTEQGRRRHITDEGSGSDRREEGNRRERGHRREERSRSERKEKGRRSD

SEQ ID NO: 148265 - protein, 241 aa, Glycine max
  Clone ID: PAT_MRT3847_104905C.1.pep
MESQLVDGNDDMGVSGDVGLSTYEVQMHQETYEVDPNEECRVLESSSGGEVGICDDHAIQEPYEGMEFESEDAAKIFYDEYARRLGFVMRVMSCRRSERDGRILARRLGCNKEGYCVSIRGKFSSVRKPRASTREGCKAMIHIKYNKSGKWVITKFVKDHNHPLVVSPREARQTMDEKDKKIQELTAELRLKKRLCATYQEQLTSFMKIVEEHNEKLSAKIHHVVNNLKEFESIEELLHQT

SEQ ID NO: 148266 - protein, 325 aa, Glycine max
  Clone ID: PAT_MRT3847_104906C.1.pep
KSLAEIRLGSSGTLPLLMERSGSLNSSQHVIEIAGSADASTSSASHHDRHFNGTNVTQHEERISGARMPLSQPSVSATSVSNGSNSRNSSFIRRGDTRRNRSPVHSGLWISIELVLLLSQIVASIIVLSLSRHEHPRTPLFQWIIGYASGCAATLPLLYWRYYHHNHMQEQESSQSRQTSPRINDPSGTLLFSSRTNGGEDGQSAVASSRSNQPSLLMNRRMKTLVEYFKISLDCFFAVWFVVGNVWIFGGHSSANEAPNLYRLCIVFLAFSCIGYAMPFILCSTICCCLPCIISILGVREDMSQNRGAASESINALPIYKFKTK

SEQ ID NO: 148267 - protein, 113 aa, Glycine max
  Clone ID: PAT_MRT3847_104907C.1.pep
MRKMLSPAIFILIIRKHSDGFKRFNFVAVDPNEGCRVLESSSWGELGICEDHAIQEPYEGMEFESEDAAKLFYDEYARRLGFVMRVMSCRRSERDGRILARRLGCNKEGYCVS

SEQ ID NO: 148268 - protein, 133 aa, Glycine max
  unsure (1)..(133): unsure at all Xaa locations
  Clone ID: PAT_MRT3847_104908C.1.pep
KSLAEIRLGSSGTLPLLMERSGSLNSSQHVIEIAGSADASTSSASHHDRHFNGTNVTQHEERISGARMPLSQPSVSATSVSNGSNSRNSSFIRRGDTRRXRSPVHSGLWISIELVLXLSQIGASINGLPLAGM

SEQ ID NO: 148269 - protein, 650 aa, Glycine max
  unsure (1)..(650): unsure at all Xaa locations
  Clone ID: PAT_MRT3847_104909C.1.pep
HAFASFNQSLWQEIXRVVSDEARAMYNGGQAGLTYWSPNVNIFRDPRWGRGQETPGEDPTLAAKYAASYVKGLQGDGAGNRLKVAACCKHYTAYDLDNWNGVDRFHFNAKVSKQDLEDTYDVPFKACVLEGQVASVMCSYNQVNGKPTCADPDLLRNTIRGQWRLNGYIVSDCDSVGVFFDNQHYTKTPEEAAAEAIKAGLDLDCGPFLAIHTDSAIRKGLISENDLNLALANLISVQMRLGMFDGEPSTQPYGNLGPRDVCTSAHQQLALEAARESIVLLQNKGNSLPLSPSRLRTIGVVGPNADATVTMIGNYAGVACGYTTPLQGIARYVKTAHQVGCRGVACRGNELMRVMWLIGLVQADAIVLVMGLDQTVEAETRDRVGLLLPGLQXKLVTRVARAAKGPVILLIMSGGPVDISFAKNDPKISAILWVGYPGQAGGTAIADVIFGTTNPGGRLPMTWYPQGYLAKVPMTNMDMRPNPTTGYPGRTYRFYKGPVVFPFGHGLSYSRFSHSLALAPKQVSVPIMSLQALTNSTLSSKAVKVSHANCDDSLEMEFHVDVKNEGSMDGTHTLLIFSQPPHGKWSQIKQLVGFHKTHVPAGSKQRVKVNVHACKHLSVVDQFGVRRIPTGEHELHIGDVKHSIYVQTTH

SEQ ID NO: 148270 - protein, 179 aa, Glycine max
  Clone ID: PAT_MRT3847_10490C.1.pep
MAVSDGYAIAVKEAASAGIHSVEKLVNMILNQHREGGSELEAVADVAVNRFSEVISLLEKPTTTRTTGHARFRRAPTTAPPVPVVQLQQMVHDSKHKLQQQQNETEQKQQTSAFKVYCPPPPPPLPQNQNHQEQPFILPLHNNEANGSTTNSYGSTLSMDTESLQRSCLSSSGFQISHM

SEQ ID NO: 148271 - protein, 246 aa, Glycine max
  Clone ID: PAT_MRT3847_104910C.1.pep
LYVGVLHLVPTLEVFPLLADLKMYEPNTIDLSDHSELEYWFKILSEHLPDLVDKAVASEGGTDDAKILGDAFARAFSAHLARLMEEPAAYGKLGLARLLEMREECLREFHFFDAYISIKQRENEASLAVLPDLLMELDSMDEETRLLTLIEGVLAANIFDWGSRACVDLYHKGTIIEIYKMSRNKMQRPWQVDDFDAFKQRMLGTGDKKPPPHRRALLFVDNASADTIWILFKKKQYLRIEIIITN

SEQ ID NO: 148272 - protein, 174 aa, Glycine max
  unsure (1)..(174): unsure at all Xaa locations
  Clone ID: PAT_MRT3847_104911C.1.pep
PTTELFLHIISARIDASRTSSMTLSXNGCLLIGTLNCANVXITDHVVSCPLFPSGAKAHENAGLTKEQAEGKFVPDPLFEDPKEFVRSCVLRSYNYDEVMGFLXRTEGSVLAHYWLALIDCPCFIYCHDKVDYIYSNLANWTRLSIFNTPCSYKFSSDRTIHEYAREIWNIRRV

SEQ ID NO: 148273 - protein, 43 aa, Glycine max
  Clone ID: PAT_MRT3847_104912C.1.pep
YHVSFSEVVSESIRSPNVLLQQITCNDEAHYHPINVSLKRTRG

SEQ ID NO: 148274 - protein, 525 aa, Glycine max
  Clone ID: PAT_MRT3847_104913C.1.pep
MDDSSQLLQAASDFVHYPGPHSDDSSRDFLNRFPLPVIINALQTQLDVPGLENTLVACLERLFNTKLGASLIPQYMPFVQVGLQADSQAVRSLACKTVTSLLENLDNDHKVAASACLIKDFNIYPLLLDCLINGNEQVAAVATDAIKKLAGFPEGMEIIFPSDKGDDTDLEIIASQCSSLGRVRVLALVVKLFSVSRSAASTIYSLNLLQLLEAEIRNADDTLVTLSVLELIYELAEIEHGTEFLSKTSIFQLLSSMISHNSMESILRSRAMMISGRLLSKDIIYSFTDEPCVKAVISSIDGRLQSLEASDRDECETALESLGHMGSSIQGATLLLSGSSPAARHVINAAFERQGPTGHGKQLAALHALGNISGETRSENNIILNAEEEENLRRLIYETASRSSKLTPSGLFLSVLQQDSEIRLAGYRMLSGLVARPWCLMEICSKQEIINKVTDPSTETTKIGMEGRYNCCKAIHKSLTVSSRVSANPAFAGIAAKFQEAVGMGPYLVKRHVEAQPAVITADRF

SEQ ID NO: 148275 - protein, 85 aa, Glycine max
  unsure (1)..(85): unsure at all Xaa locations
  Clone ID: PAT_MRT3847_104914C.1.pep
SIKFDQKLLDXVLYTFVRGGFFTRANEVVTMMEKGKMFVDKYKYRMLFLKYHKSLYKGKAPKFQTESQLNKREAALAFKRWIGLN

SEQ ID NO: 148276 - protein, 68 aa, Glycine max
  unsure (1)..(68): unsure at all Xaa locations
  Clone ID: PAT_MRT3847_104915C.1.pep
PFEPAKSAFATKAKVRRAIEAEGIPXTYVSSNFFAGYFLPNLSQPGATAAPRNRVIXLGDGNPKGSIL

SEQ ID NO: 148277 - protein, 75 aa, Glycine max
  unsure (1)..(75): unsure at all Xaa locations
  Clone ID: PAT_MRT3847_104916C.1.pep
QIIFKTLTGKTITLEVESSDTIDNVKAKIQDQVGIPPDQQMLIFAGEHPXDWKTLLDYNIQNESTMHLLLRLHGG

SEQ ID NO: 148278 - protein, 184 aa, Glycine max
  Clone ID: PAT_MRT3847_104917C.1.pep
MFSFPHTIIFILVFPIIISCSWASSLGLSSNATTIYEVLSEHGLPMGLFPQGVREFAVGEDGSFWVRLDEACNAKFENELHYERNVSGHLSYGMIDALSGLEAQDLFLWFQVMSISVDVPSTGLIYFDAAAASTRLPLSLSATPPGCFAVRSQQQDAHSHHQGQVQSARLRYKLKQGTSGRDVL

SEQ ID NO: 148279 - protein, 67 aa, Glycine max
  unsure (1)..(67): unsure at all Xaa locations
  Clone ID: PAT_MRT3847_104918C.1.pep
PPHSSTTKQQNVHLKEKNVGWLLMKRSMILNIFIQKQQPPGFKIMXNSIPYFTLAVTLLHFSRILKR

SEQ ID NO: 148280 - protein, 56 aa, Glycine max
  unsure (1)..(56): unsure at all Xaa locations
  Clone ID: PAT_MRT3847_104919C.1.pep
YGHLSIILDAIDPNRTLMDAPYIERLHXNLKMLSLTSITNDVKNTPTKNDLIHTIE

SEQ ID NO: 148281 - protein, 83 aa, Glycine max
  Clone ID: PAT_MRT3847_10491C.1.pep
VDMKVSLRPCFLLALILPIFSILMVSQTVANHTCSLIVYYSDKCDIVSCTNACVDYTGFYTAAGLCFPDGCHCEYDCPPTTLS

SEQ ID NO: 148282 - protein, 65 aa, Glycine max
  unsure (1)..(65): unsure at all Xaa locations
  Clone ID: PAT_MRT3847_104920C.1.pep
PNFFLKNFFTLLLNPPALLSTPTFKPPHPFYFQPPXFPIIPFPPPRIFNPTTLKFPPPLKFPPTL

SEQ ID NO: 148283 - protein, 82 aa, Glycine max
  Clone ID: PAT_MRT3847_104921C.1.pep
HDLSKVSIQSSDAQLSHSQFTNVVSSTSLYYIEWVCNGYVVFIRPVSSAFIIVHLFSVCPLLKLPFVYVLVHLNHLCVLSVI

SEQ ID NO: 148284 - protein, 65 aa, Glycine max
  Clone ID: PAT_MRT3847_104922C.1.pep
ILGKMNYSLSVVFIHLVFCVSCNDVRKRCMKLVTIMVRTYWWHQISCRSPPKACLLLNLKLQFYF

SEQ ID NO: 148285 - protein, 76 aa, Glycine max
  unsure (1)..(76): unsure at all Xaa locations
  Clone ID: PAT_MRT3847_104923C.1.pep
GLWWFLFNKPPLNKMGKFFPLKSLNGFGLLLGFLSQGWLLFFFFKGWEMGGFGLSLGYFKYAPPPIIFNTISGXXX

SEQ ID NO: 148286 - protein, 89 aa, Glycine max
  Clone ID: PAT_MRT3847_104924C.1.pep
AGSLCQQPYEVWQNMKDCLQSQSILLESSSSDLLFRLQQSLDILEVSSKSTKRCASRIWGYFLKIKGSLLLPLLICGQNCITLTKMVGM

SEQ ID NO: 148287 - protein, 51 aa, Glycine max
  Clone ID: PAT_MRT3847_104925C.1.pep
FLLKPNSKISPYSTKSVKSHDACLSKQNIIQPIVVEITTSIPSHPNMTCQI

SEQ ID NO: 148288 - protein, 55 aa, Glycine max
  Clone ID: PAT_MRT3847_104926C.1.pep
LTLTSPTRASGQQVSVMYSHQSCIMWSAAHLASGRSCRTYPRAHILKMSLHEVQH

SEQ ID NO: 148289 - protein, 142 aa, Glycine max
  Clone ID: PAT_MRT3847_104927C.1.pep
RPRVREVVASYALDDREENMKMLVFFDAALLPIAWPCHGACYQRVPLRMKTGYREPHFKVKRTTCRLSWEAHSIRAFTTIAEECVAPTKDYINGEQLRSDSKTVYQQAFTYDFEREVHHNDIFIFCIDYNVLSNMPYYQKHG

SEQ ID NO: 148290 - protein, 61 aa, Glycine max
  Clone ID: PAT_MRT3847_104928C.1.pep
SFAMCFGLKSTTTSVEGGGGLMMMLPYCSLESSGSSHSGGLTIDFIPVRCCIFLHFLYFFF

SEQ ID NO: 148291 - protein, 75 aa, Glycine max
  Clone ID: PAT_MRT3847_104929C.1.pep
HTRFIPRFGHTIYRCRGFLVEAPTKSRVSFNPNTSFADHKGQVHTISLWSNEPGHTNRSCGPAQDLETHKGHLVA

SEQ ID NO: 148292 - protein, 73 aa, Glycine max
  Clone ID: PAT_MRT3847_10492C.1.pep
ITHLNNRGAVWPQTLTAVILQIGAIKMEGRNNLIHFYFQKMENFVVRLCQECLNYQIFLFPKKKGFNLEQGWV

SEQ ID NO: 148293 - protein, 63 aa, Glycine max
  Clone ID: PAT_MRT3847_104930C.1.pep
HPQSILLVCFQKHRQSDYLKELYESHCIVFKEFILFYYSIPILYYNGVHQHASVHHLQVSNPF

SEQ ID NO: 148294 - protein, 92 aa, Glycine max
  Clone ID: PAT_MRT3847_104931C.1.pep
PYPSDLNHPINLYFTYLFHLSSNFSVLGLLLNFLTPPYHTHIFPPSYLHTIPSLSQPITLYHISLIPQLPPSYSPFIYYHITLKPSNHFSSY

SEQ ID NO: 148295 - protein, 1014 aa, Glycine max
  unsure (1)..(1014): unsure at all Xaa locations
  Clone ID: PAT_MRT3847_104932C.1.pep
WESYLNENFEVKSKNSPEEVLQRWRRLCGIVKNPRRRFRFTANLSKRGEAAAMRRTIQEKLRIAILVSKAALQFIQSVQLSDYKLPEEVKDAGFQICGDELGSIVEVHDVKKFRHHGGVDGIAEKLSTSTTEGLNSDTELLNRRQQIYGINKFTESAATSFWVFVWEAFQDMTLMILGVCAIVSLLVGIATEGWPKGAHDGLGIVASILLVVFVTATSDYRQSLQFRDLDKEKKKISIQVTRNGYRQKMSIYELLPGDIVHLAIGDQVPADGLFVSGFSVLIDESSLTGESEPVMVNSENPFLLSGTKVQDGSCKMLVTSVGMRTQWGKLMATLSEGGDDETPLQVKLNGVATIIGKIGLFFAVVTFAVLVQGLVSLKLQQGSLRSWTGDDALELLEFFAVAVTIVVVAVPEGLPLAVTLSLAFAMKKMMNDKALVRHLAACETMGSATTICSDKTGTLTTNHMTVVKTCFCMNSKEVSNNNASSLCSELPEPAVKLLLESIFNNTGGEVVVNQNGKREILGTPTEAAILEFGLSLGGDFQGEKQACKLVKVEPFNSTKKKMSVVVELPGGGLRAHCKGASEIILAACDKVLNSNGEVVPLDEESTSHLKATINQFASEALRTLCLAYVELENGFSPEDPIPVSGYTCIGVIGIKDPVRPGVKESVAMCRSAGITVRMVTGDNINTAKXIARECGIITDDGIAIEGPEFREKSQEELLELIPKIQVMARSSPLDKHTLVKHLRTTFGXVVAVTGDGTNDAPTFLLDGPNSDLGLAGTEVAKESADVIILDDNFSRIITKTKGFKGILDNYVFLGVINAPVFFQIIIVEYLGTFANTTPLTPAEWFFWLMMVMDTLGALARVKEPPNDDLMKRSPVGRKGNFISNVMWRNILGQSLYQFMVIWFLQSRGKSIFLLEGPNSDLVLNTLIFNSFVFCQVFNEINSREMEKINVFKGILDNYVFVGVISATVFFQIIIVEYLGTFANTTPLTLSQWFFCLLVGFMGMPIAARLKKIPV

SEQ ID NO: 148296 - protein, 79 aa, Glycine max
  unsure (1)..(79): unsure at all Xaa locations
  Clone ID: PAT_MRT3847_104933C.1.pep
XXLXFWLXKXPXXXCKXLXXXSPAGFLLKXLDNTXXNASKLIYQXASGSXXPRVNLANNXXTACEPXPYPXXLNXEXLR

SEQ ID NO: 148297 - protein, 275 aa, Glycine max
  Clone ID: PAT_MRT3847_104934C.1.pep
VNINTAKAIARECGILTDDGIAIEGPEFREKSQKELLELIPKIQVMARSSPLDKHTLVKHLRTTFGEVVAVTGDGTNDAPALHEADIGLAMGIAGTEVAKESADVIILDDNFSTIVTVAKWGRSVYINIQKFVQFQLTVNVVALIVNFTSACLTGTAPLTAVQLLWVNMIMDTLGALALATEPPNDDLMKRSPVGRKGNFISNVMWRNILGQSLYQFMVIWFLQSRGKSIFLLEGPNSDLVLNTLIFNTFVFCQVFNEMNSREMEYINVCKAYWI

SEQ ID NO: 148298 - protein, 98 aa, Glycine max
  unsure (1)..(98): unsure at all Xaa locations
  Clone ID: PAT_MRT3847_104935C.1.pep
MYFLYPGTAPLTAVQLLWVNMIMDTLGALALATEPPNDDLMKRSPVGRKGNFISNVMWRNILRQSLYQFMVIWFLQSRGKSXIFLLEGPNSDLVLNTL

SEQ ID NO: 148299 - protein, 162 aa, Glycine max
  Clone ID: PAT_MRT3847_104936C.1.pep
MAVESDKVGSDGKVWSFCSMPFWQTTHASSSSSSTTTTIPTTSSMHHSVHHQSQILQSLDRSTHQPSTTVSSVAKSLLPTRRRLRLDPPNKLYFPYEPGKQVRSAIAIKNTCKSHVAFKFQTTAPKSCYMRPPGGILAPGESIIATVFKFGEPPEKHEKPID

SEQ ID NO: 148300 - protein, 265 aa, Glycine max
  Clone ID: PAT_MRT3847_104937C.1.pep
MAVESDKTGSVGKGWSFCSMPFWQTTHASSTSSTTTFSMHHSVHHQSQILQSLDRSTHQPSTTVSSVAKSLLPTRRRLRLDPPNKLYFPYEPGKQVRSAIAIKNTCKSHVAFKFQTTAPKSCYMRPPGGILAPGESIIATVFKFVEPPENNEKPIDQKSRVKFKIMSLKVKGEMDYVPELFDEQRDHVAVEQILRVIFLDPERPCPALDKLKRQLAEAEAALEARKKPPEETGPRVAGEGLVIDEWKERRERYLARQQVEVVDSV

SEQ ID NO: 148301 - protein, 120 aa, Glycine max
  unsure (1)..(120): unsure at all Xaa locations
  Clone ID: PAT_MRT3847_104938C.1.pep
KELGNHGSNLTQEQLETHTIAAWKEGKFQQFRTLDXNGGSYPXQFIHTEPHKYLKNIALKVLQNRSITVPIIHSSSEDNAYAQLLHLTSLSGILRNIYRHCKHSVSAVPMLELPVTAIPV

SEQ ID NO: 148302 - protein, 39 aa, Glycine max
  unsure (1)..(39): unsure at all Xaa locations
  Clone ID: PAT_MRT3847_104939C.1.pep
RKVQWMHIHMVGPVXNKKQPCHTGFGVATLVEWVLRTPF

SEQ ID NO: 148303 - protein, 57 aa, Glycine max
  Clone ID: PAT_MRT3847_10493C.1.pep
FNQTDQKRINNLIPQMEKTGTLFCLNAPTLLYLYIFEQTQALLFIKARPYVELELEM

SEQ ID NO: 148304 - protein, 69 aa, Glycine max
  Clone ID: PAT_MRT3847_104940C.1.pep
MSETFIFTLSLVMLCAASAFAAVPHRLPEVYLKNGNFEENPNPKYLKKTTLIGKYALPKWEISGHVEYV

SEQ ID NO: 148305 - protein, 155 aa, Glycine max
  Clone ID: PAT_MRT3847_104941C.1.pep
MRPTARRQAKDSFIPPAPPTPLDFHHRQYSSRDSDVSSRPSSVGIGRRPTLDLYNEPSYKQTVVSTINSFLSSHNFPITFKTTLPSAKDIHETLKFLLSLLDFPFSKLEEDLPPLLKRLNYPFKLNKSILRSPAAPHQWPTFLALIHWLGQIGRE

SEQ ID NO: 148306 - protein, 47 aa, Glycine max
  unsure (1)..(47): unsure at all Xaa locations
  Clone ID: PAT_MRT3847_104942C.1.pep
KRLCTSTCTAYDKLWILLHQRKXPRVAETLNLACQVVSLRVVFYATV

SEQ ID NO: 148307 - protein, 77 aa, Glycine max
  unsure (1)..(77): unsure at all Xaa locations
  Clone ID: PAT_MRT3847_104943C.1.pep
KKKKKTPYNGVSSXRSFNNNKIHIPPTLPXPGSSXXSLRAILENQGNGSNMXKNGYETKRAMVRVSQEXTKSNKCTF

SEQ ID NO: 148308 - protein, 101 aa, Glycine max
  unsure (1)..(101): unsure at all Xaa locations
  Clone ID: PAT_MRT3847_104944C.1.pep
HAYSSFGSXAXXDXXKXXFXQMXNVXWXAPXDXASLWXRXHXVXXXXLEXQXAXLXSXLVNVLREXYLHSXGXARQLXXXXLSXXEXLQKAGVPTIAPSFG

SEQ ID NO: 148309 - protein, 46 aa, Glycine max
  unsure (1)..(46): unsure at all Xaa locations
  Clone ID: PAT_MRT3847_104945C.1.pep
XXXXXGCLXXXXQWFHXXMXTRMRTREFXLIIFVEKKGIVCYCCFF

SEQ ID NO: 148310 - protein, 53 aa, Glycine max
  Clone ID: PAT_MRT3847_104946C.1.pep
FILNLAVYNAASNFDICQLTSLKSHNETNDREYHNFKTQLTHIYIYIYIYIYI

SEQ ID NO: 148311 - protein, 115 aa, Glycine max
  Clone ID: PAT_MRT3847_104947C.1.pep
HGSLQHRTVPPAGFPVFDSHFSLAPFSLSRSLLSLSLSLRIFRYESELNLNLIELELRCRILLRPEKRDRAALRSLAAEALTGDGVVRNERSLRLRQRHPQLSEQGTGDAPRRQE

SEQ ID NO: 148312 - protein, 104 aa, Glycine max
  Clone ID: PAT_MRT3847_104948C.1.pep
SNLRDRLKQMTEVLSLTKMQGLKACYHSNNNCCCKEETMWPNQKDSGQEGGQDHKTTLVYYQSGRRSVTSSAKKDLHFVKLLQDVFLSNLCQHAILKESLHFIC

SEQ ID NO: 148313 - protein, 338 aa, Glycine max
  Clone ID: PAT_MRT3847_104949C.1.pep
MVQEKKLVDEVSGWLKIYDDGSVDRTWSGPDQFKFMAEPAPPHEQFIDGVAIRDVAVTHGGGQSGHHVRLYLPEIKPEDSQKLPIVLHFHGGGFCISEPDWFMYYQVYTRFARSTRSIVVSPFLRRAPEHRLPAAIDDGFDTLLWLQTVARSGSLEPWLEQHGDFNRVFLIGDSSGGNSVHEVAARAGSADLSPVRVAGAIPVHPGFVRSNRSRSEMEMPQTPFLTLDMLDKFLALALPVGATKDHPFTCPMGEAAPPLEGLKLPPVLLCVAEMDLVRDTEMEYYEAMKKANKDVELYVSKGMTHSFYLNKIAVDMDPNVSAQTDALISRIKEFIEKH

SEQ ID NO: 148314 - protein, 362 aa, Glycine max
  Clone ID: PAT_MRT3847_10494C.1.pep
CLLLVPGSGLASAAPVEAVAYSEHGATKCIGMTIETRPDYCLGPHLRQMLSYGCTRLEIGVQSTYEDVARDTNRGHTVAAVADCFCLAKDAGFKVVAHMMPDLPNVGVERDMESFREFFESPMFRADGLKIYPTLVIRGTGLYELWKTGRYRNYPPEQLVDIIARILAMVPPWTRVYRVQRDIPMPLVTSGVEKGNLRELALARMDDLGLKCRDVRTREAGIQDIHHQIKPEEVELVRRDYMANEGWETFLSYEDTRQDILVGLLRLRKCGRNTTCPELMGKCSIVRELHVYGTAVPVHGRDADKLQHQGYGTLLMEEAERIACREHRSTKIAVISGVGTRHYYRKLGYELEGPYMVKYLVK

SEQ ID NO: 148315 - protein, 177 aa, Glycine max
  Clone ID: PAT_MRT3847_104950C.1.pep
GKDIAGQHDYYQNTTRGRGSPSSWRDRSDITSFYFSHFPDYVREKDLWKIFQEWGKVWEVFIPTKRNKQGHRYGFVRFKGVEDEDRLERRLDNNLYIKGMKLFVNKPKFRRGGHRVDNIEPGTQGRAGVKLMEYALTEQTKHHNTLPPKLKSYAEVVRHRGTQEGKKLHGTQEGKEL

SEQ ID NO: 148316 - protein, 87 aa, Glycine max
  Clone ID: PAT_MRT3847_104951C.1.pep
GFSFFFFFFFFFFFFFFFFFFFFEGQGKKTFFPRGKRKKAPCFDNLGNSSIKNIFWEKQTLLINMPFEKNLFPFKNSFLGPKLKASF

SEQ ID NO: 148317 - protein, 42 aa, Glycine max
  Clone ID: PAT_MRT3847_104952C.1.pep
NNLQIFFFFLPKTNLPGMCSLLHWHDLISVINIMELATIIFS

SEQ ID NO: 148318 - protein, 165 aa, Glycine max
  Clone ID: PAT_MRT3847_104953C.1.pep
MLLIKEGLREQAIALEEARDRWERHGIKVVVDDDLRKEASAGVTWLNASEQVSVQGTVDRAESLLDKLKQMAADIRGKSRDTLHKIIHVVSQFISKLREWACKTGKQAEEFGEAAISKVGKSVSELQQNALEVGIGIKEGAKRVAGDCREGVEKITQKFTQKFKT

SEQ ID NO: 148319 - protein, 115 aa, Glycine max
  Clone ID: PAT_MRT3847_104954C.1.pep
EIGNKGRTEAVGDNIKGCEFQRGGLLCSSSASQMGMVLRAEAPSAYFPHYHPNTLPHIVLKETTVLVTTFMAKGGCQRGALGKPPCGTLLDKKTTFYKHLWGSMAPIKGDCIFFS

SEQ ID NO: 148320 - protein, 89 aa, Glycine max
  unsure (1)..(89): unsure at all Xaa locations
  Clone ID: PAT_MRT3847_104955C.1.pep
ASEKYLXKPFTQKKDSFPRAPKFPHCSLPGGFPPFQGGQKNALTPTKKIPLDIPKSLANFRELPFWLKGQFKNLTWFSKMRDYIKALPP

SEQ ID NO: 148321 - protein, 71 aa, Glycine max
  Clone ID: PAT_MRT3847_104956C.1.pep
VLFGSKESIPPAVGAVASIVLDPQEVRTDSGGLFDPIPPLLAKAENSCGQRWWFEHLLKRSEMWTQRTSLI

SEQ ID NO: 148322 - protein, 60 aa, Glycine max
  Clone ID: PAT_MRT3847_104957C.1.pep
RLIVSQHNMSFNGLRYSPVRFPVISHNSPYKVISEASLYSILIQEHGHLQVRSYLWYGSN

SEQ ID NO: 148323 - protein, 52 aa, Glycine max
  Clone ID: PAT_MRT3847_104958C.1.pep
AGHRLRESFSFPLLVYLLNTLLFDIGLRVRLKLLLPLSQVPVQLPGQAREDA

SEQ ID NO: 148324 - protein, 78 aa, Glycine max
  Clone ID: PAT_MRT3847_104959C.1.pep
ITCPSGKWWPSQCSGHFFINGLSITTSENHETFNSCRFSQNYDETLILYTAAMTDIRGSIMTCITQTWEMMASKHTMR

SEQ ID NO: 148325 - protein, 401 aa, Glycine max
  unsure (1)..(401): unsure at all Xaa locations
  Clone ID: PAT_MRT3847_10495C.1.pep
RSQLQKLNPEPIAWIMDSHTPESLSTFFNLVFTMRLFWLCACHAPPEAGSLYFHXSVLRTFFITVGVDTELCFMRTLGYIITKLHMIKELSVGLGLKTIFPSPRFSYANETHGLWILKGYAPVMTMKLARSNNVKKSQFSGIDAKESILRYSLAHHQLEAHVQLEYTVGFFDAFIQVRARVDNIRLHVARLGFTQNDDVDDFVEEKHFPSRVRVWVGPEIGATYCAGLSLGRSTENKESEVETKRVVEGNLEKSQGSNVKALAKSSRRTRSRSWRMDQDAEGNAAIFDVVLHDNTTGQEMGSWRPISETGGDPGHGLRGRYARANRAFNKSGSVVIAGDEYGEEVGWRLCKEMEGSVMKWRIGGEFWVSYLPNQAKGSSFETRYMEWCDEVDLPLIHGKTT

SEQ ID NO: 148326 - protein, 84 aa, Glycine max
  Clone ID: PAT_MRT3847_104960C.1.pep
MLCVTQIKEAQPIPAQTICFKSFHIYLLLDITITNYPKMQRPTFSIRTPFMFAQMVWSIKGWQQALFCNFWLQFYHLSISTSIA

SEQ ID NO: 148327 - protein, 60 aa, Glycine max
  Clone ID: PAT_MRT3847_104961C.1.pep
KMDGHEYPFFFLNNFSLPIFLNVIWLCIMDWRRIPIYNVLSSRPPSPLAIELGSPFGIFT

SEQ ID NO: 148328 - protein, 69 aa, Glycine max
  Clone ID: PAT_MRT3847_104962C.1.pep
TYVCATHISNTIPKTLPTEWSLLKPQTHRRTPYALDIRHRKNLTGYHVHVATALRPPDIHYRLSRHRCA

SEQ ID NO: 148329 - protein, 89 aa, Glycine max
  Clone ID: PAT_MRT3847_104963C.1.pep
SFLYHRNRLPRGPYPLKLFLLHLPRHVSHTQFQCQQSFFQIINHFDLNNSTFSHTLNSIMYPNHFQHQSKPIQFDFYSTNRAFLDLLHL

SEQ ID NO: 148330 - protein, 45 aa, Glycine max
  Clone ID: PAT_MRT3847_104964C.1.pep
MASGATCVQRLDGSRDSAIHTKYRISLRSSSMQEPRYPLPRVIVP

SEQ ID NO: 148331 - protein, 47 aa, Glycine max
  unsure (1)..(47): unsure at all Xaa locations
  Clone ID: PAT_MRT3847_104965C.1.pep
YKMEQVEHFKLDSSIQIYFEDISRCNSFLSVFDSQSINQKYFXGCHY

SEQ ID NO: 148332 - protein, 53 aa, Glycine max
  Clone ID: PAT_MRT3847_104966C.1.pep
SLHTSSDTLYSSLTPPNRPYTTPECRNDSVSFAISIIICLWSLRESEEGEILE

SEQ ID NO: 148333 - protein, 335 aa, Glycine max
  Clone ID: PAT_MRT3847_104967C.1.pep
MCVGFPLVALVVVSMCYGLADAEVKTPNLRWHYYKVTNRCHDAEEYVRHQVNLFWKNDRSITAKLLRLVYADCFVTGCDASILLDEGANPEKKAAQNRGLGGFAVIDKIKAVLESRCPGTVSCADILHLATRDAVKLAGGAGYPVLTGRKDGMKSDAASVDLPSPSVSLQKVLEYFKSRNLNELDMTTLLGAHTMGRTHCSFIVDRLYNYNGSGKPDPSMSVTSLESLRKLCPPRKKGQADPLVHLNPESGSSYNFTESYYRRVLSHEAVLGVDQQLLYSDDTKQISEEFAVGFEDFRKSFATSMYKMGNYRVLTGNQGEIRRYCRYTNKGNPNK

SEQ ID NO: 148334 - protein, 105 aa, Glycine max
  Clone ID: PAT_MRT3847_104968C.1.pep
SPLIPYLCGLARNIWPRNHQVQMSSISLTRKGNNELAIFCVAAILVLNRQKIIRETHSFDGMIKMFNDKMLKMNVKSCITTAIKLRKKYFNKVIKKMNYVAEKGD

SEQ ID NO: 148335 - protein, 74 aa, Glycine max
  Clone ID: PAT_MRT3847_104969C.1.pep
GHRGIPSRRSYAYIQRSTYAQQAPRIKLEHDMTDCQACYERAISYINNCGLHASAATMNMCSKSHTDMFLKQEH

SEQ ID NO: 148336 - protein, 60 aa, Glycine max
  Clone ID: PAT_MRT3847_10496C.1.pep
LIIESTELYYEFKLKKDYWMTYIFDLYICGLSQRMDPVKEASYVPNMYLCLLLCTSYSEL

SEQ ID NO: 148337 - protein, 74 aa, Glycine max
  Clone ID: PAT_MRT3847_104970C.1.pep
LTCRNEQKSRICRVCLGSSRIETKGTSSERSKFHDEVAIIQICSMFRQFKFRESKVKASSSSYHRQCHLGRVLT

SEQ ID NO: 148338 - protein, 155 aa, Glycine max
  unsure (1)..(155): unsure at all Xaa locations
  Clone ID: PAT_MRT3847_104971C.1.pep
FPWGTFVLHRAFCCRQVFTENPTVVQHILXKTNFPVYPKGLTLNRALGDFLGQGMFNSHGAGXKVQRQISSHEVNTRALHKIRETVVDAXLSGRLLPLLGDGVKNKTVIPDLXDILQHFTFDNICKIAFGLDPEYLLPCLRVNPFATAFYYATRI

SEQ ID NO: 148339 - protein, 133 aa, Glycine max
  unsure (1)..(133): unsure at all Xaa locations
  Clone ID: PAT_MRT3847_104972C.1.pep
SGSSLYCRFISFCRVGTGLSDDELDAVVTKLKPYFRKYEYPKKRPPSFYQVTNHSKERPDVWVDSPEKSTILSIVRISLAIDRIIDFXRIDRVRYDKAWYECLDVQSFIELVHSSNGTTQRDTEYGSEQDSDP

SEQ ID NO: 148340 - protein, 100 aa, Glycine max
  Clone ID: PAT_MRT3847_104973C.1.pep
GEFKFVQPKKKGQIIWEVSKPPRGLGGKGPQRASFGGRCFIYAKVNGGFIRKPILRQAGGCSIKKGPPGGVAPPPEKKTIKEGGPKRKIYGKKWFFGGAA

SEQ ID NO: 148341 - protein, 88 aa, Glycine max
  Clone ID: PAT_MRT3847_104974C.1.pep
KLLICRLFQTAGEQIHYTSLAIDLARYKPIYINFTALSQGGNHLLSPLIYQQSNLINTITNLIEQPLGVCPLGSTTHYKCAMVCDPGT

SEQ ID NO: 148342 - protein, 67 aa, Glycine max
  Clone ID: PAT_MRT3847_104975C.1.pep
RRIMISSLSVMRSDRRSLITYAYMLSNRTALALPVIWSTRLILTRLHMKIRSDDPMNCILQRIERAK

SEQ ID NO: 148343 - protein, 83 aa, Glycine max
  Clone ID: PAT_MRT3847_104976C.1.pep
VSVPHAKDYGAFKEDIYIYMCVCVCVDFAELMSKEYLFENKNENETKRGIICKLEFINWSKINSSKYFVLVMIVRDVLLVPIS

SEQ ID NO: 148344 - protein, 134 aa, Glycine max
  Clone ID: PAT_MRT3847_104977C.1.pep
KKTSHARVRKLGIRLEKDNTAKLFDSTSLEHQKTFRTERPVNSAALSPNYDHVVLGGGQEAMDVTTTSTRIGKFEARFFHLAFEEEFGRVKGHFGPINRVAFHPDGKSYSSGGEDGYVRIHYFDPQYFEFEFEA

SEQ ID NO: 148345 - protein, 59 aa, Glycine max
  unsure (1)..(59): unsure at all Xaa locations
  Clone ID: PAT_MRT3847_104978C.1.pep
LALSVILSRLLGRIGHPNKGYDSHAQGYTPHSFCVAASLWXTTAWALTMTRTVQETYDI

SEQ ID NO: 148346 - protein, 46 aa, Glycine max
  Clone ID: PAT_MRT3847_104979C.1.pep
YDPLGGLDHKTILVVSLYVPLQELPLFILLLISAHDAAMPSYCTTR

SEQ ID NO: 148347 - protein, 523 aa, Glycine max
  Clone ID: PAT_MRT3847_10497C.1.pep
MDVWSWICELPNSVEGTESHSPPMKFEIASEKNDDKLDNSTRSIHLKAERTSGSDSEAAVIFTVCLQGFHPHNAHKPLWVSEKCHLSSEKPFLPLLLQLLQEIISHSPTAHDSTCPRSQLQKLKPDPIAWIMDSHTPESLSTFFNLVFTMRLFWLCAFHAPPEAGSLYFHSLLAPVLQTASSKLASSVLRTFFITVGVDTELCFMRTLGYIITKLHLIKELDVGLLGLKTLLPSPKFSYANEAHGLWILKGYAPVMTMKLARTNTVQKTQFSGIDAKESILRYSLAHHQLEAHVQLDYTVGFYDGFIQVRARVDNIRLHLARLGFSQNDDVDDFVEEKHFPSRVRVWVGPEIGSTYCAGLSLGRSTENKECEVETKRIVEGNFEKSQGSNVKALAKSSRRTRSRSWRMDQDAEGNAAIFDVVLHDNTTGQEVGSWRPINGGRYARANRAFNKSGSVVIAGDEYGEEVGWRLCKEMEGSVMKWRIGGEFWVSYLPNQAKGSSFETRYMEWCDEVDLPLIHGKTT

SEQ ID NO: 148348 - protein, 145 aa, Glycine max
  unsure (1)..(145): unsure at all Xaa locations
  Clone ID: PAT_MRT3847_104980C.1.pep
NSSSQFDSKAWLDSXCEDDCYSVNGDFTPSRGTTPVHHTFGTPSRNRIHGSMAETSPEKKKKLLELFRESVKDDQGDVHGHKEVKPTIQDVIMPKSAHCTPYLSEANSACSSERTMSMSEDRSSIREKSVKSFAGCIPSLSSCRS

SEQ ID NO: 148349 - protein, 442 aa, Glycine max
  unsure (1)..(442): unsure at all Xaa locations
  Clone ID: PAT_MRT3847_104981C.1.pep
MGSVPSTPRRGGAYSPETAEYLIGTFVGDTPFPLSSEFWQKLLELPLNVQWSTQRVQQACELLAKNNCHTRHLAKILFHLACCLQEYMSSSGALPLVYEKAFNAVYISSIFLKHLIESDQGENIQLYLSLEDNEDVQKDVLRDQTIENLAMRNVLSFIASVEVSPDTFLLHLELLNFMIIAMSTQLLCGPSNGPNDVNPFLDAAMDQDSSLVGAVVRRLLLNFMVRSNVPSNRATYSILYDGNQSSVLQRVGSAAANIVLFPFSYLVSSGGEESKSPIADISIHVLLVLVHYHKCLVSEDYANHKSSTSDSXSKKILTFSDNPYCKALEHAIDXVMDRVDIEGNAHSAPHIKLPFASLFDTLGICLADEAAVLLLYSLLQGNSAFLEYVLVRTDLDTLLMPILEALYNAPSRTANQIYMLLIILLILSQDSSFNASIHKLIL

SEQ ID NO: 148350 - protein, 171 aa, Glycine max
  Clone ID: PAT_MRT3847_104982C.1.pep
MGLCSSVPRNANEDMKLKLSFGSKSEKLVIPPTSIKGQQQQQPQNGWSTARSTTTFTDHGSKEEAFFDSKAWLDSDCEDDFYSVNGDFTPSRGTTPVHHTFGTPSRNRIHGSMAETSPEKKKKLLELFRESVKDDQGDVHGHKEVKPTIQDVIMPKSAHCTPYLSRTVLCM

SEQ ID NO: 148351 - protein, 130 aa, Glycine max
  Clone ID: PAT_MRT3847_104983C.1.pep
TPLGMRFIALQVRRPSGRPQGILNIGFTVLDSSMRSMPLYTHNASAVGYRHLMGEKDAYDSHNHLSPRIRPTAVATPMPELRRTKSDTSSMLGAAEAVARHHRAMAVRADSTISGSEVSVKKKRGEEEKR

SEQ ID NO: 148352 - protein, 46 aa, Glycine max
  Clone ID: PAT_MRT3847_104984C.1.pep
TNILRIKWPCLAFNQVQVFRPCNGIVNLLVAYFLFLLNVGQLVAYV

SEQ ID NO: 148353 - protein, 46 aa, Glycine max
  Clone ID: PAT_MRT3847_104985C.1.pep
KYHVTLRTISIPFITLIGESPTLHQLNQTPTTNSTSIPTIVIKTKI

SEQ ID NO: 148354 - protein, 116 aa, Glycine max
  Clone ID: PAT_MRT3847_104986C.1.pep
SRIFIGSKKEDIIAMILKVSLIVVLLVICSCVVEAISRNHNQNPNHNNINKNGSSLAAIKFPDYPSFNDVSSSGDDCSFSNSEQLGHSVPTMTSGEETDEESEGALANKHDIRLGN

SEQ ID NO: 148355 - protein, 92 aa, Glycine max
  Clone ID: PAT_MRT3847_104987C.1.pep
NMGVGTFSWRAHEVLDQAPLINFPRPPRPFCFMVVHCTNGVAQSWVLTWPTVFGCLYLSYDDVSGSAISLGSGLLFPRFPRFSISHAPNFCF

SEQ ID NO: 148356 - protein, 50 aa, Glycine max
  Clone ID: PAT_MRT3847_104988C.1.pep
FLKTYATAGKMPMIVAERMRKDNVKLDEETRRLLDLTSKMCVSDVSRILS

SEQ ID NO: 148357 - protein, 63 aa, Glycine max
  unsure (1)..(63): unsure at all Xaa locations
  Clone ID: PAT_MRT3847_104989C.1.pep
XAGVHEFVVQNXDXARXRQLLTXKRRFXKLLXRPSSXPQXXGXRLIXXDVKFXXXLEFGMXEY

SEQ ID NO: 148358 - protein, 87 aa, Glycine max
  Clone ID: PAT_MRT3847_10498C.1.pep
NAHQSHTPLKHRKKRRIIKNNSQPSQYPKNQTCDTKKCSTFQQQIQIFKQPRFLEFFKEKKSEIGRKGIAKCKKGCRKSVAGLLAPF

SEQ ID NO: 148359 - protein, 110 aa, Glycine max
  Clone ID: PAT_MRT3847_104990C.1.pep
APPHPRCWVTHNRLNMCEFFAILALPPFVYSYLSPGTGLPALSVIFALNALLLQNFISNLRCFLAIVIYLYTKSWAPNMPSFSSPFAFYPPPIILVICKRNFMNLPLVPP

SEQ ID NO: 148360 - protein, 55 aa, Glycine max
  Clone ID: PAT_MRT3847_104991C.1.pep
PKFPVQPTRPTTLTLNFLKVFFHLLYITNTSSHMGRRTYAFNMLHIHFSTMNDFY

SEQ ID NO: 148361 - protein, 85 aa, Glycine max
  Clone ID: PAT_MRT3847_104992C.1.pep
QASLRSWTSKKEEKPEEKTEEEKKEEPKPPSPCVLFVDLHCEGCAKKIERYIMKMRGVEGVVIDMAKNEVTIKGIVEPQAICNTI

SEQ ID NO: 148362 - protein, 67 aa, Glycine max
  Clone ID: PAT_MRT3847_104993C.1.pep
FFFRTLKSIKTNHSTFYPELHDFDPIRVCRQKTLSFQINKNNKNISFPFPRTYLFNLFTLEHLFPNK

SEQ ID NO: 148363 - protein, 114 aa, Glycine max
  Clone ID: PAT_MRT3847_104994C.1.pep
MKNTNSNTKLILLHPYIQKQGSSNRLWLLAFISFFTLVFLATLIYTRDTTSSTTTTTSSTPLSSFTNTLLSSTVINTLLHYASKSNDTFHMPHSDLKTISDMLRKCPSPCQLLV

SEQ ID NO: 148364 - protein, 45 aa, Glycine max
  Clone ID: PAT_MRT3847_104995C.1.pep
VGSMGLFFKWFPKMFVICTKGLSFGGAWFVPALSKFQIKECGFFS

SEQ ID NO: 148365 - protein, 87 aa, Glycine max
  unsure (1)..(87): unsure at all Xaa locations
  Clone ID: PAT_MRT3847_104996C.1.pep
KRPSISLNLTRSPISNRRVFSKYTKNANENDSRSLWPAQRVFFFPLGRRSLLCSLXLCGSWRLXXLAFVSGFWXRQRMKPGGVNRTG

SEQ ID NO: 148366 - protein, 138 aa, Glycine max
  Clone ID: PAT_MRT3847_104997C.1.pep
TGPPFLKKIGMELQLEACPGLGPPFNNPELLYPESWIKARQKSSPPKIFRPGLKYFKQTLLLVEPPARFAAYFPLFQNASQDCKCSKWGLGKTVHKFENFPANLRIRAKPIPAPIWFPKKEIKNKTNKKKKKKKKNTI

SEQ ID NO: 148367 - protein, 55 aa, Glycine max
  Clone ID: PAT_MRT3847_104998C.1.pep
PISTPYISYFYSIIHCLSPWSLRGLSCCHSLLMIHHPPPDTNHVHCPFFLIKPYA

SEQ ID NO: 148368 - protein, 157 aa, Glycine max
  Clone ID: PAT_MRT3847_104999C.1.pep
AGNKDLYLGTFSTEEEAAEAYDIAAIKFRGASAVTNFEMRRYDVDAILNNSLPVGGIAKRFKVSPETENKALVSTIQPPQNTNASSSINFSTIQPVSSIPYDSAITCYPHNLFHHFNPTNGESSTAEFAATMTDAIALATLPPLAVPGFFVWPHQNY

SEQ ID NO: 148369 - protein, 53 aa, Glycine max
  unsure (1)..(53): unsure at all Xaa locations
  Clone ID: PAT_MRT3847_10499C.1.pep
GIYTVEDFTXFVVRHPQRLGNILGSGMXNKMWHRFIEYAKTCVLSGKLLCILI

SEQ ID NO: 148370 - protein, 225 aa, Glycine max
  unsure (1)..(225): unsure at all Xaa locations
  Clone ID: PAT_MRT3847_1049C.1.pep
MPRTSTLECSGCPPLRALTFDALGLIKVVEARDKQRGAPQVVERWGDPESSKCVMAVSMIDRESHPLLAVARKNNQIEVLSPVNGDIQATITDANDLDVQSEVNNIVGLHLFAKQNSELASRDCTLLTCTTKGNASIRSIELVDSSTVSSCIDSPKIWNVCSGGNILCCKVDGNEKFALFGGKGVEMNIWDLNNFTKIWNSKPPTKDNLGIFTPTXFTSATFLMK

SEQ ID NO: 148371 - protein, 55 aa, Glycine max
  Clone ID: PAT_MRT3847_104C.1.pep
GTLKAIHVFKLVKKKTEMVVEVQAPEPFRFKRDMLTDLSVEAQAAMNHTPLCLEL

SEQ ID NO: 148372 - protein, 70 aa, Glycine max
  Clone ID: PAT_MRT3847_105000C.1.pep
NTPPFRLARFFSMIERSLAPPQFVLFLLPCCTLVWFLGKFNFYRFSWPNVIRFWAPLKQVVFRFILWGKW

SEQ ID NO: 148373 - protein, 47 aa, Glycine max
  Clone ID: PAT_MRT3847_105001C.1.pep
QFVHCLVTMVFYACEKDYTHRDLAHGASPAGTMAMGEWETDAVDQRE

SEQ ID NO: 148374 - protein, 73 aa, Glycine max
  Clone ID: PAT_MRT3847_105002C.1.pep
VVRLGASAQWSVCLLRRSGQPRAVGQSDQRVVGLRQLETQGVAYRLELVKKNRVIISRSSVQFVHCLCTSVLR

SEQ ID NO: 148375 - protein, 299 aa, Glycine max
  Clone ID: PAT_MRT3847_105003C.1.pep
MSSQAPPAGQYPSGFSPFFPFGAPQQTPTGVTTRGAATPAPLRAYKNPLGAGDSSSTMNGFNGQDTSGKKKRGSPSRHTKSSVNKPKKSQEPPADLSGLVGISPAQREDGSREVVNIVLMAYDAFRRRLCQLEEANELSSSSIKRADLKACNTLMTRGIPTNMRKRIGAVPGIEIGDIFYFRMELCIVGLHAPSMGGIDALHIRGEFEEETLAVCIVSSGEYDDDAEDSDVIIYTGQGGNFFMNKDKHTTDQKLQRGNLALDRSSRQHNEVRVIRGMRDGVNPNNKIYVYDGLYKIQES

SEQ ID NO: 148376 - protein, 46 aa, Glycine max
  Clone ID: PAT_MRT3847_105004C.1.pep
KKKRFWLSWVPLRSTTTLDFICHLRKKGVCRFGPKKPVAKVRLRAN

SEQ ID NO: 148377 - protein, 48 aa, Glycine max
  Clone ID: PAT_MRT3847_105005C.1.pep
REDCKSCIVVKGKVCYDCIVMKYYEESGYGEVCMRTREVKVLLMRKKG

SEQ ID NO: 148378 - protein, 89 aa, Glycine max
  Clone ID: PAT_MRT3847_105006C.1.pep
KFVVVVVTTFFAPFEPFVLSHENDINLHIPTCKTWLIWFLLLPGLELCLLLFLFGSDLYLTTYDGTTDSMIDKVDFFHQRYRMEILELN

SEQ ID NO: 148379 - protein, 71 aa, Glycine max
  Clone ID: PAT_MRT3847_105007C.1.pep
TIHLGWKYSLIVAPALPLTHRIPGNESSEGFFICFSSSSTASHVKRTWTSPCEENSHSPTLKRENGSPQQR

SEQ ID NO: 148380 - protein, 339 aa, Glycine max
  Clone ID: PAT_MRT3847_105009C.1.pep
VTIPSELLSKDLVLNYSGNINLHRESRIKGHMYVIIGSSVGASVLLLATIISCLYMRKGKRRYHEQDRIDSLPTQRLASWKSDDPAEAAHCFSFPEIENATNNFETKIGSGGFGIVYYGKLKDGKEIAVKVLTSNSYQGKREFSNEVTLLSRIHHRNLVQLLGYCRDEESSMLVYEFMHNGTLKEHLYGPLVHGRSINWIKRLEIAEDAAKGIEYLHTGCIPVVIHRDLKSSNILLDKHMRAKVSDFGLSKLAVDGVSHVSSIVRGTVGYLDPEYYISQQLTDKSDVYSFGVILLELISGQEAISNESFGVNCRNIVQWAKLHIESGDIQGIIDPLLRN

SEQ ID NO: 148381 - protein, 47 aa, Glycine max
  Clone ID: PAT_MRT3847_10500C.1.pep
VKTQVSWFLDKGILREAAFTEQRSPLPLHSGGNTGCCTVSPYNLYFF

SEQ ID NO: 148382 - protein, 95 aa, Glycine max
  unsure (1)..(95): unsure at all Xaa locations
  Clone ID: PAT_MRT3847_105010C.1.pep
XFRLIRXTXXXRLXGFRXKFSGASGRVFXFLPXXXYXGXSXXXXXXNFQXXXXEQGXXXXXRXSEXVXYXPXNYXXFXXRXXLMXXSAXGXXXXX

SEQ ID NO: 148383 - protein, 94 aa, Glycine max
  Clone ID: PAT_MRT3847_105011C.1.pep
LDKNILSLVKYSFCFSAWPDRRSPCLARGMHWAQFLRSKALERLGKVSRGFTLDLWKPLMVVQAQAKLKRDQPFLSGFVPFQFGYIFPQVEYVR

SEQ ID NO: 148384 - protein, 66 aa, Glycine max
  Clone ID: PAT_MRT3847_105012C.1.pep
RIYKGGTSHAPAAILGARVKHPQGSDCSLEDAHDPPSIEGFHLRIWAPAHDYEIPGCHCDQDLNGN

SEQ ID NO: 148385 - protein, 75 aa, Glycine max
  unsure (1)..(75): unsure at all Xaa locations
  Clone ID: PAT_MRT3847_105013C.1.pep
ARVQSYQMYDPMRAVTWALFASXKALNSMTFKHMNGFVQAFHRDLKDNNTFYIYYVLANYSMAARGYNEINSRLF

SEQ ID NO: 148386 - protein, 74 aa, Glycine max
  Clone ID: PAT_MRT3847_105014C.1.pep
LTATGVNTFLYYNSMISIFMSIPSFGRLLDRYCGLSVLDGTDLRGSGPICSESLTRLMSCSVDISGAYWDTSVG

SEQ ID NO: 148387 - protein, 69 aa, Glycine max
  Clone ID: PAT_MRT3847_105015C.1.pep
PYIQCVFKRGSFAFLVEVIYYITLYRTPPLREPARLLLLRGSVLTLRSNPLIDVAIGIEPSLRNDDTAS

SEQ ID NO: 148388 - protein, 76 aa, Glycine max
  Clone ID: PAT_MRT3847_105016C.1.pep
TKILFTIKVLAFTVLSYHIFVGSVSFRPGMKYSSIHVAPLIGGRPIDLGTITNSIRHIEPCMISRVPLLSTSTNGN

SEQ ID NO: 148389 - protein, 211 aa, Glycine max
  unsure (1)..(211): unsure at all Xaa locations
  Clone ID: PAT_MRT3847_105017C.1.pep
DISSQLKKLEIDMSKFFLMHFILNTLSQEYGSCKISYNTHKDKWSINELMTMCFQEEERLVMEIGESSLLTTACGKKKATKSQANQKGSGKTIXKMVAKCFFCMKKGHMKKNCPGFQKWLEKKGYAKPKETSXSEQNILSSNKLGSPMEAIETCILTLSSDFILKLEKTFYVPSFSRNLIFVSRLIPFGYSFNFKDTSFELFYNSKCVGNG

SEQ ID NO: 148390 - protein, 103 aa, Glycine max
  unsure (1)..(103): unsure at all Xaa locations
  Clone ID: PAT_MRT3847_105018C.1.pep
SCLLSSEGYRLFDGRAHTNELGKCIHLFQGHXAVILXSAIIKYDLSLFVDDYIYCLSETTELLLGIQKQPCFEKASLMSFLNNLDICYNKILKLPLNVFDCFG

SEQ ID NO: 148391 - protein, 95 aa, Glycine max
  Clone ID: PAT_MRT3847_105019C.1.pep
KINKPVITGRPQKNFFFPKKIINKKNKLTAAPKDPGPPQSIGKHIHNPPNIATTSATSKTTGSTWPQIIDNNPPRAIWGHNNGIRLLNNSPFRGK

SEQ ID NO: 148392 - protein, 35 aa, Glycine max
  Clone ID: PAT_MRT3847_10501C.1.pep
LTLILNAFYPFCLCQFMYLSTTLSSHNTTIPITTN

SEQ ID NO: 148393 - protein, 84 aa, Glycine max
  Clone ID: PAT_MRT3847_105020C.1.pep
SLSVIAQHLIFFCPPLFPPRLHPFCFLSRILFGILSGYLFRSVTFYSHFSAILLAASLLATLVPSKLPLQNSQSNPKIKPNYQP

SEQ ID NO: 148394 - protein, 94 aa, Glycine max
  Clone ID: PAT_MRT3847_105021C.1.pep
QMHQTIPTKQPKFSGSTNKKRLGTFLLKKGTTPNHEPETLTLLNGWPERPRNNQRKKFLSTILELKGSSPKTKGGKWFRIPPNKKAELCYLRWK

SEQ ID NO: 148395 - protein, 32 aa, Glycine max
  Clone ID: PAT_MRT3847_105022C.1.pep
KFSQSSKSDCTDRFRKKKVLIHKIQVYLFDNS

SEQ ID NO: 148396 - protein, 96 aa, Glycine max
  Clone ID: PAT_MRT3847_105023C.1.pep
QEIKRVLTEVLLKVTDELFDEIATRVLAEDDLTAEVGHKVATSNHKASASPPSATVPKASAKVLVPIKEKVENEDTSENSNSSSPGDVLGLGNYGS

SEQ ID NO: 148397 - protein, 38 aa, Glycine max
  Clone ID: PAT_MRT3847_105024C.1.pep
ERSCTFRGGQCGNQIGSKFWEVICDEHGMDPTRRVHLG

SEQ ID NO: 148398 - protein, 108 aa, Glycine max
  Clone ID: PAT_MRT3847_105025C.1.pep
SKIIPMDNICRSGIWELSDDILTKILASMGPMDLTRVSATCHHLRSLAASVMPYTKLNLFAHQRTAVEWMLHRERNAELLPHPLFVALSTEDGFSFHVYTVTGDIVTG

SEQ ID NO: 148399 - protein, 324 aa, Glycine max
  Clone ID: PAT_MRT3847_105026C.1.pep
RASVGVYEGAPNYPDAGRCWDIVDKYKVTIFYTAPTLVRSLMRDGDAFVTRYSRKSLRVLGSVGEPINPSAWRWFYNVVGDSRCPISDTWWQTETGGFMITPLPGAWPQKPGSATLPFFGVQPVILDEKGVEIEGECNGYLCVKKSWPGAFRTLYGDHERYETTYFKPFSGYYFSGDGCSRDKDGYHWLTGRVDDVINVSGHRIGTAEVESALVSHPQCAEAAVVGVEHEVKGQGIYAFVTVVDGVPYSEELRKDLVLIVRKQIGAFAAPDKIHWAPGLPKTRSGKIMRRILRKIASRQLDELGDTSTLADPNVVNQLIELADS

SEQ ID NO: 148400 - protein, 345 aa, Glycine max
  Clone ID: PAT_MRT3847_105027C.1.pep
MNKSSDATASPTCRGRYKKPNFRSSKSQPPSPVQFSSKTPEKPPQRIRNRGVALSVADIRKAACKRLQDQKQCTEMTSAPSSSSLNKSVRRQISLWPSSPSKPKTTDDESNKLPEKYEILDEFFDRLDTLVSLHRLKRWTPTFTSISSRIESLTDRRFTHSHLAQLKFILPNAIVLKKHLVLDERTSCMKPDIHISLDPDAVEADDAKLPPQGGRVSLKKVFRARLKEFWESHPEGDEIPEGTLPEPFNRQKKDSVVDMLETPLPTKLPPCMRYSDIVNNADLDEKLYVPVNATVEFPNEHLAAPSHMAPSFRADDVQQNPLLDSLQPLAFPVSESSQKENPPLV

SEQ ID NO: 148401 - protein, 83 aa, Glycine max
  Clone ID: PAT_MRT3847_105028C.1.pep
KKRKKNLSTFSSSCSSWGYGISQQSTQRPHLSLSKNLTLAACTQQAHFFLTHKYRHHHHHHHHHHILVLLPNEKQLLGVGILL

SEQ ID NO: 148402 - protein, 39 aa, Glycine max
  Clone ID: PAT_MRT3847_105029C.1.pep
WLDGLDYDIHADPCVRHWARELPKPYNYLVLRKHTQSLK

SEQ ID NO: 148403 - protein, 83 aa, Glycine max
  Clone ID: PAT_MRT3847_10502C.1.pep
KNGRATPTGLELLPLRFGTRRNPIRLLSLLFLHPTFSSETSAFLLPKPSFHSMGLPARRALSLYRPLLYSPIPDSSRFPHHFS

SEQ ID NO: 148404 - protein, 82 aa, Glycine max
  Clone ID: PAT_MRT3847_105030C.1.pep
GLLPSQKAVNEAYIACNTVRIKVLGNEKWLGVAPWGFLPLAWLQLPESCQLIQVWRTRGISSGTGSRELAKLGFHLENWVLG

SEQ ID NO: 148405 - protein, 75 aa, Glycine max
  Clone ID: PAT_MRT3847_105031C.1.pep
PSFTDFDFASVLLSGRLSYGGGIDGVSGSASTIYFLHRPETPYYTTMWPVIGKRLFIEVDTRPIDLKQWFRMAKV

SEQ ID NO: 148406 - protein, 76 aa, Glycine max
  Clone ID: PAT_MRT3847_105032C.1.pep
IVFNTVLTYNNGHLLWSFHKHSSSLYFIYSAFNPVLYMRLQLIVYIVISATFRRCLLIRKSSKHAGSFNLGIHLKS

SEQ ID NO: 148407 - protein, 83 aa, Glycine max
  Clone ID: PAT_MRT3847_105033C.1.pep
ISSLGSATVDGLKVWQAIPSPVSSSEPDSTSSSSSSSSSSSISSSMSSFRLHLAAGGSTMVYMTVGMWSEEVGLEVECSDRAG

SEQ ID NO: 148408 - protein, 365 aa, Glycine max
  Clone ID: PAT_MRT3847_105034C.1.pep
MFAARNLPRHCFKPLSSLLQLQSNPVVRNVLPSGLTPECGNTVKVEEAYHRVGLYCYVKQLNLLNGSLSRAMSTSKGRSMRSKVERRMQKESGKTLREIRRAKKLKKKLMTEEERLIYNLKRAKKKVALLLQKLKKYELPELPPPRHDPELLTPEQLQAYKKIGFRNKNYVPVGVRGVFGGVVQNMHLHWKFHETVQVCCDNFPKEKIKEMASMLARLSGGIVINVHNVKTIIMFRGRNYRQPKNLIPINTLTKRKALFKARFEQALESQKLNIKKIEQQLRRMGVNPEDPAAMASIQRVASTFFNAIDQKEGSPYVFREGKQSITEPAEGFEESEPIADSDQEELDRFIAEIEDAADKEYEAEE

SEQ ID NO: 148409 - protein, 76 aa, Glycine max
  Clone ID: PAT_MRT3847_105035C.1.pep
VPTSRERTIRPTVSPNLSLWCQQFQTRGEMTPGQLTFNKIPTGFLVCIFNLFPGAPSYVTAGSKSPPQNAFSLMFS

SEQ ID NO: 148410 - protein, 60 aa, Glycine max
  Clone ID: PAT_MRT3847_105036C.1.pep
IIHIQAHSFHHLQCKANKAIVEQSMSKSKTATPSNNLSLSSSYIEISCLFSKITTATKSN

SEQ ID NO: 148411 - protein, 92 aa, Glycine max
  Clone ID: PAT_MRT3847_105037C.1.pep
TSINYRKIRNKKFYNLLFQVIDVCFIKFSVIFVKHLINQTERQTLLMPRNILSDDRVSSFHTVTSPKKFTKRLKEEIRVSNDSWLRILPFFD

SEQ ID NO: 148412 - protein, 112 aa, Glycine max
  Clone ID: PAT_MRT3847_105038C.1.pep
NAKSRDGVLPLHCHTMASSNTPKPENKKSTKKSEISKAEKKKTKNAEIPKTDGKTKKNKEISQEENKKKIKKAKLSNGTSKQRDEGSKKGVAAEGNGEEAKMNVFPMNRIRT

SEQ ID NO: 148413 - protein, 55 aa, Glycine max
  Clone ID: PAT_MRT3847_105039C.1.pep
NPVSSPYLPQIANLAISILVCFQITPGQFIVSNCIMFMRYNLQFIFCCTEFLTIV

SEQ ID NO: 148414 - protein, 88 aa, Glycine max
  unsure (1)..(88): unsure at all Xaa locations
  Clone ID: PAT_MRT3847_10503C.1.pep
QRHGERXEGSGCWWLXSSLLMGMATLSXSLPLFHRYPNPNPNPNPSXFRPSLSXXSPSXXXNPVVXPFLXLASXSHDXXSNSXXSXXH

SEQ ID NO: 148415 - protein, 113 aa, Glycine max
  unsure (1)..(113): unsure at all Xaa locations
  Clone ID: PAT_MRT3847_105040C.1.pep
NTGVLEPLNTKTNEAETTKAGEPDKPCDGVSKMYTSSVERXICTEHDGYDPFLGGINKYATAMMPLXDKIIYKVALSLAAEWFDCVDKKDLSEEDPLHAALSGDEGLYYVERN

SEQ ID NO: 148416 - protein, 62 aa, Glycine max
  Clone ID: PAT_MRT3847_105041C.1.pep
SRELSRHLPAWHCGKSIWRLGKFIFFTGAERGAKLPKPKYCLLESHMKVSIYSNVWAEPFLE

SEQ ID NO: 148417 - protein, 50 aa, Glycine max
  Clone ID: PAT_MRT3847_105042C.1.pep
EKKIIDNNESGFMYLSILHLFTSQVAVRVSGPHTNRTLFLTSPSQSNPAT

SEQ ID NO: 148418 - protein, 43 aa, Glycine max
  Clone ID: PAT_MRT3847_105043C.1.pep
DHSVCLATMAKFFAAMILVLFAISILLTLVMAAYEQCGHLYVN

SEQ ID NO: 148419 - protein, 40 aa, Glycine max
  Clone ID: PAT_MRT3847_105044C.1.pep
SRMRLGSRPLFRVEAPFSLSSNRRFLASVRTNIDNEIYHK

SEQ ID NO: 148420 - protein, 57 aa, Glycine max
  Clone ID: PAT_MRT3847_105045C.1.pep
KGFFSCRRSILLSSLPYSLNSTISTTQGQGKASNLMLEARLVSEWEPTNELIVNNFT

SEQ ID NO: 148421 - protein, 65 aa, Glycine max
  Clone ID: PAT_MRT3847_105046C.1.pep
FLYRHTFQHTRSTCYLFQKITYLPLILTRLLRNKGLNLLIDLKPREVIPGWLLGTSLTNNLPNPC

SEQ ID NO: 148422 - protein, 174 aa, Glycine max
  Clone ID: PAT_MRT3847_105047C.1.pep
MGLLDIVQPGVLNGGDVMKVYKYAQEHKFAIPAVNVTSSSTTNAALQAARDIKSPIIIQTSNGGAAFYAGKGIDNKNQNASVLGAIAAAYHVRAMAKHYGIPVILHSDHCAKKLLPWFDGMLEADEKYFAEHGVPLWSSHMLDLSEEPMEENVAISKKYFERMDQMGLIQRLTG

SEQ ID NO: 148423 - protein, 72 aa, Glycine max
  unsure (1)..(72): unsure at all Xaa locations
  Clone ID: PAT_MRT3847_105048C.1.pep
IPAKPIQLFFHSIPKYRNIMLAFIFRIXKIQHPIIIIIXTLIVMIYITIFIFILILSFNTNEVVINVMLICS

SEQ ID NO: 148424 - protein, 77 aa, Glycine max
  Clone ID: PAT_MRT3847_105049C.1.pep
NQGNTAWGTEKRGHEEGGFAAKPEEDMNFGWNMPFYINSQKTAIIYRQAGTAEDAEAIYNKDTDPSHEYGNSNFSTA

SEQ ID NO: 148425 - protein, 66 aa, Glycine max
  Clone ID: PAT_MRT3847_10504C.1.pep
CSWGVTLYKPFRSSASFPLYCPKVYNLTHAWGIHGMKGSLYPRNLVHFILKIEKYKKKKGGRPPVS

SEQ ID NO: 148426 - protein, 79 aa, Glycine max
  Clone ID: PAT_MRT3847_105050C.1.pep
KPSSVASSPHHSRRETSYKVVRSCASKKFITGCVILFPIAITSFLTWSASSFLALDFSLLSLLKSGSFSYPLASSFLFI

SEQ ID NO: 148427 - protein, 193 aa, Glycine max
  Clone ID: PAT_MRT3847_105051C.1.pep
AFLSYLRLRFSLGHPLSPPLIVITGSQTVAAANDALTASSERLRLLQGQWGGRQTQPKQDYSGVFRRKDTKIPEKNTSESKTRGQEQQDQSALRDITNDSPIAELARGVILGTPSAKQRRSKMKNTPGSGEALLRGQVKTLLLKVEEEVELSKFSLESMELAAPMPRDTRSFQNLSGWGFSYQPFLCSQKPTN

SEQ ID NO: 148428 - protein, 97 aa, Glycine max
  Clone ID: PAT_MRT3847_105052C.1.pep
SKGGIAGADVEQLVILIITVLIGGHRRTPPKSVAEYGQTMDRWPQALSQQIAWIRETAAPKCALAAMATVDLLSANADDEERGAVAVCKTATWAKSS

SEQ ID NO: 148429 - protein, 173 aa, Glycine max
  Clone ID: PAT_MRT3847_105053C.1.pep
MARMPLEPLIVGRVIGEVLDSFTTSTKMIVSYNKNQVYNGHELFPSTVNTKPKVEIEGGDMRSFFTLIMTDPDVPGPSDPYLREHLHWIVTDIPGTTDATFGKELVSYEIPKPNIGIHRFVFVLFKQKRRQCVTPPTSRDHFNTRKFAAENDLALPVAAVYFNAQRETAARRR

SEQ ID NO: 148430 - protein, 60 aa, Glycine max
  Clone ID: PAT_MRT3847_105054C.1.pep
SDILFIADGVFYKVFYFFIIFRTFYFCDFESLQVSDYYLFVLLYPEIRFCHLQCTSTKAL

SEQ ID NO: 148431 - protein, 67 aa, Glycine max
  Clone ID: PAT_MRT3847_105055C.1.pep
QLRRLDQSNEYRLRDGSAFSKVKHSIKHDNNNKKYITSSQSRLLNSRVYIDLTRKNLLHMKIITRYL

SEQ ID NO: 148432 - protein, 258 aa, Glycine max
  Clone ID: PAT_MRT3847_105056C.1.pep
GSFGTVYEGFTDDGNFFAVKEVSLLDDGSQGKQSLFQLQQEISLLSQFRHDNIVRYLGTDKDDDKLYIFLELVTKGSLASLYQKYRLRDSQVSAYTRQILSGLKYLHDRNVVHRDIKCANILVDANGSVKLADFGLAKATKLNDVKSSKGSPYWMAPEVVNLRNRGYGLAADIWSLGCTVLEMLTRQPPYSHLEGMQALFRIGRGQPPPVPESLSTDARDFILKCLQVNPNKRPTAARLLDHPFVKRPLLSPIGPVSP

SEQ ID NO: 148433 - protein, 118 aa, Glycine max
  Clone ID: PAT_MRT3847_105057C.1.pep
GTAAIRLRKCTALRLQTTGESIGSTYLDKIFHFTSYVTILHFSFDITILVSHIHKSIIVKRNYFHSINKYQTFKNMRSSSDDHILPTFRFNERDLVIIDLCTTLCKTVYINVIKKTPA

SEQ ID NO: 148434 - protein, 71 aa, Glycine max
  unsure (1)..(71): unsure at all Xaa locations
  Clone ID: PAT_MRT3847_105058C.1.pep
KILLXRGXXRKPTQXTINHFIRGEHEGSYLAKTPVGIPLRDTVGLCQNWDGIIPACLAGMPQTTKLMRGGK

SEQ ID NO: 148435 - protein, 221 aa, Glycine max
  Clone ID: PAT_MRT3847_105059C.1.pep
MDRVIQPPLVDTTACLCRVDTGLKTVAGAKKYVPGTKLCLRPDIKPSIHPTRNKPARGDRSRSQSPLLPGLPDDLAIACLIRVPRVEHRKLRLVCKRWYRLLVGNFFYFLRKSLGIAEEWIYVIKRDRDGKISWHAFDPVYQLWQPLPPVPKEYSGALGFGCAVLNGCHLYLFGGKDPLKGSMRRVIFYSARTNKWHRAPNMLCRRHFFGSCVINNCLYVA

SEQ ID NO: 148436 - protein, 247 aa, Glycine max
  unsure (1)..(247): unsure at all Xaa locations
  Clone ID: PAT_MRT3847_10505C.1.pep
HTSVSLRLHEFGTRQPWDLTRSSKKFEELCADLEEKLKLSGENFLRTDSLLSQALSNNAELEQKVKSLEDLHNESGAAAATATQRSLELEGHIQTSTAAAEEAKSQLRELETRFIAAEQRNVELEQQLNLVQLKTSDAEREVAELSEQISNLNAKLEEAXEEKSLLNSQLQEYTEKVALLESDLNQSSLRSSQLEEEFKNVYEKCAEHEDRASMNHERTRKLXXLIXXSHSQLENSDKKVSEFGIVT

SEQ ID NO: 148437 - protein, 48 aa, Glycine max
  Clone ID: PAT_MRT3847_105060C.1.pep
PACLREYLRNIKKVGIMGDNVSYHIFSLHVSLLLELVSNIPLIGRALL

SEQ ID NO: 148438 - protein, 48 aa, Glycine max
  Clone ID: PAT_MRT3847_105061C.1.pep
FYITLKSNIYIIDPLPSINNTYSLFLQQILQLQIKFNYLLKRFFYLFK

SEQ ID NO: 148439 - protein, 99 aa, Glycine max
  unsure (1)..(99): unsure at all Xaa locations
  Clone ID: PAT_MRT3847_105062C.1.pep
GGKIFGGXDFIFLIYTENFLXNXLXGXXGGXKHTWKKRGAPLFFFPPFLAPPPFKFFWGPKKTPMGLLLKFSPKGKLGEKKPPFFKKAPFLLGAPRDFF

SEQ ID NO: 148440 - protein, 57 aa, Glycine max
  Clone ID: PAT_MRT3847_105063C.1.pep
MGKGKKMEKSFLNLSYWIIPATSFFYQQKKNIFYRRKISPRGPGGFTSLIDCKAMGA

SEQ ID NO: 148441 - protein, 106 aa, Glycine max
  unsure (1)..(106): unsure at all Xaa locations
  Clone ID: PAT_MRT3847_105064C.1.pep
XHXXQXXXNXXETXPTXXXRXHNXXQXXLXTXXLXIFLXVXXSLXHXTLXXLNLAXXXNHXXXXFSXQXXXXTNXXTXXRITXKXXLIRNXHXYXTNXXXXXIXXX

SEQ ID NO: 148442 - protein, 138 aa, Glycine max
  Clone ID: PAT_MRT3847_105065C.1.pep
QTKHSHTTKKNKNTHTEYSFANYAFPVCPSLHSLFPNLRHPTKTPNRRQPYLSKILLPIKKRKARIQLQFFLFIRYFVKKKNYHFFIVFSVKEKKEERKVHSFTMEPTAGKPGSLRNLLIRFLLFGVLVIGVRLAYLI

SEQ ID NO: 148443 - protein, 55 aa, Glycine max
  Clone ID: PAT_MRT3847_105066C.1.pep
QATSKPVLVYPNSGETYIAESNQWVVSSASLFLHGLSLFLCSCLTNFKSNSSYNK

SEQ ID NO: 148444 - protein, 35 aa, Glycine max
  Clone ID: PAT_MRT3847_105067C.1.pep
HLISGRYSQNLCLDMSHLRQRQLWRKIIASGHGGG

SEQ ID NO: 148445 - protein, 63 aa, Glycine max
  Clone ID: PAT_MRT3847_105068C.1.pep
NASGAPQVVQKKTVLETKGEKSILLYFTAKKNPCLKRVVILGKNITKSFIVFLKKQKKKSTPP

SEQ ID NO: 148446 - protein, 89 aa, Glycine max
  Clone ID: PAT_MRT3847_105069C.1.pep
LKLHPHPQSNIKDAQLNALELFKINESTGNLAGPNPDLPLQTPKAPVENSKKKSSDTTRTLAAVAGAVSGVVLVSLIVACFLIKRKKNV

SEQ ID NO: 148447 - protein, 210 aa, Glycine max
  unsure (1)..(210): unsure at all Xaa locations
  Clone ID: PAT_MRT3847_10506C.1.pep
SPLRACSPKVRTYSPLMARACSPLKVRTCGPLKVRACSPTKVRTCSPLMARACSPMMARTCNPLKVRAWPPLKMXTCSPLMARTCSPLKVRTCSPLKVRACSPTKVKAHDPLTARTCSPLKVRACSPLKARTYSPLEVRACSPLVVRTCSPLKARTCSPLMVRACSPLKARTCSPLEVRACSPLMVRTCSPLKARTCSPLTVRVSSTQGE

SEQ ID NO: 148448 - protein, 391 aa, Glycine max
  Clone ID: PAT_MRT3847_105070C.1.pep
MSAPPHHDDDDDNEEVFLDESDIIHEVAMDNEDLPDADDDSELLEEDEDGDFVHKFTAHTGELYSVACSPTDADLVATAGGDDRGFLWKIGQGDWAFELQGHEESVSSLAFSYDGQCLASGSLDGIIKVWDVSGNLEGKKFEGPGGGIEWLRWHPRGHILLAGSEDFSIWMWNTDNAALLNTFIGHGDSVTCGDFTPDGKIICTGSDDATLRIWNPKTGESTHVVRGHPYHTEGLTCLTINSTSTLALSGSKDGSVHIVNITTGRVVDNNALASHSDSIECVGFAPSGSWAAVGGMDKKLIIWDIEHLLPRGTCEHEDGVTCLAWLGASYVASGCVDGKVRLWDSRSGECVKTLKGHSDAIQSLSVSSNRNYLVSASVDGTACAFEVENFR

SEQ ID NO: 148449 - protein, 108 aa, Glycine max
  unsure (1)..(108): unsure at all Xaa locations
  Clone ID: PAT_MRT3847_105071C.1.pep
MNAPPHHDDEDDNEQVFLDESDIIHEVAMDNEDLPDADDDSELGMNXQEEDSNFVHKFTAHTGELYSVSCSPTDAALVVTGSGDDRGFLWKIGQGDWAFERQGHEESV

SEQ ID NO: 148450 - protein, 72 aa, Glycine max
  unsure (1)..(72): unsure at all Xaa locations
  Clone ID: PAT_MRT3847_105072C.1.pep
MSAPPHHDDDDDNEEVFLDESDIIHEVAMDNEDLPDADDDSELLEEDEDGDFVHKFTAHXGELYSVACSPTD

SEQ ID NO: 148451 - protein, 143 aa, Glycine max
  Clone ID: PAT_MRT3847_105073C.1.pep
IVDYVIPSGYSAGGVFVVGRHDEDQAGAIEYFKLGKGPYYVMVRPFHLCSLEVGKTLRRVIAGGKILLNNSTTPTLSVAAIMKKPMAAGDVIERGIGGYSVRGEAVKIAECPDHLPIGLLKHSVLKRALEPGQIVTFDDVEPR

SEQ ID NO: 148452 - protein, 91 aa, Glycine max
  Clone ID: PAT_MRT3847_105074C.1.pep
DPKSAFLANLDLFSHGLVVRNYNRTAALTSLFQVSIFKQKVLKQIFEQPKGKSETPCLLLLKGQQQSNQFLHKWKKNQVFVNKKRKEKMQR

SEQ ID NO: 148453 - protein, 80 aa, Glycine max
  unsure (1)..(80): unsure at all Xaa locations
  Clone ID: PAT_MRT3847_105075C.1.pep
DPLVRLRALYRGFNILCVLIIVYQSGYLGIYYSHNXFVLTAPLHDILFATFTLERLIINDPSLASYPIYTDIRRIIITSD

SEQ ID NO: 148454 - protein, 91 aa, Glycine max
  Clone ID: PAT_MRT3847_105076C.1.pep
PAPSASLFISAVSTPTTPYCDPLPARVHHVVHPSGCQSPHSKPAASTPTPTPESLHHVLSPRPHRVPRVVFEAVHPPLRPPRRRARHPNSF

SEQ ID NO: 148455 - protein, 58 aa, Glycine max
  Clone ID: PAT_MRT3847_105077C.1.pep
AVNSISFRPVDTPLKLADYFNIGRVFQVGSIPDSPSGRPMYLDTSVMGADFPAFVEIV

SEQ ID NO: 148456 - protein, 46 aa, Glycine max
  Clone ID: PAT_MRT3847_105078C.1.pep
SKRAYSISAINWSGDNRICRPKSLGLYKILDGACSGLKTRDSHCYM

SEQ ID NO: 148457 - protein, 68 aa, Glycine max
  Clone ID: PAT_MRT3847_105079C.1.pep
PIYHIGCASPYAKLGLRVSSIYVSILFHASQMIIHGYTNTHLAGSRTLSLQQRLRKVRGRGHGEPGEG

SEQ ID NO: 148458 - protein, 544 aa, Glycine max
  unsure (1)..(544): unsure at all Xaa locations
  Clone ID: PAT_MRT3847_10507C.1.pep
MEDSDSVATLIDSTTSKIQQLQKAFAELESYRAVTLNLKWKELEEHFHGLEKSLKRRFHELEDQEKEFENKTRKAQEILEKRQAAVYAKEQATLQRLQEKRDAAVFDIVNAREKQRKVTISDLAIVSNGGKGTFHVEDKPVDAVSFAANGNVEEVVLSPENGNVELSYPDLVKLCKEMDAAGLHKFISDNRKNLAAVREEIPHALRAAPNAACLVLDSLKGFYCTEVSNQDVKKDANLLGVRRTCIMLMECLCDFLSNSGCVSNVISEDIKDRAKAVAEEWKPRLDALDIDASNVNSLEAHAFLQLLASFGIASGFNEEELSRLIPMVSRRRQTADLCRCLGLSEKMPGVIEVLVNSGRQIDAVNLAFAFDLTEQFSPIPLLKSYLKDARKISSPVRSVNSSPTAQIDVNDRELIALKAVIKCIEDHKLDEQYPLDPLQKRSMQLEKAKADKKRETEATKPQPKRPRANGVGYGPRVTNILSDKTSYARVADRYPQYVYDRPXMYPAPTENHCPPLMTTATYNISPSHGNYFGNGYQYQASYLH

SEQ ID NO: 148459 - protein, 106 aa, Glycine max
  unsure (1)..(106): unsure at all Xaa locations
  Clone ID: PAT_MRT3847_105080C.1.pep
MTEHTTSYLSKWKKGKLLGRRTLGHVYLGFNRDSGLLNAIKEVRAVWDDQSSKECLIQLKQEIHLLSXLLHPNIVEYYGSDLREETLCVYLEYVFGGSIHKLLQEN

SEQ ID NO: 148460 - protein, 368 aa, Glycine max
  Clone ID: PAT_MRT3847_105081C.1.pep
MDTTCIRFALGPILLHLLFLSLPNLSLADVIYSPLELFSINCGSNSSLSTRDGRNWTADIKFLSENKDSVAAPALTPSILEGPYTDARFSHSQFTYSFPVSTGPKFLRLFFYSTSYQNFHRSKAYFSVKAGPYTLLQDFNASLHADAGNEPGDYLFREYSINLKDGDRLNITFIPSKTSQNPDSYAFINGIEIVSMPPFLYYTNPDDVDISGLPQLVGLNTNPFPIENNYALETNYRLSVAGKQIPASRDTGMLRTWKADDKYLTTQSAPSVDYGGRTKLSFITTLNYMAPDEVYRTVRNMGMNGSNNMRLNLTWQLPVDSGFTYLLRLHFCQLDPQVRLAGDLMFFIYIEDQLVTNWADVLLWTYNQ

SEQ ID NO: 148461 - protein, 59 aa, Glycine max
  Clone ID: PAT_MRT3847_105082C.1.pep
NLVGSKEEHLWLPGDYCIVGSSEDIPPFKEWIAPDEADVTDSGRCGRHDAEGTTLAGAT

SEQ ID NO: 148462 - protein, 190 aa, Glycine max
  unsure (1)..(190): unsure at all Xaa locations
  Clone ID: PAT_MRT3847_105083C.1.pep
MGFFFTWENGAFKNRFPNGTRRRRKKPKKKRGKTGPTGKREKKRKKKKPHPEATRRTTGKAKGPTNTNQKKSQPKNETQKPXKKXKKKNLAKPTKNGKRKSRKGAQIGKGNRGEKEKKSPPPRGKKKKPQKGSPSMPKTRENGKKGGNGRNRQGHKRKRLTEKRGKKAQKKDLGQRAKKRGHKKKPQNNG

SEQ ID NO: 148463 - protein, 93 aa, Glycine max
  Clone ID: PAT_MRT3847_105084C.1.pep
PRVRPPQHYCYIWIRCFFDLFLILTTLLLSPPLVCLLIISRSVFRLRQIFPLAGGNFCRTKCFANIYHASMSSHYQICIYPPFFNLFLYYYYY

SEQ ID NO: 148464 - protein, 103 aa, Glycine max
  unsure (1)..(103): unsure at all Xaa locations
  Clone ID: PAT_MRT3847_105085C.1.pep
LPARPSYRNAKTCNMLHFVRNLIQNVSCFAPYXKRITEXLNDANDNMSLKVANIKHLSHKRTKNKPEEISNVLMNITAGGARYNNKYDLFTSSHIHYIDLCID

SEQ ID NO: 148465 - protein, 39 aa, Glycine max
  unsure (1)..(39): unsure at all Xaa locations
  Clone ID: PAT_MRT3847_105086C.1.pep
GNPNGFGAXGDDPLRHCFXLPLTSFXLPMTPTTRSSTSR

SEQ ID NO: 148466 - protein, 61 aa, Glycine max
  Clone ID: PAT_MRT3847_105087C.1.pep
GLLVRMLVLVRSSSLPSSPIICEHAALSSSSSSPVLPIYAIDSHVISCTYCQCHYAVRVEV

SEQ ID NO: 148467 - protein, 204 aa, Glycine max
  unsure (1)..(204): unsure at all Xaa locations
  Clone ID: PAT_MRT3847_105088C.1.pep
MNQIDDGRTLSPLPDQVLENVLESVLHFLTSRRDRNAASLVCKSWYRAEALTRTELFIGNCYAVSPRRAXGRFPRVRSVTIKGKPRFADFDLMPLNWGAHFTPWATALSQSYHSSLNKLHLKRMSLTDHDLTLLSHSFPSFQDLVLTCCESFGTTGLAGLTCNCRLLKGLELMECVVEVGDQEMDWISGFPERDAQTHLESLGF

SEQ ID NO: 148468 - protein, 125 aa, Glycine max
  Clone ID: PAT_MRT3847_105089C.1.pep
MAGRLTNAASRILGGNGVVYRSVASSLRLRSGMGLPVGKHYVPDKPLPMNEELLWDNGTAFPEPCIDRIADTVGKYEALAWLCGGLSFFASLGLLAVWNDKASKTPFAPKVYPYDNLRVELGGEP

SEQ ID NO: 148469 - protein, 82 aa, Glycine max
  unsure (1)..(82): unsure at all Xaa locations
  Clone ID: PAT_MRT3847_10508C.1.pep
FVCYFGHPRFFPCVSGLYFXXDCFSIPFLKKSGVCPWGRPDFLGLVKGLVGNYKRIGLKFSKKNQVFYFKKKKKKKKKKKKK

SEQ ID NO: 148470 - protein, 43 aa, Glycine max
  Clone ID: PAT_MRT3847_105090C.1.pep
CERSLLNGVMLGLVWKLTLILNQRQYVVLSVRNKARILYIKQT

SEQ ID NO: 148471 - protein, 74 aa, Glycine max
  Clone ID: PAT_MRT3847_105091C.1.pep
SYRRAPYTGVGEQNKVISELRKTESGRLWEIGKFSHYVAKQMESEDADEDSELCISAAEYLKKSKRRDESMFEY

SEQ ID NO: 148472 - protein, 74 aa, Glycine max
  Clone ID: PAT_MRT3847_105092C.1.pep
PGKNPPKTWEFLGFYYKNRGTPHFCPIPPPRPLNKSESKAPYCGLGGPQLKPTHAAKKPPGRGATGLIISKKGP

SEQ ID NO: 148473 - protein, 129 aa, Glycine max
  Clone ID: PAT_MRT3847_105093C.1.pep
GASPTVHLCSSDQFDPLSQTHHCFPSSSLSPSSLTIKKKKKKDTDTDTDTDREREGEREREREKVKKFRVVDDDDDSDDDVSVGVAVLLVVVVVVDHLLLPLPLSLIHVATRDCLLITCPSDPLTSDAW

SEQ ID NO: 148474 - protein, 69 aa, Glycine max
  Clone ID: PAT_MRT3847_105094C.1.pep
LALYVRGDCHNCTIIPLWILHAYHVFLQCVVLKLGVLMAIAAYRETLTPNYNHGRLLNGCLLCETSDAQ

SEQ ID NO: 148475 - protein, 61 aa, Glycine max
  unsure (1)..(61): unsure at all Xaa locations
  Clone ID: PAT_MRT3847_105095C.1.pep
IKGHGIRIKPFSYACGFEQLGHRTLLRKISLTGKILLTKGRDSXNIMAINYKENYQNVGIV

SEQ ID NO: 148476 - protein, 179 aa, Glycine max
  unsure (1)..(179): unsure at all Xaa locations
  Clone ID: PAT_MRT3847_105096C.1.pep
MKLDTTSLESFPTLIAPQNDVAGELSAAPFFDLPNSNDFDGFLKDAIQMVKPAKGTTTLAFIFKEGVMVAADSRASMGGYISSQSVKKIIEINPYMLGTMAGGAADCQFWHRNLGIKXTGASKLLANISYSYRGMGSSVGTMIAGWDETGPGLYYVDSEGGRLKGTRFSDGSGSPYAYG

SEQ ID NO: 148477 - protein, 78 aa, Glycine max
  Clone ID: PAT_MRT3847_105097C.1.pep
SNLILKESVWPGPIREAILFGGYDGRDKDIISRRPKMMGLHNPGREKTDYESNAMRKNGEMVVSRIVSNSAYLGHSNV

SEQ ID NO: 148478 - protein, 272 aa, Glycine max
  Clone ID: PAT_MRT3847_105098C.1.pep
MKLDTTSLESFPTLIAPQNDVAGELSAAPFFDLPNSNDFDGFLKDAIQMVKPAKGTTTLAFIFKEGVMVAADSRASMGGYISSQSVKKIIEINPYMLGTMAGGAADCQFWHRNLGIKCRLHELANKRRISVTGASKLLANILYSYRGMGLSVGTMIAGWDETGPGLYYVDSEGGRLKGTRFSVGSGSPYAYGVLDSGYRYDLSVEEAAELARRAIYHATFRDGASGGVASVYYVGPNGWKKLSGDDVGELHYHYYPVTPSTVEQEMVEATGA

SEQ ID NO: 148479 - protein, 156 aa, Glycine max
  Clone ID: PAT_MRT3847_105099C.1.pep
MKLDTTGLESFPTLLAPQNDVVGELSAAPSFDGFVKEAIQMVKPAKGTTTLAFIFKEGVMVAADSRASMGGYISSQSVKKIIEINPYMLGTMAGGAADCQFWHRNLGIKCRLHELANKRRISVTGASKLLANILYSYRGMGLSGGTMIAGWDETGP

SEQ ID NO: 148480 - protein, 52 aa, Glycine max
  Clone ID: PAT_MRT3847_10509C.1.pep
KKKGPILLAPEFLSIQNLKGGPQGVPLLPLGQNKNFPLEIKKTPMGGGKLQF

SEQ ID NO: 148481 - protein, 64 aa, Glycine max
  unsure (1)..(64): unsure at all Xaa locations
  Clone ID: PAT_MRT3847_1050C.1.pep
HQSTSLSVAGPPLALQCGNETIMNSNVTLIQLVLYSSMHRHPSPLHKYGQMYNLPADSKTYXQY

SEQ ID NO: 148482 - protein, 100 aa, Glycine max
  unsure (1)..(100): unsure at all Xaa locations
  Clone ID: PAT_MRT3847_105100C.1.pep
VKNSHSKYAKPLSEPERXELAKVTENMSGRDIRDVCQQAERSWASKIIRGQVPKEGEKAQLPPLQEYIECATSRQEALHSAAANRKFAGSFRRRNRISSD

SEQ ID NO: 148483 - protein, 173 aa, Glycine max
  Clone ID: PAT_MRT3847_105101C.1.pep
MKLDTTGLESFPTLLAPQNDVVGELSAAPSFDLPNSNDFDGFVKEAIQMVKPAKGTTTLAFIFKEGVMVAADSRASMGGYISSQSVKKIIEINPYMLGTMAGGAADCQFWHKNLGIKVIYATLNLVYCMVAVCSVIFRSVSCKISALVSHTLSFLGYFLAIIVIGVVIVVIVE

SEQ ID NO: 148484 - protein, 76 aa, Glycine max
  unsure (1)..(76): unsure at all Xaa locations
  Clone ID: PAT_MRT3847_105102C.1.pep
MTGPFWPSVSSKHSPPSIXPXFGLRSLKSSXLFGESLRVASKSXLXXXKXXXXSLVTXXXIGDSLXESSXTATPDK

SEQ ID NO: 148485 - protein, 58 aa, Glycine max
  unsure (1)..(58): unsure at all Xaa locations
  Clone ID: PAT_MRT3847_105103C.1.pep
KFVSHIILPFIFFSTLFISTNXTQPKGVYGSNMXKVGLGINHVTLAFCGKSMAKFYLH

SEQ ID NO: 148486 - protein, 102 aa, Glycine max
  Clone ID: PAT_MRT3847_105104C.1.pep
ICELSRDLCTAPLLNSPDEEVYALCCTLSQDSEAKSGLVPNPQCICKPQMRSSRSAPNMVGVQCAELNDRDVQCTAVVKVAWSEVLPLLAKYISSLITIVLG

SEQ ID NO: 148487 - protein, 73 aa, Glycine max
  unsure (1)..(73): unsure at all Xaa locations
  Clone ID: PAT_MRT3847_105105C.1.pep
MGKTYSLSLSSLCLRVLSNAYFAISSNKLYECELQNLNALXYPSNALSSEGGMTQTWNSQYXRLKCAGVTVSK

SEQ ID NO: 148488 - protein, 147 aa, Glycine max
  unsure (1)..(147): unsure at all Xaa locations
  Clone ID: PAT_MRT3847_105106C.1.pep
TRVFFEGVIQRHTPVPTQRQLTANATPRADDNIHHDGFMNHMHRDEEVKNFPPRHDPVRYAQKVPDPARILCGKRXKSMTDTENNFKQPGERYRPWPCDRHXRVVRQWVDALYDPRVTHEIRRMWISYCSHADRAVGHNIACHLNLK

SEQ ID NO: 148489 - protein, 48 aa, Glycine max
  Clone ID: PAT_MRT3847_105107C.1.pep
DEPHSYVSWDGIHFTEAANKIVAHAILNGSLFDPPFPLHEHCDLQPIG

SEQ ID NO: 148490 - protein, 284 aa, Glycine max
  Clone ID: PAT_MRT3847_105108C.1.pep
EMLKNDAVKLCLEHNFNTGFFEGSDNNTVVDAYELKVRLEHILERIALISEAANTERPSAVTNSLFIGGALAARSTYTLQRLGITHILCLCTNEIGQSDSQFPDLFTYKNFSVCDDEDSNISSIFEEACDFIDYVEQAGHSVLVHCFEGKSRSATLVLAYLMLRKKFTLLEAWNALKRVHRRSQPNDGFAKILLDLDQKLHGKVSMEWQQRKPMMKNCPICGKNTGLSSSSLKLHLQKSHKKLSSGSVDSAMTIEIQKALTTLKISHGGSVSPKPRKSHSTIEA

SEQ ID NO: 148491 - protein, 57 aa, Glycine max
  Clone ID: PAT_MRT3847_105109C.1.pep
ITSIHCTHGSPQGDVAKQIVFYRVHCRLLVKKGIDLCIYIVFMLVLKLVKYLQSHSP

SEQ ID NO: 148492 - protein, 83 aa, Glycine max
  Clone ID: PAT_MRT3847_10510C.1.pep
QGWTFIRDSITESRSDRSRLLSLVFMPRLTVYKRQGKKREGERHCEGIKPPNVTLPYMNPQPPYFENYSLTQSYLSVHHIAFC

SEQ ID NO: 148493 - protein, 81 aa, Glycine max
  Clone ID: PAT_MRT3847_105110C.1.pep
MQGRHEHLGTIVETPGSVSPDEICAENIKLFERCEEYRQKETELKQTVVDLEDELKQIQKKCTLLVSLVETKRKAKSVKGQ

SEQ ID NO: 148494 - protein, 117 aa, Glycine max
  unsure (1)..(117): unsure at all Xaa locations
  Clone ID: PAT_MRT3847_105111C.1.pep
LIKGHCGFIRYTICVWIEXTTEKEISDDEDEEQKKVDEGKVEDVVYDNEKDDKKKKXVMEVSXEWXLVNKRXPILMTNAWEITLNXWAGFYMRFTIDWEQHLAVKHLLVEGHMVIKG

SEQ ID NO: 148495 - protein, 76 aa, Glycine max
  Clone ID: PAT_MRT3847_105112C.1.pep
GHRSTSVQVISSLEHQVLTVSSRQHHLSNVLLRHPASLSVSPVFRWPVSTSGTECASASGVASSSAFSIRSFELHL

SEQ ID NO: 148496 - protein, 36 aa, Glycine max
  unsure (1)..(36): unsure at all Xaa locations
  Clone ID: PAT_MRT3847_105113C.1.pep
IFSGPVSAYPFXRWYSLLMGRVHHGVRGANGFPNAI

SEQ ID NO: 148497 - protein, 55 aa, Glycine max
  Clone ID: PAT_MRT3847_105114C.1.pep
SGPLKFPPLVYETMNKICNICILKIIKVFSFKWVGSMNQHLCRFMGMAVLKAYVF

SEQ ID NO: 148498 - protein, 177 aa, Glycine max
  unsure (1)..(177): unsure at all Xaa locations
  Clone ID: PAT_MRT3847_105115C.1.pep
MEMSLQLNCKTVFPYRGGDCVSGVLPRRHSVTFTSGYICSPCKAGWGVSFFRASADFSRKRQQKKVPVARTKGTAGKGFVPSKKSTRVKKGDTLTSVVSEVSGGDKKQTVDVNVDADKEGELEFSQEKFEAVDRIDEIVRDVXELSLLDETAGELLLLDESNEANFCIDEDDEVLEL

SEQ ID NO: 148499 - protein, 87 aa, Glycine max
  Clone ID: PAT_MRT3847_105116C.1.pep
LPLPSTTMRTMTITVSGNGGEMPQLSPYTITVPKNGRFEDLTRALSIACALGADETLLVAEVYNNCIIRFLEDPTDSLSLIRDADKL

SEQ ID NO: 148500 - protein, 90 aa, Glycine max
  Clone ID: PAT_MRT3847_105117C.1.pep
FCVICLECVSSLICCSRETFIGYLFKLSIHFTRINLCACFCAFYEILVSCSNSNLIFPSALLHCLVRVKVRGQKYLPSNIGGWFCILPLI

SEQ ID NO: 148501 - protein, 65 aa, Glycine max
  Clone ID: PAT_MRT3847_105118C.1.pep
FSVSLPLLKIFPRAQKGQKRQLGSPQHLFSRTPISELKLTSDPYTHSVVDSISQRLFVPCRCSCF

SEQ ID NO: 148502 - protein, 70 aa, Glycine max
  Clone ID: PAT_MRT3847_105119C.1.pep
LYTFNIHNSNQRQTIVVAINSKSYLFFYICITSKTKNTEYAYKEFRNIRQSELFTTNFKKCRHPHAKLNS

SEQ ID NO: 148503 - protein, 28 aa, Glycine max
  Clone ID: PAT_MRT3847_10511C.1.pep
VLQVCVWNSRIDSSVGLGVSFQLSRVCN

SEQ ID NO: 148504 - protein, 225 aa, Glycine max
  unsure (1)..(225): unsure at all Xaa locations
  Clone ID: PAT_MRT3847_105120C.1.pep
SQRLADANILFSEFSSLKSIVMWTALISGHIQNECSDVALNLYREMRDNNISPDQATFVTVLQACALLSSLHDGREIHSLIFHTGFDLDELTSSALVDMYAKCGDVKSSVQVFEELATKKDVISWNSMIVGFAKNGYAKCALKVFDEMTQSCITPDDVTFLXGCLPACSHAGWVYEGRQIFDVMGKLYGIEPRVNHYACMVDLLGRGGFSKEAEEFIDKPESEPN

SEQ ID NO: 148505 - protein, 61 aa, Glycine max
  Clone ID: PAT_MRT3847_105121C.1.pep
KPNDPPMLGLFAGANSLLAAFPEEVFRPPFPLKSQRAGQIKNPPPFKFRVPPQEFQKKTVA

SEQ ID NO: 148506 - protein, 90 aa, Glycine max
  Clone ID: PAT_MRT3847_105122C.1.pep
QTKGVLSPRRGQPTTQTIIWTSTATTTLTPLGPTNLKMCSSTTTLHTAVKVYCEVQKHRTLSLYNCPTHRYICDTIYRLTTDNKLPQLLL

SEQ ID NO: 148507 - protein, 133 aa, Glycine max
  unsure (1)..(133): unsure at all Xaa locations
  Clone ID: PAT_MRT3847_105123C.1.pep
VARGDKAGGEAIPMLLGFPRLFDPXGGYDMIGFGDILFPGLLISFAHRFDKDNGRGASNGYFLWLVVGYGIGLGLTYLGLYLMNGNGQPALLYLVPCTLGVTVILGCIRGELESLWNYGTDSSLSTEPPGSEV

SEQ ID NO: 148508 - protein, 45 aa, Glycine max
  Clone ID: PAT_MRT3847_105124C.1.pep
ASSSSMSNATLKRIIDTTHIMPPPFAQYLFWRFLFRYEMMWILVS

SEQ ID NO: 148509 - protein, 58 aa, Glycine max
  Clone ID: PAT_MRT3847_105125C.1.pep
GSYHTISPSEYLNKVAISLNSQFNKFRTRLSMSGINLLRYAFRPVTNNQHTPLDIKKT

SEQ ID NO: 148510 - protein, 76 aa, Glycine max
  Clone ID: PAT_MRT3847_105126C.1.pep
YFFFLGFGFFIVVLFLLVYRWPRTWNNKEEEREIPRAPFFRVLILTKNLRDNQNSQTLKGFQGFFICHWHGYEWYR

SEQ ID NO: 148511 - protein, 278 aa, Glycine max
  unsure (1)..(278): unsure at all Xaa locations
  Clone ID: PAT_MRT3847_105127C.1.pep
MRSIPLGTSVSPTPINTSKLSPFSVNFKKPTTFPSWGSTPPHEFSLSQSGLCRASQVVDLFPSVSPEITXRLLRFQDCWEVAETHCSSFFPEYSFPLDFVLRMDRLVAMMAGFTLPNGCKRICLVAVTGNSFGETVLFGSEDFKVGGFDGKISLNKGYVAGILTVDTVADFLPRKGPLRQRRTGVAYISNVAVREKFRRKGIAKHLVAKAESQARSWGCRAIALHCDLKNPAATKLYQGQGFRCIKVPEGANWPHPKTSPDVKFNFMMKLLNNSTVSK

SEQ ID NO: 148512 - protein, 40 aa, Glycine max
  Clone ID: PAT_MRT3847_105128C.1.pep
NYLMMLILIQGLKMKAYKNYKKAHKFIYTCFRVHKLQRIH

SEQ ID NO: 148513 - protein, 126 aa, Glycine max
  Clone ID: PAT_MRT3847_105129C.1.pep
MRSIPLGTSVSPTPINTSKLSPFSVNFKKPTTFPSWGSTPPHEFSLSQSGLCRASQVVDLFPTVSPEIIVREARLEDCWEVAETHCSSFFPEYSFPLDFVLRMDRLVAMMAGFTLPNGYKRILLVA

SEQ ID NO: 148514 - protein, 144 aa, Glycine max
  Clone ID: PAT_MRT3847_10512C.1.pep
SSGRRWELPQLPTPTALTSRTLLPLRNGWFGIRPCALIALFPTLPVLTTQIRVRYDGTKPRRNTRSITFICTPTSPQMPMANSPTAQLPIYNRIWLVAALPRTKAHATAKHPDNLFGYFQSFRLLVVIVVSYCTFSLLSFLFRH

SEQ ID NO: 148515 - protein, 108 aa, Glycine max
  unsure (1)..(108): unsure at all Xaa locations
  Clone ID: PAT_MRT3847_105130C.1.pep
TESGNPGSEQEDDLFIQKFRKGYEGPFMCSGGLPRDLGKEAVAQGQTHLVSYGSLFISNPELVLGVKLNAPLPQYNRXTFFSQDPVIGYPDYPFLSKKSETKDPRARL

SEQ ID NO: 148516 - protein, 53 aa, Glycine max
  Clone ID: PAT_MRT3847_105131C.1.pep
SIVAIQFHCCKFSAMRYGFEFLPTCTGNTRQNVTTAYYQLLLCRYVYLLGCYA

SEQ ID NO: 148517 - protein, 329 aa, Glycine max
  unsure (1)..(329): unsure at all Xaa locations
  Clone ID: PAT_MRT3847_105132C.1.pep
MAKELLTLDNGTTCTSWNYSGTRLAAGSADGTLSIFDSREPPSSSSLRSTFKSRVLEGNIVKIVWIPPEYGDAVACISADGIVSLWEEVAEDSQSLQWKMCKSFGNSSSKVLDVQFGISLASLKMVAAYSDGNVRVFELSDPLELRNWQLQAEFQNVIESVSSFGKASCLSASISWNPQKGGSQESSFLVGFNSNTPELNSSKVWEFXDQAHQRWLPVAELALPVRTKGDXRFMLLHGPPNXGRPYEIIAVATHKGLAIWHLGLNPDHDGRLPVEKVALLSGHEGMVWQMEWDMSGMTLATTGHDGMVRLWQSNFNGVWHQQAAFEPTF

SEQ ID NO: 148518 - protein, 51 aa, Glycine max
  Clone ID: PAT_MRT3847_105133C.1.pep
RGVSAPHMSWMMHILLVHHSPPDSRTHCCTVDVTFNHTKTTRPYSSISHVF

SEQ ID NO: 148519 - protein, 123 aa, Glycine max
  Clone ID: PAT_MRT3847_105134C.1.pep
FLSLLTENGNTNDDLPLPTDESVLTQIKDCFAEGKDLDVSCMSAMGDEHICPLIDVGPQNYLLVLAACCFYLRLHPLESLYIGWVTTWLMAYRFLAPLVLSMVLMDVCTQTISHLVWLSMLVL

SEQ ID NO: 148520 - protein, 77 aa, Glycine max
  unsure (1)..(77): unsure at all Xaa locations
  Clone ID: PAT_MRT3847_105135C.1.pep
MRGEQMKLLSFRARPFGKRIEWSIKLYALQYEYIEDDICYKTTLILEXNPIHMSFPALVHAXXSIIAESFIIREYII

SEQ ID NO: 148521 - protein, 152 aa, Glycine max
  unsure (1)..(152): unsure at all Xaa locations
  Clone ID: PAT_MRT3847_105136C.1.pep
NRWINLRIPFRKVFGAVKCNLKKAVXIPGLAWQGCAHFALDNAKKTVRLLALFMPRGFKFSIPNSIMWQTAVRPLMWNQSPEHPMVFPHCPSKAKDFPPPVVQYPPFCFCGVKTTRGMVRNPGPNQGSLFFGCGNWTAPKGAPSHYFEWAFN

SEQ ID NO: 148522 - protein, 68 aa, Glycine max
  unsure (1)..(68): unsure at all Xaa locations
  Clone ID: PAT_MRT3847_105137C.1.pep
AAASSMALSSPSLAGKAVKLGPSTPKFRMVIMINTTTKQASSINPXYYPDHLNYLDPFSNNPPSYLTN

SEQ ID NO: 148523 - protein, 48 aa, Glycine max
  Clone ID: PAT_MRT3847_105138C.1.pep
KRGSFVSCTALIMKFSTGFLSHRRFYELRLGGFLRRERNGCIECIELP

SEQ ID NO: 148524 - protein, 70 aa, Glycine max
  Clone ID: PAT_MRT3847_105139C.1.pep
TTFELDVTRELWLTHLKRATLGFARFRDIYLVLLRSREQAAERVGEECEVDLKTYSTTSARTGTRLEPNP

SEQ ID NO: 148525 - protein, 55 aa, Glycine max
  Clone ID: PAT_MRT3847_10513C.1.pep
YMSTSISMRQLSFTGMCTVSLIQNRSLLLHSHAQQRFRRRPLAIKGHIHPAWYAA

SEQ ID NO: 148526 - protein, 93 aa, Glycine max
  unsure (1)..(93): unsure at all Xaa locations
  Clone ID: PAT_MRT3847_105140C.1.pep
TFRRVAGQLVDSHLIFATLQRIVDESDNVSYAYMRKTGLERSEGLLKDLKWFXEEGNVIPTPGSPGLTYVKYLEELGEISAPLVLCHCYGVYC

SEQ ID NO: 148527 - protein, 51 aa, Glycine max
  Clone ID: PAT_MRT3847_105141C.1.pep
SPCSGCACGAEHFYCRRQLCVSAFHAVASLYCRSDSLHGGDVPCNEATSIG

SEQ ID NO: 148528 - protein, 72 aa, Glycine max
  Clone ID: PAT_MRT3847_105142C.1.pep
AFSPNLFLYFSPLTFPPRLHLLPFRPPSFMPLSIEKNFTPAAPGSIFPGGPTGPPMGPPRGPPPPPEIFLFP

SEQ ID NO: 148529 - protein, 371 aa, Glycine max
  Clone ID: PAT_MRT3847_105143C.1.pep
MSSSCLSGAGGRTYGFDFEFVKSPSSSTFTSHTSSSPSSTISESSNSPLAISTKKPRTPRKRPNQTYNEAAALLSTAYPNLFSTKNLKTQGKGKGKFSRPTSENFDYDSSELLLPFRVFDGTASCFPEPLLPFRSPWRGPNSIVNFNSVELNDDGEESLDAESILDEEIEEGIDSIMGSSIQEVSNDAVSNLPWILPFGGKLEFPRPRVRALRHVDDGNWWNFPAVDILSISPKINTKPPPVAAEKKMKKKKVAAAPSPVVLELKNTELPKPKQGLMLKLNYDDVRNAWSDRGTPFSDDSPLADVPGNDVTARLSQIDLLWDNGGVREASVLRYKEKRRTRLFSKKIRYQVRKVNADRRPRMKVRVSSQLS

SEQ ID NO: 148530 - protein, 146 aa, Glycine max
  Clone ID: PAT_MRT3847_105144C.1.pep
MRALFLFFILFSLSYASEQIFPAHIGSIFGGGGGGRSREPKYKIEFHPEDFPFHPDDDQESIVMPDKTGQKYMCYLPKVEKEKSGKPVIQHNISSMIVETEKRIKQKTPDELLEVLKGPCFVRQEGWGSYEFCYQKKLRQLHLEDD

SEQ ID NO: 148531 - protein, 320 aa, Glycine max
  Clone ID: PAT_MRT3847_105145C.1.pep
DFEFVKSPSSSTFTSHTSSSPSSTISESSNSPLAISTKKPRTPRKRPNQTYNEAAALLSTAYPNLFSTKNLKTQGKGKFSRPTSENFDYESSEPLLPFRVFDGTASCFLLDQTGPKPIMERPKVVSVQEKENNNNKACESPGEISSIVNFNSVELNDDGEESLDAESILDEEIEEGIDSIMGSSIQEVSNDAVSNLPWILPFGGKLEFPRPRVRALRHVDDGNWWNFPAVDILSISPKINTKPPPVAAEKKMKKKKVAAAPSPVVLELKNTELPKPKQGLMLKLDYDGVRNAWSDSGTPFTDDSPLADVPENDVTVSSKN

SEQ ID NO: 148532 - protein, 57 aa, Glycine max
  Clone ID: PAT_MRT3847_105146C.1.pep
TCELLHLAKGSIHSSSLWLTLYQHEAALTWAWDSFISNRGGHNLDKQCADNDHFACH

SEQ ID NO: 148533 - protein, 667 aa, Glycine max
  unsure (1)..(667): unsure at all Xaa locations
  Clone ID: PAT_MRT3847_105147C.1.pep
SSPTNRILHLWRKGFIIRPASFATHNSEPYGPVPRFKGKCEADPETKRSYCNGKIVGAQHFAHAAIAAGSFNPSIDFASPLDGDGHGSHTASIAAGNNGIPVRMNGHEFGRASGMAPRARIAVYKAIYRLFGGFVADVVAAIDQAVYDGVDILNLSVGPDSPPAATKTTFLNPFDATLLGAVKAGVFVAQAAGNHGPLPKTLVSYSPWIASVAAAIDDRRYKNHLIFGNGGTLPGIRVTPSTQXKRNLNTLAAANAVLVNTSLMTCSLTDGQRPELXNKNLQKGNFCRRGCYFNFVVYQGAIIAASDTVTARGAIGFVLCVDGIALGTKFRAVPVGLPGILIIDVSNSKELIDYYNITTPRDWTGRVKSFEGKGKIGDGLMPILHKSAPQVALFSARGPNIKDFSFQEADLLKPDILAPGSLIWAAWCPNGTDEPNYVGEAFAMISGTSMAAPHIAGIAALIKQKHPHWSPAAIKSALMTTSTTLDRAGDPLLAQQTSESEAMRLVKATPFDYGSGHVDPTAALDPGLIFDAGYEDYIGFLCTTPSIDVHEIRNYTHTPCNTSMGKPSNLNTPSITISHLVRTQVVTRTVTNVAEEETYVITARMEPAVAIEVNPPAMTIKAGASRQFLVSLTVRSVTGRYSFGEVLMKGSRGHKVRIPVLANGYRR

SEQ ID NO: 148534 - protein, 572 aa, Glycine max
  unsure (1)..(572): unsure at all Xaa locations
  Clone ID: PAT_MRT3847_105148C.1.pep
VRQLGIRLEVHISPEQAETLRHAPGVKSVERDWKVKRLTTHTPQFLGLPTGVWPTGGGYERAGEDIVIGFVDSGIYPHHPSFTTHNTEPYGPVSRYRGKCEVDPDTKRSFCNGKIIGAQHFAHAAIAAGAFNPSIDFDSPLDGDGHGSHTASIAAGRNGIPVRMHGHEFGKASGMAPRARELLNKNLIKGNILLCGYSFNFVVGSASIKKVSETAKALGAVGFVLCVENNSPGTKFDPVPVGLPGILITDVSNSKELIDYYNITTPRDWTGRVKSFEGKGKIGDGLMPILHKSAPQVALFSARGPNIKDFSFQEADLLKPDIXPGSLIWAAWCPNGTDEPNYVGEGFAMISGTSMAAPHIAGIAALIKQKHPHWSPAAIKSALMTTSTTLDRAGNPLLAQQTSESEAMRLVKATPFDYGSGHVDPTAALDPGLIFDAGYKDYVGFLCTTPSIDVHEIRHYTHTPCNTTMGKPSNLNTPSITISYLVRTQVVTRTVTNVAEEETYVITARMEPAVAIEVNPPAMTIKAGASRQFSVSLTVRSVTRRYSFGEVLMKGSRGHKVRIPVLANGHRR

SEQ ID NO: 148535 - protein, 53 aa, Glycine max
  Clone ID: PAT_MRT3847_105149C.1.pep
PPFGDLYKRFRGNSRPSTIHRGPLYLKDHGLLVLREETTSAAPKSARTSHELK

SEQ ID NO: 148536 - protein, 117 aa, Glycine max
  unsure (1)..(117): unsure at all Xaa locations
  Clone ID: PAT_MRT3847_10514C.1.pep
IYPGNAITYFHRHSQVILSANSXFNRSSHNRLKHTKLTCTAMYKKQHKKDIAQXDMRKMRLAAKKPYSMSIVGATLQLIHIKTADNPKLLDATNEAALFEIKETIKNTNDENNANKP

SEQ ID NO: 148537 - protein, 94 aa, Glycine max
  unsure (1)..(94): unsure at all Xaa locations
  Clone ID: PAT_MRT3847_105150C.1.pep
AGPELTREEEHAAEAPQPDAGLQDQETNGLDPTINTDNDPTPRAQRLKPGHETCNEEAEAQAKSKPEKXERRPGHYSPPPHVQRAGPRAHQEGK

SEQ ID NO: 148538 - protein, 46 aa, Glycine max
  unsure (1)..(46): unsure at all Xaa locations
  Clone ID: PAT_MRT3847_105151C.1.pep
ASFFCKARHLIIQGAFSGLRILSLGQDHRTKHGAATSRETTHFXFC

SEQ ID NO: 148539 - protein, 73 aa, Glycine max
  Clone ID: PAT_MRT3847_105152C.1.pep
TCYQTNFDQIKFGCKFFRLFNRAFLIVAQTHAGTFVCRSTIKTNQLHNSPREEPTYPVLSLNTVVAAGGGLNK

SEQ ID NO: 148540 - protein, 74 aa, Glycine max
  Clone ID: PAT_MRT3847_105153C.1.pep
CLCVRPRCQLIRYPATVPHIVKISLTKNCIYEQTGKSGGALGAVIDWDDEIVGRCLIMFMRTTVSTVHAELTEV

SEQ ID NO: 148541 - protein, 90 aa, Glycine max
  unsure (1)..(90): unsure at all Xaa locations
  Clone ID: PAT_MRT3847_105154C.1.pep
MGNFYVWNFDGVIWDSWGKTVIFVFKVAKWRWPPWLDGGNXTIKDWMVAQLIPVRPGGETGFETLXLGRWLLGTKFPSIKKFLFSEGRNV

SEQ ID NO: 148542 - protein, 61 aa, Glycine max
  Clone ID: PAT_MRT3847_105155C.1.pep
PSIYLLGARVLTTRHNDPITSKLLLLLLTQASTLSCSGIRAFPVGSANQSKGSGKGDTENR

SEQ ID NO: 148543 - protein, 45 aa, Glycine max
  Clone ID: PAT_MRT3847_105156C.1.pep
AQCIKIYRCVSEHGQRSGSRSRDRERIRRWSDCCQYSRSGAQHDH

SEQ ID NO: 148544 - protein, 78 aa, Glycine max
  Clone ID: PAT_MRT3847_105157C.1.pep
FCCFVTTEILLGLVGRDLQLSLMCFLNGTRQFIAEWSRFGILEKALVLMFIFSGISYETFCLSSFAADNICMYFNLSE

SEQ ID NO: 148545 - protein, 44 aa, Glycine max
  unsure (1)..(44): unsure at all Xaa locations
  Clone ID: PAT_MRT3847_105158C.1.pep
XYNFFFLNENKTGAINPFFIFEAASSTRETKMQHTLVPAIQVKS

SEQ ID NO: 148546 - protein, 88 aa, Glycine max
  unsure (1)..(88): unsure at all Xaa locations
  Clone ID: PAT_MRT3847_105159C.1.pep
MGGGKNTRMCKRKKGGKKKXADPXAKKDWYDIXARYIFEVKNVGKTVVFRTQGTRIASEGLKHRALDDYLADLDGDEDHALKKIMLRA

SEQ ID NO: 148547 - protein, 102 aa, Glycine max
  unsure (1)..(102): unsure at all Xaa locations
  Clone ID: PAT_MRT3847_10515C.1.pep
XXXVRXLXSEFXSAXVXXTFWVFTXXGQXHQXLXGXXPRNXXXXXXCXXXXLRXXTXETXRXXLQGXXRXXAXXXXXGXXXHRXPXXXXXXXGXFLKHNXTN

SEQ ID NO: 148548 - protein, 116 aa, Glycine max
  Clone ID: PAT_MRT3847_105160C.1.pep
LDVSTSSKPQEDAKKPIRIYLNYDAGGHSPDRDCRAIGDIVKLGEPPMTSPGFPSCNPHAIPPIFGDCWYNCTSEDISEDDKKCRLRKALGQTADWFKRALAVEPVKGNLRLSGYS

SEQ ID NO: 148549 - protein, 122 aa, Glycine max
  unsure (1)..(122): unsure at all Xaa locations
  Clone ID: PAT_MRT3847_105161C.1.pep
LLRVVAWGFGGLGVPCASPGRLFRWVFLFVLLLRRGGXALWLLVFXRPFLVLAWVLSGGSGLGRXSLSLSFFLFLXFLSPRGGGXVFSLALLXLXPSLESIRIAWVGPGLPVRSRAGVPAFP

SEQ ID NO: 148550 - protein, 36 aa, Glycine max
  Clone ID: PAT_MRT3847_105162C.1.pep
CRSHVKELKVSGFEEPIDASVPQDTFKALFQDYGVL

SEQ ID NO: 148551 - protein, 88 aa, Glycine max
  unsure (1)..(88): unsure at all Xaa locations
  Clone ID: PAT_MRT3847_105163C.1.pep
MLIVSPFLERDINHGRGYIGTLPLXFGNHVYIVGXXXMNPIPRGGYLNXFSHMVLEGNTGHPLFETAFGKIXINICFVMLLSLKLVSL

SEQ ID NO: 148552 - protein, 67 aa, Glycine max
  Clone ID: PAT_MRT3847_105164C.1.pep
NARREQEEPRSQKWSTSRRCTDRSRLWKWGGVKMSPTSPMMTSFQEGTIMTEKRYLSILRISVTVGC

SEQ ID NO: 148553 - protein, 57 aa, Glycine max
  Clone ID: PAT_MRT3847_105165C.1.pep
LHNFNAICFAYPPLWWRAETKLVKMCKLILPEPPSKNFPTFQITNFEPEGKYFLNGV

SEQ ID NO: 148554 - protein, 56 aa, Glycine max
  Clone ID: PAT_MRT3847_105166C.1.pep
EKALLGRVSFRDMYSALNAVSGHYISFGPTAPIPAKRRARILEEVDTAEKALLRGR

SEQ ID NO: 148555 - protein, 56 aa, Glycine max
  Clone ID: PAT_MRT3847_105167C.1.pep
LQLIGKAWSTQCKRLVKKDSLGRSGSTGERYRELCNQILLCALWRNSKCARYSSLA

SEQ ID NO: 148556 - protein, 84 aa, Glycine max
  Clone ID: PAT_MRT3847_105168C.1.pep
LGRFWLNLNESFLETCLFQVHKQFIRRYLCHGSSESFQVASQTIAGNNILVFVYILHFPLYDKYIAVTDLSLQIDDVFLLCFDL

SEQ ID NO: 148557 - protein, 256 aa, Glycine max
  Clone ID: PAT_MRT3847_105169C.1.pep
FEAHLEVHAGSIDEEEDEQGIAHMIEHVAFLGSKKREKLLGTGARSNAYTDFHHTVFHIHAPTSTKDSDGDLLPFVLDALNEIAFHPKFLASRIEKERRAILSELQMMNTIEYRVDCQLLQHLHSENKLSTRFPIGLEEQIKKWDADKIRKFHERWYFPANATLYIVGDIDNISKTVYHIEAVFGQTGADNEKGSVATPSAFGAMASFLVPKLSVGSSGNSIERSANAMDQSKVFNKERQAVRPPVKHNWSLPGSG

SEQ ID NO: 148558 - protein, 38 aa, Glycine max
  Clone ID: PAT_MRT3847_10516C.1.pep
NTLLFHFQYIFNFFLLQRRKPTQTFLVVNGRDNYTILM

SEQ ID NO: 148559 - protein, 84 aa, Glycine max
  unsure (1)..(84): unsure at all Xaa locations
  Clone ID: PAT_MRT3847_105170C.1.pep
CTRSYEKATGASAWRLGPASLVGRAGHDKVDRGQMSGVSMHECVDWLDXREKTRMXYICFGCLCCVDDQQLCEITCGIQTSGRD

SEQ ID NO: 148560 - protein, 93 aa, Glycine max
  unsure (1)..(93): unsure at all Xaa locations
  Clone ID: PAT_MRT3847_105171C.1.pep
AGLVKVNLSGLSDIADQVISSLADLHGSTLENLNLDGCRIISDRCLMATCENWALLXNLDGFKCPITCAGIAGLAHCRNKLICGGVRWRVELW

SEQ ID NO: 148561 - protein, 55 aa, Glycine max
  unsure (1)..(55): unsure at all Xaa locations
  Clone ID: PAT_MRT3847_105172C.1.pep
MDGRVRLERVADDESNKGKLVSWPQXAEDDKCGDIGIRIDHEDGTTLLVECKNKP

SEQ ID NO: 148562 - protein, 117 aa, Glycine max
  unsure (1)..(117): unsure at all Xaa locations
  Clone ID: PAT_MRT3847_105173C.1.pep
AFAIALLRVFSLGTVPCLTVDDLMCFSSGVVVQQLEGVCEALELLLHMLLRQWGGWSILLSPIDDTLQLLGRITPAKKLLNCFPAARTAVIFNDPLPSXXLXRQMMTAWVKKSIPGR

SEQ ID NO: 148563 - protein, 56 aa, Glycine max
  Clone ID: PAT_MRT3847_105174C.1.pep
RPLFLGFFYLFFCLNNLDNPRKKLSDFYPWFQQITKPQTNFPPYRFLSDDRIIKLI

SEQ ID NO: 148564 - protein, 62 aa, Glycine max
  Clone ID: PAT_MRT3847_105175C.1.pep
FYSTKSRCYHEKVEVIICYFVFIMKVLLIVYHQILTKHTMNLVKSKMTMAKDHLNELKDFQV

SEQ ID NO: 148565 - protein, 42 aa, Glycine max
  unsure (1)..(42): unsure at all Xaa locations
  Clone ID: PAT_MRT3847_105176C.1.pep
FYLINXKNIISTVPFTFHNLNNVINFYFIIFYFILFSLISFQ

SEQ ID NO: 148566 - protein, 57 aa, Glycine max
  Clone ID: PAT_MRT3847_105177C.1.pep
TNSNFRLKTIFNRFPGGTIKRIASSVRYAPGEPTLSSAFKSALVTYSGKPSRSNMPH

SEQ ID NO: 148567 - protein, 54 aa, Glycine max
  Clone ID: PAT_MRT3847_105178C.1.pep
GNPGAKKLGYWVWIPITLSEKAKSMFSACPLVSNFYAPKAFSQKAETSDVKTVD

SEQ ID NO: 148568 - protein, 332 aa, Glycine max
  unsure (1)..(332): unsure at all Xaa locations
  Clone ID: PAT_MRT3847_105179C.1.pep
MDTCNVFEGSWVRDDSYPLYDASHCPFVERGFNCLANGRKDRDYTKWRWKPKNCEIPRFDVRGILEQLRGKRVVFVGXSLSRTQWESMICLLMTGVEDKKSIYEIKGNKITKQIRFLGVRFSTFDVRIDFYRSVFLSEPXRCPTTVLTNLFRVMRFPTTVLTPXVQSDSEVLIFNSGHWDTXKLFXVGWYFQVDNSLELCMNPFAERGLNCLANGLKDRGYTKWRWKAKICEPPNXSHWSGQNHNSCKVTKRPWKRTNRKERNPISNMINKVVKSMSAPVTVMHVTPMTAYRSDGHVGTWSDQPSVPDCSHWCLPGVPDMWNEILLSYLLPK

SEQ ID NO: 148569 - protein, 214 aa, Glycine max
  Clone ID: PAT_MRT3847_10517C.1.pep
MRGSCSCQPSNNDKERNFMVMEVSAYICNNNFIFSSSRAITQKSSASFSSPMLVKSMATPKPLPSVSRTVGSRKNSTVFPLGEQPRSSPATATPPIKLLTRMEQLKLLSKAEKAGLLSAAEKFGFSLSTIERLGLLSKAEELGVLSAATDPGTPRTLLTLSLGLLILGPLFVYFVPEDNLGLVGLQVVVALVSVIGGSAGLAASNFVSNLQKLK

SEQ ID NO: 148570 - protein, 94 aa, Glycine max
  Clone ID: PAT_MRT3847_105180C.1.pep
GGLFRAPKSRFGPKGPLIAPKGPGGELGCVGFEGGVSLGGGGPRREFVGCVPPLKIFSPSPVPPISEKGVRFFTLGPFPGEKVLIPGGGGLPCP

SEQ ID NO: 148571 - protein, 132 aa, Glycine max
  Clone ID: PAT_MRT3847_105181C.1.pep
MFQWTHAMCLELGGMIATLCMMLLTLLLILKSSHWSGQNHNSCKVTQRPWKRTNGKDRNPISNMINKVVKNMSAPVTVLHVTPMTAYRSDGHVGTWSDKPSVPDCSHWCLAGVPDMWNEILLSYLLPKEGAY

SEQ ID NO: 148572 - protein, 125 aa, Glycine max
  Clone ID: PAT_MRT3847_105182C.1.pep
EAGNPKKYPWHIQCVDRGITVHSRRESKLLAGNRIIAQPYEFKVGAPPGKERKREFVDNPNGLFSAQAAPKPPPAVYIIVEGMRVGGKRTVIVPPENGYGQKGMNEIPPGATFELNVELLQVVAT

SEQ ID NO: 148573 - protein, 207 aa, Glycine max
  Clone ID: PAT_MRT3847_105183C.1.pep
MSSPCSCACASTNWSVDYGYGGGGVLSNSKVRSRRSKEISMAHSVCGSRRSTALVISSLPFGFLFLSPPAEARRNKKAIPEDQYITSPDGLKYYDLVEGKGPVAEKGTTVQVHFDCLYRGITAVSSRESKLLAGNRIIAQPYEFKVGAPPGKERKREFVDNPNGLFSAQAAPKPPPAVYIIGERMRVGGRRTQTSFYGVASYTGITY

SEQ ID NO: 148574 - protein, 94 aa, Glycine max
  Clone ID: PAT_MRT3847_105184C.1.pep
ACDFQKLQNRYTKSQMLYIRSQVKKKMPLTQPRGPQKEESLQNFSSPNNKSTYWGNLTGRGVNRLTHFGKKVVGYPKLFYSKKSPSMNPRNAII

SEQ ID NO: 148575 - protein, 79 aa, Glycine max
  unsure (1)..(79): unsure at all Xaa locations
  Clone ID: PAT_MRT3847_105185C.1.pep
MAGKGEGPAIGIDLGTTYSRAGVREHDRDEIMAXDQGNRATPSYVVITEAERLMGDAANNQVPMNPINTVSNAKRWIVR

SEQ ID NO: 148576 - protein, 85 aa, Glycine max
  Clone ID: PAT_MRT3847_105186C.1.pep
GGGLKPPKSPLPPLKKKGNLGAPLPPGIPFGPWAPCWPFLIKRAQFGPKKGGGWGPPWSSGSLPNPKGAKFYTIGRPTKPLPTLP

SEQ ID NO: 148577 - protein, 197 aa, Glycine max
  unsure (1)..(197): unsure at all Xaa locations
  Clone ID: PAT_MRT3847_105187C.1.pep
LVWPVRWAGAASGFEASWRNRAHICSFYIRGECTRRAECPYRHELPETGXLCECTIKDRYYGVNDPVALKLLGKAEEMSTQXALKDESIKTLHGGGLDARTTEPPXSRHFYPYGLIECIKMVLCRAGAFVIYTTREGAELVLVLPPPWALVAHTTRAGAFKGXEELSNRLVIKGLKLKLMWGRPPEELSALIDMRCQ

SEQ ID NO: 148578 - protein, 117 aa, Glycine max
  Clone ID: PAT_MRT3847_105188C.1.pep
SVTRLTRPAYIALRDAFRIGASHLKRAPEFSLFDTCFDLSGLTEVKVPTVVLHFRGADVSLPATNYLIPVDNSGSFCFAFAGTMSGLSIIGNIQQQGFRISYDLTGSRVGFAPRGCV

SEQ ID NO: 148579 - protein, 86 aa, Glycine max
  unsure (1)..(86): unsure at all Xaa locations
  Clone ID: PAT_MRT3847_105189C.1.pep
LRRVLKAMDELNVXSAAEEPSXSYKXNFAXQASXRXTLSPRSIQSDSIDLAIDGVVDTSIXQLYHNVCXMRSSDHSPSGLVSXLTT

SEQ ID NO: 148580 - protein, 176 aa, Glycine max
  unsure (1)..(176): unsure at all Xaa locations
  Clone ID: PAT_MRT3847_10518C.1.pep
RSPRVHCPANTTTLLIANFSNTSFLLYQVLFGSCGLATACSNGWLLLWRACLRNLVYNIISLLPYPAGKPSPPVAQVAAPGPYPLVAPCACRPSLTLCTPYLLPCYRPSPPPERSTLPLRXSPRLPSPFPPAQAPPSLPNQTHHPHRYIPITLPCSAYNPPQPGCTVLWHMASDRS

SEQ ID NO: 148581 - protein, 200 aa, Glycine max
  Clone ID: PAT_MRT3847_105190C.1.pep
MKNTALFTIFLLLAFTSYLPSATAASVYDTDGNILQKGRTYFVLAATRGNGGGIEFAATGNDTCPLTVVQSPSGDSIGFPIRFSYPFIETLDDILEGFGLEIRFAYRPPCSPSSIATTKWTIVNDAVKLTKTSSSIIPGFFYIWGASPNSKDYKLEFCDLDNIKCGDVGIHTDDDGSRRLVITQNDPLLVHFQNTRSSSA

SEQ ID NO: 148582 - protein, 111 aa, Glycine max
  Clone ID: PAT_MRT3847_105191C.1.pep
LNSLYVTCAINKTKALYWPKTSCPKMIWAITSAITLFFFHYQRKALNIIFYFTARPNDVAHETLYSIRIEQAYGTEKKEFLTYNLFLHTLAFINVRKTETNKFWHLIFNTL

SEQ ID NO: 148583 - protein, 222 aa, Glycine max
  Clone ID: PAT_MRT3847_105192C.1.pep
SRAKEEASSRKAIMEKVEKWMLACDEEHWLEEYSRDENRYSVSRGAHKNLRRAERARIMVSRMPALVDLLIKMTRSWEEERNKVFLYDQVPLMAILEEYNILRREKEEDTKRQQPWEKKRIQSQVVERDNTYVSRPGTSSRRLPSRSMNGALDSSAVLNRRLSMGIQQLGSNSINSGNHGLSFIKDGRNALRKKIYGEPTFTSPTRDGASSAVSTHSILFSP

SEQ ID NO: 148584 - protein, 115 aa, Glycine max
  unsure (1)..(115): unsure at all Xaa locations
  Clone ID: PAT_MRT3847_105193C.1.pep
NFIFLFPWGKAPTPTPCPNLRTLETIFFFPHPNQHFSPPFFFAPVFNKPQGFFFPLGPPPKAHLINKQNSFXSFLSGPSCFPKLPREKGPLPRKQTPPPARAFLSXIYFFLISPP

SEQ ID NO: 148585 - protein, 50 aa, Glycine max
  Clone ID: PAT_MRT3847_105194C.1.pep
LSTPGNQSLNDHENTKHSMALSRKKWKSHSQPACPLASLTVPVASLLSRR

SEQ ID NO: 148586 - protein, 45 aa, Glycine max
  Clone ID: PAT_MRT3847_105195C.1.pep
TLFILHTFFSFHIKQTIPSHYNHQSQTFTTTSLYTINKKNTIIKT

SEQ ID NO: 148587 - protein, 77 aa, Glycine max
  Clone ID: PAT_MRT3847_105196C.1.pep
RFIVGWRCVFFLNLSTRLRAHHFCELKLLLIYSSSSSSSAVSCFCVRRWGQSPLSNPSCEKVTNSITLSMCLSLSRC

SEQ ID NO: 148588 - protein, 82 aa, Glycine max
  Clone ID: PAT_MRT3847_105197C.1.pep
MGNPFRWGGKPIFFSPHPKLVFFQKGGGGNPPRGGGGPPPKFGGKKKGGPGGGEKPPPKAPNFGKGRPPQGGETPNKKSPLG

SEQ ID NO: 148589 - protein, 71 aa, Glycine max
  Clone ID: PAT_MRT3847_105198C.1.pep
LLLSPSKSDVLNARARDQAQGLGVVPTLSRLPNCASMNISHMELMFSIIYGKLYPFNAFYLCSQLCIGRTL

SEQ ID NO: 148590 - protein, 67 aa, Glycine max
  unsure (1)..(67): unsure at all Xaa locations
  Clone ID: PAT_MRT3847_105199C.1.pep
MDDGDYYRILKVQHDVTDERLKKAYMELAMKWHPDKNXETLLRKEEFEAKFTQVSEGYDVVSDRRKR

SEQ ID NO: 148591 - protein, 38 aa, Glycine max
  Clone ID: PAT_MRT3847_10519C.1.pep
NYSLWLRALIKGTSHFLVNGVPREGLGSLSVEKQKKKK

SEQ ID NO: 148592 - protein, 85 aa, Glycine max
  Clone ID: PAT_MRT3847_1051C.1.pep
EIGRFFPMLRNPSFILKAWAAFAFFRFPIPGGGHAMPHVSLMQSLGASRVLGGAVAAATAPLEAKIFARIVLRNFGFPPIEQALG

SEQ ID NO: 148593 - protein, 57 aa, Glycine max
  Clone ID: PAT_MRT3847_105200C.1.pep
KSREQSSLFADDAKRSWGGKSCCLLRWRFVIKASHFPRLLPLPHEERPETKERAWKM

SEQ ID NO: 148594 - protein, 26 aa, Glycine max
  Clone ID: PAT_MRT3847_105201C.1.pep
AMQPEMGHQMRDQISNHSSINCYRNL

SEQ ID NO: 148595 - protein, 53 aa, Glycine max
  unsure (1)..(53): unsure at all Xaa locations
  Clone ID: PAT_MRT3847_105202C.1.pep
QIGCCFIXPNDLGADPWEDPKIRDAALGVYQFFLKGGVLNLGLIWVIFVSWGK

SEQ ID NO: 148596 - protein, 76 aa, Glycine max
  Clone ID: PAT_MRT3847_105203C.1.pep
SSAESRKHRFDTSSYQQRAKALEGLLEFSARLLQQQRFEELGVLLKPFGPEKVSPRETAIWLPGCLKESVACGLAC

SEQ ID NO: 148597 - protein, 289 aa, Glycine max
  Clone ID: PAT_MRT3847_105204C.1.pep
VLKRRIRKGIPDCLRGLVWQLISGSRDLLLMNPGVYEQLVIYETSASELDIIRDISRTFPSHVFFQHTHGPGQRSLYNVLKAYSDLDRDVGYVQGMGFLAGLLLLYMSEEDAFWLLVALLKGARHAPMEGLYLAGLPLVQQYLFQFECSVREHLPKLGEHFSYEMINPSMYASQWFITVFSYSFPFHLALRIWDVFLYEGVKIVFKVGLALLKYCHDDLIKLPFEKLIHALKNFPEGAMNPDTLLPLAYSIKISKRLEELKQEYEKKNGKIRRSGELSEKPILPSVQGN

SEQ ID NO: 148598 - protein, 53 aa, Glycine max
  Clone ID: PAT_MRT3847_105205C.1.pep
QHSYSSNQMRVKNEISTLLNLTIYCFIYPFESGWRLKLSRNNGKLKCIYFFVF

SEQ ID NO: 148599 - protein, 117 aa, Glycine max
  Clone ID: PAT_MRT3847_105206C.1.pep
PDAWVDFPQLTMTLPDGREESVMKRTTLVANTSNMPVAAREASIYTGITLAEYFRDMGYNVSMMADSTSRWAEALREISGRLAEMPADSGYPAYLAARLASIYERAGKGKCLGGPER

SEQ ID NO: 148600 - protein, 328 aa, Glycine max
  unsure (1)..(328): unsure at all Xaa locations
  Clone ID: PAT_MRT3847_105207C.1.pep
PRVRRTTLVANTSNMPVAAREAXIYTGITLAEYFRDMGYNVSMMADSTSRWAEALREISGRLAXEHMGMDIDQXMPADSGYPAYLAARLASFYERAGKVKCLGGPERTGSVTIVGAVSPPGGDFSDPVTSATLSIVQVFWGLDKKLAQRKHFPSVNWLISYSKYSTALETFYEQFDPDFINIRTKAREVLQREDDLNEIVQLVGKDALAEGDKITLETAKLLREDYLAQNAFTXPYDKFCPFYKSVWMMRNIIHFYNLANQAVERGAGSDGQKISYTLIKHRMGDLFYRLVSQKFEDPAEGEAALVAKFQKLHEDLTNGFRNLEDETR

SEQ ID NO: 148601 - protein, 75 aa, Glycine max
  Clone ID: PAT_MRT3847_105208C.1.pep
TGTCVIHRHEVTQSMTRKKVQIKRNTMINLTSLLKTLLLKKNLPSDQSSNVHMRICHLRHAIFTHMNVEVVQLII

SEQ ID NO: 148602 - protein, 37 aa, Glycine max
  Clone ID: PAT_MRT3847_105209C.1.pep
LAIPIIDVLRHLRHRHNLLIISVQCHKTLLFINHFMI

SEQ ID NO: 148603 - protein, 77 aa, Glycine max
  Clone ID: PAT_MRT3847_10520C.1.pep
NPLPPQFNGFFGDPNTLKGFPVTPLGGHKFLILQKSHKITSGMLWASECNFKTKYLVLYPPLRVPNQRTPQTPKRMY

SEQ ID NO: 148604 - protein, 108 aa, Glycine max
  unsure (1)..(108): unsure at all Xaa locations
  Clone ID: PAT_MRT3847_105210C.1.pep
FSPFQTPQDALSKIINHHLHPFKLLPFSSTFTQQKNDIQLQAYNNPFITTSYITYIFTYHTSHFQXKHYDIKVTDSNTLLXFDTPITHYQTTNPNKNPFTYNKTYNNN

SEQ ID NO: 148605 - protein, 95 aa, Glycine max
  Clone ID: PAT_MRT3847_105211C.1.pep
PRPNRQVILPIIFPARPKNSQGHWSQSVLNLTYNVRKMFVEMDEKLFLASHSQFKEEEVMLNMAAEKRKEAWKQLEHAASLQPAIGNTPVLVSPI

SEQ ID NO: 148606 - protein, 36 aa, Glycine max
  Clone ID: PAT_MRT3847_105212C.1.pep
LLIPTFDFPFHVLNFPLITSSGSFFPSPSSIRYSFF

SEQ ID NO: 148607 - protein, 155 aa, Glycine max
  unsure (1)..(155): unsure at all Xaa locations
  Clone ID: PAT_MRT3847_105213C.1.pep
XXXXXSXXXXXXLXDSXFXRXXXXXXXLXXXXCWCXXTSLHXXAXAXQGLXXTXXPKXWXXXLXVXXPXXXKXQPKGGNGXEXXXXKXXGSXXQPXXXXXPAXKKXRXXXKXVXXPPXERXXHXXGQTAIXTYYXPGWAHPHKRXKXXQIXMXXX

SEQ ID NO: 148608 - protein, 109 aa, Glycine max
  unsure (1)..(109): unsure at all Xaa locations
  Clone ID: PAT_MRT3847_105214C.1.pep
LLFSLLPHLTLSSMVVEALVPLLESNMQAMNEDYSASFTSKMKKEGNHKTYSSTRDSNNNMQQGGELWTNGLICAFEFMRGNGPTKKKDYCLXRIGNSLNESDSHGDDF

SEQ ID NO: 148609 - protein, 93 aa, Glycine max
  unsure (1)..(93): unsure at all Xaa locations
  Clone ID: PAT_MRT3847_105215C.1.pep
MASLKVAFLAAVLCMGVESAPMAHAAITCGQVTSSLDNCIGYLQKGGTPASACCNGMKSLNADDKTTDDRQXRCYCLKADDNQMSSFKAHNAT

SEQ ID NO: 148610 - protein, 60 aa, Glycine max
  Clone ID: PAT_MRT3847_105216C.1.pep
SCTIYITQALISIMGVVNHISNQRLFMISNACMLVLHMYAWRCIHYLHIFYSDIQGSLWE

SEQ ID NO: 148611 - protein, 83 aa, Glycine max
  Clone ID: PAT_MRT3847_105217C.1.pep
WVYAIAHYSPAKRTWPALHPHHQLLIIQVKLVKSSLQPLTQSLTWRRLGPIFLILHQQSIWVLRPSSSLAQLSVPHSRRSNHT

SEQ ID NO: 148612 - protein, 81 aa, Glycine max
  Clone ID: PAT_MRT3847_105218C.1.pep
IAPFSEMLEGALKTHHQLVMLIENVDFADAQFKKFLCDGFETGNFGNFTEENSSQVIFILTNGGSGSTNIEQQNEDSVMRL

SEQ ID NO: 148613 - protein, 63 aa, Glycine max
  unsure (1)..(63): unsure at all Xaa locations
  Clone ID: PAT_MRT3847_105219C.1.pep
GPPFVASGQMGAFSKQPLWPSRLTXVDGEGHVQQVMSLTTEQIDLLPAXQINLVLQLLQMMRR

SEQ ID NO: 148614 - protein, 81 aa, Glycine max
  Clone ID: PAT_MRT3847_10521C.1.pep
FNNNPIITNGGAIPHEAIKRAVFGNKIEDSPPSFGHCFFFYQYRNTLFFFPFHFYPKAFYFWGEFENVLPPPLKGFHFGGI

SEQ ID NO: 148615 - protein, 60 aa, Glycine max
  Clone ID: PAT_MRT3847_105220C.1.pep
TLNSMLLMLLLKSPHCRRLRLMYIASSFNNLILIQKKAFFRSCVMYTRMSHYIWSWIQLG

SEQ ID NO: 148616 - protein, 60 aa, Glycine max
  Clone ID: PAT_MRT3847_105221C.1.pep
YSDVTDGGYGKPSGGYGAAGGGGVYPDTTTDGGYSKTSGGGYDDEVDYKKEEKHHKHLFG

SEQ ID NO: 148617 - protein, 86 aa, Glycine max
  unsure (1)..(86): unsure at all Xaa locations
  Clone ID: PAT_MRT3847_105222C.1.pep
NACRSICVAPFRGGMPIRVVSLANAIVQREPDMNSWFQSFXSPTNGDFDQGNDLTMVKANVACAAVGLTSSYTPTPLMESGLKKTE

SEQ ID NO: 148618 - protein, 46 aa, Glycine max
  Clone ID: PAT_MRT3847_105223C.1.pep
KKTEAQNNLCLSKICTRIGFSCCNFIRIDIRLAFPGNFMGVPCKKS

SEQ ID NO: 148619 - protein, 45 aa, Glycine max
  Clone ID: PAT_MRT3847_105224C.1.pep
ILSTELTNLAFSKTDKKKTYIYIFNFSFIRFFFLSLSLFSIDHNY

SEQ ID NO: 148620 - protein, 57 aa, Glycine max
  Clone ID: PAT_MRT3847_105225C.1.pep
LWFPLLVFVGTVFLASVCVSLKVREDENLPFYCRSSKSFQTLFELHNGRIRLLPEIQ

SEQ ID NO: 148621 - protein, 125 aa, Glycine max
  Clone ID: PAT_MRT3847_105226C.1.pep
CRSAGIKVIMVTGDHPITAKAIAKGVGIISEGNETVEDIAARLNIPVSQVNPRDARACVVHGSDLKDMTPEQLDDILKYHTEIVFARTSPQQKLIIVEGCQRQGAIVAVTGDGVNDSPALKKADI

SEQ ID NO: 148622 - protein, 513 aa, Glycine max
  unsure (1)..(513): unsure at all Xaa locations
  Clone ID: PAT_MRT3847_105227C.1.pep
MRSLVPKGSSRSMTCLCLTHSLTQTHSHNLLATTFSSSLYNSNNRNPLFQLFSGILRPRIRAFSTDFRSAPTPTASSSAFAQSMANFDADSVTYLKQRDAAEIDETLMGPLGFSVDQLMELAGLSVATSISEVYKPSEYSRVLTICGPGNNGGDGLVAARHLHHFGYKPYVCDPKRTPKPLYAGLVTQNEALSIPFXLIICVIFEFRFPIXNLVNEAAAVRTAKAMIFVKCILVLXLPTRWHVEEGDVDGTGIKPDMLVSLTAPKLGAKKFGGPHHFLGGRFVPPAIAEKYKLILPPYPGTSMCVRIGKPPRIGISALRENYISPEFLEEQVEADPFNQFHKWFNDALAAGLKEPNAMSLSTVGKDGKPSSRMVLLKGLDKEGFVWYTNYESRKARELSENPRASLLFYWDGLNRQVRVEGPVQKVSDEESEQYFHSRPRGSQIGAIVSKQSTVVPGRHVLYQKYKELEEKYSDGSLIPKPKNWGGYRLTPQLFEFWQGQKSRLHDRWLLPRL

SEQ ID NO: 148623 - protein, 228 aa, Glycine max
  Clone ID: PAT_MRT3847_105228C.1.pep
MAAAAPPPAPTPAPEPATSLPETTPLFTRIRLATPSDVPHIHKLIHQMAVFERLTHLFSATESSLSSTLFTSPPFQSFTVLLLEASPTPFLNSTLNPNPFYKPITKLLNLSNPINDPESDTFKTLDGVTVVGFVLFFPNYSTFLGKPGFYVEDLFVRECYRRKGFGRMLLSAVAKQAVKMEYGRVEWVVLDWNVNAIRFYQEMGAEVLNEWRVCRLTGEALQAYGGAD

SEQ ID NO: 148624 - protein, 141 aa, Glycine max
  Clone ID: PAT_MRT3847_105229C.1.pep
MYLETNKFSNALFKILTFLIFLHFLYDEMQVACLQAQLMQVKAQLAQNLVESRNIESNHQWTGNNNSVSGQPMNHPFCPTYMNPISPQSSLESIDHSSINDGMSMQDIQSREDFQIQAKERPYNNNDLGELQELALRMMRN

SEQ ID NO: 148625 - protein, 121 aa, Glycine max
  Clone ID: PAT_MRT3847_10522C.1.pep
LRNYATYRMNLRFLMTFLMPRQNVSTFDDLEVLALRVGRVPLVGIFCFSIQIHFAILLRMRLSVSESTVFFVTCNASNLSLLCSILLCGKWILLLVWTFATWCYIYGVIMLSQGYALNANH

SEQ ID NO: 148626 - protein, 87 aa, Glycine max
  Clone ID: PAT_MRT3847_105230C.1.pep
SLRKKKLLRARIRRGRRWAEPGQDLEDLAKNMLKTRLMNEPFQVLLPCIQMNFYFNLSFSFLFVFSVLLLLSSHHSVILSFQNKTCV

SEQ ID NO: 148627 - protein, 183 aa, Glycine max
  Clone ID: PAT_MRT3847_105231C.1.pep
GSRLGLVSDAISEKVDSLRKGKSEVIEKNHILILGWSDKLGSLLKQLAIANKSIGGGVIAVLAEKEKEEMEMDIAKLEFDFMGTSVICRSGSPLILADLKKVSVSKARAIIVLASDENADQSDARALRVVLSLTGVREGLWGHVVVEMSDLDNEPLVKLVGGELIETVVAHDVIGRLMIQCAL

SEQ ID NO: 148628 - protein, 50 aa, Glycine max
  Clone ID: PAT_MRT3847_105232C.1.pep
ISFTFFFLKILAFIDLSLPKIREGLHNTYSNFVSTLIYQFLAHQLFFVHP

SEQ ID NO: 148629 - protein, 79 aa, Glycine max
  Clone ID: PAT_MRT3847_105233C.1.pep
VSSDVVCLSWSRRLGDAQGPCSMRVQMSVACLIIRSRFLAHELECSPGSSSLSLMKRMHSKFMSKYYTHAQSLDIATAI

SEQ ID NO: 148630 - protein, 28 aa, Glycine max
  Clone ID: PAT_MRT3847_105234C.1.pep
SLGIFFVFFMRFCSHYYLMLLLIIIRCL

SEQ ID NO: 148631 - protein, 104 aa, Glycine max
  unsure (1)..(104): unsure at all Xaa locations
  Clone ID: PAT_MRT3847_105235C.1.pep
CPSLRGYHALAARALRARVRFLPGSLGCSRSVPSSGYDCPLHNVQAXSITISRLWLAHLATSMPSVVPDIGFGSPLRHVNPGLPRWLWPLGLCNHTLISWLQLH

SEQ ID NO: 148632 - protein, 262 aa, Glycine max
  unsure (1)..(262): unsure at all Xaa locations
  Clone ID: PAT_MRT3847_105236C.1.pep
MAIKEDVEDRTQKGIREPLVVGEQNHHASKGHPWMVYFTTFVAVCGSYEFGACAGYSSPTQDAIRKDFSLSLAEYSLFGSILTFGAMVGAITSGPLADFIGRKGAMRVSSAFCVAGWLVIYFSEGPVPLDIGRLATGYGMGVFSYVVPVFVAEIAPKELRGALTTLNQFMIVTAVSVSFIIGNVLSWRALAIIGLVPTAVLLLGLFFIPESPRWLAKRGHKKDXVAALXILRGXDADISEEAEEIXDYITSLEQLPKSVCWD

SEQ ID NO: 148633 - protein, 244 aa, Glycine max
  Clone ID: PAT_MRT3847_105237C.1.pep
MGRGRVQLKQIENKISRQVTFSKRRTGLRKKANEISVLCDAQVALIVFNAKGKLFEYSSESSMENVLERYERHTHIGKLVGDGDESQGNWSLQCFKLTGKVEVLERNLRNFVGEDLDPLNLRELQSLEHQLETAIKRIRTRKNQVMNESISDLQKKARQLQEQNGILTKKIKEKGKEVVERPHCGPETLGLTCPPELQRQQRVFPSLTLCETLQAGHLEEVVEARTVPTASTHIPPWMLHPFTR

SEQ ID NO: 148634 - protein, 121 aa, Glycine max
  unsure (1)..(121): unsure at all Xaa locations
  Clone ID: PAT_MRT3847_105238C.1.pep
LTVLHPNLEPNNNWFAALHMETVAERLRKYGLRYGHMNKPYYXLDVNEXVTHLPKEAXDAPQDRRTGAIDLSVTDEYRPGILHPKQTPFKRYLQNMATLANRETAERESSGGMTLYQQSIP

SEQ ID NO: 148635 - protein, 134 aa, Glycine max
  Clone ID: PAT_MRT3847_105239C.1.pep
MSSNRILNELTDSDKDPPTSCSAKPGAAEDMCHRQATIMGPADSPYARGVFLATIHFPPEYPFKAPKVACTTNVVHPNIDSNGSICLDILKEQWSPAITISKVLHLIRSLLTDPNPDDPLVPDIAHMYTTDLNK

SEQ ID NO: 148636 - protein, 136 aa, Glycine max
  Clone ID: PAT_MRT3847_10523C.1.pep
EFFTRRSPTTSPVIHLRRRKTLRMFLARRRFHPPPQDPPPLPDSEARVRHKLKDLFISSPPPPPLNDEKTIFHNHQQQQEDQHEELLPNSAVSVRFRTGSPFRRGASTAALRPVSSVFRYRLLRRAWRPVLVSIPE

SEQ ID NO: 148637 - protein, 78 aa, Glycine max
  Clone ID: PAT_MRT3847_105240C.1.pep
MVDKTDSLACTCAFSGVQPATVQYEPHTAVLTSPPKIMYELNAPDSQSLALIHTPDNLCDDYHYTMTSKILGTMITPT

SEQ ID NO: 148638 - protein, 80 aa, Glycine max
  unsure (1)..(80): unsure at all Xaa locations
  Clone ID: PAT_MRT3847_105241C.1.pep
NFRVYYXTKXTSPCRDCTVSWXITYINLSYDTINFXAFPHKLLHFGEIXKKDVLKFLQEEFFTLFLLIVLTVTLCLLMVV

SEQ ID NO: 148639 - protein, 59 aa, Glycine max
  Clone ID: PAT_MRT3847_105242C.1.pep
KLIQFNSILNFALESKIPYLMGPIFQRATDLNLLWWQVRFHQPTLFFLRLNPPNLRVKL

SEQ ID NO: 148640 - protein, 112 aa, Glycine max
  Clone ID: PAT_MRT3847_105243C.1.pep
PSFRLQEDTRRGLYSVFKSGPTPLPGLLSSTLWSFSHGRSKFQSTPFLTSPFFSKLGPPPLFWPLPNLSLDWIFCCLWPLFNGPQFGQHQLEGFLKKTFWEGTFLFRKPGLG

SEQ ID NO: 148641 - protein, 24 aa, Glycine max
  Clone ID: PAT_MRT3847_105244C.1.pep
KTIGSFFFNLGKISKCRIFVWHGI

SEQ ID NO: 148642 - protein, 90 aa, Glycine max
  Clone ID: PAT_MRT3847_105245C.1.pep
MIISFSRRSTIIPTMIDALVNDIIRTWSRASIIVGIMVDALDQVIMIPTRIGHTMAIDNGKEHLRIYITDRMVGHKLGVFAPTLNFRGHA

SEQ ID NO: 148643 - protein, 120 aa, Glycine max
  unsure (1)..(120): unsure at all Xaa locations
  Clone ID: PAT_MRT3847_105246C.1.pep
WXGPLLXNYVXIPPGXVXGFSLAWTRVXIXXFIHSXXXXVFLYXXEECXXRAXIXXVVLXRXTRNXCPKCICPKVALLQGEIXPXXQXGLSXPLQXDMXGSWRAYRTEPKPGPFVLGPPK

SEQ ID NO: 148644 - protein, 55 aa, Glycine max
  Clone ID: PAT_MRT3847_105247C.1.pep
PLLQQLVIFLLQDKGKCKSTLRLASDKKASSVSFSTLRCSLFYTNVNKKIIMMAL

SEQ ID NO: 148645 - protein, 170 aa, Glycine max
  unsure (1)..(170): unsure at all Xaa locations
  Clone ID: PAT_MRT3847_105248C.1.pep
MGEKDSENLIWEQMRTPTAATPIAAPQQHRTLPRLLVLLILFVSVTYVVYTLKLVSTSRACNNDAPFSTDNFSKTILSVNATAAVLRRGSLETNPEDRTDLRHVVFGIAASAKLWEQRRSYIKLWYRARDMRGVVWLDEEVKSEESSDXTPPVRISGDTAMFKYTNRQGH

SEQ ID NO: 148646 - protein, 516 aa, Glycine max
  unsure (1)..(516): unsure at all Xaa locations
  Clone ID: PAT_MRT3847_105249C.1.pep
MATKLVIFIRTFRTPYWSLVTMDSEVLNLLALILPFLLFVIVALKIGRRNLKKSESTPKIPPGPWKLPIIGNILHLVTSTPHRKLRDLAKIYGPLMHLQLGELFIIVGSSAEYAKEIMKTHDLIFASRPHTLVADILAYESTSIITAPYGRYWRQLLKICTVELFTQKRVNSFXKGLSINLAEIVVLSIYNIISRAAFGMKSQNQEEFISAVKELVTVAAGFNIGDLFPSVKWLQRVTGLRPKLVKLHLKMDPLLGNIISEHKEAKSKPXESKDETEEDLVDVLLKFLDVNDSNQDICLTINNMKAIILDIFAAGSETATTTINWVMAEIXRDPTRPPTRPXAPREVFNMKGRVDEICIDELKYLKSVVKETLRLHPPAPLLLPRECGQACEINGYHIPVKSKVIVNAWAIGRDPKYWSEAERFYPERFIDSSIDYKGTNFEYIPFGAGRRICPGSTFGLINVEVALAFLLYHFDWKLPNGMKSEDLDMTEQFGVTVRRKNDLYLIPVPSNPFQVR

SEQ ID NO: 148647 - protein, 38 aa, Glycine max
  Clone ID: PAT_MRT3847_10524C.1.pep
QINHMKQHQDSIMAFYASYLMAQPPIHSQKKTTSKCAY

SEQ ID NO: 148648 - protein, 155 aa, Glycine max
  unsure (1)..(155): unsure at all Xaa locations
  Clone ID: PAT_MRT3847_105250C.1.pep
PFFPRKGAPPGGGGKSPTVLEGPGKRLPGPPNQKSPKEGPQFTQPKKTGPNPHSFXNVPGQSRRGRQSKPPRPPSEPGTTKTPKPHRLRVGSETIGKLTVVPGAGGASPLGGGSLFIFPPPILWADRNLSSEAGIQILFPGFILIRGGGGKGFPS

SEQ ID NO: 148649 - protein, 67 aa, Glycine max
  Clone ID: PAT_MRT3847_105251C.1.pep
SPPSYRLILSLFSKTSPSPGGSIYHGGSSPLGNKTLKYESRYVLSGCLCYFPPLLKFVVGGNDIALH

SEQ ID NO: 148650 - protein, 85 aa, Glycine max
  Clone ID: PAT_MRT3847_105252C.1.pep
QTKTPRSLVILPMSWHTVCPYFSRAYYVARTEKGYTKSNIYSERFIYLRSGVLMINKHMIALLSVIVHDTYRSTIRRFILPTSSG

SEQ ID NO: 148651 - protein, 65 aa, Glycine max
  Clone ID: PAT_MRT3847_105253C.1.pep
TDKVNAPPSLWIGLGIDKSKAQERAKDQLFSQAGMKMKLTTRRERKSPPSADDPAVKDSLSTEGH

SEQ ID NO: 148652 - protein, 66 aa, Glycine max
  Clone ID: PAT_MRT3847_105254C.1.pep
NLGCFVNFANSNYNNSLFSNNASIFSSSSVNINFCPRRLHSLSLCCHLMNPSWKIIGSHATQVLIF

SEQ ID NO: 148653 - protein, 329 aa, Glycine max
  Clone ID: PAT_MRT3847_105255C.1.pep
MAASGSSFSNITSFLRNQQPSSQPLDSSLFLSAPSIFVSGSRSMVSFEAEGGKGCNGSFFRAFDMDDNGDECMDEYFHKPEKKRRLSMNQVQFLEKSFEEENKLEPERKTKLAKDLGLRPRQVAIWFQNRRARWKTKTLEKDYEALHASFENLKSNYDSLLKEKDNLKAEVASLNEKVLARGKQEGHMKQQAESEEETKRLLHLQEQEPPQRLLLESVSEGEGSKVSSVVGGCKQEDISSARSDILDSDSPHYTDGVNSALLEHGDSSYVFEHDQSDMSQDEEDNLSKSLYPSYLFPKLEEDVDYSDPPESSCNFGFSEEDHALWTWAY

SEQ ID NO: 148654 - protein, 118 aa, Glycine max
  Clone ID: PAT_MRT3847_105256C.1.pep
LLLQSVSEGEGSKVSSVVGGCKQEDISSARSDILDSDSPHYTDGVHSALLEHGDSSYVFEPDQSDMSQDEEDNLSKSLYPSYLFPKLEEDVDYSDPPESSCNFGFPEEDHVLWTWAYY

SEQ ID NO: 148655 - protein, 103 aa, Glycine max
  Clone ID: PAT_MRT3847_105257C.1.pep
VDDIIQYSPRLVVKDKILVPAGGDTYILLYEIRGSFTAESPCPVHPVVGSSPADDMTTNYNGELHVCSSDGPTRQSVRTAYETHCGKSITSQRRICSLSQPTT

SEQ ID NO: 148656 - protein, 57 aa, Glycine max
  Clone ID: PAT_MRT3847_105258C.1.pep
CLQYRKRQAFSISSVMWPLLSSFGKCKFLLVVEGAISLFQFGVKAYPIELFQRKYNE

SEQ ID NO: 148657 - protein, 84 aa, Glycine max
  Clone ID: PAT_MRT3847_105259C.1.pep
KNHFLGVANLFVGAFCILVSIIFLLLHVKNPRPYGDTAYLSWNRNNIATLYCTWYNGNTFLKRHTGYTFLLLKLMYLIVKDEAG

SEQ ID NO: 148658 - protein, 129 aa, Glycine max
  Clone ID: PAT_MRT3847_10525C.1.pep
GWNLWAVYVLAGREKIIEGDNVLQTSTPTYSCPASFLPPRLTSARYLNQPLFFLRYSLLFLASHLSYREIKTKAVPVVASSTRSASSLLPPEALTVGLVPRLLKRVKRRLRVGTKDRRTKPRGTRRNKR

SEQ ID NO: 148659 - protein, 66 aa, Glycine max
  Clone ID: PAT_MRT3847_105260C.1.pep
SPPCSSSPSWPPPRHTPARTPLKRHCPATSSVPTPPSVSCPKSLRSRKPAARPRRTCPSSKRSSHC

SEQ ID NO: 148660 - protein, 56 aa, Glycine max
  Clone ID: PAT_MRT3847_105261C.1.pep
DFEGRLLYSCRYFHSILITEPYCLTKWPYLKNTWAVVQMFALLIVCGDNRLTEKTI

SEQ ID NO: 148661 - protein, 90 aa, Glycine max
  unsure (1)..(90): unsure at all Xaa locations
  Clone ID: PAT_MRT3847_105262C.1.pep
NAKKFAAYSWVEVGNKVHRFVSEDHYHPEVGKIYGELNRLISILQQIGYNPDTNIVLHNVGEEXKVRSISYHSEKLALAFALIRKPNGVA

SEQ ID NO: 148662 - protein, 121 aa, Glycine max
  Clone ID: PAT_MRT3847_105263C.1.pep
ILRPSVLLKTLILCRRVTLLIVFLVMLLRWKIFIIQIPQINHQEYIIGLVEDLTVGVGCVIMMTFQILSLQQLFDCHLTFAEVDVRIMQIVGVCFFTNVQISDQSPSFQTTLQKGTVSLVC

SEQ ID NO: 148663 - protein, 114 aa, Glycine max
  Clone ID: PAT_MRT3847_105264C.1.pep
PDLDQTGRLEVHLDRPCLAQYETRVFFDSVVRANLSFGQLKVLEGMSREELFLWLPVKYILVTDPSSGLIVIDIGLAFKHLSLSRFEDPPICKSHSGLMLKVGGRKGVGFTAQR

SEQ ID NO: 148664 - protein, 45 aa, Glycine max
  unsure (1)..(45): unsure at all Xaa locations
  Clone ID: PAT_MRT3847_105265C.1.pep
XKSGQFLPLSKFKCFGLVMGVLRSWLPFFYIYISHIHWXVNGRFS

SEQ ID NO: 148665 - protein, 80 aa, Glycine max
  Clone ID: PAT_MRT3847_105266C.1.pep
NPTVYVKVLAPLPLEFSAFLVRVATFPIPVTGIISAIRFGAAVISPNFKVWPHHCLFWVGPFLYALAFLFSLFVRPYIFL

SEQ ID NO: 148666 - protein, 148 aa, Glycine max
  unsure (1)..(148): unsure at all Xaa locations
  Clone ID: PAT_MRT3847_105267C.1.pep
XXXEGETVPDFGXXXXHSIRTLRSWLEKSRVTQSIQLSSFYIQKQATALLRWISHNIITRHGQALILHTGTIYMLTLRPTKTGPGSSSYDATTNHTALPSGTKLQSVAIPAVYLTLELRRHYRCDTGPLSRHPDNLPRHRQLQHIQSP

SEQ ID NO: 148667 - protein, 58 aa, Glycine max
  Clone ID: PAT_MRT3847_105268C.1.pep
ILPDRLRSVQGWNKPRLSIILCRLGENELMLKARGLLLIPKRTHTEAPGATGQTRAEL

SEQ ID NO: 148668 - protein, 54 aa, Glycine max
  Clone ID: PAT_MRT3847_105269C.1.pep
EPDFALFFFNEIGQRVCFIGVDGPSPPNHCTKRIRFFQVCQTYIPILFFERMKH

SEQ ID NO: 148669 - protein, 44 aa, Glycine max
  Clone ID: PAT_MRT3847_10526C.1.pep
SDYVSGFMITCTSLFPPNVVCVSERNQTMVGSIFVLSTPIPRLR

SEQ ID NO: 148670 - protein, 72 aa, Glycine max
  Clone ID: PAT_MRT3847_105270C.1.pep
RTRGRTFGKKKKKKKKKKKKKKKKKKKKKNKKKKKKKKKKIKIKKKRVGEFMVLGILIVLWDMQIFLSGVIK

SEQ ID NO: 148671 - protein, 159 aa, Glycine max
  unsure (1)..(159): unsure at all Xaa locations
  Clone ID: PAT_MRT3847_105271C.1.pep
QYSASGSRQVHRDRLLXAKKQFEGIERKNLSVAEEQLHHPHIXKFICFFTPVDVKEEELHVFVRYLXNEIAMMSRMENEHMVHMMDQNKENFVVRSTNMFHDYVRAMNGNSDTLSGLXREDGIVNTICELYQECDXRGPAILNKYMEYMQVVKVVSHIN

SEQ ID NO: 148672 - protein, 116 aa, Glycine max
  unsure (1)..(116): unsure at all Xaa locations
  Clone ID: PAT_MRT3847_105272C.1.pep
VESLQMQNPLMLKSSFNRPNIYYXRYKDLLDDAYADLSNTLKSLGDVCAIVYCLERSMCDDLSTNLSQNGISCAAYHAGLNNKMRTSVLDDWISSKIKVVVATVAFGYAFPFLCLF

SEQ ID NO: 148673 - protein, 57 aa, Glycine max
  Clone ID: PAT_MRT3847_105273C.1.pep
SSSSRIGSRVIIDCCSSPLCATPLHDIAILSFMITYLSSPCSQLYAIGSEQLQLDPH

SEQ ID NO: 148674 - protein, 157 aa, Glycine max
  Clone ID: PAT_MRT3847_105274C.1.pep
RKNRGDEEQTTHKCGVWWWRATHCPHFLSSISALNNFTSNVKTQHFQLTLLSNARWRNNSGNNKNQRVLSPLTGAGSSKVTRRRATTTSCRPPPPPIRTTSPLFPITSSGSRFRARREPSTLPARICPTKAPSFALPSTATSRNLPTGSNKSVFVRK

SEQ ID NO: 148675 - protein, 43 aa, Glycine max
  Clone ID: PAT_MRT3847_105275C.1.pep
IVIYSRVFIRDHAKALKLFAYEIKFIYTHNIHNVIIACKTHVY

SEQ ID NO: 148676 - protein, 37 aa, Glycine max
  Clone ID: PAT_MRT3847_105276C.1.pep
LRNSILSFEKIPNETKLLLCIVQNISWVGHTWLVTSS

SEQ ID NO: 148677 - protein, 52 aa, Glycine max
  Clone ID: PAT_MRT3847_105277C.1.pep
IMTHLICLIYLKCSCLHVQTLLNVISPILYNIGLNTKIIFIIFYIRFQIRVS

SEQ ID NO: 148678 - protein, 65 aa, Glycine max
  Clone ID: PAT_MRT3847_105278C.1.pep
LVIISLINPNYNFINRRLDIHYNSVEVLSSFSKLYFRLPPNIRLHYSIRHSIFYCIIFMSIIPSP

SEQ ID NO: 148679 - protein, 556 aa, Glycine max
  Clone ID: PAT_MRT3847_105279C.1.pep
MLVLFETPAGFALFKVLDEGKLSKVEDLWKNFSSADTARQVVKLKAFSKFENTSEALEAATLLIDGKASKGLRKFLRVHCENETLGVADSKLGNVIKEKLKIDCIHNNAVMELMRGVRNQLTELISGLAVQDMAPMSLGLSHSLSRYKLKFSAEKVDTMIVQAIGLLDDLDKELNTYAMRVREWYGWHFPELTKIIQDNILYARAVKLMGDRVNAASLDFSEILPEEVEAELKEASVISMGTEIGELDLANIRELCDQVLSLSEYRAQLYDYLKSRMNTIAPNLTAMVGELVGARLIAHGGSLLNLAKQPGSTVQILGAEKALFRALKTKHATPKYGLIYHASLIGQAAPKFKGKISRSLAAKTALAIRCDALGDSQDNTMGLENRAKLEARLRNLEGKELGRFAGSAKGKPKIEAYDKDRKKGAGGLITPAKTYNPSADSVIGQMVNSAMDEDAQEPSVADKKKEKKEKKEKKKKEKNEGDETVQADGDVGEEPEPEVVKKEKKKKRKETESAELQNGNDDNAGEKKKKRKKHAEKEESPEMPSKKKGKKKKSGD

SEQ ID NO: 148680 - protein, 68 aa, Glycine max
  Clone ID: PAT_MRT3847_10527C.1.pep
RFLHPPLAQKTVPPPPLLAPWLGPQSCPSFPCSTKMSRVMGKKCLRNMQLKEKGCINFLRNPYVWNKV

SEQ ID NO: 148681 - protein, 104 aa, Glycine max
  Clone ID: PAT_MRT3847_105280C.1.pep
MRRCDRKRRDSNAKPEGIAEERVRFRHTWRSTPRSWSYIWLLFHMARHTRSISQRLKLNDLVMEFLYSMISLYYPNSVMETHVCVNRHVVILNKIDLTDPNVMH

SEQ ID NO: 148682 - protein, 144 aa, Glycine max
  unsure (1)..(144): unsure at all Xaa locations
  Clone ID: PAT_MRT3847_105281C.1.pep
RVLPRVRTAARRRQKGGSEMGDVDLARGGELXXXXLSLSEYRAQLYDYLKSRMNTIAPNLTAMGGELVGARLIAHGGSLLNLAKQPGSTVQILGAEKALFRALKTKHATPKYGLIYHASLVGQAAPKVKGKISRALAAKTALAY

SEQ ID NO: 148683 - protein, 43 aa, Glycine max
  Clone ID: PAT_MRT3847_105282C.1.pep
SLSELDLAGSLGLGIRLKECLITYRSLTNKIFTSSAKIELILF

SEQ ID NO: 148684 - protein, 151 aa, Glycine max
  unsure (1)..(151): unsure at all Xaa locations
  Clone ID: PAT_MRT3847_105283C.1.pep
LGRXAGSAKGKPKIEAYDKDRKKGAXGLITPAKTYNPSAXSVIGQMVDSAIDEDAQEPSVADKKKEKKDKKKKKDKKEEDATVQADGEEPEPVVVKKDKKKKRKETESAELQNGNDDNAGEKKKKRKKQGEQEESPEMPSKKKGKKKKSED

SEQ ID NO: 148685 - protein, 79 aa, Glycine max
  Clone ID: PAT_MRT3847_105284C.1.pep
TKEGKISAVKLQILNATKKKPCLRVSPISQLFSTNLHKIKNQSSLCCHFSLPSGFSSPKRRLNLAICPKLSAIWRLARK

SEQ ID NO: 148686 - protein, 87 aa, Glycine max
  Clone ID: PAT_MRT3847_105285C.1.pep
MLVLFEAPAGFALFKVLDEGKLSKVEDLWKNFSSADTARQVVKLKAFSKFENTSEALEAATLLIDGKASKGLRKFLRVHCENETLGV

SEQ ID NO: 148687 - protein, 62 aa, Glycine max
  Clone ID: PAT_MRT3847_105286C.1.pep
ILVISDDYVERTIIKLEGIICNIEFSFLYIKDSRSKEIHSLNVEKYESLVIKLSLNKDVGLS

SEQ ID NO: 148688 - protein, 120 aa, Glycine max
  unsure (1)..(120): unsure at all Xaa locations
  Clone ID: PAT_MRT3847_105287C.1.pep
FFPQKNLSPGPRPCPPGGGAPPPGFCFFLPRGDQNFPGGGRSPFFLYXEETPPISVFFFNGVDDQPLFWPLSWPLVXKERAFKEEKRNFKNPGGCPGFFSFFAPGSSHSDRQRLKRKETL

SEQ ID NO: 148689 - protein, 39 aa, Glycine max
  Clone ID: PAT_MRT3847_105288C.1.pep
GSSANRLFWLFYHTARKRDREITGIIMRHDTLARCQSQS

SEQ ID NO: 148690 - protein, 67 aa, Glycine max
  Clone ID: PAT_MRT3847_105289C.1.pep
IPFHYREGDQVCLKLTITTIKSDINYKGLILYENINFIFWNFCFYGGVLIFWWIYSCKIFGRLVVMF

SEQ ID NO: 148691 - protein, 65 aa, Glycine max
  Clone ID: PAT_MRT3847_10528C.1.pep
WESLKIISITFDCVGLSIGTLKQSTVGDILLGISQDFEIAGNTLMPAFSVPHATARSSENAESYA

SEQ ID NO: 148692 - protein, 254 aa, Glycine max
  Clone ID: PAT_MRT3847_105290C.1.pep
MWKFKWLSNAYWNCLSGQKFSRFSKEIFSNKSLHLNIAQIALLLNDGPFQPETCCVAGDPREFHQNASFKRPQLTKTEMTKACNMTKDLKRILSENFHDDDEGAEPQTVLYKNLWLEAEAALCSVYYKARYNQIKIEMDKHSYQEKEMEKQSKSEVVPSLSQSQSFATKVHHPNPDSSAALKFRVLDATNLEELSCLNISTDMNKPNAMTPEGKGGQNLDSFINNYFVPCSDDEAERNDESSVMARYQVLKDSG

SEQ ID NO: 148693 - protein, 58 aa, Glycine max
  Clone ID: PAT_MRT3847_105291C.1.pep
SLVKFNITGQHFENRISKFPCFLGYKYLKSTKIHLDWSLVNYNRIKSSNGHNDRFKER

SEQ ID NO: 148694 - protein, 115 aa, Glycine max
  Clone ID: PAT_MRT3847_105292C.1.pep
MATPALSSIVEPEQQHAEPEAVAVPSTSAWKSSGSVGPFFAVITVLIILSVLSCYLGRKWNRRPKTPLESIRGRGFFGWLKRVFRERIGKDIEVGGVGAKVMVCDDHEEIDHCKV

SEQ ID NO: 148695 - protein, 55 aa, Glycine max
  Clone ID: PAT_MRT3847_105293C.1.pep
TKCVVVYVKFVELNCNGFGMKKKQSELISLTSKEWCYCLSCYTLMNWVSVVPKWK

SEQ ID NO: 148696 - protein, 78 aa, Glycine max
  Clone ID: PAT_MRT3847_105294C.1.pep
MKREYIEAVVFIRLCYKYINMDYAWLHPVCLFGRNGRGDRATLYCSCPCLIYERRETRLDLQRGGEQVPVWGEGQKGH

SEQ ID NO: 148697 - protein, 63 aa, Glycine max
  Clone ID: PAT_MRT3847_105295C.1.pep
LFQLIFKAHSSAGSLIVLSSMDGWCDNCFSMVFFRQICHVFCSYSSRYQLFKETELLSSAVAI

SEQ ID NO: 148698 - protein, 116 aa, Glycine max
  unsure (1)..(116): unsure at all Xaa locations
  Clone ID: PAT_MRT3847_105296C.1.pep
INLGAPNIMVCVPPHSIIEGVTHPSMKXLPSHVXATAKVPVAYEKFHACTKCGVLDIYAKTTAMSLVTLPCRLCQASSKKGVKTCIRHRLCLSTTPPPIYFPNAVVATSMLYQYGV

SEQ ID NO: 148699 - protein, 121 aa, Glycine max
  unsure (1)..(121): unsure at all Xaa locations
  Clone ID: PAT_MRT3847_105297C.1.pep
MTRNNVIKMNGLGILGATNLGTLQLHAYDMFPLQNDTSXGARTPNVKCASWTHAVXAHNIIGFETIPEECVDASEEYIHCEHXISDSKTVIQHAYLYVRDLDLHLKDTFVFTIDGSVLSNI

SEQ ID NO: 148700 - protein, 93 aa, Glycine max
  Clone ID: PAT_MRT3847_105298C.1.pep
MNHCQKQTYSHCINLTDTTIKKGTKTSKDIPTLHLNTTAKSPLLSLRTLQSYPGLITQPVASLNKVPYRHIACAQNYNIEKENAYQLKNLEEE

SEQ ID NO: 148701 - protein, 56 aa, Glycine max
  Clone ID: PAT_MRT3847_105299C.1.pep
ETLECLKLLIEKNECLFNLLLRGQGILQTWGDQIFYNTFFVIDTGFHCWIIHIKMF

SEQ ID NO: 148702 - protein, 54 aa, Glycine max
  Clone ID: PAT_MRT3847_10529C.1.pep
MQLPTRRGGIHTLRIFILDQPIKNPLLLTNGSQRKHQSPFGQIHKLKCSPKKRP

SEQ ID NO: 148703 - protein, 211 aa, Glycine max
  Clone ID: PAT_MRT3847_1052C.1.pep
KQLAKETASSSTEPENNDEVEQITIARALLNYRLKEKMTMSNPNAPLPFHERFQIQNPRPISSQPPPATSSKILPLICQKTAPRSKPSLATTTTNESPRSRHPQAAVAVTSDNSTLPPQSCSLESRATRPLKFRAAGAAPYVPIRQMRPSCQRIAPPVTIRTVVPAFATPPCPPPASVPHPAIRAPPVRVAPPVTIRQAVPVYAAPPSKKE

SEQ ID NO: 148704 - protein, 89 aa, Glycine max
  Clone ID: PAT_MRT3847_105300C.1.pep
MYSKCGYVADAFQVFDNMPERNVVSWESMILAYARNGHAREALKLMHRMQAEGFVVDDYIHTTVISACGGVEHGDIHQDSEYSSHYLHS

SEQ ID NO: 148705 - protein, 69 aa, Glycine max
  Clone ID: PAT_MRT3847_105301C.1.pep
EVSTLQTIIKYYIVGFVILAYDSLFLGGKRLKLRVAPHSYYDSGLPREWCNVSIFLQLNIELNYGRMGR

SEQ ID NO: 148706 - protein, 98 aa, Glycine max
  Clone ID: PAT_MRT3847_105302C.1.pep
MNFHNPNTSLHLSQHDDENHLNLDLLLEPSSSSSSSPSPICSMEPRIFSCNYCQRKFYSSQALGGHQNAHKLERTLAKKSRELSLNMQSYAAAEQRSN

SEQ ID NO: 148707 - protein, 31 aa, Glycine max
  unsure (1)..(31): unsure at all Xaa locations
  Clone ID: PAT_MRT3847_105303C.1.pep
XVVLGVLHXAQDILAMAESSLQNKVATCSTX

SEQ ID NO: 148708 - protein, 69 aa, Glycine max
  Clone ID: PAT_MRT3847_105304C.1.pep
RYGSFDIDQFYFLFSKPNLLLVQFITILHHPQILLTSSPSHSFFIFLFICHNSYASTYFLQNHPTLSLT

SEQ ID NO: 148709 - protein, 82 aa, Glycine max
  unsure (1)..(82): unsure at all Xaa locations
  Clone ID: PAT_MRT3847_105305C.1.pep
MGTYDVRQSTFTVQTALKQLNEFCLKTGGACKGLTNMRHTDXSAPQSIWYGPDRPKYLGPFSEQIPSYLTREFPGDYRWDTA

SEQ ID NO: 148710 - protein, 130 aa, Glycine max
  unsure (1)..(130): unsure at all Xaa locations
  Clone ID: PAT_MRT3847_105306C.1.pep
ARGRLSYLQNYGVVDMRMAPTDCDMLGLSVLTPYYTEEEGWSLPELDTQNEDGGSLLFYXLQIYLDEWHNFRGRGKHTEEDSTGREFHEXEEIVELXPAYRGQALTTTERGLRYYIKAGPLQGLGDMAED

SEQ ID NO: 148711 - protein, 39 aa, Glycine max
  Clone ID: PAT_MRT3847_105307C.1.pep
GAGTFSGGDGSRQPSAKELELATAQGKQFYEAVSKVSFH

SEQ ID NO: 148712 - protein, 195 aa, Glycine max
  Clone ID: PAT_MRT3847_105308C.1.pep
MDEEYDVIVLGTGLKECILSGLLSVDGLKVLHMDRNDYYGGESTSLNLIQLWKRFRGDDKPPPHLGASRDYNIDMNPKFIMANGNLVRVLIHTDVTKYLSFKAVDGSFVFNKGKVHKVPANDMEALKSPLMGLFEKRRARKFFIYVQNYNESDPKTHEGMDLTRVTTKELIAKYGLDDNTIDFIGHALALHNDDR

SEQ ID NO: 148713 - protein, 285 aa, Glycine max
  Clone ID: PAT_MRT3847_105309C.1.pep
MSGLYNQISSPSTARANSPNINMRSNFEVESQYLTELLAEHQKLGPFMQVLPLCTRLLNQEILRVSGKNGLMQNQGLSDYDRVQFGSPKPNLMPSLDIQPNFTGWNSLSHEGLAGVQGLNVDWQTSPGVPSSHIVKRTLRLDIANDSYPNFNLVGRLLGPRGNSLKRVEATTGCRVFIRGKGSIKDLDKEEMLRGRPGYEHLNDPLHIIIEAELPTSVADVRLMQAQEIIQELLKPVDESQDLYKRQQLRELAMLNSNFREESPQLSGSVSPFTSNEIKRVKTDQ

SEQ ID NO: 148714 - protein, 76 aa, Glycine max
  Clone ID: PAT_MRT3847_10530C.1.pep
TSMDVCYCAPIFLFPFCFMTLYLNLGFIFGPWSCFFFCLPFFFYEMAIGSYLCFSYSFYVLVYGFSCCKCSWVYKF

SEQ ID NO: 148715 - protein, 44 aa, Glycine max
  Clone ID: PAT_MRT3847_105310C.1.pep
FFFFFFFFFFFFFILIFFFFLFFVFIFLLFFIIINFLLQIKHKK

SEQ ID NO: 148716 - protein, 63 aa, Glycine max
  Clone ID: PAT_MRT3847_105311C.1.pep
RASMAVSLSVTPLGVSNSSSSLSSKPKFPSLGFLSGTNTLGVNGPKPLTSTPVVHFAPKPWDF

SEQ ID NO: 148717 - protein, 112 aa, Glycine max
  unsure (1)..(112): unsure at all Xaa locations
  Clone ID: PAT_MRT3847_105312C.1.pep
IISGKEAIIQTQGXEKRSLAXIMLAVLRNSXDTVSMSSTRNLVDPIMXDMYPHDCVYKMAMLAKQCVDQDPVLRPDMKQVVISLSQTLLSSVEWEATLAGNSQVFSGLVQGR

SEQ ID NO: 148718 - protein, 81 aa, Glycine max
  Clone ID: PAT_MRT3847_105314C.1.pep
SVLNKVKKKIPGEDPWKSIYQKQIQDASEVLRKFVHENDFVWHEKIPSIYELPLPEGTKIVTFIPYSPKRWERQLSFKGLV

SEQ ID NO: 148719 - protein, 41 aa, Glycine max
  Clone ID: PAT_MRT3847_105315C.1.pep
GLRCVLIPQIKYKRNVSHLQISRLFYYCTYKFWTKHQKNLS

SEQ ID NO: 148720 - protein, 71 aa, Glycine max
  Clone ID: PAT_MRT3847_105316C.1.pep
QNTNWMWWVCSYPLMSQPSKPIYKINQIMQTKRADQKVRFKNRCPSNIYKLKEKVRKFTTVSALLSLLAAV

SEQ ID NO: 148721 - protein, 315 aa, Glycine max
  Clone ID: PAT_MRT3847_105317C.1.pep
MTNFPLINLEKLSGEERNDTMEKIKDACENWGFFELVNHGIPHDILDTVERLTKEHYRKCMEERFKELVASKGLDAVQTEVKDMDWESTFHLRHLPESNISEIPDLIDEYRKVMKDFALRLEKLAEQLLDLLCENLGLEKGYLKKAFYGSRGPTFGTKVANYPPCPNPELVKGLRPHTDAGGIILLFQDDKVSGLQLLKDGQWVDVPPMRHSIVVNIGDQLEVITNGKYKSVEHRVIAQTDGTRMSIASFYNPGSDAVIYPAPELLEKEAEEKNQLYPKFVFEDYMKLYAKLKFQAKEPRFEAFKASNFGPIATV

SEQ ID NO: 148722 - protein, 46 aa, Glycine max
  unsure (1)..(46): unsure at all Xaa locations
  Clone ID: PAT_MRT3847_105318C.1.pep
RSGVMTLADTTIXMLFIALGSVPNGSQGVATLPSIGFCRVIVFTLY

SEQ ID NO: 148723 - protein, 47 aa, Glycine max
  Clone ID: PAT_MRT3847_105319C.1.pep
SYFLNSPKTISKPKHNLTISISLNLFFTIQNSNTQNYPSFQTSILPS

SEQ ID NO: 148724 - protein, 36 aa, Glycine max
  Clone ID: PAT_MRT3847_10531C.1.pep
DLGWDEHWILWVGPFIVADLSALCQQVVIMPIPFKS

SEQ ID NO: 148725 - protein, 315 aa, Glycine max
  unsure (1)..(315): unsure at all Xaa locations
  Clone ID: PAT_MRT3847_105320C.1.pep
MTNFPLINLEKLSGEERNDTMEKIKDACENWGFFELVNHGIPHDILDTVERLTKEHYRKCMEERFKELVASKGLDAVQTEVKDMDWESTFHLRHLPESNISEIPDLIDEYRKVMKDFALRLEKLAEQLLDLLCENLGLEKGYLKKAFYGSRXPTFGPKVANYPPCPNPDLVKGLRPHTDAGGIVLLFQDDKVSGLQLLKDGQWVDVPPMRHSIVVNIGDQLEVITNGKYRSVEHRVIAQTDGTRMSIASFYNPGSDAVIYPAPELLEKEAEEKSQLYPKFVFEDYMKLYAKLKFQAKEPRFEAFKASNFGPIATA

SEQ ID NO: 148726 - protein, 281 aa, Glycine max
  unsure (1)..(281): unsure at all Xaa locations
  Clone ID: PAT_MRT3847_105321C.1.pep
SDFPFRSTRPDNCSSENPFPGGPCGXPCHLDCALKHDGSGIAKDGEHPKLDGGFYCVSCGKVNDLLGCWRKQLMVAKDTRRVDILCYRVSLSQRLLQGTEVYEELYKIVDEAVKKLEPEVGPLIGSPVKIGRGIVNRLSSGPEVQKLCGFALESLDSLLSKRILPSSPKPTTQDAHLLAPNMVRFEDVTATTLTIILGSEEPSGEIIAGYTLWHRKVDDVDYPTDPTCTSLLPNRGFRVSGLIPGTEYSFKVVSNDLRESGMWRSSILTEHGEERVPNCSA

SEQ ID NO: 148727 - protein, 165 aa, Glycine max
  Clone ID: PAT_MRT3847_105322C.1.pep
YGCEKTTEGGIKNGSESKITSVLKRCPQFKLLKHAGSLNYKRLLPFILDTMKDDSCNSCPQQQSGLQACDLNNGSSSPKSQIPEFQSSHDSCKVIQLQDEQVVLNGLCKPESSTDPSISVHGIDLPITTLAPMINEVTTREATPDSSKSLSVFSEVKGNNSFLMS

SEQ ID NO: 148728 - protein, 1065 aa, Glycine max
  Clone ID: PAT_MRT3847_105323C.1.pep
MIEIGDEFRAATLQLGGVEGVVGGGVTLVVTVEEGEKGEAREDLALARSEAMDTVPSSRQRSHSSGTLTRARSQLYHHRNRSGQLRFDPVPSLDEPCAELLGFRRTNCKKAKRDDGDLPRRLTKDLRARRVYSPPQSTNSGLIESAFPKGNAEAIGSPDLGLFFEARGFDRGNADLFEESGGDCSEKFDGLDGATTLPDAEICGGSNSKVNKDVEKLDAEVPVKDTPSTGNGSSLKSKSVGVLRPCFQGKLFKAPGSVNYRRLFPFQKDTVRDDSDTPKLGFCQKDQEGRQGFQLPLSPQSEEESKQELKTDATADYGVKDATSDLPDDGLKQLSSHMNNLDCVEASTSQEFGVLNEECIQTTPPDADIYVNSEVNVKPMDFTRSTHENAGQGFCLKADKVKDSLKSKSVPRQLLHRKLFKTPGSVSYKRLLPFLMDLTKDDSDRSKFDHQTHHQEDEAKRFQLPLSSESEEASIDEHKTNSSPMHGTVESNGLENYVLVNPSNELSHGNQPKLTPSQDFPEFPMQLDAKEVVRGDLSAPSVNEHTENFAIASKDECLSASELNPCSVMVDGFHSAKNVAHNDGVKEVQNTISRQHDSDSPPKDQYMLYLKGDVSGLTSVHRSSKEKGFTIAYDESKQFVNLKERESVSRFPPECQTLSQLDLNVLDAEENVTSLNHVQVSNDILGAPSENITSEKSDMAGHSGDKAGSVQNGIVLCSRMPSKGSDNKNASGIKNGSESKITSVLKRCPQFKLLKHAGSLNYKRLLPFILDTMKDDSCASVNDHHPKLAKSMDQTPLPISTSNLHLTPVNDSNGCVPVEHFAGNSCPQQQSGLQACDLNNDSSSPKSQIPEFQSSHDSCKVIQLQDEQVVLNGLCKPESSTDPSISVHGIDLPITTLAPMINEVTTREATPDSSKSLSVFSEVKGNNSFLMSSNEKLPETHECSQSLSQLQVVEQLRVPAVERAFEFSKNQLLDAEEVAHNLMKELSHLRNMLESSADSVNNNPVFGGSQVKEACRKACAAEELAKNRLSQMHDDLNIHCRITSLQPPTVTFAVHVEKEVIQPGG

SEQ ID NO: 148729 - protein, 165 aa, Glycine max
  unsure (1)..(165): unsure at all Xaa locations
  Clone ID: PAT_MRT3847_105324C.1.pep
YGCEKTTEGLSQTSLEDLCRSHLNALLASIAETEKQTEMATRVSAWKXKIEDNLEEQDLHPPFDIQDYGERILDKFSLLSLEASSSGVLSFSDLVKGQNKYDVAXRSFSSLLQLVNNGDVALERNGVDGSVCYSSVNPFHVKLLKQKSKEREGVQLRLPKKESKV

SEQ ID NO: 148730 - protein, 65 aa, Glycine max
  Clone ID: PAT_MRT3847_105325C.1.pep
GDSHTEEAKATWWLSRLIGRTKKVTIDWPYPFVEGRLFVLTVSAGMEGYHVSVDGRHVTSFPYRR

SEQ ID NO: 148731 - protein, 185 aa, Glycine max
  unsure (1)..(185): unsure at all Xaa locations
  Clone ID: PAT_MRT3847_105326C.1.pep
KKYKAFKPLNLPDRQWPNKTIEKPPRWLSTDLRDGNQSLVDPMDGEQKWMYFQMLTRLGYKEIEVSFPSASQTDFDFTQRLVQTPGIVPDDVWLQVLSPCRKELIRRTVDSLKGAKKAILHLYLATSPCFQQIVFNMNDEETIALAVECTKYARSITKDDPEQAGTQWHYEFSPETFSDXEPEFA

SEQ ID NO: 148732 - protein, 153 aa, Glycine max
  Clone ID: PAT_MRT3847_105327C.1.pep
MNTQTTSPVIKEEEEKEEGTKEVVQEEEEASHPYAFHVSGPRNLANLNWRDLISSSWKDANYKRTVIACFIQAVYLLELDRQENRTQENALAPNWWIPFKYKLTQTLIDERDGSIFGAILEWDRSAAMADLVLLRPSGAPKAVLALRGTLLIS

SEQ ID NO: 148733 - protein, 43 aa, Glycine max
  Clone ID: PAT_MRT3847_105328C.1.pep
PFYIFNPSFQIFIATIFVESYSTISASSWEPLFYDVKIELFYL

SEQ ID NO: 148734 - protein, 47 aa, Glycine max
  Clone ID: PAT_MRT3847_105329C.1.pep
KTRMTPFTCSLEKISDSSVVVIPRYFHHHGFEVVVEDESVYVWVGVW

SEQ ID NO: 148735 - protein, 189 aa, Glycine max
  unsure (1)..(189): unsure at all Xaa locations
  Clone ID: PAT_MRT3847_10532C.1.pep
PPPPPPPPPPLLPPPPPXPPPPPXPPPPQHSPPPPPPHSPPPPPPSPPPPVYPYLSPPPPPPVPPPPPPVYSPPPPPPSPPPCIEPPPPPPPCIEPPPPPPSPPPCEEHSPPPPSPHPAPYHPPPSPSPPPPPVQYNSPPPPSPPPPTPVYHYNSPPPPSFPPPTPVYEGPLPPVIGVSYASPPPPPFY

SEQ ID NO: 148736 - protein, 363 aa, Glycine max
  Clone ID: PAT_MRT3847_105330C.1.pep
MALLHKLAPFTSLYTNTPHSPPPRRHVIISFSVSPFTEKHSTERYQRDQWVYQSTTQEGQPQTTPFPPLPCDSASLRDDDIALQLPELKKLLQVLREKRECINGEGCEPGNVFLVGTGPGDPELLTLKAVRVIKSADLLLYDRLVSNDVLDLVGPGARLLYVGKTAGYHSRTQEEIHELLLSFAEAGATVVRLKGGDPLVFGRGGEEMDFLQQQGIQVKVIPGITAASPRVGELGIPLTHRGIANSVRFLTGHSRKGGSDPLFVSENAADPDSTLVVYMGLATFPSLAQKLMHHGLSPQTPAAAIERGTTLHQRTVFAELKDLHEKITSAQLVSPTLIIIGKVVELSPFWPIPTKEESCLMQA

SEQ ID NO: 148737 - protein, 59 aa, Glycine max
  Clone ID: PAT_MRT3847_105331C.1.pep
VPVSTFLSDPLLQFDSKYVSFTLFYRIILIFTCLYSVVMKPFLLFPLMGCIYWVHTPSL

SEQ ID NO: 148738 - protein, 43 aa, Glycine max
  Clone ID: PAT_MRT3847_105332C.1.pep
IKLNSYNIGSYINCQSKSTESSVTSVNPSNNHNISQVTETTFQ

SEQ ID NO: 148739 - protein, 79 aa, Glycine max
  Clone ID: PAT_MRT3847_105333C.1.pep
ISGNAESLGRVLPESDTSSRATKGPGPLNCENPRKTSQLAAPAFKWHQIFNKIRSSGRGPRHGGAPYKGVSPFIGPRAI

SEQ ID NO: 148740 - protein, 79 aa, Glycine max
  Clone ID: PAT_MRT3847_105334C.1.pep
QRNSDSNTNVSSTMSDSRGSENQGSLGDASESETDYGTWSHDQIGSRNAHGDHNGSSREQSPDLGEVERERVRQIVQGW

SEQ ID NO: 148741 - protein, 160 aa, Glycine max
  unsure (1)..(160): unsure at all Xaa locations
  Clone ID: PAT_MRT3847_105335C.1.pep
PGRNFGGPGSPPRTPAPDHAAVTPQARHAPKPKGQSCGGGERGGDRGXDGRVYDPVGCGGGRPPEQXRXPNRPAEEGGGPPPXLGRLGKEGRSRSQQQSDLHSLPIKEHQTSDTPAGPTLKDEVTKITPGQKRTRAXQRTRYKACGDGGDHNGHRGARRE

SEQ ID NO: 148742 - protein, 31 aa, Glycine max
  unsure (1)..(31): unsure at all Xaa locations
  Clone ID: PAT_MRT3847_105336C.1.pep
MLXWTGDVRIRKVVLEXNHXRQRXEXEIEXT

SEQ ID NO: 148743 - protein, 158 aa, Glycine max
  Clone ID: PAT_MRT3847_105337C.1.pep
EGSLIGLNQNFYSMIDQYKHQQLRIGLVSPQQISAWAKKILPNGEIVGEVTKPYTFHYKTNKPEKDGLFCERIFGPIKSGICACGNYRVIRDKKDDPKFCEQCGVEFIDSRIRRYQMGYIKLACLVTHVWYLKRLPSYIANLLDKSLKELESLVYCDV

SEQ ID NO: 148744 - protein, 80 aa, Glycine max
  unsure (1)..(80): unsure at all Xaa locations
  Clone ID: PAT_MRT3847_105338C.1.pep
GTKGLIIHNKHALLYICNNQXLMKNLKNDLVKKSPLPISPYAIFYAGTSNLLCKSEDKAFIFDLLQXIVLGDLHTPFIKY

SEQ ID NO: 148745 - protein, 134 aa, Glycine max
  Clone ID: PAT_MRT3847_105339C.1.pep
GFSVWVARRPPGYAFIEFDDRRDALDAIQALDGKNGWRVELSHNSKGGGRGGRGRGGEGTKCYECGEPGHFARECRLRIGSRGLGSGRRRSPSPYRRRRSPSYGYDRRSYSPRGRRSPRRRSISLPRGRSYSRM

SEQ ID NO: 148746 - protein, 91 aa, Glycine max
  Clone ID: PAT_MRT3847_10533C.1.pep
MASSQGWTPKQNKRFENALAIFDKDTPDRWHTVARAVGGKTVEEVKRHYEKLVEDVKKIEEGHVPLPNYRSAARGYGYMDEETRMKALSLQ

SEQ ID NO: 148747 - protein, 177 aa, Glycine max
  Clone ID: PAT_MRT3847_105340C.1.pep
MSRVYVGNLDPRVSERDLEDEFRIYGVLRSVWVARRPPGYAFIEFDDRRDALDAIQPVDGKNGWRVELSHNSKGGGRGGRGRGGEDTKCYECGEPGHFARECRLRIGSRGLGSGRRRSPSPYRRRRSPSYGYDRRSYSPRGRRSPRRRSISLPRGRSYSRSPPYRPSRHDSPYANAM

SEQ ID NO: 148748 - protein, 97 aa, Glycine max
  Clone ID: PAT_MRT3847_105341C.1.pep
GREVVVGPRDYGAHRDLDRAFVGKKRVFLVPDITGTLILLAVYMVLLGHGLEHLGVRNRRRLQGCQVTTYKPHSVYIVRRLLLKIMVGFSSVVNQVM

SEQ ID NO: 148749 - protein, 173 aa, Glycine max
  unsure (1)..(173): unsure at all Xaa locations
  Clone ID: PAT_MRT3847_105342C.1.pep
MSRVYVGNLDPRVSERDLEDEFRIYGVLRSVWVARRPPGYAFIEFDDRRDALDAIQALDGKNGWRVELSHNSKGGGRGGRGRGGEDTKCYECGEPGHFARECRLRIGSRGLGSGRRRSPSPYRRRTSPSYGXSYSPRGRRSPRRRSISPPWGRNYSRSPSYRPLRDFPYANAD

SEQ ID NO: 148750 - protein, 85 aa, Glycine max
  unsure (1)..(85): unsure at all Xaa locations
  Clone ID: PAT_MRT3847_105343C.1.pep
MLVGAVWCSSEDELNSVMYTSQXAQTHETSPLTEEKQIVCEIKXFEGTRENVIANAAMXSKLKESIGQKDTIKXQVKLIGGGLDG

SEQ ID NO: 148751 - protein, 58 aa, Glycine max
  Clone ID: PAT_MRT3847_105344C.1.pep
IGHFKRLTEHQVLKWISLKKRDTICAHLDPSMLDSDHNHQSNCFPKTLWLQKKFRSFW

SEQ ID NO: 148752 - protein, 94 aa, Glycine max
  Clone ID: PAT_MRT3847_105345C.1.pep
SKPWSCFFCLYANSSTRCDPLTGDYHTSLRSCLSLGRTALKGFRRNRFKYLLIRSSDNELDFSPTIAGTTSYILVVEGTTHPPQPFLARERRSC

SEQ ID NO: 148753 - protein, 56 aa, Glycine max
  Clone ID: PAT_MRT3847_105346C.1.pep
KHLNMDSKKNVKLRKLQEIHIEEENNQYKESEVRKIFGSRLIIQKYHLWGSRGLKR

SEQ ID NO: 148754 - protein, 167 aa, Glycine max
  Clone ID: PAT_MRT3847_105347C.1.pep
NMEGCLVTAACLDSLAELPALSNLNLNRCNLSDNGCKKISRLENLKVLNLGFNVITDACLVHLKGLTKLESLNLDSCKIGDEGLVNLAGLEQLNCLELSDTEVGSNGLHHLSGLSSLQKINLSFTMISDSSLRKLSGLSSLKSLNLDAYQITDAGLANLTSLTGLTD

SEQ ID NO: 148755 - protein, 57 aa, Glycine max
  Clone ID: PAT_MRT3847_105348C.1.pep
PTRTRDSHGPPLPLPFTTHSTLILGSDKHREAQSTAENELPSIYMSDYYHSLNLEII

SEQ ID NO: 148756 - protein, 54 aa, Glycine max
  Clone ID: PAT_MRT3847_105349C.1.pep
GIISGQSLEKYQAGGAAENNCFENKTFGMDHNRSRIVGSSTPRVDKEEQWRFLG

SEQ ID NO: 148757 - protein, 91 aa, Glycine max
  unsure (1)..(91): unsure at all Xaa locations
  Clone ID: PAT_MRT3847_10534C.1.pep
LNXXSXXFKMRXXKIKFTTIAAIAFSVISSLLLLRCSLPPVANIILPSLQLQCGYGFSDKHLYLGCERLNDDIRTREKTTTGTFHKYEKRK

SEQ ID NO: 148758 - protein, 159 aa, Glycine max
  Clone ID: PAT_MRT3847_105350C.1.pep
MGGACSRKQERDNKDSPTRGLSRRYCKSGTLKWWTSSFSYPSVDFHLRKGECPPLLDLCIQKINEDIDKYNTFSMLPRDISQLIFNNLVYSRRLTSASLEAFRDCALQDLYLGEYDGVNDNWMGVISSQGSSLLSVDLSGSEATDFGLTYPKDWKVSFP

SEQ ID NO: 148759 - protein, 75 aa, Glycine max
  unsure (1)..(75): unsure at all Xaa locations
  Clone ID: PAT_MRT3847_105351C.1.pep
SVCVLTRAKDLEHRSCKLQFSNIYLKVRKLLKYVAHRICXLGSFCLFRGQLVEVFFLLLLCGSRAQTHVVRVGSK

SEQ ID NO: 148760 - protein, 590 aa, Glycine max
  unsure (1)..(590): unsure at all Xaa locations
  Clone ID: PAT_MRT3847_105352C.1.pep
MGGACSRKQEWDNEDSLIRGLPRRYCKCGSLKWWTSSFSYPSVDFHLRKGECPSLLDLCIQKISEDIDKYNTFSMLPRDISQLIFNNLVYSRCLTSASLEAFRDCALQDLYLGEYDGVNDNWMGVISSQGSSLLSVDLSGSDVTDFGLTYLKDCESLISLNLNYCDQISDRXLNXINGLSNLTGLSFRRNDSISAQGMSTFSGLVNLVKLDLERCPGNFGGFRPVRGLRYLESLIFKYCYCIICHDMKRRLLHASRKSLQISSSDVTDFGISFLKVLQKLALLNLEGCLVTAACLDSLAELPALSNLNLNRCNLSDNGCKKISRLENLKVLNLGFNVITDACLVHLKGLTKLESLNLDSCKIGDEGLVNLAGLFLFLFFPNXMEILEQLNCLELSDTEVGSNGLHHLSGLSSLQKINLSFTMISDSSLRKLSGLSSLKSLNLDAYQITDAGLANLTSLTGLTDLDLFGARITDFGTNYLKKFKNLRSLEICGGVLTDAGVKNIKELSSLVCLNLSQNSNLTDKTLELISGLTGLVSLNVSNSRITNAGLQHLKTLKNLRSLTLESCKVTANDIKKLKSIYLPNLVSFRPG

SEQ ID NO: 148761 - protein, 89 aa, Glycine max
  unsure (1)..(89): unsure at all Xaa locations
  Clone ID: PAT_MRT3847_105353C.1.pep
SEGDLLVNGAFCTXTGVGASSRYSRAWSLRASPSSPVGSITRGVGAXLSCKKGSPCCQTIKPLFFWISQSFPKKKDAHKGEGYIYIVDL

SEQ ID NO: 148762 - protein, 386 aa, Glycine max
  Clone ID: PAT_MRT3847_105354C.1.pep
MVSVAEIRQAQRAEGPATILAIGTANPPNCVDQSTYPDYYFRITNSEHMTELKEKFQRMCDKSMIKRRYMYLNEEILKENPNMCAYMAPSLDARQDMVVVEVPKLGKEAAVKAIKEWGQPKSKITHLIFCTTSGVDMPGADYQLTKQLGLRPYVKRYMMYQQGCFAGGTVLRLAKDLAENNKGARVLVVCSEITAVTFRGPSDTHLDSLVGQALFGDGAAAVIVGSDPIPQVEKPLYELVWTAQTIAPDSEGAIDGHLREVGLTFHLLKDVPGIVSKNIDKALFEAFNPLNISDYNSIFWIAHPGGPAILDQVEQKLGLKPEKMKATRDVLSEYGNMSSACVLFILDEMRRKSAENGHKTTGEGLEWGVLFGFGPGLTLFKLAWGL

SEQ ID NO: 148763 - protein, 384 aa, Glycine max
  unsure (1)..(384): unsure at all Xaa locations
  Clone ID: PAT_MRT3847_105355C.1.pep
PRVRAEGPATILAIGTANPPNRVDQSTYPDYYFRITNSDHMTELKEKFQRMCDKSMIKISSFRYIYLVLILKENPNMCAYMAPSLDARQDMVVVEVPKLGKEAAVKAIKEWGQPKSKITHLIFCTTSGVDMPGADYQLTKQLGLRPYVKRYMMYQQGCFAGGTVLRLAKDLAENNKGARVLVVCSEIIVVTFRGPKXDLTLDSLVGQALFGDGAAAVIVGSDPIPQVEKPLYELVWTAQTIAPDSEGAIDGHLREVGLTFHLLKDVPGIVSKNIDKALFEAFNPLNISDYNSIFWIAHPGGPAILDQVEQKLGLKPEKMKATRDVLSEYGNMSSACVLFILDEMRRKSAENGHKTTGEGLEWGVLFGFGPGLTIETVVLHSVAI

SEQ ID NO: 148764 - protein, 113 aa, Glycine max
  unsure (1)..(113): unsure at all Xaa locations
  Clone ID: PAT_MRT3847_105356C.1.pep
MVCFLRHGFYRGGGLIAGGGSFTRYNTTVADTTSMMQIAVYFFKTSHNTTGGWARAPNETFTCGDGGITKQVLATYXAGDDAPCAYSYKYXGRAPIPLTHNYISLHAKIALGP

SEQ ID NO: 148765 - protein, 45 aa, Glycine max
  Clone ID: PAT_MRT3847_105357C.1.pep
MISDIPGHLYINITDFYSSRQRSPHHTSPTESLFFTALINTNSSP

SEQ ID NO: 148766 - protein, 224 aa, Glycine max
  unsure (1)..(224): unsure at all Xaa locations
  Clone ID: PAT_MRT3847_105358C.1.pep
MKKQKLSEPQNDTTNPFEVLSEELMFVILDFLQTTSLDKKSFSLTCKLFYSVEAKHRRLLRPLRAEHLPALAARYPNVTELDLSLCPRVGDGALGLVAGAYAATLRRXDLSRSRRFTATGLLSLGARCEHLGGLALSNATELRDAGVAAVARARNLRKLWLARCKMVTDMGIGCIAVGCRKLKLLCLKWCLGIGDLGVDLVAIKCKELTTLDLSYLPITENVYR

SEQ ID NO: 148767 - protein, 335 aa, Glycine max
  Clone ID: PAT_MRT3847_105359C.1.pep
QRMKWTDNVVRLLITVVSCVGDDGTIGGMDCHKRKSGVLQKKGKWNTVSKIMIGKGCHVSPQQCEDKFNDLNKRYKRLNDILGRGTCCQVVENPVLMDSMPNLSAKMKDDVRKILSSKHLFYKEMCAYHNGQRIPNSHELDLQGYSLEHGRDSRDNNGSEDEDEDNNDSEDDESDDEININAHEDGGRMQQLCDRNKLSEEDVHFGPQTSRMDKFEVEMARVFQDPTKSLHEQREWIKIQMLQLQEQNISYQAQALELEKQRLKWLRYCSKKDRELEKLRLENKRMKLENERRILKLEPIRLEADFSTSEMSLDPASLGINRPQGREHISLGRQQ

SEQ ID NO: 148768 - protein, 32 aa, Glycine max
  Clone ID: PAT_MRT3847_10535C.1.pep
QAAAQSRLRHQLLPQQLLHSKKTQIELSPPIV

SEQ ID NO: 148769 - protein, 107 aa, Glycine max
  Clone ID: PAT_MRT3847_105360C.1.pep
LESGFTKTLVAPNGLSVYSLLNLLPSKKQFSLTVRAMQSVRPTYQAIQPINGDPFIGSLETPVTFSPLIAWYLSNLPAYRTALSLLLRGIEVSLSHGYLLEGPFVKG

SEQ ID NO: 148770 - protein, 50 aa, Glycine max
  Clone ID: PAT_MRT3847_105361C.1.pep
KESCQRKLKINHDNQAFSNFHAVRYQLLLCPKPECFSLYIMEFSHEIRER

SEQ ID NO: 148771 - protein, 57 aa, Glycine max
  Clone ID: PAT_MRT3847_105362C.1.pep
HPACTRTHACSGERPLVLGRSCCALRRCPGLLLRPACRCSGVVLAPFCSGCWWTVPA

SEQ ID NO: 148772 - protein, 84 aa, Glycine max
  unsure (1)..(84): unsure at all Xaa locations
  Clone ID: PAT_MRT3847_105363C.1.pep
KKPVMSEINVARLVKLDEPLRTRQGRQAYSGPDRRPGQGRGLLLVPNSYNLVTGKAKLPIPELLXSXDWTWXAXSRXSGTHVPX

SEQ ID NO: 148773 - protein, 80 aa, Glycine max
  Clone ID: PAT_MRT3847_105364C.1.pep
KQALTYFLFKQTFFSEGRHTFKCMSVVLNRNICLFRNIYLLILVQDKELLRDLNSNRLFFSAQYKPALGKTLTRIILLRE

SEQ ID NO: 148774 - protein, 45 aa, Glycine max
  Clone ID: PAT_MRT3847_105365C.1.pep
KKKHFNLNPPRGGAKQINPPPPNPPDIPHLLWGPQQIITPPHIIN

SEQ ID NO: 148775 - protein, 73 aa, Glycine max
  Clone ID: PAT_MRT3847_105366C.1.pep
LLVICWLWLCWVMFFYHYGCDYSEQKNKERKEMFIRMLQFLNDFTYSLLEILLTSHIDKIVYIWGDIFVCILV

SEQ ID NO: 148776 - protein, 53 aa, Glycine max
  Clone ID: PAT_MRT3847_105367C.1.pep
LFFLILIQRLQCVKYLDNFIILSNLIRQEKILTRVKDIYDLEKKYYNYSHIFT

SEQ ID NO: 148777 - protein, 55 aa, Glycine max
  Clone ID: PAT_MRT3847_105368C.1.pep
HGVFFLGILQFPTLFNRHRIFYFNKKEKFSLPKTQKDRGVNQLGLGYDPRQKPIK

SEQ ID NO: 148778 - protein, 50 aa, Glycine max
  Clone ID: PAT_MRT3847_105369C.1.pep
SFSHFPPELSISARSLEQSQINHTSVDAFLGRERARDLDGDVNHNVRHEK

SEQ ID NO: 148779 - protein, 59 aa, Glycine max
  Clone ID: PAT_MRT3847_10536C.1.pep
VVCFICNVSCSIKKSPYASYESLGPAMYPTPCVCQGIVSVNDFHLGPYDPLFLKPGLWP

SEQ ID NO: 148780 - protein, 77 aa, Glycine max
  Clone ID: PAT_MRT3847_105370C.1.pep
RHIPAIYIFIFHLKLQIGRPVVFSLAADGEAGVRKVLQMLRDELELTMALSGCRSLKEITRDHVVTEWDRPKFSPKL

SEQ ID NO: 148781 - protein, 709 aa, Glycine max
  unsure (1)..(709): unsure at all Xaa locations
  Clone ID: PAT_MRT3847_105371C.1.pep
MRKRKKVPSLLQNLKSYEEKQAHIETLEKELDALFRYYQEAMAQKVRVELSQCGGSRNVVVAALMEESDLPLSKLVDEIHDKLNEEVSNGAIVLAEPVTYATVKSSALFVGQRVSYGVPNADADVLEDHAESCLWCWETRDLKLMPKSVRGELSVRRTCRRRIHERIMAISEMIAALKKLESEPDYNQGLIKASAKLNKAFPEADIRLLVDGLLQKNSEDMDXERASQENKLLIKQLERNRKEAEKEKEKESMHNELQRETLLNESNLKLSQDEARNDEKASEKKKQQKEQVDEAEKDQRRKEKAEAELKKKRSLQKQASIMERFLKRSKNSPSPSEKDKVSTKSTASDLLRCKNKSLFESATLSMDCTLASSSDVMLEDIRKTHFSSWRSLGQLIRLNRKQRWGLRQKPRTKVFKELKLSAIKTAVHDVELDMEKHVNRLGECSSDISSCPMNEDSSPPDTKMYSRGRQLLQFDKSHRPAFYGVWPAKSHVVGARHPLRKDPSLDYEVSSDEEWEEEEPGESLSDCDKDEEECQEECTKSDEESEDGFFVPDGYLSEDEGAQVDRMEIDDDIDGADSSPSCKNDIESEEFCALLRQQKYLNNLTEHALRKNQPLIISNLINDKDLSSDHNISGTPKLEQMCLQALSMYVIPGISCIEIYVDKMQDEDQEVCLSTGKSGASPISGVAVIPDSDLTIIVTTIQRCSQGMN

SEQ ID NO: 148782 - protein, 62 aa, Glycine max
  Clone ID: PAT_MRT3847_105372C.1.pep
IRLERLELEPFSEMIAALKKLESEPDYNQGLIKASAKLNKAFPEADIRLLVDGLLQKNSEDM

SEQ ID NO: 148783 - protein, 74 aa, Glycine max
  Clone ID: PAT_MRT3847_105373C.1.pep
QGGFLNPDFKAKFTPGGAICPWDTPGGSPPPGAFMGLGWGPGGIKVGHWVFEKDLPGTIVVFFRKLKLVCAPLG

SEQ ID NO: 148784 - protein, 56 aa, Glycine max
  Clone ID: PAT_MRT3847_105374C.1.pep
TARAARAARVRREKTTEGDTNKLELRVRYLISLISSQIRLRRIKKRRWGTDVPVNQ

SEQ ID NO: 148785 - protein, 147 aa, Glycine max
  unsure (1)..(147): unsure at all Xaa locations
  Clone ID: PAT_MRT3847_105375C.1.pep
PKLNHLLCLFILILASGHAQATSFRYCADVNYAVKVSGIQITPDPVVRSRPATFKISAATGETIYGGKWLTTVAYFGFVVHTEIHDFCEEISCPVATGSFVASHTQKLPAFAPPGTYTVEMTLKNEKEXPLTCISFKFKNRFWVSCA

SEQ ID NO: 148786 - protein, 123 aa, Glycine max
  Clone ID: PAT_MRT3847_105376C.1.pep
FIRNFQASTPAETSSTIPQVDHPCLQYKTKPSLNSTKVSNSSSKVFSNHPCDLSLSSLHPNEKHSSQSLSHTRIAEPSNLTLTKQPNHMKADIGASRDNNMVDGASLVFDKLVCGKPLPQIGR

SEQ ID NO: 148787 - protein, 261 aa, Glycine max
  Clone ID: PAT_MRT3847_105377C.1.pep
FGSRYLPSATPGPLVKYREEELKILRGDGTGERKEHERIYDYDVYNDLGNPDEDVKLARPVLGGSSTYPYPRRVRTGRKATKKDPKSERPASELYMPRDEKFGHLKSSDFLTYGIKSLSQKLLPSLENVFDSDLTWNEFDSFEEVRDLYEGGIKVPTGVLSDISPIPIFKEIFRTDGESVLQFPPPHVVQVTKSAWMTDDEFAREMIAGVNPNVIRLLKEFPPQSKLDPSLYGDQSSTITKEHLEINMDGVTVEEALNGQR

SEQ ID NO: 148788 - protein, 45 aa, Glycine max
  Clone ID: PAT_MRT3847_105378C.1.pep
QGIIWMSYTYKTFSPNIIISLWLSYKFSGIHKPQKIKVKARLQEI

SEQ ID NO: 148789 - protein, 223 aa, Glycine max
  Clone ID: PAT_MRT3847_105379C.1.pep
EIWDAIKSWVQEYVSLYYPTDLAIQQDTELQAWWKEVVEKGHGDLKDKPWWPKMQTRQELIQSCSTIIWIASALHAAVNFGQYPYGGFILNRPTLSRRWIPEPGTKEYDEMVESPQTAYLRTITPKRQTIIDLTVIEILSRHASDEIYLGERDNPNWTSDSKALEAFKKFGSKLAEIEGKITARNKDSNKKNRYGPVQLPYTLLLPTSEEGLTFRGIPNSISI

SEQ ID NO: 148790 - protein, 62 aa, Glycine max
  unsure (1)..(62): unsure at all Xaa locations
  Clone ID: PAT_MRT3847_10537C.1.pep
XXXHAYVSSEXGSSSTGXXXXYXXSTTLPXXGGXXXSDXWDXXXEQLVIXXNVXXYFHIISX

SEQ ID NO: 148791 - protein, 542 aa, Glycine max
  Clone ID: PAT_MRT3847_105380C.1.pep
GSRDVLSDISPIPVFKEIFRSDGESVLQFPPPHVVQVSKSAWMTDDEFAREMIAGVNPNVIRLLKEIPPQSKLDPTLYGDQSSTISKEHLEINMGGVTVEEALNGQRLFILDYHDAFMPYLTRINALPTAKAYATRTILFLKDDGTLKPLAIELSKPHPSGDNLGAESKVVLPADQGVESTIWLLAKAHVIVNDSGYHQLMSHWLNTHAVTEPFIIATNRRLSVLHPIYKLLYPHYRDTININGLARNALINAGGIIEESFLPGRYSLEMSSAVYKNWVFTDQALPADLIKRGLAVEDPSAPHGLRLVIEDYPYAVDGLEIWDAIKTWVHEYVSLYYPTDDAIKKDSELQEWWKEAVEKGHGDLKDKPWWPKMQTRQELIQSCSTIIWIASALHAAVNFGQYPYGGFILNRPTLSRRWIPEPGTKEYDEMVKSPQTAYLRTITPKRQTIIDLTVIEILSRHASDEIYLGERDNPNWTSDSKALESFKKFGSKLAEIEGKITARNNDSNKKNRYGPVQLPYTLLLPTSEEGLTFRGIPNSISI

SEQ ID NO: 148792 - protein, 115 aa, Glycine max
  unsure (1)..(115): unsure at all Xaa locations
  Clone ID: PAT_MRT3847_105381C.1.pep
INAFDPFANKDRKDIKAPGLLQTQNVGPPLNSLTQGTKNGSDGLKQKLWDEFLADLXGDEDQKKNTITTGAANEQRPQDLPGVPGPDFTTEGLMPWAPKWWSILEAPPDVTKKKN

SEQ ID NO: 148793 - protein, 55 aa, Glycine max
  Clone ID: PAT_MRT3847_105382C.1.pep
MRLFDPWAEFFKIECTRNWSFLVGFSITVTLMTKLSLGLSDEEAKTSKFVQAHIM

SEQ ID NO: 148794 - protein, 74 aa, Glycine max
  Clone ID: PAT_MRT3847_105383C.1.pep
KEKEIKHKQPRNLRGLLASAVVPKGNPQGNHDGSSSSSSSSSQVLASWCWRKKTTLHGSTLPHFKHRATVTPMK

SEQ ID NO: 148795 - protein, 186 aa, Glycine max
  unsure (1)..(186): unsure at all Xaa locations
  Clone ID: PAT_MRT3847_105384C.1.pep
MLLSNSSPPFSFVSGITMSMTKGITPRDSLLLKPNPLSSLSSLHSLQHGNNTIRVPVTIRIQPERFCHGAPTVTNEVPQNADFPQHYSRKEKKPFPVPIVELRRAARERMKKMKDEPRKSMSAPKNGLLVKSLVLTAYNVYNTRITLINNLKKLLKVVPVHACGCNEIHVXPVGHPFELCKGTHEL

SEQ ID NO: 148796 - protein, 118 aa, Glycine max
  Clone ID: PAT_MRT3847_105385C.1.pep
ILIVTGTLIVLLPCWRQWSELIEDKGLGLSKRESLGVIPVVVLIVIPETNENGGLELLRSITHNTTKRDYFTAACTVLHQFNKYATQHYQPQPIVSISAQLQKHQKPHPVVSFFFFFL

SEQ ID NO: 148797 - protein, 146 aa, Glycine max
  Clone ID: PAT_MRT3847_105386C.1.pep
IHILTETNNNNKVFIYIGNSRVKTSQSVRHGNSRIRVPVTIRIQPERFCHRAPTVTNEVPQNADFPQHYSRKEKKPFPVPIVELRRAARERMKKMKDEPRKSMSAPKNGLLVKSLVLTAYNVYTPAITLINNLKKLLKVVPVHACG

SEQ ID NO: 148798 - protein, 98 aa, Glycine max
  Clone ID: PAT_MRT3847_105387C.1.pep
LAIGAYKYVSELWRKKQSDVMRFLQRVRYWEKQQGFTWQRTSVPQSTSISQGNLEEKQHPFSPPLPLISAVIILFLLHFLEYYFEDIGIWCFDFEIRV

SEQ ID NO: 148799 - protein, 135 aa, Glycine max
  Clone ID: PAT_MRT3847_105388C.1.pep
SSLLESAQAFPRPISPPSYTAFLCHLFWAALREPLSSSGRLRVLSGLFNRVPSGRVFVGRFSSGLVFLPPIFRSIVSLLPATFTAPLLGTPCRARVDSLLLVPIPGSVALAPAVSAGFPLGSAFLWWTNCCACVI

SEQ ID NO: 148800 - protein, 204 aa, Glycine max
  Clone ID: PAT_MRT3847_105389C.1.pep
MGAYKYVSELWRKKQSDVMRFLQRVRCWEYRQQPSIVRLTRSTRPDKARRLGFKAKQGYVIYRVRVRRGGRKRPVPKGIVYGKPTNQGVTQLKFQRSKRSVAEERAGRKLGGLRVLNSYWVNEDSTYKYFEVILVDVAHAAIRNDPRINWLANPVHKHRELRGLTSAGKSNRGLRGRGHLYHKARPSRRATWKRNNTLSLRRYR

SEQ ID NO: 148801 - protein, 113 aa, Glycine max
  unsure (1)..(113): unsure at all Xaa locations
  Clone ID: PAT_MRT3847_10538C.1.pep
IYKGFHYAISKTKKKIFFFEINKKGTKNLGKKKPKKNPKISKRXKPKKKKILKTTNQKKINKQKQRRSKKRKKRKRHHKSLKRTGSVGGPTLGLAFFSFAGPTETISGRHHFG

SEQ ID NO: 148802 - protein, 42 aa, Glycine max
  Clone ID: PAT_MRT3847_105390C.1.pep
PNSVIRSLLTHYGSGLLTTMRSPIYSRCTLPFHLITLYMLHN

SEQ ID NO: 148803 - protein, 204 aa, Glycine max; identical to SEQ ID NO: 148800
  Clone ID: PAT_MRT3847_105391C.1.pep

SEQ ID NO: 148804 - protein, 104 aa, Glycine max
  unsure (1)..(104): unsure at all Xaa locations
  Clone ID: PAT_MRT3847_105392C.1.pep
ESPHTKRPFCINNSSPRAITHRSRPTKGQVKYPNPEQAKNNTGGRNTRGHATSVLSGARTIPLTRXSFLLGGKSITWPQTSIYHKXEQNFPPVLVKVKPMACNI

SEQ ID NO: 148805 - protein, 86 aa, Glycine max
  Clone ID: PAT_MRT3847_105393C.1.pep
PCPARMGIQKIHRIKLLISSFTQKNHKKILMSSVWAGTDSALFKSIHDMKLNFEKVLFYVLQKSQLTLSFIMESSMRKESFTFQIN

SEQ ID NO: 148806 - protein, 141 aa, Glycine max
  Clone ID: PAT_MRT3847_105394C.1.pep
MASNSSTNNAGYPIKTIVVLVQENRSFDHMLGWMKSLDPKINGITGSESNPISTSNPNSNLVQFSDQSVYVDPDPGHSIQDIYEQIFGEPWSEASTAKKLPPTMQGFAQNAGRQAVPKNATATMMETVMNGFKPDLIPVYK

SEQ ID NO: 148807 - protein, 148 aa, Glycine max
  unsure (1)..(148): unsure at all Xaa locations
  Clone ID: PAT_MRT3847_105395C.1.pep
GYVIYRVRVKRGGRKRPVPKGIVYGKPTNQGVTQLKFQRSKMSVAEERAGRKLGGLKVLNSYWVNEVYSTYKYFEVILVDVAHAAIRNDPRINWLANPVHKHRXLRGLTSAGKSNRGLRGRXHLYHKARASRMATWKINNTLSLRRYR

SEQ ID NO: 148808 - protein, 204 aa, Glycine max
  unsure (1)..(204): unsure at all Xaa locations
  Clone ID: PAT_MRT3847_105396C.1.pep
MGAYKYVSELWRKKQSDVMRFLQRVRCWEYRQQPSIVRLTRSTRPDKARRLGFKAKQGYVXYRVRVRRGGRKRPXPKGIVYGKPTNQGVTQLKFQRSKRSVAEERAGRKLGGLRVLNSYWVNELVMVFQDSTYKYFEVILVDVAHAAIRNDPRINWLANPVHKHRELRGLTSAGKSNRGLRGRGHLYHKARPSRRATWKRNNTL

SEQ ID NO: 148809 - protein, 34 aa, Glycine max
  Clone ID: PAT_MRT3847_105397C.1.pep
RAKACELMLFQLVSRDFVKCSISQDKAPARIYFL

SEQ ID NO: 148810 - protein, 171 aa, Glycine max
  Clone ID: PAT_MRT3847_105398C.1.pep
LAIGAYKYVSELWRKKQSDVMRFLQRVRCWEYRQQPSIVRLTRSTRPDKARRLGFKAKQGYVIYRVRVRRGGRKRPVPKGIVYGKPTNQGVTQLKFQRSKRSIAEERAGRKLGGLRVLNSYWVNEDSTYKYFEVILVDGAHAAIKNDPRINWLANPLHQHRELAWPSSGGK

SEQ ID NO: 148811 - protein, 43 aa, Glycine max
  unsure (1)..(43): unsure at all Xaa locations
  Clone ID: PAT_MRT3847_105399C.1.pep
EDCDFGGXPIQPNQVKAYLRGFCFDIGKLKNSYMGRSVFNSTI

SEQ ID NO: 148812 - protein, 55 aa, Glycine max
  unsure (1)..(55): unsure at all Xaa locations
  Clone ID: PAT_MRT3847_10539C.1.pep
NPPFNTLNFFPLSFSILLRKMMRMRISFLILILGXAFSLEVILFRLXRISVVDLR

SEQ ID NO: 148813 - protein, 85 aa, Glycine max
  Clone ID: PAT_MRT3847_1053C.1.pep
LYLHSLHHLPRCPILLYGLLQYELLLQSLFDKLFHYMLLPNNKKIYQLLMPRASKTNCPLKFRRWTRLRTLHQNQTMRSLEHLRN

SEQ ID NO: 148814 - protein, 93 aa, Glycine max
  Clone ID: PAT_MRT3847_105400C.1.pep
MGENNTTTAINEPVKGGGHLTIKMGICWERGTVRAFFVIIKMEKRGSAAKQINWGKPGVFQSKSWKKTANEIKLSDTKKKVIHRKDGEVKMET

SEQ ID NO: 148815 - protein, 42 aa, Glycine max
  Clone ID: PAT_MRT3847_105401C.1.pep
GFLLHHHRDHVTSQPIHRLGLFGPRHRSYPACYQHTQIMPST

SEQ ID NO: 148816 - protein, 69 aa, Glycine max
  Clone ID: PAT_MRT3847_105402C.1.pep
VPLKKRFRIATLESLCKGLNMFLIPTNTPIFAFCPYNFFCFVLVPGFLNESTFGPSGRVGGRVGGRERR

SEQ ID NO: 148817 - protein, 97 aa, Glycine max
  unsure (1)..(97): unsure at all Xaa locations
  Clone ID: PAT_MRT3847_105403C.1.pep
VRARNHVTRAYRLRQLNQLITVSVLSTTTNGDLVHGKDLAMVKVNVASAAAGLTSSYPPTPSLESGLQTDRXLIVEYFGRMSYVAHNVNQPQEKDLL

SEQ ID NO: 148818 - protein, 115 aa, Glycine max
  Clone ID: PAT_MRT3847_105404C.1.pep
YISGTETEPVSGIAVQDDTAVGDRVAVVVAIMLVDSAKHPQQNHLRRSVFRYQRGQLGREVQCLYWPRRPQNCLCRNLCHRQRGHLLSFSGHGEQIQQSRHGFCALSHHRCRWCC

SEQ ID NO: 148819 - protein, 65 aa, Glycine max
  Clone ID: PAT_MRT3847_105405C.1.pep
QLKIRDIFGPELMKEDPHLEMGLFPPFKNAVSRLDDRPWRGPPIIPVMAMFKEIPAGSGVFFRPP

SEQ ID NO: 148820 - protein, 224 aa, Glycine max
  unsure (1)..(224): unsure at all Xaa locations
  Clone ID: PAT_MRT3847_105407C.1.pep
MAVAGCQKLLELSTKIVAVGRNYAAHAKELGNAVPKEPVLFLKPTSSYLKNGGTIQIPHNEGSLHHEVELAVVIAKKARDVSESSAMDYVAGYALALDMTARDLQXAAKSAGLPWSLAKGQDTFTPISSILPKTAVPNPDDLELWLKVDEEIRQKGSTKDMIFKIPFLISYISSVMTLFEGDVILTGTPPGVGPVKEGQTITAGVTGLVDVQFNVEKRARPVLS

SEQ ID NO: 148821 - protein, 38 aa, Glycine max
  Clone ID: PAT_MRT3847_105408C.1.pep
KTHKYFLSASSVPWNQLEFSEIKKGGKHNSKFLQKGSS

SEQ ID NO: 148822 - protein, 88 aa, Glycine max
  Clone ID: PAT_MRT3847_105409C.1.pep
MELKRPKENGFQRGWPPHRYLNFYNSLAQQKLVAFIQRLRRGRSFFFSGGRFGTLFEAGFGFGRDGTQVPYSFRSGGLSSNGPYAGPR

SEQ ID NO: 148823 - protein, 23 aa, Glycine max
  Clone ID: PAT_MRT3847_10540C.1.pep
DFSCGVMKGPCACVKETDSVYRN

SEQ ID NO: 148824 - protein, 92 aa, Glycine max
  Clone ID: PAT_MRT3847_105410C.1.pep
ECLNVIGPAGSSFQVILLDLHMPELDGFEVATRIPKFRSRNWPVIVALTASTDDLWERCMQIGMNGVIRKPVLLHGIASELRRIILQGNSVM

SEQ ID NO: 148825 - protein, 72 aa, Glycine max
  unsure (1)..(72): unsure at all Xaa locations
  Clone ID: PAT_MRT3847_105411C.1.pep
AQETFLFRSESGNEGYPDKLCEQISEAXKDFFFEKEPDRKVACDICTKSNRGMGFGEVXTKGKGDYEKIVRD

SEQ ID NO: 148826 - protein, 217 aa, Glycine max
  unsure (1)..(217): unsure at all Xaa locations
  Clone ID: PAT_MRT3847_105412C.1.pep
MGNLFGKNKKRDTESANNNKGRGGRIYTAVTTRGLPPHFPTQLPHSQPPPLLYPTLEPPPPPPPPPPPPALPQSMSKKPSFARVFAKQSSSVMNNNQSAAKKYALIRDNFSTLEQVTTALRKEGLESSNLILGIDFTKSNEWTGRISFNKRSLHXXGSTPNPYEKAISIIGKTLAPFDDDNLIPCFGFGDATTHDQEVFSFHSDHSPCHGFXGKFGL

SEQ ID NO: 148827 - protein, 208 aa, Glycine max
  unsure (1)..(208): unsure at all Xaa locations
  Clone ID: PAT_MRT3847_105413C.1.pep
DAWADAWAARLEGELRSPDLSVNSCLRSLLAEKELKIRQMERDMEDLRRQREXVQKGSNHCGPSSQVVRCLSFPEENESANGKRTPERREAVGRREAVGRQAMLKSLLASPDPSILVGEIRKLENRQLQLCEDANRALEVLHKDFATHKLGXNQETAETMSKVLSEIKDLVAAISTPEEIMAANKDDLIAKITQLKNQGITIASLERK

SEQ ID NO: 148828 - protein, 62 aa, Glycine max
  Clone ID: PAT_MRT3847_105414C.1.pep
RFNHVFSAMFALSTTLCCLVGLLHAKRELATKRACMLSWSCALRERSNSFNFFQSFFFQFLH

SEQ ID NO: 148829 - protein, 112 aa, Glycine max
  Clone ID: PAT_MRT3847_105415C.1.pep
IRNNIVQHQLSPQMNPPIYIAVYNVENQTSRLKQFFVLLGGSNSLKEIRQHTLQQTKFSLANIFVQETWGTKSITCSCSCLARRHNALVPMLAISCVHLFSDEPIPNMGKLS

SEQ ID NO: 148830 - protein, 125 aa, Glycine max
  unsure (1)..(125): unsure at all Xaa locations
  Clone ID: PAT_MRT3847_105416C.1.pep
DLLKRDFKQMSTGTRVAPEDKACVWAQLHSVPWNNLETQKAYLANVENEXQELNLHSPEEARQLRRKALSRIEWLQKADETTIAQIEEFHSMHRMMNAPNSNDNIDLLLSXDLMDIQXAGKAIPN

SEQ ID NO: 148831 - protein, 71 aa, Glycine max
  Clone ID: PAT_MRT3847_105417C.1.pep
QKAFYSLPLRPCPTSFRQFILFNRGGQGPTCFMFLVKMLRTCLYLSSGCNRPKAAVSLLIQPCSGKQLYKQ

SEQ ID NO: 148832 - protein, 432 aa, Glycine max
  Clone ID: PAT_MRT3847_105418C.1.pep
MTMKFRANEVLNGKYTRATAKSVFLVPFTLLLIMLPLSLMRSSHESTPEISSVSVSSSLNNNTEVKQCNIFSGRWVHNPEAPYYSNETCHWIIDQQNCLKFGRPDREYLHWRWKPDECELPFFNATQFLNLVRGKKMAFVGDSVGRNQMQSLLCLLSHVSEPEDVSHKYSSDVVYFKRYFYHDYNFTLGNLWSPYFVRSSDADPRGHTYNSIMKLYVDEADEAWTSQVENFDIVIISSGQWFFRPLLFYEKGKLVGCNKCGMDNVTDLTHLYGYKKAFRTAFRALNSLENNSARAFLRTFSPAHFENGDWNKGGKCVRTMPFTKQEMRLEDGAVEYILEMYVTQVEEFREAQRVATKRGLEFLMMNTTEIMLLRPDGHPNNYGHAKDKNVTLNDCVHWCLPGPVDTWNEFLLYMLDIMGSDAFFSSKLEKVF

SEQ ID NO: 148833 - protein, 111 aa, Glycine max
  Clone ID: PAT_MRT3847_105419C.1.pep
RAEVPVTANAQQNVGVTLNERMLQTTNRNAQTQYNTTMELRNVAEDSAVESSSGTRRERDGGVVPVWSPPASSYSEQFVGEENGITNSSSFLQRHPQSHQMLNWRQLPQTG

SEQ ID NO: 148834 - protein, 330 aa, Glycine max
  unsure (1)..(330): unsure at all Xaa locations
  Clone ID: PAT_MRT3847_10541C.1.pep
AENADRGTAPGSPTPVSASTFSWIPFQTFFFNSSHTXPSHSTNNSFVLYSRFQHSVKFRRSFATVTATTEKVVIDDSDTTNDEPGFVNIGYISSVHGIQGEIRVKPATDFPQLRFSTPGRRWLKSKVLGRESVQEVELEEGREHPALKSWILKFRGIDTVDQAKKLIGATLLVVDEDRPELEEGEFYTHDLIGMKVFMKENGKLVGTVMNVFNSGANDLLQIVLDSSFDMLDKSGKSRSAEIDASDQLVLVPFVEAIVPDVDMKRRQMHITPPKGLLELNLRFDDRSKKERRQLEWKEKKKFQKRLIAAKKKLIEMEQKHIFHGFQYGEK

SEQ ID NO: 148835 - protein, 154 aa, Glycine max
  Clone ID: PAT_MRT3847_105420C.1.pep
RNNPLPIARRYQDQMVPSITSSLLRVEEEETSSDLRNSAEESSRAEVPVTANAQQNVGVALNERMLQTTNRNAQTQYNTTMELRNVAEDSAVESSSGTRRERDGGVVPVWSPPASSYSEQFVGEENGITNSSSFLQRHPQSHQMLNWRQLPQTG

SEQ ID NO: 148836 - protein, 122 aa, Glycine max
  Clone ID: PAT_MRT3847_105421C.1.pep
SDLRNSAEESSRAEVPVTANAQQNAGVALNERMLQTTNRNTQTQYNTTMDLRNVADDSAVESSSGTRRERDGGLVPVWSPPASSYSEQFVGDENGITSSSSYLQRHPQSHQMLNWKQLPQTG

SEQ ID NO: 148837 - protein, 117 aa, Glycine max
  Clone ID: PAT_MRT3847_105422C.1.pep
MSNIEENKDLGQMDVDASDESANMPSPQKQEESVKKKYGGMLPKKPPLISKDHERAYFDSADWALGKQGGEKPKGPLEALRPKLQPTQQQTRYRKSPYAPSGEEGGSVPAEDAPSNQ

SEQ ID NO: 148838 - protein, 63 aa, Glycine max
  Clone ID: PAT_MRT3847_105423C.1.pep
RVWDPEASSEPYWLETLNAGKPALTISQWAIQNSRYHINDTLLFKYRRNSTTLDQSVYCTTHQ

SEQ ID NO: 148839 - protein, 31 aa, Glycine max
  Clone ID: PAT_MRT3847_105424C.1.pep
ENGIGTGSSYLQRQHPQSHQLMNWTRLPQTG

SEQ ID NO: 148840 - protein, 117 aa, Glycine max
  Clone ID: PAT_MRT3847_105425C.1.pep
MSNIEENKYLGQMDVNASDKSANMPSSQKQEEAVKKKYGGMLPKKPPLISKDHERAYFDSADWALGKQGGDKPKGPLEALRPKLQPTQQQTRYRKSPYAPSGEEGGRVPAEDVPSNE

SEQ ID NO: 148841 - protein, 521 aa, Glycine max
  unsure (1)..(521): unsure at all Xaa locations
  Clone ID: PAT_MRT3847_105426C.1.pep
MSGGGCSIVWFRRDLRVEDNPALAAGVRAGAVVCVFIWAPEEEGQYYPGRVSRWWLKQSLAHLDSYLRNLGSPLITKRSTNSISSLLEVVKSTGATQLFFNHLYDPLSLVRDXNTKRPXDKARTLIGIRTFYPSLGHEGGVKAWRYEESGNSLLSAWIRSLWATDWLHDRIRVVISSFFVKVLQLPWRWGMKYFWDTLLDADLESDALGWQYISGSLPDGREIDRIDNPQFEGYKFDPNGEXVRRWLPELARLPTEWIHHSWNAPESVLQAAGIELGSNYPLPIVGIDAAKNRLLEALSKMWQQEAASRAAMENGTEEGLGDSSESVPAAFPQDTRMEETHEPVRNNPLPIARRYQDQMVPSITSSLLRVEEEETSSDLRNSAEESSRAEVPVTANAQQNAGVALNERMLQTTNRNTQTQYNTTMDLRNVADDSAVESSSGTRRERDGGLVPVWSPPASSYSEQFVGDENGIISSSSYLQRHPQSHQMVNWKQLPQTVEWRNKLDIHVIISYILKPVLTHD

SEQ ID NO: 148842 - protein, 103 aa, Glycine max
  Clone ID: PAT_MRT3847_105427C.1.pep
MPNQNAGVALNERMLQTPNRNTQTQYNTTMDLRNVADDSAVESSSGTRRERDGGLVPVWSPPASSYSEQFVGDENGITSSSSYLQRHPQSHQMLNWKQLPQTG

SEQ ID NO: 148843 - protein, 25 aa, Glycine max
  Clone ID: PAT_MRT3847_105428C.1.pep
MVASASTVGAVNKAFLNLNGSGPGV

SEQ ID NO: 148844 - protein, 115 aa, Glycine max
  unsure (1)..(115): unsure at all Xaa locations
  Clone ID: PAT_MRT3847_105429C.1.pep
MTMLIEQPALELHVECNNVHAEETKGLVLNGGWPLAKDGYMDLDINSLGPSLRDYDADRERPKGAEEVHLMLHINXTYDSVKRMQQEYGTMEPADMGISEXCELLNELIHESDPE

SEQ ID NO: 148845 - protein, 39 aa, Glycine max
  Clone ID: PAT_MRT3847_10542C.1.pep
GKPWKDFLKFLIHCCLKNSEIPYFLSRGIMFSWVSLPDF

SEQ ID NO: 148846 - protein, 35 aa, Glycine max
  Clone ID: PAT_MRT3847_105430C.1.pep
CLSQLVMPGNLVIMCAVTHPWQKTVHCPTARSALP

SEQ ID NO: 148847 - protein, 100 aa, Glycine max
  Clone ID: PAT_MRT3847_105431C.1.pep
PAPLVAPISASRSDFRVAFAFLDKFLGESKAEWPSLSLLFSSIMGKSPSYFPPDNMRSLSSLDQFLVSVGYVKKPVSGRKRSHQRCIPLWPSQYMLTFQM

SEQ ID NO: 148848 - protein, 138 aa, Glycine max
  unsure (1)..(138): unsure at all Xaa locations
  Clone ID: PAT_MRT3847_105432C.1.pep
MPATRRGETIPNSALQSPSEPGTPKNPRYPGVSETYSEPSMLPNHTIPGNCGFQVITPFKDRQDYFYKQGPDQFSKSRIQKYQPTVLRTNMPPDPLLAPDPNDIDILDAKSFPVLCDNSNVERKDEXTGTLMPCTELT

SEQ ID NO: 148849 - protein, 51 aa, Glycine max
  Clone ID: PAT_MRT3847_105433C.1.pep
KFLAATHYIYILSNRTSISLVSLVSPKNKSILNKTHVQLISCFLKLFIFYF

SEQ ID NO: 148850 - protein, 117 aa, Glycine max
  unsure (1)..(117): unsure at all Xaa locations
  Clone ID: PAT_MRT3847_105434C.1.pep
AQFAQMRPVGMPPSVSPHMPMYPPNGPDINQQIFYTQNPPTIIPSQPRFKYQQQLIPNIKRNTAPMPNFFRPIVQQKQQKQRPGGEHTDAVQQCQQPVPIMPQQILTXKHIYRYPPS

SEQ ID NO: 148851 - protein, 73 aa, Glycine max
  Clone ID: PAT_MRT3847_105435C.1.pep
MDKARFGFFFMLLILLSSQMVVQTEGRHCESKSHRFKGMCLSKHNCASVCHLEGFTGGKCRGFRRRCFCTRHC

SEQ ID NO: 148852 - protein, 202 aa, Glycine max
  Clone ID: PAT_MRT3847_105436C.1.pep
MASLSSSTKQSNNNQEVDEKPIPHDQNVLQKHVAFFDRNHDGIIYPWETFQGFRAIGCGYLLSSVAAIFINGGLSQKTRPGKFPSILLPIEVQNIHRSKHGSDSGVYDSEGRFVLSKFEEIFSKHARTHPNSLTSDELMGMLVANRVPKDYAGWLASYTEWKILYVLGKDKDGLLHKETIRAVYDGVLFEKMEKEHSDKKAK

SEQ ID NO: 148853 - protein, 47 aa, Glycine max
  Clone ID: PAT_MRT3847_105437C.1.pep
FKCVKICIPGPTSATTMIYRSCVHTIKIWPINIRLCIRYDPWARTYF

SEQ ID NO: 148854 - protein, 48 aa, Glycine max
  Clone ID: PAT_MRT3847_105438C.1.pep
QNLALFVSPPPKSWSVWCMAIIDVLPSFSGSLYPSNVCINAGFVKVCS

SEQ ID NO: 148855 - protein, 63 aa, Glycine max
  Clone ID: PAT_MRT3847_105439C.1.pep
GQRQELCTEMNGLSESMDLRKVTLLLPLDASARYMPNDACWDDQKNYLGYGVSGVGNNGLPFA

SEQ ID NO: 148856 - protein, 48 aa, Glycine max
  Clone ID: PAT_MRT3847_10543C.1.pep
EKTIHEEVFIRVGHKSFFFMFPNICYVLSYVPFGNPGGGNNSSIPFPL

SEQ ID NO: 148857 - protein, 71 aa, Glycine max
  Clone ID: PAT_MRT3847_105440C.1.pep
YSKGKAKLKNLLLGLTLPGGGRREPQLVYAKFYPKPPVCGMKCPKPNRKKTISIQKQPLAMTKHYPGKKPV

SEQ ID NO: 148858 - protein, 134 aa, Glycine max
  unsure (1)..(134): unsure at all Xaa locations
  Clone ID: PAT_MRT3847_105441C.1.pep
MLHPFRCSVXSFTILFSPALAGQRPAHASLPEEDIXEAVWPNTPIPTALRELLKPLPAGAEIDELPKQIDDTQXPKTFPYKEDLHPGTPLQVQSTKXPYAQPYAVYTCLTDINDTSKDGYSXFKRYCIKKQASE

SEQ ID NO: 148859 - protein, 128 aa, Glycine max
  unsure (1)..(128): unsure at all Xaa locations
  Clone ID: PAT_MRT3847_105442C.1.pep
FKGGSCKWIFKKKEGIKGVNXDRFKARIVSRGFTQKEGIDFNEVFSLIVKLXFDVQLEEMDVNTIFLYGELDETIMMKQPKGFEIGGKEEYVXKLKRSLYGLKXSPRQWNRRFDEFMTHTVPKESIYN

SEQ ID NO: 148860 - protein, 75 aa, Glycine max
  Clone ID: PAT_MRT3847_105443C.1.pep
AEEGKDSGRAPSCEAQQWQGLQSVNGGDWTHQRLRCSTSQGTGQLHSQNGPPIRGTVAGLAQEPGSEIVKTPFEA

SEQ ID NO: 148861 - protein, 93 aa, Glycine max
  Clone ID: PAT_MRT3847_105444C.1.pep
MKGVKPRNRTVKPDDKLGAKRKGADKVSRQVKRAKAGKDPNAPKRPPTAFFIFMDDFRKEFKEKNPNNKSVDTVSKAGRDKWKSMSDAEKAPY

SEQ ID NO: 148862 - protein, 76 aa, Glycine max
  unsure (1)..(76): unsure at all Xaa locations
  Clone ID: PAT_MRT3847_105445C.1.pep
TMCTCPNPSTPNKKKQRPTHVGAMHNHTYTYSKSSQMGCPHQTSQIIFFLGVLNLPHNLHSRTHSQRRASIXSKQP

SEQ ID NO: 148863 - protein, 53 aa, Glycine max
  Clone ID: PAT_MRT3847_105446C.1.pep
DDDKPRNDSNKVYNVHISLKHGETECCVSKENADFRKPSETPNKNSILPSTLM

SEQ ID NO: 148864 - protein, 111 aa, Glycine max
  Clone ID: PAT_MRT3847_105447C.1.pep
DRPSPSVSSSLLPSPTRVVQARSPRPPRRLPRSKRSLDWNFCSHIHKRVLIWIVLFESFLLSLQRWSGLFFPSRSQIPGLSTTTSASAALSLVVEVMRCNNKSERPPFPLL

SEQ ID NO: 148865 - protein, 83 aa, Glycine max
  unsure (1)..(83): unsure at all Xaa locations
  Clone ID: PAT_MRT3847_105448C.1.pep
LADGSVMKPCASFYAAAAQSIRLPTVSLDSFVSDTAVLLFNGSSYFQNVRGNSDSNKHXLIITGQLSNVSPDQPLGPLITRTH

SEQ ID NO: 148866 - protein, 67 aa, Glycine max
  unsure (1)..(67): unsure at all Xaa locations
  Clone ID: PAT_MRT3847_105449C.1.pep
XEYSCLTTPIRYDSVTPTQMAHHHVHTLLQHALHQHWSYHLMSLSSHTPYILISNDLHIHMSKLSSL

SEQ ID NO: 148867 - protein, 54 aa, Glycine max
  Clone ID: PAT_MRT3847_10544C.1.pep
VLTCISYGILCLRVWNLRWILRISVNHQGSWYILTFSYFLWICFSRGGGYELRS

SEQ ID NO: 148868 - protein, 78 aa, Glycine max
  Clone ID: PAT_MRT3847_105450C.1.pep
ISPSLFPFFSFRAFYFRLSRLFSLSFFSYFFSHKEPRSDIIGTGLWARKRCAMAGSDGVLGDLQGRCLLRLARGLGRK

SEQ ID NO: 148869 - protein, 101 aa, Glycine max
  unsure (1)..(101): unsure at all Xaa locations
  Clone ID: PAT_MRT3847_105451C.1.pep
MPIVTEDMDSAFQTAGANPGXEVWCIENQRLVSVSNSSHGKLYTGSAYLVXNTFLHXLWKHVIFPKIGPQYDIHYWLGNEAKKILLPLLGGQILRRYSLDK

SEQ ID NO: 148870 - protein, 71 aa, Glycine max
  Clone ID: PAT_MRT3847_105452C.1.pep
RCQNAESLRLHPISMNTLFTMFYNQKKWLNWKLENNNTLEQFFQNSKFFIHNVKNDVKLSTSIITISSEEI

SEQ ID NO: 148871 - protein, 464 aa, Glycine max
  Clone ID: PAT_MRT3847_105453C.1.pep
MASCHSSPTLVFTVRRRQAELIAPAKPTPREVKKLSDIDDQEGLRFQIPFIQFYGNNKESSMKDPVEVIRKALTKTLVFYYPFAGRLREGPGRKLMVDCNGEGVLFIEADADVTLHQFGPSYLLHPPFPCLEELLHDVPGSRGVTNCPLLLIQVTRLKCGGFIFALRLNHSMSDGFGIAKFMKALAEIACGATEPSLTPVWCRELLNARNPPRISRTHHEYEVENKAKGTMMIPLNDVVQRCFFFGPREVASLRSLVPKHLGRCTTFEVITACMWRCRIRALQLDPEDDVRFIYTININAKVNPPLPKGYYGNGFVLSAAVTTSRRLCENPFGYALELVKNAKSNVDEEYVRSTSDLIVVKGRPHQATTRSYLVSNTTRIGLDEVDFGWGKPIYGGPATGGMTSFPQMTSVYVSCKNHKGEHVIVVPISLPAKAMERFATELEGMLRHASQPIMGAHQGLMSFL

SEQ ID NO: 148872 - protein, 76 aa, Glycine max
  Clone ID: PAT_MRT3847_105454C.1.pep
FVLLGAVFILSTKTRQRLRGSRNKKDRITRAAAGGTVRRRYLRRASAPVFHQPLNSRLRSPSLLNSASLLSTHLIF

SEQ ID NO: 148873 - protein, 57 aa, Glycine max
  Clone ID: PAT_MRT3847_105455C.1.pep
FWGPQKKTITLQARGRKPGIWPQDPFLFSPEVPLSKKPLFFSIKIPIKIGVNLTGGI

SEQ ID NO: 148874 - protein, 40 aa, Glycine max
  unsure (1)..(40): unsure at all Xaa locations
  Clone ID: PAT_MRT3847_105456C.1.pep
YXYICGRVQNXEQCKYLTTKHVFFIIELSSNVPSNISRVV

SEQ ID NO: 148875 - protein, 81 aa, Glycine max
  Clone ID: PAT_MRT3847_105457C.1.pep
QDCSDSESQRTAPRASSSSGKRDCCDSASSVSREGWHGKHSKGSADSLRALRLTTKLRDLHKLAKVDSESHKEFEHWNEML

SEQ ID NO: 148876 - protein, 39 aa, Glycine max
  Clone ID: PAT_MRT3847_105458C.1.pep
LISLFLFSLNHCVVISMINECVIFYILYLFNTSFYPGCL

SEQ ID NO: 148877 - protein, 116 aa, Glycine max
  Clone ID: PAT_MRT3847_105459C.1.pep
GRSHQAWKNYSITKSQKKKKKKKKKKKKKKKKKKGRKTKNKDGAPGNYFLLEPLKLLMLVEKNQHQIQITLQKMALAKGKSLGSGGDKGQKSDAGEIRSRRACFSVELSLAGAHWN

SEQ ID NO: 148878 - protein, 193 aa, Glycine max
  Clone ID: PAT_MRT3847_10545C.1.pep
GWRTFKRPGADAFLEHLGRFYEMVEHSDQLTMHVQYVDPVADRLDPKGNILHMLSRVATKYENGKHYRKCLQAVETEIDLSKLNRNPAQVLYISAHAKESSLQPENSVEIKPWKLENDDTQLLDLIPFLEYVAMARPSDIRAVLASYQSGDIAAEFIERSKEHQRSVDIFLCSITFLYLIDGNLNVDVPTPLL

SEQ ID NO: 148879 - protein, 204 aa, Glycine max
  unsure (1)..(204): unsure at all Xaa locations
  Clone ID: PAT_MRT3847_105460C.1.pep
FLGDSVLDYLITWHLYNKYPGMTPGQLTDMRXASVNNDCYAWSAIKHGLHKHVLHASQELHMHVSATLNKFDKLSSLSTFGYEAETSLPKVLGDIVESLAGAILVDSGYNKEVVWQSIRPLLEPLVTPETLKLHPIRELNELCQKRSYKIVLEDVSRKNGVTNYRMKVEADGVIPEYEYTGPAFRDPAKKIACKEILNSLKEDL

SEQ ID NO: 148880 - protein, 51 aa, Glycine max
  Clone ID: PAT_MRT3847_105461C.1.pep
YVCGVKCCETNTHYSKGNIDKMFGSVMRSQTYFWNPNSVLYHVCSSPKLIL

SEQ ID NO: 148881 - protein, 55 aa, Glycine max
  unsure (1)..(55): unsure at all Xaa locations
  Clone ID: PAT_MRT3847_105462C.1.pep
RXLAXSLTXMRTSQENXMLCSSIVXRLAXXXTLGVLESXXSSSLPSSXHSXNTPI

SEQ ID NO: 148882 - protein, 60 aa, Glycine max
  unsure (1)..(60): unsure at all Xaa locations
  Clone ID: PAT_MRT3847_105463C.1.pep
LWPSFSSFQFSTFXXPLPNSPPIQHPLLPPPLTFFTECRVVKEELMKGRXMQLLLLEDKS

SEQ ID NO: 148883 - protein, 37 aa, Glycine max
  Clone ID: PAT_MRT3847_105464C.1.pep
DPEVHLGQHDTFSFRVLFAVSDTSQYQIIHGWGRYDE

SEQ ID NO: 148884 - protein, 37 aa, Glycine max
  Clone ID: PAT_MRT3847_105465C.1.pep
STFFQKTIALIRVETLSHYHNIFYKLIWTWAYRDTLT

SEQ ID NO: 148885 - protein, 52 aa, Glycine max
  unsure (1)..(52): unsure at all Xaa locations
  Clone ID: PAT_MRT3847_105466C.1.pep
MREILQIHLGQCXNFFRAKFWEGVCAEHWIDSTGRCQGDNEGQLERVNVYYN

SEQ ID NO: 148886 - protein, 52 aa, Glycine max
  Clone ID: PAT_MRT3847_105467C.1.pep
RECLCALSKEDISAIKLFSRDKEQPSRYCTFTTTVSLPLRNKKDNGCLRLLG

SEQ ID NO: 148887 - protein, 85 aa, Glycine max
  Clone ID: PAT_MRT3847_105468C.1.pep
LQSCRSFNKLGLLQYLTVQGARVPEPSAPPRMSLTPFVNCTVTWPAPDLASCSLFSGGCFIPQALPLLCVEVAGPLVPEAITGHV

SEQ ID NO: 148888 - protein, 98 aa, Glycine max
  Clone ID: PAT_MRT3847_105469C.1.pep
IGLHVHGKIGREHCLNTLHLLERLKIHPQLEGLHLVLLAQQVFGREARNHGVPVRRLKPTVDQGFPKLHRRDVRLIDHRSGAQASDRCAQGNSLVQGV

SEQ ID NO: 148889 - protein, 107 aa, Glycine max
  unsure (1)..(107): unsure at all Xaa locations
  Clone ID: PAT_MRT3847_10546C.1.pep
HGWRLRXRSYHQHRGLAQKNEXWYNGPEQGPTRSYTVSRGVRDTGPTALLAYLACLTGEPPGQTGCDYSRTGASCGPTERGDGLHYTYCWDCTSGYNVGTGKALASP

SEQ ID NO: 148890 - protein, 353 aa, Glycine max
  Clone ID: PAT_MRT3847_105470C.1.pep
RKPFNVPDSILRSVDFDALEGALNMKFKDRGLLVESITHASRPSSGVSCYQRLEFVGDAVLDHLITRHLFFTYTNLPPGRLTDLRAAAVNNENFARVAVKHNLHVHLRHGSSALEKQIKEFVKEVQDELSKPGFNSFGLGDCKAPTLLGYIFKSISINNFLEMLRDTTVVWKVFQPLLHPMVTQKTLPMHPVRELQERCQQQAEGLEYKASRIGDLATGEIFIEGVRVGAAQNPQKKMAQKLAARNALAALKEKEVGKTQEKNDDNGKKNGNQTFTRQTLNDICLRRNWPMPFYRCVNEGGPAHAKRFTFAVRVNTTDKGWTDECVGEPMPSVKKAKDSAAVLLLELLNKLYS

SEQ ID NO: 148891 - protein, 127 aa, Glycine max
  Clone ID: PAT_MRT3847_105471C.1.pep
GTVLGNMMGDSWLRAHEQYKDYYAALYLRTSWGKLLSILVVPRDILSPSSASVTSQDLAKRLNAFNLAFDERYKKQSNWVISDEILTENVCKHLVEGIIPIYRAYVKNYCLSIENDANVDKHMKYTA

SEQ ID NO: 148892 - protein, 76 aa, Glycine max
  Clone ID: PAT_MRT3847_105472C.1.pep
ISVIHKTQITQLLSLRSTLQMRFQMNTVGLKMTGLTSLMNIGDCTMIIRCCHLFGKRTQVRLGPQSLQSFANRCEQ

SEQ ID NO: 148893 - protein, 61 aa, Glycine max
  unsure (1)..(61): unsure at all Xaa locations
  Clone ID: PAT_MRT3847_105473C.1.pep
LSWPWACLHRDGLSEPMVASRGWDGDGSPLPISVDASXLKLRQSFMKAVKVHHVSFLCRVP

SEQ ID NO: 148894 - protein, 255 aa, Glycine max
  unsure (1)..(255): unsure at all Xaa locations
  Clone ID: PAT_MRT3847_105474C.1.pep
PPVLVTYPPTIGFIVLFEVXAAHGCQSLQFSXSSATVFGWPKEVPCTEKFPLSATNPYGPTKLFIXEEICRDIHRADSDWTVILLRYFNPVGAXPSGYIGEDPLGIPNNLMPFVQQVAVGRRPALTVFGSDYKTTDGTGVRDYIHVLDLADGHIAALRKLDDPKIGCEVYNLGTGKGTSVLEMVNAFEQASGKKIPLAMAGRRPGDAEIVYASTEKAERELKWKTKYCIDDMCRDQWNWARKNPYGYGGSEDSSN

SEQ ID NO: 148895 - protein, 69 aa, Glycine max
  unsure (1)..(69): unsure at all Xaa locations
  Clone ID: PAT_MRT3847_105475C.1.pep
PGQFDLDKQVRPRQDGLFLVQTSPNLFDLTXFFYFVSFVYKNTINLSKKNNRLTNLAXRAGLPDQEKHG

SEQ ID NO: 148896 - protein, 75 aa, Glycine max
  Clone ID: PAT_MRT3847_105476C.1.pep
RASARSWRACLDPIHVHVCSVDSHGLIGGCDFPVNPPRVGVRACERSPARGLLSWLGAPAGLLSVLDDRISIGDR

SEQ ID NO: 148897 - protein, 78 aa, Glycine max
  Clone ID: PAT_MRT3847_105477C.1.pep
LEDFSYFHPAHKHTLTARANFKELGVSAKLKYPLFMLRESKTSYYKSLLLLPQENSPMHRYGANWIMHVTMDLYLNRI

SEQ ID NO: 148898 - protein, 173 aa, Glycine max
  Clone ID: PAT_MRT3847_105478C.1.pep
LEPNRSRGLESLVDVGGGTGTMAKAIAKSFPRVECIVFDLPHVVSGLKGSENLKYVSGDMFEAIPPADAILLKWILHDWNDEECVDILKKCKEAITRKGKEGKVIIIDMVVENEKRDDESVETQLFFDMLMMVLVTGKERSKKEWAKLISSAGYNNYKITPVLGLRSLIEIYP

SEQ ID NO: 148899 - protein, 280 aa, Glycine max
  unsure (1)..(280): unsure at all Xaa locations
  Clone ID: PAT_MRT3847_105479C.1.pep
MESHDEEHAAKLLRAQTHIWNHIFSFINSMSLKCVVDLGIPDIIHNYGQPMPLSNLIASLPIHPSKTCFVHCLMRIMIHSGFFSQQNHDLENELEAKYVLTDASVLLLKNHPLSVTPFLHAMLDPVLTNPWNQFSTWFKNGDPTPFETAHGKMFWDYAGADPKLNHLFNDAMASDARFVTSLVIEKCKGVFMGLESLVDVGGGTGTMAKAIAXSFPRVECIVFDLPHVVSGLKGSENLKYVSGDMFEAIPPADAILLKVNRYSHSEYNFTFIPLTPSFYT

SEQ ID NO: 148900 - protein, 124 aa, Glycine max
  unsure (1)..(124): unsure at all Xaa locations
  Clone ID: PAT_MRT3847_10547C.1.pep
ATKEANIKAGSLSYDWDGGSSLLEALDQIREPMRPYDKPLKLSLQDVCMIGGIGTVPVGRVATAVWNPVMEVTXAPTGLTTEGKYVAMHHECITEAHPADNVGFTVENVAAIDLSVAIVGLNSK

SEQ ID NO: 148901 - protein, 69 aa, Glycine max
  Clone ID: PAT_MRT3847_105480C.1.pep
VTNPILCEPHSAGNSAFILIPYQPHERSHLLRQVKAVPHLLTSLHHDSPQVSESSSGAADYQDRRKGQL

SEQ ID NO: 148902 - protein, 72 aa, Glycine max
  unsure (1)..(72): unsure at all Xaa locations
  Clone ID: PAT_MRT3847_105481C.1.pep
MGLGSWDHDKNPKGLAVIGGFTQNTXEGVQKGSLVGILSQTSKTXYLERVELDGAXDRDTXKSKVPVVPIDD

SEQ ID NO: 148903 - protein, 265 aa, Glycine max
  unsure (1)..(265): unsure at all Xaa locations
  Clone ID: PAT_MRT3847_105482C.1.pep
MDSHDEEHAAKLLRAQTHIWNHIFSFINSMSLKCVVDLGIPDIIHNYGQPMPLSNLIASLPIHPSKTCFVHRLMRIMIHSGFFSQQNHDMENQLDAKYVLTDASVLLLKNHPMSVTPFLHAMLDPILTNPWNQFSTWFKNGDTTPFETAHGMMLWDYAGADPKHNNLFNDAMASDARFVTSLVIEKCKGMFMGLESLVDVGGGTGTMAKAIAKSFPRVECIVFDLPHXVSGLQGSENLKFVGGDMFEAIPPADAILLKVKQFHNS

SEQ ID NO: 148904 - protein, 89 aa, Glycine max
  Clone ID: PAT_MRT3847_105483C.1.pep
QRSSMEKHTLSVTLPLELIREILLRSPVRSVLRFKCVCKSWLSLISDPQFTHFDLAASPTHRLILRSNYYDNFNYIESNYTCLQMIIRF

SEQ ID NO: 148905 - protein, 143 aa, Glycine max
  Clone ID: PAT_MRT3847_105484C.1.pep
MSQELKKAASKGHEKMVTSQEEQAKITEVRGLIGPLSDKESVYCSDASISRYLRSRNWNVKKAAQMLKQSLKWRKEYKPEEIRWEEVAEEAQTGMMYKPNYHDKYGRSVLVMRPCVQKSSSTQGQIKYFVYSIEHAILNLPPH

SEQ ID NO: 148906 - protein, 38 aa, Glycine max
  Clone ID: PAT_MRT3847_105485C.1.pep
KIILYYSTTNSKEMFFPFSCLNSHLCLIPLPTMFEQPL

SEQ ID NO: 148907 - protein, 79 aa, Glycine max
  unsure (1)..(79): unsure at all Xaa locations
  Clone ID: PAT_MRT3847_105486C.1.pep
EAYQHPLALVQAHRKSSGSLQSSSTVGYDQVNDSDLXHGLAYVYASLCHWEDSEIWLLKARALKDCSGTMMHTEGVMLD

SEQ ID NO: 148908 - protein, 46 aa, Glycine max
  Clone ID: PAT_MRT3847_105487C.1.pep
SQDQDNRGYSLSCSYFIMYKPESSSARILRLVVLASIAVDFLHKTR

SEQ ID NO: 148909 - protein, 109 aa, Glycine max
  Clone ID: PAT_MRT3847_105488C.1.pep
MPPSSKFRRALGAVKDQTSISLAKVGSSTSLADLDVAIVKATRHDEYPAEEKHIREILSLTCYSRAFISACVNTLAMRLIKTKSWTVALKTLILMQRLLSECDPAYEHE

SEQ ID NO: 148910 - protein, 67 aa, Glycine max
  Clone ID: PAT_MRT3847_105489C.1.pep
MGWRLDNSGWRIRVSHVHREANACADALANLSYGLQLGFMMYEQPPAISQLLLADSRGVVSPRIISL

SEQ ID NO: 148911 - protein, 129 aa, Glycine max
  unsure (1)..(129): unsure at all Xaa locations
  Clone ID: PAT_MRT3847_10548C.1.pep
MCRLTLPYLLNSKAGTMALILLYKSDLGYSLSXVHGVHEIGLNTVTVQNSASDLDRFGXVVKLPSFNPSTSALDALKQCIADSDCLLTXELRTXLGDHLPKVLEGQKPKPSLGVSDPKSGSHLPEVTNI

SEQ ID NO: 148912 - protein, 144 aa, Glycine max
  Clone ID: PAT_MRT3847_105490C.1.pep
MASEDIRRCPRHTDQPQQHCPHCPLRRHCSHCPLRRHCHHCPLHNPHFHAVNFIKPQTQPYFPPLPHFAPSPLKTHPNFESLHHNEQPFSSDARISLELEHIVLDGEEEEDEPVFVLTDEWREFFAQSEARRKLEKKQGKKGKK

SEQ ID NO: 148913 - protein, 58 aa, Glycine max
  Clone ID: PAT_MRT3847_105491C.1.pep
HVFYLSGILCALQETLICSSSPGLDQRRAVLILGLYCVVWAYPSFYLYGRARGCPFTL

SEQ ID NO: 148914 - protein, 54 aa, Glycine max
  unsure (1)..(54): unsure at all Xaa locations
  Clone ID: PAT_MRT3847_105492C.1.pep
RSRRYFXAXLSXIXXXRRRNXIGRXTXXQIQQXXXXXHXEPNSEXTYXXXXXTX

SEQ ID NO: 148915 - protein, 106 aa, Glycine max
  unsure (1)..(106): unsure at all Xaa locations
  Clone ID: PAT_MRT3847_105493C.1.pep
MATLDSDVTVFPAGEASSSAGPSSSTKKPKRFEIKKWNAVSLWAWDIVVDNCAICRNHIMDLCIECQANQASATSEECTVAWXRWLKTRQVCPLDNSEWEFQKYGH

SEQ ID NO: 148916 - protein, 118 aa, Glycine max
  Clone ID: PAT_MRT3847_105494C.1.pep
MATLDSDVTVFPAGEASSSAGPSSSTKKPKRFEIKKWNAVSLWAWDIVVDNCAICRNHIMDLCIECQANQASATSEECTVAWGVCNHAFHFHCISRWLKTRQVCPLDNSEWEFQKYGH

SEQ ID NO: 148917 - protein, 68 aa, Glycine max
  Clone ID: PAT_MRT3847_105495C.1.pep
VKRLANDGTLKCIFRSSYRRVITWTSRLIKLGTPSSGCPFFFFFFLFFFFLFFFFFFFFSDAWADSWV

SEQ ID NO: 148918 - protein, 116 aa, Glycine max
  Clone ID: PAT_MRT3847_105496C.1.pep
LRIFFLLFEYLINRQSHNSFFEKSDLFFMCMLRPLSSDIQAQRLEILNAQWMPFEEYAAQPFIQKSELLKYINDTCLAKMGGQYSGFSPVSTSSNFSDQKNYLYLSAGALKSSNSS

SEQ ID NO: 148919 - protein, 67 aa, Glycine max
  Clone ID: PAT_MRT3847_105497C.1.pep
AHSTLRGNERSPPAIRGHRAGNGFNYPRQNRRGMGAQKTERQLRNEDEHDTDEKTRAIAKKKQSNNA

SEQ ID NO: 148920 - protein, 63 aa, Glycine max
  unsure (1)..(63): unsure at all Xaa locations
  Clone ID: PAT_MRT3847_105498C.1.pep
MLAFLISSGDNMLTVKTIFTCTDSDILAVYDTIASQLKKFLPHXIRWHLYTSMNYILPSFITC

SEQ ID NO: 148921 - protein, 42 aa, Glycine max
  Clone ID: PAT_MRT3847_105499C.1.pep
ILYIYGSICFSMLEKICISVVGWQYVCLSSYSQFESQALALG

SEQ ID NO: 148922 - protein, 141 aa, Glycine max
  unsure (1)..(141): unsure at all Xaa locations
  Clone ID: PAT_MRT3847_10549C.1.pep
TAARRRQKGFLEMAKKGIKADVVAYNALIGAFCKVNKFKNVHRVLKEMESNGVAPNSRTCNVIISSMIGQGQTDRAFRVFCRMIKLCEPDADTYTMMIKMFCEKNELEMALKIWKYMKSKQFVPSMHTFSXLIKGVCEKTM

SEQ ID NO: 148923 - protein, 43 aa, Glycine max
  Clone ID: PAT_MRT3847_1054C.1.pep
KKKKKKKKKIIKKKKKKKKKKKKKKKKKKKNKQKKKKKKHHPN

SEQ ID NO: 148924 - protein, 70 aa, Glycine max
  Clone ID: PAT_MRT3847_105500C.1.pep
LELGTKHYVLWIIIKRKRSLCCEQYYTTNGEGNPPTALDRTGSLYLITGYSWTCTFAQTAKPLLSLELPP

SEQ ID NO: 148925 - protein, 56 aa, Glycine max
  unsure (1)..(56): unsure at all Xaa locations
  Clone ID: PAT_MRT3847_105501C.1.pep
ACGGTIKFVHDESLSSRENKCAICITREICSMSLVNDGLQLDIYPYLVSDDLTXLE

SEQ ID NO: 148926 - protein, 53 aa, Glycine max
  unsure (1)..(53): unsure at all Xaa locations
  Clone ID: PAT_MRT3847_105502C.1.pep
CCVWVVWLLVLWSFVLGVAXXFSGGSSFAPFCALGFARLFGALELCKMFGRMV

SEQ ID NO: 148927 - protein, 72 aa, Glycine max
  Clone ID: PAT_MRT3847_105503C.1.pep
PKPLAGLVDHYGVGENPFKENRRIVKEGFVFRAGEISLHLGFKRGGKGGVFKNFGKGHFGKEDPRFQWGRGK

SEQ ID NO: 148928 - protein, 177 aa, Glycine max
  Clone ID: PAT_MRT3847_105504C.1.pep
GKEAIVAGFYHEGYEEPLLMLMKRRGVHSGLVVKGEEGGLSLTTRLRSANTTRGLPVNYCSGFRALDISSTSEVGGVARHGFSLEVNAKDYGFQPTDTPRTDRSVSKNIELGLAALYGEKGPAYDRIVLNAGVVDHLLGVGGAEDISAALDRAREAIDSGNALKRLLNYIKVSHKIG

SEQ ID NO: 148929 - protein, 127 aa, Glycine max
  Clone ID: PAT_MRT3847_105505C.1.pep
MACTRTFARLATRQTALRPAVFSRGFASVTDTIAREPISKVAESIVPDPARKPVPESKTSTTKEPEPSQDAKTKTFHIYRWNPDEPSSKPKMQSYTLDLNKTGPMMLDALIRIKNEVDPTLTFRRSC

SEQ ID NO: 148930 - protein, 48 aa, Glycine max
  Clone ID: PAT_MRT3847_105506C.1.pep
SQVGQSYAMIHHKSVFIYSESLAIATRFQSSSIIPGDFRLKSMVAMYI

SEQ ID NO: 148931 - protein, 52 aa, Glycine max
  Clone ID: PAT_MRT3847_105507C.1.pep
MACLHYQAPNYSPLLLLVPVVSLSSTQRALHLNLPTSNHSSTLPYLPWKLST

SEQ ID NO: 148932 - protein, 107 aa, Glycine max
  unsure (1)..(107): unsure at all Xaa locations
  Clone ID: PAT_MRT3847_105508C.1.pep
VXXRVRXXXIXLERXYXNLXXXGERXXXXAHXIAXLWXXXXDPLHXTXNWFPSKSXXXXDXXRXKXXXXXXXKXXXKXXXXKRXKQXXXRXXKXRXXXXXXXXXXXG

SEQ ID NO: 148933 - protein, 105 aa, Glycine max
  unsure (1)..(105): unsure at all Xaa locations
  Clone ID: PAT_MRT3847_105509C.1.pep
NAGRALLLDHRRGKLGAWLRELLPHHIILPHERRLQERILDQDHSNLAFGFYRQAYVLAKAVATPLVKPGSDRPXGLHQSKVFSYLDGSLPGDYGLDPLGLTDAV

SEQ ID NO: 148934 - protein, 85 aa, Glycine max
  unsure (1)..(85): unsure at all Xaa locations
  Clone ID: PAT_MRT3847_10550C.1.pep
AVTLRRVKELQLKADGLEKEVILKNVMISDRAEQKRXAILQLCFSIEHYRSGYKKLLQAFAGPKCHAVLSCLKLHSPVCHRFIVL

SEQ ID NO: 148935 - protein, 65 aa, Glycine max
  Clone ID: PAT_MRT3847_105510C.1.pep
FHFYINSFDTSFTTQGIIIHNLTSNHPKKNTKTLSLPSFSLFFPIKPMRLELLFPNYFCFSTYIY

SEQ ID NO: 148936 - protein, 97 aa, Glycine max
  Clone ID: PAT_MRT3847_105511C.1.pep
CLCIPPIIIIARFFWTLSFPSISFTEHLSRFSHPLHPPIQAIRMASVFLIGISGSIFLGRDTASVLEIIMRTSKFEGSCGRSHVLSVEVCESRSVTS

SEQ ID NO: 148937 - protein, 54 aa, Glycine max
  Clone ID: PAT_MRT3847_105512C.1.pep
KPYSDITIQTGGVAKLNSVLSFLWGHECSLLLGLLILFILLGLRTIRILWYTCL

SEQ ID NO: 148938 - protein, 52 aa, Glycine max
  Clone ID: PAT_MRT3847_105513C.1.pep
SAAKDHSISIPLRERDEEEGINSNMSRSISYITGTQLLSFKRPPNVGIIDVR

SEQ ID NO: 148939 - protein, 77 aa, Glycine max
  unsure (1)..(77): unsure at all Xaa locations
  Clone ID: PAT_MRT3847_105514C.1.pep
RKTRDVPSERLRSGKXNXTKGQGERGKTXKPXXXXXXTQXPEDXXEKEDQEKPKKRDARXRQRKDXQXKEGQAQKET

SEQ ID NO: 148940 - protein, 84 aa, Glycine max
  Clone ID: PAT_MRT3847_105515C.1.pep
IEIAVVVVAEITEIALFNVSGVFEELKDTSVVSLAATTGLVILEDALALAGRTFSGDLLAFSFALVRHFPRECNETKANCMLRV

SEQ ID NO: 148941 - protein, 73 aa, Glycine max
  Clone ID: PAT_MRT3847_105516C.1.pep
DRNSSCISNSTFARNKEAVMLRYALKLFVLVIRPLAESKVNEFGIPRGIPVPHFQEISSQKSSYMNWNYLFSQ

SEQ ID NO: 148942 - protein, 49 aa, Glycine max
  Clone ID: PAT_MRT3847_105517C.1.pep
PLFATEGVLKNPFVGGPKKKKKKKKKKKKKKKKKKKKKKKKKKKKKKKK

SEQ ID NO: 148943 - protein, 73 aa, Glycine max
  Clone ID: PAT_MRT3847_105518C.1.pep
FPVVSFLSAGLVNYFRGPYRRVLLLLGRVFKFGLFKWGGLFCLVLFFLVVFWFLFSFGCFIFCICCCFFFVFF

SEQ ID NO: 148944 - protein, 73 aa, Glycine max
  unsure (1)..(73): unsure at all Xaa locations
  Clone ID: PAT_MRT3847_105519C.1.pep
RGKGRVREGELPGNAVFAREQRRGQSLVVPNNSEAPEQGREQGXXYVVIKTHHTVVSSYTNGGCTANSSEALA

SEQ ID NO: 148945 - protein, 55 aa, Glycine max
  Clone ID: PAT_MRT3847_10551C.1.pep
FLPSQAPAKEAPWHALWSCQLGKCKTGEQCTFELLLELGGRKKITRPPGKKAPLI

SEQ ID NO: 148946 - protein, 434 aa, Glycine max
  Clone ID: PAT_MRT3847_105520C.1.pep
GESARTEGEIFSAEDADSAETEGAARKKEGAFYIWTGKEVADILGEHAALFEEHYYIKQSGNCNLSGMSDPHDEFKGKNVLIERKEPSELASKYGMSIETYQEILGECRHKLFEVRSRRPKPHLDDKVIVSWNGLAISSFARASKILKGEAEGTKFYFPVIGTEAKAYMGIAEKAAFFIRKQLYNVETHRLHHSFRHSPSKAPAFLDDYAFLISGLLDLYEFGGGISWLLWAIEFVVSTEAKVFLRTGGGYFNNTGEDASVLLRVKEDHDGAEPSGNSVSAINLIRLASMVAGSKAEHYKRNAEHLLAVFEKRLKDMAMAVPLMCCAADMLRVLSRKQVVVVGERTSEDFENMLAAAHAVYDPNRTVIHIDPNNKDEMEFWEVNNSNVALMAKNNFAVNKVVALVCQNFTCSPPVTDHSSLKALLSKKPSSSFT

SEQ ID NO: 148947 - protein, 60 aa, Glycine max
  Clone ID: PAT_MRT3847_105521C.1.pep
SGPFPSSPSDSIKRFMLNQVGAINSTKNQPNVCGFWFHFIKRIGLFPFFLLKFKVLVFCR

SEQ ID NO: 148948 - protein, 124 aa, Glycine max
  unsure (1)..(124): unsure at all Xaa locations
  Clone ID: PAT_MRT3847_105523C.1.pep
KMGAPPXXFFFLFFFFFFFFFFFFFFFFFFFFFFFFFFFFFFFFFFFFFFFFYFNDSLHNTYTIIHTSMIPSFCITFKEKSWLVEHRHTKRTCINPSTQRRMLPIFILTEKSEPTSSVDEKEDL

SEQ ID NO: 148949 - protein, 81 aa, Glycine max
  Clone ID: PAT_MRT3847_105524C.1.pep
TQFRHINVLGLVDFPSKIEESKSSLSSLAVTYSSLLAFSTYGIINITTCPTPPNHLRGTPHLALQNTMPISMLHSSYTFLL

SEQ ID NO: 148950 - protein, 53 aa, Glycine max
  Clone ID: PAT_MRT3847_105525C.1.pep
MPKQIHKINDFLLTARTNDARSAKIKRINDVVKLKVLCFKYLNTLCENKSQNA

SEQ ID NO: 148951 - protein, 81 aa, Glycine max
  unsure (1)..(81): unsure at all Xaa locations
  Clone ID: PAT_MRT3847_105526C.1.pep
KLKHPYFGLFELISKVGSLVSLWYFSDITSLVLELRSKMGSLVLFCGNFRPATTLXCGVCXDVYIAPKXKKXKKKXTSGLL

SEQ ID NO: 148952 - protein, 81 aa, Glycine max
  Clone ID: PAT_MRT3847_105527C.1.pep
MMTLVDELETLVDELDALDLGSSVVPVKKVPYGDVFEASRAGDVERLRYLLEAGVNVNARDQWDSVALYYACLAGHLDAAR

SEQ ID NO: 148953 - protein, 57 aa, Glycine max
  Clone ID: PAT_MRT3847_105528C.1.pep
EDLPVLLLVQHLVLLQVCMNTILELYIILEALRRCTFRLSTRNCGMQISFSSNEHCH

SEQ ID NO: 148954 - protein, 82 aa, Glycine max
  Clone ID: PAT_MRT3847_105529C.1.pep
LMTIFGTLSLARYGDVKCSFTALPTKDDVQRAFVDGTAQQRRMDQLCGLPMCHVANGLMCPAMFSPHSFTDSWPDAWVEPGI

SEQ ID NO: 148955 - protein, 64 aa, Glycine max
  unsure (1)..(64): unsure at all Xaa locations
  Clone ID: PAT_MRT3847_10552C.1.pep
MSDDEHDFNSHADAGASNTYPQQAGTIRTNGYILIXSSPCKVVEVSTSTTGXHGRAQCHSVSLD

SEQ ID NO: 148956 - protein, 153 aa, Glycine max
  unsure (1)..(153): unsure at all Xaa locations
  Clone ID: PAT_MRT3847_105530C.1.pep
AFNSSPFITCKKDLGFCAFPSPSSIIGKRQKCKKTSSNKIVSVVSSPKNKRSPSATGSTKIPMTATEKILARAAEKCEVRPGENAWANVDVLMINDITCPGISGIFKKEFGNTAXVWDREKIVVIPDHYIFTNDERAHRNVDIARDFCVEQDI

SEQ ID NO: 148957 - protein, 90 aa, Glycine max
  Clone ID: PAT_MRT3847_105531C.1.pep
MIDRQRDTERDRKKVSSVQAGEDSKRNMECELVYLRVELLHFTAIKVEKIHGDRKSSTSDRKNPNASSEKIWRYKNLEPLCFGPKPYLEP

SEQ ID NO: 148958 - protein, 67 aa, Glycine max
  unsure (1)..(67): unsure at all Xaa locations
  Clone ID: PAT_MRT3847_105532C.1.pep
QNLTVCGSVPDLGSGGVKKGVLLSPVXQGADLIWRGSITVPKGFQCHYRYYVVDTDKDVLIWEMRNT

SEQ ID NO: 148959 - protein, 43 aa, Glycine max
  Clone ID: PAT_MRT3847_105533C.1.pep
VINMVFICSNLYYIVTLPNIQFDLVNDKFKDSLLGNKIMMLTF

SEQ ID NO: 148960 - protein, 74 aa, Glycine max
  Clone ID: PAT_MRT3847_105534C.1.pep
NTTLMLLFFNLTFLSRILNHDLFISEIFLKFTYSCNFSEKLSICVKKLFVVVVSVGKSQIDKLSNRWRACEEKR

SEQ ID NO: 148961 - protein, 49 aa, Glycine max
  Clone ID: PAT_MRT3847_105535C.1.pep
FLAKELDASLTWMLPWLVIFLWSHYRRCLLNFIMTGGRHLDTCCIQYKL

SEQ ID NO: 148962 - protein, 66 aa, Glycine max
  Clone ID: PAT_MRT3847_105536C.1.pep
KEGKNPCLPAFQIISNINKRGEIGFSLSKTKKTSTLKGGQFPKGGPPTAIKNAHLNGAPPPRTKAK

SEQ ID NO: 148963 - protein, 163 aa, Glycine max
  Clone ID: PAT_MRT3847_105537C.1.pep
MCPLTPSDLLRIFEKVDVNGDGFLSLEELKMLLEKTGFGYSIEELESLVGKKSLDFSEFLFFYESRLKQNNNGEKELGASGGDDSDEVEEVERDLVKAFKVFDLDDDGFITSQELECVLKRLGMWDDERCGKDCASMICSYDTNFDGKLDFQEFKGMMLLTTS

SEQ ID NO: 148964 - protein, 96 aa, Glycine max
  Clone ID: PAT_MRT3847_105538C.1.pep
VNHKQFGEILFECVRYQSVSNLALVKFFQSLNKSPWSILKSGCRIQIRATIILVLFFFLSFLFFLHSSATIEQNSFQFCCCKSYNRKTRNFIMHYG

SEQ ID NO: 148965 - protein, 86 aa, Glycine max
  Clone ID: PAT_MRT3847_105539C.1.pep
NLYTLKKKNFFFFKAQPKNPNRAIILCKRNFFFIAHKTYHFLQPMTQKKSIGSFWPPKGAKKRFLGAFFFFKENSLASSRRVHMRS

SEQ ID NO: 148966 - protein, 76 aa, Glycine max
  Clone ID: PAT_MRT3847_10553C.1.pep
VPAPAGLLQLLVDVMFSLSLVLSSLSLYMFPFLLLAFLLNTASNLTPIWLPYISVSLAISYIPYSIAPFLSGDPNV

SEQ ID NO: 148967 - protein, 100 aa, Glycine max
  unsure (1)..(100): unsure at all Xaa locations
  Clone ID: PAT_MRT3847_105540C.1.pep
AVSNIRRNFSLALSLQFNTSRIEGTVGKEIFHHTPYSIKNLRFLYGGILKNIVIPNIKWGVFELMMRYVXTGTVNVNLDIAEDLWRAADQYLLDHLKRYF

SEQ ID NO: 148968 - protein, 57 aa, Glycine max
  Clone ID: PAT_MRT3847_105541C.1.pep
MAEKHNLKNPAVKRILQELKEMQSNPSDDYLSLPLEVLFIAFLSSIIILRLFILQFH

SEQ ID NO: 148969 - protein, 70 aa, Glycine max
  Clone ID: PAT_MRT3847_105542C.1.pep
TKQSKANPITHKRKRKICGSSLRIYYWHDTIITNIKPTQCGKTLTLGLICTSTAQDGSCGWPTRGSIPTP

SEQ ID NO: 148970 - protein, 77 aa, Glycine max
  Clone ID: PAT_MRT3847_105543C.1.pep
LAVSAEQLMSVKSQIVRSMLIELGGRKDMCQYSQSHTTLQAPAHTTIINLLRLSESPASCLRSPRIPYCGYEQHRCM

SEQ ID NO: 148971 - protein, 64 aa, Glycine max
  Clone ID: PAT_MRT3847_105544C.1.pep
FLTGQTLGAWRHWNDTEPLLKMHVVCVVTFYPFWAKQCEFQFFASPPLYLDQLPLGKRINLVSK

SEQ ID NO: 148972 - protein, 221 aa, Glycine max
  Clone ID: PAT_MRT3847_105545C.1.pep
MGHVGSSKDGTEAGPSAAAMGIDDDEDIDLGDVDLDPTNAEILEELGEDIVKYWCKKASMLFFNEYGLISHQINSFNHFIHTGLQKTFESFGDLVVTPGFDPSKKGENEHFRYASVKFGNVKLDKPMFWGGEGNAQEFKMLPRHARIQRMTYASKVKIQVKVQVYVPKKVRSDKFKTGKAEFLDREIMKEDEREIIIGRLPVMVKSDLCWMKDAEKDDDEF

SEQ ID NO: 148973 - protein, 82 aa, Glycine max
  Clone ID: PAT_MRT3847_105546C.1.pep
ALVQLQKLLNSISGQSNGVKLCQQCLKRKEGYIYKGGQFTCVLDKYLSFDYLRKWNKQALQLLCVCDTENLTHMRVLNKVSQ

SEQ ID NO: 148974 - protein, 191 aa, Glycine max
  Clone ID: PAT_MRT3847_105547C.1.pep
MVVPLRHFLVFSLTLISIIFHTHGAFSEQSIIKLPTDQPRVEKLTHLHFFYHDILEGKNITVVKIIEPSASEVREATGFGTTFMMDNVLTEGPELSSKHVGRAQGLFGLASLEDRGMVMLINLAFSEGEYAGSTLSMLGRNPVQDTVREMPIVGGTGVFRFAKGYAIAKSLWEISDNEHFVVEYHVTVSHP

SEQ ID NO: 148975 - protein, 89 aa, Glycine max
  Clone ID: PAT_MRT3847_105548C.1.pep
MQGKQVDAMVELSKICLLLRIFPPEESSPEMEMVSRGLEKHLKLEQREHLMFLFGKVCGEDSHRIAREALGLTHSPNGCSDQFEDNIAP

SEQ ID NO: 148976 - protein, 113 aa, Glycine max
  Clone ID: PAT_MRT3847_105549C.1.pep
HASVVLEMVGRRKNIKAEVDNSSEIYFPHWIYNRLESNQELGLQNIKNEGDDQMVGKMTIVGLWCIQTHPSARPAISKVMEMLESKMELLQIPPKPFLSSPSTSPVHLSCETL

SEQ ID NO: 148977 - protein, 61 aa, Glycine max
  Clone ID: PAT_MRT3847_10554C.1.pep
IFQQVCHNQVIFHQIFGPVLLLLLFLITATTNLIWMMDNASGKSTTSDDNNNNNPWKPLNS

SEQ ID NO: 148978 - protein, 132 aa, Glycine max
  unsure (1)..(132): unsure at all Xaa locations
  Clone ID: PAT_MRT3847_105550C.1.pep
LFSWAIPCLEGGIAEFDEGVKAQADEAHEIALRSYEPDPINVTAEFNIHVHRALMEESNDTRRELKQKYRGPCXATNPIDRCWRGWKNWAQNRXLVASCGKGFXRRALGGLHRKIYLVTDFFDDEPINPRPR

SEQ ID NO: 148979 - protein, 80 aa, Glycine max
  Clone ID: PAT_MRT3847_105551C.1.pep
MTLPRVSCSTLPLPSKKCPSTSLPCPGPSASPPPPLPQRAAKAPTLAIVSIRNGASVPPAKIPFPPSPVTLSSPPPPPQP

SEQ ID NO: 148980 - protein, 100 aa, Glycine max
  Clone ID: PAT_MRT3847_105552C.1.pep
VLCQEDPWKSVIDQAKDEASKAGLSEDTIFGAEKAITDGSAEKVAEDALGGGSLDDWVQEACNIANGGSSPFGALKDLPDYNEEDNLPEALEMAPKVHRQ

SEQ ID NO: 148981 - protein, 79 aa, Glycine max
  Clone ID: PAT_MRT3847_105553C.1.pep
YCSIHGLFFFQASNGSLTGPFLVGFAVTGTLITKLTLGLSDNVLLLLLLRQPTKLDFCSEPDFPFRRRGSHTVKFFPGT

SEQ ID NO: 148982 - protein, 46 aa, Glycine max
  Clone ID: PAT_MRT3847_105554C.1.pep
TLDGCSGLGTLLVFFYTPRTQMHTITLHGDITFFSSFHTLLYLEPN

SEQ ID NO: 148983 - protein, 65 aa, Glycine max
  Clone ID: PAT_MRT3847_105555C.1.pep
KIMFNCLMLVLILTGTTAVMAFGELFNISNFYVVEFPTCFLNSVTPLFSGLRLESYFSAFNIVSY

SEQ ID NO: 148984 - protein, 55 aa, Glycine max
  Clone ID: PAT_MRT3847_105556C.1.pep
LITCVCGIAKGASPIMNMKRNKFPKKRGCRPYQIKLDDPSYKNGNHNHQRASCFL

SEQ ID NO: 148985 - protein, 62 aa, Glycine max
  Clone ID: PAT_MRT3847_105557C.1.pep
RQCGISSQCSYPMREPQLKLECFTSNPWAFSTKKKFKRPKCFTNYNITCQGIPNSFPLEESQ

SEQ ID NO: 148986 - protein, 36 aa, Glycine max
  Clone ID: PAT_MRT3847_105558C.1.pep
PPQGEYHHIMMTLRRKPKFSNLRVSWNLVCERKRDT

SEQ ID NO: 148987 - protein, 69 aa, Glycine max
  Clone ID: PAT_MRT3847_105559C.1.pep
PPPPPLMPPFKGGPLSPSGLPIFWKGHRFGPFCFYPNLQKGVFFQSHLIPCTPGFPLPNVFFRRPLYLI

SEQ ID NO: 148988 - protein, 182 aa, Glycine max
  unsure (1)..(182): unsure at all Xaa locations
  Clone ID: PAT_MRT3847_10555C.1.pep
EQGWLCGWSSVQTIRWRVGDGHDVLFWIDSWVLGVGSLLXKQISTLGNQDLTMNVSDFVGEDGRWDINLRLQFLPSSMCASICSLTPPNFEXEEKISWKSTNDGIFSMHFAYSYQVFTMEPLKIPLFNSIRRWKGPERIRGLLWNIGKNCLMTNYKRWRMGIAIAATCPICQNQEESNIGRV

SEQ ID NO: 148989 - protein, 36 aa, Glycine max
  Clone ID: PAT_MRT3847_105560C.1.pep
KVLLLLATCPPISPKKSWKLGSLFTPFLINRNNGGC

SEQ ID NO: 148990 - protein, 78 aa, Glycine max
  Clone ID: PAT_MRT3847_105561C.1.pep
LGPLKSQLYIIDLYHMPSSRVAMIAQQGYNAMMIINLSQECMEHNSLLVGGAICSTQQQWTVEPLTMTCTTTRTTMLL

SEQ ID NO: 148991 - protein, 60 aa, Glycine max
  Clone ID: PAT_MRT3847_105562C.1.pep
VISRSIQTAGSVPGPFKACMFLRFMFRSCVFLVSAVCVICVYGFIRTLKTSSFYCFTIFC

SEQ ID NO: 148992 - protein, 78 aa, Glycine max
  unsure (1)..(78): unsure at all Xaa locations
  Clone ID: PAT_MRT3847_105563C.1.pep
XXLXSRTFTDSXEXAGXIXVLXNVXEVAXSXEXXSXXVLWSXXFTXFXXSXEXXXFWPYXXXEXRPXXGDXXRRLXXV

SEQ ID NO: 148993 - protein, 73 aa, Glycine max
  Clone ID: PAT_MRT3847_105564C.1.pep
FIIKRLVGINSSIAAGSDISDECRVKCIHGPAIVVMTCFQAAMIGTWDACHCRPESISECFALCDICVASISK

SEQ ID NO: 148994 - protein, 70 aa, Glycine max
  Clone ID: PAT_MRT3847_105565C.1.pep
HTLCNSVFILYQPLSYKPHTRTLTISFHFLNKTICQQHISYSLYSNRLVPMIYLTLPTIEKQEQYLRQLF

SEQ ID NO: 148995 - protein, 91 aa, Glycine max
  unsure (1)..(91): unsure at all Xaa locations
  Clone ID: PAT_MRT3847_105566C.1.pep
KYFKKHFFFRICQFFFRLIGEWDAPCIGSLFAKGVLLYRILTPPFVRVFTPGVFGFFPNFIAPFCLISXHSFNLGLPLVSRISVFWPLFLK

SEQ ID NO: 148996 - protein, 119 aa, Glycine max
  Clone ID: PAT_MRT3847_105567C.1.pep
MCVKGKQQRKKRPDEAENMPVTLDLENLKHKREGSLQQIRTNPPSPQCFSVARGFNKPTPSKAPKSRLMERGILGEIEQNKEIVKESPAEKSRSTSIVDGRETKALDMFWFLKPCTLSG

SEQ ID NO: 148997 - protein, 31 aa, Glycine max
  Clone ID: PAT_MRT3847_105568C.1.pep
ESSLTNFYRHFRFELKIYFKTYLLVNKFILK

SEQ ID NO: 148998 - protein, 75 aa, Glycine max
  Clone ID: PAT_MRT3847_105569C.1.pep
FDPFTKIKVKLKKRNYIIIILISGRPYHMGWMRCPVTLLYCTATPGAGVIKNNNAGTCGNGGFPGPPIGVSRRPF

SEQ ID NO: 148999 - protein, 165 aa, Glycine max
  Clone ID: PAT_MRT3847_10556C.1.pep
MQNPNPSSSSPPSPPWLDSAPFIHRSRHLLRRAPPPLHTAATFFRRASGRRMMLREPSVRMREAAAAEVEGRQSEWAYSRPVVALDVAWNAVFLAIGASVLALSTDEDPCVPLRAWIVGYLLQGALHSLCVVAEFTRRRRRRVSGTHPGSNVVGHVQWSFSSESD

SEQ ID NO: 149000 - protein, 128 aa, Glycine max
  Clone ID: PAT_MRT3847_105570C.1.pep
PRVRIYEQTRVLNGRFEVKRFHIGKMADRGRCGGRKTFNRDRRCGVSLGVLITTNPSTSSIHISTSELMIHVIAPTPNTLPTTQDQPNPTFVRELIPTTAIGDVSPLALDDSLTPEYPPDPNCEHIVD

SEQ ID NO: 149001 - protein, 204 aa, Glycine max
  Clone ID: PAT_MRT3847_105571C.1.pep
MMEKGSVVEVAATRSPMQMKMGDELEGNTSALRTAETFLRLVPVGLCVSALVLMLKSSQQNEYGSVDYSDLGAFRYLVHANGICAGYSLFSAVIAAMPRPSTMPRAWTFFLLDQVLTYIILAAGAVSTEVLYLAEKGDAATTWSSACGSFGRFCHKVTASVAITFVAVFCYVLLSLISSYKLFTNYDAPASRPTAAIEVAAFPG

SEQ ID NO: 149002 - protein, 51 aa, Glycine max
  Clone ID: PAT_MRT3847_105572C.1.pep
FKNIGYDHWILLPNYLSKDCPTKIATSKLLMKIVQKDIQLPTLLLCHSQDQ

SEQ ID NO: 149003 - protein, 58 aa, Glycine max
  unsure (1)..(58): unsure at all Xaa locations
  Clone ID: PAT_MRT3847_105573C.1.pep
ASASASATPRVSSRNYCRKKXYSSQALXGHQNAHKRERTMAKRALRMGMFTDRFTSLA

SEQ ID NO: 149004 - protein, 77 aa, Glycine max
  unsure (1)..(77): unsure at all Xaa locations
  Clone ID: PAT_MRT3847_105574C.1.pep
QRCFPFLPFILEKKRANATYGMADHDECKLKLLALKGKRTYRYIGFKIEEKSXQVIVDKLGDPANGYDESAVSLSDD

SEQ ID NO: 149005 - protein, 31 aa, Glycine max
  Clone ID: PAT_MRT3847_105575C.1.pep
QQPNGSGGSVGWANPVKRLRTDSGKRRPSHT

SEQ ID NO: 149006 - protein, 136 aa, Glycine max
  Clone ID: PAT_MRT3847_105576C.1.pep
PRAEFGTRPKCTRKCSAASGLTYKKSLYYAKSAYSVSSDPKAIQKEIMTNGPVEVAFSVYDDFPTYVDGVYTKTSNTFLGGHAVRAIGWGEENGTPYWLIANSWNTDWGKGGLFKIRRGTNECGIEGQVVAGIPKV

SEQ ID NO: 149007 - protein, 67 aa, Glycine max
  unsure (1)..(67): unsure at all Xaa locations
  Clone ID: PAT_MRT3847_105577C.1.pep
YXYNLTTTGSPRKTSMTFTRIYCKKLMMIIDKNLXXHIREGTGIIKTRRQDQKKKLLLPLTQYTPLC

SEQ ID NO: 149008 - protein, 51 aa, Glycine max
  Clone ID: PAT_MRT3847_105578C.1.pep
ARHLRCTIAWNNKWRVCYDPLFLFSSFPPCVYISLYIVRNRMRSIPMLAVS

SEQ ID NO: 149009 - protein, 42 aa, Glycine max
  Clone ID: PAT_MRT3847_105579C.1.pep
FIREENKICVRKPFLSNLNFSIYYLMSSTFISKNYIYVHKHC

SEQ ID NO: 149010 - protein, 84 aa, Glycine max
  unsure (1)..(84): unsure at all Xaa locations
  Clone ID: PAT_MRT3847_10557C.1.pep
YCRNYGXRXXNSXRFAPECRXPNXLPWLTKAYKXKSIHYWILXALSILAMLVAFPASSXLSRXXYDNGGQSXXIISWVXVAXWP

SEQ ID NO: 149011 - protein, 46 aa, Glycine max
  Clone ID: PAT_MRT3847_105580C.1.pep
DNALMGLLSFLTGNHCCETKGIRTHPHQGSREPGASLKNPPVSRAG

SEQ ID NO: 149012 - protein, 79 aa, Glycine max
  Clone ID: PAT_MRT3847_105581C.1.pep
QGGTDNTGGCADTTGVTNVKIRKIPITPCCRIIQGLADHEAALRIRTALQANVLGTNPTAPVNFIFLHNYRGKGVPNVF

SEQ ID NO: 149013 - protein, 165 aa, Glycine max
  Clone ID: PAT_MRT3847_105582C.1.pep
MTELVKNTEQFQTMGEDANLKRWRETTKSLLDAVDNLYCQPYSICVVPEELRKQNESAYEPKVVSIGPRFKGKRELQQMEEIKWRCMLCLLSRTKGDGTKILETCMREMLELDATVRACYGEEIKLNRYDLATIMVYDGCFLLKSPFQKKKTGARCSRNSLFLSQ

SEQ ID NO: 149014 - protein, 134 aa, Glycine max
  Clone ID: PAT_MRT3847_105583C.1.pep
TLVYRVMVQGRLHLKRHKLIIENRSKIANSIVHSTQAATRGPRYGQDWCAARIDLVANARCRVHAGQLSTSRSHPVQGVQLRRISIFKCCISVHSCIGLCMSPCKVLVEVNHGSRGKSRVVWRIERRNASVGAM

SEQ ID NO: 149015 - protein, 136 aa, Glycine max
  unsure (1)..(136): unsure at all Xaa locations
  Clone ID: PAT_MRT3847_105584C.1.pep
MMRARFPLLLLGVVFLASVSVSFGIAYWEKQNPSHNKCLRSCNSEKDSYRNQACHARCNLLKVEEKKECEESQIPQPRPQHRKREPQQHXKKKKNEEKQPPXFPFPHPHQPYQEEDQDQKEYTNSIAKNKRPREKE

SEQ ID NO: 149016 - protein, 125 aa, Glycine max
  unsure (1)..(125): unsure at all Xaa locations
  Clone ID: PAT_MRT3847_105585C.1.pep
MMRARLPLLWLGVVFLASIPVXFGIAYCQKQNPSHNMCLRSCNTEKDSYRNQACHARCILLKVDEDDECEXCQIPRPRPQHPEREHXQHREKEEDKGEQSLPFPFPRSRQPYQDVEHVQKEEHEW

SEQ ID NO: 149017 - protein, 174 aa, Glycine max
  unsure (1)..(174): unsure at all Xaa locations
  Clone ID: PAT_MRT3847_105586C.1.pep
MRARFPLLMLGVVFLASVSVSFGIAYGENHNPCHIKCLRSCISEKYSYRNQACHARCNLLKVEEEEXCEECQIPRPRPHQPERERQLHGEKEEDEGEQPRAFPLPRARQPNQEEEHEQKEQHEWHRQEGKHGRNGSEEEQDERERSRPHQPRQKEEEEHEWRHEHEKHHGMESE

SEQ ID NO: 149018 - protein, 128 aa, Glycine max
  unsure (1)..(128): unsure at all Xaa locations
  Clone ID: PAT_MRT3847_105587C.1.pep
YTVLKNLRYTVMRARFPLLVLGVVFLASVSVSFGIAYWEKPNPSHHKCLPSCDCQKDFYRNQACHACCNLLKVEEEEECEESEISRARPQHPERERXQHREKEEDQGEQTRSFPFXRPRQPHQEEEHE

SEQ ID NO: 149019 - protein, 94 aa, Glycine max
  Clone ID: PAT_MRT3847_105588C.1.pep
SKAREKQGRLDRKEAAHPHTKDTTTDAHFLRKPIRKRGNHPQPTSPATLASLMVVSVVRSLTLNALLENRNVQQRPYIGKMRKYNPGDEFSVNM

SEQ ID NO: 149020 - protein, 42 aa, Glycine max
  Clone ID: PAT_MRT3847_105589C.1.pep
KKIVYSRIKCGQNKLHKMKICRSLKFKMLGIKKIKLSLAFVH

SEQ ID NO: 149021 - protein, 85 aa, Glycine max
  Clone ID: PAT_MRT3847_10558C.1.pep
AHCNVRRFPKIAQEQPGRPPSKLPRLTYPFCPLVYSPLGPTQLAFPPISPHARPRARSLKGAIMIGEWGAPFHGALNPGGGAGPP

SEQ ID NO: 149022 - protein, 172 aa, Glycine max
  unsure (1)..(172): unsure at all Xaa locations
  Clone ID: PAT_MRT3847_105590C.1.pep
KIARLPLLMMGGGDLASVSVSFGVASXEKQKPRYNKCLRCCCSEKDSYRNQACHARCDLLKVDEEEECEKGAFPRPRPQHPEREREQHGEKEEDEGEQPRPFPFPRPRQPHQEEEHEQKEEHEWHLMEEKHGXKGSEEEQDEREHPRAHQPHRKEEEKHXWQHKQEXHQGKE

SEQ ID NO: 149023 - protein, 167 aa, Glycine max
  Clone ID: PAT_MRT3847_105591C.1.pep
MMRARFPLLLLGVVFLASVSVSFGIAYWEKQNPSHNKCLRSCNSEKDSYRNQACHARCNLLKVEEEEECEEGQIPRPRPQHPERERQQHGEKEEDEGEQPRPFPFPRPRQPHQEEEHEQNEEHEWHRKEEKHGRNGREEEQDERGHPRSHQPGRKEDWKHEWLHSPG

SEQ ID NO: 149024 - protein, 155 aa, Glycine max
  unsure (1)..(155): unsure at all Xaa locations
  Clone ID: PAT_MRT3847_105592C.1.pep
MMRARFPLXXLGVVFLASVSVSFGIAYWEKQNPSHNKCLRSCNSEKDSYRNQXCHXXCNLLKVXEEEXCEECQIXRXXPQHXXRERQQHGEKXEDXEGEQVTFIPIPRPRQPHQEEEHXQKEEHEWHXKEEKHRRKGKXXRNXMNRXHXLPHQPX

SEQ ID NO: 149025 - protein, 78 aa, Glycine max
  unsure (1)..(78): unsure at all Xaa locations
  Clone ID: PAT_MRT3847_105593C.1.pep
TSRPKETKPRKGPLEEDGTPKGAKPQQKTXQTKKAPPKNTAGGTTQRREPLADVVPEGNSRARGDLQRTHAMKGTNKT

SEQ ID NO: 149026 - protein, 110 aa, Glycine max
  Clone ID: PAT_MRT3847_105594C.1.pep
MMRARLPLLLLGVVFLASVSVSFGIAYWEKQNPSHNKCLRSCNSEKDSYRNQACHARCNLLKVEEEEECEEGQIPRPRPHHPERERLLHGENEEDESEHPRPFPCPRPRQ

SEQ ID NO: 149027 - protein, 208 aa, Glycine max
  unsure (1)..(208): unsure at all Xaa locations
  Clone ID: PAT_MRT3847_105595C.1.pep
MMRARFPLLLLGVVFLASVSVSFGIAYWEKQNPSHNKCLRSCNSEKDSYRNQACHARCNLLKVEEEEECEEGQIPRPRPQHPERERQQHGEKEEDECEQPRSFPFPRPRQPHQEEEHEQKEEHEWHRKEEIHGGXGSEEEQDEREHPRSHQPHQXEEEKHEWQHKHDXHQXKESDDDEEDQDDDEEQVQESQDSDXSESQREPTRHXK

SEQ ID NO: 149028 - protein, 50 aa, Glycine max
  Clone ID: PAT_MRT3847_105596C.1.pep
NSVIQIAMTVLSFHVEVRCVYVQSNRSYIFLGIKSFFRFKVPSLHRVSRA

SEQ ID NO: 149029 - protein, 52 aa, Glycine max
  Clone ID: PAT_MRT3847_105597C.1.pep
SSPWRLEGQWKLGHFHCSCLGLYLALNVHAVCVLPSLWRNAWHAGYPLPHKE

SEQ ID NO: 149030 - protein, 48 aa, Glycine max
  Clone ID: PAT_MRT3847_105598C.1.pep
DKLRWHLHQKVDTPYISLTFSNNGGFNENTPCTFPLFIIKEKIFLEKK

SEQ ID NO: 149031 - protein, 45 aa, Glycine max
  Clone ID: PAT_MRT3847_105599C.1.pep
DFGLSLIWISHFLWLFPSELCVLIMILSTRKLRMFINFEFGRPFY

SEQ ID NO: 149032 - protein, 134 aa, Glycine max
  Clone ID: PAT_MRT3847_10559C.1.pep
TSKAHCFLHLFHTSETTLLHLVFAFVHKNSMHVLFNVKRVAFSESFLSHRRRLFTWFSLSVSASLVLVSLFLLSNSLRVPKVSVFVPKLDAVGANSSIGPCPLLPFNTSHTFSSESNTFDTSKSNGSESSVQRI

SEQ ID NO: 149033 - protein, 48 aa, Glycine max
  Clone ID: PAT_MRT3847_1055C.1.pep
LITLYKKGSTLGALFPKQQLKSFSKGGKFRANSKHMSPFVIRSFQNGN

SEQ ID NO: 149034 - protein, 86 aa, Glycine max
  Clone ID: PAT_MRT3847_105600C.1.pep
TKFSTNNVNLIFTILKMYTVVGQSQKLYYEESTQTCPRPKASVTDVDFKRITTTASNTWLRSLNPTHKPLPIPIYRYRYPYKSDWQ

SEQ ID NO: 149035 - protein, 62 aa, Glycine max
  Clone ID: PAT_MRT3847_105601C.1.pep
HLKIQNPKIPTFLVNKNPQKKPKKRKPGCTPPKLQGKFTKKNKYSYSKLLKNRYPTSKKPLK

SEQ ID NO: 149036 - protein, 82 aa, Glycine max
  Clone ID: PAT_MRT3847_105602C.1.pep
FEHPPIARCAGRHMCQSVAVGVIKSVGRKVPTGAKVAKSAAKKKWLHFGYFGSACDHPGGLKKACSFTVVYLCRVLGVCCTS

SEQ ID NO: 149037 - protein, 70 aa, Glycine max
  Clone ID: PAT_MRT3847_105603C.1.pep
ESVTAEFSKEQIRALSKRAKSSSRKTISSEDKPFNLRSREAVYSNKLGKLFEITPEKNPQLQDLDMLLSM

SEQ ID NO: 149038 - protein, 53 aa, Glycine max
  Clone ID: PAT_MRT3847_105604C.1.pep
MTRACDTHQTHQGKRGERVKGFEYLIFGCKTPQPKITYMYSHQTMMHSINALP

SEQ ID NO: 149039 - protein, 70 aa, Glycine max
  unsure (1)..(70): unsure at all Xaa locations
  Clone ID: PAT_MRT3847_105605C.1.pep
TXXPXXICTXXGRVXTTAPEDXESLVTRASGQXPPXXYLLVXXTSWXYRKFGRLTDRPXEXNPTTTLXXX

SEQ ID NO: 149040 - protein, 125 aa, Glycine max
  unsure (1)..(125): unsure at all Xaa locations
  Clone ID: PAT_MRT3847_105606C.1.pep
QYSMDLLGGGIIVDKTGDWITLIQNSPISNLLRVAAWKKGXLMVKIVMSGNAVVKRRDWASLVQVSLTKINSTEHFDAXKWTKSEPHYWELKFPIEGXRPYNGYEMWRFEWAKKTSWHLSFLNDN

SEQ ID NO: 149041 - protein, 64 aa, Glycine max
  Clone ID: PAT_MRT3847_105607C.1.pep
DKRLGIHKTLWNFIVKIEDQIFRKFHNGVAQSHCCKKIAVYLLILYLSCHTHGRTPVNKHVVPK

SEQ ID NO: 149042 - protein, 64 aa, Glycine max
  Clone ID: PAT_MRT3847_105608C.1.pep
HYHLHENPFDYPVPYYYLAGAPYLGGYMFSLIPSSITIMLSIHIFMAPENPKTQLQKQCLQQKR

SEQ ID NO: 149043 - protein, 506 aa, Glycine max
  unsure (1)..(506): unsure at all Xaa locations
  Clone ID: PAT_MRT3847_105609C.1.pep
MTDLIYLQPTVDIKTVLSQLMDRXLPEFLQVEAFTKLSTAIGRVIEAQVDMPIVGAIALHVSLLTFTLRVHPDRLDYVDQVLGSCVKKLYGKPKLDDNRATKQVVALLSAPLDKYNDIVTALTLSNYPRVMDHLDHETNKVMAMVIIQSIMKNNTCICTADKVEVLFELIKGLIMDLDGTTVDEVDEEDFNEEQNSVARLIHMFHNDESEEMFKIICTVTKHIMSGGPRRLPFTVPSLIFSALRLIRQLQGQDGDIVGEEVPTTPKKIFQLLNEVIEALSSVSSPELALKLYLQCAEAANDCDLEPVAYEFFTQAFVLYEEEIADSKAQVTAIHLIIGSLQRMNIFGVENRDTLTHKATGYSAKLLKKPDQCRAVYACSHLFWVDDQDGIKDGERVLLCLKRALRIANAAQQMANAARGSSGPVTLFVEILNKYIYYFEKGNPQITSSTIQGLIELIMTEMQSDSASALPASDAFFTGTLRYIQFQKQKGGILGEKYDPINVSIPA

SEQ ID NO: 149044 - protein, 44 aa, Glycine max
  Clone ID: PAT_MRT3847_10560C.1.pep
VLKIKNKFLVLIYTEFLGVCLFLRLWFFPDKAMHVLIGSMDNER

SEQ ID NO: 149045 - protein, 114 aa, Glycine max
  Clone ID: PAT_MRT3847_105610C.1.pep
LFDYRVLLCLKRALRIANAAQQMANAARGSSGPVTLFVEILNKYIYYFEKGNPQITSSTIQGLIELITTEMQSDSASALPASDAFFTSTLRYIQFQKQKGGILGEKYDPINVSI

SEQ ID NO: 149046 - protein, 73 aa, Glycine max
  Clone ID: PAT_MRT3847_105611C.1.pep
IKLPKSRQIFGVPKFRSVRIFLNPGKELFIICHGQKSSFETYKCLLQLRQTETIHVLFYFYAFPSIFYLINHE

SEQ ID NO: 149047 - protein, 197 aa, Glycine max
  unsure (1)..(197): unsure at all Xaa locations
  Clone ID: PAT_MRT3847_105612C.1.pep
MTDLIYLQPTVDIKTVLSQLMDRLSNYAASSTEVLPEFLQVEAFTKLSTAIGRVIEAQVDMPIVGAIALHVSLLTFTLRVHPDRLDYVDQVLGSCVKKLYGKPKLDDNRATKQVVALLSAPLDKYNDIVTALTLSNYPRVMDHLDHETNKVMAMVIIQSIMKNNTCICTADKXVEVLFELIKGLIMDLDGTTVDEVD

SEQ ID NO: 149048 - protein, 49 aa, Glycine max
  Clone ID: PAT_MRT3847_105613C.1.pep
RCLEKTFCFDNLDQQLDAGAELSPTCMHFDCSFIVGAEETKRGVHSPRH

SEQ ID NO: 149049 - protein, 59 aa, Glycine max
  Clone ID: PAT_MRT3847_105614C.1.pep
VHFFHLNGNRASVAHKPGAVAYIFNFHHDVILFTSGLDIISQEVILSRTPPRCALFTTV

SEQ ID NO: 149050 - protein, 85 aa, Glycine max
  unsure (1)..(85): unsure at all Xaa locations
  Clone ID: PAT_MRT3847_105615C.1.pep
SFLAKIDYQLNPNFVVINLDPPTNTKDIYTPLDPHFFLKNYPCWNSVPQQPSTGKWXLGPKKPPFFGETLFFGEEDKKKLNFTTC

SEQ ID NO: 149051 - protein, 64 aa, Glycine max
  Clone ID: PAT_MRT3847_105616C.1.pep
PKFPPFKEMVTESIKAFRGLRKTFWWATLIGVSKPASTLKLNQPFQKWVPQPNLSGKNFPRERV

SEQ ID NO: 149052 - protein, 46 aa, Glycine max
  Clone ID: PAT_MRT3847_105617C.1.pep
SFSIPVLNVLPIYCDTSPSFKRIGPKRSCLIKKTCYVKPLPLEKIN

SEQ ID NO: 149053 - protein, 86 aa, Glycine max
  unsure (1)..(86): unsure at all Xaa locations
  Clone ID: PAT_MRT3847_105618C.1.pep
GYCISLCTVVIWGRSVXANIQKFIQFQLTXRCGRLVINVVAAVSSGDVPLNSVQLFWVNPIMDTLGAVGLATXPPTDHPQDRTPVG

SEQ ID NO: 149054 - protein, 74 aa, Glycine max
  Clone ID: PAT_MRT3847_105619C.1.pep
TALTFMYSTASFRAQFRHSHGVCHFAYSHAVRPQRVIHSDPYRIPTLARGLAINKCACRRTRGVRSHHAPCIAL

SEQ ID NO: 149055 - protein, 247 aa, Glycine max
  Clone ID: PAT_MRT3847_10561C.1.pep
LYWFLALPTPGVRKAGADATLASPDIDADTDADGPFFDLELAVPDSEEDDTNDNNNSDSASEKEFKLTLSPSTSSNDFIFNSQPNNSKPQFTASLFKSATKFRVFMLGLKKLKPNAPAAPNLKKKKLFTVKFKAEEYPIVSLFSRDNSSRPKASQNHHTDESQSSLSETLSSASEEKRLMRKYLKMVKPLYVRVSRRSEKVDVSSPESAEASTVAEKIPTVAEDSESANLKGPKQGMLLCLRLYASI

SEQ ID NO: 149056 - protein, 105 aa, Glycine max
  unsure (1)..(105): unsure at all Xaa locations
  Clone ID: PAT_MRT3847_105620C.1.pep
RSLLKECTRSKAGVHTASSGKDLTDLLXNGSTVQNRQKINIICELXRSVARTLDTLRRDDKGTGKAINYSTPAKIXLLXITDRLQAGRWFDDQGRASYAAEADRL

SEQ ID NO: 149057 - protein, 47 aa, Glycine max
  Clone ID: PAT_MRT3847_105621C.1.pep
LIYMCLNYMNYLELNVFYSLNFKKFMKFISFIYPLISIKMEIEFAKK

SEQ ID NO: 149058 - protein, 213 aa, Glycine max
  Clone ID: PAT_MRT3847_105622C.1.pep
MALLSRASSRFPQLVSPQRVVSLHTTLPSLNASTSTPTPAPYAPPPPPSASPPAGVSKAAEFVISKVDDLMNWARRGSIWPMTFGLACCAVEMMHTGAARYDLDRFGIIFRPSPRQSDCMIVAGTLTNKMAPALRKVYDQMPEPRWVVSMGSCANGGGYYHYSYSVVRGCDRIVPVDIYIPGCPPTAEALLYGLLQLQKKINRRKDFLHWWTK

SEQ ID NO: 149059 - protein, 213 aa, Glycine max
  Clone ID: PAT_MRT3847_105623C.1.pep
MALLSRASSRFPQLVSPQRVVSLHTTLPSLNASPSTATPTPYAPPPPPSASSPAGVSKAAEFVISKVDDLMNWARRGSIWPMTFGLACCAVEMMHTGAARYDLDRFGIIFRPSPRQSDCMIVAGTLTNKMAPALRKVYDQMPEPRWVVSMGSCANGGGYYHYSYSVVRGCDRIVPVDIYVPGCPPTAEALLYGLLQLQKKINRRKDFLHWWTK

SEQ ID NO: 149060 - protein, 72 aa, Glycine max
  Clone ID: PAT_MRT3847_105624C.1.pep
TDKTGALFILLGGKTFLPLHPTRWGAQQKYWGHQETTLLNRGKIHGGNPLPYHWQENKDHYFERRQHVGAEN

SEQ ID NO: 149061 - protein, 76 aa, Glycine max
  unsure (1)..(76): unsure at all Xaa locations
  Clone ID: PAT_MRT3847_105625C.1.pep
EEINKSYEKAGMNKGGDKGRDPEKPPDXCNVFEVLXDSDDIESVELHSEEALKEGMSGGGTFYNPLDVCELIYGGA

SEQ ID NO: 149062 - protein, 34 aa, Glycine max
  Clone ID: PAT_MRT3847_105626C.1.pep
TRKLAFKQLEFSCYAINVFLPGSQEKRITKKKKK

SEQ ID NO: 149063 - protein, 63 aa, Glycine max
  Clone ID: PAT_MRT3847_105627C.1.pep
IIQHMNLITPTLPVYNTKTRVAQPKPNPSRTFFNHMKASDPLSKVAPHTSPGEKTNFLGPKAP

SEQ ID NO: 149064 - protein, 129 aa, Glycine max
  Clone ID: PAT_MRT3847_105628C.1.pep
LFFFYFFFIIFSVLFFFGFFMKPRADPGGNPRNTQRAQQGSPQTQRRGARTPEEKRGKMGQRKKFSPGENIKKRQTPKPKGGSHGKQWAEKKPKNHGAPKKNKKKEPATEKQKKKILRNAREPVKKKEK

SEQ ID NO: 149065 - protein, 123 aa, Glycine max
  unsure (1)..(123): unsure at all Xaa locations
  Clone ID: PAT_MRT3847_105629C.1.pep
PPHPLFEGGFFKPIMSFPPPPPNSPPPVKFPPKLWPPNVYPDGGVCKSIFHPPGGAPNGFXLASERWPPVFPVEGIVLSFISRLFSPKNESPPNVXPAKGWGDRKDYFQKKVTPCVGKSQKML

SEQ ID NO: 149066 - protein, 46 aa, Glycine max
  Clone ID: PAT_MRT3847_10562C.1.pep
INAPTEPEGIVGSSLESMVFCQLDQLAAFRIMKDVKVALVIRCCYI

SEQ ID NO: 149067 - protein, 57 aa, Glycine max
  Clone ID: PAT_MRT3847_105630C.1.pep
ICLVRALFLTPFVIFRLFLFYLKYNLCGWGTTAESYRRLFLMGSKDIELCRYTSYGT

SEQ ID NO: 149068 - protein, 55 aa, Glycine max
  unsure (1)..(55): unsure at all Xaa locations
  Clone ID: PAT_MRT3847_105631C.1.pep
EDPXHTIKSALNSCTLTMDYVLSDLLLITNQNTGLTNPFNKYIKISKLDPLDLYI

SEQ ID NO: 149069 - protein, 87 aa, Glycine max
  Clone ID: PAT_MRT3847_105632C.1.pep
LNYFCIITSTTKIFFLRNIYDKIEATKKKKQNLMYKRKMIVYFILFNFKINYNVKHKGKKSEGLRQRWGTLLSGLPWSSLQALLSSS

SEQ ID NO: 149070 - protein, 231 aa, Glycine max
  Clone ID: PAT_MRT3847_105633C.1.pep
ESLISCVTGKGSEIGDFLTMHPGVNCISFTGGDTGIAISKKAGMVPLQMELGGKDACIVLEDADLDLAAANIVKGGFSYSGQRCTAVKVALVMESVANTLVKRINDKIAKLTVGPPEIDSDVTPVVTESSANFIEGLVMDAKEKGATFCQEYVREGNLIWPLLLDNVRPDMRIAWEEPFGPVLPVIRINSVEEGIHHCNASNFGLQGCVFTRDINKAMLISDAMETGTVQI

SEQ ID NO: 149071 - protein, 221 aa, Glycine max
  Clone ID: PAT_MRT3847_105634C.1.pep
SYRICFRTPQKPDSAIRFLRDHGFSNSQINSMVRRVPWLLSCDPCKRVLPKFQFLLSKGVSSSTIVDIVSKSPAILSRSLENTIVPSYDLVFRFLKSDDHTISCLFGNCIYYGRRDYIERNIRVLLDNGVGETNIARLLRNRCRAVFTSDILKVVEEVKDLGFDPSKSAFATALLALKSMSQTSWKEKVGVYKTCARSDEACRAAFKMHPHCMLGIIDKIL

SEQ ID NO: 149072 - protein, 45 aa, Glycine max
  Clone ID: PAT_MRT3847_105635C.1.pep
FPFAANLLLIPILTSMSSIMLLLLLETTNIYDTFLPKYKKKVFSK

SEQ ID NO: 149073 - protein, 82 aa, Glycine max
  Clone ID: PAT_MRT3847_105636C.1.pep
SPPPPPSRQASQFTHFASFPFVVQIQVAGPYFKYTNSTSQLLSTSTMKTNYMLTRNFLQWHLSCEVDSICELQFRPRVRGPW

SEQ ID NO: 149074 - protein, 57 aa, Glycine max
  Clone ID: PAT_MRT3847_105637C.1.pep
ELSMIPQRPLFLLVCYQESPILFLFTGEKMLDRVYPDENLVMQSHAKPNGDLITYFV

SEQ ID NO: 149075 - protein, 70 aa, Glycine max
  Clone ID: PAT_MRT3847_105638C.1.pep
VWKIKYCGNLIPLYIYGPTEILCDMKSSIIISHKSLPSIYRVIGKSYPIVYDNLVQSNNFPSAEYGGLKS

SEQ ID NO: 149076 - protein, 85 aa, Glycine max
  unsure (1)..(85): unsure at all Xaa locations
  Clone ID: PAT_MRT3847_105639C.1.pep
SPVFLCTGVTYXRSSFXKWLESGHNXXPXSLHVLPSKDFIPNLTLHRLIRLFLLSSSDNKPFFPFSFDHLRSLLRKIHTFYDDLS

SEQ ID NO: 149077 - protein, 127 aa, Glycine max
  unsure (1)..(127): unsure at all Xaa locations
  Clone ID: PAT_MRT3847_10563C.1.pep
PKPTHTRGPKGTPRKQPPQPPNHAKPPTHTTHGEKPXRQPPPPXRRTPETKPAEPRTPEPPGKPXTPHTERTKTAQTPRPTNKXANKPTPQQPTNTDRKSTANRGGDTTHRTNDRPRKERPEPTHEE

SEQ ID NO: 149078 - protein, 125 aa, Glycine max
  unsure (1)..(125): unsure at all Xaa locations
  Clone ID: PAT_MRT3847_105640C.1.pep
SLHRPCSTFCLFTYQHRISDGAFDKDGTLPKDGEAIPLKERDLVXLGMVYCHGKEIELGCTFGALCPWGASPQHLQARAALXNIDXLDRPEEGISSLSXYKEDTVRRDVQDLCRRSCIGILKDVV

SEQ ID NO: 149079 - protein, 73 aa, Glycine max
  Clone ID: PAT_MRT3847_105641C.1.pep
CLVCISKSRMSWSDLKECISNCKPAAIHDVISTNCPIVSYLLSQSSFQSCISCAFSSLYNVSIYRNDCPIIKF

SEQ ID NO: 149080 - protein, 90 aa, Glycine max
  Clone ID: PAT_MRT3847_105642C.1.pep
PMPYCWGPTLLTGSFCFSQGSFRTICSSVSRNPFTQKKPPLALSLLSLILIGLIPRTVCLPNVATNMAKIGLLEHVYKTQILTPPLQGDL

SEQ ID NO: 149081 - protein, 136 aa, Glycine max
  Clone ID: PAT_MRT3847_105643C.1.pep
RSVSYWRSYLDRLKENPNKDILDVLRISYDELQDLEKEIFLDIACFFCGNEELYVKKVLDCCGFHSEIGIRALVDKSLIDNSSGFIEMHNLLKVLGRTIVKGNAPKEPGKWSRVWLHEDFYNMSKATETTNNEAIV

SEQ ID NO: 149082 - protein, 52 aa, Glycine max
  unsure (1)..(52): unsure at all Xaa locations
  Clone ID: PAT_MRT3847_105644C.1.pep
HASDFFLISKIFRKKFESILSSAETSLSXLIMTIYTTREGSSTSNYNFIGVR

SEQ ID NO: 149083 - protein, 101 aa, Glycine max
  Clone ID: PAT_MRT3847_105645C.1.pep
FLRRAAFLKHNLWVTPYVPGEMHPGGEFPNQNPRVGEGLATWVQKNRSLEEADIVLWYVFGITHIPRLEDWPVMPVERIGFMLMVFHSKLAYFIAILSVQK

SEQ ID NO: 149084 - protein, 134 aa, Glycine max
  Clone ID: PAT_MRT3847_105646C.1.pep
DSREKRDTPIPVQLDHEKLHQTRTRRKATEGLKKALRLLSAQYAIFVSLHKIYQSEGVGGLYSGLEAEVLKGFLSHGLTMVMKDRVHVGVIQLYYALLMVTKKWPDELQKAQAKATHAIEDAKDKVQASAAHAI

SEQ ID NO: 149085 - protein, 141 aa, Glycine max
  Clone ID: PAT_MRT3847_105647C.1.pep
MLQRPRRRCEGTAMGAIVLDLRPGLGIGPFSLGMPICEAFAQIEQQPNIYDVVHVKYFDEEPLKLDVVISFPDHGFHLRFDPWSQRLRLIEIFDVKRLQMCYSTSLIGGPSTLATFVAVYALFGPTYPGIFDKDRRIYTLF

SEQ ID NO: 149086 - protein, 63 aa, Glycine max
  Clone ID: PAT_MRT3847_105648C.1.pep
GHSCFDCHRPRTFDIKERIQKVDAVHGDVTEAFRTCFSQFTLQASCSRCQWLISSRDPLYNVL

SEQ ID NO: 149087 - protein, 391 aa, Glycine max
  unsure (1)..(391): unsure at all Xaa locations
  Clone ID: PAT_MRT3847_105649C.1.pep
MLQRPRRRCEGTAMGAIVLDLRPGLGIGPFSLGMPICEAFAQIEQQPNLYDVVHVKYFDEEPLKLDIVISFPDHGFHLRFDPWSQRLRLIEIFDVKRLQMRYSTSLIGGPSTLATFVAVYALLGPTYPGIFDKDRGIYTLFYPGLXCLHGGVELPLQFPDMTTPVTCRVSIYDSSSGKKVGVGALMDKASAPPLPAGSIYMEEFHVKLGEELYFTVGSQHIPFGASPQDVWTELGRPCGIHQKQVDQMVIHSASDLRPRTTLCGDYFYNYFTRGLDILFDGQTHKIKKFVLHTNFPGHADFNSYIKCNFVVYGSDLGGSFQEVNNSKQRVITPSTKWEQVKEILGDCGRAAIQTQGSASNPFGSTLVYGYQNIAFEVMKNGYIATITLFQS

SEQ ID NO: 149088 - protein, 216 aa, Glycine max
  Clone ID: PAT_MRT3847_10564C.1.pep
MAKTRPGRKDVDSYTIRGTSKIVRAGDCVLMRPSDTSKPPYVARVEKIEQDNRSNVKVRVRWYYRPEESIGGRRQFHGAKELFLSDHYDVQSAHTIEGKCVVHSFKNYTKLENVGAEDYYCRFEYKAATGAFTPDRVAVYCKCEMPYNPDDLMVQCEGCKDWYHPACMGMTIEEAKKLDHFVCSECSSDDDMKKPQATFFASLGADGKVEPKRRKR

SEQ ID NO: 149089 - protein, 37 aa, Glycine max
  Clone ID: PAT_MRT3847_105650C.1.pep
MKLSNDYKLFSSSCLNHTRFDLDTERVYEDHGHLERS

SEQ ID NO: 149090 - protein, 182 aa, Glycine max
  Clone ID: PAT_MRT3847_105651C.1.pep
MPQQTKRTRSREGKGQKNYSNIYTITQQAAFSPSKVSLTSCVSLFTPNTFYVTILKTPSSIALSQLSHTSLFSVLSSIMKEVSAEGGGGLGQASSSVPAPQNGNSMQPSSMKISKSGEVYSYDYEETGDEPSRFEVWGWYLYEFCSYFVQTVLIPVVLPLMISQLQNLPMDPVRVWFKSHQG

SEQ ID NO: 149091 - protein, 113 aa, Glycine max
  Clone ID: PAT_MRT3847_105652C.1.pep
LYDIWILSSLCPTPNPPGHADFNSYIKCNFVIHGSDSVGGSFQEVNNSKQRVITPSTKWEQVKEILGDCGRAAIQTQGSASNPFGSTLVYGYQNIAFEVMKNGYIATITLFQS

SEQ ID NO: 149092 - protein, 118 aa, Glycine max
  Clone ID: PAT_MRT3847_105653C.1.pep
TETPKILATTQPTTSHPSSRRTNPQFWYLSFCGSINVNPENPHSVRIGYKRHGSHRRKEAPFGVANLHRRGNYPLSPGVLIASDPRRVSKCGRNRDLKEGNWALRYYTRRNYRGLRDG

SEQ ID NO: 149093 - protein, 90 aa, Glycine max
  Clone ID: PAT_MRT3847_105654C.1.pep
RISLYCEIHVNIPIKYSWDFTSFKCLKGDPPPKQRHSGISSLNIKGNQPILQKIETNNTLSKQLGCKISNTTNKGRIEIKWKKMEDNPTS

SEQ ID NO: 149094 - protein, 89 aa, Glycine max
  Clone ID: PAT_MRT3847_105655C.1.pep
KEMGEWIFFKICFIKKKGVLKMGFFLNFFEGGGGYFWFGAYWGYNKKREKFFLWGVLFFLSFYPPIYKKIFLKRVFLWAPVCFYFKKSI

SEQ ID NO: 149095 - protein, 48 aa, Glycine max
  Clone ID: PAT_MRT3847_105656C.1.pep
PPEGRRCAKQTHWGGTQKKKKPAALKDPGLPYPCMQRSTSSKVSPKFN

SEQ ID NO: 149096 - protein, 187 aa, Glycine max
  Clone ID: PAT_MRT3847_105657C.1.pep
ARGPPTLLPYVLACFEDQQVGGVGTSQRVKPCGNKMTIWEVLAAFRLTIRNIEIASSTHIDGGIPCLSGRTAAYRTVILKDPDFLHGFTNDLWLGKYHLNSGDDKFLTRWMVSHGWNTYVQVCKEAELLSTMKPNWRFLKQVLRWTRNTWRSDFRSIFTERYVWTKHSYVAYTMLDKFINPTLLVGP

SEQ ID NO: 149097 - protein, 90 aa, Glycine max
  unsure (1)..(90): unsure at all Xaa locations
  Clone ID: PAT_MRT3847_105658C.1.pep
RFRIVEKYREKLDSLKLHKLLGTNVLKCGTXNVLLDPNEVYEISMAISRPNIRKFVKDGFIIMKPSTIYLRSRASTMKDAPNKGRHSGYG

SEQ ID NO: 149098 - protein, 169 aa, Glycine max
  unsure (1)..(169): unsure at all Xaa locations
  Clone ID: PAT_MRT3847_105659C.1.pep
MALADIIPNSTLALNTTLWVCEHTTKFQRNSKGIFYNGNPLNYTLSVVSLQASLVCLSTTWLQSFLIPFGETTFIPQVLGGLLTVPSILGQIKNLDKLLFAPKPFYVCEAISLYGTLXXLFLMGVKIDISVLMRLGKKNWAIGLCSCVLPLILTISSAMLLRQILTPGT

SEQ ID NO: 149099 - protein, 62 aa, Glycine max
  Clone ID: PAT_MRT3847_10565C.1.pep
LCYPTAARCFHYSIISHSALCWLHVAHSGLCWFHYSILACFILTCPQTRLIVEFLCNKVPKS

SEQ ID NO: 149100 - protein, 41 aa, Glycine max
  Clone ID: PAT_MRT3847_105660C.1.pep
ITKVETKFSTSEIKWQAQLFYFSGRKLCSNFGNLIKLHVLN

SEQ ID NO: 149101 - protein, 42 aa, Glycine max
  Clone ID: PAT_MRT3847_105661C.1.pep
RKAPSGCKEFLGGKLGKKWMFQIFPGCPMLWVGVLGFNIMGE

SEQ ID NO: 149102 - protein, 61 aa, Glycine max
  Clone ID: PAT_MRT3847_105662C.1.pep
SHLQLKRLDLPIQAPRPVDVLHSDTRASRSGCNTNVVYRVLLQIIYPFVTHPCSLWKVSIV

SEQ ID NO: 149103 - protein, 96 aa, Glycine max
  unsure (1)..(96): unsure at all Xaa locations
  Clone ID: PAT_MRT3847_105663C.1.pep
GMLHDSFLQPESEECLYKVNPVAGQNWGLFFSESLEHDLSGPLFRYPLGIASEGNVPXLPGFXFFPDPKGCLFGNKITSSPPSPLLSLILDFVTNL

SEQ ID NO: 149104 - protein, 70 aa, Glycine max
  Clone ID: PAT_MRT3847_105664C.1.pep
DDTVAGPRPENGLGKLRKPHTFVFRFASGRESNRGTLKSSGENSPEDPVKVTQRFMIVKPPGGNQNPSGS

SEQ ID NO: 149105 - protein, 252 aa, Glycine max
  unsure (1)..(252): unsure at all Xaa locations
  Clone ID: PAT_MRT3847_105665C.1.pep
LAYGNQESKLIILASGGPQALVNIMRTYTYEKLLWTTSRVLKVLSVCSSNKPAIVEAGGMQALGLHLTDPSQRLVQNCLWTLRNLSDAATKQEGMEGLLGTLVQLLGSDDINVVTCAAGILSNLTCXTVLRAGDREDITEPAICALRHLTSRHQEAEMAQNAVRLHYGLPVVVKLLHPPSHWPLIKATVGLIRNLALCPANHAPLREQGAIPRLVQLLVRAHQDTQRRTSMGGTQQQFVEGVRMEEIVEGCT

SEQ ID NO: 149106 - protein, 52 aa, Glycine max
  Clone ID: PAT_MRT3847_105666C.1.pep
VEKGASSNQVDRWDYKLASRWLLPNILKKHLGVGFNSLGMAKKHSHKYSILF

SEQ ID NO: 149107 - protein, 252 aa, Glycine max
  unsure (1)..(252): unsure at all Xaa locations
  Clone ID: PAT_MRT3847_105667C.1.pep
MASNLRTNNFLRHVESMKLLPSGAGHISHLNAVILGESLATEEDDFVLPSEDFAGQANVQSPEQYSAHASGSIEDPAGFWSEIASEFYWKQRWGDKVCDENFDVRKGNIKIEWFKGGITNICYNCLDRNVEAGLGDKVAVYWEGNEPGLDGTLTYTQLLQQVCQLANYLKDIGVKKGDAVIIYLPMLMELPIAMLACARIGAVHSVVFAGFSAEALSQRIIDCXPKVVITCNARKRGSKPIYLKDIVDAAIN

SEQ ID NO: 149108 - protein, 73 aa, Glycine max
  Clone ID: PAT_MRT3847_105668C.1.pep
DGNLFYPGLTRYICSASCVGWQVATASSAGGVFFCGPCSSWGSQGSCPGEPGRARGSSCLACAALPLPIRDRT

SEQ ID NO: 149109 - protein, 112 aa, Glycine max
  Clone ID: PAT_MRT3847_105669C.1.pep
MACGCSSTTLAEKISWNCSVFVALMLVLSSCESNTSDFTSQMMLHGSVTGNISNNNNKACDEIYVVREGETLQTISEKCGDPYIVEENPHIHDPDDVFPGLVIKINPFTNRG

SEQ ID NO: 149110 - protein, 46 aa, Glycine max
  Clone ID: PAT_MRT3847_10566C.1.pep
LLNRVTLMSVFKLTIGFTLSFPLNYGFSSTPYKTISFFCIHSNLVQ

SEQ ID NO: 149111 - protein, 121 aa, Glycine max
  unsure (1)..(121): unsure at all Xaa locations
  Clone ID: PAT_MRT3847_105670C.1.pep
SFFSFFFFFFFFFFFFFFFFFFFFFLPKPNPGLRNNQKGGGPNPIKIKPPHPPPQKKTTPQNPPPITGKINKRAPPPPGXKSPPPLSPKTGPGGALKPPKNLGSPSPGGGGPFLSPPPNPP

SEQ ID NO: 149112 - protein, 172 aa, Glycine max
  Clone ID: PAT_MRT3847_105671C.1.pep
LIHILFIILVLYPELILPTIFLYLFMVGIWNFRWRPRHPPHMDTRLSHADAAHPDELDEEFDTFPFSRSSDMVRMRYDRLRSIAGKVQTVVGDLATQGERFHNLLSWRDTRATTLFVTFCFIAAIVLYVTPFQVVFLLIGFYVLRHPRFRQKHPSVPFNYFKRLPARVDSIL

SEQ ID NO: 149113 - protein, 248 aa, Glycine max
  Clone ID: PAT_MRT3847_105672C.1.pep
MIMGYQKPAWLEALYTQKFFVGCSYHENAKKNEKNVCCLDCCTSICPHCLPSHRFHRLLQVRRYVYHDVVRLEDLQKLIDCSNVQAYTINSAKVVFIKKRPQNRQFKGSGNYCTSCDRSLQEPFIHCSLGCKVDFVLKHYKDLSPYLRTCNSLQLSPDFLIPQDMGDEEMTRSTVVDCDEPMSSSSGSSGSENNMSMNMACTEIVRKRRSGWSTVCAKFMANSNKVSDEDMAISMSRRKGIPHRSPLC

SEQ ID NO: 149114 - protein, 66 aa, Glycine max
  Clone ID: PAT_MRT3847_105673C.1.pep
SIHVTPKNRFSYASLTTVDYDFNAVNLNEMVQTVLGCFLPNEVSAAVHEDGACKSTEQTCFLDANA

SEQ ID NO: 149115 - protein, 76 aa, Glycine max
  Clone ID: PAT_MRT3847_105674C.1.pep
AGQVQTKTRKGKQESPKGRARKKNREGGTKQQRPRLRTSPANVRVRFLNLFFLFFFFIFFYFFIFLFFFFFYFSRA

SEQ ID NO: 149116 - protein, 218 aa, Glycine max
  Clone ID: PAT_MRT3847_105675C.1.pep
MGNAMGSKKAKVMKIDGETFKLNTPARANDVVKDYPGHVLLDSHAVKNFGPRAKPLEPDYQLKPKKIYFLVELPKVKPEPLVTRRVRSSGIRGMNAQDRLDFLMLSKRSVSDLTMVKHGPKPENGGPTRVKMRLPKAHLERLMEESHDGSEVAEKIISLYMGNNAAVDGGGATVEAQKEVHNRKPRRKRVSFSPVEQGEIHEESAAPQQSLVYSSPSR

SEQ ID NO: 149117 - protein, 46 aa, Glycine max
  Clone ID: PAT_MRT3847_105676C.1.pep
TTVPKARFMCCSDPRGSLLTDPVESGADANANAHQSQKHILRIFGG

SEQ ID NO: 149118 - protein, 93 aa, Glycine max
  Clone ID: PAT_MRT3847_105677C.1.pep
QSHFFFVVFSFGSSAFQVKSQRSKFQVCFFLFFFLLGLFCFYLYFYVPFSFWVFVECFYDLLLDFVEEGFCFIFWGGFFSSYYTVVAENLMSC

SEQ ID NO: 149119 - protein, 126 aa, Glycine max
  Clone ID: PAT_MRT3847_105678C.1.pep
PEDFEIPVRPLLQRWVAEGFIQETGNRDPDDVAEDYLYELIDRSLVQVARVKASGGVKMCRIHDLLRDLCISESKEDKVFEVCTDNNILISTKPRRLSIHCNMGHYVSSSNNDHSCARSFVIVGLR

SEQ ID NO: 149120 - protein, 103 aa, Glycine max
  Clone ID: PAT_MRT3847_105679C.1.pep
QQFLSQSQTCHGSESASKLIHRSFSCTSFDGKPGFPFEPHPDTLMDFQCHALNSPENTFFAAQMRRVCSTGDLQNMKSTDMSQKGSPLLEEANFKVGRYSAEE

SEQ ID NO: 149121 - protein, 121 aa, Glycine max
  unsure (1)..(121): unsure at all Xaa locations
  Clone ID: PAT_MRT3847_10567C.1.pep
MATLKELLPPAKSSSTAYYDHTNDPWFKQRFSSEEEELESQLMRLERKLVPLHWRCSFMCSICPSYRVLDDXALPQCSIAESKHHVAFSXVSAPGSKILPVTVDDNGNVAYDTIVRQTETR

SEQ ID NO: 149122 - protein, 63 aa, Glycine max
  unsure (1)..(63): unsure at all Xaa locations
  Clone ID: PAT_MRT3847_105680C.1.pep
VKNLQSRALXVSMQLLKQSFQFRYLAKIYWTKTQKLLSDQFTHINITTINEKKNPRVEMVLQE

SEQ ID NO: 149123 - protein, 81 aa, Glycine max
  Clone ID: PAT_MRT3847_105681C.1.pep
ARGAGSGAGAGSGSGSGSSSYSSSGSSSSSGSGSGAGSEAGSYAGSHAGSSAGSGSSRAGSEAGSYAGSHAGSGSYGGNGK

SEQ ID NO: 149124 - protein, 76 aa, Glycine max
  unsure (1)..(76): unsure at all Xaa locations
  Clone ID: PAT_MRT3847_105682C.1.pep
MGXEXVHISIVVIGHVDSGKXTTTGHLIYKLGXXDXRVIXRXEXXXAEXNERXXXMPXCWXNLGEXXXGXXXXMLE

SEQ ID NO: 149125 - protein, 88 aa, Glycine max
  unsure (1)..(88): unsure at all Xaa locations
  Clone ID: PAT_MRT3847_105683C.1.pep
WIADGAHDIFKCAAVTETALAAAYKARMSRXRLLEXTLPKPNMVTAGSDSPKVPPEVTAEYTKQGLLETVPTGAPGGVNLPGGAKVKK

SEQ ID NO: 149126 - protein, 55 aa, Glycine max
  Clone ID: PAT_MRT3847_105684C.1.pep
SHISLCLLLAFKNILRMRSDKMNGLWTSPCTNERAQGFKNNLPSLSPLQLSIRLG

SEQ ID NO: 149127 - protein, 108 aa, Glycine max
  unsure (1)..(108): unsure at all Xaa locations
  Clone ID: PAT_MRT3847_105685C.1.pep
HNKKVEGKNSLKKXAYNIRKAIKYDMIASSLYSDHNKKIEDAIQQPIQSLDVNQRVQHVEFXYKMKQLESICNPIIPNMHHVSGGNTGETMYEKGPAAGSGTGGGTQN

SEQ ID NO: 149128 - protein, 75 aa, Glycine max
  unsure (1)..(75): unsure at all Xaa locations
  Clone ID: PAT_MRT3847_105686C.1.pep
PGWTEEDINVRLLLMGNGNNIILALSVMDTRVCDTLITXPAGLRMNYYFVERAMKKLEWWVMIDRVILLDGMYMP

SEQ ID NO: 149129 - protein, 55 aa, Glycine max
  Clone ID: PAT_MRT3847_105687C.1.pep
RNLLGCPLIADNTKDSKDHELLSVSSYVVTEVCWFCELPFGFVLYLHLPFCLCGC

SEQ ID NO: 149130 - protein, 99 aa, Glycine max
  unsure (1)..(99): unsure at all Xaa locations
  Clone ID: PAT_MRT3847_105688C.1.pep
SXAXLRXLGIXLENRXNSXXXXLXIHXXXIRIXAXXPQQQHHTXSSNXIFNXHPPPXMXPPCGXXXRXXYMDXXXXXXXAIKVLLXVFXXXEHXXMXXX

SEQ ID NO: 149131 - protein, 82 aa, Glycine max
  Clone ID: PAT_MRT3847_105689C.1.pep
PTTTTPRGRFFSPTGKNPRPPPFVPEGCPREWGFSPPVVEDRGANMVSWWFCPPLPFDLNALPFNNKAPPGDNNLPCPPLCF

SEQ ID NO: 149132 - protein, 68 aa, Glycine max
  Clone ID: PAT_MRT3847_10568C.1.pep
HGLACLLADPRYVAVDHTFRKGLALFGRPRSIAARAAFISRGGVVSCGLALLFQLTYGPTGGSNAPVV

SEQ ID NO: 149133 - protein, 30 aa, Glycine max
  Clone ID: PAT_MRT3847_105690C.1.pep
KYLYYNGIIDSINIDFFFLLLISLKIKNFI

SEQ ID NO: 149134 - protein, 266 aa, Glycine max
  unsure (1)..(266): unsure at all Xaa locations
  Clone ID: PAT_MRT3847_105691C.1.pep
LRELGQLEQDLVFGDATTKDVIKFFTMKEDITHENKLRLLMILASVXSXKFEGEKGQNLMRLAKLTEEDMNIVPNFRMLGGQPVTKKSLTAAFGLKFDIHKKKHAARKERPGEEEKWQLSRFYPIIEELLEKLMKNELSKEDYPCLNDPSPSYQGSPFSGPVNQNPHSMRSRRTPTWARPRGSEDGYSSDSVLRHASSDFRRMGQRIFVFIVGGATRSELRVCHKLTEKLKREIILGSSSIDDPAQFITKLKMITTHELSLDDIQI

SEQ ID NO: 149135 - protein, 72 aa, Glycine max
  unsure (1)..(72): unsure at all Xaa locations
  Clone ID: PAT_MRT3847_105692C.1.pep
YSRVRRNASPLIXAFKGTEHYLGSDLGRYDADVYPNLGYQVWEDPLNAPAVPYGSREYIRLGVPQGPGSARL

SEQ ID NO: 149136 - protein, 40 aa, Glycine max
  Clone ID: PAT_MRT3847_105693C.1.pep
GKLLKRHILSTFSSFYACYFKYNGIVFNHRFSPQLEVKLI

SEQ ID NO: 149137 - protein, 73 aa, Glycine max
  Clone ID: PAT_MRT3847_105694C.1.pep
ICPLCRNQKMLTHDSSSIFLSLPVPPPLSSHTLPFRFRFRSPRAPAPADRGVPAVRRDAAVPRVAHYAASQQP

SEQ ID NO: 149138 - protein, 79 aa, Glycine max
  Clone ID: PAT_MRT3847_105695C.1.pep
CNFFVWGKSVVSSDAFLRHTGERMFSYAYTNRNAPYNLCRCLGGFLPLPMTYTDWHTTCQLILTLVVLCETRLTGSLLL

SEQ ID NO: 149139 - protein, 88 aa, Glycine max
  unsure (1)..(88): unsure at all Xaa locations
  Clone ID: PAT_MRT3847_105696C.1.pep
SNVSSYIGMVSDTLRNTIPKAVVYXQVREAKLSLLNHFYTQIGKKEAKQLSQLLDENPALMERRQQCAKRLELYKAARDEIDSVSWAR

SEQ ID NO: 149140 - protein, 172 aa, Glycine max
  Clone ID: PAT_MRT3847_105697C.1.pep
EREKMRKLKYYLKLEEESQQKLREAEEARKREDAERKKKEEEERLRKLEEIAEKQRQRERELEEKENQRREALLGRAAAEPAPPARPLESGSAAPAAAAAAAAAPTPGKYVPKFRRERTESAGAAPPPETDRWNSSSRPDGDRWRSDDRRTAFGSGGGSRSSSTWSSSRNAR

SEQ ID NO: 149141 - protein, 405 aa, Glycine max
  Clone ID: PAT_MRT3847_105698C.1.pep
LTKVGAQEHRGLLLEHHYSERKEDQDDKLLEMEREEESKRLRLLKITEEAEQRALAPEFEQRKNQIIQGEIEERENEEAQALLQEAEKRIKKKGKKPIIEGDKITKQTLMELTLTEQLRERQEMEKKLQKLAKTMDHLERAKREEAAPLIEAAYQQRLVEERLLHDREQQQEVELSKQRHEGDLKEKERLVRMMGNKEIYQARVVSHRQAEFNRLRREREERISRILQSRRQEREKMRKLKYYLKLEEERQQKLHEEEEARKREDAERKKKEEEERLRKLEEIAEKQRQRERELEEKEKQRREALLGRAAAEPAPPARPLESGSAAPAAAAAAAAAPTPGKYVPKFRRQRTESTGAAPPPETDRWNSSSRPDGGDRWRGDDRKSAFGSGGGSRSSSTWTSSRNAR

SEQ ID NO: 149142 - protein, 68 aa, Glycine max
  Clone ID: PAT_MRT3847_105699C.1.pep
VHATEGQTVLISTNLIDQVLAHKEMPNMIGGLPANCKTTILCKLILGEIATTNSTIEVNEKTCVKQQH

SEQ ID NO: 149143 - protein, 131 aa, Glycine max
  unsure (1)..(131): unsure at all Xaa locations
  Clone ID: PAT_MRT3847_10569C.1.pep
LLSTSNGRSRAGIRPSISPPAQGQLKRLHATATIPSNQPPRLNIALGDIDKPLSYLVHSPYXSWFIEANTRYTRTLTVDTTSLFSNSKSPXTLSNATHDDLYDRLYTQQAVNHFLADTLLIHSISPVTSRL

SEQ ID NO: 149144 - protein, 37 aa, Glycine max
  Clone ID: PAT_MRT3847_1056C.1.pep
GLDLRIGGALLADARSHLPEEISRVHIRYDKLTLPSS

SEQ ID NO: 149145 - protein, 50 aa, Glycine max
  Clone ID: PAT_MRT3847_105700C.1.pep
PPQTHRPFLPFKAHGDFFFGDAEPCPNKALLGRLPPKKVGNGSPFQNLCF

SEQ ID NO: 149146 - protein, 89 aa, Glycine max
  Clone ID: PAT_MRT3847_105701C.1.pep
RTTTHNTLLLSPQNYNNLSSSLINRESLNYYGGDENADSRTLDLFPHKRDDQDGISLAERKSSSMLCASASMDTEITSNQFFEFLPLRN

SEQ ID NO: 149147 - protein, 84 aa, Glycine max
  Clone ID: PAT_MRT3847_105702C.1.pep
CDHSIVRWCRLTTLAVVIMDWDDNDSTCLELGRGTVEALWDTHVVGLTRGTGGCTTMFHMSLKRKLFYNWDNSGGTLHQTCKGE

SEQ ID NO: 149148 - protein, 78 aa, Glycine max
  Clone ID: PAT_MRT3847_105703C.1.pep
KIYEDDQLYTTIHIQAISGLPKSKLMGYEQELSSLRQEIEDNLAMAGQAMNKTLTQKPFAIEHGGDRSLSHSPMDRTH

SEQ ID NO: 149149 - protein, 58 aa, Glycine max
  Clone ID: PAT_MRT3847_105704C.1.pep
LQNVGSPNSRTYSSALPRKKTTLVFQGKPHLYQYARNSVLFFCISTMHCNRKGKRVVL

SEQ ID NO: 149150 - protein, 140 aa, Glycine max
  Clone ID: PAT_MRT3847_105705C.1.pep
MGCASSKKTVAGAGDSTPEGPCVVPSSSRRRSNNGLGRNQNGVVGEAREGEAREEWSKGSLREGNGSVSLMSPCKFVEAEQNAAGWPPWLTSVAGEAIQGWVPLKTDSFERLDWIGRMRLGSLLGVRVLLTKPFKGGSHS

SEQ ID NO: 149151 - protein, 71 aa, Glycine max
  Clone ID: PAT_MRT3847_105706C.1.pep
FITRMCILYVSCYIRHVSQYSVIHTPINCQSITVPRTVSNIVSRDFACLITLRYFRIMLSLSVWTCNIALR

SEQ ID NO: 149152 - protein, 81 aa, Glycine max
  Clone ID: PAT_MRT3847_105707C.1.pep
QISHNQTLLKCSSYKQSRVLSYKQLYKYFCYRKGNEVKLFWINGNHIGGIYPQFQAVSGIVTKPQPQFKTLKLSDAWADAW

SEQ ID NO: 149153 - protein, 156 aa, Glycine max
  Clone ID: PAT_MRT3847_105708C.1.pep
FFVIVEYIDETWKNNPILPSDPYQRALARFWSKFIDDKIVGAVSKSVFTVDEKEREKNVEETYEALQFLENELKDNKFFGGEEFGLVDIAAIFIAFWIPIFQEIAGLQIFTSEKFPKLYKWSQEFMSHPVVKEVLPPRDPLFAFFKARYESLSASK

SEQ ID NO: 149154 - protein, 209 aa, Glycine max
  unsure (1)..(209): unsure at all Xaa locations
  Clone ID: PAT_MRT3847_105709C.1.pep
MASSHEEVTLLGAIASAFACRVKIALKLKGVKYKYVEENLRNKSELLLKSNPVHKKIPVFIHNEKPIAESLVIVEYIDETWKNNPILPSDXYQRALARFWSKFIDDKIVDVARESVFTVDEKEREKNVTETYEGLQFLENELKDKKFFGGEEVGLVDIAGVYIAFWVPFIQEIAGLKLLTSEKFPKLYKWSQEFVNHPVVKESLPPRDP

SEQ ID NO: 149155 - protein, 53 aa, Glycine max
  Clone ID: PAT_MRT3847_10570C.1.pep
FKNAFNGGGANGPLPKMGFLNVGIALLGQRLPWGLVPTWGGPSKAGCNMYIWA

SEQ ID NO: 149156 - protein, 226 aa, Glycine max
  unsure (1)..(226): unsure at all Xaa locations
  Clone ID: PAT_MRT3847_105710C.1.pep
MASSQEEVXLLGTTGSPFVCRVHIALKLKGIQYKYVEENLRNKSELLLKSNPVHKKVPXVFIHNEKPIAESLVIVEYIDETWKNNPILPSDPYQRALARFWSKFIDDKVFGASWKAVFTADEKEREKNVEEAIDALQFLENEIKDKKFFGGEEIGLVDIAAVYIAFWVPMVQEIAGLELFTSDKFPXLQKWEQVFFEHXIVDESLPPRDPVFAFFKGRYEILFTSK

SEQ ID NO: 149157 - protein, 225 aa, Glycine max
  Clone ID: PAT_MRT3847_105711C.1.pep
MASSQEEVTLLGATGSPFVCRVHIALKLKGVEYKYVEENLRNKSELLLKSNPVHKKVPVFIHNEKPIAESLVIVEYIDETWKNNPILPSDPYQRALARFWSKFIDDKVFGAAWKSVFTADEKEREKNVEEAIEALQFLENEIKDKKFFGGEEIGLVDIAAVYIAFWVPMVQEIAGLELFTSEKFPKLHNWSQEFLNHPIVKESLPPRDPVFSFFKGLYESLFGSK

SEQ ID NO: 149158 - protein, 225 aa, Glycine max
  Clone ID: PAT_MRT3847_105712C.1.pep
MASSQEEVTLLGATGSPFVCRVHIALKLKGVQYKYVEENLRNKSELLLKSNPVHKKVPVFIHNEKPIAESLVIVEYIDETWKNNPILPSDPYQRALARFWSKFIDDKVFGAAWKSVFTADEKEREKNVEEAIEALQFLENEIKDKKFFGGEEIGLVDIAAVYIAFWVPMVQEIAGLELFTSEKFPKLHNWSQEFLNHPIVKESLPPRDPVFSFFKGLYESLFGSK

SEQ ID NO: 149159 - protein, 78 aa, Glycine max
  unsure (1)..(78): unsure at all Xaa locations
  Clone ID: PAT_MRT3847_105713C.1.pep
VAVNHFPVCTAIKLLYGDCCWTHTGLDCTXYRLFCTNNNVKWSNCSPYKLVSVLNFKYNWFNRTMRVSNVTLSPTGDI

SEQ ID NO: 149160 - protein, 225 aa, Glycine max
  Clone ID: PAT_MRT3847_105714C.1.pep
MAATQEDVKLLGIVGSPFVCRVQIALKLKGVEYKFLEENLGNKSDLLLKYNPVHKKVPVFVHNEQPIAESLVIVEYIDETWKNNPILPSDPYQRALARFWSKFIDDKIVGAVSKSVFTVDEKEREKNVEETYEALQFLENELKDKKFFGGEEFGLVDIAAVFIAFWIPIFQEIAGLQLFTSEKFPILYKWSQEFLNHPFVHEVLPPRDPLFAYFKARYESLSASK

SEQ ID NO: 149161 - protein, 69 aa, Glycine max
  Clone ID: PAT_MRT3847_105715C.1.pep
MPKYAKGESGSTGQELYESTGALYDGGQSCAGCAGAGEKAYKRLPGVREAIDDALNNRAHVMNYPCFDN

SEQ ID NO: 149162 - protein, 265 aa, Glycine max
  Clone ID: PAT_MRT3847_105716C.1.pep
MARNIGGLLALLLAVSICGAVTIPGPVSDAHRSAALELFDGSFSSLEEAYEALRVFEILGIGNKPDVSTTTCKKVAENLELSSPVKDLFYSLKVNGILKCKVDGDVFKDIALRLKATVNDASTLVEMYYSIGSLVLIKDQASDVDVLLTDADGTFHSIKALSQSDGRWRYSSNNPSSTYAAGLALEALAGVISLASSEIDQSRVNTVKNDILKLFDSIEKYDDGTFYDEKFVGGRELVLIKDQASDGDVLLTDADGSFHSIKALS

SEQ ID NO: 149163 - protein, 51 aa, Glycine max
  Clone ID: PAT_MRT3847_105717C.1.pep
SMRANPACSGYLVERDTSQLFLDLVILILGETIRTVRIVFLTLLERGINGI

SEQ ID NO: 149164 - protein, 67 aa, Glycine max
  Clone ID: PAT_MRT3847_105718C.1.pep
GSRKNTVGGTILRSDLLANSSTEGNFRASDQLLRTHRITRMIEMASTVGIPDNTGVALACAINSSYR

SEQ ID NO: 149165 - protein, 90 aa, Glycine max
  unsure (1)..(90): unsure at all Xaa locations
  Clone ID: PAT_MRT3847_105719C.1.pep
MLECLXLAXXQXKLWTTTSNLHLNXQTXXPLNYXFDSQILXRXXSLLFGFXXVWXRWTVILLRKGRCCRGXFXFAXYKVPIPXHRRXTXQ

SEQ ID NO: 149166 - protein, 66 aa, Glycine max
  Clone ID: PAT_MRT3847_10571C.1.pep
TLLVDLFLLLTGFPIHAHYSISLFPSLVTSYQGCDGFRNEVNFLYFILNCICEMVLAGMFITLLAR

SEQ ID NO: 149167 - protein, 46 aa, Glycine max
  unsure (1)..(46): unsure at all Xaa locations
  Clone ID: PAT_MRT3847_105720C.1.pep
HTHTASISKHLLQYQCATATSRVIIFTKSAPIITAERKMKTXELPR

SEQ ID NO: 149168 - protein, 34 aa, Glycine max
  Clone ID: PAT_MRT3847_105721C.1.pep
TELFICLSLGCEHLRFHLMFECSKIEANILWLEP

SEQ ID NO: 149169 - protein, 167 aa, Glycine max
  Clone ID: PAT_MRT3847_105722C.1.pep
MDSSSHQLLPFNENDPEDMLLYGIITSCQEKKVTINQEQVNKKRSSFRGVRRRPWGKFAAEIRDSTRHGVRVWLGTFDNAEAAALAYDQAAFSMRGSGAVLNFPVEKVKESLRDMKLDGCSPVVALKRRHSLAAKRKKEDVLVFHDLGADYLEHLVMCSDLPSTTIV

SEQ ID NO: 149170 - protein, 93 aa, Glycine max
  Clone ID: PAT_MRT3847_105723C.1.pep
MGAVILPNLGTKIAIPVCAIMGIRLALYQWVLVSKVKLCAGREANPNAGGKNGYNDDLIEQEEGLSDHNVERRCAEIQNANIEGANSVLCTEY

SEQ ID NO: 149171 - protein, 77 aa, Glycine max
  Clone ID: PAT_MRT3847_105724C.1.pep
SLQGDFFGQRQGSPPLHVVKPGPMNCLSGALYYNYSPRKRVFFFLYHFRSSALFFFFLAFFFFFFFFIPKEIYLHLN

SEQ ID NO: 149172 - protein, 129 aa, Glycine max
  Clone ID: PAT_MRT3847_105725C.1.pep
NCGSEKSPGPDGLNFKFIKQFWEMLKPKISRFIAEFHANRVFSRGTNASFIALIPKVKDPHHLNEYRPISLIGCVYKIVAKLLAHRLKVFPNIIDERQLAFITGRQLLHSVLIANEAVDKAKRLTSHAF

SEQ ID NO: 149173 - protein, 75 aa, Glycine max
  Clone ID: PAT_MRT3847_105726C.1.pep
QALHIPGAHANQMRAKLPISFSLFLKPHPLRYHFPKSWLESNTPQLMVEDRPFIILKPYTGTTNHSFTSHMPFSY

SEQ ID NO: 149174 - protein, 287 aa, Glycine max
  unsure (1)..(287): unsure at all Xaa locations
  Clone ID: PAT_MRT3847_105728C.1.pep
MTVQKEDLGLSLSLSFPLLSSSPSSHNPQKPSWNDPIFTSHASGEAGSFLRGIDVNRLPSVVDCEEEAGVSSPNSTVSSVSGKRSERETNGEENDTDRACSRGIISDEEDAETSRKKLRLSKDQSIVLEESFKEHNTLNPKQKLALAKQLGLRARQVEVWFQNRRARTKLKQTEVDCEFLKRCCENLTEENRRLQKEVQELRALKLSPQFYMHMTPPTTLTMCPSCERVAVPPSSAVDPATRHHHVPPSHPRAFPIGXHGQALRCPPSQILDSRKQNDKIEKKDRKP

SEQ ID NO: 149175 - protein, 189 aa, Glycine max
  Clone ID: PAT_MRT3847_105729C.1.pep
MAEYERSIQHQSKETAFQALNTIIQLHFEKTLEKKRAIDLQKKELYKLFQIFFIFLGLVFLVLAQSPRLQCRHCWIPITLLSIAHLIFYVSVAQTLRCINAFKYQRRCHKLTLGLATEKLRDIKIRLAAASAADADYDSVVADDEFEIHYQEPPETYFGKFKRNWALHFGFLILIYAFMISSSVVLLCF

SEQ ID NO: 149176 - protein, 83 aa, Glycine max
  Clone ID: PAT_MRT3847_10572C.1.pep
YLSHCEISTSSTLFSLESHSINSTSTLLILTTLHYPHPQQDPLPNPRVQFRCEVCPHQSFLNCVSWAIHNSHPQFPGLLIFPL

SEQ ID NO: 149177 - protein, 191 aa, Glycine max
  Clone ID: PAT_MRT3847_105730C.1.pep
MADYETSTSHNHHSKETAFQALNTIIQLHFEKTLEKKRAIDLQKKELHKLFQIFFIFLGLVFLAQAQSPRLQCRHCWIPITLLSMAHLIFYVSVAQTLRCINAFKYQRRCHKLTLGLATEKLREIKTRLAGAATNGADYDSVVADEEFEIHYQEPPESYFGKFKRNWALHFSFLILIYAFMISSSVVLLCF

SEQ ID NO: 149178 - protein, 136 aa, Glycine max
  unsure (1)..(136): unsure at all Xaa locations
  Clone ID: PAT_MRT3847_105731C.1.pep
QLEDGRTLAYYNIQKESTLHLLLRLRAXIQIFVKTLNLQTITLYVQSSXTIDNIHAKIHHIHGIPPHQQLLIFASKHLDHILTLHDYNIHIESTLHLELRLNHELQISINTLPHQTFTLDIAISNPTYIETSNIQH

SEQ ID NO: 149179 - protein, 62 aa, Glycine max
  unsure (1)..(62): unsure at all Xaa locations
  Clone ID: PAT_MRT3847_105732C.1.pep
RXXXPQDXQXTGRSPXLAXKXXQNSXXRXXYWERNRTMGXXXTGLXXSLEXXXXAXVRVXXX

SEQ ID NO: 149180 - protein, 62 aa, Glycine max
  Clone ID: PAT_MRT3847_105733C.1.pep
FMSMEAIEKLDLSFFSQANTNMNTSSFRKPLLLMKNKITLNNYCCSCTICHGYHHNQRQIFE

SEQ ID NO: 149181 - protein, 79 aa, Glycine max
  Clone ID: PAT_MRT3847_105734C.1.pep
WVRVPWLFPVCSCAVCFCFVLRCLVFFCGVSPSSLFLVPVSLACRSFPWFFSPVRCLFFALTVRGRPFFCVLSACLLRT

SEQ ID NO: 149182 - protein, 40 aa, Glycine max
  Clone ID: PAT_MRT3847_105735C.1.pep
SHSSPNGANAFTTTHLLTKLCLLRRIFLHFPGSGPNPRCT

SEQ ID NO: 149183 - protein, 79 aa, Glycine max
  Clone ID: PAT_MRT3847_105736C.1.pep
NFSSLKEYILRDLNSIFFSQVEHLSPKIYFRRFKSKFKAISFEMIYTLDDQDEGICVSHIAHTKKLPQSAYRVLIVVLR

SEQ ID NO: 149184 - protein, 368 aa, Glycine max
  Clone ID: PAT_MRT3847_105737C.1.pep
MAEPSSSKPAVPLLKDELDIVIPTIRNLDFLEMWRPFFEPYHLIIVQDGDPNRTIKVPDGFDYELYNRNDINRILGPKASCISFKDSACRCFGYMVSKKKYIYTIDDDCFVAKDPSGKDINALEQHIKNLLCPSTPFFFNTLYDPYRAGADFVRGYPFSLREGAPTAVSHGLWLNIPDYDAPTQLVKPLERNTRYVDAVLTIPKGTLFPMCGMNLAFDRQLIGPAMYFGLMGDGQPIGRYDDMWAGWCVKVICDHLGLGVKTGLPYIWHSKASNPFVNLKKEYKGIFWQEEIIPFFQSATIPKECTSVQKCYIELSKQVKEKLGAVDPYFTKLADAMVTWIEAWDELNSTTSEEASSKSANGAAAATK

SEQ ID NO: 149185 - protein, 51 aa, Glycine max
  Clone ID: PAT_MRT3847_105738C.1.pep
GLWSEGFVVFSWLVTSNGSKKVGCSLTFSKTPLPPLVLLSPPGGFFLLGRG

SEQ ID NO: 149186 - protein, 368 aa, Glycine max
  Clone ID: PAT_MRT3847_105739C.1.pep
MAQPSSSSKPVVPLLKDELDIVIPTIRNLDFLEMWRPFFEPYHLIIVQDGDPNRTINVPEGFDYELYNRNDINRILGPKASCISFKDSACRCFGYMVSKKKYIYTIDDDCFVAKDPSGKDINALEQHIKNLLCPSTPFFFNTLYDPYREGADFVRGYPFSLREGAPTAVSHGLWLNIPDYDAPTQLVKPLERNTRYVDAVLTIPKGTLFPMCGMNLAFDRQLIGPAMYFGLMGDGQPIGRYDDMWAGWCVKVICDHLGLGVKTGLPYIWHSKASNPFVNLKKEYKGIFWQEEIIPFFQSATLSKECTSVQKCYIELSKQVKEKLGAVDPYFIKLADAMVTWIEAWDELNNNTSEEVPSKPTNGAAAAK

SEQ ID NO: 149187 - protein, 247 aa, Glycine max
  Clone ID: PAT_MRT3847_10573C.1.pep
MSMASESSWVGRKPVKRIGGMSDALSIAADLGFSLSPPPSQEGLQNSSPTTGEKGRKDDKNVAHLTHVSEMEKKIETLARITTILKDVIQNKDRIIARLQQPYSLDCIPVEAEYQKQFSELLMKAASDYGALTASVADFQWSQNFKRVRPRLGEMLRPIPVALASCTRFFEAMSATRESFASLQKLRVGHFDSPLPRTPAGDPSQRVPGVSDCLTPPPWKTETNFDDLGIRNQRRQHLDQQVEDVNS

SEQ ID NO: 149188 - protein, 172 aa, Glycine max
  Clone ID: PAT_MRT3847_105740C.1.pep
DYSSAISFPGGHLPASLKVLHISNLKNLEFPTEHKPELLEPLPIYNSCDSLTSLPLVTFPNLKTLRIENCENMESLLGSGSESFKSLNSFRITRCPNIESFPREGLPAPNLTDFVVKYCNKLKSLPDEMNTLLPKLEYLQVEHCPEIESFPQGGMPPNLRTVWIVNCEKLLS

SEQ ID NO: 149189 - protein, 93 aa, Glycine max
  Clone ID: PAT_MRT3847_105741C.1.pep
TIMVSKSLLIGTILVHALLISHFSFISNASNSQVSHGSFLDSPHKLIKTIKRGRLLLYPPPPKLNVSPYCRQARPRTPPSPLTPPPSPPAPPN

SEQ ID NO: 149190 - protein, 491 aa, Glycine max
  Clone ID: PAT_MRT3847_105742C.1.pep
LEITYCDYNKLKFRTFLRKMFWEFGLACVANPSRRRRSSERSSAYGKKTNLEHNKAWLLAESGGCGAELTNADPQSVHSSFRFSFCSQVELESLSMSSSSAATVLMVNLDNGMSESRAREMKWRRMESLEKSISPVAHSLIRFSYGEIMSATRNFSKGRVLGRGALSCVFRGRVGILRTAVAIKRLDKENKESAKAFCRELMIASSLHSSNVVPLLGFCIDPEEGLFLVYKYVSGGSLERHLHGRKKGSSPLLWPVRYKVAIGIAEAVAYLHSGTERCVVHRDIKPSNILLSSRKIPKLCDFGLATWTSAPSLPFLCKTVKGTFGYLAPEYFQHGKVSDKTDVYAFGVVLLELITGRKPIEATRPSGDENLVLWAKPFLQKGKGAIEELLDPQLKCSLKFSNQMGRMIEAAAACVTNEESRRPGIREIIAILKGEEEPLLSKRKKSSFLGNGCVIDCYSQLQQTNNEMKSHLALAMLGVAEFEDDDYLYGR

SEQ ID NO: 149191 - protein, 50 aa, Glycine max
  Clone ID: PAT_MRT3847_105743C.1.pep
PNFRFVRPRRNLYRGSGSSSSIAHSSTSTLLSITILVHDKEPYQSLSLNK

SEQ ID NO: 149192 - protein, 221 aa, Glycine max
  Clone ID: PAT_MRT3847_105744C.1.pep
MSQESFIYSFVARGTMVLAEYTEFTGNFPAIAAQCLQKLPSSNNKFTYNCDHHTFNFLVEDGYAYCVVAKESVSKQISIAFLERVKADFKKRYGGGKADTAVAKSLNKEFGPVMKEHMKYIIDHAEEIEKLIKVKAQVSEVKSIMLENIDKAIDRGENLTILADKTETLHSQAQEFKKQGTHVRRKMWYQNMKIKLVVLGILLLLVLVIWLSVCHGFNCAN

SEQ ID NO: 149193 - protein, 98 aa, Glycine max
  unsure (1)..(98): unsure at all Xaa locations
  Clone ID: PAT_MRT3847_105745C.1.pep
MTGREILHTMKGKAGVETPDTGSGKGKTSNHITHGFHLMKGKPVHPMEDYLVXRNYSRKGQXLRLLAIFDGQLGHDGSSYLQNHLLQNILQQHDFWTE

SEQ ID NO: 149194 - protein, 46 aa, Glycine max
  unsure (1)..(46): unsure at all Xaa locations
  Clone ID: PAT_MRT3847_105746C.1.pep
TIPEECVEPTKDCLSVXQSRLNSTTVQQHAFFYAREHENHLNDIFI

SEQ ID NO: 149195 - protein, 121 aa, Glycine max
  unsure (1)..(121): unsure at all Xaa locations
  Clone ID: PAT_MRT3847_105747C.1.pep
IKPLRKRNCFALAALXXIPFQYKAAIELELLGRATGRSNKIVPRPPPAPYSELVPPARVLSNMPTFMDDERNQMACAICLTNKKDLAFGCGHMTCRDCGSRLTNCPICRQRITNRLRVFSS

SEQ ID NO: 149196 - protein, 651 aa, Glycine max
  unsure (1)..(651): unsure at all Xaa locations
  Clone ID: PAT_MRT3847_105748C.1.pep
MGSGWRRAFCTSDPDNSTIRTKHRTQSPTPSPRSCVSLGFLSSTITELSSNSSPKFQTKTNTSNSNSPLSPKLNLSLFGNSFKFRNNCGICSNSVKTGQGTAIYTAECGHAFHFPCVVSVSHARTNVCPVCDATWNDVPLLQNNAEKQNQPIHHHRSDSVSSYDDDEPLPSPLTCSAQIAPIPEDEENDDVSEFPGFFVDPKPQSSLRQNDGGDSRSVRVKLMPECAVISVSQSHETRALVLRVKAPPVLSXRDGGGLPMDLVTVLDVGNSMSGAKLHMLKRAMRLVISSLGAADRLAVVASAADSKRLLPLRRMTAQGQRAARRVVDRLVCGHGNSVGEEAMNIAAKVLEDRRERNTLAKILLLSDGHDNANNKNQRRFLSHVSSSIRFDCIKVPVLSYGFETKRTGLMHEPLEDDFALYVDRTLSVAVHDLRIQLGFSAPAEIRAVYSCSGGPTALSTSAARLGDLYAEEEKELLVEVRVPTSALGTHHVMTLRCVNINKDPVSQEFVYGAEHVFTVVPPPKSIPICGGRVERLRNVFITSRAVAESRRLAKHNDFSSAHHLLSSARALLAQLGSAEEYVRGLEAELVELQWQKQQQRVEREARWVDESGEVLTPTSAWRAAEKLAKMARMKKSLNKVSDLHGFENARF

SEQ ID NO: 149197 - protein, 65 aa, Glycine max
  Clone ID: PAT_MRT3847_105749C.1.pep
IFSFPTIFYRLSMGLADMLVITELHDPYARNVTSVFNAQSSLRRLDPWAPFVPSYRVTYPSRCCC

SEQ ID NO: 149198 - protein, 37 aa, Glycine max
  Clone ID: PAT_MRT3847_10574C.1.pep
LLLVRSQTRGLWLALAGVLQITLPIVGYMLMKVPVLT

SEQ ID NO: 149199 - protein, 213 aa, Glycine max
  Clone ID: PAT_MRT3847_105750C.1.pep
HASEDALQTCFSLWLLPEELISEILFRVPVRSLLQFRCVCKSWKTLISHPQFAMHRLRTSIAHPNIAHQQLTSSKLVSYSVHSLLQNSSIPEQGHYYSSTSHKYRILGSCNGLLCLSDINLTHVVLCNPSIRSQSKKFQIMVSPRSCFTYYCFGYDHVNDKYKLLVVVGSFQKSVTKLYTFGADCYCSKVIQNLPGDPTRKPGEVARGAVNWV

SEQ ID NO: 149200 - protein, 93 aa, Glycine max
  Clone ID: PAT_MRT3847_105751C.1.pep
HKPTQPNNQTAIQKYDINQPDPKPFVHKTQNQTLYPLMDGCKTPPLKRGRTPQTSLFHGGLTNPTVEKVANAPMLLMPQPNNRPTMSFKPPQP

SEQ ID NO: 149201 - protein, 567 aa, Glycine max
  Clone ID: PAT_MRT3847_105752C.1.pep
MDIGTYGYPTPAVKKIESYYDVPEGVDIRGRYDAEFAKILTKDALKFVADLQREFRNHIKYALECRREAKKKYNEGALPEFDPATRYIREQEWVCAPVPPAVADRKVEITGPVDRKMVINALNSGAKVFMADFEDALSPGWENLMRGQVNLKDAVAGTISLHDKARNRVYKLNDQTAKLFVRPRGWHLPEAHILIDGEPATGCLVDFGLYFYHSYSAFRRTQGAGFGPFFYLPKMEHSREAKIWNNVFEKAEKVAGIERGSIRATVLIETLPAVFQMNEILYELKDHSVGLNCGRWDYIFSYVKTFQAHPDRLLPDRVLVGMTQHFMKSYSDLLIRTCHRRGVHAMGGMAAQIPIKEDPVANEVALELVRKDKLREVKAGHDGTWAAHPGLIPACMEIFNNNMGNASNQIDTVKREDGANITEQDLLQIPRGARTMEGLRLNTRVGIQYVAAWLTGSGSVPLYNLMEDAATAEISRVQNWQWLKYGVELNGDGLGVKVNKELFGRVVEEEMARIEKEVGTEKFKKGMYKEACKIFTRQCTSPMLDDFLTLDAYNYIVVHHPRETSKL

SEQ ID NO: 149202 - protein, 229 aa, Glycine max
  Clone ID: PAT_MRT3847_105753C.1.pep
KYCNLIASQANVIIVSVEHRKAPEHFLPAAYNDSWAAPNGVPPLPPPTPRTGDPWLISHGDFSKVFIGGDSSGANLVHNLAMRAGVEVFPGGGKVYGAYLNHPYFWGSKPIGSEAVIGFEETPQSLIWNFAYPDAPGGLDNPMINPLAPGAPSLAQLGCSKMLLTVAGKDHLLFRDRTLLYYKAVKESGWKGQVELFEEEQEDHVYHMFNMETHQAKRLITIVANFLRQ

SEQ ID NO: 149203 - protein, 96 aa, Glycine max
  Clone ID: PAT_MRT3847_105754C.1.pep
SGLQIYDIVKYMITKRHTMDPKLRGYFDFAMDQALAYLLMSASSSAATIVCSWTNSVLAADKHVQMANACVALSFVAFVAFASSSVVSAFIFCRVN

SEQ ID NO: 149204 - protein, 79 aa, Glycine max
  Clone ID: PAT_MRT3847_105755C.1.pep
CCKMKLRSVDMCTKSPTTLVSRNRLTPIPHRTVPSSRLASKDTIGLIHSEDCITHVVNLMNKEYAIYYYILRSTISELN

SEQ ID NO: 149205 - protein, 70 aa, Glycine max
  Clone ID: PAT_MRT3847_105756C.1.pep
TEFLPAECFYPFCHPPFWDRFLILSPVINQFFSFQPPPPPHVLPTPLLNPPFIPPTPFKPLLNPFPFLIF

SEQ ID NO: 149206 - protein, 41 aa, Glycine max
  Clone ID: PAT_MRT3847_105757C.1.pep
TLQMIDKYNFFFKNSTLKKTEKVHAFNIKKNHIVNKPDIII

SEQ ID NO: 149207 - protein, 48 aa, Glycine max
  Clone ID: PAT_MRT3847_105758C.1.pep
FESPLVALFAHNGFCRSKTLLVTGVTGPVSSILNTLCQVGSKTRSTIF

SEQ ID NO: 149208 - protein, 122 aa, Glycine max
  Clone ID: PAT_MRT3847_105759C.1.pep
RGTITEARECGSARDLPWWDISKPKPRFQLHRCGLWPIWVLHFPWWLYRYPFFAHYSRCWRVTTSSTTCIRKMALVEDLCYYYLMLSSKLSTVELCLSFNLPFIIICLRLLGFVLGSWLGVI

SEQ ID NO: 149209 - protein, 67 aa, Glycine max
  Clone ID: PAT_MRT3847_10575C.1.pep
TVTYTSIRNNVTCCYTKTKYYHPHKALGLCQGVQLISHSYICRQVNVAHNHLTHIFTLVDFLWTWAL

SEQ ID NO: 149210 - protein, 79 aa, Glycine max
  unsure (1)..(79): unsure at all Xaa locations
  Clone ID: PAT_MRT3847_105760C.1.pep
GFFINIKSSSSLMQPTNDNHNSEYKISSHAGHPLYIGQMALMLKENSPPXTGVRXXXTWKKRKTPGGAEGGTKHFSPTL

SEQ ID NO: 149211 - protein, 138 aa, Glycine max
  unsure (1)..(138): unsure at all Xaa locations
  Clone ID: PAT_MRT3847_105761C.1.pep
MFNRPRGARAFNVLNWKHQGESSVTTGLLQDVPPEIELSDYRRIPSPGSESPSDLLNGESLNVEPIADLDFFFERLYCYYCEKGLWCIIIKWIVELLSLGFTICFSGFFLLYVDWNGLRNAXCGMDAVESGRSLCDLA

SEQ ID NO: 149212 - protein, 124 aa, Glycine max
  unsure (1)..(124): unsure at all Xaa locations
  Clone ID: PAT_MRT3847_105762C.1.pep
MPDFHDSLLTTTPPPSRPVPVREDCWSEEASSTLVDAWGRRYLELNRGNLRQKDWQDVADAVNALHGHTKKTHRTDVQCKNRIDTIKKKYKIEKARDSAYNGTLSCSWPFYEXLDALIXPNFSA

SEQ ID NO: 149213 - protein, 432 aa, Glycine max
  Clone ID: PAT_MRT3847_105763C.1.pep
KTLVDRLEVRNTATVPETDIQKTLVDNVTGRNATTFPETDTQKTLVDNFVGRSASTIPETDDKKTLADNDMGRSATTVPETDIQKTLLDNVTGSRDSENNLLDTVTGGSDRKSQVRSNKPQRKKEVKVPMRLSKRLAGLEPEVAPAERAIEYSTRKSCKEEPTATATLTNGVSDHHDAGEETKLTPQASDSLKTEVLGESLNQSEKSYDAQTGHKEQLQKVEAENIGDARSEPQLPLPFGNSWSDPCLEFAIKTLTGALPVDAGDIMPALPPGFDNPPYKQLHGNVVTSINQEAHDNSNQSQNKKELNMVSQPVLRSSSTSYENAPKFTTRHSYLDQGNIIRNLNEEPRHTGNITPPVHHSRNINSLTHEEPLKQNGQFVEGGFVTMGQQLFETGTCNHDNSESQDSAPFMNSWSDPCLEFAFKTLTGVIPV

SEQ ID NO: 149214 - protein, 57 aa, Glycine max
  Clone ID: PAT_MRT3847_105764C.1.pep
CSVTHTFGEYFKFEPKSRSPRLYFLLNKLEVIFFELASWLYYKLSTKHRRPKDQYLV

SEQ ID NO: 149215 - protein, 74 aa, Glycine max
  Clone ID: PAT_MRT3847_105765C.1.pep
MSCCGGNCGCGSACKCGNGCGGCKMYPDLSYSESTTTETLVMGEATFKINCFAEESMSMLMMDNFVMDMLKISI

SEQ ID NO: 149216 - protein, 33 aa, Glycine max
  Clone ID: PAT_MRT3847_105766C.1.pep
LCLYLESANHQQDSTTHHNSIPIAIQSISPTPI

SEQ ID NO: 149217 - protein, 165 aa, Glycine max
  unsure (1)..(165): unsure at all Xaa locations
  Clone ID: PAT_MRT3847_105767C.1.pep
MNNSSPALTLPSDTSPSVVNMFRINKVADRLAWIAQPGNRGEPLXFYNLCLSVCGGIDYALANGETPPKGDDLPLLVKQICQLKNDECSHAAMMVLLISIKNACEIGWFHTKESEELVSIADEIGKVYSSLGTINVRPRSCSPVIXSFMQNFYSKCKLGSYTCID

SEQ ID NO: 149218 - protein, 81 aa, Glycine max
  Clone ID: PAT_MRT3847_105768C.1.pep
FSLSFTPSFVKSIVCPLLGWWAAPFLLVLCPYFFWFFVRFFFIWFKSYFRSSFFFFVILPPTLVRKILVSLSYPTFYFVYC

SEQ ID NO: 149219 - protein, 621 aa, Glycine max
  Clone ID: PAT_MRT3847_105769C.1.pep
MELSSKKELLSRIVSTLTPTITLIFFFLVLSPSLCTSLGSTNTVGSELLKVAPSEFEGTVRTVVDVLQEVTSILSEFGSGFGDSRLSPRVRGRVSSRSSRFGSRAIPSLINQPQRTPSLTFSFLLFLAICTPLDAAHTDFAGSACLKVSPSHFAGSVTEVIAAIRQLASILSRFGSPLANFRLSTAIADCLDLLDLSSDVLSWALSASQNPKGKHNSTGNLSSDLRTWLSAALAHPETCMEGFEGTNSIVKGLVSAGIGQVVSLVEQLLAQVLPAQDQFDAASSKGQFPSWIKPKERKLLQAIAVTPDVTVALDGSGNYAKIMDAVLAAPDYSMKRFVILVKKGVYVENVEIKKKKWNIMILGQGMDATVISGNRSVVDGWTTFRSATFAVSGRGFIARDISFQNTAGPEKHQAVALRSDSDLSVFFRCGIFGYQDSLYTHTMRQFFRDCTISGTVDYIFGDATAVFQNCFLRVKKGLPNQKNTITAHGRKDPNEPTGFSFQFCNITADSDLIPSVGTAQTYLGRPWKSYSRTVFMQSYMSEVIGAEGWLEWNGNFALDTLYYAEYMNTGAGAGVANRVKWPGYHALNDSSQASNFTVSQFIEGNLWLPSTGVTFTAGLTV

SEQ ID NO: 149220 - protein, 75 aa, Glycine max
  unsure (1)..(75): unsure at all Xaa locations
  Clone ID: PAT_MRT3847_10576C.1.pep
HVRVEHVMPFRCNEKFRLRKIKNNQFKAVAKTKVXKISTKSQLQGPKLVFMVEGAMLKTVTPIPFYVVIDFKEGY

SEQ ID NO: 149221 - protein, 81 aa, Glycine max
  unsure (1)..(81): unsure at all Xaa locations
  Clone ID: PAT_MRT3847_105770C.1.pep
SSYLKKVVYIPDKIPFDPISCFEGDNMIDRSTNLDWYKGPTLLDALDQIIEPXMPFDKPLMLTLHDVYMIVGIGTCASVTC

SEQ ID NO: 149222 - protein, 65 aa, Glycine max
  unsure (1)..(65): unsure at all Xaa locations
  Clone ID: PAT_MRT3847_105771C.1.pep
MPGNKLAMHEFMVLPVGAPSFNGALTMGVXVYHLLKPVIKNKSGQDAINVGDQSGFAPNIQENKE

SEQ ID NO: 149223 - protein, 108 aa, Glycine max
  Clone ID: PAT_MRT3847_105772C.1.pep
QLPSSTGSLSSLTTLHLQNNQLSGTLYVLQDLPLQDLNIENNLFSGPIPPKLLTIPNFSKNGNPFNTTIIPSPPAVAPAPVAIGSSPQESPWKVAHGPSALTAPVPTS

SEQ ID NO: 149224 - protein, 93 aa, Glycine max
  unsure (1)..(93): unsure at all Xaa locations
  Clone ID: PAT_MRT3847_105773C.1.pep
FQGATVILGGPNGGAGVHLIYFFFTYEAILLKPQLFFFASNYSDRFKIPRVFFPPLEVXDGGEGFVSKHMILTHCLAPAQDIKFCFFCPQPMI

SEQ ID NO: 149225 - protein, 71 aa, Glycine max
  Clone ID: PAT_MRT3847_105774C.1.pep
MPRGKVVVTVKGKVAVTNSLRWSHSSAVAQGRGGVVAHVTMVRGGSAVGHSLTTLIVEREREGLKVEGLDI

SEQ ID NO: 149226 - protein, 77 aa, Glycine max
  Clone ID: PAT_MRT3847_105775C.1.pep
IGPGPNCGKECGTPPLIGLNQGESVEKHRNEVHLLCYSATTNIIISLLHYLLFILLALPRGNSDIPCAQLDQNWFGP

SEQ ID NO: 149227 - protein, 182 aa, Glycine max
  Clone ID: PAT_MRT3847_105776C.1.pep
MNSNFKPHCLSACHRHPSVPVTGFCALCLRERLAGIPSDDHPPPPDLRRSKSCSRPATSDPAPSPRRRSCAVRPRSTLSDLFTRDDTRKTKRSHKPNSEVRVCDDDDDDDDDADEETKTVKEFIDLEILQRSKRNAARDSRTFWNAATEKFKKWKWKHRSKKNGDADNNDDNNSDNANRNAA

SEQ ID NO: 149228 - protein, 435 aa, Glycine max
  unsure (1)..(435): unsure at all Xaa locations
  Clone ID: PAT_MRT3847_105777C.1.pep
LQKMLSEMQEVTELHPVPDAHVPVVKFKFNGVSVDLLYARLALWVIPEDLDISQESILQSVDEQTVLSLNGCRVTDQVLRLVPNIQTFRTTLRCMRFWAKRRGVYSNVAGFLGGINLALLVARICQLYPNALPDMLVSRFFRVYTQWRWPNPVMLCAIEEGSLGLPVWDPRRNPKDRYHLMPIITPVYPCMNSTYNVTSSTLRVMSDEFRRGSEICEAMEASKADWDTLFEPYXFFESYKNYLQIDITAENADDLRQWKGWVESRLRQLTLKIERHTYGMLQCHPHPGEFSDNSRPFHHCYFMGLQRKQGVPVNEGEQFDIRLTVEEFKHSVNAYTLWKPGMNIHVSHVKRSNIPNYIFPGGVRPTFPSKVTAENKQSSKSRASGHGQTEKPQGGKAVAVGADDVRKRKRSEDNMDNNPRNSSSPVSLAPPSREV

SEQ ID NO: 149229 - protein, 80 aa, Glycine max
  Clone ID: PAT_MRT3847_105778C.1.pep
SSSNRIETVNNILVSRGGDHRCTQKLKSVLLKISDSVLVFFPFLIIFFIVVVAQVHGSVFFFFFFLCFELRIFSEKGLLV

SEQ ID NO: 149230 - protein, 46 aa, Glycine max
  unsure (1)..(46): unsure at all Xaa locations
  Clone ID: PAT_MRT3847_105779C.1.pep
CRKIKAEXXKITLVCCRGEKMRGGELIARVAPNGSDHVRWLXNFKV

SEQ ID NO: 149231 - protein, 121 aa, Glycine max
  Clone ID: PAT_MRT3847_10577C.1.pep
LFLFPLGKVWVECPLVGSKKIKNFCQGKDWVGGPLTEFEKTLRFLGSPFPRFWGENKKLGGFLKLPPPFPPNQTQKGGKFLFSAPRGHKFFFFFKRGRVFWKGGGGVYNRAPPNLFCLWGY

SEQ ID NO: 149232 - protein, 166 aa, Glycine max
  Clone ID: PAT_MRT3847_105780C.1.pep
MVNFMLMITAELENLTNLQPQDGCDDPNFSYLFKLKCGRCGELSQKETCVVLNDTVPLPVGKSTTHLIQKCKFCGRDGTVTMIEGKGKPLTQEISESGKYAPLMLFDCRGYEPVDFVFGDGWKVESLEGTKFENVDLSSGEYAEYDEKGECPVMISNLRATFEVTK

SEQ ID NO: 149233 - protein, 166 aa, Glycine max
  Clone ID: PAT_MRT3847_105781C.1.pep
MVNFMLMISADLENLTNLQPQGGCDDPNFSYLFKLKCGRCGELSQKETCVVLNDTVPLPVGKGTTHLIQKCKFCGRDGTVTMIEGKGKPLTQEISESGKYAPLMLFDCRGYEPVDFVFGDGWKVESLEGTKFENVDLSTGEYAEYDEKGECPVMISNLRATFEVTK

SEQ ID NO: 149234 - protein, 63 aa, Glycine max
  Clone ID: PAT_MRT3847_105782C.1.pep
KQNDNFTPQDVAKTCLLILHVIGYQSLLSSTKRKEPLFLLLIYTYRNQHIPNIKMIQIVKSLK

SEQ ID NO: 149235 - protein, 98 aa, Glycine max
  Clone ID: PAT_MRT3847_105783C.1.pep
HERLTQIRRRNYCCDWGNNTKRSVGKDCTFADCCGRTRTTLLLNGLPERNSQRPLWLMFSQIGTGLLKGRNAWVQDFIRHSSPGGAHNDYGCSLTRRA

SEQ ID NO: 149236 - protein, 135 aa, Glycine max
  Clone ID: PAT_MRT3847_105784C.1.pep
RFPPRRLSQAFQCGASRHCPPTSLEPLPCWPLIDRPTKVLPFLLIHRISFPSPIPLEPTTDKTRTRYDSNDHNITTSHYYITSSFRLVPINRTQVSELTILNLSLYITWDRGRWSGRWRKWGCGWRWGARWGAGV

SEQ ID NO: 149237 - protein, 93 aa, Glycine max
  unsure (1)..(93): unsure at all Xaa locations
  Clone ID: PAT_MRT3847_105785C.1.pep
ATHTGGLWKDINGIDDKTDASMVXEDQEEITVELTEHTDCNKLRMMACRPAPSQVTWMGYATASXIXTSDYRITDSLADPTESYHKHVEEFAR

SEQ ID NO: 149238 - protein, 62 aa, Glycine max
  Clone ID: PAT_MRT3847_105786C.1.pep
RWYIKRLFQPWVGLEFKEPPGFQVEFPPTPTIKPRIYFRSKVPFPKRLSPIGRVGGRVWAAP

SEQ ID NO: 149239 - protein, 59 aa, Glycine max
  Clone ID: PAT_MRT3847_105787C.1.pep
NFKTICTDFHGRTQLGEKGQRYHCPLCMSTTKATFCQPLFFKRCLITTYACCIYPDHHH

SEQ ID NO: 149240 - protein, 108 aa, Glycine max
  Clone ID: PAT_MRT3847_105788C.1.pep
MEELAGAFGTSASLALRLGQTVFSSSSLLFMCLDVGFYSYTAFCYSATGWGFALPSSSTWLVAVACSVGLLVLPVQRRLIMIIFFGDMMLSCLSLAAACSTASIADLL

SEQ ID NO: 149241 - protein, 76 aa, Glycine max
  Clone ID: PAT_MRT3847_105789C.1.pep
SSRLHGFSCLSVKHRRSQSIFPGKIAFRLELSLNPNSKKHGPIHKSYDSVLPSTTYINDLNGVTPLIFCIAFGKVP

SEQ ID NO: 149242 - protein, 43 aa, Glycine max
  Clone ID: PAT_MRT3847_10578C.1.pep
REHIHEVSAWFWVLIMIPSYEHGHVCSALRSVREAPTTSNSST

SEQ ID NO: 149243 - protein, 174 aa, Glycine max
  unsure (1)..(174): unsure at all Xaa locations
  Clone ID: PAT_MRT3847_105790C.1.pep
MDTGGNSLPSAPDGVKRKVCYFYDPEVGNYYYGQGHPMKPHRIRMTHALLAHYGLLQHMQVHKPFPARDRDLCRFHADDYVAFLRSITPETQQDHLRQLKRFNVGEDCPVFDGLYSFCQTYAGGSVGGAVKLNHDQCDIAVNWAGGLHHAKKCEASGFCYVNDIXLAILXLLKH

SEQ ID NO: 149244 - protein, 386 aa, Glycine max
  unsure (1)..(386): unsure at all Xaa locations
  Clone ID: PAT_MRT3847_105791C.1.pep
MEDIEDLLIGSATPPGFRLPLAAAVGVGTKRNQLSSSSLSPSPAIPGTQTIFIKTFGCSHNQSDSEYMAGQLSAFGYSLSDDPDHADLWLINTCTVKSPSQSAMDTIISKGKSSNKPLVVAGCVPQGSRDLKELEGISIVGVQQIDRVVEIVEETLKGHEVRLLTRKKLPALDLPKVRKNKFVEILPINVGCLGACTYCKTKHARGHLGSYTIDSLVGRVKSVISEGVKEIWLSSEDTGAXGGDIGVNLPTLLNALVAELPADASTMLRIGMTNPPYILEHLKEIAEILRHPCVYSFLHVPVQSGSDTILSAMNREYTVSEFRTVVDTLTELVPEMQIATDIICGFPGETDEDFLQTINLIKEYKLPQVHISQFYPRPGTPAARMK

SEQ ID NO: 149245 - protein, 43 aa, Glycine max
  unsure (1)..(43): unsure at all Xaa locations
  Clone ID: PAT_MRT3847_105792C.1.pep
PHHPYEQLKCDIXLIXKGVTLAFFWFYTFLFTLYFFVFFFFFI

SEQ ID NO: 149246 - protein, 98 aa, Glycine max
  unsure (1)..(98): unsure at all Xaa locations
  Clone ID: PAT_MRT3847_105793C.1.pep
LNFTLFLPTPLLFCRKTPYLMVLRXLIPFPPPIIHIYIHLFFPYLHYLLTNHFINFLHLIHPFSNFLLLPQHTPTLYLPFLTSQFITTSFYFSYFPTS

SEQ ID NO: 149247 - protein, 51 aa, Glycine max
  unsure (1)..(51): unsure at all Xaa locations
  Clone ID: PAT_MRT3847_105794C.1.pep
HYMPTKIGAIACSHKVLSKIKDMPSPFRLEAREELXGSYFFSVGGFLKKNF

SEQ ID NO: 149248 - protein, 28 aa, Glycine max
  Clone ID: PAT_MRT3847_105795C.1.pep
WRYKVLNCGFSRNSHFRCNHSYNTKRNL

SEQ ID NO: 149249 - protein, 111 aa, Glycine max
  Clone ID: PAT_MRT3847_105796C.1.pep
SLTKFLRFRTMASHVNIGYHTSSSPYTNCTKILSHLKLTSNSYLHSPLMRDMTVLATSAAHYMDAHTCLSPDIARTLQNHNSTHFQHLLLGVYPQCQVACPPIHEQLLSSQ

SEQ ID NO: 149250 - protein, 39 aa, Glycine max
  Clone ID: PAT_MRT3847_105797C.1.pep
FSLCFLLNLPFFFFFFFFFFFFFFFFFFFFFLTKINSIN

SEQ ID NO: 149251 - protein, 43 aa, Glycine max
  Clone ID: PAT_MRT3847_105798C.1.pep
LHGKHFTGPVGLPDVDGRGGAAAEGVASSPIHEWCWDVSYSIK

SEQ ID NO: 149252 - protein, 177 aa, Glycine max
  unsure (1)..(177): unsure at all Xaa locations
  Clone ID: PAT_MRT3847_105799C.1.pep
KGHDGVSKGKXTIGLGQDRMDFXSEDEDVISMNLTVVTSLLEKCNVDPKQRGHLWTGSETGIDKSILFKTLLKQVFDASGNTDIEGEDSTNASYGGTDALFNCETWLESNSWHGRYGLGACTNTGAYTERPAGPTGXCGGIAMLARPDAAIGNESILMSSHMLQAYEFYKPNLAIEY

SEQ ID NO: 149253 - protein, 43 aa, Glycine max
  Clone ID: PAT_MRT3847_10579C.1.pep
HTGACASALSPLSLTLELGGICTSTRSMATISIPYCMKVWDIL

SEQ ID NO: 149254 - protein, 98 aa, Glycine max
  Clone ID: PAT_MRT3847_1057C.1.pep
ILAAGPFFGGPIKPAPPLWPPIVNGDLPHHRVYWGGPPIGGGLGGPIFGQVFLCFGPAPPSHEILFYSKPGPWKSRFLFQPPPFFFPPLQAFFFFPLN

SEQ ID NO: 149255 - protein, 76 aa, Glycine max
  Clone ID: PAT_MRT3847_105800C.1.pep
NTRVHILVGQASHGHGPAAPMGGPDPRPHGEKPQPEHAWTARTTAPDRERATDAHRQDKGRTRLLVIGAPGEGAKN

SEQ ID NO: 149256 - protein, 56 aa, Glycine max
  Clone ID: PAT_MRT3847_105801C.1.pep
SRSHYSAVLPRNSALVAHTPTSRSHYLNSNLEGMDTDTIPVPRLHSVNLKFGQPKL

SEQ ID NO: 149257 - protein, 31 aa, Glycine max
  Clone ID: PAT_MRT3847_105802C.1.pep
ARGCSEEAYQRNLCQGLEDILAIGLGFSSCD

SEQ ID NO: 149258 - protein, 45 aa, Glycine max
  Clone ID: PAT_MRT3847_105803C.1.pep
NKSTSTFFVVSNQAAKVPLYWEIPANGYEAFADDPDLLKGSCGKS

SEQ ID NO: 149259 - protein, 56 aa, Glycine max
  Clone ID: PAT_MRT3847_105804C.1.pep
GSHFPLRLRKFWKRRSVRAFSLLPPMAKRGCSARPLSWGTPGFFPSKRLLNPGPLI

SEQ ID NO: 149260 - protein, 57 aa, Glycine max
  Clone ID: PAT_MRT3847_105805C.1.pep
HDVWLRTGFRLLEQVQAVNMCISSRVHVGRWSYLNTVVCSMPLFFLIRVLYLVPSNW

SEQ ID NO: 149261 - protein, 500 aa, Glycine max
  Clone ID: PAT_MRT3847_105806C.1.pep
MGPLLYSSLLVLVLILRFVQRRRVKNLPPCPPSLPLIGNLHYIKSPLHRSLLSLSEKYGPIFSLWFGSRFVVVISSPTLLQECFTKHDIVLANRPRFLTGKYLFYNYSSMGSSPYGDHWRNLRRIITIDVLSTSRLNSFFEIRREETMRVIQKLARETCNGFALVHLRPRLTEMTFNNMMRMISGKRYYGDDIEAADAEEAKQFRDIMTEVMSLLGANNKGDFLPFLRWFDFDGLEKRLKVISTRADSFLQGLLEEHRSGKHKANTMIEHLLTMQESQPHYYSDHIIKGLIQGMLLAGTDTTAVAIEWAVSSLLNHPEILKKAKDEIDNMVGQDRLVDESDIPKLPYLQNIIYETLRLFAPAPLLLPHYSSEECTIGGFTIPRDTIVLINAWAIQRDPEHWSDATCFKPERFEQEGEANKLIPFGLGRRACPGIGLAHRSMGLTLGLLIQCFEWKRPTDEEIDMRENKGLALPKLIPLEAMFKTRPISEKVMQQLAIFGT

SEQ ID NO: 149262 - protein, 41 aa, Glycine max
  Clone ID: PAT_MRT3847_105807C.1.pep
VDHSISCALERSFLYHGRMYVSAWHICFHSNVFSKQMKVRL

SEQ ID NO: 149263 - protein, 32 aa, Glycine max
  Clone ID: PAT_MRT3847_105808C.1.pep
PKNIVNSTQNKTKRVFIIQKRINLFSLTTQPL

SEQ ID NO: 149264 - protein, 64 aa, Glycine max
  Clone ID: PAT_MRT3847_105809C.1.pep
PLCWKFVNDKSSHSMSLINRIHESFHRNSNTLQTYLNSPVLCYYRTLSSLLSSVRTRVRTRGSP

SEQ ID NO: 149265 - protein, 85 aa, Glycine max
  Clone ID: PAT_MRT3847_10580C.1.pep
LGSSRHVMFGSYTQCSVGAVQTLKGAPSFSIFGRSCYVEFEQHAGVNMHWCPSIGFVQSPFLCLRAPSGHMLVSQQIISVSVFSK

SEQ ID NO: 149266 - protein, 46 aa, Glycine max
  Clone ID: PAT_MRT3847_105810C.1.pep
DLTNMSIPLMRIWMKTHWNDNLSHNMIPQNINYTHLFLFTLSFPLL

SEQ ID NO: 149267 - protein, 129 aa, Glycine max
  unsure (1)..(129): unsure at all Xaa locations
  Clone ID: PAT_MRT3847_105811C.1.pep
LIRLGGISNYDIFPTRDCLSYSKINPGGNQIETYPFLQGDSLKKFXQKHGICVTAHTPLRGGAKNAEWCGTXFSCLEEQFLKGVGEKYKKTGAQNTLLWGIQKNTVGIPKSPKLERGKENFRGFHFEVS

SEQ ID NO: 149268 - protein, 505 aa, Glycine max
  Clone ID: PAT_MRT3847_105812C.1.pep
MPNPEAHHPSRSRARPSTSAAARPPARARVSLRQLLRVASVASGIQFGWALQLSLLTPYVQQLGIPHQWASIIWLCGPVSGLFVQPLVGHMSDRCTSRYGRRRPFILVGAVAIVAAVLVIAYAADIGWLLGDTADYRPAAITVFIVGFWILDVANNVTQGPCRALLGDLTSKDPRRTRVANAYYSLFMAIGNILGYATGSYSGWYKIFTFAQFGSSTISCANLKSAFFLDIAFIAVTTYISIMAAHEVPLNSSEAAHAEAGAGESGSAEEAFMWELFGTFKYFTTPVWIILSVTALTWIGWFPFTLFDTDWMGREIYGGDPNQGLVYDTGVRMGALGLLLNSVVLALTSLFMERLCRKRGAGFVWGISNIMMTVCFLAMLVVTYVANNMGYIGKDLPPTGIVIAALIIFTILGFPLAITYSVPYALISTHIESLGLGQGLSMGVLNLAIVVPQIIVSLGSGPWDQLFGGGNSPAFAVAAVSALISGLIAVLAIPRSGAQKARSHV

SEQ ID NO: 149269 - protein, 326 aa, Glycine max
  Clone ID: PAT_MRT3847_105813C.1.pep
MAITFGLVTPNSNTLCLTLTTPPLIANHRTTNVVFSGQSVFSYGHTNLSYSHQRASSFATIVCSAANKPSSSSEISSTAKIRSEVLSPFRSVRMFFYIAFVASGALGGFIATTQLIGALANSSRASEVPEILKGLGIDLAAVSLFAFLYFRENKAKNAQVARLSREESLSNLKLRVDEKKIIPVNSLRGIARLVICAGPASFVTESFKRSEPFTDSLLDRGVLVVPFVTDGNAPALEFEETEELATRRKRLWQLAPVYINEWSEWLDEQKKLAGVPFDSPVYLSLRLDGRVRGSGVGYPPWNALVAQLPQVKGMWTGLLDGFDGRV

SEQ ID NO: 149270 - protein, 100 aa, Glycine max
  unsure (1)..(100): unsure at all Xaa locations
  Clone ID: PAT_MRT3847_105814C.1.pep
IDXRLRXRIDXXYNEVQAQMEXXICXKLXLDDXETPKGSMLDLXIXQSXIALPKNTVGGTXLXXSEXLANFLTEGNFRASVDLQRXHRXKGMIKMVATVG

SEQ ID NO: 149271 - protein, 107 aa, Glycine max
  unsure (1)..(107): unsure at all Xaa locations
  Clone ID: PAT_MRT3847_105815C.1.pep
YNNIALEFNNRLMNLTIKLSQELPGLKVVLANAYYIMLSVIKRPQLYGLXNRHSVACCATGMYEMGYACSRCQMFSCAYAYRYVWXDSLHPTDMTYSLVAQYVVLRV

SEQ ID NO: 149272 - protein, 118 aa, Glycine max
  Clone ID: PAT_MRT3847_105816C.1.pep
RGTFVPKPILWGNCPPPLQKDNRAKNANFFYLPNQKFPPINPMGKPTKKIRGLIFNPNCLSQKKLEAPVLKVPLGFLLRKSLDFLKGKKANLAGSAPKPKGKNSPKPSGLMRVPSSFD

SEQ ID NO: 149273 - protein, 254 aa, Glycine max
  unsure (1)..(254): unsure at all Xaa locations
  Clone ID: PAT_MRT3847_105817C.1.pep
PRVRPRVRGRVGQDLRDHFYAHGEIESIKMVLQRACAFVTYTTREGAEKAAEELSNKLVIKGLRLKLMWGRPQTSKPESDGSDQARQQASVAHSGLLPRAVISQQQNQDQTQGRVYYNNPPGPPPLQQERSYYPXSMDPQRMGALVASQDGPPGGPSGSGENKPSSDKQQMQNYTHPMMPPPPGQYHHQYYPPYGYMPPVSPYQQYASPYNAAVAPSQTPAANHPYQHSMQPGSGQAAHAPAESGTSTSGSQQH

SEQ ID NO: 149274 - protein, 61 aa, Glycine max
  Clone ID: PAT_MRT3847_105818C.1.pep
TLFSILASFVGCLSFLSFNLIERWLAWYLAQEGNCRGTTTWVAGKLLGEFGRYCVLLRLRN

SEQ ID NO: 149275 - protein, 38 aa, Glycine max
  Clone ID: PAT_MRT3847_105819C.1.pep
VAESLRLNVKTMPSSALRGTTHRPCTQLIKDESFDYMS

SEQ ID NO: 149276 - protein, 67 aa, Glycine max
  Clone ID: PAT_MRT3847_10581C.1.pep
GVGFAVAFKTALYRIVISPMPEVVVCSLVESSTRLGTFRSGYPPSTTVCPGEATQTKPVVLPSTTLV

SEQ ID NO: 149277 - protein, 38 aa, Glycine max
  Clone ID: PAT_MRT3847_105820C.1.pep
NELTILSEISCAAIDVIWPYRFVQAIFHLTCLAIGDEG

SEQ ID NO: 149278 - protein, 45 aa, Glycine max
  Clone ID: PAT_MRT3847_105821C.1.pep
SPTRPYSPRYMDNGTVLAQRHDLSDHRRVDTPSMLTFMIDPTMYY

SEQ ID NO: 149279 - protein, 62 aa, Glycine max
  Clone ID: PAT_MRT3847_105822C.1.pep
RCEALNEYVTIYQEYYLQHALYHSRYFSRSLTDGQNFIHLRYHHRRDLLWLYHPMGGAANEP

SEQ ID NO: 149280 - protein, 107 aa, Glycine max
  Clone ID: PAT_MRT3847_105823C.1.pep
HASDGHEKVCFPPIFSAFTGHGLRQARRILSLAVIPLCVVTDLPYCSCPRGFCRRERLLLYLLGGRVASLPISYGRNACQCGDIGEWLDYAPILSYGPSSRLRPLSP

SEQ ID NO: 149281 - protein, 72 aa, Glycine max
  Clone ID: PAT_MRT3847_105824C.1.pep
PTLCSKKRRSFVAIEQKRCVKRGYINSLKLELPRQDTMFAERSFLDQGKPRNNRVSDQSSAYKCETCRTGDY

SEQ ID NO: 149282 - protein, 88 aa, Glycine max
  Clone ID: PAT_MRT3847_105825C.1.pep
KANGPPEGKAPKLGGLTKKGKGGFKKHGGLKPFEKGGFGPRDQKPNWGGKRFKKGGGTGNMGRKRGFLKTKTPGEETQLNGPQIKGPP

SEQ ID NO: 149283 - protein, 41 aa, Glycine max
  unsure (1)..(41): unsure at all Xaa locations
  Clone ID: PAT_MRT3847_105826C.1.pep
TCTRAESHPFNHVYAPVCKGWLNKVPDEIKRPFSGLIARXG

SEQ ID NO: 149284 - protein, 73 aa, Glycine max
  Clone ID: PAT_MRT3847_105827C.1.pep
MAEHDARDVQRPLDQWRSSKGGFMASMYILVLPALDNMGFEANMVSIVLYFYGVMHFDLASSANTLTGFMGST

SEQ ID NO: 149285 - protein, 54 aa, Glycine max
  Clone ID: PAT_MRT3847_105828C.1.pep
GKGSGINLWVERFNSGGATFFFFLCYFFLIFFVFLFFFFFLNKITRTILDCQHR

SEQ ID NO: 149286 - protein, 47 aa, Glycine max
  Clone ID: PAT_MRT3847_105829C.1.pep
REFNLFFWALRNIILFYYIGINKTKHSHYLFSNPPPTLTVATSNNPL

SEQ ID NO: 149287 - protein, 120 aa, Glycine max
  unsure (1)..(120): unsure at all Xaa locations
  Clone ID: PAT_MRT3847_10582C.1.pep
PAFPPQCAPPHARATAGGSTLRRRGGTRPIYGSKPRYHTQSRRLPSRRGSWVLPPPWCSQGQKEKKHQGRSTPAQPRTAPRTXNATFLXKXXXHSRRITRKTHLKGWTNLDASTLHNAPN

SEQ ID NO: 149288 - protein, 82 aa, Glycine max
  Clone ID: PAT_MRT3847_105830C.1.pep
ANDFSEKGKAPALLKNLRALWGNGEGLRGFFFPAYASKNQMWVWPLNKKKGGLGKPRASNKIVKFVQLRGRFFFYSFRGDIK

SEQ ID NO: 149289 - protein, 67 aa, Glycine max
  Clone ID: PAT_MRT3847_105831C.1.pep
FSQLFVCSTCDYSHAHTHHLYLVLMFFFFGNSMPCLVPWTHRQIFYSSRLGKKVTVTTSRNWTIGRP

SEQ ID NO: 149290 - protein, 154 aa, Glycine max
  Clone ID: PAT_MRT3847_105832C.1.pep
YFCLLLIYGGNECEHILIKKKKKKKKKKKKKKKKKKKKKKKKKKKKKKKKKKKNKKGGALFKGPSFPSPGLQIITFFLGPPNSISWPGFYNGGEGKTLGFPQLIPLEEHPLFPGWVITKKPRPIPLSKNLPTLMGKGTPPLRGPLSAGVVGVPP

SEQ ID NO: 149291 - protein, 68 aa, Glycine max
  Clone ID: PAT_MRT3847_105833C.1.pep
SRWWLTQCSSSLGTCSSLPSRSSTARSFCVLSSASNKRFSGQRMNKPYRRPPKEQGRVPTTSSLTQEP

SEQ ID NO: 149292 - protein, 215 aa, Glycine max
  unsure (1)..(215): unsure at all Xaa locations
  Clone ID: PAT_MRT3847_105834C.1.pep
MGHFEKPIIKVEPLDEPINSTKVVEDTEVDIMSWTNKGDFGPNKVEDPDATDYSSSFADTTSDAENGYRLSDAEVESEFLGDNGLANTSDGSAFPMRKRKLTNRWRNFIRPLMWRCKWTELRIREIDSQALKYSKELAEYDKGKHTAPDEFTLEEFGSKSLPFLGEQLRSKAKKRRRRKKVEDTTDIGSYTSRHYIFSYLENRSLXPDGYLADDF

SEQ ID NO: 149293 - protein, 70 aa, Glycine max
  Clone ID: PAT_MRT3847_105835C.1.pep
RFDLDLLIFFLLLFAMVIRVVHFYYHGSAYCTWCSFLMVIQLNPFLCSTTIYLSITILYISFPTCIFFLP

SEQ ID NO: 149294 - protein, 109 aa, Glycine max
  unsure (1)..(109): unsure at all Xaa locations
  Clone ID: PAT_MRT3847_105836C.1.pep
DFASKYSACVHTTQNGFFRHNDYLVKEKQLCAPKGSMRRLLGKEAHXGRLMGHFGVQKIVXMGXGHFYGPHMKHDVHEFCEYCIFCRDSKSXVMPDILYSPVSIPGYRG

SEQ ID NO: 149295 - protein, 75 aa, Glycine max
  Clone ID: PAT_MRT3847_105837C.1.pep
GVATLPPRGSGGERPPPPPRGQISPRPGRPKGRPKFPPPPKLNFRQKGVGKRPPPPGRGAGKPPPPKKKRNFFAP

SEQ ID NO: 149296 - protein, 145 aa, Glycine max
  unsure (1)..(145): unsure at all Xaa locations
  Clone ID: PAT_MRT3847_105838C.1.pep
YSVIITFCVVPNTTMSSLLYRLCRGLAPDGTPLLSSNSALPLPEIFLRGIAYLVKFNKPPAIPRIPELQNISRTSSTERAPMSLLSITICEPLTFLXFKLRSQWWQLLFRCVFWYSEKLQINTADAATPPKTLTLQLKSRSQTVF

SEQ ID NO: 149297 - protein, 60 aa, Glycine max
  Clone ID: PAT_MRT3847_105839C.1.pep
PSPSEGCLLRLSQYAFIAVKDTGFTSTDVLCHETTCVVRHKIVSDKLLDNTSVTHLVPIT

SEQ ID NO: 149298 - protein, 187 aa, Glycine max
  unsure (1)..(187): unsure at all Xaa locations
  Clone ID: PAT_MRT3847_10583C.1.pep
PKFDVFPGGAQGGKNGFAIPAGGGGFPSGKNPPRSPHFWGRPDGFEPKGFFGPTQNEEIXGGGGFGPFSRPGALVPNGGLSGFAFFPFGGGPRKWGGGPFVLGGAPGGVVLVVPNFWGGLKGAPESGGLGFGGPFFSQKGMGGRFKKGFYFRWPMGGGPFFFSGKGVFFFFGDNLDKFLGPPLWGFF

SEQ ID NO: 149299 - protein, 48 aa, Glycine max
  Clone ID: PAT_MRT3847_105840C.1.pep
YKIKCGVRRQISNDAYCLHLMKLLYHFDFLVLSVNNLSFFPACISLQH

SEQ ID NO: 149300 - protein, 48 aa, Glycine max
  unsure (1)..(48): unsure at all Xaa locations
  Clone ID: PAT_MRT3847_105841C.1.pep
IQGNHLTHTTIIYQYRIFXSHITNLPHFKPDEITTINNYSNEHLSLSP

SEQ ID NO: 149301 - protein, 139 aa, Glycine max
  Clone ID: PAT_MRT3847_105842C.1.pep
MATNHEPVLGYVVLYVKDVAESVAFYAKAFGYSVRRLDESHRWGELETGNTTIAFTPIHQHETDDLTGAVHNPGSCRERPPMEVCFVYSDVDAAYKHAVENGAVAVSEPELKEWGQKVGYVRDIDGNVVRMGSHVNPPK

SEQ ID NO: 149302 - protein, 57 aa, Glycine max
  Clone ID: PAT_MRT3847_105843C.1.pep
MAGDDALSTESRLTLYLPLARSSFLVVLCLLLLLSFFGFSFASTHTSPAFDVHNLHP

SEQ ID NO: 149303 - protein, 84 aa, Glycine max
  unsure (1)..(84): unsure at all Xaa locations
  Clone ID: PAT_MRT3847_105844C.1.pep
TNSNSTEHCDACQRTKPEPHAWELIFPIEVCGPDNGLEMWSFXWAYQTSWRVSVLIDISKRSTCIYILLXISHDLEMAGHTLMP

SEQ ID NO: 149304 - protein, 107 aa, Glycine max
  unsure (1)..(107): unsure at all Xaa locations
  Clone ID: PAT_MRT3847_105845C.1.pep
LRGSLGWFGLLVRAFGPPLFVAASSGAPGASCAASRVPGLFLVFVLGCGFSWSRWLLGLWRAPRXALFGSGRVVGRVLCEGAVRVSSSVGVGSVSGGVGRPGVSGPV

SEQ ID NO: 149305 - protein, 56 aa, Glycine max
  Clone ID: PAT_MRT3847_105846C.1.pep
DLDLNSLQPLFDLSAFFLNNTKRDSKCCVNEWTFIMRVPINTQLFNVVSMSMLCLC

SEQ ID NO: 149306 - protein, 158 aa, Glycine max
  unsure (1)..(158): unsure at all Xaa locations
  Clone ID: PAT_MRT3847_105847C.1.pep
PAYPSEYQGISGSXACQAQAFTLLVIVHSIGVNVVYGQAPLGFXGRYSNAFPDSXVIFGASSXRSWAMRVPWLEPLMXPDGLVFSGLEKDXQPWQERRYPEYMTHARLGSLNSVGGVATDLNAVRYVSLGVWLETSHSVVVFFQCVDHLCAHENSSGG

SEQ ID NO: 149307 - protein, 33 aa, Glycine max
  Clone ID: PAT_MRT3847_105848C.1.pep
MKAQASNSSQIQGQTSENGHFNTFQQLMDLAVS

SEQ ID NO: 149308 - protein, 49 aa, Glycine max
  Clone ID: PAT_MRT3847_105849C.1.pep
QFICTCKTERFSVSSYTIKEREKNSQVVSTCIIIAYTLCSLFHSAIIEF

SEQ ID NO: 149309 - protein, 37 aa, Glycine max
  Clone ID: PAT_MRT3847_10584C.1.pep
ESRRPRTCINACAQLCRKMNACHKFGPFVSINHRNQL

SEQ ID NO: 149310 - protein, 68 aa, Glycine max
  Clone ID: PAT_MRT3847_105850C.1.pep
VADLSVMSLLVLIIFIHFFFSFFSFAIIEAIDLHYLNHSCSSNKTFTPISFYNSNLQTLLTSLSSHAT

SEQ ID NO: 149311 - protein, 61 aa, Glycine max
  Clone ID: PAT_MRT3847_105851C.1.pep
DTFLPEQLGIPSNPFFSKCASERIFFRVWQKPLCYKNRAVDWCRKPLCPEMTAPLSECCIV

SEQ ID NO: 149312 - protein, 101 aa, Glycine max
  Clone ID: PAT_MRT3847_105852C.1.pep
DMRIIEGLCSLTVKTYYHVVLVPTGKRQEELSMVQGSWEMIAGQCFCSPRTTTLTTAMEFDFHDVVATSVLTLLKSTSYSSSLLLIPLSTSNYQRPSWRRK

SEQ ID NO: 149313 - protein, 152 aa, Glycine max
  Clone ID: PAT_MRT3847_105853C.1.pep
MSDPSRGRVTITLGRSGHVVKRDVSAADVSSFSSLHSAGTKRSVRDRIGSNADNSGWYGNGHSGNKRHRGDVSMQNGLDGSKDDLRLKLMRKSASRQTDSNGNKRHMDLRENLSKASHPLTNSYNSKQHGPESRETSLVRQIPSARSSDDLL

SEQ ID NO: 149314 - protein, 83 aa, Glycine max
  Clone ID: PAT_MRT3847_105854C.1.pep
SVSLKIGDGTARYRRATVCSSAVNILMIVSVITTNLFALYAFSSSPKDPHSHLHLLDKNFSLISEQVTLILREIDMSQKKLAQ

SEQ ID NO: 149315 - protein, 290 aa, Glycine max
  Clone ID: PAT_MRT3847_105855C.1.pep
MSDPSRGRVTITLGRSGHVVKRDASAVDVSSFSSIHSAGTKRSVRDRIGSNADSSGWHGNGHSGNKRHRGDVSMQNGLDGNDLRLKLMRKSALGQADSNGSKRHMDLREKLSKASHPLANTYNSKQHGPDSRETSLRQIPSARSSDKLLRMESMRSSYSPWTLDHIRRRSPDGFPSTSRGISPQRDVQDLHRRPVSRTYDGVRSELPISVAQRPSYVGDDQVQVQQSPQTVDGLLHALGLQKYAILFKAEEVDMTALKQMGENDLKELGIPMGPRKKILLAVLPRTKRQQ

SEQ ID NO: 149316 - protein, 189 aa, Glycine max
  Clone ID: PAT_MRT3847_105856C.1.pep
TRPEIKKLSGQQNLQQRIHHHAKIKEENNKLKIQNEELSAKLRKSDIFHSRVKEDLARLRASTGAKKSINLDEEQRLMIKLKEIEEEKVQLAQQLLRLSTNVLKVAGIARPTSDVNPSMAEEALQDLKNRITTLEMEQEDLKFKNKIIKEKIRLSELMPQASPLNPRSEENRLTPPRVSLAPFLSSFDR

SEQ ID NO: 149317 - protein, 50 aa, Glycine max
  Clone ID: PAT_MRT3847_105857C.1.pep
LQNKLSLFENPIWLSGSRYHHQWRSLSLTGTVCIDSWPTDIATLTPGMCS

SEQ ID NO: 149318 - protein, 138 aa, Glycine max
  Clone ID: PAT_MRT3847_105858C.1.pep
VEICIATPGRLIDFLECGRTNLRRTTYLVLDEADRMLDMGFEPQIRKIVDQIRPDRQTLMWSATWPKEVRQLAEDFLKDYIHINIGALELSANHNILQIVDVCHDVEKDEKLIRLMEEIMSEKENKTICFCETKRRCD

SEQ ID NO: 149319 - protein, 78 aa, Glycine max
  Clone ID: PAT_MRT3847_105859C.1.pep
GFHANLFGHKTKFFLLWEDIEDIQIIPPTFSSMGSPIIVITLWPGRGVDARHGAKTQDEEGRLKFRFQSFVSFNVANR

SEQ ID NO: 149320 - protein, 80 aa, Glycine max
  Clone ID: PAT_MRT3847_10585C.1.pep
PLSVLFQAWFLPNPTIRRSFQLGFFALSENGVYRNPIYSSDAPGELNIYNKKKAKKRGEKNLSGKLLILLFCVFLDSGNF

SEQ ID NO: 149321 - protein, 120 aa, Glycine max
  Clone ID: PAT_MRT3847_105860C.1.pep
ETFININFIYNPCWRKTKTLFFSLGQITTPLKKKSFKKVSGTNPNLHNGFKTPHTKKDHGKGATPFTSRNTGGIHNNADNENKKKTLAGPEGTPPGPKNAPPKAKRGKSPPPQGEKIPPK

SEQ ID NO: 149322 - protein, 113 aa, Glycine max
  Clone ID: PAT_MRT3847_105861C.1.pep
LIVFTNDMGCAIDDSVIAIVTDDHIYVGENACCKDKDLVHMEEHLKAFKAKRGDVFCYDRDERSMLALQGPLASFILMRLTKEDVSELYFGEFLVLCLIGSKCLLSLTWHTGE

SEQ ID NO: 149323 - protein, 81 aa, Glycine max
  unsure (1)..(81): unsure at all Xaa locations
  Clone ID: PAT_MRT3847_105862C.1.pep
XXQXHXPXRRPKAQXXXAXHGXNPPSXXGKATQKGTXRKLLKXHXXXKRXXPXXEPNQXPXXXALYHQXEIAGNHEXDTXG

SEQ ID NO: 149324 - protein, 175 aa, Glycine max
  Clone ID: PAT_MRT3847_105863C.1.pep
RKTEIREDGERLKIGGVEVGRKMSSMSFKVKDFFNGGPNQADKLVEDATSEALDEPDWALNLDLCDLINADKLSSVELVRGIKKRIVLKSPRVQYLALVLLETLVKNCEKAFSEVAAERVLDEMVRLIDDPQTVVNNRNKALMMIEAWAESTGELRYLPVYEETYKDDLTTTLVK

SEQ ID NO: 149325 - protein, 81 aa, Glycine max
  Clone ID: PAT_MRT3847_105864C.1.pep
HASDPNHNILRVTPALLRTIRLQNGIQVNRTREESSHRTCRLVCEIVILPGITTATMAYNLYCEVDSFQLRCATVCVNEKT

SEQ ID NO: 149326 - protein, 78 aa, Glycine max
  unsure (1)..(78): unsure at all Xaa locations
  Clone ID: PAT_MRT3847_105865C.1.pep
NGSLKNPFSLILGGSFLKKKVLFFLGGGVFQKNRGLFTRGGGSLENQFKKNHFDFNFRPPLCFRRAVAXPSLPPVLFF

SEQ ID NO: 149327 - protein, 60 aa, Glycine max
  Clone ID: PAT_MRT3847_105866C.1.pep
RHFNALWREKPWLFTFEFGPNHQCWFKKPFARTGVYFTRTFEALRLSFFEGSQNFPELFS

SEQ ID NO: 149328 - protein, 188 aa, Glycine max
  Clone ID: PAT_MRT3847_105867C.1.pep
TRPLQGRRHLTAHTQFTTFLCLSLFSIEFQVGVSEMGFINFPDMLRSVLGFMIRFFFRSFTKAMGFFFACFRIRDNRRTNTSQLITSSTQSTGVVVSRNRSSSLLSEEERDDSARIDGVGFEGDFQGLKDEAMFLKACGTLAGTPAEIRKASEKLKSLAPDKDSDPSRFHSWLPNTSVEKLQLDVQPF

SEQ ID NO: 149329 - protein, 74 aa, Glycine max
  Clone ID: PAT_MRT3847_105868C.1.pep
FSKRRTGLRKKANEISVLCDAQVALIVFNAKGKLFEYSSESSLLQSQTEIVLGKVFKLCGRDYNFVAIFGIVEN

SEQ ID NO: 149330 - protein, 67 aa, Glycine max
  Clone ID: PAT_MRT3847_105869C.1.pep
CAPIQVGCMIQCVQGGINFGRPPRKTKTMPGFNTQRVKQGPKVSVSHESKIEVMSPVATKEKGAAPG

SEQ ID NO: 149331 - protein, 250 aa, Glycine max
  unsure (1)..(250): unsure at all Xaa locations
  Clone ID: PAT_MRT3847_10586C.1.pep
VTLHFSLQVPTLDETTFDNLLSFGYYRKTCPQFESILHNKVKEWIQKDYTLAASLMRLHFHDCSVRGCDGSILLKHDGSERTAQASKTLRGFEVVDDIKAELEKQCPKTVSCADILTAAARDATFELGGPYWAVPYGRRDGKVSIAKEXNIVPMGHKNITSLIEFFQSKGITXLNLIVLSRAHTIKKISYNSIQYRLYNNQRTIKPDPTLDPKYINFLQSKYRXTSEYINLNTTTPKTFNNIYYINLQKK

SEQ ID NO: 149332 - protein, 112 aa, Glycine max
  unsure (1)..(112): unsure at all Xaa locations
  Clone ID: PAT_MRT3847_105870C.1.pep
RKLPCESCELNGLDSCDESCFEPPDEAKVLVVNLLYDVDRLKSAMLIEHVVTVVIXKLFITRKLTRVAVYAHVTMSTDEEAERALEQFNRYDIYGRLLTDDKASACGARHER

SEQ ID NO: 149333 - protein, 97 aa, Glycine max
  unsure (1)..(97): unsure at all Xaa locations
  Clone ID: PAT_MRT3847_105871C.1.pep
ASXXXXRXLXMXXVAGXQGGXXSXXLXSTMXXQRXXXXLXVXSVXXXXXXPXVSAYXWXXVXCVLXXXCSWVXWGQXFVGXXGTCRRLXFQXXIXXX

SEQ ID NO: 149334 - protein, 59 aa, Glycine max
  Clone ID: PAT_MRT3847_105872C.1.pep
QTQISTPLTKPPQAPSSTKAMKALEPRKPRHQYINSISQWGPNQQHTGCLVQDGQHKKL

SEQ ID NO: 149335 - protein, 66 aa, Glycine max
  unsure (1)..(66): unsure at all Xaa locations
  Clone ID: PAT_MRT3847_105873C.1.pep
XXMVXLTVVILGAXIXVXMSXXRLLVWLGNRKKEVSKESRRKAXXHKXXXWESHXTLXXPXXXKIX

SEQ ID NO: 149336 - protein, 82 aa, Glycine max
  unsure (1)..(82): unsure at all Xaa locations
  Clone ID: PAT_MRT3847_105874C.1.pep
PTRXXGLFILPSKVATILWGFDGKVATPNYGRTIKFSRSKLFPYQLIPSQIGSLQGLLPRFLIRLNLMQRAFLIGNLHHQDF

SEQ ID NO: 149337 - protein, 38 aa, Glycine max
  Clone ID: PAT_MRT3847_105875C.1.pep
KEIKSALCRLRFPWEKIRGNLLFARGIQSLVKGMLAYV

SEQ ID NO: 149338 - protein, 311 aa, Glycine max
  unsure (1)..(311): unsure at all Xaa locations
  Clone ID: PAT_MRT3847_105876C.1.pep
MLGLYFLDCQELSYGIAAIAPFSHRLTFNNWPSYIQRLRCKVNFEALIFVSHIKELGKAIVHRLRHPTEGNDYPLEETDKFGKQQTGKFVVLHLRFDKDMAAHSACDFGGGKAEKLALAKYRQVLWQGRVLNSQFTXDEELRXNRGVAHLTPEEIGLLLAALSFNNRTRLYLASHKVYGGEARLATLSKLFPLMEDKKSLVSTEEMAKVKGKASLLAAVDYYVSMQSDIFISASPGNMHNALEAHRAYMNLKTIRPNMRLLGQLFQNKSIGWSEFQLAVLDGHKNRQGQIRLRKENQSIYTYPAPDCMCRA

SEQ ID NO: 149339 - protein, 52 aa, Glycine max
  Clone ID: PAT_MRT3847_105877C.1.pep
SRISLCRLCCVLDHLWTYPKISLLSLIAHMHYVEVLSNVAAPHIFLIVNTLD

SEQ ID NO: 149340 - protein, 131 aa, Glycine max
  unsure (1)..(131): unsure at all Xaa locations
  Clone ID: PAT_MRT3847_105878C.1.pep
MRECFSIHIXGQAGIQDRNAXCELLXLEHGIXPMGTMPSDKTDGGGDDAVNTFFSETGAGKHVPRAGFVHLDPTVIDEVRTVTYRQLFHPEQLIIAXDYAANNLARGHYTNGKEIGDLCLDRIRKLADNCT

SEQ ID NO: 149341 - protein, 85 aa, Glycine max
  unsure (1)..(85): unsure at all Xaa locations
  Clone ID: PAT_MRT3847_105879C.1.pep
YFRLSNSDILREISYNLKSSIYXXNXINSISNTYIKPLLLHNMHLLNKTSTHALPFTLIIHYNSSYLTTFLPATHHSNFYPINFR

SEQ ID NO: 149342 - protein, 81 aa, Glycine max
  Clone ID: PAT_MRT3847_10587C.1.pep
RPLRRRAGYTPVPASALIAHNHSLTLASSHAHRPQLLLCPRSEADEIGERNHSRQEKKTYCSEGLYDRNLPDMVLILLISK

SEQ ID NO: 149343 - protein, 70 aa, Glycine max
  Clone ID: PAT_MRT3847_105880C.1.pep
GEKGETAAATSTAGFNGWGCHFRRGGKRSHPLLAASIQEQGVACGNPNKAIVTMATAPSHSRVQTAITSL

SEQ ID NO: 149344 - protein, 47 aa, Glycine max
  Clone ID: PAT_MRT3847_105881C.1.pep
ALNFLLCRAGSCVSCVGKIVKGDVDQSDGSFLDDEQIESGWVLTCVA

SEQ ID NO: 149345 - protein, 258 aa, Glycine max
  unsure (1)..(258): unsure at all Xaa locations
  Clone ID: PAT_MRT3847_105882C.1.pep
FIMLSDVLALGLSMVAIYFWSKPPTKNYTYGFLRLEIIVAFLNGLALIVISLGIMYEGIXRIIHPXPVESGIMILIAFIGLIANIVLTIILMISLKKENNINIQSALWHFIGDLLNSLGIIVAFVLIHFTGWNIVDPIISILISLIILRGGYKIIKNASKVLMERVPDRYDTDEIMGAMKDVEGVIDIHEFHLWSVTTNQSSLSAHVVISDDYIKSPYATINKVSDLLKTQYGLEHVTLQIENINLNHLDEEYFKQLQ

SEQ ID NO: 149346 - protein, 59 aa, Glycine max
  Clone ID: PAT_MRT3847_105883C.1.pep
MLDSKNVSAYYYFDVYDGLTERKSLYVLHNSSRIMLYYICTISVHTMLLAIPLDLTVKL

SEQ ID NO: 149347 - protein, 95 aa, Glycine max
  unsure (1)..(95): unsure at all Xaa locations
  Clone ID: PAT_MRT3847_105884C.1.pep
GTRRNWFYITITTVGIKNCGEYITNPPCVWVLLGPLWVFFLGTRYPGGGGASDTPXCTEGVVREATYSFLPRLLSFISFSSGAPLAFWASLMAGX

SEQ ID NO: 149348 - protein, 77 aa, Glycine max
  Clone ID: PAT_MRT3847_105885C.1.pep
AKDKGLLFTAIIEKANEAYKGRDIHCPCHLEASSSFAALGCIPFNLRNCYTDQTPYYGKITIHLYQRGSPSLDRNAE

SEQ ID NO: 149349 - protein, 39 aa, Glycine max
  Clone ID: PAT_MRT3847_105886C.1.pep
VPLCVIVAWILGIKMDHNFNILETGSLAVAITITDFTLQ

SEQ ID NO: 149350 - protein, 105 aa, Glycine max
  Clone ID: PAT_MRT3847_105887C.1.pep
KIKNWKPPGERLGTLKGPPPFLVFKPPPFFFFFFLGWGTTQSCPKNFFFLSNEPPFFLKNSRMRFFITLFPAALYPNPSPRRQMIDPKACRNSYTEFICCFQKLM

SEQ ID NO: 149351 - protein, 166 aa, Glycine max
  Clone ID: PAT_MRT3847_105888C.1.pep
MPPKFDPLQVVDVFVRVTGGEVGAASSLAPKIGPLGLSPKKIGEDIAKETAKDWKGLRVTVKLTVQNRQAKVTVVPSAAALVIKALKEPERDRKKTKNIKHSGNISLDDVVEIARVMSPRSMAKDLSGTIKEILGTCVSVGCTVDGKDPKDLQQEISDGDVEVPLE

SEQ ID NO: 149352 - protein, 60 aa, Glycine max
  Clone ID: PAT_MRT3847_105889C.1.pep
ANMDDLTEGITSSEFDPTPCNTLAYISTKGSVPLADSRQSALCDPHATLFDEQEPPGSRS

SEQ ID NO: 149353 - protein, 143 aa, Glycine max
  Clone ID: PAT_MRT3847_10588C.1.pep
MHSSFILGGFVINSTRTLSSAFSKALARACIRAFSPENDTTPPFTTLAECSTATAAHNIRWQIQFLGHCFALNGTGAIFTTFNENFASIRPLSFSYDACPTFTHLAECAALGHVQAQGFICFWDFPEIERLLLSCGSLGLHIL

SEQ ID NO: 149354 - protein, 38 aa, Glycine max
  Clone ID: PAT_MRT3847_105890C.1.pep
QLFTLTGLLRIQILGLLLNPLPPCHSELPKIIPSFFHR

SEQ ID NO: 149355 - protein, 68 aa, Glycine max
  unsure (1)..(68): unsure at all Xaa locations
  Clone ID: PAT_MRT3847_105891C.1.pep
IAGMHGAGSKGRLGYAXLIPFVXSMGTLKVLEXYFDLYRAXVDWQEGVAHIGELTYEVYVPXPTKTLL

SEQ ID NO: 149356 - protein, 396 aa, Glycine max
  Clone ID: PAT_MRT3847_105892C.1.pep
MANIFLHNGGNTCKATLYLLFITTTFFIANSARILDEVESQPQAIGNLPAPGATNPSLTTAPVTTTPQIDPATTLPSGQTSAPTTISQVGPATTLPSGQTPATAATMNPATTEDSGEEDDNQVEPPVPETEAPAAVTAPAEEETPAIPSAAPVTPNSLAKEPSFSFFMHDILGGSRPSARVVAGIVANTDVTGLPFSKLNNNLFPITGGIPLVNPKLNGIITNNNLPNLVGLSGAQSSTVFKNSGTSNTVTGGNNQPFVSAGNLPAGFTIQKLMFGSVTVIDDQLTEGHELDSAVIGKAQGFYLASSLDGSSQTILLTVLVHGGEHDQHHDVVDDSINFFGIHRTASSESEVAVIGGTGKYENARGYASLETLLKEDQHTTDGVDTILHFNVYLTE

SEQ ID NO: 149357 - protein, 69 aa, Glycine max
  Clone ID: PAT_MRT3847_105893C.1.pep
TRPSSFGGLCFAAEGISTEKTLRAAITLTRARSSIGSEARMCYLIAPIKGYTTAKPKALACVRGMFRVL

SEQ ID NO: 149358 - protein, 28 aa, Glycine max
  Clone ID: PAT_MRT3847_105894C.1.pep
MSLWLFTNIQERFLQFLHYPLLIKYKCV

SEQ ID NO: 149359 - protein, 160 aa, Glycine max
  Clone ID: PAT_MRT3847_105895C.1.pep
ICLHCTRPLQHNTPFTPPQQQSPSSFSTFNVLQTLHHLRNNPSHAPFFFTHLHHPISTYAVIIKILFCWNLQRQLDSLFLHLIKHHHPLPFPLLNFFETLLQDFNNNSFLLRAFNGFIKSCVSLNMFHEAIDFLFLTRRRGIVPDVLTCNFLFNRLVEHG

SEQ ID NO: 149360 - protein, 101 aa, Glycine max
  Clone ID: PAT_MRT3847_105896C.1.pep
HASAHASDSSERSRCGGTTTCYRRSTIIFCDKSGDAESTHAFMHRFRRFELIEQPPFFHSCHSDPSFVLHDSISLDLDLLPLLNHFDAFSNLLHAPSFSYQ

SEQ ID NO: 149361 - protein, 90 aa, Glycine max
  Clone ID: PAT_MRT3847_105897C.1.pep
LEPFSLSGVTSALGSILRRTSDSAIAGPSQTTIQLLKNVSSSRSRLEKKLSSRTTHQPNSSLVVKHRVISKAALERSASRTNNISLCAPS

SEQ ID NO: 149362 - protein, 104 aa, Glycine max
  Clone ID: PAT_MRT3847_105898C.1.pep
KMKKSTMAKTIPKPLSSIHPPHRSATSPPHKRRRRASRFQISRARATISPRTLRSSVCKKCPMALRLATTALYAHNRIACDILYNLAIICISDILRVRVFHFGA

SEQ ID NO: 149363 - protein, 70 aa, Glycine max
  unsure (1)..(70): unsure at all Xaa locations
  Clone ID: PAT_MRT3847_105899C.1.pep
LCCMFTCISXIXRVSYMFSLNDFPSPVFPPPFPGLERIWALVVGGDTLKCFIYSVKYCFLCQLXLKPPEX

SEQ ID NO: 149364 - protein, 88 aa, Glycine max
  Clone ID: PAT_MRT3847_10589C.1.pep
IKRKGVGINMEGMINYGANPGKDKEQCVRTEEGREEMWSGVKYKRCRLREACTISKNSPSIISASVVLERWPLVLPLLSSSSSRTDAW

SEQ ID NO: 149365 - protein, 134 aa, Glycine max
  unsure (1)..(134): unsure at all Xaa locations
  Clone ID: PAT_MRT3847_1058C.1.pep
ESINSILSAEFIRASLNDAAEKDVXXXSKAKARASLPMNGKDDEVKLEEEETNHFKDSLLPTVIGLLRTAKLPSVLRTYRDTLTADMKSAIKTAVAELLPVLACRGSESEFFSGDRAVDADGENFFVIIDYVCL

SEQ ID NO: 149366 - protein, 83 aa, Glycine max
  unsure (1)..(83): unsure at all Xaa locations
  Clone ID: PAT_MRT3847_105900C.1.pep
KKTLFRLLCALLISKGGHKSYCVHSPTPPLGVFFSSPPMKKCVTKKKIYAPKSSPFFFFFPLYIXHKMSLCLWRKNLWRCLGG

SEQ ID NO: 149367 - protein, 111 aa, Glycine max
  Clone ID: PAT_MRT3847_105901C.1.pep
KPWITPFWGSTFILTFFSKKRGKNGGGGGDINKKFGEQTPPKKVFFRGKKKNNRRKKTPYPEIFSKNCKRAPGEKKLSPRFLDQGGTKRPWRRKNPPLNRGKNQGFSPGKK

SEQ ID NO: 149368 - protein, 55 aa, Glycine max
  Clone ID: PAT_MRT3847_105902C.1.pep
MMPLLMLFSGIRNAFSSDELGLEILNIALPTTLALAADPIASLIDTAFIGHIGPV

SEQ ID NO: 149369 - protein, 50 aa, Glycine max
  Clone ID: PAT_MRT3847_105903C.1.pep
RRRPHVAKSTRFEMLNVLSVLSQLDRYWLILTVPSTRFTIISYDLFSHST

SEQ ID NO: 149370 - protein, 111 aa, Glycine max
  Clone ID: PAT_MRT3847_105904C.1.pep
KPPTSFFVPEGLCIHFFLQESGVNAGGGGGPSFLELDGLVFCPHIFLSSFSGGLVKPVFKKAEPGELVCLIIRLFFFSSGGFMVFCVPALAIIFFFFAPPFFWSPPLWRFS

SEQ ID NO: 149371 - protein, 90 aa, Glycine max
  unsure (1)..(90): unsure at all Xaa locations
  Clone ID: PAT_MRT3847_105905C.1.pep
MLXLLDTAIFCEDAXILTLIFKTPLRKLFIVSLYSVNRGRGPLVVSTVCATLMVVLASSLYSMSNIHQLTPDAFIIQPHLTNSLIFQTHA

SEQ ID NO: 149372 - protein, 63 aa, Glycine max
  Clone ID: PAT_MRT3847_105906C.1.pep
IFWVLFGVNLFFAPFPPSFFYFSLLGVSRLVTPALKKCRTAFLFFFPPGFKPGGENWKKKVGF

SEQ ID NO: 149373 - protein, 85 aa, Glycine max
  Clone ID: PAT_MRT3847_105907C.1.pep
KKKIFKLKTLQTINGGQNQSIALKQKKLKSDYSILGTPEFGPKNTSPNLAFCLALESNSLMSMRPNNLSLVDCAMAQVGSKSGNI

SEQ ID NO: 149374 - protein, 48 aa, Glycine max
  Clone ID: PAT_MRT3847_105908C.1.pep
LVKLFGMVLFIYISPHIVILPFSILSYYRLQTSCGLKCRNVWWHRGTT

SEQ ID NO: 149375 - protein, 43 aa, Glycine max
  unsure (1)..(43): unsure at all Xaa locations
  Clone ID: PAT_MRT3847_105909C.1.pep
VFFFXKENLFNIKFYLFCSQIDRLGFFQGRVTNPLENDQTPPF

SEQ ID NO: 149376 - protein, 68 aa, Glycine max
  Clone ID: PAT_MRT3847_10590C.1.pep
KVFATPLGSMREMAPDPKEEGKDQKKKKKAERSSKKLKSERFEKWESLSRRLRLCILKGSAHRRSKPS

SEQ ID NO: 149377 - protein, 223 aa, Glycine max
  Clone ID: PAT_MRT3847_105910C.1.pep
MCHLCQWNDKGRIVRCTKCKRKRFCLPCLRNWYPHLKEEDIAQECPVCCGNCNCKACLRSDEPIKKMKGKANTDEVQSCHLHQYLLQVLLPYLRQLDEEQMIENEIEAKMQGLSVSKLNIVKTDYAKDERVYCDNCKTSIFDYHRSCTKCSFDLCLICCRELRNGQLVGGADPIEWEFVFQGHDYMHAQKEKALKERKMVKQNASNADAKPEVREWSRCGWHA

SEQ ID NO: 149378 - protein, 60 aa, Glycine max
  unsure (1)..(60): unsure at all Xaa locations
  Clone ID: PAT_MRT3847_105911C.1.pep
KKNAFPPTRYLWXPVHKPCAGPAPPNQGWCKESGPQSTVTGKNTRLGPTEEKKRKKKKDP

SEQ ID NO: 149379 - protein, 90 aa, Glycine max
  Clone ID: PAT_MRT3847_105912C.1.pep
NSARARAESARVRLREDTEGYGCEKTTEGYGCEKTTEGYPLDHMFIKDPPLIEKIGWEEFKSVYLDKQNVKLDVDRFRPTLQKALELLHQ

SEQ ID NO: 149380 - protein, 629 aa, Glycine max
  Clone ID: PAT_MRT3847_105913C.1.pep
MAVEGVGENRMLRLKFTPRHKRSKSFPDKKRIEEDKPDNRIQASGRIKDMGYLAECDKARKNRSPTNEVHSTPKQEILQLERRLQDQFQVRSTLEKALGFRSSSLVNSNEMMIPKPATELIREIARLELEVVYLEQHLLSLYRKAFDQQLSSVSPTSKEESVKFPLTTHSARFINFSMPEVLTKRESSTEQSNEHKLETLSKEYDIYEPETFGKEHNRNLLEEKHLGSGVYRCHSSLSHCPAFTRESPPADSLAKSLRACHSQPLSMLEYAQSSSSNIISLAFHLGTSISDHDPVTPNKLSEDMVKCISAIYCKLADPPMTHPGLSSPSSSLSSASAFSIGDQRAMGRPRLGTLSSVDVRLDNPFHVEGLKEFSGPYSTMVEVSWRYRESQKSADTEKLLLNFRSLICRLEEVDPGRLKHEEKIAFWINIHNALVMHAFLAYGIPQNNVKRVFLLLKAAYNVGGHTISADTIQNTILKCRMSRPGQWLRLLFSQSSKFKAGDRRQAYALEQAEPLSHFALCSGNHSDPAVRVYTPKRVFQELEVAKDEYIRANLGVRKDQKILLPKLVESFSKDSGLCPIGVMDMILESLPESLRKNVKKCRLAKSRKCIEWIPHNFTFRYLISKDMVK

SEQ ID NO: 149381 - protein, 47 aa, Glycine max
  unsure (1)..(47): unsure at all Xaa locations
  Clone ID: PAT_MRT3847_105914C.1.pep
QSSLHTPXXQPXEXQQXQMDCIRSIHRYFRSYLDNLILCPGLLLITP

SEQ ID NO: 149382 - protein, 48 aa, Glycine max
  Clone ID: PAT_MRT3847_105915C.1.pep
ARGSDGLCHSNGCDTGVDPCDGVGQSIDIEWFPEDIERMFMTYCSSDD

SEQ ID NO: 149383 - protein, 586 aa, Glycine max
  Clone ID: PAT_MRT3847_105916C.1.pep
MAAATTSYSSAIAASSDTLAKPASTRTFSATNLALQSSSSKLGFKSLKLHRCAAAAGSALGARMVSAPAVKAPALLDFDTKVFKKEKINLAGHDEYIVKGGRDLFHLLPDAFKGIKQIGVIGWGSQGPAQAQNLRDSLAEAKSDIVVKIGLRKGSRSFAEARAAGFSEENGTLGDIWETVSGSDLVMLLISDSAQADNYEKILSHMKPNSILGLSHGFLLGHLQSLGLDFPKNISVIAVCPKGMGPSVRRLYVQGKEINGAGINASFAVHQDVDGRATDVALGWSVALGSPFTFATTLEQEYRSDIFGERGILLGAVHGVVESLFRRYTENGMNEDLAYKNTVESITGIISKTISTKGMLAVYNALSEDEKREFEKAYSASYYPCMEILYECYEDVAAGSEIRSVVLAGRRFYEKEGLPAFPMGNIDQTRMWKVGERVRSTRAAGDQGPLYPFTAGVFVALMMAQIEILRKKGHSYSEIINESVIEAVDSLNPFMHARGVSFMVDNCSTTARLGSRKWAPRFDYILTQQAMVAVDNGTPVNRDLISNFLSDPVHGAIKVCAELRPTVDISVPPDADFVRPELRSSN

SEQ ID NO: 149384 - protein, 153 aa, Glycine max
  Clone ID: PAT_MRT3847_105917C.1.pep
VNVAHRILFPSERRLCDCIFSRFSSVAALCFNEVCRGALIQLLNFAEAVASGSPSEWRLSKILDMFETLRDLIPEFQSLFPESMVKEVMKVHDKLGEASRVIFMNMENVIFHIPETKVIAPADGRVHLMTRHVIRYLVCTSQAQKILEQMLEQ

SEQ ID NO: 149385 - protein, 166 aa, Glycine max
  unsure (1)..(166): unsure at all Xaa locations
  Clone ID: PAT_MRT3847_105918C.1.pep
GSSSSYLAVVVFTHNFLDPMEMCKEKDHTAVSGMAHFNSGKTTTTGHMTIHPLRNVTQGVLTIFXPQEADAMNTRPSKALXLATPDPGSACQTIIITIWVXTVENSAYYGALLGTPGHRGLIRNKDNATYEADCAVLIIDSTTGGFEAGISKDGQTREHALLSFTL

SEQ ID NO: 149386 - protein, 85 aa, Glycine max
  Clone ID: PAT_MRT3847_105919C.1.pep
CAPHSPSLSLCLMDCQNNNDTDAPIHAWIAFDTLARCSPRDSDRVIMCSLAVSLSLSLACTSGFHFSYRISNLGFLRCFFLFSAP

SEQ ID NO: 149387 - protein, 91 aa, Glycine max
  Clone ID: PAT_MRT3847_10591C.1.pep
RGFHFAMGFWGIEVKPGRPCAYDADNVRGKLHVTQVLHSYTQLLFLFFIHRTRGSWISVVQETLSFWSCKFLSVGVPNNCCCFSLIICMKV

SEQ ID NO: 149388 - protein, 95 aa, Glycine max
  Clone ID: PAT_MRT3847_105920C.1.pep
KIKGAPLTKNFRGKPPNLKNLEKSSKTGNFFLAPKTLEILKRFPPSPIKIFNPGITKTFGNKNFSLPSLFCPQLKMGKKSPGKKHPRWLFQGHPL

SEQ ID NO: 149389 - protein, 54 aa, Glycine max
  Clone ID: PAT_MRT3847_105921C.1.pep
ADAFAPAVASGLICGDGIWTLPASILALAGVKPPICMKFLSRAANARVDTFLGN

SEQ ID NO: 149390 - protein, 242 aa, Glycine max
  Clone ID: PAT_MRT3847_105922C.1.pep
HASAHASAARFSHFEPSAALSQEYVHKKESSFGSVIKEPQNYLLDTENNMKKSCGNSNGFQMHTGIVYQDRSSAGSPRRFSVTKFAPEYCKSGSALNDGPFQSKPSCDFGLQQYVDITKMKENTVPPAKPTDCESGSSQMGLQLVDLKEFITQKQQALLCTGDVNSGCNVNNCSEYNSSRSAEHVLPLPSSVLDATTTPENSARKVSTEKLNVQMLLDTLQNLSELLLYHCLNDACELKELG

SEQ ID NO: 149391 - protein, 204 aa, Glycine max
  Clone ID: PAT_MRT3847_105923C.1.pep
MNDMRTLDLNGSNHQLTDYPLSYNGSSEANLHSVGYTDPFSFAKDDLEKVQADCLSAIALQLLLKLKRHLKIMYSLDDARCQAYSPTEQPKPGEVISRQNIAFNIGDSQFSLPTSPQELIQRYQEFKHALREDTVDYSHYTANIKRKRPTTTPRRVQVRKPVYVAGGYDNGDDDEDYTGGSATRKISFSGRRSSLKNSRQYGLM

SEQ ID NO: 149392 - protein, 126 aa, Glycine max
  Clone ID: PAT_MRT3847_105924C.1.pep
AGSSASLPEISNLEDSSFKVGKLSVEQRKEKINRYMKKRNERNFSKKIKYACRKTLADSRPRVRGRFAKNDDFGETNRTTSSNHEEDDEEEVVVKDEDDMVDSSDIFAHISGVNSFKCNYSFQSWI

SEQ ID NO: 149393 - protein, 70 aa, Glycine max
  Clone ID: PAT_MRT3847_105925C.1.pep
SLSLSLSLSVSVCINVNRVGERVGNDAQKWARDDECEEKVDRQANCNQMHSEDEIGRERERELDFFFFLS

SEQ ID NO: 149394 - protein, 76 aa, Glycine max
  Clone ID: PAT_MRT3847_105926C.1.pep
LRIKIQSSMIHTLVVKPIDNTASTGHNTTVKTKLLHDQNHHIIRNFQRPDTQRDIVTILRSSRGARRHTLYTLSKF

SEQ ID NO: 149395 - protein, 62 aa, Glycine max
  Clone ID: PAT_MRT3847_105927C.1.pep
LGAHTIYENGQSYAGCCQSGSWIRLLGTIQKTIRWITLSFVKCASISNSPSYVHDRVEFSVL

SEQ ID NO: 149396 - protein, 31 aa, Glycine max
  Clone ID: PAT_MRT3847_105928C.1.pep
AQLSSHSESPTYHPPNAWVAGCYSSSTMRET

SEQ ID NO: 149397 - protein, 53 aa, Glycine max
  Clone ID: PAT_MRT3847_105929C.1.pep
DRDKNFCVNQNGISFSKKKKKKKRKKKQKKKKKKKKKKKGRPPIDTVVLDRYP

SEQ ID NO: 149398 - protein, 60 aa, Glycine max
  Clone ID: PAT_MRT3847_10592C.1.pep
EARQVRPSGHSVHSSDEPSSHVSPSARKSLSMDPLRELTSRFLFLLSRVSLIFFFGRVCV

SEQ ID NO: 149399 - protein, 117 aa, Glycine max
  Clone ID: PAT_MRT3847_105930C.1.pep
IRYKVMRWRDKVGEEGVGGCSEVISRTYSIKQSKTKKLVQMTAGAEKKLPDTTLATFSTHFFIHTKTQDSERKKERKVLSFLIHHSFTGQRYRHPITYIQSQQVRSQYSTQHQRQST

SEQ ID NO: 149400 - protein, 53 aa, Glycine max
  Clone ID: PAT_MRT3847_105931C.1.pep
KGKGFLFAPGFLAGYINLDIEKRGAYINSNLLNRKRWTCPQTRGFVGPKGKHW

SEQ ID NO: 149401 - protein, 175 aa, Glycine max
  Clone ID: PAT_MRT3847_105932C.1.pep
KKKPGQGKFKIKAPWKGFPGEKRGGGNGFPKSRNPGTAPQGKNIGGRAQSPLYTIGNNPPPPKKKKPPRALSKSLKKSFGRGGLGGRGGNRGPLGGVGFGGKRPTFGSLGIIPRGGNGGSLKRGGLRGGGLNHPKGRFFSGLGNGWKKLGGGKISFNGNLGVLKNKGKGHNPLHF

SEQ ID NO: 149402 - protein, 52 aa, Glycine max
  Clone ID: PAT_MRT3847_105933C.1.pep
SLVGHLRKALEPFLHILQKTFSGLWLRCSCLYLFHFTICSKVLYLVNFHICT

SEQ ID NO: 149403 - protein, 48 aa, Glycine max
  Clone ID: PAT_MRT3847_105934C.1.pep
MKSENAFSGNQITTTMPIRKQDEKLRSYINNALKARYNKSRITGKTKR

SEQ ID NO: 149404 - protein, 83 aa, Glycine max
  Clone ID: PAT_MRT3847_105935C.1.pep
PRLRPLVRPRLLIALLYLHTGQAKNQTTPDSRNPNPTSLPLCPWLTNESFEPPTHNLPNPSSHNNITMRLLNSTNINPSPNQP

SEQ ID NO: 149405 - protein, 73 aa, Glycine max
  Clone ID: PAT_MRT3847_105936C.1.pep
LGVRGATPTKLPKLQTSQEKKTKVKTKKYNAFLSTKHQRKKKCFLTTLAPDPTVFTGRDPTRNVKPRILYLLV

SEQ ID NO: 149406 - protein, 40 aa, Glycine max
  Clone ID: PAT_MRT3847_105937C.1.pep
RCSSSSLTRSLCDYPILLLLDPTSLDSFFGMQMTTITHFS

SEQ ID NO: 149407 - protein, 117 aa, Glycine max
  unsure (1)..(117): unsure at all Xaa locations
  Clone ID: PAT_MRT3847_105938C.1.pep
MVQXAAEFADEDSKVKDRVDGRNALEGYLYSLKNNVEDKLEDKMDEDDKDTVLTAVQDAMDWLEDNQEADKEDFEAKQKEVEKIVNPIMSKVYQKGGAAPEGDGDYDEEDDEEHDEL

SEQ ID NO: 149408 - protein, 267 aa, Glycine max
  Clone ID: PAT_MRT3847_105939C.1.pep
MATAPSLLHSSGSSFFSQFRAFQFSSSLLFPHGNKHGNAVVSVKASVSGVVLVEKSEAEKANRLKTAYTEKIIPLLMEEFSYTNKHQVPKIEKIVVNCGIGDAAQNAKGLDAAISDLALITGQRPIKTRARASLATFKIREGQPLGISVTLRGNMMYSFLDRVVNLGLPRTRDFQGVNPNSFDGHGNYSIGIKDQGVFPEIRADVVGKPRGMDICIATTAKTDQEAHKLLALMGMPFREGSGPATTIRKKKLKSHHFDAKSKGRGRK

SEQ ID NO: 149409 - protein, 87 aa, Glycine max
  Clone ID: PAT_MRT3847_10593C.1.pep
YLSKSSSRSLAVTFPKLPAIYFCVASESECGGTSQSYDQDIQKTPFEYGPSLLHGPLEGGPEQSIAEPNTSNPSSYAKIESSTVSQN

SEQ ID NO: 149410 - protein, 36 aa, Glycine max
  Clone ID: PAT_MRT3847_105940C.1.pep
CVRTDTRGLQHLNIPTKMAVWVIFIVLLLAALILMP

SEQ ID NO: 149411 - protein, 52 aa, Glycine max
  Clone ID: PAT_MRT3847_105941C.1.pep
ILLRREKKKKKKKKKKKKKKKKKKKKKKKKKKKKKKKKKKKKKKKKKGGAPP

SEQ ID NO: 149412 - protein, 68 aa, Glycine max
  unsure (1)..(68): unsure at all Xaa locations
  Clone ID: PAT_MRT3847_105942C.1.pep
GXAEFICXLXNCXXKEXSXKXRTSLCXXXFPLXRXLGXEXSAXXXGXXRIFFVXXXLXLNSLXXLSLF

SEQ ID NO: 149413 - protein, 40 aa, Glycine max
  Clone ID: PAT_MRT3847_105943C.1.pep
TLYVFNRDHRLAELRTGNKSDRYLSSRISQILPNSLWTIS

SEQ ID NO: 149414 - protein, 146 aa, Glycine max
  Clone ID: PAT_MRT3847_105944C.1.pep
MAETDVPETPAASETPATGPSVKEFTLEDVKSHNLAKDCWMVIRDGGIRKVYDVTTFLDDHPGGPEIMVDVAGQDATDEFEDIGHSNDARAQLKQYEIGKIKGDTKQQVPSASTSSGRQDISGQNGPLYAVVAAVVVFAAFYIQYK

SEQ ID NO: 149415 - protein, 130 aa, Glycine max
  Clone ID: PAT_MRT3847_105945C.1.pep
FRASGARLFRLFCSLSASGSLGVRLPICPRLSILWPRRPSFPCPGPLFPGCVWCTRPFRLGPLCLCNCRWPSFLGRPLLCPWWRPPSVVFVLPLVTGLCPPRPCFLDRTRFLLWGGLGFYTFHVPHYPWS

SEQ ID NO: 149416 - protein, 285 aa, Glycine max
  Clone ID: PAT_MRT3847_105946C.1.pep
MAKHDVEGGSFSAKDYHDPPPAPLIDAEELTQWSFYRALIAEFIATMLFLYITVLTVIGYKSQSDVKAGGDVCGGVGILGIAWAFGGMIFILVYCTAGISGGHINPAVTFGLFLARKVSLIRAIMYMVAQCLGAICGVGLVKAFQKAYYNRYGGGANELSEGYSTGVGLGAEIIGTFVLVYTVFSATDPKRNARDSHVPVLAPLPIGFAVFMVHLATIPVTGTGINPARSLGAAVMYNQQKAWDDHWIFWVGPFIGAAIAAFYHQFILRAGAAKALGSFRSNPAI

SEQ ID NO: 149417 - protein, 70 aa, Glycine max
  Clone ID: PAT_MRT3847_105947C.1.pep
AFPGSTNLGNDISNLLSNSKRIGRYTWRALIRSPIYRSRDVAASRTICAPNFRTGNDNIHPVEAAPLPEP

SEQ ID NO: 149418 - protein, 101 aa, Glycine max
  Clone ID: PAT_MRT3847_105948C.1.pep
FQSPFKGAFFFWGGGPTQGFMGVLPKKGSLQLGQKKKRGKKWQRANKNTPPGFPPWGFFKTCSKKGGGTFSPPEKRGEKQIFLKKSQSKGRPFFPKFFPGG

SEQ ID NO: 149419 - protein, 94 aa, Glycine max
  Clone ID: PAT_MRT3847_105949C.1.pep
MIAIRNYKVLAPLPIGFAVFMVHLATIPVTGTGINPARSFGAAVMYNQKKAWDDQWIFWVGPFIGAAIAAFYHQFILRASAAKAVGSFRSNPTI

SEQ ID NO: 149420 - protein, 44 aa, Glycine max
  Clone ID: PAT_MRT3847_10594C.1.pep
YLSPVIVVRRSNTPRCWTSPIELSNMEWVSPPIKYNYTAIMFGS

SEQ ID NO: 149421 - protein, 120 aa, Glycine max
  unsure (1)..(120): unsure at all Xaa locations
  Clone ID: PAT_MRT3847_105950C.1.pep
NTGASYVHDAMLVQRLGDRHVAVEDLYDALKRNNILLRADHILTAANYTTVAXALYVMEPYSINVHQEQTTLQMLQAKLDCDHLRTQEAGAWLLYHGPNALXLHEAARDRTPKPDAWLFT

SEQ ID NO: 149422 - protein, 285 aa, Glycine max
  Clone ID: PAT_MRT3847_105951C.1.pep
MAKHDVEGGSFAAKDYHDPPPAPLIDAEELTQWSFYRALIAEFIATMLFLYITVLTVIGYKSQSDVKAGGDVCGGVGILGIAWAFGGMIFILVYCTAGISGGHINPAVTFGLFLARKVSLIRAIMYMVAQCLGAICGVGLVKAFQKAYYNRYGGGANELSEGYSTGVGLGAEIIGTFVLVYTVFSATDPKRNARDSHVPVLAPLPIGFAVFMVHLATIPVTGTGINPARSLGAAVMYNQQKAWDDHWIFWVGPFIGAAIAAFYHQFILRASAAKALGSFRSNPTI

SEQ ID NO: 149423 - protein, 285 aa, Glycine max
  Clone ID: PAT_MRT3847_105952C.1.pep
MAKHDVEGGSFSAKDYHDPPPAPLIDAEELTQWSFYRALIAEFIATMLFLYITVLTVIGYKSQSDVKAGGDVCGGVGILGIAWAFGGMIFILVYCTAGISGGHINPAVTFGLFLARKVSLIRAIMYMVAQCLGAICGVGLVKAFQKSYFNKYGGGANSLAAGYSTGTGLGAEIIGTFVLVYTVFSATDPKRNARDSHVPVLAPLPIGFAVFMVHLATIPVTGTGINPARSLGAAVIYNQDKPWDDHWIFWVGPFIGAAIAAFYHQFILRAGAAKALGSFRSNPHN

SEQ ID NO: 149424 - protein, 285 aa, Glycine max
  unsure (1)..(285): unsure at all Xaa locations
  Clone ID: PAT_MRT3847_105953C.1.pep
MAKHDVEGGSFSAKDYHDPPPAPLIDAEELTQWSFYRALIAEFIATLLFLYITVLTVIGYKSQSDVKAGGDVCGGVGILGIAWAFGGMIFILVYCTAGISGXHINPAVTFGLFLARKVSLIRAIMYMVAQCLGAICGVGLVKAFQKAYYNRYGGGANELSEGYSTGVGLGAEIIGTFVLVYTVFSATDPKRNARDSHVPVLAPLPIGFAVFMVHLATIPVTGTGINPARSLGAAVMYNQQKAWDDHWIFWVGPFIGAAIAAFYHQFILRAGAAKALGSFRSNPTI

SEQ ID NO: 149425 - protein, 269 aa, Glycine max
  Clone ID: PAT_MRT3847_105954C.1.pep
MNTHLLHYPKPASFSRNECVHNPVLFFAILSNQRSGSGWFETLLNSHINVSSNGEIFSVRERRQNVSSILHTLDKVYNLDWFNSASKNECSAATGLKWMLNQGLMEHHKEIAEYFNRRRVSIIFLFRRNLLRRMVSMLANSYDRYAKLLNGTHKAHVHSAEEAEILSKYKPIINSTSLLDDLQDMEMRSAKALEYFYSTRHMIVYYGDLMRNHTKLKDVQDFLGLPQMELTSRHVKIHRGPLSDHIQNWDDVNKTLKGTIYESFLEADY

SEQ ID NO: 149426 - protein, 35 aa, Glycine max
  Clone ID: PAT_MRT3847_105955C.1.pep
VKIHRGPLSDHIQNWDDVNKTLKGTIYESFLEADY

SEQ ID NO: 149427 - protein, 70 aa, Glycine max
  Clone ID: PAT_MRT3847_105956C.1.pep
FVNLLSGEGLLPSDQALVNGNDQTRQIVENYVENPLAFFEDFKLSMLKMGSLASPTQTNAQIRRNCRTIN

SEQ ID NO: 149428 - protein, 317 aa, Glycine max
  unsure (1)..(317): unsure at all Xaa locations
  Clone ID: PAT_MRT3847_105957C.1.pep
PLSLTSNSHTLFHSSLSLSRTTMVEDMCFLYKEILVMKPPKRSPMLLRTAVIIFSMVCGVFIFSVCLKQISTQARTTFMDFKVIDNHSQSILKLMNTHLLHYPKPSSFSRNECAHNPVLFFAILSNQRSGSGWFETLLNSHVNVSSYGEMFSGTERRRMVSAIVLILDGVYNFPGPNSAXQNECSAATXLKWMLNQGLVEHHKEIAEYFNHRRVSIIFLFRRNLLRRMVSMLANSYDRYAKLLNGTHKAHVHSAEEAEILSKYKPIINSTSLLDDLKDMEMRSAKALEYFNSTRHIIVXYYEDLMRNHTVRTSSVNT

SEQ ID NO: 149429 - protein, 40 aa, Glycine max
  Clone ID: PAT_MRT3847_105958C.1.pep
FGKPNMGPNIRSLIPGLAMHEGEKWSMHRKIINPAFNLEK

SEQ ID NO: 149430 - protein, 138 aa, Glycine max
  unsure (1)..(138): unsure at all Xaa locations
  Clone ID: PAT_MRT3847_105959C.1.pep
DIICDTGWTATPMHDVQVTIDWFITSQECVPRTYCVXNTQYSFVLNRWMGKLTFPQGTCRSVKLMPFSIGGGAGANNAILMNMPNAXLSIVRYYIGDLAFEVCKMTSSYIKXTDSFFIAFGILADDTINFEAFPHKLV

SEQ ID NO: 149431 - protein, 131 aa, Glycine max
  unsure (1)..(131): unsure at all Xaa locations
  Clone ID: PAT_MRT3847_10595C.1.pep
VFLLYIGATLRTMIMNMXTGFAGLRLSIGRLPVFYIHSHHVMHTARTYTLRTCEKRSPTFEVEALDWMVVTYYIVVXAPDAMRLFKHSYEVNVNQQERACKIRDTTXQCRRTRIIANTEGSLMLTLVSHWA

SEQ ID NO: 149432 - protein, 113 aa, Glycine max
  unsure (1)..(113): unsure at all Xaa locations
  Clone ID: PAT_MRT3847_105960C.1.pep
MVLLGLLLVGFLSQLGSSVSASGYGWMDAHATFYGWGDASGTMGRACGYGNLYSXSYGGQTAALSIALFINGLSCGACLHIRYVNDHMXCLLRSLIVTATSFCLRYKGFPINA

SEQ ID NO: 149433 - protein, 36 aa, Glycine max
  Clone ID: PAT_MRT3847_105961C.1.pep
VLEKVFSVSLFCFPPAAIRRVCFKSFDLCNCPFFSF

SEQ ID NO: 149434 - protein, 49 aa, Glycine max
  unsure (1)..(49): unsure at all Xaa locations
  Clone ID: PAT_MRT3847_105962C.1.pep
EGMMLVFGTTEGLRLDDSDDXRISRYYCXDKSEGLCHVIKDDMVDKVEK

SEQ ID NO: 149435 - protein, 72 aa, Glycine max
  Clone ID: PAT_MRT3847_105963C.1.pep
MAGGANFVQRVLSYVVNEVVVNGLANSPAFQRFAVRTSKRIGDISNKAVQKRQELAEQIKDISKNMESFKNQ

SEQ ID NO: 149436 - protein, 70 aa, Glycine max
  Clone ID: PAT_MRT3847_105964C.1.pep
MGADWGPVIVAVALFILLSPGLLFQFPSKYRVVEFGNMSTSGIAILVHAIIFFCILTILVVAIGIHIHIN

SEQ ID NO: 149437 - protein, 50 aa, Glycine max
  Clone ID: PAT_MRT3847_105965C.1.pep
FGSSFVERPLFLKILLFFKCHLSPKFELRSSSSLDSVKWYFTEHCIHHHD

SEQ ID NO: 149438 - protein, 126 aa, Glycine max
  Clone ID: PAT_MRT3847_105966C.1.pep
MLNSEGSSLFKPTGDRVDAFWKWNSLKDKNNRKSVTCDFCHKTTTRGISRAKRHQLQIKGDVGSCKKVPEDVKLEMIAAYEKKIAETAAYMEAMQEEDEEEEDGILEIARLKSGKKRPTTSNEASS

SEQ ID NO: 149439 - protein, 156 aa, Glycine max
  Clone ID: PAT_MRT3847_105967C.1.pep
IQECWEVCQLAGPSVTLYAISLIARAAASLPWIAFIPMSMSKSAWIAFRYQSELWFVMRVVVRAVVTALLCILIMSGSRARDNVFFQVSSGNSAGHAVSSIVVSANVRRRGSSCIPVNLPLFFSYYLDASRRWGLFGREVGCSTLRRVSAMSLEIF

SEQ ID NO: 149440 - protein, 74 aa, Glycine max
  Clone ID: PAT_MRT3847_105968C.1.pep
HLAAIPVQGKGINLARSLGDAVLYTQQKAWDDQWMFWVGPFMGAAIAAFSHPLKLRASAAKALGSVQKEPPDLK

SEQ ID NO: 149441 - protein, 50 aa, Glycine max
  Clone ID: PAT_MRT3847_105969C.1.pep
HPNAEQDSAGKNQHRWLKKEHCGSWICLGRGKCYLSNGDRREEKRSSSRI

SEQ ID NO: 149442 - protein, 182 aa, Glycine max
  Clone ID: PAT_MRT3847_10596C.1.pep
MGKEWYFAGRSSKRGVGGGAEAETQAPSGCMCAVFQFFDFHPFHFPNINQQHQQDQQASFKPPSCTSEDHTTVSKGAEAPRNSLEAEDGDGTVSSLSSKEDDFKIPKNIIQIKTSGATRTSGGNLNDLSSELTSSPGTKTPTLVARLMGLDLLPGANSPSLSSSCLSTPNTQDNVPHLHHHL

SEQ ID NO: 149443 - protein, 51 aa, Glycine max
  Clone ID: PAT_MRT3847_105970C.1.pep
DWYFQIIVAIQLGAIIIEVYIYKTGCLPKPVCQFKFFWCSVFSSLINIISR

SEQ ID NO: 149444 - protein, 105 aa, Glycine max
  unsure (1)..(105): unsure at all Xaa locations
  Clone ID: PAT_MRT3847_105971C.1.pep
AKALKGSTRVYLLDAHGNSAVVCSCSAHMTLWKKDHAAEXRFLRRKAIFKPPKPLLGGRPICVPQFLNLGALDSHRFARDQFWRHDESPPPFSTRAPNKASVDMI

SEQ ID NO: 149445 - protein, 123 aa, Glycine max
  Clone ID: PAT_MRT3847_105972C.1.pep
MDPGLIYDITTEDYVQFLCSMDHSSASISKVTKTTTSCKKGNHQALNLNLPSISVPNLKRAATVMRTVTNVGNITAVYKALVKVPHGIKVRVEPQTLSFNSDPNMDRWQVFCEDPNSCEDHTV

SEQ ID NO: 149446 - protein, 774 aa, Glycine max
  Clone ID: PAT_MRT3847_105973C.1.pep
MDTNSRNWRWARKAQLLIASALLLLQDSLVNSAEASSVHIVYMGDKIYQNPQTTKMYHHKMLSSLLGSKEAAKNSILYSYKHGFSGFAARLTKYQAEAIAKFPGVVSVIPNGIHKLHTTRSWDFMGVHHSTSKIAFSDSNLGEGTIIGVIDTGIWPESPSFNDEAMGQIPSRWKGICQGGKHFNSTNCNKKIIGARWFMKGISDQTKKLLQGNNSDEYLSARDAIGHGTHTASTAAGYFVGNANYRGLASGLARGGAPLAHLAIYKACWDFPIGDCTDADILKAFDKAIHDGVDVLTVSLGFAIPLFSYVDQRDSLAIGSFHATSKGITVVCSAGNSGPVSQTVTNTAPWIITVGATTIDRAFPAAITLGNNRTVWGQSIDMGKHNLGSVGLTYSERIAVDPSDNLAKDCQSGSLNATMAAGKIVLCFSVSDQQDIVSASLTVKEAGGVGLVYAQYHEDGLNQCGSFPCIKVDYEVGTQTLTYIRRSRFPTASLSFPKTVIGKWTSPRVASFSSRGPSSMSPTVLKPDIAAPGVDILAAFPPKGTTRSSGFAFLSGTSMSCPHVAGIAALIKSKHPTWSPAAIRSAMVKIASQTGTDGSLISEEGSTHKAADPFDIGGGHVDPNKAMDPGLIYDITTEDYVQFLCSMGHSSASISKVTKTTTSCKKGKHQTLNLNLPSILVPNLKRVATVMRTVTNVGNITAVYKALLKVPYGIKVRVEPQTLSFNSDARILNFSVSFLSTQKFHGDYKFGSLTWTDGKYFVRTPIAVRTIQFE

SEQ ID NO: 149447 - protein, 74 aa, Glycine max
  Clone ID: PAT_MRT3847_105974C.1.pep
YIMKGALAQQHSCTFMTGWSWAGIRNRSLCIWKEKASYNYHPPYLCRVRSFWHQGTLVFSFLVCHDSFFFPSMS

SEQ ID NO: 149448 - protein, 125 aa, Glycine max
  unsure (1)..(125): unsure at all Xaa locations
  Clone ID: PAT_MRT3847_105975C.1.pep
LYVLIAGLVPLQDDYLXALYRIIYLGDXKCTSGLSSEARRLITKLLAPSXNTRLTITNIMDFVWLEIPWPXSLLGNKREEYVLEENIILDAQEGPTSMNAFHDISFLDGFDGSLVFQEKKRGEKQ

SEQ ID NO: 149449 - protein, 52 aa, Glycine max
  unsure (1)..(52): unsure at all Xaa locations
  Clone ID: PAT_MRT3847_105976C.1.pep
HHKLPLECMNHMLXNMTDVHLLRARVFYNASLLLSNSYSVKFVVPLIDAFXL

SEQ ID NO: 149450 - protein, 156 aa, Glycine max
  Clone ID: PAT_MRT3847_105977C.1.pep
HFVREKEIVERQNSWLNEELNAKVNIVFELRRKHTEYEADMTSKLADMQRQFGESSKSLQWNKDRVRELEMKLKSVQEELISAKDVAAANEEQLSAELSTVNKLNELYKESSEEWSKKAADLEGVIKAMESHQKQVEDDYKEKLEKELSARKQVEK

SEQ ID NO: 149451 - protein, 35 aa, Glycine max
  Clone ID: PAT_MRT3847_105978C.1.pep
SCNCLCSFVVNASCYCDAAVVFVLHSYISITKDAN

SEQ ID NO: 149452 - protein, 71 aa, Glycine max
  Clone ID: PAT_MRT3847_105979C.1.pep
LEFGHSVRRPDCRVRSLLRHCCLHSLCVRLLSQVGSLAVITLRYKTAIPGEGGALTRHGIKYPGRLQGPVG

SEQ ID NO: 149453 - protein, 88 aa, Glycine max
  Clone ID: PAT_MRT3847_10597C.1.pep
MAEGARTAHAPAPHPIQPKPDDKTPNPVKETPPPPEKPEPGDCCGSGCVRDVYYDELEDTISYTNKTIPAPKLLHSLHHRMGGSVMGR

SEQ ID NO: 149454 - protein, 72 aa, Glycine max
  Clone ID: PAT_MRT3847_105980C.1.pep
TEAWLTFMSPPQTSIHNHQITLSSSPNLILLIFFCGDVGIELGGLSERLPFNLFPQNTVNLNQKKRCSVFWV

SEQ ID NO: 149455 - protein, 57 aa, Glycine max
  Clone ID: PAT_MRT3847_105981C.1.pep
ILVGPKQAVLVGSHAYVSLDPVERGAFASNPYIFPLLSTHVVQHPEDATDLTRGRDA

SEQ ID NO: 149456 - protein, 152 aa, Glycine max
  unsure (1)..(152): unsure at all Xaa locations
  Clone ID: PAT_MRT3847_105982C.1.pep
MNVSHASVHPVEEAPTTEGGGDQNVNAPRVRMKDVQGMPGTAGGLSLRVSQFVFAAAALSIMASTSDFPYVTAFCYLVAAAGSQALWSFSLVITDVYALLVRHASQSSLIVSLFTFAQNHSXQLETATGMALICWFTTVPSFLLNFWSLASR

SEQ ID NO: 149457 - protein, 42 aa, Glycine max
  unsure (1)..(42): unsure at all Xaa locations
  Clone ID: PAT_MRT3847_105983C.1.pep
TCCFIGSYSILDGMNKEKQQFHSXSLIVLDKLNLSFXLPVSV

SEQ ID NO: 149458 - protein, 73 aa, Glycine max
  Clone ID: PAT_MRT3847_105984C.1.pep
GAPGSPSFKRGGGFAHFFPGIKRQRMLYPLFWFSFKKKKRRGARGPPMGARYWISFCFKNPQVLGVWGGLKGF

SEQ ID NO: 149459 - protein, 148 aa, Glycine max
  Clone ID: PAT_MRT3847_105985C.1.pep
FNSAAGMDLWGAHHRLLFIGRHEEDGTPDTSMGEESNDEEEKIIKTEPVFVPEIKKRKRLSLSQLKEVKEESHGKQSSSKPKRKKHDSRDRWSAERYQLAEQNMWESLKIEGTHCSCFRRCLWIYTNGKKKWNSSCWRYRILYMVCWQ

SEQ ID NO: 149460 - protein, 57 aa, Glycine max
  unsure (1)..(57): unsure at all Xaa locations
  Clone ID: PAT_MRT3847_105986C.1.pep
SILKYPTQPRRKNRGEGGAKEDERANKTQKGXXEDEATKRTKQEGNGRDEDKDKGGS

SEQ ID NO: 149461 - protein, 86 aa, Glycine max
  Clone ID: PAT_MRT3847_105987C.1.pep
SCFFTTLWFFPFVNLETLCMGMYGLWVILVCDRVKIFCCCGFCFKVFEFDLGFGLCVFGSGIFQFGLMGSDICIVNGSCTHEWRKG

SEQ ID NO: 149462 - protein, 95 aa, Glycine max
  unsure (1)..(95): unsure at all Xaa locations
  Clone ID: PAT_MRT3847_105988C.1.pep
SHARVRKLGIRLEFKEVDGKSRDSLRAFTRTFIAVPATNSGLCIVNDELFVRNASPEEIQRAFAMPAPTPSSSPVPTLSQEQQDMLQAFSTQSXM

SEQ ID NO: 149463 - protein, 48 aa, Glycine max
  Clone ID: PAT_MRT3847_105989C.1.pep
LYFVCDFIVVHGGPVPVEEQIKNYLQIGLFEPENILFWVARLLNNLDP

SEQ ID NO: 149464 - protein, 148 aa, Glycine max
  Clone ID: PAT_MRT3847_10598C.1.pep
ILNKHWGELCKPGASIRHIHNHSVEMLQKGLKELGILRDVGSSSYHKLNPTSIGHYLGMDIHDCSMVSNDCPLKPGVVITIEPGVYIPSSFNVPERYRGIGIRIEDEVLITETGYEVLTASIPKEVKHIESLLNNFCHGMGAMDSQNN

SEQ ID NO: 149465 - protein, 68 aa, Glycine max
  Clone ID: PAT_MRT3847_105990C.1.pep
HPFAAGTNTLVTPPTWCVKDDSPGSSASRKYVVVESAHAIWRSRLRFNGTHNQISMGGLNNIFDARSV

SEQ ID NO: 149466 - protein, 149 aa, Glycine max
  unsure (1)..(149): unsure at all Xaa locations
  Clone ID: PAT_MRT3847_105991C.1.pep
XXXXXXXXXSXLTXXKXTXXXRLXRSXRXSXXHXXXPLXVXXXXXSXXXLXRHXXSXXPXXXLXTXXXXSXXXXSLXIXXXXXXHCXXVQSLXXXXXXXXXIXXXLLHXQXXXIXVXTYXTTXPXTSXHVXSXCXSXXFXPCXLXXFFX

SEQ ID NO: 149467 - protein, 43 aa, Glycine max
  Clone ID: PAT_MRT3847_105992C.1.pep
ESIRHAVIVLEEIGALSNDEPLTQLGEKLASSPVHPLICRMLF

SEQ ID NO: 149468 - protein, 29 aa, Glycine max
  unsure (1)..(29): unsure at all Xaa locations
  Clone ID: PAT_MRT3847_105993C.1.pep
FCFWSQLKLFNLXKIFFPPPPLFFYWRGD

SEQ ID NO: 149469 - protein, 136 aa, Glycine max
  Clone ID: PAT_MRT3847_105994C.1.pep
ICINTRDGHQFIPRTTLNPILLHEPQQNDLLLRFHFWLLPWRRFEASLRQAFESLQPSLRPPFSLSILTPDQYALLNRAILHGVLTEPHLANTHIKHLHAIVVDAHATFLSLLLNAVLQLLPQTPPLRQTQLLRLT

SEQ ID NO: 149470 - protein, 79 aa, Glycine max
  Clone ID: PAT_MRT3847_105995C.1.pep
HIYYQHCQPDTLHELADINNTLKDIKDEDTALRYIHAIVTIEMYTAQTYTATSTATALNTEMLDHDTDSLADDYASTHL

SEQ ID NO: 149471 - protein, 46 aa, Glycine max
  unsure (1)..(46): unsure at all Xaa locations
  Clone ID: PAT_MRT3847_105996C.1.pep
IGAYLFFCGCYDLAFGKNHYXLYLFFQATAFFVVGFGYVGTFVQGS

SEQ ID NO: 149472 - protein, 54 aa, Glycine max
  Clone ID: PAT_MRT3847_105997C.1.pep
LEKRNRKFSHPVFFLLPRKRRGFLPSLNPYYFPQPTPRIFKGTAWLFMLLKNGI

SEQ ID NO: 149473 - protein, 73 aa, Glycine max
  Clone ID: PAT_MRT3847_105998C.1.pep
NQILCNNNEGAPNFNLSSLLSSTPSSSSPISTLNSSSSATFVNGTTEDERDTYGSNMLLMYNISNGLNDSGLL

SEQ ID NO: 149474 - protein, 55 aa, Glycine max
  Clone ID: PAT_MRT3847_105999C.1.pep
QHCEVLLIVLVRYHSSSASYDDPASHACPFSPSGLRLDILHERSLRDHLHTHAKD

SEQ ID NO: 149475 - protein, 117 aa, Glycine max
  Clone ID: PAT_MRT3847_10599C.1.pep
MRTTAPSDFIFTQKLHPFNITSTKTSLQRTLPYFLQLNRMAEAARTAHKPAPHPIQPKPDDKTPNPAKEIPPPPEKPEPGDCCGSGCVRCVWDVYYDELEEYNKRYKQVDPSPKPSS

SEQ ID NO: 149476 - protein, 104 aa, Glycine max
  Clone ID: PAT_MRT3847_1059C.1.pep
KHPFSKNKNKSLNLRACDNLFPMSMLGLRDLVLIAPTPSSLNHHQGQPFSENHTNTHTPNNIPLPSSAASLSVGFGIFPLLTATPCVPQSHHHHHNNEVQELVG

SEQ ID NO: 149477 - protein, 100 aa, Glycine max
  Clone ID: PAT_MRT3847_105C.1.pep
ALTLSDLVEQYAYELIEHAMLIVAPGKGMLAAHESSGTLGKHLLNILVESIAASLHALRVLLSTDSDAMQYLSGVVLLVETLCHENGLWVTMRYGPDREQ

SEQ ID NO: 149478 - protein, 102 aa, Glycine max
  unsure (1)..(102): unsure at all Xaa locations
  Clone ID: PAT_MRT3847_106000C.1.pep
YVYAIGGTILRSDQFANFLTEGNFRARVDLQRTHCIXXMINMVATVCFSDNTGIYIGXAMNSTLRGRASYDIYTNCIQDCELXWKPACSKAMTMXFNPNPCT

SEQ ID NO: 149479 - protein, 546 aa, Glycine max
  Clone ID: PAT_MRT3847_106001C.1.pep
MLSLRLTSFTHLFSPPSSAVISRRSPAFLRRRHHPHPRPLSASFSAQSAAAETQDRVENSKNRVTERVITPRSQDFNAWYLDIIANAELADYGPVRGTMVIRPYGYAIWEAIQEYLNVKFKETGHSNMYFPQFIPYSFIEKEASHVEGFSPELALVTIGGGKELEEKLVVRPTSETIVNHMFTQWIHSYRDLPLMINQWANVTRWEMRTKPFVRTLEFLWQEGHTAHATPEEAEKEAIQMIDIYTRFAYEQAAIPVVTGRKSKVETFAGACKTYTIEAMMGDKKALQAGTSHNLGQNFARAFGTQFTDENGLREYVWQTSWAISTRFVGGIIMTHGDDAGLMLPPKLAPIQVVIVPIWKKDGEKEAVLNAASSVKDVLQRSGIKVKLDDSDQRTPGWKFNFWEMKGVPLRIEIGPRDVASGSVVISRRDIPGKQGKVFGISMEPLNLEAYVKDKLDEIQSSLLERAIAFRDSNIVDVSTYDDLKAAISQGKWARGPWSASDEDELTVKEETGATIRCFPFEQPQGVKRCLMTGNPAEEVAIFAKSY

SEQ ID NO: 149480 - protein, 107 aa, Glycine max
  Clone ID: PAT_MRT3847_106002C.1.pep
RVITGRKSKVETFAGACKTYTIEAMMGDKKALQAGTSHNLGQNFARAFGTQFTDENGLREYVWQTSWAISTRFVGGIIMTHGDDAGLMLPPKIAPIQANMKIKGMLT

SEQ ID NO: 149481 - protein, 102 aa, Glycine max
  Clone ID: PAT_MRT3847_106003C.1.pep
FLQWILHNWTDKDCIKILKNCKEAISNNGKRGKVIIIDVVINEKEDEHKVTELKLVMDITMACVNGKERNEEEWKKLFMEAGFQDYKIFPLTKYLSVIEIYP

SEQ ID NO: 149482 - protein, 85 aa, Glycine max
  Clone ID: PAT_MRT3847_106004C.1.pep
RIAERRSVNYWDIGEFLSSYWNFPRYMSYCISTGTQTTSAIVETMASVASPLSFEWGINSKKVSSSGTISSSLLIMYILARDGKK

SEQ ID NO: 149483 - protein, 120 aa, Glycine max
  Clone ID: PAT_MRT3847_106005C.1.pep
PAGRPLVLPSSPRAFPPAFILLPAASPVCVTGRSPPPPSCFLVPPLGPPGFSLSASCSFVARPCHRLPFSHRSLPCPCFALFSFDSLYVKLGRIQAPVRTPRINPRKHTQKNKDKNQGRP

SEQ ID NO: 149484 - protein, 77 aa, Glycine max
  unsure (1)..(77): unsure at all Xaa locations
  Clone ID: PAT_MRT3847_106006C.1.pep
GGGGAGXNNFFIASFFFKVSHDAGFVYPNTPNAKILPIPFYTLHHKVPINTELNNLTYILHSIKNLHFTLLFLHLKL

SEQ ID NO: 149485 - protein, 1025 aa, Glycine max
  Clone ID: PAT_MRT3847_106007C.1.pep
MAWFRAGASIAKHAIRRTLSKGGSTHLVSRARVLPSIPSSHSRSFHSSVFKEQAAPVPRAVPLSKLTDSFLDGTSSVYLEELQRAWEADPNSVDESWDNFFRNFVGQATTSPGISGQTIHESMRLLLLVRAYQVNGHMKAKLDPLNLEPREIPEDLDPALYGFTEADLDREFFLGVWRMAGFLSENRPVQTLRSILTRLEQAYCGSIGYEYMHIADRHKCNWLRDRIETPTPTQFNRERREAIFDRLAWSSLFENFLATKWTSAKRFGLEGGETLIPGMKEMFDRASDLGVESIVIGMAHRGRLNVLGNVVRKPLRQIFCEFSGGLQPEGEVGLYTGTGDVKYHLGTSYDRPTRGGKRIHLSLVANPSHLEAVNPLVIGKTRAKQYYANDVDRTKNMGVLIHGDGSFAGQGVVYETLHLSALPNYTTGGTIHIVFNNQVAFTTDPTSGRSSQYCTDVAKALDAPIFHVNGDDVEAVVHACELAAEWRQTFHSDVVVDLVCYRRFGHNEIDEPSFTQPKMYKVIRSHPSTLEIYEKNLLESGELTQEEIDRIHKKVTSILNEEFLASKEYIPKRRDWLSAYWLGFKSPEQLSRIRNTGVKPEILKTVGKAITTIPENFTPHRAVKRIYEQRAQMIETGEDIDWGFAEALAYATLLIEGNHVRLSGQDVERGTFSHRHAVVHDQTTGEKYCPLDHVIMNQDEEMFTVSNSSLSEFGVLGFELGYSMENPNSLIIWEAQFGDFANGAHVIFDNFLASGEAKWLRQTGLVVLLPHGYDGQGPEHSSARLERFLQMADDNPHVIPEMDPTLRKQIQECNLQIVNVTTPANFFHVLRRQVHRDFRKPLIVMSPKNLLRSKACRSNLSEFDDVQGHPGFDKQGTRFKRLIKDQNAHKDVEEGIRRLVLCSGKVYYELDEQRTKVDANDVAICRVEQLCPFPYDLVQRELKRYPNAEVVWCQEEPMNMGGYTYVLPRLISSMKAVNRGGYDDVKYIGRAPSAATATGFLKVHQKEQTEIAEKAVQQEPIDFPF

SEQ ID NO: 149486 - protein, 100 aa, Glycine max
  Clone ID: PAT_MRT3847_106008C.1.pep
MASSSLSKQKASDSSWTPKQNKLFEKALAKYDKDTPERWQNVAKAVGGKSADEVKRHYEILLEDLRHIESGRVPLPKYKSTGSSTNVDEEERLLKYLKLN

SEQ ID NO: 149487 - protein, 81 aa, Glycine max
  Clone ID: PAT_MRT3847_106009C.1.pep
VPILQPLPSLCDNKDQFHQHFVESKTPTTPKEPNNWQTHHNNKRPVKRLPTTNCTQKQKKPKHLSTVSFTAFHSKIIPRVR

SEQ ID NO: 149488 - protein, 59 aa, Glycine max
  Clone ID: PAT_MRT3847_10600C.1.pep
PLCFSSDMPQRKRRSCFGALRPLLWFWRQTAHLLDGARVYLNEIDIFSCPTVIYVKRIH

SEQ ID NO: 149489 - protein, 63 aa, Glycine max
  Clone ID: PAT_MRT3847_106010C.1.pep
CFFFFILFFFFFFFLVPGETIGYIFICKTIPLRRPKPLKIKYPLSPGYPDHLSVYLTKLVSPY

SEQ ID NO: 149490 - protein, 87 aa, Glycine max
  Clone ID: PAT_MRT3847_106011C.1.pep
MELTITQPDDWHLHLRDGSLLEAVLPHSAKHFGRAIVMPNLKPPITTTSAAVAYRESILKAIPKDSNFTPFMALYLTDVTTPDEIKL

SEQ ID NO: 149491 - protein, 379 aa, Glycine max
  unsure (1)..(379): unsure at all Xaa locations
  Clone ID: PAT_MRT3847_106012C.1.pep
MKPHSSTEIVFKECVCARACIKILLKKRLISVKMELTITQPDDWHLHLRDGSLLEAVLPHSAKHFGRAIVMPNLKPPITTTSAAVAYRESILKAIPKDSNFTPLMSLYLTDVTTPDEIKLAKKSGLVYGVKLYPAGATTNSQXGXTDLFGNCFSVLEEMAEQNLPLLVHGEVTDSNVDIFDREKVFIETILMPLITRLPQLTLVXRPTTTADAVKFVESCKEGYVAATVTPQHLLLNRNALFQGGLQPHNYCLPVLKREIHRQAIVSAVTSGSKRFFLGTDSAPHDRRKKECSCGCAGIYNSPVALSLYAKVFEEAGALDKLEAFTSFNGPDFYGLPRNKSKIKLRKAPWKVPDYLSFPFGDIVPMFAGETLEWEALPC

SEQ ID NO: 149492 - protein, 132 aa, Glycine max
  Clone ID: PAT_MRT3847_106013C.1.pep
PPAVGPVFFREKCGVELFKILFLHQRFFCEDQSFFFFNRAFWFIFLYWKFSSLFAGWMFFFFHLFFLWSASSSSHPLYCFFFICFVISTFLIFSCFFHFIHCFFFLSPSFFFVWPASFLHLRNNLILINNKM

SEQ ID NO: 149493 - protein, 391 aa, Glycine max
  unsure (1)..(391): unsure at all Xaa locations
  Clone ID: PAT_MRT3847_106014C.1.pep
MGLIRSMRSRSQRVVQEQEAAECVGVVVGDSMRQSCWANMPQELLREVLLRIEASEDTWPPRKSVVSCAGVCRSWRHITKDIVKTPELSSKITFPISVKQPGPRENLLRCFIKRNRSTQTYYLFLSLTSTLAEDGKFLLAARKCRRPTCTDYIISLDADDMSKGSNSYVGKLRSNFLGTKFTIYDSQLPHTGAKIMKSRSTRLVNLKQVSPKVPTGXNYPVAHISYEFXMCLGSRGPRRMHCVMDSIPATAIEPGGVAPTQTEFSLNNIDMFPSFPFFRSKSNRAENSMSGPLVDQKDGMLVLKNKAPRWHEQLQCWCLNFHGRVTIASVKNFQLVASAENGPAGPEHDKIILQFGKVGKDLFTMDYRYPISAFQAFAICLSSFDTKIACE

SEQ ID NO: 149494 - protein, 151 aa, Glycine max
  unsure (1)..(151): unsure at all Xaa locations
  Clone ID: PAT_MRT3847_106015C.1.pep
HCVMDXISAAAIEPGGVAPVQTEFSLNNIDMFPSFPFFRSKSNRVENSVSGPLVDQKDGMLVLKNKAPRWHEQLQCWCLNFHGRVTIASVKNFQLVASAENRPAGPEHDKIILQFGKVGKDLFTMDYRFPISAFQAFAICLSSFDTKIACE

SEQ ID NO: 149495 - protein, 370 aa, Glycine max
  Clone ID: PAT_MRT3847_106016C.1.pep
MRNRGVWEDASTATVLVLVLCSSYGIAEVKSQSQKVSGLFVFGDSLVEVGNNNFLNTIARANYFPYGIDFGRGSTGRFSNGKSLIDFIGDLLGIPSPPPFADPSTVGTRILYGVNYASASAGILDESGRHYGDRYSLSQQVLNFENTLNQYRTMMNGSALNQFLAKSIAVVVTGSNDYINNYLLPGLYGSSRNYTAQDFGNLLVNSYVRQILALHSVGLRKFFLAGIGPLGCIPSLRAAALAPTGRCVDLVNQMVGTFNEGLRSMVDQLNRNHPNAIFVYGNTYRVFGDILNNPAAFAFNVVDRACCGIGRNRGQLTCLPLQFPCTSRNQYVFWDAFHPTESATYVFAWRVVNGAPDDSYPINMQQMATI

SEQ ID NO: 149496 - protein, 162 aa, Glycine max
  unsure (1)..(162): unsure at all Xaa locations
  Clone ID: PAT_MRT3847_106017C.1.pep
MCLIRSMRSQSQRVVQEQEEAECVGDSMRQSCWANMPQELLREVLFRIEASEDAWPPRKSVVACAGVCRSWRQITIDIVKTPELSSKITFPISVKRPGPRENLLRCXIKRNRSSQTYYLYLSLTNTLAEDGKFLLAARXCRRPTCTDYIISLDADDMSKGKH

SEQ ID NO: 149497 - protein, 156 aa, Glycine max
  Clone ID: PAT_MRT3847_106018C.1.pep
KHPKGDSASEVELGNGEKGNSPVVSPLKTASTEVSLLTVIDKSKEKENHREKVVPKDFFSSMKDIEFLFVKASESGKEVPKMLEANKSHFRPLFPAKENRLVAPSFLKACFSCGEDPSKLPEEPAQNSGKYLTWHRTMSSRSYSSANPPGANSKAD

SEQ ID NO: 149498 - protein, 49 aa, Glycine max
  unsure (1)..(49): unsure at all Xaa locations
  Clone ID: PAT_MRT3847_106019C.1.pep
LLSHISTCKCNPWFXNDXLLLLKNPMGSHCLSLSPDIISLYMSCSXXSF

SEQ ID NO: 149499 - protein, 144 aa, Glycine max
  Clone ID: PAT_MRT3847_10601C.1.pep
MINMDTLLKTPNKLEFLHPLHGYSEKLSNSCSSRVQNQYFGFGSKKPIVRWGKCGNLRASSSALLELVPEFKKENLDFELPLYDSSKGAMVDLAVVGEGPAGLAVALLNSGNGLSVCAIDPNPRLIWPNNYGVWVDEFEAMDLL

SEQ ID NO: 149500 - protein, 36 aa, Glycine max
  Clone ID: PAT_MRT3847_106020C.1.pep
LTQNKFPQKSNPHSNPVYQVMGSTRINKFIIQQKQT

SEQ ID NO: 149501 - protein, 80 aa, Glycine max
  Clone ID: PAT_MRT3847_106021C.1.pep
FFFFFFFFFFLGFCFFFFFFFFWGRPQKKPFFPGKILFKQNLPPPLMAPGPPQLIWKNFYNSPNIGTNFPTGPKTRRKFS

SEQ ID NO: 149502 - protein, 171 aa, Glycine max
  Clone ID: PAT_MRT3847_106022C.1.pep
MAMRGGRKNLKRATEEKHITLQDGQGIMQVVSLRGANIIEVMDASGNKLLALFPAKIQKSMWIKRGSFVVVDESGKEKALESGSKVACLVSQVLFSKQVRELEKSPEWPESFKSAMVDDSIESTTSQQEHELEGSDDDGLPPLEANTNRIRPAELQADDEDSESSSDTDDD

SEQ ID NO: 149503 - protein, 52 aa, Glycine max
  Clone ID: PAT_MRT3847_106023C.1.pep
PPTPYHSLPPIFNSKPNIPTYHHHIPYYPNLPISFNSLKHHPSQNYSLLPSS

SEQ ID NO: 149504 - protein, 89 aa, Glycine max
  Clone ID: PAT_MRT3847_106024C.1.pep
SSAMVPITSLSSMATVPCKAASPHALTMLPKMKVKHVRCSHKRIPRTPNTRTHFQDQPKSRWLSKFELQRAVREPCSEGFTAESRETLT

SEQ ID NO: 149505 - protein, 84 aa, Glycine max
  unsure (1)..(84): unsure at all Xaa locations
  Clone ID: PAT_MRT3847_106025C.1.pep
QRVADEELKAQNAAVDKMCSTEDHKFAEIMNPRQSVVGDLKXVHDGKELXGHHVSCCNSTAWENYVIEIPLMAQDEILFSRASY

SEQ ID NO: 149506 - protein, 83 aa, Glycine max
  Clone ID: PAT_MRT3847_106026C.1.pep
GRAGTAGPTRRCSRRRPQTETRKRPGARTPKKDTQEPNSRGKRMTHWAGHRRRESHTMPQLGPETNTVTSDDRPRGKRKPCQM

SEQ ID NO: 149507 - protein, 82 aa, Glycine max
  Clone ID: PAT_MRT3847_106027C.1.pep
GAPHTRGVVPPPEGPFFWRPPKWVKGRAVLHIRPPIKRGEGFGDPPFGIQDNRGRPRKGSYFLPPGFKGVLLFLSPGFKGAV

SEQ ID NO: 149508 - protein, 453 aa, Glycine max
  unsure (1)..(453): unsure at all Xaa locations
  Clone ID: PAT_MRT3847_106028C.1.pep
IGNSQIGVSEILSCRNRSSIRVQVRRRKAMSSGSSSSHSSEKEKEKQRVSRTSLILWHAHQNDAAAVRKLLQEDPSLVKARDYDNRTPLHVASLHGWIDVATCLIEFGADVNAQDRWKNTPLADAEGAKKSNVIELLQSHGGLSFGQNGSHFEPKPVAPPLPNKCDWEVEPTELDFSNSVRIGKGSFGEILKAHWRGTPVAVKRILPSLSEDRLVIQDFRHEVNLLVKLRHPNIVQFLGAVTDRKPLHVITEYLRGGDLHQYLKEKGALSPATAINFSMDIVRGMAYLHNEPNVIIHRDLKPRNVLLVNSSADHLKVGDFGXLSKLITVQSSHDVYKMTGETGSYRYMAPEVFKHRRYDKKVDVYSFAMILYEMLEGEPPFASREPYEGAKYAAEGHRPHFRAKGYTPELQELTEQCWAHDMSQRPSFIEILKRLEKIKENLPTENHWHLFTS

SEQ ID NO: 149509 - protein, 53 aa, Glycine max
  Clone ID: PAT_MRT3847_106029C.1.pep
RKRGYVASNSKDDPVKGADSSTAQDVMIEKTGQIGNGYAPVLDCHTSHIFLLF

SEQ ID NO: 149510 - protein, 85 aa, Glycine max
  Clone ID: PAT_MRT3847_10602C.1.pep
MTLLVLVVLVVVIGAIADDAKHDDHKDHKSDYCNYPFHLLKVESWVNCEEGHVRHGLSARFGSVVPDKPDKTDKTATIFANSIDC

SEQ ID NO: 149511 - protein, 127 aa, Glycine max
  Clone ID: PAT_MRT3847_106030C.1.pep
MSSGSSHSSEKEKEKQRVSRTSLILWHAHQNDAGSVRKLLQEDPSLVKARDYDNRTPLHVASLHGWIDVATCLIEFGADVNAQDRWKNTPLADAERAKKSNVIELLQSHGRLSFGQNGSHFEPKPVA

SEQ ID NO: 149512 - protein, 84 aa, Glycine max
  Clone ID: PAT_MRT3847_106031C.1.pep
DFKASNTFMHQTIFTLFNKIGFAINYGKTQPIQTSTHTNMRHIQTVINQNNMHCKQNETNRGCLCGAITSLSPSRIPPLRYLIY

SEQ ID NO: 149513 - protein, 41 aa, Glycine max
  Clone ID: PAT_MRT3847_106032C.1.pep
ITVVSIRNELDQGIGTIILLPYRIRIIVAGHPLSLNFDSFA

SEQ ID NO: 149514 - protein, 71 aa, Glycine max
  Clone ID: PAT_MRT3847_106033C.1.pep
GLYRLLLYCTTKLILVMTEDFQYNIEVATMPNAGMESTHSENYLCHILEPSKKGPPIFPLTWFEQRQTQPY

SEQ ID NO: 149515 - protein, 48 aa, Glycine max
  Clone ID: PAT_MRT3847_106034C.1.pep
QFVWKALKTSFRNNWETYFNEVRPLEAERFKALRIQWAQYYLKVRNQT

SEQ ID NO: 149516 - protein, 117 aa, Glycine max
  unsure (1)..(117): unsure at all Xaa locations
  Clone ID: PAT_MRT3847_106035C.1.pep
GGGVHYIMQCAANLNVVRHAFLSVHEGWGLTVLVRIHPSRKMLPIHPMALLHGRRIVGSTFGGIXGKTQLPHFAKECMNGVVKLYDFXITHELPVKEINQAFDLMTPGESLRCLLHL

SEQ ID NO: 149517 - protein, 110 aa, Glycine max
  Clone ID: PAT_MRT3847_106036C.1.pep
RGQSLSPSSSKIFDAACCLAPTESSMAFLSPCSVSFCPYSGSDTLMYCPGSTIILFLSQQCSSCSRWPIERGHLLVVLFRVCPSAQDVPLVIRCPVQFHPWTGLSHPPFG

SEQ ID NO: 149518 - protein, 49 aa, Glycine max
  Clone ID: PAT_MRT3847_106037C.1.pep
LQFNFPNKMISPKAGSLKEIFVFISIFSYELFLKTLQHIKKFIVIYCKF

SEQ ID NO: 149519 - protein, 52 aa, Glycine max
  unsure (1)..(52): unsure at all Xaa locations
  Clone ID: PAT_MRT3847_106038C.1.pep
TSVGTVEPDLELLAVLEKNPXLAFALTCGQGGSIPIEQTVKLIGMTREGSGN

SEQ ID NO: 149520 - protein, 107 aa, Glycine max
  Clone ID: PAT_MRT3847_106039C.1.pep
PRVRTVLRKNDRRGVIVYIMLPFTDLSPSPNVHAFFLPFSSLPSLLTFLLPFIFFFFPATPPPLHLLPSPPFLLHPAQPSAATVCVPQPRLFAVTSKYVRDLQGFVP

SEQ ID NO: 149521 - protein, 77 aa, Glycine max
  Clone ID: PAT_MRT3847_10603C.1.pep
FLVRGPPFFFFCESLGFPLPFGRRPSGFWIGGPIWSLYLLRVFFFLAFPVGSLAFWPIRNQWCQNNKRCLYKERIVY

SEQ ID NO: 149522 - protein, 665 aa, Glycine max
  unsure (1)..(665): unsure at all Xaa locations
  Clone ID: PAT_MRT3847_106040C.1.pep
FFISNIIFEAARWRRFRCSIRVRCRRSSSERRVANAPNNPNQFVTTSLYVGDLEQNVNDAQLYDLFNQVVQVVSVRVCRDLTTRRSLGYGYVNFSNPQDAARALDVLNFTPLNNRPIRIMYSHRDPSLRKSGTANIFIKNLDKAIDHKALHDTFSSFGLILSCKIATDASGLSKGYGFVQFDSEESAQNAIDKLNGMLINDKQVYVGHFLRKQDRENALSKTKFNNVYVKNLSESTTDEELMKFFGEYGTITSAVIMRDADGKSRCFGFVNFENPDDAAKAVEGLNGKKVDDKEWYVGKAQKKSEREQELKGRFEQSIKESADKYQGVNLYLKNLDDTISDEKLKEMFAEYGTITSCKVMRDPTGIGRGSGFVAFSTPEEASRALGEMNGKMIAGKPLYVALAQRKEDRRARLQAQFSQMRPVAITPXVAPRMPPSMMPPPGLGQQFLYGQGPPAMMPPQAGFGYQQQLVPGMRPGGGPMPSFFVPMVQQGQQGQRPGGRRGTGPVQQPQQPMPMMQQQMLPRGRVYRYPPGRNMQDVPLQGVAGGMMSVPYDMGGLPIRDAVGQPMPIQALATALANAPPEQQRTMLGEALYPLVDQLEHDAAAKVTGMLLEMDQPEVLHLIESPDALKAKVAEAMDVLRNVAQQQTNPADQLASLSLNDNLVS

SEQ ID NO: 149523 - protein, 143 aa, Glycine max
  unsure (1)..(143): unsure at all Xaa locations
  Clone ID: PAT_MRT3847_106041C.1.pep
GRELVMIIKRNFSIADQNTLADIAYQHELYXSHAYSKGKVLIASKVPLPDYRADLDERHGSTQKEIKMSTDIERRVGNLLNSSQTTGATLSSLPSISADLGQKQSAAPIKYVCVRQTDSCKEEPSVALNERQELVQASDNLRK

SEQ ID NO: 149524 - protein, 349 aa, Glycine max
  unsure (1)..(349): unsure at all Xaa locations
  Clone ID: PAT_MRT3847_106042C.1.pep
EREQELKGRFEQSIKEAADKYPGLNLYLKNLDDTISDEKLKEMFADYGTRPSCKVMRDPTGISRGSGFVAFSTPEEATRALGEMNGKMFAGKPLYVALAQRKEERRARLQAQFSQMRPVAITPSVAPRMPLYPPGAPGLGQQFLYGQGPPAMMPPQAGFGYQQQLVPGMRPGGGPMPSFFVPMVQQGQQGQRPVGRRGTGPVQQPQQPMPMMQQQMLPRGRVYRYPPGRNMQDVPLQVAAGGMLSVPYDMGGLPMRDAVGQPMPIQALATALANAPPEQQRTMLGEALYPLVDQLEHDSAAKVTGMLLEMDQPEVLHLIESPDALKAKLXTMDVLKNVAQQQTNPADQL

SEQ ID NO: 149525 - protein, 90 aa, Glycine max
  Clone ID: PAT_MRT3847_106043C.1.pep
FFFNFIFFFCFGFQHIQNNYKTPIHYISKSWNRPINSEQPQTNYSAFSGNKTQLPKLLQSFIPFFVAQNTTREKKIGFRWCNPAVREVHY

SEQ ID NO: 149526 - protein, 63 aa, Glycine max
  Clone ID: PAT_MRT3847_106044C.1.pep
DRLFNLTILTLLCPMLCMHHDFKKGRGYNNVFLKIVNFGEGEVELDPCSWKLHLVQLLSQVLY

SEQ ID NO: 149527 - protein, 52 aa, Glycine max
  Clone ID: PAT_MRT3847_106045C.1.pep
LPNKKLFIPLLILSLLLLHNLSLSFSYTKLTLPQIPFPNKTHFNSLSFIPAH

SEQ ID NO: 149528 - protein, 73 aa, Glycine max
  Clone ID: PAT_MRT3847_106046C.1.pep
FWARKGGYPWGAPVLGPFKPFGAPPFGFSPLGPALSFFFVNPPLNFFFFPLFFLNLGRGFFFLGGGGKKKKGG

SEQ ID NO: 149529 - protein, 146 aa, Glycine max
  Clone ID: PAT_MRT3847_106047C.1.pep
PGGTLLGAISSRKMAAPPAGDRWGAMERKSHIDTIDLTNSSPEPDQHYRMPLKQQRLPNYFKEEPRNESRSTPRVKTERKAAEMRPLNSQRRARQIDPQHLARIIDTSSPHTVKAVLLDLCKLSPALSGALARGLAPHSTFAQSLN

SEQ ID NO: 149530 - protein, 72 aa, Glycine max
  unsure (1)..(72): unsure at all Xaa locations
  Clone ID: PAT_MRT3847_106048C.1.pep
MKKTKLLQRLELIPIHSVKVSTAFSCPLTERCTVLXGIGKDLHVHVLEGSNHGNQNVLAFNYIWEYIPFWQN

SEQ ID NO: 149531 - protein, 89 aa, Glycine max
  Clone ID: PAT_MRT3847_106049C.1.pep
NWQRLKYGVDLNGDGLTLKFNKELFNTVIQQQISYIKNKLRTEKFNNKISNNTFKIFTLQYTSPILNNFLTLNTYNHILTHHPKQTSNL

SEQ ID NO: 149532 - protein, 60 aa, Glycine max
  Clone ID: PAT_MRT3847_10604C.1.pep
VRVRLHQWNLSNLNNYFMFSRVNYMRALLNPRVLGLSAFVVKLNAWGVGGIRELGPAGVP

SEQ ID NO: 149533 - protein, 35 aa, Glycine max
  unsure (1)..(35): unsure at all Xaa locations
  Clone ID: PAT_MRT3847_106050C.1.pep
LETEILXAGSGNLSRNHIIHWAFKRLIRGAGGTST

SEQ ID NO: 149534 - protein, 272 aa, Glycine max
  unsure (1)..(272): unsure at all Xaa locations
  Clone ID: PAT_MRT3847_106051C.1.pep
PRVRNYIVVRNXILARWRSNVSVWLTHDRALRSIRSEHKGLVETAYRFLLEHGYINFGLAQEIQTLKLKPFDGSDRGTVIVIGAGFAGLVAARQLVFMGFKVVILEGRTRPGGRVKTKKMSGDGVEAAADFGGSVLTGINGNPLGVLARQLGLPLHKVRDICPLYLPDGRSVDSEVDSRVEVSFNKLLERVCKLRQAMIEEVKSVDVPLGTALEAFRRVYMVAXDKEERMLLNWHLANLEYANATLMSXLSMAYWDQDDPYEMXGGDHCFIP

SEQ ID NO: 149535 - protein, 94 aa, Glycine max
  Clone ID: PAT_MRT3847_106052C.1.pep
IACKFSELLEKIDRRTGKATEANPKFIKSGDSAIVKMVPSKPMCVEAFTDYPPLGRFAVRDMRQTVAVGVIKSVEKAAAGSGKVTKSAAKAAKK

SEQ ID NO: 149536 - protein, 43 aa, Glycine max
  Clone ID: PAT_MRT3847_106053C.1.pep
RLSFPSIMSLGYRLHQSLPGSRNMVRDEGPKYSPELRKPPPFL

SEQ ID NO: 149537 - protein, 109 aa, Glycine max
  Clone ID: PAT_MRT3847_106054C.1.pep
MLEGKAVIGETDMLQTMQQDAMDLASKALDFFDVTEAIKIARFIKKEFDRMHGPGWQCIVGTDFGSFVTHCCGCFIYFCLGNLAILLFRGSAAPEAHENRFSALDAAKA

SEQ ID NO: 149538 - protein, 65 aa, Glycine max
  unsure (1)..(65): unsure at all Xaa locations
  Clone ID: PAT_MRT3847_106055C.1.pep
RXFAIAPCHITFLXQFVWKVSGNFLKPYHNXSRQXLVNLVDCLMCAGRDTKWLNDTSKCFKFGKL

SEQ ID NO: 149539 - protein, 44 aa, Glycine max
  unsure (1)..(44): unsure at all Xaa locations
  Clone ID: PAT_MRT3847_106056C.1.pep
GSKQNLPQYSQPIPHHRLAGRGRTSPKLNXAPSGAXPLSSGMFY

SEQ ID NO: 149540 - protein, 98 aa, Glycine max
  Clone ID: PAT_MRT3847_106057C.1.pep
MNLISNYMPDFYMAHQQQQQQQQQQQLQSFDCLISATNSNTDITSVEDDDGISMILSDCGNLWNNFSYGSAASTGESESNASNGRNKDMQCSPDNIGV

SEQ ID NO: 149541 - protein, 92 aa, Glycine max
  Clone ID: PAT_MRT3847_106058C.1.pep
PINSRGGPFKPYGLGLSPLPYAKVLFWGRPFFYRRGLTRPLGYSWVVLPGLPCFLTNWPPPPPPPPPPPPPPPPPPQRRRTSYSDDGKPLLG

SEQ ID NO: 149542 - protein, 240 aa, Glycine max
  unsure (1)..(240): unsure at all Xaa locations
  Clone ID: PAT_MRT3847_106059C.1.pep
SIPGSTHASDFHFPRSFLPPNLSATSLPQLIHFRFPHSALSISSPFPLPGFEMEAKNKVKIDDSTAESPTSVLEDEAVCAPKEEVKLEEEVTADIKDDGTSLISKTMVEEEENLIEARMKEEEVQCEEVPDLNDTQFNKLDELLTQTKLYSEFLLEKMDDITLAVGEQENREEQESNPSAKKKGCGSKRKAASQYNTRKAKKAVTAMLTRSEESEKTXDTNMTXEERVEKEQXELMPFTD

SEQ ID NO: 149543 - protein, 122 aa, Glycine max
  unsure (1)..(122): unsure at all Xaa locations
  Clone ID: PAT_MRT3847_10605C.1.pep
DGKGERLEHDRIYDNNVYNDTGNSHHGKYSARPILEGSITHAYPRMGRTGQSPTRKDLKSVIPCDIXVPRXIEHIGHXKSSDILAYGMKCFMXYVLLALQFVIDLNCTLNESDRIQDVHDFH

SEQ ID NO: 149544 - protein, 80 aa, Glycine max
  Clone ID: PAT_MRT3847_106060C.1.pep
TKKATAYILTLLNFLFHAGFGEKEPPPAAVLPVDVSVDLYQHHLPASYYPADFHWPLFVVVPFEPSVITEAHLRSVVAFA

SEQ ID NO: 149545 - protein, 63 aa, Glycine max
  Clone ID: PAT_MRT3847_106061C.1.pep
FNQKNKFLHDPLKNILFFKIKSIGSATYLRKWWAGIFILWLAFSKDYNSKKMIFFEFFFGFKK

SEQ ID NO: 149546 - protein, 37 aa, Glycine max
  Clone ID: PAT_MRT3847_106062C.1.pep
YCINLLKSYTYSLSNSNLYYPSIVISVPIDMIVIIII

SEQ ID NO: 149547 - protein, 110 aa, Glycine max
  Clone ID: PAT_MRT3847_106063C.1.pep
LSDKAPDKGQFANFDEANYKGNPYLTWNNSNRGSLRALPPPSTALHDGEENDTAIDFTAFCWSFASCYVMVQIVLVIILWINPHWRRQWFYFVEVCLHKCFGQFLEDVFY

SEQ ID NO: 149548 - protein, 68 aa, Glycine max
  Clone ID: PAT_MRT3847_106064C.1.pep
RRNICYVFFLIFVIVWKKLLFWSPFLCHFILDLSFPEHIIHNHKLLQGGLRLLSPYHQLFRMTLITTL

SEQ ID NO: 149549 - protein, 123 aa, Glycine max
  Clone ID: PAT_MRT3847_106065C.1.pep
FELFTRGSSRVDLQDNCYIQRKYPQLYVISKQQNFLINSMGEFVDGRWEWKLSWRRDFFDYEIQMAADFVDEIHSGHIHVICNSTMTRRLWWEPLRWVIEWVLFPQTQRTTFCNSLNGTTKLV

SEQ ID NO: 149550 - protein, 76 aa, Glycine max
  Clone ID: PAT_MRT3847_106066C.1.pep
PPLPVQQNPRNMKQKPRPGLPPPLFPQGQKPYFFRMGVKIPLKIPVVIPMVGGMLGLTGFFLVFGLRGKEKEKCDK

SEQ ID NO: 149551 - protein, 295 aa, Glycine max
  unsure (1)..(295): unsure at all Xaa locations
  Clone ID: PAT_MRT3847_106067C.1.pep
MGAPKQKWTAEEEAALKAGVLKHGAGKWRTILTDPEFSAILHMRSNVDLKDKWRNINVTAIWGSRQKAKLALKRNLPAPKIDNNHMALSXLVRHDEFXDTKPIAVSGGPLQSPNLKEQISRLVDNHILEAIVNMKEQKGSDKVAIASFIELLXIEEKYRFPPNLSKLLPAKLKHMVASGKIIKEKHKYRIAPSSTVXTSEVLLQEKPKETAEVHKNDDVSMILKSQFYAEISKVKGLTAQEAAAAAAKAVAEAEAAIAQAEAAAREAEAAEAEAEAAQVFAKAAMKALKCKMLHI

SEQ ID NO: 149552 - protein, 86 aa, Glycine max
  Clone ID: PAT_MRT3847_106068C.1.pep
KGSYKGWARCARSIKEQRRRNGIAWYCLYGKLYRWEAGHNRNSTSSCKGARSKLAKWLWVGRRPQVAGVRRVSRWASVPGPSGPRG

SEQ ID NO: 149553 - protein, 382 aa, Glycine max
  unsure (1)..(382): unsure at all Xaa locations
  Clone ID: PAT_MRT3847_106069C.1.pep
MADLKERLLPPKPASALNLREGVNRPSPSGRRPGLRAGVLGLKKRGQGLRSWIRVDTSGNSQAIEGDKFTLMRRSVLPATNLGMGGLVIVQXDKNRRRGNMNFENVFSYSSPDYLPFEFWALEVALEAACTFLDSQAAELEIEAYPLLDELTSKISTLNLERVRRLKSRLVALTRRVQKVRDEIEQLMDDDGDMAEMYLTEKKRRMELSFYGDQSMVGYKSVDGASISAPVSPVSSPLDSRKLEKCFSIARSRHESMRSSESTTESIEELEMLLEAYFVVIDSTLNKLTSLKEYIDDTEDFINIQLDNVRNQLIQFELLLTTATFVVAIFGVVAGIFGMNFEIELFDVPSAFQWVLIITGVCGVFIFSAFVWFFKYRRLMPL

SEQ ID NO: 149554 - protein, 88 aa, Glycine max
  Clone ID: PAT_MRT3847_10606C.1.pep
IDVIGAIEPVASNGHRFILVAIDTFHQMGPSRSYNTVTRSVVVRFTKRELICRYGLPKKIITDNGTHLIHTMHQEMCDDFKIQHHNST

SEQ ID NO: 149555 - protein, 38 aa, Glycine max
  Clone ID: PAT_MRT3847_106070C.1.pep
GLKPYCLPQALTTFLGGKRKGPTVFFVGGSLPTRKKPL

SEQ ID NO: 149556 - protein, 50 aa, Glycine max
  Clone ID: PAT_MRT3847_106071C.1.pep
GLISQNTKIYLIKRLISLNICFSSLHANLEIKSLIMLTYSHYIYVFTCSS

SEQ ID NO: 149557 - protein, 45 aa, Glycine max
  Clone ID: PAT_MRT3847_106072C.1.pep
CSRPNNVICERVPLIVHTPKHSVFVRKGVMFMRNKSFQHKQCYVL

SEQ ID NO: 149558 - protein, 69 aa, Glycine max
  Clone ID: PAT_MRT3847_106073C.1.pep
GLVLVAGDVNFGGEALVDGIRLEIGWFWGCGEEQKLIWLFNCAKERGWVGCYCFHLSQLYESRKGQTST

SEQ ID NO: 149559 - protein, 48 aa, Glycine max
  Clone ID: PAT_MRT3847_106074C.1.pep
LSYYVIPVTCINLTISLGFGHWPALSDGGKCFGAFATTLLTVRSEFWT

SEQ ID NO: 149560 - protein, 161 aa, Glycine max
  Clone ID: PAT_MRT3847_106075C.1.pep
MVKEIETLTEDERRALRGSKFAPLPRPSNSKPRLAHPGGPLATNKAAALAKFLERKLKDPNGLASINPDILELAVNNAKETVYASGTSNSRRNVRHVDSFGDSDSKDSSDEEQNELSEVKECKKKKKKKKKKKEKNKNKKPKNTEDPGCAVMKKPKQKFKF

SEQ ID NO: 149561 - protein, 51 aa, Glycine max
  Clone ID: PAT_MRT3847_106076C.1.pep
ESNVVERINLKSSVPSRGSSLPLHIDTCPQHDASAYSTDPTISTMGNNDRV

SEQ ID NO: 149562 - protein, 69 aa, Glycine max
  Clone ID: PAT_MRT3847_106077C.1.pep
FNWNVQITNNRISYKRKTQLKSQLTFKKAQKNMTSYKPILLTQQVCLTFYQTRQYLKQSGWIRFNESTN

SEQ ID NO: 149563 - protein, 135 aa, Glycine max
  unsure (1)..(135): unsure at all Xaa locations
  Clone ID: PAT_MRT3847_106078C.1.pep
GGGPYGAEDPNNPYGVPSSPPGFWISFMRVMQGVVNFFXGRISMLIDQNTQAFHMFMTALLQLFDRSGVLYGELARFVLRLLGIRTKPKKINPPGPDGLPLPGQHNSSVNQNFIEGTKPAPSGSWDNVWENDAKK

SEQ ID NO: 149564 - protein, 66 aa, Glycine max
  Clone ID: PAT_MRT3847_106079C.1.pep
LPPFKNKNNSQHWKVHSVIPQIVKQEPLVGEVFSKAGECHSSWIGPFFNWINAFLHGIYFFNQNPF

SEQ ID NO: 149565 - protein, 102 aa, Glycine max
  unsure (1)..(102): unsure at all Xaa locations
  Clone ID: PAT_MRT3847_10607C.1.pep
MTHSARCAVEAVPLLRQEEVEHRREAVKCTPTALGQFLPGLIYSAETSNAXCTVLMYHISCLCGYLKEASVTQYVNSPNARFTVASCGIPIPTCYFIKPSYN

SEQ ID NO: 149566 - protein, 169 aa, Glycine max
  Clone ID: PAT_MRT3847_106080C.1.pep
ERPNKLLVAHPNARTPGGEQKKNRPPATTNAGKQPRNQEPRTGTQTPKPNKGGKDNKPQNTSTRTPGEPQSHHKEKNHKTNKTGRPQEQHPDTRGTKQRAHQKTHQSRSQTPPETEPNPKAHKSKNNTQNNKEKKPPKTTTPAPPKGAQRETKGKDTTKGKGKPRGKPG

SEQ ID NO: 149567 - protein, 162 aa, Glycine max
  Clone ID: PAT_MRT3847_106081C.1.pep
MVYSLFDCQAEFLNRKGHPELALEIAKRSVISAPSEFGTWARLAEIYVSLEQWDMALLTLNSCPMFTYQDKDAPRMPEPLRVALPVMPESVCDEIDDTAGVSDADMVHPTLRKLHAAGFKGTFLKAYMLLTKITKKIGWDQLLRIRKQVFVMEEEYRHEKNM

SEQ ID NO: 149568 - protein, 75 aa, Glycine max
  Clone ID: PAT_MRT3847_106082C.1.pep
DPVRSRSRQRAGNFYHPRNGPIISKKVYHPEKVLQSRAVREKRSAFEHMIAKLEMLWPDQTVILHMLHETTHLTS

SEQ ID NO: 149569 - protein, 56 aa, Glycine max
  Clone ID: PAT_MRT3847_106083C.1.pep
LGSAIRNKIHYIISELKITCYLIISRQFLNDWHNRTKQCQDNFHFYLVSSVHLETK

SEQ ID NO: 149570 - protein, 66 aa, Glycine max
  Clone ID: PAT_MRT3847_106084C.1.pep
SEMSGKVSISVVSLILLVGVAIGVVVCVYKKCKDPTVQCQQRSLWVICQNTDEQKLCHDTLSSVYG

SEQ ID NO: 149571 - protein, 81 aa, Glycine max
  Clone ID: PAT_MRT3847_106085C.1.pep
HKCSDTHFVAYDHMVFELIILPLSCTSACSSLICTCGQEAFNVFSACFLPCAHNLVLLVTLQMFLCVINRINPFAIDSNAW

SEQ ID NO: 149572 - protein, 145 aa, Glycine max
  Clone ID: PAT_MRT3847_106086C.1.pep
MKKLLDFGKKALFYVRVLSGYEERRIRSYRLQLEQRVQQAEIIMEMLNKGPREEIQSIMMQVLEKQATLQQAEAEKNASKHQVNNAETNMNESEMMEEEKTLTEMLKALQQEVLLEKADTESDVNAHQADNSPINLSSASTTTSK

SEQ ID NO: 149573 - protein, 36 aa, Glycine max
  Clone ID: PAT_MRT3847_106087C.1.pep
PYEAGHDYAVRNIVSVLRSSNMKVIRRWIGRVDDGT

SEQ ID NO: 149574 - protein, 65 aa, Glycine max
  Clone ID: PAT_MRT3847_106088C.1.pep
HPLTNISFNDIFINHNPYIYTLILLPKSHQTYNKLPLLLYFHCTPFYLKSSFYFFIHSYLNIFPL

SEQ ID NO: 149575 - protein, 94 aa, Glycine max
  Clone ID: PAT_MRT3847_106089C.1.pep
PSTSALYTSTLYTHTFALVPGRFGLVPGPSAIWQLAAAGPLRHSAFPPSAPRLSPSTPDLSQAPGPASHTFLACRCGCGWTLPVCLTFCRIRLP

SEQ ID NO: 149576 - protein, 52 aa, Glycine max
  Clone ID: PAT_MRT3847_10608C.1.pep
VYDPIKNPTPLKNPGVLYFPERGGRPTRTGQDVLKKAGGFMEHSSHPPTKLP

SEQ ID NO: 149577 - protein, 129 aa, Glycine max
  unsure (1)..(129): unsure at all Xaa locations
  Clone ID: PAT_MRT3847_106090C.1.pep
PLCRRIKISSFYSXKWFVPGLDPYPLFWGQLLREVKNTTLPEIDLASLVHADFANDPPHHFSGLTLRNVVDPLMATGCYSNLEKLRVHKTGGGELLSRTLLMPVGPSRVHRTANTPLCSHPGSEPNDLD

SEQ ID NO: 149578 - protein, 58 aa, Glycine max
  Clone ID: PAT_MRT3847_106091C.1.pep
PEFRLAQRPLFIFFSPDMDLLSLHTQPPALDRPVSLVWAGPIFGYTPTLSGIRQRVPA

SEQ ID NO: 149579 - protein, 109 aa, Glycine max
  unsure (1)..(109): unsure at all Xaa locations
  Clone ID: PAT_MRT3847_106092C.1.pep
XSGPANRPPREGNDILRGDHASTDGSITKQATSKMAEMTNSLRGGDEKTMRERTHLPQARRSRMATRKKDVWRAERGIPTGSPLTAIRNSTTNETPTRNSHEKPPRQAK

SEQ ID NO: 149580 - protein, 104 aa, Glycine max
  Clone ID: PAT_MRT3847_106093C.1.pep
MTGKAKPKKHTAKEIAAKVDAATTNRGGGKAGLKDRSGLEKGGHAKYECPHCKVTAPDVKSMQIHHDARHPKIPFEEDKVVNLHATHVPESSKPRPGVRGSLKK

SEQ ID NO: 149581 - protein, 105 aa, Glycine max
  Clone ID: PAT_MRT3847_106094C.1.pep
MTGKAKPKKHTAKEIAAKVDAATTNRGGGKAGMKDRTGLEKGGHAKYECPHCKVTAPDVKSMQIHHDARHPKIPFEEDKVVNLHATTSVPESSKPRPGVRGSLKK

SEQ ID NO: 149582 - protein, 51 aa, Glycine max
  Clone ID: PAT_MRT3847_106095C.1.pep
VLEITLLALINSRYQQQSLSNVKSWSSIRAPSMSLGSSRISSIKGGCRLAN

SEQ ID NO: 149583 - protein, 162 aa, Glycine max
  unsure (1)..(162): unsure at all Xaa locations
  Clone ID: PAT_MRT3847_106096C.1.pep
MNTSVRPRLLHRKKATTLLSHEKAEMRGSSRGGENNAAKGGKASSKDRKLALQQDVDRLKKKLSREENIHRALERAFNRPLGALPRLPPYLPPYTLGLLXEVAVLEEEXVRLEEQVVHFRQDLYQEAVYMSSSKMKLEQSAGMNNANPTSIPKLGKLKSLSE

SEQ ID NO: 149584 - protein, 110 aa, Glycine max
  Clone ID: PAT_MRT3847_106097C.1.pep
YVSSEFGLGVPARVNADECMALDNEVFYDICLRTLKLTTASFGDLHHVIPATMSGVTCCLRVPGHLNSDLRKLAENFIPLLGLHFVMEGLAPLTCRGYQQYRAITEPQLT

SEQ ID NO: 149585 - protein, 49 aa, Glycine max
  unsure (1)..(49): unsure at all Xaa locations
  Clone ID: PAT_MRT3847_106098C.1.pep
LLPEXGWXVXXAVXXALADQNXVALVIXXPGXPCGNVYXYXHLEQIDEX

SEQ ID NO: 149586 - protein, 74 aa, Glycine max
  Clone ID: PAT_MRT3847_106099C.1.pep
KVQEFVVSYKLVYREENMKLFVFFVAAVVLVAWPCYGAGYHAFPLRLNIGYGERSSDVACSRSKLAVDAHVIRA

SEQ ID NO: 149587 - protein, 46 aa, Glycine max
  Clone ID: PAT_MRT3847_10609C.1.pep
DITDSSCLVLFTPALYTRASRHPMKLSVASVYPSCHKHFLSEKTSF

SEQ ID NO: 149588 - protein, 89 aa, Glycine max
  Clone ID: PAT_MRT3847_1060C.1.pep
KNSPNKTNSPNTHPTYKSQPHKQHQQNRENKTNEKVKFCNKETPKPVLKLVLYLILNRHPIRNFQFQARFCSNSHLPLKNSVKDHINAR

SEQ ID NO: 149589 - protein, 71 aa, Glycine max
  Clone ID: PAT_MRT3847_106100C.1.pep
IVPWPLTMFHQEFFKKERKVPFKPQKIYRIIYFNFGHLKNQDVRISNVPKLIEYKCPTSTLDLIQSHTSIV

SEQ ID NO: 149590 - protein, 91 aa, Glycine max
  Clone ID: PAT_MRT3847_106101C.1.pep
KRGEKTRFLKTAAYGHFKEKTLPSHGKWPTPSSGKRPKKFIPLLYVESFLTVALKICLKTKTFHVSNSGGFSPLPPNLLIECSFEIFTGIH

SEQ ID NO: 149591 - protein, 81 aa, Glycine max
  Clone ID: PAT_MRT3847_106102C.1.pep
HHLESKAYAGASKTYAHQAASIRKNGYILIKGRLLQGVELSPPNTGKHWYSKRQFARPALLTGNYPFDIFSSFRNCIVLHV

SEQ ID NO: 149592 - protein, 118 aa, Glycine max
  Clone ID: PAT_MRT3847_106103C.1.pep
MAAFAKPSHSQLRAQRDHPLLPSTSTSTSSNFKLKTFTFSHNLHTLHPRFRKAKHICVSNSATTTTSLSSNHNPNCHIYQLCLLGNLDRAMSYLDSMHELRIPVEDDAYVALIRMCEW

SEQ ID NO: 149593 - protein, 608 aa, Glycine max
  unsure (1)..(608): unsure at all Xaa locations
  Clone ID: PAT_MRT3847_106104C.1.pep
MGRNGRNLIVKKLHLWHMPRIQGKSALVSHFQNSSLMNEDLRCRPYSHGNVKEMRETPHKMHHKFIEFYDVRAAEAALKSLNRSDIAGKRIKLEPSRPGGARRNLMLQLNQELDQDESRSFRYQVGSPVANSPPGNWLQFNSPVEQNSMQTINYSPGSRIISPTTGNHLPGLASILQPQVSNTVKAAAIGNDLGRSSQGEHIFSGMNSSHGATFQSHSLPEPKFSQYRGALSSIGPSTSNGSSVETLSGPQFLWGSPTLYSEHTKPSAWPRSSVGHPFXIDGKSHAFPYSTQNSSFVGSSQHLHHHHVGSAPSGLPFERHFGFHPESSETSFMNNVGYGGIGPGHNDGNHMVNVGGSVNPNITIPRNISDNGSSNFRMRSSPRLSPVFLGNGPFPGLPPTTLEGLADRARSRWIENNGSQVDSKKQFQLNLDKIKSGEDTRTTLMIKNIPNKYTSKMLLAAIDENHRGTYDFLYLPIDFKNKCNVGYAFINMLSPSLIIPFFETFNGKKWEKFNSEKVASLAYARIQGKSALVSHFQNSSLMNEDKRCRPILFHSEGSEVCDLIVQDHHLPSNSNNLNIQAPRPSEFYSSDFAGSPPKAGPSASLDAN

SEQ ID NO: 149594 - protein, 141 aa, Glycine max
  unsure (1)..(141): unsure at all Xaa locations
  Clone ID: PAT_MRT3847_106105C.1.pep
MELAQLEALCERLYNSQDSVERAHAENTLKCFSMNTEYISQCQYILDHALTPYALMLASSSLLKQVTEHSLAMKLRLDIWTYLINYLATRGPELQPFVAASLIXLLCRVTKFGWFDDDRFRDLGKESMNFLSQATPGHYAI

SEQ ID NO: 149595 - protein, 184 aa, Glycine max
  Clone ID: PAT_MRT3847_106106C.1.pep
MKSLFKPKPRTPSDIVKQTRDLLLRLTSRDDDNMPDLTKNLRDLKSILYGNSESEPVPEACAQLTQEFFADNTLRLLIQYLPKLNLEARKDATQIVANLQRQQVQSKLIASDYLDTNLDLMDVLVSGYENTDMALHYGAMLRECIRHQIVAKYVLDSPHMKKVFDYIQLPNFDIAADAAALLKS

SEQ ID NO: 149596 - protein, 302 aa, Glycine max
  Clone ID: PAT_MRT3847_106107C.1.pep
MPSSLSSFLHMVPILSLLVLSCVICSSSAQGPPSPGYYPSSKISPVSFYQGFRNLWGPQHQRLDQGSLTIWLDSNSGSGFKSLHSYRSGYFGAAIKLQPGYTAGVITSLYLSNNQDHPGNHDEIDIEFLGTTPDKPYVLQTNVYIRGSGDGNIIGREMKFHLWFDPTQDFHNYGILWKPSEIIFFVDDVPIRRYPRKSEATYPSRSMYVYGSIWDASSWATEDGKYKANYNYQPFVGRYKNFKLQGCTSESSASCKPPSFSPSGFGSLSPQQFRAMQWVQNNYMVYNYCHDPRRDHTLIPEC

SEQ ID NO: 149597 - protein, 123 aa, Glycine max
  Clone ID: PAT_MRT3847_106108C.1.pep
NEMIFFVDDVPIRRYPKKSDATYPSRPMYVYGSIWDASSWATEDGKYKANYNYQPFVGRYKNFKLQGCTSESSASCKPPSFSPSGFGSLSPQQFRAMQWVQNNYMVYNYCHDPRRDHTFIPEC

SEQ ID NO: 149598 - protein, 46 aa, Glycine max
  Clone ID: PAT_MRT3847_106109C.1.pep
HAYIWMLLSLTQFAAYVLPPDQCLVMYVQDIVYGYRLCRRIKNVCM

SEQ ID NO: 149599 - protein, 253 aa, Glycine max
  Clone ID: PAT_MRT3847_10610C.1.pep
GKCINALAENSAHVPFRDSKLTRLLRDSFGGTARTSLVITIGPSPRHRGETASTIMFGQRAMKVENMVKLKEEFDYKSLSRRLDIELDKLIVEHERQQKAFEDEIERLSTEAQHRISEAERNYVDSLEKERSKYQKDYMESIKKLEEQFVMNQQKNEESHMKLSGEIPRVSAEELADLKKMLRKETHLRKAAEGEVNNLKIQVAELKKSEASRKSEILKLHTMLEDKERQKEKLEGEIAILQSQLLQLSLEAD

SEQ ID NO: 149600 - protein, 134 aa, Glycine max
  unsure (1)..(134): unsure at all Xaa locations
  Clone ID: PAT_MRT3847_106110C.1.pep
MSRERERFDEIGKKIKREGDVSSQMGRRHMLGPPGTLNTITPCAACKLLRRRCAQECPFSPYFSPHEPQKFASVHKVFGASNVSKMLMEVPECQRADAANSLVYEGXMWRLRDPGYGCMGAISALQQQGQSFQA

SEQ ID NO: 149601 - protein, 97 aa, Glycine max
  Clone ID: PAT_MRT3847_106111C.1.pep
YAEYNGGVYDIKKKKKKKKKKKKNKKRKKRARNEKNFNFGRWEEMLIYEPKLVNSANELHVPKLGGGPLRAKYLISPLGQFKFFFLGALKLIHGARF

SEQ ID NO: 149602 - protein, 92 aa, Glycine max
  Clone ID: PAT_MRT3847_106112C.1.pep
PTRPYGCERRQKGEPQASYTRMTRTLVSMILLKFFIFAAMVIVLFSLGVSSNQVCPGQCDDFSDCNAYCVAHNHKTGKCVVAPEVGFICCCF

SEQ ID NO: 149603 - protein, 52 aa, Glycine max
  Clone ID: PAT_MRT3847_106113C.1.pep
NSKFRCTSLMEEMRSDFGKRNNRDQGSILSRTKLPTQLTICKMILVQPSIRA

SEQ ID NO: 149604 - protein, 50 aa, Glycine max
  Clone ID: PAT_MRT3847_106114C.1.pep
DELDYFSFILYFCFLGNNKVKPCVLEESRKPKSTILIDHDLSLLLHFPFT

SEQ ID NO: 149605 - protein, 233 aa, Glycine max
  Clone ID: PAT_MRT3847_106115C.1.pep
RPTRPRTRGSGLNYESDEQNESNGLKLSENGGDNKGKKKGLPAKNLMAERRRRKKLNDRLYMLRSVVPKISKMDRASILGDAIDYLKELLQRINDLHHELESTPPGSSLTPSSSTSFQPLTPTLPTLPCRVKEELYPGTLPSPKNQAAKVEVRVREGRTVNIHMFCTRRPGLLLSTMKALDNLGLDVQQAVISCFNGFALDVFKAEQCREGQDVLPEQIKAVLSDSAGFHGMM

SEQ ID NO: 149606 - protein, 63 aa, Glycine max
  Clone ID: PAT_MRT3847_106116C.1.pep
YSKKWRVNCLPQKRVLLEDVFVIQNWLWKAFNLFEGLLDHYHFHSLILELGLFVVGCSFSSFA

SEQ ID NO: 149607 - protein, 114 aa, Glycine max
  Clone ID: PAT_MRT3847_106117C.1.pep
NIPGPPWGPLTGSFEGRQEKPVEKFFFDQSLGFWKSFRGGGYLVRGLPKENMIFSDHGRNYFLGPMGSNICCFFKKNFQCWDANFLPFFINWGLGALFSNLTIYCKGILGFPNC

SEQ ID NO: 149608 - protein, 140 aa, Glycine max
  Clone ID: PAT_MRT3847_106118C.1.pep
TSGIVLYFGDMLLLTIKKLHELLMSSELVTAEYEISRSEISIIIQGLVLGLLLYPIALKYILQIWEWSINTTSAEARRYYEIGKSLMFVASLGIVLIMIVPSWMQFVHEFRMHPFFWVLSFVFSEPSKRLTLCIYWVCII

SEQ ID NO: 149609 - protein, 65 aa, Glycine max
  unsure (1)..(65): unsure at all Xaa locations
  Clone ID: PAT_MRT3847_106119C.1.pep
LDLKGAFXCFLKAFSIRSLFGSNCIKQPKGWRKNVIENSKLCLVYLLPVNKTAVLNSIKEISSLR

SEQ ID NO: 149610 - protein, 70 aa, Glycine max
  unsure (1)..(70): unsure at all Xaa locations
  Clone ID: PAT_MRT3847_10611C.1.pep
MARQTFIMINPNGLQRGLIVEIINXCERKGSYLTGSKLVTVDRTYAEXHYADQFAKPSFSCMADYIVHGP

SEQ ID NO: 149611 - protein, 124 aa, Glycine max
  unsure (1)..(124): unsure at all Xaa locations
  Clone ID: PAT_MRT3847_106120C.1.pep
MTTEPDVESKYAHNGKGMVGTAILLFILIIIIIFFHTYVRSCRRRRRFSHSLPTNSSAAASLDDPCLDPSIIKSLPTFTFFRRXHRSLQDCAVCLSEFSDRDEGRVLPNWKHSFHAHCIDTWDR

SEQ ID NO: 149612 - protein, 91 aa, Glycine max
  Clone ID: PAT_MRT3847_106121C.1.pep
AGVQGTCKYGTRVDYIFSSSDSPYKFVSGSYLVLSSKGTSDHHIVKVDVVKVNSNPQENLTKKQGQRRQKVVRIKSTPSKCIWKTHNGDID

SEQ ID NO: 149613 - protein, 289 aa, Glycine max
  Clone ID: PAT_MRT3847_106122C.1.pep
MEAPSMAATERTVLQFSSSQSLSTKVHPLVVFNICDCYVRRLDQAERVIGTLLGSILPDGTVDVRNSYAVPHSESVDQVALDIEYHHSMLLSHQKVNPKEVIVGWYSTGLGVTGGSALIHEFYSREVPNPIHLTVDTGFTKGAGTIKAYVSHNLSLGDHQIAAQFQEIPLDLRMVEAERIGFDTLKATAVDKIPSDLEGMEALMGHLLALIDDIHKYVDDVVEGRIDPDNKIGRFISDAVGSIPKLPSSAFEKLVNDSLQDHLLLLYLSSITRTQLSLAEKLNTAAQIL

SEQ ID NO: 149614 - protein, 62 aa, Glycine max
  Clone ID: PAT_MRT3847_106123C.1.pep
PPPPPLAPPPPAHPGAPPGFSPPPPPRPRPPFPSPLPGPPPPPRPGSPPPLGPPPPNAPALP

SEQ ID NO: 149615 - protein, 195 aa, Glycine max
  Clone ID: PAT_MRT3847_106124C.1.pep
PTRSGSGGSGGRSGGDQGGGNVEDVALKKGPWTTAEDAILTDYVTKHGEGNWNAVQRNTGLNRCGKSCRLRWANHLRPNLKKGAFSPEEEKIIVDLHSQFGNKWARMAALLPGRTDNEIKNYWNTRIKRRQRQGLPLYSDEHDHNHRSTTPTSTTTPSPCLTPTGSNPNIATSFEFFNQNQQQQQQYQHQYQYQT

SEQ ID NO: 149616 - protein, 71 aa, Glycine max
  Clone ID: PAT_MRT3847_106125C.1.pep
VVGGTQLRFQSACYKPIVVNGASLESLKSNSILSAPPCCWICTIRIGATEDSHCNKASHEQTHDIHQLTQT

SEQ ID NO: 149617 - protein, 70 aa, Glycine max
  Clone ID: PAT_MRT3847_106126C.1.pep
HRLQMHQALNLYSCFLQVTLRVLEVLFSFATAMISIRTSGFRKFLRLIPEEDVDDASSQYNFGMVLKETL

SEQ ID NO: 149618 - protein, 93 aa, Glycine max
  Clone ID: PAT_MRT3847_106127C.1.pep
CSTYIIITYLLEPYPYKTSYTFLDGGCINYLSLSPRTYYRIPAIHVRSPTQTIDPSKVLLYDPIKISTYLNIPVILYLLQRRAHPTGTAQDIT

SEQ ID NO: 149619 - protein, 45 aa, Glycine max
  Clone ID: PAT_MRT3847_106128C.1.pep
GNIKAIVLYNNKHQASHSHARPPTYITRQNNNTAHCTKQNSSRLI

SEQ ID NO: 149620 - protein, 55 aa, Glycine max
  Clone ID: PAT_MRT3847_106129C.1.pep
NKPFGKTLYFACSILKRVSYKQKKNLYELWRKREPNLKYLKVWGCLVKVNIPLNK

SEQ ID NO: 149621 - protein, 183 aa, Glycine max
  unsure (1)..(183): unsure at all Xaa locations
  Clone ID: PAT_MRT3847_10612C.1.pep
PRVRVPGSEGPARAGGLVADVVFVIEGTANLGPYFEELRKHYLLPAIEYFNGGPPAETDFGGDYGGTQYSLVVFNTVDCAPESYVQCHAPTSSAYEFVTWLDGIKCSWXGGGESCSLIAEGLSTALQLFDDFKKMREQIGQTHRVCLLICNSPPYLLPAVESTTYSXCTTESLVQKIGERGIH

SEQ ID NO: 149622 - protein, 37 aa, Glycine max
  Clone ID: PAT_MRT3847_106130C.1.pep
LTHLDHTQPNYISMPLPIRRESSLTYLESIYTHWFKG

SEQ ID NO: 149623 - protein, 62 aa, Glycine max
  Clone ID: PAT_MRT3847_106131C.1.pep
AYFVGVLGMAHGFSGFLAVLLEVGTLERVKLEAYLCWFCSVNRVLDYETACAFSAPQQLIHA

SEQ ID NO: 149624 - protein, 337 aa, Glycine max
  Clone ID: PAT_MRT3847_106132C.1.pep
LPFLLIQIRWQPWQPQPSLQTPNSHSSTESPSHILPASRPPPNYPHPNKESIVSREMTRRYMTDMITYADTDVVIVGAGSAGLSCAYELSKNPAVSVAIVEQSVSPGGGAWLGGQLFSAMVVRKPAHLFLDELGVAYDEQEDYVVIKHAALFTSTIMSRLLARPNVKLFNAVAAEDLIVKEGRVAGVVTNWALVSMNHDTQSCMDPNVMEAKVVVSSCGHDGPFGATGVKRLKSIGMIDSVPGMKALDMNAAEDAIVRLTREIVPGMIVTGMEVAEIDGSPRMGPTFGAMMISGQKAAHLALKALGRNNAIDGTCGVGREEPQLILASADTEEIVDA

SEQ ID NO: 149625 - protein, 57 aa, Glycine max
  Clone ID: PAT_MRT3847_106133C.1.pep
YISSDKPNCHEIQHAVLLSQHYDYYSQTSSHTVRKFLQRFAYISLKNFTSFPGMMNQ

SEQ ID NO: 149626 - protein, 318 aa, Glycine max
  Clone ID: PAT_MRT3847_106134C.1.pep
MAAMATTTLSSNPKLSFFNGKPVTYSSRVAPTTKLSSSKQGTISMSLTPPPYDLQSFKFQPIKESIVSREMTRRYMTDMITYADTDVVIVGAGSAGLSCAYELSKNPAVSVAIVEQSVSPGGGAWLGGQLFSAMVVRKPAHLFLDELGVAYDEQEDYVVIKHAALFTSTIMSRLLARPNVKLFNAVAAEDLIVKEGRVAGVVTNWALVSMNHDTQSCMDPNVMEAKVVVSSCGHDGPFGATGVKRLKSIGMIDSVPGMKALDMNAAEDAIVRLTREIVPGMIVTGMEVAKIDGSPRMVCTFYFNFRPNYSSILLLLLC

SEQ ID NO: 149627 - protein, 68 aa, Glycine max
  Clone ID: PAT_MRT3847_106135C.1.pep
AISGPIPEYPRQCGTRIPHTGPTFASHAPAKILLFLYLSKMATSLWIMDRAGYFSQIHHTPLFSCHLN

SEQ ID NO: 149628 - protein, 351 aa, Glycine max
  Clone ID: PAT_MRT3847_106136C.1.pep
MAAMATTTLSSNPKLSFFHGKPVTYSSRVAPTTKLFSSKQGTISMSLTQPPYDLQSFKFQPIKESIVSREMTRRYMTDMITYADTDVVIVGAGSAGLSCAYEISKNPAVSVAIIEQSVSPGGGAWLGGQLFSAMVVRKPAHLFLDELGVAYDEQEDYVVIKHAALFTSTIMSRLLARPNVKLFNAVAAEDLIVKEGRVAGVVTNWALVSMNHDTQSCMDPNVMEAKVVVSSCGHDGPFGATGVKRLKSIGMIDSVPGMKALDMNAAEDAIVRLTREIVPGMIVTGMEVAEIDGSPRMGPTFGAMMISGQKAAHLALKALGRNNAIDGTCGVGREEPQLIFASADTEEIVDA

SEQ ID NO: 149629 - protein, 50 aa, Glycine max
  Clone ID: PAT_MRT3847_106137C.1.pep
TNFIAECDFEYQDQWLQLYWETCFEMASWITWMKRTNPKLSPFTLSQRQD

SEQ ID NO: 149630 - protein, 65 aa, Glycine max
  Clone ID: PAT_MRT3847_106138C.1.pep
SSRKTRQPLFPHKRLTLKSYIYSYISAKTLQATSPIAEGSLKDATVADSRASRCQSPPGIKRHTP

SEQ ID NO: 149631 - protein, 69 aa, Glycine max
  Clone ID: PAT_MRT3847_106139C.1.pep
HASAQGQSVPQAPPNQTQSSFMKQSSTLSKSKKWPPSPPSENQNSQTEYMDEEEEEPWEPKSVTINGQH

SEQ ID NO: 149632 - protein, 59 aa, Glycine max
  Clone ID: PAT_MRT3847_10613C.1.pep
KQVWQRVEKGRAVLFVYLVRSWHGSLVSGERTHVSYNTTNGGGSMVGGIDGSSKDIRFG

SEQ ID NO: 149633 - protein, 85 aa, Glycine max
  unsure (1)..(85): unsure at all Xaa locations
  Clone ID: PAT_MRT3847_106140C.1.pep
ENYTIRFLVXNGHLLEFXXFFLLRXAAGVXXLXRIXVRXXXWXXIRXXGFILCYVALWWLLLLEFSXCSVEIGGFXXSWLPWKLV

SEQ ID NO: 149634 - protein, 54 aa, Glycine max
  Clone ID: PAT_MRT3847_106141C.1.pep
SHSVREFRREKEDSTDQQSGSVHRVICAFWEYCLEVKSQLHRLIHSMYREARAE

SEQ ID NO: 149635 - protein, 98 aa, Glycine max
  Clone ID: PAT_MRT3847_106142C.1.pep
MGSKTKIARVILGMLAVILLISSEVAARDLKEGEVVKETNEENDAKLVGGGDDIYENINCERYKFVDLNPTIGCPCGCCKLYIVLQLVCVHCCPKTRN

SEQ ID NO: 149636 - protein, 122 aa, Glycine max
  unsure (1)..(122): unsure at all Xaa locations
  Clone ID: PAT_MRT3847_106143C.1.pep
ISLEKDQIVNMLVDLCGLNLEDEGIDQISSSTSMIIDLCFKVIKGQGGPLSRASHIDAELFERIQSLLYVRDQGLILYEDILEEEMLIRSDENKLSNELKVASEEIIALKEERSSLLXDLER

SEQ ID NO: 149637 - protein, 50 aa, Glycine max
  Clone ID: PAT_MRT3847_106144C.1.pep
LYPIHNKSGPLIFGDPGSIYHASQPEALWHKPTSFSSRATLADHHCIQGV

SEQ ID NO: 149638 - protein, 49 aa, Glycine max
  Clone ID: PAT_MRT3847_106145C.1.pep
RTTRPGRLHHFDTPILSSHIFGLWELNLNKQKQADRRILSKSDRSHPVT

SEQ ID NO: 149639 - protein, 44 aa, Glycine max
  Clone ID: PAT_MRT3847_106146C.1.pep
LSLLDVILKLIIFFKDKKKKKKKKKKKKKKKKKKKKKKKKKKKK

SEQ ID NO: 149640 - protein, 149 aa, Glycine max
  Clone ID: PAT_MRT3847_106147C.1.pep
NFFLFFPPKKILLRIPWFQQEPLKWFSRGEVESRLWCSRASPRCCRVPVVGRRRTRRLSPLLSAQLPVAIVLLNLSTLTPGPTDSRFQPLLIRDTFTLLYYYCIYMYIVLSNLIFNGLMSWFFFYSNVNVDIVVDVVNKISQLLSFIST

SEQ ID NO: 149641 - protein, 111 aa, Glycine max
  unsure (1)..(111): unsure at all Xaa locations
  Clone ID: PAT_MRT3847_106148C.1.pep
LSLVRRLVGTEHEGYDPSVGGIQKYATPMVPLDEQILSTDAHDVXREWEACVDEEDPYEEETPRAALNGVEGSDYMEGLPIDTSGGTTLVLALLTGDLGKGRFGAGDGEQI

SEQ ID NO: 149642 - protein, 77 aa, Glycine max
  unsure (1)..(77): unsure at all Xaa locations
  Clone ID: PAT_MRT3847_106149C.1.pep
PIVLVTNSDGVXFPGLTHLVEALVQQGLFNVHVCVPXIGQXDSALSVTLRDTIVAASAKICGATVFEISRTSCGIEF

SEQ ID NO: 149643 - protein, 36 aa, Glycine max
  Clone ID: PAT_MRT3847_10614C.1.pep
MDTKRYGYINSSKEDYVRVQSERPLQAPIILVQFKA

SEQ ID NO: 149644 - protein, 77 aa, Glycine max
  unsure (1)..(77): unsure at all Xaa locations
  Clone ID: PAT_MRT3847_106150C.1.pep
SWSCSLFTFLVIIESFMDLSRVAQSLDTLWFYTNILTCRDQPEPEASLIDQFAPLVHFKECPKRDLLKPITPXQHES

SEQ ID NO: 149645 - protein, 131 aa, Glycine max
  unsure (1)..(131): unsure at all Xaa locations
  Clone ID: PAT_MRT3847_106151C.1.pep
MQGFTAATTDFTELQSTMRAIEHACTSIQMHINPGASEAVILSLGQSSQPYKTCQFILENSQVATARFQAAAAIREAAIREWGFLSADDKKGLIXFCLCYVMQHTSSPDGYVXSKGSSVAPHLMKRGWLEF

SEQ ID NO: 149646 - protein, 86 aa, Glycine max
  Clone ID: PAT_MRT3847_106152C.1.pep
HSSCSSSNMTLHQNESPTFSSRIFSSQVDSKYNNPPVDLHGFHPLHQESHHLQSPKPHQFPQEIISISSSTESYVSLARFHVSVFI

SEQ ID NO: 149647 - protein, 131 aa, Glycine max
  unsure (1)..(131): unsure at all Xaa locations
  Clone ID: PAT_MRT3847_106153C.1.pep
STSRFSMSADWRAGQSTPPYLDGSAPDDFGFDPKKLVLLPKNRERFFXSKLIHCRWVMLAVPGIMEAEGLGLXNXKKAQEWAGGGGGPRTPPREFISIFFSSHWGGGMGERKQKKKKQWSMEKDPENNTYP

SEQ ID NO: 149648 - protein, 117 aa, Glycine max
  Clone ID: PAT_MRT3847_106154C.1.pep
PFLVLSFLLSHFRSQTSSFMPFCNHDDASVLLSFKSSFTLDSSSLSNPWCESCHPKTESWENGTNCCLWEGVSCDTKSGHVIGIDLSCSCLQGEFHPNTTLFKLIHLQKLNLAFNYF

SEQ ID NO: 149649 - protein, 254 aa, Glycine max
  unsure (1)..(254): unsure at all Xaa locations
  Clone ID: PAT_MRT3847_106155C.1.pep
MAWLRNLSKFATMKRASSSSSQRPKNTDPFCLLPSFTFFSNFSTNTIEEKPCVKPVEYNNYSGLQPTRPHEKPRVVVLGSGWAGCRLMKGLDPRVYDIVCVSPRNHMVFTPLLASTCVGTLEFRSVAEPIGRIQPAISREPGSYFFLANCTQIDAHNHMVHCETVTEGVETIAPWKFTISYDKLVIALGSQPSTFGIQGVKEHAIFLREVHHAQEIRRKLLLNLMLSDVPGISEEEKQRLLHCVVVXGGPTGVE

SEQ ID NO: 149650 - protein, 100 aa, Glycine max
  unsure (1)..(100): unsure at all Xaa locations
  Clone ID: PAT_MRT3847_106156C.1.pep
ENTFCLKGTISKAMIQQTDGNQMVTVRTPLKSDPSKQSGRQXHIDPIGGGIXEDRTGDWSTLTQNSTIRNWLRAAAWKKGCIKAKTAQAGNAAIKRRDCA

SEQ ID NO: 149651 - protein, 85 aa, Glycine max
  unsure (1)..(85): unsure at all Xaa locations
  Clone ID: PAT_MRT3847_106157C.1.pep
MTGIRTVSDPGDSTSDRLSNATGASYIAVCYVKFDEATGARDVTVIYTEPPXKLVRKLDWSNDVLFTGGWAKSGLYYETVTKIFK

SEQ ID NO: 149652 - protein, 107 aa, Glycine max
  Clone ID: PAT_MRT3847_106158C.1.pep
RLEQKPSFCFSCWMRHNNGAWSVTRAASEESGSFTTHSVQLPSFLCVSVDATMPSVEQRSCYNRQTQFCQRRQKIIQQTKSLSIAAGEKRRVEDVRKHDVLNIGGET

SEQ ID NO: 149653 - protein, 367 aa, Glycine max
  unsure (1)..(367): unsure at all Xaa locations
  Clone ID: PAT_MRT3847_106159C.1.pep
MADGLHSQHPSVVQKLSGQSYLVSRLAPNHSRNCSTTGSYFNGGLQSSGLVPVTAHAPAEKGVSGFLLDFLMGGVSAAVSKTAAAPIERVKLLIQNQDEMIKSGRLSEPYKGIGDCFTRTMKDEGVIALWRGNTANVIRYFPTQALNFAFKDYFKRLFNFKKDKDGYXKWFAGNLASGGAAGAXSLLFVYSLDYARTRLANDAKAAKKGGERQFNGLVDVYRKTIKSDGIAGLYRGFNISCVGIIVYRGLYFGMYDSLKPVVLVGGLQDSFFASFLLGWGITIGAGLASYPIDTVRRRMMMTSGEAVKYKSSLEAFKIIVAKEGTKSLFKGAGANILRAVAGAGVLAGYDKLQLILFGKKYGSGGGG

SEQ ID NO: 149654 - protein, 62 aa, Glycine max
  unsure (1)..(62): unsure at all Xaa locations
  Clone ID: PAT_MRT3847_10615C.1.pep
ASLVSFLKLLVAELILMPSRFATDYKPIKTPPVDDPPSNKPPKHKTPXYNAKPPXYTKPKPP

SEQ ID NO: 149655 - protein, 99 aa, Glycine max
  unsure (1)..(99): unsure at all Xaa locations
  Clone ID: PAT_MRT3847_106160C.1.pep
XXXXXXXPXXXLFXXLCXXXFXXXXNFXQETAXTMIXPXSXXTHXXEXXXXXRXXSXINSXVXELTXRXPPFFFFFLKCKXQFTSSRIPSLRTRXCDSX

SEQ ID NO: 149656 - protein, 204 aa, Glycine max
  Clone ID: PAT_MRT3847_106161C.1.pep
MEESKFGQTDKRKRVRDESDSVLNSPDSLKHPRAESNLSESLRVDSDEFELARLDPVLLNMLNDAENVAEREPTVLDSVIKSFEEEILSPVPNPNLASEADVFKPNLGYLLEASDDELGLPPTVAPSEDVLKPETVDSDRVGPEGMDLTGFLGFEDDIRSYEGFGFVGYDVGDNGGGYVTIDGLFDYAEPGADILWRSESLQAL

SEQ ID NO: 149657 - protein, 47 aa, Glycine max
  Clone ID: PAT_MRT3847_106162C.1.pep
LVSSSGGFFFNKKRIWQWLFGVQGKKVRKFPLDPVQFGPWNHFNSDG

SEQ ID NO: 149658 - protein, 90 aa, Glycine max
  unsure (1)..(90): unsure at all Xaa locations
  Clone ID: PAT_MRT3847_106163C.1.pep
KCCLVPPSGKSPNRTWTPHGCXFPLDXYPLISLEPHCSPPWFTQYPPMEPPALIPPPPHPRLITFCPMEIAPGKSLLIFALALTLLYPMI

SEQ ID NO: 149659 - protein, 108 aa, Glycine max
  Clone ID: PAT_MRT3847_106164C.1.pep
GLDPCCWGAGLDCCCRFRTGVAAQFFGCIICVGGWDIPSVWALGWALGGFPMCLVLVCGPCFGPPLMVGGGFGSFFSRSFLFVKKKKKKKTEKKKKEKTKKKGGRSRS

SEQ ID NO: 149660 - protein, 51 aa, Glycine max
  Clone ID: PAT_MRT3847_106165C.1.pep
KFSPNHHLKRRCHFIKQELSTHSRNSWAFEISSVTYSASGDVSNSEAPIVI

SEQ ID NO: 149661 - protein, 134 aa, Glycine max
  Clone ID: PAT_MRT3847_106166C.1.pep
MVDSSQLLEAASDFAHYTGAHSDDSARDFLNRFPLPVIFSALQTQFDVPGLENTLVTCLERLFNTKLGASLIPQYMPFVQVGLQADSQAVRSLACKTVTCLIENLDNDHKVAASVRLIKDFNMYPLLLDCFIKG

SEQ ID NO: 149662 - protein, 43 aa, Glycine max
  Clone ID: PAT_MRT3847_106167C.1.pep
MVICFKFECSALVFVNNEESNIKRKTVIVLRKIHSHNQLLICY

SEQ ID NO: 149663 - protein, 66 aa, Glycine max
  Clone ID: PAT_MRT3847_106168C.1.pep
VIKGVYKVCHLERQVSVRDRQSDHQDQVFTLANRRGLHGNHRHGQLREQTTASYGHYYSVVWIVPH

SEQ ID NO: 149664 - protein, 51 aa, Glycine max
  Clone ID: PAT_MRT3847_106169C.1.pep
SSLSHLLFTTLTYNQKQEQLYHFVEITTMINISRLTNISTFIIIPTNTATL

SEQ ID NO: 149665 - protein, 66 aa, Glycine max
  Clone ID: PAT_MRT3847_10616C.1.pep
ECSSRGVLTQSQPRIKSRWACESSLNSSPNRIRSALYHAICRRPLKPPRRCSPSRCTRSGGRVGHP

SEQ ID NO: 149666 - protein, 110 aa, Glycine max
  Clone ID: PAT_MRT3847_106170C.1.pep
PSLHNDSQTLSSLVGGGQRRKIVANKGEKDPIDKRHIVWSSFYYQQGSRQDAWRLWNTTFSNSATPISEKMLSMNSQGNSFNIPCYFTSKPYSSTINSSVQCSCSFSGEN

SEQ ID NO: 149667 - protein, 63 aa, Glycine max
  Clone ID: PAT_MRT3847_106171C.1.pep
KENNELWKKRVAYYKTLDYQLAERGRYRNLLDMNAYLGRFAAALIDDPVWLINTATRQAADNT

SEQ ID NO: 149668 - protein, 128 aa, Glycine max
  Clone ID: PAT_MRT3847_106172C.1.pep
MPTETVEILGNQKSFLNGYLEDVFMARLSNLSKDIDWREFTCPQCTSLLGAYPCREGQTPVDGGVRFFKCYISTCVPVGGSGDMFRVFAMGKMFANQLMECANDESSFRFVIRDLTTKSPVLQIILLN

SEQ ID NO: 149669 - protein, 57 aa, Glycine max
  Clone ID: PAT_MRT3847_106173C.1.pep
KKNRSNNFCKCAIFPKTTLWRSYASAGVTRHEPSIYSEILFFMLHTRILIIHIAKLM

SEQ ID NO: 149670 - protein, 62 aa, Glycine max
  Clone ID: PAT_MRT3847_106174C.1.pep
PIRGLFPLPQSLKEAELFGNYFKQIREEPSGWLLSVAHSPNGPSKKGGGAFPKRKFMNIIFP

SEQ ID NO: 149671 - protein, 71 aa, Glycine max
  unsure (1)..(71): unsure at all Xaa locations
  Clone ID: PAT_MRT3847_106175C.1.pep
VLGRKAWRIGPLFLCNIDTEEKAHIGQEALIAEHECLKWLDNKKPGLVVYVCYXSVAKVSDSQLREIAIGL

SEQ ID NO: 149672 - protein, 49 aa, Glycine max
  Clone ID: PAT_MRT3847_106176C.1.pep
EIHQWEVISMLCCELLIFTNFSANNCLFKYCSLLILNLNKFHMSWRVPS

SEQ ID NO: 149673 - protein, 128 aa, Glycine max
  unsure (1)..(128): unsure at all Xaa locations
  Clone ID: PAT_MRT3847_106177C.1.pep
LHSIRTTLSNLALPLKFRLFTGWCCGLNYREQTQQNQCHIQKLIALKPDNRIHSKGGLIVTWNPNNKPFQCAXDALFHCTLNLNSLCRPSYTNKPQEIYIQQCKGIFGMIYPDCPNTFXEPQQPQQIG

SEQ ID NO: 149674 - protein, 101 aa, Glycine max
  unsure (1)..(101): unsure at all Xaa locations
  Clone ID: PAT_MRT3847_106178C.1.pep
XXXXVRXLGIRLEXXSXQSXILXXSXTGXXSQCXXVIXXXXXXXRXRTTXXXTXSTDXXRXRKXSPHLSGXXVAXVXLXXNAPXVVXXWXXNIPQRTXMLS

SEQ ID NO: 149675 - protein, 135 aa, Glycine max
  unsure (1)..(135): unsure at all Xaa locations
  Clone ID: PAT_MRT3847_106179C.1.pep
LCVRWNFDPSKQSLXQYSIDLLGGGIIVDKTGDWITLIQKFSVSNLLRVAARKKGCLMVKIVMSVNAAIKRSDWASLVQVLLTHSNSTEHLDACKCAKSEPHSWEXIFPIEVSGPNNGFETWSSEWANQTLWYLR

SEQ ID NO: 149676 - protein, 263 aa, Glycine max
  Clone ID: PAT_MRT3847_10617C.1.pep
MHHRRFSKLIHVADPDEPESGPEPASEAGPASPSSGEDTKTEAPSPKKRREMKKRVVTIPIGDVDGSKSKGENYPPSDSWAWRKYGQKPIKGSPYPRGYYRCSSSKGCPARKQVERSRVDPTKLIVTYAYEHNHSLPFPKSNSSAASAAVSDGAAVSPIESAARFPPEEEMTVFATDSDLELAGDAAVLLSHHHHHFGWFDDVASTGVLESPICGEVDDVAVPMREEDESLFADLGELPECSAVFRRRNIPATSAIRCGGITG

SEQ ID NO: 149677 - protein, 70 aa, Glycine max
  unsure (1)..(70): unsure at all Xaa locations
  Clone ID: PAT_MRT3847_106180C.1.pep
LLYFWFHYLFCSILSYYKLXIQSDSIISLKCSHFLNLSLIFLNILDSLTHNIYYFFLLEHINTQKKKYTL

SEQ ID NO: 149678 - protein, 42 aa, Glycine max
  Clone ID: PAT_MRT3847_106181C.1.pep
EEVAAAAAVGSGGFAFHEHHEKKEAKDLDEEAHGKKHHHLFG

SEQ ID NO: 149679 - protein, 69 aa, Glycine max
  Clone ID: PAT_MRT3847_106182C.1.pep
KEQLSLLDRFTEDAKRLYGSEAFATDFQDSAAAKKLINDYVKNGARGKITDLIKDLDSQTMIVLVNYLF

SEQ ID NO: 149680 - protein, 72 aa, Glycine max
  Clone ID: PAT_MRT3847_106183C.1.pep
VIMVHSVTPILILTFIYCRWLVHTFHQFSNQCIVMLGKPLNVCNSTLKPISFISNLFHFLTMNTLISKVQDI

SEQ ID NO: 149681 - protein, 135 aa, Glycine max
  unsure (1)..(135): unsure at all Xaa locations
  Clone ID: PAT_MRT3847_106184C.1.pep
MNARRDGRNNRVALFDGIEEGGIRASSLYSSTSSHEIDEHDNEXALDGLQDRVNLLKRLKESGDINEEVDSHNRMLDRMGNDMDSSRGVLSGTMDKFKMVFETKSNQRMFTLVASFVVLFLIIYYLTRFDVLNRY

SEQ ID NO: 149682 - protein, 131 aa, Glycine max
  Clone ID: PAT_MRT3847_106185C.1.pep
RKGSLRRLRKKYQSVESDDDGRHEEKIIADDSMDDQTQEIKDDEDILPISSLYKNKASQRVLDEEMDASVDRQAGDASNKNGEDGGNSIVETNLKADHDLVDSQTLREAQPSNHLVDPCIVLDVGDIKNLK

SEQ ID NO: 149683 - protein, 125 aa, Glycine max
  unsure (1)..(125): unsure at all Xaa locations
  Clone ID: PAT_MRT3847_106186C.1.pep
MNARRDNRNNRVSLFDGIEEGGIRASSVYSSSHEIDEHDNEQALDGLQDRVNLLKRLSGDINEEVDSHNRMLDRMGNDMDSSRGVLSGTMDKFKMVFETKSNQRMFTLVASXFVVLFLIIYYLTR

SEQ ID NO: 149684 - protein, 115 aa, Glycine max
  Clone ID: PAT_MRT3847_106187C.1.pep
MPVTPSVSMLTHHTPAPDMHRPVSKNFHHVSSGMPPALNNQSQQETAMASGPKRANYYKNLIRQHGADKQDIQDSHIGIRHSNFQDMKPLHNIKHREVKPKILKPCIYFTSPRGC

SEQ ID NO: 149685 - protein, 168 aa, Glycine max
  Clone ID: PAT_MRT3847_106188C.1.pep
MNMELQLPQQVLPQILCDIPTSGLKPAIPSVLVSTPTPDVTASWTTPTSAAGSLPSGFGLKPSNPSVSLLNPTPTLSVPAIPSVSLLSSSHDKPVTASVPLSRPVPGMPVTPSVSMLTHHTPAPDMHRPVSKNFHHVSSGMPPALNNQSQQETAMASGPVEWNAPCFK

SEQ ID NO: 149686 - protein, 81 aa, Glycine max
  unsure (1)..(81): unsure at all Xaa locations
  Clone ID: PAT_MRT3847_106189C.1.pep
DLYMLIDYHTVATEFRKFLPYYIRWHQYTSKIYILPSTLTAETKYKRNWRNIHITGLFYDGXYKFWTKHQTNLALTEDEKM

SEQ ID NO: 149687 - protein, 225 aa, Glycine max
  Clone ID: PAT_MRT3847_10618C.1.pep
ICVHETIRRREMKKRVVTIPIGDVDGSKSKGENYPPSDSWAWRKYGQKPIKGSPYPRGYYRCSSSKGCPARKQVERSRVDPTKLIVTYAYEHNHSLPLPKSNSSAASAAVSDGATSSSPADSAARYPPEEEMKVFATDSDLELAGDAAVLLSHHHHHHFGWFDDVTSTGVLESPICGEVDDVAVPMREEDESLFADLGELPECSAVFRRRNIPATSAIRCGGITG

SEQ ID NO: 149688 - protein, 94 aa, Glycine max
  Clone ID: PAT_MRT3847_106190C.1.pep
ENLCTYETYPSSLTSGFGTEGNEGRARRRSETRSRRARRSFDIRARADLPRTAPKTEEEREPRSSLRTLPLQNGSVASTTKRAPRKTNHTADVH

SEQ ID NO: 149689 - protein, 105 aa, Glycine max
  Clone ID: PAT_MRT3847_106191C.1.pep
VCLNIKKKKKKKKKKKKKKKKKKKKKKKKKKRGGPPPRKLANPEKNSEPDPEGDQVSPKGSRIKPGQKKGKSWYRGKMVIRKKSKKKNNPKAKRENPGVPNEGAT

SEQ ID NO: 149690 - protein, 32 aa, Glycine max
  Clone ID: PAT_MRT3847_106192C.1.pep
LRLWERRLCKGNCSLEGVGIRQKEKNNSFRHL

SEQ ID NO: 149691 - protein, 118 aa, Glycine max
  Clone ID: PAT_MRT3847_106193C.1.pep
MSTAPPPTATGSSKVDAAKAKLAAMPAPDAPTGLGLYSRFAFAGAVCCSVTHGALTPVDVVKTRIQLDPVTYNSGLIGGFRKVIANEGAGADWTGFGPTAGGYFLQGAFKFGGFEFFK

SEQ ID NO: 149692 - protein, 102 aa, Glycine max
  unsure (1)..(102): unsure at all Xaa locations
  Clone ID: PAT_MRT3847_106194C.1.pep
KQAHPRVLXAAASSMALSSPSLAGKAVKLGPSAPEVXGRVSMRKTVTKQXASSRKPMVTGPEPRQVTWGPFSXRXPRSYLHWASFPGDYXLGXLAGAFRAEP

SEQ ID NO: 149693 - protein, 107 aa, Glycine max
  unsure (1)..(107): unsure at all Xaa locations
  Clone ID: PAT_MRT3847_106195C.1.pep
AVASFDQRNANDLLSQIRQHSSAFGDGLQRLAHYFANGLETRLAAGTPSYMPLEGTTSADMLKAYKLYVTSSPLQRLTXLFGNPDIVSLVENEGSVHIIDFGICYGF

SEQ ID NO: 149694 - protein, 44 aa, Glycine max
  Clone ID: PAT_MRT3847_106196C.1.pep
ASLLLPTSYPFIGNDVMTHCLSNLCSNCYYFLSSLNLIFLQKFR

SEQ ID NO: 149695 - protein, 43 aa, Glycine max
  Clone ID: PAT_MRT3847_106197C.1.pep
LVYKTNNLPLNQISQFGPPTFNKPDFQLIPMVLLLKPCVIFHC

SEQ ID NO: 149696 - protein, 223 aa, Glycine max
  Clone ID: PAT_MRT3847_106198C.1.pep
KSGSTKLLHALGDCATINQRKVMEDIAAIFKKADKDNSGTLTVKEFQEVLADICERYPQVELYLKSQQMHNIADLLKGSKEDVEKESIELNIEELKTILSKVDSQMKFLPATAQVASQQGTYLAKCFNRMEECEKNPEGPIRFRGEGRHRFKPFRYKHLGQFAPLGGEQTAAQLPGDWVSIGHSSQWLWYSVYASKQVSWRTRALVVSDWTRRFIFGRDSSQI

SEQ ID NO: 149697 - protein, 168 aa, Glycine max
  unsure (1)..(168): unsure at all Xaa locations
  Clone ID: PAT_MRT3847_106199C.1.pep
FAPRYTHLLRFESSLSSLLSPSASHNDVPEPRLRGSGHPTTTFQTHTLSDNPYCCKFHEDMINIRDVGRHRFKPFRYKHLGQFAPLGGEQTAAQLPGDWVSIGHSSQWLWYSVYASKQVSWRTRALVVSDWTRRFIFGRDSSQIXKSFNIFQSLAVAMLQSLSILNLY

SEQ ID NO: 149698 - protein, 69 aa, Glycine max
  Clone ID: PAT_MRT3847_10619C.1.pep
KGALFDLQHCLVDHKHKYLLWTVIFVLHQEICNMCFRSSINSFKTSAIDVVSASGPYCVGTLYYPHVYL

SEQ ID NO: 149699 - protein, 69 aa, Glycine max
  Clone ID: PAT_MRT3847_1061C.1.pep
FFFFFKRLIPLLIKHQDHRAQQCKEIILFLIGQSSIIIGIGKQIQGFQTLASIKRAHSVWDSKKLSLKT

SEQ ID NO: 149700 - protein, 55 aa, Glycine max
  Clone ID: PAT_MRT3847_106200C.1.pep
PHPRVNLYIPQLSLHHLGKLINKPSICIPRDIMLKGGYQCLGVTTGGNKIIPTPF

SEQ ID NO: 149701 - protein, 77 aa, Glycine max
  Clone ID: PAT_MRT3847_106201C.1.pep
MATSAIQEIRFTGQTVLKQINEFVRHTRGSRKGRTNMRQTVKNAPQSIWYGPERPKYLGPFSGEISSYLTGELPNDY

SEQ ID NO: 149702 - protein, 49 aa, Glycine max
  Clone ID: PAT_MRT3847_106202C.1.pep
KENCAWLAQSNNFFSSFQMIDFHLQCIIACLLIKGENCRPWPSGLKPSI

SEQ ID NO: 149703 - protein, 53 aa, Glycine max
  Clone ID: PAT_MRT3847_106203C.1.pep
YRIKVTFVIFINITKSINGHIYNITNYIDQVWMCSMKITCNVIKHVYLQLVLL

SEQ ID NO: 149704 - protein, 57 aa, Glycine max
  Clone ID: PAT_MRT3847_106204C.1.pep
LFFFNMLNCAVSISIYLNFLFLGSLSRLDCRSTFSYKRSEISIFVELYFKYWKLGGR

SEQ ID NO: 149705 - protein, 138 aa, Glycine max
  Clone ID: PAT_MRT3847_106205C.1.pep
FTISRPAIMVALMAPTAGAFFLLLNKTHLALYVSTAIIGVCTGAITSISVSTTTELFGTKNFSVNHNVVVANIPVGSLLFGYLAAFVYHKGGHHGHGKCLGMECYRSTFVIWGSLCFFGTFLAFVLHVRTRKFYSHKL

SEQ ID NO: 149706 - protein, 88 aa, Glycine max
  Clone ID: PAT_MRT3847_106206C.1.pep
LPRHRRGLLGGGGCYPGTSGGWGGRGRGSNRSATTVAASWPIGGRARLVLGSKARDRIWRGSGYSRGPICSFITAARSAGPVRYLVMI

SEQ ID NO: 149707 - protein, 56 aa, Glycine max
  unsure (1)..(56): unsure at all Xaa locations
  Clone ID: PAT_MRT3847_106207C.1.pep
PNGVNLLYLGGVSWNNENMFYEVKGDSCSPNAAESVMFICFSPXKKKKKKKKKRAL

SEQ ID NO: 149708 - protein, 35 aa, Glycine max
  unsure (1)..(35): unsure at all Xaa locations
  Clone ID: PAT_MRT3847_106208C.1.pep
SYGKDNRTXHDLGKTLHSLXRDIWNNQLNLINXLY

SEQ ID NO: 149709 - protein, 47 aa, Glycine max
  Clone ID: PAT_MRT3847_106209C.1.pep
ETTSTDTLKANFTGVILLQYMNISFPKILNIGSPQYSVFHPSKRGMD

SEQ ID NO: 149710 - protein, 39 aa, Glycine max
  Clone ID: PAT_MRT3847_10620C.1.pep
DNSNTSVSHNTKSHHHHHSTLFLSLISLSFDLPIITDSD

SEQ ID NO: 149711 - protein, 97 aa, Glycine max
  unsure (1)..(97): unsure at all Xaa locations
  Clone ID: PAT_MRT3847_106210C.1.pep
ACRRKRRWPPFQGQLLLEIVKKNNSFLVKQFRKGNQNVXIXKESTNLYKLNSLKYTGFXNTKTVTVTTQGENXGLFFGTTKTKKPNKPAGMPHKSLY

SEQ ID NO: 149712 - protein, 77 aa, Glycine max
  Clone ID: PAT_MRT3847_106211C.1.pep
RSNSSLYHDQGLGKGWGPERYRTLHINAGRLPVQRWSFLGVPNILLSGSPSVLVSQNIGSRITGPMNGLQIISYQSV

SEQ ID NO: 149713 - protein, 114 aa, Glycine max
  Clone ID: PAT_MRT3847_106212C.1.pep
TFGDPKMGQFSMRNVVPRVVLRSLSVAAATVLAAMLPFFPDIMALFGAFGCIPLDFILPMVFYNMTFKPSKNTIMFWVNNVIAAASSILVVIGGIASIRQIVIDAKTYNLFADM

SEQ ID NO: 149714 - protein, 94 aa, Glycine max
  Clone ID: PAT_MRT3847_106213C.1.pep
VGRVCCPKCNAVPRRESGGRSDRPAPPAAAGAGTMHQDPPTAPAQSGGGHMLGGIGPTIANGRDVRTGRAMAHMAVDAAMGTRTLRHETVDTEE

SEQ ID NO: 149715 - protein, 51 aa, Glycine max
  Clone ID: PAT_MRT3847_106214C.1.pep
PIPSLPSPFERYALTITTSHRAASQNMHGTPSILNRHTVFLWTLDDSRSTR

SEQ ID NO: 149716 - protein, 36 aa, Glycine max
  Clone ID: PAT_MRT3847_106215C.1.pep
RLLSARSMTRSMYLILAHLGHHRRLVPLRLPQVGSE

SEQ ID NO: 149717 - protein, 226 aa, Glycine max
  Clone ID: PAT_MRT3847_106216C.1.pep
ISESTLTHIESMDGERETLEEPIEKEGSLVGDGKDLKVGVLGSDLCIEGVVCTRERDAELNGDVGFDGSKEEGKGVDPSGGEAAEALGEDSQVLRSLESKSVNEIAELDGNEATLKTLDEQKNIDDKEVNKLVEKEAISDVIQAEPDVTQSIKEHAGDLGEGSQVVRSLEGKSENETAELDGNDVTLKTLDEQKNIDIQVESDISQSIEGQAGIAEQGWFTRRAGN

SEQ ID NO: 149718 - protein, 65 aa, Glycine max
  Clone ID: PAT_MRT3847_106217C.1.pep
HNSYAENTRGGSSCLGFPKHSTNCPWGGALSQRIEPKNPATMPAQPASHAPWGDAPACAGTTGSF

SEQ ID NO: 149719 - protein, 100 aa, Glycine max
  Clone ID: PAT_MRT3847_106218C.1.pep
MNPLCCIAPVSIDRDRANPVVAKSPSQCQLGLDASIRTVNYASKSSFSTQDSSVGADSVKDTAAADLEEEEEPRDSRAFAGGNGGGVAVCVALLLGDRVN

SEQ ID NO: 149720 - protein, 38 aa, Glycine max
  Clone ID: PAT_MRT3847_106219C.1.pep
TKPPSMTLYTIHLHHQFLYNIPFHIKTLQTPILLYQHY

SEQ ID NO: 149721 - protein, 48 aa, Glycine max
  Clone ID: PAT_MRT3847_10621C.1.pep
EGLKYAGPNSNFFFQPDTYFIHFDNHYSFPDSLWTCILLMNINPQMVF

SEQ ID NO: 149722 - protein, 52 aa, Glycine max
  Clone ID: PAT_MRT3847_106220C.1.pep
FLKFDLVSSDLDIRCRNFGVIYKKSSILMSEKCNFAKCGISLFRLLVCELFF

SEQ ID NO: 149723 - protein, 45 aa, Glycine max
  Clone ID: PAT_MRT3847_106221C.1.pep
LTSEVTHRRASGNQIRCSTHKQEMRTPKHKELYYIEEREVATEKR

SEQ ID NO: 149724 - protein, 509 aa, Glycine max
  Clone ID: PAT_MRT3847_106222C.1.pep
MAETDIQDYLQLFFLWLLSIIAVRAILTKLRHKPRRPPGPRSLPIIGHLHLISALPHQSFHALSTRYGPAVQVFLGSVPAVVVSCPELAKEFLKTHEPSFSNRFVSAAVHHLSYGSKGFLFAPYGSYWRFLKKICMSELLGGRTLDQFRHLREQETLRFLRVLRAKGEAHEAVDVSGELMTLTNSVISRMVLSRTCCESDGDVEHVRKMVADTAELAGKFNLADFVWLCKGLDLHGIKKRLVGILERFDGMMDRVIREHEEERERRKERGEGEEIRDLLDILLEIHQDESREIKLSRENVKAFILDIYMAGTDTSAITMEWALAELINNHHVMEKARQEIDSVTGNKRLIQESDLPNLPYLQAIVKETLRIHPTAPLLGRESSESCNVCGYDIPAKSLVFVNLWSMGRDPKIWEDPLEFKPERFMNNNEDKQIDVRGQNFQLLPFGTGRRLCPGASLALQTVPTNVAAMIQCFEFRVDGTVSMEEKPAMTLPRAHPLICVPVPRMNLPF

SEQ ID NO: 149725 - protein, 116 aa, Glycine max
  Clone ID: PAT_MRT3847_106223C.1.pep
MANMERMIRSFMSLFFILWIFVVLDLVLKVYGHAEGDALIVLKNSMIDPNNALHNWDASLVSPCTWFHVTCSENSVIRVELGNANLSGKLVPELGQLPNLQYLELYSNNITGEIPV

SEQ ID NO: 149726 - protein, 36 aa, Glycine max
  Clone ID: PAT_MRT3847_106224C.1.pep
GIGNTSQRFISSASPGSQLFSFGSHFRSYSMSALPQ

SEQ ID NO: 149727 - protein, 79 aa, Glycine max
  Clone ID: PAT_MRT3847_106225C.1.pep
IYNMYINRSIRNHENTSNNMTSLFAVTGSSAKHFFLLCVHVFQIPFLLLLLFNIADSYQSTILILKSTDRTNYRIIIAR

SEQ ID NO: 149728 - protein, 67 aa, Glycine max
  Clone ID: PAT_MRT3847_106226C.1.pep
HLLTVWRVICIYSTFYFSKYTILVCSPLLVFVLRMEGVRLYFLGLVFFVGVVCCTRVMVVVRMVSIG

SEQ ID NO: 149729 - protein, 208 aa, Glycine max
  Clone ID: PAT_MRT3847_106227C.1.pep
MFRESLFALFLLSAFSSSLLPLTTAQDYVLDTDGHAVENHGTYYLLPAKSGSGGGGIEVAATGKESCALTVVQSLNEDSMGLPLKLSSPSITTSHFTEYTSLSIEFTSAPAPCSSASEWTVVKGLPEGRAVKLNDYGNTVEGDFAFVCAKREFYRCNKSYQLIFCPYGLMRCEDVGISIDDDGNRRLVISDGNPFLFKLQKVGSSSSA

SEQ ID NO: 149730 - protein, 65 aa, Glycine max
  Clone ID: PAT_MRT3847_106228C.1.pep
PITFSSGSGRSGNQLSAFLTVMVQTKTNPPAPFSFSLVFYFTHFYWTRTPLSYFPPPTLSFTTSS

SEQ ID NO: 149731 - protein, 57 aa, Glycine max
  Clone ID: PAT_MRT3847_106229C.1.pep
KRIAIVTDIWEGLTSNSTLMLLCTFLCMFIYSTRHIYVLFIYKNTKAQAKSYHGSYV

SEQ ID NO: 149732 - protein, 146 aa, Glycine max
  Clone ID: PAT_MRT3847_10622C.1.pep
PTPPKKPYYYHSPPPPPPKKKPYYYHSPPPPSPPYVATTTPPVPSSYSTSYRPPPSATSYPPPPSYHTTGSYSYPPPPPPVASTVSYPLPPTAYPPYSSHPPSSYPPQPSSYPPPPSYPPPASAYPPPPYPPPAGYPPGIYPPPPY

SEQ ID NO: 149733 - protein, 92 aa, Glycine max
  unsure (1)..(92): unsure at all Xaa locations
  Clone ID: PAT_MRT3847_106230C.1.pep
RLXMTFXXLMYRNRXWPTNSXIPASVXDXDVNSVGSTSGXAPXXGXPCPLVLXXAPPSQWAVSPGTCXAPQRXIXLXPVHLNFSLPLRXXXS

SEQ ID NO: 149734 - protein, 156 aa, Glycine max
  Clone ID: PAT_MRT3847_106231C.1.pep
KLKQKVSVNERVMPICLPSKDYAEVGRVGYVLGWGRNANFKFTDHLKYVMLPVADQDQCIRHYEGSTVPEKKTPKSPVGVQPILNEHTFCAGMSKYQEDTCYGDAGSAFAVHDLEEDTWYATGILSFDKSCAVAEYGVYVKVTSIQDWVQKTIAEN

SEQ ID NO: 149735 - protein, 75 aa, Glycine max
  Clone ID: PAT_MRT3847_106232C.1.pep
FFNNKQKKKDKATSSKNYIFFLNLFYLLLFHLPTSNRAYLKLNNHDLLMKMNHHKHSNISECAHPYCHLNACTKI

SEQ ID NO: 149736 - protein, 101 aa, Glycine max
  Clone ID: PAT_MRT3847_106233C.1.pep
YCQVGWGVSLLVDVFISNYNAFFFVHVSCAIIFVELWYHFNIIFKCSPPTTHTHPKSNVAIFKCSCQRKLSEVIIVLSFFSNVRGFKLKLVDDYLDCRRWD

SEQ ID NO: 149737 - protein, 137 aa, Glycine max
  unsure (1)..(137): unsure at all Xaa locations
  Clone ID: PAT_MRT3847_106234C.1.pep
MATVLAPPPSLTVRASSCRRHSKKKQQQKRALGDFSLFAQVVRKDVEFLKRGIDNGVAWAKETFRIPEVAKKIDDVVWLRNLDDPTXASLASACWPQPCYPGLTGVDLLMYDLKAFEAYATDFYYFSKLWTRPIPQD

SEQ ID NO: 149738 - protein, 56 aa, Glycine max
  Clone ID: PAT_MRT3847_106235C.1.pep
GSLVLFSLQLAARSGSVSALLTPRYSAALDIADLEVHTCTQDWQGFQVAFTLSRED

SEQ ID NO: 149739 - protein, 48 aa, Glycine max
  Clone ID: PAT_MRT3847_106236C.1.pep
IYLSNTLEVLARDRIMINKCSGSFAPAVLKFDHMSCYLHCLMVCEVFL

SEQ ID NO: 149740 - protein, 85 aa, Glycine max
  Clone ID: PAT_MRT3847_106237C.1.pep
TPFPYGLIHLLFIQDHDFLAQWVGGAKTGTGTGGSQRHSLDSFTKILKGRGMFPRKKFNRGVLNILIKRTFFPLNGNLLGPGDNP

SEQ ID NO: 149741 - protein, 120 aa, Glycine max
  Clone ID: PAT_MRT3847_106238C.1.pep
CQSSFSTWAKQVPLSAFFWEACRRGQPWRASSSPYLPVTAKDRSNGQRTQRNLHVLEARMINRGIGHGCTSNGFNGIVQSNREGPINIPKLDPVGFSFPEKSGGCPPICPPQVCYKEMLN

SEQ ID NO: 149742 - protein, 74 aa, Glycine max
  Clone ID: PAT_MRT3847_106239C.1.pep
EVPHSHASCSKKKKKKKKKKEKKQKKKNKKKRGDLLEGTGLGEPTCKEKGRALCTLNKRNWTLMQRLLITKTTA

SEQ ID NO: 149743 - protein, 113 aa, Glycine max
  unsure (1)..(113): unsure at all Xaa locations
  Clone ID: PAT_MRT3847_10623C.1.pep
RVPITIIRTCDQRNNTVNWLNYDGIIVSSLEANSALYRPXHEPFKSIPLIWTEHENALAYRCRQYTTNGHIELSNDRGRVINRSTDVDFPDYALPMIHFKLDAGNFYAIPGYP

SEQ ID NO: 149744 - protein, 88 aa, Glycine max
  Clone ID: PAT_MRT3847_106240C.1.pep
MPSSKGSTIALRGVQGTIWAWLVQDTHPGAIQIRTYATQDPVVGQFRPILGVDAWEPPYYLDYQNRKAEYFKAIWNVINWKAAEKRFQ

SEQ ID NO: 149745 - protein, 265 aa, Glycine max
  Clone ID: PAT_MRT3847_106241C.1.pep
FFKYTKEVNLPLLGLFDDEHIDYEVDRNKDETPNLAELTRRGLEIMERASNGFIMVVSGHGIQSACLQGDPGALYGELLSWDAAVAEAVNFIKEKSIETLLLVLSDLNTAGLTLAYPGESTWDPRAVLDQRGSIESIVQKIAERHYNETELEQLVEQRLGITLVSQERDLVEANQDNATSLYPVLSTMVTKRAKITWSSTSNTGQDVNMFVHGRGAEEFKGNLDNAQISRMLDGLMTMKVEEITAHLNGQDSTVKNSPGSATGLL

SEQ ID NO: 149746 - protein, 499 aa, Glycine max
  Clone ID: PAT_MRT3847_106242C.1.pep
VIAGVLAKAGYKVLVLEKGGYFARNNLSLLEGPTMDQMYLNGGLVASDDMGVFILSGSTVGGGSAINWSACIKTPQHVCKEWSDKHGLELFESELYREALNAVCEKMEVQSEIEDEGFNNAILRKGCQEMGYPVSNIPRNSASDHYCGWCCMGCKDGRKKGTSETWLVDLVKSGNGAILPGCEAIKVLHKKKEGRDRKIARGVAFEFEYKGTKDICVVESKVTIVACGALSTPALLKKSGLRNQNIGRNLHLHPVAMAWGYFPDAPESEVWPEAYKKSYEGGIMTAMSTVVAEFEQSGYGAVIQTPSLHPGMFSIVTPWTSGIDIRDRMRKFSRTAHIFALARDQGSGTVKAPDRISYKPADVDEENLKKGIEKVLRILAAAGAEEIGTHHNKGRTLNVKQVSYHEFEKFVKEESSRSLTDLTTPLCSAHQMGSCRMGSNPKQSVVNPTGETWEVEGLYVADASVFPTALGVNPMVTVQAIAYCTAQSVVEVLRRKRTK

SEQ ID NO: 149747 - protein, 78 aa, Glycine max
  Clone ID: PAT_MRT3847_106243C.1.pep
FYTFFIFERMFYIFLWLVKLKKKLLFLLIYFVIYYILKNTLYLSLTLLNIFNLILKIKDYLNILLKKTYMNLALSRSI

SEQ ID NO: 149748 - protein, 81 aa, Glycine max
  Clone ID: PAT_MRT3847_106244C.1.pep
FVTYKDCHENRVADNVIPVVKEEKDNQWNHEAIENPLTLSCVINQTKPLALSHPMFLSWARVWGTTLLTFRGGKIVRVSVS

SEQ ID NO: 149749 - protein, 56 aa, Glycine max
  Clone ID: PAT_MRT3847_106245C.1.pep
PCNCSGYKPPHEKPPLHTPTVEKPPAYKRPEENPPFNKPIDEKPPNDKLPAEKPPQ

SEQ ID NO: 149750 - protein, 150 aa, Glycine max
  Clone ID: PAT_MRT3847_106246C.1.pep
KLASFLGIIARNPELAPLNIDDWRCFDKEEKNKLVDLVRKKFSIPERGVEFVKKSLGKKWKDYKCDLRSMYFTKYKTKHTLLKHRPNHIPRDQWIGLVSYWISDKGKRRSQANKSNRAKQKMPHTGGSKSIGTLMNEKAKDGIEPTRAEV

SEQ ID NO: 149751 - protein, 45 aa, Glycine max
  Clone ID: PAT_MRT3847_106247C.1.pep
PKVFMGLFFDLSKAPFQVRLTAGQYVFIAILFFSFFFNVLFPVST

SEQ ID NO: 149752 - protein, 142 aa, Glycine max
  Clone ID: PAT_MRT3847_106248C.1.pep
DLVMVDAWCVGYHSEADAPSRRLAKPLIFCRTESDCPMENGYARPVEGIHILVDMQNMEILEFEDRKLIPLPPADPLRNYTSGETRGGVDRSDVKPLQIIQPEGPSFRVNGHFIQWQKWNFRIGFTPKEGLVIHSVAYIDGS

SEQ ID NO: 149753 - protein, 73 aa, Glycine max
  Clone ID: PAT_MRT3847_106249C.1.pep
SKNGTTEGSLQPQDCGPRCEERCSKTHHKKPCLFFCNKCCAKCLCVPPGTYGNKEVCPCYNNWKTKRGGPKCP

SEQ ID NO: 149754 - protein, 97 aa, Glycine max
  Clone ID: PAT_MRT3847_10624C.1.pep
LSFSRALLIVDFWLHQFVSVYVGDLHDPECGFQILSSFSFNFNRRMEVLEGFLFAFSFWIYTTIPIHTPMLMQDLALSSFQICRLDFPLLKHTIRYG

SEQ ID NO: 149755 - protein, 140 aa, Glycine max
  Clone ID: PAT_MRT3847_106250C.1.pep
MDPPRKKKKGRYGVAELKTLGNQLLSSASHINNLPLLLTFVSPSSPPHHVLESLLSLHSFFLPLLPKLPSSSAPSSADDQSEFIYLAWLRSKFDEFLKSLLDVLASPQGDETLKELGLDTLMEFVKVANGGAFHSSLYHK

SEQ ID NO: 149756 - protein, 117 aa, Glycine max
  unsure (1)..(117): unsure at all Xaa locations
  Clone ID: PAT_MRT3847_106251C.1.pep
YPLFTGLSINPKXLKIQFTTIFIGVNITFFPQHFLGLGGIPRRYSDYPDIFTTXNIVSSLGRSISVIRIIIFIIIIXERIVSKRKIIFKQNITSNIEXLQKLPPEEHSYNELPIISK

SEQ ID NO: 149757 - protein, 340 aa, Glycine max
  unsure (1)..(340): unsure at all Xaa locations
  Clone ID: PAT_MRT3847_106252C.1.pep
MDPPRKKKKGRYGVAELKTLGNQLLSSASHINNLPLLLSFVSPSSPPHHVLESLLSLHSFFLPLLPKLPSSSSAAXPPSAGDDQSEFIYLSWLRSKFDEFLKSLLDVLASPQGDETLKELVLDTLMEFVKVSNGGAFHSSLYHKLLCSIVYSTSPPTFLVDLLASKYFKYIDVRYFTFISLKKLASTLEGKDVSDDKIANADGSSESQMSSNMECVIHNMYYTISHVPPHQGSDNTSELEMWSSSESDHKQLYGDKGADDKPQKFQKPNKNVLSAAKIAKKMKLKFTKAWIAYLRLPLPIDVYKEVLVNLHQAVIPHLSNPIMLCDFLTRSYDVGGWWSV

SEQ ID NO: 149758 - protein, 255 aa, Glycine max
  unsure (1)..(255): unsure at all Xaa locations
  Clone ID: PAT_MRT3847_106253C.1.pep
GNSGFEEPVSAVANKGAGGRSSAKREQNMAGKNASTEREDPSEFITHRAKDFLSSIKDIEHRFIRASESGREVLRLLEANKIKVGYSEAKGKSSTTALLSAVQPVCCGRKASPVFQEPAQKIISWKRTASSRSSSSRNALATKTKEDIDDSGSDFVEEFCMIAGSHSSTLDRLYAWERKLYDEVKASEFIRKDYDRKCHQLRHQFAKDQGTHVIDKTRSVXKDLHSRLTVAIYSVDSISKRIERMRDEELLPQFF

SEQ ID NO: 149759 - protein, 72 aa, Glycine max
  Clone ID: PAT_MRT3847_106254C.1.pep
KPSGVPFSRTLIFAGLRLGVYRADSPGRVAVLSPRYSATYRALPISSSWRPWFHANEASAVVWTDILSLAFA

SEQ ID NO: 149760 - protein, 93 aa, Glycine max
  unsure (1)..(93): unsure at all Xaa locations
  Clone ID: PAT_MRT3847_106255C.1.pep
XLXIIXTXXHXXQRXSTIXXNSLXPSTLXXLKXXEXXKXSKXRXFXKXXXSPHQHXSXXXPXXXXAXQXXXXXXXXNXXXXXKXXXFXSXXPP

SEQ ID NO: 149761 - protein, 53 aa, Glycine max
  Clone ID: PAT_MRT3847_106256C.1.pep
SLSKPRLEREYSPPEPLRRWQDRRFPHSRRTPDVRPIEFSRRSGGSHIGNIRE

SEQ ID NO: 149762 - protein, 89 aa, Glycine max
  unsure (1)..(89): unsure at all Xaa locations
  Clone ID: PAT_MRT3847_106257C.1.pep
VYCFVHKVPVCGECICFPEHPXCVVRTYSEWVIDGEYDWPPKCCQCQSVLEEGDGSQTTRLGCLHVIHTNCLVSHIKSFPPHTAPAGRL

SEQ ID NO: 149763 - protein, 60 aa, Glycine max
  Clone ID: PAT_MRT3847_106258C.1.pep
ELFINEGCFQTFNRGSLPAWMPSEVQPLQMARTMLSWRMHVGVATGDGEMYVFFIFPQFR

SEQ ID NO: 149764 - protein, 36 aa, Glycine max
  Clone ID: PAT_MRT3847_106259C.1.pep
RLREDYRRAIYNKSLIGSNAKRKRARPTKFWFKAIV

SEQ ID NO: 149765 - protein, 59 aa, Glycine max
  Clone ID: PAT_MRT3847_10625C.1.pep
KQKTVDVRRKLHKHSLMAATTKQEIYYMSTTQDASKRKTFGRSVVNYLLNVDTNNPTPS

SEQ ID NO: 149766 - protein, 112 aa, Glycine max
  Clone ID: PAT_MRT3847_106260C.1.pep
IRPNSFFFFFAQPFFLSHPPHGFKLSPPPPSGNRILAPSFWGANSLFKSFFNERHNPYDPLKVFLKHFPKIFFPPQKQMQTPFFLFFPTHFLNLFIKTPPKKFKKNPPPPVG

SEQ ID NO: 149767 - protein, 147 aa, Glycine max
  Clone ID: PAT_MRT3847_106261C.1.pep
RKGWSSGTRTSPSWWRGKCVFFDLQGGTNFSNVTGGHTSSTVKQSHPLVAVPSTAGIAPKGEGAEGNTNNEKVKVIVGKVVVRVVLLVLLSVLVLWMSKLIQKMKMPQLERAAKVGKPLQMSSIGDTKAPVAAVTRTQPTLEHEYAP

SEQ ID NO: 149768 - protein, 77 aa, Glycine max
  unsure (1)..(77): unsure at all Xaa locations
  Clone ID: PAT_MRT3847_106262C.1.pep
KKTMSHEVRPLXLLQFFDYLIIFTSLTFPSILIFSFCFLSYRSLRLTRTRSFELLKNIFSFLLFLLRARAEFLACVA

SEQ ID NO: 149769 - protein, 140 aa, Glycine max
  unsure (1)..(140): unsure at all Xaa locations
  Clone ID: PAT_MRT3847_106263C.1.pep
QTGFPMKHVVLTPGLVTLLLLTGSPCLRGYGRRIGERRIKSLRRCIVMPDLSVXNSVILKKGENDXPGLTDVEKPRMIGPKRASNMLILFNLSQEDVVWKSVXTYRHTSTTNAGKKESXAPRIHKLATPLTLQTTRTNTA

SEQ ID NO: 149770 - protein, 92 aa, Glycine max
  Clone ID: PAT_MRT3847_106264C.1.pep
EWQVDPLGSSSVWRSSGGVDVFSGSSRRDDDEQELKWAAIEKLPTYLRMTRGILTEAEGQPTEIDINKLCPLQKKNLVERLVKIAEQDNEKF

SEQ ID NO: 149771 - protein, 125 aa, Glycine max
  Clone ID: PAT_MRT3847_106265C.1.pep
SLFFSRHPQWNGFFPTHSWFEVKGFFWAVYSPQGWASRSCKSLGIDPPLIFFHFSVGPPRPIGFFLPQNPPFFFFFMFSPIPLFFMFFCPLFLGSYAIFFFKKPLCLFGLIREEKAGVGFRFVVP

SEQ ID NO: 149772 - protein, 205 aa, Glycine max
  unsure (1)..(205): unsure at all Xaa locations
  Clone ID: PAT_MRT3847_106266C.1.pep
YLMRFPTEXXCNLLNEARHAPXHEIAWEMVLERSAEVWPEENRNKSGSGIEEYVWSNHKPWIPRPFLSIHVRMGDKACEMKVVEFEEYMQLADRIRRHFPNLNSIWLSTEMQEVIDKIKEYSGWNFHYNKVRRQGRTNVSMAKYEASLGRESSTNYPLVNFMMAADSDFFVGALGSTWCFLIDGMRNTGGKVMAGYLSVNKDRFW

SEQ ID NO: 149773 - protein, 141 aa, Glycine max
  unsure (1)..(141): unsure at all Xaa locations
  Clone ID: PAT_MRT3847_106267C.1.pep
SKFGGLAIATCGRRLCQWKHYMNKRFFLDLGLSXEEFHAFTWFPPWAVDVSHGSVLLFSRVCTSHLLSIKELGDDCANGVVKILSGMQADPLSALGFXCKWFFFMGRFMWFCQHGLDAELVKFVPPSISPEILLLLAGPSF

SEQ ID NO: 149774 - protein, 107 aa, Glycine max
  unsure (1)..(107): unsure at all Xaa locations
  Clone ID: PAT_MRT3847_106268C.1.pep
MESVPNPNGEEPTSWDELYNINLMPSELFLKFRKELQGIRVGLNMEFYNAPVNEYQAKLVLKPLTPEWKWKIIYEPLHQDVRVLSKKIPITKFLNLXVGVGHNFQMH

SEQ ID NO: 149775 - protein, 65 aa, Glycine max
  Clone ID: PAT_MRT3847_106269C.1.pep
LLCSLYILSVKATLTHYIKNMTLLAIKMTRWLTQVAVWRFVGFVSTIVGLVCHGLRSSLNYVFGE

SEQ ID NO: 149776 - protein, 440 aa, Glycine max
  Clone ID: PAT_MRT3847_10626C.1.pep
RHIGQGKGTRGSQHSNTSPAANHYQFNRVAAPPLESPSSPSASPSGSAKPPVPKLAPHRKNASDSSPPHSTSGSGTLSKTKSTSSKVHTVPILAGVIGGAVFLIFSSIGIYLCKTKVANVRPWAMGLSGQLQKAFVTGAQKLKRSDLEAACEDFSNVIGNSPIGILYKGTLSGGVEIAVAFVSITSSKNWSKTLEAQFRSKIDKLSKVNHKNFVNLIGYCEEEEPFTRMLVFEYAPNGTLFEHLHIKEAEHLDWGTRLRVATGVAYCLQHMHQLDPPMALIKLNSSAVYLTDDYAAKLSDLSFSNDIASAETRAMDKPLATPESNVYSLGVLLFEMVTGRLPYSVEHKDSLENWASHYLEVDQPLKEIVDPILVSYQEDQLEQVASLITSCVHPDPQKRPTMKDVSERLREITKITPESAVPKLSPLWWAEIEIASAEAR

SEQ ID NO: 149777 - protein, 153 aa, Glycine max
  Clone ID: PAT_MRT3847_106270C.1.pep
VRFWSEYFTTDRSLEKAMLSRQHVPVESSHLFKFINWSSLLPERFIKGHVYNNPNYGSSELAKKYPGFLDVRAAPLLADDNKLRGLPLTYVITCQYDLLRDDGLMYVTRLRNTGVQVTHNHVEDGFHGAFSFLGLKISHRLINQYIEWLKENL

SEQ ID NO: 149778 - protein, 91 aa, Glycine max
  Clone ID: PAT_MRT3847_106271C.1.pep
LTVQHLLDGGRPFCVLICSRLEACFIINALLCGHRYSMSIISTTTRVIVISAYSLSFSLELYIMLGHAVLYHTLFDDSVLCKKMMRMGKEN

SEQ ID NO: 149779 - protein, 95 aa, Glycine max
  Clone ID: PAT_MRT3847_106272C.1.pep
ERVAAISLVVLAVASPLYIDHRPESELEDDEQSLSFAFWLALLLFVLIIAIALSAFLNRNFTRFHRNWIQSWWFFWWIILILIVLLLVLKCKASV

SEQ ID NO: 149780 - protein, 75 aa, Glycine max
  unsure (1)..(75): unsure at all Xaa locations
  Clone ID: PAT_MRT3847_106273C.1.pep
RVSQRNPVXIDVKVAKSGAAGKERLLSGSVTAASLRSAGTQTEAQDTGPTPTQVTPHTAPVWFLFLPPSEKLSLS

SEQ ID NO: 149781 - protein, 103 aa, Glycine max
  Clone ID: PAT_MRT3847_106274C.1.pep
RTLAVAHCHLLPMASAILVIPHLCWRSCLILRQRCPLQSPFTLQRHNWIEGPQLPRNWNVQNIRLCDLRLRQTVKDAIERLNIQDLVTHYTTCERTHHMRQPH

SEQ ID NO: 149782 - protein, 86 aa, Glycine max
  Clone ID: PAT_MRT3847_106275C.1.pep
TWFSKFVCPPFFPEWHIKPKKKLIPGPCCGLSMAIPKKIVSKLSNFFSPIFFLKQCDSVFLVLIFTQGNFCQNKIKSPGPVFFFFF

SEQ ID NO: 149783 - protein, 72 aa, Glycine max
  Clone ID: PAT_MRT3847_106276C.1.pep
FMNHVGDLGFQAETCSRDIIRARAVVLQKIIKLPPPGRCYSGVSPSFMSLLLLGEFIRSFPVFDAPLPPRYR

SEQ ID NO: 149784 - protein, 244 aa, Glycine max
  Clone ID: PAT_MRT3847_106277C.1.pep
MVFEETELRLGLRLGLPGNGAAPTTEAAAELGVRKRGFSETETDETTSVDLMLNLSPKEASAAATTDGADPRENPKTSPKEKNLPLLDPAKPPAKAQVVGWPPVRSFRKNMFAAQKSSGGEESEKNSPNASFVKVSMDGAPYLRKVDLKMYKSYPELSDALGKMFSSFTIGNCESQGFKDFMNESKLMDLLNSSDYVPTYEDRDGDWMLVGDVPWEMFVESCKRLRIMKGKEAFGLAPRTGEKC

SEQ ID NO: 149785 - protein, 89 aa, Glycine max
  Clone ID: PAT_MRT3847_106278C.1.pep
SYLEVMEKSLSPRSKTNGGWFSCWGRLKLKLPWSKRTSTYKPIGGFNYDPLSYAQNFDEGWEEDDEESLHRGFSARYAAPSSHNKLLKQ

SEQ ID NO: 149786 - protein, 246 aa, Glycine max
  Clone ID: PAT_MRT3847_106279C.1.pep
MVFEETELRLGLGLCLPGNGTTATTEAAAAELGVRKRGFSETETDETATVDLMLNLSPKEAAAADGADPREKPKTSPKEKTLLLPDPAKPPAKAQVVGWPPVRSFRKNMFAAQKSSGGEESEKSSPNASFVKVSMDGAPYLRKVDLKMYKSYPELSDALGKMFSSFTIGNCESQGFKDFMNESKLMDLLNSSDYVPTYEDRDGDWMLVGDVPWEMFVESCKRLRIMKGKEAIGLAPRAVEKCKNRS

SEQ ID NO: 149787 - protein, 346 aa, Glycine max
  Clone ID: PAT_MRT3847_10627C.1.pep
WKQKKIVLGENLLCYIHRAVRILSLYALFLFSKEHEELVGIYASQLARHRCIDLFVHMMELRLHNSVHVKYKIFLSAMEYLPFSSMDDSKGNFEDIIQRILLRSREIKVGKYDNLSDVAEQHRLQSLQKAKVIQWLCFTPPSTITNVKDVSKKLLLRALIHSNILFREFSLISMWRVPAMPIGAHTVLGFLAEPLKQLAETLETSEDYNVFEDLREFQDWREYYSCDATYRNWLKTEVENAEVPISELSLEEKERAISAAKETLSASLSLLKRKETPWLASTDCMYESAEPVFLELHATAMLCLPSGECLCPDATVCTTLTSALYSSAGDEVVLNRQLMVNVSISS

SEQ ID NO: 149788 - protein, 65 aa, Glycine max
  unsure (1)..(65): unsure at all Xaa locations
  Clone ID: PAT_MRT3847_106280C.1.pep
XPLHVKGPKIKKQGINFNSFLFCPSWKNNEKNSHFVSDGPGFKRVXXXILVXQFXCXKGXQIVYI

SEQ ID NO: 149789 - protein, 219 aa, Glycine max
  Clone ID: PAT_MRT3847_106281C.1.pep
MKIVSVAVRSISANLPNQFHQSHLLRSLSTWKFTDNATGNRQFSNSESPEESEQFGGNRGKYAQLDSIFEKFNQQGMARQRPGSVNGASSERMHDLEETYDTLTDGMDGKLMNAATYFELQRMFYYYFVVESRVLPVQESTTNSSSKKGVWYWDYNEQEYPIQDTDVIKFRVTNVSYPQIPVEQPKESKPFAPMLISGAMDDDGLGPVSWWFADEDEDE

SEQ ID NO: 149790 - protein, 50 aa, Glycine max
  Clone ID: PAT_MRT3847_106282C.1.pep
HFFLGESYFHVLLVSNEAPELNSIIMETECYVIIASVKTHGPHSSSMCFW

SEQ ID NO: 149791 - protein, 80 aa, Glycine max
  unsure (1)..(80): unsure at all Xaa locations
  Clone ID: PAT_MRT3847_106283C.1.pep
PGSTHGPKTLTLNASLQKTDYYNTSPPKXWRRKIKKIFCQAICGQQIRCSKNLFCVLFPFVQVKILVPQKKKKKKKKKNK

SEQ ID NO: 149792 - protein, 36 aa, Glycine max
  unsure (1)..(36): unsure at all Xaa locations
  Clone ID: PAT_MRT3847_106284C.1.pep
XHSSRQXXYTKXTRIFLEHQXLILYTAXXDGYXXLI

SEQ ID NO: 149793 - protein, 88 aa, Glycine max
  Clone ID: PAT_MRT3847_106285C.1.pep
QHTRVTMTDLVLRGPPSVVSALVGQVTDHAVFSTRADALGLVRFADGERLMIASVRQGGNFDLRDLRVGIQSGTVIVGLQSLVLFWLS

SEQ ID NO: 149794 - protein, 121 aa, Glycine max
  Clone ID: PAT_MRT3847_106286C.1.pep
MKSLSSVGLGLSIIFGCLLLALVAEVYYLLWWKKRITNREIENNYGNPVKELFYMFCWKRPSSSSLRQTSFTPPELCSSMRIGDTLVHNPEQVQSQSGKDFVFKPFGEDGMDAGYMSPRYC

SEQ ID NO: 149795 - protein, 142 aa, Glycine max
  Clone ID: PAT_MRT3847_106287C.1.pep
MPVSVEQSGETEMMEEDRNKREDAKPSQVRTLANGLVIQELEKGRQDGKIAALGKKISIYYTGKMKEDGVVFASNAGQAPYKFRLGKGKVIEGWDVGLEGMQVGEKRRLVIPPSLTSESDEHCAKIPPNSWLVYDFELVKVH

SEQ ID NO: 149796 - protein, 111 aa, Glycine max
  Clone ID: PAT_MRT3847_106288C.1.pep
TTCNTTHQHQPHQETGQQPQTPCCTTTTTSPEQAHPHQPTPQHQHQDVCTGTWCTTLLHQAPDPPPQRCCCCTRTCHNSPTCQPNQTMPPCNPHQQDAAKTTTYFIGSCLF

SEQ ID NO: 149797 - protein, 112 aa, Glycine max
  Clone ID: PAT_MRT3847_106289C.1.pep
RNPNRGALGPFKTKKKGPKKRQGTGGKTPQRGGGQTLGGGGPKYRRHHRGQGAPNPKHKQGETQRGLGFGGGGHPPGGGGPPPKGGGARSGKALVLPRSPLGRGKPHPPPKR

SEQ ID NO: 149798 - protein, 68 aa, Glycine max
  unsure (1)..(68): unsure at all Xaa locations
  Clone ID: PAT_MRT3847_10628C.1.pep
GCLIHNQQLLLFLLTHKTTTGLFTGGEGQHHHHHFYEPFFLDPQTLLAAPNLPIQPFXFXPFXPVFFF

SEQ ID NO: 149799 - protein, 105 aa, Glycine max
  Clone ID: PAT_MRT3847_106290C.1.pep
TDGVSEARVANVLARIVSPSPSLCSEKSFIVKRVQIDFISLESVHPSAGFARASAPEGLPQACCNHTVASTVIYIVSIKYLQGFILLCRALRDIDPHIDGSLCHQ

SEQ ID NO: 149800 - protein, 92 aa, Glycine max
  Clone ID: PAT_MRT3847_106291C.1.pep
KTCPRQKAPPKRNHRLTKGDSSSFPCECVTLLLTLFFIPPSKAKTTFMPQKVMGWFSNPGTQMPFPSLQRNMALGRGSHRTCSHPGKIDLPK

SEQ ID NO: 149801 - protein, 78 aa, Glycine max
  Clone ID: PAT_MRT3847_106292C.1.pep
QGRPTPCVGGHHVRPGGRQTLAQVPPGGGGYPLPKPKRVMSGKKKGTFPRHERNINAESAPGPRGGMSNCASYVKARP

SEQ ID NO: 149802 - protein, 66 aa, Glycine max
  unsure (1)..(66): unsure at all Xaa locations
  Clone ID: PAT_MRT3847_106293C.1.pep
KLYADTARATCYRDCSDCTNEPVCSVCLNHQLYHRTLHIKTXSLHDVNRDDDIQNGWDMSDEHHYI

SEQ ID NO: 149803 - protein, 71 aa, Glycine max
  unsure (1)..(71): unsure at all Xaa locations
  Clone ID: PAT_MRT3847_106294C.1.pep
RVRFLLKKKKKKKKKKKKKKKKKKKKKKKKKKKXKKKKKKKKKKKGGAVLKNPSLRTRAGKEKIFLKGPQN

SEQ ID NO: 149804 - protein, 162 aa, Glycine max
  Clone ID: PAT_MRT3847_106295C.1.pep
CHTKNPTPVTPAGGQHWDTSTNRTTNTAGGGQGRGGGSIRNHSGSTNASKSNGSSSCSIQLQSSSTIAWGLQQAESATKAEQEDIKWSEYLNNTPFYLGTTPVQHQTTNSLYSSDEVKPETTGFIADESSTMSWHHSQHNFQPSEIYTKDLQRFSVAFGQTL

SEQ ID NO: 149805 - protein, 100 aa, Glycine max
  Clone ID: PAT_MRT3847_106296C.1.pep
DRHKILISCSTSILCPCIRLKHCYAFLSKTNCYVHNLYSYEYLHTLQNACVSYSHRCHRKSTVWFPVFREMRAIHSGCSKWRVIERHPSVMSKQTTRTRG

SEQ ID NO: 149806 - protein, 55 aa, Glycine max
  Clone ID: PAT_MRT3847_106297C.1.pep
HLCSPIVRTKHVRTADHHWNKYWLPEMSTILRGYYINAHSAQSTLKIDPVYDIAS

SEQ ID NO: 149807 - protein, 60 aa, Glycine max
  Clone ID: PAT_MRT3847_106298C.1.pep
RLWSSAWQPMSLRNFANGKTVGMVAIIIVKRLHGLCVAFGVGDKASVVVAPIRLTRHFCK

SEQ ID NO: 149808 - protein, 174 aa, Glycine max
  unsure (1)..(174): unsure at all Xaa locations
  Clone ID: PAT_MRT3847_106299C.1.pep
ESAECGSRQQFQQIVEVQESARILMDISNGNKLSGNSVVGVQGNLYADLKDILETWRLRTPNEWDNMSVWYDLLQWRNEMYNSVIDAFKDFGTTNSALHHLGYRDKAWTVNRLAHIARKQSLFDVCVTILEKLYGHSTMXVQEAYVMITEQALAYLENNGELTNGINLINSTNL

SEQ ID NO: 149809 - protein, 51 aa, Glycine max
  Clone ID: PAT_MRT3847_10629C.1.pep
RQPLIFFGPTQMWVKCPPSQEKFLFPLWQNLNILPPKIMICGVKANCISPF

SEQ ID NO: 149810 - protein, 82 aa, Glycine max
  Clone ID: PAT_MRT3847_1062C.1.pep
LELNTFPRHLKFPLLRISRVSGGLFNQQWIFNLLVSVFLYVCFHFDEFMFMSHKCKWERRMGFGVSLDKWCGVVSYVMSAHM

SEQ ID NO: 149811 - protein, 105 aa, Glycine max
  Clone ID: PAT_MRT3847_106300C.1.pep
HAEISCENRFTFAPTFIKTGLHVLKQESNMEDIRFSDPCRKTKLDNDFNSSEPKNQRWVGNEVAKKQVVQQQQLMGSFLSLMWHWALVFLISFLVFLISCRISNQ

SEQ ID NO: 149812 - protein, 1124 aa, Glycine max
  Clone ID: PAT_MRT3847_106301C.1.pep
MAMQSSSSSFSYRFTNDVFLSFRGKDTRHSFTGNLYKALSERGINTFIDDKKLPRGDEITSALEKAIEESRIFIIVLSENYAWSSFCLNELDYILKFIKGKGLLVLPVFYKVDPSDVRNHTGSFGESLAYHEKKFKSTNNMEKLETWKMALNQVANLSGYHHFKHGEEYEYQFIQRIVELVSKKINRAPLHVADYPVGLESRIQEVKMLLDVGSDDVVHMLGIHGLGGVGKTTLAAAVYNSIADHFEALCFLQNVRETSKKHGLQHLQRNLLSEMAGEDKLIGVKQGISIIEHRLRQKKVLLILDDVDKREQLQALAGRPDLFGPGSRVIITTRDKQLLACHGVERTYEVNELNEEYALELLNWKAFKLEKVDPFYKDVLNRAATYASGLPLALEVIGSNLSGKNIEQWISALDRYKRIPNKEIQEILKVSYDALEEDEQSIFLDIACCFKKYDLAEVQDILHAHHGHCMKHHIGVLVEKSLIKISLDGYVTLHDLIEDMGKEIVRKESPQEPGKRSRLWLPTDIVQVLEDNKGTSHIGIICMNFYSSFEEVEIQWDGDAFKKMKNLKTLIIRSGHFSKGPKHFPKSLRVLEWWRYPSHYFPYDFQMEKLAIFNLPDCGFTSRELAAMLKKKFVNLTSLNFDSCQHLTLIPDVSCVPHLQKLSFKDCDNLYAIHPSVGFLEKLRILDAEGCSRLKNFPPIKLTSLEQLKLGFCHSLENFPEILGKMENITELDLEQTPVKKFPLSFQNLTRLETVLLCFPRNQANGCTGIFLSNICPMQESPELINVIGVGWEGCLFRKEDEGAENVSLTTSSNVQFLDLRNCNLSDDFFPIALPCFANVMELNLSGNNFTVIPECIKECRFLTTLYLNYCERLREIRGIPPNLKYFYAEECLSLTSSCRSMLLSQELHEAGRTFFYLPGAKIPEWFDFQTSEFPISFWFRNKFPAIAICHIIKRVAEFSSSRGWTFRPNIRTKVIINGNANLFNSVVLGSDCTCLFDLRGERVTDNLDEALLENEWNHAEVTCPGFTFTFAPTFIKTGLHVLKQESDMEDIRFSDPCRKTKLDNDFNSSKPENQRWVGNDVAKTQVVQQQKLMGSFLSRMWHWALVFLISFLVFLISCRRNNQ

SEQ ID NO: 149813 - protein, 48 aa, Glycine max
  Clone ID: PAT_MRT3847_106302C.1.pep
ACLVKTSMPPAHLLLCIASGALIITLVCILTLLITHLIMTIITTFKQL

SEQ ID NO: 149814 - protein, 96 aa, Glycine max
  Clone ID: PAT_MRT3847_106303C.1.pep
PVFVPSKSVSCFPKKEGALPPRLAKIPLEVQKKNFFSKGLEGSPKSQKEGFSLSQEGESCFSVGMAKILFPPHPFLTFFFSAPHFVGPPPLKSPNP

SEQ ID NO: 149815 - protein, 249 aa, Glycine max
  Clone ID: PAT_MRT3847_106304C.1.pep
MVSSAVLAIDDPYSEALLSLKAELVDDDNSLQNWVVPSGGKLTGKSYACSWSGIKCNNGSTIVTSIDLSMKKLGGVVSGKQFSIFTNLTSLNLSHNFFSGNLPAKIFNLTSLTSLDISRNNFSGPFPGGIPRLQNLIVLDAFSNSFSGSLPAEFSQLASLKVLNLAGSYFRGSIPSEYGSFKSLEFLHLAGNSLSGSIPPELGHLNTVTHMEIGYNLYQGFIPPEIRNMSQLQYLDIARANLSGLIPKQ

SEQ ID NO: 149816 - protein, 80 aa, Glycine max
  Clone ID: PAT_MRT3847_106305C.1.pep
MPNLCTVSSNASSNFIFGVQPHNFYNVFGSRRTRPRCRVSMSSSDPQNAVVVGGGSVTMDFLATVAAYPKPDDKIRSTSL

SEQ ID NO: 149817 - protein, 146 aa, Glycine max
  unsure (1)..(146): unsure at all Xaa locations
  Clone ID: PAT_MRT3847_106306C.1.pep
VVRRGFKFRMPLGLPEAETVNXCADNTGAXKNLYIIIGERDQMVRLNSSSLRLAVGDMVMATEKNGKPYLRKKVLPAXIVRQCKPWCRKDGVYMYFEDXNAGVFAKPKGEMKGSRYSLDPIGIECAXLRPRIASAAKCFRLSGESW

SEQ ID NO: 149818 - protein, 58 aa, Glycine max
  Clone ID: PAT_MRT3847_106307C.1.pep
LEKKKKKKKIKKKKKKKKKNKGELTVERHLTPVFNLGPNSGLGHLVSFSECYLHVPNT

SEQ ID NO: 149819 - protein, 47 aa, Glycine max
  Clone ID: PAT_MRT3847_106308C.1.pep
LVSIQQVHIISRARRSIIIYVSHCHVWDNAVAFSNQGKEPEEKSLSM

SEQ ID NO: 149820 - protein, 60 aa, Glycine max
  Clone ID: PAT_MRT3847_106309C.1.pep
AQLTAEEQSTGLSFYRDVYEGEILSVLKIIRAMGGAMLMITTRMGNRYAAGQELPPMLQT

SEQ ID NO: 149821 - protein, 249 aa, Glycine max
  unsure (1)..(249): unsure at all Xaa locations
  Clone ID: PAT_MRT3847_10630C.1.pep
TRPSFGVWIIGSLLSELAIGPSSLFEAINQEPLNEDSNSCYTSIAEEQWCKSNPFLMKTLLFCLETLEKTKAKGNLLAIRMLLVSGWFSPAPISDSLLANAAKSIPMVENRLKKWTKSLSLTPSCLSLRTWKNEEDSAMLLVKMGLARRANQHDGCWLHFHPITQAFAKRKGGLQYAKAAIQGVRKMGSQVNSDHLWASAFLVFGFKSEPPLVQLKAIDMXVXYIKKTALPLAIQAFTTFSRCIHPWSS

SEQ ID NO: 149822 - protein, 386 aa, Glycine max
  Clone ID: PAT_MRT3847_106310C.1.pep
MLFQVGGQGSRPTFFEMAAAQQLPASLRAALTYSIGVLALRRPFLHKLLDFEDESFALLMLVLESHTLRTTDASFSESLYGLRRRPANIALKNDDATTTTTSSSALRRRQRVLSVVFLVVLPYLKSKLHSIYNREREARLQATLWGDETQGFDDGRGDYSPVSTLTSDAAASISMRIANRVQRIVGFCYPWLHASTEGLQFAYQLLYLLDATGYYSLALHALGIHVCRATGQELMDTSSRISKMRNRERERLRGPQWLKTLQGALLSCSYTVLDYAQTGLIAAVFFFKMMEWWYQSAEERMSAPTVYPPPPPPPPPKVAKEGIPLPPDRTICPLCSQKRVNPSVVSVSGFVFCYACIFKYITQYKRCPITLMPSTVDQIRRLFHDV

SEQ ID NO: 149823 - protein, 80 aa, Glycine max
  Clone ID: PAT_MRT3847_106311C.1.pep
KKETLDHLVRERHNMQTSTKLGKKPLKNKNSMGYIHYIPKYFRIIEKKGNIKTQNIWERNIIFTQINNGGGPLQTHFTFI

SEQ ID NO: 149824 - protein, 99 aa, Glycine max
  unsure (1)..(99): unsure at all Xaa locations
  Clone ID: PAT_MRT3847_106312C.1.pep
HIPVSNISARENHVXQIPLMAQDETLTSSACESRTAMVSNNRXPAATAVHAVAIDIVIDSCASSDCNIAGAMLEADTSHTDPANAGRSIARAPFRSPMP

SEQ ID NO: 149825 - protein, 378 aa, Glycine max
  unsure (1)..(378): unsure at all Xaa locations
  Clone ID: PAT_MRT3847_106313C.1.pep
MEIPIPTLLSFMFLFLLPTLKMALLSCGTGNPIDDCWRCQPDWEKNRXRRADCSIGFGKHAVGGRDGKIYVVTDPGDHPVNPKPGTLRYGVIQEEPLWIIFKRDMVIKLKQELMMNSFKTIDGRGASVHIAGGPCITIQYVTNIIIHGINIHDCKQGGNAYVRDSPTHYGWRTLSDGDGVSIFGGSHVWVDHCSLSNCRDGLIDAIHGSTAITISNNYMTHHNKVMLLGHSDTFTRDKNMQVTIAFNHFGEGLVQRMPRCRHGYFHVVNNDYTHWRMYAIGGSAVPTINSQGNRFLAPNDNTFKEVTKRENSAQSKWKNWNWRSNGDLMLNGAFFTASGAGASSSYARASSLAAKSSSLVSSITASAGSLRCRKGSRC

SEQ ID NO: 149826 - protein, 70 aa, Glycine max
  Clone ID: PAT_MRT3847_106314C.1.pep
TLGNSRKRLIVCPPPGIWIYPPPPPPGGLFAKLPKPPGLMLNPPMLPKPGQKSLKANGAFQNPQTIVGFP

SEQ ID NO: 149827 - protein, 59 aa, Glycine max
  Clone ID: PAT_MRT3847_106315C.1.pep
IQHITIPFIFLEPAQNSVKYLTWHRTASSRSSSSRNPLGANSIDNAEDHANNLFDNSCM

SEQ ID NO: 149828 - protein, 43 aa, Glycine max
  Clone ID: PAT_MRT3847_106316C.1.pep
TLSTSELGVGAHTWIGSSSIYFFQTLASVKSSDDFHSYTLKAT

SEQ ID NO: 149829 - protein, 70 aa, Glycine max
  unsure (1)..(70): unsure at all Xaa locations
  Clone ID: PAT_MRT3847_106317C.1.pep
XXMRECXXDXDWSGXYPXRKCLXXXXXDSXTAXGXDGQMPSXKTVXXGXDDFNTXXXEXVLESSGHVXXX

SEQ ID NO: 149830 - protein, 41 aa, Glycine max
  Clone ID: PAT_MRT3847_106318C.1.pep
LLHAYNKKICQAGSICLKPLEGEKSENLFLFHVIHKNDEVP

SEQ ID NO: 149831 - protein, 71 aa, Glycine max
  Clone ID: PAT_MRT3847_106319C.1.pep
YYCLLWMILNMRLAVGAPPSGSPTKVFLNHYVMTACLTSRMIGDCDSPYHAVYCKKLHFVCALLLLVRFKP

SEQ ID NO: 149832 - protein, 228 aa, Glycine max
  Clone ID: PAT_MRT3847_10631C.1.pep
MDRTQILLVGLPIFLFFSDILNLFSPQPSPKPTHHHLPPIHPKPHPQPHLQQPLEFPTQKQSGIGLIGIGNTVSIDFCTSCSYKGNAVTVKNMLESEFPGINVVLANYPPPLPKRILGKVVPVVQTGIIVAIVAGDQIFPRLGITPPPWYYSLRANKFRSIASTWLLTNFLQSFLQSSGAFEVYCNGDLVFSKLKENRFPGEIELRELVGRRLANTRFVSGIEGGVGL

SEQ ID NO: 149833 - protein, 56 aa, Glycine max
  Clone ID: PAT_MRT3847_106320C.1.pep
LMHLSYDYLEDLGSVSCVRNVDRYQHNCSDFSFKSLSSQLKNIFVSFMAFFCSTYH

SEQ ID NO: 149834 - protein, 121 aa, Glycine max
  Clone ID: PAT_MRT3847_106321C.1.pep
MDEDKTQQLPRRMTRSSASSSPSTSNNIVAAKVTSLEPLTINDLLVGGDPISLDDIISSFPGRSSQILEVVRHLGPLNSPMLPLFVYGSSSTGKTSIILQLFRHLNRPIVFSSCRTCYNQN

SEQ ID NO: 149835 - protein, 148 aa, Glycine max
  unsure (1)..(148): unsure at all Xaa locations
  Clone ID: PAT_MRT3847_106322C.1.pep
VGAQTPVEATDXRLEVEDALDAAKASFLECEEVGGGCSLXTLSNNVDGVKKLLDNVDHPTGAELFKRALSYPTRMITNNAGLNXNVVTDTALYNNNENFGYDAARDSYEDLMKAEIMDPTDVARRCIEHXASVPKAFLTSTAPGRRAH

SEQ ID NO: 149836 - protein, 73 aa, Glycine max
  Clone ID: PAT_MRT3847_106323C.1.pep
SWLDNGMNVSSGIKAIMQPPLQACGMLFWSSSSVDALIRVARCAHMSLNMVIRGASVGKLPQAYEPISCSYCR

SEQ ID NO: 149837 - protein, 246 aa, Glycine max
  Clone ID: PAT_MRT3847_106324C.1.pep
MSPTIEPPVSLVKRNVGPGLIPFEAPNLNRLKIIHLERTGIPCSICRDYDGFPLTSSGNPHDSMVVLKQESQFAKANDNSFFHFNLQIEQGIPVLSKWIIFNRFKFVASKGIKLGPAFLLTRLTGGSIVGDMAPYQAFSIGGLGSVRGYGEGAVGSGRSCLVANSELTLPLNKMLEGAIFLDCGTDLRSGHLVPGNPALRQSKPGSGIGLGYGLRFKSQFGHFQVDYAVNAYQQRTLYFGLSNLAS

SEQ ID NO: 149838 - protein, 98 aa, Glycine max
  Clone ID: PAT_MRT3847_106325C.1.pep
NNIPSLIEETVKSCLSPVLKELMAGAMGGGAFGGRGFSLNLNPMPFMNLSFGGGEMVDEKWRKQQILELEVYSKRLELVQDQIKAAMEELRSHGGGGL

SEQ ID NO: 149839 - protein, 65 aa, Glycine max
  Clone ID: PAT_MRT3847_106326C.1.pep
LVLCFYILRLVTKWFDTFMVIGLRECLNLLLPKCMLGASLAVIGITNRILLGITNRILLVKEYYK

SEQ ID NO: 149840 - protein, 273 aa, Glycine max
  unsure (1)..(273): unsure at all Xaa locations
  Clone ID: PAT_MRT3847_106327C.1.pep
MIRVPHRHWYVLRTISLSALTLLRLEAARGRRSKRLKRKYRNVLNKISSGKEFSFKSAHDQAAAEISRRIWQQRDFDRRQXHWTTTKSTLAVAPIPNLNFSPVVLNNETILKRRSEKKTPKRSRPRSVVKIEPNDGSASNRDHNCISNTTPTATAAATNTTAAAAGTNNNNCNSGYGNNIPSMIEETVRSCLSPVLKELMAGAMGGGAFGARGFSLNLNPMPLMNWSFGGGEMVDEKWRKQQILELEVYSKRLELVQDQIKAAMEELRSHGGG

SEQ ID NO: 149841 - protein, 63 aa, Glycine max
  Clone ID: PAT_MRT3847_106328C.1.pep
ILINSDHRMPHLKTGTKSNRYLFSRIFKLSSVFSALGSSAKENPSPVLITDFVNHFLFNFQFT

SEQ ID NO: 149842 - protein, 222 aa, Glycine max
  unsure (1)..(222): unsure at all Xaa locations
  Clone ID: PAT_MRT3847_106329C.1.pep
PALQSNPVSYAYHYTSHYYYYYYCYYYEYWHYDNHLDSVSVLLLQPSDLLDELVLVEIELELRLDLVVEQSRVVVVRGSSLRGVVXEALQELDLVLVGPQPLKQPPXSSGVGGGFFSSTGSRRRRFGSEESATTMVVAVGVEIGAAPPLETEEPGTATVTARAVEGEGSFSSSSAKTSSSSSSXSPSSXDSSSSSSMSSSRKXRRRVAEKPLRLERFGLVSG

SEQ ID NO: 149843 - protein, 355 aa, Glycine max
  Clone ID: PAT_MRT3847_10632C.1.pep
EVQEPEEKIERNDEKNTNIEGVTEEGIKSVINFLKEKIPGLKIKVMNVSVEEEAAENNDSIKQLMEEDSNKTGSSENHEEEVNNLDEPDAVTLERDGDATEEEKDLEMKLLIGGVVHNNEDTPVKDEFIRLPAEIKNMEKDSFVFHFDCGNVDYGIKEDKIPNIKVAALAAQGVSELMPPDVANAFWSSDKVSSKISKSMRDIVRVAMSQAQKRTKLSGDTNFSRIICSRGDSDPFDGLYVGAFGPYGMEIVHLRRKFGHLNEVDNENKTSDVGFFEYVEAVRLTGDLNVPAGLVTFRAKIGRGNRNTNRGMYPDDLGVVMHYISECLCVSVLIHVEAYLISKFTLAHHAGPFIL

SEQ ID NO: 149844 - protein, 130 aa, Glycine max
  Clone ID: PAT_MRT3847_106330C.1.pep
SVPGLIGCGGRSLCLGLTSLLSYDALSRSVICWTRIQTLVGCEMDSTTGTITRKSPPRTWHSGKLCSSFRSDGVGRHKSAIRVRATHGVAIGLPPGTWVETCISFIHVPTKRLHPGMESQASECRASHYL

SEQ ID NO: 149845 - protein, 55 aa, Glycine max
  Clone ID: PAT_MRT3847_106331C.1.pep
CSERRWVPSSFIFPQLAKRVFRPSLLSLAPAGFFRLRRYKISAGKLRVCPPISYV

SEQ ID NO: 149846 - protein, 74 aa, Glycine max
  Clone ID: PAT_MRT3847_106332C.1.pep
FSVRILNAYHDFLQSVVRKLEVPMAIVSKCENSHTNLRSWTPTNNAAYCEERTDDQELNYLKFVQLGTMQALMR

SEQ ID NO: 149847 - protein, 63 aa, Glycine max
  Clone ID: PAT_MRT3847_106333C.1.pep
IITHLGSLCGTGGELWGKTTQMSILTSMLKGFSYTQSLTFSFSHSSTSFLLLWYKSLDELGRF

SEQ ID NO: 149848 - protein, 64 aa, Glycine max
  Clone ID: PAT_MRT3847_106334C.1.pep
SCCSGVLSAVLAGPCCFPVALLRSFASCAPLRCPVSGVLRRFFSPCPPPCGVFARVSPRVGHPG

SEQ ID NO: 149849 - protein, 102 aa, Glycine max
  unsure (1)..(102): unsure at all Xaa locations
  Clone ID: PAT_MRT3847_106335C.1.pep
EQSKKKKKEKKGLKEKIEEKIEGDHHHKIKEKLPGHKKTEEAQVXTPPPPPLVASLEHGEGAHHEGEAKEKKGILEKIKEKLPGYHSKTEEEKEKEKESGAH

SEQ ID NO: 149850 - protein, 53 aa, Glycine max
  Clone ID: PAT_MRT3847_106336C.1.pep
NIFFFFFFFFFFFFFFFSPEPISTKCCITTIFSMRNRFRKFISVASLFISIYE

SEQ ID NO: 149851 - protein, 192 aa, Glycine max
  unsure (1)..(192): unsure at all Xaa locations
  Clone ID: PAT_MRT3847_106337C.1.pep
MADETQNKYESSEVEVQDRGVFDFLGKKKDEEDKPHPQEEVIATEFQKVTVSDQGENKHSLLEKLHRSDSSSSSSSEEEGEXEGDHHHHKDEDTSVPVEKVEVVETAHAEEKKGFLDKIKEKLPGPKKTEEAPATTPPPPPPVASLEHGEGAHHEGEAKEKKGLLEKIKKKLSGYPSKKKEEKEKEKESGAP

SEQ ID NO: 149852 - protein, 214 aa, Glycine max
  Clone ID: PAT_MRT3847_106338C.1.pep
MADETQNKYESSEVEVQDRGVFDFLGKKKDEEDKPHPQEEVIATEFQKVTVSDQGENKHSLLEKLHRSDSSSSSSSEEEGEDGEKRKKKKKEKKGLKEKIEEKIEGDHHHHKDEDTSVPVEKVEVVETAHAEEKKGFLDKIKEKLPGHKKTEEATATTPPPPPPVASLEHGEGAHHEGEAKEKKGILEKIKEKLPGYHSKTEEEKEKEKESGAH

SEQ ID NO: 149853 - protein, 35 aa, Glycine max
  Clone ID: PAT_MRT3847_106339C.1.pep
EYWRITQHPLLKVQVPIREGSPAHPGIFLAVGRNL

SEQ ID NO: 149854 - protein, 60 aa, Glycine max
  Clone ID: PAT_MRT3847_10633C.1.pep
HEPAAFEQKLLFSSPNFAILTKLIITSPLLRQKSGPTPQLPSNRSCYSHPRIFYFHHSCE

SEQ ID NO: 149855 - protein, 214 aa, Glycine max; identical to SEQ ID NO: 149852
  Clone ID: PAT_MRT3847_106340C.1.pep

SEQ ID NO: 149856 - protein, 60 aa, Glycine max
  unsure (1)..(60): unsure at all Xaa locations
  Clone ID: PAT_MRT3847_106341C.1.pep
DISEIAETEMVNIHYTGKNTVSGTLTTTSKRFTSKGXCFPVVPTPFLLIIEYFVAVIXSV

SEQ ID NO: 149857 - protein, 119 aa, Glycine max
  Clone ID: PAT_MRT3847_106342C.1.pep
NSARASSSATPLPVKTMTCSTTTTTSSSSSSSSWAMLKSDAEEDAEKNHCNRYMHDQLDATLSSTASMEISQQQNPDPGLGGTVGECMDDVMDTFGYMELLEANDFFDPASIFLNEGDE

SEQ ID NO: 149858 - protein, 108 aa, Glycine max
  unsure (1)..(108): unsure at all Xaa locations
  Clone ID: PAT_MRT3847_106343C.1.pep
NLCPFRTSVIIWGVLKRLKPVLDDIMDYQIPSNVNLCKECEELDMQVNEARDFIEKWSPKMSKIXSVLXRWYLXXIKLQSTSLDICHMIVKSLQSPPLHQWLILALFQ

SEQ ID NO: 149859 - protein, 223 aa, Glycine max
  Clone ID: PAT_MRT3847_106344C.1.pep
MSQESFIYSFVARGTMVLAEYTEFTGNFPAIAAQCLQKLPSSNNKFTYNCDHHTFNFLVEDGYAYCVVAKESVSKQISIAFLERVKADFKKRYGGGKADTAIAKSLNKEFGPVMKEHMKYIIDHAEEIVKLIKVKAQVSEVKSIMLENIDKALDRGENLTILADKTEALRSHAQDFRKQGTQVRRKMWYQNMKIKLVVLGILLVLVLVIWLSICGGFDCTNWQ

SEQ ID NO: 149860 - protein, 109 aa, Glycine max
  Clone ID: PAT_MRT3847_106345C.1.pep
SFSSESDEEFYPSEQFLEGDGNSITKHIESANTMLSFIWWIVGFYWVTAGGQSLTRDSPQLYWLCITFLSFDVMIVLICVAVACLIGIAVCCCLPCILAILYVVADQEG

SEQ ID NO: 149861 - protein, 74 aa, Glycine max
  Clone ID: PAT_MRT3847_106346C.1.pep
NPTLRFCDSSFELYLVFSSLLTIQITMSSLDEPVGLDKLPSMSTIDRLQRFSSAACCPRVDNFTLGLGNCWIEG

SEQ ID NO: 149862 - protein, 67 aa, Glycine max
  Clone ID: PAT_MRT3847_106347C.1.pep
INDKIINFYNNYFNLSYPITRSRKLFYVLKPLTSDPSNSHPNCSPILPQVNCSLSFCSFPHVLNLFP

SEQ ID NO: 149863 - protein, 79 aa, Glycine max
  Clone ID: PAT_MRT3847_106348C.1.pep
NTHTKRKSKKGKFATFSELQMLETTITVYYYTNKRYPFERKKKSKITPTQFTTTTNEHDPLIFWHWRRKRKIKFFFVGN

SEQ ID NO: 149864 - protein, 117 aa, Glycine max
  unsure (1)..(117): unsure at all Xaa locations
  Clone ID: PAT_MRT3847_106349C.1.pep
RTXNKEAGPHKQLQPGPTQQKAEXKQTQEEPHTXRATQERPATTXTADGSPHQKAKAQDRTAPTTPGEQATGAKPTTKNNTGAQGPKPEKPGTRTQGNQKKPTPHHTARXQXETXRT

SEQ ID NO: 149865 - protein, 73 aa, Glycine max
  Clone ID: PAT_MRT3847_10634C.1.pep
IVSIKNKSHLTVIQFQEYIFTRHSHSKRGEYSKEKKEYFFNNKSSPQSYLISQGRYVIILTSSPLLLSHSIHF

SEQ ID NO: 149866 - protein, 505 aa, Glycine max
  Clone ID: PAT_MRT3847_106350C.1.pep
CQAPVSLGSLQPPVIPDSLTTLSQYLRHISLEFDAIVREGRDNAEAAEAQRNEETRSVSSHLGSTPEGLSSPASLAEVLRSTRQMIDQQAGECLLQLSGQLENQANVTDPLLRSSIQSRALRTGVLFYNLGAFLLELGRTTMTLRLGQTSSEAVVNGGPAVFISPNGPNHIMVQPLPFQPGASFGAVPVGAAQSNSSLGSGLGSSFFPRRIDIQIRRGTSTTSSNTNQEERNETQSASVQRNSGESSVNQATSRRPDASIAGEPGVRLVPIRTMVAAAVPGTLGRLPSESSGNSIGLYYPILGRFQHVSSGHSNSEQGSQQSSQHHTVLPSTPESILQRQNTEDSARNGSLSTPSTRQEPSSSRVVNINILAASGPQNNQESERQIPSSVLQFLRTFFPGGEIHVEDSSVQGTTAGSALDHAATSRGAAPVPEAQPNVSEEGIFLSNILREIMPVISQQVGSEGNPSEDHMAQDSSTQVETDVGTSRRQSDSDPSPPNAKRQKME

SEQ ID NO: 149867 - protein, 125 aa, Glycine max
  unsure (1)..(125): unsure at all Xaa locations
  Clone ID: PAT_MRT3847_106351C.1.pep
MAGRVSTCGSFGLALSLLPPFQISADESSEKDDVLTXHHSIFHDTVSKHDGMDAEFYAPCRGHCXMLAAAYEKAATILSSHDPPVVLAKRDANQEKNKDLASQXDRRGYPSIQRLRKGGKNGQEY

SEQ ID NO: 149868 - protein, 75 aa, Glycine max
  Clone ID: PAT_MRT3847_106352C.1.pep
LFITDLSYNMISGGIFLRWGAITLDELHLMANKLTRPFPTIVNIITTLRNYNIEGNQLFGNIPSDIGIMTQFIKT

SEQ ID NO: 149869 - protein, 74 aa, Glycine max
  Clone ID: PAT_MRT3847_106353C.1.pep
HTMAPRIYVTFRLSGFSFLDYFFCQLTHLLTTVGSLHPFVRLVHLFRFFSFSLCFICLLSPNTGTVWIGFFSPV

SEQ ID NO: 149870 - protein, 192 aa, Glycine max
  Clone ID: PAT_MRT3847_106354C.1.pep
RLGGRVGGRVGAASGGDGSVGGEGSGKRSSELSTTERQEIQMKKAKLIDMLDEVEQRYRQYHQQMQIVISSFEQAAGIGSARTYTALALQTISKQFRCLKDAIAGQIRAANKSLGEEDCFGGKMEGSRLKYVDHHLRQQRALQQLGMIHHNAWRPQRGLPERSVSVLRAWLFEHFLHPYPKDSDKHMLAKQT

SEQ ID NO: 149871 - protein, 369 aa, Glycine max
  unsure (1)..(369): unsure at all Xaa locations
  Clone ID: PAT_MRT3847_106355C.1.pep
MMTFVLNGMLCWLAFTALSAFTYWFNFKGKTKAKAQDPSPSQPDTTDSNAISRAARSSDRAEEREQDTVTQADLEHFLHLLEGKDGVMDWQSFMERSTPNMQYKAWRYDPETGPTVYRSRTVFDDATPELVRDFFWDDDFRPKWDAMLAYCKVLEECPHNGTMISHWIKNMPFSEPASCMEDRVQAMSNTAQKGNGIDWKWVAVGGTVALVLGLHTSAVGRALLLGAGHRIARRXLTYELLNGKVQDMGIPKDVAKLGVRHGMWGAVKKLHSGMRAYQSARKTEASLSRCALMASKTTKITSDANMHSSEPSSCMEDRVQAMNNTAQKGNGIDWKWVAVGGTVALVLGLHTGAVGRALLLGAGHRIARR

SEQ ID NO: 149872 - protein, 152 aa, Glycine max
  Clone ID: PAT_MRT3847_106356C.1.pep
FGSSKRTASTYIDGQGNWHRSSKGAPEQIIELCELKGEVLKKAHKVIDEYANRGLRSLGVSRQTVSEKNKESAGESWQFEGRLPLLDPPRHDSAETIRRALDLGVNVKMITLCQPCHRYETGRRLGMVTNMYPSFSLFGDSMDLAIASIPVV

SEQ ID NO: 149873 - protein, 49 aa, Glycine max
  Clone ID: PAT_MRT3847_106357C.1.pep
SKALRSTVRSRKVVFANLHGIHSYKFDRMMEWARECSRCKQVFEGLLLI

SEQ ID NO: 149874 - protein, 128 aa, Glycine max
  unsure (1)..(128): unsure at all Xaa locations
  Clone ID: PAT_MRT3847_106358C.1.pep
KVIDITYSKGRGKKGLEEALDRICAEAXAAISDGYTTLVLSDRAFSRKRVAVSSLLAVGAVHQHLVKTLERTRVALVIESAEPREVHHFCTLVGFXADAICPYLAVEAIWRLQVDGKIPPKTNGEFHT

SEQ ID NO: 149875 - protein, 138 aa, Glycine max
  unsure (1)..(138): unsure at all Xaa locations
  Clone ID: PAT_MRT3847_106359C.1.pep
ILRYLKGTLSHGLLLQPASTVKPLAFYAFCDANWASDVDDRCSTSGAAIFLGPNLISWWSRKEKVTARSNTEAEYLSLAQTSTKLTWSRALLTELKIPFTTLYCXNQSAVSIAHNHVFHSRTKHIKIDVFFVRERNPN

SEQ ID NO: 149876 - protein, 56 aa, Glycine max
  Clone ID: PAT_MRT3847_10635C.1.pep
IVRWCEHVHAYSSVAVSLAMKRPWVKQRNSKTVRTRVIGLLGYSIRFKHDRLVKFM

SEQ ID NO: 149877 - protein, 34 aa, Glycine max
  Clone ID: PAT_MRT3847_106360C.1.pep
NNNLSSIGPCPLIMHSAHWETEPIRIFCNNQTVN

SEQ ID NO: 149878 - protein, 72 aa, Glycine max
  Clone ID: PAT_MRT3847_106361C.1.pep
RGKTKTQINPKKKQNYPRYNGQIFYKGGHWKNPCLTEINRLAPHPPFFKWRNRKKARTNRPSHQVQNLNGEW

SEQ ID NO: 149879 - protein, 101 aa, Glycine max
  Clone ID: PAT_MRT3847_106362C.1.pep
GFPRGSYSPPLHPKKPPGQANKEPLPFRVAGSPPRVSKKTSCLKPLFYFVPPFGLFGKRASPPFFKIISMEKKTKGLAPPFFPAKKKWKAPLKRGPKLLRE

SEQ ID NO: 149880 - protein, 128 aa, Glycine max
  unsure (1)..(128): unsure at all Xaa locations
  Clone ID: PAT_MRT3847_106363C.1.pep
NSKFLLKFENFFDDPINFQAFAHNLMQFGDTHLQXRIEIVQQECLTAWTTHVRPATTLLADGCPYLYAMVHDSSLSTIPCDFVIGVKLTTINNMCAYGLNPGISRSRVFGTIPQSISQQTVWNQMATG

SEQ ID NO: 149881 - protein, 148 aa, Glycine max
  Clone ID: PAT_MRT3847_106364C.1.pep
MSGRAMISCFSPPSTTPCSAPIPLWRRNHLLHATPPPSLHLLSRRSHLVAGGRRVWVNVKSEKNLSESPKYEDDVVVQKKKKRGLDNVEEEARWWQVFPKRWVIVVLCFSAFLLCNMNNILSKWVPVSERSRSLALVYSGMYLGSVTG

SEQ ID NO: 149882 - protein, 158 aa, Glycine max
  Clone ID: PAT_MRT3847_106365C.1.pep
HRQRFLRPTELTVSPNHHHHRQSKTKPPTPASTMDSIAGAPPHADVTPPPPRQSPFPGREDCWSEEATFTLIEAWGQRHLELNRGNLRQRHWQEVADAVNARHGHVSTKARRTDVQCKNRIDTLKKKYKIEKARVSDSGDSATTWPFFRRLDFLIGDN

SEQ ID NO: 149883 - protein, 513 aa, Glycine max
  unsure (1)..(513): unsure at all Xaa locations
  Clone ID: PAT_MRT3847_106366C.1.pep
MSGRAMISCFSPPSTTPCSAPIPVLSRRNHLLHATPPSPHLLSRRSHLVVAGGGGGKTWANVKSEKNVSESPKYEDDAVVQKARDLDNVEEEARWWQVFPKRWVIVVLCFSAFLLCNMDRVNMSIAILPMSAEYNWNPSTVGLIQSSFFWGYLLTQIAGGIWADTVGGKQVLGFGVVWWSVATALTPIAAKLGLPFLLVARAFMGIGEGVAMPAMNNILSKWVPVSERSRSLXALVYSGMYLGSXTGLAFSPFLIHQFGWPSVFYSFGSLGTVWCSVWLSKAHSSPLEDPELRPEEKKLITAQXSSKEPVKTIPWRLILSKPPVWALIVSHFCHNWGTFILLTWMPTYYNQVLKFNLTESGLFCVLPWLIMAISANVGGWIADTLVSKGVSVTRVRKIMQTIGFLGPAFFLTQLSHVNSPVMAVLCMTCSQGTDAFSQSGLYSNHQDIAPRYSGILLGLSNTAGVLAGVFGTAATGYILQHGSWDDVFKVSVVLYLVGTVVFNLFSTGEKVLE

SEQ ID NO: 149884 - protein, 38 aa, Glycine max
  Clone ID: PAT_MRT3847_106367C.1.pep
VVHVFCPEDFTHLIVDLANASIGSIHFLIRGSSGGKLV

SEQ ID NO: 149885 - protein, 50 aa, Glycine max
  Clone ID: PAT_MRT3847_106368C.1.pep
KFKGILITHQPKEHELLHGEEFQCFVSNKTICFSIRELVGANFKSGRING

SEQ ID NO: 149886 - protein, 382 aa, Glycine max
  Clone ID: PAT_MRT3847_106369C.1.pep
MAFPSKGDDEQVLVQRKSNARVLTLNRTKQLNALSFYMVSRLLEIFSEDEKDSDIKLVVVKGNGRAFCAGGDVAAVARDGSKGDWRFGANFFQSEFKLNYLMATYSKPQVSILNGIVMGGGAGVSVHGRFRVVTENTVFAMPETALGLFPDIGSSYFLSRLPGFLGEYAGLTGARLDGAEMLACGLATHFVPSSKLSLLEEALCKVETSDPNAVSAIINKYSEQPFLKEDSVYHRMDVINKCFSKKAVEEILSSLEVEATRKADPWISATIQSLKKASPTSLKIFLRSIRQGRLQGVGQCLVSDYRVVCHILKGHYSKDFFEGCRAILIDKDRNPKWEPSKLELLSDSDVNRYFSKLDDKGWKDLELPKRFNNLPTYAISKL

SEQ ID NO: 149887 - protein, 60 aa, Glycine max
  Clone ID: PAT_MRT3847_10636C.1.pep
IIHSKRNKQNHKIRYGSYLLKFNYGAEKDKTCDPFRNLKGNSNMKKHIKICIQQSRKRVR

SEQ ID NO: 149888 - protein, 60 aa, Glycine max
  Clone ID: PAT_MRT3847_106370C.1.pep
SPPYMNSLRTWLNIHMIGQEWPFDFARTCRNLYMLHTHTSLTIFPSYIMTLPMDGETLCV

SEQ ID NO: 149889 - protein, 120 aa, Glycine max
  Clone ID: PAT_MRT3847_106371C.1.pep
FFCCENPRVLGENNENLVKTVEKCCFGRRQTLQFATATLLGGCLSLFLFFPYTANPNPTTAFKSVRCKESKESERVREKKKQRPTCVNFAMESQREYEKEEEALVLKTTKVVEYLVPKMS

SEQ ID NO: 149890 - protein, 47 aa, Glycine max
  Clone ID: PAT_MRT3847_106372C.1.pep
RDKNVPKRQRQASGFPSKKEGFHSAIPTWGSQTINLVLLVSPRTQFR

SEQ ID NO: 149891 - protein, 78 aa, Glycine max
  Clone ID: PAT_MRT3847_106373C.1.pep
SVVCNFTRHILSGLAYLHSNKTIHRDIKGANLLVNESGTVKLADFGLAKILMGNSYDLSFKGSPYWMAPEVFYCSNHL

SEQ ID NO: 149892 - protein, 174 aa, Glycine max
  Clone ID: PAT_MRT3847_106374C.1.pep
MELSSKKELLSRIVSTLTPTITLIFFFLVLSPSLCTSLGSTNTVGSELLKVAPSEFEGTVRTVVDVLQEVTSILSEFGSGFGDSRLSNAVSDCLDLLDMSSDELDWSVSATQSPKGKHNSTGNTSSDLRTWLSAALANQDTCIDGFDGTNGMVKGLVFTGIGQVMFLLQQLLTR

SEQ ID NO: 149893 - protein, 99 aa, Glycine max
  Clone ID: PAT_MRT3847_106375C.1.pep
CTSARDTGLCGARVCVRERQTATPTTGCFSLTGVTFTISFTPLLVPSKNLRCSSNMIIACATFYANSLWHMALARFVILNTGQLTLNTKNSPTLTCRGS

SEQ ID NO: 149894 - protein, 126 aa, Glycine max
  Clone ID: PAT_MRT3847_106376C.1.pep
MAKSSSTTTPQKPFLNLDPLFLKTPSYTSLKDVLPFSAAACNSPAASHHQYVSIRNRLVKQAAWAYLQPMSISPSGPSGPHFFRHFYNRFSPTHNNNPFTTCLSFIYRTLHRILHAIPCFLHVFEE

SEQ ID NO: 149895 - protein, 100 aa, Glycine max
  unsure (1)..(100): unsure at all Xaa locations
  Clone ID: PAT_MRT3847_106377C.1.pep
LASGKTFKSDIIVAGSHSAEHFPEREDHEKPILIYARLRQPVYPQYNEVQAHMETHLFKLPLDDVETPKGSMXDLKISQSKIALSKDTDEKNHSALGAIG

SEQ ID NO: 149896 - protein, 68 aa, Glycine max
  unsure (1)..(68): unsure at all Xaa locations
  Clone ID: PAT_MRT3847_106378C.1.pep
IGTTKSVSHITIFPTKLKALCSSPRYYPIMVATMEPDTXTVNYNCAVSVFPAQACXICGGEACMADMY

SEQ ID NO: 149897 - protein, 130 aa, Glycine max
  Clone ID: PAT_MRT3847_106379C.1.pep
MGYGRCRASFVLDGFSLKPVPYPVLLILSLILLFLGISWYLSYEEVVEAAEEQLGWMLLATPVVLILVVRWLSSVDTSEWFFFNSSPWERRRRTHHFPSEGSSPWGVAALILLVLVLLHYHSTFLDAWFV

SEQ ID NO: 149898 - protein, 142 aa, Glycine max
  unsure (1)..(142): unsure at all Xaa locations
  Clone ID: PAT_MRT3847_10637C.1.pep
MGATNAICDTPAEIPEWIRVFKDGTVERPLDHAIVPATMNTGLSSIDITILHHPANPICARIYXQTSPIPXTKILPMYVYFHGGGFFFESDFFKLFNDHVLKMVPQANIIEVSAEYRLASEHPSPAAYDDXWDALNGSHPFY

SEQ ID NO: 149899 - protein, 70 aa, Glycine max
  Clone ID: PAT_MRT3847_106380C.1.pep
GHITHARRGRPFCCLPQRVSPSISLKRHSSLGPEALCFHFTKILHPFPLSAVGRGCRQLKRDLPPPLSMP

SEQ ID NO: 149900 - protein, 229 aa, Glycine max
  unsure (1)..(229): unsure at all Xaa locations
  Clone ID: PAT_MRT3847_106381C.1.pep
GVPPPPPQRGPKNTRPHTRGGGAPRLGGPPPPQSPVFPGGGGPATPQMGPPKGRPPFKTLPGKPRPTWPEKKGAKHAKNRGGMAGGKXTGPPGGTPPPPRGKRPHKGGGPGPNPGAQWWGRPPAAAPPVFKPPGKRGGAPPGESLGNPGGFPKRGGETPAPQXGKRGAPKKAXPCPPPPRKTGSPRPGPPPEKGSPEGQNTFSLLIRAPLFFFFFFFSFFFFFFFFFFF

SEQ ID NO: 149901 - protein, 62 aa, Glycine max
  Clone ID: PAT_MRT3847_106382C.1.pep
KREPQHCLSKLPHQASSSQSFYADNRIQKLDNLLGNLVAALKVRFAEDPQINRVLEAIGQQV

SEQ ID NO: 149902 - protein, 180 aa, Glycine max
  Clone ID: PAT_MRT3847_106383C.1.pep
GRLTRRTNKTTEGGQKSEKPCLNSPGEIPSGDSGTNGSVTNNQQVNPVLAAADTSNSKEEEKLAIEKIMSGPYDAHQAFQEEPEELEDNTQYKNQDKDSGGNMKNNMESLDSKPAVPEEPVISKEITCSTHLCSNESLEELEPAELTAPLLSGPPAPVPMKKPLIRLNFTSLGKATDKSV

SEQ ID NO: 149903 - protein, 77 aa, Glycine max
  Clone ID: PAT_MRT3847_106384C.1.pep
GTWHKFCEAVQFHGQEWLSLSPTIPLEKDSLIGATVTASMLNFIQPTHNSLSISSDWNTKVSLFWLALHAMVWFLEL

SEQ ID NO: 149904 - protein, 69 aa, Glycine max
  Clone ID: PAT_MRT3847_106385C.1.pep
MFRRLRWFVGLNQKNWSTKRLVNVDHQPGPGTPNKLLPVLDAVHEVAIYIHRFHNLDLFEQGWYKIKVT

SEQ ID NO: 149905 - protein, 688 aa, Glycine max
  unsure (1)..(688): unsure at all Xaa locations
  Clone ID: PAT_MRT3847_106386C.1.pep
MDTPDRSKINTPLSQFEDSPVFKYISNLSPIEPVKSVHVTQTFNSYSFSSPPSVFTSPHGNCHKESRFLRRHNLLETSKPKVSSEDISVADASIEPCNENKNPNISIELPQVLKYNLGSPGYEPLLYGDEANSLLELPGNGKPASDVASVPEGSEKDSIEGEMHLPGLCQIEEAKVEAQDCGVDSLITEASDLVMFSPPVSSSRFCYGANTITASHFIASLSXLHKRESNQDILLQPSLALHFLPSKSLGNQTLFGLKLSIFKLTQIKKYRIFCNEIDLLSITPSGDSRRCVLPGIGLHLNALASLKDCKNIKIDTLSSGRQPNLLSSPSSVQLSPSQEHQLSLVPASVERDLEPLENEVQPGEDCTQSLVLVQMAGEDFQQNSPKKKRRKLEPAGEGESCKRCNCKKSKCLKLYCECFAAGVYCIEPCACRDCFNKPIHVETVLQTRQQIESRNPLAFAPKVIRSSDSVSEIGDDLNKTPASARHKRGCNCKKSSCLKKYCECYQGGVGCSVSCRCEGCKNTYGRKDGSVPSGLEAEPEEETEACEKGVVENASWKTETQNTEDHPDQSLATTPLPLSRSLLPLSFSSKGKPPRSFVTTISSSGLFVSQKLGKSNAPRSQHQPKCVKPLQTVPDDDSPVTCIKTSSPNGKRISSPNCDVGSSPTTRRGGRKLILQSISSFPSLTPHH

SEQ ID NO: 149906 - protein, 182 aa, Glycine max
  Clone ID: PAT_MRT3847_106387C.1.pep
MDTPDRSKINTPLSQFEDSPVFNYISNLSPIEPVKSVHLTHTFNSYSFSSPPSVFTSPHGNCHKESRFLKRHNLLETSKPKVWSEDVNSVYSSEETLADSTQACHESSEQQENTAQKISIGDASIEPCNENPNISIELPQVLKCNLGSPGYEPLLCCDEANSLLEYPAWQASIRCCLCSRRL

SEQ ID NO: 149907 - protein, 69 aa, Glycine max
  Clone ID: PAT_MRT3847_106388C.1.pep
HYCPKLSFHLAYALNTFILEKCLVLITYTWYRLIPLSQLTLFEKGYHKIYYCLTFQCKDRKGSRSVLDI

SEQ ID NO: 149908 - protein, 66 aa, Glycine max
  Clone ID: PAT_MRT3847_106389C.1.pep
SVLFRHQCLKFPVILWLQCEELWSPACPALQDPVPSLPAFPSTFSLAGPAWGWRVGTSASCPPVLP

SEQ ID NO: 149909 - protein, 83 aa, Glycine max
  Clone ID: PAT_MRT3847_10638C.1.pep
YLVAPLLPKVKCLDQPMEKGFNYILLVWVFVWYYSTIVRLDFPKLKKSSYLALFFYWLWWSVQRRLASFHMLPEAKQGHWRFP

SEQ ID NO: 149910 - protein, 54 aa, Glycine max
  Clone ID: PAT_MRT3847_106390C.1.pep
FPISLTQALTLGYHIDTMYHRWLYTRSTTSSITYAIWHSLPNPAMAYPTSCCTS

SEQ ID NO: 149911 - protein, 65 aa, Glycine max
  Clone ID: PAT_MRT3847_106391C.1.pep
NPHSSTLRSIPFISLSPSIVALPNQQTVEDPSNKLAIAGDRRTGTTTFLKRHRTRESYKKYQPTI

SEQ ID NO: 149912 - protein, 63 aa, Glycine max
  Clone ID: PAT_MRT3847_106392C.1.pep
PRVRSFKKKKKKKKKKKKKKKKKKKKKKKKKKKKKKKKKKKKKKNKKKKKFKKKKNGGALFKK

SEQ ID NO: 149913 - protein, 103 aa, Glycine max
  unsure (1)..(103): unsure at all Xaa locations
  Clone ID: PAT_MRT3847_106393C.1.pep
RXHXYVSSEFGSXXXAIXXXXRPRXXVXXXXIXFVLXXSXSXXRXTSXKIXXCNXXSXIXXXXXVSVXXRXXXLXXXXXIXXXKXRSXXXXQIXXXXXFWMXR

SEQ ID NO: 149914 - protein, 90 aa, Glycine max
  Clone ID: PAT_MRT3847_106394C.1.pep
IRESMLAQKSRAKWIKEGNTISHFFHASLKDRYIKNYLVRLHTENGGEVKDVVVHHFQRIFMEPNLERPFLSGIQSNQVSSCDCVSLTVL

SEQ ID NO: 149915 - protein, 338 aa, Glycine max
  Clone ID: PAT_MRT3847_106395C.1.pep
MGGGNQEAVKQLQTLMENVDDEQLKNTFQIMHQGYQTETLIRFLKARDWNIAKAHKMLIDCLNWRVENEIDNVLRKPIPMDLYRAIRDSQLIGMSGYSKEGLPVIAVGVGLSTYDKASDKYYIQSHIQLNEYRDQVILPTATRKHGRYIGTCVKVLDMTGLKFSALNQLRLLTAISTIDDLNYPEKTDTYYIVNVPYVFSACWKVVKPLLQERTRRKIQVLQGCGKEELLKVMDYASLPHFCRKEDSKSSKHHALGNIGNCFSFNHAFHQQLYNHIKQQSIIVESISPIRQGSFYVDIPEPDPDDAKIAKTIETEFHKLENQKNGFTNSLNGLRVNGH

SEQ ID NO: 149916 - protein, 83 aa, Glycine max
  Clone ID: PAT_MRT3847_106396C.1.pep
KAPVTLRPELNCLKGPRIEDPGFNIPRMENPGPREVHLLQQPRKRLTSAFHVHFIPVLKKHVSYFRLGTAILAPSLFITIKPR

SEQ ID NO: 149917 - protein, 258 aa, Glycine max
  Clone ID: PAT_MRT3847_106397C.1.pep
ELNKKRGGGNQEAVKQLQTLMENVDDEQLKNTFQIMHQGYQTETLIRFLKARDWNIAKAHKMLIDCLNWRVENEIDNVLRKPIPTDLYKAIRDSQLIGMSGYSKEDLPVIAVGVGLSTYDKASDKYYIQSHIQLNEYRDRVILPTATRKHGRYIGTCVKVLDMSGLKFSALNQLRLLTAISTIDDLNYPEKTDTYYIVNAPYVFSACWKVVKPLLQERTRRKIQVLQGCGKEELLRVNVNIIFNNLLLAITISPMPYV

SEQ ID NO: 149918 - protein, 93 aa, Glycine max
  Clone ID: PAT_MRT3847_106398C.1.pep
SASFNMDTRLKSVSLLTLFLLASLFASSLPVSEARPLFSSSPSKNGISIIREVNGVFRTLKSSGPSPGVGHRLKNLQNLGGMKDSGPSPDKGH

SEQ ID NO: 149919 - protein, 52 aa, Glycine max
  Clone ID: PAT_MRT3847_106399C.1.pep
QIQIETITARRILVFIDNNATLEIKTWITYLFILNNIYYNIIFVFYILVYVV

SEQ ID NO: 149920 - protein, 118 aa, Glycine max
  Clone ID: PAT_MRT3847_10639C.1.pep
MPEEDLVDIKFRLYDGSDIGPFRYSSAATVDMLKQRIVSDWPKGKTVVPKSANEVKLISSGKILENNKTVGQCKVPFGETPGGVIIMLVVVQPSLAKTKADKKVDDSPKKVVCSCSIL

SEQ ID NO: 149921 - protein, 84 aa, Glycine max
  Clone ID: PAT_MRT3847_1063C.1.pep
KIELAILKSSVSKNETTKKLRKLNESIHLLNYRYSMKLVIKIIKKSKIPEKSKTIIYLKRINRKFDKYIKDKKVKNIKYFRNVS

SEQ ID NO: 149922 - protein, 51 aa, Glycine max
  Clone ID: PAT_MRT3847_106400C.1.pep
FVHVYLHGTGYSTVGTKMGADRLAECQKNDQLSVLRYMICLYIAGIAAFID

SEQ ID NO: 149923 - protein, 394 aa, Glycine max
  Clone ID: PAT_MRT3847_106401C.1.pep
SISIVPGRSASALVFVSTWNVGGIAPDEDLNIDDLLETCNNSCDIYILGFQEIVPLKASNVLGSENNEISMKWNSIIREALNKKITHQRDKDAKKQELKNNFPNKKENPAKCCDAPHDFQCIISKQMVGLFISVWIRRDLCPFIRHPSVSCVGCGIMGCLGNKGSISVRFQLHETSFCFVCSHLASGGREGDEKHRNSNVAEIFSRTSFPRGPLLDLPRTILDHDHVILLGDLNYRISLPEETTRLLVEKRDWDSLLANDQLIMELMSGNMLRGWHEGAIKFAPTYKYCPNSDIYYGCCYHGKKAEKRRAPAWCDRIVWCGEGLKQLQYTRIESKLSDHRPVKAMFIAEVRVFPELMKNLQSLFLSERYEQIKTPFEVSTTDDFVNRKRSSFRL

SEQ ID NO: 149924 - protein, 126 aa, Glycine max
  Clone ID: PAT_MRT3847_106402C.1.pep
PECAVTTYKDCGVAGLLVVCFCVFVPLRRLWRSLFFVLLALSSPPSYPSRPSYFLFLSFLRASCSTQYTCEKRRCLLHCVATVVVLAVYISLSLSLFSPSAVPSQAAKPWLQPPPPPPKQAALLHM

SEQ ID NO: 149925 - protein, 123 aa, Glycine max
  unsure (1)..(123): unsure at all Xaa locations
  Clone ID: PAT_MRT3847_106403C.1.pep
THRKQLNTKVARKYPMPDSRVKELIRFIPGLVFLLDIKLCQKRTEFMFHKQSFKRXDSVLPMNLESDIRFFTNSVSTPQRAFHSLKVSLSKNYNLCAILFKTGTIIPWYMLLATTTRGHSSSL

SEQ ID NO: 149926 - protein, 183 aa, Glycine max
  unsure (1)..(183): unsure at all Xaa locations
  Clone ID: PAT_MRT3847_106404C.1.pep
MSKLLSSPRLSSSLMLSFLQLGSLTIHLKWRCIAGSASMEGENASKVTELVNEIANISEYMPPMKKQHCNLAXRLKLLIPMFKEIRDMNKDALPEDTSNSVLAFKEALQSARELLRFKSDYYYWCFFFCFLLNSLPKVVLAVMILKLHTLDYFLFFKIFLYFFINLFWVFELFFGFLPLLYDD

SEQ ID NO: 149927 - protein, 77 aa, Glycine max
  Clone ID: PAT_MRT3847_106405C.1.pep
LTIKPCRIQIDLVLLKIEGLSCAINKSTTWYKVDTYIIFLDKIRRKKRALMFSCHGIAASKRNSSIMKRALLSSSRS

SEQ ID NO: 149928 - protein, 74 aa, Glycine max
  Clone ID: PAT_MRT3847_106406C.1.pep
WPQLGAEVNMWDYHERTPLPHCITSGKNQLAKFLLKRGASPPVKNAGGLPVLERAMEGGAITAEELFILLVECQ

SEQ ID NO: 149929 - protein, 110 aa, Glycine max
  Clone ID: PAT_MRT3847_106407C.1.pep
TSVAVLLGGMHTLSLELPFEAGITPFGLLSTPCIPVTSRPMIFWPNTRIPILKRKRPHFGGERRSGSRELQVSCDLISQDLRLLRPGLPSCSSLSLSLNIRVCVSLVECL

SEQ ID NO: 149930 - protein, 222 aa, Glycine max
  Clone ID: PAT_MRT3847_106408C.1.pep
MSEVFEGYERQYCELSANLSRKCSSASLVSDQEQQQQKLSEIKAGLDDADVLIRKMDLEARSLQPSVKAMLLAKLREYKSDLTNLKKEFKRLTSPNADEAAREELLETGMANTHLASADQRERLTMSVERLNQSSERIRDSHRTLLETEELGINIIQDLHSQRETLLNSHKRLHGIDDAIDKSKKVLTTMSRRITRNKWIVASVIGALVFAIVIILFYKLSH

SEQ ID NO: 149931 - protein, 99 aa, Glycine max
  unsure (1)..(99): unsure at all Xaa locations
  Clone ID: PAT_MRT3847_106409C.1.pep
SFFFSLNSNISREVFMLDWSPNPFGMKVKISLSXKGIKYXYKEXDLRNKSPLLLQMNPVHKKIPVLIHNGKPICXSLIAVQYIEEVWNDRNPLLPSDPY

SEQ ID NO: 149932 - protein, 123 aa, Glycine max
  unsure (1)..(123): unsure at all Xaa locations
  Clone ID: PAT_MRT3847_10640C.1.pep
MPEEDLVDIKFRLYDGSDIGPFRYSSAATVDMLKQRIVSDWPKGKTVVPKSANEVKLISSGKILENNKTVGQCKVPFGEXPGGVIIMLVVVQPSLAKTKAVYRFDCQAKYQCSLPLLHCFIWG

SEQ ID NO: 149933 - protein, 55 aa, Glycine max
  Clone ID: PAT_MRT3847_106410C.1.pep
KYRRIIGSSSNRQEGWSILFNISHSDLETFIHITFIHHHFTNKHNLNLFFMGNIH

SEQ ID NO: 149934 - protein, 79 aa, Glycine max
  Clone ID: PAT_MRT3847_106411C.1.pep
TTRSLRGLSTTISITPMRPRGQSSSGSLQLPPLSSSSTFSAPPSPLTIWPLSPTGSTPTAPLLNPNLTGIPYNNNDNYG

SEQ ID NO: 149935 - protein, 57 aa, Glycine max
  Clone ID: PAT_MRT3847_106412C.1.pep
GNGTGGVSIYGTKFADDNLEKKRAGPDVVSMANAGPGTYGSKKLICTRKTKWGDGQQ

SEQ ID NO: 149936 - protein, 184 aa, Glycine max
  Clone ID: PAT_MRT3847_106413C.1.pep
MSHHSSSVNGEGTSHKNPLSRILDELSSLNLWKEKLERKEKGKERVEISQDERKQVREEERRKILKELRNEKDASYSSHDSCKSLSEELHDYYEGRHRERRIHGDPPVEYWNDLKNALRKRHIPSNYKRELMHKLQRFRQGSMSVEEYRQQMELLLLRAGHREEERTSIDRFLSGLIWEVREQG

SEQ ID NO: 149937 - protein, 168 aa, Glycine max
  unsure (1)..(168): unsure at all Xaa locations
  Clone ID: PAT_MRT3847_106414C.1.pep
RTLWQLXIPLKATTFAWRLIKERIPTKGNLWRRRVQLNNLMCPFCNRQEEEASHLFFNCPRILPLWWESLALTKTVGVFSPIPRQNYMQHTLISKGKHLQARWKCWWVALTWSIWRHRNRIVFLNKAFNGSKLMDDAIFLVWSWFRQLEKGFAQPYNYWSSNLSTAFF

SEQ ID NO: 149938 - protein, 144 aa, Glycine max
  unsure (1)..(144): unsure at all Xaa locations
  Clone ID: PAT_MRT3847_106415C.1.pep
MNVFIILFSIISMADSLDNGLARTPPMGWMPWTKFYCQTEWAKHPFSCINEQLYMDMADRLAEDGFREVGYQFVHIDDCWAEKARDSQGRIVADPTRFPSGIRNLSDYMHNRGLKLGIYXDIGTETCENYPGSYQHYDIDAQTF

SEQ ID NO: 149939 - protein, 103 aa, Glycine max
  Clone ID: PAT_MRT3847_106416C.1.pep
FPVPVSFEPGGFFPSSMEIGVVPAGTPISGILNCRSPKGAPVPGRAPFSAGDRGVKVFGSRGKRKTPKFGKPLCFPSKKGFAETGPRIKGGFAKPPFGGPLGG

SEQ ID NO: 149940 - protein, 573 aa, Glycine max
  unsure (1)..(573): unsure at all Xaa locations
  Clone ID: PAT_MRT3847_106417C.1.pep
MAASLFMPSSIVDEEARFEAEVAEVQAWWNSERFRLTKRPYTARDVVSLRGNLRQTYASNEMAKKLWCLLKNHQANGTASRTFGALDPVQVTQMAKHLDTIYVSGWQCSATHTTSNEPGPDLADYPYDTVPNKVEHLFFAQQYHDRKQREERMRMSREERARTPYVDYLRPIIADGDTGFGGTTATVKLCKLFVERGAAGIHIEDQSSVTKKCGHMAGKVLVAISEHINRLVAARLQFDVMGVETVLVARTDAEAANLIQSNIDTGANPNLKGKSLATLMQQGMAAGKNGAELQALEDEWLSKAQLKTLSEAVVEAIERQNNIGEEEKRRKLNEWMHHSSYERCLSNEEGREIAEKLGVRNLFWDWDLPRTREGFYRFKGSVTASVVRGCAFSPHADVIWMETASPNVVECTEFSEGVRSKHPQMMLGYNLSPSFNWDASGMSDEQMKDFIPKIAKLGYVWQFXITVGGLHSNALXITSTFARDARDWGMRGMLAYVERIQREERNNGVDTLAHQKWAGANYYDRYLKTVQGGVASTAAMGKGVTEEQFKESWTRPGAVEIDRGSIVVAKARM

SEQ ID NO: 149941 - protein, 558 aa, Glycine max
  Clone ID: PAT_MRT3847_106418C.1.pep
EAEVAEVQAWWNSERFRLTKRPYTARDVVSLRGNLRQTYASNEMAKKLWRLLKNHQANGTASRTFGALDPVQVTQMAKHLDTIYVSGWQCSATHTTSNEPGPDLADYPYDTVPNKVEHLFFAQQYHDRKQKEERMRMSREERARTPYVDYLRPIIADGDTGFGGTTATVKLCKLFVERGAAGIHIEDQSSVTKKCGHMAGKVLVAISEHINRLVAARLQFDVMGVETVLVARTDAEAANLIQSNIDTRDHQFILGVTNPNLKGKSLATLMQQGMAAGKNGAELQALEDEWLSKAQLKTLSEAVVEAIERQNNIGEEEKRRKLNEWMHHSSYERCLSNEEGREIAEKLGVRNLFWDWDLPRTREGFYRFKGSVTASVVRGCAFSPHADVIWMETASPNVVECTEFSEGVRSKHPQMMLGYNLSPSFNWDASGMSDEQMKDFIPKIAKLGYVWQFITVGGLHSNALITSTFARDFANRGMLAYVERIQREERNNGVDTLAHQKWAGANYYDRYLKTVQGGVASTAAMGKGVTEEQFKESWTRSGAVNIDRGSIVVAKARM

SEQ ID NO: 149942 - protein, 379 aa, Glycine max
  Clone ID: PAT_MRT3847_106419C.1.pep
GYSVNKPGFLSTLPAPSGSPFYDMLALDCEMCITSEGFELSRITLVDVKGQVLIDKLVKPSNAITDYNTRYSGITSEMLDGVTTSLRDIQEEFLKLVHKETILVGHSLENDLLALKISHDLVIDAAESSSHPGGTTQKEALRALTKRYLCREIQQPGPGQDSREAARATMELALLKIRNGPNFGSPPSFTRKKLLSILSESGKTSSLIDDISVVKRYASESSHAIPVTSDDVALAKANKEVKNGKVHFIWTQFSELHSYLKKQAEDSERLNRRLAEMLALQTCQNNFTKGKDFKLKASAELKEILARMDARIHNLYLSLPTNAMMIICTGHGDTAIVRRLRKMLTEQNESNLCREKIVEILEEVQARAEVALCFVGVKH

SEQ ID NO: 149943 - protein, 86 aa, Glycine max
  Clone ID: PAT_MRT3847_10641C.1.pep
LEYAVSCLLQGIKFGLVNSRSHLARVLYLLSFDTPNEPVGRSFDKYYEQVPHWVWLSWIPQLLLSLQRTEAPHCKLVLLKIATLYP

SEQ ID NO: 149944 - protein, 79 aa, Glycine max
  unsure (1)..(79): unsure at all Xaa locations
  Clone ID: PAT_MRT3847_106420C.1.pep
CLTPXXQSPXLILRXAPXXXSXPXXRXLKXLESRSYYESFXXXLTXLXQFLLKVAXLHHCLXXXXXECXHXMAGGYVDD

SEQ ID NO: 149945 - protein, 740 aa, Glycine max
  unsure (1)..(740): unsure at all Xaa locations
  Clone ID: PAT_MRT3847_106421C.1.pep
MEETLSLSLIHVNNSLVFTNRLHIILHFTALCFLVYYRLCFFFQNPQTRRGTTLFPWLLVFASEIILSFIWILGQGFRWHPISRTVFPERLPQDDKLPLIDVFICTADPTKEPTLDVMNTLLSAMALDYPPEKLHVYVSDDGGSSVTLSAMREAWKFAKWWIPFCMRYRIECRCPKAYFSASENGGGDSDGSIEFLADKKMIKEKYEAFKEDIERVKEDHSGDTTGIKGQNHPPIIEVIQENSSSEIEQVKLPFLVYVSREKKPSHPHHFKAGALNVLYRVSAVISNAPYILVLDCDMFCNAPASARQALCFHLDPKISLSLAFVQFPQKYHNISKNDIYDSQHRSQLXVLWQGMDGLRGPVLSGTGFYMKRESLYGNYKIKATDLELRQYVGTSNGFIKSLKQHCTPDSDTVGHTLPEEETLLLASCNYEIGTEWGKEVGFLYGTVCEDVHTGFTLNCNGWNSVLCDPPQPQFLGNGTTNLNDLLIQGTRWYCGLLDIGLSRFCPLICGPLRMSLLQSLCYAQLTYFPLYCLPLWCLAIVPQLCLVDGIPLYPKVSDPFFFIFLFIPLSALTKHLVEVLSTGGTIRKWIIEQRIWMISSITSHLYGCLDALLKKFGLKEASFLPTNKVEDDEQTRLYQMDKFDFRTSNMFLVPMVALLIINISCFIGGIYRVLSVGDWDKMFIQLLLPAYIIVVNSPIIEGLVIRKDVGRIYPSTALVVTSNILATIITSTIYSLLRKV

SEQ ID NO: 149946 - protein, 110 aa, Glycine max
  unsure (1)..(110): unsure at all Xaa locations
  Clone ID: PAT_MRT3847_106422C.1.pep
DATDNYGPALTRKRSIPYHIPAYPPICPKRQLKFHLASLRDPQSNPQDQHNQYLHLKASIXNTDSSSLNQPIPINTYSHYDHLLDSTATIFSDLTTYTSPSTSLLLIPTF

SEQ ID NO: 149947 - protein, 110 aa, Glycine max
  Clone ID: PAT_MRT3847_106423C.1.pep
AKTEESKLETVQEVEESSDKKDEAVKEVAEENTETEKKVADADTKKEETEKVSIEESPEEKKEVIESETKEIVAETEVSKKTNETEEIKSVETEEKKPEVEKSESETVEA

SEQ ID NO: 149948 - protein, 127 aa, Glycine max
  Clone ID: PAT_MRT3847_106424C.1.pep
ATYAPCLGIGVGFHHNNPFLYHKKSKPKKEQESRRSSDYGEEHNNPKPKQPMGTDMATIRRNSRRGGRKFQQQQALARCTKMEAEEETRDYGSVFSMKQQKDPNVLHYITCKSTTTNSRTEVGGGLR

SEQ ID NO: 149949 - protein, 93 aa, Glycine max
  Clone ID: PAT_MRT3847_106425C.1.pep
RKSIIRNLRSLADPMVMINNCTSLGTVHEGVHIARRFTWPLRYPHFTASISCSRDLYLGRSIPRNVVLCSFNVQASQGSVLIVFVTGPCDLIR

SEQ ID NO: 149950 - protein, 83 aa, Glycine max
  Clone ID: PAT_MRT3847_106426C.1.pep
MMTMLTRFTFCHFCLEATTVTATAAKKLFGLKSNVFRSNEIGENEKSWFMMLRSRYLIGQTHHVEWSKIQTPTDEWVVTYDTM

SEQ ID NO: 149951 - protein, 80 aa, Glycine max
  unsure (1)..(80): unsure at all Xaa locations
  Clone ID: PAT_MRT3847_106427C.1.pep
MFGRAPNKNDNSMYYXILGVFNNASQDDLKKAYKIAAIKNHPYKGGDPHKFKELAQAYYVLSDPYKREKYYQYWVYALYV

SEQ ID NO: 149952 - protein, 65 aa, Glycine max
  Clone ID: PAT_MRT3847_106428C.1.pep
RIDTLGVGVTHYSLSHSHALRVQAREREMEDLEEVAINKSSRVFSRARKCGVCWNKLKNKKSSYY

SEQ ID NO: 149953 - protein, 101 aa, Glycine max
  Clone ID: PAT_MRT3847_106429C.1.pep
DSQKTILRNQKNGALGAAVWTFPIGGFSLAPPPFSPPLKGAHLVISLSPIIENPFREGPFAISSSLLKRILLGDFYLGDLSCFPPPFLKKSGLFIRLRTFF

SEQ ID NO: 149954 - protein, 74 aa, Glycine max
  Clone ID: PAT_MRT3847_10642C.1.pep
LEFQGFVFFGIFLFTVGFFHSSPIFDFLFSTYILLCFNRVSILFLPPPPPQKFINSWKSRGSIWSPLFLARVRL

SEQ ID NO: 149955 - protein, 82 aa, Glycine max
  Clone ID: PAT_MRT3847_106430C.1.pep
QWPEAIRNLEKLGDAPTRLSVQEKRKNCSTVVVTPSCPGMSPFFVLRGGWHNFGPQQNIIGGGAFISRAFVCVSPPKIKLWG

SEQ ID NO: 149956 - protein, 180 aa, Glycine max
  Clone ID: PAT_MRT3847_106431C.1.pep
PRFFFPPPLPFFKCAVPRGPRGGPSPRGVLGHFFRAPVREPKSLAQGGFCFPPPPAPIFGLLGGSPFRGGGPRFFFFPRTRVFFFFVSPPGPGVPVGLFLKLGTWCFTPPFYQFWGPNPFPIHPVWGSPGDSPQICRGPFCPPPRAGAFFPGKKKKKKKKKKKKKKKKKKKKKKKKKKKR

SEQ ID NO: 149957 - protein, 83 aa, Glycine max
  Clone ID: PAT_MRT3847_106432C.1.pep
ACWGSEVFSKMKLLLFLVPLVLGAGFASVNGPSLCTWSFIVDCSITFTHLPASSDSSSNARHQSNETKVFNVTKPGFNLAAGK

SEQ ID NO: 149958 - protein, 44 aa, Glycine max
  Clone ID: PAT_MRT3847_106433C.1.pep
TVKQAFGWPSDPKWVRFGCKVSAMNRSFRPSPIRKRRVQNKYRN

SEQ ID NO: 149959 - protein, 98 aa, Glycine max
  Clone ID: PAT_MRT3847_106434C.1.pep
CARGPPCQPHGGMPVLLLLLRLFSQECPTRFVFSQILSPCLAQRDTNAVSQVMGISLSIFPPAARKHTGALFTPPFLPADNSFRQTSTHCLKFIMFTT

SEQ ID NO: 149960 - protein, 48 aa, Glycine max
  Clone ID: PAT_MRT3847_106435C.1.pep
WVGKTLCIKSEMVFLPPGVLGLATLLRKKWSCLTLQQGQVFWTCDRCV

SEQ ID NO: 149961 - protein, 166 aa, Glycine max
  unsure (1)..(166): unsure at all Xaa locations
  Clone ID: PAT_MRT3847_106436C.1.pep
MASVYIPVQNSEEEVRVALDQLPRDASDILDILKAEQAPLDLWLIIAREYFKQGKIDQYRQILEEGSSPEIDEYYADVRYERIAILNALGAYYSYLGKIETKQREKEEHFILATQYYNKASRIDMHEPSTWVGKGQLLLAXGEVXQACAAFEIVVDGDHDNVPALL

SEQ ID NO: 149962 - protein, 347 aa, Glycine max
  unsure (1)..(347): unsure at all Xaa locations
  Clone ID: PAT_MRT3847_106437C.1.pep
MSQNGKLMPNLNQHSTKLLNLTVLQRIDPFVEEILITAXAHVTFYEFNIDLSQWSRKDVEGSLFVVKRNTQPRFQFIVMNRRNTENLVENLLGDFEYEVQIPYLLYRNAAQEVNGIWFYNARECKEFGYLFSVNSKVSSTKSEFEELEAXPSSSTTFNVADVPDGPSFVNFFSAAMAIGNTSNTPITGQPYQSSAAISSSSVPTHTATPTVPTLQIPSLSQSTPLIPPLDAVESICSSNRTAKLVKPSFFVPPPSSAMMIPPVSSSTPTAPPLHPAVNVHRPYGAPLLQPFPPPNPPLSLAPAXPSPSPNYGSVISREKVRDALMVLVQDNQFIDMVYRALLNAHQS

SEQ ID NO: 149963 - protein, 116 aa, Glycine max
  unsure (1)..(116): unsure at all Xaa locations
  Clone ID: PAT_MRT3847_106438C.1.pep
RSECLLCRGVDPDDKASSXGQLLYAWAYNLDLHETYLANHLNVLRELYPHSSYESSQLRRIALSLLEWLHKADAPTXISQIEEFHSIXMMMNAPVSQDHIDLLWSMDMLPLTKSTL

SEQ ID NO: 149964 - protein, 148 aa, Glycine max
  Clone ID: PAT_MRT3847_106439C.1.pep
MSQNGKLMPNLDQHSTKLLNLTVLQRIDPFVEEILITAAHVTFYEFNIDLSQWSRKDVEGSLFVVKRNTQPRFQFIVMNRRNTENLVENLLGDFEYEVQVPYLLYRNAAQEVNGIWFYNARECEEVANLFSRILNASAKVPPKGMSED

SEQ ID NO: 149965 - protein, 91 aa, Glycine max
  Clone ID: PAT_MRT3847_10643C.1.pep
GSSFERINLRLDFIIPGKVSLNNGSSLSIRTYLKLGSQTLLFTLHSEFKLQAVTYCMPCLIRLLLTLIRNQKHLQVPFFQAYYQELCWRPL

SEQ ID NO: 149966 - protein, 110 aa, Glycine max
  Clone ID: PAT_MRT3847_106440C.1.pep
PKGYSPSVSPRPTLSPGRYPVCSRVLTRPTFIWGQRPQRMSRPRVVGRLTLGQKGFFLVFFFFRPLFSWNPMLWRQFHPLAQLSEHNKRPFKGWSLNAPPLQGLNFQGLN

SEQ ID NO: 149967 - protein, 45 aa, Glycine max
  Clone ID: PAT_MRT3847_106441C.1.pep
HQLCSPALHKVPSIYGTISRNKQCYSSQYVPQYRKVKISGVWIIV

SEQ ID NO: 149968 - protein, 108 aa, Glycine max
  unsure (1)..(108): unsure at all Xaa locations
  Clone ID: PAT_MRT3847_106442C.1.pep
FSLPTSIXEDFGATDLKYIILPFYLAELDXKIAQTVRVQILXVPMQNLKXFISFCESMELVAXSRYNLTFMGHQXTVADHRATKIARFLARRAAQSKLLEIKEPKEPR

SEQ ID NO: 149969 - protein, 245 aa, Glycine max
  Clone ID: PAT_MRT3847_106443C.1.pep
MRALTSSSSTFIPKRYSFFFFLSILFALRSSSGGCSEYHHHHAPMATIGGLRDSQGSQNSVQTEALARFAVDEHNKKQNSLLEFSRVVRTQEQVVAGTLHHLTLEAIEAGEKKLYEAKVWVKPWLNFKELQEFKPAGDVPSFTSADLGVKKDGHQPGWQSVPTHDPQVQDAANHAIKTIQQRSNSLVPYELHEVADAKAEVIDDFAKFNLLLKVKRGQKEEKFKVEVHKNNQGGFHLNQMEQDHS

SEQ ID NO: 149970 - protein, 43 aa, Glycine max
  Clone ID: PAT_MRT3847_106444C.1.pep
AASVAVAALAEASATTVPLAASHYQVREKTIASTDQLNKKSEF

SEQ ID NO: 149971 - protein, 245 aa, Glycine max
  unsure (1)..(245): unsure at all Xaa locations
  Clone ID: PAT_MRT3847_106445C.1.pep
MRALTSSSSTFIPKRYSFFFFLSILFALRSSSGGCSEYHHHHAPMATIGGLRDSQGSQNSVQTEALARFAVDEHNKKQNSLLEFSRVVRTQEQVVAGTLHHLTLEAIEAGEKKLYEAKXWVKPWLNFKELQEFKPAGDVPSFTSADLGVKKDGHQPGWQSVPTHDPQVQDAANHAIKTIQQRSNSLVPYELHEVADAKAEVIDDFAKFNLLLKVKRGQKEEKFKVEVHKNNQGGFHLNQMEQDHS

SEQ ID NO: 149972 - protein, 350 aa, Glycine max
  Clone ID: PAT_MRT3847_106446C.1.pep
HASDSPLSSHHATDTLTLLVLVVLFFAPVDAHFPATGELPTFREAPAFRNGRECRNRARSDSVIHIAMTLDATYLRGSVAGVFSVLRHASCPENVVFHFIATTHRRTELRRIITATFPYLSFHLYHFDANLVRGKISYSIRRALDQPVNYARMYLADLLPATVRRIIYFDSDLIVVDDVAKLWSIDLHARVLGAPEYCHANFTNYFTHRFWSNPSYAASFKGRDACYFNTGVMVIDLWKWREGRYTEKLERWMRIQKRNRIYELGSLPPFLLVFAGDVERVEHRWNQHGLGGDNLEGLCRDLHPGPVSLLHWSGKGKPWLRIDSKKPCPLDSLWAPYDLFRHSPSLFSDS

SEQ ID NO: 149973 - protein, 82 aa, Glycine max
  Clone ID: PAT_MRT3847_106447C.1.pep
QKLLIQQIIYYLSAIQVECFHLVCATCKWRSFVASDYLFLSLIRRYLESCFTRRFPFSLISWIRLSSMLTPLFYSAYIFIRL

SEQ ID NO: 149974 - protein, 69 aa, Glycine max
  Clone ID: PAT_MRT3847_106448C.1.pep
LNMYFIMAKLCECKVMCIEFVECKSSLSMNSIFAISVARIRKETTIYRAILCMTWWNREQKAQPSNSLN

SEQ ID NO: 149975 - protein, 74 aa, Glycine max
  Clone ID: PAT_MRT3847_106449C.1.pep
FLSIFPKLLLVSKLKARLFFRKAMLYAHEFDLKIPAPRQNGGNSHQWCRNKFFRLWRRIRSKKSHQARNLPGHH

SEQ ID NO: 149976 - protein, 53 aa, Glycine max
  Clone ID: PAT_MRT3847_10644C.1.pep
MLDKKVTRGHIGSSRGSISKNPTLMFCARAGYKNFNFARPRNKRIFPKKKKKK

SEQ ID NO: 149977 - protein, 95 aa, Glycine max
  Clone ID: PAT_MRT3847_106450C.1.pep
MELADRAVGFLLSFISLSIFTYYTFWVIILPFVDDDHFALRFFLPQEYAIMIPVSAAVALLCLLGWLFGAAWPYSLESWASRPTRSRPCAFCSHF

SEQ ID NO: 149978 - protein, 58 aa, Glycine max
  Clone ID: PAT_MRT3847_106451C.1.pep
TKPNFFLWWDFKIRLGLTNQPKIFILLSTTQKILNVLFFYQITLIINLNFISFLIPYY

SEQ ID NO: 149979 - protein, 69 aa, Glycine max
  Clone ID: PAT_MRT3847_106452C.1.pep
NAGYKAGLVRIAAVYPLTFICLTLGLVPSPVHLDPLCSAQLYLVTFGRGRSKVVNPVNYSGHLSFRFWS

SEQ ID NO: 149980 - protein, 83 aa, Glycine max
  Clone ID: PAT_MRT3847_106453C.1.pep
LDGSPPAPHLDKRFGSWINYWLVAFEGGGWCITVTTCLARQTHRLCSCQQMAMLIASIRIWNHWDMLNPPCYLWYRIMRQCCD

SEQ ID NO: 149981 - protein, 40 aa, Glycine max
  Clone ID: PAT_MRT3847_106454C.1.pep
PPHNSDTLLLVSCSNFVAQFSTMATTTQLHLPPGIQIPHN

SEQ ID NO: 149982 - protein, 62 aa, Glycine max
  Clone ID: PAT_MRT3847_106455C.1.pep
TGLIWILVGRSLIRTPTPISTLLGSPGPWTASKWMVVFPPLVLNPYQFYLELVLGMPWLTLG

SEQ ID NO: 149983 - protein, 76 aa, Glycine max
  Clone ID: PAT_MRT3847_106456C.1.pep
MVVTQVQLDRAKDIRRELEMEIIEEHTVMEYSKVSKKCEKCGHGEATYYTRQMRSTDKGQTTFYACTGCGHPSQEN

SEQ ID NO: 149984 - protein, 103 aa, Glycine max
  unsure (1)..(103): unsure at all Xaa locations
  Clone ID: PAT_MRT3847_106457C.1.pep
HXTQQKHTPXPHTXXXKHXNXXTPQXHXKXTKNTXPGEXAXTXHPXTPNXPXXXKXXHNXDNXHXXXXXIXXXXXXXPQXQXNRQPXXTTXTXXXXAXXNNHP

SEQ ID NO: 149985 - protein, 87 aa, Glycine max
  Clone ID: PAT_MRT3847_106458C.1.pep
KKKQKCPRKIIVKVDVKKGPTLLLTTCVLKPEIIPPPLFFFPPLRFWGQAFFLPIFFWARGIIRLFHFFWALQKKLQKKKIPWGGLF

SEQ ID NO: 149986 - protein, 67 aa, Glycine max
  unsure (1)..(67): unsure at all Xaa locations
  Clone ID: PAT_MRT3847_106459C.1.pep
QENVVLKFSQEEWLTAWSTQVRPATALVCAGCTYVCAGARESTVYTTRGDCDMGVKXTPIHNMCAYG

SEQ ID NO: 149987 - protein, 120 aa, Glycine max
  unsure (1)..(120): unsure at all Xaa locations
  Clone ID: PAT_MRT3847_10645C.1.pep
LEPAPLAKLESTNDEKERDYLPKVNYEHEVDKLLDGLGPRYTDWPGCDPLPVDADMLPVTVPGYQPPFRXLAVAMIKLWEISSIAKVALKRGVQLTTSERMAEEIKKLTGGILLSRNKDF

SEQ ID NO: 149988 - protein, 42 aa, Glycine max
  Clone ID: PAT_MRT3847_106460C.1.pep
GHSTTIAGGESLFCNHTWFKNPSSSQTDLLFKVTYKLSFLCT

SEQ ID NO: 149989 - protein, 104 aa, Glycine max
  Clone ID: PAT_MRT3847_106461C.1.pep
MVPSNTVTAFTAKPSPLLTFVMLIVLGVVGFYSLHFPPRPTTSPDPSHVMRGGIGDPLSPGWSGVESGEKLGLEDSEVLKRFPKIPSLPLSAEAAERILESLGG

SEQ ID NO: 149990 - protein, 96 aa, Glycine max
  unsure (1)..(96): unsure at all Xaa locations
  Clone ID: PAT_MRT3847_106462C.1.pep
QLKRYPAFLMTGIKIPIESLAFVMGKGRQPSIAYAEDMYEDRRGTXKIKVRRIHHTQNIKGGSPGRTPHPGEVFITRLETKCIIMIERLWFCHNHN

SEQ ID NO: 149991 - protein, 277 aa, Glycine max
  Clone ID: PAT_MRT3847_106463C.1.pep
RSRKNEWVEGVDLWLKIQEEAWLDVDQEPILSSYYFSSILSHKSLESALANHLSTNLSSLSLPSSTLFDLFMGVLVDDGDDDIVGAVKDDLIAVKERDPACISYVHCLLNFKGFLACQAHRIAHKLWLQGRKVLALLIQNRVSEVFAVDIHPGAKIGRGILLDHATGLVVGETAVIGNNVSILHNVTLGGTGKASGDRHPKIGDGVLIGAGTCILGNIKIGDGAKIGACSVVLKEVPPRTTAVGNPARLVGGKDNPIKLDKMPSFTMDHTSWSDYVI

SEQ ID NO: 149992 - protein, 91 aa, Glycine max
  Clone ID: PAT_MRT3847_106464C.1.pep
VPIFLAHMSLFIGDAVNSLSIYASLMPIGASNFPASFKLTFFCPFSYHFTCINRFLLPLCLFINSISIRLISRFIQNHVPQYVNKPPTSFS

SEQ ID NO: 149993 - protein, 61 aa, Glycine max
  Clone ID: PAT_MRT3847_106465C.1.pep
SFLPSPWHMMECSLLNRDSLHRKIFSFYFRSPNLILAYPTLYIGSVGVLSFAVYLDCIDKQ

SEQ ID NO: 149994 - protein, 91 aa, Glycine max
  Clone ID: PAT_MRT3847_106466C.1.pep
LFFVIIHLFSNSPMAQENNDPPRDENFRNENFRDENFRDESRQSLSFRSPMSRMLSFTRMLGRERKGNVSLSSCGSDCSCAAEQGEPEETQ

SEQ ID NO: 149995 - protein, 665 aa, Glycine max
  Clone ID: PAT_MRT3847_106467C.1.pep
MPGRMTPGSHNFPNDVILNLKRKQDHEAYPDLPLSNHGQKHGWLPSGTCAGHNGSDLGFLAKFNDMESQSVSIDSVSKKLKQVKYCPCFHSIHQIVPRSRTKSPAGTHDPTSGGLLGPSYASCTCAPHKLVSDSDMKSSGISPSLLWKSTTSGPNLDRRNYLPPISAGDLNSGDNFGSSSAGHELRKYVKDSEYVGTHKSINLNIMPTGCFDTTAASFQSVQITGEEDKFQDSRLPWLKAKPVPKGKPNEESQTSTQVDSFLLNPYKSGCMHSDLMFSKVEKSDFCTDKTLAFDLNGKPQTSKVFQSLFKNHWIEEIKISNVNSLCDSDPDMGEQAPAIEHFMKNEKKHKHLAGILDLNSCMNEDENMPIDIDLQAPVSPENKECSPPRGESDENQLEMLLQLAGQEQEQEQEQEQDLEEQEDQTGIAAEALVSISKTVAYDDLQMTTCPSSESSVSSSLHWFSGIVSTIVDHSQCEVKEDFNCTIKDLEDFLPADFDYFEFMSLNLTDTKDLDYGCYKSCGQNEQEVESSSPIQPRNCRTNRKRRGNDFQSEILPSLASLSRYEVTEDLQTIGGLLEAARRTHSATGCLRSACKNALAKGKKRSCASVSNNITDLLLNLKEVNIDTEIAIEKMGFISWGKICRKPRGKRVATSKPHLIFSKVHN

SEQ ID NO: 149996 - protein, 200 aa, Glycine max
  unsure (1)..(200): unsure at all Xaa locations
  Clone ID: PAT_MRT3847_106468C.1.pep
ERIQLPLASMQEKSRELSXTPLPAPTAIKESLDPKLSGLTYRKVGKKILDLQLPADEYIDSEGDSCENERVIKQPPLSTYTVEKPYRINSNNGFADLNLPCKLQKETGVKSDDFGASIPHRNHTFHDMPGRMTPGSHNFPNDVILNLKRKQDHEAYPDLPLSNHGQKHGWLPSGTCAGESLSPKLHCSYYNTCLVLAYLF

SEQ ID NO: 149997 - protein, 53 aa, Glycine max
  unsure (1)..(53): unsure at all Xaa locations
  Clone ID: PAT_MRT3847_106469C.1.pep
EVTDCSDHTSFFMDVYIEGIPYXNXLNSIAHDSYHELVKTIAHMFDTTILMWT

SEQ ID NO: 149998 - protein, 459 aa, Glycine max
  Clone ID: PAT_MRT3847_10646C.1.pep
PRYTDWPGCDPLPVDADMLPVTVPGYQPPFRVLPFGVRATLGLREATALRRIARTLPPHFALGRNRQLQGLAVAMIKLWEISSIAKVALKRGVQLTTSERMAEEIKKLTGGILLSRNKDFLVFFRGKNFLSADVTQALLERERMAKVMQDEEEQARLRASSLLIPTNNTSELSAEAGTLGETLDADAKWGKTLDERHKQKIMREVEQLRHANLVKKLEQKLSFAERKLRRAEKALMKVESFLKPSEYKADPESITDEERFMFRKLGLRMKAFLLLGRRGVFDGTIENMHLHWKYRELVKIIVKAKTFEQVKKIALALEAESGGVLVSVDKVSKGYSVIVYRGKVYQRPSTLRPKNRLPRGKALARSIELQRHEALMNHISTLQSKVGRIRSEIEQMEKVKDKGDEALYDKLDSAYPSDDENSEVEDGEQGDEAYLKTYNSENDSEIESEVESDNMYPPI

SEQ ID NO: 149999 - protein, 98 aa, Glycine max
  unsure (1)..(98): unsure at all Xaa locations
  Clone ID: PAT_MRT3847_106470C.1.pep
XYRGQLVYGFPFNFPQPCLTTCSETHPPSSKTSSPKPYPDPTIALWLGTRLWLLLQACAYRAKCLQLFRFVICHCIMRLTKRSMWLWFLPYEIKASCR

SEQ ID NO: 150000 - protein, 53 aa, Glycine max
  Clone ID: PAT_MRT3847_106471C.1.pep
MQLINGITKCTKKGDDPSMLRYWINDNHRSWGSLQVLLKTVLIRREVLRREFF

SEQ ID NO: 150001 - protein, 130 aa, Glycine max
  Clone ID: PAT_MRT3847_106472C.1.pep
GDSYHHKGGGGGGGDENNGVSFSQTANRFENQKQLVGNPVMFQNLEISKPPGSSVTEDPSGATVTTTVAPPTEWFFGNSSFSSAGNGNDGANSNNNNINININDANNNWSDALAWGDFQQQQQQQYSALP

SEQ ID NO: 150002 - protein, 80 aa, Glycine max
  Clone ID: PAT_MRT3847_106473C.1.pep
MTRGKSKTESKTADCKLAVNNKGAANNAKKLAGNGNAAKDANKRKRPPSAFFVFMEEFTNVFNKEHPENKSVSAVGKTAG

SEQ ID NO: 150003 - protein, 70 aa, Glycine max
  Clone ID: PAT_MRT3847_106474C.1.pep
AFHQAINRGPNFYGGSLTILFYVCNNKLLSLSDRTPCYCFFRKDRRASWGRGLTLISITPLSPKQPGNVK

SEQ ID NO: 150004 - protein, 44 aa, Glycine max
  Clone ID: PAT_MRT3847_106475C.1.pep
KNEMRVNIINNYKHTRYLKEVNNVHDRDTILLETDAISMIIDND

SEQ ID NO: 150005 - protein, 425 aa, Glycine max
  unsure (1)..(425): unsure at all Xaa locations
  Clone ID: PAT_MRT3847_106476C.1.pep
CLFQRYYTPTARELARLAQIQITPILHHFSESLAGAASIRAFDQEGRFIYTNLLLVDGFSRPWFHNVSAMEWLSFRLNLLSNFVFAFSLVMLVSLPEGIINPSIAGLAVTYGINLNVLQASVIWNICNAENKMISVERILQYTNITSEAPLVIEDSRPPSNWPDTGTICFKNLQIRYAEHLPSVLKNITCTFPGRKKVGVVGRTGSGKSTLIQAIFRIVEPREGSIIIDNVDICKIGLHDLRSRLSIIPQDPALFEGTVRGNLDPLQKYSDIEVWEALDKCQLGHLVRAKEEKLDSPVVENGDNWSVGQRQLFCLGRALLKRSSILVLDEATASVDSATXGVIQNIISQEFKDRTVVTIAHRIHTVIDSDLVLVLSDERVAEYDEPSKLLEREDSFFFKLIKEYSGRSHNFSNLATQHVQSKELL

SEQ ID NO: 150006 - protein, 356 aa, Glycine max
  Clone ID: PAT_MRT3847_106477C.1.pep
MKKGNLGLGLKLSVPVSDQSNFARFLTESGTFKDGDLLVNRDGVRIVSQNDVEAPPPIKPTDNQLTLADIDVIKVVGKGNGGVVQLVQHKWTSQFFALKVIQMNIEESMRKQIAQELKINQQAQCPYVVVCYQSFYENGVISIILEYMDGGSLADLLKKVKTIPEDYLAAICKQVLKGLVYLHHEKHIIHRDLKPSNLLINHIGEVKITDFGVSAIMESTSGQANTFIGTYNYMSPERINGSQRGYNYKSDIWSLGLILLECALGRFPYAPPDQSETWESIFELIETIVDKPPPIPPSEQFSTEFCSFISACLQKDPKDRLSAQELMAHPFVNMYDDLEVDLSAYFSNAGSPLATL

SEQ ID NO: 150007 - protein, 95 aa, Glycine max
  Clone ID: PAT_MRT3847_106478C.1.pep
HKTRYKRGGGEPPRYITNICKHTACAKYIYKRHVFILGQPQRLWGFYWQRTLPSMELCHNFPLFAADNTILIFCTNTNAMWPNFTPQNWDHPIYH

SEQ ID NO: 150008 - protein, 132 aa, Glycine max
  unsure (1)..(132): unsure at all Xaa locations
  Clone ID: PAT_MRT3847_106479C.1.pep
QGVSPPRSTQEAPPPLAEQPEPNXRNLDESALIAQDLYLALHPGPVRISVSVHNVDEGNLQGQVVVNTVLFLSEPVGSLKEKKAGQIQLPGSNHQFSGKPGFLKDDKSLAPYNEGAGETSTLSLIERGGIKG

SEQ ID NO: 150009 - protein, 69 aa, Glycine max
  Clone ID: PAT_MRT3847_10647C.1.pep
EGRVQGVPTIKKKDRDELGVTVVTAALSFLANFEDVYKLWTFVARFLDADFVEKERWRYTALNQKTIEV

SEQ ID NO: 150010 - protein, 76 aa, Glycine max
  Clone ID: PAT_MRT3847_106480C.1.pep
KGGKTGPQNKWGFHFSPFFFLKLLKWGFKNFTMFYLPQVPPFIINYGSALSDKALQTIGRALWLIIIINPPLFPFF

SEQ ID NO: 150011 - protein, 194 aa, Glycine max
  unsure (1)..(194): unsure at all Xaa locations
  Clone ID: PAT_MRT3847_106481C.1.pep
AIRQIILNSDPQLEIFVRLLKSTSLFLKAAVLLYLSKPKAKQMLSSEWVPLILRVLEFGDKLQTLFTVQCSPQVAAFYVLDQILTGFDEDKNLENARQVLSLGGLTLLMRRIDGEVHERNNAAMIISCCIRAEGSCRSFLADNINKTSLLELIVIESKQNSSGYALSVLAELLYLDRRTKTXNXLRGLKDGWGG

SEQ ID NO: 150012 - protein, 62 aa, Glycine max
  Clone ID: PAT_MRT3847_106482C.1.pep
CKIFCTNLKRYSHIVVFHQAMCSRPHTPLPIVANQAAMHVVPHDPLGYARVSAAIACVSRVS

SEQ ID NO: 150013 - protein, 44 aa, Glycine max
  Clone ID: PAT_MRT3847_106483C.1.pep
TIFYKGLKGLFIITGSILIDLLKYYFLTSPREPYFPYVSTVENQ

SEQ ID NO: 150014 - protein, 59 aa, Glycine max
  Clone ID: PAT_MRT3847_106484C.1.pep
TLRGLASSLPKRPKLHSTFFSPLYLPSFSLILNLSEFHSPKFRLTLFVHLISHSPHDQA

SEQ ID NO: 150015 - protein, 71 aa, Glycine max
  Clone ID: PAT_MRT3847_106485C.1.pep
HQRGTNSGVSGAFPVCNCICCPFNHSNLARCWAWSHHHCPHCLFLIRIARIWGVLDAVGLTRFIFGSFPLF

SEQ ID NO: 150016 - protein, 40 aa, Glycine max
  Clone ID: PAT_MRT3847_106486C.1.pep
CADIRTLAARDTMVATGGPSWKNPTGTRDGVLSKLTEARK

SEQ ID NO: 150017 - protein, 73 aa, Glycine max
  Clone ID: PAT_MRT3847_106487C.1.pep
LERVHIKEIIKESIEELGIPYSFLTLGLHESSLGSHHYRTREPNRYDLPFITGSLDFLCHSLNHCTKSTNPKL

SEQ ID NO: 150018 - protein, 68 aa, Glycine max
  Clone ID: PAT_MRT3847_106488C.1.pep
ATFSLFFVFPYKASLKVIKIFIFTFRSSELQRIEFTMPVSFARQHQSLLIEFSLTRVCIWLRHSSSRI

SEQ ID NO: 150019 - protein, 65 aa, Glycine max
  Clone ID: PAT_MRT3847_106489C.1.pep
MSGIIHKIEETLHVGGPKMEEEHKVCHHGEHSSEYRGKCHADEPRLGKKGGSALSKSVYRLESQS

SEQ ID NO: 150020 - protein, 71 aa, Glycine max
  Clone ID: PAT_MRT3847_10648C.1.pep
TPRNIDKNDELISTKSYLVATKDATPLTERNVKDPLRGGLEHILLTLDMWGGRKLLNRPGFLYHKHENTSI

SEQ ID NO: 150021 - protein, 77 aa, Glycine max
  Clone ID: PAT_MRT3847_106490C.1.pep
SIPAPSDPVKPSQNNRSVISFQAEGLTMHCTKWKFSNYRMVATHPLSNHAMRKDAFIRKREASYSLPEPIFRNPKRM

SEQ ID NO: 150022 - protein, 35 aa, Glycine max
  Clone ID: PAT_MRT3847_106491C.1.pep
STYVNWTKGHKPTYQVDMIATLLPIYLLMGTATCL

SEQ ID NO: 150023 - protein, 72 aa, Glycine max
  Clone ID: PAT_MRT3847_106492C.1.pep
SDWESCTLSWPLPSAERRAASTYRRNQCPTTYGPNGFSPIQDSTSLLVRSQIDHWPSASLGGEHDLNREMEE

SEQ ID NO: 150024 - protein, 167 aa, Glycine max
  unsure (1)..(167): unsure at all Xaa locations
  Clone ID: PAT_MRT3847_106493C.1.pep
AHANQPSDIIYHLGSSVVNPVMYLNLRDYSVRYFTEKPWINRDGKPVKVGKFTILRNMDSFRKYMYIRYLLPLKGLELVNAVSCQYFQKMYLDFNRRXRTVMRLVELYKPYLFFNGVFDNMNTEKLLSSARQGGVETEXFYFDPKMIDWEDYFINIHFPGIIKHALK

SEQ ID NO: 150025 - protein, 53 aa, Glycine max
  unsure (1)..(53): unsure at all Xaa locations
  Clone ID: PAT_MRT3847_106494C.1.pep
XLYTTQYRHEKNXGFHPPLXXXPXXXSXXXXFXLSXSVTPTKPXTLLFYPXKM

SEQ ID NO: 150026 - protein, 87 aa, Glycine max
  Clone ID: PAT_MRT3847_106495C.1.pep
MATSNFSNDLSVSLAFVLVLHSKAHSTDTVSFTFNKFNPVDPNIMLQYDASISSSEVLQLTKVGTNGLPTSGSLGRALYAAPIQIWD

SEQ ID NO: 150027 - protein, 75 aa, Glycine max
  unsure (1)..(75): unsure at all Xaa locations
  Clone ID: PAT_MRT3847_106496C.1.pep
MLEIVVINMCKNRKVCCDILIGNMIARRVVMEXFGDATPKGAENFRAICTGDVXMGRSGKPGHYRGSVVHRSSPE

SEQ ID NO: 150028 - protein, 231 aa, Glycine max
  Clone ID: PAT_MRT3847_106497C.1.pep
MAAAAAATLSSSFSKPSSLPFHTHSYSFPTTLPTVPTPPRAAVVKTPLIVYSKNPISDIVSSTESRSGGAWDDEKPREECGVVGIYGDPEASRLCYLALHALQHRGQEGAGIVTVHNNVLQSITGVGLVSDVFNQSKLDQLPGSLAIGHVRYSTAGQSMLKNVQPFVAGYRFGSVGVAHNGNLVNYRTLRTNLEDSGSIFNTTSDTEVVLHLIATSKHRPFILRIVDACEK

SEQ ID NO: 150029 - protein, 61 aa, Glycine max
  Clone ID: PAT_MRT3847_106498C.1.pep
PNLRLGYTLTDKSSSGNIRILCMLEMPITSLLEVDPLRILRYLIGAVAMMIGVLLPFSYMM

SEQ ID NO: 150030 - protein, 35 aa, Glycine max
  Clone ID: PAT_MRT3847_106499C.1.pep
IITLIVLIGGIETSTICYLINFIDTGAKWVELCNC

SEQ ID NO: 150031 - protein, 39 aa, Glycine max
  Clone ID: PAT_MRT3847_10649C.1.pep
GPRLDFRGVGEQAYPLGEAGNPGGAQSTGSPCSSLSGAH

SEQ ID NO: 150032 - protein, 62 aa, Glycine max
  Clone ID: PAT_MRT3847_1064C.1.pep
KKKFARGICYRFSLPSPLYILRAPSYWSSSNFLTGQISTLTIPPNLKNKPNKKPLLMNGNNF

SEQ ID NO: 150033 - protein, 173 aa, Glycine max
  unsure (1)..(173): unsure at all Xaa locations
  Clone ID: PAT_MRT3847_106500C.1.pep
KGVXFSIESSGRGQKHFXSEXFNSRGESKNHSLLGLPPLFYXKSESVYRXSIKKWGQTSXGNNXXEPKPKIGVFTSNNIGGAVNQYRVSRNLSQIQYSTQWYIRDVLSXVNCDFXYGDSKGQIGNETLSHXTIMRYTSNQHLSNLRKRXKKWGXPLIFISXAGRAMSXDPNAY

SEQ ID NO: 150034 - protein, 45 aa, Glycine max
  Clone ID: PAT_MRT3847_106501C.1.pep
GRQMPVVCSNRAHASKIPSDGRISLMCVSYQRSDAWVGPGIPDRY

SEQ ID NO: 150035 - protein, 201 aa, Glycine max
  unsure (1)..(201): unsure at all Xaa locations
  Clone ID: PAT_MRT3847_106502C.1.pep
MKVAAEGCNLLLLFITSYLSLISGLGVHSLSYDHSATTKCLAEPRRAQYGGGIIVNPGFDHNIEGWTVFGKGAIKERISNGGNRFIVAHNRTHPLDSFSQKVQLKKGMLYTFSAWLQVSEGSDTVSVMFKTKRNEMVRGGQVIAKXXGCWTLLKGGIAANXLSPVEILFESKNSAEEIWADNISFTPFTXKQWEITYRRQH

SEQ ID NO: 150036 - protein, 56 aa, Glycine max
  unsure (1)..(56): unsure at all Xaa locations
  Clone ID: PAT_MRT3847_106503C.1.pep
RIGGLKENKIIXFWNDDIASPGGNLWTGVIINKPDGGDAYERVTNELAREDVTVGN

SEQ ID NO: 150037 - protein, 78 aa, Glycine max
  Clone ID: PAT_MRT3847_106504C.1.pep
TSINSPHQNKYNFSMKHNTTTPSIDTFSQTPNKCLPKIPTLFKPTILNHYPPISKESQLYNLSTINNSFIYMPPSPSE

SEQ ID NO: 150038 - protein, 76 aa, Glycine max
  Clone ID: PAT_MRT3847_106505C.1.pep
ALIKSTSSLRDALLPQDVPSLAIPLLLLIAQHRSLVVIISDAPYIKMVSEQFDRCHGTLLHYVEFLCSAFTPASNY

SEQ ID NO: 150039 - protein, 140 aa, Glycine max
  Clone ID: PAT_MRT3847_106506C.1.pep
MKKATRIVSIFVISMLCFQELIHVSSSPFLYAHQVYEESSGGRNLKQEQEQEQKHAQEVHCSRERSRAARKVIEEYLTPFMERENYQLSSKCKLHPENDIFTDQEEHKIYIDRHEWRCGYCKKSFREEKFLDQHFDSRHY

SEQ ID NO: 150040 - protein, 83 aa, Glycine max
  Clone ID: PAT_MRT3847_106507C.1.pep
IRYAILVLKCLMPLYHPHILIPPIILFPRDILYISFVTLVFVFFFLLHLRILLLFLFTIVTFTFQIFFFLLEPLALSSSNKLE

SEQ ID NO: 150041 - protein, 37 aa, Glycine max
  Clone ID: PAT_MRT3847_106508C.1.pep
FSSEDRRSSQDLSLHPWPVNLNHLSHKARQGILATPS

SEQ ID NO: 150042 - protein, 89 aa, Glycine max
  Clone ID: PAT_MRT3847_106509C.1.pep
QDKLQRLTLQRCRNMSWLSGLRELKPLLHLLLPLSIHWVAGEMTVFVLVDVTTSALCPGESTCSKVIYINGIHQTIVGIFRMVVLPLFR

SEQ ID NO: 150043 - protein, 146 aa, Glycine max
  Clone ID: PAT_MRT3847_10650C.1.pep
GKPRVSVGLKTVMMVEVKRKEPDTETSPGDDTTRHTKKTKVQPGETFFAVKVTDNINTSSPSFTPSACKDIQPMLDSEKTPSSDSKGSAGNAAPSNYSSIVDPHSPQGNGSPQSQPSVSTNRSISDVDSAVQMLEGRLRGHCTCGP

SEQ ID NO: 150044 - protein, 103 aa, Glycine max
  unsure (1)..(103): unsure at all Xaa locations
  Clone ID: PAT_MRT3847_106510C.1.pep
EQPSHDEARPLLHQSQPIFERPTPPDTPEFLLGWTADGLPLDHGNAMGHTMGRAQGNSSICAXLGRTDHFCSSDLEVCLLGNEAPCVLHGNNVERLESAPGTF

SEQ ID NO: 150045 - protein, 43 aa, Glycine max
  Clone ID: PAT_MRT3847_106511C.1.pep
LLQGTRQLFVTHASHSVRNEISSAEDDLSTVGDSTKAPIRTRS

SEQ ID NO: 150046 - protein, 74 aa, Glycine max
  Clone ID: PAT_MRT3847_106512C.1.pep
QQLLTYLIDHSDPTRGNTHYTMTLIFKLCSVTGWPGPATIFLWTMCPHWVGPTGMHSTDVLLHFHVEVSIVAPT

SEQ ID NO: 150047 - protein, 98 aa, Glycine max
  unsure (1)..(98): unsure at all Xaa locations
  Clone ID: PAT_MRT3847_106513C.1.pep
EAEDSFADITHCTVSIKLRSRTHIVLECVNNANCXLCYHHKKIFNFDHYIXSPFFSLTANGLVLCRYMLTNCINYNYTYHSTLPIFRLIIHIADYALL

SEQ ID NO: 150048 - protein, 39 aa, Glycine max
  Clone ID: PAT_MRT3847_106514C.1.pep
FKENLGNFSHQLTCCRTNVSHSNYSISYSNHINAIIWAK

SEQ ID NO: 150049 - protein, 52 aa, Glycine max
  unsure (1)..(52): unsure at all Xaa locations
  Clone ID: PAT_MRT3847_106515C.1.pep
LLTNKLTHFNIYDMVAFKFELGLPKVLEKXSYXPRQPTRPPKRPSTRGRTRG

SEQ ID NO: 150050 - protein, 60 aa, Glycine max
  Clone ID: PAT_MRT3847_106516C.1.pep
GARIRGATEAVVHGGILVKRGFRYTAGIEHLDPAFLHLEIGFQAPPLSWPVRGCFMPEPF

SEQ ID NO: 150051 - protein, 102 aa, Glycine max
  Clone ID: PAT_MRT3847_106517C.1.pep
SLVALLVNWGIPPRFYVSNILVFFPRCASPKVFFFYDPTLFVSLECFSFYSGGGGVFPVPFWKMVSILCSRRPKKKNFFFPPPQKVCSGFLRPDSWNKSVKN

SEQ ID NO: 150052 - protein, 40 aa, Glycine max
  unsure (1)..(40): unsure at all Xaa locations
  Clone ID: PAT_MRT3847_106518C.1.pep
HRVQILFQXTGRTVKCDRFVIVNHLDICNCYHYQLPEGRS

SEQ ID NO: 150053 - protein, 73 aa, Glycine max
  unsure (1)..(73): unsure at all Xaa locations
  Clone ID: PAT_MRT3847_106519C.1.pep
MPIRNISVXRPEEATHPDTLKAALAEFISTFIFLFAGSGSGIAYNKLTDNGAATPVGLIFAYIVHAFALFFDV

SEQ ID NO: 150054 - protein, 50 aa, Glycine max
  Clone ID: PAT_MRT3847_10651C.1.pep
GTFGFLVSLFWGANRSFLASIGGCLVQLVVKEIANGDQPVKADAIPKGNF

SEQ ID NO: 150055 - protein, 103 aa, Glycine max
  unsure (1)..(103): unsure at all Xaa locations
  Clone ID: PAT_MRT3847_106520C.1.pep
IIPDPEVNFVRQKKNVQCFIIASDGFWDVMTNEEAWWVAKKVIFFWHKKYGVTGTTGLSEGADPQAQSPAEYLFKLAIDKKXQDNIFVIVIDLEAQRKIKRKP

SEQ ID NO: 150056 - protein, 134 aa, Glycine max
  Clone ID: PAT_MRT3847_106521C.1.pep
TTDCIQTFKPPPPLRGGDASVNSVHIFPKNTDHIVVCNKTSSIYIMTLQGQVVKSFSSGKREGGDFVAACVSPKGEWIYCVGEDRNIYCFSYLSGKLEHLMKVHEKEVIGVTHHPHRNLVATFSEDCTMKLWKP

SEQ ID NO: 150057 - protein, 99 aa, Glycine max
  unsure (1)..(99): unsure at all Xaa locations
  Clone ID: PAT_MRT3847_106522C.1.pep
FALGWGHAPGEGWPPPLGGFLGDPXFLRTFLFASLRFDVGWVVPLSVPPVLSFFDGRLLGSGDPQRVALFVPGGAPVPFLLVFGIFSPPSWAWGEGWEP

SEQ ID NO: 150058 - protein, 513 aa, Glycine max
  unsure (1)..(513): unsure at all Xaa locations
  Clone ID: PAT_MRT3847_106523C.1.pep
MSTLEIEARDVIKIVLQFCKENSLHQTFQMLQNECQVSLNTVDSIETFVADINSGRWDAILPQVSQLKLPRNKLEDLYEQIVLEMNELRELDTARAILRQTQVMGVMKQEQPERYLRLDHLLVRTYFDPNEAYQDSTKEKRRAQIAQALAAEVTVVPPSRLMALIGQALKWQQHQGLLPPGTQFDLFRGTAAMKQDVDDMYPTTLSHTIKFGTKSHAECACFSPDGQFLVSCSVDGFIEVWDYISGKLKKDLQXLAEEVFMMHDDAVLCVDFSRDSEMLASGSQDGKIKVWRIRTGQCLRRLERAHSQGVTSVSFSRDGSQLLSTSFDSTARIHGLKSGKMLKEFRGHTSYVNDAIFTNDGSRVITASSDCTIKVWDVKTTDCIQTFKPPPPLRGGDASVNSVHIFPKNTDHIVVCNKTSSIYIMTLQGQVVKSFSSGKREGGDFVAACVSPKGEWIYCVGEDRNMYCFSYQSGKLEHLMKVHEKEVIGVTHHPHRNLVATFSEDCTMKSWKP

SEQ ID NO: 150059 - protein, 51 aa, Glycine max
  Clone ID: PAT_MRT3847_106524C.1.pep
GIITLFLLAHITTTFEVRWPPRAQSWKDPKHNCCYHLTTWKQKTKKSPHGF

SEQ ID NO: 150060 - protein, 89 aa, Glycine max
  Clone ID: PAT_MRT3847_106525C.1.pep
NKHKSKTGRKAERQKYQQKYYRSSDGIGTKYSSINDLKPSLLLPLRHRRKNQTSLGIYGRQHWHCLSQSVIQHQTSLNKSLGKTLMDST

SEQ ID NO: 150061 - protein, 142 aa, Glycine max
  unsure (1)..(142): unsure at all Xaa locations
  Clone ID: PAT_MRT3847_106526C.1.pep
KVTRSDPMHSWWESVXKARSRIHALVGILRSSCYDSVCSLADFDRPALSLLSSPDDYSAGCCSLSGSHLDPLCHWLYDTFLSSDPHLRLVVLSFVHLLAGLYLSRIHSPEPPALAGFEAVLLDLYAVXTRSRNGKPLVVTIP

SEQ ID NO: 150062 - protein, 57 aa, Glycine max
  unsure (1)..(57): unsure at all Xaa locations
  Clone ID: PAT_MRT3847_106527C.1.pep
NXGFFYHKRKFQKTEHSTQFSKFIYPNLHLKLYNYPTSINLTLTTKSLNLGNSLKVK

SEQ ID NO: 150063 - protein, 146 aa, Glycine max
  Clone ID: PAT_MRT3847_106528C.1.pep
RQAHNRNKTKKGATQIKAGPKKKKRRTMSHHTETPKPNRQQEHYGRKKNKLSEPHGKEATNNKGTGTTRGGTKNKKHITAEENQGKLKGGTREREQMQTKQTLKGAKRKHHKMGKPTTQGEHRKKQNQKKRKAKNPTEKEGEDTMS

SEQ ID NO: 150064 - protein, 74 aa, Glycine max
  Clone ID: PAT_MRT3847_106529C.1.pep
AAQNPFISLLRPLKGEYPRECWQMRFSLVTDAFSDMSRMSSSFLSQGELVIGQAVTSYLSHMRSRKERYVVARP

SEQ ID NO: 150065 - protein, 38 aa, Glycine max
  Clone ID: PAT_MRT3847_10652C.1.pep
MNGMESPLSKATTPSKLKLAYKAHVLYMNKNKLTLNYL

SEQ ID NO: 150066 - protein, 61 aa, Glycine max
  Clone ID: PAT_MRT3847_106530C.1.pep
ASLATLTNPQPAALNGLAGSSISGTKLSFKPSRHTVQSKNFRSGALVSKFGHKSVFFALPD

SEQ ID NO: 150067 - protein, 56 aa, Glycine max
  unsure (1)..(56): unsure at all Xaa locations
  Clone ID: PAT_MRT3847_106531C.1.pep
AMVPLLAASFIREYKVRLGVSVAAVTYALMVFGWIGALRXKAPVLRSALTVLIVGW

SEQ ID NO: 150068 - protein, 46 aa, Glycine max
  Clone ID: PAT_MRT3847_106532C.1.pep
RGRVSQQQWCTSRAQKSKGYFKSYQVKVQELKRGKRPVSVSGRRLI

SEQ ID NO: 150069 - protein, 56 aa, Glycine max
  Clone ID: PAT_MRT3847_106533C.1.pep
CTKANYCTCRIGETFSKDYTTSVYAADRGRVPAQHSRTNMWGYRSLDLLAGRCCHY

SEQ ID NO: 150070 - protein, 81 aa, Glycine max
  unsure (1)..(81): unsure at all Xaa locations
  Clone ID: PAT_MRT3847_106534C.1.pep
PKVRVKLNIKEPRFGWSGPXHTHASIGTIQAINANGKLRIYTPEGSKAWMLDPSEVEVVEEKGFCIGDWVKVKALVSPPPT

SEQ ID NO: 150071 - protein, 34 aa, Glycine max
  Clone ID: PAT_MRT3847_106535C.1.pep
ARCYRNSNRGQHQALTEVQYIIGIITCAQFVLYG

SEQ ID NO: 150072 - protein, 203 aa, Glycine max
  Clone ID: PAT_MRT3847_106536C.1.pep
DCNMSSLKLQKRLAADVLKCGRKKVWLDPNETNEIGNTNSRQNIRKLVKDGLIIKKPVAVHSRARVRKNTEARRKGRHSGFGKRKGTANARTPQKDLWVDRMRVLRRLLKRYRETKKIDRHLYHTLYMKAKGNVFKNKRVLMEFIHKKKAEKARAEMLSDQAEARRTKVREARKRRADRITQKKQELLQTYQREDEAAAAQKK

SEQ ID NO: 150073 - protein, 29 aa, Glycine max
  Clone ID: PAT_MRT3847_106537C.1.pep
WAGYQAFNVIEARMDMLITMNHIIYYYCL

SEQ ID NO: 150074 - protein, 55 aa, Glycine max
  Clone ID: PAT_MRT3847_106538C.1.pep
SIAIAPCSKELIHPEPLVNESHKVFFLFAIHPGILCGTKFWYKKTELVVVKSWTY

SEQ ID NO: 150075 - protein, 88 aa, Glycine max
  Clone ID: PAT_MRT3847_106539C.1.pep
APSNLYFSAIGTNAENNQRNFLAGSQPHVLSQTPSPVQELAFPGSAPAVHKLFKNQTASYFVDAQPNKKEDGNKGTKGPLSSILRAVC

SEQ ID NO: 150076 - protein, 145 aa, Glycine max
  Clone ID: PAT_MRT3847_10653C.1.pep
MATTGALCGTMLNTSFLKRQASVNMTSFKANAAVFGVKGGRGGRVRAMATYKVKLITPEGEQEFECPDDIYILDQAEENGIDLPYSCRAGSCSACAAKVVSGKLDQSDGSFLDDDQIDAGFVLTCVAYPTSDIVIETHREEELTA

SEQ ID NO: 150077 - protein, 42 aa, Glycine max
  unsure (1)..(42): unsure at all Xaa locations
  Clone ID: PAT_MRT3847_106540C.1.pep
FIEHNXICMIDFHWLGVHAVFELCPIPLWITTCYDKLMRGIS

SEQ ID NO: 150078 - protein, 94 aa, Glycine max
  Clone ID: PAT_MRT3847_106541C.1.pep
IARGTISLCVERGMVDEGGVDYVDRAHVTLSFGKLSQPDTPLEPIHNADTCMLFQYQIRQRPSFCLLLFHGSAQLPTTSLILYYSYFFIDDRSR

SEQ ID NO: 150079 - protein, 156 aa, Glycine max
  unsure (1)..(156): unsure at all Xaa locations
  Clone ID: PAT_MRT3847_106542C.1.pep
VVRLREDDRRGKTESLIRHRLPNCWEHLNTLEFLDLSNNKLSGKIPQSMGTLVNLEALVLRHNNFIGDLPFTLKNCTRLDILDLSENLLSGPIPSWIGQSLQQLQILSLSVNHFNGSVPVHLCYLRQIHILDLSRNNLSKGIPTCLXNYTAMMEAE

SEQ ID NO: 150080 - protein, 78 aa, Glycine max
  Clone ID: PAT_MRT3847_106543C.1.pep
LYSGRPPLSFVRQNRKTTRLAPAVLSSGLQDAQDFLGDPPESILNRQKNSHTTAITESSLDDEYEPLDLGEKSIYRAC

SEQ ID NO: 150081 - protein, 43 aa, Glycine max
  unsure (1)..(43): unsure at all Xaa locations
  Clone ID: PAT_MRT3847_106544C.1.pep
ITGKLGLHSLRQRLWYIRSNCAFSVQGLXSHSDALSNNVASKT

SEQ ID NO: 150082 - protein, 329 aa, Glycine max
  unsure (1)..(329): unsure at all Xaa locations
  Clone ID: PAT_MRT3847_106545C.1.pep
MLKAVASGLVITSILICVSANDNGFPRCNCDDEASFWTIESILECQRVGDFLIAVAYFSIPIELLYFISCSNVPFKWVLIQFIAFIVLCGLTHLLNGWTYGPHTFQLMVALTVSKILTALVSCATAITLITLIPLLLKVKVREFMLKKKTWDLGREVDHIMRQKEAAMHVRMLTQEIRKSLDRHTILYTTLVELSKTLGLQNCAVWMPNVDKTEMNLTHELNGRNFNLTIRITDPDVVRIKGSDGVNILSSDSALAVGSSRRFXRQDTVAAIRMPMLPGFGISMLRVWNFKGRAMLLRQACFPLVVFRRPARGNQEPRSWSNQELEILM

SEQ ID NO: 150083 - protein, 38 aa, Glycine max
  Clone ID: PAT_MRT3847_106546C.1.pep
SIKISTIKDRLPIWKMRVPAKKRHHIWNQVSCANLLGP

SEQ ID NO: 150084 - protein, 100 aa, Glycine max
  Clone ID: PAT_MRT3847_106547C.1.pep
MATANKTIYTHDTINNSLDLVMNSRKFNLIYYTAIKSLKIYKGKLIIIANNYPHLKKSIIEYYAMLDKVGVHHYNVNNVNLCTSCVKYYRVCCLNINDPG

SEQ ID NO: 150085 - protein, 78 aa, Glycine max
  Clone ID: PAT_MRT3847_106548C.1.pep
MRELHEGTVAITLHNGLLIIHSQRIPYPILHSFGYRAIALLNFAVNSQAHICAWLLYPATSIPHSLWTRPGFEHQLVS

SEQ ID NO: 150086 - protein, 57 aa, Glycine max
  Clone ID: PAT_MRT3847_106549C.1.pep
LETANTELSILAVDYPVDKVSCYVSDDGAAMLTFEAVAETSAFAGNWVPFIPMCGIR

SEQ ID NO: 150087 - protein, 56 aa, Glycine max
  Clone ID: PAT_MRT3847_10654C.1.pep
LSSNRLLFLYLNHNILFFLIYHQLPNPHFVHNTYQKIYNFLTISKTILTKNFHIFH

SEQ ID NO: 150088 - protein, 87 aa, Glycine max
  Clone ID: PAT_MRT3847_106550C.1.pep
DKLRGERGKGITIVIGLWKLETAEASCTVVDAPGPRDGIGNVIAGTSHAVGSERSIESATGRWVCGSGRTGQPRDLPPCSVSFGGCG

SEQ ID NO: 150089 - protein, 41 aa, Glycine max
  Clone ID: PAT_MRT3847_106551C.1.pep
TEPWWNACTYAMVDQRLMNLGPSPCHLIMQVVAIEILTNCK

SEQ ID NO: 150090 - protein, 52 aa, Glycine max
  unsure (1)..(52): unsure at all Xaa locations
  Clone ID: PAT_MRT3847_106552C.1.pep
LCGFHFAVQHIVGKQLLIKSSPDELIRPCXYQLLNDEGMPQHNKPFRKGSLY

SEQ ID NO: 150091 - protein, 89 aa, Glycine max
  Clone ID: PAT_MRT3847_106553C.1.pep
KFVELMTKIDRRSGKELEKEPKFLKNGDAGFVKMIPTKPMVVETFSEYPPLGRFAVRDMRQTVAVGVIKNVEKKDPTGAKVTKAAQKKK

SEQ ID NO: 150092 - protein, 60 aa, Glycine max
  Clone ID: PAT_MRT3847_106554C.1.pep
PRTACLQRRLTCVGAVTRPRLMDRGSWDHPGDAWRVLRVHHRAPLGQGLSSKVHSLASPL

SEQ ID NO: 150093 - protein, 108 aa, Glycine max
  unsure (1)..(108): unsure at all Xaa locations
  Clone ID: PAT_MRT3847_106555C.1.pep
RDMRQTVAVGVIKNVEKKDPTGAKVTKAAQKKKXIVRFGSSGDVVSYGYNKCWFLAPVSSFLGSMFFGHSLKSPPSSRNFCSQNWVLDRRWQDSFYHSVLMCCVCKNP

SEQ ID NO: 150094 - protein, 65 aa, Glycine max
  Clone ID: PAT_MRT3847_106556C.1.pep
VFVSITWFHRLFLGCRLSVLRVAHVARSCLSLCGVVSYVDCSSAWFATIRGQCHIFPPVSAGWWG

SEQ ID NO: 150095 - protein, 129 aa, Glycine max
  unsure (1)..(129): unsure at all Xaa locations
  Clone ID: PAT_MRT3847_106557C.1.pep
FLKNGDAGFVKMIPTKPMVVETFSEYPPLGRFAVRDMRQTVAVGVLKNVEKKDPTGAQVTKAAQKKXESCGLVHQGMSFLMVTXMLVSCPCVFSPPSSRNFCSQNWVLDRRWQDSFYHSVLMCCVCENP

SEQ ID NO: 150096 - protein, 86 aa, Glycine max
  unsure (1)..(86): unsure at all Xaa locations
  Clone ID: PAT_MRT3847_106558C.1.pep
ELMPKIDRRSGKELXKEPKFLKNGDAGFVKMIPPKPMVVETFFEYPPLGRFAVRDMRQTVAVGVIKNVEKKDPTGAKVPKAAQKKK

SEQ ID NO: 150097 - protein, 98 aa, Glycine max
  Clone ID: PAT_MRT3847_106559C.1.pep
MGSVDCYPSRVDDAAVVSLDSLPLGFRFRPTDEELVNYYLRQKINGNGREDWVIREIDVCKWEPWDMPGLSVVQTKDPEWFFFCPQDRKYPNGHRMNR

SEQ ID NO: 150098 - protein, 115 aa, Glycine max
  unsure (1)..(115): unsure at all Xaa locations
  Clone ID: PAT_MRT3847_10655C.1.pep
YYAQQIIFFQKKKLFLLFPXLLYYLLLGRLTTNDGGVQRXTPYYIYIMEIGYYKHINDNEFHQSIIMIHVFLVDELIITNACFKIXLAPXXXNYDELPFXTAYYDCXXFLGQDIN

SEQ ID NO: 150099 - protein, 122 aa, Glycine max
  unsure (1)..(122): unsure at all Xaa locations
  Clone ID: PAT_MRT3847_106560C.1.pep
SPPLGRFAVRDMRQTVAVGVIKNVEKKDPTGAKVTKAAQKKKXIVRFGSSGDVVSYGSNECWFLALVSSFLGSLFFGHSLKSPPSSRNFCSQNWVLDRRWQDSFYHSVLMCCVCENPCLPFC

SEQ ID NO: 150100 - protein, 56 aa, Glycine max
  Clone ID: PAT_MRT3847_106561C.1.pep
IIPTKPMVVETFSEYPPLGRFAVRDMRQTVAVGVIKNVQKKDPTGAKVTKAAQKKK

SEQ ID NO: 150101 - protein, 51 aa, Glycine max
  Clone ID: PAT_MRT3847_106562C.1.pep
MLGALLASGDHFSDEEIVDFLLALLVAGYETTSTIMTLAIKFLTETPWTVF

SEQ ID NO: 150102 - protein, 109 aa, Glycine max
  unsure (1)..(109): unsure at all Xaa locations
  Clone ID: PAT_MRT3847_106563C.1.pep
AVRNMRQTDAVGVIKNVEKKDPTGAKVTKAAQKKXESCGLVHQGMSYLMVTIXWFLALVSSFIGSLFFEHSLKSPPSSRNFCSQNWVLDRRWQDSFYHSVLMCCVCENP

SEQ ID NO: 150103 - protein, 122 aa, Glycine max
  Clone ID: PAT_MRT3847_106564C.1.pep
EADRKKANRRRNGKALKLAALNKKVIRGTHKHNTLKQNDKRRLATVDQEPNSGNKSCKMMGETSNYVRKTSYLETKTQGQETNIYSNHKKRHPLMNQTARFTSSSGQPWGPWLQREPSSARS

SEQ ID NO: 150104 - protein, 104 aa, Glycine max
  Clone ID: PAT_MRT3847_106566C.1.pep
KGNQLRNGLALKLAALNKNVIRGSHLHNTLEQNDKMSLASVDQKPISGNKSCEMMVETSYYEQKTSYLDTKTQGQESNLYWNHKKRHPLMNQTARFTCSSGQPW

SEQ ID NO: 150105 - protein, 94 aa, Glycine max
  Clone ID: PAT_MRT3847_106567C.1.pep
YQFYLYSFVQHLFLWCSYIFDQASLETLGIWITTQLQSFTIVFHNHSITVRPVSLNAFTLYKVPEMPSSIFLIASVEKSPFCSASWPASNHQNV

SEQ ID NO: 150106 - protein, 47 aa, Glycine max
  Clone ID: PAT_MRT3847_106568C.1.pep
LACPDILIADCVHLLFNLITNARFGFSLRIEQDDPRFKTIYPSCYLG

SEQ ID NO: 150107 - protein, 109 aa, Glycine max
  Clone ID: PAT_MRT3847_106569C.1.pep
LLKSFGFFRTLGGHPYNRNCLFQIGAKKAQFAWYLTKGGGSFPGGGFSKGEFSVMGAGPLGFNPPGLGFFGWGPTPAPGVKGVFKAALLVKWDPPPPGRKKKRDLGFFP

SEQ ID NO: 150108 - protein, 104 aa, Glycine max
  unsure (1)..(104): unsure at all Xaa locations
  Clone ID: PAT_MRT3847_10656C.1.pep
RIVNCEGRGLAAQEEPEVLITMGSXLMDCPGLAMSRAFGDFCLKDYGLISVPDVSYIIITPLDESVVLATXGVWDVLTNSEVINIVASAPRRPIAVNLLVKRAV

SEQ ID NO: 150109 - protein, 116 aa, Glycine max
  Clone ID: PAT_MRT3847_106570C.1.pep
FKVLDSGAKKIKTDTPHVINGDLALRKGPHASGKKGQGKGVYQLVHLHGANVDGYSPIYDTKDCSPTGDGYAGGTTGWPIWSVTLLTLLAGGALLVYNTDALAQHTLRIDDLSSYL

SEQ ID NO: 150110 - protein, 44 aa, Glycine max
  unsure (1)..(44): unsure at all Xaa locations
  Clone ID: PAT_MRT3847_106571C.1.pep
FLFXLGGGGSFLRISGFFLCGVIHKKFYCLXXFLSGRVGSIGFF

SEQ ID NO: 150111 - protein, 108 aa, Glycine max
  Clone ID: PAT_MRT3847_106572C.1.pep
DCGCATLPSKTWHMYDKHPLSLNYFVEGSLREHECGICNEKMSPKQWFYYCDDCDSGAHPSCVVGKSRRVKFGRSFKYDVHSHPLALVEETEQNNECGACGERCNGWT

SEQ ID NO: 150112 - protein, 95 aa, Glycine max
  Clone ID: PAT_MRT3847_106573C.1.pep
PHWTVQSRMERRGKKKEEKETPKNQKDSILMSIKLIRFHASKEKQHHKFHKPYIFNNNIFNIYAQQGKKFTYGSQVTTLDKLVNRQRESDHTQII

SEQ ID NO: 150113 - protein, 114 aa, Glycine max
  Clone ID: PAT_MRT3847_106574C.1.pep
NAINLGTLDSIVLSLKEKGKNPTRGISMKKKEKKAYINWEDNDMDSSSDSENEIINLGLMAKDYESGEEVMSSNYDLSISFYELEDAFNDLHKESVKLSKLVSYSKKTISSLEN

SEQ ID NO: 150114 - protein, 98 aa, Glycine max
  unsure (1)..(98): unsure at all Xaa locations
  Clone ID: PAT_MRT3847_106575C.1.pep
NSRFQLLXTTTXGDFVQGKDLAXVKVNVACAAXGLTSSYTPTPLLEXSGLXKDRXXSSRNLERSPYXAPXRXSSPQXXXGLAXNFPFDXNXGXRWXKA

SEQ ID NO: 150115 - protein, 81 aa, Glycine max
  Clone ID: PAT_MRT3847_106576C.1.pep
YSVRMTINGSCEDVPWHFLRLKLEYIFGLTLQSLQSRVICIQNITLVYVHCSENSTRHMLCQLNHSHPRYGFFHLHHPQAF

SEQ ID NO: 150116 - protein, 68 aa, Glycine max
  Clone ID: PAT_MRT3847_106577C.1.pep
KLIWGHPQSKLLNAFKQQLFLKILLPLNPLDNPFHFSVLTHLYSFLVSFKSGCKVQHLLTSFFIGSMP

SEQ ID NO: 150117 - protein, 68 aa, Glycine max
  unsure (1)..(68): unsure at all Xaa locations
  Clone ID: PAT_MRT3847_106578C.1.pep
AXWXIPHQLXIWXKKGYINXAGQLSSHKLVLKLRQKFKFHKLKKYTYLWRISHYDFVWLHILENASHV

SEQ ID NO: 150118 - protein, 233 aa, Glycine max
  unsure (1)..(233): unsure at all Xaa locations
  Clone ID: PAT_MRT3847_106579C.1.pep
RIGVDDHDSYNELCDFIYXVSSLSPTKHFIIHSRKALLNGISPAENRSIPPLKYEYFYGLLRDFPDLRFTINGGISRVDEVSAAREAGAHGVMVGRAAYNNPWQILGHVDAAIYDKPSCDLTRRQVLEKYLVYGDSVLGKYGHRSTLRDVVKPLLHLFHSEPGNGLWKRKADAAFKNCTTIESFFEETLVAIPDSVLDSLVAESPPGRDLFANMHNLLPPPYRTREEAIIICA

SEQ ID NO: 150119 - protein, 108 aa, Glycine max
  Clone ID: PAT_MRT3847_10657C.1.pep
INGNYHVEKDMVHWLQKSLSAKAGISHMPSPLGSDCSSRSSPKVQVTHCRKRLNHFTKSKSLRSPVSKILENSEIKSNGIANIARHRTYQKSLLNDLSNKGTHSDITS

SEQ ID NO: 150120 - protein, 87 aa, Glycine max
  Clone ID: PAT_MRT3847_106580C.1.pep
ILGPINVGFFPDPQGILFKGTCLSAKVCSSPHHFATVVPRPGFLNDGGQIAFIQLGFKVLCLSEPLIPLLLSPASFRTLLRCVALDY

SEQ ID NO: 150121 - protein, 105 aa, Glycine max
  unsure (1)..(105): unsure at all Xaa locations
  Clone ID: PAT_MRT3847_106581C.1.pep
EYGVEQVKEDKKDGVEAVNEDKKQDRVEEVEEDKEVDGVKEVIEDKEVDDVKEVKXDKAIDGVKQVVADKKGDELKEIEEDKKDDHISETDKMDEGTKVKETIEG

SEQ ID NO: 150122 - protein, 102 aa, Glycine max
  unsure (1)..(102): unsure at all Xaa locations
  Clone ID: PAT_MRT3847_106582C.1.pep
SFVRAWGLDLPXGNIPSVWTSTDERLVGTQHELDEPCLGGIQLLAATTVPGQEETLYKVAQDRGQEWFVGDDHVDIFEEVNIRAVLHMLDGSDFMERIAIAT

SEQ ID NO: 150123 - protein, 101 aa, Glycine max
  Clone ID: PAT_MRT3847_106583C.1.pep
VSGILKWTMSYKQSSKHLSLSIGRNRKGGELSQQSRLPRGIEGNLHILPASVLMSSRIGDAQLIVDLLLLQHELRSHRPLQIYSPSRFVPVLPMSELSGGP

SEQ ID NO: 150124 - protein, 267 aa, Glycine max
  Clone ID: PAT_MRT3847_106584C.1.pep
MVDLSTVHRTEKRVLLASHQLINWSVAGFSMVLPLFSENSLLSRLTSIFLGFAPPFLLLSIGYEAIFYAALALVLMAWILFENTILNLNIVNKSSDSTKSVTNHLIHGSDNRSLQLSDVRIPLVFMVLFNVAFFGTGNFASIASFEISSVYRFITIFSPFLMAALLIFKLFIPFLLVICVFSAITKLNQVPRLGCYFLVILFSDMMTIHFFFLVRNTGSWMEIGNSISHFGIMSAQVVFVLLLFALTNTYTKDIHCNSAVSSTRKAN

SEQ ID NO: 150125 - protein, 148 aa, Glycine max
  Clone ID: PAT_MRT3847_106585C.1.pep
ACCRGRCRRRRIETLISTTPILSHMAIRNISSNNLRFFSIPHSACSTFLFSHFFSNTTPFFSPPHLSSSLLFSTPKHPFASSSTFRSNIHNGHAHFHTRMSFCTYTPYWGRPHATSEQFYQIIALIREDVDELGSKLNSMNVSLSDAS

SEQ ID NO: 150126 - protein, 161 aa, Glycine max
  unsure (1)..(161): unsure at all Xaa locations
  Clone ID: PAT_MRT3847_106586C.1.pep
VMNILKPKPNPQQLLRDWQRRLRQECRNIERQIRXEEKNVQKAIREAAKRNDMGSAKALAKELVRSRQTVNRLYENKAQMNSISMHLGESVAIARTVGHLSKSAEVMKLVNNLMKAPEMAVTMQEFSKEMTKAGVIEEIVNDAVDSALDSEDIEDEIEEEV

SEQ ID NO: 150127 - protein, 164 aa, Glycine max
  unsure (1)..(164): unsure at all Xaa locations
  Clone ID: PAT_MRT3847_106587C.1.pep
RVYGDDXLISVHEYVKPYFSGSKLKRFLAGHNITITDGIDKACATLQIRKSANXDFIKRDCTQMCHVLWTDTDDTASLWALQHSESCPHLGKQDAYIDNLGTELRELNVHSSEEASQLITIALSRIEWLPKDCVPTIAQIEEIHSMRWMMNAADYMITQTTADF

SEQ ID NO: 150128 - protein, 227 aa, Glycine max
  Clone ID: PAT_MRT3847_106588C.1.pep
MEKVMNILKPKPNPQQLLRDWQRRLRQECRNIERQIRDIQREEKNVQKAIREAAKRNDMGSAKALAKELVRSRQTVNRLYENKAQMNSISMHLGESVAIARTVGHLSKSAEVMKLVNNLMKAPEMAVTMQEFSKEMTKAGVIEEIVNDAVDSALDSEDIEDEIEEEVDKVLTAIAGETAAQLPEAVRKERVKLPAQSVGAEEDAIAEGVDDEEEMEEIRARLAKVRS

SEQ ID NO: 150129 - protein, 94 aa, Glycine max
  Clone ID: PAT_MRT3847_106589C.1.pep
MEKVMNILKPKPNPQQLLRDWQRRLRQECRNIERQIRDIQREEKNVQKAIREAAKRNDMGSAKALAKELVRSRKTVNRLYENKAQMNSISMHLG

SEQ ID NO: 150130 - protein, 155 aa, Glycine max
  Clone ID: PAT_MRT3847_10658C.1.pep
ASLNECKNIAFQALKVNESKCTHMKCTFGGIWNGGGGDGQKNLFVASFFFDRAAEAGFANPNLPVVKVRPVDFEAAAKQACKTKLEDAKSTYQRVEEGNLPYLCMDLLYQYTLLVVGFGLDPWQQITLVKKVKYHDAFVEAAWPLGSAIEAVSST

SEQ ID NO: 150131 - protein, 64 aa, Glycine max
  Clone ID: PAT_MRT3847_106590C.1.pep
MFSPNVESLQEALEAVVKEGPQRLARRGKACREYAAKMFTARKMALAYERLFLCIKDRSFCTYP

SEQ ID NO: 150132 - protein, 348 aa, Glycine max
  Clone ID: PAT_MRT3847_106591C.1.pep
MCQALSAPSPPCTALLSFLFFLLTVVGPVSVSAWRPWPQKNNMNTTDYAFGDSKKYEGSSEFVKLRYHMGPVLTTNITVHTIWYGKWERNQKKIIREFINSISAANSAHPSVAGWWRTVQLYTDQTGANISKSVRLGEEKNDRFYSHGKSLTRLSIQTVIKSAITAKTRPLPINPRSGLYLLLTADDVYVQDFCTSVCGFHYFTFPSLVGYTLPYAWVGNSAKFCPGQCAYPFSVPAYIPNRKPFKSPNGDVGVDGMISVIGHEMAELATNPLANAWYAGQDPSFPVEIADLCEGIYGTGGGGSYTGQVFDARDGATYNMNGIRRKFLVQWLWSHVLNYCTGPNALDH

SEQ ID NO: 150133 - protein, 348 aa, Glycine max
  Clone ID: PAT_MRT3847_106592C.1.pep
MCQGLSAPSPPCSALLSFTLLLLLLSVVGPVSAWRPWPQSNKMNISDYAFGDSKKYEGSSEFVKLRYHMGPVLTTNITVHTIWYGKWERSQKKIIREFINSISAANSPHPSVAGWWRTVQLYTDQTGANISKSVRLGEEKNDRFYSHGKSLTRLSIQSVIKSAITGKTRPLPINPRSGLYLLLTADDVYVQDFCTSVCGFHYFTFPSLVGYTLPYAWVGNSAKFCPGQCAYPFAVPAYIPNRKPFKSPNGDVGVDGMISVIGHEMAELATNPLANAWYAGQDPSFPVEIADLCEGIYGTGGGGSYTGQVLDARDGATYNMNGIRRRFLVQWVWSHVLNYCTGPNALDH

SEQ ID NO: 150134 - protein, 179 aa, Glycine max
  unsure (1)..(179): unsure at all Xaa locations
  Clone ID: PAT_MRT3847_106593C.1.pep
ANPHITXVGRLPGHSVYRNATQKXQSYTYKGSVIDGVYAPLDLAYTRYIKDRLRKXEVDVDRCQRRAPEVQRIVFVILCIAPLTAIDYSGVQARKDLNRELNSRGSHIAICNTSPEVPLSLSRPCAVELIGKEWYFVXRVHYRVRVCGQHVHSLKGASSSPQAPFSTVGDQTKFVCSSI

SEQ ID NO: 150135 - protein, 204 aa, Glycine max
  unsure (1)..(204): unsure at all Xaa locations
  Clone ID: PAT_MRT3847_106594C.1.pep
MVVNERPSKRMKRRVTADLRDFLTFPEPGVTASGQPFRNCVQRFLSDHARITFPPSLFXSSLMTWQILFRVGDIVSGPDLSPAMVTLDIVEEDVPRCRTSVYCEPCRVVGWSGLPVCRNRSPFIIRVASDAVETXSRPCSRCGNLLQFSETRCRXCNFAITVDDLEEXWVYLQIENNHHLLXHGVVHXNGYGHXLLTLNGRKRW

SEQ ID NO: 150136 - protein, 57 aa, Glycine max
  Clone ID: PAT_MRT3847_106595C.1.pep
VCYLRRINLGCTRFYHASCSTPPPSLLFSCDRINPVLHRIHVCVTLAPLSRQNTIYS

SEQ ID NO: 150137 - protein, 297 aa, Glycine max
  Clone ID: PAT_MRT3847_106596C.1.pep
MDPLRGSEPENPTATCLSMLSLRRFSACRDFARRLPPSDFVARVLAVADVLSASDFYSVLQLRPSDGGNRDLARRQYAKLALLLDPTNPDKLPFSDEALARVQEAWHVLSHPERRTRHDREQNANANPRRTTTSFWTACPYCWNLFEYEKRYEDCALLCQVCGKAFQGVPVKPPTKTGDAVVEGEELRQYYSCEASVPLMYYEVKGNNGLGGQNIAQFVYISDDDNDDGGFVKNEGLQQGIREKRRMRVKTVANKVAGNRRRRPIDGGDSDFDLDVEDGELEFTEGDDDAFVGLKFD

SEQ ID NO: 150138 - protein, 51 aa, Glycine max
  Clone ID: PAT_MRT3847_106597C.1.pep
FFKSRMPGEDPLRFGTPKLFCRTSSQVMDRMSICCISYMRQCEIPPPIASP

SEQ ID NO: 150139 - protein, 47 aa, Glycine max
  Clone ID: PAT_MRT3847_106598C.1.pep
STNYRGTSDGYFSSINGKDPSELFPTEALSGPPPQEKGFILSVRPTF

SEQ ID NO: 150140 - protein, 96 aa, Glycine max
  Clone ID: PAT_MRT3847_106599C.1.pep
PISTTSMPMDRYPLEVSSTFKISGGNNNNNNSNSTLDRFDSSITSSDMMGMGYFPFQHLNYGSNMGLTTTPNNTPLCFMPSSTSSQMMSELNSTML

SEQ ID NO: 150141 - protein, 69 aa, Glycine max
  Clone ID: PAT_MRT3847_10659C.1.pep
HITPRAQEGMWRRWRCAHPIRSDSPQAYDATGSTPGIPTIQNHFCRNILFPRYVGGLSSVVERYFFSLP

SEQ ID NO: 150142 - protein, 175 aa, Glycine max
  Clone ID: PAT_MRT3847_1065C.1.pep
MSKREEFAPWHFFFLLLLLWGFVGGDAPGREVWCVAKNNAEDTALQSAVEWACGAGGADCGAIQGGGPCFDPSSMQNTASYAFNDYFRKHAISEENCNFGNNAAITSFNPSFGNCKLPSSLLVNNGSFSGSVSSMGLMPGEETSGCGGVVWRWWLAPFIVTTHFLFMLVSISRIV

SEQ ID NO: 150143 - protein, 61 aa, Glycine max
  Clone ID: PAT_MRT3847_106600C.1.pep
RAGVCALGAVIARHNGDERVLDYYQRRFVLFILYPCDNSNLHMKSTCLTAFHIIAFAYNTL

SEQ ID NO: 150144 - protein, 42 aa, Glycine max
  Clone ID: PAT_MRT3847_106601C.1.pep
GKITVCQYSVTNLRVLSYYFADNKPFRIFGCYICTKSITYLL

SEQ ID NO: 150145 - protein, 100 aa, Glycine max
  Clone ID: PAT_MRT3847_106602C.1.pep
VWGFFFFFLHKRRREQFFLKQKEPTKKKTPTPKTKPKQNTKTKKAKDDHPQKRMPAQKKKKSRVTLEPKSKIIIKTINKPKIKREPIQNKTDFRTPNFPR

SEQ ID NO: 150146 - protein, 407 aa, Glycine max
  Clone ID: PAT_MRT3847_106603C.1.pep
GWDCCPRIPGGASSASAPASSPVHGERNVACTELLPVRLNPQVTRTHALFCTVEPSIKNTLRSLLPSCSLIISDPPQNHEQQNLNQLGLLQIELEEVKKENQNLRSMLNEISEHYAALQNQLLLAMQQKKLSSSPRNNEDMQKDSQQNNMEKPALPSCRQFLNTGKINNRVILQEAKIVEEQAFEASCKKARVSVRARSESSLMGDGCQWRKYGQKISKGNPCPRAYYRCNMGTACPVRKQVQRCAEDESVVITTYEGNHNHSLPPAARSMACTTSAALKMFLSGSTTSSHGSTYSYSNSDLFSPLCTSTYYPSAAPSCPTITLDLTQTSKNNMKFPSAISSNHLQPFPLSLHGQPQQSEGILPSEKNLALVDVVSAAITNDPSLKAALEAAVSSIIGDSQKSLPTL

SEQ ID NO: 150147 - protein, 71 aa, Glycine max
  unsure (1)..(71): unsure at all Xaa locations
  Clone ID: PAT_MRT3847_106604C.1.pep
IFMSSFLAVNISLFSLSLSFSXFLFAKMGSEERLXHYQYAHKTGVFPXTAHYPKRTXQFEICLCLFLSRKI

SEQ ID NO: 150148 - protein, 64 aa, Glycine max
  Clone ID: PAT_MRT3847_106605C.1.pep
KKGSPPQSKKDHDPYYLDKKKKKPPPGASSLSESMGFFGAPMTQPPIRSIEIKQGIFWKAKKTN

SEQ ID NO: 150149 - protein, 333 aa, Glycine max
  Clone ID: PAT_MRT3847_106606C.1.pep
MEKLNLALVSSPKPLMLGHVPAIDATSRDVFRRKHFSFGRVLIAPHRCRFRVSALSSSHRNPKSVQEKLIVKHFASISSSNTQEATSTGVNPQLSPSPSSTIGSPLFWIGVGVGLSALFSVVASRLKKYAMQQAFKTMMGQMNSQNNQFGNAAFSPGSPFPFPMPTAAGPTAPASSATTQSRAPSASSASQSTITVDLPAAKVEAAPTTNVKDEVELKNEPKKIAFVDVSPEETVRESPFESFKDDESSSVKEAWVPDEVSQNGAPSNLSFGDFPGSQSTKKSALSVDALEKMMEDPTVQKMVYPYLPEEMRNPTTFKWMLQNPQYRQQLEEC

SEQ ID NO: 150150 - protein, 650 aa, Glycine max
  Clone ID: PAT_MRT3847_106607C.1.pep
MANNGSPKHKKMQKNLCTQLAVAVRSTQWSYGIFWAPSTTEERVLLEPNRLERLEIKTRKTVQAMELEMKADKIGLQRSEQLKELYKFLLAGEADPQTKRPSAALAPEDLSDLEWYYLVCMSFVFNHNQSLPGRALEIGDTVWLCNAQHADSKIFSRSLLAKSASVQTVVCFPYQKGVIEIGTTELVTEDPSLIQHVKACFLEISKPTCSDKSSSVLDKPHDDKYPTCTKGDQRVLEAMALENPCSLEENIKFDHDPINELQDGNNEDSNMDSPDGCQHHFPMDGSMIEGINGVPSQVHFVNEALVIGAPDSLSSCDCMSEASENQGNDSKNVDQTQLMELQYCHKPKRSSMDVGADEDLCYIRTLCAILGNSSTFKPNPYAGNSNCKSSFAKWKKGRVSERKRPKLHQSMLKKTLFNVPFMHRSYSSLKSQKENGRMKWTSKLENANDGFMEKTFSDKKRENKNFHVVKPMVPSSISEVEKISILGDTIKYLKKLETRVEELESYMEVTDPEARIRRKCPDVPEQMSDNYGTRKICMGMKPWVNKRKACGIDEIDTELERIVSEESKVLDVKVNVKEQEVLIEMKCPYREYILYDIMDTINNLHLDAQTVESSTSDGVLTLTLKSKFRGAATAPTRMIKEALWKVSGNT

SEQ ID NO: 150151 - protein, 300 aa, Glycine max
  unsure (1)..(300): unsure at all Xaa locations
  Clone ID: PAT_MRT3847_106608C.1.pep
MAFKNLSVLTLCVSLVLSFFAPNSIAANNRAVVPPETICNSTVNPSFCKTVLANQNGSIVDYGRISVRKSLSQSRKFLNSVNSLLQDRSSLSLPTIRALEDCQFLAELNFEYLTNALDTVDKASDVLPTAQAEDQQTLLSAVLTNEETCLEGLQQSTASDQRVKSDLISSLSDDKKLHSVSLDLFTKGWVAEKKISTSWQVNGRHLDFHNGRLPLKMSNRVRAIYASARGHGRKLLQDNSQSVLVSDIVVVSQDGSGNFTTINDAIAVAPNNTVANDGYFLIFITQGVYQXYISIAKNKK

SEQ ID NO: 150152 - protein, 93 aa, Glycine max
  unsure (1)..(93): unsure at all Xaa locations
  Clone ID: PAT_MRT3847_106609C.1.pep
AANTLISTAISPFPSLLSSSKSTFATTVPLSSFNITNTSSSHFSISTNXIPDHPRPPYLNNSAPNNFKFDPLRLNEVPENLEKFKESELIHYR

SEQ ID NO: 150153 - protein, 128 aa, Glycine max
  Clone ID: PAT_MRT3847_10660C.1.pep
MEEEKGRVCVTGGTGFIGSWIIKRLLEGGYTVNTTIRSDPGRKRDVSFLTNLPFASKKLRIFNADLSNPESFSEAIEGCIGVLHTATPIDLEVNEPEEIVTKRTIDGALGILKACLNSKTVKRVVYTS

SEQ ID NO: 150154 - protein, 123 aa, Glycine max
  Clone ID: PAT_MRT3847_106610C.1.pep
MTESEEAGAKPMNTLGGQVCQICGDNIGNNVNGDPFIACDVCAFPVCRACYEYERKDGNQSCPQCKTRYKRHKGSPAILGDQEEDGVADEGASDLNYNSENQNEKQKIEHSHWLPQGSPEGAD

SEQ ID NO: 150155 - protein, 302 aa, Glycine max
  unsure (1)..(302): unsure at all Xaa locations
  Clone ID: PAT_MRT3847_106611C.1.pep
MMESEGEAGAKPMKTLGGKICQICGDNIGNNVNGDPFIACDVCAFPVCRACYEYERKDGNQSCPQCKTRYKRHKGSPAILGDQEEDGVADEGASDLNYNSENQNEKQKIERMLGWQMAHGRAEEAVAPNYDKEVSHNHIPLLSGGQEVSGELSAASPERLSMASPGGRGKRVHNLQYSSDLNQSPNIRVGDPGLGNVAWKERVDGWKMKQDKNVAPMSTGQATSERGAGDIDASTDVLVDDSLLNDEARQPLSRKVSIPSSRINPYRMVIALRLVILCIFLHYRITXPVPNAYAXLWLISVI

SEQ ID NO: 150156 - protein, 54 aa, Glycine max
  unsure (1)..(54): unsure at all Xaa locations
  Clone ID: PAT_MRT3847_106612C.1.pep
MALPNQQTVDXPSIKLVIVCDMCTVKTTFVKRXLTVVFXNVYEPTIGVEVHPLD

SEQ ID NO: 150157 - protein, 45 aa, Glycine max
  Clone ID: PAT_MRT3847_106613C.1.pep
LRNDDRGSYFSIFGHLNTHAHITMQYYISVMVAFLFFTQSSLQIS

SEQ ID NO: 150158 - protein, 119 aa, Glycine max
  unsure (1)..(119): unsure at all Xaa locations
  Clone ID: PAT_MRT3847_106614C.1.pep
TGWLLKLPFPHCTAPRVKGMPISIRRGAGPKNAVLMNTPNAGLSLRGSFAGELXFEVLNTTLSYIKRTVTFXIALGNSADDTIYQEAAPHKLEQCGQTQERDRSKWAHEEFLTACVTQV

SEQ ID NO: 150159 - protein, 43 aa, Glycine max
  Clone ID: PAT_MRT3847_106615C.1.pep
LLARCVVPAMVVVIRPTKNPFCVKGRFYWYPCRAGFETSPTTY

SEQ ID NO: 150160 - protein, 40 aa, Glycine max
  unsure (1)..(40): unsure at all Xaa locations
  Clone ID: PAT_MRT3847_106616C.1.pep
VCVNRDLVVKRTHSARPLPYXXFXPLPKISYXKXLLXTFR

SEQ ID NO: 150161 - protein, 177 aa, Glycine max
  Clone ID: PAT_MRT3847_106617C.1.pep
MASLAASTAAASLGMSEMLGNPINFSGATRPAPSASSPASFKTVALFSKKKAAPPPPKKKPAAVSPANEELAKWYGPDRRIFLPEGLLDRSEIPEYLTGEVPGDYGYDPFGLSKKPEDFAKNQAFELIHARWAMLGAAGFIIPEAFNKYGANCGPEAVWFKVCKICQLSPLLNSLIH

SEQ ID NO: 150162 - protein, 99 aa, Glycine max
  Clone ID: PAT_MRT3847_106618C.1.pep
MAFLAASTAAASLGMSEMLGNPINLSGATRPAASACSPACFKTAALFSKKKAAPPKKAAAAATANDELAKWYGPDRRIFLPEGLLDRSEIPEYLTGEVT

SEQ ID NO: 150163 - protein, 53 aa, Glycine max
  Clone ID: PAT_MRT3847_106619C.1.pep
ELQIVLACKGITPLFVFILKPRIHFFQSNLTCFCCKDYHIHYVWEHGVMGNLI

SEQ ID NO: 150164 - protein, 123 aa, Glycine max
  Clone ID: PAT_MRT3847_106620C.1.pep
VSIKQKDRSAMSVGPGMDLPIMHDSDRYELVRDIGSGNFGVARLMRDKHTEELVAVKYIERGEKIDENVQREIINHRSLRHPNIVRFKEVILTPTHLAIVMEYASGGELFERICNARRFSEDE

SEQ ID NO: 150165 - protein, 93 aa, Glycine max
  Clone ID: PAT_MRT3847_106621C.1.pep
SSRLEYGCEKTTEGIEAISLYLNQRSSLASNDFSKFCNCGGKRDSIRQNANYSAKYVEVINTQQKQLEGMKYFFEETKLEVRQIQSEWGRSIE

SEQ ID NO: 150166 - protein, 109 aa, Glycine max
  Clone ID: PAT_MRT3847_106622C.1.pep
FIKNHVSKIFSGEYTVYVYLIFVLLGTCQGNSLKQFLSDETVNPGHAQGKKIGPSSFDGGVCASQCLLKSDCILGYETLKRILSMGARIIWFIQFRTSLTPADCGWPTG

SEQ ID NO: 150167 - protein, 289 aa, Glycine max
  unsure (1)..(289): unsure at all Xaa locations
  Clone ID: PAT_MRT3847_106623C.1.pep
MASLAASTAAMSEILGNPVNLRCATRSAPSPTTPATFKTVALFSKKKAAPPPPKKKPAAVSPANEELAKWYGPDRRIFLPEGLLDRSEIPEYLTGEVPGDYGYDPFGLSKKPEDFAKYQAFELIHARWAMLGAAGFIIPEAFNKYGANCGPEAVWFKTGALLLDGGTLNYFGKPIPINLIVAVVAEIVLVGGAEYYRIINGLDLEDKLHPGGPFDPXLGLAKDPDQAALLKVKEIKNGRLAMFAMLGFYFQAYVTGEGPVENLAKHLSDPFGNNLLTVIAGSVERAPTL

SEQ ID NO: 150168 - protein, 307 aa, Glycine max
  Clone ID: PAT_MRT3847_106624C.1.pep
MASLAASTAAASLGMSEMLGNPINFSGATRPAPSASSPASFKTVALFSKKKATPTPPKKAAAAAPANDELAKWYGPDRRIFLPEGLLDRSEIPEYLTGEVPGDYGYDPFGLSKKPEDFAKYQAFELIHARWAMLGAAGFIIPEAFNKYGANCGPEAVWFKTGALLLDGGTLNYFGKPIPINLIVAVIAEIVLVGGAEYYRIINGLNFEDKLHPGGPFDPLGLANDPDQAALLKVKEIKNGRLAMFAMLGFYFQAYVTGEGPVENLAKHLSDPFGNNLLTVIAGSAERAPTLKSFIFMFFSNLSKYIY

SEQ ID NO: 150169 - protein, 77 aa, Glycine max
  Clone ID: PAT_MRT3847_106625C.1.pep
NPLHPSKYSLSLLPRSLTTLTKTRVAQPILHGLYGSLKHRVSGALLRSGLSGLGSRKKSNNFRLGLGNSLLIKSSSF

SEQ ID NO: 150170 - protein, 72 aa, Glycine max
  Clone ID: PAT_MRT3847_106626C.1.pep
NLLKFEILIIIDHSSDHIYDQYKWNLMEHNEWLLAGFLWLMIIAVVYILMGICGDSYFLAIEYLSGGASYKY

SEQ ID NO: 150171 - protein, 124 aa, Glycine max
  unsure (1)..(124): unsure at all Xaa locations
  Clone ID: PAT_MRT3847_106627C.1.pep
ADRTIKKKKRGKIKKKTRNKKSNGEKKEKPPKTKQRNXEEEQGQRPQGKATLLKKKRLAAQPNQKPQKQKGPGRPCFFGRLKHHHHYGPSPLKKKGTESKPTPGMSPIQSKNWRLKKTRKSKGK

SEQ ID NO: 150172 - protein, 143 aa, Glycine max
  Clone ID: PAT_MRT3847_106628C.1.pep
MISITSTELNYLVFRYLHESGFTHSAFAFGYEAGIDKNKNDDSVVPPGALVTFIQKGIQYLELEANLSGAQSDADMDEDFSFLQPLDLITKGPTELHNIVKAKKENLRQHKFESNKIMNDLSQDDSRRERVQETGQEVKGKEN

SEQ ID NO: 150173 - protein, 106 aa, Glycine max
  Clone ID: PAT_MRT3847_106629C.1.pep
CIIYGRDLADNTHINQYMKYSGTRALHSPSAGIFHAGHTVYASFTLIQQGQAVAGPVKNVRPPCGSYLFTLSLHRSIGTLSISAGKHFLGTRMLICTHCVLRCTKY

SEQ ID NO: 150174 - protein, 45 aa, Glycine max
  unsure (1)..(45): unsure at all Xaa locations
  Clone ID: PAT_MRT3847_10662C.1.pep
HHTHYHXYHYHHSPIHTHTPNXHILHTHHLHYHNHHHHHLHNHTH

SEQ ID NO: 150175 - protein, 144 aa, Glycine max
  Clone ID: PAT_MRT3847_106630C.1.pep
MEMHPGDDMPMSNGRDHNSMKMHMSLYWGKDAIVLFSGWPKHSVGHYILAILFVFFLAIIAEVVSNKPNIKRGTNPIIGGLAQATFYVFRISLLYLVMLAVMSFNLGIFIAAVAGHTLGFFLAKSRALALANREQESSSDAQKV

SEQ ID NO: 150176 - protein, 35 aa, Glycine max
  Clone ID: PAT_MRT3847_106631C.1.pep
QNLGLFNFLIRKYFPKLNSKFYLNPLSYPLNFYEL

SEQ ID NO: 150177 - protein, 50 aa, Glycine max
  Clone ID: PAT_MRT3847_106632C.1.pep
GVHAYIRVKTEGFVQTPWSKLSNQSRILIPVFRPFAVFQIKEKFSQHTFC

SEQ ID NO: 150178 - protein, 78 aa, Glycine max
  Clone ID: PAT_MRT3847_106633C.1.pep
NRLFKYSYCYYCSWSSQKLKQSKVKNLISMILIHHNFTLKNKKKRKVSLEFIPNQSHIALIICSVFPLRRGCHENVLF

SEQ ID NO: 150179 - protein, 38 aa, Glycine max
  Clone ID: PAT_MRT3847_106634C.1.pep
IQRNNDHHDHIHHLNSNFYYMTYVFKYLTIKGQLKHFD

SEQ ID NO: 150180 - protein, 457 aa, Glycine max
  unsure (1)..(457): unsure at all Xaa locations
  Clone ID: PAT_MRT3847_106635C.1.pep
GCERRQKGKKAPLEYISSLESSQAGMTIKEYGKILIEHKPVETIQILIRLCTEDGDKRGRSNGVYMSMLPSPVDFLSIFIHHPQSLMDFLEKYTNKVKDSPAQVEIHNTLLELYISNELNFPSMSQVNDGGNYLNGASAKTMILSAQSNGNIGDHKNSEQEKNHLERLEKGLRLLKTAWPPETEHPQYDVDLAIILCEMNAFKDGLLYLYEKMKLYKEVSARYMQAXDHEGXIACCMRRGDSVKGGDSSLWADVLKYFGELGEDCSKEVKEVLTYIERDDILPPMIVLQTLSRNPCLTLSVLKDYIARKLERESKMIEEDRQAIEKYQEDTLAMRKEIQDLRTNARIFQLSKCTACTFTLDLPAVHFMCMHSFHLRCLGDNEKECPQCAPEYRSVLEMKKNLEQNSKDQDRFFQQVKSSKDGFSVIAEYFGKGIISKISNGSTSGPVSGTASSSSGF

SEQ ID NO: 150181 - protein, 65 aa, Glycine max
  Clone ID: PAT_MRT3847_106636C.1.pep
LPNWTSPQHRVFFIIKNQGSGVVRPPKNPLFFLNIFLGRGFYKKTTPLSGEKGWATYFMFSPPPL

SEQ ID NO: 150182 - protein, 60 aa, Glycine max
  Clone ID: PAT_MRT3847_106637C.1.pep
GERHGPKGEPPRPARENPPPAPRWPPPRAVANSDASEEIKRSMPSIGPSAILGPIFSLFH

SEQ ID NO: 150183 - protein, 167 aa, Glycine max
  Clone ID: PAT_MRT3847_106638C.1.pep
RRFIFFFDAQTHHGLTIRPKVLPRDLRANQLCHLKLRQCVQKLFASPSPKLTANVHETVAQNHATALLMPDVVEFKGLASFLTKCWQCFKFLTVQSGTCHANKLGRHAINMFITCLSIRKPANGPGLTVLHLLYLGMHMPRSGIHLSQLWCSVHYKITYPMVNWTFT

SEQ ID NO: 150184 - protein, 80 aa, Glycine max
  Clone ID: PAT_MRT3847_106639C.1.pep
TCKSYAMETKQRKNHQIKTNMNMQMRQQPRPHRRHNHHGHMLTTQGTTTAAVRVTVNATTTSTSSKGEEIDLEHKSLKKK

SEQ ID NO: 150185 - protein, 111 aa, Glycine max
  unsure (1)..(111): unsure at all Xaa locations
  Clone ID: PAT_MRT3847_10663C.1.pep
NKKKNIEAISSDFNLFQRHDWHNKYRNRTCIYYFSSTCLLLYVEFVMLIFTSNNTNESLQQGHGTGTDDIXTKSHLPFHRCHHYNKLIQFWFNFLKSRGQVPTLMIYEAKM

SEQ ID NO: 150186 - protein, 43 aa, Glycine max
  Clone ID: PAT_MRT3847_106640C.1.pep
QQLHTFLFTFSSKSQPFWECPINTIIFPIILLTFHLIHTFSLP

SEQ ID NO: 150187 - protein, 106 aa, Glycine max
  Clone ID: PAT_MRT3847_106641C.1.pep
KKNFSFQKFLKPQKKISFLKTCLWGFLGRGFSTGKKFLPVKQKIFPFPFWANGFFQGSRKPSPPQKSPLIGFFPGLGVYPNFLPLISVPKGGIPPNFLGGFMGPPS

SEQ ID NO: 150188 - protein, 209 aa, Glycine max
  Clone ID: PAT_MRT3847_106642C.1.pep
LAILSMILGNLIVITQTSMNRMLAYSSIGQIGYVIIGIIVGDSNGGYASMITYMLFYISMNLGTFACIVSFGLRTGTDNIRDYAGLYTKDPYLALSLALCLLSLGGLPPLSGFFGKLYLFWCGWQAGLYFLVSIGLLTSVVSIYYYLKIIKLLMTGRNQEITPHVRNYRRPPLRSNNSIELSMIVCVIASTILGISMNPIIEIAQDTLF

SEQ ID NO: 150189 - protein, 158 aa, Glycine max
  Clone ID: PAT_MRT3847_106643C.1.pep
ELSSGIYSGDSSRFGGHEGESLFSWYRENNEGTIELIIGGNSKIYEVTDSDYNCHLLFGYTPVRSDSVVGELVLSDPTNIVLPELPYVEMLALTGNTVEGDILTAVEVIPNSETQHVWSKYKKDIRYQWFCSSEVADNLSYDPLPNQSSCSYKVQLED

SEQ ID NO: 150190 - protein, 314 aa, Glycine max
  Clone ID: PAT_MRT3847_106644C.1.pep
MYGPVATSDSATSRGGLPNDCGDSVVTLDQVPRWIDAEHSLQYDNGDSSFSSSYFPDPLAFKLGSESGGGVSRFPVDHEVNSKIYLWRGNPWNLEVDAVVNSTNEVLDEALSSPGLHAAAGPGLAEECATLGGCRTGMAKVTNAYDLPARKVIHTVGPKYASKYQTAAENALSHCYRSCLELLIDHGLKSIAMGCIYTEAKNYPREPAAHVAIRTVRRFLEKQKDNITAVVFCTTSTTDTEIYKRLLPLYFPRDKQEEEMALSKLPADVGDENGETVIDERKIRIKPLPQKKVSKESKPAKAPVDLPVSDVGTV

SEQ ID NO: 150191 - protein, 235 aa, Glycine max
  Clone ID: PAT_MRT3847_106645C.1.pep
MAVQLWETLKEAIVAYTGFSPSTFFTVLALLFAAYYVVTGLFGSSDDHHHRHRHAQEEEMPPLRPPVQLGEITAEELKAYDGTDPEKPLLMAIKAQIYDVSQSRMFYGPGGPYALFAGKDASRALAKMSFEEKDLTGDISGLGPFEIDALQDWEYKFMSKYVKVGTVKSEEVPVTEPESTGEPSESTSRDIDAAAAAAKHTEDGKSETPAVKSDETPSNVDADIPLRKMKKKRTS

SEQ ID NO: 150192 - protein, 42 aa, Glycine max
  Clone ID: PAT_MRT3847_106646C.1.pep
MATMVLLPRVEKKKKKKKKKKKKKKKKKKKKKKKKKKKKKKK

SEQ ID NO: 150193 - protein, 191 aa, Glycine max
  unsure (1)..(191): unsure at all Xaa locations
  Clone ID: PAT_MRT3847_106647C.1.pep
MAVQLWETLKEAIVAYTGFSPSTFFTVLALLFAVYYVVTGLFGSSDDHHHRHRHVEEEEEMPPLRPPVQLGEITAEELKAYDGTDPEKPLLMAIKAQIYDVSQSRMFYGPGGPYALFAGKDASRALAKMSFEEKDLTGDISGLGPFELDALQDWXYKFMSKYVKVGIVKNEEVPVNESCWSIVKPLESKIP

SEQ ID NO: 150194 - protein, 80 aa, Glycine max
  Clone ID: PAT_MRT3847_106648C.1.pep
EIPMLCGKLNLIHTERNCFSLPLFMIPFDVTSMAGFHMLLHAFVIKMHQKPLLPVHNIVKCKYNQQYIYIYIYIYIYIYI

SEQ ID NO: 150195 - protein, 89 aa, Glycine max
  unsure (1)..(89): unsure at all Xaa locations
  Clone ID: PAT_MRT3847_106649C.1.pep
PPFFFFLFXNSFFFFGLISSSGGGLIGGGVLSFITSFPKMKRLFILFTRPSVPLLLPLFKSFARKFFPYTPKKKYRLTCLHSFIFVLFI

SEQ ID NO: 150196 - protein, 57 aa, Glycine max
  Clone ID: PAT_MRT3847_10664C.1.pep
LVAIFRINKIWIDGHIYKFVQFYYSIIIMITIISNRNFRINPMKKPETQIRKLKSYE

SEQ ID NO: 150197 - protein, 54 aa, Glycine max
  unsure (1)..(54): unsure at all Xaa locations
  Clone ID: PAT_MRT3847_106650C.1.pep
TSQYLSLILLCGQKTIGLFIXNGGYTIYVXIHYLPYNVINNFNYTFLIDSIHNF

SEQ ID NO: 150198 - protein, 60 aa, Glycine max
  Clone ID: PAT_MRT3847_106651C.1.pep
LALSGVVSSKVSTAELGGTSVHDVWTVSLSAKVYEWALEIGGFNVSLNYIHGNSFVTVTF

SEQ ID NO: 150199 - protein, 79 aa, Glycine max
  Clone ID: PAT_MRT3847_106652C.1.pep
VPSETPSPPTNCTETAYSFRICQKKLVPIAFLFLYVLLLIRMAAPLACVVGSGLSIQSNKIGKDVNGRYLFSYHRLSVL

SEQ ID NO: 150200 - protein, 114 aa, Glycine max
  Clone ID: PAT_MRT3847_106653C.1.pep
YETLVPTTLYYTHKINHLVIPTRHYCFTPSLNNIFPTGDFIHKNTISKRTTYVHYKAKHGHITTIIIYDLIHHKIITPNTTYSYVKSIRPRMLLAASQWQAIQEYYCHLMIKKT

SEQ ID NO: 150201 - protein, 146 aa, Glycine max
  Clone ID: PAT_MRT3847_106654C.1.pep
SKPILARTTISASDGKTKPLVTKGTKKTVPTNTTTSTSTKKVFNKDHASFNSTKSTPKETTKTSKVETEQVKEVTSQEVEVIKVENEEQKVHEVEHVNDHVPPDVESEHEIEHVQGLENSDPPQYQVDDERVISTVSETEKETLEE

SEQ ID NO: 150202 - protein, 61 aa, Glycine max
  Clone ID: PAT_MRT3847_106655C.1.pep
PVRIPGAHASLKLFCILGRITYSVPEIEAAVKSHFRSKDQSRGASKVRSCETCLHASATTC

SEQ ID NO: 150203 - protein, 59 aa, Glycine max
  Clone ID: PAT_MRT3847_106656C.1.pep
TYEVGLVEKFPPVPLLKSFLKDAKKVAASILEDPNNAGRAAVLFSLFNIYFYDFLWFLV

SEQ ID NO: 150204 - protein, 81 aa, Glycine max
  Clone ID: PAT_MRT3847_106657C.1.pep
HVHSGKSTSTGHLIYNLGGIDKRAIERFDKEAADMNKRPFNSAWVLDNLKADRERRISIDIALWKPETTKYYSTVIDAPAH

SEQ ID NO: 150205 - protein, 46 aa, Glycine max
  unsure (1)..(46): unsure at all Xaa locations
  Clone ID: PAT_MRT3847_106658C.1.pep
XXNXXPLLFXTSALSLFPRHLYXFQTLETSNPIEAXXTXITPLLXI

SEQ ID NO: 150206 - protein, 87 aa, Glycine max
  Clone ID: PAT_MRT3847_106659C.1.pep
ILNLCFRGNGCLCFSVSRFSHPSSFKIDLDLINSIKCLNSYLLKRIILRNKVLKKTHIIMLLDSYDKSLNFQYYLKTKTKTVNEEKV

SEQ ID NO: 150207 - protein, 83 aa, Glycine max
  unsure (1)..(83): unsure at all Xaa locations
  Clone ID: PAT_MRT3847_10665C.1.pep
MPPYTVVYFPVRXRCAALRMLLADQGQSWKEEVVTVETWQEGSLKASCLYGQLPKFQDGDLTLYQSNTILRHLGRTLGLYGKD

SEQ ID NO: 150208 - protein, 133 aa, Glycine max
  Clone ID: PAT_MRT3847_106660C.1.pep
MGHVGSSKDGTKVGLSAAAMDIDDDDDDDDDDLGDVDLDPTNSEILEELGEDMVKYWCKKASMLFFDEYGLISHQINSFNHFVAIGLQNTFDSFGDLVVTPGFDPSKKGENEHFRYASVKFGKVKLDKPMFWG

SEQ ID NO: 150209 - protein, 45 aa, Glycine max
  Clone ID: PAT_MRT3847_106661C.1.pep
FSYYNSQFHKGTSLYLNGYIPTPQLYTTQTYIHLHPTTNLYYHQT

SEQ ID NO: 150210 - protein, 330 aa, Glycine max
  Clone ID: PAT_MRT3847_106662C.1.pep
MYGIWCFITVLLFSPVAFSELCNPQDKKVLLQIKKDFNNPYLLASWNPNTDCCNWYCVQCHPETHRINSLVILSSVPQTNLSGPIPPSVGDLPFLETLQFHKLPKLTGPIQPTIAKLTKLKEIYISWTNVSGPVPDFLARLTNLQFLDLSFNNLSGPIPSSLSQLSNLVSLRLDRNRLTGPIPESFGSFKKPGPSLWLSHNQLSGPIPASLANIDPQRIDFSRNKLEGDASVLFGRNKTTQIVDVSRNSLAFDLSKVEFPTSLISLDLNHNQITGSIPVGLTAVDFLQGFNVSYNRLCGEIPQGGRLQKFDVYSYFHNKCLCGSPLTSCK

SEQ ID NO: 150211 - protein, 99 aa, Glycine max
  Clone ID: PAT_MRT3847_106663C.1.pep
YKARSWFNRVVTLSPDGGDGRALCYKFELQHGSEESQKDVLKRCVAAEPKHGEKWQVISKAVENSHLPVEAILKKTVVAMGKEETSILSDGTKSQAPSH

SEQ ID NO: 150212 - protein, 335 aa, Glycine max
  Clone ID: PAT_MRT3847_106664C.1.pep
KLQNDGPLVLRSLSQKDIIQLVELLIAERKLLVEIPSHGSKSNGLRSVFMSRASQSKLPNSSEHDMEKQNQSIPHTRVSPTSTDSEFYGGSRNDILEDLQQLVNEILRDHPKGYNICSCVRIFLLRYGYYLDIEKLGHQKLSSLLQVMPGVKSESNYIFPSVPAVSASDGETSILKTQITNATHAVLNSDNEISDSALKDDKMESLLEELGSVSVMNSNQSDLDLKLGTVPQSIIRQIRCILRSHPKGISITGLREELKKSNVCFYQSFYGYKTFSRFLSSIPHVQLQPLGHGKFCVHLVSLESPETFESNDVQSITSAAKIDESNAKSDDLAAH

SEQ ID NO: 150213 - protein, 93 aa, Glycine max
  Clone ID: PAT_MRT3847_106665C.1.pep
DPTLALPGGFPLVFLPAFFFLKVNLFWLVGGTTTFHERWVTMPPLVKPFLSSRFFSLRVTPGPPQGLMGLLKMGRWPQILLLTNNKPFFLEYL

SEQ ID NO: 150214 - protein, 47 aa, Glycine max
  Clone ID: PAT_MRT3847_106666C.1.pep
VLRVFQISFFLNLFVFVEIKGIYIYIYIWCTVPAIYEPVIGRLIKSY

SEQ ID NO: 150215 - protein, 95 aa, Glycine max
  unsure (1)..(95): unsure at all Xaa locations
  Clone ID: PAT_MRT3847_106667C.1.pep
IFPKVLDVSLLDXVIQVTSPXSIEAAKLLALKDAFLMIIPSGAVAVSSMRVGEPPDNAGQLFVVIFPRGGRGYLSSPRLGSIRKEGGQMSFYLGP

SEQ ID NO: 150216 - protein, 48 aa, Glycine max
  Clone ID: PAT_MRT3847_106668C.1.pep
LNFFKKITNLRTTNPYRAYESAIRIVHTDQQSVCPYRSSTRNPYVSYE

SEQ ID NO: 150217 - protein, 238 aa, Glycine max
  Clone ID: PAT_MRT3847_106669C.1.pep
MKYSEISHFSHPQHKLRFEYSEFPFKCDGCKEVGIGSRYKCSICDFDLHMHCAMITSPTLLHPFYTKCNFQFMSKPPGDTPRYCNACEKDVRGFLYHCKACGFDLHPCCAKLPMVLDDGEVKLYLYRKVSSPCHRCGRKGRSWSYRSKCKNYNLHVACVRDMLVENWHEVYVKGRSVNSNIPSLRNTLYTPHNSRRSKGKVKKCCEIAGLAVQVVISAVLGDPTALIAGLVGSFMSRA

SEQ ID NO: 150218 - protein, 61 aa, Glycine max
  unsure (1)..(61): unsure at all Xaa locations
  Clone ID: PAT_MRT3847_10666C.1.pep
MVCLACFLPPFLVPIGNTPPFFXFFLMGKIFRVFGWGDRKPERGPPVCPFKPPPPRVEADF

SEQ ID NO: 150219 - protein, 40 aa, Glycine max
  Clone ID: PAT_MRT3847_106670C.1.pep
SMVVFKFTKRHVGLFPYMHIDRKLNTWILIVYLYPPSDVD

SEQ ID NO: 150220 - protein, 83 aa, Glycine max
  Clone ID: PAT_MRT3847_106671C.1.pep
PIFFFSQDNVRNQLIQFELLLTTATFVVAIFGVVAGIFGMNFEIQLFDVPSAFQWVLIITGICGVFIFSAFVWFFKYRRLMPL

SEQ ID NO: 150221 - protein, 46 aa, Glycine max
  Clone ID: PAT_MRT3847_106672C.1.pep
KLLLLQKRGISRFQPYINLNANLNSFTRSPKIQLTALHFKNPEREK

SEQ ID NO: 150222 - protein, 95 aa, Glycine max
  Clone ID: PAT_MRT3847_106673C.1.pep
PNQVSTIMVCFCARGQKLKTLEPKLCGLPEFTVLCPIDNLGRTQSLHGTSHSSRFGQKTEMESDLVPWTCDCRFDYVIRMILRFYKLTSPYLLFA

SEQ ID NO: 150223 - protein, 67 aa, Glycine max
  Clone ID: PAT_MRT3847_106674C.1.pep
LRQFNIHHTPPLTTKISSSTSTVVCKTVIVKPQTETQGLNIADHDTQLIRKTPMFYPNNIPKGSLAH

SEQ ID NO: 150224 - protein, 36 aa, Glycine max
  unsure (1)..(36): unsure at all Xaa locations
  Clone ID: PAT_MRT3847_106675C.1.pep
KXKLXHXSTFSSHPXFLYILEGLYXRYKFPLYFSLI

SEQ ID NO: 150225 - protein, 57 aa, Glycine max
  Clone ID: PAT_MRT3847_106676C.1.pep
PKIWCREETSSLWTKPTSQLIILVSPPLAPFGISIYLNSRTGNNNSKNHFLHKTLWN

SEQ ID NO: 150226 - protein, 107 aa, Glycine max
  Clone ID: PAT_MRT3847_106677C.1.pep
LPLTNVSLFRVAFCIDLNGILFFFSQFPLGFVFAELEGDSLNDFLYTNLNDVGIANLDWFLGVFTEDSQLKHRAYWLEKCPGLCTEGYLFGSLIATIMTCGTLNPKI

SEQ ID NO: 150227 - protein, 87 aa, Glycine max
  Clone ID: PAT_MRT3847_106678C.1.pep
PLSAHFALPCLHLNPFDSNTLPVVLLLKWTRWTSRLQRPGSTLHFVKKHIELISHKQGEKEAHRRLAAGTSCMQRLARQCCRYWFHS

SEQ ID NO: 150228 - protein, 55 aa, Glycine max
  Clone ID: PAT_MRT3847_106679C.1.pep
DTLSEQDGQLLLIATKVLFFSFVPKYATMHNNIMNRATLYELILDNDKLFSRETQ

SEQ ID NO: 150229 - protein, 72 aa, Glycine max
  Clone ID: PAT_MRT3847_10667C.1.pep
YQPIRGRLQRDGVCRLFRPTWDDVYERHIVQSTLAIKTRTSEARSFVQIKGGGVGPGNIRRGGTSEAQRPSL

SEQ ID NO: 150230 - protein, 68 aa, Glycine max
  Clone ID: PAT_MRT3847_106680C.1.pep
KTPPWLLIFAQKSKFQIFQPQDNFLNPLIKTKNFCWKHKIFPNFFFCCKKKSFLYPNFFPQGLTNKNF

SEQ ID NO: 150231 - protein, 77 aa, Glycine max
  Clone ID: PAT_MRT3847_106681C.1.pep
TLFVFMRESVVSIQLSYAFRSIKVRLHLLFQFSNLVGRQCKPSIFKPSNFGFRVWVSVTICKFLVGVLLLAKFGIPI

SEQ ID NO: 150232 - protein, 148 aa, Glycine max
  unsure (1)..(148): unsure at all Xaa locations
  Clone ID: PAT_MRT3847_106682C.1.pep
RAPTRPPTRPADMTGKEIERALLKEVISNPRIFVFEHHFAIDLLTCQDRSDMICLGVDTLNSKTLELXVIRFLSKVTLLASGGAGHIYPKTTNPLVATGVGIAMAHRAQAVIFNMEFVQFHSTALTDEGLSIKPTKPRENAFLITEAV

SEQ ID NO: 150233 - protein, 121 aa, Glycine max
  Clone ID: PAT_MRT3847_106683C.1.pep
EFSVFVELKNAELPKPKQGLMLKLNYDDVRNAWSDRGTPFSDDSPLADVPGNDVTARLSQIDLLWDNGGVREASVLRYKEKRRTRLFSKKIRYQVRKVNADRRPRMKGRFVRRLNSSANAH

SEQ ID NO: 150234 - protein, 111 aa, Glycine max
  unsure (1)..(111): unsure at all Xaa locations
  Clone ID: PAT_MRT3847_106684C.1.pep
TCDAWADAWVDILDDYYTIATQFIKFLSDYITGYLNTLLIYILLSFLTAXIKNKRXNVRNIPVSRFFYTGXYKICTITLKKKFLLTQIEKIGCGFKKKGIPCGIFSQSDGL

SEQ ID NO: 150235 - protein, 87 aa, Glycine max
  Clone ID: PAT_MRT3847_106685C.1.pep
FFRYYLKAANADAEVQKRVKYLAELALSGHEQLCYRPSTVAAALVILACLEVNQISYHKVIGIHVRSKDENLYECIENLEWVLRYLG

SEQ ID NO: 150236 - protein, 240 aa, Glycine max
  Clone ID: PAT_MRT3847_106686C.1.pep
MGGVTSLLMLLCLFAGAMSPVKGEDPYFFFTWNVTYGTLSPAGVPQQVILINNEFPGPNINSTSNNNIVVNVFNNLDEPLLFHWAGVQQRKNSWEDGVAGTNCPIQPGTNYTYHFQVKDQIGSFFYYPSLGLQRAAGGFGGLRINSRLLIPVPYADPEDDYTVLAGDWFTKSHSTLRKLLDGGRSLGRPQAVLLNGQNAKGDGTDKPLFTMIPGMTYKYRICNVGLKNTINFRIQNHPMK

SEQ ID NO: 150237 - protein, 278 aa, Glycine max
  Clone ID: PAT_MRT3847_106687C.1.pep
SICNLSEDAKTIHIIDFGIRYGFKWPALISRLSRRPGGPPKLRITGIDVPQPGLRPQERVLETGRRLANYCKRFNLPFEFHAIAQRWDTIRVEDLKIETDEFVAVNCLFQFEHLLDETVVLNNPRDAVLRLIKNANPDIFVHGIVNGSYDVPFFVSRFREALFHYTALFDMLDTNVARQDPMRLMFEKELFGREIVNIIACEGFERVERPQTYKQWQLRNMRNGFRLLPLDHRIIGKLKDRLRDDAHNNNFLLEVDGDWVLQGWKGRILYASSCWVPA

SEQ ID NO: 150238 - protein, 307 aa, Glycine max
  unsure (1)..(307): unsure at all Xaa locations
  Clone ID: PAT_MRT3847_106688C.1.pep
QKHVEELVRLPDCFLGSSPSPEAGPVCPTPALSNGFVTFGSFNNLAKITPKVLQVWAKILCAIPNSRLVVKCKPFCCDSVRQRFLSTLEKLGLEPLRVDLLPLILLNHDHMQAYSLMDISLDTFPYAGTTTTCESLYMGVPCVTMAGSVHAHNVGVSLLSKVGLGHLIAKNEDEYVELALKLASDISALQNLRMSLRDLMSKSPLCDGAKFTLGLESTYRKMWHRYCKGDVPSLKRMELLQQPVSTNDLSNKNSEPTRITNSSEDXSGSVKANGFSTTHPPKLNLHTCEENGGSLNHSSKQGIVGSC

SEQ ID NO: 150239 - protein, 42 aa, Glycine max
  Clone ID: PAT_MRT3847_106689C.1.pep
NLTSLFSQKKKRILKTNHSNPIQNSANSYHHPKRLTSTTLLH

SEQ ID NO: 150240 - protein, 85 aa, Glycine max
  Clone ID: PAT_MRT3847_10668C.1.pep
ALEISEQVEGPQLHTRFGPSIVEPEIFFLDNDYASQGIPWGPPLKDSWFLPKNGGTPLPGKFWGVRKRKRKIESLPEEWADGWSA

SEQ ID NO: 150241 - protein, 86 aa, Glycine max
  unsure (1)..(86): unsure at all Xaa locations
  Clone ID: PAT_MRT3847_106690C.1.pep
NGNSEEQTNPKNLQKTQLMGKYTLPKWEDNGRXELVSGGAEPVGMFFPMAHGIHAVMLGNQASTFQNIKAKPRQLNALIIGASETC

SEQ ID NO: 150242 - protein, 46 aa, Glycine max
  unsure (1)..(46): unsure at all Xaa locations
  Clone ID: PAT_MRT3847_106691C.1.pep
NSFSEPDFEDCDTXYIEGCNGXLMDYAFEFIINNGRIDMREDYPYR

SEQ ID NO: 150243 - protein, 44 aa, Glycine max
  unsure (1)..(44): unsure at all Xaa locations
  Clone ID: PAT_MRT3847_106692C.1.pep
QLLSLFYIFQLCLDVTKCNMSLVNAXTNVXLFLYSNNTXHXVRA

SEQ ID NO: 150244 - protein, 80 aa, Glycine max
  unsure (1)..(80): unsure at all Xaa locations
  Clone ID: PAT_MRT3847_106693C.1.pep
IFNFLIHFFYYFYLXYYSYFLKLFIFFLFFILSFISFNILYFILFKSSFFIYFLFLSNLYNYFFFPIYYFLYSFLFLYSF

SEQ ID NO: 150245 - protein, 86 aa, Glycine max
  unsure (1)..(86): unsure at all Xaa locations
  Clone ID: PAT_MRT3847_106694C.1.pep
VEYCGRMSYVAHNVNHPREKDLLEGNHAFDIKSRSRXGKVSSHKAQVATGETFIYDIIGXGSHSXQDFSEKEYLEKPERIDARSRQ

SEQ ID NO: 150246 - protein, 530 aa, Glycine max
  Clone ID: PAT_MRT3847_106695C.1.pep
MVVLAASIVSKSGKVLVSRQFVDMTRIRIEGLLAAFPKLVGTGKQHTYVETENVRYVYQPIEALYLLLVTNKNSNILEDLETLRLLSKLVPEYSYSLDEEGICKHAFELIFAFDEVISLGHKENVTVAQVKQYCEMESHEEKLHKLVLQSKINETKDVMKRKASEIDKSKIEKNRGDKGGFGPLQSMGSGRIENSFSDLSISSSGTGFGSGSGFGLTSDVDSFATKSKGRPTSSATAPPKGLGMKLGKSQRTNQFLESLKAEGEVILEDVQPKLSQSRVSAPPPTDPITLTVEEKLNVTLKRDGGVSNFDVQGTLSLQILNQEDGHIQVQVQTGDNQAVSFKTHPNMNKELFANDYILGLKDPNRPFPTGQASDAAGVGLLKWRMQSTDESMVPLTINCWPSSSGNETYVSIEYEASSMFDLQNVVISVPLPALREAPSVRQIDGEWRYDSRNSILEWSVLLIDNSNRSGSMEFVVPLADSSVFFPISVRFMATDTFSDLKVTNIIPLKGGNPPKFAQRTQLITDSYQVV

SEQ ID NO: 150247 - protein, 528 aa, Glycine max
  Clone ID: PAT_MRT3847_106696C.1.pep
MVVLAASIVSKSGKVLVSRQFVDMTRIRIEGLLAAFPKLVGTGKQHTYVETENVRYVYQPIEALYLLLVTNKNSNILEDLETLRLLSKLVPEYSYSLDEEGVCKHAFELIFAFDEVISLGHKENVTVAQVKQYCEMESHEEKLHKLVLQSKINETKDVMKRKASEIDKSKIEKNRGDKGGFGPLQSMGSGRIENSFSDLSITSSGPGFGSGSGFGLSSDVGSFSTKSKGGPTSSATAPPKGLGMKLGKSQRTNQVLESLKAEGEVILEHVQPKLAQAAAPPSTDPISLAVEEKLNVTLKRDGGVSNFDVQGTLSLQILDKEDGHIQVQVQTGENQAIIFKTHPNMNKELFANENVLGLKDPNRPFPTGQAGGSEGVGLLKWRMQSTDESMVPLTINCWPSSSGNETYVSIEYEASSLFDLRNVVISVPLPALRDAPSVRQIDGEWRYDSRNSFLEWSVLLIDNSNRSGSMEFVVPQAESSAFFPISVRFIATETFSDLKVTSIIPLNGGNPPKYSQRTQLITENYQIV

SEQ ID NO: 150248 - protein, 36 aa, Glycine max
  Clone ID: PAT_MRT3847_106697C.1.pep
DIERNQRGRTLGPWILEWTSPHLSQLHLTQTSHLPK

SEQ ID NO: 150249 - protein, 71 aa, Glycine max
  Clone ID: PAT_MRT3847_106698C.1.pep
EGRRKKEKEKKKEKKEKKKKRRKKKRRKKEKREEEKEREKREKKRRGRRKKKENANAAVYEQKGSLETHIF

SEQ ID NO: 150250 - protein, 115 aa, Glycine max
  Clone ID: PAT_MRT3847_106699C.1.pep
HRVLNRRPMLTQGYNSDLATHSKASTAMKEHVHKLAVIGAMVTHWHTYPGVSNRHTPVKLTYTSLRHSVDDIMTEDASLNHLYIVGVSNDSSCSIVMNILGCTNHWHFQHISHHA

SEQ ID NO: 150251 - protein, 70 aa, Glycine max
  Clone ID: PAT_MRT3847_10669C.1.pep
THACRRPKDTAIPIKPATEIPLLSTLSLTDSKLKLKTDHENAQTNIVVHCHGYPDEATNINQLKKPVADN

SEQ ID NO: 150252 - protein, 55 aa, Glycine max
  Clone ID: PAT_MRT3847_1066C.1.pep
ARRYRFPIRATPPSCFRMTADGGRASHICLVPSGAGVLAATCFIINLNCEGNQLR

SEQ ID NO: 150253 - protein, 66 aa, Glycine max
  unsure (1)..(66): unsure at all Xaa locations
  Clone ID: PAT_MRT3847_106700C.1.pep
GGDNLIXVLDFSRPSLRGPKWKSFLPGLTIPIPVGFAKTRAPLQFKKFANWDFFKRNFKQMPNVLG

SEQ ID NO: 150254 - protein, 55 aa, Glycine max
  unsure (1)..(55): unsure at all Xaa locations
  Clone ID: PAT_MRT3847_106701C.1.pep
PAXWISWNLFNLIIKVVPRLGWLSSXLQSFTXERRYSGRASQLDSFGILCEMGII

SEQ ID NO: 150255 - protein, 87 aa, Glycine max
  unsure (1)..(87): unsure at all Xaa locations
  Clone ID: PAT_MRT3847_106702C.1.pep
SDXLVLLLQSKVKLSQHKVFSSCNWNCFVAHKKESPRTITNYRNRVRAIFVLLLSTRQKPPLGCVASQKGGSPPILVHYILKNKRIS

SEQ ID NO: 150256 - protein, 96 aa, Glycine max
  unsure (1)..(96): unsure at all Xaa locations
  Clone ID: PAT_MRT3847_106703C.1.pep
YFHPGIPLKVKSELGKWGLIDLEGTDRLLKPGAKELPFVKAKPIILSFSLXPNVVPLLKRKRCIFPNRNTSLPQILKNFFGFGSKVWMLVHITPSK

SEQ ID NO: 150257 - protein, 66 aa, Glycine max
  unsure (1)..(66): unsure at all Xaa locations
  Clone ID: PAT_MRT3847_106704C.1.pep
MAXXAIQQSAFTGQTALKQXNEFXXKTGGAXKGXTIXRRTVKSXPQXIXXGPXXPKYGGFLGAVFG

SEQ ID NO: 150258 - protein, 56 aa, Glycine max
  Clone ID: PAT_MRT3847_106705C.1.pep
ELDGHDAHIHCLNWVHLVRQYSSDDMPIPHRIDYLMCLHKIGVRAIYQGLTQVVQT

SEQ ID NO: 150259 - protein, 107 aa, Glycine max
  Clone ID: PAT_MRT3847_106706C.1.pep
SRRDTLRDQTETKNSDEGPKFYFSLSIFQIYGMGLVYHVCINNLLIQIYLQVSRERRKGGGTLGLSINSVAAIEPEHVPKNLVPLHFGLCIKIHPRVSQQPIRMLST

SEQ ID NO: 150260 - protein, 266 aa, Glycine max
  Clone ID: PAT_MRT3847_106707C.1.pep
MSRALVHLLGVLWLCCWLASTGESQIEYLRYKDPKQPVPTRVRDLMSRMTLEEKIGQMVQIDRSVANANVMKTSFIGSVLSGGGSEPLPRATAEDWVNMINDFQKGALESRLGIPMIYGIDAVHGHNNVYNATIFPHNVGLGCTRDPNLAQRIGAATALEVRATGIPYVFAPCIAVCRDPRWGRCYESYSEDPKIVQEMTEIIPGLQGSIPANSRKGFPYVGGKTKVAACAKHFVGDGGTTKGINENHTLIDWHGLVSIHMPAYSE

SEQ ID NO: 150261 - protein, 71 aa, Glycine max
  Clone ID: PAT_MRT3847_106708C.1.pep
KVYGPIVPRAGPKFISLSLSSSLYLYLFPFSLSCVLFRREKNKSEKLGGYLVANSSAISLWFGWFVTPPLG

SEQ ID NO: 150262 - protein, 77 aa, Glycine max
  Clone ID: PAT_MRT3847_106709C.1.pep
TPKSSLSELTAAHSLQYGSPCNPLITIPHEQLHKTFIHHHDERSSKLCPHLFYPCFYHHVKQGMAHRFHDQKHSQPQ

SEQ ID NO: 150263 - protein, 310 aa, Glycine max
  Clone ID: PAT_MRT3847_10670C.1.pep
MLRHLRLEDFLSLKPVDPSNHSFEGDMEKRNLIFKLISLREEEEYSIKDEVTTELDISQHMVKEHLFHKQFKEKLYSWLLHKVTESGKGPNVLDEDGQGVLHLAAFLGYDWAINPIISAGVNINFRDVNGWTALHWAASCGRERTVAVLVSMGADCGALTDPSPSSPAGRTAADLASSYGHKGISGFLAESSLTHHLETLTMDDQKGGRQEISGMKAVQTVSERSATPVHFGDMPDLCLKDSLTAVRNATQAADRIHQVYRMQSFQRKQLTQYESDELGLSDQQALSLLASRACKSGQGDGLANAAAVQI

SEQ ID NO: 150264 - protein, 53 aa, Glycine max
  Clone ID: PAT_MRT3847_106710C.1.pep
GAALVIVYLNNFSCSFGEWKLVFYVIRALGHVVLPFRVIMFILEGLPNDSGLA

SEQ ID NO: 150265 - protein, 68 aa, Glycine max
  Clone ID: PAT_MRT3847_106711C.1.pep
MRSMVDYFLDLCVSCSFVFLLSDSVTPTKPVNLVVVPVQNDGSTGLPPPPLHKRTPLVQVPVLVDLSG

SEQ ID NO: 150266 - protein, 77 aa, Glycine max
  Clone ID: PAT_MRT3847_106712C.1.pep
KYLKSGDSLRKLIRQVFIPFIKDWFCFLFCSQYHALYFSAYHPIESRKICSSIPVFYTITNVQHLTYILTKVASTSV

SEQ ID NO: 150267 - protein, 38 aa, Glycine max
  Clone ID: PAT_MRT3847_106713C.1.pep
GFYTSLFYMNSILTAIGCTCTILDVNADIKPGFSSRML

SEQ ID NO: 150268 - protein, 87 aa, Glycine max
  Clone ID: PAT_MRT3847_106714C.1.pep
VSKYHTCKDQRIKEYASLQMSTKSITMLGAPGEGLVEIYRCQVSKCKSCNCSAPNSVCPGLHLQLCLLQCLVPPTVGLTKPAQSVMA

SEQ ID NO: 150269 - protein, 84 aa, Glycine max
  Clone ID: PAT_MRT3847_106715C.1.pep
LLADQNWNVVAETVVSHFFSSTERIYDWSVQIADGSYIPDSQPIDGSENHMAVFLLQVMHHTCVLLKSYLPLDKQLRLASMVIT

SEQ ID NO: 150270 - protein, 54 aa, Glycine max
  unsure (1)..(54): unsure at all Xaa locations
  Clone ID: PAT_MRT3847_106716C.1.pep
KKYLILQAEIHNLNQPYFIQXRPSPFIKKKKRRPRDLNTPITSPKLLIFLKGNT

SEQ ID NO: 150271 - protein, 95 aa, Glycine max
  Clone ID: PAT_MRT3847_106717C.1.pep
DPCPQIPASYLRIKDGSVPVSFIQKYLMKKLDLTSETEVEIKCVGQPVLPTLQLYNLVELWLDTAPTSQRIPATIGSSAKDFVMVLAYARRVPDP

SEQ ID NO: 150272 - protein, 88 aa, Glycine max
  Clone ID: PAT_MRT3847_106718C.1.pep
WVLDTKPDLLPIHPFTFTYFHHFPKRNSHMEGSKCDIKTQRSVASILLQELMLLFQSEHFMPSLPCIQFIQCGRKHNLCRFYSGQDRT

SEQ ID NO: 150273 - protein, 32 aa, Glycine max
  Clone ID: PAT_MRT3847_106719C.1.pep
KGTTLKKCECNCTRIYDGIILRGRLYHYRLNK

SEQ ID NO: 150274 - protein, 120 aa, Glycine max
  Clone ID: PAT_MRT3847_10671C.1.pep
ENTYNVLTYNLRTRQKNKKTRILSFIIIILEAMTYIGYPTKVKACITSMPIFSGNKQQPLFVRNEPHASILCLGLDQFTCTLQRELPCLMFIIIPNILCQLSMPVRHGMKYPCSYIPLLS

SEQ ID NO: 150275 - protein, 70 aa, Glycine max
  unsure (1)..(70): unsure at all Xaa locations
  Clone ID: PAT_MRT3847_106720C.1.pep
RMILSSREHQWWRQACRYRGHLQSXPKCYGRINCNTSNNIKDELNYGLKFPPMIIRKRSQKSDSPMIIRX

SEQ ID NO: 150276 - protein, 71 aa, Glycine max
  Clone ID: PAT_MRT3847_106721C.1.pep
MASKAPTAPYPSAARISDSQCFPQYTASLKCLEEFNSDKSKCQEHFDVYKMCKKKEREARLERNKNRSLFS

SEQ ID NO: 150277 - protein, 37 aa, Glycine max
  unsure (1)..(37): unsure at all Xaa locations
  Clone ID: PAT_MRT3847_106722C.1.pep
IITKVLNKLNFQHLSIKKKKRKKKXGEKXKXXKKKKK

SEQ ID NO: 150278 - protein, 80 aa, Glycine max
  Clone ID: PAT_MRT3847_106723C.1.pep
LGYNRFKHKYCELRLHNLATTDSRTQITSYFNLLEDVHVLLHLIFKFGFLFSSFSCLEERSIKLRRFLVTQECFTNLGPN

SEQ ID NO: 150279 - protein, 62 aa, Glycine max
  Clone ID: PAT_MRT3847_106724C.1.pep
MTGILYETGEHSGHAVVIKYAPYGGDSRMGMDEYSAEIFMRGKHTLVLLNSLQDTLGAAPII

SEQ ID NO: 150280 - protein, 163 aa, Glycine max
  Clone ID: PAT_MRT3847_106725C.1.pep
LMLLLPLPTPGALCPTSLPSTPSHPLLHQYSAAHLGGLYCFTPTSSVKISSLSLLIFCFFLCVSFLYTYPYHLTYSVNQPPSLIKPAHPLGGLPTATRIPRPSGHLSTPFTRLYIAPYSFTAIIKIYLTIHFLLSFITPILPFPPPPPPKQAALLHMYHGKSP

SEQ ID NO: 150281 - protein, 161 aa, Glycine max
  Clone ID: PAT_MRT3847_106726C.1.pep
GDLSNVGLRNVLARPSVGSERIPDLLYCVYQGMFACITVALASGAVSERGRMLPCVVFMFIWTTVVYDPLACWTWNPAGWSYRLGGLDFAGGTPVHIASGSAALAYSYILGKRAGHGTHALNYRPHNITFIVIGTVFLWVGWFGFNAGSALSANLRAVMAA

SEQ ID NO: 150282 - protein, 79 aa, Glycine max
  Clone ID: PAT_MRT3847_106727C.1.pep
PLTSPYLLLFDAIKVDYNFKLSEGHCRVFSIVACSAATPTQWMLPYHILTTITVLAYPRRGSSRKILLAVAGIGSVLKI

SEQ ID NO: 150283 - protein, 101 aa, Glycine max
  Clone ID: PAT_MRT3847_106728C.1.pep
VQKNANEILYGDNRLTEKTIDTSRDSNMEEVYYTIAPQVRKKIPHYNRRDVDTQLIYNLPCLVTAEIQNKRDARNIQISGSLYDGRYKYWTKHEKNLALTE

SEQ ID NO: 150284 - protein, 85 aa, Glycine max
  unsure (1)..(85): unsure at all Xaa locations
  Clone ID: PAT_MRT3847_106729C.1.pep
PYFFPRKKKNPLFFHSYSLHTTNXKTHQFTTTFSPTSTNHPPFLLYSNHTLYLQPLHPNHKPEPLKSLSLYHHLQHNTTNLTNTF

SEQ ID NO: 150285 - protein, 89 aa, Glycine max
  Clone ID: PAT_MRT3847_10672C.1.pep
FISFITSEASDKCEREKRKTINGDDLLWAMATLGFEDYIDPLKIYLTRYREMEGDTKGLAKGGDSSSKKDVQPSPNAQVECTHECANHA

SEQ ID NO: 150286 - protein, 36 aa, Glycine max
  Clone ID: PAT_MRT3847_106730C.1.pep
VLRIRLNLHGLTHGTSCASCRYLAKYIRHEGQDRTR

SEQ ID NO: 150287 - protein, 35 aa, Glycine max
  Clone ID: PAT_MRT3847_106731C.1.pep
FKLILDFLKWHQPPGWVSLPQSRGARPLSWSHHPP

SEQ ID NO: 150288 - protein, 173 aa, Glycine max
  unsure (1)..(173): unsure at all Xaa locations
  Clone ID: PAT_MRT3847_106732C.1.pep
MAVEAPPHNMNLFPSQLLTAREMMKPNLGFYTAPTRKRSRDSITTVPNALLPLPQKNKLSSSSSSSPPPSILDQELLFHFQNQQSEIDRFIVQHTEKVRMEMAEQRVRQSRMLITAIQEAVAKKLKEKDEEIQRVGKLNWVLQERVKSICVENQIWKELAXTNEATANNLRNN

SEQ ID NO: 150289 - protein, 148 aa, Glycine max
  unsure (1)..(148): unsure at all Xaa locations
  Clone ID: PAT_MRT3847_106733C.1.pep
LQFSKRLVQLHPNFHVTCSKFPHVVCSPKCRQYXILQTXLPPNINTIFLQPVKPEDLPQGATIETQIQLIVALSMPSIHQALKTLTSRTRXVALVADSSAFDALDFAKEFNMLSYIYLPISATTLSWYFYVPMLDKETSCEYRDCPEP

SEQ ID NO: 150290 - protein, 320 aa, Glycine max
  Clone ID: PAT_MRT3847_106734C.1.pep
MAVEAPPHNMNLFPSQLLTSREMMKPNLGFYTAQQTEGGGGAAAAMPILPSSTALPFYHQSDSGLTCHATTAAAPPRKRSRDSITTTESNTLLLPVPQKNKLSSSPPSILDQDLLFHFQNQQSEIDRFIAQHTEKVRMELEEQRVRQSRMLIAAIQEAVAKKLKEKDEEIQRVGKLNWVLQERVKNLCVENQIWKELAQTNEATANNLRNNLEQVLAHVSEDHHHNLHHTTVEAAESSCASNNNNSHHREEEEVCGGSGNGKQSDGVLGKRMCNQCGVRESIVLLLPCRHLCLCTMCESTVRNCPLCQSGINASVHVNYS

SEQ ID NO: 150291 - protein, 36 aa, Glycine max
  Clone ID: PAT_MRT3847_106735C.1.pep
VLILCVQTHYQLEGNKSKLTRRQLSIILSLCIWYFK

SEQ ID NO: 150292 - protein, 158 aa, Glycine max
  Clone ID: PAT_MRT3847_106736C.1.pep
KPQQTHTHSQESNNQTNNKSLIMAVEAPPHNMNLFPSQLLTAREMMKPNLGFYTAQQTEAAAAAATPLLQSTALPFLHQSDSGLTCHVTTTAPTRKRSRDSITTVPNALLPLPQKNKLSSSSSSSPPPSILDQELLFHFQNQQSEIDRFIVQHVSLFQ

SEQ ID NO: 150293 - protein, 69 aa, Glycine max
  unsure (1)..(69): unsure at all Xaa locations
  Clone ID: PAT_MRT3847_106737C.1.pep
LLGLWYFGQIKDQALVFQALCWLSXLPIXPWVRGFERQIPGFLFTWFLVETFVASIFAVDAWEANVDSI

SEQ ID NO: 150294 - protein, 70 aa, Glycine max
  Clone ID: PAT_MRT3847_106738C.1.pep
AFKKLTCQSLPMNRVHIYHCGELSKRKWGLMKEGPLHPFHRNPETPEQQLGMKVSIFGRSFGGWVEPGPF

SEQ ID NO: 150295 - protein, 70 aa, Glycine max
  unsure (1)..(70): unsure at all Xaa locations
  Clone ID: PAT_MRT3847_106739C.1.pep
XXYKSXFSSXIXVSFXQSNVAFSFGGXYNXNAYSIPIAIPMAQYCFPFSFLCFLFFWVPXVSRGLLIIXS

SEQ ID NO: 150296 - protein, 47 aa, Glycine max
  Clone ID: PAT_MRT3847_10673C.1.pep
VFTKLFFRHIFMLPNQLDTGQMKYDYSDITVRRATYLTMFGNNSYRS

SEQ ID NO: 150297 - protein, 69 aa, Glycine max
  unsure (1)..(69): unsure at all Xaa locations
  Clone ID: PAT_MRT3847_106740C.1.pep
MARGKTEDLVNQVLDEIGIDINQELVNAPSSAVAVPAAKTKVPQVETTGNDDGGIDCDXQAWIDNLRKL

SEQ ID NO: 150298 - protein, 40 aa, Glycine max
  Clone ID: PAT_MRT3847_106741C.1.pep
KMIISIEASEKARSGRSAGRSLPGDPGGFCAWRHISHHLT

SEQ ID NO: 150299 - protein, 71 aa, Glycine max
  Clone ID: PAT_MRT3847_106742C.1.pep
PENPGSPHACCRPREDDRGGRTGANEAPDTRRQRTRDGSPQAERRKARKTEPQERSEARAHDPRARQRPRA

SEQ ID NO: 150300 - protein, 58 aa, Glycine max
  Clone ID: PAT_MRT3847_106743C.1.pep
KYQSYEHFPKFEVIDSCSIIIQITNFPNMPGDFKLLAYGYEPIKEDILDDDGKEQKLS

SEQ ID NO: 150301 - protein, 84 aa, Glycine max
  unsure (1)..(84): unsure at all Xaa locations
  Clone ID: PAT_MRT3847_106744C.1.pep
VKTMDLHNSVLGSLLVDGDWVTAALCLDEGCCXAGITVLYCNDLGHCHFGEECQKYQILVSLDFLSWLPMSRSCIIMLWLLAAG

SEQ ID NO: 150302 - protein, 69 aa, Glycine max
  Clone ID: PAT_MRT3847_106745C.1.pep
GGPKKHFFFPPFGKGGGLFNPRGFFWTYTIPPPLNCKIFPRGFFNNLTKDFWGGLKKQAQFGPDWSFFF

SEQ ID NO: 150303 - protein, 60 aa, Glycine max
  Clone ID: PAT_MRT3847_106746C.1.pep
FKTTCFFSSTQHTSVRKGVVLNQSEWCWARLHFWIICVGVGHEWEARCQCSRLTSRLRQC

SEQ ID NO: 150304 - protein, 119 aa, Glycine max
  unsure (1)..(119): unsure at all Xaa locations
  Clone ID: PAT_MRT3847_106747C.1.pep
LGYRDLLTGDELLSDSFRYKEIENGMLWEDEGKWVVKGAVDVNIDANPSAEGGGEYEGVDDAAVNAADICDTYXLLEQPAFYQKQFVTFMKRFIKNLTPKLDGKQQELFNKHFEGASKY

SEQ ID NO: 150305 - protein, 84 aa, Glycine max
  Clone ID: PAT_MRT3847_106748C.1.pep
DLTQKYSIEISVIYLLCWILGVLVEVVFPYLVIFLLTLHKSILLSTKYVNVIMEFFGQSLPLYRGEWITNEQSWTMNAVIKALT

SEQ ID NO: 150306 - protein, 113 aa, Glycine max
  Clone ID: PAT_MRT3847_106749C.1.pep
ESETSRRRNYVGGREDRVAAVVCFKVYKLDEEWGKWVDVKNLGDRAFVLGNSCSFSVSAKELTGYQENCIYFTDIFDVRVYNLDDRSIVSIDFDPCIDKSMCSHSSWTRIGRN

SEQ ID NO: 150307 - protein, 66 aa, Glycine max
  Clone ID: PAT_MRT3847_10674C.1.pep
PSTSPFFQDSLKNSNAPYKPTTHSSHQYITSNFRPTSLLYFKSHFTYSLHQSLQHPLTTHIYHYNF

SEQ ID NO: 150308 - protein, 123 aa, Glycine max
  Clone ID: PAT_MRT3847_106750C.1.pep
KRVLPEPRFPRLPPKINDSCGVVPHGIFVPLNVGFFSGPPGFSFLAGWFLGQILSFPPLFPTFFSQPGFFFPRGQNGFFYLGFKLWGFLEPPFSFFFSPPKFLAFLRFVSFVFLNSPFHSLGF

SEQ ID NO: 150309 - protein, 59 aa, Glycine max
  unsure (1)..(59): unsure at all Xaa locations
  Clone ID: PAT_MRT3847_106751C.1.pep
WRHHRAXACLSCREVQKTMKESTELLERPSLLFVFNRSGCGETSRLVRRKVAGSVIAWH

SEQ ID NO: 150310 - protein, 91 aa, Glycine max
  Clone ID: PAT_MRT3847_106752C.1.pep
IKCYPPPRRLVLFVFLGHMVWPFCDLKKFKSLLFPYYINAQSIFQFFPPPDFVISLIRCSMFNSQCPRFPGLCRSLLLPPKVMWWSPLAPP

SEQ ID NO: 150311 - protein, 49 aa, Glycine max
  Clone ID: PAT_MRT3847_106753C.1.pep
YLVLPPLIRDRCLTKCGDRKRVVWEFAGSRSRHFLSHMNRPLLRAQSAL

SEQ ID NO: 150312 - protein, 77 aa, Glycine max
  Clone ID: PAT_MRT3847_106754C.1.pep
ALHNQHVLPSQELPCLHPRAGVRLLILTSTLSISDAAICLSSIARLLELPSLAIPDVYMFLTFRSNPISSLIEYNVN

SEQ ID NO: 150313 - protein, 126 aa, Glycine max
  Clone ID: PAT_MRT3847_106755C.1.pep
KILIQKKGKNIIIVRFPKLNFSLILIFLSFPLPEIIHSDNKWEGGGNNTGQKGGGGNNQPQGYNQQGLNPQQQLLQHLQQLQHMKRLQDLKLPQFKDRRLSNPNPNPNPKAGEIILSDEDDLSDDE

SEQ ID NO: 150314 - protein, 60 aa, Glycine max
  Clone ID: PAT_MRT3847_106756C.1.pep
IRQVVICLCLVCSLRWCPMLSLWDLLVSNLRVSLHDLSRLRVHSHCESRGILNLSGVELH

SEQ ID NO: 150315 - protein, 46 aa, Glycine max
  Clone ID: PAT_MRT3847_106757C.1.pep
SGRFFFFFFFFLTLYRKTIIIFGDRNFITPTHLFSFQKITKIIFNL

SEQ ID NO: 150316 - protein, 106 aa, Glycine max
  Clone ID: PAT_MRT3847_106758C.1.pep
GAYPGEGGELPGHTVIGDIAVTRNSTAGVGLINSPPNHDMYSIVDLAQLSHDLKNANPAADISGKSISKAGAGIIASAVVKGHATHVLISGHDGGTGVSRWTGIKN

SEQ ID NO: 150317 - protein, 263 aa, Glycine max
  Clone ID: PAT_MRT3847_106759C.1.pep
MMMMDPPMTPLGQMLLEEITPVVMLLSTPSVEQVSLKNGLSFLQTLTPFCSFNNIDVPVRTASDQPYRLHKFKLRLFYASDVRKPDMKVAKEQLKQVITEAGEKEFSESCSDVSEINHEFSSSSEYQNTPSWFRFLNKELVRVASFSDHEAFDHPVICLVAVSSKDEQPISRFVDLFNTNKLPSLLNDGAMDPKVSKRYLLVHDNQDGPADRYDFSHFYFQVIFLLSLAKIAMHILCLTPTYVKILCFQNLSSKLKFKVNCFP

SEQ ID NO: 150318 - protein, 337 aa, Glycine max
  Clone ID: PAT_MRT3847_10675C.1.pep
MVSDSIAAVPIPSAANTKNPGKKKRTNRSAKLKQYKIDARREQWLSQGAVKSKGCKDGLDDDGHAPPSPAEVKHSVEPLNTRRRGEEDDGLIHHDSDSESPTNCPAGVLCGTDSGTNFTGSSSGGSSSSSSSSSSSSGGCCSGNVTEVEEEEEGDDDDDDDDGCLDDWEAMADALAADDKRENPCPDSPPVVSPSEGSNLGSPNSKPESGRLFPWGSGNSRAWRADDAFRPQSLPNLSKQHSMPNPDRRGVPWGRAPTPSSCPICCEDLDLTDTSFMPCLCGFRLCLFCHKRILEEDGRCPGCRKPYECEPVETEASVLGDSLTLRLARSCSMIERS

SEQ ID NO: 150319 - protein, 66 aa, Glycine max
  Clone ID: PAT_MRT3847_106760C.1.pep
QKGEIHGSILTIINRADLQGWTLRAYFSYPIARSHNLGTSGLPIVQQPLEIKEAHSSPGVASPLDM

SEQ ID NO: 150320 - protein, 319 aa, Glycine max
  unsure (1)..(319): unsure at all Xaa locations
  Clone ID: PAT_MRT3847_106761C.1.pep
MAAETEPKKIIIDTDPGIDDAMAIFLALQSPEVEVIGLTTIFGNVYTTLATRNALHLLEVAGRTDIPVAEGSHVTSTNGTKLRVADFVHGVDGLGNQNFPPPKGKPIEESAASFLVHQAKVNPGKVTVVALGPLTNIALAIQLDPEFAKNIGQILILGGAFAVNGNVNPAXFGDPEAADVVFTSGADVLAVGINVTHQDVLTESDREKLASSNGKFVQYLNKILDVYFSYHREAYNVKGVYLHDPTVVLAAVDPSLVTCIEGIVRVQTSGITRGITILYNKQKRFAEINEWSNKPTVKVAVTVDAPRVMKLVMDRLVDS

SEQ ID NO: 150321 - protein, 100 aa, Glycine max
  unsure (1)..(100): unsure at all Xaa locations
  Clone ID: PAT_MRT3847_106762C.1.pep
TLCPGRSTGTCHQPIYGPXNPPFVEPNTDIRLDAHVINYDTLLVGTALTFGGMATSKDSAEACFEARFSCTGHDRLGRYPCYPGELRMDHTSAASFKDNA

SEQ ID NO: 150322 - protein, 424 aa, Glycine max
  Clone ID: PAT_MRT3847_106763C.1.pep
MGVIDFYNTGALCWVKSNANLKQQVGLAPRPICSFEGNNQRKFVAMASTVPVEQVNNGPLQVTGDSFIREHLRKLAPYQPILPFEVLSARLGRKPEDIVKLDANENPYGPPPEVMEALGSMQFPYVYPDPESRRLRAALAHDSGLEAEYILAGCGADELIDLIMRCVLDPGDKIVDCPPTFTMYEFDAAVNGALVIKVPRRPDFSLNVEQIAEVVKQEKPKCIFLTSPNNPDGSIIDDEVLLKILELPILVILDEAYIEFSAIESRMSWVKKHDNLIVLRTFSKRAGLAGLRVGYGAFPLSIIEYLWRAKQPYNVSVAAEISACAALQNPTYLENVKNALLKERGRLYDLLKEVPFLRPFPSHSNFILCEVTSGKDAKKLKEDLAQMGVMIRHYDKKELKGYVRVTVGKPEQTDTLMKCLKRLS

SEQ ID NO: 150323 - protein, 63 aa, Glycine max
  Clone ID: PAT_MRT3847_106764C.1.pep
SKHSNLRPCSSPLKGSPFSRLSYLLVSTATESSRHASPKTITLNSTFAVATFSSFRITAGASH

SEQ ID NO: 150324 - protein, 74 aa, Glycine max
  Clone ID: PAT_MRT3847_106765C.1.pep
ARDGGREKTKNITNLVLSSNPTMPMGCFQGSMGRLQLLLSIQCLSHFSHIGKLSITEITFPMSTSPTSNAFNVT

SEQ ID NO: 150325 - protein, 83 aa, Glycine max
  Clone ID: PAT_MRT3847_106766C.1.pep
VTFMDYLIGTLERQLKLLHSLGARQLVVFGLGPMGCIPLQRVLTTTGNCREKANKLALSFNKAASKLIDDLAENFPDSSYKFG

SEQ ID NO: 150326 - protein, 90 aa, Glycine max
  Clone ID: PAT_MRT3847_106767C.1.pep
CFIFRAFFLGKGPFKTPFDPLSVPFSPKVWAYAPTFAPGLCGGPPAFHFFGPFFGPLGFSPFFPNVFPPLWPPILFLTPFFFFFFFFGSP

SEQ ID NO: 150327 - protein, 114 aa, Glycine max
  Clone ID: PAT_MRT3847_106768C.1.pep
MGSKFPMTQLGTSPGYMISPHRDFCVYSKYSRRISSEQKFPFKFVAQSLGHKWKLNDISTSSIQERLNVLMSRTQNFWNEVTFPLAKPGQSRKPDTENDCGFQVMEDIFMIEQT

SEQ ID NO: 150328 - protein, 51 aa, Glycine max
  Clone ID: PAT_MRT3847_106769C.1.pep
DPKNLLYDIKKSKEVRAYYLIKPQSVSHSANPELCLLSPRSPPGSRSIRQV

SEQ ID NO: 150329 - protein, 99 aa, Glycine max
  Clone ID: PAT_MRT3847_10676C.1.pep
NRIQRFSHGFRFNRRRADSLRRKHQEPGEEEEGSIFFNSISILIFLSFTCIPFSVLISLIVILCVLQTNRSAKLKQYKIDARREQWLSQGTRCSHYCFR

SEQ ID NO: 150330 - protein, 48 aa, Glycine max
  Clone ID: PAT_MRT3847_106770C.1.pep
KSALFVNVFVLKPHYYVFFELNQKVWGNLRPVELVFMSIVSGSFGLFT

SEQ ID NO: 150331 - protein, 81 aa, Glycine max
  unsure (1)..(81): unsure at all Xaa locations
  Clone ID: PAT_MRT3847_106771C.1.pep
SWHCYGAAIILNNDRGCHDHXILWLVPFIGAALAALYHQVVIMAIPFKTKMMQSNRSCLIKLRTTNKIKTMFLGLLFISSR

SEQ ID NO: 150332 - protein, 56 aa, Glycine max
  Clone ID: PAT_MRT3847_106772C.1.pep
FLTASSVPSSVALSESHSSSSSSSCSYTSTLTLNFNSDGHLDSQSNFRYASSSFAS

SEQ ID NO: 150333 - protein, 58 aa, Glycine max
  Clone ID: PAT_MRT3847_106773C.1.pep
MILMHRESVPHQPSSLLKDSWDVKFIVMRLRAIRVCNFGPPTSYSNHYIRLCKSKANQ

SEQ ID NO: 150334 - protein, 184 aa, Glycine max
  Clone ID: PAT_MRT3847_106774C.1.pep
MAAVSLRLLSFLCWLYVIIISQASAQTCDNSRGNYTINSTYHNNLNTLLSNFSSHTEINYGFYNFSYGQEPDKVYTIGLCRGDQNQNQCLKCLNESRVSLADKCPNQKEAIDWRGECMLRYSNRSIFGLMENNPKVLLVRQENVTGSLDEFTEVLGNLMRNLSSTAALGDSRRKYATRSMPTSN

SEQ ID NO: 150335 - protein, 92 aa, Glycine max
  Clone ID: PAT_MRT3847_106775C.1.pep
HMLTKFLFKCIFFQIQTNISILYNSFTKTIFNNEIASFFIFCTFPSTKTNQRKEKNKNRHIQKQQNHVLHIRKTLTNIYNKKIRPSKHGSVS

SEQ ID NO: 150336 - protein, 59 aa, Glycine max
  Clone ID: PAT_MRT3847_106776C.1.pep
YRWGSLCVYLECGSLRWLKENLSKPSHILIVHMNLLSSRWWCWKTANCSKFGKLACLPP

SEQ ID NO: 150337 - protein, 55 aa, Glycine max
  Clone ID: PAT_MRT3847_106777C.1.pep
KPIIFIKAIFFFTIYIFFDRISNFLKLINNSRILIINTLYSIIYIKKLFYFLLTY

SEQ ID NO: 150338 - protein, 92 aa, Glycine max
  Clone ID: PAT_MRT3847_106778C.1.pep
NLKIAPIKKKKRRPNPRLGLINWNKKRSPPRVGGGFWKNEPSIQSSGGSVIGTHPPSVPIGEGPKREGNLCFPQTGGVYRIPGGLGGPRRGG

SEQ ID NO: 150339 - protein, 45 aa, Glycine max
  unsure (1)..(45): unsure at all Xaa locations
  Clone ID: PAT_MRT3847_106779C.1.pep
EHKGHHHAELNGDLKEEQHHGEHKXVLVYKIKNKIHGNVHSRVRK

SEQ ID NO: 150340 - protein, 44 aa, Glycine max
  Clone ID: PAT_MRT3847_10677C.1.pep
FFFIRNCLSKDQPVAFKNKHLLLWPPPLFIAININVIPERHLLP

SEQ ID NO: 150341 - protein, 75 aa, Glycine max
  unsure (1)..(75): unsure at all Xaa locations
  Clone ID: PAT_MRT3847_106780C.1.pep
MSDDEREEMEFDLTSPEVVTMYKSAAEIVNKALHLVISECKPKTLIVDLCEKXDSYIIEQTGNMYKNVNRKIERG

SEQ ID NO: 150342 - protein, 85 aa, Glycine max
  Clone ID: PAT_MRT3847_106781C.1.pep
IAIHFLLRILIMHTEQLSHYMRVNHRRKGDLLYCCLLLTRAGENDHSQGQPKQGMNAETDSASAMRLSTRGNSPDLHSPLQGTYT

SEQ ID NO: 150343 - protein, 82 aa, Glycine max
  Clone ID: PAT_MRT3847_106782C.1.pep
MRVIVPLQGVVQGTGGLFWGSVIPCALFYFLQLYFKTKTPHHPAPSQNNHKDDDSTTFHRSLSSNHRHFTTTGFGYVSRANS

SEQ ID NO: 150344 - protein, 91 aa, Glycine max
  unsure (1)..(91): unsure at all Xaa locations
  Clone ID: PAT_MRT3847_106783C.1.pep
MCHGLNFTTAVFYCHIVREAAAYMAPLVAGDGTHTQALAACLSDTSXMNHHMLDELMGVDPGTNPVCRFLGSKAILWYASYTVEPAYQTNV

SEQ ID NO: 150345 - protein, 200 aa, Glycine max
  Clone ID: PAT_MRT3847_106784C.1.pep
SFILHVQSGSRGTVGRDPPWHVILSVAVFIFFYRRVIDPLVGRLKKKSSKGLTELQRMGIGLVIAVMAMVSAGIVECYRLKYADSVCPHCSGTSSLSIFWQIPQYTLIGASEVFMYVGQLEFFNAQTPDGLKSFGSALCMTSISLGNYVSSLLVSIVMKISTEDHMPGWIPGNLNRGHLDRVYFLLSILTSIDFGPFYLH

SEQ ID NO: 150346 - protein, 71 aa, Glycine max
  Clone ID: PAT_MRT3847_106785C.1.pep
LQQLSGDINEEVDSHNRMLDRMGNDMDSSRGVLSGTMDKFKMVFETKSSRRMFSLVASFVVLFLIIYYLTR

SEQ ID NO: 150347 - protein, 83 aa, Glycine max
  Clone ID: PAT_MRT3847_106786C.1.pep
ERQGEFTNHALLPTGRYRYCRMVVLKPMVNEGVWRFCRITMRDPVLVTSGKGRAYPKSHAPLEKHSNKKRGGKATLGEISFTE

SEQ ID NO: 150348 - protein, 126 aa, Glycine max
  Clone ID: PAT_MRT3847_106787C.1.pep
MNARRDGRNNRVALFDGIEEGGIRASSLYSSTSSHEIDEHDNEQALDGLQDRVNLLKRLSGDINEEVDSHNRMLDRMGNDMDSSRGVLSGTMDKFKMVFETKSSRRMFSLVASFVVLFLIIYYLTR

SEQ ID NO: 150349 - protein, 185 aa, Glycine max
  Clone ID: PAT_MRT3847_106788C.1.pep
MRKWIVITVCWIVWETYGLFERSPLGTWINSKWYLRQNPAEECFHNQSSASLRRDWTISRAMNARRDNRNNRVSLFDGIEEGGIRASSVYSSSHEIDEHDNEQALDGLQDRVNLLKRLSGDINEEVDSHNRMLDRMGNDMDSSRGVLSGTMDKFKMVFETKSNQRMFTLVASFVVLFLIIYYLTR

SEQ ID NO: 150350 - protein, 165 aa, Glycine max
  Clone ID: PAT_MRT3847_106789C.1.pep
PSPQGLARVCYIKALKIQHTRAHQGLARVHFLKNDKAAAYKEMTNLIEKARNNASAYEKRSEYGDREITKADLEMVTRLDPLRVYPYRYRAAVLMDSHKEEEAIAELSRAIAFKADLHLLHLRAAFHEHKGDVLGALRDCRAALSVDPFHQKMLELHCRVNSHEP

SEQ ID NO: 150351 - protein, 124 aa, Glycine max
  Clone ID: PAT_MRT3847_10678C.1.pep
SHHKFIQNKTQFQLEPTKKIKKLLKTQNTFIINLGLGSKPKTPNLVVGGGRFRSRRWRYRSRSHQHGRSRSATGNELQIWSFPSFPLQSLAVTQVRGSASSIGLRLGFEGNGSGGLGSQNWGWM

SEQ ID NO: 150352 - protein, 214 aa, Glycine max
  Clone ID: PAT_MRT3847_106790C.1.pep
VSSEHERLVYEGWILYDTGHCEEGLQKAEESISIKRSFEAYFLKAYALADSSLDSSCSSTVISLLEDALRCPSDNLRKGQALNNLGSVYVDCGKLDLAEDCYIKALKIQHTRAHQGLARVHFLKNDKAAAYKEMTNLIEKARNNASAYEKRSEYGDRDLTKADLEMVTRLDPLRVYPYRYRAAVLMDNHKEEEAIAELSRAIAFKADLHLLHLR

SEQ ID NO: 150353 - protein, 83 aa, Glycine max
  Clone ID: PAT_MRT3847_106791C.1.pep
CCRNRTLYFLIGNLSFSANVWPCTKVKYSHTRKDLMGLTGKPLVIQEGYRKISKKFYKLPKFCLTLAHFEWGLPKKNHSRRVL

SEQ ID NO: 150354 - protein, 120 aa, Glycine max
  unsure (1)..(120): unsure at all Xaa locations
  Clone ID: PAT_MRT3847_106792C.1.pep
LSIYKRIEPTSCYFLLRLCASEFLILYPAIFNFLVGCDRICTQQKLHTVSSSKLLSSAXLILTWAVLCIGLSLVPIRTMSHKMPDGSCGISHRHFLYSGGICRVDPGLHCIAYYLPATAS

SEQ ID NO: 150355 - protein, 78 aa, Glycine max
  unsure (1)..(78): unsure at all Xaa locations
  Clone ID: PAT_MRT3847_106793C.1.pep
FSIGPANIMHDSVSRHYTSRVVSYVIRNMKAKEPLLDPRSEYLQSLSATLLIKRYPAPNVRIKESPXXXXXXXXFSTR

SEQ ID NO: 150356 - protein, 35 aa, Glycine max
  Clone ID: PAT_MRT3847_106794C.1.pep
TQVRSVSISIKMVRSTLKVDMLHSYCQVIFNNECS

SEQ ID NO: 150357 - protein, 70 aa, Glycine max
  Clone ID: PAT_MRT3847_106795C.1.pep
SIFSYSYVYFLHILVEKLFQKKKKKKKKKKKKKKKKKKKKKKKKKKNKKKKKKKKKKGGAPNKMSFSPRK

SEQ ID NO: 150358 - protein, 116 aa, Glycine max
  Clone ID: PAT_MRT3847_106797C.1.pep
AGFKKLRGRFFPGGCDPLFQRPDGGPFNGPPGKFDPKRFLGALFPKVFLAPGPRGQKKHRGGKKLLPPQFLGALIFPRCGQNIFPPPPGQKRGPRTFVVGLILGEGGKDLNPSPPL

SEQ ID NO: 150359 - protein, 62 aa, Glycine max
  Clone ID: PAT_MRT3847_106798C.1.pep
DAAEIVPYEEPLVQHEETVAYCACDPVAVVGQEGGAHNATAMYGGDVALTTDTNLGATCNIW

SEQ ID NO: 150360 - protein, 42 aa, Glycine max
  Clone ID: PAT_MRT3847_106799C.1.pep
YYASRGPNVLPLILSHRIHSQVLLVLHSAVCLHVPDQIRFFT

SEQ ID NO: 150361 - protein, 64 aa, Glycine max
  Clone ID: PAT_MRT3847_10679C.1.pep
GHIVLFSRPLFVLSLQRMDVAFTAFRSPLIILRGPGLASLSALIGSTSGISRRQLFSSVCNLAL

SEQ ID NO: 150362 - protein, 66 aa, Glycine max
  unsure (1)..(66): unsure at all Xaa locations
  Clone ID: PAT_MRT3847_1067C.1.pep
TPTSTSPKCGGEIIRFIISSLFDQMLKYRDDGLXSDHGYYRYHDCIDPGGSFNSFGTSADDNTHRN

SEQ ID NO: 150363 - protein, 46 aa, Glycine max
  Clone ID: PAT_MRT3847_106800C.1.pep
FVFFWKTIFHGEYKRKVSYKCINRARKLLYEGICILWIVKKVIVVK

SEQ ID NO: 150364 - protein, 80 aa, Glycine max
  Clone ID: PAT_MRT3847_106801C.1.pep
PRAFFPFVCLNFVVFLGTPGGIETREVAVNAFLPASPAFEAVKRSLGLFAAFIVEGFSRLPIFYPLPGFFPPGPFLVFCL

SEQ ID NO: 150365 - protein, 226 aa, Glycine max
  Clone ID: PAT_MRT3847_106802C.1.pep
MAPKSDSAEAIVLNFVNEQNRPVNAQNVADALQKFNLKKAAIQKALDNLADGGRISFKEYGKQKIYLARQDQFQIPNTEELNQMKEQNAELQKQLEDQKKATSEVEAEIKSLQSNLTLEQIFEREVNLRLEVQEMEEKLTKLRGGVTLVKPEERKAVENMLSEMIGQWRKRKRMFKDLWDTLTENSPKDPKEFKEELGIEYDEDVGVSLQSYNDLIQQGKKRPRGK

SEQ ID NO: 150366 - protein, 81 aa, Glycine max
  Clone ID: PAT_MRT3847_106803C.1.pep
ATQKNKKMKQQRKPRKEFTQHTTLKVNSTCKMSQNLLSHTNKPQKEKQQLNKEQNGGKIEGKKTELESSQVRTQRSMSRLQ

SEQ ID NO: 150367 - protein, 70 aa, Glycine max
  Clone ID: PAT_MRT3847_106804C.1.pep
LNELLPKALQTLSRELPVRPTIIQILHMEFTDDARVDEYGDINQNMPTRARFGESKAIYLQFLCQCPNPL

SEQ ID NO: 150368 - protein, 108 aa, Glycine max
  Clone ID: PAT_MRT3847_106805C.1.pep
PQTVEVLLRVRISHYYRRIDDAHCHLLILTSHKVLQSHNTVNQPSSNDLKMQILIDEQSPCKLSQKGTSKRSPSTNYFTISHSKPSGNNHTAVSALEPACMGQYLLIC

SEQ ID NO: 150369 - protein, 161 aa, Glycine max
  Clone ID: PAT_MRT3847_106806C.1.pep
NFMAMAILVITMIVNICIQFVTGVIYLFWVEHAVIMLIMLILLMTMASSAISLPKMKHYFELKYKMNEEALKEGSKLLGEEGNQMVNRLRDQLMKIWMMAHTSSPQFVLGRSVTGTASGAFCLLSTLTLVEAMLRSYLMPWSFDFCTGDTDYKWSIILILI

SEQ ID NO: 150370 - protein, 79 aa, Glycine max
  Clone ID: PAT_MRT3847_106807C.1.pep
HVRLFINGDRRKGYRSGYICRTFLHFREIKFCIFIFQGRIYQRITHSRTKMTIYLPFYILLLSRLIIFYVLLITFTYCQ

SEQ ID NO: 150371 - protein, 29 aa, Glycine max
  unsure (1)..(29): unsure at all Xaa locations
  Clone ID: PAT_MRT3847_106808C.1.pep
MVEAKVNAGVHDINTTXLSEPILLTSQNQ

SEQ ID NO: 150372 - protein, 54 aa, Glycine max
  Clone ID: PAT_MRT3847_106809C.1.pep
VQSLGDKFVYLVKICFLNKGDYFVRMNCWMWSSKGQCLKYLWFGFCFVTFFPCP

SEQ ID NO: 150373 - protein, 39 aa, Glycine max
  unsure (1)..(39): unsure at all Xaa locations
  Clone ID: PAT_MRT3847_10680C.1.pep
PXYXXFMXNXXRFSLXSXKHFXGXXRLHVXXASRACRTS

SEQ ID NO: 150374 - protein, 48 aa, Glycine max
  Clone ID: PAT_MRT3847_106810C.1.pep
KAESFGMIIGKKEKKPCTSNMPTQLWCDSIYKTRRVYLGFYNFLDPNS

SEQ ID NO: 150375 - protein, 31 aa, Glycine max
  Clone ID: PAT_MRT3847_106811C.1.pep
LWKCNLCLRGEHFSVSGMTVSYVAAPYSNFS

SEQ ID NO: 150376 - protein, 96 aa, Glycine max
  unsure (1)..(96): unsure at all Xaa locations
  Clone ID: PAT_MRT3847_106812C.1.pep
HQTLKFITPATIGITLLLLRGLSLTGTVISLMIATPILVVYGRILVPDADGLGPSXLHGCLISGGSGVAAIADLTWIYNDVSGNQPAGYDTLDYAK

SEQ ID NO: 150377 - protein, 107 aa, Glycine max
  Clone ID: PAT_MRT3847_106813C.1.pep
LLSIYTPNNYFCCNLVQIYLIGSSSDCGIHLLDFYPSTNSPSHVDYKEDMQENSRRHNRSNQNRFISLSEGVISCAAHPLYNAIVAGTKKTSLLVISQRQESCRSDD

SEQ ID NO: 150378 - protein, 113 aa, Glycine max
  unsure (1)..(113): unsure at all Xaa locations
  Clone ID: PAT_MRT3847_106814C.1.pep
PFLSWCFGGAFVVSLGVVSRPFGVWGWGSSSASLLGWGALWLVLVPVAVRVASCSCFSCLSVPVAVTSVLPSVPFFSAAFLRRRRCCSVPVCAWVAASYPILSRGSWXGVFIY

SEQ ID NO: 150379 - protein, 85 aa, Glycine max
  Clone ID: PAT_MRT3847_106815C.1.pep
INTDGVNLELSLDDISDDGCLSPCCQDCRSGLQSPVHIISGLNGESNRHIIASPEMNKFLTHEPPDGCEKVNITRDIKKWICFTS

SEQ ID NO: 150380 - protein, 60 aa, Glycine max
  Clone ID: PAT_MRT3847_106816C.1.pep
FKRVPLKGVYLEKVKAFLENQKGGLLPKTPFKFLNAGRKKLQQVNLKTGQPLKKLNWGGS

SEQ ID NO: 150381 - protein, 265 aa, Glycine max
  Clone ID: PAT_MRT3847_106817C.1.pep
MQSLSLSMSLRSSSLVNFLLLGSETRVRRRRRSVIVACALEGDSGSSSTSSFLSRTQTYALLKQQLQVAAKSEDYKEAARIRDSLKQFEDEEPVLRLRRLLKEAIAEERFQDAASYRDELNNIAPHSLLKCCSDATTLGIRVQVRSVYIEGRSQPSKGLYFFAYRIRITNNSDHPVQLLRRHWIITDANGRTENVWGIGVVGEQPLILPGNSFEYSSACPLNTPNGRMEGDYEMIHVERVGSQSFNVAIAPFSLCLLGDDEGCII

SEQ ID NO: 150382 - protein, 52 aa, Glycine max
  Clone ID: PAT_MRT3847_106818C.1.pep
FCEGSIFFRFYSTDKDDKRWIILSPLFNNSHSYLKKYIYKRNIRPIKAKRNS

SEQ ID NO: 150383 - protein, 105 aa, Glycine max
  unsure (1)..(105): unsure at all Xaa locations
  Clone ID: PAT_MRT3847_106819C.1.pep
KPMDIMTALQLVLRKCLAYGGLXRGLHDGAKLIENHAALLXVLANKCNQPDSVLLLRALCAYCNDCLLTVPTAXTLAEWAGLIEIDTQGKARKVTGCSCXDVKGF

SEQ ID NO: 150384 - protein, 71 aa, Glycine max
  Clone ID: PAT_MRT3847_10681C.1.pep
RTGIPGSTTRPLSHFLIKLTHFFMNAKLQNEITATYLLHMATSTIEIQPRSILISFLWVFSPLSYKKKYLF

SEQ ID NO: 150385 - protein, 175 aa, Glycine max
  unsure (1)..(175): unsure at all Xaa locations
  Clone ID: PAT_MRT3847_106820C.1.pep
XXAXKLXTGSAWMVLSHSFVEYVVWGWDNLPRTLLMYYTNFISSPEGYFQTVACNEPELAKTVVNSDLHYISWDNPPKQHPHVLTINDTTKMIASNAAFARKFKHNDPVLDVIDKKLLHRENEQLFTPGGWCSGNPRCSKVGNIHRITPSPGSKRLRLLVTRLTWMAKFGQKQCI

SEQ ID NO: 150386 - protein, 66 aa, Glycine max
  Clone ID: PAT_MRT3847_106821C.1.pep
EEDLFPGFESVTSRSQDYNLTDAPRHSLNQMKIGHYSCFHGPILCYIHHDPAEEFEESNFINTKHA

SEQ ID NO: 150387 - protein, 87 aa, Glycine max
  unsure (1)..(87): unsure at all Xaa locations
  Clone ID: PAT_MRT3847_106822C.1.pep
QTWALTRNGSSHCSSSNKSVAVRPLLKDMVSIRVVIXILASRAASVKFLLSTRFNAVELARICTSDRWLFPPGGLSSTEDLYYGSRS

SEQ ID NO: 150388 - protein, 89 aa, Glycine max
  Clone ID: PAT_MRT3847_106823C.1.pep
LHLLCKLAVQFVAVQVFAPSGGLFPPPKHKLYLPVLALYALPLTASTSRAFSLPRQRHYLLVPPLTGVVAFAVLLSLPLSSKPPPPLVP

SEQ ID NO: 150389 - protein, 188 aa, Glycine max
  Clone ID: PAT_MRT3847_106824C.1.pep
MAYQTPDQDSGSDPKTPTRLYNPYKDLEVPIRNLYQLPTSPEYLFVEEARRKRRSWGENLTFYTGCGYLSGAVGGAASGLVGGVKSFESGDTAKLRVNRVLNSSGHAGRAWGNRLGVIGLLYAGIESGIEATRDTDDVWNSVAAGLGTGALYRAARGVRSAAVAGAVGGVVVGVAVTAKQALKRYVPI

SEQ ID NO: 150390 - protein, 104 aa, Glycine max
  unsure (1)..(104): unsure at all Xaa locations
  Clone ID: PAT_MRT3847_106825C.1.pep
LEHACGLASANTCWSHSLFRESKLMXHNALVLRIASHNKLLDQLSHDALYLPIYQFTPLCRILYKAPSCVQWGEHALPLSPFXIVLECNLNPNTDELSDIKYVN

SEQ ID NO: 150391 - protein, 92 aa, Glycine max
  Clone ID: PAT_MRT3847_106826C.1.pep
TTILFLECLQGNAYSRKTRYVKRLLSFSCCLSTTTPTSPLCRRCHALFFRSGHRTDHPHALCLSLTHSQSLCLSVSLPLILSRLAPICRYFS

SEQ ID NO: 150392 - protein, 770 aa, Glycine max
  Clone ID: PAT_MRT3847_106827C.1.pep
MVDKMNMLIFKSLQISLLLVFSIRNTTAEKKTHHTKHTYIIHMDKFNMPESFNDHLLWFDSSLKSVSDSAEMLYTYKKVAHGFSTRLTTQEAELLSKQPGVLSVIPEVRYDLHTTRTPEFLGLAKYSTLSLASGKQSDVIVGVLDTGVWPELKSFDDTGLGPVPSSWKGECERGKNFNPSNCNKKLVGARFFSRGYEAAFGPIDEKTESKSPRDDDGHGSHTSTTAAGSAVVGASLFGFANGTARGMATQARVATYKVCWLGGCFTSDIAAGIDKAIEDGVNILSMSIGGGLMDYYKDTIAIGTFAATAHGILVSNSAGNGGPSQATLSNVAPWLTTVGAGTIDRDFPAYITLGNGKIYTGVSLYNGKLPPNSPLPIVYAANVSDESQNLCTRGTLIAEKVAGKIVICDRGGNARVEKGLVVKSAGGIGMILSNNEDYGEELVADSYLLPAAALGQKSSNELKKYVFSSPNPTAKLGFGGTQLGVQPSPVVAAFSSRGPNVLTPKILKPDLIAPGVNILAGWTGAVGPTGLTEDTRHVEFNIISGTSMSCPHVTGLAALLKGTHPEWSPAAIRSALMTTAYRTYKNGQTIKDVATGLPATPFDYGAGHVDPVAAFDPGLVYDTSVDDYLSFFCALNYSSYQIKLVARRDFTCSKRNNYRVEDLNYPSFAVPFNTAYGVKGGSRKPATVQYTRTLTNVGAPATYKVSVSQSPSVKIMVQPQTLSFGGLNEKKNYTVTFTSSSKPSGTNSFAYLEWSDGKHKVTSPIAFSWT

SEQ ID NO: 150393 - protein, 454 aa, Glycine max
  Clone ID: PAT_MRT3847_106828C.1.pep
MKHWMSMRRMAVGAVSNSTLFLPSSLLSSSKPNPLTIPFSFYLTKTSPFSISVLTRQRRFLSVSSLTADHHNLSDFGDGDSVAISNEGLKMLLKGMTYPELEKWVQSHGYRPGQAMMLWKRMYGNNIWAHHIDELEGLNKDFKKMLNENAEFKALTQKEIRTASDGTRKILFTLEDGLVIETVVIPCDRGRTTVCVSSQVGCAMNCQFCYTGRMGLRRHLTAAEIVEQAVFARRLLTDEVGSITNVVFMGMGEPLHNIDNVIKAADIMVDEQGLQFSPRKVTISTSGLVPQLKRFLHESNCALAVSLNATTDEVRNWIMPINRKYKLELLLQTLREELCFKKNYKVLFEYVMLEGVNDSDGDAERLIELVKGIPCKINLISFNPHSGSFFKPTKDERMIEFRNTLAGAGLVVILRLSRGDDQMAACGQLGKPGTIQAPLLRVPEQFQMAIGSSA

SEQ ID NO: 150394 - protein, 99 aa, Glycine max
  unsure (1)..(99): unsure at all Xaa locations
  Clone ID: PAT_MRT3847_106829C.1.pep
XSXXLFNFXXXXIPFXHSPHYXXXFXXXXLXYXLXLXXXLXFXXHXFSSYXXXXXXIXXLXLXXKHISXFXLFXPFXSXLISXXXYKQSYLXLYSYSXS

SEQ ID NO: 150395 - protein, 53 aa, Glycine max
  Clone ID: PAT_MRT3847_10682C.1.pep
MVRFSNNDIGLLNFTTFLLSIPILVAGVWLSKQGATECEQWLEKPVIALGVFL

SEQ ID NO: 150396 - protein, 105 aa, Glycine max
  Clone ID: PAT_MRT3847_106830C.1.pep
QLLEPVTATLAEETNWLLCRVLCIHLMQYPPCAYRKADSKKSNSLSKQAVFLGVCIFECYISSTGIITRPVLNNNFHIEFYTLPKIKISGNFNILNCTTESKKSY

SEQ ID NO: 150397 - protein, 51 aa, Glycine max
  unsure (1)..(51): unsure at all Xaa locations
  Clone ID: PAT_MRT3847_106831C.1.pep
FXXGFFEXRTXDCLEVXTLVXSXFKAKXLAYSXQRLPCLRSTDXCCCXXFA

SEQ ID NO: 150398 - protein, 367 aa, Glycine max
  Clone ID: PAT_MRT3847_106832C.1.pep
MDLVSRRYLIYVSQHGSQPQALSPITSPGSSIFHPHQHASSTSFPIIAIAIIGIMATAFLLVSYYIFVIKCCLNWHRIDVLRRFSPSRRREDPPPTYSPATDTRGLDEALIRLIPVTQYKAQQGDDRDFGERRFCECAVCLNEFQEDEKLRVIPNCSHVFHIDCIDVWLQSNANCPLCRTSISLTSRFHIDQLLTLRPSSSSYPHDQTPPRENLIGGDEDFVVIELGSDHDRSQNLQERGNALELPTCPISPSSPRKLLEHRNVQKKKAMKLQKVTSMGDECIDIRAKDDQFFSVQPIRRSFSMDSSGDRRFYLAVQEALRNQNWQVNEVNSIEGCSGIGSRAKRSFFSFGHGSRSRSSVQPVSLDP

SEQ ID NO: 150399 - protein, 35 aa, Glycine max
  Clone ID: PAT_MRT3847_106833C.1.pep
KTTKGYRVEFTTNCFFFHKTTYGLLNQNMNVDRAY

SEQ ID NO: 150400 - protein, 129 aa, Glycine max
  Clone ID: PAT_MRT3847_106834C.1.pep
AANIKGDVDSDCLDYEILGEDLTMGEPIGQGSCGTVYHAQWYGSDVAVKVFSKHEYTDDTILSFKQEVSVMKRLRHPNIILFMGAVTSPQHLCIVTEFLPRGSLFRLLQRNTSKIDWRRRVHMALDVAR

SEQ ID NO: 150401 - protein, 108 aa, Glycine max
  unsure (1)..(108): unsure at all Xaa locations
  Clone ID: PAT_MRT3847_106835C.1.pep
FGEASYGWSRNWRKDNTINRLRWCMMAHESRSLDSDKTVNAGFWIIEGPKTVQDSAKMELEXIHDNIRSPKNKIDLHMDNVQRLKIHQIIKNAKLGIXNYEQENELAN

SEQ ID NO: 150402 - protein, 139 aa, Glycine max
  Clone ID: PAT_MRT3847_106836C.1.pep
MKQLIRRLSRVADSSNYTLLRADSAASQRCHHRRRRAESFRLAAAAKIRRSSAVVPEGHVPIYVGDEMERFVVCAELLNHPVFVKLLNESAQEYGYEQKGVLRLPCRVFVFERVLDALRLGLDARDVAELVNFSPEEFS

SEQ ID NO: 150403 - protein, 57 aa, Glycine max
  Clone ID: PAT_MRT3847_106837C.1.pep
KKKKPGFFFSKKRIHFLLLKKTPNLLARAKSLHQKTLFFSHPFGWTHVIPKGGTRFF

SEQ ID NO: 150404 - protein, 79 aa, Glycine max
  Clone ID: PAT_MRT3847_106838C.1.pep
LLIKSNTYNIHISYLNFNQHNVVYLIWACSNPLHSPIYSFTIPYPIYYVNILITTPHTIAFSIRPSNSMAIGTRLITFN

SEQ ID NO: 150405 - protein, 119 aa, Glycine max
  unsure (1)..(119): unsure at all Xaa locations
  Clone ID: PAT_MRT3847_106839C.1.pep
FNPNPCSDAWSLEFLKRAGLHCYIIXDTGWTANPMQVVQQTIERFISFHECGDNNXSGVNAHNPPEFNRWKGKMTLPQGTITSADRMPISIGGGACTKNAILKNMPKAFLSMWRYFGGD

SEQ ID NO: 150406 - protein, 166 aa, Glycine max
  Clone ID: PAT_MRT3847_10683C.1.pep
RVIGSTGSDEKVRLIKEEFGYDDGFNYKKEEDLDAVLSKFFPNGIDVYLDNVGGKMLESVLNHVNKFARIPLCGMISQYNQAWTEREGVRNLLNLVGKEVRMEGFLLKTHFNRFGDFAKEIEGHIKEGRLKPKTKINFGIESFLDSLNSLFSSSNIGKVVIQVNKA

SEQ ID NO: 150407 - protein, 102 aa, Glycine max
  Clone ID: PAT_MRT3847_106840C.1.pep
SISASGTPSVIDHEIDMDSWFRQVINELNSYPTTVDRARKTRKVLGHIFRRVLTWIWYKCRGAYGLLRRDYMPNGWRVIAVLAAATALTLTAIQTHYAIHRN

SEQ ID NO: 150408 - protein, 289 aa, Glycine max
  Clone ID: PAT_MRT3847_106841C.1.pep
MCPFPFPFFVTVLSGLLLAAFYSYLKRNKEMGAKKWFKIIVKLKKSKKDKSKKEQITDENSNEYSNGKQSVPKSQVSIANEGLMMDRTVPSKLMDDIAATRIQNAFRSFMARRTLHHLRGAEKFEALIQDHLAREQTATALSYIHSWSRTQEQIRARRICMITEARIKQKKLETQLKIEAKIQELEVEWCNGSETMEEIISRLHQREEAAIKRERAMAYAFSHQWRPNCSQYFGQASYSLGKESWGWSWTERWVAARPWEVRVRGQTTKTTKLNGHAGAKNQIRQDEPK

SEQ ID NO: 150409 - protein, 103 aa, Glycine max
  Clone ID: PAT_MRT3847_106842C.1.pep
RMHTLGSWVESSRLTFALNANTKAVMATTSLSWNPNTLILERKARHILIPAGAPTTKRSLFMHGTRSMCINSHRDDLQFFIWACAKRVHHVTGKDTAVHDAHE

SEQ ID NO: 150410 - protein, 44 aa, Glycine max
  Clone ID: PAT_MRT3847_106843C.1.pep
SAQPTREGTTIQAAHDARPRSKPVLVVGMLKVLAHNHDPIYISP

SEQ ID NO: 150411 - protein, 100 aa, Glycine max
  Clone ID: PAT_MRT3847_106844C.1.pep
FKNIIIFYHLKVKYNITIKYKKDSLNRNQINKRSQRSIIKISKLTHYYHHHNCVTSILMIVIATTIDNGGGSNDDNQDDGGDNDHGVGGDDDNALTIILR

SEQ ID NO: 150412 - protein, 107 aa, Glycine max
  Clone ID: PAT_MRT3847_106845C.1.pep
MEHGSYTDQSKSTFSLVDEDHTFANAVRFTLNQDPRVSFCGYSIPHPSDNRVNIRVQTTGDPSREVLKDACQDLMLMCQHVRSTFDKAVSDFKISKARKNNEDMDVE

SEQ ID NO: 150413 - protein, 47 aa, Glycine max
  Clone ID: PAT_MRT3847_106846C.1.pep
KKIFNKGKRAKGCTFFTFWLKTLEAFMLKTLPLFPLVHGQRYLSSFI

SEQ ID NO: 150414 - protein, 177 aa, Glycine max
  Clone ID: PAT_MRT3847_106847C.1.pep
IRGLAREIHKPSPHSHTMEDGGSLVSEDGSKIEDTTSEKVEKVKEEEDIGKEESGGGLINNLVSTLITPLSPGIGKATENESGADADEDEGENEGGIISKMVSNFFHQSEGEGVVEAEEDKEQEEEIMAGGEKIKRLKTENGGIIHNIFSHLPASIPDGAVPTADEATFLINSLVRD

SEQ ID NO: 150415 - protein, 125 aa, Glycine max
  unsure (1)..(125): unsure at all Xaa locations
  Clone ID: PAT_MRT3847_106848C.1.pep
ERQMLSAEHKHLEHDRDQLLGESQRHHPEWQAYEILVPSSXRSVEYSADQTQHMMVSSVALVLQIPEMSRIPLPLTETYAXKRRLPXTGHCCDKSSVADAVNSYQMXPRENTDSTTVLNVIVGRL

SEQ ID NO: 150416 - protein, 80 aa, Glycine max
  Clone ID: PAT_MRT3847_106849C.1.pep
FQSAFESRICTPYCRTAPSSLHLCLRHQSLSSPINKTHKVNPFPFFSNQKTQFFTKRKTTQKQKKPFPNPCKRCGITLDS

SEQ ID NO: 150417 - protein, 77 aa, Glycine max
  unsure (1)..(77): unsure at all Xaa locations
  Clone ID: PAT_MRT3847_10684C.1.pep
KCSCLDFSLACHLPMDKDVLVPVDVLVYRYQFLPLCYNKGPCMPQMGIQAVAVLALHHXHNLDCLKFPLSSKGCPSH

SEQ ID NO: 150418 - protein, 128 aa, Glycine max
  Clone ID: PAT_MRT3847_106850C.1.pep
PQFLSQEKILRWGGLFDIGIHPPGKGNRSLENLFKKAVLSEGLPQIGERKQTQVFLSCQQGLGHRVGNSPDFRGTIHQMGSCQHLPLFPRFSARERGFSQRNSPYPDETCEGDNCKILRQKRHYAGLP

SEQ ID NO: 150419 - protein, 65 aa, Glycine max
  Clone ID: PAT_MRT3847_106851C.1.pep
AWSYQSARLISISSSTANSTIFFCIRRQRFGKNAQPNRWLVDNMHDRLPMPRAISSSAAAKLFFS

SEQ ID NO: 150420 - protein, 440 aa, Glycine max
  unsure (1)..(440): unsure at all Xaa locations
  Clone ID: PAT_MRT3847_106852C.1.pep
MPLGERSGDKSESRYCGVETDFNDDMAHVLHFNLYSGSFDFVVAPLMDPSYRPSLVQNDALGSGLLPFAGSDLVLSPSQWSSHVVGKISSWIDLDSEDETLRVDSETTLRQEIAWASHLSLQACLLPAPKGTSCANYARCVNQILQGSNNMQLWLRLPLVKPDDDSMDXKSVALVDYWETWNSFRLLCEHHSQLSVALDILSTLPSPNSLGRWFGEPVRAAILHTDCFLTNSHGCPCLSKRHQSLITGFFNHSIQIIVSGNSVHPKASVDANDNSGTNSQRHPLRPYLDYIGYLYQRMDPXQFGSSFELGYRDFLQSPLQPLMDNLEAQTYETFERDAMKYIQYQRAVSKALLDRVPDEEASVKTIVLMVVGAGRGPLVRASLQAAEETGRKLKVYAVEKNPNAVVTLHALVKLEGWEYTVTIVSSDMRHWNAPEKADIL

SEQ ID NO: 150421 - protein, 51 aa, Glycine max
  Clone ID: PAT_MRT3847_106853C.1.pep
ITVFPLLELTIEFGFHIQYLLYISNLKAFPYFTHHKFSISLYLINGISSLL

SEQ ID NO: 150422 - protein, 228 aa, Glycine max
  unsure (1)..(228): unsure at all Xaa locations
  Clone ID: PAT_MRT3847_106854C.1.pep
KKKKKKKGRKRQRRKITRKREYRKKTKKIHKXKKKKPKKKKPAKKKTKRKNKHIQNNQKKKTKVKKRKKKEQKKIQLKKTKTHKKYTQKQIKKKKKQKQNFKXKHEKKNPKNQKKHQNVTKLLTKQNMKHNRNKLKQKKKNQRKKNKKHNPPKKXKQIKQXKQKNVKKRKTKKKKKKNAKKKRKKKKQTIRNKKIQKKTKRFQKEKLKKNNKKKKQKNKRKKKISHKN

SEQ ID NO: 150423 - protein, 61 aa, Glycine max
  unsure (1)..(61): unsure at all Xaa locations
  Clone ID: PAT_MRT3847_106855C.1.pep
ACDMAYQVVKGRXIINXHLXYHFDXFMDHARHKGLNLFDFCLIFFKIKIEFWSLRFFLCVP

SEQ ID NO: 150424 - protein, 92 aa, Glycine max
  Clone ID: PAT_MRT3847_106856C.1.pep
LVACRYSGVETNKDPVCTCSNPTPYSLSEIFWKLNMLYFFVSCLFRCVLFFSKIFWKFSVLLYFLVSCLLRCVLFFSKMLWKLNMAYFFVFC

SEQ ID NO: 150425 - protein, 97 aa, Glycine max
  unsure (1)..(97): unsure at all Xaa locations
  Clone ID: PAT_MRT3847_106857C.1.pep
GATHAYKNILINRNSSDHLTMLIKAVSGSNMWDGSNNKLTVQLTISIKTTPFYPDLDIRMCATLSNVLAQVCCEVNYXLLTSXHQSLILYTMSNIEW

SEQ ID NO: 150426 - protein, 53 aa, Glycine max
  Clone ID: PAT_MRT3847_106858C.1.pep
SRPADTVFEVILSTEQQKRYEWDTLMCDLELIDSYDGHYDVVYGTYDSKYLSR

SEQ ID NO: 150427 - protein, 121 aa, Glycine max
  unsure (1)..(121): unsure at all Xaa locations
  Clone ID: PAT_MRT3847_106859C.1.pep
ARVMWDQKTVHAMRFGCVXFRTQQDAQRCIHDLTDLWLGRRQIRWHSTTHGAVGYEQKQRLNAKSVVQLTKVSSRDGKHTCHMDCSENNSHYTTGYVGYLATXVTKLDLRSQLHALGARTD

SEQ ID NO: 150428 - protein, 57 aa, Glycine max
  Clone ID: PAT_MRT3847_10685C.1.pep
KGKGGKNMNRGKNYAYDHKRYLVFIEHCSEYAPALHMLGIGRCEAMCIYWTKRLCHI

SEQ ID NO: 150429 - protein, 48 aa, Glycine max
  Clone ID: PAT_MRT3847_106860C.1.pep
RQAQPKGLAFKLGFIIMVITLFLYLALTKKGGFKPPSIPPFLKRRPNF

SEQ ID NO: 150430 - protein, 94 aa, Glycine max
  unsure (1)..(94): unsure at all Xaa locations
  Clone ID: PAT_MRT3847_106861C.1.pep
SDTSAWSIGLAGCVMNMAIXLQGVQPIGTIIETTNTERILFTDDADNQLLDENYTYIRAPFDGNHPFNVVXFTFHVTGIIHDNILVDMVMHIKT

SEQ ID NO: 150431 - protein, 92 aa, Glycine max
  unsure (1)..(92): unsure at all Xaa locations
  Clone ID: PAT_MRT3847_106862C.1.pep
XEAKYTSRAAXLYRXILXXXVAXXMAXDGGLXSSXVASXSSQGVXGLPXXKXNXVPXDXILEXXDXPXSXSSPRASXXVIXSTVXXXIGXKX

SEQ ID NO: 150432 - protein, 62 aa, Glycine max
  Clone ID: PAT_MRT3847_106863C.1.pep
LRAGTSLAPLGRGAETRVEPSLVPPKILANITVIHMVSRLTERGLCPRDPPFQKKKKKKKKK

SEQ ID NO: 150433 - protein, 128 aa, Glycine max
  Clone ID: PAT_MRT3847_106864C.1.pep
MAPSNKPRQGATKIRGAQAHANYEKPPAHKPPTEKPPGHKPPAEKPPAHKPPVENPPNHKPAGEKPPAHKPPEEKPPENKPPAAKPPADKPPGERPPGDKPPAEKPPRNKPPSEKPHVDKPPDEKPPG

SEQ ID NO: 150434 - protein, 115 aa, Glycine max
  Clone ID: PAT_MRT3847_106865C.1.pep
RRYAMGRTRYMITSLTAHLTRIAVGDCRDGILLYSYHEEAKKLELLYNDPSQRIVADCILMDADTAVVSDRKGSIAVLCSDHLEASDNAGAQCNMTLSCAYFMAEIAMSIKKGSY

SEQ ID NO: 150435 - protein, 149 aa, Glycine max
  Clone ID: PAT_MRT3847_106866C.1.pep
RDKVNKVGLSPNIVTYNILINGFCDVRKMDSAVRLFNQLKSSGLSPTLVTYNTLIAGYSKVENLAGALDLVKEMEERCIAPSKVTYTILIDAFARLNHTEKACEMHSLMEKSGLVPDVYTYSVLLHGLCVHGNMKEASKLFKSLGEMHL

SEQ ID NO: 150436 - protein, 113 aa, Glycine max
  unsure (1)..(113): unsure at all Xaa locations
  Clone ID: PAT_MRT3847_106867C.1.pep
STRAIGGGITGDLIPDMRTLTHNFTIRNWLRAAGWLTGYFMHMSETAVNAQVKRRLXHSLVQEFITTKYIAECFGAHNSTQSGPHYCEVNFPGEVXGSDNCSEKWRYEGATHT

SEQ ID NO: 150437 - protein, 79 aa, Glycine max
  unsure (1)..(79): unsure at all Xaa locations
  Clone ID: PAT_MRT3847_106868C.1.pep
MXDEXHHFXXKXDAGXXXTYPQQXGXIRKXGYIVIKGRPCKVVXXSXXXTXKHGXAKCHFVXIXIFXXKXLEDLVXSLT

SEQ ID NO: 150438 - protein, 73 aa, Glycine max
  Clone ID: PAT_MRT3847_106869C.1.pep
SSSVERGGGHCWETIFQWKLYIQEYMGDTIVLDAFFKYIVGWAIEGVGSGRSQGKQHEYNQNTSMRFSDFMNK

SEQ ID NO: 150439 - protein, 43 aa, Glycine max
  Clone ID: PAT_MRT3847_10686C.1.pep
PPHLCRTHRLCVPGTDLDMVPLTYVKFQSLSPLYSLFSTVQSL

SEQ ID NO: 150440 - protein, 62 aa, Glycine max
  Clone ID: PAT_MRT3847_106870C.1.pep
YTVLADCCSRCLIVQFWILMGSFLCTFGTNGLQSLGMSLWHAKVASKKKKKGGRRLVSFLTR

SEQ ID NO: 150441 - protein, 253 aa, Glycine max
  Clone ID: PAT_MRT3847_106871C.1.pep
MEETQVLHELHKLSQIESEETLNQMLCTLWSTRKTGLPLSDKSHFQSLLHLPSPSHLDPVLACLRSLVRKCAHQNLARDDLLRLFPRDLPIQLQTNLVSALQRNRDRWKEDVSHVIPQLKGTINFAPSLLWPRQEQDFDAVAVPAVVPDVGPSGVNSCFQCDAVGASDNLENLPCLKSMTWTMENRGSSPADRVAIISLKLHDYSKSPSGETEIKFQLTRDTLEAMLRSMTYIREQLNAVETSSGPANKKQKQ

SEQ ID NO: 150442 - protein, 49 aa, Glycine max
  Clone ID: PAT_MRT3847_106872C.1.pep
YFLTLNFFLSCMFALLLLLLLLLLLLFRTEDGFLELAHPRQIAILCPVH

SEQ ID NO: 150443 - protein, 118 aa, Glycine max
  unsure (1)..(118): unsure at all Xaa locations
  Clone ID: PAT_MRT3847_106873C.1.pep
FHLLRTTLLRCFWRETAFTAFLAAIRLSVTLVGPXLTERSDDFTEGKGSSVYDGHYLVLILLCAKFADAVTAHHFNLLCETLGMLITRTLITSLHMKELRPPGSTRQDHACGPIVISW

SEQ ID NO: 150444 - protein, 48 aa, Glycine max
  Clone ID: PAT_MRT3847_106874C.1.pep
RWKIMIIRWSMCCVMGQCYPVLLSWKRPSSPVMYECDRVICLLRDVPP

SEQ ID NO: 150445 - protein, 64 aa, Glycine max
  Clone ID: PAT_MRT3847_106875C.1.pep
MSATKTKVQSIIDENPVAVFSKSYCPYCRQAKQLLSDSGAKFYAIELDQVDDGSAIQSTLGEMT

SEQ ID NO: 150446 - protein, 92 aa, Glycine max
  Clone ID: PAT_MRT3847_106876C.1.pep
MEEATEFHSEENKLSMEKNKKRRLKTPAQLKGLEDFYNDNKYPTEEMKSELADELELTEKQISGWFCHRRLKDKKMLNDEVCANGRHDRSSG

SEQ ID NO: 150447 - protein, 132 aa, Glycine max
  Clone ID: PAT_MRT3847_106877C.1.pep
HRDHLVIPSHTIIPPHRHLHIRYQASTSTAMLGHPVQDIPCHCFLFRATTLPTLALAMHTLPFVDTHPLHCNHPSRAFYNPIAPIKIACQAALRVLLSIIRIILVSSIAEWRITHPHEPRYHRLHEGSTPHL

SEQ ID NO: 150448 - protein, 89 aa, Glycine max
  Clone ID: PAT_MRT3847_10687C.1.pep
QKPNSTPHPCNTRAVTKSRTHVASLETTTYCPPPFIALIGFCFSSVPVASVQLRVEPPGGHWPLSPLGQVSGEWRKPLSGLASGDSGWS

SEQ ID NO: 150449 - protein, 88 aa, Glycine max
  Clone ID: PAT_MRT3847_106880C.1.pep
GSRRSRSVVAMSPMVVWVVAPTLLMAVDPSTQVAMSTMMPMTLTSADSDTIVLNAAVSLVLRSDAAYGLMMSVPLMNDLICLHRAYLY

SEQ ID NO: 150450 - protein, 96 aa, Glycine max
  Clone ID: PAT_MRT3847_106881C.1.pep
MGLGGPRRCHGFDDWPRSLQDSDNVENNAAGPSLSISMPGNAAAASSDVSLKWSTGYGEDPGPRNENVGLVAEQLQLNWAGGWASSNQVASMGGPL

SEQ ID NO: 150451 - protein, 73 aa, Glycine max
  Clone ID: PAT_MRT3847_106882C.1.pep
LSYLSSSSKLMMLRWFKFTHLYHVLALLPLRFCSTTLSSFPPPFIVTLLAASLGGRSPSWLISSMNGFSHTHV

SEQ ID NO: 150452 - protein, 89 aa, Glycine max
  Clone ID: PAT_MRT3847_106883C.1.pep
VAPPPSRFVPLFFAGSNLLLGSPPFGQVGFSPPPPKFFTFRNGFFFPGHFFSEPHFFPRPPFFYFRPAFNLPPSKKRFYFPGPGPGFLF

SEQ ID NO: 150453 - protein, 209 aa, Glycine max
  Clone ID: PAT_MRT3847_106884C.1.pep
TRPCKDGAIDKARKLLESLLENGLKPDIFTFSSIVDGLCQIKRTEEALECFTEMIEWGINPNAVIYNILIRSLCTIGDVARSVKLLRRMQKEGISPDTYSYNALIQIFCRMNKVEKAKKLFDSMSRSGLNPDNYTYSAFIEALSESGRLEEAKKMFYSMEANGCSPDSYICNLIIKILVQQEYVEEAQNIIESCRQKGISLNSIPNLET

SEQ ID NO: 150454 - protein, 42 aa, Glycine max
  Clone ID: PAT_MRT3847_106885C.1.pep
GHYVLTQSASYDVSATDSWVLLIVVCTAYKRLINVMFEPRKE

SEQ ID NO: 150455 - protein, 96 aa, Glycine max
  Clone ID: PAT_MRT3847_106886C.1.pep
SASFLDQLVSSLSLSTLGGSKCAALSCWCRSFFFFRCASLSRTIWKQHQRSTLGIEHGISSACGDMPPTSGPTCGRYLLYRFPPILRWDDSSGFPA

SEQ ID NO: 150456 - protein, 95 aa, Glycine max
  Clone ID: PAT_MRT3847_106887C.1.pep
HASECSHFQSLTPFEPRLGFLSTFFHLTLSTYKEYTFNTIHQHPYIYNYHTKFDTLDSDCYIANQRAMNTRTQLAIYKHWTALDATPFNIALHHH

SEQ ID NO: 150457 - protein, 62 aa, Glycine max
  Clone ID: PAT_MRT3847_106888C.1.pep
SCISCSCKFVFLTILHSSNSCNLQVMSSMWYFQEAAELLSILYVQGKLDIGWRFGQSMVTIM

SEQ ID NO: 150458 - protein, 137 aa, Glycine max
  Clone ID: PAT_MRT3847_106889C.1.pep
SATHVFYSWLGEPHQKPSQTTMPFSVTHNAKFSGSGARSFAKFLCTFSLTSDIVKWACSICTKFTSRQIGQEPNQLENQKDQGLPHTWAGDKTKARRVTRIRKGAPDTRRSPHGGSPERPQEAVHAQNRHLHFSPQG

SEQ ID NO: 150459 - protein, 57 aa, Glycine max
  Clone ID: PAT_MRT3847_10688C.1.pep
PIDVKYECETITHGPNLGDPLVGWRGNNGSTLTSGVIANTEGISWASEDKIQHANYF

SEQ ID NO: 150460 - protein, 71 aa, Glycine max
  Clone ID: PAT_MRT3847_106890C.1.pep
FALNFGKRSRLGILAPSVRMGLPLFVAVPRLFGLASGSAGAVLFPGLTSPKQWAILLFSFKWSWPFRRKAS

SEQ ID NO: 150461 - protein, 60 aa, Glycine max
  Clone ID: PAT_MRT3847_106891C.1.pep
RSKIPKIKEHKHCKRLFSNSPVSNTHLSYIWISGGSPLIVMFENKINSELCLVRPKNMFE

SEQ ID NO: 150462 - protein, 111 aa, Glycine max
  Clone ID: PAT_MRT3847_106892C.1.pep
RAEQVFAKQGLSQHYVHQMATWVPNLISSLPKDISDEFPTYACLLGNILETGGFALSRPDCSFDMAIDLAAVITFLLESHPSLTRSDGRESSSIAEDEMTGEDEVMEVAFG

SEQ ID NO: 150463 - protein, 53 aa, Glycine max
  unsure (1)..(53): unsure at all Xaa locations
  Clone ID: PAT_MRT3847_106893C.1.pep
PFTGTVSIRCLIIAATCYSAMMTRTIIVRRIYLHSVXMYQKYEHRHSNMPAHI

SEQ ID NO: 150464 - protein, 96 aa, Glycine max
  Clone ID: PAT_MRT3847_106894C.1.pep
ILKMQLDASSNKGSNLRYLTSKSCNMEENFNYNFHHHSKAKTPVQSFETHVHPQSSLPYVWSYCHGIGAIQTVHISALIKYNNYTTNMFYFQSLGT

SEQ ID NO: 150465 - protein, 75 aa, Glycine max
  unsure (1)..(75): unsure at all Xaa locations
  Clone ID: PAT_MRT3847_106895C.1.pep
GPIFGPPLPEGIKNGKTPVSLVAKKGALKPFXITKGSKNFQPPQKYIPGLDVRPLSKFPEKSDKSDASAEKPPRS

SEQ ID NO: 150466 - protein, 76 aa, Glycine max
  Clone ID: PAT_MRT3847_106896C.1.pep
LIVTVRLVVPSSQVGCLIGKGGVIVSEMRKATGANIRIIGTDQVPKCASDNDQVVQVWRLYLFYFILQLKHAEECF

SEQ ID NO: 150467 - protein, 49 aa, Glycine max
  Clone ID: PAT_MRT3847_106897C.1.pep
HSHDRVHLRDPVPLSLPREKYLTSCSRASLLLDETPFIYYYPYRMKLKI

SEQ ID NO: 150468 - protein, 71 aa, Glycine max
  Clone ID: PAT_MRT3847_106898C.1.pep
FNQYKTIIYTYIYITLFTRRLLHRGPRHTKYNTFNSIKSNNISLQCFLTRSNKITFLTKYKYQIYESQYSP

SEQ ID NO: 150469 - protein, 72 aa, Glycine max
  Clone ID: PAT_MRT3847_106899C.1.pep
SFQYSFRVLHYTHSLTLGWFYALLFMLFKLLINKLIRIFEPLHPQGYKLLTIIEIAYYLRRMVSSKLGDTYP

SEQ ID NO: 150470 - protein, 81 aa, Glycine max
  unsure (1)..(81): unsure at all Xaa locations
  Clone ID: PAT_MRT3847_10689C.1.pep
VIVTVYITTRHSNRTTLPRWVPHPLIQDFNLTISSDYHWLLVGYNGAGKTTVLKILXWKHLVEPDMNGVLGKSAFEDTTII

SEQ ID NO: 150471 - protein, 50 aa, Glycine max
  Clone ID: PAT_MRT3847_1068C.1.pep
TNSIFQSMFWLKVNPKIHMPRRGQIMRYASTLKYKIYFTSTICYSAKRRN

SEQ ID NO: 150472 - protein, 47 aa, Glycine max
  Clone ID: PAT_MRT3847_106900C.1.pep
FKALYYLINVKLNFFSLVIRVGILIMDYFLINFFIMSFAFSHKNNSF

SEQ ID NO: 150473 - protein, 299 aa, Glycine max
  Clone ID: PAT_MRT3847_106901C.1.pep
MMVQKEDLGLSLSLNFPHHNTPNPQHPSLMSSSTHSSSPSGCNPQKPSWNEAFTSSDRNSDTCRGETRSFLRGIDVNRLPSAVDTEEETGVSSPNSTVSSVSGKRSEREEPNGEEHDMDRACSRGISDEEDAETARKKLRLSKDQSAILEESFKEHNTLNPKQKLALAKQLGLRPRQVEVWFQNRRARTKLKQTEVDCEVLKRCCENLTEENRRLQKEVQELRALKLSPQFYMQMTPPTTLTMCPSCERVAVPSSAVDAATRHHPMAQAQAQAQIRHRPIGPWASASPITHRPFDVFHH

SEQ ID NO: 150474 - protein, 40 aa, Glycine max
  unsure (1)..(40): unsure at all Xaa locations
  Clone ID: PAT_MRT3847_106902C.1.pep
XXRXYQXASLXXAGIPPXXSQXVKVKNAXXCLFTPIXPMP

SEQ ID NO: 150475 - protein, 37 aa, Glycine max
  unsure (1)..(37): unsure at all Xaa locations
  Clone ID: PAT_MRT3847_106903C.1.pep
LKIFNLKVTLNIRKFAQILLTDYVGIFILAVXXXVLF

SEQ ID NO: 150476 - protein, 77 aa, Glycine max
  Clone ID: PAT_MRT3847_106904C.1.pep
PALTISMGALRSTIVSGSPLDDHVHRCPTLIVSRAMGYSWCATLRFCKILNIAASLRKMQFPPDSWTAAPLCRPLTA

SEQ ID NO: 150477 - protein, 116 aa, Glycine max
  unsure (1)..(116): unsure at all Xaa locations
  Clone ID: PAT_MRT3847_106905C.1.pep
PCYWNYVNIKFTRISDFEFTRKXXRFGXXYIPVWHXXIVDPQDYDTVNAIGSKSYNALMGELVSLETLIMNVHHENNPEDCVDFXSSTTATLLVPSPSLSNTRSFNDSPHSISDHI

SEQ ID NO: 150478 - protein, 152 aa, Glycine max
  Clone ID: PAT_MRT3847_106906C.1.pep
MSLAGKISIEIGVHASAAKWFNLFATQLHHVQNLTERVHETKLHHGDDWHHNESIKHWTCTIDGKVTTYHESIESVDEPNKTITYKIFGEDIDHQYKVFKVIFQAIHKDHGGAFIKWTIEYERVGEEVDLPFGFIEYLNKGSRDVDGHLLKA

SEQ ID NO: 150479 - protein, 53 aa, Glycine max
  Clone ID: PAT_MRT3847_106907C.1.pep
ALFFFFKTFVLVIPCYRDILTFWFFPGPQNNFYFGKSNSLDLKSGPVVYSVSL

SEQ ID NO: 150480 - protein, 122 aa, Glycine max
  Clone ID: PAT_MRT3847_106908C.1.pep
GAPGVMFKKWLVLLPPLIAGRGLTGWGDFSLSPLSNTCLKEFSWVLTFLSRLWAQGSLFKNPLHICPIRVCYEGESVPVFISFPFFGKDLFFLNRHLLFFSVLCIFWFKSIAFSFICLWPNP

SEQ ID NO: 150481 - protein, 490 aa, Glycine max
  Clone ID: PAT_MRT3847_106909C.1.pep
SISERTKMTADIGLIGLAVMGENLVLNIESRGFTVAVFNRTTSVVDKFLEARAKGKKIIGTHSLEELVSKLKRPRKIMLMIRAGSPVDQQINALLPFLEAGDIVIDGGNSHYPDSNRRTKFLKEKGISFIGTGVSGGEEGALTGPSIMPGGDPAAWEHVKPIFQAISAKVEDGTPCCDWVGEDGAGHFVKMVHNGIEYGDMQLIAEAYHLLSGVLGLSNDELAKVFAEWNKGDLDSYLIEITSHILGKKDEETGKHVVDLILDAAGQKGTGKWTATSALDFGIPVTLIGEAVFARCLSSLKDERVQASKVIPGPKANFTGDREVFIAQVRDALFAAKVVSYAQGFLLMRSAAQEFKWNLNYGGIALMWRGGCIIRSTFLGKIKEAYNNNPSLPNLLLDPYFQAKIESVQSAWRTVVSTAFLNGIPIPALSSALAYFDGFRTERLPANLIQAQRDYFGAHTYERVDKPRGEYFHTNWTGHGGTTSSRTYNV

SEQ ID NO: 150482 - protein, 80 aa, Glycine max
  unsure (1)..(80): unsure at all Xaa locations
  Clone ID: PAT_MRT3847_10690C.1.pep
VYVXGXGRXXFRRXVXXXXXEXKRRCRCMXRQXXRXLSPCGPCXXTXDXXSPRTCVXXXXXXVVXXLXLEXNPSXXXXXX

SEQ ID NO: 150483 - protein, 244 aa, Glycine max
  Clone ID: PAT_MRT3847_106910C.1.pep
RWRLRRHINNLKVSPVGVGLMGYMGNKGSVSISMSLFQSRMCFVCSHLTSGQKEGAEHRRNSDVHEILRRTCFSSSVFDADQPQTIPSHDQIFWFGDLNYRINMLDAEVRKLVALKKWDELKNYDQLSKELRMGHVFDGWKEGLINFPPTYKYEFNSDRYVGESPKEGEKRRSPAWCDRILWLGKGIKQLQYGRAEIKLSDHRPVSSAFLVEVEVFDHRKLKRALNFTRAAVHPEIFLDEDGEI

SEQ ID NO: 150484 - protein, 45 aa, Glycine max
  Clone ID: PAT_MRT3847_106911C.1.pep
DAWSYTSIRHYNSLAIKTGTDTHSLLDHLNLIYYIPYRLRVSISI

SEQ ID NO: 150485 - protein, 52 aa, Glycine max
  Clone ID: PAT_MRT3847_106912C.1.pep
NYCYCYCCMLSLLSIDIVHFIFYKKEGITRISRNMVLSTTMISSVTYSIQAH

SEQ ID NO: 150486 - protein, 135 aa, Glycine max
  Clone ID: PAT_MRT3847_106913C.1.pep
PRPLRNGFLLLAIRQNWRTSYFGGKKNYLKKTQDLQDPPKLQFQNLKIFFPLGSQKLLLNSSHHLVHFFRISDLHTVLHGFCHFKQLPCQKQFGGAPGGSLLNHRVYNKQNFFWVRQTTPQNICFFCLGAKQKTS

SEQ ID NO: 150487 - protein, 137 aa, Glycine max
  unsure (1)..(137): unsure at all Xaa locations
  Clone ID: PAT_MRT3847_106914C.1.pep
APEKAXRPPPPLLIPYSRYGPKAEITHIFRSPEKRPHQELSLAFLGLILLPFIGFLVGLLRLGVNLKNFPGSTVPATFGILFHVGIAAVLLLYVLFWLKLDLFTTLKAFGLLGAILMFVGHRILSHLAFTSAKLKSA

SEQ ID NO: 150488 - protein, 61 aa, Glycine max
  Clone ID: PAT_MRT3847_106915C.1.pep
GIVEKKEIAKVIKCLMEGEEGKGKRERKMNLKDFSANALKDGSSTQTLSQLARHWENSSEV

SEQ ID NO: 150489 - protein, 88 aa, Glycine max
  Clone ID: PAT_MRT3847_106916C.1.pep
TNWVPSALAFWLPFPTTGTNCVSVEFHHTAAVLANSVVFPSDQANNLTMAGKVPSPFGTILYSRGTPPLGFLAFTTQEAGTYLACFWG

SEQ ID NO: 150490 - protein, 91 aa, Glycine max
  Clone ID: PAT_MRT3847_106917C.1.pep
QPMKTRNGHFYMSFGAVACASSTSLSHKPCTWLGLCPFEETQNPNPWIWLGVGQWAKRLKEKQNERKGLDRGPRRIKKKAGKSATLVPYAA

SEQ ID NO: 150491 - protein, 136 aa, Glycine max
  Clone ID: PAT_MRT3847_106918C.1.pep
SRGALGAFFVSDVPNPPPFENVSRWLKELRDPPDVNIVFMLLGNKIVFKLFKAVAPEDAQGYPQKKGLFFFETSVFEATNVENAFQTIFAEIYRLFSKKSLFSNDPVANIFKKGKAFPVGGGPEPNPNKPFFCKSF

SEQ ID NO: 150492 - protein, 225 aa, Glycine max
  Clone ID: PAT_MRT3847_106919C.1.pep
MSWCDSVQEPRILVAPDPGTDGNGLGQMISLRHPKSGNATQYLFVNGMLQELQWFKNLYGSWFLGDYITEDGRMYLSTPIDPVFIMLPIFEEARMKKGDDLGRFRQLDEILFIDGYPGYMQLMSVVENCMLVVSEVKEIGSSKFFRLDDSKVLRWLCYKVCQLKQTLPKLDKNYAVQSEKDTLIDAVSILGEYLKEKPWLQLLCDHLKLNILEVTGKAQVNAEGK

SEQ ID NO: 150493 - protein, 102 aa, Glycine max
  Clone ID: PAT_MRT3847_10691C.1.pep
YKFNYLFCIFFIFIYFNYRSKVECSQLYYNNNKYLTSKTLIRYEMIIIQPLPFFLRLNLLQQQLARYMTKLTVTGYSYKRKLKREYSGYLTYTINRRILYHE

SEQ ID NO: 150494 - protein, 116 aa, Glycine max
  unsure (1)..(116): unsure at all Xaa locations
  Clone ID: PAT_MRT3847_106920C.1.pep
MMRFFALNPPFFFGSQLVQFTFALFSGRVVPPLSLLGQKIAFFFSLQKRSKTCLLPQSFFFPSSEAYEYNKHHNQKKLKQYKTINKKKKKXKKKKKKKKKNKKKKKKKKKIKKKKV

SEQ ID NO: 150495 - protein, 32 aa, Glycine max
  unsure (1)..(32): unsure at all Xaa locations
  Clone ID: PAT_MRT3847_106921C.1.pep
XFYXLILMLNVVIVLWLQKARHSLRHPCLLEA

SEQ ID NO: 150496 - protein, 65 aa, Glycine max
  Clone ID: PAT_MRT3847_106922C.1.pep
ILPLIYTLAFTHHQLQLTNQPFTKLIHIPSIQTKHNNIRKPIAPSTHIKNTCPHNINHRTHLPKP

SEQ ID NO: 150497 - protein, 58 aa, Glycine max
  Clone ID: PAT_MRT3847_106923C.1.pep
CSPSLAHRVNMLPYRYILPQRTTTCHTTRMMTHIGHPTLKHMLIIPTPKKILKNHMWP

SEQ ID NO: 150498 - protein, 52 aa, Glycine max
  Clone ID: PAT_MRT3847_106924C.1.pep
SCNQISIVLYHESFLLRGDVVRLVLDTDIRFMGILFGNEGNISCEILGLNTA

SEQ ID NO: 150499 - protein, 144 aa, Glycine max
  Clone ID: PAT_MRT3847_106925C.1.pep
NAASNWSHGIQDDPNNVTRFVMLAREPIIPRTDRPFKTSIVFAHDKGTSVLFKVLSAFAFRNISLTKIESRPHRSRPIRVVDDESEGTAKHFEYLFYIDFEASMAEVRAQNALAEVQEFTSFLRLLGSYPIDITPWTPSSPRQN

SEQ ID NO: 150500 - protein, 56 aa, Glycine max
  unsure (1)..(56): unsure at all Xaa locations
  Clone ID: PAT_MRT3847_106926C.1.pep
PSTPKTVSSITALTENLIRQGSNTVGIIGGQWNDPHVGLXGGSITFELPHPMYYIQ

SEQ ID NO: 150501 - protein, 118 aa, Glycine max
  unsure (1)..(118): unsure at all Xaa locations
  Clone ID: PAT_MRT3847_106927C.1.pep
MLYCLATIMGPSYCLYAGGVFLATIHFHTYYPFHPPNVAFTTKVFHPYMYFYGSICLDLLXDQSSPALTIXXVLLSIXSLLTDPISDDSLVPVLAHIFKTDGFXFESAVISWTYKCAM

SEQ ID NO: 150502 - protein, 71 aa, Glycine max
  Clone ID: PAT_MRT3847_106928C.1.pep
LLNPSYISIWVFSMELERLYYSLSCMMCDHIKWVLLIWNSSVKALQLQQVAFCGVVLARFLSIGMRAFHHV

SEQ ID NO: 150503 - protein, 170 aa, Glycine max
  Clone ID: PAT_MRT3847_106929C.1.pep
MGAEPLSKNEVALAQTQAPFVLGLQPSALVDHVARVDWSLLDQIPGEHGGSIPVELGELEHILREVKIHIVSCHDNDDDDYPSSHIKTLAGGSVANTIRGLSNGFGISSGIIGACGDDEQGKLFDHNMSSNGVDLSRLRKKKGHTAQCVCLVDDLGNHTMQPCLSNAVKV

SEQ ID NO: 150504 - protein, 97 aa, Glycine max
  Clone ID: PAT_MRT3847_10692C.1.pep
DLWEHEARKRTKTEPHTREKTTPTEGRGPNNGKEKRSTERAKQTARHKRNPNDKPKQTTARDKHKGTSPRQRKRRKHPESQAHTEPQATARTPEKAE

SEQ ID NO: 150505 - protein, 46 aa, Glycine max
  Clone ID: PAT_MRT3847_106930C.1.pep
NSIHIVNSVLFCHALVLLRLLTQQCLKLLLCTRLTCPPNNEFISSI

SEQ ID NO: 150506 - protein, 69 aa, Glycine max
  Clone ID: PAT_MRT3847_106931C.1.pep
GLAAPLGPPAFQVYCLGRGHWGHCNWCKFSPPEGPPAFTLQALGSPLLWKCGGPPCPGGKISGRTPPPS

SEQ ID NO: 150507 - protein, 70 aa, Glycine max
  Clone ID: PAT_MRT3847_106932C.1.pep
DPKFFKNVEPGMVKIIPPNPMVVEPFFGYPPLGRFAVRAMGQTVAVGVIKSVCKKAPPGPKVTKAAPKKK

SEQ ID NO: 150508 - protein, 169 aa, Glycine max
  Clone ID: PAT_MRT3847_106933C.1.pep
MYQQQGSDPTKQSPATGFPVSYSNSTTYSTNEASYAPVPPPQPKPLVDWSTGLCDCFSECGNCCMTCWCPCVTFGRVAEIVDKGSTSCGASGALYTLICCVIGCGCLYSCFYRPKMRRQYGLKGNGCSDCLTHCFCEPCALCQEYREGMYRGELGIIGWHGNVEHQLKM

SEQ ID NO: 150509 - protein, 72 aa, Glycine max
  Clone ID: PAT_MRT3847_106934C.1.pep
VTLWCSSNYLVAVVAPVVGILSNKFGCRAAAPSYLVVVVFTSCCALRVTFALVFSASGHVGPWRLVAQLASL

SEQ ID NO: 150510 - protein, 175 aa, Glycine max
  Clone ID: PAT_MRT3847_106935C.1.pep
MLEQQGSDPTKPAAAATGFPATTEASSYAPVAPPQSKPTVDWSTGLCDCFSDCGNCCITWWCPCVTFGRVAEIVDRGSTSCGASGALYTLVCCGWPYSCFYRSKMRRQYGLKGNCCTDCLLHCCCESCALCQEYRELKQRGFDMIIGWHGNVEQRIQEVAMTAATPPSVEKGMSR

SEQ ID NO: 150511 - protein, 186 aa, Glycine max
  Clone ID: PAT_MRT3847_106936C.1.pep
MYQQQGSDPTKQSPATGFPVSYSNSTTYSTNEASYAPVPPPQPKPLVDWSTGLCDCFSECGNCCMTCWCPCVTFGRVAEIVDKGSTSCGASGALYTLICCVIGCGCLYSCFYRPKMRRQYGLKGNGCSDCLIHCFCEPCALCQEYRELQHRGFDMIIGWHGNVEQRSRGVAMTATTAPSVENGMSR

SEQ ID NO: 150512 - protein, 60 aa, Glycine max
  Clone ID: PAT_MRT3847_106937C.1.pep
FFQAKAMQDPEIQNILQDPVMRQVLIDFQENPKAAQEHTKNPMVMNKIQKLVSAGIVQMK

SEQ ID NO: 150513 - protein, 174 aa, Glycine max
  Clone ID: PAT_MRT3847_106938C.1.pep
GVNIVPIHCDSSNNFQITPEALEAAYKDAEAMNSKVRGVLITNPSNPLGVTIPRSVLEEILDFVTRKNIHLVSDEIYSGSVFSSSEFTSVAEILEARQYKDAERVHIVYSLSKDLGLPGFRVGTIYSYNDKVVTTARRMSSFTLISSQTQHLLASMLSDKKFTENYIRTHRERL

SEQ ID NO: 150514 - protein, 68 aa, Glycine max
  Clone ID: PAT_MRT3847_106939C.1.pep
AIKNSIQQIINLSFTKLIIPKIHLEISVLCMFKANRIKLYKLSKKGGGADIFLRYEKKSSKNKAAARI

SEQ ID NO: 150515 - protein, 83 aa, Glycine max
  Clone ID: PAT_MRT3847_10693C.1.pep
KSLSQNQGNINPGPTLYIQFLLGMKISFFFYKDMFFYQKEDAFFLGFKGVLQRGLFMFQLSNHFFMPTLGKIWAHDKKFTGPW

SEQ ID NO: 150516 - protein, 92 aa, Glycine max
  unsure (1)..(92): unsure at all Xaa locations
  Clone ID: PAT_MRT3847_106940C.1.pep
PRVRLDGAFRIFREMPERNVVCWSAVIAGYVQNDRFIDGYELMXDILKVGMGVSQSTYASVFRSCAGLSAFNWGTQLHGHALKSDFAYDSII

SEQ ID NO: 150517 - protein, 124 aa, Glycine max
  unsure (1)..(124): unsure at all Xaa locations
  Clone ID: PAT_MRT3847_106941C.1.pep
GFSNMGSYINGQCEDTGTSLLLLYPIDTESIANGTEATLYDDYEGLITCSEAITTCMTISAPMRGEISGQIPEAVLAKLDPWGRLRVFEMTXILPEGIGEDQEIVDIADYGVGXIKLLNGSVLP

SEQ ID NO: 150518 - protein, 97 aa, Glycine max
  Clone ID: PAT_MRT3847_106942C.1.pep
LLLLKASDDGGHGTHCLGPTDSDSVDCTAYVSEHPIRLEPTMISRIFLETMMHDVPGDCERISIAVPAKQMLASAPYKYPLVSLSPSTIMVYPRTIL

SEQ ID NO: 150519 - protein, 96 aa, Glycine max
  Clone ID: PAT_MRT3847_106943C.1.pep
VSWDRRTEHHEHKLASCCAVSNVHEVVNAATHLCCLIKMSLFPRLHIFARPLLSSSLSAPSGRSSLPPYTFISSVCVFLFQRLSVSHILFGTTTYP

SEQ ID NO: 150520 - protein, 45 aa, Glycine max
  Clone ID: PAT_MRT3847_106944C.1.pep
QKKKNPQIIQMQSFLFAHKFPYSKTILLKIQSNTKCKYRSQRNFK

SEQ ID NO: 150521 - protein, 151 aa, Glycine max
  Clone ID: PAT_MRT3847_106945C.1.pep
IFMLLIELVSKVAKHVCRNQQERRPWQHPTSWKLFDCRKEIHFRNQIHFRIFSWSKKNILVFSSYRFFPTLIFRSPFLCLITPRKSFETCHNNQNETHKRTEKKLKPYERESVCEKEMKVRGSCRISRHSASLARARHLDRSGLGGVVRVG

SEQ ID NO: 150522 - protein, 100 aa, Glycine max
  unsure (1)..(100): unsure at all Xaa locations
  Clone ID: PAT_MRT3847_106946C.1.pep
KAGFVFPRVFAYGGFVFSFSCGLRGFYSEAKKKKFPSITTPKFRAGGIFGALFFTFLHPCFWFPGNEFWSQWAGFGLDFWWPIFGFHRFVFKKKKKPTRX

SEQ ID NO: 150523 - protein, 127 aa, Glycine max
  unsure (1)..(127): unsure at all Xaa locations
  Clone ID: PAT_MRT3847_106947C.1.pep
CGICGDGGDLICXDGCAXTFYESCVDIHELPAGEMHCTPCGGEPCGLDMGPSVMETAFELVDRICVGSRIEHHIIWSFVGQTPSHKNSLQDLSVSENLCSLRNNCDEDLRVSLQLGDNEAKRRRSEA

SEQ ID NO: 150524 - protein, 48 aa, Glycine max
  Clone ID: PAT_MRT3847_106948C.1.pep
IDCLLLAAQSVMQDLCSARHSEDKRAMNSIFSKFISLNFPVFGQFLYF

SEQ ID NO: 150525 - protein, 137 aa, Glycine max
  unsure (1)..(137): unsure at all Xaa locations
  Clone ID: PAT_MRT3847_106949C.1.pep
DRRARQNGTQPQQPPRRACDRGMSARTKHDGRQRSRGHKRPPGGKGREATRHTGQGKEGKRRQRGPNGRQETEWREPPKKAPGGEAREHEKEEPAEAKTDEKHXREERKEERQKHKKKGRLARRGERERGAGNKTPR

SEQ ID NO: 150526 - protein, 92 aa, Glycine max
  Clone ID: PAT_MRT3847_10694C.1.pep
FGSRVQIPLMAKEEILSSSASDCRAARVSKNSNSHATAMHVGAIEIINDSYASPECTIVGAMLMVASYHTNLENAFRSIMVAPCRCGWPIRV

SEQ ID NO: 150527 - protein, 91 aa, Glycine max
  unsure (1)..(91): unsure at all Xaa locations
  Clone ID: PAT_MRT3847_106950C.1.pep
VALREIXRKYQKSTELLIRKLPFQRLVREIAQDFKTDLRFQSHAVLALQEAAEAYLVGLFEDTNLCAIHAKRVTIMPKDIQLARRIRGERA

SEQ ID NO: 150528 - protein, 136 aa, Glycine max
  Clone ID: PAT_MRT3847_106951C.1.pep
MARTKQTARKSTGGKAPRKQLATKAARKSAPTTGGVKKPHRYRPGTVALREIRKYQKSTELLIRKLPFQRLVREIAQDFKTDLRFQSHAVLALQEAAEAYLVGLFEDTNLCAIHAKRVTIMPKDIQLARRIRGERA

SEQ ID NO: 150529 - protein, 73 aa, Glycine max
  Clone ID: PAT_MRT3847_106952C.1.pep
AYLPTRVALQTLTLQTRRRVCSNECVCLHLSLTPNIKLTSIAAVFLKPTTLSTHHFITHVEASTDLTHEEDTF

SEQ ID NO: 150530 - protein, 66 aa, Glycine max
  unsure (1)..(66): unsure at all Xaa locations
  Clone ID: PAT_MRT3847_106953C.1.pep
RIFLCVYLCRPWFASGFVTDRGRATSYGRTGRVILVSDIGESVFNPLLRKMGDAQRXRMEQVPTPT

SEQ ID NO: 150531 - protein, 98 aa, Glycine max
  Clone ID: PAT_MRT3847_106954C.1.pep
FLSFFIPFNWEQKPGPFRLFYRNAPHIWGQRQDIFRTPETFSSLNRRCSKMMQKKKTTILAPTFFSPYSSTGAGRLRSMRHGTPFRRSHLALPQVCFP

SEQ ID NO: 150532 - protein, 98 aa, Glycine max
  unsure (1)..(98): unsure at all Xaa locations
  Clone ID: PAT_MRT3847_106955C.1.pep
THLGTDTLFFAFYYQQNTYQQYHAAKELKKQSWRYHRKYNTWFQRHEEPKVATDEYEQGTYVYFDFHIANDAXQHGWCQRIKTEFTFEYNYLEDDLLV

SEQ ID NO: 150533 - protein, 876 aa, Glycine max
  unsure (1)..(876): unsure at all Xaa locations
  Clone ID: PAT_MRT3847_106956C.1.pep
MGASRKLQGEIDRVLKKVQEGVEVFDSIWNKVYDTDNANQKEKFEADLKKEIKKLQRYRDQIKTWIQSSEIKDKKVSASYEQALMNARKLVGREMERFKICEKETKTKAFSKEGIGQQPKTDPREKAKSETRDWLNNVVGELENQIDNFEAELEGLSVKKGKNRPPRLTHLETSITRHKAHIKKCEFILRLLDNDELSPEQVNDVKDFLDDYVDRNQDDFDEFNDVDELYSSLPLDKVESLEDLVTIPPGPSKVTPVLSLKHAVKASASASQTSDDSALEQADDTASQDSNSDFVARTPPPKSSIVSPTATTPAGNFATPVSMNVPVPNLSSPPAIASVMPGSNSVQSSLEISSPVDASSFVNQSSTMKEEEINSFPGQRPSPSLSDVTLXGTQQKQLKSSNKYAPLVNNPGFRQWALVLNHLVADDRLGSNGMVQPLVSPLSNRMIMPQVARPNDGTSSVDSSSVNEAATXGRVFSPSAVPGMQWRPGSPFQNQNDVGQLRGRTEIAPDQRERYLQKLQQVQQGHXTLLNMPSFVGGNPKQFSAQQQNPLLQQFNSQGSSVASQSSVGLGVQSPGLSGIASTSLPQPPNSVHSPSSQQSLLLVVSKDADVGNSKVDEPQLQIFPDDSGTESTASTGIGKNFVNEDELKSTYAVDSPAGVPASLPESAQTSRDIDLSPGQPLQSNQRTGNLGVIGRRNXDLGAIGDNFSGSTVSSGGVRDQLYNLQMLEAAHFKIPLPKDSERPRTYTPKHPTITPPSYPQVQAPIVNNPAFWERVGIEPYGTDTLFFAFYYQQNTYQQYMAAKELKKQSWRYHRKYNTWFQRHEEPKVATDEYEQGTYVYFDFHIANDDLQHGWCQRIKTDFTFEYNYLEDEPIV

SEQ ID NO: 150534 - protein, 65 aa, Glycine max
  Clone ID: PAT_MRT3847_106957C.1.pep
CLSWCACWFWSGFSRVRSILFVFALKPAVRWVGYRGSVKTFALGYEIVMGFAIVILLYDFNVIGF

SEQ ID NO: 150535 - protein, 56 aa, Glycine max
  Clone ID: PAT_MRT3847_106958C.1.pep
KYKKKQGKVNNKKQKKKNKRRVPFFLVSSFYTLAGAETPFFSGPFICWHRPFLSAS

SEQ ID NO: 150536 - protein, 69 aa, Glycine max
  Clone ID: PAT_MRT3847_106959C.1.pep
AGVSFVSVSILDSISAHHTAQCTSTFKCALRCMVAVQLVADLGAESHLTEVEADTRREPPVFPYCDIFL

SEQ ID NO: 150537 - protein, 308 aa, Glycine max
  Clone ID: PAT_MRT3847_10695C.1.pep
RQELKNLVVEGRDGNVTFEDFPYYLSERTQVLLTSAAYVHLKHLHFSKHTRNLPPASRAILLSGPAEPYQQMLAKALAHYFESKLLLLDITDFSVKLQNKFGCSRKEPSFKRSISEATLERMSGLFGSFSMLSSTGETRGILRQQSSASVSSNPPKLRRNASASYDISSTSSQCGPTFPAPLKHTSSLCFDEKLFVQSLYKLLVSITETGSIILYIRDVEKLILQSPRLYNLLQKMIKKLSGSVLILGSQILDSEDDCKEVDERLSALFPYNIEIKAPKDETHLGCWKGQLEKDMIDILIQDNRHHMA

SEQ ID NO: 150538 - protein, 320 aa, Glycine max
  unsure (1)..(320): unsure at all Xaa locations
  Clone ID: PAT_MRT3847_106960C.1.pep
MQINSHGSSVSAQSGIGLGVQSTSLGGISSASLQQPPNPVHSPSSQQPLMPDVGNSKIEEQQQHQNFPDDSTIESIASTGIGKNLINEDDSKSAYTVDSPAAVSASLPESAQTSRDIDLSPGQPLQSNQPTGNLGVIGRRNGAEHGAIGDNXVGRMLVLVECRDQLYNLQMLEAAHFKLPLPKDSERPRTYTPKHPTITPPSFPQVQAPIVNNPAFWERVGIEQYGTDTLFFAFYYQQNTYQQYMAAKELKKQSWRYHRKYNTWFQRHEEPKVATDEYEQGTYVYFDFHIANDDLQHGWCQRIKTDFTFEYNYLEDEPIV

SEQ ID NO: 150539 - protein, 882 aa, Glycine max
  unsure (1)..(882): unsure at all Xaa locations
  Clone ID: PAT_MRT3847_106961C.1.pep
MGASRKLQGEIDRVLKKVQEGVEVFDSIWNKVYDTDNANQKEKFEADLKKEIKKLQRYRDQIKTWIQSSEIKDKKVSASYEQALVDARKLIEREMERFKICEKETKTKAFSKEGLGQQPKTDPKEKAKSETRDWLNNVVGELESQIDNFEAELEGLSVKKGKSRPPRLTHLETSITRHKAHIKKCEFILRLLDNDELSPEEVNDVKDFLDDYVERNQDDFDEFDDVDELYSSLPLDKVETLEDLVTIPPGLSKVAPSLSLKNTLTVSASQSASASQTSEXQEQADDTTSQDSNSDIVAKTPPCKSGGISSATSTPVDHATPVSVNVSGHNLSSAPVAVLPGSNSVRNVLENTNVINSSSVNQSTSTNEEEINSFPSRRPSPSLSDATLLKGRSSLSNQATASIPLGSGNMVSSNGALGSVSSASEIAKRNILGADDRLGSSGMVQPLVSPLSNRLILPQAAKANDGTVLVDSSTVNEAASGRVFSPSGVPGMQWRPGSPFQNQNDAGQLRGRTEIAPDQREKFLQKYQQVQQGNSTLLNMNSTLLNMPSLVGGNHKQFSAQQQNPLLQQSGIGLGVQSTSLVGISSASLQQPPNPVHSPSSQQPLMPGVSIDADVGNSKIEEQQQHQNFPDDSTTESTASTGIGKNLINEDDSKSAFALDSPAGVSASLPESAQTSRDIDLSPGQPLQPNQPTGNLGVIGRRNGAEHGAIGDNFSGSSVSSGGVRDQLYNLQMLEAAHFKIPLPKDSERPRTYTPKHPTITPPSYPQVQAPIVNNPAFWERVGLEPFGTDTLFFAFYYQQNTYQQYLAAKELKKQSWRYHRKYNTWFQRHEEPKVATDEYEQGTYVYFDFHIANDAXQHGWCQRIKTEFTFEYNYLEDDLLV

SEQ ID NO: 150540 - protein, 52 aa, Glycine max
  Clone ID: PAT_MRT3847_106962C.1.pep
SSCASTFIWEHVLEVLSPLSPECISLNSSMSRVPPHAIYDILVLFVVRHGWT

SEQ ID NO: 150541 - protein, 142 aa, Glycine max
  Clone ID: PAT_MRT3847_106963C.1.pep
MGASRKLQGEIDRVLKKVQEGVEVFDSIWNKVYDTDNANQKEKFEADLKKEIKKLQRYRDQIKTWIQSSEIKDKKVSASYEQALVDARKIIEREMERFKICEKETKTKAFSKEGLGQQPKTDPREKAKSETRDWVEQCGWGS

SEQ ID NO: 150542 - protein, 57 aa, Glycine max
  Clone ID: PAT_MRT3847_106964C.1.pep
ICKGRMYRSLAACRPSRERGKSSKDREEHLLCALLNKKRDQLLNLHLLLRRVHIIYE

SEQ ID NO: 150543 - protein, 102 aa, Glycine max
  Clone ID: PAT_MRT3847_106965C.1.pep
NPPKRNPWDKGKKTLGKKGNGFFTLGGLLKPRGGPKKGGGEPLGWAPGFFFFKKKRGILFRPPAGKGNTGLWAGYKQGTPPLDNFSSNLSEPGETKTGDLFD

SEQ ID NO: 150544 - protein, 104 aa, Glycine max
  Clone ID: PAT_MRT3847_106966C.1.pep
NLEFGSRKDTDIAYSSLIEPKLWVCCYIYPLGGRKSQPLLYRARVLVALSEHVMGSDYILLTTDLIRHQCSVCDRHPSEVKLEERICEPCLDYYHQDGLTIVRR

SEQ ID NO: 150545 - protein, 90 aa, Glycine max
  Clone ID: PAT_MRT3847_106967C.1.pep
IVHARIAFSPLLSSSLPSLPNRLGISSTPLFSSLSLLRRPLSRHVEAPLRLPCPYVRGSAPALGVKKKNPKAFSQLIKPNPPKKGKNPPP

SEQ ID NO: 150546 - protein, 117 aa, Glycine max
  unsure (1)..(117): unsure at all Xaa locations
  Clone ID: PAT_MRT3847_106968C.1.pep
TEGLVQEFDGSYQRVYREGNVQLLVFFGAALVLVAXPCHRAXYQTLPVRMKTGYGERSSEGKCARIMACCEAHNIRAFKTIPEECVEPTKDYINGEQSRSDSKTVYPQAFFYASERE

SEQ ID NO: 150547 - protein, 158 aa, Glycine max
  Clone ID: PAT_MRT3847_106969C.1.pep
LTKEKKMPQNKIFQDQQQSSNPIPDLSLHISLPNRAPSSICTEGDSPFDAEGFKSHSDGSIKGCSIPYHTDTQLSLANPTNTTYTPSEAESTWRKRNCVRLDAEGQIRLINGIPLYSNLYCLDTIPSMERNQPTNKLPFSSLYACPHPPSAPNYGNNN

SEQ ID NO: 150548 - protein, 77 aa, Glycine max
  Clone ID: PAT_MRT3847_10696C.1.pep
EALTGSMAATSQTGHNLLSTLLRKSRWHTVWGMRTGADKCQVLTNVNAVIPVLGSGLLRFLTYKRPRSCLQLHTTTL

SEQ ID NO: 150549 - protein, 470 aa, Glycine max
  Clone ID: PAT_MRT3847_106970C.1.pep
EDLPPGWVKELKIRKNSKGIRKDPFYIDPASGYVFRSKKDVLRYLESGDIRSCAFKPSRRQVQDEDNLTPPPAAKRQKLKQSAPEQQLSSATEILDKSNLELLDANSSRKGKNANVSSGMMVASVPMGESVEKMHSLEDGAANSSELKKTSDPSSSALLNESLKESEQVLSADDVQEKEHVVNMMENAIEKNHSNYSISKNRKEFNVPHRSSPRLAGSKPVQLANNVMNEQTLQVPKRNLRKSRNTLDIDISEDQTVSKEQPHQQEADKIEDKKPEIQISSNKSSKKKEYHLPRRASKRLAAIEHESMNSKAKLQQSECGPVTVLADQAPTNGKSANKRKKSEPQLGKRENEEMEDEKSESQLSFAFHYSWSDPSLEYAINTLTGVLPPAETDIPKTLVDNVTGKGATTIPETDIPKSLVDNATGKGTTTVPETDIQKTLVDNVTGRSGGSENNLLDTVAGSRDRKSQAR

SEQ ID NO: 150550 - protein, 136 aa, Glycine max
  unsure (1)..(136): unsure at all Xaa locations
  Clone ID: PAT_MRT3847_106971C.1.pep
RYKGTVQEFVVSYNLVYREENMKLFVFFVAAVVLVSWSCHGACYQRFPLRMTTGYGERSSDVTCACFTRAVEPHNIRAFRTIPEKCVEPPTDXIHGEQFRSDSTTVKQQAFFYASEREVHHNDIFIFCIDNTVLSN

SEQ ID NO: 150551 - protein, 138 aa, Glycine max
  unsure (1)..(138): unsure at all Xaa locations
  Clone ID: PAT_MRT3847_106972C.1.pep
IVQEFVASYKVVYREENMKLSVFFVAALILVAWPCHGACYQRFPLRMKTGYREHSSEVKCPRFKLAVEAHNIRAFKTISEEYVXPTXDYINRXQFISDSKTVNQQAFFYASERDVHHNDIFIFGNRYTVLFNIPYYEK

SEQ ID NO: 150552 - protein, 116 aa, Glycine max
  Clone ID: PAT_MRT3847_106973C.1.pep
GQSYDFSVVMQLVTMLSIKPSDGLKGFICIVYRSLADAVGSFSKWISAFKENFRALLLFLAIGISQPLSSNACASALRKVCEDASVVIYEPSNLEILMWIGEGWDKWHLSLEDEEE

SEQ ID NO: 150553 - protein, 123 aa, Glycine max
  Clone ID: PAT_MRT3847_106974C.1.pep
MEEMSGLATAINSSNIGFQLLKKHGWKEGTGLGVSEQGRLEPVETHVKNNKRGLGADKAKKKVVKAKPDQSDSSKGNNQQDHLPQKKSKTLSKRMRKMQEFEKKMREKEFERAFFREFWPENV

SEQ ID NO: 150554 - protein, 123 aa, Glycine max
  unsure (1)..(123): unsure at all Xaa locations
  Clone ID: PAT_MRT3847_106975C.1.pep
PRVREFVVSYKLVYREEKMKLFVFFVAAXVLVACPCHGAGYQRFPLRMKTGYGERSSEVKCASFRLAVEAHNILSLKTILEECFEPTXDYINGXQFKLDFXNIYQHAFFYSIYLQFYYNYLFI

SEQ ID NO: 150555 - protein, 101 aa, Glycine max
  unsure (1)..(101): unsure at all Xaa locations
  Clone ID: PAT_MRT3847_106976C.1.pep
GRVGGRVGSIKPSDGLKGFMCIVXSLADAVGSFSKWISAFKENFRALLXYTKLHFSMXFLAIGISQPLSSNACASALRKVCEDASVVIYEPSNLEILMWIG

SEQ ID NO: 150556 - protein, 196 aa, Glycine max
  unsure (1)..(196): unsure at all Xaa locations
  Clone ID: PAT_MRT3847_106977C.1.pep
SYGLVYFEENMNLFIFFVAAVVLVAWPCHGAGYQRFPLRMKTGYGERSSEVKCACFTLACEAHNIRAFKTIPEECVEPTKDYINGEQFRSDSKTFNQQAFFYASERQVHHNDIFIFGIDNTVLSNIPYYEKHGYGVEESNDTSYDECDNNDHAPALPXTHHKYNQLMSLGCSIATLSXRYCDIMCGTQPHLMKAGF

SEQ ID NO: 150557 - protein, 225 aa, Glycine max
  unsure (1)..(225): unsure at all Xaa locations
  Clone ID: PAT_MRT3847_106978C.1.pep
EFVVSYKLVYREENMKLFVFFVAAVVLVAWPCHGAGYQRFPLQMKTGYGERSSEVKCASFRLAVEAHNIRAFKTIPEECVEPTKDYINGEQFRSDSKTVNQQAFFYASEREVHHNDIFIFGIDNTVLSNIPYYEKHGYGVEEFNETLYDEWVNKGDAPALPETLINYNKLLSLGFKIVFLXSGRYLXDKMAVTEANLKNACFHTWEQFILIDPHFITTNALSYES

SEQ ID NO: 150558 - protein, 74 aa, Glycine max
  Clone ID: PAT_MRT3847_106979C.1.pep
SPQLLWYLEANIVFSPIVSARSCFFSTTQHICFNFQSTKLYKLQHNNPPIQKNSHNYQWSEWRGAEFKMSLKLI

SEQ ID NO: 150559 - protein, 94 aa, Glycine max
  unsure (1)..(94): unsure at all Xaa locations
  Clone ID: PAT_MRT3847_10697C.1.pep
MTIMSRFGPLTILKISLVGGGVIGSGAEAKPKAFFGVGDSLGDNGNNNYLATTARADAPSYGIDYPXSHKPTGRFFNGYNIPDLISQRLGAEST

SEQ ID NO: 150560 - protein, 267 aa, Glycine max
  Clone ID: PAT_MRT3847_106980C.1.pep
DKSDTCRSRKRRCLFKEANPPQGIKVQEFVVSYKLVYREENMKLFVFFVAAVVLVAWPCHGAGYQRFPLRMKTGYGERSSEVKCASSRLAVEAHNIRAFKTIPEECVEPTKDYINGEQFTSDSKTVNQQAFFYASEREVHHNDICIFSIDNTVLSNIPYYEKHGYGVEEFNETLYDEWVNKGDAPALPETLKKDNKLLSLSFNIVFLSIRYLNKMTITETDLKKLTSHVRTVDLKIHIYHFNALSYKSPVKRSIEASYKFVESWKPL

SEQ ID NO: 150561 - protein, 39 aa, Glycine max
  Clone ID: PAT_MRT3847_106981C.1.pep
RWGCVFQNTASSSFFVWVQKQKNLVLCYVKMILIFGVIL

SEQ ID NO: 150562 - protein, 255 aa, Glycine max
  unsure (1)..(255): unsure at all Xaa locations
  Clone ID: PAT_MRT3847_106983C.1.pep
MKLFVFFVAAVVLVAWPCHGAGYQRFPLRMKTGYGERSSEVKCASFRLAVEAHNIRAFKTIPEECVEPTKDYINGEQFRSDSKTVNQQAFFYASEREVHHNDIFIFGIDNTVLSNIPYYEKHGYGVEEFNETLYDEWVNKGDAPALPETLKNYNKLLSLGFKIVFLSGRYLDKMAVTEANLKKAGFHTWEQLILKDPHLITPNALSYKSAMRENLLRQGYRIVGIIGDQWSDLLGDHRGXESRTFKLPNPMYYIE

SEQ ID NO: 150563 - protein, 179 aa, Glycine max
  Clone ID: PAT_MRT3847_106984C.1.pep
EEFEIKDSSQEYLALHPMGSKKQTSLLKEHFEPVMSDDGQSLSDSDASTSSQDEPANGMKDKSRVPRMYEIKNEQHAEAFWSQKSLAGEDSLPMGDRVAALRDDQQSSRVPKGIKQGPGGSREITFATRSSAKYKEDEEDKEVPNRKKRGVQSLGLKPNRPVFRGQGRGKRGNGRRGRR

SEQ ID NO: 150564 - protein, 692 aa, Glycine max
  Clone ID: PAT_MRT3847_106985C.1.pep
MATRDGGMKSTSINGVKMYTIASQQPSLASWLPSSKKQNSHRNVKSYTQNLQLLEDLRFATAATKIKATPDGEYIIASGIYPPQVKVYEVRELGLKFERHLDSEIVDFQVLSDDYSKLAFLCADRSVYLHAKYGKHYSLRIPRMGRDISYDCWSCDLLCAASSPDLYRINLEQGRFLSSLNTQSPALNVVSRSKLHGLVACGGEDGAVECFDMRVRSSVGRIDAVGPSGDVDQEVTALEFDEDGGFLMAVGSSAGKVLIYDLRSSNPVRIQDHMYGSSILDIKWHHTLNYEQPMLITSDNHVVRIWDPETGEGLTSIEPTTGTINDVCTFPGSGLILLALDCSQIPSYFIPSLGPAPKWCSSLENFTEELDMGGQTTIYDHYKFLTKEELERLNLTNLIGTNLLRAYMHGFFINHALYKKAKALVDPFEYEAYIEQQKREKMEAERASRITVRKKLPKVNRALAARLLETEEAENEKRDEDADDGETKKASKKKKGLSMQDLQDDRFKAIFTNEEFEIKDSSQEYLALHPMGSKKQTSLLKEHFIPVKVDDRQSLSDSNASTSSHLRPASEHCHTYPGVPLYEIKNEQHAEAFWSQKSLAGEDSLPMGDRVAALKVTQQSSRVPNGVKQGPGGSREITFSTRSSAKYKEDEEDKEVPHRKKRGVQSLGLKPQRPVFRGQGRGKRGNGRRGRR

SEQ ID NO: 150565 - protein, 44 aa, Glycine max
  Clone ID: PAT_MRT3847_106986C.1.pep
KSENHVYHKRAPSIYVNALKHVSSGWTVPKNAVSSTHWYHAQYK

SEQ ID NO: 150566 - protein, 65 aa, Glycine max
  Clone ID: PAT_MRT3847_106987C.1.pep
IATIYLISFTITHSLTTHKIPSREHAYVLHNIEMIMLPLMFMEATSKLTCHMSQVLPLQNYTLKL

SEQ ID NO: 150567 - protein, 36 aa, Glycine max
  Clone ID: PAT_MRT3847_106988C.1.pep
LVACAMAWPCCGDYCGDGEDRRLHILLAIYWLIAHN

SEQ ID NO: 150568 - protein, 102 aa, Glycine max
  unsure (1)..(102): unsure at all Xaa locations
  Clone ID: PAT_MRT3847_106989C.1.pep
MVEAGEEEVIEFKWGTRKGLGGKKKDVQFYESFTYDGVEYSLFDSVFLYKEGEPEHYIGKILKIWENSDKSKKVKILWYFRPSEILNFLEGSETXENELFLA

SEQ ID NO: 150569 - protein, 152 aa, Glycine max
  Clone ID: PAT_MRT3847_10698C.1.pep
MASALSSRVESVRNSPSLRFSLNCIRALSSSSSSSSAAAAVSSGENPNKSKRRKKKNLFEVAQFLPNWGIGYHMAKTHWNEVSYEITKINLYKDGRHGKAWGVAFKNGLPLADAPKKISGVHKRCWRYLPNVVKALESSTDSGLKVETEAAS

SEQ ID NO: 150570 - protein, 37 aa, Glycine max
  Clone ID: PAT_MRT3847_106990C.1.pep
VHLARPLQLSSVRFDDLMSETSISVLAVVMTSLALVI

SEQ ID NO: 150571 - protein, 79 aa, Glycine max
  Clone ID: PAT_MRT3847_106991C.1.pep
LLLSIMINRNATILRLLSNRSRALLVQKGSFLILSLNLSIISNIETFRLGNSNLSNRNLSRSLRLSEENERLHRRGRLV

SEQ ID NO: 150572 - protein, 217 aa, Glycine max
  unsure (1)..(217): unsure at all Xaa locations
  Clone ID: PAT_MRT3847_106992C.1.pep
EXXXQXLEDEKRLENPERYLEQLHARYKDLSEKVDQRKRLKTNGGHSNGNNLSGGIGRGERLNAAQRERMRLLTTAAFDRGKGEDTFGAKDEDWQLYKLMGKDNDDGDEEPDEDDAELARISSRLLDLDPTFVPNKSETGSSQPAEAPRARPLTKEDFHIVFGAERFRCPEILFNPNWIAVDQAGLDEMAGGSIRRLSCKDESLQERLTSSILVTGG

SEQ ID NO: 150573 - protein, 268 aa, Glycine max
  Clone ID: PAT_MRT3847_106993C.1.pep
MDVGTVLLLCWVTLIPGILSDPSDEACMTHLSKSLQDPNNQLHNWKEENFANPCNDSTTNLRGAICNNGRIFKLSLNNLSLRGTISPFLSNCTNLQALDLSSNFLTGPIPADLQSLVNLAVLNLSSNRLERVIPPQLTMCAYLIIIDLHDNLFTGPIPQQLGLLVRLSAFDVSNNRLSGPIPASLSNRSGNLPRFNASSFLGNKDLYGYPLPPLRNRGLSLLAIVGIGLGSGLASLVLSFTGVCIWLKITDRKMALEEGKITPLMPDY

SEQ ID NO: 150574 - protein, 269 aa, Glycine max
  Clone ID: PAT_MRT3847_106994C.1.pep
MEVGSVVLVWWWISLIPRILSDPSDEACLTNLSKSLEDPNKLLHNWKEENFAKPCNDSSSNLRGAICNNGRIYKLSLNNLSLRGTISPFLSNCTNLQTLDLSSNFLTGPIPPELQSLVNLAVLNLSSNSLQGVIPPVLTMCAYLNIIDLHDNLLTGPIPQQLGLLVRLSAFDVSNNRLSGPIPASLSNRSGNLPRFNASSFLENKDLYGYPLPPLRNKGLSVLAIVGIGLGSGLASLVLSFPGVCIWLKFTERKMALEEGKISPLMPDY

SEQ ID NO: 150575 - protein, 103 aa, Glycine max
  Clone ID: PAT_MRT3847_106995C.1.pep
CFNCGVVQVDVNTEVGVVRDIILKELRIYTDYGRCSRPLFIVDKQRLLIKKKDIHALQQRESPEDGGWHDLVSKGFIEYIDTEEEETTMISMTINDLVQARIN

SEQ ID NO: 150576 - protein, 89 aa, Glycine max
  unsure (1)..(89): unsure at all Xaa locations
  Clone ID: PAT_MRT3847_106996C.1.pep
MGFRFPSIRQASFMASQATSKFVDAPKGYFAVYVGEKXRFMIPVXYLNQPSFQDLLNEAEEEFGYDHPMGGLTIPCSEDVFQRITSCLN

SEQ ID NO: 150577 - protein, 65 aa, Glycine max
  Clone ID: PAT_MRT3847_106997C.1.pep
GSRFHSLVYKGSNVCQASVQSTQPPPASANPVLSLHADTVADLDSRSASLKYIHYCHFLLSLWTS

SEQ ID NO: 150578 - protein, 233 aa, Glycine max
  Clone ID: PAT_MRT3847_106998C.1.pep
MVFLQQTATMAVTKSLSIFLFIAISCVAVAQAANFNITNNCTYTVWAAAVPGGGSRLNPGESWNISVTNGTTGGRIWGRTNCTFDNAGRGKCLTGDCDGVLECNKTGTPPNTLVEFALNQYNNLDFYDISLVDGFNIPLQVSPTYNCSSVKCAADIIGECPTQLQVPGGCNNPCTVFNTTQYCCSTGAAGCGPTDYSKFFKERCPDAFSYPMDDASSMFTCMGGSDYRLVFCP

SEQ ID NO: 150579 - protein, 223 aa, Glycine max
  Clone ID: PAT_MRT3847_106999C.1.pep
MAVTKSLSIFLFIAMSCVAAAQAANFNITNNCTYTVWAAAVPGGGARLNPGESWNISVTNGTTGGRIWGRTNCTFDNAGRGKCLTGDCEGVLECNKTGTPPNTVVDFALNQYNNLDFYDISLVDGFNVPLQLTPTYNCSSVKCAADIIGECPTQLQVPGGCNNPCTVFNTTQYCCSTGAAGCGPTDYSKFFKERCPDAYSYPMDDATSMFTCMGSDYRVVFCP

SEQ ID NO: 150580 - protein, 123 aa, Glycine max
  Clone ID: PAT_MRT3847_10699C.1.pep
RPEPGATHAPNKPAHAPTERGETETQGADPKPETKANAPDARSTKSSQHPETNPKGKKKPPAQAQTREHNQPHPKKPAEHATTDTGPRARHKPHQPPPQDPGPNQAQAGENPEKGPHPPTRDR

SEQ ID NO: 150581 - protein, 69 aa, Glycine max
  unsure (1)..(69): unsure at all Xaa locations
  Clone ID: PAT_MRT3847_1069C.1.pep
MGASSSMSTVCVILASLASAALYANPQRAVDVPFGRYYVATSAFAHIGYLNGGTXIQLPPNPYTCNGLQ

SEQ ID NO: 150582 - protein, 37 aa, Glycine max
  Clone ID: PAT_MRT3847_106C.1.pep
MVCNYCIFVDKKKKKKKKKKKKKKKKKKKKKKKKKKK

SEQ ID NO: 150583 - protein, 63 aa, Glycine max
  Clone ID: PAT_MRT3847_107000C.1.pep
MGLWSTTNAVSRRFHKFGDDQKNLVFQDDATSSSRGIELTKLDGGGQPVGGSVGTVVYSRPVH

SEQ ID NO: 150584 - protein, 65 aa, Glycine max
  Clone ID: PAT_MRT3847_107001C.1.pep
NLPRRTAYFGTSVSSIFKGLSTQQIQHCFWRGFVCVRGFDQKERAPRPLQARLHFSASRLAKAEK

SEQ ID NO: 150585 - protein, 93 aa, Glycine max
  Clone ID: PAT_MRT3847_107002C.1.pep
MAGNDWLNNYLESILDMLPVLLYSKCCLDARQRRTPIPSCFSTQEALGFHHTYLYSSRDISIGLTGVLTICSPWSMLAVPGILTSQALGLCNW

SEQ ID NO: 150586 - protein, 69 aa, Glycine max
  unsure (1)..(69): unsure at all Xaa locations
  Clone ID: PAT_MRT3847_107003C.1.pep
PLSTDLRSKYNVRSISFRKDDYVRVLCXTYRGREVKFFHVYRRMWVIHIXRITRERVNGFTLYFVIHPS

SEQ ID NO: 150587 - protein, 73 aa, Glycine max
  Clone ID: PAT_MRT3847_107004C.1.pep
FTPFNILTLVPGGINSTDPCKSYKGLYKKKMGLEQNTQNPPWSLWIWAFAIFKGSAQFHWCFNKTKQCPNPGS

SEQ ID NO: 150588 - protein, 48 aa, Glycine max
  Clone ID: PAT_MRT3847_107005C.1.pep
VRLYHIEWPPFPPFMTDTRGSQCAGLEPESRCLRDALQSIISLWQPAL

SEQ ID NO: 150589 - protein, 103 aa, Glycine max
  unsure (1)..(103): unsure at all Xaa locations
  Clone ID: PAT_MRT3847_107006C.1.pep
MARLVLPSKTLIFSRNTLLGLISPAPNTARGSIRFKHFLASEVTFRKKYCPLYSSLPRVKQVSRRLICSVATEDLPKEVEKSNMETPREIFLKITKXDYYFDT

SEQ ID NO: 150590 - protein, 67 aa, Glycine max
  Clone ID: PAT_MRT3847_107007C.1.pep
IDRVMGREGCYNSSPHVTSNLDLRLWLHWHSCFFFPLYGSLLICWLIKNWVGLRTLGVPTELMTAHG

SEQ ID NO: 150591 - protein, 981 aa, Glycine max
  Clone ID: PAT_MRT3847_107008C.1.pep
MARLVLPSKTLTFSRNTLLGLISPAPLKANCSVSYFQNTARGSIRFKHFLASEVTFRKKYCPLYSSLPRVKQVSRRLICSVATEDLPKEVEKSNMETPREIFLKDYKMPDYYFDTVDLKFSLGEEKTIVNSKIAVYPRIEGSTPPLVLDGRDLSLVSIHLNGKALKEEDYHLDARHLTIRSPPSGKYDLEIVTDICPQKNTSLEGLYKSSGNFCTQCEAEGFRKITFYQDRPDIMAKYTVRIEADKSLYPVLLSNGNLAEQGDLEDGRHYAVWEDPFKKPSYLFALVAGQLQSRDDTFITHSGRMVSLRIWTPADDVPKTVHAMYSLKAAMKWDEDVFGLEYDLDLFNVVAVPDFNMGAMENKSLNIFNSKLVLASPETATDADYAAILGVIGHEYFHNWTGNRVTCRDWFQLSLKEGLTVFRDQEFSSDMGSRTVKRIADVSKLRNYQFPQDAGPMAHPVRPHSYIKMDNFYTVTVYEKGAEVVRMYKTLLGSQGFRKGMDLYFKRHDGQAVTCEDFFAAMRDANDADFANFLLWYSQAGTPVVKVNTSYNPEAHTFSLKFSQEIPPTPGQSVKEPTFIPVAMGLLDSTGKDIPLSTVYHNGTLLSVSSNDQSVCTTVLRVTKKEEEFVFTNIFERPIPSLLRGYSAPVRLESDLTDSDLFFLLANDSDEFNRWEAGQVLARKLMLHLVDDLQHNKPLVLNSNFVEGFKRILCDSSLDKEFVAKAITLPGEGEIMDMMGVADPDAVHAVRTFIRKQLASKLRSEFLSTVENNRSSEEYVFNHSNLARRALKNVALAYLGCLEEQEFTNLVLHEYKTATNMTEQFAALVAIAQNPGKTRDDVLADFYGKWQHDFLVVNKWFALQAMSDIPGNVENVRKLLSHPAFDLRNPNKVYSLIGGFCGSPVNFHAKDGLGYKFLGEIVLQLDKLNPQVASRMVSAFSRWRRYDEDRQKLAKAQLERIMSTNGLSENVFEIASKSLAA

SEQ ID NO: 150592 - protein, 184 aa, Glycine max
  Clone ID: PAT_MRT3847_107009C.1.pep
MARFVLPSKTLTFSRNTLLGLISPAPNTARRSIRFKHFLASEVNFRKKYCPLYSSLSRVKQVSRRLLCSVATEDSPKQVEESKMETPREIFLKDYKMPDYYFDTVDLKFTLGEEKTIVSSKIAVYPRIEGSTPPLGLDGQDLSLVSIHLNGKALKEEDYHLDARHLTIQSPPSGKYDLEIGTDI

SEQ ID NO: 150593 - protein, 126 aa, Glycine max
  Clone ID: PAT_MRT3847_10700C.1.pep
PFPTFTRYTAMPLKVSISHFTAIYGKLARARAPFPGSPGGPRARPRFLFFLTSSEVRSNCSLWWLYDSIRSTSCDFYVLIRRFSLAPQKIKYACVCVAIVTLKQAQALLFRLLENVDQKKKMNERM

SEQ ID NO: 150594 - protein, 45 aa, Glycine max
  Clone ID: PAT_MRT3847_107010C.1.pep
SGAALTKPVNHWNRSSDNDGNECSKTGFCLLNSMNDSHIVTPLSS

SEQ ID NO: 150595 - protein, 403 aa, Glycine max
  unsure (1)..(403): unsure at all Xaa locations
  Clone ID: PAT_MRT3847_107011C.1.pep
MARFVLPSKTLTFSRNTLLGLISPAPVNCSVCYFQNTARRSIRFKHFLASEVNFRKKYCPLYSSLSRVKQVSRRLLCSVATEDSPKQVEESKMETPREIFLKDYKMPDYYFDTVDLKFTLGEEKTIVSSKIAVYPRIEGSTPPLVLDGQDLSLVSIHLNGKALKEEDYHLXDARHLTIQSPPSGKYDLEIVTDICPQKNTSLEGLYKSSGNFCTQCEAEGFRKITFFQDRPDIMAKYTVRIEADKSLYPVLLSNGNLAEQGDLEDGRHYAVWEDPFKKPSYLFALVAGQLQSRDDTFVTRSGRKVSLRIWTPADDVPKTAHAMYSLKAAMKWDEDVFGLEYDLDLFNVVAVPDFNMGAMENKSLNIFNSKLVLASPETATDADYAAILGVIGHEYFHNWTGNR

SEQ ID NO: 150596 - protein, 346 aa, Glycine max
  Clone ID: PAT_MRT3847_107012C.1.pep
MDLPVIDLSPSLSGEWDPLLCAEVSRSLRETGALLVKDPRCTVEDNDRFIDMMERYFSKPRDFKHRHERPHLHYQVGVTPEKVEVPRSLVDEEMQEKLKAMPKENQPNTPVGPDLKWRYFWRIGPRPSNTRFQELNAEPVIPEGFPEWKETMDSWGYKMIAAIEVVAEMAAIGFGLPKDAFTSLMKLGPHLLAPTGSDLQKYGQEGTIFAGYHYDLNFLTIHGRSRFPGLNIWLRNGQKVEVKVPIGCLLIQTGKQIEWLTGGDCIAGMHEVVATKRTLDAISLAQEQNRSLWRVSSTLFAHIASDAVLKPLGHFAESPLASKYPPMCAGEYVEQELSVINLKGKK

SEQ ID NO: 150597 - protein, 54 aa, Glycine max
  Clone ID: PAT_MRT3847_107013C.1.pep
SNKLLKLFHQLIEVFLCQRGMYHYQLYTEYLLVSLVTRSSLYADPVCSLRILGG

SEQ ID NO: 150598 - protein, 59 aa, Glycine max
  Clone ID: PAT_MRT3847_107014C.1.pep
TLGPKGSNFPKAPVIGAPLGAPLKETFGPSLNPLIKLRAGEFLGFAPFFAPQGGLLFKI

SEQ ID NO: 150599 - protein, 171 aa, Glycine max
  unsure (1)..(171): unsure at all Xaa locations
  Clone ID: PAT_MRT3847_107015C.1.pep
KKTPHSFSEKGGQKGDLKNGGRGTPSPFKKKNNIRGGPHPANQKTPRGKAPSKKKEKAGERGPPKNSSLFFLGPPQTPPGKKPQFNPPLGGKKGPPRXGGGGPPPLKPRGPPEKRPQNXSRKTPPPRNPKPQKGGKNRGNPPPGQPPAGGAKPQKRGGGPPGRAPLDSTPP

SEQ ID NO: 150600 - protein, 67 aa, Glycine max
  Clone ID: PAT_MRT3847_107016C.1.pep
LPHTLTPLTNHTFNHIKNNKNHPARLNTPSLPTPKYHLIQTQNIHHNTHYCTISKYIQTYKPLKSPN

SEQ ID NO: 150601 - protein, 145 aa, Glycine max
  unsure (1)..(145): unsure at all Xaa locations
  Clone ID: PAT_MRT3847_107017C.1.pep
MDAYAGLLETNIGMLSKKSTMSLYTAPVVRLTQFHFYVHNNINGEHPTAMKIAERPKASICRLGTIYMMDESLSERSSSTSMVVXKXEGIYAEVLTHEHAILIVTNLLFTDGIYNGCTLNILGKNYILQSVKEMSIGGGRGIFKY

SEQ ID NO: 150602 - protein, 47 aa, Glycine max
  unsure (1)..(47): unsure at all Xaa locations
  Clone ID: PAT_MRT3847_107018C.1.pep
LFSLISLTTWRLHHXSKKITSSKSASTXTSRFKKMTRLSXXRFKTRR

SEQ ID NO: 150603 - protein, 91 aa, Glycine max
  Clone ID: PAT_MRT3847_107019C.1.pep
PPPPPPPPSPPHRPPHPHTPPPTPPAPPPRAPPLARRPTPPPPPHFRPPCPTGLNSPFSKNLLSPSSTYATPPIHKGRTCLSISISIQTWV

SEQ ID NO: 150604 - protein, 517 aa, Glycine max
  unsure (1)..(517): unsure at all Xaa locations
  Clone ID: PAT_MRT3847_10701C.1.pep
MNNGVSQESSVLLDLASHVNRFAFDSFRSDNNKTLLSNFLHFNGNTRTGAAAAKRGVSLGGKVGGASVRFGNILNDFNRAVRFHCEKIPIGFASLRVGDGGDGADGNGNGEGNGVRVDECGGVENEGFRGNGVEGEKPKKVLILMSDTGGGHRASAEAIKAAFYQEFGDDYQVFVTDLWADHTPWPFNQLPRSYSFLVKHGPLWKMTYYGTAPRVVHQSNFAATGTFIAREVAKGLMKYQPDIIISVHPLMQHVPLRILRSKGLLKKIVFTTVITDLSTCHPLQQMLRKGHXKRATTDVAQRALKAGLQPSQVKPVRPKDELTRELRMDEDLEAVRELGMDEXDLPAVLLMGGGEGMGPIEATARALGDSLYDENIGAPVGQILVICGRNKKLANKLSSINWKVPVQVKGFVTKMEECMGACDCIITKAGPGTIAEAQIRGLPIILNDYIAGQEAGNVPYVVENGCGKFSKSPKDIAKIVAEWFGPKAYXDAVFKIVHDLHELVRQRSYLPEYSCTT

SEQ ID NO: 150605 - protein, 54 aa, Glycine max
  Clone ID: PAT_MRT3847_107020C.1.pep
INFYSIHNYVLNVDMPFKLWTTSIRFNSAYIYTPLFSFKCSLKQRLDIYSFILF

SEQ ID NO: 150606 - protein, 50 aa, Glycine max
  Clone ID: PAT_MRT3847_107021C.1.pep
MGERKVLNKYYPPDFDPSKIPRRRQPKNQQIKVRMMLPMSIQCGTLGTYI

SEQ ID NO: 150607 - protein, 54 aa, Glycine max
  Clone ID: PAT_MRT3847_107022C.1.pep
TRYAHIYESCRSDRTNIGKSMTQNNNPSTALTIHKNGHSKVARGERAQNLSGCY

SEQ ID NO: 150608 - protein, 46 aa, Glycine max
  Clone ID: PAT_MRT3847_107023C.1.pep
IHQSRTWSASENLYITIHGKVSKRLISMVPNNILHNPKDKRQFYYY

SEQ ID NO: 150609 - protein, 74 aa, Glycine max
  unsure (1)..(74): unsure at all Xaa locations
  Clone ID: PAT_MRT3847_107024C.1.pep
DIKETGYTYLMPNNILKKXICIANFLTQIYGYMHGVSPTNNPQVKEIHCITMASQVGGHINKFIWHEIFQNMIS

SEQ ID NO: 150610 - protein, 96 aa, Glycine max
  Clone ID: PAT_MRT3847_107025C.1.pep
VINLISSADVVSKYDSVIPQYHALYEPMAIDSALLHSDQVRVASTTAMTFYRIADIGEISTQVYYAPLKPSIIVQQLTKKSDSYSLWLIEAFKTHF

SEQ ID NO: 150611 - protein, 150 aa, Glycine max
  unsure (1)..(150): unsure at all Xaa locations
  Clone ID: PAT_MRT3847_107026C.1.pep
RLPMFHCNGWTFTWGVAARGGTNVCLRTTAARDIYRNIVVHNVTHMCCAPIVFNIILEAKQSERIDIKVINGKRKSPVEILTGGAPPPASLLEQIESLGFHVTHAYGLTEATGPALVCEWKKEWNMLPKKEQAQLKARQXVSVLTMADVD

SEQ ID NO: 150612 - protein, 202 aa, Glycine max
  unsure (1)..(202): unsure at all Xaa locations
  Clone ID: PAT_MRT3847_107027C.1.pep
MEVTVFTPALEGXKLVKSEQGEILTQPFLDACKHILPVIDKFGAAMALVKSDIGGNISRLESKYSSNPTKFNYLYSLVQVEVETKTAKSSSSCTNGLLWLTRAMDFLVALFQNLIEHADWSMSQACTDSYNKTLKKWHGWLASSSFSVAMKLAPDRKKFMEVIQGTGDISADIQKFCTDFSPIFEENHKFLARCGLDDMKAS

SEQ ID NO: 150613 - protein, 116 aa, Glycine max
  Clone ID: PAT_MRT3847_107028C.1.pep
PRVRPRVRPRVRSDAPSQLRSSASAGSLEAANHLNAIQVDYSESDLESMDYAGMFTNTQWTSYVSSHHKRQAFVMYLQTNPGGITIFGWTVDRSLVNTIFFLELSLVTFVLGQTLI

SEQ ID NO: 150614 - protein, 76 aa, Glycine max
  Clone ID: PAT_MRT3847_107029C.1.pep
KKYYFPRQVPKIWMHCRNWKKDAIENTLLRYYVQKGSSSLNQMPKQTLQTILKTFNGILQSLQPFMCHMYLVIISP

SEQ ID NO: 150615 - protein, 46 aa, Glycine max
  unsure (1)..(46): unsure at all Xaa locations
  Clone ID: PAT_MRT3847_10702C.1.pep
GFFFLKAGAPKPWRSKXGANAKTKLWIKADPRIHEPKGSEPVRGAP

SEQ ID NO: 150616 - protein, 44 aa, Glycine max
  Clone ID: PAT_MRT3847_107030C.1.pep
SKDEVLVIIQHPRAQRLRKLDGFSQNPDCFVVSDLNANSPPCPT

SEQ ID NO: 150617 - protein, 172 aa, Glycine max
  Clone ID: PAT_MRT3847_107031C.1.pep
LEADAINDADEETIKKLIYPVGGYTRKASNLKKIANICLMKYDGDIPSSIEQLLLLPGIGPKMAHLVMNVGWNNVQGICVDTHVHRICNRLGWVSRLGTKQKTSTPEETREELQRWLPKEEWVPINPLLVGFGQTICTPLRPRCGECSISELCPSAFKETSNSSPSSFKSKK

SEQ ID NO: 150618 - protein, 236 aa, Glycine max
  Clone ID: PAT_MRT3847_107032C.1.pep
MAATEIGLLEWVRVGGEEEEAEQAKGCLSKFVDNGSVESHRYYLSRRTTLEMLKDRGYSIPSHEIDLSLSDFRDMHGQFPDPDRLRLSLTHATNSSKRILVIFCGPGVVKVTAIRNIAGQIINRDTLTGLILIVENHITSQALKAVNLFSFKVEIFQITDLLVNITKHVLKPKHQVLTDKQKINLLKKYNIEEKQLPRMLQTDAIARYYGLERGQVVKVTYSGEVTQMHVTYRCVW

SEQ ID NO: 150619 - protein, 76 aa, Glycine max
  Clone ID: PAT_MRT3847_107033C.1.pep
EPVVFSYEEIFSSTDGFSDSNLLGHRTYGSVYYGLLGDQEVAIKRMTSTKTKEFMSEVKVLCKVHHANLVCLCCSK

SEQ ID NO: 150620 - protein, 148 aa, Glycine max
  Clone ID: PAT_MRT3847_107034C.1.pep
FQILVIFCEPGVVKVTAIQNIAGQIINRDTLTGLMLIVENHITSQALKAVNLFSFKVEIFQDHVVVTCILLSSLITDLLVNITKHVLKPKQQVLTDKQKKNLLKKYNIKEKQLPRMLLTDAIARYYGLERGQVVKVTYSGEITQMHVW

SEQ ID NO: 150621 - protein, 39 aa, Glycine max
  Clone ID: PAT_MRT3847_107035C.1.pep
SVSGLFRVILLVHPLSQNPTRKCCQLVKIKSGVYVFRFH

SEQ ID NO: 150622 - protein, 60 aa, Glycine max
  Clone ID: PAT_MRT3847_107036C.1.pep
ISLSFPTKWPSLIFFFVLNKPTILKNHNFHIFQFIPFFQNILQYPFQHKKLALQFSLLFK

SEQ ID NO: 150623 - protein, 200 aa, Glycine max
  Clone ID: PAT_MRT3847_107037C.1.pep
MDITDKETSENQSHLQPISTEVKMDNIEKETSKSSSLCIAGETYHAPYARVSSMEDPSTRNSEYGKAAPSSLETAAIGVETVKVHVSNIGNSTLEKIPEAIEKPQVKESSSKGFRRLLKFGKKSHSSAAERHTESDNVSIDDEADEVGTNSSSNEVHTLKNLISQDETPTASTTQQKSSRSFSLLSPFRGKNSEKKIMMA

SEQ ID NO: 150624 - protein, 118 aa, Glycine max
  unsure (1)..(118): unsure at all Xaa locations
  Clone ID: PAT_MRT3847_107038C.1.pep
GRADTLYTPIFFAAMTSCRCGIFAEGGTLSKPASTRTLSVTNLTLQSTISKLGFKSQRLPRCAAASGSALGARMVXVPKVKAPALLQIDTKVFKKEKINLSGHYEYILKGRIHLIHLL

SEQ ID NO: 150625 - protein, 46 aa, Glycine max
  Clone ID: PAT_MRT3847_107039C.1.pep
CHLIHQEKHIEIKHHFIRDHVQNGKVDLEFVPTDEQLVDVFTKPLT

SEQ ID NO: 150626 - protein, 88 aa, Glycine max
  Clone ID: PAT_MRT3847_10703C.1.pep
QINNNKTLLSNFLHFNGNTRTGAAAAKRGVSLGGKVGGASVRFGNILNDFNRAVRFHCEKIPIGFASLRVGDGGDRADCNGKTRGNGV

SEQ ID NO: 150627 - protein, 107 aa, Glycine max
  unsure (1)..(107): unsure at all Xaa locations
  Clone ID: PAT_MRT3847_107040C.1.pep
LSFLPLFAFLALSEDVEQVVDISGNPIFPGGTYYIIPSTXGTTHSGLKLSRTRNSNCPFTILQNYSEIFHNTPVKFSIPKIIPRIIFTNTPLKIKFAKKPYYAKSSK

SEQ ID NO: 150628 - protein, 62 aa, Glycine max
  Clone ID: PAT_MRT3847_107041C.1.pep
GSRRKSLLIGSLEQLMTPKFRSQEHITNNNYRCVCILIIIIYEKYACTFRPDETITNNKYLY

SEQ ID NO: 150629 - protein, 107 aa, Glycine max
  unsure (1)..(107): unsure at all Xaa locations
  Clone ID: PAT_MRT3847_107042C.1.pep
KQFXXXXXFXXXIGMYGGYFSSDPLXXXTLMKXXXNSAGLDPFKDVDDDYWAIDAATKTIQKLLEIEKTSLHPKEPVVXIKEESHEHENQINQSAYECNFSKENDIS

SEQ ID NO: 150630 - protein, 38 aa, Glycine max
  Clone ID: PAT_MRT3847_107043C.1.pep
SMPRFLSIMRSAGCPGLHAPRSSSLCRGMYWSVGELEP

SEQ ID NO: 150631 - protein, 160 aa, Glycine max
  Clone ID: PAT_MRT3847_107044C.1.pep
FLLIISAAAVGVSLPFLIGSIFYSKIEGWLEKYPKRASVLRSAGGGNWFHQFQAVALIRVSPFPYIIYNYCAVATNVEYWPYLLGSMVGMVPEIFVSIYTGILIETLANASHQNHTLSTPQIALNVVGFCISGATIIFFTAYAKRQLKELQQKEDGLLLQ

SEQ ID NO: 150632 - protein, 170 aa, Glycine max
  Clone ID: PAT_MRT3847_107045C.1.pep
IRLEVDATMVLSGAVLTAYVGVNGLARRMSMDRCLPQFLMTENRLRHTNHFIIIGFFLITSSLYLIVNGNVETLAGVYTVAFLGVMSLFAVGNMLVKYKRGSLYRQIRASWLSTVSALLFVLAGLVGNVVYNLSLLKYFALYFSITVLVVMLMFVRIRILKIVLYFLSKN

SEQ ID NO: 150633 - protein, 328 aa, Glycine max
  Clone ID: PAT_MRT3847_107046C.1.pep
HAEFGESKGRVCVTGGTGFIGSWIIKRLLEDGYSVNTTVRPDPEHRKDVSFLTSLPRASQRLQILSADLSNPESFIASIEGCMGVFHVATPVDFELREPEEVVTKRSIEGALGILKACLNSKTVKRVVYTSSASAVDNNKEEIMDESSWNDVDYLRSSKPFGWSYSVSKTLTEKAVLEFGEQNGLDVVTLIPTLVFGPFICPKLPSSVRNSLDFILGEKGTFGVVLQTDMVHVDDVARAHIFLLEHPNPKGRYICSQCSVTYERISKLVSAKYPEFQPPPVESLNHIEGTKGSYLSSKKLIDAGFVYKYGLEEMVDDAIQCCKEKGYL

SEQ ID NO: 150634 - protein, 83 aa, Glycine max
  Clone ID: PAT_MRT3847_107047C.1.pep
FLILSFGLFNRTKTLALAVWDLNQDSPRFYLRQLYYNSFFPDIQSQIVKFNGILVLKKTLDSPGLIFQRWLLARCDNDPTNRL

SEQ ID NO: 150635 - protein, 70 aa, Glycine max
  Clone ID: PAT_MRT3847_107048C.1.pep
MMSNLYGEYNQKIDYVFKVVLIGDSAVGKTQLLARFAKNQFSVDSKATIGVEFQTKTLIIDNKTVKAQIW

SEQ ID NO: 150636 - protein, 126 aa, Glycine max
  Clone ID: PAT_MRT3847_107049C.1.pep
EEDTDDEGLEEEEDDESANEYTDDEDVSWKVRRAAAKCLAALIVSRPEILSKLYDEACPKLIDRFKEREENVKMDVFNTFIELLRQTGNVTKGQTDADMSPRWLLKQEVSKIVKSINRQLREKSIK

SEQ ID NO: 150637 - protein, 215 aa, Glycine max
  Clone ID: PAT_MRT3847_10704C.1.pep
SLSSFSYQSSCHRSLYSEKLQRGQSLIAFDGNNSESEAEDDHALDSVMKLYSAFKNKNTHELSADERRRVSNFLSFFETFQGRTQVLEFFSYLTSILGNNIQIIFKPTPHEGVNVGLQWKFEWNKIHLPLWKGFGLHISHTYHGRAVIRNIETFMEPLLHLKPFGLKMKIGLGEFMEKIASFMVSEFGNKAKRVLYLVLAVSSLTAFLFFMKLAS

SEQ ID NO: 150638 - protein, 123 aa, Glycine max
  Clone ID: PAT_MRT3847_107050C.1.pep
MADPIPAPPRSATELFSDPLDAHPLWFKPASFLSPDFDSESYISELRTFVPFDTLRSELNSYLSSLNHELIDLINRDYADFVNLSTKLVDVDAVVVRMRAPVVELRDKIEQFRGSVEVSLVAI

SEQ ID NO: 150639 - protein, 153 aa, Glycine max
  Clone ID: PAT_MRT3847_107051C.1.pep
MKRLKIHPTYITFISVLNACAHAGLVEEGWRQFKSMINDYGIEPRVEHFASLVDILGRQGQLQEAMDLINTMPFKPDKAVWGALLGACRVHNNVELALVAADALIRLEPESSAPYVLLYNMYANLGQWDDAESVRVLMEEKNVKKQAGYSWVD

SEQ ID NO: 150640 - protein, 284 aa, Glycine max
  Clone ID: PAT_MRT3847_107052C.1.pep
MAGRKHAPSSFTRLDDARLAHSSSSSVAVVRALEERVEARHREIQALLSDNQRLAGIHVALKQDLAATQEELRRLSATAAEVKAERDAEVREIYEKSLKVDAEVRAVAAMSSELDRVRADVQELVAERKELAAQLHAVESELAKARAEAQFVPAIKADIETMRHEIQRGRNAIEFEKKTHASNLEHRRTMDNNMIIMDREVEKLRADLANAEKRARAVMAADAKTNPGYPANYDNPEMGYGGITCPPDSYSMHQLQAVVDTHSPHEAGASLHYPNDLQHTQVPR

SEQ ID NO: 150641 - protein, 56 aa, Glycine max
  Clone ID: PAT_MRT3847_107053C.1.pep
LSPEPPPHRPRPAFVSGSPPPRPTTRPPRAQSSTATAHHTTVINRAILSTLCCGIF

SEQ ID NO: 150642 - protein, 58 aa, Glycine max
  Clone ID: PAT_MRT3847_107054C.1.pep
VYMKMIMINPKGLASTQGTSHNRLDHGGQALAGIGTNDTQGNQALHDKFLYCPLMLIA

SEQ ID NO: 150643 - protein, 56 aa, Glycine max
  Clone ID: PAT_MRT3847_107055C.1.pep
RRKSLKSGGMGICISSESSAIHGAPEEARDENVLVFEATKVLSGLCSAYTKQGSKG

SEQ ID NO: 150644 - protein, 297 aa, Glycine max
  Clone ID: PAT_MRT3847_107056C.1.pep
KKTRRKQSFFPIGINFYGPYLSAPTLALTILFANSGLHFLHFSSVPRFSIYHYAFDGLALLLLLVPSTCAAIGHWLKFIFWFYAFDATSFCVNLPVLQVMARRTVAIIGPHSSVTAHVITHIANELQVPLLSFSALDPTLSSLQFPFFIRTCHSDLYQMTAIADLVNYHDWKDVIAVYLDDDNGRNGIGALGDKLAERRCRISYKAPLSPDASMEEISNVLVQVALAESRVIVVHANTQFGPKLFSVAKNLGMMGTGYVWIATAFLSALLDINSPLSPDSLDDIQGVLTPRMYTPDS

SEQ ID NO: 150645 - protein, 50 aa, Glycine max
  unsure (1)..(50): unsure at all Xaa locations
  Clone ID: PAT_MRT3847_107057C.1.pep
DGDXAXFVXPLXGILKXHMRNXILSPXTPSTASVXXSXLNITXAKLADSL

SEQ ID NO: 150646 - protein, 58 aa, Glycine max
  Clone ID: PAT_MRT3847_107058C.1.pep
LWTSSWAFFALSPNLPAKPNLCAKRAVQFFQLFFKVFSSSFCINFPLKHLKSSSFEFC

SEQ ID NO: 150647 - protein, 136 aa, Glycine max
  unsure (1)..(136): unsure at all Xaa locations
  Clone ID: PAT_MRT3847_107059C.1.pep
MIKAWLLVLMVLSNGFFSNGDGMHNSTIPDFVNIGALFSFNTSVGRSIKIAIEAAVEDINSDPTILGKTKLNLSLQEDSKYRGFLSISEVCLSXRTVAIIGPHSSVTAHVITHIANELQVPLLSFSALDPTLSSLQ

SEQ ID NO: 150648 - protein, 240 aa, Glycine max
  Clone ID: PAT_MRT3847_10705C.1.pep
NSARATTDVAQRALKAGLQQSQIKIFGLPVRPSFVKPVRPKDELRRELGMDEDLPAVLLMGGGEGMGPIEATARALGDSLYDENIGAPVGQILVICGRNKKLANKLSSISWKVPVQVKGFVTKMEECMGACDCIITKAGPGTIAEAQIRGLPIILNDYIAGQEAGNVPYVVENGCGKFSKSPKEIAKIVAEWFGPKAYELQQMSQNALRLARPDAVFKIVHDLHELVRQRSYLPEYSCTT

SEQ ID NO: 150649 - protein, 93 aa, Glycine max
  Clone ID: PAT_MRT3847_107060C.1.pep
RAYPTTRGKSVNCTIYLPILYKINNHRNPIIIIIIQTQNRSPYNIISSKHIATSPFIHVSHLPHTRVSFSVICNHTSFQLDDDDQEEQVAAIK

SEQ ID NO: 150650 - protein, 187 aa, Glycine max
  unsure (1)..(187): unsure at all Xaa locations
  Clone ID: PAT_MRT3847_107061C.1.pep
TDKISSLQALLANLWRSVIRCQHVEPHEEIQFAMPVGVSPRVVPPLPEDYFGNAALYWSCCHETXGEVLQGELGKSALEINKMICSHSDEKVKNHYESWARTPRQRGVAYSNTLNVGSSPRFNIYGNDFGWGKPMAVRSAGDSMSYSIVFMFGGCEEGXIVIEVFLPYEVLEAMGSDPEFMHICLCE

SEQ ID NO: 150651 - protein, 33 aa, Glycine max
  unsure (1)..(33): unsure at all Xaa locations
  Clone ID: PAT_MRT3847_107062C.1.pep
MGFVKVVKNRGYIKRYQLKFKMHRQXKTDYFAT

SEQ ID NO: 150652 - protein, 137 aa, Glycine max
  unsure (1)..(137): unsure at all Xaa locations
  Clone ID: PAT_MRT3847_107063C.1.pep
LLANTHELFDGNFPLDSRFPIFXVNCLHPVCQLPPEAVVANVTCGCGRGGXLPTTAWIISADNNRXSSYINKRIRTVLVKGXKTVFLTRVDSFSAALLAAXFGVNNEILSSNLTNXILPLLLENSKSLKYLVDECPF

SEQ ID NO: 150653 - protein, 81 aa, Glycine max
  Clone ID: PAT_MRT3847_107064C.1.pep
TSTHSSLGNSIWHEKRSLRASNQIRHGSCIICILRQGQHGEHGVRQIRTIQCLLQIISVHLFHFMVCLVISHSPSVVFSQP

SEQ ID NO: 150654 - protein, 41 aa, Glycine max
  unsure (1)..(41): unsure at all Xaa locations
  Clone ID: PAT_MRT3847_107065C.1.pep
LEGXXXASRXCRXVXMVXFXXXQGIRSRAEXRAYXRVXATX

SEQ ID NO: 150655 - protein, 86 aa, Glycine max
  unsure (1)..(86): unsure at all Xaa locations
  Clone ID: PAT_MRT3847_107066C.1.pep
NPGRRTHPPIPTITLPYSFISLTILFSVALTGESHVHPXLPPLTLXEAFSPNTPIPTALTXLLIPLPADRYIAXLPNHIDDTQYPK

SEQ ID NO: 150656 - protein, 133 aa, Glycine max
  Clone ID: PAT_MRT3847_107067C.1.pep
MNMLLWLPAYPTFQPGWDLDDEIHATFFKCISWQVEETLDTINCPYHYFCDKTYPSNYPLVVDILVLLFTAASYLVTLVILVMDMSSGRGRIFLGQSKRFLLPSGPISLPLIILAFAKGPQINTIFPLTCVGA

SEQ ID NO: 150657 - protein, 106 aa, Glycine max
  Clone ID: PAT_MRT3847_107068C.1.pep
MEEAEKELERRSKFLNSLIQQKKKAAIESEHEHESSLKVDVRACDMPLPLQNRAFQCARLYLESMPPANKLDSKRLALALKKEFDSSYGPAWHCIVGTSFGSYVTH

SEQ ID NO: 150658 - protein, 63 aa, Glycine max
  Clone ID: PAT_MRT3847_107069C.1.pep
IMVIYRYHRERGESSDTGSGVRMMLATVEITSESIEEASQSLRLTLVERVRTGIFSSPLLLLM

SEQ ID NO: 150659 - protein, 82 aa, Glycine max
  Clone ID: PAT_MRT3847_10706C.1.pep
TTPSGTDPRTTVQSKDVTINAQTGVAVRLYLPPAAASSATKKLPLLIYIHGGAFCVCTPYNPAYHHHLNAVSAAANVVVASV

SEQ ID NO: 150660 - protein, 53 aa, Glycine max
  Clone ID: PAT_MRT3847_107070C.1.pep
TYYNALYLFLSSGLLTLAVLITTYFLSLTIPFIINTFFFFNLLSSTNTLFLPN

SEQ ID NO: 150661 - protein, 88 aa, Glycine max
  Clone ID: PAT_MRT3847_107071C.1.pep
RHRAKLKTGKIESAIFLLQEREKTPPPLIPVSNSPWGSQGESPGDIIPNQLGLHCLPEEKHYGVSNSIRGTFSFEFKGETYVGNAPRM

SEQ ID NO: 150662 - protein, 106 aa, Glycine max
  Clone ID: PAT_MRT3847_107072C.1.pep
MKTCLVVIQLQRLLTINKINVNLTLNITEVITLIPVTKTKPWGRFAAEIRDPWKKQRVWLGTFDSAEDAARAYDKASRRLTLPKAKTNFPPFPGPAEADHHSQIPF

SEQ ID NO: 150663 - protein, 55 aa, Glycine max
  Clone ID: PAT_MRT3847_107073C.1.pep
STVHKSPSTPNLINVLLDEPLIQMSKVTGLQLLLLPLWLESNIWCQSPIGYPLKI

SEQ ID NO: 150664 - protein, 47 aa, Glycine max
  Clone ID: PAT_MRT3847_107074C.1.pep
LYKFNSTNTLIISSFLFSCHIIISFNNMLNFFFIKKSPFFEKQIKSI

SEQ ID NO: 150665 - protein, 97 aa, Glycine max
  unsure (1)..(97): unsure at all Xaa locations
  Clone ID: PAT_MRT3847_107075C.1.pep
RLVLTAKACLLISYTIHTHTTDSVPTVSDSHCANAEVDERTXKLGIVDTDGRXFHGLRPLSYLGADVHILDFDLISTASYENXIAEKCIPELMHYAP

SEQ ID NO: 150666 - protein, 160 aa, Glycine max
  Clone ID: PAT_MRT3847_107076C.1.pep
ACFTRRSQCGTPPTAISSAESLLSIKHSCPITVLSVRQRKRKKKDIIEMDVSRRRLGVRCSVVAGSVWESRMKSDEVGGGVKVFTGEQSAEEGGNGGTRLKRGQIGSVVASGKRKTWKSEGLENNHIQIAIGKAEPHKNGSNSSSSQQCKGSNISSDSIK

SEQ ID NO: 150667 - protein, 44 aa, Glycine max
  Clone ID: PAT_MRT3847_107077C.1.pep
RMAHLLYTQKRQIGVYMFVKELYMMQIHDKSYRKPFIETPTSST

SEQ ID NO: 150668 - protein, 249 aa, Glycine max
  Clone ID: PAT_MRT3847_107078C.1.pep
MAATQPPQGPDRTTEEIPAEPDNLKEQGTAIIGHSRETTSQSGSLGSSGDCPLYPPNVYAPQAQAFYYRGFDNGNGEWDEYSSYVNSEGLDIGSPGVYNENPSLIFHSGYGFNPQMPYGPYSPVTTPLPSVGGDTQLYSPQQFPYTGPPYYHQLVPPSLPYLNSPTPVSQPELTSLVGIDQQVDNMFFGPRAGYPSVGSFGRGNFPVAPGSFGFHESQQGFEGSRSGGIWSDCSKPSERQRSLMPLSPS

SEQ ID NO: 150669 - protein, 83 aa, Glycine max
  Clone ID: PAT_MRT3847_107079C.1.pep
ASSRGSGKHPQLVPSTPRWAVANGAGVILSVCDDEVARNETTTLTAAAVPALLLPPPTTALDEHLAAGLPALEPYARLFHTLF

SEQ ID NO: 150670 - protein, 38 aa, Glycine max
  Clone ID: PAT_MRT3847_10707C.1.pep
CSPPQCLRLLMANFYPGGMFRGQSIILYPVNHLSTVCS

SEQ ID NO: 150671 - protein, 212 aa, Glycine max
  unsure (1)..(212): unsure at all Xaa locations
  Clone ID: PAT_MRT3847_107080C.1.pep
MRSSKMWMVFMCLTVSFFARIESLSVTVNDVECVYEYVLYEGDTVSGNFVVVDHDIFWSSDHPGIDFTVTTAAGNTVHSIKGTSGDKFSFKAPSHGMYKFCFHNPYSTPETVSFYIHVGHIPSEHDLAKDEHLDXVTAEQKYSKARDARHXHTNESTRKRVVCYTVGEYLLLAAGSVVQYTXVERLFLAAVSALQVIYIRRLFSKSVAYNRV

SEQ ID NO: 150672 - protein, 210 aa, Glycine max
  Clone ID: PAT_MRT3847_107081C.1.pep
MRSAKMWTVLMCLMVSFFARIESLSATVNDVECVYEYVLYEGDTVSGNFVVVDHDIFWNSDHPGIDFTVTSAAGNTVHNIKGTSGDKFSFKAPTHGMYKFCFHNPYSTPETVSFYIHVGHIPSEHDLAKDEHLDPINVKIAELREALESVTAEQKYLKARDARHRHTNESTRKRVVFYTVGEYLLLAAVSALQVIYIRRLFSKSVAYNRV

SEQ ID NO: 150673 - protein, 40 aa, Glycine max
  Clone ID: PAT_MRT3847_107082C.1.pep
RAIYNTIITFSIHICQLVSTVPRLENGLASGRRPIVPQRG

SEQ ID NO: 150674 - protein, 95 aa, Glycine max
  Clone ID: PAT_MRT3847_107083C.1.pep
TPFCIHFLSGNRPVKPPIKLAVNPGSIMGFVNRIVEPNIKRNHDGLHIGHSLVLRQVLPHTSLNNSVLNRALRGALWIAHPLMQPPFGPIGRTKG

SEQ ID NO: 150675 - protein, 86 aa, Glycine max
  Clone ID: PAT_MRT3847_107084C.1.pep
TDTKTMRLWSGKLAGRVLWLTGQRSGTRRVIQRHNQIPGYKDIRLFPATTEYPIPCAHVRRTMIWTCGGMRIKFTLLQWMCAWATR

SEQ ID NO: 150676 - protein, 140 aa, Glycine max
  unsure (1)..(140): unsure at all Xaa locations
  Clone ID: PAT_MRT3847_107085C.1.pep
MCGGAIICDFIPDAVAAGAGRLTGHYMWPDLKKRKNDLDVDLDADFRDFKDYSDIYYDNDRHDKPFAKASSSCRSTTAKTAALQVRAEKLADRKRKNQSKGIRQRPCGKWSGEMSDPRKEAREWLGTFNTSXEAARAYDA

SEQ ID NO: 150677 - protein, 108 aa, Glycine max
  Clone ID: PAT_MRT3847_107086C.1.pep
MASPQQLRTTTTDLLKINHPVLLAGMNVAAGPKLAAAVTNAGGLGVIGGVGYTPDMLREQIAELKGYLKDKNAPFGVDLLLPQVGGSARKTNYDYTKGKLDELITIII

SEQ ID NO: 150678 - protein, 85 aa, Glycine max
  unsure (1)..(85): unsure at all Xaa locations
  Clone ID: PAT_MRT3847_107087C.1.pep
LAFHTLCDXPKTLLQSLLYCIHSWHTMSGTKVFSLEGKGLKLTTAEDIEPHIQDLKSNDQVEEIKFLGNTLGIGAMRLLPRFWKE

SEQ ID NO: 150679 - protein, 76 aa, Glycine max
  Clone ID: PAT_MRT3847_107088C.1.pep
NLDNMVGMLLRHLCHQCRCSSLASCPLIASPDTHTAGSHTSCAESFRAPSVLCVVNNLVIALSHVQVTSKLKPLIN

SEQ ID NO: 150680 - protein, 636 aa, Glycine max
  Clone ID: PAT_MRT3847_107089C.1.pep
MSGPGVQLHIQDHHVVMDNGIVQVTLSNPDGIVTGIRYNGVDNLLEVLNKETNRGYWDLVWSAPGSKGMFDVIKGTCFKVIVQNEEQVELSFARMWDHSLEGKFVPLNIDKRFIMLRGSSGFYSYGIYEHLNGWPDFDISETRITFKLWKDKFQYMAMADNRQRVMPFPEDRLAGRCQTLGYPEAVLLVNPKDPRLKGEVDDKYQYSCVNMNNRVHGWISFSPPVGFWQITPSDEFRSGGPLIQNLTSHVGPTTLAMFLSSHYAGQDLVPKFRGGESWKKGFGPVYIYLNSGAVGDNPLWLWLVAAREMMNEVLCWPYSFPASEDFLKSDQRGNVSGRLLVLDRYVCTDLIPANRAYVGLAPPGDAGSWQRECKDYQFWTRADENGFFTIKNVRPGDYNLFAWVPGFVGDYKFGDFMKITSGSYIELGELVYEPPRDGPTLWEIGIPDRSAAEFYAPDPSPQHINKLFINHPDRFRQYGLWDRYSELYPDADLVYTIGVSDYTKDWFYAQAPRKKVDNTLQGTTWQIKFEICSVVKGSTYKLRVAIASATLAELQIRVNDPNARRPVFTSGLIGRDNSIARHGIQGIYWLYHVNIPGSLLVDGTNTIYFSQPRCTSPFQGIMYDYIRLEGPPCEEI

SEQ ID NO: 150681 - protein, 62 aa, Glycine max
  unsure (1)..(62): unsure at all Xaa locations
  Clone ID: PAT_MRT3847_10708C.1.pep
EXWXELVGVEGXVXVXXIERENXLVXXXXVLKGXIXXXDXXCDRVWVWXXKEGIVYXVXXIG

SEQ ID NO: 150682 - protein, 57 aa, Glycine max
  Clone ID: PAT_MRT3847_107090C.1.pep
LMLLTLITCHKHNGVMPINLSCKWMQHPWWDVSSGSRNCSCFNNFLQRRCLQGLTEC

SEQ ID NO: 150683 - protein, 86 aa, Glycine max
  Clone ID: PAT_MRT3847_107091C.1.pep
VIPHTICSPLSLSATSSFLPCLLFFLAETLYTMGFCCTEPVSSFKVLTEYTEGLEIKQLSLGHFLSKSNDLISNIPQQNEAREIQT

SEQ ID NO: 150684 - protein, 64 aa, Glycine max
  Clone ID: PAT_MRT3847_107092C.1.pep
KTKDGRISQENTCILHPHCHHLFSFLKDSSVSLPDNLMLMPDAMPCLCHIHKIISTGYHITNRS

SEQ ID NO: 150685 - protein, 88 aa, Glycine max
  unsure (1)..(88): unsure at all Xaa locations
  Clone ID: PAT_MRT3847_107093C.1.pep
VSMQRMMNAPVSNDNIDLLLSIDLXGVQGAGXKLKQTRLVLDEKQRVXNTQEXFDGNFTGDSGLPDIANGHQPVRQLPTESCRRKWHM

SEQ ID NO: 150686 - protein, 155 aa, Glycine max
  unsure (1)..(155): unsure at all Xaa locations
  Clone ID: PAT_MRT3847_107094C.1.pep
SLNNCGKPGRRPWGHTPAELLKHLRTGLARILADNYYVTEGAGHFYKHHHREHSPTQGEMQATGLSVQVGQITAAELKAYDGTDPDKPSLMGMKAQIYDVSHSRMVYAPGEPYALXAGKDASKAIAKMSLEEKDLTGDISGLGPFEMDASQDWQY

SEQ ID NO: 150687 - protein, 197 aa, Glycine max
  unsure (1)..(197): unsure at all Xaa locations
  Clone ID: PAT_MRT3847_107095C.1.pep
KKKKKKKKKKKKKKKKKKKKKNPKPKNQTQKKKGGPGAPRFGPFKGGKWAPWGKQGQSRFRGENGFLFKFPPKNRPEAKRGKPGGPKGGANPXKGGGPTGRFPGGKPGGPGGLKKRPTPGERGFGNGALFPFPGQGPGGPGPWAGGGGYRPPKGGKPGSPQNRGKPRKKTGDKRAPKGPKPQKGPLAGVFPKAPPPG

SEQ ID NO: 150688 - protein, 78 aa, Glycine max
  Clone ID: PAT_MRT3847_107096C.1.pep
TANLSHRTHHHCYRIYLPTHSNNTRNNQLLNPNLNDPVLYQQSTAPKWANPTSPPPTAPMFSSSISISHQPHTSKPSQ

SEQ ID NO: 150689 - protein, 69 aa, Glycine max
  unsure (1)..(69): unsure at all Xaa locations
  Clone ID: PAT_MRT3847_107097C.1.pep
XHLQSGGENRKSKIGNRLLAASRSLGVSITKHDPTLSFRRFKDRKLRQDKSQMKGSIFSISGSDDDGLV

SEQ ID NO: 150690 - protein, 280 aa, Glycine max
  Clone ID: PAT_MRT3847_107098C.1.pep
MIVTRSALMLHLQNPPIRYHFFSHFSYAPTFPTLFKPRPFSPTTPRQAQTRTFVSAVASSSSAAHGSNGRDTFFAEENVSWSSLGLSDTISRALSNIGLNRPSLVQASSVPSVLLGNRVIIAAETGSGKTYSYLVPLIDKLRDAQEHSLHAVLDQKVTSPQNVLLVLCPNVQLCEQVVRRANSLCRDDGETIVSVAAICGKQGWPIREPDVIVTTPAGLLNYVDLDRTRRMEFMRGVKYVGFDEADLLPCGSFQNKEIRLINLLRFDEKLLCRSKKSVAE

SEQ ID NO: 150691 - protein, 111 aa, Glycine max
  unsure (1)..(111): unsure at all Xaa locations
  Clone ID: PAT_MRT3847_107099C.1.pep
YQVADDTLLVYYVTRQATFENATRWLKELRDHTDSNIVXMLIGDKSXDLRHLDCCPXTEYGKFTAEKESLYFMETSALDASNVENAFTEVIYQIYRIVSMRTVQDLKNAKL

SEQ ID NO: 150692 - protein, 86 aa, Glycine max
  unsure (1)..(86): unsure at all Xaa locations
  Clone ID: PAT_MRT3847_10709C.1.pep
KHSTLDGKRVILFSYGSGLTSTMFSLQLREGQHPFSLSNIAKVMXSSKLKSRLEFPPEKFVETMKPGSQLCLATFRRLFLFAIVSS

SEQ ID NO: 150693 - protein, 337 aa, Glycine max
  Clone ID: PAT_MRT3847_1070C.1.pep
FSHASAHASAHASELGSRLGGLKSVENAHDDSVWAVTWVPATANRPPLLLTGSLDETVRLWRSDDLVLDRTNTGHCLGVASVAAHPLGSVAASSSLDSFVRVFDVDSNATIATLEAPPSEVWQMRFDPKGAILAVAGGGSASVKLWDTSSWELVATLSIPRPEGQKPTDKSGSKKFVLSVAWSPDGKRLACGSMDGTISVFDVPRAKFLHHLEGHFMPVRSLVYSPYDPRLLFTASDDGNVHMYDAEGKALIGTMSGHASWVLCVDVSPDGAAIATGSSDRSVRLWDLNMRASVQTMSNHSDQVWGVAFRPPGGSDVRGGRLASVSDDKSISLYDYS

SEQ ID NO: 150694 - protein, 78 aa, Glycine max
  Clone ID: PAT_MRT3847_107100C.1.pep
ARCSKMQHDVPRVACTRLYHLKYPNPSRISQLSEIGQFCRISMFSFINAILIKPFFSLFKISSYTIIFLLTSIDKISV

SEQ ID NO: 150695 - protein, 41 aa, Glycine max
  Clone ID: PAT_MRT3847_107101C.1.pep
FTNQLHSQKLCKTNPFFLKRDHENSFLLQFKSQNPGSRGGT

SEQ ID NO: 150696 - protein, 99 aa, Glycine max
  unsure (1)..(99): unsure at all Xaa locations
  Clone ID: PAT_MRT3847_107102C.1.pep
GNRRPXXPXGQKXXKKASQXKNKPXXAAKQEPFFFKLHSHYHQSIIPXTVHTLLKITXFFTFQRQTNTLTPHIPKXKPRHIHILXTXQTEHPLXHPLPP

SEQ ID NO: 150697 - protein, 81 aa, Glycine max
  unsure (1)..(81): unsure at all Xaa locations
  Clone ID: PAT_MRT3847_107103C.1.pep
KSSSRRXLRHLAAKHLGVNIQTGEPCPIENARAAMLLFQRNKKEWEKSIKDQFRLKQKQRKSKQKKKLKNEPPSNGTHVEI

SEQ ID NO: 150698 - protein, 385 aa, Glycine max
  Clone ID: PAT_MRT3847_107104C.1.pep
MVKMEEEKKETKVVLTRPLTIGRESDSDASYKAPNLLQRILSLFNNVRPGSDLTRFQLPPLFNLPKSQLQCYGESVYCTGSDLLSMCNNGQSPLDRFISVVAWCISTTRPVTFGVAPYNPILGETHHVSRGNLNVLLEQISHHPPVTALHATDEKENIEMLWCQRPDPKFNGTSVEAKVHGIRQLKLLNHGETYEMNCPRLLLRILPVPGADWAGTVNIRCLETGLVAELSYRSSSFLGIGGNHRVIKGKILDSSSLKVLYEVDGHWDRTVKVKDTNNGKVRVIYDAKEVMSGLETPILKDIEGVWQTESAHVWGELNQAIVSKDWEKAREAKLKVEERQRELVRERESKGETWISKHFVVSNNKEGWQCSPIHKSVPAAPITAL

SEQ ID NO: 150699 - protein, 134 aa, Glycine max
  Clone ID: PAT_MRT3847_107105C.1.pep
RPTRPLTDSLCPLCRTQQEDASHLFFHCSKLQPIWWETMSWLQVKGAFPLSPKQHFLHHLGVQPAGVRYNRWHCWWLALTWSIWKLRNSIVCSNANFDANKLFEEAIFLLWSWLRGFEKDFTVHFNHWSSNLPQ

SEQ ID NO: 150700 - protein, 132 aa, Glycine max
  Clone ID: PAT_MRT3847_107106C.1.pep
DVNPDHEKKPHSKSFWGIDTSKSLNCDTKKHLVCSIPLLSRSNSTGSVANPKRVSSNKHPSAAKSSSYSFSPLNMYPMQKSPSGKSYGGSYPKGLRINPVLNVPTPCVSKGSAHLFGLGSFLRVGKVKKSKK

SEQ ID NO: 150701 - protein, 78 aa, Glycine max
  Clone ID: PAT_MRT3847_107107C.1.pep
ARETPEILPQGGEGFLPKKNSKNLFKQLFEGQNYLGVKRITPGAIKGETITGPVLSPEEKQLGAFGGSTIFWEQKKKF

SEQ ID NO: 150702 - protein, 95 aa, Glycine max
  Clone ID: PAT_MRT3847_107108C.1.pep
PFGVSLLLAGPDENGPSFFSPDPSGPFWQCNAKAFGSGSEGANSFFQEQFNKGLPLQKAEPIAFSLFNPVLEKKVPPPTVYISKGAPPFLFFPPF

SEQ ID NO: 150703 - protein, 36 aa, Glycine max
  unsure (1)..(36): unsure at all Xaa locations
  Clone ID: PAT_MRT3847_107109C.1.pep
SLSPFRVFSSGNXLPYFRRRCYSSGREPSIPSTPQQ

SEQ ID NO: 150704 - protein, 67 aa, Glycine max
  unsure (1)..(67): unsure at all Xaa locations
  Clone ID: PAT_MRT3847_10710C.1.pep
VSVVRXKSIELAYLVLGAQEKCGCXNQLPTRVNVLASFRLTFXFESLXRSXLXLSSVCMLXVSADAX

SEQ ID NO: 150705 - protein, 59 aa, Glycine max
  Clone ID: PAT_MRT3847_107110C.1.pep
LCPLILPPVFCALFFPLLFFLEVRRGALVSPTLYFPPFWANFYTSRYRFRFSGFKPRVR

SEQ ID NO: 150706 - protein, 118 aa, Glycine max
  Clone ID: PAT_MRT3847_107111C.1.pep
CKKQFGVSPRPHWVTTYYGGHSIELVLQKFGSNIIFSNGLRDPYSSDGVLKNISDSLVAIHTVNGSHCLDILGANANHSDPEWLVEQWKREIMVMKGWIAQYYDDLVALNGATKFQSK

SEQ ID NO: 150707 - protein, 223 aa, Glycine max
  Clone ID: PAT_MRT3847_107112C.1.pep
KSNGLKGSFPSSLCKIKTLEVISLSHNELSGELPDLGSLTGLHVLDLRENHLESELPLFPKSVVTVLLSNNSFSGDIPKQFGELDQLQHLDLSSNHLSKTPPSTLFSSPKISYLNLANNVLSGALQDKLSCGGKLGFVDISSNKLSGGLPSCLANTTDGRVVRYAGNCLSLNSQNQNSGSYCKKSSSGWKNLKKWKVAAAMAIICGLVLGVLASGVFLWKKYH

SEQ ID NO: 150708 - protein, 40 aa, Glycine max
  Clone ID: PAT_MRT3847_107113C.1.pep
YSCEKTTEYGRRSASPLWAAPHDADLSHPASNLFTRLERI

SEQ ID NO: 150709 - protein, 46 aa, Glycine max
  Clone ID: PAT_MRT3847_107114C.1.pep
QCPPYWTLFSSWRFLSFIYNFFMSQLITSLMLVINSIYSLFNHYST

SEQ ID NO: 150710 - protein, 40 aa, Glycine max
  Clone ID: PAT_MRT3847_107115C.1.pep
LILFMVNIAQSRIRPLCLCWTHTPLNNSHASSLYTSACEG

SEQ ID NO: 150711 - protein, 73 aa, Glycine max
  Clone ID: PAT_MRT3847_107116C.1.pep
SSRSANCCRTAQGSASYQATPSLSGWSILFSSICIFSLKILIIVIPSKQIVDFFCDSEGSKKCKFTRWSRKWP

SEQ ID NO: 150712 - protein, 58 aa, Glycine max
  Clone ID: PAT_MRT3847_107117C.1.pep
KKVKFVERLGPDQRANLLNGFVEEFLRFLVVGTLKALFRRLRHRLESVEPSPSGHRTR

SEQ ID NO: 150713 - protein, 179 aa, Glycine max
  unsure (1)..(179): unsure at all Xaa locations
  Clone ID: PAT_MRT3847_107118C.1.pep
VFAKIASLVAPNSHSLPHPLSLQDLSSYHRHLEPPLQGGTTSSSRNKCLRLSLYLATFLFLTYLLFLLLYSYWAHASSAKYYVVLDCGSTGTRVYVYRAYVRFNRHTTLPIAITFLRNPSHKKPPTGRAYDRIETEPGIDKLVNNVSGLNNALKPLLRWAKKQIPVRAHKSTXXFLYAT

SEQ ID NO: 150714 - protein, 68 aa, Glycine max
  Clone ID: PAT_MRT3847_107119C.1.pep
KVASFSSRTLAYFWHFSLNRIPLFLMSKVVFLPVPVEQSSYPVRSQCFGIIFCMHASPSVYVIVFISS

SEQ ID NO: 150715 - protein, 100 aa, Glycine max
  Clone ID: PAT_MRT3847_10711C.1.pep
PNQKKKNGKPLGTKKKKPPENEFLGFHTGGALKKPKKSPKRDKLQKKKTPKRLKEGGFFGGGFHHQNQEKNFGGFINKKGDRRGLKKPRPGKAGPQTSKG

SEQ ID NO: 150716 - protein, 52 aa, Glycine max
  Clone ID: PAT_MRT3847_107120C.1.pep
FQEKIPVEEVFESLKCSRARLTSDEGASRLQVFGPYKLEEKKESQLLSFWVY

SEQ ID NO: 150717 - protein, 66 aa, Glycine max
  Clone ID: PAT_MRT3847_107121C.1.pep
LTMRCQFVNTCNVVSVANMCHEKSVMVNLMSPWCSFALEDMDAAEECDKSMSNFNSDGFVFCLFLL

SEQ ID NO: 150718 - protein, 168 aa, Glycine max
  Clone ID: PAT_MRT3847_107122C.1.pep
ARGFKPYRHHRERNPKETVGRLRRLKNKLGLIFHHHHHHHHYHHHDDDVHGHRHTMWNQLQNVFHHKVKHGVTTNKVDKTRRGAVARVLPQRNHVGQFHRLAEGVLRHIRHSKKPNPFKLDGMKQLRNGHSQKKLRWWQNLRPHRKVRLKKKGRVKMGFMSQKSLKNY

SEQ ID NO: 150719 - protein, 42 aa, Glycine max
  Clone ID: PAT_MRT3847_107123C.1.pep
RYTAVILPIIAMTLHTSIRYELILCHHNYLIDLHFTIIINGF

SEQ ID NO: 150720 - protein, 96 aa, Glycine max
  Clone ID: PAT_MRT3847_107124C.1.pep
HCGIYHVNFHPIKILFVSLCWIVGYNEILDHRSRHVLIFFPFFGREVGVNMLKKYIYLRKKTIYLPMSMYNRHNIIFPRSLYSMLYIGLIDDSKAR

SEQ ID NO: 150721 - protein, 55 aa, Glycine max
  unsure (1)..(55): unsure at all Xaa locations
  Clone ID: PAT_MRT3847_107125C.1.pep
PSVXXQTTXLXXXTGXSRAASYXALXXKXXARXXXXLLSSXPASTXXSRSSRXCD

SEQ ID NO: 150722 - protein, 62 aa, Glycine max
  unsure (1)..(62): unsure at all Xaa locations
  Clone ID: PAT_MRT3847_107126C.1.pep
KTFEYMTKYWRARNLGTRAVEINMDAPVMGKMEGETFPLETSIXELGEGKIPFTIWHLLADG

SEQ ID NO: 150723 - protein, 539 aa, Glycine max
  Clone ID: PAT_MRT3847_107127C.1.pep
MGLQIKEPLLFTLVTISLISITKLLHSYFSIPFSPSNLSIAIATLIFVLISYKFSSSSIKHSSTTLPPGPLSVPIFGNWLQVGNDLNHRLLASMSQTYGPVFLLKLGSKNLVVVSDPELATQVLHAQGVEFGSRPRNVVFDIFTGNGQDMVFTVYGDHWRKMRRIMTLPFFTNKVVHNYSNMWEEEMDLVVRDLNVNERVRSEGIVIRRRLQLMLYNIMYRMMFDAKFESQEDPLFIQATRFNSERSRLAQSFEYNYGDFIPLLRPFLRGYLNKCKDLQSRRLAFFNTHYVEKRRQIMAANGEKHKISCAMDHIIDAQMKGEISEENVIYIVENINVAAIETTLWSIEWAVAELVNHPTVQSKIRDEISKVLKGEPVTESNLHELPYLQATVKETLRLHTPIPLLVPHMNLEEAKLGGHTVPKESKVVVNAWWLANNPSWWKNPEEFRPERFLEEECATDAVAGGKVDFRFVPFGVGRRSCPGIILALPILGLVIAKLVKSFQMSAPAGTKIDVSEKGGQFSLHIANHSTVLFHPIKTL

SEQ ID NO: 150724 - protein, 58 aa, Glycine max
  Clone ID: PAT_MRT3847_107128C.1.pep
YLKMWHCPIYGCVVLCSLPNKLKCKMFVPLFHHTTNPLILSLFPRPVFSLPWSPLYKI

SEQ ID NO: 150725 - protein, 327 aa, Glycine max
  Clone ID: PAT_MRT3847_107129C.1.pep
PDQVRPTTHAYGHAKERKKIIKGLKGHIDKTAYHQYGCMVLVCILSVVDDTKLITKVIIRELQSILKELVLDKNGRRPLLQLLHPNSSRYFSPDDLASLNLSIPSLSLKDQSEASSLTETSKVSLGDKESKEDIEVAVDEVNKDKTSADDSDLAESGKKDPFVRRQELLIKSGLADSLLDICIESVGELIQSNFGKEVLYEVATGGSDGIMHPVLDDKINSLHNAVASLAAMPKSEDSQEEHVLENFHSSRTIRKLILDCPNFASTLWEKALKGKSELWVHGHSCKVISAFLESPDPTVLKLVKKELQPLIDIGILKNPKPIEQANQ

SEQ ID NO: 150726 - protein, 148 aa, Glycine max
  Clone ID: PAT_MRT3847_10712C.1.pep
AIVEKLAENAKFQNPPKLKKILQDPKETVVESDLRNRMQPLKDQLANTISHLYSVFETHVFIAICRGYWDRMGQEILSFLENRKENRSWYKGSRVAVSILDDTFASHMQQLLGNALHEKDLEPPRSIMEVRSMLCKDAPNHKDNTFYY

SEQ ID NO: 150727 - protein, 103 aa, Glycine max
  Clone ID: PAT_MRT3847_107130C.1.pep
MDISSSQYNSAGESGWTRYLDHSSLSESYFQRRGGIEDYGGKGATLEEEEEDLSMISDASSGPPHYHEDDDQNYCVNWYPSTSHYTKESENNKNKKVKEYGNN

SEQ ID NO: 150728 - protein, 90 aa, Glycine max
  unsure (1)..(90): unsure at all Xaa locations
  Clone ID: PAT_MRT3847_107131C.1.pep
EHVRSMSHSSRXVRKNFPLILDCPNFASPLWEKALKGKSELWVHDSSCKVISAFLESPDPTVQKLVKKELQPLIDNGILKNPKPKEQANQ

SEQ ID NO: 150729 - protein, 32 aa, Glycine max
  Clone ID: PAT_MRT3847_107132C.1.pep
MAVAVTRNQIENISIRELAMLYAIKTKGKGLA

SEQ ID NO: 150730 - protein, 41 aa, Glycine max
  Clone ID: PAT_MRT3847_107133C.1.pep
GESSKRLLIIDGRTLWETNVKDCRFNVHYQLSYRLKCRDQM

SEQ ID NO: 150731 - protein, 101 aa, Glycine max
  Clone ID: PAT_MRT3847_107134C.1.pep
IEDSTTCVREIQKERVEKIARLIIRGEVRSGISYYPPRPKRPRWRKRATQGKWRLERTPWSEGHIGVRLRQTNRARSGSHKRRETPTSATRSGSVPATRPR

SEQ ID NO: 150732 - protein, 86 aa, Glycine max
  Clone ID: PAT_MRT3847_107135C.1.pep
GSATVVVMVVDCVDFDGSFPRTAVKSLFQALERIQDNSKRSKKLPKLVLVATKVDLLPSQVSPARLDRWVRNRARSGGAPKFNGVY

SEQ ID NO: 150733 - protein, 49 aa, Glycine max
  Clone ID: PAT_MRT3847_107136C.1.pep
RMSQSQGLPSVRTGSREDQKLEDHQICSANDLLLTNDKVIKYSIRMLNT

SEQ ID NO: 150734 - protein, 63 aa, Glycine max
  Clone ID: PAT_MRT3847_107137C.1.pep
EGNRLLKWGCQRIPGGTKNPKSCFPPSENPLRFPRQPQKWGVYLTSRYWKRKNFPPNPRNFRG

SEQ ID NO: 150735 - protein, 88 aa, Glycine max
  Clone ID: PAT_MRT3847_107138C.1.pep
FIVQDADFTFINSLPQPIISPTPSHFFLLFSNSIRITNLFSFIHKQILMFLFVLKLVQPVTLQHHRSNSTLFLGSTHKLRFISPIKLN

SEQ ID NO: 150736 - protein, 57 aa, Glycine max
  Clone ID: PAT_MRT3847_107139C.1.pep
RLNVHFMFIIIFLVVVTTLNFTTQINHILKLHVQILMFGRSLLRLFSIAWNGRISPF

SEQ ID NO: 150737 - protein, 101 aa, Glycine max
  Clone ID: PAT_MRT3847_10713C.1.pep
RTIFVHSEFKGLFESAKANTIILFPTLGAKNQYAFDSAPNPGFGSFNWCKSHPFGDWDGLREQLWGILTEKKSLDCEVSLQKVHFFGGAETGGWGTPMVTM

SEQ ID NO: 150738 - protein, 85 aa, Glycine max
  unsure (1)..(85): unsure at all Xaa locations
  Clone ID: PAT_MRT3847_107140C.1.pep
MGDIFFFFFLILLKNPTIKIGGTKANPQNFFKELPQKTKIFFIGKGAQNVSPPKIKRXLYIPALELLNKQFFQMFLKNNGRLPNR

SEQ ID NO: 150739 - protein, 107 aa, Glycine max
  unsure (1)..(107): unsure at all Xaa locations
  Clone ID: PAT_MRT3847_107141C.1.pep
TXKVMHLGNTTTNRVEYAHWALKRVLQNSLGDLCSVWDAMDNTISLQHTEIKASFETSTHVVRHVFKVTLYKRLHGMXSRYALNYIAAESECVHYAGKNPSCCGCVM

SEQ ID NO: 150740 - protein, 79 aa, Glycine max
  unsure (1)..(79): unsure at all Xaa locations
  Clone ID: PAT_MRT3847_107142C.1.pep
XXXXXXXNXLIXERXXXKXXXXXLXXXXXXXXIXXXLKFYXXLLMEFGREXXXYXXXXXXYXXTXXXXXPSLXTXIXXK

SEQ ID NO: 150741 - protein, 77 aa, Glycine max
  unsure (1)..(77): unsure at all Xaa locations
  Clone ID: PAT_MRT3847_107143C.1.pep
QAKQSVSXSGVYDTEGRYVPAXIENXXXKXAXXTAPDKXTXGERWDLTXXNRXAXXXXXXPWSKXEXGARAAARDEX

SEQ ID NO: 150742 - protein, 95 aa, Glycine max
  Clone ID: PAT_MRT3847_107144C.1.pep
RRCSSTGSCSTVVISEEINKSDVCGRALDGALRRVPECGREDMVIHFDLCCLRGLITKREMHQWVEPSLSTICRSRPLYYRQHQINPQKENNASC

SEQ ID NO: 150743 - protein, 82 aa, Glycine max
  Clone ID: PAT_MRT3847_107145C.1.pep
KLVRALGSGGAKKKRGGKNGAFHPGGSKGGGPSFSLAPGNFFQAGGGEVSPFKKFRAGKAGRTMTRERYPHSMGTKPPPFFQ

SEQ ID NO: 150744 - protein, 84 aa, Glycine max
  Clone ID: PAT_MRT3847_107146C.1.pep
HDDESEAINIAKNICTPEIELDEKSTVDEQCEQHETKDNIGILQQQADHQSVQSSVPSVITNYATAEGHVKSKSSTKLTDDVNV

SEQ ID NO: 150745 - protein, 97 aa, Glycine max
  Clone ID: PAT_MRT3847_107147C.1.pep
KRINQSLETGPSCSVVAVPLVRLMVSRCNQVLLGGQQSLEPSAAMLFPLEPEPLCSEDPFIDTLWPQSFWVILDLLFQENHRKHVKKAPLVSYWEGG

SEQ ID NO: 150746 - protein, 130 aa, Glycine max
  unsure (1)..(130): unsure at all Xaa locations
  Clone ID: PAT_MRT3847_107148C.1.pep
LKPFISFKKKIPGKKLGDPPKAGLTPEPKKGAPSRLFAPPNRAPGKGVGKTPKANPSPWPNPPFSKKPPKPGPGVFNRQPFPPKKWQASLNNGPPRPLXKPRGGPPEPPLIPSRIEDPTLGPKGPPPPTF

SEQ ID NO: 150747 - protein, 110 aa, Glycine max
  unsure (1)..(110): unsure at all Xaa locations
  Clone ID: PAT_MRT3847_107149C.1.pep
KNILDFDPGGETSHVSTLTIDNGVFXVLATNADTHLXSDXFDQIILQYSIQFTYTNHANDITKNPQPLSTLKIDPVHGIYVSHLTHLIREGICSLXEGFDSSDPLTPNRF

SEQ ID NO: 150748 - protein, 77 aa, Glycine max
  unsure (1)..(77): unsure at all Xaa locations
  Clone ID: PAT_MRT3847_10714C.1.pep
PRVRCDWNLILESVQEGVPLIPWSLFAEQKMNAVMLVDGLKVGXRLKLHLKFNENDIVEKEEIAKVIKYLMEGEEGK

SEQ ID NO: 150749 - protein, 70 aa, Glycine max
  Clone ID: PAT_MRT3847_107150C.1.pep
CKTKANPLGVVVTAASILLSSNLPLFIFVIGLVLFFFFFLSFIFHRNQFQCFQFPRLGSLWCMKEAFSEI

SEQ ID NO: 150750 - protein, 68 aa, Glycine max
  unsure (1)..(68): unsure at all Xaa locations
  Clone ID: PAT_MRT3847_107151C.1.pep
KYTERSFWAGLPYMCSGASDMLETMLICYPYRRLTHCDALSQSYMAPVHDTNVXPVCTRPLINYFQHP

SEQ ID NO: 150751 - protein, 49 aa, Glycine max
  Clone ID: PAT_MRT3847_107152C.1.pep
HPHLNHLPSISLICLLITYSVKLITQSPWLSSRKEGHTDTHTILVFFSY

SEQ ID NO: 150752 - protein, 54 aa, Glycine max
  Clone ID: PAT_MRT3847_107153C.1.pep
SRHIYYTGLDLETISQTWFLLNILHRGSVIYGVSPLLPAEELVPPLTTTASVHT

SEQ ID NO: 150753 - protein, 67 aa, Glycine max
  unsure (1)..(67): unsure at all Xaa locations
  Clone ID: PAT_MRT3847_107154C.1.pep
MAAEEDKNLVEILENXNPIDVAKYMNFVSAPQAGAIATFSGTTRDTFEGKTVMELRYEAYVPMAIRC

SEQ ID NO: 150754 - protein, 443 aa, Glycine max
  unsure (1)..(443): unsure at all Xaa locations
  Clone ID: PAT_MRT3847_107155C.1.pep
SSPCGNPPSSKTLEFRAVDFSCSWFNLLSSPRQKGGLVQSSQFSSGNSAGQSLQGMQAMGMMGSPNLTSQLRANGAMAYAQQLRMSQGQIRQQLSQQGSLNTAQVQGLPRSSSLAFMSSQLSGLSQNGQPAMINSLTQQQWLKQMPAMSGPAAPLRLQHQRQQQLGSSTQLQQNSMTLNQQQLSQLMQQQKSMGQPQLLQQQQQQQQQPQPQQLQQQLIQQQPQQQSHLQVSVHQQQQQQQQSPRMPGPAGQKSLSLTGSQPDVTASGATTPGGSSSQGTEATNQVLGKRKIQDLVAQVDPQGRLDPEVIDLLLELADDFIDSATTHGCILAKHRKSSTLESKDLLLHLEKLXLTIPGYSSEEKKNQSKPQLNDLHKRRLDMVRTLMESSSSESSINSSKEMSRQGISNPPPVGTHHLVRPLSPEQLVSHAAGSQMLQQMTRF

SEQ ID NO: 150755 - protein, 172 aa, Glycine max
  unsure (1)..(172): unsure at all Xaa locations
  Clone ID: PAT_MRT3847_107156C.1.pep
MAVPRAHKLVEKSEVAPATTRTTSSLPLSFLDLPLAGPIYVRRQFFYHFAHPTHHFCQTTLPTLKHSLSLTLSHFFPLAGNLLCPSPPHKPFIRNTNDDTVTLTVIESEADFKLLSSNHPKSLKELDHLVPELSFSFSTMHDDTFIXPIMALQAXVXPXPCLCIAITYCHAI

SEQ ID NO: 150756 - protein, 91 aa, Glycine max
  unsure (1)..(91): unsure at all Xaa locations
  Clone ID: PAT_MRT3847_107157C.1.pep
MPLFYTGEGAWCQRMAILMNMPNXAVLSMWRYFVGDLVFEVSKMTSPYIKCTVSFFIAFEIWPDETIIFEAFPHKLLQLEEIQEKVVVEIF

SEQ ID NO: 150757 - protein, 96 aa, Glycine max
  Clone ID: PAT_MRT3847_107158C.1.pep
VLQKQPSNVHVYFGRKVASWRSKSRDLCLERFYPSPTWVMKAWETTQDEMMIAGGLHVVVFNKMVVFTVFNHFKIDTFEASCLILWQVMVKWLYYK

SEQ ID NO: 150758 - protein, 61 aa, Glycine max
  Clone ID: PAT_MRT3847_107159C.1.pep
RGKKKKKKKQKKKKKKKKKKKKKKKKEKKKKKKKNKKEKRKEKNIFLVKPKLNFLKRSFIT

SEQ ID NO: 150759 - protein, 150 aa, Glycine max
  Clone ID: PAT_MRT3847_10715C.1.pep
FLFRPRVRKRKEDRVSNLPDEVLHRILSTLDAKSAVQTCVLSKRWRHVWTSLPVLNLLDSCFDDFLHFQCFVDHFLSRRDAYSNISVLNFACTDHELDDGHTHIVDSIIDHVTLTPPMTIQGLYIVAECIVGKLPQLSICQSLTTLKLVT

SEQ ID NO: 150760 - protein, 123 aa, Glycine max
  unsure (1)..(123): unsure at all Xaa locations
  Clone ID: PAT_MRT3847_107160C.1.pep
LAIRSVEGIAEAAAVHAVKQLNKATGWFCNTAVPVNVVFKPNQAILAQAVDTANVAKQACISAIVTIATTAYGDEWTACDYKYSLGAHPLHYVVMIDTEAPLAVRLIEEGDKAXLTGEVISST

SEQ ID NO: 150761 - protein, 65 aa, Glycine max
  Clone ID: PAT_MRT3847_107161C.1.pep
NNTLSGNVPPALKRLDDGFLYEYNLGLCGVGFSSLKACNASDHVNPSRPEPYGAATRDIPETANV

SEQ ID NO: 150762 - protein, 56 aa, Glycine max
  Clone ID: PAT_MRT3847_107162C.1.pep
SSSEKDISLLLIGYMLKSSAVCGRPVIASNMHILGTRHRDQAQPSTLQILSFMIFH

SEQ ID NO: 150763 - protein, 70 aa, Glycine max
  Clone ID: PAT_MRT3847_107163C.1.pep
GSIFGESRVRSFASLVDSAIRSSSATEADLESSPVQAEDRAMRSSSSGTDLGTSPFHVFATAAGMRTVAG

SEQ ID NO: 150764 - protein, 59 aa, Glycine max
  Clone ID: PAT_MRT3847_107164C.1.pep
IDPHFTYIRCNMVLIFICSLTIISSVASARTAKSKVTVGSAPTFRCSDRAEKRREVMFY

SEQ ID NO: 150765 - protein, 150 aa, Glycine max
  Clone ID: PAT_MRT3847_107165C.1.pep
ANSAASAKSNKIDTEIVESIDVTDDARSFSWAVDSAIRSETGSIFGESRVRSFASLVDSAIRSSSATEADLESSPVQAPVRAMGRAMRSSSRTDLGTSPFHVFATAAGMRTVAATQSYRELFNLLELILIILLLINEFVKQAYGLLLRMN

SEQ ID NO: 150766 - protein, 404 aa, Glycine max
  Clone ID: PAT_MRT3847_107166C.1.pep
MDTEMVESIDVTDDARSFSWAVDSAIRSDTGSIFGESRVRSFASLVDSAIRSSSATEADLESSLVQAEDRAMRTVAARLTKAVSNAKRHFAKGLFTRAELIPVTQAELEPATNNFPGLLFTLDELKAATNNFSFDNKIGTGGFGIVEYRGKLIDGREVAIKRGKTWSNSFGKSEFALFSRLHHKNLVGLVGFCEQKDERLLVYEYMKNGALYHHLHDKKGSSVLNSWKMRIKIAVDVSEGIQYLHNYASIIHRNIKSSNILFDATWTARVSGFDFAVGTFGYVDPEYFHLNVVTEKSDVYGLGVVLLEILTGRRAVLKYGAKDYVCTPIKSVVDFAVPVILAGELEKILDPRVGPPDENEAEAMELVAYTAIHCVNLKGKDRPTMADIVVNLERALAICESSHI

SEQ ID NO: 150767 - protein, 400 aa, Glycine max
  Clone ID: PAT_MRT3847_107167C.1.pep
DSIVDNGQASLIRRGSSGSSGGGASNNSNSSISSMIMRQTSIIMRRQRTEEFTLAELVAATNNFSLENKIGSGSFGVVYKGKLAEGREVAIKRGETGSKMKKFQEKESAFESELAFLSRLHHKHLVGLVGFCEEKDERLLVYEYMKNGALYDHLHAKNNVEKESSVLNNWKMRIKIALDASRGIEYLHNYAVPSIIHRDIKSSNILLDATWTARVSDFGLSLMSPEPDRDHRPMKAAGTVGYIDPEYYGLNVLTAKSDVYGLGVVLLELLTGKRAIFKYGEDGGTPLSVVDFAVPAILAGELVKILDPRVGPPDVNEAEAVELVAYTAIHCVNLEGKDRPTMADIVANLERALAICESSHDSTSPPVPILLSNEKLLVAALSSSRVNNNPGKLLVAGSSS

SEQ ID NO: 150768 - protein, 205 aa, Glycine max
  Clone ID: PAT_MRT3847_107168C.1.pep
MAPELVPTVVKSSAAFTKPATLPRRAYVTFLAGNGDYVKGVVGLAKGLRKVKTAYPLVVAVLPDVPEEHRKILESQGCIVREIEPVYPPENQTQFAMAYYVINYSKLRIWEFVEYSKMIYLDGDIEVYENIDHLFDLPDGNFYAVMDCFCEKTWSHTPQYKVGYCQQCPEKVRWPTELGQPPSLYFTLGMFVFEPNIATYHDLFE

SEQ ID NO: 150769 - protein, 130 aa, Glycine max
  unsure (1)..(130): unsure at all Xaa locations
  Clone ID: PAT_MRT3847_107169C.1.pep
MAPELVPTVAFTKPATLPRRAYVTFLAGNGDYVKGVVGLAKGLRKVKTAYPLVVAVLPDVPEDHRKILESQGCIVREIEPVYPPENQTQFAMAYYVINYSKXRIWEXVGYTKMIYLDGDIQGYENIDHPI

SEQ ID NO: 150770 - protein, 314 aa, Glycine max
  unsure (1)..(314): unsure at all Xaa locations
  Clone ID: PAT_MRT3847_10716C.1.pep
MALCRTGPNPIPGSYSAQNLSTKLIVPAPLRFTRQFSNLVRRKRKGVGGSSLRNAASASSKESLEDAPTTLSVCLEEETDHVIQFKMSDFKILDTVSVGLGGRPDEVIFEGMVKDSGSSLCNTRVVLRQLSSAQAQRRGKRAIEVLKKLVRRKLXYHSYSMQVHGYISLPASDASGSFILVHGYHGSFSLRHWLQQSDWLPTLEATLALDEESVRKVGEDFTGGPAVSRQLRLVRILMRDLLIGVNYLHSHGLAHTELRLENVHISPIDRHIKVGILGNAADFYRDGSNGSSLDNLDRRQMMIAFDMRYMGFHN

SEQ ID NO: 150771 - protein, 113 aa, Glycine max
  Clone ID: PAT_MRT3847_107170C.1.pep
YTIETSENELGANKLYVLMRERLFEVACPKDTICRSSIIWHSYFSNMCILTRKHVICGWRTFNVDSCIDEWVNEGRMHSALAPRLLIELQRSWCALGFNVCVLLLACLSQCSS

SEQ ID NO: 150772 - protein, 205 aa, Glycine max
  Clone ID: PAT_MRT3847_107171C.1.pep
KEERKIRGSFEILAGIFKRDKAIIEDVKKKGVRVGDLARALKQNVHEAGILIYLINASPIDIKTLGLLPILGGVGCTSNSYKDKQEALLLTPRAASLMIIEELVTSFDYATNNMHLATIRSPHVLSGFLEVARNDNLEEFFSLTTILIKCMQYDAQCRKYVSQFTPLAPFIHLLQSENTRAKCTALEFFHEILCIPRYITMQTNI

SEQ ID NO: 150773 - protein, 83 aa, Glycine max
  unsure (1)..(83): unsure at all Xaa locations
  Clone ID: PAT_MRT3847_107172C.1.pep
EALSSRCXXFFFFFFFGKSKTFIVFFGRALTNKQMYISFLKKKTRMPKILHFPPFSTSIIFSHTLPIKQFISANPQLFFTTKI

SEQ ID NO: 150774 - protein, 87 aa, Glycine max
  unsure (1)..(87): unsure at all Xaa locations
  Clone ID: PAT_MRT3847_107173C.1.pep
VHTLVLYTLVRIYRKIDFRRNEKDIYGGIVTIEYDPNRKAYIXCLIHYGDGEKIFILHSRGAINGDTIVLGTEVTIQMGKALPLTAV

SEQ ID NO: 150775 - protein, 48 aa, Glycine max
  Clone ID: PAT_MRT3847_107174C.1.pep
GGPPFFFFEGQPTNLFNNDPKLRILEAIIRHQPILQWPKPQNHNGRVK

SEQ ID NO: 150776 - protein, 87 aa, Glycine max
  Clone ID: PAT_MRT3847_107175C.1.pep
DNGSNNSAFADPLAFGPGHVNPARASDPGLDYGISTHDYLHYLCSLWSTSSQFAILSVGSFKCDIEASHRAGDLTDASCAELTRASA

SEQ ID NO: 150777 - protein, 58 aa, Glycine max
  Clone ID: PAT_MRT3847_107176C.1.pep
EVETASIFLTATGTVSSTYKLLVLADVSFVLEFSSPHLMLLDGREGESRFRERIDNLA

SEQ ID NO: 150778 - protein, 162 aa, Glycine max
  unsure (1)..(162): unsure at all Xaa locations
  Clone ID: PAT_MRT3847_107177C.1.pep
GIFALLLLISTSSFQLLRASDDADDDATFYDSHDXDFEYRWVVSQKDEYSGVWTHAKSXGHDDHGLLVSDKTRKYAIVKELDEAESLKDDTSVIQXELDSXNGLQCGGAYLKYLQPHEAGSISKEIDSVSPYSIMLATDKCGATNKAHYILKHKISKRGVYV

SEQ ID NO: 150779 - protein, 58 aa, Glycine max
  Clone ID: PAT_MRT3847_107178C.1.pep
PEGRATHIIILNAANILPFNTPITKIPYYYTMIFDKFFPHNSSIPYVPRLPNVTCNTS

SEQ ID NO: 150780 - protein, 95 aa, Glycine max
  Clone ID: PAT_MRT3847_107179C.1.pep
LVSPFGKTDTASVLSEAIEYIKFLHEQVTALSTPYMKSGAPIQIQQNSGKSKEAEGPKQDLRSRGLCLVPVSSTFPVTHETTVDFWTPTFGGTPR

SEQ ID NO: 150781 - protein, 55 aa, Glycine max
  Clone ID: PAT_MRT3847_10717C.1.pep
SHHNDERDQRSHIMYSCPHCHINACHGHTIGAVSILVWIAIEAAHVIRVTHQQIL

SEQ ID NO: 150782 - protein, 48 aa, Glycine max
  Clone ID: PAT_MRT3847_107180C.1.pep
DMFRYRLKVHFHLYVLCVIYTVRSLRYDVFCRLAKYKPPSVGPVVGKE

SEQ ID NO: 150783 - protein, 135 aa, Glycine max
  unsure (1)..(135): unsure at all Xaa locations
  Clone ID: PAT_MRT3847_107181C.1.pep
NRTQKPGRDIKPRDRHAHEFPLPQLGGGRGPQKGTEINRGEMKGVYGSTGKKKPNQKAKNQTRRRRKRKRTDCLGGKGTDIIGEXKTARPSGKKPXRPGRGRKQTTPGKRRFSPWTXRRAGGPPPKGPKTGGPGG

SEQ ID NO: 150784 - protein, 57 aa, Glycine max
  unsure (1)..(57): unsure at all Xaa locations
  Clone ID: PAT_MRT3847_107182C.1.pep
WYGEMVPPKPMXVKTFYENHHFGSFAVRNMRQTVAVGVIKSVEKKDPTGAKVTKAAA

SEQ ID NO: 150785 - protein, 96 aa, Glycine max
  Clone ID: PAT_MRT3847_107183C.1.pep
GMMQVLLKLQAIYNPVRFKLAFALLDAAIVFSFLVDRCCYCLCYDKFMSTLKELILMPFDKSLYKVVAFQADASVPLVFLSRLIILCIFKLYEYGK

SEQ ID NO: 150786 - protein, 200 aa, Glycine max
  Clone ID: PAT_MRT3847_107184C.1.pep
MGKKGSGSSWLTAVKRAFRSPTKDSDKRSGRRREDCDQEEDEEKKREKRRWIFRKTHMSHEGGNNNSNTQPELKHDVAASVARSRAEAALANAQAAAEVARLSKPASHAREHFAAVVIQTAFRGYLARRALRALKGLVKLQALVRGHNVRKQAKMTLRCMQALVRVQARVLDQRIRSSLEGSRKSTFSDTASVWDSRYLQ

SEQ ID NO: 150787 - protein, 144 aa, Glycine max
  unsure (1)..(144): unsure at all Xaa locations
  Clone ID: PAT_MRT3847_107185C.1.pep
MGKKGSGSSWLTAVKRAFRSPTKDSDKRSGRRREDCDQEEDEEKKREKRRWIFRKTHMSHEGVNNNSNHTTQQKVQHDVAASGGWFKDXQDQKHALAVAMATAEAAMATAXAAAEVARVSKPASHAREHFAAVVIQTAFRGYLA

SEQ ID NO: 150788 - protein, 137 aa, Glycine max
  Clone ID: PAT_MRT3847_107186C.1.pep
VFQLFHSLCLLSSGKTVYFGPASAAKEFFASNGFPCPPLMNPSDHLLKTINKDFDQDIEAGLAGTENILTEEVIHILVNSYKSSERNQEVQNEVALLSKKDTSSLDMKKGNACFLNQCLVLTKGSFINMYRDLGYYW

SEQ ID NO: 150789 - protein, 39 aa, Glycine max
  Clone ID: PAT_MRT3847_107187C.1.pep
PRGPPRGSPFCNRVNHLVFFHPINSTLYLMPNPICFSLS

SEQ ID NO: 150790 - protein, 100 aa, Glycine max
  Clone ID: PAT_MRT3847_107188C.1.pep
RPNHKTIGWSLDSKHFYKKKTQNRDIGGLLSTILKHKKNLVITEVFSPLKIIKGAMEFNIPTMGAHKHHCFGEPRKNPRNFSWWETLLKNPPPFGTIGKQ

SEQ ID NO: 150791 - protein, 62 aa, Glycine max
  unsure (1)..(62): unsure at all Xaa locations
  Clone ID: PAT_MRT3847_107189C.1.pep
XDSYYCLFPQAYPXGVLFVLVLNFLLNLRFPMYKINNFVSTCYERSKSGEMRSNTRCVSTRK

SEQ ID NO: 150792 - protein, 675 aa, Glycine max
  unsure (1)..(675): unsure at all Xaa locations
  Clone ID: PAT_MRT3847_10718C.1.pep
TLALCGRGPIPNPGSGSPQNLSTKLIEPALLPFTGQFYNLVRRKRKGVSRSSLRNAASASSKESQEDAPSTLSVYLEEETNHVIRFKMPDSKISHTVSAGLGGRPDEVIFEGMVKDSRSPLCNTRVVLQQLSSAQAQRRGKRAIEVLKKLVRRKLLYHSYSMQVHGYTSLSASGVSGSFILVHGYHGSFSLRHWLQQSDWLPTLEATLALDEESVRKVGEDSTGGPAVSRQLRLIRILMRDLLIGVNYLHSHGLAHTELRLENVHISPIDRHIKVGILGNAADFYKDGSNGSSLDNLDRRQMMIAFDMRCVGFIMAKMVMRELMDPLIFAKFKLFLKKGYDPSCLREFMLEILGRSSPYGNAGLQILDRNWGAGWHLLSLLLATKPSQRISCLDALRHPFLCGPRWXRVVPSMDIIRWGLGSTAMRIREKYIYRQPQQSRLAHFIDLMEMLNPHPQPRNWLELLPGKWRLLYSTGKHVGLTLRQPPLRVLVSDVHLTVTRESKLKDNLSFGSDIGFSVMIGQDWPHDKAGKSGRLQVNSLFTLRSGRRLYLKQDKTTEKFFFGPSSNVEALAQKFKGKKWRKIVPFKEFPSSLPAAKLASGDIDVRMNLDDPLNRNVDTARNVLQELRTQIPPEIFDLSRLVCGTYVDSRMLVLRGVNGSALLFTRSFVDRNGSS

SEQ ID NO: 150793 - protein, 47 aa, Glycine max
  Clone ID: PAT_MRT3847_107190C.1.pep
IRTISLLPFIWIRTSQSSEDRLEGVHAMRTLELKAVLQKLKRIINHC

SEQ ID NO: 150794 - protein, 199 aa, Glycine max
  unsure (1)..(199): unsure at all Xaa locations
  Clone ID: PAT_MRT3847_107191C.1.pep
KSNVTSTIFPPSLYFPSLCLPVSTITLSSISTFSFSCGFFFFFCCLQRHTISKFSIKQSLKQARKLAKVFEDFLQRHQKSPSLNHAETASLGDCRDLNQLNVDYLASISEELKSASSSDSELIEKIESYLSAVATNHYTCYDGLVVTKSNIANALAVPLKDVTQLYSVSLGLVTEALDKXLRRNITRKHGLPTKTFRLG

SEQ ID NO: 150795 - protein, 60 aa, Glycine max
  Clone ID: PAT_MRT3847_107192C.1.pep
KNWNPSSIRSRHSVRSSRVRIDRLDDHSRQWIVVINGYRTNECKDYVLATQCRLVYHEPR

SEQ ID NO: 150796 - protein, 602 aa, Glycine max
  Clone ID: PAT_MRT3847_107193C.1.pep
MELRRQKGTDTNHKPHFQPHIEPKKAMSPPPFSPPLSISLLFVFLLAPLLLAQSPPSPSPSSSSSSSVACKGTLYPKLCRSILSAIRSSPSDPYGYGKFSIKQSLKQARKLAKVFEDFLQRHQKSPSLNHAETASLGDCRDLNQLNVDYLASISEELKSASSSDSELIEKIESYLSAVATNHYTCYDGLVVTKSNIANALAVPLKDVTQLYSVSLGLVTEALDKNLRRNKTRKHGLPTKTFKVRQPLEKLIKLLRTKYSCAKLSNCTSRTERILKESGSQGILLYDFVIVSHYGIDNYTSIGDAIAAAPNNTKPEDGYFLVYVREGLYEEYVVIPKEKKNILLVGDGINKTIITGNHSVIDGWTTFNSSTFAVSGERFIAVDVTFRNTAGPEKHQAVAVRNNADLSTFYRCSFEGYQDTLYVHSLRQFYRECEIYGTVDFIFGNAAVVFQGCKIYARKPLPNQKNAVTAQGRTDPNQNTGISIQNCSIDAAPDLVADLNSTMSFLGRPWKVYSRTVYLQSYIGNVIQPAGWLEWNGTVGLDTLFYGEFNNYGPGSNTSNRVTWPGYSLLNATQAWNFTVLNFTLGNTWLPDTDIPYTEGLLR

SEQ ID NO: 150797 - protein, 57 aa, Glycine max
  Clone ID: PAT_MRT3847_107194C.1.pep
MSQILAPFQLLELNVISAQDLAPLGRNMRTYAVSWVHPDRKLSTRVDSEGHTNPTWN

SEQ ID NO: 150798 - protein, 61 aa, Glycine max
  Clone ID: PAT_MRT3847_107195C.1.pep
FGPRGQQFWRKFVAEYFAPNAKKKWCVSMYGSGRQTTGVFPQDVWHCEICNCKPGRGFGKF

SEQ ID NO: 150799 - protein, 35 aa, Glycine max
  Clone ID: PAT_MRT3847_107196C.1.pep
RPHCGSDFRGSEGVTPTVLYVECVETSMRCRKKIN

SEQ ID NO: 150800 - protein, 68 aa, Glycine max
  unsure (1)..(68): unsure at all Xaa locations
  Clone ID: PAT_MRT3847_107197C.1.pep
GVMARHISADTQDTFILTLSVGLATGQINPRAPGRSEGLVIYIQLLRIEXELGAXAVYGGANFYTPVE

SEQ ID NO: 150801 - protein, 136 aa, Glycine max
  Clone ID: PAT_MRT3847_107198C.1.pep
EMRNEGLLPNVFCYTALIGGHCKLGQMDIVGSILLEMSSNGIRPNKITYTIMIDGYCKLGNMKEARELLNEMIRNGIAPDTVTYNALQKGYCKERELTVTLQSDHKSNIGLPLEEEITYNTLIHKLHPHTAISNRE

SEQ ID NO: 150802 - protein, 104 aa, Glycine max
  Clone ID: PAT_MRT3847_107199C.1.pep
HVCKRRPVPSLGLVHPRSSVSFHIGRAAFLWVQVRLVAWFSCFPRERFLTFGSSFVLTSVHRLNSDLAQGCESLPLCTPDTPVGLLSSKMAPLCFSLDKTRRIS

SEQ ID NO: 150803 - protein, 58 aa, Glycine max
  unsure (1)..(58): unsure at all Xaa locations
  Clone ID: PAT_MRT3847_10719C.1.pep
SNLYLSFFLSLLRXKPFFLXSXXXXILXFLXFTLXGXKKEXXXYYXPYYXXYCNXSXX

SEQ ID NO: 150804 - protein, 208 aa, Glycine max
  Clone ID: PAT_MRT3847_1071C.1.pep
PRVRPRVRPRVRLSGLKSVENAHDDSVWAVTWVPATANRPPLLLTGSLDETVRLWRSDDLVLELTNTGHCLGVASVAAHPLGSVVASSSLDSFVRVFDVDSNATIATLEAPPSEVWQMRFDPKRQGAILAVAGGGSASVKLWDTSSWELVATLSIPRPEGQKPTDKSGSKKFVLSIAWSPDGKRLACGSMDGTISVFDVPRAKFLHHL

SEQ ID NO: 150805 - protein, 36 aa, Glycine max
  Clone ID: PAT_MRT3847_107200C.1.pep
ASAALAWVVTHPHASATCVYAYHIKIQYSICHKRAR

SEQ ID NO: 150806 - protein, 74 aa, Glycine max
  Clone ID: PAT_MRT3847_107201C.1.pep
MHPKPVPQKEPLSAALSALTLVVQFNGWLSFFLLLYYKLPLRPETHKTYYEYTGLGHIYGLLAMNSWFWGAIYH

SEQ ID NO: 150807 - protein, 69 aa, Glycine max
  unsure (1)..(69): unsure at all Xaa locations
  Clone ID: PAT_MRT3847_107202C.1.pep
WFRGLASSDIYTXICSXDCELWNLLDKSMTMLFNPNPCSDAWSLEFLXKRTGFHCDIHXVTGWTATPNA

SEQ ID NO: 150808 - protein, 43 aa, Glycine max
  Clone ID: PAT_MRT3847_107203C.1.pep
AGEVLSLKLGISYSLLITRRRCVSLRSRALLHSIIIFCLLLFA

SEQ ID NO: 150809 - protein, 145 aa, Glycine max
  Clone ID: PAT_MRT3847_107204C.1.pep
ETNPHFSRSSQPEYIDDRDTEPYPLVPRRKRRDQPSTQVAPPIPVALPAEHEDRVPLRTRPQHEDHVPLQPQVEDHPHPPPPILQEPRRGKQRSPRRQPTNQGFRPVKSKVNFQEPPPSADVPPLVAPVNYSPEHWDQASPESRL

SEQ ID NO: 150810 - protein, 82 aa, Glycine max
  Clone ID: PAT_MRT3847_107205C.1.pep
QTPLQLASCLTSTCIHILKASQVKKKNLLLLLSPLDLYKKMTREQSKSAGESVLKIQLEIGNLVTVGRSQAYQPCLMCVNID

SEQ ID NO: 150811 - protein, 264 aa, Glycine max
  unsure (1)..(264): unsure at all Xaa locations
  Clone ID: PAT_MRT3847_107206C.1.pep
APRGTPLISPHIKWDHSQTWDVPVAEDFPNGSSSSSATVYSIDASPESPDHYLVDHCIDGRVIFPGTGYLCLVWKTLARSLGLSLEETPVVFENVSFHQATILPKTGTVALEVRLLEASHAFEVSDTGNLIVSGKVYLWEDPNSKLFDHPEVPTPPESASVSRLTQGEVYKELRLRGYDYGPQFQGICEATLEGEQGKLLWKDNWVTFMDTMLQVSILGSSQQSLQLPTRVTXIYIDPATHRQKVYRLKEDTQVADVTTSRCLG

SEQ ID NO: 150812 - protein, 106 aa, Glycine max
  Clone ID: PAT_MRT3847_107207C.1.pep
KNPVVELEPGNFTRFFLFRGKSPGPKKKNNFSKGFWSPKPKSLRVLPTTFFLVKQIIHSSTPLESGGGGVIQCCNKKLSRFPLLFFKKKWTKQCFGFQSKAKPFVF

SEQ ID NO: 150813 - protein, 88 aa, Glycine max
  Clone ID: PAT_MRT3847_107208C.1.pep
MIDFECRRRRRRRRRRRRRRRRRRRRRRRRRKSNQFNNVLLNMQDKTNCNNINEIKEKRNANSIYTGSTTSRAYVQSQATHLRFSLIL

SEQ ID NO: 150814 - protein, 115 aa, Glycine max
  unsure (1)..(115): unsure at all Xaa locations
  Clone ID: PAT_MRT3847_107209C.1.pep
MKMKXLVXXVXTILVXWXCHAYDMFPLRMNTGYGARTPEVKCASWRVXVELPXMFGFETIXEEXVEVTKEYMHGEQYRXDCKRVKQQAYFYAGDLEGHARGAFGVRIDGAELCDM

SEQ ID NO: 150815 - protein, 130 aa, Glycine max
  Clone ID: PAT_MRT3847_10720C.1.pep
NLLRKRQNMPPSISSFSSSSSSCSLSWWLLLLSTSSVTTSVNTSLSSGSCVLQWPSLKDIPTSSFCFVKATSTNSVSCESCSGTNAEFSLIPTPIESLPSEVIFLPCNIGLAIWSALKSTCFKFPDRHDG

SEQ ID NO: 150816 - protein, 296 aa, Glycine max
  unsure (1)..(296): unsure at all Xaa locations
  Clone ID: PAT_MRT3847_107210C.1.pep
GSRIDKRLSGKRTFIVLDDVNXVWRLKDLCGNHEWFGQGSVLIITTRDLHLLDLLKVDYVYEIEEMDENESLQLFSWHAFGQPKPREDFNELARDVVAYCGGLPLALEVLGSHLISRTETEWESALSRLKMTPNDQIQQKLRISFDDLYDHMEKHIFLDICCFFIGKDKVYVTHILNGCGLHADIGLTVLIERSLVKVEKNNKLEMQNLLREMGREIIREGSRKKLGKRSRLWFDEDVVEILTEKTGTEAIEGLALKLHSNKRYCFKADAFAEMKRLRLLQLDNVELTGDYRFCSG

SEQ ID NO: 150817 - protein, 128 aa, Glycine max
  Clone ID: PAT_MRT3847_107211C.1.pep
MASFNSIQNSTTPILLITILITFLLHHLLCPVSCFNQPQHAIPPPDPLCEEKNRLGSMPPTCHNKCNRCHPCMAVQVPASPNHERVHPGLAPTAAMEVFFLQGNRVNGIAWVAPDESFSSALIVWIGV

SEQ ID NO: 150818 - protein, 201 aa, Glycine max
  Clone ID: PAT_MRT3847_107212C.1.pep
MASSESTKQEGVVGGIGEKLIPLHENVLQKHAAFFDKNHDGVIYPWETFQGLREIGNGILSSVGLSLFINLALSQTTRPGKFPSLLFPIEIKNIQLGKHGSDTGAYDTEGRFVPSKFEGIFTKHSHTHPNALTYDELKEMLKANREPKDFKGRIGGLVEWKVLYKLAKDKNGLLQKETIRSVYDGSLFEMLKKENSARKKN

SEQ ID NO: 150819 - protein, 35 aa, Glycine max
  Clone ID: PAT_MRT3847_107213C.1.pep
NSGECVTVCAINIHQWTTEQSSSHCRNLLTAHCFA

SEQ ID NO: 150820 - protein, 56 aa, Glycine max
  Clone ID: PAT_MRT3847_107214C.1.pep
DYGDGHSCTVSIDDSFAHPHAFRRPNLTWRCTTHALTKIHSEPRDSLTTTDQLESG

SEQ ID NO: 150821 - protein, 117 aa, Glycine max
  Clone ID: PAT_MRT3847_107215C.1.pep
VALGLYFGAGVFSKDAHVVHLIKIGIPLVAATQPINSLAFVFDGVNYGASDFAYSAYSLVLVSLVSVATEFILYRTKHFVGIWIALTIYMTLRMLAGIWRMGTGTGPWLYLRGRSLP

SEQ ID NO: 150822 - protein, 89 aa, Glycine max
  Clone ID: PAT_MRT3847_107216C.1.pep
FATSRIKGIEARSNKNSLTNEIMVPLTIKLFIVRFFILSRGQGECRGTMGVEPNSAKTPDKNKMETGIPVSFTSLSSLMKLKVKIFFHT

SEQ ID NO: 150823 - protein, 202 aa, Glycine max
  Clone ID: PAT_MRT3847_107217C.1.pep
MKMDFRKFSVKRQCLPWQLQLVVSILLFLAVSSLGSPIETRKTGRSSVFSLFNLKEKSRFWSEDVIHNDFDDLKFSSHGKLSVFNYTNAGNIANYLKLQEVDSIHLPVPMNFIFIGFEGKGSHEFKLLLEEIERWFTKIDHVFEHTRIRHEEVVIPFYKTNMDKMRWHQLAVVSDINYNFSVHAIEMGEKVTSIIEHAINVF

SEQ ID NO: 150824 - protein, 37 aa, Glycine max
  Clone ID: PAT_MRT3847_107218C.1.pep
KHSSIPQPRSSTMIACSVIDIVCSAETYGCVVARVDA

SEQ ID NO: 150825 - protein, 191 aa, Glycine max
  Clone ID: PAT_MRT3847_107219C.1.pep
MGDVLSPFTISSPPPPSSPSTKSNSMPMLYYGLVVVGTAAIVLAIYNLVLLRRSHTRHALPSQSTGQNRDIVRVPEMRTRSFEDSQQRNLLSSFKYKKEVVAKEEEQEEEEQDDDEFECSVCLSVYEEGEEVRKLPQCKHYFHVLCIDMWLYSHLDCPICRTPVDVVGPLCPLENSPDGMMESGGGIPSSL

SEQ ID NO: 150826 - protein, 70 aa, Glycine max
  Clone ID: PAT_MRT3847_10721C.1.pep
MVLNSLLWVLFGILEKVSRNIDLVYGGGSIGLMGLVSHAVYEGGRHVIGVIPKTLMPKEITGETVGEVMA

SEQ ID NO: 150827 - protein, 63 aa, Glycine max
  Clone ID: PAT_MRT3847_107220C.1.pep
SFLADLGKFTDRLVTIFLFSFLPFPLILHHFLNQKGLVTGFVGALSLFSCDQRYLPTSIGMVF

SEQ ID NO: 150828 - protein, 108 aa, Glycine max
  unsure (1)..(108): unsure at all Xaa locations
  Clone ID: PAT_MRT3847_107221C.1.pep
MSASCGVVECVFVLGCARWLWKRCTYVGSYDSATWPAATADEFDRVPRVCRLILANYEPDLRTPQYQKPTFXTGHXLNPDCVIKRVTYEDTLGHAPXYIIYLDHENKE

SEQ ID NO: 150829 - protein, 289 aa, Glycine max
  Clone ID: PAT_MRT3847_107222C.1.pep
MEGKEEDVSLGANKFSERQPIGTAAQSQDDGKDYTEPPPAPLFEPSELTSWSFYRAGIAEFVATFLFLYITILTVMGVNRSSSKCATVGIQGIAWAFGGMIFALVYCTAGISGGHINPAVTFGLFLARKLSLTRALFYMVMQVLGAIVGAGVVKGFEGKTFYGQHNGGANFVAPGYTKGDGLGAEIVGTFILVYTVFSATDAKRSARDSHVPILAPLPIGFAVFLVHLATIPITGTGINPARSLGAAIIFNKDLGWDDHWIFWVGPFVGAALAALYHQVVIRAIPFKSS

SEQ ID NO: 150830 - protein, 59 aa, Glycine max
  Clone ID: PAT_MRT3847_107223C.1.pep
YQYLSRFLTWGVPPPSPQFGNWKVLWKFLRGPLKTRTFRLYVCPTNVSLNINIKKRVFK

SEQ ID NO: 150831 - protein, 54 aa, Glycine max
  Clone ID: PAT_MRT3847_107224C.1.pep
TITGIRLSMASNIKYHYAHNHATQELDVICLMIRNTMHLKVLAQHRKYYNLFNT

SEQ ID NO: 150832 - protein, 101 aa, Glycine max
  Clone ID: PAT_MRT3847_107225C.1.pep
RTSGSYLEAVVILTVMLARLSPTQRSHASMGLRKDVTSHHKSRSSLIFYNSSMISYSTSPLAYYRTCPRFQLPETLTRPHLMDHGLVLTRFLVQLFQPCLY

SEQ ID NO: 150833 - protein, 51 aa, Glycine max
  Clone ID: PAT_MRT3847_107226C.1.pep
IFIHLLPFRRRKLETPYKSLYPQTENKSQSQKGRSPKTNLLRLISQTLTGN

SEQ ID NO: 150834 - protein, 73 aa, Glycine max
  Clone ID: PAT_MRT3847_107227C.1.pep
VGLTLLQAVLVHFKDSREPLFGSEKIHDHLDGSGLDGSVVSEQGEHAARPAPPGSGRAALPCASSGAKDSGFR

SEQ ID NO: 150835 - protein, 27 aa, Glycine max
  Clone ID: PAT_MRT3847_107228C.1.pep
LILLYYPELRLSCIATSYLFYLVTYIQ

SEQ ID NO: 150836 - protein, 198 aa, Glycine max
  unsure (1)..(198): unsure at all Xaa locations
  Clone ID: PAT_MRT3847_107229C.1.pep
MASLYPPPFSIATNNNTSTPAATGTHVSTSCSIPLIRNHNSNAPKVAKSRVSCKATKGGDQENQSIKNINKDTQEEAFMFDRRNILIGLGGFYGTLSNDSLSLAAPISPPEITKCGPPDLPSGAKQTNCCPPISSNIIDFTLAITPQVKVRPAAHLVDATYLQNYKEALRRMKALPPNDPRSFTQQANIHCAYXDGAY

SEQ ID NO: 150837 - protein, 56 aa, Glycine max
  Clone ID: PAT_MRT3847_10722C.1.pep
GLAKGPYMIWICKKKHYDKIKRPFYKWPHRYNGSIHTLFSLSRKSQEFFPSPSVVL

SEQ ID NO: 150838 - protein, 101 aa, Glycine max
  unsure (1)..(101): unsure at all Xaa locations
  Clone ID: PAT_MRT3847_107230C.1.pep
AXXQQLQQXQEFDIPTGRXVCXATQRXAXRVANYXEDXYLQATDKRKALEETMAFTTQALASVAYQVGNLAGHTLRMLDLQGAALRQVEAKMSTLGQMVNM

SEQ ID NO: 150839 - protein, 99 aa, Glycine max
  unsure (1)..(99): unsure at all Xaa locations
  Clone ID: PAT_MRT3847_107231C.1.pep
KYNIENGGSAPEGITYNIYXNTTTINEYLIASYLPDVYITTTCVTSYTVPXGPFDVEVFDSAIDYIXYNNSIFDFXFIMKLLSSYKFTFFLLCTSLGFL

SEQ ID NO: 150840 - protein, 59 aa, Glycine max
  Clone ID: PAT_MRT3847_107232C.1.pep
MEASKMKFFLVLVIAMLAMVATGVSAAEAPAPGPSSDATTFFVPTALASLFVLAFGLLF

SEQ ID NO: 150841 - protein, 72 aa, Glycine max
  Clone ID: PAT_MRT3847_107233C.1.pep
QKCNQGFRQTQHIKTQINKSNFATVDQEPSSGNNSCQMKGETLNFCPKTRFLKKKNQSSEKKPTFIGTHIPW

SEQ ID NO: 150842 - protein, 400 aa, Glycine max
  unsure (1)..(400): unsure at all Xaa locations
  Clone ID: PAT_MRT3847_107234C.1.pep
MALRCSQNSCGLLALFLSLLVLVVSLQCQVASSAVLLSMKHKHNHVNNQRPMVQKTNQSICSLFEGAWVRDETEGYPLYQSSSCPIIDPEFNCQMYGRPDSDYLKYRWKPVDCELPRFNGVEFLLNMKGKTVMFVGDSLGRNQWQSLICMLSAAAPQAQTHMVRGDPLSTFRFLDYGVTISFYRAPYLVDIDXVQGKRILRLEEVDGNGDAWRSADVLSFNTGHWWDHQGSLQGWDYMELGGKYYQDMDRLAALERGIKTWANWVDSNIDSSRTKVFFLGISPSHTNPNEWNSGVTAGLTTKNCYGETSPIISTGTAYPGVYPEQMRVVDMVIREMSNPAYLLDITMLSAFRKDAHPSIYSGDLNPQQRANPTYSADCSHWCLPGLPDTWNELFYTALFY

SEQ ID NO: 150843 - protein, 128 aa, Glycine max
  Clone ID: PAT_MRT3847_107235C.1.pep
MQACTTMSSLQQQPIWTKGLNFPAKGYGSNNGFLPQVRFCNIKPSKASHVEASLVTGKPSSVPFSVPEIGGDGSSFLDYGLSEADPDVRAIIDKEKDRQFKSLELIASENFTSRAVMEAVGSCLTNKY

SEQ ID NO: 150844 - protein, 527 aa, Glycine max
  Clone ID: PAT_MRT3847_107236C.1.pep
MQACTTMSSLQQQPIWTKGLNFPAKGYGSNNGFLPQVRFCNIKPSKASHVEASLVTGKPSSVPFSVPEIGGDGSSFLDYGLSEADPDVRAIIDKEKDRQFKSLELIASENFTSRAVMEAVGSCLTNKYSEGLPGKRYYGGNEYIDELEILCQQRALAAFHVDENKWGVNVQTLSGSPANFAVYTAVLKPHDRIMGLDLPHGGHLSHGFMTPKKRVSATSIYFESMPYRLDESTGLIDYDMLEKTATLFRPKLIVAGASAYPRDIDYPRMRKIADEVGAFLMMDMAHISGLVAASVLSNPFEYCDIVTTTTHKSLRGPRGGMIFFKKDTVHGVDLEPAINNAVFPGLQGGPHNHTIGGLAVCLKYAQSPEFKNYQNQVVANCRALAKRLIEHGYKLVSGGSDNHLVLVDLRPSGLDGARVEKILDLASITLNKNSVPGDKSALVPGGIRIGAPAMTTRGLGEKEFSLIADFIHEGVQISLEAKSLVSGTKLQDFLKFVTSSEFPLGEKVSELRRKVEALTTQYPIPGV

SEQ ID NO: 150845 - protein, 280 aa, Glycine max
  Clone ID: PAT_MRT3847_107237C.1.pep
MAEEGHRVTLNVYDLSQGLARQLSMSFLGKAIEGIWHTGVVVYGNEYYFGGGIQHSPAGSTPYGTPLRVVDLGVTHVPKDVFEMYLQEISPRYLPETYSLLTHNCNNFSNEVAQFLVGASIPEYILQLPNEVMSSPMGALILPMIQNLETTLKSGGVPQVPQFKPATTLNVSANTQKNSSTSNSSSENGVSREVNKEVKGKDENSKAAPSANTTGQPQKPSLNGVTADPLGDARNKVQDEILKEFAAIMASGTMRASEAAALATKRVMQRYGHTTAVSQN

SEQ ID NO: 150846 - protein, 55 aa, Glycine max
  Clone ID: PAT_MRT3847_107238C.1.pep
PVFRATTHAYAYVQALSNTFSDISSSYLIYLLRRGFLSEACTVLWLMNHDPIIRT

SEQ ID NO: 150847 - protein, 83 aa, Glycine max
  Clone ID: PAT_MRT3847_107239C.1.pep
GKGKDENSKAAPSANTTGQPQKPSLNGVTADPLGDARNKVQDEILKEFAAIMASGTMRASEAAALATKRVMQRYGHTTAVSQN

SEQ ID NO: 150848 - protein, 51 aa, Glycine max
  unsure (1)..(51): unsure at all Xaa locations
  Clone ID: PAT_MRT3847_10723C.1.pep
LLGGKNPQIXNTIFXVNCCVVFEPNQLTFLRSINPSKCYNFXRDLCMVQQK

SEQ ID NO: 150849 - protein, 145 aa, Glycine max
  unsure (1)..(145): unsure at all Xaa locations
  Clone ID: PAT_MRT3847_107240C.1.pep
MAEEGCRVTLNVYDLSQGLARQLSMSFLGKAIEGIWHTGVVVYGNEYYFGGGIQHSPAGLTPYGTPLRVVDLGVTHVPKDVFEMYLQEISPRYLPETYSLLTHNCNNFSNEVAQFLVGASIPEYILQLPNEVMSSPMGALILXMI

SEQ ID NO: 150850 - protein, 92 aa, Glycine max
  Clone ID: PAT_MRT3847_107241C.1.pep
LAPPFHLFVKVNVNGSYKMNAMVMGFGGVICNQVRCWLGGFYCHRNEGDPLLAKLLAIEHGLNYTWDRVYKSVECKSDCVAVVDPSVVFSQP

SEQ ID NO: 150851 - protein, 38 aa, Glycine max
  Clone ID: PAT_MRT3847_107242C.1.pep
NICKRFNCPIRQCSLSQWPKPPHILIILLKILVILYNR

SEQ ID NO: 150852 - protein, 67 aa, Glycine max
  Clone ID: PAT_MRT3847_107243C.1.pep
KSMMYICEDSDCTTIMRQVAPENIFDKIDVGANQLRHDIGSLYIKTAPAANPRPSEVISVIGKHIHH

SEQ ID NO: 150853 - protein, 70 aa, Glycine max
  unsure (1)..(70): unsure at all Xaa locations
  Clone ID: PAT_MRT3847_107244C.1.pep
GGRKMNPDMSHTEXTTTETLXMGEAPEKAKLEGAKKEETRENQGCKGEPNCYCNPSTSKRSQGRASFKHR

SEQ ID NO: 150854 - protein, 61 aa, Glycine max
  Clone ID: PAT_MRT3847_107245C.1.pep
AATTSSTTNSIKDSSTSASLVTVRHQPYVSSPKCTSVMLPAMIVMLQSDTRRYSMLLIIIH

SEQ ID NO: 150855 - protein, 76 aa, Glycine max
  unsure (1)..(76): unsure at all Xaa locations
  Clone ID: PAT_MRT3847_107246C.1.pep
ARDLIGDFFGILVQTVEENPQLLIERDESLDKXDPVELKKLSPSFKENGGAGAVGNALSIADGAAELILFSGHKAQ

SEQ ID NO: 150856 - protein, 80 aa, Glycine max
  Clone ID: PAT_MRT3847_107247C.1.pep
NYSNERKTNLSSLRVLSLPDQEFNPISAYLPQSHFTRYTSLPTTSHLSCHTPQPARQLVAYSPSLVLIRCISPILPSPIH

SEQ ID NO: 150857 - protein, 91 aa, Glycine max
  Clone ID: PAT_MRT3847_107248C.1.pep
VFYVLHSCLRRALSTYNISGVVAYMSGASSWLGNEFHEALQHIPREPNLGAKWFFGVVGDQKPGTEFVTDFHLMVVLNKFVLNLRHVIDEQ

SEQ ID NO: 150858 - protein, 195 aa, Glycine max
  Clone ID: PAT_MRT3847_107249C.1.pep
GESNHGTKASRSDQERRKGIAWTEDEHRLFLLGLDKYGKGDWRSISRNFVVTRTPTQVASHAQKYFIRLNSMNKDRRRSSIHDITSVNNGDISAPQGPITGQTNGSAGNSTAKAAKAATPASTGVPGVGIYAAPTIGQPIGGPLVSAVGTTVNLPAPAHMAYGVRAPVPGAVVPGAPVNMGPVTYPMQHTSVPHR

SEQ ID NO: 150859 - protein, 96 aa, Glycine max
  Clone ID: PAT_MRT3847_10724C.1.pep
TTRGNNPTEPKQKTQQNKAHKKGKHPNNKKKKKRPPKTRKAQDTPQGGPGQTPKRIPTPPQKGAPLTPPPKGGNPKRRRAAPEGTHPRGEPHTPRG

SEQ ID NO: 150860 - protein, 67 aa, Glycine max
  unsure (1)..(67): unsure at all Xaa locations
  Clone ID: PAT_MRT3847_107250C.1.pep
MSCCGGNCSCXSSWKCGNGCRSCKMXPEMSYTESDIIETLVMGVAPVKAQFEGAEMGVLADNDRCKC

SEQ ID NO: 150861 - protein, 119 aa, Glycine max
  Clone ID: PAT_MRT3847_107251C.1.pep
AMDAHIKEGDVFFIPRYFAFCQIASRGEPLEFFGFTTSAQKNRPQFLVGATSLMRTMVGPELAAAFGVSEETMNRVARAQHEAVILPTPWAAHAHDHKVKEEVVVDIFQKLARNEIMGF

SEQ ID NO: 150862 - protein, 72 aa, Glycine max
  Clone ID: PAT_MRT3847_107252C.1.pep
PFTLERPNPIYPRNPMGGKTYWANPTGWKPLITRGDWVNLNWPNLQTPTFRNFPLKTQWGPPGPGSFAIKTP

SEQ ID NO: 150863 - protein, 79 aa, Glycine max
  Clone ID: PAT_MRT3847_107253C.1.pep
GGGQKAGKTHFLGGKKKVEKAKKMGIIKAQRERVVYSFFLGKGIGPKNPPQGVPKINSFFFLKGPLPFKKTKIFPFSFP

SEQ ID NO: 150864 - protein, 62 aa, Glycine max
  Clone ID: PAT_MRT3847_107254C.1.pep
NHSTHFPLHASTQFVFAHYHPGTPIYYNNSYNLNAIVNTYQLPLHNYTRCIQTQYHISCIIF

SEQ ID NO: 150865 - protein, 81 aa, Glycine max
  unsure (1)..(81): unsure at all Xaa locations
  Clone ID: PAT_MRT3847_107255C.1.pep
GXXKXXRRTKKYSKIXLKTSYTHTXPQNTLXXXTTSSXXHKPTQPSFPYSXQXNXKXTRXXLQKXLSXQDXCSXGLXXQNA

SEQ ID NO: 150866 - protein, 70 aa, Glycine max
  unsure (1)..(70): unsure at all Xaa locations
  Clone ID: PAT_MRT3847_107256C.1.pep
LHSRKLKPILHPLKHNFVFWYTLLTLRVLNQSSYDDNIXKIVQFSTVEXFWFFYCHLSLPASLPIPTYFH

SEQ ID NO: 150867 - protein, 72 aa, Glycine max
  unsure (1)..(72): unsure at all Xaa locations
  Clone ID: PAT_MRT3847_107257C.1.pep
FKGRVSVGSVRCIQCEIFVEPSHNILNEEQQKVIIWLGKIVKDKIPMDXGYTVSTLQALPMYRSNFFIKQAC

SEQ ID NO: 150868 - protein, 57 aa, Glycine max
  Clone ID: PAT_MRT3847_107258C.1.pep
LFHNRNKNRTSGHVYLGGPSPFAEPTPYLVLVGKKQGRIKKLIGASAKSEKGSGLPG

SEQ ID NO: 150869 - protein, 34 aa, Glycine max
  Clone ID: PAT_MRT3847_107259C.1.pep
PIDDALDESCLASEIYFPVAGRLAMLGTSKHPEC

SEQ ID NO: 150870 - protein, 99 aa, Glycine max
  unsure (1)..(99): unsure at all Xaa locations
  Clone ID: PAT_MRT3847_10725C.1.pep
MDTQAIVNNVNPQVYNKFTEKRAIYEPAKEKLTDYRLHRVNESDDDHLVYDGVKPRDLVDITFRNNIEIGEMFLAVIHTRETTEXENSGCTAAELQVYL

SEQ ID NO: 150871 - protein, 55 aa, Glycine max
  Clone ID: PAT_MRT3847_107260C.1.pep
SGEKEGLLQLPSDKALLSDPVFRPLVDKYAADEDAFFPDYAEAHQKLSELGFAAA

SEQ ID NO: 150872 - protein, 46 aa, Glycine max
  Clone ID: PAT_MRT3847_107261C.1.pep
LTDHSTHFHSSVLRKGKWGHALFSASKVILRKVGGEDPPSVVFSQP

SEQ ID NO: 150873 - protein, 123 aa, Glycine max
  unsure (1)..(123): unsure at all Xaa locations
  Clone ID: PAT_MRT3847_107262C.1.pep
FFFGILCVWFCYCFSCSRPAPCWSSTASVGPLLSQCLSALLESLADFLCLAMSVTAARPRWPFVSCLAGPVLWLPLLLWVVGWPWSLLFVLPKLCCVRGVRRHNVGWLFLLCVQCSPVLVXXS

SEQ ID NO: 150874 - protein, 75 aa, Glycine max
  unsure (1)..(75): unsure at all Xaa locations
  Clone ID: PAT_MRT3847_107263C.1.pep
ENVCRSLQHPYTLFRYSVIHCSCLSRIDVSCSLRHITCEIASARRRNRASMCCFWHVEAGLVSTKNNTFRXXGFG

SEQ ID NO: 150875 - protein, 60 aa, Glycine max
  Clone ID: PAT_MRT3847_107264C.1.pep
NYIMSLTTLLLVTFLGKSLNLKVYLMIELYLHNIILNLNTYLMIENIFSSVKVLVLRERL

SEQ ID NO: 150876 - protein, 127 aa, Glycine max
  unsure (1)..(127): unsure at all Xaa locations
  Clone ID: PAT_MRT3847_107265C.1.pep
TVRLHRFPSYNRVETREGWGLNLPWDIIARRMTTTAERWVGTQHXGRLXESVGGIQKCAPSMMPLXNKFFLRLHNXMVEEWYDCVNEEDFFEEVCLRAALNGVEGMHYMERIPSATSEGFSSCAFTH

SEQ ID NO: 150877 - protein, 45 aa, Glycine max
  Clone ID: PAT_MRT3847_107266C.1.pep
PRAPHTSKTVVRKSQGIHIGHARRLGGTKIMLQYLDLMISVIISV

SEQ ID NO: 150878 - protein, 354 aa, Glycine max
  Clone ID: PAT_MRT3847_107267C.1.pep
MPPSTIEGASSPSIVEDLQIMVRTRGLGRALGTVSGRGLGRGDHDDSDDSPQRRRPTASARRQRVPVTVTDEADVPATEIDVPGPDLASTEAGLDADEPMVEADIQDTGANTAAEDDVDTGAQAAEDEPEGFLGGPSDPSVLTEYADHVAGSVWTGEERPELKLSSHGRKMHSLGRPVPTIEGLVAGTGLSPLIACSIDTGDRGLLLSFVEQWHRETSSFHLPMGEVMIMLGNVASLLHLPMVGDLHAFQPVHMDDVVQMLALHDLNQTKRYAWGVAALVHMYDHLNDASISTSRQLGGYIMLLQCWIYEHFPSVAESTADPDYDEDSLCAGRWIAMKKTVKSIRTPTYRERLD

SEQ ID NO: 150879 - protein, 42 aa, Glycine max
  Clone ID: PAT_MRT3847_107268C.1.pep
HISLDFLTIPNNLSFHTSYALATSFTHNASHNLYHLNIHQLH

SEQ ID NO: 150880 - protein, 45 aa, Glycine max
  Clone ID: PAT_MRT3847_107269C.1.pep
SKKSISNRSEDWAIHHEGDDQSPKIGILKKRKASSWTDSKKALII

SEQ ID NO: 150881 - protein, 120 aa, Glycine max
  unsure (1)..(120): unsure at all Xaa locations
  Clone ID: PAT_MRT3847_10726C.1.pep
AATTVHRACACLGAPYTAPKSMAGLPPRETNIDITYIVTTSGRSQCLPVWPTVPMNKSETLSYLPYFADAQLAKEEYCVLKKGWISCLKFQMNLRRVYREHIESSXFYDGLYWTMWKLPM

SEQ ID NO: 150882 - protein, 156 aa, Glycine max
  Clone ID: PAT_MRT3847_107270C.1.pep
GYAREMQAFYRQDYEKYIQALDKAADKDRAQLTKAYQTAAVLFEVLKAVNRIEDIPVSDEIMEAHIKVEEQKQLYAPYNILPLDPNSGKEAIMRYHEIQASVSALRNTRGLPWSKEHGNKVNEDILDWLQLMFGFQIDNVENQREHLILLLANVHI

SEQ ID NO: 150883 - protein, 58 aa, Glycine max
  Clone ID: PAT_MRT3847_107271C.1.pep
LVRYDSLYIECGRHVSVLAAGKEAYVERRCGVSQSFSLLSSHSLHALDSEFTSAVVSS

SEQ ID NO: 150884 - protein, 152 aa, Glycine max
  unsure (1)..(152): unsure at all Xaa locations
  Clone ID: PAT_MRT3847_107272C.1.pep
DEAELFSKSAQHAYKQFRDKAALSRSMTVDKMEEVAQGRVWTGKDAASHGLVDAIGGLSRAVAIAKVRANIPLDRQVTXLELSRPSPSLPEILRGLGNSLVGVDRTFNELLQDLTFSHEVQARMDGIMFEKLEGYPYANPILALIKDYLSSL

SEQ ID NO: 150885 - protein, 80 aa, Glycine max
  Clone ID: PAT_MRT3847_107273C.1.pep
QAQSLPRPMKQPPTQPHHQPPLHMLNLTALWEQWCHLHPGCCRKPLFHCLIAVTIAALRLHHQGPILRWPSSGFNKINVN

SEQ ID NO: 150886 - protein, 482 aa, Glycine max
  unsure (1)..(482): unsure at all Xaa locations
  Clone ID: PAT_MRT3847_107274C.1.pep
MEKERPASWRPDPFHARPPPRDPMEFLSRSWSASALEVSKALSSQQLPPSSNNNVVCYVNNSNASIILEDIAGEVEESAATVSGNPFSFASSETSQMIMDRIFTFEFGQQEVSPRTSGRLSHSSGPLNGSLTDSPPVSPSEIDDFKYNRSNNNHNTVNMITGLNGQYWGAGGAATTAGGGKTVGRWLKDRKENXKEETRAHNAQLHVAVSVAGVALXMAAIAAATAASPCSVKHXYLAETDMAVASAATLVAAQCVEAAEAMGAERDHLASVVSSAVNVRSAGDITTLTAAAATALRGAATLKARVLKEVWNIAAVIPVEKNLGSGSGGGDNGNGSNGSSNSSFSGEIVPEENFLGICSRELLARGCELLKRTRTGELHWKIVSVYINRMNQVMVKMKSRHVAGTITKKKKNVVLGVIKDMPAWPGRHLLEGGENRRYFGLKTVMRGVVEFECRNQREYDVWTQGVSRLLSIAAEKNNKNRI

SEQ ID NO: 150887 - protein, 110 aa, Glycine max
  unsure (1)..(110): unsure at all Xaa locations
  Clone ID: PAT_MRT3847_107275C.1.pep
PLLSKKIVKKRVKKFKKPQSDRKISVKTNWLRPNGINSHVRKKFKGCTLIPNINYGSDNNTHHYLPNDFKKFIIHNIKDLELLIIHNKTYYXKITHNISTRKRKDVVDRA

SEQ ID NO: 150888 - protein, 101 aa, Glycine max
  Clone ID: PAT_MRT3847_107276C.1.pep
FYLFFFFSLLKAAPHRGSAICDESKGKLQEWLHACDFSILLHLNKLMWDPRTLISLSFSVRLKLHFSHKFLSDKTCTPTIAMLMVSLAHVNWSSLWLNNDL

SEQ ID NO: 150889 - protein, 73 aa, Glycine max
  Clone ID: PAT_MRT3847_107277C.1.pep
GQCERFHGDVERPLHITGARCDEMAKKLSNAEWVNIGVNELPDGATDFKGEAIRALALREKGKRFDGGGGSGK

SEQ ID NO: 150890 - protein, 66 aa, Glycine max
  Clone ID: PAT_MRT3847_107278C.1.pep
LNLFVTAHMPQVRPYRSSLFSKHFLIIVCFSSITIHVTLFLLSFVFCHRLTVYCLPYFYTIRPFSF

SEQ ID NO: 150891 - protein, 56 aa, Glycine max
  Clone ID: PAT_MRT3847_107279C.1.pep
SRMLWVSLPRVLSYCLRVLLDNAIYAFEVEWLIILGISTPLTKFGSLGECMNLCSR

SEQ ID NO: 150892 - protein, 41 aa, Glycine max
  Clone ID: PAT_MRT3847_10727C.1.pep
NLIFILQVVSKLNMYFFYETFNIPKHIFIYYKNTLLYSLNL

SEQ ID NO: 150893 - protein, 167 aa, Glycine max
  unsure (1)..(167): unsure at all Xaa locations
  Clone ID: PAT_MRT3847_107280C.1.pep
WQVWLEVDGRXIEIXKXXEGLIVLNIGSYMGGVDLWQNGYEHDDDXXLQSMHDKMLEVVCVCGAWHLGKLQVGLSQARRLAQGKAIKIHCSSPFPVQIDGEPFIIQPGYLEITHRGQAFMSRRTSEDEPKGRASAIMTEVLLDAECKGIINASQKKALLQEMAINLS

SEQ ID NO: 150894 - protein, 109 aa, Glycine max
  unsure (1)..(109): unsure at all Xaa locations
  Clone ID: PAT_MRT3847_107281C.1.pep
SITRGRDESNIHITGLFDDGRYKXWTKHDKNLALTEHDKMEESRNRGIPADXLAKGAHEFEKHDEHESLKDQTPADDKTYSTNVXNKIAKIMNLRQRAVGELKLLTDGK

SEQ ID NO: 150895 - protein, 46 aa, Glycine max
  unsure (1)..(46): unsure at all Xaa locations
  Clone ID: PAT_MRT3847_107282C.1.pep
FRPFRFFSACAVKGGALLLLLSXXXXLAFCPXXTGLHASTAGNYVC

SEQ ID NO: 150896 - protein, 94 aa, Glycine max
  Clone ID: PAT_MRT3847_107283C.1.pep
FFFFFFFFFFFFFFFFFCFFFFFLRGGTPQRGPQKRALTHFFFAPQRGGAPFLSIFRPIYKKGFFYRGSTGVNNIVLPCLKKLKRLFRPNPPFG

SEQ ID NO: 150897 - protein, 64 aa, Glycine max
  Clone ID: PAT_MRT3847_107284C.1.pep
IGTMLKKLIPTSNNFKLADKPYMTSLGHTKTNLTKGWVPMPGPLKHTLFLNAEECSGQTGGQPP

SEQ ID NO: 150898 - protein, 57 aa, Glycine max
  Clone ID: PAT_MRT3847_107285C.1.pep
MFLFSKFFYVKLVNFQPNENLLLSLLIRSKLRQNQSYMFDRRQNQLLTFTIVKPNTH

SEQ ID NO: 150899 - protein, 374 aa, Glycine max
  Clone ID: PAT_MRT3847_107286C.1.pep
TIEHDCSNDEFTAGAEDQVEHNSTIENDCSNDEFTAGAEDQVEPSSTIEHDCCNDEYSTTGAEDQVELSSTIEHGPNPDGCLVRHSDDPPEYEEKQSFASVNIDEKRHANVATDELTSWDECDGSSKLHYSERLLSTRKAISPSSEERLCKAVESVNLNHKNNLKCKEKLYFSEKTDKMNSTAEGLDDITGARLTDIFNKISVIPRSKRVSQPRGISKNAHSSRQATRIGCNSVQSCSKSAIAFTQQQMHDAECLAMRLTKELKSMKDIVDDMLRSEFCLNTSLRHKVNEARMAVKNATRAEEATKRCLAFMSRDCSRFCKIMKFADDSPSPQKPPPDVVRKERKKIAFADEAGGKLFQVKFYEDDAVSLSKSN

SEQ ID NO: 150900 - protein, 85 aa, Glycine max
  unsure (1)..(85): unsure at all Xaa locations
  Clone ID: PAT_MRT3847_107287C.1.pep
QVPDFYFTRFSSGAFYFLLLLSVYYIPNPLGLFFISPFFIYKKGNNFCCLYFLGLGFCTXFNKNTEVTSLCSSSTSCLSNSEQSK

SEQ ID NO: 150901 - protein, 88 aa, Glycine max
  unsure (1)..(88): unsure at all Xaa locations
  Clone ID: PAT_MRT3847_107288C.1.pep
RQFLFSDDALKEMPSMMGATYWEFDSDSCHIKMLGSTPEPPKGSXSSIDCDCSFANNTCHVIRMSISLYLILNALNFEVVYATVCIRI

SEQ ID NO: 150902 - protein, 139 aa, Glycine max
  Clone ID: PAT_MRT3847_107289C.1.pep
ITLLAPPAPHPRPHGSPLYTGHPPPPPGLLPLLMSSPHPVPAEPISRLPTGAGPLLFPPMSAVALVPPAISAGPPHECPPPPSRVRRPVRFCLYAPSEQLSLAPAVNIQGPRGSLVHFCNTNVTSMYLLHQTTPNSRTF

SEQ ID NO: 150903 - protein, 42 aa, Glycine max
  unsure (1)..(42): unsure at all Xaa locations
  Clone ID: PAT_MRT3847_10728C.1.pep
LGLLPLLCXCRXLALDLXFXGMEXFQVMFXXKIEEXXWXTKN

SEQ ID NO: 150904 - protein, 70 aa, Glycine max
  Clone ID: PAT_MRT3847_107290C.1.pep
KHIYLFFSKKNKKVFKGNKQVFLCSFCRAQTYDNATQNHEPKAFSRLCGGILIKAPLNWILVFPEGFPHP

SEQ ID NO: 150905 - protein, 128 aa, Glycine max
  Clone ID: PAT_MRT3847_107291C.1.pep
ESFCSDSRMLNFITIVVLLGCMVYTVVAAGRSWKATTAPHKVNMNRVTLGAGGYRQLSYKAPYGAVDIPRPRGEATLSCSLLHFLLVAVACCIFPPSIIMIVYSLCNLFVLTPFQHCIFIGSMCYVST

SEQ ID NO: 150906 - protein, 68 aa, Glycine max
  Clone ID: PAT_MRT3847_107292C.1.pep
KIPHPFNIPTTSILLTHHFNNSSIVIKYIKEHIFIHFNIYETSILLTFHKLHPPTHIYHYLTFFLPTN

SEQ ID NO: 150907 - protein, 339 aa, Glycine max
  Clone ID: PAT_MRT3847_107293C.1.pep
MASSNKMKTIKSTFLVLCLLASFLCPIKAHGGSSHDGVSESEDLHSRGLIVVKIWCLIIFLVSTFAGGVSPYFYRWNETFLLLGTQFAGGVFLGTSLMHFLSDSAETFGDLTSKSYPFAYMLASSGYLLTMLGDCVITIVTRNSNREAKVVELEGGTTPQEHDLARDHCAVAETTNPVLLKTSSLGDTILLILALCFHSVFEGIAVGVAGTKADAWRNLWTISLHKIFAAIAMGIALLRMLPKRPFVTTAAYSLAFAVSSPIGVGIGIAIDATTQGSTADWMFAITMGIACGVFIYVAINHLISKGFKPQRTMRYDTPLFRFVAVLSGVAVIAVVMIWD

SEQ ID NO: 150908 - protein, 118 aa, Glycine max
  unsure (1)..(118): unsure at all Xaa locations
  Clone ID: PAT_MRT3847_107294C.1.pep
DKWCTQSLAISADIGFDXNCNRSXXXAKEYGXXDXLVXXAAXQRLTNSXXEITXQXFXXVFGTNXXSXYXWXIMLMKHMKXWSCVINSTXVNAYNGNPESFDYTGFQGANCXFTRGLF

SEQ ID NO: 150909 - protein, 85 aa, Glycine max
  unsure (1)..(85): unsure at all Xaa locations
  Clone ID: PAT_MRT3847_107295C.1.pep
IFTRYQELKERYGMNISAGGLSDNDTTLHLAVYTLPFGGGGESAIGAYHWKFLFEAFSHXRTSLYRQFNGDAPVRYLPFTIADVY

SEQ ID NO: 150910 - protein, 67 aa, Glycine max
  Clone ID: PAT_MRT3847_107296C.1.pep
ICSPLKVSQYGQSGRLASWLVLYVEPILLFSWVDLGHPHGQKWNAITCTSPYTLLFFYENVMKNKDR

SEQ ID NO: 150911 - protein, 93 aa, Glycine max
  Clone ID: PAT_MRT3847_107297C.1.pep
HPPQCLKSLVPTGGGFTTKTPFYPGSSRDVPKNGNFLLVSCPSTNTPFCVCRCSWVLWRVKQVGRSLGKKTFYRLVFLKNYKKKKKTKKEQKK

SEQ ID NO: 150912 - protein, 51 aa, Glycine max
  Clone ID: PAT_MRT3847_107298C.1.pep
IDISHHPLSVLGISVLFVYGHSLWLGLQQICSFHSVVNRLCRNNSYHSVSD

SEQ ID NO: 150913 - protein, 374 aa, Glycine max
  Clone ID: PAT_MRT3847_107299C.1.pep
MTEMIRNERREFDPFPMYGTENNRDDSERTAFRRAEKKYKLYYDYNASSKNKKKKQPKPVDLAEVLDFRSILECYHQNAVLPSGVIVLHDKFTSPVFALQNRPGFYFIPGALSIEKQCSLIRESLTDFPQPPNRTNHNALYGPIQDLFVAAKEGKLLVEDNSPITSSETYADIDHRDDKEWKFTTEKDMSLRKCRTVSASVLLRKLRWSTLGLQFDWSKRNYDVSLPHNKIPEALCELSKQLAKPALPGGVEFRPDAAIVNYFGLGDTLGGHLDDMEADWSKPIVSLSLGCKAIFLLGGKSREDTPLAMFLRSGDAVLMAGDARECFHGVPRIFTDKENAEIGHLETRLTHEDDICFLKYIQTSRININIRQVF

SEQ ID NO: 150914 - protein, 116 aa, Glycine max
  unsure (1)..(116): unsure at all Xaa locations
  Clone ID: PAT_MRT3847_10729C.1.pep
AQIRCKLCAKVNDEESERCNLQRSLEVNKGAGNFHDRTGKXFLHSSIFLADILTLQNNHYNIIHRINKLSFGHHFPXLINPLDDVKCVQRPTHFIYHYFIIIVPTIYTYIKSLVIH

SEQ ID NO: 150915 - protein, 101 aa, Glycine max
  unsure (1)..(101): unsure at all Xaa locations
  Clone ID: PAT_MRT3847_1072C.1.pep
FNSEKVASLAYARIQGKXSLIAHFQNSSLMNEDKRCRPILFHTDGPNAGDPEPFPMGANIRLRPGKSRTAGNEENRSQGSPSTLSSGEESANGIDSSKISN

SEQ ID NO: 150916 - protein, 35 aa, Glycine max
  Clone ID: PAT_MRT3847_107300C.1.pep
HYVLELLIVSSYGHTDLVFHSTIELTRAGSSFKFT

SEQ ID NO: 150917 - protein, 64 aa, Glycine max
  Clone ID: PAT_MRT3847_107301C.1.pep
MIIAFGATAPAARGLIKGGTLMSLAEISTTTTSYQRLLLMISMMGGRLSIPMDPFFLYLKKKQQ

SEQ ID NO: 150918 - protein, 64 aa, Glycine max
  Clone ID: PAT_MRT3847_107302C.1.pep
STTSPSSSSIMAQFKGKYHEALMVNISYILTHAAGATFDNDRHGQHYRVWLASTYRACPSAGAM

SEQ ID NO: 150919 - protein, 90 aa, Glycine max
  Clone ID: PAT_MRT3847_107303C.1.pep
WCSSSSTFHLLSPLQRDHPTSKDLRLAPKAEQLIRGLHLSPEVRRFSWSHKDPLCALWSSSAPNGAGATFETALAARALRKQPAQLDRTR

SEQ ID NO: 150920 - protein, 126 aa, Glycine max
  unsure (1)..(126): unsure at all Xaa locations
  Clone ID: PAT_MRT3847_107304C.1.pep
LLQKLGVGCTXVAPGFECLSVIGPPGCFIQVLFLDLPTPDLKGFEGPPRIRKFKSGTXPMIVPLPPRAKKNLWEKCTQVGIKGVTPHPVLWHGIASEPKKIPLQGKNVLLKWKGGGKLYPLSLPRI

SEQ ID NO: 150921 - protein, 44 aa, Glycine max
  Clone ID: PAT_MRT3847_107305C.1.pep
GGHIGFWRPSNPREGFLSKWAGSFGMGQNQFWNPITGLARIGSS

SEQ ID NO: 150922 - protein, 85 aa, Glycine max
  Clone ID: PAT_MRT3847_107306C.1.pep
PVLKKTNKGFTFNRKGGSPPEKFPGRFPAGGSLGQRNFGWAQFSPVGLAYNPTPFAYVVLKIQKRAAKLVKAAFNEMEVLPSFSE

SEQ ID NO: 150923 - protein, 88 aa, Glycine max
  Clone ID: PAT_MRT3847_107307C.1.pep
CRPFFFFFFLFFFFFFFLFFFFIFFFFFFYREPQKRLIPFKPQVNKQMGPIQGFEKRKAPLGNATKIPVPVGKGKPKTVPPLKVQNLN

SEQ ID NO: 150924 - protein, 42 aa, Glycine max
  Clone ID: PAT_MRT3847_107308C.1.pep
DHGLGGSQCTAIYCNRVEHQEPVGCHCRKRSKMYLTRSRTIV

SEQ ID NO: 150925 - protein, 44 aa, Glycine max
  Clone ID: PAT_MRT3847_107309C.1.pep
RDPTSQARFFVNSPCLSILFAGISMLDDFFFTREPFKPKRNPSL

SEQ ID NO: 150926 - protein, 45 aa, Glycine max
  Clone ID: PAT_MRT3847_10730C.1.pep
LYVLRLKLNCYMHCKTWGISADNTLAGHIAGFTLICACKFYWVNV

SEQ ID NO: 150927 - protein, 127 aa, Glycine max
  Clone ID: PAT_MRT3847_107310C.1.pep
PYVFFWEISGEASQEVLGGCSTCLAKSLVDAGYPGSRKVNGIGAPELRVVRRGPFPEVLGHSLALGAAVSRFKTSRWVGPPNPKVLQILNENVVKNYLSTAFNWVVRKAISIYLSIYRYIYMVPFLH

SEQ ID NO: 150928 - protein, 321 aa, Glycine max
  Clone ID: PAT_MRT3847_107311C.1.pep
MSKVVCVTGASGAIGSWVVLLLLQRGYTVHATVQDIKDENETKHLEEMEGAKSHLHFFEMDLLDIDSIAAAIKGCSGVIHLACPNIIGQVEDPEKQILEPAIKGTVNVLKAAKEAGVERVVATSSISSIMPSPNWPADKIKAEECWTDLEYCKQKGLYYPIAKTLAEKAGWEFAKETGFDVVMINPGTALGPLLPPRINSSMEMLVSVLKGGKETYEDFFMGMAHFKDIALAHILALENKKAAGRHLCVESIRHFSDLVDKVSELYPEYDVVKLPKDTQPGLLRASTKDASTKLIDLGLEFTPVDQIIKDAVESLKSKGYV

SEQ ID NO: 150929 - protein, 118 aa, Glycine max
  unsure (1)..(118): unsure at all Xaa locations
  Clone ID: PAT_MRT3847_107312C.1.pep
ADTRYGIIKLQFTLACIKMGRNLXHKTVSIQKKRVFQRRDGAYFTTPHGRFIGKQSRLMQTWTIAGFVTSKMLLENPEKASLLFWEEDFELLQNCVCKLSKSGRRKCSRFAARSQFIV

SEQ ID NO: 150930 - protein, 39 aa, Glycine max
  Clone ID: PAT_MRT3847_107313C.1.pep
CLININNLLSVTGDGTRSETSFNIKYAEEVIVHITHYGP

SEQ ID NO: 150931 - protein, 48 aa, Glycine max
  Clone ID: PAT_MRT3847_107314C.1.pep
CWFGYGFLFYIIIFIEKLNLILYIIVGFSKYFTDWDCGGLPVRGYLSE

SEQ ID NO: 150932 - protein, 68 aa, Glycine max
  Clone ID: PAT_MRT3847_107315C.1.pep
SAMSSTTPPWNGNEDPVGADGQEWTLLSKEGLYHCQIATLCSCPRGTETVPAHVRLLMKTVKPLYSHE

SEQ ID NO: 150933 - protein, 102 aa, Glycine max
  unsure (1)..(102): unsure at all Xaa locations
  Clone ID: PAT_MRT3847_107316C.1.pep
AFIGHLRITKVSHHCLSTPICKALNHFDFPIPDTLCHFNTLWTFLTSNQVFYFPRSFIICFPLGSVLLSLSYPPSISLILLRLYLNPPPPPPPKRRYXTRGA

SEQ ID NO: 150934 - protein, 70 aa, Glycine max
  unsure (1)..(70): unsure at all Xaa locations
  Clone ID: PAT_MRT3847_107317C.1.pep
FWPRSFGMTCMIALAEKGITYEFKDXDLMNKSPLLLQMNPVHNKIYNLIHNGKPIRESLIAALYIDEVLN

SEQ ID NO: 150935 - protein, 56 aa, Glycine max
  Clone ID: PAT_MRT3847_107318C.1.pep
VPGTNSRVNTGVSKASKRGHAGVATNTSCICIVRPLLDANGHDLILSDSSDDQIDS

SEQ ID NO: 150936 - protein, 71 aa, Glycine max
  Clone ID: PAT_MRT3847_107319C.1.pep
MAMKMLIDGEAELAQGGGEQVSNFDFDLFIIRAGSRGVRVARSSSTFGAKVGTCELPFHAIRSEQLVESVE

SEQ ID NO: 150937 - protein, 79 aa, Glycine max
  unsure (1)..(79): unsure at all Xaa locations
  Clone ID: PAT_MRT3847_10731C.1.pep
KERNRTELGEXSAXXXQLXXXXAXXXIPXFPVGKKXGXXNESSTWESLNLXEKYLLRFRALEKISLIIEPNXMSXPPHP

SEQ ID NO: 150938 - protein, 210 aa, Glycine max
  unsure (1)..(210): unsure at all Xaa locations
  Clone ID: PAT_MRT3847_107320C.1.pep
MGLKKCRHHSFQRRNLLXLILGAIAAFVVLILLVIFLIWVILRPTKPHVRLHVYASYLSTPTPNTLTLTMQVTLSSHNPNARIGVYYHALRVYASYRSQQISLATALPDTYQGHRDFAVWSPFLFGNVVPVSPFVLTSLQQDQSAAGAVVVNVKVNGRVKWKVGSWVSGRYHIYVNCPAYISFAGDRSNVAGVVASPVKFRLLQSCSVDV

SEQ ID NO: 150939 - protein, 668 aa, Glycine max
  Clone ID: PAT_MRT3847_107321C.1.pep
MSPSNSPVAAETLFSGTVFLILLHLSLFLTPTLSLDFLFNSFAGVTNLTLIKDARVDASVIRMNNDSNQYSYGRAFYPVKIPMLKTNTSNNSSSISSFSTSFVFSILPQISTSPGFGLAFVLSNTTDPPGAIASQYFGLFTNATSPSVFPLVAVEFDTGRNPEFNDIDDNHIGIDLNNIESINATTAGYFNSSGAFVPVRMRTGQNIHAWIDFDGENLEFNVTVAPIGVSRPTKPTLRYQNPAIADYVSSNMYVGFSASKTNWIEAQRVLAWSFSDSGPARELNTTNLPVFELESSSSSLSNGAIAGIVIGSFIFVLICASGFYLWWRMNKANEEEDEIEDWELEYWPHRFSYEELSYATGEFRKEMLLGSGGFGRVYKGTLPNNTEIAVKCVNHDSKQGLREFMAEISSMGRLQHKNLVQMRGWCRKGNELLLVYDYMPNGSLNKWVFDKSDKVLGWEQRRRILVDVAEGLNYLHHGWDQVVIHRDIKSSNILLDADMRGRLGDFGLAKLYTHGEVPNTTRVVGTLGYLAPELATVAAPTSATDVYSFGVVLLEVACGRRPIETSVAEEEVVLIDWVRELYAKGCAREAADLRIRGEYDEGDVEMVLKLGLACCHPDPQRRPTMKEVVALLLGEDPPEAPGKVLSDLVRGGEDSDEAAPLQPSPPPV

SEQ ID NO: 150940 - protein, 217 aa, Glycine max
  Clone ID: PAT_MRT3847_107322C.1.pep
MGTGSTLAGKEVPIVGSDAVRWIDLSVPSSSNIAAVDGVAALPTTDDRASCFVIGDPPTYLIWRIHKAQPQSLELLELAASKEFPRVGLRFTFPDALCPFAFIGKNEISGASRFPYLLYVLTVSGVAYLLKIRNVSAYTSVSVFPVDELLEVNVRDYIPNHATAITTVMATVGGLVVGTSDGSVFCFQLGVVDPSAPGFMHELRDEAGISRLWGLIS

SEQ ID NO: 150941 - protein, 83 aa, Glycine max
  Clone ID: PAT_MRT3847_107323C.1.pep
GTVNDMKSILGLSFAHLNYDIALLSLLPNVMTHPHLLMPISVLTYLPFDCKDSLEAVYCLLERGRVKKIHCINHCLASVAKTL

SEQ ID NO: 150942 - protein, 62 aa, Glycine max
  Clone ID: PAT_MRT3847_107324C.1.pep
ALYQYSCTTSSYSITKLYSLSHPLNYTYASINSRIGILSILIEEISVNSDNIALNSSPPGSP

SEQ ID NO: 150943 - protein, 74 aa, Glycine max
  Clone ID: PAT_MRT3847_107325C.1.pep
HVNTSFLFTAILNKFLPELVGIIVRDYCLYISYIALIDWAKLFRTSRVSYKLIQSIEYNFSIFPPERIKHHHNS

SEQ ID NO: 150944 - protein, 54 aa, Glycine max
  Clone ID: PAT_MRT3847_107326C.1.pep
FYSVSISFLQEFYGGKKDLAKFKSDVESFICSVMPASSSLQIKTTPGIYVYIIN

SEQ ID NO: 150945 - protein, 84 aa, Glycine max
  unsure (1)..(84): unsure at all Xaa locations
  Clone ID: PAT_MRT3847_107327C.1.pep
SRASHLFHAYPCFNLFLLXKSFNNNFFCKXLAXIASYKLLSTLSLPPHYHTHYSSHLEQHHENYRNLTMANLIYFNLETKPDII

SEQ ID NO: 150946 - protein, 33 aa, Glycine max
  Clone ID: PAT_MRT3847_107328C.1.pep
FPTGKTDCSVCHSSTGVFCRACLKIRYGECEKK

SEQ ID NO: 150947 - protein, 132 aa, Glycine max
  unsure (1)..(132): unsure at all Xaa locations
  Clone ID: PAT_MRT3847_107329C.1.pep
KSNQINTXSVECXMTAIIASNAGTEKRISNSDIIVSCIQGMSMGWVVLPLYPSPFTLTGIQTGNGYPCAYPVKNHYEITKNHNIYVIFNRQINEYPWGGYYNTRTHPSSILIRQWKYGIRDGLLDKYSLKTQ

SEQ ID NO: 150948 - protein, 183 aa, Glycine max
  Clone ID: PAT_MRT3847_10732C.1.pep
SRRKPFSDRTNTCSPSLVPLKPHKTITNPSSSAPAKCNTAATITTTTTTTTNLHNSPNPPSPSPSPLEIVDVEASEPITVVYSRRRSSNKRKRDKGKAVAVPFTTTPNFKISHTCEKDDEFEGANLPKAKAMTVPRTKKQRALSSEKDEFKDHQLQEFIQKQKAYFKEIDEFELEVESGDELD

SEQ ID NO: 150949 - protein, 59 aa, Glycine max
  Clone ID: PAT_MRT3847_107330C.1.pep
TPCVSQEQRLSPLMYVQTNCLIQTGYIYLDVRTVEEIKKGHVFSNNVLNISYMLDTLNG

SEQ ID NO: 150950 - protein, 57 aa, Glycine max
  Clone ID: PAT_MRT3847_107331C.1.pep
FLHPKFYVFVLNNDTETIINHSKHHISIHHLIISIFLSLYTAFYIHFYLSIFISLSY

SEQ ID NO: 150951 - protein, 71 aa, Glycine max
  Clone ID: PAT_MRT3847_107332C.1.pep
GTMVVDPRTPCTKKKKEISFSVKTKVTGRVNIKIKNFSLEVGKPMCDQLGTGWICWLVRITNGPEVTNELQ

SEQ ID NO: 150952 - protein, 180 aa, Glycine max
  Clone ID: PAT_MRT3847_107333C.1.pep
TCLMLDLRGRFQMRFFTSEDGGCGIPNTLMRCFTESSPSLILRTNPVEGSDTKSLCGGPNNFFGVLLNSIWKYSVLEIDARQTEAALLKKGLKLNGLGLLGPLYSFVEEDYSHLFVSCLFLLLYLVCYFLGALFLWGVVYPIWLVIGYVGDKLRISFFFFLNLACNCVVYIVNFLVVTSF

SEQ ID NO: 150953 - protein, 362 aa, Glycine max
  Clone ID: PAT_MRT3847_107334C.1.pep
MWVRGVNFFETLLEASKEQNQRFSISSDKSAIYSVGIRPHELSHIQQLTGFSLGDFPFRYLDVSLLSSRLNVCHYAPLLSKITGLIQGWSKKSLSYAVCSPKKEGGLGFFNLKDWNLALLSRILWDFHYKKDSLWVRWVHHYYFRGSDVWNYNTSSSDSVLIKKIIQIRDFIISKELSTEDAKKRIQSWSTNEQLLVGKVYEYIRGVKPTVSWCSVIWNPAIPPKMSFILWFVKRNQLLTLDKVAFLNKSSLCPLCSNEYESNAHLFFSCRKSLQVLAHIRDLAPFRKRFISLQRITDSLIRDISTSGVQGKFRYLTIAITVYCIWLSRNKLIFEDYQFPVIEVISKIKFLMYRQAHLLHLF

SEQ ID NO: 150954 - protein, 45 aa, Glycine max
  Clone ID: PAT_MRT3847_107335C.1.pep
GGRPFFCFFFLFFPGTPHLMKLLEAPCKCSKEPDHHLIIKPYQNF

SEQ ID NO: 150955 - protein, 279 aa, Glycine max
  Clone ID: PAT_MRT3847_107336C.1.pep
MECVSSTSFSVAVNESIYDHFKGQRGLRQGNHLSPYLFVLCLEYFSRYMSNLKDDANFKFHPNCAGIQLSHLAFANDIMLLSRGDIPSVSTMFAKLQHFCRVSGLSISSDKSAIYSAGIRPHELSHIQQLTGFSLGDFPFRYLGVPLLSSRLNVCHYVPLLSKITSLIQGWSKKSLSYAGKLELIRAVIQGIVKFWMRIFSLPQSVLDQIKTSCRNFLWGKADIGKNKSLVAWERCVELQYFFIRFSFDKENHSNKGLYYLEGAKYGRDQKEDSILEHQ

SEQ ID NO: 150956 - protein, 61 aa, Glycine max
  Clone ID: PAT_MRT3847_107337C.1.pep
LVILSLSPAYLLIAKASITQALSRLKPTLATYITYSLYHDRPFLLTYIYNYIFIHSANASC

SEQ ID NO: 150957 - protein, 566 aa, Glycine max
  Clone ID: PAT_MRT3847_107338C.1.pep
MAGICCGVVGEGDTPAPLEPTPRPSRRRSLDILPLKYIADMPMPPPEALRKRPKLNLRDCDNAIENCDESTGHKVTKKESKVDYDDDVVSETKNVTVSEVEEESPKFGVTSVCGRRRDMEDSVSVRPCFTQGFHYFGVFDGHGCSHVATMCKERLHEIVNEEIESARENLEWKLTMENGFARMDDEVHRRSQSNQTFTCRCELQTPHCDAVGSTAVVAVVTPDKIVVSNCGDSRAVLCRNGVAIPLSSDHKPDRPDELLRVQSKGGRVIYWDGPRVLGVLAMSRAIGDNYLKPYVISEPEVMVTERTEEDECLILASDGLWDVVSNETACGVVRMCLKAQKPPGSPGSDVAADGSDRACSDASILLTKLALARHSSDNVSVVVVDLRRDQRQSSNYNDDFVKDGKTKSEGGGAWFSISSDKSAIYSVGIRPHELSHIQQLTGFSLGDFPFRYLDVSLLSSRLNVCHYAPLLSKITGLIQGWSKKSLSYAADIGKNKPLVAWLVVCSPKKEGGLGFLISRTGTLRFFPVSCGTFIIRKILYGFGGFTITISEGAMCGITILLHQIQF

SEQ ID NO: 150958 - protein, 38 aa, Glycine max
  Clone ID: PAT_MRT3847_107339C.1.pep
IFYLLYENEKKDKLYFGKSLMRQNHSNHTVTLFRLRIN

SEQ ID NO: 150959 - protein, 41 aa, Glycine max
  Clone ID: PAT_MRT3847_10733C.1.pep
KLNFQSGDDNKAKSCQHTVIRCFSSDGAYEFCKETTLNYVM

SEQ ID NO: 150960 - protein, 411 aa, Glycine max
  Clone ID: PAT_MRT3847_107340C.1.pep
MLKSIDFLAQFCTWIMECVSSTSFSVAVNESIYDHFKGQRGLRQGNHLSPYLFVLCLEYFSRYMSNLKDDANFKFHPNCAGIQLSHLAFANDIMLLSRGDIPSVSTMFAKLQHFCRVSGLSISSDKSAIYSAGIRPHELSHIQQLTGFSLGDFPFRYLGVPLLSSRLNVCHYVPLLSKITSLIQGWSKKSLSYAGNGVWNYNTSSSDSVLIKKIIQIRDFIISKELSTEETKKRIQSWSTNEQLLVGKVYEYIRGVKPTVSWCSVIWNPAIPHKMSFILWLAKRNRLLTLDKAVFLNKGSLCPLCSNEAESNAHLFFSCRKSLQVWAHIRDLAPLRRRFTSLQRITDSLIRGRSTSGVQGKLRCLAITITIYCIWLSRNKLIFEDYQFSVIEVISKIKFLMYRQAHLLHLF

SEQ ID NO: 150961 - protein, 230 aa, Glycine max
  unsure (1)..(230): unsure at all Xaa locations
  Clone ID: PAT_MRT3847_107341C.1.pep
LNRVLQNEIVWKVGCGDKFRFWEDKLVGEGETLMRKYPRMYQISCQQQQLIQQVGSHTETTWEWKFQWRRPLFDNEVDTTIGFLEDTSRFPIHRHLADCWVWKSEPNGHYSTRSAYHLMQHEAAKANTDPAFEEIWKLKIPAKAAIFAXRLVKDRLPTKNNLRRRQVQLNGTLCLFCRNYEEEASHLFFSCTKTQPVWWESLSWINTSGAFSANPRHHFLQHSFGLLGLK

SEQ ID NO: 150962 - protein, 313 aa, Glycine max
  Clone ID: PAT_MRT3847_107342C.1.pep
MECVSSTSFSVAVNESIYDHFKGQRGLRQGNHLSPYLFVLCLEYFSRYMSNLKDDANFKLHPNCAGIQLSHLAFANDIMLLSRGDIPSVSPMFAKLQHFCRVSGLSISSDKSAIYSAGIRPHELSHIQQLTGFSLGDFPFRYLGVPLLSSRLNVCHYVPLLSKITSLIQGWSKKSLSYAGKLELIRAVIQGIVKFWMRIFSLPQSVLDQIKTSCRNFLWGKADIGKNKSLVAWSVVCSPKKEGGLRLFKSQGLKPCVSFPYPVGLSLERCVELQYFFIRFSFDKENHSNKGLYYLEGAKYGRDQKEDSILEHQ

SEQ ID NO: 150963 - protein, 86 aa, Glycine max
  unsure (1)..(86): unsure at all Xaa locations
  Clone ID: PAT_MRT3847_107343C.1.pep
HSSSWIQIASNGKSTGKSIHDCMLPWLELGHIYPDLRRRQILAQNDHFRTFIKXPKTFDRVPKCPNHLESFIKIVKLPLPKIDHLP

SEQ ID NO: 150964 - protein, 103 aa, Glycine max
  Clone ID: PAT_MRT3847_107344C.1.pep
ASAGGCKTSRLPSKPESEILMPLSTPRLSAETPPLSVNMTPTAVRKSPRPYAYAPGKQLTRAAKGYELQNPLILAQHDLKRAKDRLMQADNEKLKAVCDLTEA

SEQ ID NO: 150965 - protein, 284 aa, Glycine max
  unsure (1)..(284): unsure at all Xaa locations
  Clone ID: PAT_MRT3847_107345C.1.pep
ICSNILFFLHKYGVRYLGVPLLSSRLNVCYYAPLLSKITDLIQGWXSYAGKLELIRAVIQEIVNFWMGIFPLPQSVLDRINASCRNFLWGKTDIDKNKSLVAWSVVCSPKKEGGLGLFNLKDXNLALLSRILWNFHCKKNSLWVRXVHHYYFRGSDMWNYNTSSSDSVFIKKIIQIRDFIISKELSTEEAKKRIQSWSTNEQLLVGKVYEYIRGVKSTVSWCSVIWNPTIPPKMSFILWLAKRNRLLTLDKVAFLNKGSLCPLCSNEVESNAHLFSSCRKSLQV

SEQ ID NO: 150966 - protein, 69 aa, Glycine max
  unsure (1)..(69): unsure at all Xaa locations
  Clone ID: PAT_MRT3847_107346C.1.pep
GSSAVTCSIAAIGIDLIAGGKRHRXNRTVALSTDIDLKVLVKLYAVIVRRTGSNFNAVIIKRLFMSNVN

SEQ ID NO: 150967 - protein, 183 aa, Glycine max
  Clone ID: PAT_MRT3847_107347C.1.pep
MAKNALLNLYLLAFNGASCAGWAYVLYLTVTTVLQAHEAGQDWSQVAQSTWDVVSLPLKVVQTMAVMEIVHAAVGFVRSPLGSTLMQVSSRLWLVWAINVLCPVSRYQFGFPLMVASWGLVEVPRYSFYALNLYNAVPGFLFFLRYHLFMVLYPSGVLGEVLCMVSSLSFLSTGAYAIQLPNT

SEQ ID NO: 150968 - protein, 43 aa, Glycine max
  unsure (1)..(43): unsure at all Xaa locations
  Clone ID: PAT_MRT3847_107348C.1.pep
REMILLGVSSFRDIXSALIAVLGQYVSYGPIGPNPAELRARIL

SEQ ID NO: 150969 - protein, 38 aa, Glycine max
  Clone ID: PAT_MRT3847_107349C.1.pep
PTGPMGRVSNGFPSTSKSPLPKKGWVTHFKKFVSQVKI

SEQ ID NO: 150970 - protein, 58 aa, Glycine max
  unsure (1)..(58): unsure at all Xaa locations
  Clone ID: PAT_MRT3847_10734C.1.pep
FTPNFIKSYKIATSLWKNIXNHNRRRRSEQHPDEIFDLVSLFNSQFHKKIKXXNCNML

SEQ ID NO: 150971 - protein, 137 aa, Glycine max
  Clone ID: PAT_MRT3847_107350C.1.pep
FGRLSIVSWTFSAAPLAQRLFWIPGMASPKNLVGVRPFHSSKCSSRFITIVVGFSCFQCWFRFILYLLVGVCFWYQCFLGHLHYVLSLSLVHMIMSSFCFFCVLVRFTHDVQRAMVASINKSSRSRATAVRSTGSGL

SEQ ID NO: 150972 - protein, 87 aa, Glycine max
  Clone ID: PAT_MRT3847_107351C.1.pep
NYTFSKNTDPRVIKQDTCTLLYLLYILHLSCQTTFPLDKDNSPSFAKNTGSHHFGFNNPIQLKPQFLTFNFPSISVLPFESSVKLYG

SEQ ID NO: 150973 - protein, 131 aa, Glycine max
  Clone ID: PAT_MRT3847_107352C.1.pep
SVVENSASMLGDSSIPAMTLLLGANLLNGLKRSGMKFSLLVGIIVIRYIALPILGVVIVKGAIHFGIIHHDPLYQFVLMLQYALPPATSISTITQLFGARHPASAIVMLATYVCASFSLTLWSTLFMWLVL

SEQ ID NO: 150974 - protein, 67 aa, Glycine max
  Clone ID: PAT_MRT3847_107353C.1.pep
SCYVLNGTGPTLKRSQNRDYHKYEKAEQDAVNQVALNYIYSASLGSSQEYPFVIQNFISTTRAHIFS

SEQ ID NO: 150975 - protein, 126 aa, Glycine max
  unsure (1)..(126): unsure at all Xaa locations
  Clone ID: PAT_MRT3847_107354C.1.pep
CQQVAPYNTFYSQLEKHMNEVGIVPTVNRWDEPLALGMVDPHDSLSHPAGVSDVQAESATRVDPDQXIFNIHICFFSVCIVVMQIPNWFGGESTGATKGNPFTLPDAYMVSQHKNVCVVLIDLYIN

SEQ ID NO: 150976 - protein, 44 aa, Glycine max
  Clone ID: PAT_MRT3847_107355C.1.pep
LNINRIDFFFELVQEKMNALFYKTNLVNQIISTKPVGLTKLNFI

SEQ ID NO: 150977 - protein, 88 aa, Glycine max
  Clone ID: PAT_MRT3847_107356C.1.pep
GTTRPVSPAVYLLQKIVMGKFFEHDFQVLGFSRTFYLIHFSPIIKVEFPPDFALILGFCIITSSPNQPPCVFGKWLNGYAKQVTLFQF

SEQ ID NO: 150978 - protein, 45 aa, Glycine max
  Clone ID: PAT_MRT3847_107357C.1.pep
KASNLDLMIFLEKVMPPQAKVRGMKIKKGPFYPLILVGWFRMGFL

SEQ ID NO: 150979 - protein, 77 aa, Glycine max
  Clone ID: PAT_MRT3847_107358C.1.pep
QGRGRWDLAVQERAARSQCTYSNPEGTVVLACDQAQCRWLNVQLSPWQGSLGLQYNASQEWDLRSSCGSLRLNRVYR

SEQ ID NO: 150980 - protein, 61 aa, Glycine max
  Clone ID: PAT_MRT3847_107359C.1.pep
HLGFSQFVLLVVPVIIIYIPSNSCCAIAIVRLSTLANMMGKRKRWPRNASTSSIVRRATTS

SEQ ID NO: 150981 - protein, 146 aa, Glycine max
  Clone ID: PAT_MRT3847_10735C.1.pep
PPPYPWEGPLFPPAGVTPPRWEPQIVFPGPTPFWTSLTPLPLVGPPGLPPRFFLLGSQVLPPRQALWGFFLKGGAFIGALRGPVTLWPWEFGFPGHWGFILDNLGFILGYKGVLSFPPWGGPPEGTFYPRLGFGRYFFPQTKVYFL

SEQ ID NO: 150982 - protein, 76 aa, Glycine max
  Clone ID: PAT_MRT3847_107360C.1.pep
LFWSGTSFTLNLTLSGSMNGRTLVENRHAQTETTPTTSGGGIEHTTLEHAFPTLPHVAHNASLCKGKELKTTWSKT

SEQ ID NO: 150983 - protein, 56 aa, Glycine max
  Clone ID: PAT_MRT3847_107361C.1.pep
WGFFSLSKLIIRDKLFDEIASTIAFNHVLSSDATCQLSTTLWFQLEIYTPLCSSSS

SEQ ID NO: 150984 - protein, 75 aa, Glycine max
  Clone ID: PAT_MRT3847_107362C.1.pep
LFPHTQNILTIATLKKKQQKNKHFNEASNNQRNKKTKNGRDHSVQRGNRHAWQSPQREKALHSGLLSLNFMESSP

SEQ ID NO: 150985 - protein, 79 aa, Glycine max
  Clone ID: PAT_MRT3847_107363C.1.pep
MGKPWTLSLSSLRLLLLSSACYAISYSKLNECQLNNLNALEPDHLVKSEWGLIQTWYCQHPELKCSDRTVSKLTLNRNG

SEQ ID NO: 150986 - protein, 503 aa, Glycine max
  Clone ID: PAT_MRT3847_107364C.1.pep
MGLVFTKWACAFLLCCCLITSGGLHGGSKVRGVNLGGWLVIEGWIKPSLFDGIANGDMLDGTEVQFKSVTLHKYVSAENGGGMNVTVDRDVPSSWETFRLWRASESEFQFRTSEGQFLTCDGGGCSVSATAKSPSTSETYGIERNGKNRIHLKIKGGAYLQATTNGQLTADYPGAPGWDDNAATFEMTIVSNKLHGDYQLANAYGHGRAKDILRRHRNSFITIEDFKFLYKHGINTVRIPVGWWIAYDPDPPSPFIGGSLEALDNAFSWAQEYDIKCIIDLHAAPGSQNGMEHSASRDGFTGWPTSPDYISDSLYVIEFLVSRYARNPALLGIELLNEPSAATVSLDVLISYYKQGYQIVRKYSSSAYVIICQRIGVADPMELYQANIGSHNLVLDLHFYNLFDTFFNNMSAMDNIQYIYKSREGEWVNEWNVTNGSQKDYQDFARAQLDVYNAASFGWCYWTLKNDEKHWDFEWSIRNNYLQLGKLYTFGGKLALPLLHVHL

SEQ ID NO: 150987 - protein, 45 aa, Glycine max
  Clone ID: PAT_MRT3847_107365C.1.pep
TPTGFFYFVFPESTRMQLVNQFGNRLFHWASEVTYVHAYSSMSDT

SEQ ID NO: 150988 - protein, 533 aa, Glycine max
  Clone ID: PAT_MRT3847_107366C.1.pep
MGLVFTKWACAFLLCCCLITSGVYSVEGLHGGSKVRGVNLGGWLVIEGWIKPSLFDGIANGDMLDGTEVQFKSVTLHKYVSAENGGGMNVTVDRDVPSSWETFRLWRASESEFQFRTSEGQFLTCDGGGCSVSATAKSPSTSETYGIERNGKNRIHLKIKGGAYLQATTNGQLTADYPGAPGWDDNAATFEMTIVSNKLHGDYQLANAYGHGRAKDILRRHRNSFITIEDFKFLYKHGINTVRIPVGWWIAYDPDPPSPFIGGSLEALDNAFSWAQEYDIKCIIDLHAAPGSQNGMEHSASRDGFTGWPTSPDYISDSLYVIEFLVSRYARNPALLGIELLNEPSAATVSLDVLISYYKQGYQIVRKYSSSAYVIICQRIGVADPMELYQANIGSHNLVLDLHFYNLFDTFFNNMSAMDNIQYIYKSREGQLQALNNSNGPLILVGEWVNEWNVTNGSQKDYQDFARAQLDVYNAASFGWCYWTLKNDEKHWDFEWSIRNNYLQLGNSPSKRSLNILGLLGLACTWFCLLPFL

SEQ ID NO: 150989 - protein, 122 aa, Glycine max
  unsure (1)..(122): unsure at all Xaa locations
  Clone ID: PAT_MRT3847_107367C.1.pep
IVISALAYSGLSGALETXCGQGFGAKEYQMLGIYLQGSCIISLIFSIIISIIWFYTEPILVLLHQSPDIARTAALYMKFLIPXVFAYSFLXNISRFLQTQSVVMPLVALSALXLXIHXGIAY

SEQ ID NO: 150990 - protein, 49 aa, Glycine max
  Clone ID: PAT_MRT3847_107368C.1.pep
MKFLFQCPCCSCFCFMKPKQGKAKVKEVKETKVEKKKGEDKNEEKKINM

SEQ ID NO: 150991 - protein, 67 aa, Glycine max
  unsure (1)..(67): unsure at all Xaa locations
  Clone ID: PAT_MRT3847_107369C.1.pep
VKPRRGGTRHPGCSCRGPHSPSGPPXLGLDCPPRPCVRAEAKSSRKVLRPPRSPLATRDGAAESRTP

SEQ ID NO: 150992 - protein, 72 aa, Glycine max
  unsure (1)..(72): unsure at all Xaa locations
  Clone ID: PAT_MRT3847_10736C.1.pep
LILDRQRITILRGNHESTQITQVYGLYDGCLRKYCSANVWKSFTDLVDYXPLTALVESEIICHHGGLSPSIE

SEQ ID NO: 150993 - protein, 68 aa, Glycine max
  Clone ID: PAT_MRT3847_107370C.1.pep
DLLAIQPTKISHFLGMKMSQVTPPPHFNVPHCEMNPPPCLCPHSPPVFKLCYLIRGKGQEDAHFLLSG

SEQ ID NO: 150994 - protein, 33 aa, Glycine max
  Clone ID: PAT_MRT3847_107371C.1.pep
IHFRTPTQKYRGLINCISLPLIKSEEIITQSKV

SEQ ID NO: 150995 - protein, 98 aa, Glycine max
  Clone ID: PAT_MRT3847_107372C.1.pep
TQICCACLYNTNNNQRKLEMELHGQSFFSSTFFSSTLVSLTSLTFAFPCFGFMKQKQEQQGHWNKNFIIALLVARSQIPGQEGQCVQLLGPLNFYLSF

SEQ ID NO: 150996 - protein, 85 aa, Glycine max
  Clone ID: PAT_MRT3847_107373C.1.pep
PRSSSSCAACKFLKRRCIPNCIFAPYFRSDECKKFAKVHKVFGASNVSKILVEVPEEQREDTVNSLAYEAEARLRDPVYGCIGAI

SEQ ID NO: 150997 - protein, 55 aa, Glycine max
  unsure (1)..(55): unsure at all Xaa locations
  Clone ID: PAT_MRT3847_107374C.1.pep
SWHLSFIFDTPPQXTVFDILLEISQDFVAAANGVMTAFYGPQVNTSSSESAESCA

SEQ ID NO: 150998 - protein, 52 aa, Glycine max
  Clone ID: PAT_MRT3847_107375C.1.pep
WKRHFDELYALLSFDIISLDFCYYNCGLHWSHILQLLIVMRSAINTLFDKLF

SEQ ID NO: 150999 - protein, 64 aa, Glycine max
  Clone ID: PAT_MRT3847_107376C.1.pep
EEYSVVCNLKKKKKKKKKKKKKKKKKKKKKKKKKKKKKKKKKKKKRGAPKKKPCKPENKFQTGT

SEQ ID NO: 151000 - protein, 80 aa, Glycine max
  unsure (1)..(80): unsure at all Xaa locations
  Clone ID: PAT_MRT3847_107377C.1.pep
KKKRRRRTPATKYKKQQNFTSSKKQQNPLNASLNLPQXTQKXPIKSLLFHKFKTFYLPINILYHHYYPFTISSTQILYPL

SEQ ID NO: 151001 - protein, 61 aa, Glycine max
  Clone ID: PAT_MRT3847_107378C.1.pep
QCNIYGTIAWHCGHYTIMNDSRLRRTPNISQSSYSLVYSKKKRRVAWVGQSIPVRSSEAAS

SEQ ID NO: 151002 - protein, 74 aa, Glycine max
  Clone ID: PAT_MRT3847_107379C.1.pep
IYTQKHSSKFGPRFSYSQISFDKVEQKMTLTFSNSEITKLFVLSTKFVNSSLKQPVCDVNLACNLFVQNCNDGI

SEQ ID NO: 151003 - protein, 127 aa, Glycine max
  Clone ID: PAT_MRT3847_10737C.1.pep
LSPKGTRIFMGFLQEKFGPGGSWGGGPWLGLWGKENLGKNTASPFAKEASVQKGMLTGFHRGKKKLGGPFLRAVPEAQTKNGLKKLWVRKFLLKGRFWALFFSRGSPRGGKMARFCLVISPLGWLKN

SEQ ID NO: 151004 - protein, 74 aa, Glycine max
  unsure (1)..(74): unsure at all Xaa locations
  Clone ID: PAT_MRT3847_107380C.1.pep
KQXHEXTEKXPFCWGTHTINIEQSETXLAHPSPGGWXXTNTNFYXTXPQEGGPGGNIIFKSPPKHPPXLAEXAN

SEQ ID NO: 151005 - protein, 73 aa, Glycine max
  Clone ID: PAT_MRT3847_107381C.1.pep
KRKNAERMNLQIWKNQRALAIIIMREHKLEANRKHYFCYKTIHLFDTQVALCLPVKFLEYSLLLLCSLQLPVA

SEQ ID NO: 151006 - protein, 149 aa, Glycine max
  Clone ID: PAT_MRT3847_107382C.1.pep
MDYTVPCGPVKYQFFRDIIHCKIFLNNFCSPSLSFHMTEDKCISNNFQYATSQIEPTLQQEIKKNYIRPILNPNISKSQQTVTNCHFLNSNYKITHDPFEITKIPWKIQPYLSSSKHKNKRGKKKFPTYMNNPGITHISEKCEILKTEK

SEQ ID NO: 151007 - protein, 74 aa, Glycine max
  Clone ID: PAT_MRT3847_107383C.1.pep
GKENNSFKIERDNYHLKVPKVFHGGKAKNPSGQPIISQNGYTRAVKKKIALKKTGNWALYMKRGDYNLGNKFQG

SEQ ID NO: 151008 - protein, 90 aa, Glycine max
  unsure (1)..(90): unsure at all Xaa locations
  Clone ID: PAT_MRT3847_107384C.1.pep
XVSSTXAQXXXGXTFKYXIIGXGXHXSEXFPEKXDQEXPKKXXARLRQRIDPQYNEVQAQMXXNXXKLSLDDVXTPXGSMLXLKXLLKFP

SEQ ID NO: 151009 - protein, 68 aa, Glycine max
  unsure (1)..(68): unsure at all Xaa locations
  Clone ID: PAT_MRT3847_107385C.1.pep
KKLVNSKNGPPTFEQPKITLEKLFLXGNKFVQKQKNVKRVQLAVKYLNKAVFGNATKDGIQRGPFFQF

SEQ ID NO: 151010 - protein, 57 aa, Glycine max
  Clone ID: PAT_MRT3847_107386C.1.pep
SQKTTPYLSIKLTLLGNNKHIVNMQNYHALPTQNDTYLKYNDQNYTSTKVKFKLYNK

SEQ ID NO: 151011 - protein, 81 aa, Glycine max
  Clone ID: PAT_MRT3847_107387C.1.pep
NSKNDWEILNNSIMEIYGLGKLIGGGVWFQKNGVLTPISYSLSGLTDQLAVLSNICFWYSKISRNKSASTYICTLFLLLFG

SEQ ID NO: 151012 - protein, 32 aa, Glycine max
  unsure (1)..(32): unsure at all Xaa locations
  Clone ID: PAT_MRT3847_107388C.1.pep
XXXXFYFFFFXFFFWEGRNFWDRKFPLTDFKG

SEQ ID NO: 151013 - protein, 51 aa, Glycine max
  Clone ID: PAT_MRT3847_107389C.1.pep
KIIKKKNVYISRKSQLLSKIIYQKKSQYSIVHCYKPNHYMFSERDHTQSKY

SEQ ID NO: 151014 - protein, 66 aa, Glycine max
  unsure (1)..(66): unsure at all Xaa locations
  Clone ID: PAT_MRT3847_10738C.1.pep
GGDIIRIPEIRCDRSSDYKKLIWRKLPKDDNCNCLETKLLKARVQLASXWLAQNITATTLLVSGLQ

SEQ ID NO: 151015 - protein, 275 aa, Glycine max
  unsure (1)..(275): unsure at all Xaa locations
  Clone ID: PAT_MRT3847_107390C.1.pep
LTSCKMSTETTNLFTLLLLPVSPILISGVAVESSLFTPEFGNSVECSLFKQWLHNLQTENGVLADGTLALRQVLIQGVDMFGKRIGFLKFKADIFDKETGKMVPGIVFARGPAVAVLMLLESEGETYAVLTEQARVPVGRIILELPAGMLDDDKGDFVGTAVREVEEEIGMKLNVGDMVDLTAFLDSATGCKVFPSGGGCDEEISIFLYRGRVDKEIISQLQGKETGLREHGELIKVRVVPYKXLWHTTADCKVLVAVALLEMAMKEGLLPALST

SEQ ID NO: 151016 - protein, 57 aa, Glycine max
  Clone ID: PAT_MRT3847_107391C.1.pep
NCLSHPLTQKTIKLTLILPPPKKTHISHQILFIPNTNTLISKLSNLFKNKLLFPPSK

SEQ ID NO: 151017 - protein, 110 aa, Glycine max
  Clone ID: PAT_MRT3847_107392C.1.pep
MAVANKLLSVLIIALIAISMLQTVVMASHGHGGHHYNDKKKYGPGSLKSFQCPSQCSRRCGKTQYHKPCMFFCQKCCRKCLCVPPGYYGNKAVCPCYNNWKTKEGGPKCP

SEQ ID NO: 151018 - protein, 81 aa, Glycine max
  unsure (1)..(81): unsure at all Xaa locations
  Clone ID: PAT_MRT3847_107393C.1.pep
DEINEIMGEKLXSAKDEKKILAEFEDWEIQAYSPRSSVSSSXVNVGIKEKLDLPDVPTKAPVTSDDEVSTKRKVMEKPLEA

SEQ ID NO: 151019 - protein, 130 aa, Glycine max
  Clone ID: PAT_MRT3847_107394C.1.pep
LAPPPKCKRGVRKKKKYQAPGPYNQFKGGDIVRVQKTGPFTKTRAFFALPGPKRPSSRAWAHPRELSIPLGCQPKKTPKSPPNFPFLGQLLHFFLGVWGGIWKGQVFCVGPFFSPPGGGNFFLFKGGASF

SEQ ID NO: 151020 - protein, 41 aa, Glycine max
  Clone ID: PAT_MRT3847_107395C.1.pep
FFFFFFFFFVLVLKQLKKCHFGLKLLLSFGFGRPAHESSAK

SEQ ID NO: 151021 - protein, 132 aa, Glycine max
  Clone ID: PAT_MRT3847_107396C.1.pep
DDTFPNGTVLKKGTKVIYAIYAMGRMEGIWGKDCKEFKPERWLRDGRFMSESAYKFTAFNGGPRLCLGKDFAYYQMKYAAASIVYRYHVKVVENHPVEPKLALTMYMKHGLKVNLYQRDAAQIQKHLEDGLK

SEQ ID NO: 151022 - protein, 43 aa, Glycine max
  Clone ID: PAT_MRT3847_107397C.1.pep
ARVTSRGPTVTDPDTEEQGEVFYVPRDENLGHLKSKDALWIGT

SEQ ID NO: 151023 - protein, 57 aa, Glycine max
  Clone ID: PAT_MRT3847_107398C.1.pep
TVAVDLPLQCALTLIGADHVMHCDLSTYHLSHTKVFIIRICSRDVQDWASRVVMFTD

SEQ ID NO: 151024 - protein, 72 aa, Glycine max
  unsure (1)..(72): unsure at all Xaa locations
  Clone ID: PAT_MRT3847_107399C.1.pep
AQWKMLMLIQKSGVGGIXSRFVLLINSGNGKERKIRMREKFSFGNLTIIIFFPFFCMSIFYFCLPIYLKVKQ

SEQ ID NO: 151025 - protein, 84 aa, Glycine max
  Clone ID: PAT_MRT3847_10739C.1.pep
VAQMLESPIRYGHISYLVLCWIKVGFMQGELSWVASGFSQFERCMYARQWIEFRCVYRDDSSLHDVYVRLSTLEWQVKRYISPD

SEQ ID NO: 151026 - protein, 366 aa, Glycine max
  unsure (1)..(366): unsure at all Xaa locations
  Clone ID: PAT_MRT3847_1073C.1.pep
YGCEKTTEGGIRPHHGLYHMWNSSNLQQQTSSSTMLWQKSPSFVNDASSPGLPQMSSFARTPPHMLRTPHMMDHHVGSAPVVTASPWERKNSYLGGSPEASGFRLGSLGSGGFHGSWQMHPLDFPSHNMFSHVGGNGTELTSNAGQNSPKQLSHVFPVRHPMSSMSKFDASNERMRNLYHRRNEANTNNVDKKLYELDLGRILRGEDSRTTLMIKNIPNKYTSKMLLAAIDEXNKCNVGYAFINMIDPGQIIPFHQAFDGKKWEKFNSEKVASLAYARIQGKGSLIAHFQNSSLMNEDKRCRPILFHTDGPNAGDPEPFPMGANIRLRPGKSRTAGNEENRSQGSPSTLSSGEESANGIDSSKISN

SEQ ID NO: 151027 - protein, 108 aa, Glycine max
  Clone ID: PAT_MRT3847_107400C.1.pep
PNHKKKGGAGAPPQKKKKFGPIPKKGPPDRTRGKGPGKAEKPPHSGNRAKGRGGGPPPKTRGGPPPGGYRPDNIQERASQKTHRVEPGDSKAMKQQEGLLFRKAGEIQ

SEQ ID NO: 151028 - protein, 121 aa, Glycine max
  unsure (1)..(121): unsure at all Xaa locations
  Clone ID: PAT_MRT3847_107401C.1.pep
SSPQARCFAASLHSGTTNGLYKAMLLSQVLFWIRPKGQAIMLLCSAQPSGRAFHFICPAWWPTFHCLPSIFIHSSITEFVFSVRLIAXLVFRVSYSYLLPCWVSSCFKQIEIFXSFXXXXP

SEQ ID NO: 151029 - protein, 66 aa, Glycine max
  Clone ID: PAT_MRT3847_107402C.1.pep
MFFRPVCQDQAGLLASSVKRACGARQNSLGALSGRTLTPRGGQFSNGLPPWGSLFIKPAGAPCPLN

SEQ ID NO: 151030 - protein, 69 aa, Glycine max
  unsure (1)..(69): unsure at all Xaa locations
  Clone ID: PAT_MRT3847_107403C.1.pep
SYFSLSQPYNLIQIMIXDSKIXXPXHXXNLNXXXXXHXMVXRMSGXCQLVEXXQXNXGEAAXSXVLGCL

SEQ ID NO: 151031 - protein, 155 aa, Glycine max
  Clone ID: PAT_MRT3847_107404C.1.pep
MAGPSATDLQRTRELEKFLAASGLYESKDEAAKREEVLHRLGEIVKSWVKQLTRLRGYTGQMVEDANAIILTFGSYRLGVHGPGADLDTLCIGPSYVTREEDFFYTLHDILANVEEVTELQPIPDAHVPVMKFKFDGISIDLLYASISRFGSYLK

SEQ ID NO: 151032 - protein, 50 aa, Glycine max
  Clone ID: PAT_MRT3847_107405C.1.pep
GQQQQKDPEQEHNAEWEDALALGVVSCSPCCVPGPVVVGLYLHTDNALYG

SEQ ID NO: 151033 - protein, 91 aa, Glycine max
  Clone ID: PAT_MRT3847_107406C.1.pep
CWYQDSGFPCFKGGPRTIQNLRKRFHLNLTEEVSILILVTLLTVIFFACLLHFFLSWQQCVSLVLSLISSSLDAWRTRQYDYYQRVLNGIL

SEQ ID NO: 151034 - protein, 63 aa, Glycine max
  Clone ID: PAT_MRT3847_107407C.1.pep
KSCIVFYIYRLSHMTKRIALPRILFLQLIYLSSLPASFPLPTILGSMGPPPPPPQVGGTATHV

SEQ ID NO: 151035 - protein, 81 aa, Glycine max
  Clone ID: PAT_MRT3847_107408C.1.pep
IQQYISQIAACRPCLYNSEQCTFLAMKKCIQDHTLYNTKPRENTFQQEKIRHKSLKRGAMLEHFQHQMPVHKSPKDELQMN

SEQ ID NO: 151036 - protein, 94 aa, Glycine max
  Clone ID: PAT_MRT3847_107409C.1.pep
LQGVLLWHPKGSRQSQDPRPALQKLNQNKSKGTLQVTSYQLVPAPPKSQDPFPRPQDGMVKLLPIPSLKKVRITKTKTQQKSCPKTPRQSQISP

SEQ ID NO: 151037 - protein, 224 aa, Glycine max
  Clone ID: PAT_MRT3847_10740C.1.pep
MVFWVFGYGSLVWNPGFDYNEKIIGFIKDYRRVFDLACIDHRGTPENPARTCTLEEKEGAICWGAAYCVRGGPEKEKLAMQYLERRECEYDRKTLVNFFKEGDSLHPTLTDVIVFTSTPDKVNNKYYLGPAPLEDMARQIATAYGPCGNNRDYIFLLEKAMYDIGHEDDLVIELANEVRKVLGMGNVVPKEKKLVGAAQLPHPPHVTIPTLQLHPLPEPIAMDI

SEQ ID NO: 151038 - protein, 65 aa, Glycine max
  Clone ID: PAT_MRT3847_107410C.1.pep
HKCISIGEKGHIHVAIVSCYMSHFQVIHLPSKLSYMGRWIMIGIVSEIPCSQGNYPHNPRDSGLR

SEQ ID NO: 151039 - protein, 123 aa, Glycine max
  Clone ID: PAT_MRT3847_107411C.1.pep
TLVRVWETYMCVCVCICEIQIYHVFHKQNNGVFIKEKKRINFPVIRVVILYRRDGSVHSCVCVCVCVCVGLTNTVVVEIFRFSNTMVFTKNCRCPNLHFLAPFSLSHFLPIKPSSWKTLIHTQ

SEQ ID NO: 151040 - protein, 105 aa, Glycine max
  unsure (1)..(105): unsure at all Xaa locations
  Clone ID: PAT_MRT3847_107412C.1.pep
FXLGKKTXKEQGIMEKNIERPKKKVFGRAFLGPLGGVPPAGRGGPPFGAMGGPGFQTKKEPFPFAWEFLWAFLGPPRPAPTEGRGLNKEKNCPRLRPPPGPPPNP

SEQ ID NO: 151041 - protein, 53 aa, Glycine max
  Clone ID: PAT_MRT3847_107413C.1.pep
YQFIIHLRPHVGICSQGNLFRRLVLSKNTPLVVQFQEFRSALAPNIHVLYASE

SEQ ID NO: 151042 - protein, 73 aa, Glycine max
  Clone ID: PAT_MRT3847_107414C.1.pep
GSFSGHECSEDAEDSNEDPVEKEFEDFLYSSGVNPNVYVLSSGRWDVNQEAQSSSRPPTIDQEFEEYFSMLML

SEQ ID NO: 151043 - protein, 78 aa, Glycine max
  unsure (1)..(78): unsure at all Xaa locations
  Clone ID: PAT_MRT3847_107415C.1.pep
SLSLNHNNRTHFSPTPPCPTHHLPQTMGYVPMNCHQLGPKFLPFPNPPMPKQQLSGLXFSNNTAFWNSSAEALNDIRX

SEQ ID NO: 151044 - protein, 226 aa, Glycine max
  Clone ID: PAT_MRT3847_107416C.1.pep
MEESRNNPSQVDSFQVDEMHNLSIVEWKKKRKLQSDQLDLLRPKHRCWVGSFSSAHASVFDENPVLESMHNHTVESSEPESAKDSNSLMEDCDTAISVNEESKHEADCGNSYLYVNRVSYIDEEAFVDSECIPPYDDANAQALINHEEHLQGLGSFSGHECSEDAKDSNEYPVEKEFEDFLYSSGANSNVYVLSSGRWNVNQEAQSSSRPPTIDQEFEEYFSMLML

SEQ ID NO: 151045 - protein, 146 aa, Glycine max
  Clone ID: PAT_MRT3847_107417C.1.pep
PPQKSFLGFFLNFSRVFPPPPLAPKGAFSWPTKGLGPLGFFFSPSWPLFWPFQGPLESPIFPIRFPLGPFAPFISQKPPFWNLALFFPGGHRGSPNLTFGHWGFLLFPPKFFPGDPPGNSPFFKIFFWPFLPLGCSKLPFFGFFRF

SEQ ID NO: 151046 - protein, 73 aa, Glycine max
  Clone ID: PAT_MRT3847_107418C.1.pep
NNYERKRKTYGRIAEENSLRSKKALCQGRLFNSWEFQDFPENLCPSLYTFKFFTIRIYVLKSHACQLHSLNRF

SEQ ID NO: 151047 - protein, 66 aa, Glycine max
  Clone ID: PAT_MRT3847_107419C.1.pep
EKKRVVITNPIWERRLFLSHDPFFFFPKKFPSKKKTISGNPTPCGENPSKKRPQQGLIKAPKYPPV

SEQ ID NO: 151048 - protein, 55 aa, Glycine max
  Clone ID: PAT_MRT3847_10741C.1.pep
FPIFVLNPQTTDWVESVAGKSDFTSVNFPTCKKNALFVKGRMLWECRLLSDLFHP

SEQ ID NO: 151049 - protein, 44 aa, Glycine max
  unsure (1)..(44): unsure at all Xaa locations
  Clone ID: PAT_MRT3847_107420C.1.pep
LAKGYGPDRRNFLPXGLLDRSEIPEYLTGKVPXDYWYDPFGLNQ

SEQ ID NO: 151050 - protein, 38 aa, Glycine max
  Clone ID: PAT_MRT3847_107421C.1.pep
HDIIYITGNSEKIIITLLQCTDKAINTYKTSSGYYKDT

SEQ ID NO: 151051 - protein, 54 aa, Glycine max
  unsure (1)..(54): unsure at all Xaa locations
  Clone ID: PAT_MRT3847_107422C.1.pep
VNCEQQYSSKTLQXPSCNSTNCSGATTNNCLICPGESRQGCKKTTFGFMSIIPF

SEQ ID NO: 151052 - protein, 37 aa, Glycine max
  Clone ID: PAT_MRT3847_107423C.1.pep
SMRDLVEIILISHEILWSYINSSCFFNHDTNFPYMRG

SEQ ID NO: 151053 - protein, 65 aa, Glycine max
  Clone ID: PAT_MRT3847_107424C.1.pep
HQSRSGLFSSGHNESGKETTTKCLHYKLDCFDQPEIERGANGAANINNKSFNVSCALHKRKGGRE

SEQ ID NO: 151054 - protein, 44 aa, Glycine max
  Clone ID: PAT_MRT3847_107425C.1.pep
CITLNNEKSYLSIFFIYFNSFFPNLYCDLCSKILMIRVFEIVVP

SEQ ID NO: 151055 - protein, 62 aa, Glycine max
  Clone ID: PAT_MRT3847_107426C.1.pep
KQTIAFQAMTLQHISFFNDRSINLHLLTIIILKISLIQLTCFLFYSFLLIQLLFPFPFSSYF

SEQ ID NO: 151056 - protein, 175 aa, Glycine max
  unsure (1)..(175): unsure at all Xaa locations
  Clone ID: PAT_MRT3847_107427C.1.pep
SARVSLGGSRGNTNPQEEIPPPDTLFWCNKNDDVSSYHRGSSGFELWNQQQLQHQQQQLMGHDPPPQPRPLFHQDLYSALGVGPSRPISDDQSSSRSSFLLGASGGGSARGGISCQDCGNQAKKDCPHMRCRTCCKSRGFDCQTHVKSTWVPAXRCGERLQQLSALQQHQQQQQT

SEQ ID NO: 151057 - protein, 61 aa, Glycine max
  Clone ID: PAT_MRT3847_107428C.1.pep
RKDNFQKLKLIYALQNKHMSKAAWKQIYILQANTFTSQKHTSNSTTNAKGKRQEHQRERVG

SEQ ID NO: 151058 - protein, 79 aa, Glycine max
  Clone ID: PAT_MRT3847_107429C.1.pep
GAARFRGSSFTYPCLQIDTPNIRSPKVNSQAVDLQNLDWKNLGETQVNPLVTHPPFTNWVNTEKACKDGPSQHFHSQNG

SEQ ID NO: 151059 - protein, 224 aa, Glycine max
  Clone ID: PAT_MRT3847_10742C.1.pep
MVFWVFGYGSLVWNPGFDYNEKIIGFIKDYRRVFDLACIDHRGTPENPARTCTLEEKEGAICWGAAYCVRGGPEKEKLAMQYLERRECEYDRKTLVNFFKEGDSLHPTLTDVIVFTSTPDKVNNKYYLGPAPLEDMARQIATAYGPCGNNRDYIFLLEKAMHDIGHEDDLVIELANEVKKVLGVGNVVPKEKKQVGAAQLPHPPHVPIPTLQLLPLPEPIALDS

SEQ ID NO: 151060 - protein, 76 aa, Glycine max
  Clone ID: PAT_MRT3847_107430C.1.pep
MATSVAVAGALTAHDRRVLTAVNAGASSLSLAGSSFIVVCYLLFKELRKFSFKLVFYLALSVCFFFLSFRVPLLQI

SEQ ID NO: 151061 - protein, 52 aa, Glycine max
  Clone ID: PAT_MRT3847_107431C.1.pep
HLLFAPKTLRMLREDAKFETILLYFSYWTVFLYNFELQCPLNLNLVPFPFVL

SEQ ID NO: 151062 - protein, 53 aa, Glycine max
  Clone ID: PAT_MRT3847_107432C.1.pep
LYITYLVLSPILESLTIQSFYWTLAMTEYIFLFIYLSLVSHNTCKSSRQLKEV

SEQ ID NO: 151063 - protein, 42 aa, Glycine max
  Clone ID: PAT_MRT3847_107433C.1.pep
KQRCLFHNTSWSFILTIYPTSVYLTDNLVASLMVPTQFSCEV

SEQ ID NO: 151064 - protein, 49 aa, Glycine max
  Clone ID: PAT_MRT3847_107434C.1.pep
MPGKTPKTPKTPAVKPPVTIPPINVPTDVLPPIVKPPSIIPSIPIINPT

SEQ ID NO: 151065 - protein, 83 aa, Glycine max
  Clone ID: PAT_MRT3847_107435C.1.pep
RFYHVICERIGSFGHWDVQTLKVLQCVLFCKLGVSSLFFLVKRPISIIVCKILQIIYQKNYKYMEILIYTSLENEKWITILES

SEQ ID NO: 151066 - protein, 37 aa, Glycine max
  Clone ID: PAT_MRT3847_107436C.1.pep
AMTSTAMYTIRTWSSIITGSYGIRWPQKHDLFHQTKY

SEQ ID NO: 151067 - protein, 132 aa, Glycine max
  Clone ID: PAT_MRT3847_107437C.1.pep
MKQLIRRLSRVADSSNYTLLRSDSSQACHHRRPRAESFRLSAPSKIRRSSAAVVPEGHVPIYVGDEMERFVVCAELLNHPVFVKLLNESAQEYGYEQKGVLRLPCRVFVFERVLDALRLGLNARDITELVNF

SEQ ID NO: 151068 - protein, 163 aa, Glycine max
  unsure (1)..(163): unsure at all Xaa locations
  Clone ID: PAT_MRT3847_107438C.1.pep
HPLVASTHRRESYITPCNTLRGSPPHAIARGGSAGTLPDYREYAYEQXHIVAHKNLIAWCEVHVTKEAEGNCISNIKLXDNATDTDKKSEKRMTHGDSARNPKFDDNTETLTVNEMITITPASEPWMNIQHDAFYAQHNPSMKNFELSVSSTVKASYISSPGS

SEQ ID NO: 151069 - protein, 66 aa, Glycine max
  unsure (1)..(66): unsure at all Xaa locations
  Clone ID: PAT_MRT3847_107439C.1.pep
IPKVGPQRCKKENSCQIYFKSLFTLTGVYGFXKHVSHIDPRENRPYLKMFXALKARKMVERVPLSA

SEQ ID NO: 151070 - protein, 74 aa, Glycine max
  Clone ID: PAT_MRT3847_10743C.1.pep
RGPNLSPYKFPGGIGGPFSHLNLPWKVKHLLGAPRGNFWTNPFGNPFSSLWAAGAPPEFPARPLGGTQFSLWGG

SEQ ID NO: 151071 - protein, 153 aa, Glycine max
  Clone ID: PAT_MRT3847_107440C.1.pep
MRGTNSTKDQSLTQKLLPCTLHVLLPIPLLPLVLLSFYFHPLSLTPSPPTKLSLSTPSPSPSPSPSPSTPFPHPPSPSAEKEKTYETPCDYFNGKWVRDKRGPLYNGSTCATIKESQNCIINGRHDSTYLRWRWKPSECHLPRFEPNTFLQLI

SEQ ID NO: 151072 - protein, 110 aa, Glycine max
  unsure (1)..(110): unsure at all Xaa locations
  Clone ID: PAT_MRT3847_107441C.1.pep
DSIDHKTVEENGINMLVSHKXEGAEGLIXRGFPELMHSWRPHILLSWTXLGYRAVTPDLRGYGDTQAPYTVNXYTYYHLVGDIIDLIDSIILYNVFLVAHDCGAIIIVYL

SEQ ID NO: 151073 - protein, 109 aa, Glycine max
  unsure (1)..(109): unsure at all Xaa locations
  Clone ID: PAT_MRT3847_107442C.1.pep
KLNHWPTPVFVWPSSFLNFSSSVLNSSTFLDHSLTLASMFCKLFSAWSHRRXYGLFFKFKTLKTSQEFINILPAMEDVGQLPNNGVHRKIKRSFHYRGQHRLHSVSLIL

SEQ ID NO: 151074 - protein, 85 aa, Glycine max
  Clone ID: PAT_MRT3847_107443C.1.pep
IELQTGKLKGIVSEDTIHEAPFGRQHALRNRVSIVLARTLCFLKIGEDRFIPPSGLVQHADTSRSMQLCQSFIHALRTGRVCSYT

SEQ ID NO: 151075 - protein, 175 aa, Glycine max
  Clone ID: PAT_MRT3847_107444C.1.pep
RGRDVVLVQENQAERMESVLSQIVERTFNFVVDPIIRQLAYILRCSQNVDELLTSFKSLELEKESIDRRCDQAENNLENTEAKVKEWSRKVDEFKTELEKFRNDEGPPKTGLSNVLFLFPYFWKRHRLGRPAKKMAEIVKNLIDESAKFNDVSYPANVTSNDFPLFKCGYMPICF

SEQ ID NO: 151076 - protein, 66 aa, Glycine max
  Clone ID: PAT_MRT3847_107445C.1.pep
CQPYDLPNAGHLSANTVGCTRRSSRKTFSVRKCNANRSLIGVEHSIGLYAHTSVPNYKSSNRVLST

SEQ ID NO: 151077 - protein, 78 aa, Glycine max
  Clone ID: PAT_MRT3847_107446C.1.pep
HFTRSFSFHLCYLLWPNHPNLIKHPFTTLSITFSLSISSFSFHLSSLSTYKQYNNNTNTYGQLVDLDHPASFYCWAGC

SEQ ID NO: 151078 - protein, 89 aa, Glycine max
  Clone ID: PAT_MRT3847_107447C.1.pep
GSRERTLIASSHASLGHLTKWKAWLSQGLAERAEKWMIFRFKSQCQLGSIHSALLNADSPIHIAVLRLQIVYKSFRTRRQLADCAILVE

SEQ ID NO: 151079 - protein, 62 aa, Glycine max
  unsure (1)..(62): unsure at all Xaa locations
  Clone ID: PAT_MRT3847_107448C.1.pep
TNHILPYTTNTTTMDHHTXGXFATNLARELTYLXPMPITFCFRWKQIRSFTSFILLLSRLXX

SEQ ID NO: 151080 - protein, 100 aa, Glycine max
  unsure (1)..(100): unsure at all Xaa locations
  Clone ID: PAT_MRT3847_107449C.1.pep
QXYXNYTXXXASXXWXNRMTXXXSHHXIXXXXPXAXXXXXEIXXXFEXPXXXXXMXXXXXXGXXXXXKXXXXXXLXXXXXENVXXXSSRIPSLRTRACDV

SEQ ID NO: 151081 - protein, 165 aa, Glycine max
  Clone ID: PAT_MRT3847_10744C.1.pep
VGIARGLCFLHHECYPAIPHGDLKPSNIVFDENMEPHLAEFGFKQVLRWSKGSSPTRNKWETVTKEELCMDIYKFGEMILEIVTGGRLTNAGASIHSKPWEVLLREIYNENEGTSASSLHEIKLVLEVAMLCTQSRSSDRPSMEDVLKLLSGLKHLEDGRTSKEG

SEQ ID NO: 151082 - protein, 235 aa, Glycine max
  Clone ID: PAT_MRT3847_107450C.1.pep
MAHTLSTNLALNLPTSRYVRPSRPTQVKPMKVMMGDAREKLEHVHVPKHNKHHQPLPKNKVAPTPPVGLWDRFPTARTVQEMMETMERMMEDPFAFSTLEWPSSPLPSEGVGGYRRRGRAPWEIKECESEYKMRFDMPGMNKEDVKVWVEEKMLVVKAEKAQKKKQENEIVELQQEKQQEEEEWSAKSYGRYSSRIALPDNVQFENIKAEVKDGMLYITIPKATSYSNILDIQVQ

SEQ ID NO: 151083 - protein, 65 aa, Glycine max
  Clone ID: PAT_MRT3847_107451C.1.pep
LSLFLFFLFLVLEYGAISPPCAGRSFPSPDLVGRLWGTVFNLSKLGLVPIYSNPLLCVNECTRWI

SEQ ID NO: 151084 - protein, 60 aa, Glycine max
  Clone ID: PAT_MRT3847_107452C.1.pep
LVLKRNWVLILAYAKNQNLGIFLGLKKNYKLLTWGTTVVLVIPPIQLRRGGFSFFMDLPL

SEQ ID NO: 151085 - protein, 241 aa, Glycine max
  Clone ID: PAT_MRT3847_107453C.1.pep
SSVSSKKGNFRYTGRPAIPNNADGPAYAQLSVPVNGNLLTTNEEFSAERGGSIDGILHELLQKGDAAHKYMQGSRNMKIDNWILLDNYVQGRVLSSGSQARALQLHSKRSKKHMSMKRHKKDGSLDLPQEFQKFDIFKPMHEMWKDYIMLLLKSTGKNQLAQCLLGADLHGAFILVVECKITHFTGICGIMIRETAEAFGIITEDNKFRVVPKKVSVFVFQVDCWKVTLHGDKLGSRKVGL

SEQ ID NO: 151086 - protein, 92 aa, Glycine max
  Clone ID: PAT_MRT3847_107454C.1.pep
MASSFQLHHSYFSLQSLDKSQVIADVGSRSFYLRKNNDASSFRWGSAPEIFTRGSTPSIANPPLLIPSFIARKISKIVRRAHRLWNIVLCSQ

SEQ ID NO: 151087 - protein, 82 aa, Glycine max
  Clone ID: PAT_MRT3847_107455C.1.pep
GIFYFSFCSSFFSFMPCTNNVLYSMFYSSWLYFSTKMFFCPLIVVYSDCRFDIFKPMHEMWKDYIMLLLKSTGKNQLAQCLL

SEQ ID NO: 151088 - protein, 82 aa, Glycine max
  Clone ID: PAT_MRT3847_107456C.1.pep
SKFLVVCHQVVEVKVGLHCDECIKKILKAIKKIEDIETYNVDKQLSKVIVTGNVTTEEVIRVLQKIGKNATPWENPQPQPNC

SEQ ID NO: 151089 - protein, 66 aa, Glycine max
  Clone ID: PAT_MRT3847_107457C.1.pep
PHSTPILYSPPQTFLFSPPPATPTPLPASPIHAPTPASSPPVSPPSPSPRVTPNPISPNTPPGPSP

SEQ ID NO: 151090 - protein, 96 aa, Glycine max
  unsure (1)..(96): unsure at all Xaa locations
  Clone ID: PAT_MRT3847_107458C.1.pep
XXPXAXSLFXXLIPATXXXQQRASCXSXSVYTXLPXXXXXPHSKPXXSXPLHXPAQPSCTPRLXLPAPSLAHXXPTXNLNKKPYXLCMHLPLLXSY

SEQ ID NO: 151091 - protein, 58 aa, Glycine max
  Clone ID: PAT_MRT3847_107459C.1.pep
KYIQKPFELLLPFNHYTIHVWQFYIVMTQQFTNSPNKLNHFINILILRNTNQNIFYFN

SEQ ID NO: 151092 - protein, 166 aa, Glycine max
  Clone ID: PAT_MRT3847_10745C.1.pep
RRNLFDSEATTAAEFLEEIGLSTIQQHEADSWTWKADPSGNYSTKTAYELLQEAIRGDNEDGIFGQLWKLKIPPKAAVFTWRLINDRLPTKANLRRRQVEISDSLCPLCNNSEEDAAHLFFNCSKTLPFWWESLSWVKTAGAFPKDLREHFLQHNSGNTAGTKATR

SEQ ID NO: 151093 - protein, 136 aa, Glycine max
  Clone ID: PAT_MRT3847_107460C.1.pep
LFHQQNLGDVKYSNFWGVAKCEGFLWKVKKNQLKFPLHICIKHVVFLAAIYSKNGSQLFILRCFLKYVGLRQKFKTQGFIPLQRCHRSLFYFQTQIRKFFFLVFFLEIISLQIRPVKLLKMPLGGLNLLYGPFFLG

SEQ ID NO: 151094 - protein, 76 aa, Glycine max
  Clone ID: PAT_MRT3847_107461C.1.pep
IRAGLALPCHLTVVVGTTYAPSTHTLTAYGGIFCFGGAATALASERPVVTASIQHNSTIAGRSTARLVSTGKLGSS

SEQ ID NO: 151095 - protein, 82 aa, Glycine max
  Clone ID: PAT_MRT3847_107462C.1.pep
MRKNYLTNDIHVSQRIGSNVTKGDNLDDNTVDSATYNVKSSNVKEPVRSPTSLVFGYLNLFSDGVHNFTDGMALGSAFLLYG

SEQ ID NO: 151096 - protein, 103 aa, Glycine max
  unsure (1)..(103): unsure at all Xaa locations
  Clone ID: PAT_MRT3847_107463C.1.pep
ANLIYKNYGTPLAHXRAMGYDSLYKESHTFGPGRSPLENEHLYPRVMNQLLSLPXEDTELIKLMTSSCSXALSRLGLEDCFEGIICFETLNPIHKSTVSDDED

SEQ ID NO: 151097 - protein, 151 aa, Glycine max
  Clone ID: PAT_MRT3847_107464C.1.pep
GKQSVPIDLKESIRVLAKLREAPWYYAETKELPRSSHEVKDGHWHSISKGAPWFPYEGKEISRLSFESRETIKSTPKLKELPRLSLDSKEGSLRSYSTDSKATHHSRNIYSGTSTSNDKFPTLQQPSATPSRPPSVVAKLMGLEALPDSSL

SEQ ID NO: 151098 - protein, 82 aa, Glycine max
  Clone ID: PAT_MRT3847_107465C.1.pep
MLLSMTTFIGAAFCFGAFLFRSMYGFLALFSIGELLVFATQVVSFYSINISLCLIAILKYYPFYMLIIYEYFSNSDIVKLNS

SEQ ID NO: 151099 - protein, 73 aa, Glycine max
  Clone ID: PAT_MRT3847_107466C.1.pep
FNKTFLMSGIYNWERPFKLIICLILQCFYNNNSPTFYHLMTNQTHSCNYLPMKYVSNNGLKCGVLIGQIKLMH

SEQ ID NO: 151100 - protein, 47 aa, Glycine max
  Clone ID: PAT_MRT3847_107467C.1.pep
SSTMQQVHGFNSNISIYSYIILVSLKFKSNPHYFFVMRLRACLDLNI

SEQ ID NO: 151101 - protein, 41 aa, Glycine max
  Clone ID: PAT_MRT3847_107468C.1.pep
LLLQWRSPVSVILDKPGVASNNHCGLSSIVVPQVLMHYSTW

SEQ ID NO: 151102 - protein, 46 aa, Glycine max
  Clone ID: PAT_MRT3847_107469C.1.pep
VRLSVNLLITKFTFNGTKIYHTPQHERVSMYRTCKSRYIPLKHSYG

SEQ ID NO: 151103 - protein, 69 aa, Glycine max
  Clone ID: PAT_MRT3847_10746C.1.pep
RNSRDPWHITECSLYHRIKGFHLLCIRLAVQFMGLSIHVNDIIKLFLFDDKISKQSFEMIHFLKVGRGV

SEQ ID NO: 151104 - protein, 48 aa, Glycine max
  Clone ID: PAT_MRT3847_107470C.1.pep
GRFQDWGIAGDTLMPTFCASQATARSSEKCEHALHDLEFVIACASSFG

SEQ ID NO: 151105 - protein, 46 aa, Glycine max
  Clone ID: PAT_MRT3847_107471C.1.pep
NLGGTIRETMASHAGVCKIGSFKTIASFHLATSFYPIPLTGYNSQT

SEQ ID NO: 151106 - protein, 98 aa, Glycine max
  Clone ID: PAT_MRT3847_107472C.1.pep
YIVSSAACLGGGGGGGGGGGGGGGGGKYTWQIIRGGKVTASTPGPVKRLRTGNTGKLLKKKFSDSDRGAINSNAPAVQRAKHSPNKWDNKGGMLEGGN

SEQ ID NO: 151107 - protein, 89 aa, Glycine max
  Clone ID: PAT_MRT3847_107473C.1.pep
IRPINAERTHSRTQEKADYSPNATMTTPPFRSQPEESQEGLAQNPHISNDTNATLSERTRETTIAYQKKSATRVPRTQNETHGMICCRS

SEQ ID NO: 151108 - protein, 56 aa, Glycine max
  Clone ID: PAT_MRT3847_107474C.1.pep
LRTALTTDLLGFTMWPLGGDTHHIIRAGGTCADELNLTNHFHWQQPKKYCDHHEQA

SEQ ID NO: 151109 - protein, 121 aa, Glycine max
  unsure (1)..(121): unsure at all Xaa locations
  Clone ID: PAT_MRT3847_107475C.1.pep
DLGADXGLIGQYGVGFYSAFLVAERVVGGTKSPTSDMLYEWDAETDWGPYVIXEDTDPVXVLRRGAQITLLLREEAKNQFPTPSKPLGLLWQKPQRGGFGVCPWEQMKGAFEGKILAPLHP

SEQ ID NO: 151110 - protein, 61 aa, Glycine max
  Clone ID: PAT_MRT3847_107476C.1.pep
SQTQMLLFAIQSVFLTQNTIRCKSNTNMPREFNSCLVHAHDVRGTGNICIQIQAKLTILLV

SEQ ID NO: 151111 - protein, 203 aa, Glycine max
  Clone ID: PAT_MRT3847_107477C.1.pep
FGFFILCRLSEIINVFASPQVSHHPMIVACHCEGTGWKFWGDSNLKSKFWGRSIQLDPVGTLTLEFDDGEVFQWSKVTTSIYNLIFGKLYCDHYGTMRIQGNQEYSCKLKFKEQSIIDRNPHQVHGIIQASTGKYCSTLLGKWDDSMYYVNGDYSGKGKGYESMSDAHLLWKRSKPPKFPTRYNFTRFAITLNELTPGLKVFF

SEQ ID NO: 151112 - protein, 57 aa, Glycine max
  Clone ID: PAT_MRT3847_107478C.1.pep
GILSRSVTVPRSLNSPRRSKEVSYTYSGNKGCQSYSPPTQVDKSRVRIDSSHSLSSP

SEQ ID NO: 151113 - protein, 60 aa, Glycine max
  Clone ID: PAT_MRT3847_107479C.1.pep
CILVVQVYPKKLPRPNHALLAQLQGFISKYLYAQTLCILYIVKSAYCVEYCPMYSRACIN

SEQ ID NO: 151114 - protein, 51 aa, Glycine max
  Clone ID: PAT_MRT3847_10747C.1.pep
WGTKQDPPHGATLICLRVLVEVLIWCAEPLDGTKVLFLFSLNLGVSVNFRD

SEQ ID NO: 151115 - protein, 80 aa, Glycine max
  unsure (1)..(80): unsure at all Xaa locations
  Clone ID: PAT_MRT3847_107480C.1.pep
RIFNQLANYYAKYMIKHIVDTAVFRIEGTPLSNITYYXKHGYGVGKXNCALDDEWLTRAXTRACPRYIKYNMLVGLGFMI

SEQ ID NO: 151116 - protein, 76 aa, Glycine max
  unsure (1)..(76): unsure at all Xaa locations
  Clone ID: PAT_MRT3847_107481C.1.pep
MLLDFTQNPLPWQKKQHWKSLIPTTXXAAAAVDMDVEIVEAELVRAEPNQNRAREEEVPKSGRRCCTYWSNYDADL

SEQ ID NO: 151117 - protein, 233 aa, Glycine max
  Clone ID: PAT_MRT3847_107482C.1.pep
NSEIVSSSFSFLSIHFFPLSIQFNFTTSMPSNKQSSMPSNPNPRSSEVGNPMRRSFTGNPFSKPSIVPNHGVKTPANSPSADFSRRGSVGIRESGGSLRDSFDDKENGKDQILKPTKVRSPAVSSKGSKNFMSPTISASCKINESPRKKVLIEKNEAVPSPADKKSHVRKVTFAEPLEEKMIDGIIPNFEEGLRSSLSSEDLSGESETSETHYMDVPFDSKMIQICALNLSMM

SEQ ID NO: 151118 - protein, 411 aa, Glycine max
  Clone ID: PAT_MRT3847_107483C.1.pep
PVIPKRMREGEHSSLASNSRGAATEIASSGTSLVSGLDSNSPPCLVELYGSQDSGLQLNGIFGFVVILTSDLELEEDNEDCDLSDGISEDPLCHLPPSKVPHLHCFIHRKLAVHDFLQHNPIVEPRPNLVREIREALLRHLTAVLGNDDLATHFMLLHLLSNVHARADDLAVGKLSLNLTCFSKEIVSVFGKPLSAALKNLLQITFYIPLTVEYLNTLALVPKKYYDTNRLETGVFQLAEGSHLIVDETKLEAGTLNSVGVENTRLLKNLMELQKVEYDFKYYKVDMATDFQLLVLSEGKSNILPADVIVPFRPSATSCSEAVTAEALEAWRWYLATVRQLSHTIEPEMQKVVETDLVAARQADRSLSSQDLSRLVTMGRLMSLSYGETSLSLEHWQTVKELERLRRERLQ

SEQ ID NO: 151119 - protein, 151 aa, Glycine max
  Clone ID: PAT_MRT3847_107484C.1.pep
MALVVEDNDFQHILRILNTNVDGRHKVMYALTRIKGIGRRFSNLLCKKAQIPLTTRAGELKEAQIETIKTILTNPGQFNIPDWFLNRQKDHKDGKNSQAVSNVLDTKLREDLERMKKMRLHRGLRHYWNIRVRGQHTKTTGRRGKQAGKEK

SEQ ID NO: 151120 - protein, 74 aa, Glycine max
  unsure (1)..(74): unsure at all Xaa locations
  Clone ID: PAT_MRT3847_107485C.1.pep
ISGFVPACALSPTLNRLAFISGFRLSACFSHSADGLKWCASLDDPSLNXXAQLILLPXSSSRSAXXCCAQRMAR

SEQ ID NO: 151121 - protein, 35 aa, Glycine max
  Clone ID: PAT_MRT3847_107486C.1.pep
WLQRLMHPSHAGRSGVQGISAGSEGFSRIRRGKRE

SEQ ID NO: 151122 - protein, 174 aa, Glycine max
  Clone ID: PAT_MRT3847_107487C.1.pep
MASACLKLRNLSRGGGAFRCGRYSKLIHAEREREEEEEEVPSSRISRPLSEILKELNKKVPDSLVKTRLQKDQDASPIRFIPWHVVNRILNLHAPEWSGEVRNITYSADAKSVSVVYRVTLYGTDAEIFRESTGTASVDDTSYGDPVQKAEAMAFRRACARFGLGLHLYHEDAS

SEQ ID NO: 151123 - protein, 102 aa, Glycine max
  unsure (1)..(102): unsure at all Xaa locations
  Clone ID: PAT_MRT3847_107488C.1.pep
YAPNIKKWYINSTSNFNFILFINLWKFIFPFLMSLNNWPRSYQNPRLSFLXXXPSSTHTFHEAMVPPQAEFARQARKDERKRCNDSGNLTQYNCISVVEVKG

SEQ ID NO: 151124 - protein, 133 aa, Glycine max
  unsure (1)..(133): unsure at all Xaa locations
  Clone ID: PAT_MRT3847_107489C.1.pep
VLIATLIDMPNAAFGMKRSQGRHLFHEVPTRTVTYVACTICGVTASIDVAVDTMNGAALPHRMLQFEEIEEKAVRKASPDAICTVSSTKARAETAVXADGSPSYAPIGHDRGEPTLPGECAIAVKATPINKPS

SEQ ID NO: 151125 - protein, 67 aa, Glycine max
  Clone ID: PAT_MRT3847_10748C.1.pep
RDWDNSVAGMNTKSVPGGDGKRQLTLQAGLLENSHGLRQEWALATDLQKIYVRLRQRHEAATLPHEL

SEQ ID NO: 151126 - protein, 80 aa, Glycine max
  Clone ID: PAT_MRT3847_107490C.1.pep
MTIVLKSVINRPCILNIYNHILRIYMYPTLKSNYIPQILYLTCLSLSFNHGLCSEMKGIMPPPYCSYPGGPLIFSNPGKS

SEQ ID NO: 151127 - protein, 27 aa, Glycine max
  Clone ID: PAT_MRT3847_107491C.1.pep
SFHERDFVPVTPLTFLMVLFATTGELY

SEQ ID NO: 151128 - protein, 162 aa, Glycine max
  unsure (1)..(162): unsure at all Xaa locations
  Clone ID: PAT_MRT3847_107492C.1.pep
EFCHRIIHSDSPYHNAIYCYKKDNELLLALHIIPQYCYQVIILPLFYVHSLKGAPQGLKQLLSFSKQIRGFSSFYMLAVALYLLPNLLAXAVLFLFPMLRRWIENSDWHIVRFFLWWSQPSIYVGRGMHDSQFALMKXTIFWLLLLTCKFLFSFFVQIKPLV

SEQ ID NO: 151129 - protein, 226 aa, Glycine max
  unsure (1)..(226): unsure at all Xaa locations
  Clone ID: PAT_MRT3847_107493C.1.pep
STKXYQIKLRTGIVDELIVSKNVPTGQVNMLERIASQLQVDTQAENLISSRINNKPSHGSVNGVFKTMEDDVTGECEVMYDISPLPQYQLQSRTELAPMPQLRGDGQLIDIVKTKNFSHCEQRPGYNFGFNALTDVKPASNQMGEFMARSSVSRVVLSGNLQRYTXIQSSVTTNKVILSPVLYNNQKGMVVSRMNLTLASVSSSNSHMEAPTNPRKIKDLVYDYNL

SEQ ID NO: 151130 - protein, 349 aa, Glycine max
  Clone ID: PAT_MRT3847_107494C.1.pep
RLRERQKGQRDQTTDVQKRKSLVDVSVSTNKSVLRRWSAGMGETSVQDQAEHVPEDPVPVTSNDVVHAEAPTNSEVGVVSDFITESHNNNDNTDPDVKPERQENIGSFAADNPDETNPTVKGETNKKLAASAEWNQRKQEEFNQILKKMVESKPVLFGKSKPSRNQNISFEQRGGSYDNYKEKRDAKLRGAKAGKQVEKEAQFQQMQQLLDKRKVEMPKSVSASKKSSPRMPQNSLRKSTPPANSTKETSKPLTTKKISSRTSPMPATRKSWSATPSPRAAGTSPAKVRGGISSANTTPTRRKPVSTTSVPQPTSQREKSMPWNRNEKETQTNNARSLKSMDEKRQPAV

SEQ ID NO: 151131 - protein, 95 aa, Glycine max
  Clone ID: PAT_MRT3847_107495C.1.pep
LIIPRLIFLIERDQNVRQRSSRSRIIREILARIQGCQALIKTCPPRLNLHARGRVQALIHSLSHNNVPRLLISNFFKSFIASLDSLRHCFMKDGI

SEQ ID NO: 151132 - protein, 47 aa, Glycine max
  Clone ID: PAT_MRT3847_107496C.1.pep
LILVINWIISILLLLFIFNHRNCAVVIKQQFHYESKKEQQFHCLNSG

SEQ ID NO: 151133 - protein, 59 aa, Glycine max
  Clone ID: PAT_MRT3847_107497C.1.pep
SVKSIDVHEHLLMFPCFVSKKCVKTVRKFWCEIYTKAYVWKTRWILKRNLSIDKSRKDS

SEQ ID NO: 151134 - protein, 113 aa, Glycine max
  unsure (1)..(113): unsure at all Xaa locations
  Clone ID: PAT_MRT3847_107498C.1.pep
RVSANSVHPKASVYANDNSYTDSQKHPLRPYLDYIEYLYQIMDPLSDQEHFQHIMPSRLQEFLTXPMQPLIDTTETHTYDTFKRDSHKSIHYKLPIIQSFIHKLTDQNTSIKT

SEQ ID NO: 151135 - protein, 97 aa, Glycine max
  unsure (1)..(97): unsure at all Xaa locations
  Clone ID: PAT_MRT3847_107499C.1.pep
IFLGKNPLGNFVELPANPQGLYYCHLLRGVIKGPLKMGSIKTKETGLRNVLPGNNVFXLQVKFFKHVPKKYPPKDAEGIFFEELKTPGFHYFIISAL

SEQ ID NO: 151136 - protein, 64 aa, Glycine max
  Clone ID: PAT_MRT3847_10749C.1.pep
ASKKIRKSPGKKWTLQDTSQFIYVHLAKRQWETENCIKIYIHPLGHRIFLIKYRHNIFCEFPYQ

SEQ ID NO: 151137 - protein, 230 aa, Glycine max
  Clone ID: PAT_MRT3847_1074C.1.pep
MVTRDEGVIQSFYFGWGFRDYVREKSEGKGRGCRDLVNGQKSDFTKLCSANSTVGDGNSRSIKRKRWPIVHSLETAHLAMCPNPEARKNLSVLKKMVKFLKPNKAVIVLQGRYAGRKAVIVRTFDEGTRERPYGHCLVAGIKKYPSKVIKKDSAKKTAKKSRVKAFVKLVNYQHLMPTRYTLDVDLKDAVTPDVLATKDKKVTALKETKKRLEERFKTGKNRWFFTKLRF

SEQ ID NO: 151138 - protein, 49 aa, Glycine max
  unsure (1)..(49): unsure at all Xaa locations
  Clone ID: PAT_MRT3847_107500C.1.pep
CFICYKQSKGAFIAVYRYASATPLPPSILSRRIGXQGVGILLSRLFGKN

SEQ ID NO: 151139 - protein, 130 aa, Glycine max
  unsure (1)..(130): unsure at all Xaa locations
  Clone ID: PAT_MRT3847_107501C.1.pep
MALETLASNEFSNFIIYDTISATPFSSHGSPEASFLESLVNYQEHDPAFDNSALRTRNHQAGEQESVGRRQNVVGVQVQGRKKRRRKPRVCXNKEEAETXRITHITVEXNXXXQMNEHLXVLRSLMPESY

SEQ ID NO: 151140 - protein, 160 aa, Glycine max
  unsure (1)..(160): unsure at all Xaa locations
  Clone ID: PAT_MRT3847_107502C.1.pep
MLVDQDLLTRDEXISDSLLLKEXIANGMLXDAEGKSIREXAADVYIGANPSSLGGGDDHGVDDAFXEVLTLXTFRLQDQPXCDMNQADTLMKRFIKNKTXPKLDAXEQQXLDNKLIEXQLAYLLYKIQDVQFLRCDILCDDACLNCAYYKDSAGASTLLI

SEQ ID NO: 151141 - protein, 55 aa, Glycine max
  Clone ID: PAT_MRT3847_107503C.1.pep
PTKKCGVTSLDKTRGSVCQVPTPQKEFWPRCSTKKILLTWPSFSFPPIIISPIIG

SEQ ID NO: 151142 - protein, 107 aa, Glycine max
  Clone ID: PAT_MRT3847_107504C.1.pep
MSQLGVALQESLRTQREARSTILGLLREQMDGVDGGTRRRRSLKERFGFIGMGCCGASWGFRSDALSVNQGEQEQQQETDSGRVAAPECVGPAGSGSGMNLAAALAA

SEQ ID NO: 151143 - protein, 135 aa, Glycine max
  Clone ID: PAT_MRT3847_107505C.1.pep
EIVKHQAYKNVYDLKLIEETKLNYLNLAACLKARQSDTQDQGLQHVNISTAQGICNGITFGYFIISYSVSLSKTLNLQGINHYSLSKGYGRTGYAIRIFCLADILKLEGEYINSHCAILPKLFKHKGFCFFIYLK

SEQ ID NO: 151144 - protein, 115 aa, Glycine max
  unsure (1)..(115): unsure at all Xaa locations
  Clone ID: PAT_MRT3847_107506C.1.pep
DTCTKRKQNLLLKNSFASVSMGDEKPFDFLRILFEGVIAGGTAGVVVETALYPIDTIKTRLQAARGGEKLILKGLYSGLAGNXASALFVGVYEPIKQKLLRVFPEHLSAFTHLIG

SEQ ID NO: 151145 - protein, 324 aa, Glycine max
  Clone ID: PAT_MRT3847_107507C.1.pep
MGLFTLSVMVNDSAISLPDTCTKRKQNLLLKNSFASVSMGDEKPFDFLRTLFEGVIAGGTAGVVVETALYPIDTIKTRLQAARGGEKLILKGLYSGLAGNLVGVLPASALFVGVYEPIKQKLLRIFPEHLSAFTHLTAGAIGGIAASLIRVPTEVIKQRMQTGQFASASGAVRFIASKEGFKGFYAGYGSFLLRDLPFDAIQFCIYEQIRIGYMLAAQRNLNDPENAIIGAFAGALTGAITTPLDVIKTRLMVQGSAYQYKGICVRALTMVEGPRPRAFGMGPGPRGLGIGGAGSFGVRESTKRLRVLSRPPPPLPPYSESGKG

SEQ ID NO: 151146 - protein, 79 aa, Glycine max
  Clone ID: PAT_MRT3847_107508C.1.pep
FFWRVTVCKFEDFSSLGCDIRPSSFLNRLLRGLALPLGNHMAARRGCVYLTIDCCAYCSTMGSDHHTNGSFGAKACGSL

SEQ ID NO: 151147 - protein, 54 aa, Glycine max
  Clone ID: PAT_MRT3847_107509C.1.pep
LNRIWGRWFKSYIGFELFDDFGKVICYTRILNVAVLLRSGVCNVRSRGRLRGRK

SEQ ID NO: 151148 - protein, 51 aa, Glycine max
  Clone ID: PAT_MRT3847_10750C.1.pep
TLQLDWSNGMKKMEYSLRYIIDYCINLSTRSVMVHFFPISKLMQKTAESIW

SEQ ID NO: 151149 - protein, 38 aa, Glycine max
  unsure (1)..(38): unsure at all Xaa locations
  Clone ID: PAT_MRT3847_107510C.1.pep
PLNMSPYGSPDSMETSLSVEPGATKENHYYLRKKKXKG

SEQ ID NO: 151150 - protein, 187 aa, Glycine max
  unsure (1)..(187): unsure at all Xaa locations
  Clone ID: PAT_MRT3847_107511C.1.pep
LHVLAYLFEHRSEKGNKTYVLLFLIPLSSLLISSSPTTLKFFILREDQAVIYGNSNSIPLSSMLLFLLLXPCCICSSPLQDPELVVEDVQKSINASRRNLAFLSCGTGNPIDDCWRCDPNWEKNRKRLADCSIGFGKHAVGGRDGKLYVVTDPGDHPVNPKPGTLRYGVIQEEPLWIIFKRDMVIKL

SEQ ID NO: 151151 - protein, 86 aa, Glycine max
  Clone ID: PAT_MRT3847_107512C.1.pep
FTHSLLGKHLIIRTEKGKKQSLHKMNKRNPNHRWVVNLSRFGLLLALIAAAWCVLTPARANSTTIYEELQAQGLTMELVPEEIAKY

SEQ ID NO: 151152 - protein, 76 aa, Glycine max
  Clone ID: PAT_MRT3847_107513C.1.pep
PKAFYFSRKYILWEKLGAGINCLIAVFSTCSKICKLINCLIVEFRRKFNFVHCWEFLYGKCWPFLRYIPAPTSRRI

SEQ ID NO: 151153 - protein, 93 aa, Glycine max
  Clone ID: PAT_MRT3847_107514C.1.pep
RTSSQVVTTVNRAGAGLVVQLTGLKSMVGFPTRKTNIAFTSIVGTGGGVHCLQGWPPIGKKKLGTFSYLPDLDDAQLAKEVDSLLRKGWIPCL

SEQ ID NO: 151154 - protein, 133 aa, Glycine max
  Clone ID: PAT_MRT3847_107515C.1.pep
MRFFFEFVSCCGLPTQRSPEPVVPAKEEERSLVPATAVAVVPSRKKMRMGSAEWRPSLGSISEDVTPPAPALRDRESPRKGEVASAGRDAKKRSAGGGGTAKVRHRSFSNAYYGSAPSMPTMIPTFSPTPFMF

SEQ ID NO: 151155 - protein, 48 aa, Glycine max
  unsure (1)..(48): unsure at all Xaa locations
  Clone ID: PAT_MRT3847_107516C.1.pep
XDIXTXTXXXXHKXAXLXSQXTXHXHXXDXXXXXXXXEFXAXVEHXXX

SEQ ID NO: 151156 - protein, 91 aa, Glycine max
  Clone ID: PAT_MRT3847_107517C.1.pep
FPSSFASPVYFPNSYNNTPLFFFLSQLASLHLTILILLYLIFLSLSSISEFLFQQLSRKKLELEVCSRSCKTPCSIRKIRGLLPAWKIPLQ

SEQ ID NO: 151157 - protein, 312 aa, Glycine max
  unsure (1)..(312): unsure at all Xaa locations
  Clone ID: PAT_MRT3847_107518C.1.pep
MQNSVLDPQDQRVTSCMEDSTAMTIEFLRARLLSERSISRSAKQRADELAKKVMELEEQLKTVILQRKMAENATADVLAILESQGISDVSEEFDSGSDLENPCDSSVSNECAKEGEEPMSSKGRQHGSDKMPGSNVDSSPVSSKSLSWKGRHDSSHSLEKYKTSNLRQXSSFSSISSSPKHRQGKSCRKIRHRQIRLVVEESRNKFANHEKELASLSKGFPNFLDGGSNMPKIESEIQEEGGSEANPLNKNHHVDGYGREKDMEKALEHQAQLIDQYEAMEKVQREWEEKFRENNSTTPDSCDPGNYSDMTG

SEQ ID NO: 151158 - protein, 59 aa, Glycine max
  Clone ID: PAT_MRT3847_107519C.1.pep
DGGNNKGEGEVSSGKPAEQSAKPASEPPKQDYIHVRARRGQATDSHSLAERVIFCFYCT

SEQ ID NO: 151159 - protein, 20 aa, Glycine max
  Clone ID: PAT_MRT3847_10751C.1.pep
YLGPIDELNVVIPFYRIFES

SEQ ID NO: 151160 - protein, 167 aa, Glycine max
  Clone ID: PAT_MRT3847_107520C.1.pep
SIPASVSAAPRQTAVAPSAIVSASTTSKSSNRSRALATSSNNDGSSDEDGIGDVDAQKKKERRRQQVRYASRRRPKMQRDVESFLRDRIAELKEQIRIIGGDLTEQCSQMAGMSEQALTEAYEKQMATVQTLRKDNNKLKEQLLQHENFARMIQYGLNALPSDCRDV

SEQ ID NO: 151161 - protein, 130 aa, Glycine max
  unsure (1)..(130): unsure at all Xaa locations
  Clone ID: PAT_MRT3847_107521C.1.pep
HYESAQEWKRSAIDDYSHTYMDRPPRKRVRVXATTLWFTRFRMDSLCGQEVENIICYAASEHTSSCLFKGVARNGTPTRGDDDINGHTMLELVDNXTSDYTIHAIMGEXTFEQVSECCDREWKEKHSIKI

SEQ ID NO: 151162 - protein, 178 aa, Glycine max
  Clone ID: PAT_MRT3847_107522C.1.pep
LISLRDANQLPSLHICPRCTQRIPLHTAHVLRAGMRLAIRGGIIGLLHLPRQRPLSTTFLSQKRSDPKHGLFRRYSLTLPFRLGSCGLAPRLFLLLYRCLCFFLSRVDWTAAPRQHRCHFAAFPSRSVLEGALRGILVVIPRGSFSLYLDFHMFCLCLGGGLPSELLPPLSAGPVLVP

SEQ ID NO: 151163 - protein, 169 aa, Glycine max
  Clone ID: PAT_MRT3847_107523C.1.pep
MGKAAIIILASTLCFLSFLGSAYARARFMVEGTVYCDTCRVQFLTKLSEILEGATVRVTCSQVDNAKNVTFSKEAVTDASGSYKVEVEGDHEEDTCEVTLLKSPRPDCSEIDRESHLQQAARISITKNNGIVSPLRQANPLGFLKKDRLPGCADLLKELGINEDGTLSV

SEQ ID NO: 151164 - protein, 79 aa, Glycine max
  Clone ID: PAT_MRT3847_107524C.1.pep
LISSVVLDQVIAGRKMMECCKIAIVLTIYIMAMLVFAHCCVAENVAEDVAAIPPTPMESAGVHLCASAVFVVTALVVAM

SEQ ID NO: 151165 - protein, 69 aa, Glycine max
  unsure (1)..(69): unsure at all Xaa locations
  Clone ID: PAT_MRT3847_107525C.1.pep
KXGXSENFFHCYKFCFFYSTLLINIHPFLQPPHHHDCPFYFNPLFESLKNISFIPSTHTFFIFFFIYFI

SEQ ID NO: 151166 - protein, 89 aa, Glycine max
  Clone ID: PAT_MRT3847_107526C.1.pep
GQVRRTKERSHGPHQPWPSRKSSNSPMPASRAWNKNGKSNQEDKGDLTCTSRHLFQCLVCFFFCCVLFGVLFFGFARNSTTFPTRPRTR

SEQ ID NO: 151167 - protein, 124 aa, Glycine max
  Clone ID: PAT_MRT3847_107527C.1.pep
ACYFGLILWAESNVSFGPDFGFSYGLRVVNCRLFSGCSPAPPLFLVPKFNWPWGLGGLPWAEKGASHFVFLLGGGGGVIIFSPPFCFIFPDRFWGDPIPPLWVFLFGKPSKLFCWKPSGPLFLP

SEQ ID NO: 151168 - protein, 76 aa, Glycine max
  Clone ID: PAT_MRT3847_107528C.1.pep
LSLGRLSNRRSPSLDRKWLIWLRPSLPIDLWLGRGMPFNPYLRGYLFHFCFSKVGFDGASTRDLTFFTLRIVQDAG

SEQ ID NO: 151169 - protein, 50 aa, Glycine max
  Clone ID: PAT_MRT3847_107529C.1.pep
FVCGLWVALCSSSGRLPFRLVLGLPFSRPLKPGAWVGPAGPARPVPACLL

SEQ ID NO: 151170 - protein, 86 aa, Glycine max
  Clone ID: PAT_MRT3847_10752C.1.pep
HTFVSLVVEQFPFSSFSWLSNLIQCLILAACFQFILFHPSSINYESWHDIYTLFIVCIRIPFSFFFSLVFILLSRYKFLSKCLLII

SEQ ID NO: 151171 - protein, 255 aa, Glycine max
  Clone ID: PAT_MRT3847_107530C.1.pep
MSCRKRQKTSPDKTSDCFDSLPDDLVLSILCKLSSTATSPSDFISGLITCKRLNFLGLHSLVLSKACCKHSQSGSNPASTTRPGEGSDELYAPALYSLAVIQFNGSGGTKNDKDLRAGVALCARAAFLGHIDALRELGHCLQSARGVKQNVTEGRRFLVQANVRELAAVLSAGNNKRPWLTWSHQPVPHPRLRSETGSGCPLLSDYGCNVPAPEVHPASQFMSEWFDIRRVPSAGMRLCSQSGCGRPETRRHEFR

SEQ ID NO: 151172 - protein, 241 aa, Glycine max
  Clone ID: PAT_MRT3847_107531C.1.pep
FDGTRSKLLDWKKRFNIIEGISQGLLYLHKYSRLKVIHRDLKASNILLDENMNPRISDFGLARMVTRQESTTNTSRIVGTYGYMSPEYAMEGVFSVKSDVYSFGVLLLEIVSGRRNTSFYDGDRFLNLIGHAWELWNEGACLKLIDPSLTESPDLDEVQRCIHIGLLCVEQNANNRPLMSQIISMLSNKNPITLPQRPAFYFGSETFDGIISSTEFCTDSTKAITTSREIESRNIKKASRA

SEQ ID NO: 151173 - protein, 347 aa, Glycine max
  Clone ID: PAT_MRT3847_107532C.1.pep
MSCRKRQKTSPDKTSDDFFDSLPDDLVLSILCKLSSTATSPSDFISVLITCKRLNSLGLHSLVLSKASHKTFSVKAKNWCDSLHRFLKHCADAGNIEACYTLGMIRFYCLQNRGSGASLMAKAAMNSHAPALYSLAVIQFNGSGGTKNDKDLRAGVALCARAAFLGHIDALRELGHCLQDGYGVKLNVTEGRRFLVQANARELAAVLSAGNTKRPWLTWSHHPVTHPRLRSGCPLMSDYGCNVPAPDAHPASQFMSEWFDIRGGFPGPDMRLCSHSGCGRPETRRHEFRRCSVCGVVNYCSRACQALDWKFRHKAECAPVERWLDDDDEDVAGENDGGDDGVMMVDS

SEQ ID NO: 151174 - protein, 114 aa, Glycine max
  Clone ID: PAT_MRT3847_107533C.1.pep
EIRSRGSDKRERRRGGGGGGNGVCVCVCVCVGDCRHHHRHHRSVYKKNFFSTTFCVGDGNGTLSLSLCFYLCVVLLELKLPKHNNIKPHVQQSFSIFWSASFLHPPFGGLFPPS

SEQ ID NO: 151175 - protein, 114 aa, Glycine max
  Clone ID: PAT_MRT3847_107534C.1.pep
MGFSQDPCTDSNAPTSTSSTLVVDHYCDYDKLKFKTFLRKMFWEFGLACVANPSQRRRSSGDGKKTNMENNKAWLLAESGGCGAELTNADPQSVHSSFRFSFCSLVDRGVLNMS

SEQ ID NO: 151176 - protein, 102 aa, Glycine max
  unsure (1)..(102): unsure at all Xaa locations
  Clone ID: PAT_MRT3847_107535C.1.pep
KISLXPGESGDCYSTYLSPSDVNSIGXGWATLIAYRMGNERYFFNRTVWNKIHXRLDRLSSXAHYEPDITRLASGHTLFALPSYTLPGTMLISAYFGRCGLQ

SEQ ID NO: 151177 - protein, 44 aa, Glycine max
  unsure (1)..(44): unsure at all Xaa locations
  Clone ID: PAT_MRT3847_107536C.1.pep
TFIKHYYLTPGTPIRIXHXSYLILVNSHNIGGRERGKGGWVLRY

SEQ ID NO: 151178 - protein, 57 aa, Glycine max
  Clone ID: PAT_MRT3847_107537C.1.pep
VKELFLNYLIGVIIFFVRMKYQCTSLSLIEQANRFFLFLSFTKYLIEVIIIFLRKKF

SEQ ID NO: 151179 - protein, 83 aa, Glycine max
  Clone ID: PAT_MRT3847_107538C.1.pep
SHIIIINPGRMRVSESHQRTPVSSHNRKHPFKWWCSLLQMALTWATTWCMTHEMQAVECDSETAFRGLFAEGPWRMACYEGYA

SEQ ID NO: 151180 - protein, 62 aa, Glycine max
  Clone ID: PAT_MRT3847_107539C.1.pep
TKTKKNFTKKKKKRGPKRKYPKHGPGENPQNNWAWETPRLKNPGPGEKKKKKNPGPQGPRGG

SEQ ID NO: 151181 - protein, 64 aa, Glycine max
  Clone ID: PAT_MRT3847_10753C.1.pep
MATVRTPLNSDSSRQKVCELSIDLLGGGMVPKRREPEIPGDFVIGVKLTSINNMCAYGLNPGIS

SEQ ID NO: 151182 - protein, 80 aa, Glycine max
  Clone ID: PAT_MRT3847_107540C.1.pep
TSSIHRLRLSLLKATESVISEGTISGVSEILNDVIHEAELLRTALGSSLPTSWSAEADISYIGYNVGSDTGIRARNPGIL

SEQ ID NO: 151183 - protein, 102 aa, Glycine max
  unsure (1)..(102): unsure at all Xaa locations
  Clone ID: PAT_MRT3847_107541C.1.pep
RSGSSVSESFYYRSMTSYASWISKPCVEGRGSSQSPLPNAGAWIVWSVRIFHDCIMTITGSSESLSFKECSESGSMIYDVRESVVSMCXHXXXXXXPPXDXT

SEQ ID NO: 151184 - protein, 81 aa, Glycine max
  unsure (1)..(81): unsure at all Xaa locations
  Clone ID: PAT_MRT3847_107542C.1.pep
VHRFGLRRLASGPGCDALLCLPFVVCVFPSPLWCGFLFATLLLAPLPLFGGLRRGAFCPPCLQVFASLSLLLXPASKRKGG

SEQ ID NO: 151185 - protein, 325 aa, Glycine max
  Clone ID: PAT_MRT3847_107543C.1.pep
MSSSAGKLVCVTGAAGYIASWIVKFLLERGYTVRATVRNPNDHTKVEHLLKLEGAKERLHLFKADLLGENSFDSIVEGCDGVFHTASPFIINVKDPQADLLDPAVKGTLNVLKSCVKSPSVKRVILTSSVAAVAYNKRPKSPEVVVDETWWSDPDYCRELKLWYLLSKTLAEDAAWKFAKENDLDLVVVNPAMVVGPLLQAELNTSAAIILNLINGSETFSNDTYGWINVKDVANAHIQAYEIASASGRYCLVERVAHYSELARILRDQYPTYQIPEKSADDKPYVPTFQVSKEKAKTLGIEFIPLEVSLRETVETLKEKNFANF

SEQ ID NO: 151186 - protein, 251 aa, Glycine max
  Clone ID: PAT_MRT3847_107544C.1.pep
MMKKKPSARENSSSSTTAAREEESEWEMRPGGMLVQKRTTNTDVVTRNLRLRIAYGALRYEICVSSIATFGEVKKVLSGETGLEVDEQRLLYRGKERENGEYLDVCGVKDRSKVVLIQDPSSIERRFIQMRINAKIQTAHRAINNVAVQLDQLADQVSAIEKSISNGVKVPEVQITTLIEMLMRQAIKLESISAEGDASAQKNLQGKRVQKCVEKLDQLKVFNARIKPVVVTTKWETFDHPPSSTTWELFD

SEQ ID NO: 151187 - protein, 45 aa, Glycine max
  Clone ID: PAT_MRT3847_107545C.1.pep
VRTPVKICSLSCLDRNTSYNRMSGVCIKKIIPLLYIMMGNVKKTT

SEQ ID NO: 151188 - protein, 70 aa, Glycine max
  Clone ID: PAT_MRT3847_107546C.1.pep
SSLKVKLNYIHLVSTKAIGKHNPSIFSNITSAYSQHKTSSIYINNLTSITQALHLNLKPNLYHTLPYFLS

SEQ ID NO: 151189 - protein, 224 aa, Glycine max
  Clone ID: PAT_MRT3847_107547C.1.pep
MACWSAENATKAYLSTLKMGQKCKEPDVAEFISALAAGNNAQLMVVACGGAADSTTLALVAAANQTGGKVICIVPSHEELRASKISMGRMASHQVQFMVGEAQEVLLEHYDQAADFVLIDCNLENHEEILRAVQEGRKQNGTVVVGYNAFSCRKSCLACGSKTQLLPIGGGLLVTRFGVSETSPKYGNRIMGKVKSRWVVKVDKCTGEEHVFRVRFPQRKVVQA

SEQ ID NO: 151190 - protein, 76 aa, Glycine max
  unsure (1)..(76): unsure at all Xaa locations
  Clone ID: PAT_MRT3847_107548C.1.pep
GHHTTISLARHTKNLHTLNLSXYANLTNNKLNVIIDSYFSLKLLKLFKYSLITNIFLNKHSNPEIQILKLKISPLL

SEQ ID NO: 151191 - protein, 116 aa, Glycine max
  Clone ID: PAT_MRT3847_107549C.1.pep
RWFRSVDPMDLPSSNLLDGGAETLSLLIVMQTSLTVMRIDDQYHRCARSEPHQLPNLKTVPHWRCLNAVFGRGVWSERRERVFSDSVVTLFPLSFHTSSDERIVDWFCMVAFSVCF

SEQ ID NO: 151192 - protein, 92 aa, Glycine max
  Clone ID: PAT_MRT3847_10754C.1.pep
RLQTGKKNLTKNKNPFLFKYPTTATSSLSARSSFALLTMETMPLFHDLRSVAVTTSIFSDLRSVLDNNDDNDDASPPMRVDLLRYYPHLEDP

SEQ ID NO: 151193 - protein, 39 aa, Glycine max
  Clone ID: PAT_MRT3847_107550C.1.pep
AGRYRRRLTLIMYDSRATCVGHCVCVRFFDCYYANRMCR

SEQ ID NO: 151194 - protein, 171 aa, Glycine max
  unsure (1)..(171): unsure at all Xaa locations
  Clone ID: PAT_MRT3847_107551C.1.pep
GAPMVVEKVVGYIETPHGLRSLATVRAEHLPKDCRRRYDKNWNQSKKKALTKTHKKWQDELGRFFIERNIKKHVRYCTVIRGNXHTQMKPKRHRQKKDHITENPLKGGATEDKGSGRESTREKHNQENKDFKDDPKNRLKWGAEQAMKRKERTGRWRTEQATRKKPKGAPK

SEQ ID NO: 151195 - protein, 82 aa, Glycine max
  Clone ID: PAT_MRT3847_107552C.1.pep
INDYGRLCKPDTADASVRMYDMASLCPLNDRVEKQCPWIMFLPTHGDRLEVYDPWHQKGYAIHMPDAAGYDSSYTHYGRLLR

SEQ ID NO: 151196 - protein, 111 aa, Glycine max
  Clone ID: PAT_MRT3847_107553C.1.pep
PSKSRIFLLKDLFAELRYPSKSPECGSLAGLTLGETKTTLPRLGAKDSSCIQVVNHACLERTAPYGPLHSATVLINPAPPCYMHYTVTPPHGGFFRTPPDICHVNFPFMYR

SEQ ID NO: 151197 - protein, 65 aa, Glycine max
  Clone ID: PAT_MRT3847_107554C.1.pep
SHYLPSLLLCDTFISMAIFSMHMPFIPIFSLPTSSSLKNFCISVILCPVMSTIIRPLNRSICNFL

SEQ ID NO: 151198 - protein, 61 aa, Glycine max
  Clone ID: PAT_MRT3847_107555C.1.pep
RVRLYWTVRLRSFGEIDHAGAAYPSVPVILLWLKQNSVERRGRTTTPFCVLTFNLVSSSIY

SEQ ID NO: 151199 - protein, 66 aa, Glycine max
  Clone ID: PAT_MRT3847_107556C.1.pep
VKKGVIMFYRLEKNHVLNVTTKNMYQGVQKPLKRLEEETQNILVETSLKGKSLDFNMSRGGKVCNI

SEQ ID NO: 151200 - protein, 52 aa, Glycine max
  unsure (1)..(52): unsure at all Xaa locations
  Clone ID: PAT_MRT3847_107557C.1.pep
QIPIVSKDHVKVSFSGLKFNVIYINKICISIKKXXKXKKKKKKKKKKKKKKK

SEQ ID NO: 151201 - protein, 221 aa, Glycine max
  Clone ID: PAT_MRT3847_107558C.1.pep
MALPQQHTVDYPSFKLVIVGDGGTGKTTFVKRHITGEFEKKYEPTIGVEVHPLDFHTNCGRIRFYCWDTAGQEKFGGLRDGYYIHGHCAIIMFDVTARMTYRNVATWHRDLCRVCENIPIVLCGNKVDVKNRQVKAKQVTFHRKKNLQYYEISAKSNYNFEKPFLYLAKKLAGDQGLHFVEMPALAPPDVVIDIATQQLNEEEICRAAAQPLPDDEDDLFE

SEQ ID NO: 151202 - protein, 129 aa, Glycine max
  Clone ID: PAT_MRT3847_107559C.1.pep
LSFLFQVVLLLQRIEGVEVCLFGMYVQEFGSECQFPNQRRVYLSYLDSVKYFRPEVKAVTGEALRTFVYHEILIGYLEYCKKRGFTSCYIWACPPLKGEDYILYCHPEIQITPKSDKLREWYLAMLRKA

SEQ ID NO: 151203 - protein, 60 aa, Glycine max
  unsure (1)..(60): unsure at all Xaa locations
  Clone ID: PAT_MRT3847_10755C.1.pep
GLNVKSQQIKQPNFNEVSTSQFKRRREGKTDYRARIRLINQDKNKYNXRNILCCRSAQDM

SEQ ID NO: 151204 - protein, 40 aa, Glycine max
  Clone ID: PAT_MRT3847_107560C.1.pep
MEGIFYYSCSLAGHWGLRKLSGRYHDIHHSIDGDTDMAFS

SEQ ID NO: 151205 - protein, 881 aa, Glycine max
  Clone ID: PAT_MRT3847_107561C.1.pep
MESFFTEVTAYPPAHVVHEKLSEMKMDNNNADDKMPIAEPVKYDEPANLARPENIKTEKETGQDRKENVVQTSENAAGTKSGKPKIKGVSLTELFTPEQVREHITGLRQWVGQSKSKAEKNQAMEHSMSENSCQLCAVEKLTFEPPPIYCTTCGVRIKRNNMYYTTGTGDTRHYFCLPCYNDARTENIIVDGTPIAKSRLEKKKNDEETEEWWVQCDKCEAWQHQICALFNGRRNDGGQAEYTCPNCYIQEIERGERKPLPQSAVLGAKDLPRTILSDHIEQRLFKRLKQERLERARLQGKSYDEIPGADALVVRVVSSVDKKLEVKPRFLEIFQEENYPTEFPYKSKVVLLFQKIEGVEVCLFGMYVQEFGSECQFPNQRRVYLSYLDSVKYFRPEVKAVTGEALRTFVYHEILIGYLEYCKKRGFTSCYIWACPPLKGEDYILYCHPEIQKTPKSDKLREWYLAMLRKAAKENIVVDLTNLYDHFFVSTGECRAKVTAARLPYFDGDYWPGAAEDLIYQLRQEEDGRKQNKKGTTKKTITKRALKASGQSDLSANASKDLLLMHKLGETICPMKEDFIMVHLQHACTSCCILMVSGNRWVCRQCKNFQICDKCYEAELKREEREQHPINQREKHTLYPVEITDVPSDTKDKDEILESEFFDTRQAFLSLCQGNHYQYDTLRRAKHSSMMILYHLHNPTAPAFVTTCNICRLDIETGQGWRCEVCPEYDVCNACYQKDRGADHPHKLTNHPSMADRDAQNKEARQLPVLQLRKMLDLLVHASQCRSAHCQYPNCRKVKGLFRHGMHCKIRASGGCVLCKKMWYLLQLHARACKESECHVPRCRDLKEHLRRLQQQSDSRRRAAVMEMMRQRAAEVANSSG

SEQ ID NO: 151206 - protein, 222 aa, Glycine max
  Clone ID: PAT_MRT3847_107562C.1.pep
TFFDTRQAFLSLCQGNHYQYDTLRRAKHSSMMVLYHLHNPTAPAFVTTCNICYLDIETGQGWRCEVCPEYDVCNACYQKDGGIDHPHKLTNHPSMVDRDAQNTEAREVRVVQLRKMLDLLVHASQCRSAHCQYPNCRKVKGLFRHGMHCKTRASGGCVLCKKMWYLLQQHARACKESECHVPRCRDLKEHLRRLQQQSDSRRRAAVMEMMRQRAAEVANNAG

SEQ ID NO: 151207 - protein, 51 aa, Glycine max
  unsure (1)..(51): unsure at all Xaa locations
  Clone ID: PAT_MRT3847_107563C.1.pep
DIIQNHAKPIFLSDLVFTIKIAAPNAGFVQLIMHLXKHNGIFEIHESQEYH

SEQ ID NO: 151208 - protein, 99 aa, Glycine max
  unsure (1)..(99): unsure at all Xaa locations
  Clone ID: PAT_MRT3847_107564C.1.pep
ICNRSLETGSASGCFVRNFLGFAENEFFQFLRLGIICTSXHPLRGPSMSQPAPPPKFFRNVLESLFSVRAFPSRAVGGLLFIAYPVKFLMECMFEILTF

SEQ ID NO: 151209 - protein, 479 aa, Glycine max
  unsure (1)..(479): unsure at all Xaa locations
  Clone ID: PAT_MRT3847_107565C.1.pep
MSFASSFSMLRHRAVAAYAPTLLLRRFRCLPTIAARHQQQQQNPNKQAAAPSRNLLKAKQTLKEYSCLAPVLSLEDSPPLTESQAIGVVAASQANFMRVIVPENDEPSGSFRGVEILCVVRALLKKIKQRVMVRVIVPENDEPSGSFRGVEILCVVRALLMLVPPGAIVGHLLLRGSLEHPKPEPLNLTRFPRQAESTGIPLMLALNKTELVDNEIISSWKARLRSWGYEPVFCSVESGHGLDLLGYKLRDQTTVIVGPSGVGKSSLINALRSNPSDAAEGDNWFEPILGSKWLEDQRVGEVSTRSGRGKHTTRHVSLLPLSEGGFLADTPGFNQPSLLKVTKQSLAQTFPEIRKMLSANETEKCSFNNCLHLGEPGCIVKGDWERYSYYFQLLDEIRIREEFQLRTFGTKREGDVRLKMGDMGVQQAEPRLEPKKHRRQSRKRINQSILDELDDDDEXDNLLDEENDPILRALRNENS

SEQ ID NO: 151210 - protein, 70 aa, Glycine max
  unsure (1)..(70): unsure at all Xaa locations
  Clone ID: PAT_MRT3847_107566C.1.pep
GVVVSNNMPKSVAVAGDRLFYHKVSDPYVKRTCYFMGHDENNLWDIGDEGRLDPSXTLSNHKHWVVAEML

SEQ ID NO: 151211 - protein, 55 aa, Glycine max
  Clone ID: PAT_MRT3847_107567C.1.pep
TPPHAARTYTESLISPRLPIYLLLSSTAPSWRPRHRTPQRMATKAFRNALIARLC

SEQ ID NO: 151212 - protein, 72 aa, Glycine max
  unsure (1)..(72): unsure at all Xaa locations
  Clone ID: PAT_MRT3847_107568C.1.pep
AXRQLWXSRAXSYLRXSVFHRGXSNVVKDLKYAXSHEWVKVDENSATXGITDHAQDHLGKVVEVNEALNSSP

SEQ ID NO: 151213 - protein, 69 aa, Glycine max
  Clone ID: PAT_MRT3847_107569C.1.pep
NKNMHWLLNLTDEQISETNEAVNLFDQERQGMMNVSVYQGLGFRMDMIYAFGAFEERRSLLRYWIRKIR

SEQ ID NO: 151214 - protein, 52 aa, Glycine max
  Clone ID: PAT_MRT3847_10756C.1.pep
FRNGPCPSTIVSVEDDEVGEHCEISLHNTSQSALCQVPHQMLAQELKFNLKS

SEQ ID NO: 151215 - protein, 175 aa, Glycine max
  Clone ID: PAT_MRT3847_107570C.1.pep
MAEEVTRVMVAVNESSIKGYPHPSISSKGAFDWTINKIVRDNVSAFNLLFLHVQVPDEDGFDDMDSIFASPDDFKNMNQRDRIRGVHLLEYFINRCHEIGVVCQAWIMHGDPKEVICHEVKRLRPDLLVVGSRGLGPFQKVFVGTVSEFCWKHAECPVISIKRKPDETPQDPVDD

SEQ ID NO: 151216 - protein, 146 aa, Glycine max
  Clone ID: PAT_MRT3847_107571C.1.pep
MSSGSFSTKPQWIYDVFINFRGGDTRRNFVSHLYYALSNAGVNTFFDEENLLKGMQLEELSRAIEGSQIAIVVFSETYTESSWCLSELEKIVECHETYGQTIVPIFYDVDPSVVRHPTEHFGDALEAAAQKKYSAKDKEYGFSRWK

SEQ ID NO: 151217 - protein, 84 aa, Glycine max
  Clone ID: PAT_MRT3847_107572C.1.pep
RVTRFISHLRFPSHFPTRLYNNSSHLVLHHHQVLNPLVIIKLRKHPHPIPQPQYPVTSRTRPNRNHNLRYQTGSTRRTTYRTTC

SEQ ID NO: 151218 - protein, 50 aa, Glycine max
  Clone ID: PAT_MRT3847_107573C.1.pep
EKRGLPSTKLFSRFFAKRELGILMEGPDAPGKTPILYKLKLGEIVTIIPT

SEQ ID NO: 151219 - protein, 284 aa, Glycine max
  Clone ID: PAT_MRT3847_107574C.1.pep
SSISTIRPLRFGVAPYNPTLGETHHVSKGNLNVLLEQVSHHPPVSALHATDDKENIEMTWCHSPISKFNGTLVETKVHGKRQLKLHNHGETYEMSTPNLVNIILPIPGTDWVGNVSIRVEAPGHGKRQLKLHNSGLTYEMNAPHIKGKIFESFAMKILYKIGIHWDSTVTVRNTTNTEARVIYDAKEVLSGLQAPIVQDPESVWPTETALVWGELSQAILSKDWEKAREAKKTVEERQRELFKERESKGGNWVPKHFLVSYSKEGGWECSPIQKSVPKAPIATL

SEQ ID NO: 151220 - protein, 399 aa, Glycine max
  unsure (1)..(399): unsure at all Xaa locations
  Clone ID: PAT_MRT3847_107575C.1.pep
MSFRSIVRDVRDSFGSLSRRSFDVRLTGHHRGKSQGSVQDLHDQPLVIQNSRWASLPPELLFDIIRRLEESENTWPARKHVVACAAVCQSWRNMCKDIVKSPEFCGKLTFPVSLKQPGPRDGIIQCFIKVPCRFILFCLSRLQAYLLGILFLCSGLYPYLLSGDIFFDFHTXRSNFLGTKFIIYDTQPPYSSAHICPPGTGKTSRIFYSKKVSPKVPSGSYNIAQVTYELNVLGTRGPRKMHCVMHSIPASALDAGGTVSGQPELLPRSLEDSFRSISXFKLPVRRPLDHSIESGSSRFSEIGESCIEDDDGKMRPLVLKNKPPRWHEQLQCWCLNFRGRVTVASVKNFQLIAATQPAAGAPTPSQPAPPEHDKIILQFGKVGKDMFTMDYRFFLVPWL

SEQ ID NO: 151221 - protein, 64 aa, Glycine max
  Clone ID: PAT_MRT3847_107576C.1.pep
SISPSFRDEIYGRIRKGSSLRSRRYKRSRKTQALGQNANNTYSFQFLTPPSSLSLSHVRTPTRA

SEQ ID NO: 151222 - protein, 427 aa, Glycine max
  Clone ID: PAT_MRT3847_107577C.1.pep
MSFRSIVRDVRDSFGSLSRRSFDVRLTGHHRGKSQGSVQDLHDQPLVIQNSRWASLPPELLFDIIRRLEESENTWPARKHVSACAAVCQSWRNMCKDIVKSPEFCGKLTFPVSLKQPGPRDGIIQCFIKRDKSNLTYHLFLCLSPALLVENGKFLLSAKRTRRTTYTEYVISMDADNISRSSNTYIGKLRSNFLGTRFIICDTQPPYSSAHICPPMTGKTSRRFYSKKVSPKVPSGSYNIAQVTYELNVLGTRGPRKMHCVMHSIPASALDAGGTAPGQPELLPRPLEDSFRSISFSKSLDRSIEFSSSRFSEIGESIIEDDDGKMRPLVLKNKPPRWHEQLQCWCLNFRGRVTVASVKNFQLIAATQPPAGAPTPSQPAPPEHDKIILQFGKVGKDMFTMDYRYPLSAFQAFAICLSSFDTKLACE

SEQ ID NO: 151223 - protein, 99 aa, Glycine max
  Clone ID: PAT_MRT3847_107578C.1.pep
NLEILKQASSGVVGLLPACSCYIWWNKLALQVVCPFILDQFYWAERMHWLGVSPEPLSRNYLLPDKNDNTSIPEAARVLSLAIHDALASTVKGRAAEIG

SEQ ID NO: 151224 - protein, 231 aa, Glycine max
  Clone ID: PAT_MRT3847_107579C.1.pep
MFTLTSPSSRALPMDSLPKLRHPSPFPTPLSSSLSFRSLPPPHFPSSSFRLPSIRASSSPSQNDPAFRTPRNTPSLPPLLQTLTSFLSPLLETTCIVIAAAAFFFMRFHHTPAVIAAPLTSPAAETDTAFTQEEAERLLEERLSTNPRDTEALHALMEVKIKARKMDEAFEVLNRLIELEPEEQEWPLLKANMHIYNDDHASARKLFEEILKKDPLRVEAFHGLVMATAQS

SEQ ID NO: 151225 - protein, 159 aa, Glycine max
  unsure (1)..(159): unsure at all Xaa locations
  Clone ID: PAT_MRT3847_10757C.1.pep
EPXIQTRMKHYPTXFVNHCKHNWTELLIKLILLMLISQRKMVLQICLKRQGTAGLNRRDTEYIYVMAVDMDISHTQLPKHIXDAILAILTWHRAEPLEPXTHHKDDMDTMHMTNTHMVQEHNYYDDLDHNCMDVDATLVIANXCDDDEANHLLMHRSLP

SEQ ID NO: 151226 - protein, 107 aa, Glycine max
  unsure (1)..(107): unsure at all Xaa locations
  Clone ID: PAT_MRT3847_107580C.1.pep
RFNWWNKKSFFAIGSVKSNVGPLDTDAEASALVNTLYSMXHKQLPPTLKLKPPNSLIDFINTPFYINPDVVNYQTDDIDLLLAGVSPFGYGGSNAPSALEYAHILKS

SEQ ID NO: 151227 - protein, 179 aa, Glycine max
  unsure (1)..(179): unsure at all Xaa locations
  Clone ID: PAT_MRT3847_107581C.1.pep
MMRDETIRNMKAAEEALGXKQKQKPSFELAGKLASETNRVRGVTLLFNEPAEARKPDIKWRLYVFKAGEVLNEPLYIHRQSCYLFGRERRVADIPTDHPSCSKQHAVIQFRQVEKEQPDGTLLKQVRPYIMDLGSTNKTFINDGPIEPQRYYELREKDTIKFGNSSREYVLLHENSIGQ

SEQ ID NO: 151228 - protein, 70 aa, Glycine max
  Clone ID: PAT_MRT3847_107582C.1.pep
LSLRIVEFLSDNRHHIINNSTQSRSTQPLAQSICSKESKSLHPNLQKLKFFRDHRFQDFEWHVVCALLGF

SEQ ID NO: 151229 - protein, 68 aa, Glycine max
  Clone ID: PAT_MRT3847_107583C.1.pep
SFDLGLDEPFFEAQDSHRSNLSVGLEIARQLQFGARRSHSCIHAHNHFPFPSSSRVSRQRTCQWLSIN

SEQ ID NO: 151230 - protein, 158 aa, Glycine max
  unsure (1)..(158): unsure at all Xaa locations
  Clone ID: PAT_MRT3847_107584C.1.pep
THFVQGKDLATVKVNVTGAADGSTGRYTATPLPESEGRKDRGXIVDAFVRTAYLGDNGNEPHKKDSAEGNWTFDIKSHCRLEKGSSTTAQSASAKTFKYDTIGAGSHSSEDSTETEDQEKPKEIDAPLRHRKDSQXNEAQAQMETNMFKLSLDDVETP

SEQ ID NO: 151231 - protein, 91 aa, Glycine max
  Clone ID: PAT_MRT3847_107585C.1.pep
VQTSAPPIKGALIYAFASPLTGLKIGPPPHGGVYYYLSCPPKGSPSFGTLCPKKTPPPKRRRKRDVIFFFKVIGEGGKRGFFFGFSFPPVS

SEQ ID NO: 151232 - protein, 24 aa, Glycine max
  Clone ID: PAT_MRT3847_107586C.1.pep
LVLVFRRIRKLNNLFHNPIRRFFN

SEQ ID NO: 151233 - protein, 81 aa, Glycine max
  Clone ID: PAT_MRT3847_107587C.1.pep
GYGLRCAVLYHRQVVPCIDRQSYGMCVTGKGSLPALAKLIPHRMLYLGGRSSQRNKLFEDLVPWQNWSQKPLRSELVACKN

SEQ ID NO: 151234 - protein, 85 aa, Glycine max
  unsure (1)..(85): unsure at all Xaa locations
  Clone ID: PAT_MRT3847_107588C.1.pep
FCFRPISRVTCVFRVKSELGLCLGSAIRYTMGFSIRSPYHETCHSQANENRWGEKNPRVCLLRNRTELSTIFVRRTXMSKIAEDS

SEQ ID NO: 151235 - protein, 66 aa, Glycine max
  Clone ID: PAT_MRT3847_107589C.1.pep
RESIPSVNTPSLAGALVHRAGASPSMANKHDAPETYKALGTGVVMEAPSLYCIKPSAFVGVTHQQT

SEQ ID NO: 151236 - protein, 79 aa, Glycine max
  unsure (1)..(79): unsure at all Xaa locations
  Clone ID: PAT_MRT3847_10758C.1.pep
KKDKXSFFRLFIPQHHQPLLCSILKGAHTINLSNKITIKNANKLPLSMITNLKRLPPILAKSIAMLISVCPYHLLVKVA

SEQ ID NO: 151237 - protein, 58 aa, Glycine max
  Clone ID: PAT_MRT3847_107590C.1.pep
VMLMDIWVAQSSKITLCKGLVVVVTKKKLPANSAKKEAEFLPTKVGLVFKNKTHLTRI

SEQ ID NO: 151238 - protein, 72 aa, Glycine max
  Clone ID: PAT_MRT3847_107591C.1.pep
MNIINSLATQRYKRAYRLLGRIVVVLPRLGYRATQVLTIITALTIAIIISNTITLKRRPVWLTTTRVLKALV

SEQ ID NO: 151239 - protein, 59 aa, Glycine max
  Clone ID: PAT_MRT3847_107592C.1.pep
SLFSFSTGPGNLRKCMAKGKEGIQLTELGQHLLNKTNVRSYTPSQQERRGYTMAQYDRR

SEQ ID NO: 151240 - protein, 45 aa, Glycine max
  Clone ID: PAT_MRT3847_107593C.1.pep
PLLWGSICNAIYSIGRQIIRLQSSCRYTCPGTIMSQTMRSTMPSP

SEQ ID NO: 151241 - protein, 75 aa, Glycine max
  Clone ID: PAT_MRT3847_107594C.1.pep
KKKKKKFKKKKKKKKKKKKKKKKKKKKKKKKKKKKKKKKKKKKKKKKKKGGGLLKEPNLKTRDLKKIIFFLGPQN

SEQ ID NO: 151242 - protein, 133 aa, Glycine max
  Clone ID: PAT_MRT3847_107595C.1.pep
MASSSRARSSSPFSYRKPSTPYSSTSSSSSFINGRLMPRSSSSSTSSFFNSGGRSITPSRGCSDSAYHGSRGYAARSPVAFGAEELIAEQMVDSSRTGDSISVTIRFKPLSEREYQRGDENAWYADGDKIVRN

SEQ ID NO: 151243 - protein, 98 aa, Glycine max
  Clone ID: PAT_MRT3847_107596C.1.pep
SMLNHASRTNHTLLGLPVATPDLVQAFQPLWLNTAGSIASELAYCPNDTRCTDLLAGLRMAYSHCGVSRITTDDPLSMHLHCHYPFTRLTHDQSCCTN

SEQ ID NO: 151244 - protein, 55 aa, Glycine max
  Clone ID: PAT_MRT3847_107597C.1.pep
GNRMSSQLQNNRCSIRMSHPSRVVDHQHAIVPMPPGGPDPIRLNVIGQSSRILAW

SEQ ID NO: 151245 - protein, 60 aa, Glycine max
  Clone ID: PAT_MRT3847_107598C.1.pep
SFIKLIALFIVITRSKMILLSLGTQDKKYEVLSFTTLIPFWIENLIAALVTSTRYCHLLY

SEQ ID NO: 151246 - protein, 109 aa, Glycine max
  Clone ID: PAT_MRT3847_107599C.1.pep
MGFSWIRGKCIGKGAFGTVSVALRKRDDQTQNFAVKSVDLKTGLPGQLEALENEIRILRRMSSPHVVTFLGDDATCEQRNLHMEYMPRGTLADLDADVDEVLVRRYTLC

SEQ ID NO: 151247 - protein, 48 aa, Glycine max
  Clone ID: PAT_MRT3847_10759C.1.pep
SAVIQKPLQHTTNNFKTLDIFKLHMQVIKVRISLTSYQDIHSFSVLIS

SEQ ID NO: 151248 - protein, 61 aa, Glycine max
  Clone ID: PAT_MRT3847_1075C.1.pep
TLSSAGFWPLGFPHTFGANVAVHDSKPGTFEGLVIVFGAPDQTHNAQCLTQGFILCGHPVA

SEQ ID NO: 151249 - protein, 86 aa, Glycine max
  Clone ID: PAT_MRT3847_107600C.1.pep
PRVRLIVTSLVFDIDSFARKFSAEQSDFTLSRFSEIFMEMELSSIFLGRFSFSDLVEVWNAFSFKVYIILLYNMTLSRGFREIRKI

SEQ ID NO: 151250 - protein, 43 aa, Glycine max
  Clone ID: PAT_MRT3847_107601C.1.pep
HWHSVLFLKYYASFIRGPRVKLNSINFIQEATCTSGCPSFLAF

SEQ ID NO: 151251 - protein, 51 aa, Glycine max
  Clone ID: PAT_MRT3847_107602C.1.pep
ARPPQLRKLVKRLERNYYLQRSLIKGQKGGADFNLGAPPKKILKEYKALAS

SEQ ID NO: 151252 - protein, 116 aa, Glycine max
  Clone ID: PAT_MRT3847_107603C.1.pep
SRRLICAGCLRKDTVVLIGCMAAGYVVGPTRPGSALDGPCIEGPVDDIFKSPIAGWNRGQITIYEPGLGGGGKPCRGKILLFNTDVETHVYEAHILWGHEHAQTIARVLGARRVVD

SEQ ID NO: 151253 - protein, 134 aa, Glycine max
  unsure (1)..(134): unsure at all Xaa locations
  Clone ID: PAT_MRT3847_107604C.1.pep
PNPRPVPPPRINPHPHNTNNRGALKKKRGFQPPKPQHRDRPTGGEHTQEGAPSXPQRTPPRDPAQQPTPATQQGGRDPRTGPTTHHTTCPPPQPKPPTRWQKAQRGTPSLQTPATTPQAPRKTGASTHTREKPK

SEQ ID NO: 151254 - protein, 49 aa, Glycine max
  unsure (1)..(49): unsure at all Xaa locations
  Clone ID: PAT_MRT3847_107605C.1.pep
ELALKYLTQFSLVSFXAHSLLFIFLFGVGHCGPVESRASIWFISKLEIL

SEQ ID NO: 151255 - protein, 117 aa, Glycine max
  Clone ID: PAT_MRT3847_107606C.1.pep
GRPLKLEAFSGEKPSRDLFPPKTLGLSGDLAKRGAFPKLLNPKGLFGGAPTGGIVLAPEAGGGPKARGGNSYPWETPSPGGETHQSFGVLKGGLFFKPCPGILPFSTKKLSLSGVCP

SEQ ID NO: 151256 - protein, 95 aa, Glycine max
  Clone ID: PAT_MRT3847_107607C.1.pep
PIVDSDLRKIGARVLETAKQLCINKSVNDVTAEVVEGDPRNVLCDAVDKYRAAMLVVGSHGYGAIKRAVLGSVSDYCAHHAHCTVMIVKKPKIKH

SEQ ID NO: 151257 - protein, 69 aa, Glycine max
  Clone ID: PAT_MRT3847_107608C.1.pep
LNKKGRQCVNNFKERSKSKLETTTKTKFTILPINYATLIAWFSSFLPPGLNLICILLFVLCLIICHYSL

SEQ ID NO: 151258 - protein, 164 aa, Glycine max
  Clone ID: PAT_MRT3847_107609C.1.pep
MAASSSSSEKQVVLIGIDDSEQSTYALNWALDHFFPSPIFKLVLIHSRPTATSAVGFAGPVYAGAAEILPIVDSDLRKIAARVLETAKQLCFNKSVNDVTAEVVEGDPRNVLCDAVDKYRAAILVVGSHGYGAIKRAVLGSVSDYCAHHAHCTVMIVKKPKIKH

SEQ ID NO: 151259 - protein, 160 aa, Glycine max
  unsure (1)..(160): unsure at all Xaa locations
  Clone ID: PAT_MRT3847_10760C.1.pep
MLLLRQLCLLLFAVFYLIDARTQSVXVKGRLLCGTAPARNVRVKLYDEDAGVDPDDQLDAGYSDPNGNFQLSGHTSELTNIDVVFKVYHDCDDGIKPGSRKLKFKIPNSYVTDSATPKKTFDIGVLNLETVFKDEERELIVTMKKKRRSHRYQDFLDILP

SEQ ID NO: 151260 - protein, 47 aa, Glycine max
  Clone ID: PAT_MRT3847_107610C.1.pep
SHPWDNIHSDVSIDVTKHHTPKSLADNDALKAVKFLRVLSDVYFMER

SEQ ID NO: 151261 - protein, 162 aa, Glycine max
  Clone ID: PAT_MRT3847_107611C.1.pep
MAASSSEKQVVVIGIDDSEQSTYALNWALDNFFPSPIFKLVLIHSRPTATSAVGFAGPVFAGAAEVLPIVDSDLRKIGARVLETAKQLCINKSVNDVTAEVVEGDPRNVLCDAVDKYRAAMLVVGSHGYGAIKRAVLGSVSDYCAHHAHCTVMIVKKPKIKH

SEQ ID NO: 151262 - protein, 73 aa, Glycine max
  Clone ID: PAT_MRT3847_107612C.1.pep
GYRDDGARNTIIHESSSLPPNRYGIFLSLQKLSFCTNYCFWQQVSSFVHLLPFLLLLRVCCLVSHFDKIGQKT

SEQ ID NO: 151263 - protein, 69 aa, Glycine max
  unsure (1)..(69): unsure at all Xaa locations
  Clone ID: PAT_MRT3847_107613C.1.pep
HASCEAGSFLRGMDVNRVPSVVGGDEXAGGSSSNSTDSIVSGRRSERETTGEENDTDRACAMCIISDEE

SEQ ID NO: 151264 - protein, 308 aa, Glycine max
  unsure (1)..(308): unsure at all Xaa locations
  Clone ID: PAT_MRT3847_107614C.1.pep
TPILLETENLSVFRFLDKAAIKEVSAGSTRVPLTVSQVEGAKLIFGMALVWLVTLIPSTIWAQINTLFVKQGTTLDRNLGPHFKIPSASLGSFVTLSMLLSVPMYDRFFVPFMRQKTGHPRGITLLQRLGIGFSIQIIAIAIAYVVEVRRMHVIGANHVAXPKDIVPMSIFWLMPXYVLIGIADVFNAIGLLEFFYDQSPEDMQSLGTTFFTSGIGVGNFLNSFLVTMVDKITGRGDKKSWIGDNLNDCHLDYYYGFLLVMSSVNMVVFLWVSSRYIYKRESIRVKEGLCVQMEGGNPTLDASLGLQV

SEQ ID NO: 151265 - protein, 65 aa, Glycine max
  Clone ID: PAT_MRT3847_107615C.1.pep
NLIPTTNIKIIILITYAILTTHTTYSGVGWGGIYLGKFNNFHGTKALFYKGNFLLHYHNTIPKHI

SEQ ID NO: 151266 - protein, 121 aa, Glycine max
  Clone ID: PAT_MRT3847_107616C.1.pep
MKSGACEGCGAGCGGGCGNMIKSGGCGSGCGGGCGNLIKGGGCGGCGGGCGGGCGNLIKSGGCGAGCGGGCGGGCGGCGGGCGNRLESSGCGGCGGGCGGDLMDSKCGIDEHFNEELKYVS

SEQ ID NO: 151267 - protein, 42 aa, Glycine max
  Clone ID: PAT_MRT3847_107617C.1.pep
NSCCIIISDWSTITTCHCTWHLLSVSVFLKEEIHLDVKNLFI

SEQ ID NO: 151268 - protein, 69 aa, Glycine max
  Clone ID: PAT_MRT3847_107618C.1.pep
FFFFFFFSFFFFFLTRTRSSPCIKSKPLRVYRHKEGLWGKGKRGVHKDIGGGGRILPPGGRKKNHGGQH

SEQ ID NO: 151269 - protein, 74 aa, Glycine max
  Clone ID: PAT_MRT3847_107619C.1.pep
GFLFLIPFWSLLFFPGGSPFVCGSLFLGGCAINTSFGCESGFPKLLWVSFWETLGEIRFLTGNKKKITRVRPGV

SEQ ID NO: 151270 - protein, 86 aa, Glycine max
  Clone ID: PAT_MRT3847_10761C.1.pep
MAALTSLSFSAVTHCSERKVTLSSTRFLASSSEIFGFRTDFSYHYVGVRASNSPSKMVVQCMSSATDVPPTVSETKLNFLKAYKRP

SEQ ID NO: 151271 - protein, 69 aa, Glycine max
  Clone ID: PAT_MRT3847_107620C.1.pep
TEPENQCAGACANHPCPSKPCTNVQCRLLPGNDVSINGRVCDEVSNCLRVIIVSFINVWEHPRISAMII

SEQ ID NO: 151272 - protein, 151 aa, Glycine max
  Clone ID: PAT_MRT3847_107621C.1.pep
HASDDTLCPELLLLLLLASTFRFVSRSCSPTTTMGCFFACFRARDSSSATAPTATVPSSPSGKHKPTDVVVSRNQLSTLFLSEERENSVVRDDRKSFEVGSQKGDYEAKFLKAGDTLARTPLEKAHPVGQPFNPSTPVKCCEEGGKRTDSL

SEQ ID NO: 151273 - protein, 220 aa, Glycine max
  Clone ID: PAT_MRT3847_107622C.1.pep
MGTPPTDELVKKIQQLEEGHAHLKQEMSKLKLSDVRHGHHRQRSHSVSPQRSRLGAPPKKRSDAPAAAWKRGSCSFKQSSPLQRESRGGGDPQIHGGGEEAAPRRGPSAVNFTERQYLNILRSMGQSVHILDLNCRIIYWNRSAENLYGYTAEEALGQDGIGLLGDPRDLDLANNTVNRVMMGESWTGQFPVKNKTREKLLAVATNTTFYDDDGNLVGLI

SEQ ID NO: 151274 - protein, 55 aa, Glycine max
  Clone ID: PAT_MRT3847_107623C.1.pep
SHMIGAFSQNRVTMTSHLMISLSESDLTYSLCSVSCYVLFGALVLFFIDIVPRCI

SEQ ID NO: 151275 - protein, 126 aa, Glycine max
  unsure (1)..(126): unsure at all Xaa locations
  Clone ID: PAT_MRT3847_107624C.1.pep
MSKLLLGLVAGFVATSVTMEMIMVPKNVSSQNICDYIFTQDLYNSIISQADDGCAWKNFYXQYAFFNAHNTYNEFGRLGDHDDCXREGIPGFAHITLXTRHFCYIDXINCASWDYCDESSTDYPIA

SEQ ID NO: 151276 - protein, 48 aa, Glycine max
  Clone ID: PAT_MRT3847_107625C.1.pep
RFFTSSVINSEARLDIFSFLPGDVLVASLDAFSRVCDAGEVTGKHVMS

SEQ ID NO: 151277 - protein, 95 aa, Glycine max
  Clone ID: PAT_MRT3847_107626C.1.pep
NFKLKACIILICFGNLQRNFVKRATNLCAIIIKKKKKKKKKKKKKKKKKKKKKKKKKKKKKKKKKKKKKKKKKKKGGPLKKTKLKTQGPGKEKLF

SEQ ID NO: 151278 - protein, 73 aa, Glycine max
  Clone ID: PAT_MRT3847_107627C.1.pep
ESVVDWDFMEELLFCYLNLNEKKSHKFILSAFVDLITVMRRNSETPSNNPQSVRTVRSHRGTRNVTLEFGSSS

SEQ ID NO: 151279 - protein, 55 aa, Glycine max
  Clone ID: PAT_MRT3847_107628C.1.pep
PLQHPLWQSILNRVMPRSSTRDYFPNTITSDEYIQQSDIPPVAGAWRRPGNPGPV

SEQ ID NO: 151280 - protein, 51 aa, Glycine max
  Clone ID: PAT_MRT3847_107629C.1.pep
IRRIIAGPGVEIVFPVFSPTLKEIRVVSPRKVRRAKLFYFRDKLPRFSPFK

SEQ ID NO: 151281 - protein, 153 aa, Glycine max
  Clone ID: PAT_MRT3847_10762C.1.pep
TRVPGNPSLGWLPYLLHEFGRNLTGAIQIQLVQINEGVSLCDLVFFFSNMKRLRSSEDLYSYGGDKSNNSCKDSNNLNRSFSSAQRSFYYKQENARKGLVSSSSSSSSRYERDRTVEEDREGSRLVRKRSEHDFEGFDRRKGFISRLSIGGSC

SEQ ID NO: 151282 - protein, 117 aa, Glycine max
  Clone ID: PAT_MRT3847_107630C.1.pep
GSCGLPCFFPGGFSFCWALSRVPCFPLVCFGVSGPCLCPFALWFICHPVLVFFVCLVLLLFGCRSVSGLSFFRLGGFAFALGCLFPFRVCRFPLSFVCLLLALIVRVVRPGFSGPVP

SEQ ID NO: 151283 - protein, 52 aa, Glycine max
  Clone ID: PAT_MRT3847_107631C.1.pep
HRAAYKRLSTKLMKPFWQEPKLSQRQLLKPRTVSYSLLTVPQRALYVSNYSY

SEQ ID NO: 151284 - protein, 113 aa, Glycine max
  Clone ID: PAT_MRT3847_107632C.1.pep
KLIGTHGLARKLADGVQALGGKFVYPTETNMVWVDLASLGIPLKDLQAAGEALEQPLVIRGARFVVHHQITEQAIDDLLILFKELQDKHRAKQGDLDAINEKRPQEKLIAGQY

SEQ ID NO: 151285 - protein, 60 aa, Glycine max
  Clone ID: PAT_MRT3847_107633C.1.pep
AFLKLYIIHDQLVVKMNVVVIHARHVPFHPSHLPEASTHVLYMVNKVEMDVSYSSTRFLL

SEQ ID NO: 151286 - protein, 523 aa, Glycine max
  unsure (1)..(523): unsure at all Xaa locations
  Clone ID: PAT_MRT3847_107634C.1.pep
MKRERQQLGSNAGTSSCGYSSGKSNLWEEEGGMDELLAVVGYKVRSSDMAEVAQKLERLEEAMGNVQDDLTDLSNDAVHYNPSDISNWLQTMLSNFDPLPSEEPEKDSASSDYDLKAIPGKAIYGAGSDALPNPKRVRADESRRAVVVVDSQENGIRLVHSLMACAEAVENNNLAVAEALVKQIGFLAVSQVGARXQKATYFAEALARRIYRVFPQQHSLSDSLQIHFYETCPYLKFAHFTANQAILEAFQGKNRVHVIDFGINQGMQWPALMQALALRNDGPPVFRLTGIGPPAADNSDHLQEVGWKLAQLAERIHVQFEYRGFVANSLADLDASMLDLREDESVAVNSVFEFHKLLARPGAVEKVLSVVRQIRPEILTVVEQEANHNGLSFVDRFTESLHYYSTLFDSLEGSPVNPNDKAMSEVYLGKQICNVVACEGMDRVERHETLNQWRNRFGSTGFSPVHLGSNAYKQASMLLSLFGGGDGYRVEENNGCLMLGWHTRPLIATSVWQLATKSVVAAH

SEQ ID NO: 151287 - protein, 434 aa, Glycine max
  Clone ID: PAT_MRT3847_107635C.1.pep
MEQSPSLPRSQRPPRVSNNPPPADSSGNRKPIALWPGMYHSPVTTALWEARTNIFERLLDPPRDAPPQSELLTRTPSQSRTSILYNFSSDFVLREQYRDPWNEVRIGKLLEDLDALAGTTSVKHCSDEASTTRPLIVVTASVDKIVLKKPISVNIDLKIVGSVIWVGHSSIEIQLEVTQSNEEGNDSDSVALTANFIFVARDSKTGKAAPVNRLSPETAHEKLLFVQAEARSNLRKTKRGGEKRDFENGEKNRLRALLAEGRIFCDMPALADRNSILLKDTSLENALICQPQQRNIHGRIFGGFLMHRAFELAFSTAYAFAGLAPCFLEVDHVDFLRPVDVGDFLRLKSCVLYTEVHDPDQPLINVEVVAHVTRPELRTSEVSNTFHFSFTVRPEAKAMKNGFKLRNVVPATEEEARRILERIDADNLNEFFRA

SEQ ID NO: 151288 - protein, 58 aa, Glycine max
  Clone ID: PAT_MRT3847_107636C.1.pep
LNYSLYVYYADSLVRIITGGGVLTFDKTGFNILPQLGPPCSDYHSVKSVHPMTCMNTE

SEQ ID NO: 151289 - protein, 49 aa, Glycine max
  unsure (1)..(49): unsure at all Xaa locations
  Clone ID: PAT_MRT3847_107637C.1.pep
AKTKKNNQYRGIRQHAWGKWAAEIRDPRXGVRVWTGTFSTAEEAARCCD

SEQ ID NO: 151290 - protein, 472 aa, Glycine max
  unsure (1)..(472): unsure at all Xaa locations
  Clone ID: PAT_MRT3847_107638C.1.pep
MKMAVSAITGARLTLGIGWRYXLSSSTRSRTVAMAVSVDPKTDNKLTLTKSEEAFAAAKELMPGGVNSPVRAFKSVGGQPIVIDSVKGSRMWDIDGNEYIDYVGSWGPAIIGHADDQVLSALVETMKKGTSFGAPCLLENTLAELVINAVPSIEMVRFVNSGTEACMGALRLARAYTGREKIIKFEGCYHGHADPFLVKAGSGVATLGLPDSPGVPKAATFETLTAPYNDTAAVEKLFEANKGEIAAVFLEPVVGNAGFIVPKPDFHNFLRKITKENNTLLVFDEVMTGFRLSYGGAQEYFGITPDITTLGKIIGGGLPVGAYGGRRDIMEKVAPAGPMYQAGTLSGNPLAMTAGIQTLQRIKEPGTYEYLDKITGELVQGIIEAGKRAGHAICGGHIRGMFGFFFTEGPVYNFADAKKSDTDKFARFFWGMLAEGVYLAPSQFEAGFTSLAHTSDDIKKTIAAAEKVFREI

SEQ ID NO: 151291 - protein, 30 aa, Glycine max
  Clone ID: PAT_MRT3847_107639C.1.pep
PKGTGINGMPNPKPGFKIGQPLWLETGFRL

SEQ ID NO: 151292 - protein, 56 aa, Glycine max
  Clone ID: PAT_MRT3847_10763C.1.pep
MKLGLARFNPFYYASTRDSNTSGHFIPLASLHTASHATARRPRSSLGNSKGKKRLS

SEQ ID NO: 151293 - protein, 214 aa, Glycine max
  unsure (1)..(214): unsure at all Xaa locations
  Clone ID: PAT_MRT3847_107640C.1.pep
MAVSAITGARLTLGIGLAIPLSSPTRSRTVAMAVSVDPKTDNKLTLTKSEEAFAAAKVRMTSLFLPSFLLSILIFDFXFQELMPGGVNSPVRAFKSVGGQPIVIDSVKGSRMWDIDGNEYIDYVGSWGPAIIGHADDQVLSALVETMKKGTSXGAPCLLENTLAELGINAVPSIEMVRFVNSGTEACIGAQRLARAYTGRXKIIKXEGCYMAML

SEQ ID NO: 151294 - protein, 92 aa, Glycine max
  Clone ID: PAT_MRT3847_107641C.1.pep
GGGGRTKFCSMAVHATICPLSRTLGWCPLRKGYAQVQGWLGKHTHFSFGGVLESLSSPKDLSMANITHQALHQLANVLTLIPETCTPILRTR

SEQ ID NO: 151295 - protein, 81 aa, Glycine max
  Clone ID: PAT_MRT3847_107642C.1.pep
PRVRTAARRRQKGSGTCVRINTMQRIRMELGGLEKRIMANLSNSISTNADIVNGESLNFNLCACGAGEGMHELCECLSYNS

SEQ ID NO: 151296 - protein, 63 aa, Glycine max
  unsure (1)..(63): unsure at all Xaa locations
  Clone ID: PAT_MRT3847_107643C.1.pep
XIAXLXSXMXVXXXRSYXXSHXHYSATXXXDHXXXXXSXXPINFXTXXSTXLEPNSEXTXRVX

SEQ ID NO: 151297 - protein, 56 aa, Glycine max
  unsure (1)..(56): unsure at all Xaa locations
  Clone ID: PAT_MRT3847_107644C.1.pep
MFATQIHSRMCEGTFGQVVGCWDKSRNETXAVEIVRGIKKYPETAMIQIEVLQQLG

SEQ ID NO: 151298 - protein, 49 aa, Glycine max
  Clone ID: PAT_MRT3847_107645C.1.pep
MIKSFGMDGSGNVYHCQSLLTNGKYVYVIGTKGLESSSGDPNVYTFVLL

SEQ ID NO: 151299 - protein, 34 aa, Glycine max
  Clone ID: PAT_MRT3847_107646C.1.pep
EYAILIPVSAGVALLCLLCIFIGFVMLKSKKKKA

SEQ ID NO: 151300 - protein, 122 aa, Glycine max
  unsure (1)..(122): unsure at all Xaa locations
  Clone ID: PAT_MRT3847_107647C.1.pep
MNVLVFFIPTGFLTGGCRAYHIFPLXMNTGYRARTLYVKCATWRLFLXAHNIYNFETIPEKCVXSTNEYIHVXQYTSYSKTFNQQAYFYSKNLXIHPKNTFFFNINGTLLSNIXPYYKKHLF

SEQ ID NO: 151301 - protein, 271 aa, Glycine max
  Clone ID: PAT_MRT3847_107648C.1.pep
SALKKYPALNTSFNEEAGEVVHKHYWNIGIAADTDKGLLVPVVKHADRKSIFEISDEINELAVKARDGKLTSEEMKGATCTISNIGSAGGQWFTPVINHPEVAILGIGRIAQKPIVKDGEIVAAPVLALSLSFDHRQIDGAGPGGYVAAIRAAQLGQKVTIVEKGNLGGVCLNVGCIPSKALLHASHRFVEAQNSENLGVIAESVSLNYQKVQEFKTSVVNKLTGGVEGLLKGNKVEIVRGEAYFVDNNSLRVMDEKSAQTYNFKHAIIAT

SEQ ID NO: 151302 - protein, 71 aa, Glycine max
  Clone ID: PAT_MRT3847_107649C.1.pep
ARAKILSSLIYILTKFHYLLPGTQQFITHVLSSTTTTDAYDTFHTTRLISQISEEHASTLQAVQSALAAHR

SEQ ID NO: 151303 - protein, 51 aa, Glycine max
  Clone ID: PAT_MRT3847_10764C.1.pep
QIYKFFFVGCLTFNLVWRFGLGSLSRVFTPSCLSFSKKKKKKKKAAAAEYA

SEQ ID NO: 151304 - protein, 72 aa, Glycine max
  Clone ID: PAT_MRT3847_107650C.1.pep
LSNIKKKPPRGHPPLNNKGVLGVNKKKIALQKALTHTMDKRPKQGALRGVNPGKNHPFQGGNKKQKNRGKKN

SEQ ID NO: 151305 - protein, 76 aa, Glycine max
  Clone ID: PAT_MRT3847_107651C.1.pep
KIRPLIGSPYFEELVSCSWLEDIVGTQLVLNVTFQFILLKNCTKTANEQQNQTCQMKHHTLHKPRIPADKYYLVPD

SEQ ID NO: 151306 - protein, 66 aa, Glycine max
  Clone ID: PAT_MRT3847_107652C.1.pep
LSIFTQRRTTSVQTSAEGQENHTLLWPRTAGIIAFRTLGPSAEHYPIDIGLRDKLQLQPSTSERHK

SEQ ID NO: 151307 - protein, 49 aa, Glycine max
  Clone ID: PAT_MRT3847_107653C.1.pep
NTFLFLIFFLNKFYFNPLNLKFHFSFLKFLYIKWGFLSFNYIGLNLINI

SEQ ID NO: 151308 - protein, 155 aa, Glycine max
  Clone ID: PAT_MRT3847_107654C.1.pep
MDDGHMHGMGGMAPTPPSTNGTTMTMMMHHKMMMHMTFFWGKDADILFNNWPGGKSGMYVLALVFVFVMAVLVELLSHTRFIKPGSNHVVSGLIKTLLHVLRVGLAYLVMLALMSFNGGVFLVAVLGHALGFFVSTVAFNKPPQNEGFDLPPISC

SEQ ID NO: 151309 - protein, 25 aa, Glycine max
  Clone ID: PAT_MRT3847_107655C.1.pep
RQGLALGGFTVHGLDSEQFSTLTMT

SEQ ID NO: 151310 - protein, 100 aa, Glycine max
  unsure (1)..(100): unsure at all Xaa locations
  Clone ID: PAT_MRT3847_107656C.1.pep
GPPPSKWMGFCQTSKNFTCRXKLLGVKITKVNGFFTRVNPKSVRDINGHGPNVPSXTAVGNPVNTLRMLRLGQETXRGGVTNTHICVHKVCGLDGCTDTH

SEQ ID NO: 151311 - protein, 182 aa, Glycine max
  Clone ID: PAT_MRT3847_107657C.1.pep
MGLVFTKLFSSLFGNKEARILVLGLDNAGKTTILYRLQMGEVVSTIPTIGFNVETVQYNNIKFQVWDLGGQTSIRPYWRCYFPNTQAIIYVVDSSDVDRLVIAKEEFHAILEEEELKGAVVLIFANKQDLPGALDDAAVTEALELHKIKNRQWAIFKTSAIKGEGLFEGLDWLSNTLKSGGG

SEQ ID NO: 151312 - protein, 88 aa, Glycine max
  unsure (1)..(88): unsure at all Xaa locations
  Clone ID: PAT_MRT3847_107658C.1.pep
GYPVVVNAPSNLNSFAXGLNAENNQRNFLAGSQDTVMRQLPSQVQELASPGSAHAAXNPSTNQRESYLGDAPPXRKQEGHSARKGPPP

SEQ ID NO: 151313 - protein, 80 aa, Glycine max
  Clone ID: PAT_MRT3847_107659C.1.pep
MGIVFTKLFSSLFGNKEARILVLGLDNAGKTTILYRLQMGEVVSTIPTIGFNVETVQYNNIKFQVWDLGGQTSIRPYWRC

SEQ ID NO: 151314 - protein, 379 aa, Glycine max
  Clone ID: PAT_MRT3847_10765C.1.pep
MKIVRKDLVPNGPGSVKMVAVDSDDLWFAYNLIAPGDSVMAVTVRKVLREAASGGREAERVKLKLEIKVQELADYDKEGSILRVRGKNILENEYVKIGAFHTLELELQRPFVLRKDVWDSLALEVLQQASDPGASADLAVVLMQEGLAHILLVGRSMTVTRSRIETSIPRKHGPAIAGYEKALDKFFQNVLQAFLKHIDFNVVRCAVIASPGFTKDQFHRHLFLEAERRQLRPIIENKSRIILVHTSSGYKHSLKEVLDAPNVMSLIKDTKAAQEVRVMKDFYDMLSNDPSRACYGMKHVEVANERLAVQMLLITDELFRNSDIATRKKYVNLVNSVKDSGGSVHVFSSMHVSGEQLAQISGIAAILRFPLPDLEDIEM

SEQ ID NO: 151315 - protein, 90 aa, Glycine max
  Clone ID: PAT_MRT3847_107660C.1.pep
TCLVLRRTRGKNPTERPRGIRTAKPRIPKKLLTNPICSFWLEKEEEEEEVNNDEKRAEKRGNIVHPKKMVGQFRKMARKTKRVALCVRVT

SEQ ID NO: 151316 - protein, 48 aa, Glycine max
  Clone ID: PAT_MRT3847_107661C.1.pep
CFHLEEGSHPQPQPVTLEVSDKSLLYVRELQRTHAALSFSFSNSIWFE

SEQ ID NO: 151317 - protein, 143 aa, Glycine max
  unsure (1)..(143): unsure at all Xaa locations
  Clone ID: PAT_MRT3847_107662C.1.pep
CDSEGLIHEITPPYTPLYNGTTRRKNKTNMNMVRCMLKSKNLPNYLWHEAVSTTVHILNRSPTKRLTGMTLEEAWTGVKPCVAHLRVFGSICYKHIPDXLRRKLDDKGEQVILISYHAIGGYKLYDPRSKQVPMSRDLICYEN

SEQ ID NO: 151318 - protein, 175 aa, Glycine max
  unsure (1)..(175): unsure at all Xaa locations
  Clone ID: PAT_MRT3847_107663C.1.pep
MVHDITGVSPGEGTGATMSDDEDEQVGSDANLFDGALDGPDSMGFGPLIPTENERSLMERVRPEVKHELKQGYKEKIVDIREEILRKRXVGKLPGDTTSVLKALWQSHSKWPYPTVATKTESNKVAGNAILYECVQTIMSIEDNGGLHVLAINILGRFLSNHDNNIRFISAHCFS

SEQ ID NO: 151319 - protein, 85 aa, Glycine max
  unsure (1)..(85): unsure at all Xaa locations
  Clone ID: PAT_MRT3847_107664C.1.pep
MPIRSIAVGRPEQATHPDTLRAALAVFISPFIIAFAGSGSGIAYSRLSDNGAAIPAGLIAAAIAHAFTVIVAVSXVGANISGGHV

SEQ ID NO: 151320 - protein, 198 aa, Glycine max
  Clone ID: PAT_MRT3847_107665C.1.pep
SAIASRNWETIQIEDLKIERNELLAVNCLVRFKNLLDESIEVNSPRNAVLNLIRKMKPDIFVHSVVNGSYNAPFFLTRFREALFHYSSIYDMFDTLISRENEWRLMLEREFLGREIMNVVACEALERVERPETYKQWQARNTRAGFKQLPLDKEIMTKFRGKLREWYHRDFVFDEDGNWMLQGWKGRIILYASTCWVP

SEQ ID NO: 151321 - protein, 91 aa, Glycine max
  Clone ID: PAT_MRT3847_107666C.1.pep
EWADYNSLFVGFGGFGPPGGGGGPFLINKFFFSKKIFPVLPPENGCFFQTWIVLKRGFFFFGFFKPPVLVRGGFFLLGFLVGLEVFWWNLG

SEQ ID NO: 151322 - protein, 72 aa, Glycine max
  Clone ID: PAT_MRT3847_107667C.1.pep
VQKFNYVLPYFKERLEMICSLSCANKNSRRSKRQKEKGAPFSPSTGNLRFNLSPASFTHLLSIFIRLHSTFG

SEQ ID NO: 151323 - protein, 81 aa, Glycine max
  unsure (1)..(81): unsure at all Xaa locations
  Clone ID: PAT_MRT3847_107668C.1.pep
LGSSSXLFXLVSASHGGGSFRSWVHTYSFGLATVVFLLYLGFSWRPDCGIRSFLFYDCSIXVLGGNHPWXPVWLFLRGGFF

SEQ ID NO: 151324 - protein, 127 aa, Glycine max
  Clone ID: PAT_MRT3847_107669C.1.pep
AQTDNIETPACLISPQQVNFLLNGKGVLNRTNVQMDPGAQVPTNVTGMLKFGTNLLQAVGQFNGRYVVLVAYMSVTPLLEDPVLQDYLQPAVTSVDLDSDIIEGASRISLNCPIRCVVNFSVHDIDQ

SEQ ID NO: 151325 - protein, 66 aa, Glycine max
  Clone ID: PAT_MRT3847_10766C.1.pep
FSHSHAHTPQKHGQRSLCSRVPMSSSSSCCSPSHAPAMLPTPSPNPNLTANLDPIVPNLIPFRLPS

SEQ ID NO: 151326 - protein, 107 aa, Glycine max
  Clone ID: PAT_MRT3847_107670C.1.pep
GAKPFPSQAKFFKMGAPPPQGGVGGYSGFGQPNLPDVMNTTRGLVISSRGHKAPLLQNLKSFWGERIFLFLPGWIHERRLGGKVLKSTLFVVLFLTEVKSKFWDNFH

SEQ ID NO: 151327 - protein, 51 aa, Glycine max
  Clone ID: PAT_MRT3847_107671C.1.pep
SCTKAIRAINLFPHIRKSIKAIISAKTANSTPNNLYGPGLIHSTVVVAVTG

SEQ ID NO: 151328 - protein, 333 aa, Glycine max
  Clone ID: PAT_MRT3847_107672C.1.pep
MFELATKSNMTKLTHLIGIIKDKASQSKAALLSKRTTLFLLRATSHDSSTPPTRKHLATLLSSGDGSRATASAAVEVLMDRLQGTNNAAVALKCLIAVHHIIHHGSFILQDQLSVYPSAGGRNYLNLSNFRHNADPTSWELSSWVRWFAKHIEQLLCTSRILGFFLGTPTDREDRVSGLVNADLLTEFDSLVALVEGICKRPEPNNVYGNNGLVEEIVKLAREDWGVVEVEVRVRVSEFKERLGGFKFGEVVELVCCLKRLEQCQEMMDGARELGLWDFVGEVKDKAGIQVYRQEGKLRKESRKLRFSESDRFSAPVLNSRDFLHFPSGRFLL

SEQ ID NO: 151329 - protein, 59 aa, Glycine max
  unsure (1)..(59): unsure at all Xaa locations
  Clone ID: PAT_MRT3847_107673C.1.pep
GGEAVREKASIASDSQYVLSTIEGETQDFPDARAYPLTLKDQEXKTGITADPGAVALMR

SEQ ID NO: 151330 - protein, 35 aa, Glycine max
  Clone ID: PAT_MRT3847_107674C.1.pep
QVYRQEGQLRKESRQLRFSESDRFSAPVLNSRDFL

SEQ ID NO: 151331 - protein, 94 aa, Glycine max
  Clone ID: PAT_MRT3847_107675C.1.pep
LRGGRSTPLFQLQQGLPLWGESLSWVKSVGAFPKEPKDHFMQHTVPSATRSKDIRWSCWWVALTRTIWQHRNKLVFDNHNFNATQLMDEALLLL

SEQ ID NO: 151332 - protein, 47 aa, Glycine max
  Clone ID: PAT_MRT3847_107676C.1.pep
LVIPPQILTRWLLPWKGNRIYLVTKSTVSSLLLSRDWLAPNTAGSDP

SEQ ID NO: 151333 - protein, 48 aa, Glycine max
  Clone ID: PAT_MRT3847_107677C.1.pep
YRNNQGQLRDTIQLGFNFNSLINQSKGFHRAVCKQLKFKSRIKKLIGL

SEQ ID NO: 151334 - protein, 45 aa, Glycine max
  Clone ID: PAT_MRT3847_107678C.1.pep
LHWRSMRFWRGAYKALNSPITTSFYGAVLPKLLSIIFQFGSSKVR

SEQ ID NO: 151335 - protein, 108 aa, Glycine max
  unsure (1)..(108): unsure at all Xaa locations
  Clone ID: PAT_MRT3847_107679C.1.pep
SPRKGLLSILLRKWKPFLNLSIFITFPSLHSNSVIIYLLFIYFYIVPSLEFEVLSSTQFIAEDRSLHGSCLLVFGFSSTSCSLIYMLCTYXPLELFGISCKVYTLIRE

SEQ ID NO: 151336 - protein, 527 aa, Glycine max
  Clone ID: PAT_MRT3847_10767C.1.pep
MDSPNALSTAPAAGSRKNATLICVPIMGESVEKMEIDVDKAKAGGADLVEIRLDSLKTFDPYRDLNAFIQHRSLPLLFTYRPKWEGGMYDGDENKRLDALRLAMELGADYIDIELQVAHEFYDSIRGKTFNKTKVIVSSHNYQLTPSIEDLGNLVARIQATGADIVKIATTALDITDVARMFQIMVHSQVPFIGLVMGDRGLISRILSAKFGGYLTFGTLESGVVSAPGQPTLKDLLYLYNLRQLAPDTKVFGIIGKPVGHSKSPILFNEVFKSIGLNGVYLFLLVDDLANFLRTYSSTDFVGFSVTIPHKETALKCCDEVDPVAKSIGAVNCIVRRPTDGKLIGYNTDYVGAITAIENGLRGKHNGSSTTISPLAGKLFVVIGAGGAGKALAYGAKAKGARVVIANRTYDHARKLAYAIGGDALALADLDNYHPEDGMILANTTSIGMQPKVDETPVSKHALKYYSLVFDAVYTPKITRLLKEAEESGATIVTGLEMFMGQAYGQYENFTGLPAPKELFRKIMENY

SEQ ID NO: 151337 - protein, 79 aa, Glycine max
  unsure (1)..(79): unsure at all Xaa locations
  Clone ID: PAT_MRT3847_107680C.1.pep
DQDLKVKIPEEXGEFHPHWLRGNIVTGRSGKALPAINGGPKVSAKGSASVGRYLRXRHRVGKDPLQYIHSGFLAYEKLY

SEQ ID NO: 151338 - protein, 161 aa, Glycine max
  Clone ID: PAT_MRT3847_107681C.1.pep
KFAGFTGVRLGWTVVPEELLYSNGFPVVHDFNRIMCTCFNGASNIAQAGGLACLSPEGLRAMQTLVDYYMENARILVDALTSLGLTVYGGKNAPYVWVHFPGSKSWNVFAEILEKTHIITVPGSGFGPGGEEYIRISAFGQRDSIIEASKRLKYLIYQEQN

SEQ ID NO: 151339 - protein, 120 aa, Glycine max
  unsure (1)..(120): unsure at all Xaa locations
  Clone ID: PAT_MRT3847_107682C.1.pep
MPGMTGYXFLQRIKGSFSFKETPVGIMSFENVFPRINKCLEEGAKDFIVKPVKFFYVKRFKDFMPTKEVRGEFSPKKREGVPKRKLLGPFDGLPLLPPSIFLSPLPFLLRSGIGFPIRRV

SEQ ID NO: 151340 - protein, 65 aa, Glycine max
  Clone ID: PAT_MRT3847_107683C.1.pep
FLYELHKLRLLYPTPSESFRSHKHPGSVTTLLHFHHQSTVLLLHYPHSLILHQHILLLLLSLYQP

SEQ ID NO: 151341 - protein, 54 aa, Glycine max
  Clone ID: PAT_MRT3847_107684C.1.pep
SFMWCHRNSIVVKMDNLFFNVFVCILDVKTLHVVRYCLLVVLIIVKRGIVVSFF

SEQ ID NO: 151342 - protein, 67 aa, Glycine max
  Clone ID: PAT_MRT3847_107685C.1.pep
IGAPAPLWLCFQNISFCFCCCGKRGGGPHFLVGKKGQVGSVNAPLSSFGRRGVSFISLVAFFLKTKK

SEQ ID NO: 151343 - protein, 99 aa, Glycine max
  Clone ID: PAT_MRT3847_107686C.1.pep
FLTFIAGNHPLHNLVGFSSTCNGITLFVLLIGCNFIIPLSLHHHVIILVVVHAVVSRAVVVVAVIAFILAVIAVIRSIILLVFVSSANVMIAIALLMLI

SEQ ID NO: 151344 - protein, 88 aa, Glycine max
  unsure (1)..(88): unsure at all Xaa locations
  Clone ID: PAT_MRT3847_107687C.1.pep
RLMLKQGIQNLHISTLHGIKNRTPAMESLSNDREVKMARPFLIVINKKQHLTRKXKSGTATYFVDLQTPRKGLIPEKWVALNANHSRI

SEQ ID NO: 151345 - protein, 96 aa, Glycine max
  unsure (1)..(96): unsure at all Xaa locations
  Clone ID: PAT_MRT3847_107688C.1.pep
TTRAAFSFLTAKVVVLVVLLYLKHSQCVPEGSHEIFSISSDFPSPCISHHCQISLSPPPSIQWYFGPKTSNGPRIPQHPHLKGPLRPTLLPQCXPL

SEQ ID NO: 151346 - protein, 91 aa, Glycine max
  Clone ID: PAT_MRT3847_107689C.1.pep
KRDEFVEAFASLWGKYYQGLQESYMTTPEPFLNYYCKRCREPHLSLNCQEHSTPTFWFTKHGSVTQLLYQHTKDSCSDISFQKGTRFHFMD

SEQ ID NO: 151347 - protein, 115 aa, Glycine max
  Clone ID: PAT_MRT3847_10768C.1.pep
PLGHKYLFLGEIFGKWAHKTCNRSYPRPGCFLFPFRKRGNPPPLEIYPPPDNSLASLNNLVPPRGGLSVPPVWGFWGRGFFRVFPQRHCCCKVKKEGVWGVWHVHQMILSSIGPL

SEQ ID NO: 151348 - protein, 83 aa, Glycine max
  Clone ID: PAT_MRT3847_107690C.1.pep
GHITLLTLTTEFTQRSSSCRQNSASASSMALATAPMAGMVVNLVPSAAEVRMVNMMKTVIKQVSSGNPWYGPDRFAYVGTFSG

SEQ ID NO: 151349 - protein, 49 aa, Glycine max
  Clone ID: PAT_MRT3847_107691C.1.pep
SRYEESFKSLHHCFRSQCHCHCLDLRIMASHLARLLLLLLQTHQLHRLP

SEQ ID NO: 151350 - protein, 111 aa, Glycine max
  Clone ID: PAT_MRT3847_107692C.1.pep
IGVFFFFFFFQNKRPPFLSFGGTLLQKSTTPDPNIRPIHYPSTGIISPYTYFPIVCCCSYFVEDKYDYPSCKELLYPYQCQHAYRMHWLKTRGLPIIHQHKTLTLLYTPRL

SEQ ID NO: 151351 - protein, 119 aa, Glycine max
  Clone ID: PAT_MRT3847_107693C.1.pep
MPPMSMHAASLLLEAVFLKAKSFQALGRFQDAAQSCKTILDTVESALPEGWPENFVSDCKLQETVGNAVELLPKLWKLAGSSQDIMSSYRRALLYHWNLDIEATARIQKELSFFLLYSG

SEQ ID NO: 151352 - protein, 59 aa, Glycine max
  unsure (1)..(59): unsure at all Xaa locations
  Clone ID: PAT_MRT3847_107694C.1.pep
ASKACDKEPQRAFPLGSIHNFTFHESHSSIHIHSWSFYNLLNXMLFFFYXCLTHHRFLV

SEQ ID NO: 151353 - protein, 57 aa, Glycine max
  Clone ID: PAT_MRT3847_107695C.1.pep
ATYITASNHLKLTRNISPNRAIQKTKTWLSSSVTNPVLYIAYIEPSLPSTFTVWTQR

SEQ ID NO: 151354 - protein, 53 aa, Glycine max
  Clone ID: PAT_MRT3847_107696C.1.pep
IGLNILELGWLVLSCFLAQTPCIYAKLARASVNCIAVLFRFFKFYEGLAIVRL

SEQ ID NO: 151355 - protein, 72 aa, Glycine max
  Clone ID: PAT_MRT3847_107697C.1.pep
DIEGRLIYVFPCLHSIVLTEPHCRSKWFYSKNTSAEVQMFAAIYLFGDNRLTEKTTFTCRDQDILVVYYTIA

SEQ ID NO: 151356 - protein, 50 aa, Glycine max
  unsure (1)..(50): unsure at all Xaa locations
  Clone ID: PAT_MRT3847_107698C.1.pep
FXSWLVGLAASPGAVPPGPSWCLLCXGXSXVGFWFXVXSGLSVAPEIRPG

SEQ ID NO: 151357 - protein, 106 aa, Glycine max
  Clone ID: PAT_MRT3847_107699C.1.pep
MAIFKALLASILISLVIVNLVESDTMYQVIKNTVEGSSPSPSPPTIDCDVECNRRCQLSSRPNLCKRACGTCCQRCNCVPSGTYGHYEECSCYANMTTHGGKHKCP

SEQ ID NO: 151358 - protein, 104 aa, Glycine max
  unsure (1)..(104): unsure at all Xaa locations
  Clone ID: PAT_MRT3847_10769C.1.pep
IXIKXXXDGISXIXYXXNWFFXXVXXXCXIXXLNXXNRXXDXXNXXIVXXVYYVMXXXXXIIXSXIMFKDWXGXDVSSIXXEICGXXXVXXGXXILXMXREXEE

SEQ ID NO: 151359 - protein, 143 aa, Glycine max
  unsure (1)..(143): unsure at all Xaa locations
  Clone ID: PAT_MRT3847_1076C.1.pep
MEKVCEFCTALRPLVYCKADAAYLCLSCDSXVHLASAASGRHLRNXVCHSCGYHLAYVLCLEHKMLICRDCDQKLHNLSLPHKKRAIRSFMGCPSAKDFAALWGFESNEIENYSAQDQFGSVSCVSADLNVAQVSGKPGIQTG

SEQ ID NO: 151360 - protein, 131 aa, Glycine max
  Clone ID: PAT_MRT3847_107700C.1.pep
MADNYNVLELNIGLGNNNNSKVGGHAGQSPRQRCPAPFLLKTYELLEELSENEKDSTKIVSWNAEGTGFVVWSPAEFSELTLPRYFKHNNFSSFIRQLNTYGCKLLSSYLCELVPGMLQRACWHSLAEGTR

SEQ ID NO: 151361 - protein, 137 aa, Glycine max
  unsure (1)..(137): unsure at all Xaa locations
  Clone ID: PAT_MRT3847_107701C.1.pep
VXXLPXSXLXXXXXXXLXXSXCGRXXLXXXXYXXSXXQVXXSXXSXVYYTXSXXXXXXXXRAXLXXXXXXXXXXXXVXXXXXLHXXXXSXXTXEFTXMXXXXXXXIXLNAKXHSLVXSXXAXXXXXXXHXXAXXXAX

SEQ ID NO: 151362 - protein, 47 aa, Glycine max
  Clone ID: PAT_MRT3847_107702C.1.pep
MVLQTRNNAHVVSVPLKAQGHIMPMMDIARLLARTGEIVTIFTTPQN

SEQ ID NO: 151363 - protein, 207 aa, Glycine max
  Clone ID: PAT_MRT3847_107703C.1.pep
MGNENHYHHQFYYQKSTFLPMLCSRPSIKEVTLPRFRDPSASSGNDPLSPRISCMGQVKRNNKISGIPPSHRLTFTTKTDNTNRNTTSSPIVKYSKLKKLFSGKNFIISTPKTTTATTTFSSCRSRHQEVSDMPKNQKCLSNNVVFNKSIEEMDPPLPVVKRVCKLEEPKELDSLWKRRSGTDRPALKSLQLQQINHPRICVQPPTV

SEQ ID NO: 151364 - protein, 219 aa, Glycine max
  Clone ID: PAT_MRT3847_107704C.1.pep
MAPRDKTSAVKPSGNAGVKDLHFRGVRKRPWGRFAAEIRDPAKKTRVWLGTFDTAEEAARAYDAAAREFRGPKAKTNFPLPSENFKNASPSQSSTVESSSRDRDVAADSSPLDLNLAPVAVSSARFPFRNQFPVFPGAVPAANQVMYFDAVLRAGMAGPRGFAFGYNPHPVAASEYHATTSDSDSSSVIDLNHNEGVVKGNGSRMFDLDLNHPPPHEIA

SEQ ID NO: 151365 - protein, 46 aa, Glycine max
  Clone ID: PAT_MRT3847_107705C.1.pep
PMGESPEGRKMVHIFFRASRTPLEFLPPFHGKGQTLTGLDYWPVNH

SEQ ID NO: 151366 - protein, 123 aa, Glycine max
  unsure (1)..(123): unsure at all Xaa locations
  Clone ID: PAT_MRT3847_107706C.1.pep
KDDGSPGGMETKSGLGVASLWPSRPFIWELLSLVSGCLGGEILQVDLFVLPRIQTPSGAKFFVVCEPAPQSVEMFLDFAPEMYTDYVLKKPFYQSYMPVCCEVLXISDLTQAVPKDMCCFWGR

SEQ ID NO: 151367 - protein, 82 aa, Glycine max
  Clone ID: PAT_MRT3847_107707C.1.pep
TESGNVDEAGNNLQCSILIKSIPCTYTPLNPDMIFDQSTCPRGQRVLSSATTIATALRMRYSLKGLRVLRILSLWYISIYAE

SEQ ID NO: 151368 - protein, 60 aa, Glycine max
  Clone ID: PAT_MRT3847_107708C.1.pep
METPNVTIPKVGPKPSRKVKLPTPKELISHYESKGMDSQDASMKVIEDLQTALIRVISSG

SEQ ID NO: 151369 - protein, 139 aa, Glycine max
  Clone ID: PAT_MRT3847_107709C.1.pep
METPNVTIPKVGPKPSRKVKLPTPKELISHYESKGMDSQDASLKVIEDLQKALFRVISSGKGKHDKLLTESSRKIDAINNRLTVLDMKLDSKPAYVETFAIGLASGAALKGIGAVVPHIIAPLTQIWNSVSSAIKSSPQ

SEQ ID NO: 151370 - protein, 73 aa, Glycine max
  Clone ID: PAT_MRT3847_10770C.1.pep
PHRPGCNSWGNPGCPPGGGFLFSRRSKMLNSWGSRGWVEKPTWPKGNKLGVFVELENVFIQLVVLVFPPLSLQ

SEQ ID NO: 151371 - protein, 127 aa, Glycine max
  Clone ID: PAT_MRT3847_107710C.1.pep
KNPKKNSIPSLGGPLLGVFLPRDLILARSLLGASFPLWGVALWLAGPLAFVVSWGKFFPAAISPQLPIRESHCSTRGRFMRGLPFLLALPSLPPFQGGTLLCPSVLLIGPLRGGRPFVFWPPGRFFL

SEQ ID NO: 151372 - protein, 59 aa, Glycine max
  Clone ID: PAT_MRT3847_107711C.1.pep
LVAFFSKKTSFIQTVLIWRVAINMLHGLYTYKRPKYAFSKILLSHRDSKTKSVGARELE

SEQ ID NO: 151373 - protein, 138 aa, Glycine max
  Clone ID: PAT_MRT3847_107712C.1.pep
MPMQMPESTCSFNTFPVQPTDNSRNTDGATMHNKGYSIPPPHHVPSNQFSFVHGEHRMKPQREVPPPPSYSNGHHFMPSMTREYGYDNHERLRPPYDYQERWNVPPCSGPRYHDKSVPAPYGCHPNESISFPSHGWRF

SEQ ID NO: 151374 - protein, 60 aa, Glycine max
  unsure (1)..(60): unsure at all Xaa locations
  Clone ID: PAT_MRT3847_107713C.1.pep
SIAVARINAYELLSKTMAELLMQIXDLKAALALLRVRKVTGGAAIELSTIKVVMLSIAQV

SEQ ID NO: 151375 - protein, 97 aa, Glycine max
  unsure (1)..(97): unsure at all Xaa locations
  Clone ID: PAT_MRT3847_107714C.1.pep
STDTIDQVTQQPIKGQKCGGEFNLEKWNAHGAAYLLHDRLHTRSDXHIADVCSFCASMLKTTFIQPXNWPVCKTCGLPPGRVPKKGTSLTKLGFMIP

SEQ ID NO: 151376 - protein, 83 aa, Glycine max
  unsure (1)..(83): unsure at all Xaa locations
  Clone ID: PAT_MRT3847_107715C.1.pep
QSCGRNFVSVFKGISLLYMLRDWPTILSCSAVELSFFLFFFFCLMNILYPLFFYFFVFPSDNNYXYKNIFNLFLKKLMEFAGR

SEQ ID NO: 151377 - protein, 50 aa, Glycine max
  Clone ID: PAT_MRT3847_107716C.1.pep
RNGEEIKLFHQTEKVLMGITHIATKKTFQLSFYDMNQTASAISKFSEMMT

SEQ ID NO: 151378 - protein, 44 aa, Glycine max
  unsure (1)..(44): unsure at all Xaa locations
  Clone ID: PAT_MRT3847_107717C.1.pep
GEAGTYYDDGGARGGIHLTCSESLLKKTEREITVLVLVXIPCIG

SEQ ID NO: 151379 - protein, 163 aa, Glycine max
  Clone ID: PAT_MRT3847_107718C.1.pep
HSLGATQLVVFGLGPMGCIPLQRVLTTSGNCREKANKLALTFNKASSKLVDDLAKDFPDSSYKFGDAYDVVYDVISSPNKYGFQNADSPCCSFWNIRPALTCVPASSLCKDRSKYVFWDEYHPTDSANELIANELIKKFGLSNTNQGSVPSPAPAVAPSPDDQ

SEQ ID NO: 151380 - protein, 60 aa, Glycine max
  Clone ID: PAT_MRT3847_107719C.1.pep
DTRGGRATKYKVIIRISFVLGHIPQWGGSFKHTVGHTNNEVAIKLHHDLCFADLSKEMAL

SEQ ID NO: 151381 - protein, 82 aa, Glycine max
  unsure (1)..(82): unsure at all Xaa locations
  Clone ID: PAT_MRT3847_10771C.1.pep
SLATYPTRTACTQQGCMGPXNRAFFESRCPSCGSRFNDQGRVVRGPAPMWLALALCGINNDKAVFVLCGQTIFRSFQAPWRV

SEQ ID NO: 151382 - protein, 68 aa, Glycine max
  Clone ID: PAT_MRT3847_107720C.1.pep
MAGLLGYRSLPPKAKNLVVAGGLTAFVFGAYFYTMRAVGGTDELQVAIDKFEADKSKNEGDANMPSKV

SEQ ID NO: 151383 - protein, 80 aa, Glycine max
  unsure (1)..(80): unsure at all Xaa locations
  Clone ID: PAT_MRT3847_107721C.1.pep
FFVAYLGIVRRKEWPHFFRFHVVMGMLLEFTPVXVIAASSGYSPYNLQGNLQXHFWTAVSFGYLFTVLESIRCALAGMYA

SEQ ID NO: 151384 - protein, 145 aa, Glycine max
  unsure (1)..(145): unsure at all Xaa locations
  Clone ID: PAT_MRT3847_107722C.1.pep
EXPGXDPTPXPPTPFSIQFXEATNMVCCKXXRAXWLQRSGLVFNQSVLCTXXLSXEALPRXXSLWTXXIXXPIXXIWXFSREKGLLSWLKGSCXTPPVKARGSDPDLXXGLAFKAXSLSLPXXMAXXSGWTYXDLTXLWDPFGPP

SEQ ID NO: 151385 - protein, 116 aa, Glycine max
  Clone ID: PAT_MRT3847_107723C.1.pep
PFGRPPLFFKNPRGKSPPPKYFILFFPPGVPPLGFYKKPRAPTPKGIFFCGGTPGTPLGTKASLLNPGGHPPPKEKKKFPGLKTHAPNALFIPGPNFPPAPKGKNPKTWPKKPWPK

SEQ ID NO: 151386 - protein, 57 aa, Glycine max
  Clone ID: PAT_MRT3847_107724C.1.pep
WGILSVKFPVESIGWNTVADAHYTTQFCLCKSPELHIKFTYTQTFYPKKKKKKVGRF

SEQ ID NO: 151387 - protein, 60 aa, Glycine max
  Clone ID: PAT_MRT3847_107725C.1.pep
ICGCVLPKDDDLVIYCIGERSEVGMLDTGKIQWKSIHKHYNTYLFWKSFQVTMIPTNHNS

SEQ ID NO: 151388 - protein, 103 aa, Glycine max
  Clone ID: PAT_MRT3847_107726C.1.pep
YNSRGGGQPTPPGGKTPKPGHCFREKTRRGRTKPKPRGYIYFGKPPPNARTPPRGGVPCLLKKTPKIWGEFQENPNTYGGFFPPRATCPNKLPFFTGAKKILR

SEQ ID NO: 151389 - protein, 99 aa, Glycine max
  Clone ID: PAT_MRT3847_107727C.1.pep
QALLSTAHSDTNPTPTYIFFFFSFPIPLHHICYFSHFFQLLFKYLSIPFPFPPSLTLIIFTLLLLLPPPPFFSLSKVKPINNGAAAHGHDDHDDVAAPP

SEQ ID NO: 151390 - protein, 111 aa, Glycine max
  unsure (1)..(111): unsure at all Xaa locations
  Clone ID: PAT_MRT3847_107728C.1.pep
VLALLIGLSTACLRLKNDRERDEEISERTLLQELSTPKSVAVTEEGDLISSDELLFMTLAVIKAATDDFSDTNKLGQGGFGAVYKGVLPDGNEIAVXRLSRKSWQGMEELN

SEQ ID NO: 151391 - protein, 94 aa, Glycine max
  Clone ID: PAT_MRT3847_107729C.1.pep
SFFFVFFFFCGFFFCYSVCFTLNKFFWGTAEKRPHQNLTSKGTCILKQGEKRPRKKHLQKKTHQKKKHPYPEGHVHRCLTPPSRAPPCKTAGLS

SEQ ID NO: 151392 - protein, 85 aa, Glycine max
  Clone ID: PAT_MRT3847_10772C.1.pep
NPSLRVYYKPRKFSRILLWVDQVTEIHSASYVYGQATSRERILPKSLHVLSYFLLAPNNDSLRFTSFYFNLERLKTYCEGHMNYI

SEQ ID NO: 151393 - protein, 45 aa, Glycine max
  Clone ID: PAT_MRT3847_107730C.1.pep
TWVLFFMVYKTDWNKKASPAEDKINQWGGHENSKTPAIAKNDQET

SEQ ID NO: 151394 - protein, 58 aa, Glycine max
  Clone ID: PAT_MRT3847_107731C.1.pep
RAGARELELHMERHHLLGTTNRVILGPHTYYVRRYDNTVRTDTLIQMQRKKTHIDSIE

SEQ ID NO: 151395 - protein, 202 aa, Glycine max
  Clone ID: PAT_MRT3847_107732C.1.pep
MSLSVPKLARPLPLHHHSSYGSLTMSFHTFTPFLGSTHKLRFISPIKLNAPRFNSSVVSVSDLFKNNKPKSTTNLLITKEEGLQLYEDMVLGRSFEDMCAQMYYRGKMFGFVHLYNGQEAVSTGFINFLKKEDCVVSTYRDHVHALSKGVPARAVMSELFGKATGCSRSQGGSMHMFSKEHNLIGGFAFIAEGIPVATWAAF

SEQ ID NO: 151396 - protein, 96 aa, Glycine max
  unsure (1)..(96): unsure at all Xaa locations
  Clone ID: PAT_MRT3847_107733C.1.pep
MGKSDPTVRADQHTDVEKANTMLRGLITEKRFTPLTLRLVXHSARTXDVSSKTCSTFGTIYQPSDLDYGTNYGHNIAARPLEPLEADLTILSYSDF

SEQ ID NO: 151397 - protein, 89 aa, Glycine max
  Clone ID: PAT_MRT3847_107734C.1.pep
LLIINVAVQQEVVCTKRNQCRNKKQHPLRHNLEALNIIRPFFNDWLQPWKTKGIFFMRSYEESRCNLSTVLLDASHFLWCRLLQTNTLI

SEQ ID NO: 151398 - protein, 190 aa, Glycine max
  Clone ID: PAT_MRT3847_107735C.1.pep
MPQTQPKKKVRRSCETRHHIIAERKRRQELTGSIIALSATIPGLKKMDKAYVLREAVNYTKQLQERVKELENQNKVDSATFIRKSEASSDKNTGNCETNKEISLFEVEARVLDEEVLIGIHCEKQKDIVFKIHALLGKLHLSTTSSTVLPFGTSTLIINIIAQMNGENSMTMHDLVKKLRDYLLEVYDMQ

SEQ ID NO: 151399 - protein, 118 aa, Glycine max
  Clone ID: PAT_MRT3847_107736C.1.pep
KNFPSSKRNLLAAKNKDADKHDRSKEIELKEVASLAEKLLEASSEWFLKYLEESLSNEYGLKNEGNIEIASLLGQLKQVNHWLDNLAGGDKVDPRVEKLRKNLYRFLLEHVNSAVTCN

SEQ ID NO: 151400 - protein, 120 aa, Glycine max
  Clone ID: PAT_MRT3847_107737C.1.pep
LIGELGCQAYEIFLGGAPGPGIDFTRWSFLGGTFKPFFLGPPLGGFFRRARANLGFLGILPFLRDPFLSGEMPWGGFSIFLPKISGPNFRNRCFDVSLGGLLRHDRCDFFTDSTNLTCLG

SEQ ID NO: 151401 - protein, 80 aa, Glycine max
  Clone ID: PAT_MRT3847_107738C.1.pep
TRIRPAVQDDGGDIEYRGFDLDTGIVKLRMQGACSGCPSSSVTLKSGIENMLMHYVPEVKGVEQELDAEDDGAALSGEIK

SEQ ID NO: 151402 - protein, 141 aa, Glycine max
  Clone ID: PAT_MRT3847_107739C.1.pep
LPYFRIIPLVSLSVLIGIVYAVVAPLLLPFLILYFCLGYVVYVNQITMVGLFGLKLKPAASISTIPLILFTWMFNEYCKMRFLPSFHHYTLQDAAENDELDEKCGLLELHYENAINAYCPPGLRPVNFMASESSSTPLVSS

SEQ ID NO: 151403 - protein, 154 aa, Glycine max
  Clone ID: PAT_MRT3847_10773C.1.pep
KKKLLQRTFHVVSSKNRLRRIQIHTSYMGNICSSDDRPSRVSPAESSLVDSSSCHDRPLNLEVTTAEREHEDMISGNIGSVNKKITWEVLHSYTLSLVTKTQHEGKGNGSTEEASGQGARVIVNTDGNFHGNGNGSKYQNCSIVMNYEAAKGTN

SEQ ID NO: 151404 - protein, 70 aa, Glycine max
  unsure (1)..(70): unsure at all Xaa locations
  Clone ID: PAT_MRT3847_107740C.1.pep
FWTKHENLYLPTXNQRVILIRGRGIPSXILAKLAHAFLQHVAHXNHKDQIPAFIILFSTKDNTIIINYSP

SEQ ID NO: 151405 - protein, 47 aa, Glycine max
  unsure (1)..(47): unsure at all Xaa locations
  Clone ID: PAT_MRT3847_107741C.1.pep
FETDSKQKCSKANKRTXITRXKTXMISVLHVTYYKSITNLWGTIELN

SEQ ID NO: 151406 - protein, 191 aa, Glycine max
  Clone ID: PAT_MRT3847_107742C.1.pep
GCAPNRATWNTMLAVCSEEGKHNYVNKVLREMKNCGFEPDKDTFNTLISAYARCGSEVDSAKMYGEMVKSGFTPCVTTYNALLNALARRGDWKAAESVIQDMRTKGFKPNENSYSLLLHCYSKAGNVKGIEKVEKEIYDGHVFPSWILLRTLVLTNHKCRHLRGMERAFDQLQKYGYKPDLVVINSMLSMF

SEQ ID NO: 151407 - protein, 70 aa, Glycine max
  Clone ID: PAT_MRT3847_107743C.1.pep
SYKHCFSIICCVPTKRFLCWMCTIFQIMEAMFTTSETLILFFLRDLIDFVSLSYFLSSYSLYIMILMFHI

SEQ ID NO: 151408 - protein, 114 aa, Glycine max
  Clone ID: PAT_MRT3847_107744C.1.pep
LPQPSIVVNKGGGGAGFFEALKGGDEFWGPLFGKGFFAFWGVFYFYPFLKGFMGCQNRPPALGFFWARVVAPVFFFIWGKKKPFVNPVGRETLPQTCLAIKCLVPPKKLSQRIF

SEQ ID NO: 151409 - protein, 54 aa, Glycine max
  Clone ID: PAT_MRT3847_107745C.1.pep
NFPLKIKNNFTKRFWLLFPLPSPKIIFFFEKKASTPNFLWDPFSFFFYVDWNTN

SEQ ID NO: 151410 - protein, 37 aa, Glycine max
  Clone ID: PAT_MRT3847_107746C.1.pep
LRCYSNKKGPQLHQIKKGEEDNNYSIIRRGVLLRRKN

SEQ ID NO: 151411 - protein, 482 aa, Glycine max
  unsure (1)..(482): unsure at all Xaa locations
  Clone ID: PAT_MRT3847_107747C.1.pep
MALKFLNKKGWHTGSLRNIENVWKAEQKHEAEQKKLDELRKQIQEERERTEFRLLQEKAGLVPHQERLEFLYDSGLSVGKSSNSEGFKALEQLPKSDATDAAGSSASAXSKEGASVPGALFEEKPQSANDAWRKLHSDPLLMIRQREQEALAKIKNNPVQMAIIKKSIEGTENKEKVYKKEKRKKHWSSKSKHKKQSDSEDDTTERXNERLVMKFLNKKHHKAQSDSEYQSSEGEMRRRKDRYEDKKYRERSPSHQQRQRNGKDYKEDAGDRNYNRSRSERSVQKGQLDSGYESSEGEKRRKNYYEGKKCRERSPNHQQRQRNGRDYKEDTGDRNYNTSKSERYASEGWSNIDAPKSGGGRISEASSNRYSASSPEHGSHYKCRNVAPKLSEEERAVKLKQMQLAAELHEEQRWKRIKKAEESDTKEAIQNDNVCGKNFLDTVQKSVYGAAEGGSTSIAESVRRRTYYSQGRSGGEGNAFRR

SEQ ID NO: 151412 - protein, 81 aa, Glycine max
  unsure (1)..(81): unsure at all Xaa locations
  Clone ID: PAT_MRT3847_107748C.1.pep
RYSRVLGRIYHEITSYPWSFFLPPLFKLFSYFVSESDTDRQGCLSENGEMDLKIFYMAGSTDRLNHNPVVQVWKLNPHXKS

SEQ ID NO: 151413 - protein, 123 aa, Glycine max
  unsure (1)..(123): unsure at all Xaa locations
  Clone ID: PAT_MRT3847_107749C.1.pep
ENMKPLDTRGAAQVLAARPCHGAGYQRLPLQMKTGYGERSSEAKRARLRLAAEAHNIRAFKTIPEERAAPTKDHINGGQLRXSDSKTGNHQPSXYASERQVHHNDIFIFGIDNTVLSNIPYYE

SEQ ID NO: 151414 - protein, 64 aa, Glycine max
  Clone ID: PAT_MRT3847_10774C.1.pep
HREVKPPPSHHGDYFTGSFHVFGKVVDQGDTMRKKRRPWRPYAWPYRYSLLRVIVHKIFQSRLL

SEQ ID NO: 151415 - protein, 34 aa, Glycine max
  Clone ID: PAT_MRT3847_107750C.1.pep
TNDGFADRRRLTGNAALRRRNGTDEGRPHKGSQQ

SEQ ID NO: 151416 - protein, 75 aa, Glycine max
  Clone ID: PAT_MRT3847_107751C.1.pep
AVSHLLRFISFSVPRVNRLRPLMRSVGFSTCISTYQDLHVELDLAQCPSPVLGVVKHNNSSYGARAILLPSPCVL

SEQ ID NO: 151417 - protein, 74 aa, Glycine max
  Clone ID: PAT_MRT3847_107752C.1.pep
VVVIHRPLSVGIINQVQMIGLDIECSIENNIFVVERQNEYEWPSTVSDSAANLEVFNVLKCAIVLETFSSVKCT

SEQ ID NO: 151418 - protein, 92 aa, Glycine max
  Clone ID: PAT_MRT3847_107753C.1.pep
ADSETRVPHRLYTSAGKRRENAISLGLVVPPAGLEQDLRVAPFIFKAKWLQKHFKNSSGKVASQFPFRSKSLVALRKIFFPTTFQRLVHLFM

SEQ ID NO: 151419 - protein, 33 aa, Glycine max
  Clone ID: PAT_MRT3847_107754C.1.pep
RSCACWSHVCYRHHSCSSSIVDHSASSDSMISL

SEQ ID NO: 151420 - protein, 65 aa, Glycine max
  Clone ID: PAT_MRT3847_107755C.1.pep
HKALQNCLMQTYTEIAHQNEKYLTKHITSIGEQHAHPINARNLDSQLSHGTIGQKKIRGDHQFLY

SEQ ID NO: 151421 - protein, 207 aa, Glycine max
  unsure (1)..(207): unsure at all Xaa locations
  Clone ID: PAT_MRT3847_107756C.1.pep
TSSPEKQNHHKVSFLPGLELHKAKEGKQTKPNIFLISHLFNLWFIYPWNMVQRKVPSKLGIQAEHVKSDKRLSNLKLLSSSHHQDGKNRGADMKKKMKKSRSIKLSDLEALQSSSSSSPSRRSLSLHTPTTTTSASPQKQQPLFRTVDGSPNYMKPTSSSHAKKELFLVSQRNTQPXSDFKNLPRKISSDSKAACVKKPAXALTRHL

SEQ ID NO: 151422 - protein, 35 aa, Glycine max
  unsure (1)..(35): unsure at all Xaa locations
  Clone ID: PAT_MRT3847_107757C.1.pep
FSFFYHVLFSFNSKIDINGLSHFLLNMYPHVLYXY

SEQ ID NO: 151423 - protein, 110 aa, Glycine max
  unsure (1)..(110): unsure at all Xaa locations
  Clone ID: PAT_MRT3847_107758C.1.pep
PEAAKEYIHRDFYTSDSKQXGKSYFYARDLEIHPKDTFVFSIDGTVLSNIPYYKKHAYPLEKFNSTLYDQWVNKGXSPSLPXTLKNYNKLLSLCFTFASVTALFYNVFPY

SEQ ID NO: 151424 - protein, 91 aa, Glycine max
  Clone ID: PAT_MRT3847_107759C.1.pep
SCRIRHEASAEFGRSKLFVSVYKTNLDKHYKISTLPMWSKYVINHLCLPYFVFSIASWSHHMLDSILSFMSAVGGSSWMLLITRPTMNPAT

SEQ ID NO: 151425 - protein, 51 aa, Glycine max
  Clone ID: PAT_MRT3847_10775C.1.pep
SPSHTRRYVHSLYFLLASLSLISELPYKTNTSAKQSLNSPITFLHYLSLIL

SEQ ID NO: 151426 - protein, 72 aa, Glycine max
  Clone ID: PAT_MRT3847_107760C.1.pep
KALSPNRGGNPGGVFNPFEFGPSFGGKGKEFSHGGLGMLGFFGFIVLPHVAGEGPIVVSLGSLFYRGGCFLV

SEQ ID NO: 151427 - protein, 52 aa, Glycine max
  Clone ID: PAT_MRT3847_107761C.1.pep
KVNTLIKMVTPATKIMVGTARSRSTLGLIDVHDNNGRAYPCLGNEHARILIL

SEQ ID NO: 151428 - protein, 55 aa, Glycine max
  Clone ID: PAT_MRT3847_107762C.1.pep
SGIYCCLLTLIVNQFFRIRNYFFLLALVAVNKRLLERVFSFRGVSSFFLFPDVKL

SEQ ID NO: 151429 - protein, 87 aa, Glycine max
  Clone ID: PAT_MRT3847_107763C.1.pep
QWLLDSHGLLDIQRLLIYQTCLGLPTLSGLHKAPLQHIVCRWLTKETCILGTTFFDTSQSYGLHADDEMMNGKASKELAREKDQLAT

SEQ ID NO: 151430 - protein, 49 aa, Glycine max
  Clone ID: PAT_MRT3847_107764C.1.pep
LPGPIFCDPDDYLAVCWVGLPAGLDLTLKFYPPSGTGRVALKFQLALTQ

SEQ ID NO: 151431 - protein, 81 aa, Glycine max
  unsure (1)..(81): unsure at all Xaa locations
  Clone ID: PAT_MRT3847_107765C.1.pep
RYIRFRRQQHQKHRVVNVYGPTKGSPNRVPVCLIEKETQCQIVHLDLFSAXINEPEFQKQQSFRYHPVRHYRNYTRNDSRG

SEQ ID NO: 151432 - protein, 74 aa, Glycine max
  Clone ID: PAT_MRT3847_107766C.1.pep
NTCCGYLHPVCRIKYVTIRNMGYLSHPWYNGLSSSIPNDVYTLYSACILGGHSLSRATIIAPRQTLLRPSSRLH

SEQ ID NO: 151433 - protein, 219 aa, Glycine max
  Clone ID: PAT_MRT3847_107767C.1.pep
NQEQYRSSDSKWKLNEKTATMKSRRLSTGAGVNLTSPGGSASLDTLYSKFLHPKRILEEDSSSDNSSLISSNSDEGSCSTDSTADSTSTDDFADYIFGDVGRGAGGMLRNSDSNICPALPSFPHSGYFPSSDIDQHDSVVLPHSTGFQPSPSEEGLLYRNRVVDVKRSGGGVSHFHLDTNIEHRKLDTSSSSISFRETDSVFNDRNSGVSCTKSRYRTD

SEQ ID NO: 151434 - protein, 85 aa, Glycine max
  Clone ID: PAT_MRT3847_107768C.1.pep
HCLLLAAFYSYLKRNKRMGAKKWFKIIVKLKKSKKDKSKEEKVISFVPLFRPCISILKFASIMIIWRVFLYSLDILSGLVLLRWI

SEQ ID NO: 151435 - protein, 62 aa, Glycine max
  Clone ID: PAT_MRT3847_107769C.1.pep
PPEVAVTIWIPSLAYVEPNYDDKTSSSISSGTFLKVCSDVKLVFMFVEHIVLLMQFSPRSEL

SEQ ID NO: 151436 - protein, 138 aa, Glycine max
  unsure (1)..(138): unsure at all Xaa locations
  Clone ID: PAT_MRT3847_10776C.1.pep
VWLWTSLLAGGPPLMNGESQQLGNNNIQSSSDTLPIPVSNAVLIPQHMGSFSEVHAGNQKFPNTGRQLDSRHHGKTNGRNPSKTNGPKALNPAPENYSNINSSQTGNYTHTVPPSGSTPNFICGNPVHXRGLNGFLHS

SEQ ID NO: 151437 - protein, 71 aa, Glycine max
  Clone ID: PAT_MRT3847_107770C.1.pep
KKKKKRGVRTLLDRLILNPFFPSHETAILIKLFSTLYLIPLEYLNLILSSNHLTSHTLLPSHPWDQANITC

SEQ ID NO: 151438 - protein, 62 aa, Glycine max
  Clone ID: PAT_MRT3847_107771C.1.pep
AGIVRHREPWRRKDGVYMYYEDYASVIAYPKGEMKGTAITGPIGKECADLCHRIAGAVNAIV

SEQ ID NO: 151439 - protein, 124 aa, Glycine max
  Clone ID: PAT_MRT3847_107772C.1.pep
MTSCLTRPHICSTFQSLFLGGVGSLSQAALQMAIVEVAQQTPSAVPQSESSEERMTQETAPVTEAPATEQPAAEVSASEPPAAEAPAPESSTVAPGDETTPAPTDTVEETTTEVAPEEPKGRTS

SEQ ID NO: 151440 - protein, 73 aa, Glycine max
  unsure (1)..(73): unsure at all Xaa locations
  Clone ID: PAT_MRT3847_107773C.1.pep
MPKVSYDAIVADSRLKHTGAGAXMNQSWIADMDPNIPIRSPHAFVIFKSEFREHFKEEHSNNKSVSVVGKAGG

SEQ ID NO: 151441 - protein, 50 aa, Glycine max
  Clone ID: PAT_MRT3847_107774C.1.pep
VILLLQIMGSICSIDMFFDVSLNRHAYCDSVSSSPRLNLQVTTCPSMYYT

SEQ ID NO: 151442 - protein, 259 aa, Glycine max
  Clone ID: PAT_MRT3847_107775C.1.pep
MASTKERENFVYVAKLAEQAERYEEMVEAMKNVAKLNVELTVEERNLLSVGYKNVVGARRASWRILSSIEQKEEAKGNDVSVKRIKEYRLKVESELSNICSDIMTVIDEYLIPSSSSGEPSVFFYKMKGDYYRYLAEFKSGDERKEAADHSMKAYQLASTTAEAELASTHPIRLGLALNFSVFYYEILNSPERACHLAKQAFDEAISELDTLSEESYKDSTLIMQLLRDNLTLWTSDIPEDGAEEQKVDSARAAGGDNA

SEQ ID NO: 151443 - protein, 91 aa, Glycine max
  unsure (1)..(91): unsure at all Xaa locations
  Clone ID: PAT_MRT3847_107776C.1.pep
KSICKNDEVLRMELDIQRFLSNANYQHFKFQHFPSSYLXLTTHHVAQHYNIQTIIQNNSLDSQRTRIIIRNITETNYPIIHLSKIPTKHLE

SEQ ID NO: 151444 - protein, 48 aa, Glycine max
  Clone ID: PAT_MRT3847_107777C.1.pep
KYYWLLATLSAVNVLYYLVCSWIYGPPADQESKVTEENGSNEEELPLI

SEQ ID NO: 151445 - protein, 37 aa, Glycine max
  Clone ID: PAT_MRT3847_107778C.1.pep
KRGPTDAIVHLQLYYSIDIFKRNNIKTARVLFIVGFY

SEQ ID NO: 151446 - protein, 54 aa, Glycine max
  Clone ID: PAT_MRT3847_107779C.1.pep
IKETQLTCKLPTRYIKIQPRVPNPEEKHKDPYVESYPPYLKQIFQKQKRTQPTS

SEQ ID NO: 151447 - protein, 50 aa, Glycine max
  Clone ID: PAT_MRT3847_10777C.1.pep
MLIHIQGTCILFEDEFNEFCFIHRHINLFFFPFCKYYRSMSMDVVYISQN

SEQ ID NO: 151448 - protein, 59 aa, Glycine max
  Clone ID: PAT_MRT3847_107780C.1.pep
DYRQQEDVSYTGPRIAFLIGSIPFFPLTSQSTNTNSSSLLSTISSHPSYYIMPLPLYQQ

SEQ ID NO: 151449 - protein, 75 aa, Glycine max
  Clone ID: PAT_MRT3847_107781C.1.pep
FILLWLMTPDRIYLLKTMMEHPSIQHPTMIRHFTIMHPNKEHLNLLIHLKLARSQRPLGICLPCLAHINDPSIKE

SEQ ID NO: 151450 - protein, 129 aa, Glycine max
  Clone ID: PAT_MRT3847_107782C.1.pep
QYDDSNQNLKNMISTVIGQYGLLPVSGVISKLKSEGHGHVFTSVFYAQSGIHPMLSPKPVCQNERPPFPTSTYSQSNPDSHCSDQPHDCSNDATCLDQNVKDNTDSDHARHESAAADQSAWYNLCHDAA

SEQ ID NO: 151451 - protein, 215 aa, Glycine max
  Clone ID: PAT_MRT3847_107783C.1.pep
KKKKKKKKKKKKKKKKKKKKKKKKKKKKKKKKKKKKKKKKKKKKKRGGPFKRTKFNDPGLARKNFFKRAPKIKSRARGLKTGEGENPGGTQIKSLGKKPPFPQWGKKKKAPPRPPFQKVAHPKGKRDPPLNGPINPGGGGGSPQGTRYFGKALSPRPFGFFPFFFPKVGGFPPKGLKGGPPLRVPIKGLTAPHPKKICLGGGSPKGPTPLINGFS

SEQ ID NO: 151452 - protein, 144 aa, Glycine max
  Clone ID: PAT_MRT3847_107784C.1.pep
IKSRARVLKTGGGENPGGPQIKSLGKKPPFPQGGKKKKAPPQPPFQKVAHPKGKRDPPLNGPINRGGGGVSPKGTRYFGQALSPRPFGFFPFFSPHFPGFPPKSLKGGPPLGVPIKGLRAPPPKKLCLGGGSPKGPSPLKNGFP

SEQ ID NO: 151453 - protein, 94 aa, Glycine max
  Clone ID: PAT_MRT3847_107785C.1.pep
RRRGRGHLAPIKGGGAGYQQSFGKKPYGIRKDFKTEPQTGEKIKKLWFNPQKPLGLWGGKKPPGRKVIETFEKKLPSKLMEGRESPAPAPVPGC

SEQ ID NO: 151454 - protein, 58 aa, Glycine max
  Clone ID: PAT_MRT3847_107786C.1.pep
GLTNGNDTHTLRSIYSYITCCIALIEFIDSMEIKETQNFDVKKKKPKKTVNINFIILK

SEQ ID NO: 151455 - protein, 36 aa, Glycine max
  Clone ID: PAT_MRT3847_107787C.1.pep
MNHDQEASQLGEINVNKIELRRVLLVEEIGAKVRIE

SEQ ID NO: 151456 - protein, 71 aa, Glycine max
  Clone ID: PAT_MRT3847_107788C.1.pep
LNRRSHACTKCKLCTLQAVCMPTRTVMPRHLQSPNSLAYPTVHMLKDLWLPPLSVPANYSDSTADCSSTAI

SEQ ID NO: 151457 - protein, 256 aa, Glycine max
  Clone ID: PAT_MRT3847_107789C.1.pep
HLDIAQVVRWKRTPTSEVEPNVRYAASFSGYGFYGDVDTAGAKERWKGRTREADAGTLEVETDGTNEAARRDDEGDETQATRTREQAGRRIRGINCKVCNEKPNHASVGVGSLTPQQNSEETRWARSKGRFLSVGAAVISCRNEKGPGAVVADAHLSDGFLHLILIRDCPHVSYLWHLTQLTSHGGYLWHLTLLKHQGARPLNYKFFGQYKTPAFTFTDSGNESVWNVDGEIFQAHQLSAQVFRGLVCMFASGPEV

SEQ ID NO: 151458 - protein, 81 aa, Glycine max
  Clone ID: PAT_MRT3847_10778C.1.pep
MATVMQKIKDIEDEMARTQKNKATAHHLGLLKAKLAKLRRELLTPSSKGAGGAGEGFDVIKSGDSRVGLVGFPSVGKSTLL

SEQ ID NO: 151459 - protein, 55 aa, Glycine max
  Clone ID: PAT_MRT3847_107790C.1.pep
LFKIPSGRTYNTRPHETLTNIFNLTGTFTAIGHLSTIISSFLSLTYTNSYHQTNN

SEQ ID NO: 151460 - protein, 37 aa, Glycine max
  Clone ID: PAT_MRT3847_107791C.1.pep
LFFFFVESFFWLSTFLIYRGLVIFNDLKLILLKCKTN

SEQ ID NO: 151461 - protein, 77 aa, Glycine max
  Clone ID: PAT_MRT3847_107792C.1.pep
VIEIKNSTIFTACLLFSSLPPSSNLPFITSQCHSLFLFTLTLSNILHTFLFHFVFSATGFNQNAGLFKLSPFFFFLN

SEQ ID NO: 151462 - protein, 88 aa, Glycine max
  Clone ID: PAT_MRT3847_107793C.1.pep
NLCLDILFLLKFRMPLFWIINLLRFKHLLACWFLSPTGCYFIFTWVLFIGQSISLPYASLLGEYYFNSLNITSSLLGKILRFRLFFLL

SEQ ID NO: 151463 - protein, 50 aa, Glycine max
  Clone ID: PAT_MRT3847_107794C.1.pep
GQRIYWCIGFHMESPIAATSSLFCVVPEEKRTTSTEIKKPCFNSTRVVWS

SEQ ID NO: 151464 - protein, 34 aa, Glycine max
  Clone ID: PAT_MRT3847_107795C.1.pep
HSNHTCLMSDGERYCSCVPRPGAVTGSDFVTRWY

SEQ ID NO: 151465 - protein, 140 aa, Glycine max
  Clone ID: PAT_MRT3847_107796C.1.pep
PPHGGGFPFPAPWGGGFLNGAPDLPPLWGAGGGLFPFKTCNYKTPFLLKAAFFAPGFFSGKPFIKFSRICGFFFTGPCQVFSPPFFPHWPLFKILLGFPVLKKFHVKIPFRGGLTLLKKLKIGLGKRAFLGGLSPPPPVV

SEQ ID NO: 151466 - protein, 79 aa, Glycine max
  Clone ID: PAT_MRT3847_107797C.1.pep
PVCTFSNETRVLTPAPEDEIQKHGGSGGRSRNAELVGEHCEKTECDSHWSTRSVIRPVNTELQNPSSIDSSVLRAHSQA

SEQ ID NO: 151467 - protein, 251 aa, Glycine max
  Clone ID: PAT_MRT3847_107798C.1.pep
CYSRCEPTNPRFFIGEIAPTVENEFMLSLLQLCGTIKTWKRPQDLSTGTPTSFGFYEFESAEGVLRALRLLTKLNIDGQELKVNVNQAMKEILELYVKTKTENLKNKETQEVGEKNEGEQPSNANEDAKVDTEPSNKEASESSNKESHDVANFGIVTDEDREADCEALEKITKMIEERLKTRPLPTPPAQPTGDGSVNLTSEQPVKARDGDSVVDTEKNESAENKNEKETNNDNKPTSEHERTESPDRRHD

SEQ ID NO: 151468 - protein, 160 aa, Glycine max
  Clone ID: PAT_MRT3847_107799C.1.pep
MADSASSPATLPPNPQPSQSAPDLLSQSATPPSSTPLATNPNPNPTLLPPPPTLHFLAGTPPQVPGVLPPSFRPLGPQVPQFSPVPAPNPAYQNPAVPPPGVPGATVAVPPPQMQAMMSYQVQPGNPAMRPFAPIPNGYAAAPNVTPAGGSFIQSFVVPL

SEQ ID NO: 151469 - protein, 59 aa, Glycine max
  unsure (1)..(59): unsure at all Xaa locations
  Clone ID: PAT_MRT3847_10779C.1.pep
SDYAEGKVVLENNDLKVTPGTGRYIQMPPXSYLFDGLDKKDAIYLNSLQAPVKRAKAST

SEQ ID NO: 151470 - protein, 61 aa, Glycine max
  Clone ID: PAT_MRT3847_1077C.1.pep
LYTCLWRAKLTIVRLGCTKLNFLHFLRVINLSLCFINVYLLYLMFVMIWDGHQVSLYELNL

SEQ ID NO: 151471 - protein, 930 aa, Glycine max
  unsure (1)..(930): unsure at all Xaa locations
  Clone ID: PAT_MRT3847_107800C.1.pep
MADSASSPATLPPNPQPSQSAPDLLSQSATPPSSTPLATNPNPNPTLLPPPPTLHFLAGTPPQVPGVLPPSFRPLGPQVPQFSPVPAPNPAYQNPAVPPPGVPGATVAVPPTQMQAMMLYQGRFAYGVYIFTHNLLXYICIDVFLLCTGIPRYPPPYGTMVRPVFPARPPGAVNIPTISRPPVAGIPAVRPIIPPVVRPVVAPSVTPAEKPQNTVYIGKIAPTVENEFMLSLLQLCGTIKTWKRPQDLSTGTPTSFGFYEFESAEGVLRALRLLTKLNIDGQELKVNVNQAMKENLERYDKTKTENLKNKKTQAGVGEKNEGEQPSNANKDAKADTEPSNKEVLESSNKESHDIXVANFGIVCDEDREADREALEKITKMIEERLKIRPLPAPSAQLTGDGSVNLTSEQPVKARDGDSVVDTEKNESAENKNEKETNNDNKPTSEHERTESPDRRHDRKSRERDRDRELKREKDRELERYEREAERERVRKEREQRRRVEETERQYETYLKDWEYREREKEKERQYEKEKEKERERKRRKEILYDEEDEDEDSRKRWRRSVIEEKRKKRLREKEDDLVDRQKEEEEIAEAKKKAEEEQKRQRDALKLLSEHVVNGGKENMITEEITNEVKSIVVEQDTVADYSREDHIGDGNSINVIIDESTIASVAPTDAQSGGNAPTKKLGFGLVGSGKRTSVPSVFHEEDDDDAHKDKKMRPLVPIDYSTEELQAVQPTVSGPTPPNLAAAAEFAKRISSTNFKEEKLDGERDRSRRSNEKSNHRDRSDEDGTHNRDENKERIPGRDRDRDHGSEKLKTSDNKRLLDAKQLIDMIPKTKEELFSYEIDWAVYDKHQLHDRMRPWISKKIKEFLGEEETTLIDYIVSSTQEHVKASQMLERLQIILDEEAEMFVLKMWRMLIFEIKKVESGLALRSKS

SEQ ID NO: 151472 - protein, 77 aa, Glycine max
  Clone ID: PAT_MRT3847_107801C.1.pep
RVHTLLSPFSHLNIHSSVHTRETLLRYSFSPISILNRALHQLCIDLSPSFSLQMNKEILKRSSLQNQVYLRYLIVNI

SEQ ID NO: 151473 - protein, 236 aa, Glycine max
  Clone ID: PAT_MRT3847_107802C.1.pep
GVVIVLPGGLHKRLTTGELLIGPARVLFMDEISTGLDRSTTYQIIRYLKHSTRALDGTTIVSLLEPAPETYELFDDVILLCEGQIVYQGPREAAVDFFKQMGFSCPERKNVADFLQEVTSKKDQEQYWSILDRPYRYVPVGKFAEAFSLYREGRILSEKLNIPFDRRYNHPAALATLSYGAKRLELLKTNYQWQKLLMKRNSFIYVFKFVQLLLVALITMSVFFRTTMHHNTIDDG

SEQ ID NO: 151474 - protein, 43 aa, Glycine max
  Clone ID: PAT_MRT3847_107803C.1.pep
FTETMCHAQLTLLLYIHRNFIHYVKEVAQFSCVTRFPIVILHS

SEQ ID NO: 151475 - protein, 52 aa, Glycine max
  Clone ID: PAT_MRT3847_107804C.1.pep
STRHITFETRSPHIICQKLNHLQQAKTLIMLLSKIPRLLRPKHVPHSQGVSR

SEQ ID NO: 151476 - protein, 34 aa, Glycine max
  Clone ID: PAT_MRT3847_107805C.1.pep
YYSYYTMQLIFLHMILFQTPKLTPKLKHYGITLD

SEQ ID NO: 151477 - protein, 103 aa, Glycine max
  Clone ID: PAT_MRT3847_107806C.1.pep
MKVKKGWLAVQVEEEGGGGGSQRFVIPISYLYHPLFKHLLDKAYEVYGYHTEGPLKLPCSVDDFLHLRWRIEKESTTHHHHQHHHHHHHRQLPHALYFHAYQF

SEQ ID NO: 151478 - protein, 128 aa, Glycine max
  unsure (1)..(128): unsure at all Xaa locations
  Clone ID: PAT_MRT3847_107807C.1.pep
MNRYLVIAAVASVADHYILMDRADMTGGPVMDMPIMHDSXTVTMCTHVDSGKFGMTKLMQDKQTMELVAVKYIDWGDKIDENVKRDLISHRSLKHATSDRSKEELLTPTNVAIVKEYASGGELYEKIC

SEQ ID NO: 151479 - protein, 475 aa, Glycine max
  Clone ID: PAT_MRT3847_107808C.1.pep
MTSIVSGNLNMGRKDFEHQYGNDPSVGLSISHSIADPSSCLNFGGIRKVKVNQVRDSDNCMPAASMGPSYSREDNSTISVGAGYNKNDGDNISLGPTYNNGYDNTIAMGSRISKTDDNLLSMAHTFSKGDGGFMLMGHNYGKGDESILSMGQPFDKGDGNFISMGQSYEKEDGNLISLGTSYTKGHENFIPVGPTYGKSGENFITVAPYDKGTDHIISMGPTYDKVDSNIASTVPSYDRGDSSSLPVGQNHHKGQSSSISFGGFHDDPGPNIPSGIISGYDLLIGSQNSAQGMDSQNDLTETNTESLVNSIPKPNTKNDIVKNKEPKTTKKAPTNNFPSNVKSLLSTGIFDGVQVKYVSWSREKSLKGIIKGTGYLCSCDNCNQSKALNAYEFERHAGAKTKHPNNHIYFENGKTIYAVVQELKNTPQDMLFDAIQNVTGSTINQKNFRIWKASYQAATRELQRIYGKDDVVIPS

SEQ ID NO: 151480 - protein, 66 aa, Glycine max
  Clone ID: PAT_MRT3847_107809C.1.pep
PINIQKCLNELNRSLLMLDNQSAIHANRYFSSFDPISSVFIIHPHKHICSYRYLFVLCTNDVLFLQ

SEQ ID NO: 151481 - protein, 81 aa, Glycine max
  unsure (1)..(81): unsure at all Xaa locations
  Clone ID: PAT_MRT3847_10780C.1.pep
LAGRYNNLVIRXVGLAVFAFATAYIRLMMETLSAFLHAMSIKWVEFHNKFYSGDGAQFKPFSPASLTGDENKYRVHSSDEY

SEQ ID NO: 151482 - protein, 168 aa, Glycine max
  Clone ID: PAT_MRT3847_107810C.1.pep
MSYQHKSFWMPRDAGCMAEENAGYENSSRIEPKRSHQWFMDTGEPEIFSNKKQAVEAVSGRPISGVSHANVSQWDTNSGFHSVTSQFSDRLFGSDLARTVNLVDKNVPSIVSGNLNMGRKDFEHQYGNDPSVGLSISHSIADPSSCLNFWWHQKKLKVIKSEILTTAC

SEQ ID NO: 151483 - protein, 168 aa, Glycine max
  unsure (1)..(168): unsure at all Xaa locations
  Clone ID: PAT_MRT3847_107811C.1.pep
IFEGVQVKYVXGSREKSFKGIIKGTXGYLCSCANCNQSKALYATEFERHAGAKTKHPNNHIYFENGKTIYAVVQELKNTNQDMLFDAIQNVTGSTINQKNFRIWKGNKNFQFAWSCLCFSCPCLDIQNNTNSSIFSTSNLFPPLSASYQAATRELQRIYGKDEVVIPS

SEQ ID NO: 151484 - protein, 119 aa, Glycine max
  Clone ID: PAT_MRT3847_107812C.1.pep
GIPEDEMAALERQLAPAVDNTVTKDRKVGFVSAGVESQLDRGVKTSANHEDIELPEESDSDDDDDKIEIAQKDVPSAVFGGLIRKRDENENNGEVDAAKDKDNGIRLGALERMKRLKQN

SEQ ID NO: 151485 - protein, 225 aa, Glycine max
  Clone ID: PAT_MRT3847_107813C.1.pep
EGRTALHVSVIDNIQCEQVELLMSVSSIDLNICDADGMTPLDLLKQRARSASSDILIKQMISAGGVSKCLDAVAGNALCTHHKAHVIGGSPGTSFRIPDAEIFLYTGIENSSDTTNYDQASVESYSCSNELSNSDSANSPHNKKSNSVNVRRSKFRLHWPRRRETKAAASELEDDDSLDPFSSSRNLEEFPIPLRQRYSQPCSHPNNKRTQPMRTSLPSSSSNVK

SEQ ID NO: 151486 - protein, 99 aa, Glycine max
  unsure (1)..(99): unsure at all Xaa locations
  Clone ID: PAT_MRT3847_107814C.1.pep
ARNSARXXSLSLSXIHXLLFXIDSXLXRFXXXXXPQXXXXXDPAPXVXSXGXGDXXKSHXXXVXEXRDVXMAXXNXAXCPXVLKRKRGXPAKGXRIPXG

SEQ ID NO: 151487 - protein, 154 aa, Glycine max
  Clone ID: PAT_MRT3847_107815C.1.pep
RLEGDFIFGNAAAVFQNCNIYPRLPMSGQFNAITAQGRTDPNQNTGTSIHNCTIRPADDLATNIDAAETYLGRPWKNYSRTVFMQSFMDIVINSAGWREWDGDFAFSTLYYAEFNNTGPGSSTVNRVTWPGYHVINATDAANFTVSNFLLGDNW

SEQ ID NO: 151488 - protein, 83 aa, Glycine max
  Clone ID: PAT_MRT3847_107816C.1.pep
GGSNSSPPPFFFFFFLFFFFFFFFFFFFFFFFFFWWGPEKIKRCIYMTLVLFLILQIKLHNHSRTSHMSWASSNLKAEDNIGP

SEQ ID NO: 151489 - protein, 51 aa, Glycine max
  Clone ID: PAT_MRT3847_107817C.1.pep
NTEVGIIVCRYDSKINLSSSDLFGTRYSLRFKSYKHMYVSSHFCVFRDSHS

SEQ ID NO: 151490 - protein, 163 aa, Glycine max
  Clone ID: PAT_MRT3847_107818C.1.pep
DHINNIKVSHPHSIKQQHQTTQISHQPDFHVQNLRGRGFDLERPAEEDIFIRARGFDEGEAGPSSHTAFQRCKTSTSGYDEEMEVDLTLSIGGSQVKNSHLPQLACSNSTNNGKIRKLNSSASFKSDRTGECSDPTTPMSSSTVTFTQERKGPHWLSQGLKLK

SEQ ID NO: 151491 - protein, 65 aa, Glycine max
  Clone ID: PAT_MRT3847_107819C.1.pep
TFTITSDVVLMILKVEVEEGNITLALISSLWVILTTAMDNRIAYDPYMDEIIDIQQVHQVLQGKV

SEQ ID NO: 151492 - protein, 120 aa, Glycine max
  unsure (1)..(120): unsure at all Xaa locations
  Clone ID: PAT_MRT3847_10781C.1.pep
VLIQKVSRVVAITHEASPCQGRVPXIQGITLKGGPQMVQLRFHGQRLXYTNSLFSPWDKLFYPELVQKGSPISSRXVVPDQGGXEIDPNLSVHFAVELDGPSIAHDMIYCGGKSTSQIWI

SEQ ID NO: 151493 - protein, 82 aa, Glycine max
  unsure (1)..(82): unsure at all Xaa locations
  Clone ID: PAT_MRT3847_107820C.1.pep
EQENRGHVTLYKILSRLNXLDPTNSNKHINCIRIHDPILHNHINNRSYLYQQITFTIILLQNFQLHTPDSSSKLSITTKAHL

SEQ ID NO: 151494 - protein, 183 aa, Glycine max
  Clone ID: PAT_MRT3847_107821C.1.pep
PQTRPPTGKKKPLGPAKNPKPLLTKKKPFRETIYPKKGGGAPPGNPKFWEKMAKEGARGPNYPTKQKGFPPSGAPGAPRGKTREFPPPRAKLGFMAPNWGPGKTSNPQGGFPWDWGEKPRQKKQFLQGGLGRNPGFSPPRGQRPQLVGREKGAPPEGKPQNWGPPGGPKPKGNGAGPTPLWGP

SEQ ID NO: 151495 - protein, 70 aa, Glycine max
  Clone ID: PAT_MRT3847_107822C.1.pep
IIHPNRVKLTNPPNPNHSLPPIYNSKPNIPTYHIPLHYNPNYTLIFIPIIITLSNHIHYYQYLNLIPNHT

SEQ ID NO: 151496 - protein, 87 aa, Glycine max
  Clone ID: PAT_MRT3847_107823C.1.pep
YNRNKLFGTSVVQYCYAYFRSGASSIAAGQICIPKCYCCQQHWRRWHGGTNLEWRRMTEYAAGKRLWREKRTSLTQIFHAVGRSKFG

SEQ ID NO: 151497 - protein, 446 aa, Glycine max
  unsure (1)..(446): unsure at all Xaa locations
  Clone ID: PAT_MRT3847_107824C.1.pep
MMGISHFLAIPYPILGHMNPLLQFSQVLAKYGCKITLLSSDENYEKLKSASGGGNDKVIMDSHIKLVSLPDGVDPEDDRKDQAKVISTTINTMRAKLPKLIEDVNDAEDSDNKISCIIVTKNMGWALEVGHQLGIKGALFWPASATSLASFNSIQRLIDEGAIDSKNGLPTRKQEIQLSSNLPMMEXAAMPWYCLDNAFFFLHMKQEMQNLNLAERWLCNTTFDLEAGAFSTSQKLLPIGPLMANEHNIISILQEDRTCLEWLDQQPPQSVIYASFGSMVSTKPNQFNELALGLDLLKRPFLWVVREDNGYNIAYPDEFRGSQGKIVGWAPQKKILEHPAIACFISHCGWNSTIEGLYNGVPFLCWPFCSDQLMNKIYICDVWKVGLEFHRDENGIILREEIKKKVEQLLGDEEIKGRASKLMEKVIKNKAQGDQNLIKFINWAKE

SEQ ID NO: 151498 - protein, 61 aa, Glycine max
  Clone ID: PAT_MRT3847_107825C.1.pep
LAASHSIKEATKVIQVLHFGGNLTRPSLFLRPKHPPPVTITTPNPTVQFSLSRVSSTSFLS

SEQ ID NO: 151499 - protein, 77 aa, Glycine max
  Clone ID: PAT_MRT3847_107826C.1.pep
AMPAAMSQEWYGKKADINCVGAGDRIFICLNSPELCAYVLCDLVTNKWTELPKCCLNGELMEFMSAFSFEPRIEASV

SEQ ID NO: 151500 - protein, 107 aa, Glycine max
  Clone ID: PAT_MRT3847_107827C.1.pep
RAAYNMSKIDQIMLRFRLIAPKPLPSAAALSDAFSSENTGVSMRKDNTGNKRCSRGMRRRRNSAHPRPPPLQAVTLPLLPKTPHLMKTTFVLMTRQVPVCLSLRLSF

SEQ ID NO: 151501 - protein, 65 aa, Glycine max
  Clone ID: PAT_MRT3847_107828C.1.pep
KHRVTAISAMKHAMFCPFQLGYKQLHFSPTWQLGIACMSRHKLKGDTYMYPTAINLSTKFTSLGK

SEQ ID NO: 151502 - protein, 344 aa, Glycine max
  unsure (1)..(344): unsure at all Xaa locations
  Clone ID: PAT_MRT3847_107829C.1.pep
FPKWERRKKRRRRGGGGRDGVASVREVVAPYEAVVEELWKEVKVKDLEVKNLREKLDSAVALTTNGSAEKKPGRSLSKRKLGIQAMAAVPTPELFEATMMQVRESSKSFTSLLLSLMHNAHWDITAAVRSIEAATASTDKFHNTSSTTSIVSAYHAKYALESYISRKIFQGFDHETFYMDGSLSSLLNPDQFRRDCFTQYQHMKSMDPTELLXVKPTCHFGKFYSLSYPMHIDTXMLQSLFGNLEQPNHVQVGNHPRSEFYNEFLGVAKAVWLLHLLAFSLNPAPSQFEASRGAEFHPQYMDSVVKFSGGRVPAGQVVGFPVSPGFKLGNGSVIKARVYLIART

SEQ ID NO: 151503 - protein, 114 aa, Glycine max
  unsure (1)..(114): unsure at all Xaa locations
  Clone ID: PAT_MRT3847_10782C.1.pep
GYHISIAILLALSFHESEAKGKSHPTVSADYHKAVXNAKKKLRSFMAEKRCAPLMHSLASHSAGTYDMSAKIGGPIRTIKXLSKVTHGANNRLDIPVRRLDPLXAEYLTLSYAD

SEQ ID NO: 151504 - protein, 117 aa, Glycine max
  unsure (1)..(117): unsure at all Xaa locations
  Clone ID: PAT_MRT3847_107830C.1.pep
LRPPTILGVREHVFTGRVSSTASFMCNQETRFVTLGQRVLAHPLKVRMHYGHTGVCARLLHITRGGIRMAFRVINISEDMYPGFNXSTLRHGNITRYGYLQVGKGXDAALNQMALFE

SEQ ID NO: 151505 - protein, 156 aa, Glycine max
  unsure (1)..(156): unsure at all Xaa locations
  Clone ID: PAT_MRT3847_107831C.1.pep
GKYYXDMDRLAALERGMKTWANWVDNNIDKSXIRVSFXAISPTHYNPNEWNVGQTTVMTTKNCYGETAPISGTTYPGAYPEQMRVVDMVIREMKNPAYLLDITMLSALRKDGHPSIYSGELSPQKRANPNRADCSHWCLPGLPDTWNELFYTALFY

SEQ ID NO: 151506 - protein, 701 aa, Glycine max
  Clone ID: PAT_MRT3847_107832C.1.pep
MFPFGQKGQKIKGTMVVMQKNVLDINSITSVGGIVDQGLGFIGSAVDALTFAATKISIQLISATKADGGKGKIGKSTNLRGKITLPTLGAGEQAYDVNFEWDSDFGIPGAFYIKNFMQNEFYLKSLILEDIPNHGTIHFVCNSWVYNSKNYKTDRIFFANNTYLPSETPAPLLKYREEELKNVRGDGTGERKEWDRIYDYDVYNDLGNPDSGDKYARPVLGGSALPYPRRGRTGRGKTRKDPNSEKPSDFVYLPRDEAFGHLKSSDFLAYGIKSVSQDVLPVLTDAFDGNILSLEFDNFAEVHKLYEGGVTLPTNFLSKIAPIPVIKEIFRTDGEQFLKYPPPKVMQVDKSAWMTDEEFARETIAGLNPNVIKIIEEFPLSSKLDTQAYGDHTCIIAKEHLEPNLGGLTVEQAIQNKKLFILDHHDYLIPYLRKINANTTKTYATRTIFFLKDDGTLTPLAIELSKPHPQGEEYGPVSEVYVPASEGVEAYIWLLAKAYVVVNDACYHQIISHWLSTHAIVEPFVIATNRQLSVVHPIYKLLFPHYRDTMNINSLARKALVNAGLILNRPTISRRFMPEKGSPEYDALAKNPEKEFLKTITGKKETLIDLTVIEILSRHASDEFYLGQRDGGDYWTSDAGPLEAFKRFGKKLEEIEKKLIEKNKDETLRNRYGPAKMPYTLLYPSSEEGLTFRGIPNSISI

SEQ ID NO: 151507 - protein, 190 aa, Glycine max
  unsure (1)..(190): unsure at all Xaa locations
  Clone ID: PAT_MRT3847_107833C.1.pep
PKVMQVDKSAWMTDEEFARETIAGLNPNVIKIIEAIQNKKLFILDHHDYLIPYLRKINANTTKTYATRTIFFLKDDGTLTPLAIELSKPHPQGEEYGPVSEVYVPASEGVEAYIWLLAKAYVVVNDACYHQIISHWLSTHAXVEPFVIATNRQLSVVHPIYKLLFPHYRDTMNINSLARKALVNADGIIE

SEQ ID NO: 151508 - protein, 466 aa, Glycine max
  Clone ID: PAT_MRT3847_107834C.1.pep
MFGIIGGNKGHKIKGNLVIMRKNVLDINSITSVKGVIGTGINIIGGVVDTVTALASHISIQLIPYLRKINATTTKTYATRTIFFLKSDGTLTPLAIELSKPHPQGEGYGPVSEVYVPSSEGVEAYIWLLAKAYVVVNDSCYHQLVSHWLNTHAVVEPFVIATNRHLSVVHPIYKLLFPHYRDTMNINSLARKSLVNADGIIEKTFLWGRYSLEMSAVIYKDPSAPHGVRLLIEDYPYASDGLEIWDAIKSWVHEYVSFYYKSDAAIQQDPELQAWWKELVQVGHGDLKDKPWWQKMQTREELIEASATLVWIASALHAAVNFGQYPYGGLILNRPTISRRFMPEKGSAEYAALAKNPEKEFLKTITGKKETLIDLTIIEILSRHTSDEFYLGERDGGDYWTSDAGPLEAFKRFGKKLQEIEQKFIQKNKDETLRNRSGPAKMPYTLLYPSSEEGLTFRGIPNSISI

SEQ ID NO: 151509 - protein, 339 aa, Glycine max
  unsure (1)..(339): unsure at all Xaa locations
  Clone ID: PAT_MRT3847_107835C.1.pep
MSLLSDLINLNLSESTEKIIAEYIWVGGSGMDLRSKARTLPGPVSDPAKLPKWNYDGSSTDQAPGDDSEVILYPQAIFKDPFRRGNNILVICDVYTPAGEPLPTNKRYGAAKIFSHPDVAAEEPWYGIEQEYTLLQKDVNWPLGWPLGGFPGPXDAHYKACIYAGINISGINGEVMPGQWEFQVGPSVGISAGDEVWAARYILQTITEIAGAIVSVDPKPIPGARPEKKARANYSIFKNPPQKSGWGGRKKKNPFFFILXKRNPPPXVLFFLSWEKKKFEKLHPFFLGGWWPNGGSSIRVERAXEXNGKGYFEDRRPASNMDPYVVTSMIAETTILWKP

SEQ ID NO: 151510 - protein, 853 aa, Glycine max
  Clone ID: PAT_MRT3847_107836C.1.pep
MSPFGQKGQKIKGTMVVMQKNVLDINSITSVGGIVDQGLGFIGSAVDALTFAATKISIQLISATKADGGKGKIGKSTNLRGKITLPTLGAGEQAYDVNFEWDSDFGIPGAFYIKNFMQNEFYLKSLILEDIPNHGTIHFVCNSWVYNSKNYKTDRIFFANNTYLPSETPAPLLKYREEELKNVRGDGTGERKEWDRIYDYDVYNDLGNPDSGDKYARPVLGGSALPYPRRGRTGRGKTRKDPNSEKPSDFVYLPRDEAFGHLKSSDFLAYGIKSVSQDVLPVLTDAFDGNILSLEFDNFAEVHKLYEGGVTLPTNFLSKIAPIPVIKEIFRTDGEQFLKYPPPKVMQVDKSAWMTDEEFARETIAGLNPNVIKIIEEFPLSSKLDTQAYGDHTCIIAKEHLEPNLGGLTVEQAIQNKKLFILDHHDYLIPYLRKINANTTKTYATRTIFFLKDDGTLTPLAIELSKPHPQGEEYGPVSEVYVPASEGVEAYIWLLAKAYVVVNDACYHQIISHWLSTHAIVEPFVIATNRQLSVVHPIYKLLFPHYRDTMNINSLARKALVNADGIIEKTFLWGRYSMEMSAVIYKDWVFTDQALPNDLVKRGVAVKDPSAPHGVRLLIEDYPYASDGLEIWDAIKSWVQEYVSFYYKSDEELQKDPELQAWWKELVEVGHGDLKDKPWWQKMQTREELVEASAILIWIASALHAAVNFGQYPYGGLILNRPTISRRFMPEKGSPEYDALAKNPEKEFLKTITGKKETLIDLTVIEILSRHASDEFYLGQRDGGDYWTSDAGPLEAFKRFGKKLEEIEKKLIEKNKDETLRNRYGPAKMPYTLLYPSSEEGLTFRGIPNSISI

SEQ ID NO: 151511 - protein, 357 aa, Glycine max
  Clone ID: PAT_MRT3847_107837C.1.pep
MSLLSDLINLNLSESTEKIVAEYIWVGGSGMDLRSKARTLPGPVSDPAKLPKWNYDGSSTDQAPGDDSEVILYPQAIFKDPFRRGNNILVICDVYTPAGEPLPTNKRYDAAKIFSHPDVAAEEPWYGIEQEYTLLQKDVNWPLGWPLGGFPGPQGPYYCGTGADKAYGRDIVDAHYKACIYAGINISGINGEVMPGQWEFQVGPSVGISAGDEVWAARYILERITEMAGVIVSFDPKPIPGDWNGAGAHSNYSTKSMRDEGGYEVIKKAIEKLGLRHKEHIAAYGEGNERRLTGRHETADINTFSWGVANRGSSIRVGRDTEKNGKGYFEDRRPASNMDPYYVVTSMIAETTILWKP

SEQ ID NO: 151512 - protein, 856 aa, Glycine max
  Clone ID: PAT_MRT3847_107838C.1.pep
MFGIIGGNKGHKIKGNLVIMRKNVLDINSITSVKGVIGTGINIIGGVVDTVTALASHISIQLISATKADGHGKGKVGKATNLRGQVSLPTLGAGEDAYDVHFEWDSDFGIPGAFYIKNFMQVEFYLKSLTLEDIPNHGTIHFVCNSWVYNSKSYHSDRIFFANNTYLPSETPAPLVKYREEELKNVRGDGTGERKEWDRIYDYDVYNDLGDPDKGEKYARPVLGGSALPYPRRGRTGRGKTRKDPNSEKPSDFVYLPRDEAFGHLKSSDFLVYGIKSVAQDVLPVLTDAFDGNLLSLEFDNFAEVRKLYEGGVTLPTNFLSKIAPIPVVKEIFRTDGEQFLKYPPPKVMQVDKSAWMTDEEFARETIAGVNPNVIKILEEFPPRSKLDSQAYGDHTSIITKQHLEPNLGGLTVEQAIQSKKLFILDHHDYLIPYLRKINATTTKTYATRTIFFLKSDGTLTPLAIELSKPHPQGEGYGPVSEVYVPSSEGVEAYIWLLAKAYVVVNDSCYHQLVSHWLNTHAVVEPFVIATNRHLSVVHPIYKLLFPHYRDTMNINSLARKSLVNADGIIEKTFLWGRYSLEMSAVIYKDWVFTDQALPNDLVKRGVAVKDPSAPHGVRLLIEDYPYASDGLEIWDAIKSWVHEYVSFYYKSDAAIQQDPELQAWWKELVQVGHGDLKDKPWWQKMQTREELIEASATLVWIASALHAAVNFGQYPYGGLILNRPTISRRFMPEKGSAEYAALAKNPEKEFLKTITGKKETLIDLTIIEILSRHTSDEFYLGERDGGDYWTSDAGPLEAFKRFGKKLQEIEQKLIQKNKDETLRNRSGPAKMPYTLLYPSSEEGLTFRGIPNSISI

SEQ ID NO: 151513 - protein, 856 aa, Glycine max
  Clone ID: PAT_MRT3847_107839C.1.pep
MFGIIGGNKGHKIKGNLVIMRKNVLDINSITSVKGVIGTGINIIGGVVDTVTALASHISIQLISATKADGHGKGKVGKATNLRGQVSLPTLGAGEDAYDVNFEWDSDFGIPGAFYIKNFMQVEFYLKSLTLEDIPNHGTIHFVCNSWVYNSKNYKTDRIFFANNTYLPSETPAPLLKYREEELKNVRGDGTGERKEWDRIYDYDVYNDLGNPDSGDKYARPVLGGSALPYPRRGRTGRGKTRKDPNSEKPSDFVYLPRDEAFGHLKSSDFLAFGIKSVSQDVLPVLTDAFDGNILSLEFDNFAEVRKLYEGGVTLPTNFLSKIAPIPVIKEIFRTDGEQFLKYPPPKVMQVDKSAWMTDEEFARETIAGVNPNVIKILEEFPPRSKLDTQAYGDHTCIITKQHLEPNLGGLTVEQAIQSKKLFILDHHDYLIPYLRKINATTTKTYATRTIFFLKSDGTLTPLAIELSKPHPQGEEYGPVSEVYVPSSEGVEAYIWLLAKAYVVVNDSCYHQLVSHWLNTHAVVEPFVIATNRHLSVVHPIYKLLFPHYRDTMNINSLARKSLVNADGIIEKTFLWGRYALEMSAVVYKDWVFTDQALPNDLVKRGVAVKDPSAPHGVRLLIEDYPYASDGLEIWDAIKSWVQEYVSFYYKSDAAIQQDPELQAWWKELVQVGHGDLKDKPWWQKMQTCEELIEASATLIWIASALHAAVNFGQYPYGGLILNRPTISRRFMPEKGSAEYAALAKNPEKEFLKTITGKKETLIDLTIIEILSRHASDEFYLGERDGGDFWTSDAGPLEAFKRFGKKLQEIEHKLIQKNKDETLRNRTGPAKMPYTLLYPSSEEGLTFRGIPNSISI

SEQ ID NO: 151514 - protein, 37 aa, Glycine max
  Clone ID: PAT_MRT3847_10783C.1.pep
ALGNETNLGSHIRVVKSCTPKTDSCTVCSHRWILLVW

SEQ ID NO: 151515 - protein, 858 aa, Glycine max
  unsure (1)..(858): unsure at all Xaa locations
  Clone ID: PAT_MRT3847_107840C.1.pep
QRCLESSEENKGHKIKGNLVIMRKNVLDINSITSVKGVIGTGINIIGGVVDTVTALASHISIQLISATKADGHGKGKVGKATNLRGXVSLPTLGAGEDAYDVHFEWDSDFGIPGAFYIKNFMQXEFYLKSLTLEDIPNHGTIHFXAXSXVYNSKSYXSDRIFFANNTYLPSETPAPLVKYREEELKNVRGDGTGERKEWDRIYDYDVYNDLGDPDKGEKYARPVLGGSALPYPRRGRTGRGKTRKDPNSEKPSDFVYLPRDEAFGHLKSSDFLAYGIKSVAQDVLPVLTDAFDGNLLSLEFDNFAEVRKLYEGGVTLPTNFLSKITPIPIIKELFRTDGEQFLKYPPPKVMQVDKSAWMTDEEFARETIAGLNPNVIKIIEEFPLSSKLDTQAYGDHTCIITKEHLEPNLGGLTVEQAIQNKKLFILDHHDYLIPYLRKINANTTKTYATRTIFFLKNDGTLTPLAIELSKPHPQGEAYGPVSEVYVPSSEGVEAYIWLLAKAYVVVNDACYHQIISHWLNTHAVVEPFVIATNRHLSVVHPIYKLLFPHYRDTMNINSLARKSLVNADGIIEKTFLWGRYSLEMSAVIYKDWVFTDQALPNDLVKRGVAVKDPSAPHGVRLLIEDYPYASDGLEIWDAIKSWVEEYVSFYYKSDEELQKDPELQAWWKELVEVGHGDLKDKPWWQKMQTREELVEASATLIWIASALHAAVNFGQYPYGGLILNRPTISRRFMPEKGSPEYDALAKNPEKEFLKTITGKKETLIDLTIIEILSRHASDEFYLGQRDGGDYWTSDAGPLEAFKRFGKNLEEIEKKLIEKNNNETLRNRYGPAKMPYTLLYPSSEEGLTFRGIPNSISI

SEQ ID NO: 151516 - protein, 30 aa, Glycine max
  Clone ID: PAT_MRT3847_107841C.1.pep
TNLNFFPAHSKLGCIYNKGGPKSIKFNIIY

SEQ ID NO: 151517 - protein, 112 aa, Glycine max
  Clone ID: PAT_MRT3847_107842C.1.pep
RLKLEARMRRACRKIWRSVPCTSRKSLRNDSRKDMEEILRAKLSTIKEEPELCDENLASPRHVCMAKKQGKKVQGKDKTGRCLVPHVNLKQSYVLFITGFASKGAFAGFLQR

SEQ ID NO: 151518 - protein, 85 aa, Glycine max
  Clone ID: PAT_MRT3847_107843C.1.pep
GPSTDLILSNPMQLCQFMDRNALLHPHFCYLGDLGLLQFKDLNAHKSPFQRTYSAYIIRTWKMALILRFLRSKCSKLFFTKIFHN

SEQ ID NO: 151519 - protein, 76 aa, Glycine max
  unsure (1)..(76): unsure at all Xaa locations
  Clone ID: PAT_MRT3847_107844C.1.pep
KRXXNXQIGRAYSTRRVXLISFIEVXXXXXXTXXIXSQIMXKDSAFSEDLAXACXTEXAGYXSXXQXFQNLXRFPK

SEQ ID NO: 151520 - protein, 40 aa, Glycine max
  Clone ID: PAT_MRT3847_107845C.1.pep
FSAPFCNPWFCSNLSAFLSINSFFSLIHLLIVLSTPFLLS

SEQ ID NO: 151521 - protein, 421 aa, Glycine max
  Clone ID: PAT_MRT3847_107846C.1.pep
MDSARTAPPPWQELDLDSLKPLKVLGKGGMGTVFLVQAANNTRFALKVVDKTCVHAKLDAERRARWEIQVLSTLSHPFLPSLMGTFESPQFLAWALPYCPGGDLNVLRYRQTDRAFSPAVIRFYVAEILCALDHLHSMGIAYRDLKPENVLVQNTGHVTLTDFDLSRKLNPKPKPNPNPVIVPSIPLPNSNVPQPRRKHRRNLSRWISFFPPDGTNNNNKNGLKKAKSAQVSPVSRRKPSFSSGERSNSFVGTEEYVSPEVVRGDGHEFAVDWWALGILIYEMLYGKTPFKGRNRKETFRNVIMKPPEFVGKRTALTNLIERLLEKDPTKRLGYTRGAAEIKEHEFFRGVQWELLTEVVRPPFIPTRDDGAGDSTDRISDRNCGFDIRGYFLNLKSSPSLPGSPLPSPSCRFKKNVSLTEF

SEQ ID NO: 151522 - protein, 77 aa, Glycine max
  unsure (1)..(77): unsure at all Xaa locations
  Clone ID: PAT_MRT3847_107847C.1.pep
ALGRTSPXALLFVYIMLATLSYITLGPALMGFWVVPGSTIPKRWVIPYPYLVHPHLLAQSLASVFSARLPIPPVCWA

SEQ ID NO: 151523 - protein, 53 aa, Glycine max
  Clone ID: PAT_MRT3847_107848C.1.pep
LESQAHSVSSSDQSPCSAHCQPLIGKGTVILNSWFIEKDHTVHCPFRSSASAQ

SEQ ID NO: 151524 - protein, 38 aa, Glycine max
  Clone ID: PAT_MRT3847_107849C.1.pep
DECYKLHQVGNGPCNLWIIKRLQLQPHDPSTSEVKIYL

SEQ ID NO: 151525 - protein, 102 aa, Glycine max
  Clone ID: PAT_MRT3847_10784C.1.pep
SEIAYELEKVNERARHCASTTLPLYLPSQINRVAYSRCFLSRVSSTSWLPLLISTMTSISVTDLAEGIQVIRGHLLITTMRIMTTILLHRRSLKQRLKKLLV

SEQ ID NO: 151526 - protein, 390 aa, Glycine max
  Clone ID: PAT_MRT3847_107850C.1.pep
MVLSSEDEEEEEEEDSDCEESDCDEASESDDGDVDDSSLSNKVVALLREGKDIESLKLNECKAYLRNHGLRIAGNRDVCVARIKEHWRLKHGSGYTLYPRSSFTINCTGDVCMGDVVLFRQKVYEKFDKVTRHGKTLGNRTVAGRVVKESYGAAKQQHTFTVEVLWSSGVRKLPPLSPLLVKGRNLYKQKTYRQRWKNEADRIEVLREKHGRGAAARSIRSLKRKNKSCYANESKGSKRQHEIHTKKQSKIGRSNVVDKVRHQDGSKRANNFQPREVTSSSQATQKEKASSRASRYTRGRHNSAEFDRYQVPVYPLHNYPQYTPSRNEPSEFFYHIRDLIPNMTEFPPSRPRVGEFASRSQLPVSNDICHARTNLYDFEMRNYGWRKYDI

SEQ ID NO: 151527 - protein, 58 aa, Glycine max
  Clone ID: PAT_MRT3847_107851C.1.pep
LFPPSSPFVSAMPVEQTARIMIFHKKCLQFAEIISRKMQHKTKIKNPTPIYRECLKWR

SEQ ID NO: 151528 - protein, 182 aa, Glycine max
  unsure (1)..(182): unsure at all Xaa locations
  Clone ID: PAT_MRT3847_107852C.1.pep
SEPLNFYVFSLYLPEGKDIESLKLNECKAYLRNHGLRIAGNRDVCVARIKEHWRLKHGSGYTLYPRSSFTINCTGDVCMGDVVLFRQKVYEKFDKVTRHGKTLGNRTVAGRVVKESYGAAKQQHTFTVEVLWSSGVRKLPPLSPLLVKGRNLYKQXTYRQVLISAYKPLSLGSFLSSYSFLS

SEQ ID NO: 151529 - protein, 98 aa, Glycine max
  unsure (1)..(98): unsure at all Xaa locations
  Clone ID: PAT_MRT3847_107853C.1.pep
MLLPFTHHVLVSDHNHKLRSNFFIIIFLLVSHIFRCHYHQCLTFFIPLHHFIXCLFFFLIPDLLFFFFLSDFFSFTFFFIYFLIFIFIFFYFMFLFFY

SEQ ID NO: 151530 - protein, 71 aa, Glycine max
  Clone ID: PAT_MRT3847_107854C.1.pep
SALFKSKPNSGFKPNASVIPIEDLRTTKNKRRTVKNNEGFPHNRLRKCYGSTSAWIFLTKTHFFTQNSRNA

SEQ ID NO: 151531 - protein, 65 aa, Glycine max
  Clone ID: PAT_MRT3847_107855C.1.pep
SQCRSHVQLAVRIDVVLLLKYIHVDVVCSLKRKPVLIRVADRNPEYSSGDRCCKSKGLELGIEEV

SEQ ID NO: 151532 - protein, 38 aa, Glycine max
  Clone ID: PAT_MRT3847_107856C.1.pep
KKKKKKKKKKKKKKKKKKKKKKKKKKKKKIKNKKKKKK

SEQ ID NO: 151533 - protein, 145 aa, Glycine max
  unsure (1)..(145): unsure at all Xaa locations
  Clone ID: PAT_MRT3847_107857C.1.pep
MPLSIGGGAGAKNAIIMNMPNADLSLWRYFVGDLDFEVSKMTSSYIKCTVFIFIALGNLADDTINFEAFTHKLVQFVEIHETVVLKFSQEEFLTGWLTQVRSAATLLDDGCSYLYAMVHDSXVPTIPGDFVIAAKMTTINTMCAY

SEQ ID NO: 151534 - protein, 80 aa, Glycine max
  Clone ID: PAT_MRT3847_107858C.1.pep
MAVALCEMAAVVSTVSAKKIDTSISIENVIEAVQALPDMDDELVLDACDFLEDERKAKTFLALDAKLRKKWLIRKLRIQM

SEQ ID NO: 151535 - protein, 83 aa, Glycine max
  unsure (1)..(83): unsure at all Xaa locations
  Clone ID: PAT_MRT3847_107859C.1.pep
KASSHYILXWSXSVNGGIAPPXNFSLLPKPPPKEKDASSFPWVKVAVAMLSALTFTLLCLXFIXTRYKRYMIFXTLEDWELDC

SEQ ID NO: 151536 - protein, 69 aa, Glycine max
  Clone ID: PAT_MRT3847_10785C.1.pep
IYVQTILSMKINLEHQSTPIYLHSVFNTSMELPASNLKKYMYRDDHWQNDSCLGSRCLKRKKVRHGWHQ

SEQ ID NO: 151537 - protein, 63 aa, Glycine max
  Clone ID: PAT_MRT3847_107860C.1.pep
HPIKDNWLTCRHDILYARINSPPGVVVCYNHHHDLGVNHLAHTPLSHNEESSVHRPPEIILWG

SEQ ID NO: 151538 - protein, 56 aa, Glycine max
  Clone ID: PAT_MRT3847_107861C.1.pep
MESIVDSTGTFSMFFCMISSLTSFQYIVQGIGYGLVIPVVNLAAHLSQLSQELIQV

SEQ ID NO: 151539 - protein, 71 aa, Glycine max
  Clone ID: PAT_MRT3847_107862C.1.pep
AETPAGPGRNPRGVPRARHTRHFHANANGEQRTQGPRCLLLRSGTRQAAPGVCEGALTTDTKAGYGHTVSA

SEQ ID NO: 151540 - protein, 45 aa, Glycine max
  unsure (1)..(45): unsure at all Xaa locations
  Clone ID: PAT_MRT3847_107863C.1.pep
TSKLCSGNTISMYILYKKHSILAKPYEXQHRLYCLEHYSQRARAE

SEQ ID NO: 151541 - protein, 102 aa, Glycine max
  Clone ID: PAT_MRT3847_107864C.1.pep
PGKGANQPPPNNEPSLQFNWGPGESESLPKMIIKLTWKKTWGSLTLQPKNNGPRFNGKKNPRGGNPSPKKNSGKIQKSPLFFFNNKISPLKKQGGETSRGGG

SEQ ID NO: 151542 - protein, 103 aa, Glycine max
  unsure (1)..(103): unsure at all Xaa locations
  Clone ID: PAT_MRT3847_107865C.1.pep
GGGGFPKKNFLFFGTKNYGPGPNRRNPQQKKKKTFFFFKSPGAGTYFFWFINKGIRFPPPPPGFQKWGKTPPPPLILKSPKVGLNXXFRALPQFLRRETPGSK

SEQ ID NO: 151543 - protein, 66 aa, Glycine max
  Clone ID: PAT_MRT3847_107866C.1.pep
IQGAASFRFILFKRGRCFPSKMYKALFVPKRFFLSGLTPRIFSHYEVIRTRWCLLKKKSNGHNCSM

SEQ ID NO: 151544 - protein, 158 aa, Glycine max
  Clone ID: PAT_MRT3847_107867C.1.pep
GCKPTKEDLKRCFMLDFDRSAFIIASTATEEEMLQWYRERIVWTDKALFMKLMRKGILTRIYAPMIIIQSLKESGVFSSLIAKAAQTKLSKDNFLQSVESSNSTRNSRSEIISSRKIDAGGLSQATARRILEVIDDSLPSAIPPLSPPSLDHADLIIS

SEQ ID NO: 151545 - protein, 64 aa, Glycine max
  unsure (1)..(64): unsure at all Xaa locations
  Clone ID: PAT_MRT3847_107868C.1.pep
IGSFNXCGGYSLLHCTVTADCIKYSSVLWCIVILTCQVRYGENGREVLLFLLSSPLLSRCQRDV

SEQ ID NO: 151546 - protein, 62 aa, Glycine max
  Clone ID: PAT_MRT3847_107869C.1.pep
FFLLIAAVPFCHLLPDKPFCCFLKTVPFCRILAPEPFFNLLSSEPFCCLFKTKPFCRFFTTV

SEQ ID NO: 151547 - protein, 74 aa, Glycine max
  Clone ID: PAT_MRT3847_10786C.1.pep
LLYGVIMIGSLRSLIAKFPLLVCLYFGYFKSMQVTQLRSKIQKPKHEYDTLLAEVKSLGLWEENDNVADVPLAI

SEQ ID NO: 151548 - protein, 405 aa, Glycine max
  unsure (1)..(405): unsure at all Xaa locations
  Clone ID: PAT_MRT3847_107870C.1.pep
PCKTTAYLIFFTCQKVILEVITALAELGSTAKDIISLIPQTLNRSGRAPFDHTDSSRWLQRYVEAQCCMASNDYKGGLELFADLLQRFPNNIHIILEMAKVEAIIGKNEEAIMNFEKARSIDPYIVTYMDEYAMLLKLKSDYPKLNKLVHDLLNIDPARPEVFVALSVLWERKDEKKALQYAEQSIRIDERHIPGYIMKGNLLLTMKRAEAAVPAFRAAQELRPDIRSYQGLVHTYLALSKNKEALYASREAMKAMPQTAKALKLVGDVHASNSSGREKAKKFYESALRLEPGYLGAALALAELHVIEGRNGDAVSLLERYLKDWADDSLHVKLAQVFAATNMLQEALSHYQAALRXLNPQNEAAKRGLERLEKQMKGVDPDAPEEDEDNDVEDADGDQDETELL

SEQ ID NO: 151549 - protein, 86 aa, Glycine max
  unsure (1)..(86): unsure at all Xaa locations
  Clone ID: PAT_MRT3847_107871C.1.pep
XGFILNRPTLTRRLXPXGKXXXDXVDVXSXHXXAXLXTITXXXXALVDXTVIXXLSRHASDEVYLGXRXNPXGTXXTXXIQAFKXX

SEQ ID NO: 151550 - protein, 37 aa, Glycine max
  Clone ID: PAT_MRT3847_107872C.1.pep
IIVSVLAYSRRQQCVLSYQSFQASLSSLCIYISMLFE

SEQ ID NO: 151551 - protein, 54 aa, Glycine max
  unsure (1)..(54): unsure at all Xaa locations
  Clone ID: PAT_MRT3847_107873C.1.pep
MLIFVRKGGPDNQKGIGLMRALVXDIGIPSSVYGPTATMTGICKEAIQFMTGSA

SEQ ID NO: 151552 - protein, 90 aa, Glycine max
  Clone ID: PAT_MRT3847_107874C.1.pep
RLRKERRKGSDFLFLYPLLFVTFPLIAKPIEQLNIKFLFSTWNLLVLFHFDSVHRSSLLPLLDPLHSRSNQRLIITLLPDPSFFPFPFCV

SEQ ID NO: 151553 - protein, 171 aa, Glycine max
  unsure (1)..(171): unsure at all Xaa locations
  Clone ID: PAT_MRT3847_107875C.1.pep
MGSTENELSLAEEALLQDDESKQYTGDGSVDFKGRPVLKRNTGNWKACPFILGNECCERLAYYGIATNLVTYLTQKLHEGNVSAARNVTTWQGTCYLAPLIGAVLADAYXGRYWTIAIFSTIYFIGMGTLTLSASVPALKPAECLGTACPPATPAQYAVFFFGLYLIALGT

SEQ ID NO: 151554 - protein, 386 aa, Glycine max
  unsure (1)..(386): unsure at all Xaa locations
  Clone ID: PAT_MRT3847_107876C.1.pep
SFFNWFYFSINIGALXSSTFIVCIQENAVWGIGFCMTALLLALVMGSIFFGTPYYRVEKAWGSPITRLYSVVVAFLXSPNLVVSEENGLLYETSTKNYSWLAMCXIFFGFNXRCLDRAAVVSDAESKSGDYSNQWRLCTVTQVEELKILIRMFPVWATGIVFAAVYAQMSTLFVEQGTMMNTNFGSFRIPPASLSSFDVISVIFWVPVYDRIIVPIARKFTGKERGFSELQRMGIGLFISVLCMSAAAIVEIVRLKVAKEHGLVDEPVPVPLNIFWQIPQYFLLGAAEVFTFVGQLEFFYDQSPDAMRSLCSALSLLTTSLGNYLSSFILTVVTYFTTQGGNPGWIPDNLNKGHLDYFFWLLAGLSFLNTFVYIVAAKRYKQKKSA

SEQ ID NO: 151555 - protein, 107 aa, Glycine max
  Clone ID: PAT_MRT3847_107877C.1.pep
LSGEASVVRLPFSACLCSLVSTWPPPHVSLLIRQSCVPYIPLFVWCEMCVFQRCVLPHFCCYVCCLLSPLCGFSQVVFSVPLERSWDFIFDGSPQLCSVVPPSSKGI

SEQ ID NO: 151556 - protein, 36 aa, Glycine max
  Clone ID: PAT_MRT3847_107878C.1.pep
RCEKTTERGTRSTNYGIDIGSHRTIRDSLLRAQGTP

SEQ ID NO: 151557 - protein, 399 aa, Glycine max
  unsure (1)..(399): unsure at all Xaa locations
  Clone ID: PAT_MRT3847_107879C.1.pep
MGSPENQLSLAEEALLQDDESKQYTGDGSVDFKGRPVLKRNTGNWKACPFILGNECCERLAYYGIATNLVTYLTQKLHEGNVSAARNVTTWQGTCYLAPLIGAVLADAYWGRYWTIAIFSTIYFIXCLDRAAVASAAESKSGDYSNKWRLCTVTQVEELKILIRMFPVWATVIVFAAVYAQMSTLFVEQGTMMNTNVGSFKIPPASLSSFDVISVIVWVPVYDRIIVPIARKFTGNERGFSELQRMGIGLFISVLCMSAAAIVEIVRLQLAKEHGLVDEPVPVPLNIFWQIPQYFLLGAAEVFTFIGQLEFFYDQSPDAMRSLCSALALLTTSLGNYLSSFILTVMTYFTTQGGNPGWIPDNLNKGHLDYFLWLLAGLSFLNMFVYIVAAKRYKEKKSA

SEQ ID NO: 151558 - protein, 105 aa, Glycine max
  unsure (1)..(105): unsure at all Xaa locations
  Clone ID: PAT_MRT3847_10787C.1.pep
RTGSPGSTYSTADVRAQEGETANAGXFSVEPATFSTETRWEESLKVWLLLRARVLKGKKMTPCAGHRLRESHAVPLSVNTGEHSTIRYKTARQIKTSSVGCSGLG

SEQ ID NO: 151559 - protein, 92 aa, Glycine max
  unsure (1)..(92): unsure at all Xaa locations
  Clone ID: PAT_MRT3847_107880C.1.pep
GKGNAKFNVPFLDGINAXLYGRKSYATRPHIFXLIPLGTLKPIGIELSLGPSFGXKRVVTPPVDATTNWKWQLAKAHVCADDAGVHQLVNHW

SEQ ID NO: 151560 - protein, 140 aa, Glycine max
  unsure (1)..(140): unsure at all Xaa locations
  Clone ID: PAT_MRT3847_107881C.1.pep
FRLVTSPTKPPGRFSRSEPGPAPPRQQAKDRADTEHQGPTPNDPGAEARETDAPGAKEEAHTRKQQRKGKKXQTTAQGPKKEXSYEKSHKDPKKEXGSNGTEAHDKEPGKNNQLQGDQRKNDTHFLVQAGLVKKDQNQDS

SEQ ID NO: 151561 - protein, 50 aa, Glycine max
  unsure (1)..(50): unsure at all Xaa locations
  Clone ID: PAT_MRT3847_107882C.1.pep
GSSLVIXXTLRGWRCXEEWDRFFKLSGDSFDVVRRMAQPQGPTAHPAQNT

SEQ ID NO: 151562 - protein, 61 aa, Glycine max
  Clone ID: PAT_MRT3847_107883C.1.pep
IRGSHVADSHFLWIPEMAPFHHRVLGKYYQPSSHQKPTDHPSLMFYFHKTRMTLQRHIRKG

SEQ ID NO: 151563 - protein, 39 aa, Glycine max
  Clone ID: PAT_MRT3847_107884C.1.pep
VNLTDLKFELFPLHSQLLEESLLFSFPPLIDMLKFSGYS

SEQ ID NO: 151564 - protein, 50 aa, Glycine max
  Clone ID: PAT_MRT3847_107886C.1.pep
HKYILRTEMTGEKINLKEKNDTLKGKTPQRKGQSGPPVMKKTLIYAYRQS

SEQ ID NO: 151565 - protein, 83 aa, Glycine max
  Clone ID: PAT_MRT3847_107887C.1.pep
SGISRAADCGKLLNMGNMKKPSRSSSSFFDRFKKVNAKGLQSNDRSPQEEATLEKDRYPLLFKFNEGFTNAVKRPVRIREFLS

SEQ ID NO: 151566 - protein, 52 aa, Glycine max
  Clone ID: PAT_MRT3847_107888C.1.pep
APKRHGRGISADVCLRTKRKNKLWRALNINGRPYLRIQSYCSITQTNDILYH

SEQ ID NO: 151567 - protein, 64 aa, Glycine max
  Clone ID: PAT_MRT3847_107889C.1.pep
DDRRDLFYCKFSANDVYILPVSYPDVALVTSLRDGMNLVSYEFVACQDKKKGVLILSEVITETL

SEQ ID NO: 151568 - protein, 110 aa, Glycine max
  Clone ID: PAT_MRT3847_10788C.1.pep
IPLISPEGEQVVPLVKWVNFVVKKECPAEVFDVELFRYPNIEEEMVVMLQIGMACAARIPDQRPKMPDLVRMIKEICRVNTPNPPSTEFRSEVFTPTPRAVDIPSTFVQQ

SEQ ID NO: 151569 - protein, 70 aa, Glycine max
  Clone ID: PAT_MRT3847_107890C.1.pep
VDPLTRRRTPLPLFFFFFVSPKKKRFNQSRPEVIKLFHTQNAKRNLFFMTIMPPCTKGTSNRHPLYTTLP

SEQ ID NO: 151570 - protein, 88 aa, Glycine max
  unsure (1)..(88): unsure at all Xaa locations
  Clone ID: PAT_MRT3847_107891C.1.pep
MLHRMLFLSHPRTSLRQNSTVWADTLSRGLVNLNISGPKINPLADIGVDFDAINRXEKRMEXPTXTXXXSXVTMGXAMXSGSGMGRAX

SEQ ID NO: 151571 - protein, 60 aa, Glycine max
  Clone ID: PAT_MRT3847_107892C.1.pep
GSSTRQKGDQHLCSHSLSPNLIFLALFLWRACQQLGYLIIFKGLILATCTSAFIGSSFIL

SEQ ID NO: 151572 - protein, 79 aa, Glycine max
  Clone ID: PAT_MRT3847_107893C.1.pep
PERSSNCVHFFFLYFLFISDSNCVHLEVIDENLIFKFFIFSIYLFILILSKISFHSHRSSHISQMHFISYEIDVQVGDG

SEQ ID NO: 151573 - protein, 145 aa, Glycine max
  Clone ID: PAT_MRT3847_107894C.1.pep
MEYSKEIHSNGNANGSLNLCNGSTDPLNWGMAAEALKGSHLDEVKRMVEDYRNPVVKLGGKSLTVSQVAAVATRHHGGVTVELAKETRHGVKASSDWVMDSMVKGTDSYGVTTGFGATSHRRTKQGAALQNELIRFLNAGIFCNG

SEQ ID NO: 151574 - protein, 135 aa, Glycine max
  unsure (1)..(135): unsure at all Xaa locations
  Clone ID: PAT_MRT3847_107895C.1.pep
APKGLTFLAALIRVXSLSLSAYDAGEGQNNGLVMNFYKESCPHAEDITLAKMESILLFFSSLKFALSVLLILHLPFYSAQIMQGFSTLGLRLXQKDSHMNFGLRDLLFIETIKDTLARECPGDDTCADIQHFDTL

SEQ ID NO: 151575 - protein, 98 aa, Glycine max
  Clone ID: PAT_MRT3847_107896C.1.pep
KLLIRLENNSHPNFIHRRIRQSRGGILKPFAVSPPEEHPPDPRTIFQSQTNNPKISQRKGALHLHRTSTHSAAYSLLWRLARPNNLFFHDFIPSTTAK

SEQ ID NO: 151576 - protein, 62 aa, Glycine max
  Clone ID: PAT_MRT3847_107897C.1.pep
SSKRGSKGGIVRSGTRASSFGGPVLGLVFPLTGRGLDLGEMVVPEPREGQETVGEAEKVTKT

SEQ ID NO: 151577 - protein, 156 aa, Glycine max
  Clone ID: PAT_MRT3847_107898C.1.pep
LCAGGFSFPSYFFDFSNPELEVLAVPMRLLKFLSRYPPEVVVPPRTPMFFSEKTNQIFPQLVLKPPVLSPWNTNVFRVNVFPRNHPFVVFLFPLGRVIPQALCSELIWITLSLAFGSTHPFLVPIFLPTLLLKQWFYPPLSLEPFIAKKLIPKIFS

SEQ ID NO: 151578 - protein, 94 aa, Glycine max
  unsure (1)..(94): unsure at all Xaa locations
  Clone ID: PAT_MRT3847_107899C.1.pep
MLSVLTYVLLXLPLLFFAGSDDSIFSESDNSWVNFTKFLTGASTVGGIAIPSILKHAGVIGWGAFAMELSSYFVFGMAIICYLWMSGDDDYSIL

SEQ ID NO: 151579 - protein, 71 aa, Glycine max
  Clone ID: PAT_MRT3847_10789C.1.pep
NPQTSPPPDQPNGEPGKNFPKKNPPRSFKKTPPTPGRPPDQPRHPPEAPQNPPPTEKWGGQEKYTPRPPRG

SEQ ID NO: 151580 - protein, 129 aa, Glycine max
  unsure (1)..(129): unsure at all Xaa locations
  Clone ID: PAT_MRT3847_1078C.1.pep
FVFAAEMGDPEAQYALGCHLRVVNDYVQSDQQAFYYLEKAVDQLHPGALYLLGAVYLTGDCVKKDIAFALWCFHRAXSEKGHAGAAIAYGSLLLKGVEVPESVIKFSLTRGAASYTRGRNKGAFAIDPV

SEQ ID NO: 151581 - protein, 137 aa, Glycine max
  Clone ID: PAT_MRT3847_107900C.1.pep
MADLPGYLHACLNTGKLASLAILVSGGIVLQILACALYNNWWPMLSVLTYVLLPMPLLFFAGSDDSIFSESDNSWVNFTKFLTGASTVGGIAIPSILKHAGVIGWGAFAMELSSYFVFGMAIICYPWMSGDDDYSIL

SEQ ID NO: 151582 - protein, 76 aa, Glycine max
  Clone ID: PAT_MRT3847_107901C.1.pep
LYRSLANSNWPFPPTVYVYDKSKIHASFLDFIFKVFPEVQNYEQSQIRAFVLISKTRKCNSNRIYNFGCKILLDLS

SEQ ID NO: 151583 - protein, 68 aa, Glycine max
  Clone ID: PAT_MRT3847_107902C.1.pep
SFYKWRSHFFFFCAISLPNLLYSSKSKRMAQTVSSNNQTNCIAFYTIAILSCLVLMISSSLSFKKLQQ

SEQ ID NO: 151584 - protein, 60 aa, Glycine max
  unsure (1)..(60): unsure at all Xaa locations
  Clone ID: PAT_MRT3847_107903C.1.pep
KAFNRTTLNSGRVTKXKGAYIALLHVYISIIXRVGAQIEAFVTIIVINVTNNLATVLLFL

SEQ ID NO: 151585 - protein, 53 aa, Glycine max
  Clone ID: PAT_MRT3847_107904C.1.pep
LRLLGLFYRGSAGYLLLLSLTVLIGSRKAGSNDRDLSYLLRYSETSIGMTSSL

SEQ ID NO: 151586 - protein, 43 aa, Glycine max
  Clone ID: PAT_MRT3847_107905C.1.pep
PGRLQRPPRVRTLEETEGAYFSSNPTLLFLFDHHLSIRESIGT

SEQ ID NO: 151587 - protein, 104 aa, Glycine max
  Clone ID: PAT_MRT3847_107906C.1.pep
FPGHLGGKDHLSLKRALRLWNPGGWPLGNTFFFLNGTAPAGSVPPSFKIWLHGAGKGWFQGWIAGSKGRSIFFPRGRRLFPPGVPKSFFLRKGKGATTKGGGPI

SEQ ID NO: 151588 - protein, 94 aa, Glycine max
  Clone ID: PAT_MRT3847_107907C.1.pep
PTPPKKSSTFLNNTIMQCPNNPSDSNSPNGHPKKPLKNAKQRYPIARGARTEKTGEEGIVISDKVKKKILIITMWYRARVCVFFVLFLLVLCWY

SEQ ID NO: 151589 - protein, 75 aa, Glycine max
  Clone ID: PAT_MRT3847_107908C.1.pep
MTNNTRGVTVYTLRAVSILPTLPPPDGHTTAEDLPCLNNDPVYTTTMGCGLWTGPCTELRYSGCYIHCGQGHLSG

SEQ ID NO: 151590 - protein, 140 aa, Glycine max
  unsure (1)..(140): unsure at all Xaa locations
  Clone ID: PAT_MRT3847_107909C.1.pep
MDQLPVEVIGNILSHLRAARDVVIASATCRKWRLACCKHLHTLSFNSKDWPIYRDLTTTRLEILITQTIFQTSGLQSLSILMEDVDEFSRXNLLLVLYTRETLKQLHYNVKTTPNVNILEICGRHKLEXLDLAHNXIVGG

SEQ ID NO: 151591 - protein, 75 aa, Glycine max
  Clone ID: PAT_MRT3847_10790C.1.pep
SYTFFSPLYFAFMALSLSLKRFSRFSLAACSASASSTTSALTSCFITRRGGALGLNLGFLGTPGPSFPDPEAMRV

SEQ ID NO: 151592 - protein, 36 aa, Glycine max
  Clone ID: PAT_MRT3847_107910C.1.pep
CHSNVTLLFALEIHAQTGLSACCGSIYSIMMAIHDT

SEQ ID NO: 151593 - protein, 88 aa, Glycine max
  unsure (1)..(88): unsure at all Xaa locations
  Clone ID: PAT_MRT3847_107911C.1.pep
XPQTPFHSERXCCRXHXQNSXRXRCVRXRVRXXSRXVCXGXXXXXLTPEXPSVISLLLSFCLRRKTXHTLHLRTXFVIIXXXQXGXXL

SEQ ID NO: 151594 - protein, 109 aa, Glycine max
  unsure (1)..(109): unsure at all Xaa locations
  Clone ID: PAT_MRT3847_107912C.1.pep
LFAGESGSGKRGHFPQFVVXAADIVTTDXRRKMMIASTQTRTVAEMPVSRXVAEEMDVSVGEEVGYKIRFADSTYALTGLQYLNDGMLLREAIPDPISEGSTVIIADDG

SEQ ID NO: 151595 - protein, 120 aa, Glycine max
  Clone ID: PAT_MRT3847_107913C.1.pep
PKPARQLLRTPTSGSRGSGPGFSGVLWSSITFGFPSSDIRLAWRFNNGTSSNTLFIMLMAGLVRPAVVWWLNKGTQLRGGRLNVHIFACHSEGKQNPPAVGCRPPEYQKKETKNKTPPPG

SEQ ID NO: 151596 - protein, 89 aa, Glycine max
  Clone ID: PAT_MRT3847_107914C.1.pep
KPGSKPNAPPASTAESPLRRHDHVLRHRRNTTPARNRHRRNPLKRSKNNNNSEKKSNTHIPPVIVKWQCLVLSYYISKCTKRKNLDAIM

SEQ ID NO: 151597 - protein, 250 aa, Glycine max
  Clone ID: PAT_MRT3847_107915C.1.pep
MIPCENECWSLEVETCFYSEKCFNSSSMYQSSIILVSFCFSVTQNNLLSKLLIRSCPSTTLVLDFDETLVHSTLEPCEDVDFTFPVNFNSEERTVYVRCRPHLKDFLERVSGLFEIIIFTASQSIYAEQLLNVLDPKRKIFRHRVYRESCVYVEGNYLKDLPVLGRDLAHVIIIDNSPQAFGFQVDNGIPIESWFDDRSDQELLLLLPFLESLVGVDDVRPLIAKKFNLREKIAAAAHPLNTNRRDFLSE

SEQ ID NO: 151598 - protein, 46 aa, Glycine max
  Clone ID: PAT_MRT3847_107916C.1.pep
KKIFLLNTKITLFIIIFIFIFIIFMIFFNFLINILIIKILQSLMIM

SEQ ID NO: 151599 - protein, 63 aa, Glycine max
  Clone ID: PAT_MRT3847_107917C.1.pep
TNNIFEILLLCKRVFFYLKKQQKSWVWPLPNVNHAIARLGSLMNKVYGGSQCPGIPQKLFNFF

SEQ ID NO: 151600 - protein, 92 aa, Glycine max
  Clone ID: PAT_MRT3847_107918C.1.pep
LDLGVGSSGRLRVLHGLAWSFLPRCGSGLNWAGCSCSAFAFKELEGSKPAYPREPIAVDNAPGLLVLWMVAFGIGVNDEQGQLGAFVFHSQR

SEQ ID NO: 151601 - protein, 46 aa, Glycine max
  Clone ID: PAT_MRT3847_107919C.1.pep
YTFSMVTLFRINSHRGSEAFIDYSEVDNVPGIHIYGHVPFSGTRIF

SEQ ID NO: 151602 - protein, 463 aa, Glycine max
  Clone ID: PAT_MRT3847_10791C.1.pep
MGAVYFSQSCYKPRQIFNLERESTLVGRCPVVQIRCRRVVSACLNVDVDAPNTGNTTSEKKKTKDVIEMEGMYLVGTYARTPVVLERGEGCKLYDVEGNEYLDLSAGIAVNALGHGDADWLKAVVEQAGTLTHTSNIFHTIPQVELAKRLVASSFADRVFFANSGTEANEAAIKFARKYQRHTTSNGKVPATEFIAFSNCFHGRTLGALALTSKVQYRMPFEPVMPGVTFLEYGNAQAAVELIKQGKIAAVFVEPIQGEGGIYSATKEFLQSLRSACDETGALLVFDEVQCGLGRSGFLWAHEAYGVFPDMMTLAKPLAGGLPIGALLVTERVASAINYGDHGSTFAGSPLVCSAALAVLDKISKPDFLSSVSKKGLYFKELLREKLGENRHVKEIRGVGLIIGIDLDVPASPLVDACRSSGLLVLTAGKGNVVRLVPPLIITEKELEQAAGILCQTLPVLDN

SEQ ID NO: 151603 - protein, 203 aa, Glycine max
  Clone ID: PAT_MRT3847_107920C.1.pep
HSNIGKNFSPSILTVNDTSSGYGTWPSSNNTNGLVRPNSSVERVGVQNNNMLMDILEHQQSQQHQQKQQLQQQSLIHDQSCSINVQPSCMGGPSQSSDTFQAVNSPASVNQDFSFARNAIIDYSLLSQKSKNSFSASQFPGGDTKARGVLYGYSTPSTCSTSSSNGNRQQLQNSTLTFGAARPLPSLLPMSDRKDPYGLNQVI

SEQ ID NO: 151604 - protein, 72 aa, Glycine max
  Clone ID: PAT_MRT3847_107921C.1.pep
YPQGLANYNLAQSSTDAQAPLYSRGCKNCIGNIRFSTIHPKTLYFFWGIERFIFCFGKKNFLSSSVVIFDCQ

SEQ ID NO: 151605 - protein, 74 aa, Glycine max
  unsure (1)..(74): unsure at all Xaa locations
  Clone ID: PAT_MRT3847_107922C.1.pep
KSLDTPDMNPHFDSIVTWQMTNLKSMEKVEKDVRYTDISPLDGQPCADHDIVSGEGAQPPXYTLIIMEVVAPLS

SEQ ID NO: 151606 - protein, 97 aa, Glycine max
  unsure (1)..(97): unsure at all Xaa locations
  Clone ID: PAT_MRT3847_107923C.1.pep
ILKAGEKANDVWWNEPRWKGIKRPHSAHEVHSTRXTVNQEYPRTTMAKKLFGLLKERSEQGQSGHTMGAIDPVQVTQQGANQEVLYVSRWACSSVLT

SEQ ID NO: 151607 - protein, 102 aa, Glycine max
  Clone ID: PAT_MRT3847_107924C.1.pep
MDRRKEKNAPWLSVPQFGDWDQKGQVPDYSLDFSKIRETRKQNKTNISRASLGNEEEFMDSTTSSSVNTAHSSEHPQPHYHQTHSPTARKSFLSYFNCCVKA

SEQ ID NO: 151608 - protein, 57 aa, Glycine max
  Clone ID: PAT_MRT3847_107925C.1.pep
TAQPIYSLIIFIPYKYEGELPLQNSQKIFLASFSSTIFNNDSNQAFSSFHIRIGYMN

SEQ ID NO: 151609 - protein, 86 aa, Glycine max
  unsure (1)..(86): unsure at all Xaa locations
  Clone ID: PAT_MRT3847_107926C.1.pep
LPAVCLLTNEGIIPQISKIASKWGRGHLTSISGTGIQEMRRRGVGRDERRRKEKFCFIGGGKDXSRGGVQGPPKEQGGSDRRGTGS

SEQ ID NO: 151610 - protein, 98 aa, Glycine max
  Clone ID: PAT_MRT3847_107927C.1.pep
KVVIRFSLGEQLFSVSSGYHAGNGCYEFHGSICASLAGFLHVYSLRDSQNTETNIVEVRRNIDERCNVLPSQGKIVTCTGESEILIYIVLISILITSI

SEQ ID NO: 151611 - protein, 133 aa, Glycine max
  Clone ID: PAT_MRT3847_107928C.1.pep
QATGKGGQKTKIPQAKAKPASAQERRVTKVAETVQSMRISKCSPPHSRGIRIGVKTLLPQNSTAKRGKKKCTRTPQSRKDNQPNKCRSFQKSMKFQRMARAQRQHRTPAPTHPGKKGGRQPGRWTRAGVNTGP

SEQ ID NO: 151612 - protein, 48 aa, Glycine max
  Clone ID: PAT_MRT3847_107929C.1.pep
VDSKNSFHYHNFMFTTCHPTRPGIIINLVPLIILAYPNHLYSLQLSSS

SEQ ID NO: 151613 - protein, 216 aa, Glycine max
  Clone ID: PAT_MRT3847_10792C.1.pep
IAAVFVEPIQGEGGIYSATKEFLQSLHSACDEAGALLVFDEVQCGLGRSGFLWAHEAFGVFPDMMTLAKPLAGGLPIGAVLVTERVASSINYGDHGSTFAGNPLVCSAALAVFDKISKPDFLSSVSKKGLYFKELLKQKLGGNQHVKEIRGVGLIIGIDLDVPASPFVDACRNSGLLVLTAGKGNVVRLVPPLIITEKELELAADILCKTLPVLDN

SEQ ID NO: 151614 - protein, 52 aa, Glycine max
  Clone ID: PAT_MRT3847_107930C.1.pep
SLQHRIISDNVRASHIRIAFLCLHSITEIRYMYPHHDSFKSFLQIIICINNG

SEQ ID NO: 151615 - protein, 99 aa, Glycine max
  unsure (1)..(99): unsure at all Xaa locations
  Clone ID: PAT_MRT3847_107931C.1.pep
XATXXXXXXXXXXRXXXXPWXXXXXXXXVWXXXIRXAXXXXXXXXAXLXQXXXXXXXXWCXLXXXXXXXXGXXKXPXXPXXXDXXAXRXXXXAYSXXQP

SEQ ID NO: 151616 - protein, 52 aa, Glycine max
  unsure (1)..(52): unsure at all Xaa locations
  Clone ID: PAT_MRT3847_107932C.1.pep
EAXXPVTTXAMLXYVGXELSTSSXWTMDLSARLLCRSKEXCPYCLXXXWCCC

SEQ ID NO: 151617 - protein, 62 aa, Glycine max
  unsure (1)..(62): unsure at all Xaa locations
  Clone ID: PAT_MRT3847_107933C.1.pep
XXXLPSTXTVTXAVRXXXXXQAQIXGHLHLSHHYIPKIEHAVQVQLHPLLCSTVSHHAGPFP

SEQ ID NO: 151618 - protein, 202 aa, Glycine max
  Clone ID: PAT_MRT3847_107934C.1.pep
SAARPLVYVAAGCNEVSLWNAENASCHQVLRTANYDSDAEMSDLPWALARPSSKPTSQSDLRRNGNRKYGVDELNEPPPRLPGIRSLLPLPGGDLLTGGTDLKIRRWDHYSPDRSYCICGPNLKGIGNDDFYETKSSFGVQVVQETKRRPLTIKLTAKAILAAAATDSAGCHRDSIVSLASIKLNQRLLLSSGRDGAIKVWK

SEQ ID NO: 151619 - protein, 77 aa, Glycine max
  Clone ID: PAT_MRT3847_107935C.1.pep
NKRVIQDVGVGCGYFTTSLFEKWLKNVFQSSLKTVTFGGKEGILFRLSWGGKGNKKSESGFMSFSLPKSIQVNYFIK

SEQ ID NO: 151620 - protein, 63 aa, Glycine max
  Clone ID: PAT_MRT3847_107936C.1.pep
CPPYPFRYLRSTFIFKLSKFNYHNFIIITKFLITSIILTISSLTQFYLYYTPLNTKSQYLITL

SEQ ID NO: 151621 - protein, 108 aa, Glycine max
  unsure (1)..(108): unsure at all Xaa locations
  Clone ID: PAT_MRT3847_107937C.1.pep
KVYGKKCLENLSVNKRVIKNVGVGCGFFPTSLFXKRLKNVFQTSLKTVTFGGKEGILFRLFWGGKGDKKSDSGFMSFFLPKSIQVNYFIECPPFGYLRGLFCKIVPMV

SEQ ID NO: 151622 - protein, 73 aa, Glycine max
  Clone ID: PAT_MRT3847_107938C.1.pep
ANVRPGVILRCAPITHGRKVTPKKFQCEKIFFSQQILLALSKHIRFPSLTLTQTLWSIKFLERDKTYRCDLCG

SEQ ID NO: 151623 - protein, 70 aa, Glycine max
  Clone ID: PAT_MRT3847_107939C.1.pep
RVDQRKLKRANSRNVVPGLRKKPRNPGVFRVLNPGHFKKVKPPSLEWNEFGLKWVGQWWSFSHPSSTGIP

SEQ ID NO: 151624 - protein, 234 aa, Glycine max
  unsure (1)..(234): unsure at all Xaa locations
  Clone ID: PAT_MRT3847_10793C.1.pep
MVGKESLRTEVLNLSFEKLMMVECGGNSGKGVNIKAGVITEWKDIPVELLMQILSLVDDQTVIIASEVCRGWREAICFGLTRLSLSWCSKNMNNLVLSLAPKFTKLQTLILRQDKPQLEDNAVETISNFCHDLQILDLSKSFKLTDHSLYAIALGCQDLTKLNISGCSAFSDNALAYLASFCRKLKVLNLCGCVKAASDTALQAIGHYCNQLQXLNLGWCENVSDXGVMSLAYG

SEQ ID NO: 151625 - protein, 65 aa, Glycine max
  Clone ID: PAT_MRT3847_107940C.1.pep
FFKVYFSLFIILFFLVMCPSLFFLVKNFLVLRKINYLGVLWYGIESITRGLLVLGKAGRLELLMV

SEQ ID NO: 151626 - protein, 92 aa, Glycine max
  Clone ID: PAT_MRT3847_107941C.1.pep
THGVKRLMLNRTWGEKNQLTLLITNTLHYCIALLITRTSYLITKTKAVFAFSAINTLVSDKQITALETIMNATTSERENTDIQGFCVHFTLH

SEQ ID NO: 151627 - protein, 86 aa, Glycine max
  Clone ID: PAT_MRT3847_107942C.1.pep
VELVKTFSTIIWYFESLNFNCLNLLGGDLVIKHGTILLTRAYIHVTCSYLTSLTRTLILVNSNSNTVIITTLSKPSILTEANNNTI

SEQ ID NO: 151628 - protein, 48 aa, Glycine max
  Clone ID: PAT_MRT3847_107943C.1.pep
RSLFEGYAMILWFLCIYGESLLGPFLRLMRVGYLYNDFTYQTYWSERE

SEQ ID NO: 151629 - protein, 43 aa, Glycine max
  Clone ID: PAT_MRT3847_107944C.1.pep
EEKLFFLLKKFKYTEPISIILYLDRRLNTYQLMFAINRNILDS

SEQ ID NO: 151630 - protein, 40 aa, Glycine max
  Clone ID: PAT_MRT3847_107945C.1.pep
TARRRQKGTAARRRQKGTAARRRQKGTAARRRQKGLLHLF

SEQ ID NO: 151631 - protein, 48 aa, Glycine max
  Clone ID: PAT_MRT3847_107946C.1.pep
GLKPLPPLPSYTFYKKGPSSLSNNLCLPFFLFGLGKKKWPKWPFLGGV

SEQ ID NO: 151632 - protein, 91 aa, Glycine max
  unsure (1)..(91): unsure at all Xaa locations
  Clone ID: PAT_MRT3847_107947C.1.pep
INSTTSTYYKANFEQIFKNLSAYINNVVYNPYNIPFPPTSNFLILYTINRSSILDXFNTPTLLIALYLLYITISPSYTPLKLSFHKLYNIF

SEQ ID NO: 151633 - protein, 100 aa, Glycine max
  Clone ID: PAT_MRT3847_107948C.1.pep
ASSSYSNEGSTDEQGLNCSWRAIKIDRTYDKGHENRYVKFLVWFATGVGGLELLCAFVVWFFLVRTTEQQDSGADGRVYALAGFRKFSYSELKQATKGFS

SEQ ID NO: 151634 - protein, 69 aa, Glycine max
  Clone ID: PAT_MRT3847_107949C.1.pep
PLFPGTLGIKSPLLMHRMSADQPSSLISLEPHHLLQEKWLDELINAMPRKIVAWLATPNDILNTKRVHA

SEQ ID NO: 151635 - protein, 50 aa, Glycine max
  Clone ID: PAT_MRT3847_10794C.1.pep
SFGCSLFFGYSYKLSLDFHLITTSSINTLGFNKLLWIVDLWFPIISALAS

SEQ ID NO: 151636 - protein, 195 aa, Glycine max
  Clone ID: PAT_MRT3847_107950C.1.pep
MILNGGDYTYANQYLTTGGKEASCYSCEFPDAPIRETYQPPWDGWGRFMDPLPSEIPMMVIEGNHEIDPQAGGITFKSYLTRFAVPAEESGSKSNFYYSFDAGGIHFIMLGAYVDSNSTGAQFAWLKKDLQSVDRSVTPWLVAAWHSPWYNSYASHYQEFECMRLEMEELLFRYRVDIVFNGHVTSTTIFFLYPF

SEQ ID NO: 151637 - protein, 42 aa, Glycine max
  unsure (1)..(42): unsure at all Xaa locations
  Clone ID: PAT_MRT3847_107951C.1.pep
ERVAQDCADTSSSFEEIRKSILSKPGCXINVTDDLINLATTE

SEQ ID NO: 151638 - protein, 34 aa, Glycine max
  Clone ID: PAT_MRT3847_107952C.1.pep
NLKTSFCADQSRSSQANDVRKQIDGSAVPVHTER

SEQ ID NO: 151639 - protein, 99 aa, Glycine max
  unsure (1)..(99): unsure at all Xaa locations
  Clone ID: PAT_MRT3847_107953C.1.pep
SSRAGVCDAIKSLLCLSGFTEIRADNLPATYPVCADLSSLNLSYTHFHTHQLTSPIHHCHKPEISXVLHSIRDXGLHAVALTCNDFRELPVFTVDATHE

SEQ ID NO: 151640 - protein, 122 aa, Glycine max
  unsure (1)..(122): unsure at all Xaa locations
  Clone ID: PAT_MRT3847_107954C.1.pep
GRVYCVPCRAGFETSATTYIAGAEIMLQCKSKVSNEVVYSXKGYSVSSGAFSMFVVEDLADLICSAYLVIIPHPLCLDVSPGRDESVVILTRYFGIAFNDWFAFAMGVMSHDVAFSLCCSLM

SEQ ID NO: 151641 - protein, 54 aa, Glycine max
  Clone ID: PAT_MRT3847_107955C.1.pep
KALSSISPHLSSLKLHNYCRHYYLLKGNSLVSSTYSYTHSYSITFPFIFFFCSI

SEQ ID NO: 151642 - protein, 55 aa, Glycine max
  Clone ID: PAT_MRT3847_107956C.1.pep
PCPVKYSLFFIHLRCLWFPIHIAFTLSHDFLHIYLKSYNILLLFNMIAKIPYFCL

SEQ ID NO: 151643 - protein, 88 aa, Glycine max
  unsure (1)..(88): unsure at all Xaa locations
  Clone ID: PAT_MRT3847_107957C.1.pep
QIKNIPLAFSTIKTPSAIGQLGSTGETALKHLNEFVLNTASTGKXPTNMRHTVKSAPQSISYGPDRPKNLAPFSTSIPXYLTSEFSGD

SEQ ID NO: 151644 - protein, 108 aa, Glycine max
  unsure (1)..(108): unsure at all Xaa locations
  Clone ID: PAT_MRT3847_107958C.1.pep
RTXXXXXRXAALXTCXXVVXAXXSSXSSXXVAXXSAXXXLXGXWXGPXGWTVPXXXVALVXXXXXXXXXXXXTXXCXSCPXSXXGXXXXXWXVDPXLGXXHXXCXXGX

SEQ ID NO: 151645 - protein, 391 aa, Glycine max
  Clone ID: PAT_MRT3847_107959C.1.pep
MISSMKCTASSLTCSAFSNRKIPIARPQLVTLPTINNVEQNMGLSQLCSQKPLYLSSTENLALVKRRRETECQAYEADRSRPLEINIELPGEEAAQRFKIGLYFATWWALNVVFNIYNKKVLNAFPYPWLTSTLSLAAGSLMMLVSWATRVAEVPKVNLDFWKALFPVAVAHTIGHVAATVSMSKVAVSFTHIIKSGEPAFSVLVSRFLLGEAFPMPVYLSLLPIIGGCALAAVTELNFNMIGFMGAMISNLAFVFRNIFSKKGMKGMSVSGMNYYACLSIMSLLILTPFAIAVEGPKVWIAGWQTAVSQIGPNFVWWVAAQSVFYHLYNQVSYMSLDQISPLTFSIGNTMKRISVIVSSILIFHTPVQPINALGAAIAILGTFLYSQAKQ

SEQ ID NO: 151646 - protein, 57 aa, Glycine max
  Clone ID: PAT_MRT3847_10795C.1.pep
WHIRKDWLLEQESTQLLWRVHIARLRLLECMTSYRNDHRQMTRCRLQQSRTKAGGRD

SEQ ID NO: 151647 - protein, 98 aa, Glycine max
  Clone ID: PAT_MRT3847_107960C.1.pep
HSPPKRGHLKPKGVISPLIITQPPGQKFNFPKQNLLKMKPLAKNIVPVPGKHFGDPLSPPRKIFLPIITGEAGVMPFPPQRWKRVIASSPWERVFCFS

SEQ ID NO: 151648 - protein, 318 aa, Glycine max
  Clone ID: PAT_MRT3847_107961C.1.pep
MNDLMTKSFTSYVELKKVAMKEDVDLEAGGPGDRKVELSSSTTHLDTDMGLFLEEAEKVKAEMGSLRDILGRLQQANEESKSLHKPEAHKALRSRINAEILAVLKKARAIRTQLEEMDRANAANRRLSALKDGTPAIYRTRIAVTNGLRKKLKELMMDFQDLRQRMMTEYKDTVCRRYFTVTGEHPDEDVIEKIIANGNEEEVLAKAIEEHGRGKVLDTVLEIQDRHDAAKEVEKSLLELHQVFLDMAVMVEAQGEKMDDIEHHVFHASHYVKDGTKSLQSAKEYQKRSRKWMCIGIILLLILILVIVIPIVTSLSSS

SEQ ID NO: 151649 - protein, 138 aa, Glycine max
  Clone ID: PAT_MRT3847_107962C.1.pep
VTGEHPDEEVIEKIIANGNEEEVLGKAIQEHGRGKVLETVVEIQDRHDAAKEVEKSLLELHQVFLDMAVMVEAQGEKMDDIEHHVLHASHYVKDGTKNLQSAKEYQKKSRKWMCIGIILLLILILFIVIPVVTSLSSS

SEQ ID NO: 151650 - protein, 97 aa, Glycine max
  Clone ID: PAT_MRT3847_107963C.1.pep
GCEKTTEGAHCLRAISSWNSTFSSSLSWTRLSLRNDQPLMASNCCWCSALWNRCLSKSISACRDTLEPSQVASFLDLLAGSFFGAISCEDTFVKLVY

SEQ ID NO: 151651 - protein, 159 aa, Glycine max
  Clone ID: PAT_MRT3847_107964C.1.pep
MFSVNTLPSQFPPPSPCRRHCRLTVVCSSFRRRSRSRRRHNKVSLPTTTSTSSFEPKLEAVIDLTPLTAFQSELRRFLSSGKDAYRDLQTLVTLDHNRRLVVSCRPSTLHFLGTSAALTFLAFSVFTVLAQLISRVSSWRRNAASHKPVVVRRDRSLGG

SEQ ID NO: 151652 - protein, 54 aa, Glycine max
  unsure (1)..(54): unsure at all Xaa locations
  Clone ID: PAT_MRT3847_107965C.1.pep
XALFYLQNLPRLPPPLVIIMFLNRSKMETFYMYEIQSASLLKPKNCTMLECPAV

SEQ ID NO: 151653 - protein, 63 aa, Glycine max
  Clone ID: PAT_MRT3847_107966C.1.pep
TINNLTSKASARQTLKCRDNFRYLFHNSIQRTEAQRDWWLPNSGTPFGNFCLSFPLLETTINP

SEQ ID NO: 151654 - protein, 83 aa, Glycine max
  Clone ID: PAT_MRT3847_107967C.1.pep
NPLDFPHQSTSESIVVKKDFGGFFDSYEKAPVDNFWAQSYVGDMSPVPNELFVPPVAESENFTPLNDDLGGQTHLSHENHCLF

SEQ ID NO: 151655 - protein, 80 aa, Glycine max
  unsure (1)..(80): unsure at all Xaa locations
  Clone ID: PAT_MRT3847_107968C.1.pep
TYPSGMTDXMLGATEAPPVHSKHPVIPIHRSHTQKSVEPLRWCSCKIHPSAFRWRSLAKRRALVLNRDIMGLMVTFQAAQ

SEQ ID NO: 151656 - protein, 59 aa, Glycine max
  Clone ID: PAT_MRT3847_107969C.1.pep
TMLPNEALSSKNADAPQLNKRKLEASQPYDDHLLPGQDPLNLFSPIDRAHTLIGQAAQR

SEQ ID NO: 151657 - protein, 454 aa, Glycine max
  Clone ID: PAT_MRT3847_10796C.1.pep
IIQGSSLDVRKVLEILIEKINTKIQVGKDRYQYFRILSQVAYLEDMVNNWAYSLLSLEQDSPEHKTKVIPESGGPLNSHLTRENHQTEDEDCHLVVPVDGNDLETLEGSQKEIPSETTGCLASDDNNDNADIFDCDDGNASSEGHLQNHSFSDNKNINNTIAASQPLYPSTSQENGTLFGQSEPVTAGNNEEMDGELEISEGLNKSTCTHPVVPSENGLHTACDPETQNVEIGNLITISDQPFSLSAVETATKSSDGKSDKQENATDNNVSSSNGSGPAESGVICLYQCCPACLHSLHHLTKKILVEKWGLNSEQWTAEDVHDAVASLSVDLISAVRKCSMPQDFIDSSNKTSRNEKHGTSLDCLKLRTCNNGNQGKDVVPAECFSHAASQHATAMEDMALNEESTKLDLKFVFRDGVLVHMDPDKDVKVPCKFENLCLCSLRELIVMKKRPFD

SEQ ID NO: 151658 - protein, 63 aa, Glycine max
  Clone ID: PAT_MRT3847_107970C.1.pep
TGHSSLCHKKTYVGGGVTYRKRNSVRINKSFFGFASMGIHPPPPFFDARKRRSGLIITDPRPC

SEQ ID NO: 151659 - protein, 70 aa, Glycine max
  unsure (1)..(70): unsure at all Xaa locations
  Clone ID: PAT_MRT3847_107971C.1.pep
TLTFHPHINHLLILIINTFYSNNYIFLLXLIINSSYTFYNILFYSFTHNINLYSHPHYFIHIISHNTINT

SEQ ID NO: 151660 - protein, 77 aa, Glycine max
  Clone ID: PAT_MRT3847_107972C.1.pep
MMHMQPSLSPRRLCLFNTTTGAALRELNFLTSILAVRMNRQRLIVILQDKAYVYEINSLTILDTIDTVPNIKGLCAF

SEQ ID NO: 151661 - protein, 84 aa, Glycine max
  Clone ID: PAT_MRT3847_107973C.1.pep
YGWSCIPSVFPLHTGCTQCAFKIWECSFLQFPLPSILFFIRCRMCRSFCRMDDLVSEAAALPQQFLEPVTCFSTWAPPQDSFLD

SEQ ID NO: 151662 - protein, 73 aa, Glycine max
  Clone ID: PAT_MRT3847_107974C.1.pep
THSLDNPTLQTLTCNTLTLLYFYLTPTNWPPYQQILNYKTMTVPNYNPLQYISLYHIHVHLKRPRPINLPNNF

SEQ ID NO: 151663 - protein, 56 aa, Glycine max
  Clone ID: PAT_MRT3847_107975C.1.pep
IENKWAFFCKGQIKPKKNKKKKKKKKKKKKKKKKKKKKKKKKKKKKKKKKKKKKKK

SEQ ID NO: 151664 - protein, 120 aa, Glycine max
  unsure (1)..(120): unsure at all Xaa locations
  Clone ID: PAT_MRT3847_107976C.1.pep
SPIFFTPWALGRGPNFWDAPLEYNPERFFFFSAPGKKKIYVRGRDYQPPPFGRGKKKCPGASLGFFFLQTTLAGFFPGFAGVVKNGKNPPFSMFXKRRGPFFFAHPPKGNPVPGFPPFPA

SEQ ID NO: 151665 - protein, 66 aa, Glycine max
  Clone ID: PAT_MRT3847_107977C.1.pep
VEESKRMERSTQVVPCRLIQCKRVCALSPAFTCFYSEFCKKLRKSLNKSKCPISSYIVYNRVPQIG

SEQ ID NO: 151666 - protein, 72 aa, Glycine max
  unsure (1)..(72): unsure at all Xaa locations
  Clone ID: PAT_MRT3847_107978C.1.pep
NYIFILYHYNFEIVIILDKGPLNKFYAIYSKHXNYLSLNIQTFIINYHKAKSLLICKDHCDTHYSKCSYIGH

SEQ ID NO: 151667 - protein, 194 aa, Glycine max
  unsure (1)..(194): unsure at all Xaa locations
  Clone ID: PAT_MRT3847_107979C.1.pep
FFNTSSFPRLLFGIRFHYLLQALKAGFRHLVFEDNYDTGTGDHXKVXQICDQSYIRGGGHNCFKDSDEARIRSRRKKFWEKAVDXEELCGPDEAWWGVRGFMRDNFNHSNKPISYAQHFQNSRYIESILDVYWELPPVAGPSLTHQTRYDPARAPSPIVEDGRYGLFRRLGLANLDNSVFNGYTQMVYLQISEQ

SEQ ID NO: 151668 - protein, 37 aa, Glycine max
  unsure (1)..(37): unsure at all Xaa locations
  Clone ID: PAT_MRT3847_10797C.1.pep
RILIHACMRMDVSKMDLTTTVRGXKISMPMMIASTAM

SEQ ID NO: 151669 - protein, 46 aa, Glycine max
  Clone ID: PAT_MRT3847_107980C.1.pep
PRVRFLDVMGFSSPFYIKKVKKKIKAEVLFILKNLLWDLMSFFPQL

SEQ ID NO: 151670 - protein, 64 aa, Glycine max
  unsure (1)..(64): unsure at all Xaa locations
  Clone ID: PAT_MRT3847_107981C.1.pep
VLLARVGLXGWAFPXLCPWAPGALXVLWLXLXAAXGSVLPCXAXVVRCSLCLLLAPVVAVWWAL

SEQ ID NO: 151671 - protein, 91 aa, Glycine max
  Clone ID: PAT_MRT3847_107982C.1.pep
GSSIDSGPDSDYEHEDEEYARSSRPDLNHDPLICISVSRAQNDATDSSDGGETLSSRGLTLHAIGKRLSIITEYGDPSDVGRVAQSNHDVS

SEQ ID NO: 151672 - protein, 169 aa, Glycine max
  Clone ID: PAT_MRT3847_107983C.1.pep
ARPLLSPFCQNGGRQIMSRIGMTACSLSSAAEASDFECDAIHDDVKAAEKDNALCLAVSQLASEFSKESMLSLQKIFGVRRAHVISTGSLKLDLALGIGGLPKGRIVEIYGREAAGKTTLAIQIIKEAQKLGGYCAYLDVENALDFSLMESMGIDTENLLISHPDCAEN

SEQ ID NO: 151673 - protein, 198 aa, Glycine max
  Clone ID: PAT_MRT3847_107984C.1.pep
AKEASCNSNFSPTSSYDCKQNINNSFQRDGKSKKLGNEVLIEDLQKDLNARLQREAALEAALSVKVEIEDDLRSTLDEIKHQKQDLEYELTNMRMLVSKMKKSGINVEDKSTNDVQTKVKNGHPTSNGYSHRKQYKEGEILGSMEDMIALEELRANYQRERRRCKELESHISILKGEDIAGLDVMALEELQNLHIEAI

SEQ ID NO: 151674 - protein, 141 aa, Glycine max
  Clone ID: PAT_MRT3847_107985C.1.pep
MSHSLKVFFVFTLLFLAVVEAKHKKKHKHKIRHGPKPFLPLIPPFGSDELPPVPQLPPIFEPPSNIPQLPPFPLKQGGEEGQGVENTQQDAKEGIENKLFEVTSIGHWEIISENAGVSAMHINLLPTNKIIVYDAKVYRTS

SEQ ID NO: 151675 - protein, 315 aa, Glycine max
  Clone ID: PAT_MRT3847_107986C.1.pep
QNLEMEEAQVQVWEGYVDWRNRPTIKGRHGGMLAASFVLAAEVLENLAFLANASNLVLYLSKFMHFSPSTSANIVTNFMGTAFLLAILGGFLADAFITTYSLYLISAGIEFMGLLMLTIQAHKPSLKPPNCVIGNTDSPCDKIHGADAVMLFAGLYLVALGVGGIKGSLPPHGAEQFDENTPEGRKQRSAFFNYFVFSLSCGALIAVTFVVWIEDNKGWKWGLVVSTASILLSIPVFLLGSHKYRTKIPAGSPITSMFKVLVAAICNNCKAKNSSNAVISMTTGPSHATERKDGEEQSKTRKEVVPGQTLTDNLK

SEQ ID NO: 151676 - protein, 195 aa, Glycine max
  Clone ID: PAT_MRT3847_107987C.1.pep
MQALLLRHRLSNSNTKSLFRLSSYFHSSSCSPRPFIPSPPSASSIATNLFTSPWSASQCRGIKVSGSDIKVGNIIGKQGHFYEVLKVDHSHEGRGKATIKAELRDIDQGNKVTQRMGTDEDVERVYVQEKTFMFMCMDSDGTVVLMDPDTLDQIEVSKDLFNKDCLYLRDEMKVKVHFYDDKPLSASVPKRVTCI

SEQ ID NO: 151677 - protein, 66 aa, Glycine max
  unsure (1)..(66): unsure at all Xaa locations
  Clone ID: PAT_MRT3847_107988C.1.pep
XNXGEXWXTREDSXFXXXXAGXDDVERPPLXIRCYSPFQXXXASXGXVQGNXNXXPFXXVSPNPGF

SEQ ID NO: 151678 - protein, 44 aa, Glycine max
  Clone ID: PAT_MRT3847_107989C.1.pep
VEVAIALIWTLNVLSREPESSFWIFIDSFLSFACKHEEGQDVHM

SEQ ID NO: 151679 - protein, 63 aa, Glycine max
  Clone ID: PAT_MRT3847_10798C.1.pep
PTRPTAARRRQKGTNSFVSEAFPVCSCICSRFNHSKLSSCLVWSNHHCPNCNFFRRIARIWEV

SEQ ID NO: 151680 - protein, 60 aa, Glycine max
  Clone ID: PAT_MRT3847_107990C.1.pep
IKGLTIENNLASPYRKTNEKEKRKGIVPNWGLQTKEKTLQNGSGFEGYYEGASIILHSNA

SEQ ID NO: 151681 - protein, 105 aa, Glycine max
  unsure (1)..(105): unsure at all Xaa locations
  Clone ID: PAT_MRT3847_107991C.1.pep
APPASTTRRMDQAMSRHRRAHLCGTALTMEEELDRQILYSLHRAPAPISSSMLGLETVTRSVDHSGSEDXSNDPRESKTYRPLDMHHGMEARLVSSKGPQFPRFI

SEQ ID NO: 151682 - protein, 129 aa, Glycine max
  unsure (1)..(129): unsure at all Xaa locations
  Clone ID: PAT_MRT3847_107993C.1.pep
FFRVYTQWQWPTSVMLCPIEENDLGFPVWHPXKNPCDRSHHMSIITPAYPYMNSSFNDSMSTLRVMMXQFQYGNKICGEIXLSKACWKALFEKYSVFESYKNYLQVDADDLHNWKGWVESCLHQLTLMV

SEQ ID NO: 151683 - protein, 92 aa, Glycine max
  unsure (1)..(92): unsure at all Xaa locations
  Clone ID: PAT_MRT3847_107994C.1.pep
XSFSLIKTPYLCGXKIVGRKNPPTHILLSFYKLAYYLFWELATQHCKPPRYDHAISVEMGNKNIKLEYFEXALTTQNXIVRIYKVKPPQNTW

SEQ ID NO: 151684 - protein, 68 aa, Glycine max
  Clone ID: PAT_MRT3847_107995C.1.pep
SSGREKERELVGQGKKTKETNLTQQIFLKRRQIWTFRARTCVSPLSADAMPISSPARPGFRQPASSKL

SEQ ID NO: 151685 - protein, 31 aa, Glycine max
  Clone ID: PAT_MRT3847_107996C.1.pep
IVFFYNKKNLFKNFFHTPSLKIICLVFYELF

SEQ ID NO: 151686 - protein, 55 aa, Glycine max
  Clone ID: PAT_MRT3847_107997C.1.pep
SMSHIYLVAHLCIPRKLALLPGLICRHPLFLANCFMDALTFVQRACTIDKANLFY

SEQ ID NO: 151687 - protein, 80 aa, Glycine max
  Clone ID: PAT_MRT3847_107998C.1.pep
HPIVLRNRFNCWMSQVDSIVSCRIMILIRSPSFAPLVTSNVGIESFLCCYPHKFCSYFSLAYDLFLNKYSELKQEMVMYL

SEQ ID NO: 151688 - protein, 102 aa, Glycine max
  unsure (1)..(102): unsure at all Xaa locations
  Clone ID: PAT_MRT3847_107999C.1.pep
MACLSAMVHLELAHGCILSNMDLVTSENDREDFLDPECSFLLADLHHRMGPHYASLNTALIELVHRXTMGSSMPLHLTKERSTHYVLAQVDNCIQYREDADV

SEQ ID NO: 151689 - protein, 47 aa, Glycine max
  Clone ID: PAT_MRT3847_10799C.1.pep
TIFCFFNKQILSAFYKNASFKVACFKLKQTHLIFRNNHLCFKSFIKS

SEQ ID NO: 151690 - protein, 55 aa, Glycine max
  unsure (1)..(55): unsure at all Xaa locations
  Clone ID: PAT_MRT3847_1079C.1.pep
SHTKKKHLMLVLVNSFAACIDTYVEKLLIAWRLLVSXHTHTHTHIYSFFKEKLCM

SEQ ID NO: 151691 - protein, 85 aa, Glycine max
  unsure (1)..(85): unsure at all Xaa locations
  Clone ID: PAT_MRT3847_107C.1.pep
MMMKSAMCAVVVVGLLLLAEVAPMADAVTCTPTELSPCLPAITSGAKPSSACCAKLKQQKPCLCGYXKNASLTQCVRSANARKTV

SEQ ID NO: 151692 - protein, 50 aa, Glycine max
  Clone ID: PAT_MRT3847_108000C.1.pep
ATGTEETLRHAGLPAEFKQKKKKADDLKGGRFRRSKFTYACMRWHNFNIM

SEQ ID NO: 151693 - protein, 48 aa, Glycine max
  Clone ID: PAT_MRT3847_108001C.1.pep
YFKSTICLIGLVPTLLVGLHIFIWVLLYRRINGYLLNMFIRVLPFLCD

SEQ ID NO: 151694 - protein, 170 aa, Glycine max
  Clone ID: PAT_MRT3847_108002C.1.pep
RKVAGGYSSPEYQTKCPQTENINQEKEFYQLPIVNTDQHGELEVSENGNQQECRSNPVIQNAAAKSQDDFPSPTFQPKSPILSFFPDSTPKTGQKEDDVNSPASTERTFSLGSIHTQASEPDFNGLGEQMQLSDMEELKSFIPRKDKSSDTEKKEQGGGSSDPSSEEHNF

SEQ ID NO: 151695 - protein, 326 aa, Glycine max
  Clone ID: PAT_MRT3847_108003C.1.pep
DAIEGRFHFLFEGRFHFLLEAASFSLDELVDILNVPVALMIADSACSKSHRMVLPSNLWSISWVSWKIRATQALVYGIGLSEERHGQAAGRRLLGLVRGQPLCDDGQLFSAMVVRKPLGTGSLTKANFNWKITWASKLEKCYCIVVLPQNELEVKAEDTTYTIPCLLLLPNSTQVLCILSIPYSLYMQGPMFWAMMISEQKVAHLALKPLGRNNAIDGTCGVGTKEPQLIFASADSESYIVYLGSHSHGPNPSASDLESATNSHYKLLGSHLGKEWNASGPMHVDLLEGALQRQTSVELQTNLWSPWLSKDGSLVLSVQNHLVSSN

SEQ ID NO: 151696 - protein, 34 aa, Glycine max
  Clone ID: PAT_MRT3847_108004C.1.pep
ITFLKGRVQNSSLLLGLSCVALALHYSVGLAHPT

SEQ ID NO: 151697 - protein, 246 aa, Glycine max
  Clone ID: PAT_MRT3847_108005C.1.pep
TAISRTLEGRFHFLFEGRFHFLLEAASFSLDELVDILNVPVALMIADSACSKSHRMVLPSNLWSISWVSWKIRATQALVYGIGLSEERHGQAAGRRLLGLVRGQPLCDDGQLFSAMVVRKPLGTELLTKANFNWKITWASKLEKCYCIVVLPQNELEVKAEDTTYTIPCLLLLPNSTQVLCILSIPYSLYMQGPMFWAMMISEQKVAHLALKPLGRNNAIDGTCGVGTKEPQLIFASADSEEIVDD

SEQ ID NO: 151698 - protein, 81 aa, Glycine max
  Clone ID: PAT_MRT3847_108006C.1.pep
SNDQHLLQREPHHDSPQVVTTPPYVSRRCRDFIRLGFRERYHRKRVGRLLMSFDMMESIVIVDSVSMFSRTENSRDQHKFL

SEQ ID NO: 151699 - protein, 55 aa, Glycine max
  unsure (1)..(55): unsure at all Xaa locations
  Clone ID: PAT_MRT3847_108007C.1.pep
RITLQTRVPYLMITRNYNTLTXKTFFLNXXTLFHNLXFXHTLSSCVVFLYLIXSL

SEQ ID NO: 151700 - protein, 98 aa, Glycine max
  unsure (1)..(98): unsure at all Xaa locations
  Clone ID: PAT_MRT3847_108008C.1.pep
MAGAWVFKNGVVRLAENPAGEAVDGSRGGRRKVLVHTASNEGITSYAELEPKLNLLGXERYYDYPVLVQFSQRSTVHLIFLPKNFNKLMPMRMYDIGA

SEQ ID NO: 151701 - protein, 52 aa, Glycine max
  Clone ID: PAT_MRT3847_10800C.1.pep
PTRPSIFTYLYLSQTAYASSGTGDFHRETVIFVHALIDHHYLHSSSGFHTKC

SEQ ID NO: 151702 - protein, 276 aa, Glycine max
  Clone ID: PAT_MRT3847_108010C.1.pep
MGLPASPGAATRKVVFSAEEAKLQAENGNKVELMRPETSPEDIEGMVASEALVTTHGDGSAGDLYLRAIETVNAEHSEEFDQFLTWSEEIARLQARMNAETPQDIKAGYNFGSKRIGLVRTEHMFFGPERLIEMRRFILASNHDERVQALEKIKTYQVEDFETIFRLSQDRPTIVRLLDPPLHEFLPSSEEDINNVSQQLNVSSEFLRKRIVDLNEVNPMLGHRGCRLAVTYPELYEMQVEAIIESVIKLQKEGITCLPEIMIPLVSTVEEFTTLK

SEQ ID NO: 151703 - protein, 166 aa, Glycine max
  Clone ID: PAT_MRT3847_108011C.1.pep
KLFVDFLQNLEVDTDPNKGLVSHTIHNDFQYHSPRLTTLDRNSDSTESEPRETGNRVVNVSSILVTEGDLLQPERIHNGIVFNVVKKEDLSPLSSSSHGFENYNIEVAECVQDECPGKEIDAASSASEHGDDEESMPARSLTDMPDYNSIDHHSGTDSGMDQSIDS

SEQ ID NO: 151704 - protein, 75 aa, Glycine max
  unsure (1)..(75): unsure at all Xaa locations
  Clone ID: PAT_MRT3847_108012C.1.pep
PFGPGRRMCPGITFGLASTTLPXELLHFHFYWGLPNKMKPEDFDMDEPFGMAVAKKTQVFLIPPVCLAFSSPYFF

SEQ ID NO: 151705 - protein, 47 aa, Glycine max
  unsure (1)..(47): unsure at all Xaa locations
  Clone ID: PAT_MRT3847_108013C.1.pep
YFGCKNEDLSLVNASILQVSNXRXHSTITWKMTSNITFAVEEIRLPV

SEQ ID NO: 151706 - protein, 50 aa, Glycine max
  Clone ID: PAT_MRT3847_108014C.1.pep
TNFLHLLFLTKFPKKKKKNLFHFISTPSIYPSFLNIHIYLSPLNKTYFDP

SEQ ID NO: 151707 - protein, 78 aa, Glycine max
  unsure (1)..(78): unsure at all Xaa locations
  Clone ID: PAT_MRT3847_108015C.1.pep
FAVLVTDASVTNCKCGNSYXRCKMYPNLSISEITTTNTLVMVVVPVKAQLLDAEMDIPHXNYGCKSRPNXCCNPCTCM

SEQ ID NO: 151708 - protein, 103 aa, Glycine max
  Clone ID: PAT_MRT3847_108016C.1.pep
MHPEFPDDDIMALFEEKLDEDRDKWTVWFDGASNILGHGIGAVLVSPDNQCMPIIARLGFDCTNNMAEYEACALAVQAAIDSNVKLLKVYGHSALVIHQLRGE

SEQ ID NO: 151709 - protein, 54 aa, Glycine max
  Clone ID: PAT_MRT3847_108017C.1.pep
INTKPYSQDGGVFLENKHTFPFPGDRFDPLATYALIAPHGGNYNLAQHIPQKIL

SEQ ID NO: 151710 - protein, 68 aa, Glycine max
  Clone ID: PAT_MRT3847_108018C.1.pep
RIPGRPTRPKLQNPPKGHHKANNHVFQGGALCFNSFFFFRLYHFLYCFLFFSIFGFYLSSPNYGCMIL

SEQ ID NO: 151711 - protein, 66 aa, Glycine max
  Clone ID: PAT_MRT3847_108019C.1.pep
TGVQTTSEGTTYVRLAITTKGDGIIQEEGMRGRLKGICYIKSGCALLCTGMHSCGPSLTNRDDIGI

SEQ ID NO: 151712 - protein, 542 aa, Glycine max
  unsure (1)..(542): unsure at all Xaa locations
  Clone ID: PAT_MRT3847_10801C.1.pep
MGCAFGREASREERREEVREAKAEEEGRGEVVENENIEKEGGREERRTRARGERRRSSKPNPRLSNPPNHVHGEQVAAGWPSWLSKTAGEAINGLTPRRADTFEKIDKIGQGTYSNVYKARDTLTGKIVALKKVRFDNLEPESVKFMAREILILRRLDHPNVIKLEGLVTSRMSCSLYLVFEYMVHDLAGLATNPAIKFTESQVXKCYMHQLFSGLEHCHNRHVLHRDIKGSNLLIDNDGILKIGDFGLASFFDPNHKHPMTSRVVTLWYRPPELLLGATEYSVGVDLWSAGCILAELLAGKPIMPGRTEVEQLHKIFKLCGSPSDEYWKKSKLPHATIFKPQQSYKRCIAETYKDFPPSSLPLMDTLLAINPDERLTATAALHSEFFTTKPYACEPSSLPKYPPSKEMDAKLRDEEARRLRAAGKANADGVKKSRPRERVGRGIAVPEANAELQANIDRRRLITHSNAKSKSEKFPPPHQDGALGYPLGSSHHMDPVFDPPDVPFSSTNFSQPKANIQTWSGPLVDPSGVGVPRRKKKHGK

SEQ ID NO: 151713 - protein, 65 aa, Glycine max
  unsure (1)..(65): unsure at all Xaa locations
  Clone ID: PAT_MRT3847_108020C.1.pep
AMADYQLENEGNPVENGGTXHMPSDITALCGITPAPAEDERRPLTVAQYDSELDKGIGHNLLSPY

SEQ ID NO: 151714 - protein, 69 aa, Glycine max
  unsure (1)..(69): unsure at all Xaa locations
  Clone ID: PAT_MRT3847_108021C.1.pep
MFLKNNILVLNVSYVLLFLVASSTSAYLKLNILDLLMKSDHHXHSNDDESSKPCCDQXACTKLNPPQCI

SEQ ID NO: 151715 - protein, 153 aa, Glycine max
  Clone ID: PAT_MRT3847_108022C.1.pep
KEGKKMDPVEQISEEWSSLSGFYTAEEANFMSQLLGNCSLPENLCGNFNLGIPSAIWPGHESTIVSVTGINESPYFHANGDNNNNNYLCFSQGSSSTADSSNIFPTTSGNSYTLNDPVANIGYMSTDFANLGPCNVQGSDSQQLNENTHEELG

SEQ ID NO: 151716 - protein, 91 aa, Glycine max
  Clone ID: PAT_MRT3847_108023C.1.pep
TARLLNLQHLSLPKPSTLILFSLLNHACWSLIPVLTTTKMLATKQQFLILIGKLQQCSRPLTFFIIFLTYFMNNFFLFMETFLLRHEYLFT

SEQ ID NO: 151717 - protein, 68 aa, Glycine max
  Clone ID: PAT_MRT3847_108024C.1.pep
AKPKISLCFPLSTTRTQIPCNGSVWAVMWAAIGIYLSFVGVVGSLIKSSNPDAWLQSAGPCSAGITVY

SEQ ID NO: 151718 - protein, 106 aa, Glycine max
  Clone ID: PAT_MRT3847_108025C.1.pep
PTLPPTRTATRGEILINGAYRTPDVKTATSTTGFLLPRDAEFLTAVAGADRLKGKKRHSLWWPQTSGIIFFSTLSLFATRYDTRDRIWGHSGTFGASLSAFCLIVS

SEQ ID NO: 151719 - protein, 49 aa, Glycine max
  Clone ID: PAT_MRT3847_108026C.1.pep
GFRGKPYKKTKTNTCNFSSLYLFIHLNTSPTIQYNITHLSPQVSTSAMF

SEQ ID NO: 151720 - protein, 53 aa, Glycine max
  Clone ID: PAT_MRT3847_108027C.1.pep
MESKGGKTKCSTSHRKAIFDEAALRYSIGDFRPNRGIKKYRSAGYSNCHRIPY

SEQ ID NO: 151721 - protein, 47 aa, Glycine max
  Clone ID: PAT_MRT3847_108028C.1.pep
ARRFMIYVHAKMMIVDDEYIIFRSGYINQTSMDGAPHSDIAMGAYSP

SEQ ID NO: 151722 - protein, 279 aa, Glycine max
  Clone ID: PAT_MRT3847_108029C.1.pep
MASSHNEFYALMLVVVVGSMVASCGANFNQDFDLTWGDHRAKIFNGGQLLSLSLDKVSGSGFQSKKEYLFGRIDMQLKLVAGNSAGTVTAYYLSSQGPTHDEIDFEFLGNVSGDPYILHTNVFTKGQGNREQQFYLWFDPTRNFHTYSIIWKPQHIIFLVDNIPIRVFKNAETIGVPFPKNQPMRIYSSLWNADDWATRGGLVKTDWSKAPFTAYYRNFKATEFSTSSSNSFSDAAWQSNELDAYGRRKLRWAQKYFMIYNYCNDLKRFPQGIPAECRR

SEQ ID NO: 151723 - protein, 148 aa, Glycine max
  unsure (1)..(148): unsure at all Xaa locations
  Clone ID: PAT_MRT3847_10802C.1.pep
ARGELLKEMVDDAGIQPDVVSYNILIDGCILVDDSAGALSFFNEMRARGIAPTKISYTTLMKAFAYSGQPKLAHRVFNEMDSDPRVKVDLIAWNMLVEGYCRLRLLEEANKVVHKMKESGFHPDVGTDGRLANGIALAXEPGEALVLW

SEQ ID NO: 151724 - protein, 41 aa, Glycine max
  unsure (1)..(41): unsure at all Xaa locations
  Clone ID: PAT_MRT3847_108030C.1.pep
XVXMKXXXXVSXXGXXYLPXVKXFSICAXGVXXVXHXXTIX

SEQ ID NO: 151725 - protein, 143 aa, Glycine max
  Clone ID: PAT_MRT3847_108031C.1.pep
FYLWFDPTRNFHTYSIFGSPQHIIFLVDNIPIRVFKNGETIGVPFPKKQPMRIYSSLWNADDWATRGGLVKTDWSKAPFTAYYRNFKATEFSTNSFSDAAWQSNELDAYGRRKLRWVQKYFMIYNYCNDLKRFPQGIPVECRR

SEQ ID NO: 151726 - protein, 81 aa, Glycine max
  Clone ID: PAT_MRT3847_108032C.1.pep
SYAHFYFYFLYVMFLLQNVISGLDFNHSGRSKQARANSEEICRGWIEYKVTVSSFLWGYSSYFLCIKYKVYIYKRVFIQRL

SEQ ID NO: 151727 - protein, 146 aa, Glycine max
  Clone ID: PAT_MRT3847_108033C.1.pep
MADFDKHAAQREAESLRTLAFFGVCLSTVATVIAVLSVPFAYQHFQQIGTQMQNEVDFCKMRSGNMWREVTRTQAYSKVSHDSRHKRQAGGCCGCGVSPPGPPGPPGPSGQPGGDGQPGGSGQPGAPAMAPARPVPLNGGCVPSCM

SEQ ID NO: 151728 - protein, 79 aa, Glycine max
  Clone ID: PAT_MRT3847_108034C.1.pep
AKKGGGTKKNPQSFLKGNFGFHPGVWRQKPQKIGKFLEIAQPPHFAPQNNGEKKHGLIILRPNFKIFFPKGLWKVNKTW

SEQ ID NO: 151729 - protein, 41 aa, Glycine max
  Clone ID: PAT_MRT3847_108035C.1.pep
INEKDASLKKKKTKKKQGAPLLGGIPQAYRDAVSCGRSIAS

SEQ ID NO: 151730 - protein, 185 aa, Glycine max
  Clone ID: PAT_MRT3847_108036C.1.pep
PTRPPTRPTAARRRQKGKPKNKISCHSIPLTFAISSSPMAATDESLRKSLAEKHAAVEAQGNAVRALKAAKAAKPEIDAAIEALNALKLEKSSIEHSLLGGSDSRKAFRQSVVNTLERRLFYIPSFKIYRGVAGLFDYGPPGCSVKSNVLSFWRQHFVLEENMVEVDCPCVTPEIVLKASRWWVS

SEQ ID NO: 151731 - protein, 109 aa, Glycine max
  unsure (1)..(109): unsure at all Xaa locations
  Clone ID: PAT_MRT3847_108037C.1.pep
FGVYEALXRFLAGGHDTSGLGRGSIMLAGGVDGAAFWLMVYPTDVVKSVIQVDDYKNPKFFGSIDAFRRISASEGIKGLYKGFGPAMARSVPANAACFLAYEMTRSALG

SEQ ID NO: 151732 - protein, 95 aa, Glycine max
  Clone ID: PAT_MRT3847_108038C.1.pep
FSAFALNSAKAKPQELAVTVASDAFTQFKHLLLPITDRNPYLSESTRQAIATTSALAKKYGADITVVVIDEQQKESLPEHETQLPSIRWHLSEGL

SEQ ID NO: 151733 - protein, 41 aa, Glycine max
  Clone ID: PAT_MRT3847_108039C.1.pep
YYSMSMIMIGKRHYIYTNIFTGVASSTTNVKKTSHRSQIIS

SEQ ID NO: 151734 - protein, 1286 aa, Glycine max
  unsure (1)..(1286): unsure at all Xaa locations
  Clone ID: PAT_MRT3847_10803C.1.pep
MNNNGGFSSNILVLDGKNWDRWSALMKSLFGAQEVSDLVQNGYEDLGANPTEAQRLVFKEAKKKDCKALFYIQQNVDSYHFEKIAKATRSKEAWDILEKYHDGGEKVKQVKLQSFRRKYEMMQMEEGQKIGDYFSKLTSLVNQMQTCGEVITDQMVVEKVLRSLTSKFDFIVVAIQEAKDVKAMKIEELQNSLEAHELMVIDRGTERSVQQALQAQISKKEGNSKNSKKKGKGKGNWSNNGKAKTDDKAESSKRGGSDRGHNKKKEFDKSKVQCYNCEKYGHFADECWFKKDRQNNEEANVAQGKDPHTVLMMATTCEDKVQNEEWYLDSGCSNHMTAHREWLTSFDNSKKTSIKLADNRKLAAEGIGNIVIRGNDGKRVIIEKVLYVPEMNCNLMSIGQLVEKGFSVTMDGDSLKLFDAEKNLVLKSNLSKNRTYKCSISSDKMMCMSGVTSEETEALWHMRREICEICVKSKQSRLPFVPEAPKRASAALQVVHSDTCGPFEVPSLGGSKYFITFIDEFTRMLWLYTLKLKSEALDVFKRFKVLIEKESDKSIKILRTDGGGEYTSKDFEAFCTSHGIVHEVTTPYTPQHNGLAERRNRTLLGMARSMIKQKKLPHQFWGEAITTAAYILNKCPTKKLEKVPEEAWCGRKPSVQHLRVFGSLCYKHVPDVRRSKLEDKSEIMILIGYHPTGAYKLYDPTTQRVHISRDVIVSESESWKWQVTPVYSSEIQQGFIYPDSSDESEDEGDNEVDGNVPQEDEASVRPQRIRQAPRRLDDCERALDNAVSDEGDLIHFALLADAEPVEYRDALKNKVWKKAMMEELSSIEKNQTWELVKLPENKKTIDLKWVFKTKLNPDGSVSKHKARLVARGFLQKQGIDYNEVFAPVARHETVRLVVALANLRNWPLYHLDVKSAFLNGPLEETVFVTQPPGFEIAGKEGMVYRLHKALYGLKQAPRAWNKRIDEFLIQLGFKKCTVEYGVYVMNSKDSGMLIICLYVDDLLITGSDPEEIKEFKLTLNQEFEMTDLGELSYFLGLEFVKTKKGMIMHQQKYVLEILDRFGLIECKSISNPCETSSKLEECSEEEKADATMYKQLVGSLRYLCNSRPDICYAVGVISRFMNEPRKSHLIAAKRILRYVKGTANYGLVFPANRGEDQLDLIGYSDSDWCGDRVDRRSTSGYVFMLNGVAICWSSKKQPVTTLSSCEAEYIAGTXCSLSAAKNPVSHGRSKHXRFHFIREQVMSGRIELVYCPTQDQLADGFTKALKLDRFEELRRKLGLTGVEIMD

SEQ ID NO: 151735 - protein, 131 aa, Glycine max
  Clone ID: PAT_MRT3847_108040C.1.pep
MAFVHYLLSVPNKPIALVDDFLTLFKPLSHSPPQNSLFSRLRRIAHKAKAKPQELEVTVASDAFTQFKHLLLPITDRNPYLSESTRQAIATTSALAKKYGADITVVCIDEQQKESLPEHETQLSSIRWHLS

SEQ ID NO: 151736 - protein, 164 aa, Glycine max
  unsure (1)..(164): unsure at all Xaa locations
  Clone ID: PAT_MRT3847_108041C.1.pep
NFAILQXGHHWHPXHVVHWLHCSWHSFLEKKRIKSLYKKXKKXXMLYGALTGTCARARVMGKAEEVQEKVKADMEAMKEKMATMMKVMMSMKKIMDANAVTIAATSTLAKVNPMPRSGLNQMNHPTSAMVGKIWEVRAAPIMHKVKTRMPSYHMACLPTIHHPM

SEQ ID NO: 151737 - protein, 213 aa, Glycine max
  Clone ID: PAT_MRT3847_108042C.1.pep
MAFAHYLLAVPVEPSPNFPTNPPKPNPSLSSSSSSSISSHCFNLSSSLRPKHSLFSRFRRICHKAKAKPQEPEVTVASDAFTQFKHLLLPITDRNPYLSEGTRQAIATTSALAKKYGADITVVVIDAQQKESLPEHETQLSSIRWHLSEGGLKDYNLLERLGDGNKPTAIIGDVADDLNLDLVVISMEAIHTKHIDANLLAEFIPCPVMLLPL

SEQ ID NO: 151738 - protein, 43 aa, Glycine max
  Clone ID: PAT_MRT3847_108043C.1.pep
GIPNLSVIVIGGSHCFYQRSFKLLKLPINPLQPGPYLSLTKGL

SEQ ID NO: 151739 - protein, 187 aa, Glycine max
  Clone ID: PAT_MRT3847_108044C.1.pep
GCEPLGPMQEGLKSYVGRHQLDGLEETVKALFESYNISESMEQLQVSETISHVPEEGTRSSDDDVRSSSSTMGTRKLKPKCLNTDSTQLTPSTESAKKETSQKSNPGSRLRGNLSTNTTTPRPALDNRNNRLVKKSEKPSKQEPNKEKGMIKRQGKKSDVKEVSTPKGGKENMEARTTEENSVTEVV

SEQ ID NO: 151740 - protein, 109 aa, Glycine max
  unsure (1)..(109): unsure at all Xaa locations
  Clone ID: PAT_MRT3847_108045C.1.pep
MSKLQSDALREAILRIMTDFKAKNMKFEETIELQIGLKNYDPHKDTARSGSVKSAEIARPKKKTWLLGEAQHVXEAEKIXLDYMGLAAFEKLNTNKKLVRELGKKYHAF

SEQ ID NO: 151741 - protein, 142 aa, Glycine max
  unsure (1)..(142): unsure at all Xaa locations
  Clone ID: PAT_MRT3847_108046C.1.pep
DTMGAGSHSSXDFPEKEDQEKPIKIDAXDLRHRIDPVYIEVQAQMETNLFKLSLDDAETSKGSMLDLKISQSKIVLPKITVGGTILCSDLLAKFLTEGIFRASVDLXRTHXIKGMIKMVATAVIPENTGILLACAMNSSFRG

SEQ ID NO: 151742 - protein, 456 aa, Glycine max
  Clone ID: PAT_MRT3847_108047C.1.pep
MEHTMLPAIGSVFPRGVFAALLLMLLFSFSTFTSIEAYDPLDPTGNITIKWDVISWTPDGYVAVVTMYNFQQYRHIQAPGWSLGWTWAKKEVIWSMMGAQTTEQGDCSKFKAGIPHCCKKDPTVVDLLPGTPYNQQIANCCKGGVLNSWGQDPSNAVSSFQFSVGSAGTTNKTVKMPKNFTLKAPGPGYTCGPAKVVKPTVFITNDKRRTTQAMMTWNITCTYSQFLAQKAPSCCVSLSSFYNDTVVNCPTCTCGCRNKTEPGSCVDPNSPHLASVVSASGKTANTPLVQCTSHMCPIRVHWHVKLNYKEYWRVKITITNFNYRMNYSQWNLVVQHPNLDNITQLFSFNYKSLNPYEGLNDTSMLWGVKFYNDFLSSAGSLGNVQSEILLRKDKSTFTFDKGWAFPRRIYFNGDNCVMPPPDAYPWLPNASSKLVFSLLSTVIATLASLLILLNQS

SEQ ID NO: 151743 - protein, 48 aa, Glycine max
  Clone ID: PAT_MRT3847_108048C.1.pep
INPGGPIHPSSHLKEHIALLKCWTPLGKLICWFCIHSFFIHHRKAGGL

SEQ ID NO: 151744 - protein, 95 aa, Glycine max
  Clone ID: PAT_MRT3847_108049C.1.pep
PTTSPSKYNRKKRAKGGLNQTGIKDKKSSLKEIKKIGKSNRQQLIDGLTQTGLKVIVSFLLVGDSNPQSLPPHHQANLITPTKTKLSPHHFTQCT

SEQ ID NO: 151745 - protein, 1292 aa, Glycine max
  Clone ID: PAT_MRT3847_10804C.1.pep
MNNNGGFSSNILVLDGKNWDRWSALMKSLFGAQEVSDLVQNGYEDLGANPTEAQRLVFKEAKKKDCKALFYIQQNVDSYHFEKIAKATRSKEAWDILEKYHDGGEKVKQVKLQSFRRKYEMMQMEEGQKIGDYFSKLTSLVNQMQTCGEVITDQMVVEKVLRSLTSKFDFIVVAIQEAKDVKAMKIEELQNSLEAHELMVIDRGTERSVQQALQAQISKKEGNSKNSKKKGKGKGNWSNNGKAKTDDKAESSKRGGSDRGHNKKKEFDKSKVQCYNCEKYGHFADECWFKKDRQNNEEANVAQGKDPHTVLMMATTCEDKVQNEEWYLDSGCSNHMTAHREWLTSFDNSKKTSIKLADNRKLAAEGIGNIVIRGNDGKRVIIEKVLYVPEMNCNLMSIGQLVEKGFSVTMDGDSLKLFDAEKNLVLKSNLSKNRTYKCSISSDKMMCMSGVTSEETEALWHMRYGHLNFRSLSELNSKDLVYGLPKLNARREICEICVKSKQSRLPFVTEAPKRASAALQVVHSDTCGPFEVPSLGGSKYFITFIDEFTRMLWLYTLKLKSEALDVFKRFKVLIEKESDKSIKILRTDGGGEYTSKDFEAFCTSHGIVHEVTTPYTPQHNGLAERRNRTLLGMARSMIKQKKLPHQFWGEAITTAAYILNKCPTKKLEKVPEEAWCGRKPSVQHLRVFGSLCYKHVPDVRRSKLEDKSEIMILIGYHPTGAYKLYDPTTQRVHISRDVIVSESESWKWQVTPVYSSEIQQGFIYPDSSDESEDEGDNEVDGNVPQEDEASVRPQRIRQAPRRLDDCERALDNAVSDEGDLIHFALLADAEPVEYRDALKNKVWKKAMMEELSSIEKNQTWELVKLPENKKTIDLKWVFKTKLNPDGSVSKHKARLVARGFLQKQGIDYNEVFAPVARHETVRLVVALANLRNWPLYHLDVKSAFLNGPLEETVFVTQPPGFEIAGKEGMVYRLHKALYGLKQAPRAWNKRIDEFLIQLGFKKCTVEYGVYVMNSKDSGMLIICLYVDDLLITGSDPEEIKEFKLTLNQEFEMTDLGELSYFLGLEFVKTKKGMIMHQQKYVLEILDRFGLIECKSISNPCETSSKLEECSEEEKADATMYKQLVGSLRYLCNSRPDICYAVGVISRFMNEPRKSHLIAAKRILRYVKGTANYGLVFPANRGEDQLDLIGYSDSDWCGDRVDRRSTSGYVFMLNGVAICWSSKKQPVTTLSSCEAEYIAGTYAACQLVMSGRIELVYCPTQDQLADGFTKALKLDRFEELRRKLGLTGVEIMD

SEQ ID NO: 151746 - protein, 61 aa, Glycine max
  unsure (1)..(61): unsure at all Xaa locations
  Clone ID: PAT_MRT3847_108050C.1.pep
NNTHLIQHHFIALLYLCSNSIADPFLKPTALDYGFXLPFAHMSALSVLPNKATRTCDARLT

SEQ ID NO: 151747 - protein, 40 aa, Glycine max
  Clone ID: PAT_MRT3847_108051C.1.pep
YGFSENKESEIICRIIHLTIWLPFQSIDFITSSSASTNTH

SEQ ID NO: 151748 - protein, 36 aa, Glycine max
  Clone ID: PAT_MRT3847_108052C.1.pep
VRPHVAGAQADLLQELQVGIIGTQSIILFPCRQSQE

SEQ ID NO: 151749 - protein, 117 aa, Glycine max
  Clone ID: PAT_MRT3847_108053C.1.pep
MNDSLISAAQVGDIDLLYKLIQMQPYVLEQTDFMPFVDTPLHVAAAAGHASFATEIMRLKPSFAWKLNPCGLSPMHLALQNKHYRMVCRFVDINKNLVRVKRRGGLTPLHLQLKPGE

SEQ ID NO: 151750 - protein, 258 aa, Glycine max
  unsure (1)..(258): unsure at all Xaa locations
  Clone ID: PAT_MRT3847_108054C.1.pep
MFVARSIAADHKDLIHDVSFDXHGRRMATCSSDQSVKVWDKSESGDWHCTASWKTHSGSVWRVTWAHPEFGQVLASCSFDRTAAVWEEIVGESNDKLRGQSHWVKRTTLVDSRTSVTDVKFAPKHMGLMLATCSADGIVRVYEAPDVMNLSQWSLQHEVSCKLCCSCISWNPSSSRAHPPMIAVGSDDSSPNSMAKVQIFEYNENTRKYAKAETLMTVTDPVHDIAFAPNLGRSFHXLAVATKDVRIFTXLKPLRKEL

SEQ ID NO: 151751 - protein, 38 aa, Glycine max
  Clone ID: PAT_MRT3847_108055C.1.pep
FFFFRLFSSEIKLFALGVGNSFYEIFVLITYRGSHVWQ

SEQ ID NO: 151752 - protein, 96 aa, Glycine max
  Clone ID: PAT_MRT3847_108056C.1.pep
HLLLLLGGHLHHCIYAVGETLCSLHGRLIWCGWERMRCIRRPDKTYMQIIRPPIHAQPRPRGPSLALGPPSSGSWRDAILPRVPPYRNFLRIGPGG

SEQ ID NO: 151753 - protein, 43 aa, Glycine max
  unsure (1)..(43): unsure at all Xaa locations
  Clone ID: PAT_MRT3847_108057C.1.pep
RXVGSVHLNGMCXISALQKLTDMNLQSFKDREPLSVYAGDQLI

SEQ ID NO: 151754 - protein, 473 aa, Glycine max
  unsure (1)..(473): unsure at all Xaa locations
  Clone ID: PAT_MRT3847_108058C.1.pep
MLCKLSMAPLAFSFFFILITFFSSSSEAGSVGINYGRVANDLPTPAKVVELLKAQGLNRVKLYDTDATVLTAFANSGIKVVVAMPNELLANAAADQSFTDAWVQANISTYYPATQIEAIAVGNEVFVDPNNTTKFLVPAMKNVHASLTKYNLDKNIKISSPIALSALQNSFPASSGSFKTELVEPVIKPMLDLLRQTGSYLMVNAYPFFAYAANSDKISLDYALFKENPGVVDSGNGLKYTNLFDAQIDAVFXAAMSALKYDDVKIAVSETGWPSAGDSNEIGASPDNAASYNGNLVKRVLSGSGTPLKQNESLDVFLFALFNENQKTGPTSERNYGLFYPTEKKVYDIPLTAEEIKEAPPSGVGKSQVPVSGEVSTTTSKGQTWCVASGGSSEKKLQNALNYACGEGGADCTPIQPGATCYNPNTLEAHASYAFNSYYQKKARASGTCDFGGTAYVVTQPPKYGNCEFPTGY

SEQ ID NO: 151755 - protein, 41 aa, Glycine max
  Clone ID: PAT_MRT3847_108059C.1.pep
AIIPHYMEHMLQLHPGVVRSIPSGSSGLMDFLINLIYPVAL

SEQ ID NO: 151756 - protein, 1303 aa, Glycine max
  Clone ID: PAT_MRT3847_10805C.1.pep
MNNNGGFSSNILVLDGKNWDRWSALMKSLFGAQEVSDLVQNGYEDLGANPTEAQRLVFKEAKKKDCKALFYIQQNVDSYHFEKIAKATRSKEAWDILEKYHDGGEKVKQVKLQSFRRKYEMMQMEEGQKIGDYFSKLTSLVNQMQTCGEVITDQMVVEKVLRSLTSKFDFIVVAIQEAKDVKAMKIEELQNSLEAHELMVIDRGTERSVQQALQAQISKKEGNSKNSKKKGKGKGNWSNNGKAKTDDKAESSKRGGSDRGHNKKKEFDKSKVQCYNCEKYGHFADECWFKKDRQNNEEANVAQGKDPHTVLMMATTCEDKVQNEEWYLDSGCSNHMTAHREWLTSFDNSKKTSIKLADNRKLAAEGIGNIVIRGNDGKRVIIEKVLYVPEMNCNLMSIGQLVEKGFSVTMDGDSLKLFDAEKNLVLKSNLSKNRTYKCSISSDKMMCMSGVTSEETEALWHMRYGHLNFRSLSELNSKDLVYGLPKLNARREICEICVKSKQSRLPFVTEAPKRASAALQVVHSDTCGPFEVPSLGGSKYFITFIDEFTRMLWLYTLKLKSEALDVFKRFKVLIEKESDKSIKILRTDGGGEYTSKDFEAFCTSHGIVHEVTTPYTPQHNGLAERRNRTLLGMARSMIKQKKLPHQFWGEAITTAAYILNKCPTKKLEKVPEEAWCGRKPSVQHLRVFGSLCYKHVPDVRRSKLEDKSEIMILIGYHPTGAYKLYDPTTQRVHISRDVIVSESESWKWQVTPVYSSEIQQGFIYPDSSDESEDEGDNEVDGNVPQEDEASVRPQRIRQAPRRLDDCERALDNAVSDEGDLIHFALLADAEPVEYRDALKNKVWKKAMMEELSSIEKNQTWELVKLPENKKTIDLKWVFKTKLNPDGSVSKHKARLVARGFLQKQGIDYNEVFAPVARHETVRLVVALANLRNWPLYHLDVKSAFLNGPLEETVFVTQPPGFEIAGKEGMVYRLHKALYGLKQAPRAWNKRIDEFLIQLGFKKCTVEYGVYVMNSKDSGMLIICLYVDDLLITGSDPEEIKEFKLTLNQEFEMTDLGELSYFLGLEFVKTKKGMIMHQQKYVLEILDRFGLIECKSISNPCETSSKLEECSEEEKADATMYKQLVGSLRYLCNSRPDICYAVGVISRFMNEPRKSHLIAAKRILRYVKGTANYGLVFPANRGEDQLDLIGYSDSDWCGDRVDRRSTSGYVFMLNGVAICWSSKKQPVTTLSSCEAEYIAGTYAACQLVWLESLCLELKCKLQKPQKLLIDNRSAINLAKNPVSHGRSKHNKVSFHKRTGDEWED

SEQ ID NO: 151757 - protein, 418 aa, Glycine max
  Clone ID: PAT_MRT3847_108060C.1.pep
ILLLHLILHLKVVNFLTGFAEAGSIGINYGRIANDLPTPAKVVELLKSQGLNRVKLYDTDATVLTAFANSGIPRVRPRVRTAARRRQKGAMKNVHASLAKYSLDKNIKISSPIALSALQNSFPASSGSFKTELLEPVIKPMLDFLRQTGSYLMVNAYPFFAYAANSDKISLDYALFKENPGVVDSGNGLKYTNLFDAQIDAVFAAMSAVKYDDVKIAVSETGWPSAGDSNEIGASPDNAASYNGNLVKRVLSGSGTPLKPNESLDVFLFALFNENQKTGPTSERNYGLFYPSQKKVYDIQLTAEAPPSGVGKSQVPVSGDVTTSSKGQTWCVANGGSSEKKLQNALNYACGEGGADCTPIQPGATCYDPNTLEAHASYAFNSYYQKMARASGTCYFGGTAYVVTQPPKYGNCEFPTGY

SEQ ID NO: 151758 - protein, 128 aa, Glycine max
  Clone ID: PAT_MRT3847_108061C.1.pep
NRQHTAASTHTISISTAKKPLHVHTKPSYERAWLTLAADNKKESSTDGHKILPDWGYRHVYTDESVNCTYPEPINAHNFGEKLALFASTDRGGDASFNTTERIEALTEQPCTLETTLCSKKHQNDYLD

SEQ ID NO: 151759 - protein, 87 aa, Glycine max
  Clone ID: PAT_MRT3847_108062C.1.pep
TGISHIIWVQLDIGACVISVVYVNRHLGYESFSTLILVHSSLTDLGIKVFAHHKSHIDIGWLTNMKNAYIIGHSLINRFLKGSFGCL

SEQ ID NO: 151760 - protein, 72 aa, Glycine max
  Clone ID: PAT_MRT3847_108063C.1.pep
FFLSTRKSNLRIFPLSLLIVSPNQSYNLNFKRACFYLFKRCFLCPPLRWLTLIFRLFELLIFSHGAFPSYAL

SEQ ID NO: 151761 - protein, 107 aa, Glycine max
  unsure (1)..(107): unsure at all Xaa locations
  Clone ID: PAT_MRT3847_108064C.1.pep
SVFIRGGITFNSCPFXMXNRSQCTYKVSRTPRACRDVLSNKHTVGTWYLXRKCFKYRGXGGILLKNEEQTERQGAVATGKTVIPSSFNSITTIKNLHDLTKPGSINK

SEQ ID NO: 151762 - protein, 83 aa, Glycine max
  unsure (1)..(83): unsure at all Xaa locations
  Clone ID: PAT_MRT3847_108065C.1.pep
QRGGWKTPGAPQINLFAHHPFFGWWCNKEEAPTGRSYQXSPSLVTRGPXPCGASLTAGGVVSPRRVTSIFAGVLAPAFFAFLP

SEQ ID NO: 151763 - protein, 60 aa, Glycine max
  unsure (1)..(60): unsure at all Xaa locations
  Clone ID: PAT_MRT3847_108066C.1.pep
STXXRHKPYFLINPCGFPHTHKYXNXDXXFXKXXXPXVXLSPXYXXXXXFRSKISSXRXP

SEQ ID NO: 151764 - protein, 125 aa, Glycine max
  Clone ID: PAT_MRT3847_108067C.1.pep
SLPAELGGLASLVDLDLSENSFVGGGLPPDFTRLRNLRRMILANSMLTGALPGRLFSDSLQFLVLRQNNFSGSLPVELWSLPRLSFLDVSANNFSGLLPNSTSAANNATAAVLNISHNKFYGGLT

SEQ ID NO: 151765 - protein, 72 aa, Glycine max
  unsure (1)..(72): unsure at all Xaa locations
  Clone ID: PAT_MRT3847_108068C.1.pep
GTPNSTYVVKANVLEGFKVLVQPSSLAFKTIGEKKSFRVILEGTSWPSHGFXVFGNLSCTDGNHTVTSPIVI

SEQ ID NO: 151766 - protein, 79 aa, Glycine max
  unsure (1)..(79): unsure at all Xaa locations
  Clone ID: PAT_MRT3847_108069C.1.pep
KISNELLLDLLLRLLDDMHISTETLTAETIFLRDIEVRHYQRLSRMMIQDSEGFPPDQXRLIFAGKQLQDGRTLADYNI

SEQ ID NO: 151767 - protein, 63 aa, Glycine max
  unsure (1)..(63): unsure at all Xaa locations
  Clone ID: PAT_MRT3847_10806C.1.pep
PVIQVAVIQVLIHTLSDTKQSGIKGELQKLESEXPLEVIEHQKEXDKKALSASLRSDILVMVS

SEQ ID NO: 151768 - protein, 175 aa, Glycine max
  unsure (1)..(175): unsure at all Xaa locations
  Clone ID: PAT_MRT3847_108070C.1.pep
SHCIFMMEGSKSAQRLPILLXRLILTFSAETLYHFFWFSDHLFFLWGSXXLQIFLMHTFFGEERLTYSXHKITNPHPPLIPTIHVPSHDEPRFSCFLESQAPWSALMISFNMPSHELIPVNDFPTLLSESMFLYALNQRFFNISRLNDPPYFSCSASPDLLLPFLVANLMTSSFQ

SEQ ID NO: 151769 - protein, 170 aa, Glycine max
  Clone ID: PAT_MRT3847_108071C.1.pep
INQSKLKNPHTQNLEVGSKRPPKKRVYGEKKNRKKSKRGGAQKKLKKKKKTFINKKKGVLLTKKNHPNMGGRHTRRGGYHPKTNHPKRGGKKNQSWGDTPPIKTRNALGGTTSTRKDRINMLVPKGRSALIKNTYTFGSPTKGGTPPNKPGGTTRGGRKKKPPKKTNTPK

SEQ ID NO: 151770 - protein, 105 aa, Glycine max
  Clone ID: PAT_MRT3847_108072C.1.pep
PHQGKLDPRAIKCVFIGYASNKKGYKCYHPQSRRVYVSKDVTFHETESFFTSPPLQRESSLEAEIPELLCFPLLQDSTPVEHDKDPEPTSSPVQHKEDRRFGNPY

SEQ ID NO: 151771 - protein, 48 aa, Glycine max
  Clone ID: PAT_MRT3847_108073C.1.pep
SIRSYIPLKNPDFSMTNTLFLCNIQGSSLNVQSWDGNQIRIWLTIFKK

SEQ ID NO: 151772 - protein, 99 aa, Glycine max
  Clone ID: PAT_MRT3847_108074C.1.pep
TYPYTSFSPQQQQQEVDEVQFSDDKHSARDGKILLFVFLSAFFLLFVFVLMIPWLKNHARGSHDSGTEEDSIEFQNNTASQNWFRRRRKEDDANTMQQQ

SEQ ID NO: 151773 - protein, 72 aa, Glycine max
  Clone ID: PAT_MRT3847_108075C.1.pep
NNARADLPVPPLLWDAGLSKYADMYARQRRQDRLLKHSNGPYGENIFWRRGDRWTPAQAVMAWVTEQRWYNY

SEQ ID NO: 151774 - protein, 57 aa, Glycine max
  Clone ID: PAT_MRT3847_108076C.1.pep
YISLSDLFLSFLQFRLLPSHSPLYFYTPCVLFHDHLLIFFTYIHIVDAIKLCFAGCG

SEQ ID NO: 151775 - protein, 78 aa, Glycine max
  Clone ID: PAT_MRT3847_108077C.1.pep
MIKQYSRIHVHPKFHDYHELDARFDALKFNKFNSSKHLSIQRCMNILNLFIRNTYKNGIFCSIEILPTLDVILWYVKK

SEQ ID NO: 151776 - protein, 67 aa, Glycine max
  Clone ID: PAT_MRT3847_108078C.1.pep
PKLLNNCSRQLWQSHCYIPPPTPNPKLEQIPPFRLEQYWDLPTGVTLPKLLISRDGGPLFITLLIDF

SEQ ID NO: 151777 - protein, 76 aa, Glycine max
  Clone ID: PAT_MRT3847_108079C.1.pep
ILRILNVLILILLERSTTNTPPHTATTCTCAAGAWEKEEKRENCCKISKFIPLKIKFEILFFQLIKISFKILNSFY

SEQ ID NO: 151778 - protein, 138 aa, Glycine max
  unsure (1)..(138): unsure at all Xaa locations
  Clone ID: PAT_MRT3847_10807C.1.pep
HASALFSATQTKNVEDLARLSFQATPIYIDVDDGRKXVTNEGLQQGYVVVPCAKRFVVLYSFLRRYQSKKVMVFFSSCNSVKFHADLLKCTGLDCLNIHGKQKQHARTTTFFNFCKAQKGILLCTDVAARGLDIPDVV

SEQ ID NO: 151779 - protein, 99 aa, Glycine max
  Clone ID: PAT_MRT3847_108080C.1.pep
SHTHSVTPISWLLPNIMDLDFMRASSIHSISHQFSSHKPSRLHSDDDDDAQSLLRCPSCEFEIDLSSLRIHLEEIQCYEPQNMLCHVCDDTLRDDVITV

SEQ ID NO: 151780 - protein, 161 aa, Glycine max
  unsure (1)..(161): unsure at all Xaa locations
  Clone ID: PAT_MRT3847_108081C.1.pep
HSYWHACRYDGLTTPQTQGTDSPGGSCSVEIKARSGLEKVPLAKAQFGRGKTFKSAIIGAGAHSSEDSPEHDDXEKPKXIDARLRQRIDPQYNEVQAQMETNLFKLSLDDVETPKGSMLDLKISQSKIALSKNTXVGGTILCSDLLAYFLTEVNFTSLSIF

SEQ ID NO: 151781 - protein, 65 aa, Glycine max
  Clone ID: PAT_MRT3847_108082C.1.pep
LGLCPHYFGGVSLVSLCGHKLICIGKHLVPLANSWGLALRIPRIKFFLPVKCFFSKLILVQILQN

SEQ ID NO: 151782 - protein, 73 aa, Glycine max
  Clone ID: PAT_MRT3847_108083C.1.pep
LAMLRHTRASAAPASGRGGFATALVARKKSANGSDAEFADRRQQFGIGRELPPMRDFPRFLKWTKHVQGQMRK

SEQ ID NO: 151783 - protein, 39 aa, Glycine max
  Clone ID: PAT_MRT3847_108084C.1.pep
NSSQQVTIVLKRREVQGFRNDRALSPRWPKGCRTSRPQA

SEQ ID NO: 151784 - protein, 45 aa, Glycine max
  Clone ID: PAT_MRT3847_108085C.1.pep
NYIKILRKIVFNSLSNFKRVNDKLHCIKEEKKNVLMIPTSIGSFI

SEQ ID NO: 151785 - protein, 32 aa, Glycine max
  unsure (1)..(32): unsure at all Xaa locations
  Clone ID: PAT_MRT3847_108086C.1.pep
NNCVHNITFNRSSTPRLVDVXVFYXSFVNKKI

SEQ ID NO: 151786 - protein, 100 aa, Glycine max
  Clone ID: PAT_MRT3847_108087C.1.pep
MYYISKSGEAGTVVVDSAIVAAEEHATSVQAIVNMGEGSDAVCVKDSGVIYEDAYSHIGIKAEGRAHHGHLVIFWGNKNTTAVGFDQAIILLLHASADGA

SEQ ID NO: 151787 - protein, 140 aa, Glycine max
  Clone ID: PAT_MRT3847_108088C.1.pep
MASMTMLQTMIPKNAPNLPPRVGASSNNTTKISFGGSGRVLWTGIQRNRNNRSSSIVVAAVGDVSSDGTAYLVAGAIAVALVGTAFPIFFSRKDTCPECDGAGFVRKANVTLRANAARKDQTQIVCARCNGLGKLNQIDK

SEQ ID NO: 151788 - protein, 93 aa, Glycine max
  unsure (1)..(93): unsure at all Xaa locations
  Clone ID: PAT_MRT3847_108089C.1.pep
EPQDIECCGALEYYDKAFDRITTRSEKPLRSIKRIFHTVTKINDPVIRKLAKTXGNVFATDAILATLMSCTRSVYSWDIVVQRVGSKLFFDKR

SEQ ID NO: 151789 - protein, 42 aa, Glycine max
  Clone ID: PAT_MRT3847_10808C.1.pep
WGQKQKEIWGFVLRKMKVFAMPLQKSPTNLLSPKMFNNHPGL

SEQ ID NO: 151790 - protein, 479 aa, Glycine max
  unsure (1)..(479): unsure at all Xaa locations
  Clone ID: PAT_MRT3847_108090C.1.pep
MKIATWCEDQQYNFPSAKQVAVVDVLLRCSDIFCPFLVGSNRDLPPHRHSINSNFCIWTHQTMKARRGKRSEAFWPSIVMKKWLNIKPGRVGGRVGGRVGETESEDDACSIRGSRMCVREDNPHPLRTEGVQSIFPSVTSDASPCKGRKTRHRRGKSETLRAQYINTKEMRVTIGTWNVAGRHPCEDLEIDDWLCTEDPADIYIIGFQEVVPLNAGNVLGAEDNTPIPKWEAIIRRSLNKSSEPDSKHKSYSAPPSPVXTSSAADLLADTIDADNPIPIDMTIEEYVATVDNNEVEQQEVKSIIDIENNLQLRRVFGIDIDWPERSLDAIPQIVDSNSKLRRVLSSSARIGFNRTESSLVYGVGLKRSHRSSGNLGLLWQQQQVIPEVVDSLEDVSDVLSAEGGDTFIVPNDEDEDEFGTTESCPSTRYVRIVSKQMVGIYVSVWVQRRLXRHINNLKVXPVGVGLMGYMGNKVRHVSL

SEQ ID NO: 151791 - protein, 119 aa, Glycine max
  unsure (1)..(119): unsure at all Xaa locations
  Clone ID: PAT_MRT3847_108091C.1.pep
MKARRGKRSEAFWPSIVMKKWLNIKPKVNDFSEDEVDTETESEDDACSIRGSRMCVREDNPHPLRTEGVQSIFPSVTSDASPCKGPQTRHRRGKSETLRAQYINTKEMRVTIXTWNVAG

SEQ ID NO: 151792 - protein, 102 aa, Glycine max
  Clone ID: PAT_MRT3847_108092C.1.pep
MTIEEYVATVDNNEVEQQEVKSIIDIENNLQLRRVFGIDIDWPERSLDAIPQIVDSNSKLRRVLSSSARIGFNRTESSLVYGGWIENVHTAVEIWAYGNNNK

SEQ ID NO: 151793 - protein, 118 aa, Glycine max
  unsure (1)..(118): unsure at all Xaa locations
  Clone ID: PAT_MRT3847_108093C.1.pep
QTTIHSSLIQSMIVLHPCALLPSCTTITCFKPFSHNNRFVPSSMVPRLALSYARTRTFSCSARNRLKDLNGRDFSIDIVNENLELEDDGGDDGFSARGLYARSEANDTDEEEAXKDGD

SEQ ID NO: 151794 - protein, 215 aa, Glycine max
  Clone ID: PAT_MRT3847_108094C.1.pep
MASTIGISSSISIYKTPSFQLFKRPAATTTSVFFNTLPRNRDATLSSVPSAIATPSILTEQPLKGLTLDDLSNSDQFGYDFEPDTNVSDHELDISKLGLPSPLVHSLQKRGIISLFPIQRAVLVPALEGKDIIARAKTGTGKTLAFGIPILKGLTNDDEQSPHRRSGRLPKALVLAPTRELAKQVEKEIQESAPYLKTVCVYGGVSYVAQYSVLS

SEQ ID NO: 151795 - protein, 55 aa, Glycine max
  Clone ID: PAT_MRT3847_108095C.1.pep
KTTEGGGRSNLRERKREWERETHPLFSFSHLYTTQHNTKALSLISKDRIFNTLTF

SEQ ID NO: 151796 - protein, 114 aa, Glycine max
  Clone ID: PAT_MRT3847_108096C.1.pep
VPRQVDEHMFITFGPSFDICRSDTGVCPGPVPLFSANMNNESFVLPHGKGVSMLEAFFRNDVTGVYTRDFPDQPAVVFDCTNPNITSSPDTPREFLIAPKSTKVKTLKFNSTVQ

SEQ ID NO: 151797 - protein, 62 aa, Glycine max
  Clone ID: PAT_MRT3847_108097C.1.pep
PAYRDTTVLFVDPRLHPYVEARAPTTVFSTHALPCTPKLVVVKHRVNHHIVNPETALAPFSL

SEQ ID NO: 151798 - protein, 64 aa, Glycine max
  unsure (1)..(64): unsure at all Xaa locations
  Clone ID: PAT_MRT3847_108098C.1.pep
HSEXGTWSXKRSSIXVCQXAHHIVDYLPXLHXILCLQXPFYKXGYSFFSLVGXXSHXFXTLIIC

SEQ ID NO: 151799 - protein, 112 aa, Glycine max
  unsure (1)..(112): unsure at all Xaa locations
  Clone ID: PAT_MRT3847_108099C.1.pep
MQPNVISSKSSSDSENFAESQLVPKMPKQASEEPKKKKKVKLPLPLVPADNNQNASQPVRKCMHCEITKTPQWRAGPMGPKTLCNAXGVRYKTGRLFPXYRPAASHFLPIWH

SEQ ID NO: 151800 - protein, 54 aa, Glycine max
  Clone ID: PAT_MRT3847_10809C.1.pep
SWMDCSVKEGTRGQYMIVELPLQALLLGMAVIKADTLFGLVLGQWRINLLLTLT

SEQ ID NO: 151801 - protein, 99 aa, Glycine max
  Clone ID: PAT_MRT3847_1080C.1.pep
RAQKIHWGFVKKKKIPWAIYKRNPAHLAWLFACNPGPWGANQGFLPILTGLIAPVFSYTKILGLISTPSTKTPSLGWKPTPIKLVETFLSASPPRSPPS

SEQ ID NO: 151802 - protein, 324 aa, Glycine max
  unsure (1)..(324): unsure at all Xaa locations
  Clone ID: PAT_MRT3847_108100C.1.pep
MVGPNFMDEIDCGSFFDHIDDLLDFPVEDVDGGAATLPSVSAGNSNSLASIWPSESDSFPASDSVFSGNSASDLSAELSVPYEDIVQLEWLSNFVEDSFCGGSLTMNKVEEPSCTTKEDSVNTQFHTSSPVSGLESSSSCSGGRTLPPRSPEIYILWTYSSAQPXSYYVIPCISSKSSSDSENFAESQLVPKMPKQASEEPKKKKKVKLPLPLVPADNNQNASQPVRKCMHCEITKTPQWRAGPMGPKTLCNACGVRYKSGRLFPEYRPAASPTFCPSVHSNSHKKVLDTMQCMWGSLQVRPALPRIPACCKSNFLPIRALQFS

SEQ ID NO: 151803 - protein, 69 aa, Glycine max
  Clone ID: PAT_MRT3847_108101C.1.pep
DSGSAPPFRPGLLVGAPTQPGLLFSSVHGRGYALNSSRAFGFSVASLLFCLTNWPPGFKFLPPFQHSWL

SEQ ID NO: 151804 - protein, 80 aa, Glycine max
  Clone ID: PAT_MRT3847_108102C.1.pep
GGQMEEMTGSPSSQASNAESGLIFSTGSPFPEAWTTGHLVGSLTSLSSGTLREVFRSPVLCSVPFPALIRVPEKDTFRDS

SEQ ID NO: 151805 - protein, 92 aa, Glycine max
  unsure (1)..(92): unsure at all Xaa locations
  Clone ID: PAT_MRT3847_108103C.1.pep
SDGSGXYQSXRRFXRCXXXXHQHXHXALPXTLYDTXXLRFPSIXWXFXLXXXCSTIRXFFLLCEXHSKARXLXLSQPXTLPXSRWQXLWXSD

SEQ ID NO: 151806 - protein, 143 aa, Glycine max
  unsure (1)..(143): unsure at all Xaa locations
  Clone ID: PAT_MRT3847_108104C.1.pep
GSRGXXAXXKTTXDQAXXEXXXRHKXGTPXXXEPERDXXXQGXQXAXERRAXEXXRXEXXTEDRQGXXAEXXRXXREXGXKGTRAEKXTXGDXAXXXXKXTEAXGXXXXPKXXEXXRQKXGXSXXKXKEXPXXXQEKAEREEQ

SEQ ID NO: 151807 - protein, 120 aa, Glycine max
  unsure (1)..(120): unsure at all Xaa locations
  Clone ID: PAT_MRT3847_108105C.1.pep
RFSWEKLLRQAKAPSMFLQSFKNFVSLCVYGDDNXISVYEYDKPNFYGSKXKSFLAYHNITITDCFDKTSATLQFRKSADRYFLXRNFNKMSNVLWEASEDKASLWSQRHYRLCYKLPMH

SEQ ID NO: 151808 - protein, 207 aa, Glycine max
  Clone ID: PAT_MRT3847_108106C.1.pep
MPKVKTNRVKYPEGWELIEPTLRELQAKMREAENDPHDGKRKCETLWPIFKIAHQKSRYIFDLYHRRKEISKELYEFCLDQGYADRNLIAKWKKPGYERLCCLRCMQPRDHNFATTCVCRVPKQLREEKVIDLMLSETLTMGHHFSRLYYCLLNECYILGTLPNMVYFCSILQSFNAALVKIGAKLDKLQSFYFLFFKEINFVRGTL

SEQ ID NO: 151809 - protein, 145 aa, Glycine max
  Clone ID: PAT_MRT3847_108107C.1.pep
MPKVKTNRVKYPEGWELIEPTLRELQAKMREAENDPHDGKRKCETLWPIFKIAHQKSRYIFDLYHRRKEISKELYEFCLDQGYADRNLIAKWKKPGYERLCCLRCMQPRDHNFATTCVCRVPKQLREEKVIECVHCGCKGCASGD

SEQ ID NO: 151810 - protein, 145 aa, Glycine max; identical to SEQ ID NO: 151809
  Clone ID: PAT_MRT3847_108108C.1.pep

SEQ ID NO: 151811 - protein, 57 aa, Glycine max
  Clone ID: PAT_MRT3847_108109C.1.pep
TLYVKREGLIQLKKRHIMTHDIGTHKLMCTGFHYTNDLSNATMNSPVYTNPLTIYLV

SEQ ID NO: 151812 - protein, 91 aa, Glycine max
  Clone ID: PAT_MRT3847_10810C.1.pep
LFNPPYFFLSTIYIYYLFSIGSEEIFSSIHQSLKLPGDAESVFKKIPPFVISFESNPCFTKSFFTHFGCRLCSPNLKHPGPQNGPFDGLRL

SEQ ID NO: 151813 - protein, 60 aa, Glycine max
  Clone ID: PAT_MRT3847_108110C.1.pep
FYTRVFRQLVVNWGPFKACMFLRLMLRSCVFLVSAVCLKCVYGFLCTLKPCYLYCFTVFC

SEQ ID NO: 151814 - protein, 251 aa, Glycine max
  Clone ID: PAT_MRT3847_108111C.1.pep
MRKKTYSDLSLLLILVAQSLSASSFSHNGPLTDAQVSFIKQRQLLYYKDEFGDRGEKVTLDPSFVFENDRLKSAYIALQAWKEAILSDPKNLTQDWLGPNVCNYSYVFCAPAPDNHKIRTVAGIDLNHGDIAGYLPEELGLLTDLALLHINTNRFCGTLPHKFDRLKLLFELDLSNNRFAGKFPDVVLRLPQLKFLDLRFNEFEGTVPKELFDKDLDAIFINDNRFVFDLPENFGNSPVSVIVLANNRFHG

SEQ ID NO: 151815 - protein, 317 aa, Glycine max
  unsure (1)..(317): unsure at all Xaa locations
  Clone ID: PAT_MRT3847_108112C.1.pep
YVNAHTALHFENGPFFGSSSCRTRFAGAIPTLLRHNVLARAEDKARDPTPSSFQPQQSSQQQYQNLTPESGSCDPLCSLDETSSQEFEDSYQPKTDFLKAVAILATAATGAVAINHSWVATNKDLAMRLRVTTACAGIIFEESLAFNKSGVGLLMAVSLWVIRSIGAPSTDIAVSELTHASAEVSEIVFFLLGAMTIVEIVDAHQGFKLVTDNITTRNPRLLLWVIGICTFFLLAPLDNLTSTIVMVSLLRKLDPPSEYRKILGAVVVIAANAGGAWTPXGDVTTTMLWIHGKLSTVQTXKDLFVPSAVSLSVPLGL

SEQ ID NO: 151816 - protein, 179 aa, Glycine max
  unsure (1)..(179): unsure at all Xaa locations
  Clone ID: PAT_MRT3847_108113C.1.pep
MFQHLHNSRLPLHGFCTVESSPFFGSSSCRICFTGTLPTLLRHNVLARAEDKARDPTPSSFQPQQSSQQQFQNLTPESGSCDPLCSLDETSSQEFEDSYQPKTDFLKAVAILAAAATGALTINHSWVATNQDLAMALLFXIGYAGIIFEESPALHKSXVGLLMTVSLWVIPSIGGNIYL

SEQ ID NO: 151817 - protein, 46 aa, Glycine max
  unsure (1)..(46): unsure at all Xaa locations
  Clone ID: PAT_MRT3847_108114C.1.pep
MIGSTAPTRACTDSCGCECECRAVHVPXXGHDPSNCPYHYRCVCHR

SEQ ID NO: 151818 - protein, 159 aa, Glycine max
  Clone ID: PAT_MRT3847_108115C.1.pep
KQAFKEGWFQSGDQAEKHLYGPIQIKDSFKHIVVSGGKNISSVGVQPVLYNHPPVFETPVVSKLNDQWAHTPCAFAKLKKGFTLHAPEIIHFCRDHSPHKMAPNTVIFQDKPKPSTGKTQKFVLREKPEAFKVTQANRKWSLRVRKTIKIKKVKSNLLH

SEQ ID NO: 151819 - protein, 50 aa, Glycine max
  Clone ID: PAT_MRT3847_108116C.1.pep
FLVSGYSSFTFYRPPTIPIFEEIYMGWVSGYEGQHLGEHRLSREPVCVNL

SEQ ID NO: 151820 - protein, 40 aa, Glycine max
  Clone ID: PAT_MRT3847_108117C.1.pep
YSVTTIPLQQPIHGNVDQPCVQWHLTQNNKEQQIVVPAKV

SEQ ID NO: 151821 - protein, 57 aa, Glycine max
  Clone ID: PAT_MRT3847_108118C.1.pep
STSVLSSMLQFSASYSDLAKVKYSKKQKEKKRNETVSNDNSKITTLEDKCCSHIPLL

SEQ ID NO: 151822 - protein, 551 aa, Glycine max
  Clone ID: PAT_MRT3847_108119C.1.pep
IVAGRVVPNASAIGGFAKGTALGGAPLARLAIYKACWPIKGKSKHEGNICTNIDMLKAIDDAIGDGVDVLSISIGCSAPISYEEDVIARGALHAVRKNIVVVCSAGNSGPLPQTLSNPAPWIITVAASTVDRSFHAPIKLSNGTIIEGRSITPLHMGNSFYPLVLARDVEHPGLPSNNSGFCLDNTLQPNKARGKIVLCMRGQGERLKKGLEVQRAGGVGFILGNNKLNGKDVPSDPHFIPATGVSYENSLKLIQYVHSTPNPMAQILPGTTVLETKPAPSMASFSSRGPNIVDPNILKLEIIARGVYVWHSWTAEDGPTRMTFNDKRVVKYNIFSGTSMSCPHVAAAAVLLKAIHPTWSTAAIRSALMTTAMTTDNTGHPLTDETGNPATPFAMGSGHFNPKRAADPGLVYDASYMGYLLYTCNLGVTQNFNITYNCPKSFLEPFELNYPSIQIHRLYYTKTIKRTVTNVGRGRSVYKFSAVSPKEYSITATPNILKFNHVGQKINFAITVTANWSQIPTKHGPDKYYFGWYAWTHQHHIVRSPVAVSFP

SEQ ID NO: 151823 - protein, 125 aa, Glycine max
  Clone ID: PAT_MRT3847_10811C.1.pep
GKKILVLYCPYKKFSPFIKRGIIPKKIFPVKAPKNFPLPSPPRKKKERNPLFWGGGPTFKGPFGFSHFLGGFFWIQIYLFFHNFLPRKLKKNGGFGFLGFFRERLKGFQSLKPFFYGRTFFGVMF

SEQ ID NO: 151824 - protein, 95 aa, Glycine max
  unsure (1)..(95): unsure at all Xaa locations
  Clone ID: PAT_MRT3847_108120C.1.pep
SCPRGIDDKNFDKRVYSLCGGDDKIAXVERTHLLXDSCLKMAICKKDSRRAECXIPSRFSLTAIGNSICNEMLIRYIYDKLLRQAKAPAMLSQSF

SEQ ID NO: 151825 - protein, 43 aa, Glycine max
  Clone ID: PAT_MRT3847_108121C.1.pep
PSPPPPPPPLRVFTITFIQILLPSHLITHMNFGDASKISTAIS

SEQ ID NO: 151826 - protein, 74 aa, Glycine max
  Clone ID: PAT_MRT3847_108122C.1.pep
WAQFQPMVRPVKAQFKGLGSWESCASLFKWNLKKNCTKQFQIRFHQRESGNNTQFMSIIIYSINISIWGGGKPP

SEQ ID NO: 151827 - protein, 62 aa, Glycine max
  Clone ID: PAT_MRT3847_108123C.1.pep
VVVAGCCGPDSLQGSSSESACSTQGNKTKTLYRIIASLGHSSYIGTILYFLISINYFDFIFF

SEQ ID NO: 151828 - protein, 54 aa, Glycine max
  Clone ID: PAT_MRT3847_108124C.1.pep
ILISLRLYGVVVFLDLYHCIILISFLPLQNGRLRRDYFKTLSVRLQLISIILFS

SEQ ID NO: 151829 - protein, 116 aa, Glycine max
  unsure (1)..(116): unsure at all Xaa locations
  Clone ID: PAT_MRT3847_108125C.1.pep
AQHVYQTQSSEQQVSLAQIVPCASINRSFSFMGWLQNVHHCAYDPPDMPINKIWFEYWSDMRFRPRFELAGCIRAACCVSSVCSGRECTDSNRMDKRVPLVSPXVQRAWVEKGFRA

SEQ ID NO: 151830 - protein, 89 aa, Glycine max
  unsure (1)..(89): unsure at all Xaa locations
  Clone ID: PAT_MRT3847_108126C.1.pep
SIGSVQALNGDMANDSYGNDYIPDVMKHCIRPDIVSFDHXNGSHNCRPPYADSRRTGHQTCDDPCGTRRAEXSIPRFPGGGTHRAGRGF

SEQ ID NO: 151831 - protein, 64 aa, Glycine max
  Clone ID: PAT_MRT3847_108127C.1.pep
KEYFWCLRVYVGEEMKGTLKMENKNRLLYLHFLVPFPNYSPHSSISHDSQQNFKTNSNQTFNSF

SEQ ID NO: 151832 - protein, 100 aa, Glycine max
  Clone ID: PAT_MRT3847_108128C.1.pep
VCDASILLDSTPKNLAEKDGPPNLSVHAFYVIDEAKAKLEKACPRTVSCADLIAIAARDVVALVITQLSLQAILELPLLSSSRSRTRAARAARAARAQSQ

SEQ ID NO: 151833 - protein, 45 aa, Glycine max
  Clone ID: PAT_MRT3847_108129C.1.pep
LLVSYNVRQDKFGDYLLLQYSCLVCLRCVSIYLGLDSGSFCRYFL

SEQ ID NO: 151834 - protein, 198 aa, Glycine max
  Clone ID: PAT_MRT3847_10812C.1.pep
VLFYIFQFIRVVLLFTVIVLIGTGWSFLKPFLQDRENVRLMIVIPLQVLANLASVVIGETGPFIKDWVTWNQVFLLVDIICCCAIIFPIVWSIRSLRETSKTDGKASRNLAKLTLFRQFYIVVIGYLYFTRIVVFALRTIAAYKYQWVSNAAEETASLAFYVVMFYMFRPLEKNEYFVLDEEEEEAAEMALKDEDFEL

SEQ ID NO: 151835 - protein, 41 aa, Glycine max
  Clone ID: PAT_MRT3847_108130C.1.pep
TLRFFSCWEHQTLIKSNPGVVVVRKINAFFFLGFGWTFCIP

SEQ ID NO: 151836 - protein, 95 aa, Glycine max
  Clone ID: PAT_MRT3847_108131C.1.pep
DMAVSQQELNYSHLKSRSNHTGNCFLFQIRQLRSDKHACCLWHVLSCRHINVELHLHWHASPDGDFNISRCSMDSHAVGHGSVCRLQCPGIANKR

SEQ ID NO: 151837 - protein, 325 aa, Glycine max
  unsure (1)..(325): unsure at all Xaa locations
  Clone ID: PAT_MRT3847_108132C.1.pep
MGVGSQDAIKQFQAFIDQVEEPLRTTFQNVHQGFVTETLMRFLKARDWDPCKAHKMLVDCLNWXRVQNEIDNILSKPIVPADLYRAVRDSQLIGLSGYSREGLPVFAIGVGLSTFDKASVHYYVQSHIQINEYRERIILPSASKKQGRPITTCIKVLDMTGLKLSALNQIKLLTIISSIDDLNYPEKTNTYYIVNAPYIFSACWKVVKPLLQERTRRKIQVLPGCGRDELLTIMDYSSLPHFCRREGSGSSRHSESGSENCYSLDHPFHQELYNHIKQQARLREAVEPIKQGSFHVHFPEHPEEKFEIDKTIESKKHKFENGNFV

SEQ ID NO: 151838 - protein, 180 aa, Glycine max
  unsure (1)..(180): unsure at all Xaa locations
  Clone ID: PAT_MRT3847_108133C.1.pep
MGVGSQDAIKQFQAFIDQVEEPLRTTFQWLRNXKDKIALPIRSWNVHQGFVTATLMRFLKARDWDPYKAQKMLVDCLNWRVQNEIDNILSKPIVPADLYRAVRDSQLIGLSGYSREGLPVFAIGVGLNTFDKASVHYYVQSHIQINEYXRERIGLPSASEKQGRPITTCIKVLHMTGLKL

SEQ ID NO: 151839 - protein, 176 aa, Glycine max
  Clone ID: PAT_MRT3847_108134C.1.pep
INQVFFMSLGGQVELVKDGKPYVLFVDGKLCACKPMSESDLASFIVNCVLSEDKINQVLPIGGPGKALTPLEQGEMLFRLLGKEPKFLKVPIEIMDFAIGVLDFLVKVFPSLEDAAEFGKIGRYYAAESMLLLDPETGEYSAEKTPSYGNDTLEEFFARVLREGMAGQELGEQTIF

SEQ ID NO: 151840 - protein, 54 aa, Glycine max
  Clone ID: PAT_MRT3847_108135C.1.pep
QQDQNLRLKHDQLGQPRALEHPRGTHVNLSAGESNATIPRYVLPSGDLFVKAIL

SEQ ID NO: 151841 - protein, 172 aa, Glycine max
  Clone ID: PAT_MRT3847_108136C.1.pep
EREREKIHSVSAPPPPPPPPPTKRKSQIPPSPSSPPEPPRRRNSGRPPLPNRAVTFNDETLNAGNQSPLIPIPPPPPPFKMKAMKFVVRGDFVKIRSNQSSRCSSPEREDIINVSETTIIDAVTDSVNETVTDRNVFCPSPDVNVKAATFIARLRGEWRLEKLNSLKEKGNG

SEQ ID NO: 151842 - protein, 88 aa, Glycine max
  unsure (1)..(88): unsure at all Xaa locations
  Clone ID: PAT_MRT3847_108137C.1.pep
QRKKTRHAAKEGTRGRGTFPTWPSEPRALEAFKRFGNKPAQREKKPPKKNTDAKLRTRWAPGQKPXNRGAPSRREGLTFRGIPNSLSI

SEQ ID NO: 151843 - protein, 71 aa, Glycine max
  Clone ID: PAT_MRT3847_108138C.1.pep
FYVRHIFVVCLVLSQILLCKSHYSKLPKSIWKSLKKNWGFLKLNLLAFLIQFCLDQKPVLYKVLSIYFYIY

SEQ ID NO: 151844 - protein, 563 aa, Glycine max
  unsure (1)..(563): unsure at all Xaa locations
  Clone ID: PAT_MRT3847_108139C.1.pep
MAPRKPREREMLFDSVIALVFILVACVDLCDGATVVDVYRLIQYDMSGVPFGSRLASLNHHAASLHFSPHADLSRTVLLIPLRELNMSFVKEYIAESKPLGGLIFLLPRMFSFENKDGMGSNHQDESKELLKNVLDELEKILIHANLPYPVYFAFEDDNIDAVLTDIKKNDVTGQPATATTGGYKFVVSATEPKKVVSPPITNIQGWLAGLKTDDDAHQLPTIAIVASYDTFGAAPALSVGSDSNGSGIVALLEVARLFSLLYSNPKTRGQYNLLFGLTSGGPYNYNGTHKWLRSFDQRLRESIDYXAICLDSIGSWENELWIHVSKPPENAFIKKIHEDFSRVAEELGFKVNLKHKKINISNPRVAWEHEQFSRLRVTAATLSELSTAPELLGKTGGLVDGRHFVNEAAIVRSVKLIAESLARHIYGHQGKNIQIFAANSNLAVNPSYVQSWLDVLSQTPRVAPFLSKGDPFVMALKKELEDHTDEVNLHRDVLDGMFTFYDSTRAKLNIYQVASVTFDLLLLLVLGSYLIVLFSFLVITTRGLDDLISLFRRPPSRKVKTA

SEQ ID NO: 151845 - protein, 98 aa, Glycine max
  Clone ID: PAT_MRT3847_10813C.1.pep
LIPQVITNALDDLNVTFASCHTSCIKITLVSMLSVSLPLILLPSVQILLQHLKINKFIKGNKTKELKIPGSHHCYLILQVRKKYTISIQFKVVTNFIQ

SEQ ID NO: 151846 - protein, 401 aa, Glycine max
  Clone ID: PAT_MRT3847_108140C.1.pep
MATKRSVGTLKEGDLKGKRVFVRVDLNVPLDDNLNITDDTRVRAAVPTIKYLTGYGAKVILSSHLGRPKGVTPKYSLKPLVPRLSQLLGIEVTMANDSIGEEVEKLVTQLPEGGVLLLENVRFYKEEEKNDPEFAKKLASLADLYVNDAFGTAHRAHASTEGVAKYLKPSVAGFLMQKELDYLVGAVSNPKRPFAAIVGGSKVSSKIGVIESLLEKVNVLLLGGGMIFTFYKAQGYSVGSSLVEEDKLSLATTLLEKAKAKGVSLLLPTDVVIADKFAADANSKTVPASSIPDGWMGLDIGPDSIKTFGEALDTTQTIIWNGPMGVFEFDKFATGTEAIAKKLAELSGKGVTTIIGGGDSVAAVEKVGLADKMSHISTGGGASLELLEGKQLPGVLALDDA

SEQ ID NO: 151847 - protein, 83 aa, Glycine max
  Clone ID: PAT_MRT3847_108141C.1.pep
NFLFFFFFFFFFFFFFFFFFFFKGRKKRVLGNPYWNIPNRKIYKISPKQEKNPGKNMGLFFFHTKQGQFTGKKQKPFKAKHGF

SEQ ID NO: 151848 - protein, 129 aa, Glycine max
  unsure (1)..(129): unsure at all Xaa locations
  Clone ID: PAT_MRT3847_108142C.1.pep
IYVDDLIYAGNDKGMMIEFKQSMMQAFDMTGLGKMRFFLGIEVLKKSXRIFLCQRKYATDIWKKFAMSKSKLVKSPIVSGFKIIKDADGAXVDDTYFKQIVGSLMYLTATRSDIMYSVSLISRYMPKPT

SEQ ID NO: 151849 - protein, 187 aa, Glycine max
  unsure (1)..(187): unsure at all Xaa locations
  Clone ID: PAT_MRT3847_108143C.1.pep
QGGIPPLTYAISQVAIEAIYSATQTTIFSVIIYSMMGFEWTAXKFLSFYYFMLMCLIYYPLYGMMIVAVTPSFQIAAVCNSFFLTIWNTFCGFVIPRTQIPIWWRWYYWLAPNAWTLYGLVTSQFGDKITQVEIPGAENMGLKELLKKNFGYDYHFLPVVVVVHLGWVLLFLFVFAYSIKFLNFQKR

SEQ ID NO: 151850 - protein, 46 aa, Glycine max
  Clone ID: PAT_MRT3847_108144C.1.pep
AAAIRSHNGFLIKYKLIFSIYLRGKTQLWDKICCTAVLAYQIIKLN

SEQ ID NO: 151851 - protein, 77 aa, Glycine max
  Clone ID: PAT_MRT3847_108145C.1.pep
KLAKISSSSSGIIKRIHDLGYGMTMVTYRCTDGVTYRYDVVGFGPTTHGQSSMHRSMIFRNQVRSFYYTMTCSAACP

SEQ ID NO: 151852 - protein, 76 aa, Glycine max
  Clone ID: PAT_MRT3847_108146C.1.pep
HLTRPVQWARFQPAGIHQSMPPYPWKQRGCFPAIFSLRSESASKLKLNYALINSYNLNPLVALHHIYLKKDMFLVP

SEQ ID NO: 151853 - protein, 182 aa, Glycine max
  Clone ID: PAT_MRT3847_108147C.1.pep
MALLGTQNPPSNQEPSSVVYSSPSPSPVVSDFSVPPASTQQPSGSPVNLASPQSTPTRMLSTKLPKGRHLIGEHAVYDIDARVPGEVQPQLEVTPITKYASDPGLVLGRQIAVNKSYICYGLKLGAIRVLNINTALRYLLRGHTQRVTDMAFFAEDLHLLASASTDGRIFVWKINEGPDEDD

SEQ ID NO: 151854 - protein, 82 aa, Glycine max
  Clone ID: PAT_MRT3847_108148C.1.pep
STKTSKSFLFCFGANPPCFFFTTTTYFYDFHPGGGETPFFPRFFGPIEGGLRGNPFWFLPKLAFWETLRKQKSTNWGNPPKI

SEQ ID NO: 151855 - protein, 89 aa, Glycine max
  unsure (1)..(89): unsure at all Xaa locations
  Clone ID: PAT_MRT3847_108149C.1.pep
GTGWFRTFIADYVAGLMKVGGTALLFIVPSKVPFGVPRKPNFSSCLRKLHPFTNWTVIKDIVEVSLAYILAASYLPXLMIAVLYSFTHN

SEQ ID NO: 151856 - protein, 59 aa, Glycine max
  unsure (1)..(59): unsure at all Xaa locations
  Clone ID: PAT_MRT3847_10814C.1.pep
CSQFSFFPNNLKNLQLXYLKSFFXLILLFFFFFLVLPIGFLLPKNXPFPNPEPSFLSHF

SEQ ID NO: 151857 - protein, 51 aa, Glycine max
  Clone ID: PAT_MRT3847_108150C.1.pep
DTWESLHPKWNNIKAYQVHNTTLPFLNLVSQLIVTNSNLTFEMREWQMGRD

SEQ ID NO: 151858 - protein, 49 aa, Glycine max
  Clone ID: PAT_MRT3847_108151C.1.pep
RHLSYTKNQPSLACSLCFHYDAAGFNIFVFYPTVVALAPVESLFRSRRS

SEQ ID NO: 151859 - protein, 165 aa, Glycine max
  Clone ID: PAT_MRT3847_108152C.1.pep
MGKYFAVVALFVSALCFSSILARKTPALDKFFVEGKIYCDPCHFAFESRLSFPLEGVKVSLQCLRSENDTVTYVKEGKTDANGQYSIPVHGDHEEEICIVVADSPTEGQCKEAMPNKSDRIVLTKNMGVSSMARYVNPLGFMTQGIDATQCNLVVQELGLDQLDN

SEQ ID NO: 151860 - protein, 102 aa, Glycine max
  unsure (1)..(102): unsure at all Xaa locations
  Clone ID: PAT_MRT3847_108153C.1.pep
KRSLAALFNLPRTCFFPGYDTVESEIVRHLLEDXQTLRTAMKLXIRQTLSGNRQSGRVTPRSFLTSLAPVISRDPMVFMKVSAAVCQIQTSGGRTAVVLSKE

SEQ ID NO: 151861 - protein, 87 aa, Glycine max
  Clone ID: PAT_MRT3847_108154C.1.pep
GSHRVFQARSFKIAAPKINLGVPIKKLLRCHGGEVNLGPLKRAPPRFFSTFVTLDTPFRCYYFDFKNGFAFSQEVVEGFVCLSKLTI

SEQ ID NO: 151862 - protein, 86 aa, Glycine max
  unsure (1)..(86): unsure at all Xaa locations
  Clone ID: PAT_MRT3847_108155C.1.pep
XPISPFAVFSIPHQIFVPLPEVGWEKLEKRSTFKNSYFFFHFLPRGGGGSHLPNPLTTFNKIQKKDPNSPLLCSLTSPPLNSLKNP

SEQ ID NO: 151863 - protein, 59 aa, Glycine max
  Clone ID: PAT_MRT3847_108156C.1.pep
HVLCIGLFLYHSVKMVSCWSFLGACNGSFFKLTQCFSWAPFRCLFCSKCYKKEHTALLL

SEQ ID NO: 151864 - protein, 96 aa, Glycine max
  unsure (1)..(96): unsure at all Xaa locations
  Clone ID: PAT_MRT3847_108157C.1.pep
AFFTGAPNLANFCLFLNRISIRSCGSISRAPLLCSLPLLVVEDEDDYDQVNSSVIRLPLFCDTVCFLIKAPSSMCSSSCSWGCXPHIMSFLFRCWW

SEQ ID NO: 151865 - protein, 81 aa, Glycine max
  Clone ID: PAT_MRT3847_108158C.1.pep
MAEEVTRVMVAVNESSMKGYPHPSISSKGAFEWTINKIVRNNVSAFNLLFLHVQVPDEDGSLSISLSFLFNCSLLLCQEIL

SEQ ID NO: 151866 - protein, 126 aa, Glycine max
  unsure (1)..(126): unsure at all Xaa locations
  Clone ID: PAT_MRT3847_108159C.1.pep
HPLVCCQRNRSLAPNNARCCTMCNLHMFDCGDFFPVWPXLQEHSAAGGGGFISIIGFDNVRREQCLGFNSFRCHQACKSLKNWPSICNHPYVFVELKVHSLMSSRDQISSSGIHGFRFRASMEINA

SEQ ID NO: 151867 - protein, 49 aa, Glycine max
  unsure (1)..(49): unsure at all Xaa locations
  Clone ID: PAT_MRT3847_10815C.1.pep
MKMDECEKTKLHDVNMEXETRRRKKGQKEGXDENEDMYGGEQRVECVKK

SEQ ID NO: 151868 - protein, 57 aa, Glycine max
  Clone ID: PAT_MRT3847_108160C.1.pep
NTSMSTLFIENHENNANLLQRYKSNLFMKHPSCILKNLARIWSCINTQDNFIQKTPL

SEQ ID NO: 151869 - protein, 71 aa, Glycine max
  unsure (1)..(71): unsure at all Xaa locations
  Clone ID: PAT_MRT3847_108161C.1.pep
PVWADADTWFERQQHEEEMKRIEAKNRATIPAGGEFHREPITXHRRGKKEEEIEIKVDPMAKVEPEVFKNK

SEQ ID NO: 151870 - protein, 70 aa, Glycine max
  Clone ID: PAT_MRT3847_108162C.1.pep
KKEVAFFKPGAKKKTPHFQGPTKNSPKFNPIPRGKLHGFIFNPGGSPQGFFRKTKLLPPKNSPGASNLTP

SEQ ID NO: 151871 - protein, 67 aa, Glycine max
  Clone ID: PAT_MRT3847_108163C.1.pep
MIRTKNFDSMKQRESKPNLLCLFMKAMQELTATLVKPYISALLIIPYVKLPVWTFILLYLLALSTSH

SEQ ID NO: 151872 - protein, 216 aa, Glycine max
  Clone ID: PAT_MRT3847_108164C.1.pep
MPQNPVSVLHNRRGIIVSSMENGTRPEFQLASDGVHQAQLAAQSFQKELEANNIPLANVRICYSPFSRTTHTANVVSTLLNLPFDGPHCKVIQDLRERYFGPSFELLSHDKYQVIWDIDEKDPFLGPEGGESVKDVACRLATAMATMESEFQGCAVLVVSHGDPLQILQTILHAANEHKEPTYNDLASILTAVQVAPILSQHRKHALLTGELRAVI

SEQ ID NO: 151873 - protein, 207 aa, Glycine max
  unsure (1)..(207): unsure at all Xaa locations
  Clone ID: PAT_MRT3847_108165C.1.pep
RVRISSFDVNGNIRASSSNPLQRDNDRETGQGDSLSDQRLFSCVTCGILCFSCVAIVQPREPAARYLMSADCSFFNDWVVGSGVSSNKFTIALEEATIAEPNMYTGWMKKNVQXWXHDVSVQSSREALNTESENGNTALALLASAYGNSSDSEEDQIADESHESNVINSASECLLSHTQDSYASPMTALDKEMILQRVPVVKMCIVI

SEQ ID NO: 151874 - protein, 82 aa, Glycine max
  unsure (1)..(82): unsure at all Xaa locations
  Clone ID: PAT_MRT3847_108166C.1.pep
YFFIRQVFNFVGIFVDHWSVLLGGHRVESRTFKLPXPCTTFSSSFTFQQSSLXPFYLYVIRCVQIGALASFYVVSVVCHQVM

SEQ ID NO: 151875 - protein, 120 aa, Glycine max
  unsure (1)..(120): unsure at all Xaa locations
  Clone ID: PAT_MRT3847_108167C.1.pep
HSLLLPWPYPWILFPNCATLPHFPLPYPLPSPSDLCRHLTFPLPPPPRLGYTPSDPPPKTTPRXHPLPPPSPPNPXPPSSPPSSKPPASSSPPLPYSSCAFTTHPPPSPXRSLPPPPSPT

SEQ ID NO: 151876 - protein, 145 aa, Glycine max
  unsure (1)..(145): unsure at all Xaa locations
  Clone ID: PAT_MRT3847_108168C.1.pep
MQTQRVNTLALFLLLLLSPPRPAASMPPRDPLRSSCAKARYPTLCFQTLSNFSNLATKPLDLAQAAIKVSLARTRTLSVYFKTLNATSSRFGKRQRVAVSDCVEQISDSVTQLINTLNELQHLRAGTFQWQMSNAQTWTSAXLTN

SEQ ID NO: 151877 - protein, 211 aa, Glycine max
  unsure (1)..(211): unsure at all Xaa locations
  Clone ID: PAT_MRT3847_108169C.1.pep
MASSLIAKRFLSSSLLSRSLLRPAASASHRSFNTNAMRQYDNRADDHSTDIDRHSERSFPSTARRDDIFXRCVGSIFSDSEFEPGSEHDGPGHGQSVPLRVARDRSWRWSXRGWDARETEDALHLRVDMPGLGKEDVKISVEQNTLIIKGEGAKEGDEEESARRYTSRIDLPDKLYKIDQIRAEMKNGVLKVVVPKMKEEERKDVISVKVE

SEQ ID NO: 151878 - protein, 162 aa, Glycine max
  Clone ID: PAT_MRT3847_10816C.1.pep
IIKQIMRQIITSLKKIHDIGIVHRDVKPANLVVTKRGQIKLIDFGAATDLRIGKNYVPNRTPLDRDYCPPELYVLPEETLSLPPEPIAAFLSPILWQLNSPDLFDMYSAGIVLLQMAIPTLRSPAALKNFNLEIRTCGYDLNKWRASTRMRSDFQILDSDSS

SEQ ID NO: 151879 - protein, 212 aa, Glycine max
  unsure (1)..(212): unsure at all Xaa locations
  Clone ID: PAT_MRT3847_108170C.1.pep
MASSLIAKRFLSSSLLSRSLLRPAASASHRSFNTNAMRQYDNRADDHSTDIDRHSERSFPSTARRDDIFXRXCVGSIFSDSEFEPGSEHDGPGHGQSVPLRVARDRSWRWSXRGWDARETEDALHLRVDMPGLGKEDVKISVEQNTLIIKGEGAKEGDEEESARRYTSRIDLPDKLYKIDQIRAEMKNGVLKVVVPKMKEEERKDVISVKVE

SEQ ID NO: 151880 - protein, 113 aa, Glycine max
  Clone ID: PAT_MRT3847_108171C.1.pep
INILTDEVTIQSNEFCFYSMFYRDEAILMFKGGLTQRSHDIKGPGSSSRRRSRTSGEEAKSKGDKLRCRAEALVKKQAACLFFSITLYSSSLCDQNQSSGSERAAEMRQFNSE

SEQ ID NO: 151881 - protein, 133 aa, Glycine max
  Clone ID: PAT_MRT3847_108172C.1.pep
SVTNYGKYTQFKTNPCSYFTVGKQKASTLSLTVLVVIEMFNALNALSEDSSILTIGLFANPWLLVAIFLCMALHCVILYIPFFGVIFGPVPLNSNDWLLVLMFSFPVFIVEEILKLVNRQRNRAEIDLEKKVI

SEQ ID NO: 151882 - protein, 51 aa, Glycine max
  Clone ID: PAT_MRT3847_108173C.1.pep
SSWLDLRAPFESGLEFAEPFTCIVKFLYEFVCILALLCFFKFPFPLFNIII

SEQ ID NO: 151883 - protein, 87 aa, Glycine max
  Clone ID: PAT_MRT3847_108174C.1.pep
PFLQTVLYGAGIERGANTGVPCVKKVGIRFSIFGHSWVTLVVNIGVAGGGYVHSVSIPGSMGGPQPMSRGWGHNWQSNSNLHGRSRS

SEQ ID NO: 151884 - protein, 54 aa, Glycine max
  unsure (1)..(54): unsure at all Xaa locations
  Clone ID: PAT_MRT3847_108175C.1.pep
XSDEVHXDXTDEXXTXXQHRIRLRFXTXKPLXXLYLSAXXXXARAEFRXXXRXX

SEQ ID NO: 151885 - protein, 51 aa, Glycine max
  unsure (1)..(51): unsure at all Xaa locations
  Clone ID: PAT_MRT3847_108176C.1.pep
SSNKFEYNRSDNNKTQRPEQCTXTFHQPIYGPQSPPLIAPNNDVKLDRQAI

SEQ ID NO: 151886 - protein, 67 aa, Glycine max
  Clone ID: PAT_MRT3847_108177C.1.pep
VRLKIMLEGPNIYNIKYHVHDHGVYIHACVDDAMDFRHDRDYDAYRMKLPCGSDLIDPRDCRAMLGQ

SEQ ID NO: 151887 - protein, 107 aa, Glycine max
  unsure (1)..(107): unsure at all Xaa locations
  Clone ID: PAT_MRT3847_108178C.1.pep
FIXFXFNPCNWVXFLFXLSSSLSHITCTHXITXXVLXXSLPKYFFPCFXNXNTNXXVLPPPKXLXFFXFGFXFALGRWLXRPXRLSXXXFWXVWFSPSCXFPXARGS

SEQ ID NO: 151888 - protein, 109 aa, Glycine max
  unsure (1)..(109): unsure at all Xaa locations
  Clone ID: PAT_MRT3847_108179C.1.pep
QCKQTEAXRXXXFVILXXXSAFGDLVFELCVCNFCSLLLYLFIWFLGGHLKVPPPPYIKLYYQCVTPKGFANPPPISSSAFPFLLGYSPSFFPFPPLGSSWVGSQKGLP

SEQ ID NO: 151889 - protein, 55 aa, Glycine max
  unsure (1)..(55): unsure at all Xaa locations
  Clone ID: PAT_MRT3847_10817C.1.pep
LWXXPXVXFFPXXXRSPPGXXXLXXSWXXXPXAFVSGFXVRQPMXAVCXXFPARX

SEQ ID NO: 151890 - protein, 306 aa, Glycine max
  unsure (1)..(306): unsure at all Xaa locations
  Clone ID: PAT_MRT3847_108180C.1.pep
GSIDSNWDRFRGMEDIRLNVLIRLLKNKFAENFLVDVIEWESWWYGLCTTLVLETQNALEHDVLEAFSXILSPVYSIGTFEFXVKHIDDKELNAIGSNLWKEESKCVEWLNTKQPSSVVYVNFGSIAVMTSEQLIEFAWGLANSNKNFLWVIRADLVAGENAVLPPEFVKQTENRGLLSSWCSQEQVLAHPSVGGFLTHSGWNSTLESMCGGVPMICWPFFAEQQTNCRFCCKDWGIGLEIEDVEREKIETLVRELMDGEKGKEMKKKALQWKELAESAAFRSVGSSFANLDNMVRDVLLGKSLKY

SEQ ID NO: 151891 - protein, 351 aa, Glycine max
  Clone ID: PAT_MRT3847_108181C.1.pep
MAEDWDLHAVVRGCSTVTSSSVSSSSSPSSSGFASSYFHPEAAVSSSSSSYSGFNIFKGEQGISQVLSLSAYPFEARSSIEELHELCKPFFSKSQPLTLQASSPLSSLSSYSSAPPKSVSTQEKQQQRSKQAHAVTTPRSKRRKNQLKKVCQVPVENLSSDIWAWRKYGQKPIKGSPYPRGYYRCSSSKGCLARKQVERNRSDPTMFIVTYTAEHNHPAPTHRNSLAGSTRQKPLVPQTATTTEEDSDKSKSLTKPTSPATSGAEEEAPTPSQGEKSESREEKEDVMDDEEEDEFGLSDMVLSDDFFESLDELSQLTAPSVVTGDCFSDPFSAIAIPSWVASGAATASGCR

SEQ ID NO: 151892 - protein, 117 aa, Glycine max
  Clone ID: PAT_MRT3847_108182C.1.pep
RWVLAINIEEIEDFEFKDARNSEELISVDKKSSVDGWHIIQFSGGKNAPTLFDLTLYWRSGSTHNSDSPLLKLRTDVNRLTPITERVLEKLPRWCSLFGKSTSPYTLAFLTNLPVKF

SEQ ID NO: 151893 - protein, 57 aa, Glycine max
  Clone ID: PAT_MRT3847_108183C.1.pep
LPVGAKAFTLTLLIQRTFEISEGLKLLDLLFIFLQCLAWACLKFRPQHTHFYNIPCF

SEQ ID NO: 151894 - protein, 61 aa, Glycine max
  Clone ID: PAT_MRT3847_108184C.1.pep
GVFNFTFRWMDTHSNVHFVRSFNLLLLIQHQFEVSNETTNMHLYYFLQIFIYKLFIFNILS

SEQ ID NO: 151895 - protein, 124 aa, Glycine max
  unsure (1)..(124): unsure at all Xaa locations
  Clone ID: PAT_MRT3847_108185C.1.pep
PGPGYSTYKIYXXKKKKKKKKKKKKKKKKKPSLGKLFVSSLLSTFTSHTNMSCHRRQASQVLPPEILAGNEDFTKSCDLTQQVADHVGTTKSATISTTNQPHQERQAPSPVTTAKKPPPPGKST

SEQ ID NO: 151896 - protein, 104 aa, Glycine max
  Clone ID: PAT_MRT3847_108186C.1.pep
RPLEPAGGNRTPGTRWHYASVETEILGLVLRSATGTPVADYLHDRIWDAIGTEADASWAIDGSGQEIAFCCFNATLRDYARLARLLAHDGAWEGRQLIPRQWLL

SEQ ID NO: 151897 - protein, 50 aa, Glycine max
  unsure (1)..(50): unsure at all Xaa locations
  Clone ID: PAT_MRT3847_108187C.1.pep
XNXKIQIXXLIKFINQSMKLKSXKLQSMKLTTNTSXQPITXFFFSQEIFI

SEQ ID NO: 151898 - protein, 90 aa, Glycine max
  Clone ID: PAT_MRT3847_108188C.1.pep
PAGPGSGNNARGTLDSGRPRPTKGWGKFGNRFIINPRAIHKNSYADNNQEGENQTRPHQRRKNRQDAHDVPDTTRIIRPLDHQKRQTPDS

SEQ ID NO: 151899 - protein, 78 aa, Glycine max
  Clone ID: PAT_MRT3847_108189C.1.pep
LNYWEPVQKRAQMLREPPMSAPHSIPHHGPRFSSGLSYKCIPPPPQDVVLSKNCMLQITNCSSKLGLVEGRISPWFSL

SEQ ID NO: 151900 - protein, 56 aa, Glycine max
  Clone ID: PAT_MRT3847_10818C.1.pep
ETCLMQDITNSDYLLSVIRAVIKKRQCLCEGMLYENEFWKCNGLKDVERKVIQIRI

SEQ ID NO: 151901 - protein, 67 aa, Glycine max
  Clone ID: PAT_MRT3847_108190C.1.pep
KDCFFFQITEETGCKTKQIKLKIQSFLGGGPIFLPNLGGRIKQSSWGQINGTANTCLSFFPLVKNGG

SEQ ID NO: 151902 - protein, 414 aa, Glycine max
  Clone ID: PAT_MRT3847_108191C.1.pep
LVLTDEVKHAVPYSWDPTSLASFIENYGTHIVTSATVGGRDVVYIRQHQSSSLSASDIETYVKDIGDDRFHNVKHFSGPGPLKYKEKDVTVIFRRRGGDDLEQSHTKWVETVKLAPDVINMNFTPIGSLLEGVPGIKLLAFFPEDLTLLFRPPAADPLDSRHFQLAETVEPAQDNLQRNVPASQSLHFGLLGLKYFVRAIDLYLEYKPPIEDLQYFLDFQITRVWAPEQNNLQRKEPLRPPRHSHLAIGAPKWHGPEEQDSRWFEPIKWKNFSHVSTAPIEYTETSIGDLSGVHIVTGAQLGVWDFGAKNVLHLKLLFSKVPGCTIRRSVWDHNPSAPVAQRPDGASSSLMKKTSEDKKEDSSIHIGKLAKIVDMTEMSKGPQDIPGHWLVTGAKLGVEKGKIVLRIKYSLLNY

SEQ ID NO: 151903 - protein, 55 aa, Glycine max
  Clone ID: PAT_MRT3847_108192C.1.pep
SPTINRLFPIICHHLLSIRHLKRTQLQIAHKPLFHGISQAECVITSIYRRRKMRQ

SEQ ID NO: 151904 - protein, 46 aa, Glycine max
  Clone ID: PAT_MRT3847_108193C.1.pep
PFLKTPISTIQRWWLRCLSILGREGVSCIRYQHQLVKISNHLISWF

SEQ ID NO: 151905 - protein, 66 aa, Glycine max
  Clone ID: PAT_MRT3847_108194C.1.pep
FSHSIFSLGSMYCAMLLTGWFTSVAETGKLVHVGWLSVWVRIITFWVTALLYLWSFVAPIMFLERE

SEQ ID NO: 151906 - protein, 54 aa, Glycine max
  Clone ID: PAT_MRT3847_108195C.1.pep
LSSLALKQSLLNKGYKKHRRKPIMNMFTCQIEYNQIISGLNCDASVGLWGYYDL

SEQ ID NO: 151907 - protein, 45 aa, Glycine max
  Clone ID: PAT_MRT3847_108196C.1.pep
YLPIKKMQTQKCNLLSPLTGSIPSSAHCSCPHVDATFHVLVPPSS

SEQ ID NO: 151908 - protein, 74 aa, Glycine max
  Clone ID: PAT_MRT3847_108197C.1.pep
PLVLYSLRMSWFLVILFLRLTFGLTHSEAGHDKKLSSAVACGTVYCDTCYQKDLSTGDHFILRAFALFDFFFLK

SEQ ID NO: 151909 - protein, 143 aa, Glycine max
  Clone ID: PAT_MRT3847_108198C.1.pep
AEELNSDAAKKILSIRNNENDIWRLDLHGLHATEAIQALQEHLYRIECQGFSKSSATSNGVKENGLGHSTLGSFNFMDREKLDTQAPLRLRPLALHVITGIGNHSRGLAALPAAVRSFLNENRYRFEEMRPGVITVWPKFRQN

SEQ ID NO: 151910 - protein, 338 aa, Glycine max
  Clone ID: PAT_MRT3847_108199C.1.pep
FGSSGKYCGATAQEDVNLAIKKLREQHLWAEHSLIDDIFSAVNNNIDKATALLETMDPAANFEESKVSSNPRSTTSDDTPCKDKTDDSLTSEKVEDDIPFDSNLVDNLQDNDKDLEDRNAPSGQKLSDVDYLRCKMKLLNSIPVEPEWEDDDIYISNRKDALRTMRSASRHSRAASSAFLRGDHFSAQHHSMKARAERHTAEELNSDAAKKILSVRNNENDIWKLDLHGLHATEAIQALQEHLYRIESQGFSKSSATSNGVKENGLGHSTLGSLNFMDREAPLRLRPLALHVITGVGNHSRGQAALPTAVRSFLNENRYRFEEMRPGVITVWPKFRQN

SEQ ID NO: 151911 - protein, 59 aa, Glycine max
  Clone ID: PAT_MRT3847_10819C.1.pep
MECSKNQGRADFGPSLDTLQNIFHKPLQKNDAIDHLPVIAFNFGLNLPIWNNTEQTDLI

SEQ ID NO: 151912 - protein, 57 aa, Glycine max
  Clone ID: PAT_MRT3847_1081C.1.pep
ATANASVQPSAHDSAGASRPLTGGVCRVVFQCQYWPLYTILAYVPLHAPFSLFYSLS

SEQ ID NO: 151913 - protein, 54 aa, Glycine max
  Clone ID: PAT_MRT3847_108200C.1.pep
LHLELSGACMKESRRFFYSFPWRSWAILDLNQRLRISRSKRCAHCLSLHSADSH

SEQ ID NO: 151914 - protein, 105 aa, Glycine max
  unsure (1)..(105): unsure at all Xaa locations
  Clone ID: PAT_MRT3847_108201C.1.pep
VSSCDHDGPFGTLWVXRLNSIGVMDSVPGIKALAINKAEKCQCVXTRKVEPGINVTGMEVAXCDGAPSMGSAFEAMMFSGQNTAHMGSGFIGTNQRLGFSSKLSN

SEQ ID NO: 151915 - protein, 117 aa, Glycine max
  Clone ID: PAT_MRT3847_108202C.1.pep
KRFQFVFFFLRSYWSVITCVICADVRYSKLKEDNLHGSELLKVYCLFNWRACPHSVILTKFLHSGELSGDEPTISENLALKVHSFRFISTFHFDFLFSVCVVEQNIILSVNFDVFWH

SEQ ID NO: 151916 - protein, 178 aa, Glycine max
  Clone ID: PAT_MRT3847_108203C.1.pep
MVAMRFHQYQVVGRALPTESDEHPKIYRMKLWATNEVRAKSKFWYFLRKLKKVKKSNGQVLAINEIFERNPTKIKNHGIWLRYQSRTGYHNMYKEYRDTTLNGAVEHMYTEMASRHRVRHPCIQIIKTATIPAKLCKRESTKQFHNSKIKFPLVFKKVRPPTRKLKTTYKASRPNLFM

SEQ ID NO: 151917 - protein, 88 aa, Glycine max
  Clone ID: PAT_MRT3847_108204C.1.pep
MVKPFKVLHGGVSALVAESLASIGAHMASGYQRVAGIQLSINHLKSAVLGDLVYAEAIPLNVGKTIQVFQFFLSFFLSFTSSSISPHS

SEQ ID NO: 151918 - protein, 178 aa, Glycine max
  Clone ID: PAT_MRT3847_108205C.1.pep
MVAMRFHQYQVVGRALPTESDEHPKIYRMKLWATNEVRAKSKFWYFLRKLKKVKKSNGQVLAINEIFEKNPTKIKNYGIWLRYQSRTGYHNMYKEYRDTTLNGAVEHMYTEMASRHRVRHPCIQIIKTATIPAKLCKRESTKQFHNSKIKFPLVFKKIRPPTRKLKTTYKASRPNLFM

SEQ ID NO: 151919 - protein, 211 aa, Glycine max
  unsure (1)..(211): unsure at all Xaa locations
  Clone ID: PAT_MRT3847_108206C.1.pep
MASGRNLKNAVIAFLVPLPSIFFYLSFLNHYDSAKSPSFWSTLWSWCYHHPLLLANALFFLNVNVLFWLIGLIQSSHWMIDPYWTVIPVMLVHYYATHPLAPYDLWRSKIVILLTWVWSVRLTHNYFRRERWQWGAREDWRFTEMSQQYGKQWWWVSFFAVYVSQQMFLIALSLPLYAVHTVNQPLNMWDLVATVVCLCGIXIAYFADTQL

SEQ ID NO: 151920 - protein, 116 aa, Glycine max
  unsure (1)..(116): unsure at all Xaa locations
  Clone ID: PAT_MRT3847_108207C.1.pep
EMLTDSLASPDCNIFGAMLLVDTYHTNPENADRSILDAPFRGGRPIRAVALSNTIVQIEPNMNSRFQLLRTNYHGEXVQGKDLAMAKDNVACAAEGLTSSDTPTPLLESGLQKDRR

SEQ ID NO: 151921 - protein, 47 aa, Glycine max
  Clone ID: PAT_MRT3847_108208C.1.pep
GVKFTKYNHIYRSQLLVKKSKNKNKRLAQKQGFNNHYLTPLFWPQCV

SEQ ID NO: 151922 - protein, 96 aa, Glycine max
  Clone ID: PAT_MRT3847_108209C.1.pep
GPLLGSAQLVEPVSSFPTGLSECVETLTCPRSRRTSIVCDQCLWFTISVLSHLCVLLLSSQDFTAQALKFQIHAAKKPYSVSIVCAIFGSNPELES

SEQ ID NO: 151923 - protein, 53 aa, Glycine max
  Clone ID: PAT_MRT3847_10820C.1.pep
LQDPFTWVIKDPLYFVLIPLGMLYSQVKVGCSFPPCPKVPLLQSVYNMSLHGH

SEQ ID NO: 151924 - protein, 279 aa, Glycine max
  Clone ID: PAT_MRT3847_108210C.1.pep
MGSTVEYHIQHIINIPEQIEPALWPECCIYKVPTSLLKVKEVAYTPLLISIGPVHHNKEQLMEMQEQKHRYFHFFWARLSLVNKLDLVQYKAFLELEERNLRCCYQKKFPEISKEQFVEMMLLDAVFIMELFLREAKKWEHKDDYLMTQGCVSKSIRCDLMLLENQLPMVVLEKLYDRVVPSNAKKHTRFINLAHEYFRSYYPHQQSSENKFELRNWEKSLHFTDLIRNAYLPKKLSSQKNYPQKECVLRTATKLNESGISFDKVDERCLLDVKFEKKR

SEQ ID NO: 151925 - protein, 221 aa, Glycine max
  unsure (1)..(221): unsure at all Xaa locations
  Clone ID: PAT_MRT3847_108211C.1.pep
MEKAESSASTSEPDSDENHHRHPTNHHINPPSSLTPLEFASLIPSVAEHHSYLVGSGQCSSLLAQRVQAPPDAVWSVVRRFDKPQTYKHFIKSCAVKEPFHMAVGVTRDVNVISGLPAATSTERLDLLDDIRCVTGFSIIGGEHRLRNYRSVTTVHSFDDDADDGKIYTVVLESYVVDVPDGNTEEDTRLFADTVXKLNLQKLASVTEGTNGDGDGKPHSR

SEQ ID NO: 151926 - protein, 71 aa, Glycine max
  Clone ID: PAT_MRT3847_108212C.1.pep
VEIERANANAGCFVFVLLLFFFYPQILLVNIINFCLTKNFQLMIFTLYLSCFCYFIGCWRERVRDKTFKLS

SEQ ID NO: 151927 - protein, 108 aa, Glycine max
  unsure (1)..(108): unsure at all Xaa locations
  Clone ID: PAT_MRT3847_108213C.1.pep
THAVRLRQTFDVKCLLYVERVVCTEPQVDGAXTVGFDIFGAGMHSLDDYPVSEDAQDPVEVGAEWGHEVDPXYDEALAAMVTGVVGLAFVDGVTPAGSVGDPHVLQRK

SEQ ID NO: 151928 - protein, 38 aa, Glycine max
  Clone ID: PAT_MRT3847_108214C.1.pep
GAHSYKRAHSSIISPYTIFTAPSFYNFHDLLITLSLPN

SEQ ID NO: 151929 - protein, 119 aa, Glycine max
  Clone ID: PAT_MRT3847_108215C.1.pep
RLRQSRLMWLFSLLTVYELVPFSVLVLRRGAFVFRKLNGLHVSKWAYAFDDLISLYLSRKQSAAAVPSEFFFLPPPPPPPPSPPSSSFRDSSSPSPFFLPPPPRPTSTQDGHAHYSSER

SEQ ID NO: 151930 - protein, 120 aa, Glycine max
  unsure (1)..(120): unsure at all Xaa locations
  Clone ID: PAT_MRT3847_108216C.1.pep
KXLXLXLIXXXNXRXSLTXPPXXHDXFXXXDDEGXVMKXIXCLLIXXXIXLXXRDCXXISQXHTXCSXXSXRNAXXKIFXPXXXFFXPWXXNXXAXXFXGXXKNXXFXKXXXXXFFFFFX

SEQ ID NO: 151931 - protein, 54 aa, Glycine max
  Clone ID: PAT_MRT3847_108217C.1.pep
KSPSPIFKLLGPRVYFYPNLENWEKGLTKRAHQPPGIWGLNAKLKLELWLKEIY

SEQ ID NO: 151932 - protein, 65 aa, Glycine max
  unsure (1)..(65): unsure at all Xaa locations
  Clone ID: PAT_MRT3847_108218C.1.pep
TLPPTLPPILIPIPXKPKAKCFPSSPHSSLLTRXPSKLTLYPLPTNGFQRVFQSQELSTFRRNFP

SEQ ID NO: 151933 - protein, 177 aa, Glycine max
  Clone ID: PAT_MRT3847_108219C.1.pep
MSASTVVHNFCSVACCISNCGHNRTLVPTHHQFHSPNSLLRLKKQTFLTNIYFKSSRTQKPRSSFVVSAAQSNFVKVLQNAWKVGRDGIEAGTNLVPNSVPRPIARISVTIVALSVTLFVLKAFLFTAFFILATIGLAYFAYLAFNKDQGPSGNGGTTSTPMDDPVEEARKIMEKYK

SEQ ID NO: 151934 - protein, 57 aa, Glycine max
  unsure (1)..(57): unsure at all Xaa locations
  Clone ID: PAT_MRT3847_10821C.1.pep
LSVLEFRASLIWRLLLIVSLLSPHIKGDGSGYVFFVDSSVINSSAXDPPTMXNIHCC

SEQ ID NO: 151935 - protein, 46 aa, Glycine max
  Clone ID: PAT_MRT3847_108220C.1.pep
FSIGPSNVIHDSVSRHYSSRIVIYVIRKIKTKKPLLDPRSKDLQSF

SEQ ID NO: 151936 - protein, 44 aa, Glycine max
  unsure (1)..(44): unsure at all Xaa locations
  Clone ID: PAT_MRT3847_108221C.1.pep
FYAWADPWGFCDVLKHKNGEQGKRRXDCGDGEQMTWTAGARDEE

SEQ ID NO: 151937 - protein, 41 aa, Glycine max
  Clone ID: PAT_MRT3847_108222C.1.pep
SQTSKRHRAKSHLTLFIIVIGRAQQIMDTVSRNKNQRTVTC

SEQ ID NO: 151938 - protein, 220 aa, Glycine max
  Clone ID: PAT_MRT3847_108223C.1.pep
NTYWGRRSIMGFVAHYPDSELRTAKNGQFVKVSGVVTCGNVPLESSFQKVPRCVYTSTSLYEYRGWDSKAANPAHRRLTWGLRLLERRVVDFYISDFQSGLRALVKTGHGARVTPYVDDSVLINVNPTKEELSPEFLRWLGERNLSSDDRIMRLEEGYIKEGSTVSVMGVVQRNENVLMIVPPPDPITTGCQWTKCIFPSSLEGIVLRCEDASKNDVIPV

SEQ ID NO: 151939 - protein, 67 aa, Glycine max
  Clone ID: PAT_MRT3847_108224C.1.pep
KGNQQRIGEALKLGGLNKNVVGGVDKLNTLKQSGKGVLRPGIKNPILGTKGARGGGRLQTMCQEQGS

SEQ ID NO: 151940 - protein, 309 aa, Glycine max
  Clone ID: PAT_MRT3847_108225C.1.pep
TSFQAAFADNYRMYSRSHFVKGLEILILLIVYEVYGSSYRSSHLYLFITISMWFLATSWLFGPLLFNPSGFDWQKTVDDWTDWKRWMGNRGGIGISSDKSWESWWDEENEHLKYSNLRGKIIEIVLAFRFFMYQYGIVYHMDITHHNKDLLVFGLSWAVLVIILIVLKMVSMGRRRFGTDFQLMFRILKALLFLGFLSVMTVLFVVCGLTIADLFAAIIAFMPSGWAIILIAQACKVCLKGAKLWDSVKELSRAYEYVMGLIIFLPTAILSWFPFVSEFQTRLLFNQAFSRGLQISMILAGKKDTYKSD

SEQ ID NO: 151941 - protein, 347 aa, Glycine max
  unsure (1)..(347): unsure at all Xaa locations
  Clone ID: PAT_MRT3847_108226C.1.pep
VFNSGPSSSTYAGSIQATQRTAHGQFPAGSSRNTRDNVRIVHSASAPNLMENNSVEISISDFPPVSAAQVSKLPASSQSKLNVENFQSANKSLVEKIRGALDFDEERYSIFKDISAQYRQGTIDTGTYVDYVQQFGLSHLVLELARLCPDTQKQKELIARXSSLQRDAFPEINFVRGTSSTHSKDSNVNKKGKGKSVDSRGSNSKEKLANNFLSTVHQLQANYKSSEEKAEVLSRGDYRSDGGKLKIEQRIDMNSGSQPTMKLGGKTETSNDSLSNQSKDDGGGGNKQRKKTSKFLRVRLGDGSVSALLDQSDPGTTDGSEGNKDDSGGGPPVRGVWRKGGGNKLFS

SEQ ID NO: 151942 - protein, 76 aa, Glycine max
  Clone ID: PAT_MRT3847_108227C.1.pep
ACKVCLKEAKLWDSVKELSRAYEYVMGLIIFLPTAILSWFPFVSEFQTRLLFNQAFSRGLQISMILAGKKDTYKSD

SEQ ID NO: 151943 - protein, 61 aa, Glycine max
  Clone ID: PAT_MRT3847_108228C.1.pep
YSLGFFIGLERKPQPRRRPFFHSFISRGLGSNPNENPSRLSKQDPGGKELRKRAVLPQGHT

SEQ ID NO: 151944 - protein, 51 aa, Glycine max
  unsure (1)..(51): unsure at all Xaa locations
  Clone ID: PAT_MRT3847_108229C.1.pep
AQRGVCLKVSVYDAKITLTSSVSSRICRVGGLILNCVRYFSVFSXXXFFFF

SEQ ID NO: 151945 - protein, 110 aa, Glycine max
  unsure (1)..(110): unsure at all Xaa locations
  Clone ID: PAT_MRT3847_10822C.1.pep
ARFLGNTYQLQHKRFQSILIQRDSLRIQDCRPCCYLISVDKEYRLEGXMPRSRPLPQHPQRKPYQPRESEEHHYDQPSGLPIALANLRRKDYXSCREEHQWPRKEDIREQ

SEQ ID NO: 151946 - protein, 73 aa, Glycine max
  Clone ID: PAT_MRT3847_108230C.1.pep
WGPCRQWLQPRVPSRITGLFDPAFIYSFPRIKAKAPFKLVLFFIPWEYIQLVFLKFRYYLGDIWVLHRGETQL

SEQ ID NO: 151947 - protein, 237 aa, Glycine max
  Clone ID: PAT_MRT3847_108231C.1.pep
MDSDFWTSRLAAAKRQYTLQHHHPNSHLDRLGIDDFDVEEEVRPDFPCPYCYEDFDIASLSSHLEDEHSCESRVTICPICSDKVARNMLSHITLQHGHLLKLQRRRRLRRVAIPNSQTLSLLGRDLREAHLQVLLGGGGGGGYRSNSVAAAVSNAAATDPFLSSFILNFPACEAEEISKSVVTSAENSSAKNATPEHIWKSSFGPSLSTEEREKRMRQAAGRSGFVQELFLSTLLGE

SEQ ID NO: 151948 - protein, 74 aa, Glycine max
  Clone ID: PAT_MRT3847_108232C.1.pep
LKVYSLYLITCSQVAASLLHRFRSCKLSEKVVVSLNDEIVSPLLCMTQLWTIASLWSNPKSRSVSRLQAQPLIG

SEQ ID NO: 151949 - protein, 212 aa, Glycine max
  Clone ID: PAT_MRT3847_108233C.1.pep
PGRRHAGRGSKSYGLGKERRVCVQKMKKKGDTDNGFGSLPQFTFSGEAKWVLGDLFAHYPPGDGNSWEMVGENSDTATDRTKQRPDDIFSRPSMTKAEIARRLEALTSRMNNGSNLKQIIEGRSKLPIVSYKDSITSTVESHQVVLISGETGCGKTTQVPQFILDHMWGKGEVCKIVCTQPRRISATSVSERIASERGETIGENVGYKIPVE

SEQ ID NO: 151950 - protein, 43 aa, Glycine max
  Clone ID: PAT_MRT3847_108234C.1.pep
SLQRDHTSVISERALNLPPTSVSSDLATMQLGIRCCHLTLVLS

SEQ ID NO: 151951 - protein, 54 aa, Glycine max
  Clone ID: PAT_MRT3847_108235C.1.pep
KPMFQSCKITRIKTNANRCGLGQYSSEHFGVKPNLSRDRIPHRCIIYVYLHKKV

SEQ ID NO: 151952 - protein, 74 aa, Glycine max
  Clone ID: PAT_MRT3847_108236C.1.pep
SYDIHFSGLFLHSNAAISCEPYSVDRIHLGPLRLVFDQETLTNPKCVWTCLISRASCCSTTLREPHHILHRSIP

SEQ ID NO: 151953 - protein, 114 aa, Glycine max
  unsure (1)..(114): unsure at all Xaa locations
  Clone ID: PAT_MRT3847_108237C.1.pep
RXXXGXXXGXXGXXXRSXXAAXXRXRRGXXRXXMRXAXXXLXXXXRXXXSEXXEXXXXXGXXRXXXXXXXXXPXXXXEXXRXXXXXXAXXPXAXXSVXGXPXXXXXXXXXXXXX

SEQ ID NO: 151954 - protein, 51 aa, Glycine max
  Clone ID: PAT_MRT3847_108238C.1.pep
LEHHLNLIHDPNILFHQHSPPQPILLYYKLLVTHITPPLILISLPEPKFFK

SEQ ID NO: 151955 - protein, 104 aa, Glycine max
  Clone ID: PAT_MRT3847_108239C.1.pep
LWWGRGPLLLGMREFLVGFPTGLRSIISSGIRFINLCQMGSLVLFFGLEIGVANALLLVLICSPITYWSILYVGDFLQMLSSLFFDGGILPGLLTLSPSIYPSI

SEQ ID NO: 151956 - protein, 329 aa, Glycine max
  Clone ID: PAT_MRT3847_10823C.1.pep
MAEEAIDLSPLLKLYKDGHVERLIGCDVVPPGHDPATNVESKDIVISKDNDVSARIYIPKLTDQTQKLPLFLYFHGGGFCIETPSSSTYHKFLNSIVSKANVIGVSVHYRRAPEHPVPIAHEDSWTSLKWVASHFNGNGPEEWLNRHVDFGKVFFGGDSAGANIAHHMAIRVGSHGLPGADPIQGSEFLLERPCAGVNFKGMVLVHPYFWGVERVGSEARKPEHVALVENLWRFTCPTTVGSDDPLMNPEKDPNLGKLACERVMVFVAENDLLKDRGWYYKELLEKCGWNGVVEVIEAKGEGHVFHLLNPDCDNAVSLLDRVASFINHS

SEQ ID NO: 151957 - protein, 105 aa, Glycine max
  Clone ID: PAT_MRT3847_108240C.1.pep
TLTRTTTLSIISSQWVKSDDGEASAELKGNELNNGRLAMISMYGFSDQAIVTCKGPLDNLADHLANPDNNNAWAYATNYVHLKRASNKRMTCGLLRGFRIAYRED

SEQ ID NO: 151958 - protein, 43 aa, Glycine max
  Clone ID: PAT_MRT3847_108241C.1.pep
NFVVFVCGIVDPLHHAHGFMHFLWTCTCHLELEKNVFVEPDLC

SEQ ID NO: 151959 - protein, 108 aa, Glycine max
  Clone ID: PAT_MRT3847_108242C.1.pep
TKNPVWGFLEKGGCKWKKFNNNSIKTKGGPLPQETVKRAGWGKKMENSPPSLGHGFFFNQNRSPLIFSPPHFYPRAFYFGGEKEKDLPPPMKGFHLVGLQKKGPIAFK

SEQ ID NO: 151960 - protein, 71 aa, Glycine max
  Clone ID: PAT_MRT3847_108243C.1.pep
VNWEKNKRYHGYFFNMKLYDENLDVIINMLSMSKTIQMFPRGTKQTLYLNDNRTTEDGYSTHKDCEKDDDS

SEQ ID NO: 151961 - protein, 76 aa, Glycine max
  Clone ID: PAT_MRT3847_108244C.1.pep
VWLVLANSMLVEQPIRHGNQKLFKEMVFLELFAQVILLFSHIWNFLGKCRGEGFILCFINLSKMPYFESPITIIIG

SEQ ID NO: 151962 - protein, 42 aa, Glycine max
  Clone ID: PAT_MRT3847_108245C.1.pep
GLHCLSMVPTLQRHDSTVTLNLSIPPWQPLSVGRDTKQAWRY

SEQ ID NO: 151963 - protein, 229 aa, Glycine max
  unsure (1)..(229): unsure at all Xaa locations
  Clone ID: PAT_MRT3847_108246C.1.pep
APDFDTLKVFGSLVFASTFQSPXNQVDLRARXCVFLGYKSGVKGVVLFDLLNNSIFLSRDVTXHEHIFPYQSSSPKTPWEYHSISPTPNDSDITLDSDISLDINAEQSPSPPHSSLSPNISNDTVISDTSTSTPPPKDHNDSPLLHSKPIRQRRAPLHLSDYVCHNTSPTSHESLTSGTKSKYPLSSFHSLTLLSPSHKAFSMSITHCTEPQSYEEASKHEHWVTAGRV

SEQ ID NO: 151964 - protein, 99 aa, Glycine max
  Clone ID: PAT_MRT3847_108247C.1.pep
ISSFIIRKWPTNTYNVGAYLIFHRPLDSQFPDPTLANTGGRLVLYLPHFNLKISKNSGCLPEVINFCPTLKERQIPVWKQLNLRKFFIFKIQGDFLVLT

SEQ ID NO: 151965 - protein, 63 aa, Glycine max
  Clone ID: PAT_MRT3847_108248C.1.pep
MGRRLVVGGNWKCNGTTEEVKKIVTTLNEAKVPGEDVVEVVVSRLLCSSFCRGLLRLDFHVSA

SEQ ID NO: 151966 - protein, 198 aa, Glycine max
  Clone ID: PAT_MRT3847_108249C.1.pep
MEPAKIDWKRLEWSFVEDKLYEHINAPKWVDFLSLDHSLNDHADEAWFCKPDCKHPKTAEDFLRSKTPPSKKGFSPGYVSENLPSGDKIRRDAKIKRRVPALFNQESENQNPNLFTPPPTTKVNPLKEAIKSTEEKKKVVDNDDTFVDHKAPSLRSTLSTKNLFAGRPILNQITEFCNELKKLAIRAKERENAENLIP

SEQ ID NO: 151967 - protein, 65 aa, Glycine max
  Clone ID: PAT_MRT3847_10824C.1.pep
MSRGGAVAAAKGKKKGATFTIDCAKPVEDKIMDIASLEKFLQERIKVFEVLDEEVLEETQCARLA

SEQ ID NO: 151968 - protein, 155 aa, Glycine max
  Clone ID: PAT_MRT3847_108250C.1.pep
MEPAKIDWKRLEWSFVEDELYEHINAPKWVDFLSLDHSLDDHADEAWFCKPDCKHPKTAEDFLRSATPSKKGFSPGYVSENLPSGDKIRRDVKIKRRVPAMSSASPQADKFRFNQESENQNPNLFTPPPTKEVNPVKESIKSSEEKKKLLIMMTH

SEQ ID NO: 151969 - protein, 77 aa, Glycine max
  unsure (1)..(77): unsure at all Xaa locations
  Clone ID: PAT_MRT3847_108251C.1.pep
KXNCMFNFKRPPQHKXKPQTIKPTSTFPKTPSTTSQHIHHQHLLLLNQQYPIHCPTKPLTLIHHITTKPTIPSKNPS

SEQ ID NO: 151970 - protein, 292 aa, Glycine max
  Clone ID: PAT_MRT3847_108252C.1.pep
TVRMCATQATSRATSVILRQSMHLGVLALIPHAVATQTLFVVYYKPRTSQFIIGVNKYLEAMDKKFSVGMRFKMRFEGDDSAETDKRFSGTIVGVEDISPHWVNSKWRSLKVQWDEPAAVPRPDRVSPWEIEPFVASASTPSVQPTMVKTKRPRPPSETPDVDTTSVASVFWDAGLQQADMAQKNTEGSWLSSPHSSCPSHLFQDVTDDSKIVSAWPVSKPHSSKLNNDHVLDQVDKESKVETATSYRLFGIDLIDPSRNSPSVEKASAQAVNVPKVTTEGCTITLSHSVIW

SEQ ID NO: 151971 - protein, 90 aa, Glycine max
  Clone ID: PAT_MRT3847_108253C.1.pep
ECVTTLLPSPSQCPFLIIFILLLRRRTSHYRAQAPHPQVVKMSTMPMYQQQQEQPPPMSVTQHSPHESIGPVIGVLVVVSVLFVKAFLLL

SEQ ID NO: 151972 - protein, 290 aa, Glycine max
  Clone ID: PAT_MRT3847_108254C.1.pep
MAQKNVLAESKRNDSTGTWHHMQTDMNSKSNSGNAMLRNQTEGSWLSSPHSSCPSHLFQDATDDSKSVSAWPVSKPHSSRLNNDHVLDQVDKESKVETATSYRLFGIDLIDHSRNSPSVEKASAQAGNAPKVTTEGCTSTLTRTDAGHLSDVPMASSKERKQEQQQVSPKETQSKQICRSRTKVQMQGVAVGRAVDLTMLDGYDQLINELEEMFDIKAQLQHRNKWEIVFTDDEGDMMLVGDDPWPEFCNMVRRIFICSSQDVKKMSCGSKLPISSVEDGTVISSDTTET

SEQ ID NO: 151973 - protein, 77 aa, Glycine max
  Clone ID: PAT_MRT3847_108255C.1.pep
GLTTDNGASTVTRRMNCYYTHLHFDVRTCVCLPSYQRFTLRLSIPPLCRTVFAMSTTTPAIDILDQFAINSLLSRSS

SEQ ID NO: 151974 - protein, 142 aa, Glycine max
  unsure (1)..(142): unsure at all Xaa locations
  Clone ID: PAT_MRT3847_108256C.1.pep
SALGLSXCLXXXSXSPGSLSPVALGXSGWLXXLLVLFFFSSSFALPXXGVAXPXFLXAPLGXXXXLXXMXXXVPPSGWXFRXXLXPLLPXXVCCLSAXSLXXLSFFWXXCXFXPRPLXXVSXXPPPPPRAAAPQKPCFRSRA

SEQ ID NO: 151975 - protein, 381 aa, Glycine max
  unsure (1)..(381): unsure at all Xaa locations
  Clone ID: PAT_MRT3847_108257C.1.pep
MAVCIAAYEATGSQVQLSLERGLPAMIGNFISRQLPYPSLSYDMVHCAQCGIMWXKKNGMFLIEVDRVLKPGGYFVLTSPTSRPQGSSREKKRIMANPMEGLTQQLCWTLLAQQDETFIWQKTADIDCYASRKQRTIXVCKGDDTQSYYRPLLPCISGTSSKRWIAIQNRSSESELGSAELKIHGKYFQPEEFYEDFQYWRSAVNNYWSLLTPLIFSDHPKRPGDEDPLPPYNMIRNVMDMSANFGGLNAALLEEXKTVWVMNVVPARASNALPLILDRGFAGVTHDWCEPFPTYPRTYDMLHAYGLISHLSSERCSMVDLFLEMDRILRPEGWVILSDTIGAIEMARMLAAQVRWDARIIDLQNGSDQRLLVCQKPFVKK

SEQ ID NO: 151976 - protein, 260 aa, Glycine max
  Clone ID: PAT_MRT3847_108258C.1.pep
MHPWEGSSPKHSQTKAMTNMESTTPILTPLVLLLLFSLAKGLHNPKCDAAYQHDHDGSTLQVFHVFSPCSPFRPSKPMSWEESVLQLQAKDQARMQYLSNLVARRSIVPIASGRQITQSPTYIVRAKFGTPAQTLLLAMDTSNDAAWVPCTACVGCSTTTPFAPPKSTTFKKVGCGASQCKQVRNPTCDGSACAFNFTYGTSSVAASLVQDTVTLATDPVPAYTFWCIQKATGSSVPPQGLLGPGRGPLSLLAQPKALPI

SEQ ID NO: 151977 - protein, 208 aa, Glycine max
  Clone ID: PAT_MRT3847_108259C.1.pep
MKMIYIFFLLALLSSTSHASVNDFCVANLKGPDSPSGYQCKPPNTVTVNDFVLSGFVAGNTTNAFNAALTPAFVTELPGVNGLGISAARLDLAKGGSVPMHSHPGASEILIMVKGQITAGILTPGAVYEKTLKPGDVMVFPQGLLHFQANSGKGKATAFVAFSSANPGAQLLDLLLFGNSLPSDLVAQTTFLDVAQVKKLKARFGGRG

SEQ ID NO: 151978 - protein, 80 aa, Glycine max
  Clone ID: PAT_MRT3847_10825C.1.pep
RGNFYIFALLNWRGWTVAPPPLRIGKVFFFFCSPMGLFKSIVCLIKPFGTSKGYVFGWTTGRGNFPISPLKRKLRVFSLP

SEQ ID NO: 151979 - protein, 50 aa, Glycine max
  Clone ID: PAT_MRT3847_108260C.1.pep
TYFSKIVVPDSLTVGSSSNFVWRFLRQCDRVLGISKKKKKKKKKKKKKGG

SEQ ID NO: 151980 - protein, 69 aa, Glycine max
  Clone ID: PAT_MRT3847_108261C.1.pep
RGRKWKRNGLKQINQSSRNEFSLQWLLCFPLLFGFFVCKETNVSLPFYMLHQLIGQLELSCMLSVTLML

SEQ ID NO: 151981 - protein, 67 aa, Glycine max
  unsure (1)..(67): unsure at all Xaa locations
  Clone ID: PAT_MRT3847_108262C.1.pep
TRXCXXAIAXXFKHEAQFXKRRXGQXGSFVGAMAIADFVKTTLGPNXWIXFCXQQXXXVKXCHXXWS

SEQ ID NO: 151982 - protein, 68 aa, Glycine max
  unsure (1)..(68): unsure at all Xaa locations
  Clone ID: PAT_MRT3847_108263C.1.pep
GTASQFIEIITFLEKKKVKKADLLKGVSVVRSKKVKNXLILDGTYIELVGRACALINQKWHVKKKEIS

SEQ ID NO: 151983 - protein, 89 aa, Glycine max
  unsure (1)..(89): unsure at all Xaa locations
  Clone ID: PAT_MRT3847_108264C.1.pep
MLNLTSFFFSHTTQGGHVRHELYYLLKNEKDVHFSFXXVFKRVXVRKATEGMRSSKFCLNIAGDTPSSNRLFDAIASHCVPVIISDDIE

SEQ ID NO: 151984 - protein, 69 aa, Glycine max
  Clone ID: PAT_MRT3847_108265C.1.pep
NISTWVRQVWGRFPSGALAELVAINLLFYCIEFKGCQPVSRVTDSKGKTLIYIQCIIYCWQTFHFCIVF

SEQ ID NO: 151985 - protein, 121 aa, Glycine max
  unsure (1)..(121): unsure at all Xaa locations
  Clone ID: PAT_MRT3847_108266C.1.pep
KPTHXFFFLEPKTATAQPWLALPXSQTQLCGSLTERPRFRTPADLFRPPTSLFRPPHGSLFRSVKLLKGYPVXXVVDEEGTXSRSTXXSXSHPKMAPCQEPLVLPRRIFNSGKNEQXXLKL

SEQ ID NO: 151986 - protein, 60 aa, Glycine max
  unsure (1)..(60): unsure at all Xaa locations
  Clone ID: PAT_MRT3847_108267C.1.pep
TPITSTSSATPTLSPPPPTTATPTCAXRAPPLPPSASSXAASPSLSPTPHPSPRSSPSPS

SEQ ID NO: 151987 - protein, 63 aa, Glycine max
  Clone ID: PAT_MRT3847_108268C.1.pep
FRRLLMAKIFATCYWGKKLFEQMVRFTGMTHVQMVHRFYGIRINISHELHLLKLPHLKPPNSI

SEQ ID NO: 151988 - protein, 59 aa, Glycine max
  Clone ID: PAT_MRT3847_108269C.1.pep
GIVVSYVSFITCLNLNITQGRPIALRFCFQIIVNFAKLLNYEPVIVDIVKAFGIWACNL

SEQ ID NO: 151989 - protein, 124 aa, Glycine max
  Clone ID: PAT_MRT3847_10826C.1.pep
MSRGGAAAAKGKKKGATFTIDCAKPVEDKIMDIASLEKFLQERIKVGGKAGALGDSVTVTREKTKIILTSDCNFSKRYLKYLTKKYLKKHNVRDWLRVVVSNKDRSVYELRYFNIAENEGEEED

SEQ ID NO: 151990 - protein, 83 aa, Glycine max
  Clone ID: PAT_MRT3847_108270C.1.pep
TTIACYKQATTFLQINFFFQKEKKGKKKSPNRLTRFLLFKTKRKPNQIFFKLFIFWQTLIKAFFFFLLNVCQIWLGPSPRWPL

SEQ ID NO: 151991 - protein, 199 aa, Glycine max
  Clone ID: PAT_MRT3847_108271C.1.pep
ARGSHVSIITLSGKPIEGTEPNGNGAAICPLQGYLFGTAIELSETTAAAAKKEHRTSLGELFQRSKSAEENFSAKCEKEDKRAEKEVDKSAMNLMKEKLKKRMLHAYSKNSTSINGGPIDSASAETKLNKILHMFRKKVHPESSTAAQKSAKHHKNQKKKKTINDGGYNKSDLVHPEEDSSVNREYWIKTDADYLVLEL

SEQ ID NO: 151992 - protein, 79 aa, Glycine max
  Clone ID: PAT_MRT3847_108272C.1.pep
FSSGQRFKSMATKINIGSTNKILRRWKEGYVRLEPLKGSPLIRILFLIFFSYFFFFFCLFFFYFFLFLKVIFFFFSFFF

SEQ ID NO: 151993 - protein, 133 aa, Glycine max
  unsure (1)..(133): unsure at all Xaa locations
  Clone ID: PAT_MRT3847_108273C.1.pep
KPGRAQTGKKKPKAPEITPSPKPQYREPEKRVRTPKPPAGKKAPPGPESFPRAPKTPKGGPPRGAKDPFQGPAXHGNFPRPLIGPPPXPAGGFPPPKKWPKPGTPGKPVGAHENLGAGPPSGKTPGVLRGAPL

SEQ ID NO: 151994 - protein, 112 aa, Glycine max
  unsure (1)..(112): unsure at all Xaa locations
  Clone ID: PAT_MRT3847_108274C.1.pep
VARSPPYVAPDFASWALQDATSPIIEELTNFHDHTLIIVFLISSLVLYIISLILTTKLTHTSTIDAQEVETIXTILPAVXILILIALPSLRVLYIIDELNNPVLPVKTIGHQ

SEQ ID NO: 151995 - protein, 124 aa, Glycine max
  unsure (1)..(124): unsure at all Xaa locations
  Clone ID: PAT_MRT3847_108275C.1.pep
YDDIVTEVSSYLTKVGYNPDNIRFGLISGFEGDNMIERSTNLDWYKGTTLLEALDQINEPKRTSDXPLMLPLHDVYNIDGIGTVPMGRVETEVVKPVKAMTFGHTGLTTEVKSVEMHHDALTHA

SEQ ID NO: 151996 - protein, 195 aa, Glycine max
  Clone ID: PAT_MRT3847_108276C.1.pep
MEHVIPSQNETFVVDPTVSPYESRIIFFYKTWDPFGVLSNFPPHPIQMPDENGDCVTWMSVEHYYQAHKFIRVDDPLAQDCVERIKSAISPEEAARIGRSMQKQKPYLIRSDWDNIKIDVMYRALKCKFSIYPHLNSMLLSTAGSVLVEASPHDLFWGGGRDGEGLNYLGRLLMKLRSEFLGESSSSSETPSLTV

SEQ ID NO: 151997 - protein, 65 aa, Glycine max
  Clone ID: PAT_MRT3847_108277C.1.pep
YGRAPCSQRLRRPLLATTGCRIHRFSVELPNPGISQPLQLAYYSENFELHTRELICSRLLGLYTY

SEQ ID NO: 151998 - protein, 65 aa, Glycine max
  Clone ID: PAT_MRT3847_108278C.1.pep
HKSTNWTYNNLNEKWGGQSQTKDHGDAGVCGFNGLVVVRGSPLSPNRHRSTRWRKRRGAIALCGW

SEQ ID NO: 151999 - protein, 367 aa, Glycine max
  Clone ID: PAT_MRT3847_108279C.1.pep
GQLLFLCRDKFIFGRPTRPRMEEMVLDILKKSNIKEATEFTIRVAASERLGIDLSDTASKHFVRSVVESFLLSVAANEKSKDAEKKKENEDIAAKNDDVAKKEDVVVANEEESRETEVLPKLKRDDPERVICHLSNRRNVAVKDFKGTTLVSIREFYMKDGKPLPGSKGISLSSEQWSTFKKSVPAIEEAIKKMEGRIGSEPNGKQNGDASNSAVDVALEPNGKQNGDASNSVVDVAPLEPHGKQNGDASNSVVDVAALEPVVPIEVIRLDGKNFQSWARQMELLLKQLKVDYVLDEPCPNPTLGGKRWLNDDLTCHRNILSHLSDPLYNLYANRKLSAKDLWERIKTGLSVRGIWNPKISCEKSIF

SEQ ID NO: 152000 - protein, 124 aa, Glycine max
  Clone ID: PAT_MRT3847_10827C.1.pep
MSRGGAAAAKGKKKGATFTIDCAKPVEDKIMDIASLEKFLQERIKVGGKAGALGDSVTVTREKTKIILTSDCNFSKRYLKYLTKKYLKKHNVRDWLRVIASNKDRSVYELRYFNIAENEGEEED

SEQ ID NO: 152001 - protein, 582 aa, Glycine max
  Clone ID: PAT_MRT3847_108280C.1.pep
MTLPQSFGCGLVQAPLVTSSGLLTKVWSVISSRDEDIVSYSGNNGLSLKVSEDSGLTVVAFEVNPDFDLQSTVVSFSDPKENNLNRFEFLCTKKHPDFSVNKSVVDLFSKNLPRLDELKSKIDSSPRLIVTGRGLGGPIASLFTLSLLGNKNSSEKKKPPLCITFGSPLVGNKKFQEAISRSSTWSSCFLHVVSIKDPFLKRLNPDIKDYMPFGTFLFCSDISSTCFENPKSVLELLVISIKDQNQAFPSIDYGNIVGNLYIKAICKDFTPRGQDFTDSNSLRASIRLQLWAALGLTPDMQQQHLNIDINALVTKLEKLEKEVIFQKGNKFDPSKKLNVMKIEMAKLEWYKKYSKNNKIGYYDSFKRGISTSDLDVVQCQKTLRNYWIDMVAEAELKPQTEGAAFRTRWLFGGTNYRRMFEPLDIAEYYANGGKDYEAKGRSRHYIVLQEWLEEDKKEKSNSNSTNKKDVESILTFDSCFWAHVEEAILSCKVLKDEQSSVTEKEEETGKLLEFEKYVYGLLTKYEVSSEIFLRQSSYMIWWNQYKAIKGTSYNSALADFMSNPDHYNVLYIKGTYNFPPQA

SEQ ID NO: 152002 - protein, 53 aa, Glycine max
  unsure (1)..(53): unsure at all Xaa locations
  Clone ID: PAT_MRT3847_108281C.1.pep
XFGTEYLLTQISLKGLILSFNPFFTGTWINIWWWVMAGKIIIYRGHFLTFNNV

SEQ ID NO: 152003 - protein, 163 aa, Glycine max
  Clone ID: PAT_MRT3847_108282C.1.pep
LSSDSSHAVESEGIGDVVQLVDEKKYYQSCCVDGVTYRLQGHALFPTSHGKLTPSKLQSMWEDCKTGLKWVKVTNCYFPDDLPGNIGHPCISEVNEVYESNSDRTEMASSIRGPCEVLPSDKFKQENDRRCQLRNEESSRVQPIFLCRWFYDEFKKLFQPVIS

SEQ ID NO: 152004 - protein, 77 aa, Glycine max
  Clone ID: PAT_MRT3847_108283C.1.pep
KAMGLKNIKASIGRLVHVTKNILQKGKSGTSNNLKVVHSRTQEFKIASDMRDLFLEFFNHQERLHKRLALEERRVCS

SEQ ID NO: 152005 - protein, 172 aa, Glycine max
  Clone ID: PAT_MRT3847_108284C.1.pep
MKKSFVSFLFFTALLVIVCSKEEEGGAKEKKYGTIIGIDLGTTYSCVGVYKNGRVEIIANDQGNRITPSYVAFTPDSGERLIGDAAKNQLTLNPENTIFDAKRLIGREFTDKTVQDDMKLWPFKIYNKANKPHVQVKVGNEDKQFAAEEVSAMVLTKMKENAESYLGHEVKN

SEQ ID NO: 152006 - protein, 49 aa, Glycine max
  Clone ID: PAT_MRT3847_108285C.1.pep
STQGEPPHCARGKCPPSSTSHGSPITNHVPIFFRLPIVCPSRDSELHGN

SEQ ID NO: 152007 - protein, 178 aa, Glycine max
  unsure (1)..(178): unsure at all Xaa locations
  Clone ID: PAT_MRT3847_108286C.1.pep
MTAEVMAQEETQAAEVVVAVEPLKEEKVAEENVKPRESSVEASKPKMVEKSSSYKEESNYLSDLKEFERKALSELKSKLEEAILGNTLFEPKKEALLENEEKKNEGEEKEEEEEKKVDVQENDVSLWGVPLLPSKGAECVDVALLKFLRAREFKVTDAFEMLKXTLKWRKESKIDSAV

SEQ ID NO: 152008 - protein, 59 aa, Glycine max
  Clone ID: PAT_MRT3847_108287C.1.pep
RKVNINSGQMNSSLHQSYALLVQHCSVHSAYKFSEFFMNTVTVTLSIQPHEIRSPQQAA

SEQ ID NO: 152009 - protein, 99 aa, Glycine max
  Clone ID: PAT_MRT3847_108288C.1.pep
SVACTLQRDSFSVFTPIFVYMVAAKYLGGRIITGPAIMYDIRFEIDELIDLLSIFVKFSVESLCGPNGPKGSTNCMGDGMLFTYSCLTCHLFLSQASIS

SEQ ID NO: 152010 - protein, 98 aa, Glycine max
  Clone ID: PAT_MRT3847_108289C.1.pep
SPHSCCRFPIGCPTCVTFLLSRLQVNVFLSLFNMHQRVRIGLQPDGVSTPFASCNKERASTFNVGTSPGSHCTAMISNSTSPQCNNSIKPNAGAWPEP

SEQ ID NO: 152011 - protein, 79 aa, Glycine max
  unsure (1)..(79): unsure at all Xaa locations
  Clone ID: PAT_MRT3847_10828C.1.pep
FLRMRHCRVDTSXALKSSTWFRFPYPLQWGTPVFHWKMAIVMCVVSLISSVDSVSFLSFSVLVPELYFFLLACVILAKS

SEQ ID NO: 152012 - protein, 51 aa, Glycine max
  Clone ID: PAT_MRT3847_108290C.1.pep
QTNPKFHVIHKGKLNEQDLNYLSYSIPVKPIITSTQLPCCTCSSNQLSLEP

SEQ ID NO: 152013 - protein, 48 aa, Glycine max
  Clone ID: PAT_MRT3847_108291C.1.pep
NVDVNEVSKSIHKYQLYRDSHEFTGITVLTHVNELEHYITLSLVANNG

SEQ ID NO: 152014 - protein, 114 aa, Glycine max
  unsure (1)..(114): unsure at all Xaa locations
  Clone ID: PAT_MRT3847_108292C.1.pep
GDRPTLERFSRHVEQESPWKTLETPXMDXVXKASYCCKXXXSVKDLVXXLFETAFLTXGFSLDDPNTFGNRIHRMLKLGLSIDEDAGEADADMPPLEDADADADAXXSKMXEVD

SEQ ID NO: 152015 - protein, 52 aa, Glycine max
  Clone ID: PAT_MRT3847_108293C.1.pep
TMFLPYKKPGTLNPGKRKANRDPNIFGIQRMGQVGVLSFTKKKVIFLKKKKI

SEQ ID NO: 152016 - protein, 82 aa, Glycine max
  unsure (1)..(82): unsure at all Xaa locations
  Clone ID: PAT_MRT3847_108294C.1.pep
EKHNPDHNECLQSCDSDIDSNRNQACDAQVLLLKAHKEECXGGDVLTTRPQPQHPDRXPHAPGEKEEDYNEHPHTIPYPRPH

SEQ ID NO: 152017 - protein, 96 aa, Glycine max
  Clone ID: PAT_MRT3847_108295C.1.pep
GRVPAHGSPAPSFFRRGGKPWEACFKGVKSFTGVWKTPPHPQEGGNCLKNLANNMGQSFNVGNEAFFLGKWGANIPCKIRPSPSWAPLKFLRGGLV

SEQ ID NO: 152018 - protein, 62 aa, Glycine max
  Clone ID: PAT_MRT3847_108296C.1.pep
HNDEGTLVCQGTSSVCGIRRSFAMATFFEMRVMRNSTILRNSCPCKLMHASYLTPNYALIFA

SEQ ID NO: 152019 - protein, 35 aa, Glycine max
  Clone ID: PAT_MRT3847_108297C.1.pep
SYLSPDFRFHPTDYELILHYLSKKVSSIPLLYSII

SEQ ID NO: 152020 - protein, 113 aa, Glycine max
  Clone ID: PAT_MRT3847_108298C.1.pep
MAHITNLPMTPLMPASTSSNNIKEIAFKTAPSASKVEIKRFLETFYGFEVEKVRTLNMKGKKKRYAGSLVAKPDYKKAYVTLKKPLSFSQNPYPFGSTVEDKKKENMLTTTHY

SEQ ID NO: 152021 - protein, 147 aa, Glycine max
  Clone ID: PAT_MRT3847_108299C.1.pep
ENPANEAEEKEPEDKEMTLEEYEKVLEERRKALQALKTEERKVDTKVFESMQQLSNKKDIDDIFIKLGSDKDKRRETLEKEDKSKKSVNINEFLKSPEGESYYNPGGHGRRHGRGRGARGGYGGYATANIPAPSIEDPGQFPTLGVK

SEQ ID NO: 152022 - protein, 28 aa, Glycine max
  Clone ID: PAT_MRT3847_10829C.1.pep
LLIWRLPMEYQIFFNTIFYIGKLLKPNN

SEQ ID NO: 152023 - protein, 227 aa, Glycine max
  Clone ID: PAT_MRT3847_1082C.1.pep
MSRDENANGSQPESDDDDEAPARRYSRKSRENSDVDSEPDRNFFNSRRGTSDSDDGDRRRRRERKSRRHYCSESDSGSGKAREDSDVDSETDRKQCNSRRKSQGGRSDSDDGDRTHRRKRKSRRRHSSDFGSEESESERSGSESESEEERKRREKRRRREKEDEREWKRRRREKERKRRRREKEKEEEERRKKEKLKKKKKKEKEERGKKGAVTNSWGKYGVIRETD

SEQ ID NO: 152024 - protein, 72 aa, Glycine max
  unsure (1)..(72): unsure at all Xaa locations
  Clone ID: PAT_MRT3847_108300C.1.pep
MEGMEQDVSMGANKFRLRQPMVTAAXAQDVCRDYHDPWRAPLVDPTEFTERAFYTSGIAXFAATFLFLYITV

SEQ ID NO: 152025 - protein, 59 aa, Glycine max
  Clone ID: PAT_MRT3847_108301C.1.pep
HASDLLTDICLSVSIIFSRAGIFWGASFFLLISPRLYVTSRLSESLSAHHLSFKLRYSQ

SEQ ID NO: 152026 - protein, 106 aa, Glycine max
  Clone ID: PAT_MRT3847_108302C.1.pep
RSTPPSTISATTSRSTESPTRSPSALLDAATSESTSTDSSSSSRTLSATPSTLRWLARARRSPGSARRVPGESSSTTTSTRSSTKKLTHLTSISPREASAASSTSL

SEQ ID NO: 152027 - protein, 92 aa, Glycine max
  Clone ID: PAT_MRT3847_108303C.1.pep
GKPVIVVSLLFWNLFNKLSEAAKGSVSLAAVSAKVSIEPDSSFGWEIIVGPKVKAIGIDRFGVSAPAAIIFRLFGVTKAAVAAPHIELIQNI

SEQ ID NO: 152028 - protein, 156 aa, Glycine max
  unsure (1)..(156): unsure at all Xaa locations
  Clone ID: PAT_MRT3847_108304C.1.pep
RSLGRTRGITITDGFDKTSATLHSRKLADCDSLKRNFRQMSNVLWVAPXDKASLWSHLHYVSCNNLEMQEAYLVNLANVSPELFLHSPXEARPLRRKXALSRIEWLQKAAVPTISHIEESHSLHRTMNAPDPKDNIDQLLSTXFVVFPGACKAFPN

SEQ ID NO: 152029 - protein, 133 aa, Glycine max
  unsure (1)..(133): unsure at all Xaa locations
  Clone ID: PAT_MRT3847_108305C.1.pep
IHPINGEPLIRSLITSVTSNPLISXYLCNLIAYRTAATPLLRWIKVDLXHGFAFVAPCSNADPVRNXSDHRASCGLYPADGTVAIFSLCLTVYVISSLNERAPSTDLMIILTGLMIEPYQLQTADVLARSTQG

SEQ ID NO: 152030 - protein, 81 aa, Glycine max
  Clone ID: PAT_MRT3847_108306C.1.pep
ITRKYESSNNLLEFITEYTRYFMRVSIRVYLVERVGEKTKVKSSLHRKRKGVSTKQRLIAKDKCKKRRENDMDLRCCERKA

SEQ ID NO: 152031 - protein, 241 aa, Glycine max
  unsure (1)..(241): unsure at all Xaa locations
  Clone ID: PAT_MRT3847_108307C.1.pep
MAAELVNGATSEKLAETDWTKNIEICELVAHDKREARDVVKAIKKRLGSKHSNTQLFAVMLLEMLMNNIGEHIHEQVIDTGIIPILVKIVKKKSDLPVRERIFLLLDATQTSLGXVHLXKFPQYYNAYYEXLVSAGVQFAKGNKWSNQIFLVHNLXRLGNVPNREQASPXHEAVAQPAESQTXPXSSIMQKASNALQVVXEALDAIDAQDRVAAGDEFTLDLVEQSSFQKQRVMHLVMASR

SEQ ID NO: 152032 - protein, 75 aa, Glycine max
  Clone ID: PAT_MRT3847_108308C.1.pep
MAAELVNGATSEKLAETDWTKNIEICELVAHDKREARDVVKAIKKRLGSKHSNTQLFAVMLLEMLMNNIGEHIHE

SEQ ID NO: 152033 - protein, 42 aa, Glycine max
  Clone ID: PAT_MRT3847_108309C.1.pep
MAAELVNGATSEKLAETDWTKNIEICELVAHDKREARDVVKL

SEQ ID NO: 152034 - protein, 125 aa, Glycine max
  Clone ID: PAT_MRT3847_10830C.1.pep
MSRGGAVAAAKGKKKGATFTIDCAKPVEDKIMDIASLEKFLQERIKVGGKAGALGDSITVTREKTKIIVTSDSNFSKRYLKYLTKKYLKKHNVRDWLRVIASNKDRSVYELRYFNIAENEGEEED

SEQ ID NO: 152035 - protein, 91 aa, Glycine max
  Clone ID: PAT_MRT3847_108310C.1.pep
FFLVSVHAIHKGEKVGSQFGLQLLLFITYSFAFFIFWLYICNCMSQIVILLCTFVGKSIRRLCWLTAEFNLVDINFVDCSFLLLNIFNVLY

SEQ ID NO: 152036 - protein, 137 aa, Glycine max
  unsure (1)..(137): unsure at all Xaa locations
  Clone ID: PAT_MRT3847_108311C.1.pep
NESISNQTDVALSISKLXIREEARDTNLLYSTLSMHVVLSIIVAGSKDPTLDQLLSFLQSKSTDHLNSFAYQLFTEELSDALSXGRPRIFIADCVWVEQSLLIVPSFKQLVNADYNASLASIDFQTKAVEVFNEINS

SEQ ID NO: 152037 - protein, 47 aa, Glycine max
  unsure (1)..(47): unsure at all Xaa locations
  Clone ID: PAT_MRT3847_108312C.1.pep
HAENLRLPEKSRDVPLAAYCTRXICXVKIADNLVQSPCRDTPPHRHF

SEQ ID NO: 152038 - protein, 79 aa, Glycine max
  Clone ID: PAT_MRT3847_108313C.1.pep
HLFFFVHNKIFSFIPSVLTVYKIQCPKYDTTMPNIITGRKNASNSNLTLFSTLSDKTSCWSTYIGLGLSYLVMPTQDFT

SEQ ID NO: 152039 - protein, 112 aa, Glycine max
  unsure (1)..(112): unsure at all Xaa locations
  Clone ID: PAT_MRT3847_108314C.1.pep
KRDSLRDPQSARKRDNQKSERKRRGKKKGEKXGKPXTKLXTRKEARKETRSLKAGGEAAGKTTIMHKQKVGEIPTTIPTVETEEDTDENKNVSYAGGEDRGQDKSRPQWRNN

SEQ ID NO: 152040 - protein, 264 aa, Glycine max
  Clone ID: PAT_MRT3847_108315C.1.pep
LEVLRSKIKRVSRDCLIAISWLGFQISKSPDSISYSASEVILSGIEQFLHPGIESEERLLACMCMFNYALGKAKTNAFLRRTVCSLIYFKGLLFSGYSDGSIKVWDIRGHSASLVWDIKEHKKSVTCFSLHEPSDSLLSGSTDKTIRVWKMIQRKLECVEVIALKEPIHHLRAHGETIFAISESHGLKLVNGSRVTKDILKGKHVKCMTVAQGKLYIGCTDSSIQEYSTTHNRELEIKPPTRSWRKQSKPINAVVAYRDWLYSA

SEQ ID NO: 152041 - protein, 91 aa, Glycine max
  Clone ID: PAT_MRT3847_108316C.1.pep
SIQAKKFSGPKLEIWPTNAGSYNSFRGPSLLVEYDFTPKRKDHFRLTPQEGYTANTPLPQFRRPQFFGQIFSPLYMGCLCPPTRLKLQPNS

SEQ ID NO: 152042 - protein, 85 aa, Glycine max
  Clone ID: PAT_MRT3847_108317C.1.pep
ERERVKWMMERVDETEVVGASVLHGGMIITMVVEPRVYRVGGIAGEHDGFIAMRQCADILAVQYAVSYWIDDLLGHMLLTGFIVT

SEQ ID NO: 152043 - protein, 87 aa, Glycine max
  unsure (1)..(87): unsure at all Xaa locations
  Clone ID: PAT_MRT3847_108318C.1.pep
GGAGAKNAMLMNLPNAVLSMWRYFVGDLVFEVSKMTYAYIKCTVSFFIXLQSXADDTINSEAVPIMLFQSGEIHENVVLKFSLEGIL

SEQ ID NO: 152044 - protein, 156 aa, Glycine max
  unsure (1)..(156): unsure at all Xaa locations
  Clone ID: PAT_MRT3847_108319C.1.pep
MTEGKLVEAAEAHKTLQDFDPPKKRKRNKYAFACAMLASMTSILLGYDIGVMSGAAIYIKRDLKVSDEQIEILLGIINLYSLIGSCLAGRTSDWIGRRYTIVFAGAIFFVGALLMGFSPNYSFLMFGRFVAGIGIGYALXIAPVYTGEGCPGCCGG

SEQ ID NO: 152045 - protein, 114 aa, Glycine max
  Clone ID: PAT_MRT3847_10831C.1.pep
SSRCDQTMQQKRYSDPERTASLLCESCLIRIYVQDSTGGHDSIKSRGETVEAQNPDGLTDKVPKDLQQIMDTAITIEKELENVCKKRAARIEELNEIGQKLKGEHAAKSLIIVC

SEQ ID NO: 152046 - protein, 48 aa, Glycine max
  Clone ID: PAT_MRT3847_108320C.1.pep
MLSQKQAEEAIVTNETEHKVGSTREEEKEQGHSIFSLKSILWHGGSVW

SEQ ID NO: 152047 - protein, 69 aa, Glycine max
  unsure (1)..(69): unsure at all Xaa locations
  Clone ID: PAT_MRT3847_108321C.1.pep
KISSTRPNAKLGRVGCTDAPHKKKELXEAKTAYTNNFIPFIGFDNTRPVLRINFFFYKPPSFYNIAKFA

SEQ ID NO: 152048 - protein, 82 aa, Glycine max
  Clone ID: PAT_MRT3847_108322C.1.pep
NPITTVMLPRNPSYTNPEPCQHLAEYKLKHGFNGYKAIQKLLVTSPIGKTSVKKPNTKTLKGLNFIVECAVINCMTLILTKL

SEQ ID NO: 152049 - protein, 149 aa, Glycine max
  Clone ID: PAT_MRT3847_108323C.1.pep
MLLRNPSLYTNPEPCQHLAEYKLKHGFDGYKAIQKLLVISPIGKASVKKPNTKVPRCGFCNGCEGRFYLCLICSSFSCLDHTLLHPQSETGHAVFVDIERAELFCGVCRDQLYDPDFDQVVMSKHSLGVASGVTGNESICQRLIKRRRL

SEQ ID NO: 152050 - protein, 76 aa, Glycine max
  Clone ID: PAT_MRT3847_108324C.1.pep
FKLSEFRTTQPYTPLSSLLTRETLRIEVEASDFDPSNVESTNVQVEGLDREWINALAKREEELDCSGLAKRCYQKE

SEQ ID NO: 152051 - protein, 91 aa, Glycine max
  Clone ID: PAT_MRT3847_108325C.1.pep
MAPSRSQPGIVSPEIERITLHNPIAFTARVYAAPFLSLYPLLYFAYYHRYDQWIKSEEWTFVYCVLLGFGHALTFLSTRWSVGIRTRVENT

SEQ ID NO: 152052 - protein, 62 aa, Glycine max
  Clone ID: PAT_MRT3847_108326C.1.pep
TLVGLERAIVLRCALPRQILLQLRTRAFCRTIGSSCNMISTPSKEFEPLIILNSLLSYRSSQ

SEQ ID NO: 152053 - protein, 60 aa, Glycine max
  Clone ID: PAT_MRT3847_108327C.1.pep
SLSVFQSGNNVANVGWIVIPLSNQITSSGLSSALPFCIVFAHLVCSQVLSQSSSIGVCCQ

SEQ ID NO: 152054 - protein, 51 aa, Glycine max
  Clone ID: PAT_MRT3847_108328C.1.pep
FKKSIFWVNPNWGLKTRKNTEVKPPLPKMVAAAKFIRTQLKLVPSELKMSQ

SEQ ID NO: 152055 - protein, 241 aa, Glycine max
  unsure (1)..(241): unsure at all Xaa locations
  Clone ID: PAT_MRT3847_108329C.1.pep
LLLNNNLYIHQHEKYIRWLRVSIYTILLLVCQCSATLLGRFYFDKGGKSKWIEAFVQSAGFPIPIPLLFYCPKHAKSTNDPSNNDTSETKPKLLIIFLLYLVFGLLLAAIDFMYACGLLYLPLSTFALLCASQLGFIAVLTFFINSQKFTALILNSVAVLSMSVILIALNPESEDTKHHPREKQIIGILCAIVSSATFALHHSLVQRCFEKVXKTKTFATVLRMNFYPMLVASVFGSVXLF

SEQ ID NO: 152056 - protein, 48 aa, Glycine max
  Clone ID: PAT_MRT3847_10832C.1.pep
ENKKHTKKIHQEKGYKKRNIKNTTKKLKKTKPKHKKRGRPKGSNLTYP

SEQ ID NO: 152057 - protein, 63 aa, Glycine max
  Clone ID: PAT_MRT3847_108330C.1.pep
NSKQNKKWPFKTYLWHIKNQGCLIPCGILYILYPNNARDSLKTISSFYAIFWGCLKLEKQKFW

SEQ ID NO: 152058 - protein, 241 aa, Glycine max
  Clone ID: PAT_MRT3847_108331C.1.pep
LTRPPTRPLGCYVPCESCALSAVDIIFTRLGAKDRIMTGESTFFIECTETASVLQNATQDSLVILDELGRGTSTFDGYAIAYAVFRHLIEKVNCRMLFATHYHPLTKEFASHPRVIMQHMACAFNSKSDTHSMRDQELVFLYRLASGPCPESYGLQVALMAGIPEKTVNIASKPSQKMKKSIGQSFRSSEQRSEFSTLHEEWLKTLVSISRIEDCNSLDEDALDTLICLWYEVKTSFISGK

SEQ ID NO: 152059 - protein, 44 aa, Glycine max
  Clone ID: PAT_MRT3847_108332C.1.pep
FFISVQKLKQQLLINDSPFHILKAIHPIYNEALLMFNINKKEFH

SEQ ID NO: 152060 - protein, 73 aa, Glycine max
  Clone ID: PAT_MRT3847_108333C.1.pep
GGNLGGYTFSSGKLFSPGYPKPLNRSLLGKSVPPPVTGPEKFPGERVVLAAARFFFFFFFFFLQIPSVVFSQP

SEQ ID NO: 152061 - protein, 277 aa, Glycine max
  Clone ID: PAT_MRT3847_108334C.1.pep
TLYFHSCRDLKLISEVQAPFRGVRRFFYVAFTAAAGITLFFTVPRLLRAINGGDGAPDLLATAGNAAINIGGIVVLVALFFWDNKKEEEQLAQISRDETLSRLPLCLSTNRVVELVQLRDTVRPVILAGKKETVSLAMQRAERFQTELLRRGVLLVPVIWGEGQETKLEKKGFGLKPKAAEALPSIGEDFEKRAQSITAKSKLKSEIRFKAEVVSPVEWERWIRDQQKSEGVSLGEDVYIILRLDGRVRRSGKGMPDWQQIVKELPPKEAFLSKIER

SEQ ID NO: 152062 - protein, 119 aa, Glycine max
  Clone ID: PAT_MRT3847_108335C.1.pep
EGPPLVECETYRFRGHSLADPDELRDPAEKAHYAGRDPISALKKYMIENKLASEQELKTIEKKIEEIVEDAVEFADESPHPPRSQLLENVFADPKGFGIGPDGKYRCEDPKFTQGTAHV

SEQ ID NO: 152063 - protein, 285 aa, Glycine max
  unsure (1)..(285): unsure at all Xaa locations
  Clone ID: PAT_MRT3847_108336C.1.pep
LDPHKIALRYLKSCFLPDFLSCLPWDYFYKLSSNNELVRYLLLIRLCRAFRVTQFFDTLEKNTRVCYLFSRILKLFVVELYCTHTAACLFYYLATTVPPSQHSYTWIGSLKMGDYTYSDFTHIDLWKRYVTSLYFAIVTMATLGYGDIHAVNVREMIFVMIYVSFDMILGAYLLGNITALIGQGSKTERFRDQMSHIVNYINKNNLDKQICHHIKDHLRLKYHPSYTGSSVLQDIPTTIRTKISISLYEQFIQKVSLFKGXSSGFIKQIVRHSLHAHTSEWHSRN

SEQ ID NO: 152064 - protein, 46 aa, Glycine max
  Clone ID: PAT_MRT3847_108337C.1.pep
RWPGFYYGMVHMLNDITAACWLTYLLLTLTDIGLSPSIQMLHRRGE

SEQ ID NO: 152065 - protein, 137 aa, Glycine max
  unsure (1)..(137): unsure at all Xaa locations
  Clone ID: PAT_MRT3847_108338C.1.pep
HASATGNSVNNNTQNPNALRFLFSTFELAPHFPLYLSATRHHVSLTLPPPPPXSPLPPPPFPPTSHGRPSSSRAPPPTAASPPSAPPPPRXSWSPXXXGPPPRPPPVRAPSGWSPRWPGSGVRLPLVARGLAGLCGP

SEQ ID NO: 152066 - protein, 81 aa, Glycine max
  Clone ID: PAT_MRT3847_108339C.1.pep
PSISQVFISLTSAIAGFKKTCLWGKPPFPLLELIPKVIFFSPSFFWGNFPPNPIFPFQGGGLKNWFCLKTDLEPNFRVSHP

SEQ ID NO: 152067 - protein, 53 aa, Glycine max
  Clone ID: PAT_MRT3847_10833C.1.pep
PHWGENWQSKAGLVGQTLPFKGPSNGRRTSPPWNIVPRNWQFGPTFPGKNFKI

SEQ ID NO: 152068 - protein, 56 aa, Glycine max
  Clone ID: PAT_MRT3847_108340C.1.pep
LRFQPRYTAYRLAHFTRTAGLILHTNTSVMPRARASTEQHVDQIAIDSYMLQPISH

SEQ ID NO: 152069 - protein, 91 aa, Glycine max
  unsure (1)..(91): unsure at all Xaa locations
  Clone ID: PAT_MRT3847_108341C.1.pep
LERQCIXPAGWNNWGXIENXXTACFXEYXCFGPGWCPSQRVKWARELQAEAAEQFLMHSFIXDPESEXPWLAQXMALKXXNSXKNGAFGLK

SEQ ID NO: 152070 - protein, 86 aa, Glycine max
  Clone ID: PAT_MRT3847_108342C.1.pep
APLPCCHQPFFSVLRTLANLTWLQIISYEILRSSQTSGRNHQHIHLHFLLLSQLSFSKQNLVNVKTLRWINKALGSSAITARTHRF

SEQ ID NO: 152071 - protein, 62 aa, Glycine max
  Clone ID: PAT_MRT3847_108343C.1.pep
QLQAWFSGSQRMHCLAAYTAEEAPKESDVSRRCHLFFQGHRTDKGRRWRKTSGRHRGASITL

SEQ ID NO: 152072 - protein, 63 aa, Glycine max
  Clone ID: PAT_MRT3847_108344C.1.pep
PKRASEHFFFALSHLPLLQLSRTIKFRHYCVCANLIKEVDKEPVQFSTLTTEKRTDQILWLVL

SEQ ID NO: 152073 - protein, 38 aa, Glycine max
  Clone ID: PAT_MRT3847_108345C.1.pep
LSLRWRPAAPSFSMAFGRSKGCPCLTDSADLVQEALVS

SEQ ID NO: 152074 - protein, 151 aa, Glycine max
  Clone ID: PAT_MRT3847_108346C.1.pep
MAHSTSLIFMGLSFGPLPKTKVSVSGRLVSRSSAGLRIRAVQENGGPRRLVDIIRLVPEFSRNYFRSPSRRALFGGISLLGGFYVAQTISLSFGALGVNDVIAAVLCVLLTEYVTKFYYSRPKVTFPVALLNNFKMGFTYGLFIDAFKLAS

SEQ ID NO: 152075 - protein, 146 aa, Glycine max
  Clone ID: PAT_MRT3847_108347C.1.pep
FFTFLGSKGGNCEQISQLAQHSKMAPIWEESMAQDVRGIQGGTGFDRAERKSITAPKAYKGLERTSPNPTNNTADMEDMQGTPGFNQEWINATEKVIEPTADQERKWMPLNATVTEDTGDIQARIGLNQDGINVASEPKADPRKER

SEQ ID NO: 152076 - protein, 86 aa, Glycine max
  Clone ID: PAT_MRT3847_108348C.1.pep
MASNLILNDLNDFHKYPPTSFISCPVSYYMFHFQSTIIIPAYNPYSLSVFLITIHFPSHYPFKPSNVTFITNVFHPNININCNIFL

SEQ ID NO: 152077 - protein, 151 aa, Glycine max
  Clone ID: PAT_MRT3847_108349C.1.pep
NEVCPMFNATLIKKILDNFVPDELCPDPVPSNVFEALNSENEMEDGKEYVNNFPCIAAPIAYSPPPATSIASIVGEIGSKSQLRRNKSSVVRKSHTSDDELDELKSPLSSIFFSVSSSPKVLTKSSLKFKEIRNQSPVRYELLRDVWMKSD

SEQ ID NO: 152078 - protein, 35 aa, Glycine max
  Clone ID: PAT_MRT3847_10834C.1.pep
KPHTQGTIPSIPFRRDQCRSLPSCLIYINYDAFIV

SEQ ID NO: 152079 - protein, 124 aa, Glycine max
  Clone ID: PAT_MRT3847_108350C.1.pep
DSCFSYGPDCNIVGATLVADTYHTNPEKADGSILVAAFRGGRPILVVTFSNTMEQIEPDMNSRFQHLSTTTNGDFVQGKDLEMGKGNVACAVVGLSSRYTATPLKASGLQKDSWLIDEYCGGMP

SEQ ID NO: 152080 - protein, 342 aa, Glycine max
  unsure (1)..(342): unsure at all Xaa locations
  Clone ID: PAT_MRT3847_108351C.1.pep
ELLSRSFLQDFFDGGTFYEFKIHDLVHDLAVFVAKEECLLVKSHIQNIPENIRHLSFAEYNFLGNSFTSKSVAVRTIMFRNGAEGGSVEALLNTCVSKFKLLRVLDLRDSKCKTLPRSIGKLKHLRYFSIENNRNIKRLPNSICKLQNLQLLNVSGCKELEALPKGLGKLISLRLLWITTKQPVLPYSEITNLISLAHLYIGSSYNMESIFGRVKLPALKTLNVAYCDSLKSLTLDVTNFPELETLIVVACVNLDXDLWKEHHEERIGKLKLKLLGFRDLPQLVALPQWLQETANSLQSLRISGCDNLEILPEWLSTMTNLKVLLISDCPKLISRRGEVPCS

SEQ ID NO: 152081 - protein, 58 aa, Glycine max
  Clone ID: PAT_MRT3847_108352C.1.pep
KKKKKKKKNKKKKKKKKGKGGRFKGVQRYIRFHAYVTPASIALPHFNSLPDFFQWPDW

SEQ ID NO: 152082 - protein, 421 aa, Glycine max
  Clone ID: PAT_MRT3847_108353C.1.pep
MGTLCFPLFATMAIWGLLLGAESKTHVGDAEVLKELKQGLEPGSVKPGSCVSSWDFTLDPCDNLFGDKFTCGFRCDVVVSGLSRVTELALDQAGYSGSLSFTWNLPYLQTLDLSNNYFSGQIPYSFSNLTRLSRLSLSSNSFSGEIPSSLGTLSNLQELYLDNNNLRGTIPQSFDNLPNLKRLELQSNKLNTRLPNLGSLRHLKFLYLSDNSVTGTLPASLPVSLVQISLRNNNLSGVLVGESFKSLTRLQVVDFSSNQLSSAVPSVFFQLPSLQQLTLSFNEFTNLEAPYKGTESQSGLVAVDLSNNRLKGFLPSFMAVMPKLSSLSLENNEFTGRIPTQFGVKTVFPEKGVSSFGRLLLGGNYLLGGIPRPLLALKRDSANVSLVDNCLYRCPHSFFFCQGGQQKSLAQCNRFSPASTP

SEQ ID NO: 152083 - protein, 166 aa, Glycine max
  unsure (1)..(166): unsure at all Xaa locations
  Clone ID: PAT_MRT3847_108354C.1.pep
GMSSVTSNSRMAXLFSRDGAMPLSSLWHQVNXXEVSIYAVWLSVFISFCMALTSLGSIVAFEAMVSIATIGLYIAYALPIFFRVTLAQKDFVHGPFNLGRYGVIVGWVAVFWVVFISILFSLPVSYPITIETLNYTPVAVGCLLILVVSYWLISGRRWFRGPITNI

SEQ ID NO: 152084 - protein, 67 aa, Glycine max
  Clone ID: PAT_MRT3847_108355C.1.pep
KSPLSHTPLPRWFVCLFWCPIFMVLPRPHIPELFPSTNIAISASVPATLIILIPPPPPPPPPQAGGT

SEQ ID NO: 152085 - protein, 367 aa, Glycine max
  Clone ID: PAT_MRT3847_108356C.1.pep
MAALDLTISMLALIVVVVSLGLWGGVQGAPQVPCYFIFGDSLVDNGNNNQLQSLARADYLPYGIDFPGGPSGRFSNGKTTVDAIAELLGFDDYIPPYADASGDAILKGVNYASAAAGIREETGQQLGGRISFRGQVQNYQNTVSQVVNLLGNEDSAANYLSKCIYSIGLGSNDYLNNYFMPQFYSSSRQYSTDEYADVLIQAYTEQLKTLYNYGARKMVLFGIGQIGCSPNELAQNSPDGKTCVEKINTANQIFNNKLKGLTDQFNNQLPDAKVIYINSYGIFQDIISNPSAYGFSVTNAGCCGVGRNNGQITCLPMQTPCQNRREYLFWDAFHPTEAGNVVVAQRAYSAQSASDAYPVDIQRLAQI

SEQ ID NO: 152086 - protein, 61 aa, Glycine max
  Clone ID: PAT_MRT3847_108357C.1.pep
VLHKAIGAWLQPRSYSPDASQSKWLPLVSSKNPFFKRFIDRNVGPQIPPENQNNPGILSFQ

SEQ ID NO: 152087 - protein, 53 aa, Glycine max
  unsure (1)..(53): unsure at all Xaa locations
  Clone ID: PAT_MRT3847_108358C.1.pep
XXYYSTIYEEQKSQILGLNYLFTILSLRAFQPIKNYLQPVSIQHTTIARNTFS

SEQ ID NO: 152088 - protein, 229 aa, Glycine max
  Clone ID: PAT_MRT3847_108359C.1.pep
VKNKDASLGRRPGRGFMRIKNKPYPKSRFCRGVPDPKIRIYDVGMKKKGVDEFPFCVHLVSWEKENVSSEALEAARIACNKYMAKFAGKDAFHLRVRVHPFHVLRINKMLSCAGADRLQTGMRGAFGKPQGTCARVAIGQVLLSVRCKDSNSHHAQEALRRAKFKFPGRQKIIVSRKWGFTKFSRSDYLKFKSENRIVPDGVNAKLLGCHGPLANREPGRAFLDTATSS

SEQ ID NO: 152089 - protein, 180 aa, Glycine max
  Clone ID: PAT_MRT3847_10835C.1.pep
MSAGFDPAKLAKLQANNAKLAGAPRKKVVRKPGAAQGDDRKLQTALKKLNVQPITGVEEVNMFKEDGNVLHFNAPKVHAALPSNTLAIYGAGADKDLTELIPGILNQLGPDNLASLRKLAESYQTLTQRNKGAAGKDGEEDEGEGDDVPDLVESFDVEEAGEEKKEKEEEKKDASVEELS

SEQ ID NO: 152090 - protein, 55 aa, Glycine max
  Clone ID: PAT_MRT3847_108360C.1.pep
LEPIFVLLFKRMNIYNNNLCWFYSHTLSSFFLFLILPSLSTTNLTSLFCYFSKTH

SEQ ID NO: 152091 - protein, 308 aa, Glycine max
  Clone ID: PAT_MRT3847_108361C.1.pep
MVIMSALFSFIFPPPSSLVVSGMSVFENGNRPKQRVTKQANTMVIKSVLFSFIFPPPPSLVVWGLTVTSFLILANAFLSEIRGKHLNYSKFWNANPSAEKQVKLSSKAGMLLLYTPAFLAGLASFWVFPHQGLRFTILQSAVTLHYFKRVFEVLFIHKYSGGMTLESAIPITLSYFLSAVTMVYSQHLTKGFPEPPINLFYPGIVLFLVGIIGNFYHHYLLSKLRGKGEKEYKIPKGGFFELVICPHYFFEITVFYGIFFISQTLYSFAFAVGTTMYLVGRSYSTRKWYLSKFEDFPKHVKAVIPFVF

SEQ ID NO: 152092 - protein, 118 aa, Glycine max
  Clone ID: PAT_MRT3847_108362C.1.pep
EGGKVDGNYPPIGKTVHAQDHLGDVVYVELPKVGAPVPQGGSFGAVESVKAPSDINSPISGKVVEVNEGLNSFPALVNSSPYKKGGIIKVEINARGELNNLRDSDQYSKFCEKKNSKP

SEQ ID NO: 152093 - protein, 78 aa, Glycine max
  Clone ID: PAT_MRT3847_108363C.1.pep
SSRIGSSSTAKLRTLAISMARGGTEASRRFGQTLPAPRLHPARFSSFHLRRLPTGNSLFITLFSSHSIIIRTPYNLCT

SEQ ID NO: 152094 - protein, 65 aa, Glycine max
  Clone ID: PAT_MRT3847_108364C.1.pep
FTTLPSHAYGAYFASHLRPLAKPTVPPKCLSSTPPSITTTPGAPPITVTRTSANSTMKTTRISRT

SEQ ID NO: 152095 - protein, 171 aa, Glycine max
  Clone ID: PAT_MRT3847_108365C.1.pep
RAGYNYHGNEPMYSGITGEEFQADIYIGVVYYQRLRHMVSDKWQVRSTGPVHNLTMQPIGGRKKAGGIRFGEMERDSLLAHGMSFCLQDRLMNCSDFSQCHLCAKCGTIFTSLLSKEHETQNDVKFKKHHMICKICDTSKYITLIKIPFAFRYLATELASMGIKITLESKY

SEQ ID NO: 152096 - protein, 108 aa, Glycine max
  Clone ID: PAT_MRT3847_108366C.1.pep
DLDQVDYFSQKGVEQAIQSGSITLPSGESVPLKDAIVIFSCESFSSPKLRKSPCAENKGKETVDDESSSLSLDLNLAIEDESGGVALGGDNGILELVDKQINFNIQEL

SEQ ID NO: 152097 - protein, 96 aa, Glycine max
  Clone ID: PAT_MRT3847_108367C.1.pep
SNYYKKFKHTPSSRQIEALMFKHQTGRRGAICYESHELHQQRANLSPTRAQVICSNYTHSLLNNFFFLQQKDLLNKMKIWYYIICCSRCNTHNKTN

SEQ ID NO: 152098 - protein, 64 aa, Glycine max
  Clone ID: PAT_MRT3847_108368C.1.pep
PYPDPKCYINGQGVLILKKNIQPVLELVCKRLHYKGKAKVLLEKITLGTDLTFLFLISQEGQPV

SEQ ID NO: 152099 - protein, 185 aa, Glycine max
  unsure (1)..(185): unsure at all Xaa locations
  Clone ID: PAT_MRT3847_108369C.1.pep
TVTNCLLSVPPTRCHEDESHALLQFKERFVISKSTSYNPFSYPKIASWNATTDCCSWDGIQCDEHTGHVITIDLSSSQIFGILDANSSLFHLKHLQSLDLADNDFNYSQIPFRIGELSQLRYLNLSEANFSGEIPXQVSHLSKLLSLDLSRAFYSSPDTGNLLSFKISTLRSLIQNSTNLEKSSS

SEQ ID NO: 152100 - protein, 46 aa, Glycine max
  unsure (1)..(46): unsure at all Xaa locations
  Clone ID: PAT_MRT3847_10836C.1.pep
RTCTETYAYNYYTGVYAETPTRQSISLVRTEHFXRAEFRAYXILRX

SEQ ID NO: 152101 - protein, 49 aa, Glycine max
  Clone ID: PAT_MRT3847_108370C.1.pep
PLPYVQLNIRQLPFTRLATLCFMVEHHGAPVAHLNIRIHSAVVDVIHRI

SEQ ID NO: 152102 - protein, 57 aa, Glycine max
  unsure (1)..(57): unsure at all Xaa locations
  Clone ID: PAT_MRT3847_108371C.1.pep
CRVGFERFCPQFSATLCAPGGPCVACSTTICVXWDAAFSNYLCPSGMAVLRVHGSTY

SEQ ID NO: 152103 - protein, 113 aa, Glycine max
  Clone ID: PAT_MRT3847_108372C.1.pep
MSFRFPARTLWQAAPRFANIPRVAPQTTRWARSYAVASDQNRTAIVTGSARGIGKAIALRLANDGYDVCINDIEANKSEADEVVKQIQGLGRKSFSYSADVSNLSQVQGLVKA

SEQ ID NO: 152104 - protein, 44 aa, Glycine max
  Clone ID: PAT_MRT3847_108373C.1.pep
ETVTMTPLDHLFYIEDTLGRDYSCCDAHDKHATYATLYTFHYSQ

SEQ ID NO: 152105 - protein, 201 aa, Glycine max
  unsure (1)..(201): unsure at all Xaa locations
  Clone ID: PAT_MRT3847_108374C.1.pep
MATETKVQELGGITDVHGAANSVEINNLARFAVEEQNKRENSVLEFVRVISAKQQVVAGVNYYITLEAKDGLIKNEYEAKVWVREWLNSKELLEFKPVNVSSTPIXGGITDVTANSLEIDILARFAVDQHNKKENANLEFVGVIRAKQQVVEGFIYYITLEAKDGETKNVYETKVWVRSWLNSKEVLEFKPISINPLSVSV

SEQ ID NO: 152106 - protein, 281 aa, Glycine max
  Clone ID: PAT_MRT3847_108375C.1.pep
VVLNLSQNQLEVIPDSIAGLQRLVELDVSSNVLESLPDSIGLLVNLKIFNVSANKLTALPESIALCRSLVELDASFNNLMCLPTNMGFGLVNLEKLLIHLNKIRFLPASIGEMKSLRHLDVHFNELHGLPQSIGKLTNLEYLNVSSNFSDMTELPETLGDLVNLRELDLSNNQIRALPYSFGRLEKLTKLNLDQNPIIVPPIEVVNQGAEAVKEFMAKWWLDLIEEAQQKSMSETQNQQAQTGWLAWGASLLNNVAEVSESVAEYFGAKKAPRDPWLDQQL

SEQ ID NO: 152107 - protein, 130 aa, Glycine max
  Clone ID: PAT_MRT3847_108376C.1.pep
MLTLENQIYAVKTGTGGIANDYYGLDASAANLGGKAGRRFSEFPMKICHYFNKGFCKHGTSCRFYHGQVVPENFSQMYGNDAISEDQVISPGSLAQLESEIIELLRTKGGPMSIASLPMAYYDKYKKVLQ

SEQ ID NO: 152108 - protein, 65 aa, Glycine max
  Clone ID: PAT_MRT3847_108377C.1.pep
PSRSAPLYCTLAIFVWFGQMAVWSYPISLSHESLSKTSMGRLVWHMKADIMLHAKWDLHCMGATH

SEQ ID NO: 152109 - protein, 61 aa, Glycine max
  Clone ID: PAT_MRT3847_108378C.1.pep
GCVKFLIKTQHDNHTINLVANVDNAIITTSIYTVTLLSYPQAMICSQNEISSIIIYCKARR

SEQ ID NO: 152110 - protein, 73 aa, Glycine max
  Clone ID: PAT_MRT3847_108379C.1.pep
HHQLKIQVYFILHLFFFIISVIYYFHLKLLLIVFLLLLFFLYNFSIFMFYAKSYLLSFFFIYLYQMLSRRTHY

SEQ ID NO: 152111 - protein, 90 aa, Glycine max
  unsure (1)..(90): unsure at all Xaa locations
  Clone ID: PAT_MRT3847_10837C.1.pep
MFFIIGSPPPPFFFQFFLYYFPTFSFDHIKYVNAVSYIQLHLYNYTFTAFHFNNSYFFXHFIIYIIYSSFKFFFIQSLLFYLFFPKLFIY

SEQ ID NO: 152112 - protein, 56 aa, Glycine max
  Clone ID: PAT_MRT3847_108380C.1.pep
NFFFFEGGCKKWKTMGPDNSIKFHQFEFFLKKIKPFLKLICPLNFSTIGTVPWTHV

SEQ ID NO: 152113 - protein, 112 aa, Glycine max
  Clone ID: PAT_MRT3847_108381C.1.pep
MIQEMLGGASASHIPGERKISINNGGRGRALLLTPPTSSSSPSCTTSITTTGTGTVTLSNSENQNLRCPRCDSSNTKFCYYNNYNLTQPRHFCKTGRRYWTKSGALQNVPIG

SEQ ID NO: 152114 - protein, 53 aa, Glycine max
  Clone ID: PAT_MRT3847_108382C.1.pep
RDAYIGQCLLRKTLYRMEMGMTASIDLLDPLMNTGPKHAGLPAFAIVSHNRTW

SEQ ID NO: 152115 - protein, 71 aa, Glycine max
  Clone ID: PAT_MRT3847_108383C.1.pep
MAGPILRSLWSSTRKSFSSSFSSSSSPSAPFSHSRFFSRTFAAAPAAATTATTASSLDPSHLRNVAVIAHV

SEQ ID NO: 152116 - protein, 568 aa, Glycine max
  Clone ID: PAT_MRT3847_108384C.1.pep
MDTFKAPKESKSDEESPNGVGKCGRYEEEGGGIRLGQVGVFGDGCKGKHEAPSRGTLANTTPVRGRLHGFAGTIVVSSPQAAELFLKTHDLVFATSYGTITHPRAAPLSRISCGGPRPPKSKKSNLNSEAQELVRLLTSKIRSNDKEVLLKTLNKYVKQVFRWMQKQRWYIADNGIYSKLISVMGKKGQTRMAMWLFSEMRNTGCRPDTSVYNALITAHLRSRDKIKALAKAIGYFQKMKGMERCKPNIVTYNILLRAFAQARNVEQVNSLFKDLDESIVSPDIYTFNGVMDAYGKNGMIREMEAVLARMKSNQCKPDLITFNLLIDSYGKKQAFGKMEQVFKSLLHSKERPSLSTFNSMILNYGKARLKDKAEDVFQKMTDMGYTLSFVTHESMIYMYGFCDCVSRAAQLFDELVESKVHIKVSTLNAMLDVYCLNGLPQEADSLFERAISIKIHPDSSTFKLLYKAYTKANQKELLDKLLKHMDKDGIIPNKRFFLDALGAVASLPANSESANAATDSNTANSESANAATDSNASNSESAYAATDSNNPQDFAKLATGVKNILAHR

SEQ ID NO: 152117 - protein, 274 aa, Glycine max
  unsure (1)..(274): unsure at all Xaa locations
  Clone ID: PAT_MRT3847_108385C.1.pep
ANLQLQLRKTQNSNSELLLAVTDLEAMLEQKNNEILDLSTNTKSQKITKEHDDATELDRLRQKIADQDEEIDNYYKQHEELSEQIKELTLEYDLLKKENVDISLRLKQDEAQHIKLQNEHSSCLVTIQQLESQVERLDERLKVQEEEFSASLVCIKELENEVKSLEKELKLQADQFEEDLHAMQCAKTEQEERAIQAEEALRKIRHNNVVASERFEEEYRLLSVEMSXKVEENEKMTMKAVAEADALRHQNKLIEEMLHKCNEELRLITDQNEF

SEQ ID NO: 152118 - protein, 651 aa, Glycine max
  unsure (1)..(651): unsure at all Xaa locations
  Clone ID: PAT_MRT3847_108386C.1.pep
MDTFKAPKESKSDEESPNGVGKCGRYEEEGGGIRLGQVGVFGDGCKGKHEAPSRGTLANTTPVRGRLHGDSSGLQLGFTVIRLTVARLMHCFDWKLPNDMLPDHLDMTDEFGLTVPRANHLHAIPTLSSCSSSPSFAASYGTITHPRAAPLSRISCGGPRPPKSKKSNLNSEAQELVRLLTSKIRSNDKEVLLKTLNKYVKQVRTQHCFLLFEELGKHDNWLQCLEVFRWMQKQRWYIADNGIYSKLISVMGKKGQTRMAMWLFSEMRNTGCRPDTSVYNALITAHLRSRDKIKALAKAIGYFQKMKGMERCKPNIVTYNILLRAFAQARNVEQVNSLFKDLDESIVSPDIYTFNGXVMDAYGKNGXMIREMEAVLARMKSNQCKPDLITFNLLIDSYGKKQAFGKMEQVFKSLLHSKERPSLPTFNSMILNYGKARLKDKAEDVFKKMTDMGYTLSFVTHESMIYMYGFCDCVSRAAQLFDELVESKVHIKVSTLNAMLDVYCLNGLPQEADSLFERAISIKIHPDSSTFKLLYKAYTKANQKELLDKLLKHMDKDGIIPNKRFFLDALGAVASLPANSESANAATDSNTANSESANAATDSNASNSESANAATDSNASNSESAYAATDSNNPQDFAKLATGVKNILAHR

SEQ ID NO: 152119 - protein, 65 aa, Glycine max
  Clone ID: PAT_MRT3847_108387C.1.pep
LSLKTNVCGIYLLQSCCGFRFYTKFWSTHLGKENSSCRISDGILEKKVHEDSEVLEIGITWDALI

SEQ ID NO: 152120 - protein, 148 aa, Glycine max
  Clone ID: PAT_MRT3847_108388C.1.pep
KALSGRNLIGFGEPTDPQIISVLRSNNTSGLQMCLRDGTWASIQPDHTSFFVNVGDLLQVMTNGSFKSVKHRVLANSSMSRLSMIYFGGPPLNEKIAPLPSLVSREEESLYRELTWREYKNAAYKSKLSDNRLSLFDKFADHSDKSPL

SEQ ID NO: 152121 - protein, 72 aa, Glycine max
  Clone ID: PAT_MRT3847_108389C.1.pep
AELIRVDNNDKRVINQIPLTLHARTYASLVLGGNQQGPPLMIDVRITLTLSLSSLASCWESNAPVHPTKVAS

SEQ ID NO: 152122 - protein, 65 aa, Glycine max
  unsure (1)..(65): unsure at all Xaa locations
  Clone ID: PAT_MRT3847_10838C.1.pep
QFSHSPITYLLSPYLPSIISSIYHNPSLQPYILQHTFSFTXIPLSNLLFQQSSFLSFIQSFLQTI

SEQ ID NO: 152123 - protein, 162 aa, Glycine max
  Clone ID: PAT_MRT3847_108390C.1.pep
KEVGLAAFDLRSAHASLSQYIETSSSYQNTKTLLHLYDPIVIIIPPNKLASNSTAGVTELVDRFYGSVKQVMLARGCFDDTKGAILIKNLAAKEPSALGLDTYYKQYYLCLAAAAATLKWTEAEKGVVVTNHSLSVTFNGSFDHMNIDSTRSRLLRANLLQP

SEQ ID NO: 152124 - protein, 269 aa, Glycine max
  unsure (1)..(269): unsure at all Xaa locations
  Clone ID: PAT_MRT3847_108391C.1.pep
LEISITGVPHDAVQVFIRFLYTSSCEKEEMDEFVLPLLVLSHVYVVPHLKRECEQKLELSLLTIDNVVDVFQLALLCDAPRLNLICHRKVLKNFKVVSETEGWKTMKLSHPALEKEIVESMVDEDIIKKEKIRKNKEREIYLQLYEAMEALXHICRDGCRTIGPHDKDSIANQPCKYTACNGLELLVRHFAGCKLIVRGGCVHCNRMWQLLELHSRLCVDPDYCRVPLCRNFKERISKQIKKDEIRWKILVQKILRTRGIGIASCFLPQ

SEQ ID NO: 152125 - protein, 58 aa, Glycine max
  unsure (1)..(58): unsure at all Xaa locations
  Clone ID: PAT_MRT3847_108392C.1.pep
TVGSFPGEKGLXXGDLEGQEEDQCASLITGGTSGMRQSXAKSKTAXCGGLKGXESGRG

SEQ ID NO: 152126 - protein, 43 aa, Glycine max
  Clone ID: PAT_MRT3847_108393C.1.pep
TFHSWNHIENNNTRTLLKNEIAAAITMTDIFVFLVDTVPREDF

SEQ ID NO: 152127 - protein, 85 aa, Glycine max
  unsure (1)..(85): unsure at all Xaa locations
  Clone ID: PAT_MRT3847_108394C.1.pep
FPPAXVKRXXXRXXDQADXXXETTSPPFXSEEGVVRGRGDNVVRGQTACVVANREGWDAIWSGRSGAVWQCVGSLSGTSWWCLVD

SEQ ID NO: 152128 - protein, 92 aa, Glycine max
  Clone ID: PAT_MRT3847_108395C.1.pep
FYNLPPLFNSNSLEPSPANLNARHPPGDNVFPAGPKQAVLGSSGCTSMTMQVPLSSAVRSASAFSRRVLDHPVYVLVLVREAVAYSSNSQNR

SEQ ID NO: 152129 - protein, 65 aa, Glycine max
  Clone ID: PAT_MRT3847_108396C.1.pep
IQPNRTYMEMYELPLPNNSQTILSTTVNLHRPRLILSNCSSICLYGMCSPPKHAMTNPFYVRLKR

SEQ ID NO: 152130 - protein, 55 aa, Glycine max
  Clone ID: PAT_MRT3847_108397C.1.pep
GRCFRPTIGGGCPLKLALSCLVLLCEFFSSFFHPSCWKVSCIPGCLGVTYSFYWI

SEQ ID NO: 152131 - protein, 76 aa, Glycine max
  Clone ID: PAT_MRT3847_108398C.1.pep
MSSQENGRPLPKFGEWDVNNPASAEGFTVIFNKARDEKKTNTATATPTPRRSDPVFKNENYNNPQYSGKRKWFCCG

SEQ ID NO: 152132 - protein, 51 aa, Glycine max
  Clone ID: PAT_MRT3847_108399C.1.pep
PTRFFIFPPTRIRRKPSLWEPLYKVKTYYSHYPLLRAVYRTPYEGLRAYIV

SEQ ID NO: 152133 - protein, 112 aa, Glycine max
  Clone ID: PAT_MRT3847_10839C.1.pep
LLLIEYSISDLRFKPSQIVMVRGPALLCCSPALLLLSISLQSSNVWNTSITYSFHFDQPLFIYFSLFLPIPPFSLLPILLLFSSPTAQFSLSQYSCILCSVVLRLCFHVFPS

SEQ ID NO: 152134 - protein, 72 aa, Glycine max
  unsure (1)..(72): unsure at all Xaa locations
  Clone ID: PAT_MRT3847_1083C.1.pep
ILXXXLHPCPXWSTPTXSXFFHLIXPTIPHPSSNAPXRXXGGSDXXRERRMRNGVRLRXLXXIVIDGXEPGM

SEQ ID NO: 152135 - protein, 151 aa, Glycine max
  unsure (1)..(151): unsure at all Xaa locations
  Clone ID: PAT_MRT3847_108400C.1.pep
MEEEQEVVELEDLEVVCGYECETSILNLDSIDKFEMFLLHHQKKKITFFYIKKYLLNYIMIFLFSFLLFIYFFYLLCNKTFLNFFYFFVTVIYCLYCFINNFYIMIFXYIFLIFIKXCLLLETYYFFYNLFFFKSKLIIFFIYYILMFLLF

SEQ ID NO: 152136 - protein, 162 aa, Glycine max
  Clone ID: PAT_MRT3847_108401C.1.pep
GIPGSTHASGDVLFLMEDIQALKPTLFCAVPRVYDRVYAGISSKISSGGALQSTLFQYAYNYKLGYLEKGLPQDKAAPLFDKLVFDKIKQALGGRVRLLLSGAAPLPRHVEEFLRVTFGATMSQGYGLTESCGGCFTAISNVFSMMGTIGVPMTTIECRLES

SEQ ID NO: 152137 - protein, 151 aa, Glycine max
  Clone ID: PAT_MRT3847_108402C.1.pep
MSVVGFDFGNESCIVAVARQRGIDVVLNDESKRETPAIVCFGDKQRFIGTAGAASTMMNPKNSISQFKRLIGRKFSDPELQRDLKSLPFLVTEGSDGYPLIHARYMGESKTFTPTQVFGMMLSNLKEIAEKNLTTAVVDCCIGIPVYSTDL

SEQ ID NO: 152138 - protein, 143 aa, Glycine max
  Clone ID: PAT_MRT3847_108403C.1.pep
MSVVGFDFGNESCVVAVARQRGIDVVLNDESKRETPAIVCFGDKQRFIGTAGAASTMMNPKNSISQIKRLIGRKFADPELQRDLKSLPFLVTEGSDGYPLIHARYMGEAKTFTPTQVFGMMLSHLKEIAEKNLTTAVADCCIG

SEQ ID NO: 152139 - protein, 80 aa, Glycine max
  unsure (1)..(80): unsure at all Xaa locations
  Clone ID: PAT_MRT3847_108404C.1.pep
FXXKCQXSXTSAFXYXXXXVILXHLXXCMLXNIDGHQVPQHIMXEVGDTXKRXLAEXRSLLHMXSGASXNHECGXGYLKL

SEQ ID NO: 152140 - protein, 102 aa, Glycine max
  Clone ID: PAT_MRT3847_108405C.1.pep
MHDHSHQYPLPCLYCHPYSYIRMVQNLIERCMLFHMSQDQCIRALAEHAGIKPLVTVTVWKELQKENKEFFRAYLQVVTPRPLFMSRCFQRRPNLARRKHWK

SEQ ID NO: 152141 - protein, 172 aa, Glycine max
  unsure (1)..(172): unsure at all Xaa locations
  Clone ID: PAT_MRT3847_108406C.1.pep
EKTRNXKXKXLXXFXATXXXAXQGHAXEXGPVRMNTGYGARTAEVKCASWRLGGEAHIFFGFETIPEECVEATKEYIHGEQYRXDCKTGNQQAYFYARDLEVHAKDTCXLSIDGTELCNIAYYRKHGCGGEKWNWTLGDEWGNKGNGPGLWETVENDIKVRSVGLEMIWVGG

SEQ ID NO: 152142 - protein, 112 aa, Glycine max
  Clone ID: PAT_MRT3847_108407C.1.pep
GCLTYLSSRGACLLCKLPVLYCAVTLRFHQTGRPFEGQLPPVTCRPTHTAPCRKCSSSVTTYIARLKVLFAAAPVSCIYSFAKLCTLIALLGYPLHLGFLGLPSCLCLPHNR

SEQ ID NO: 152143 - protein, 75 aa, Glycine max
  unsure (1)..(75): unsure at all Xaa locations
  Clone ID: PAT_MRT3847_108408C.1.pep
NHRDLGAFNLPMYSLATSWYXXIIYIYMSIYXSYLCSSQKKKGDLSLCGCAILAPGPRTSLVTNNNNENKQAFFY

SEQ ID NO: 152144 - protein, 46 aa, Glycine max
  Clone ID: PAT_MRT3847_108409C.1.pep
RSEIINFFWTKYIFRLKYFEYKHLNNGTIKFVEISNKKYGFRNYFR

SEQ ID NO: 152145 - protein, 63 aa, Glycine max
  unsure (1)..(63): unsure at all Xaa locations
  Clone ID: PAT_MRT3847_10840C.1.pep
SIXXXXXQAXXXSCYDRXTFQLLHLSXTXSXLXGRLXVXFPHXLPXXXGXILLSVXDANXDDV

SEQ ID NO: 152146 - protein, 98 aa, Glycine max
  Clone ID: PAT_MRT3847_108410C.1.pep
GQNTKTNNWQNTPIYYPNVKKKFPGGHNPLFHRGPKKGRTPLFFNQKTPKNPFCLAPVTSTPSQWKKQGPPKKLKGANGGGLNKLRQPPLEAPKNRGG

SEQ ID NO: 152147 - protein, 440 aa, Glycine max
  Clone ID: PAT_MRT3847_108411C.1.pep
MVKNKVPDWLNSSIWSSSSPSSPPSSAVASPFEQPPRPPSPAVVTPFEPPPPRPPSPPSVHDPLPTQRIDDSPREDHGDGFRSAHDVSRQAQLLAELSKKVVDMSELRSLACQGIPDAAGIRSTVWKLLLGYLPPDRGLWSAELAKKRFQYKQFKEEIFMNPSEITRKMYNSANCDTDDASCARALLSRSEITHGEHPLSLGKTSVWNQFFQDTEIIDQIDRDVKRTHPDMHFFSGDSQFAKSNQEALKNILIIFAKLNPGVRYVQGMNEILAPLFYVFKNDPDEENAAFAEADAFFCFVELLSGFRDNFVQQLDNSVVGIRATITRLSQLLREHDEELWRHLEVTSKVNPQFYAFRWITLLLTQEFNFADSLHIWDTLLSDPDGPQETLLRVCCAMLVLVRKRLLAGDFTSNLKLLQNYPTTNISHLLYVANKFRVQSV

SEQ ID NO: 152148 - protein, 51 aa, Glycine max
  Clone ID: PAT_MRT3847_108412C.1.pep
NSNTVMGCCVSSSHKTSTSSLAKFHDPPKPLTKPSESNSTVEETVEGSALG

SEQ ID NO: 152149 - protein, 458 aa, Glycine max
  Clone ID: PAT_MRT3847_108413C.1.pep
MVKNKVPDWLNSSIWSSSSPSSPPSSAVASPFEQPPPPPPRPPSPAVVTPFEPPPPRPPSPPSVHDPPPTQRIDDSPREDHGDGFRSAHDVSRQAQLLAELSKKVVDMSELRSLACQGIPDAAGIRSTVWKLLLGYLPPDRGLWSAELAKKRFQYKQFKEEIFMNPSEITRKMYNSANCDTDDASCARALLSRSEITHGEHPLSLGKTSVWNQFFQVGESLKTLKELLNMVDCTDTEIIDQIDRDVKRTHPDMHFFSGDSQFAKSNQEALKNILIIFAKLNPGVRYVQGMNEILAPLFYVFKNDPDEENAAFAEADAFFCFVELLSGFRDNFVQQLDNSVVGIRATITRLSQLLREHDEELWRHLEVNPQFYAFRWITLLLTQEFNFADSLHIWDTLLSDPDGPQETLLRVCCAMLVLVRKRLLAGDFTSNLKLLQNYPTTNISHLLYVANKFRVQSV

SEQ ID NO: 152150 - protein, 77 aa, Glycine max
  Clone ID: PAT_MRT3847_108414C.1.pep
ERERTSLDFFFFFFFFFLFNLLIVLFNPLTQFHAIVFVFFWERWMDMQLPTQYYTALVINFFAVSFFFFVRKILIVR

SEQ ID NO: 152151 - protein, 50 aa, Glycine max
  Clone ID: PAT_MRT3847_108415C.1.pep
GLYSLTCFVVVWVLVIGFGLGGWASMINFIHQIDTFGLFVKCYQCPPHKA

SEQ ID NO: 152152 - protein, 72 aa, Glycine max
  Clone ID: PAT_MRT3847_108416C.1.pep
CVVSRALNIMSSFSKLQIEHASIDASGIGTGTVQRNGSQGLRFILWSVLVASRGRCRRLVGNLRLLGRSIST

SEQ ID NO: 152153 - protein, 64 aa, Glycine max
  Clone ID: PAT_MRT3847_108417C.1.pep
NCYSLYTMILDIHIHTDGQWRLEANKLNVAERILNISLQLILIWKCMGLKICFWCECNRPSMVI

SEQ ID NO: 152154 - protein, 164 aa, Glycine max
  Clone ID: PAT_MRT3847_108418C.1.pep
MIEVQANAMEQSWWANMPHELLREVLLRIESSESTWPLRRSVVACGGVCRTWRRLIVKEIVKPPQFSSNITFPISLKQPGPREHLLQCFIRRNSASQTYYLFLSLSSALVADDGKFLLAARKFRRPTCTDYIIFLDADDMSRESNAYVGKLRSNFLGTKFTIYD

SEQ ID NO: 152155 - protein, 215 aa, Glycine max
  Clone ID: PAT_MRT3847_108419C.1.pep
MKASTASDTQKNKEFEDPEFDEEDSLQIAMDEHDDIETMAIEDVAYNNNGKGSLSQESGKSGNSGSEIGDSARSLAQVDPISGGEMATGFPSTFNGVRSLQDSPVGSPVSWNSRVPHPFSYPHESSDIDASIDSPIGSPASWNSHSLNQGDNDAARMRKKWGSAQKPFLVANSSQNQPRKDVTKGFKRLLKFGRKTRGSKSLADWISATTSEGDD

SEQ ID NO: 152156 - protein, 51 aa, Glycine max
  Clone ID: PAT_MRT3847_10841C.1.pep
CCITSPFPILFFLKVRFIISLIKSKNKMKLKNEKREEPIIRNEPHTSCFID

SEQ ID NO: 152157 - protein, 329 aa, Glycine max
  unsure (1)..(329): unsure at all Xaa locations
  Clone ID: PAT_MRT3847_108420C.1.pep
MIEVQANAMEQSWWANMPHELLREVLLRIESSESTWPLRRSVVACGGVCRTWRRLIVKEIVKPPQFSSNITFPISLKQPGPREHLLQCFIRRNSASQTYYLFLSLSSAQYLDDATFLLAARKFRRPTCTDYIISLDAVDMSRESNAYVGKLRSNXGSSKFTIYDRKSCSTELVVNSKLIXCEKVVPLSYFWQPSWLFHHKMDMLDCKRMKSFSNLEKLGRTCLQWITSTLSHHFKHLQSASTASLPRLLANDACLNMSHQRTNTCFIIKRTYQLFTTTXTPRGLQKQQVILQFGKIGKDLFTMDYRYPISAFQAFAISFGSFATTVACE

SEQ ID NO: 152158 - protein, 92 aa, Glycine max
  Clone ID: PAT_MRT3847_108421C.1.pep
VRFVSSSLGVLLGLCFCAVCVALSLRLVFFGWCLSGPSVVLRAPFASSCWWWVCLALSGSSASVVSGGRVPFLNINLRSLRARGSAWLFRFG

SEQ ID NO: 152159 - protein, 83 aa, Glycine max
  Clone ID: PAT_MRT3847_108422C.1.pep
TVTLFPSMHYGWAVDCRWYYHGRYFYDPKDEDLQDSQQVNSILVYINALWVIDCRWGYLDPYFFISITTFFAQKMKFYNILDA

SEQ ID NO: 152160 - protein, 101 aa, Glycine max
  unsure (1)..(101): unsure at all Xaa locations
  Clone ID: PAT_MRT3847_108423C.1.pep
TMTNTEAFQIKSISELLIHPLLWRLTGFVSSVFGXSCYAFSPSFHDLFGHWNPLKISFYTVVSSLLSIFMLFVKRCSGEHGKGFLLKAHVGFVVXGLTSLW

SEQ ID NO: 152161 - protein, 131 aa, Glycine max
  Clone ID: PAT_MRT3847_108424C.1.pep
GIRLEPMHIMKTDSIASVKLRIQTFKGFFVKKQKLVFEGKELARNRSCIRDYGVGDGNVLHLVLRLSDLKAITVRTMCGKEFGLYVEKSRSVGYVKQHIAKKGQGFLDHKDQKLICEGEELEDHRLIEDIC

SEQ ID NO: 152162 - protein, 219 aa, Glycine max
  unsure (1)..(219): unsure at all Xaa locations
  Clone ID: PAT_MRT3847_108425C.1.pep
RTLRSGCVPVPQTHVLLSSAWLDQHCLSHSVANILLQMQSIGYHPDCGTCNYLLSSLCAVDQLEEAVKVLRGMGGAGCIPDSSSYGAVIGAMCRVRKTAKALDLMKQMVVQYGLTPGQGTLVKLLAALRANREIWKAVEMIEFLEKEGNSVGFRGYELVIEGCLEKREYVLAAKVATGMTERGFIPYIXVRXKIIXSLASIDKWNLXCAVKQKFAXLKS

SEQ ID NO: 152163 - protein, 97 aa, Glycine max
  Clone ID: PAT_MRT3847_108426C.1.pep
ELFLNLTPFVFSKSPPILLMVGTIFFNLDHHFGPKLKFQLEAFFFWGILKLAQKKFGVFSPPQRVPLGALFFFFWQKPFLGKMYVNFSCDKTSRNFF

SEQ ID NO: 152164 - protein, 109 aa, Glycine max
  Clone ID: PAT_MRT3847_108427C.1.pep
MNSNIDSTDHSQDQSRKRNLPDADDSPAPNFHIDSSDHNQDQSKKRKQPNDEDSPSLESPCSNMNPRRYQIEVYEVARRRNTIAVLDTGSGKTLIAVMLMKEVGQAIKT

SEQ ID NO: 152165 - protein, 132 aa, Glycine max
  Clone ID: PAT_MRT3847_108428C.1.pep
KKKKKKKKKKKKKKKKKKKKKKKKKKKKKKKKKKKKRGNGFKGFSGSLRGAPCSLAFFLGGLGFLWWARCFPALPPGYPLGVPPAYPLCAPLPFSPLWLGGLRGRARDRPFPPVATPLFWPVGPPAWGGRLR

SEQ ID NO: 152166 - protein, 105 aa, Glycine max
  unsure (1)..(105): unsure at all Xaa locations
  Clone ID: PAT_MRT3847_108429C.1.pep
VVFWRFVVSPVVAVVSXRLCGFPGVRFCCRVFPFVGSALVGARASSFGGGAPLCXPSSVFRAARASCPCLGGAFLLPCLLVSPRPFCGLLAAIQARGSARGFRAG

SEQ ID NO: 152167 - protein, 56 aa, Glycine max
  Clone ID: PAT_MRT3847_10842C.1.pep
LSLKPELATPDKTMTIPFAPPCTTSATLSPSNPGNHRIPVRLNAFGKQHATLYIML

SEQ ID NO: 152168 - protein, 132 aa, Glycine max
  Clone ID: PAT_MRT3847_108430C.1.pep
GQKPISSVNEQGLQSLASYFLLCMEENRFFDIVDARVMQEVEKEHIIVVANLARRCLQLNGRKRPTMKEVTLELESIQKLENQCNAQEQQEELELAGNEDSQFWAAYSTTSTAGQTSDSKTSTLEIMPILIK

SEQ ID NO: 152169 - protein, 135 aa, Glycine max
  Clone ID: PAT_MRT3847_108431C.1.pep
RIFKTGKPKEFQRPAKPKSQPNYPGKQRKNFFKRAPKMKKTGRGLKTPEREKPGVNQNKCPGKKPPFPKWGKKKKGPPQGPFQKVANPKGEREPPLNRAIKAGGGGGNPKGNPKICQPPKPRPFGFLPFLLTKVG

SEQ ID NO: 152170 - protein, 366 aa, Glycine max
  Clone ID: PAT_MRT3847_108432C.1.pep
MGLRSKLRMSASVVQQGMKEIRRSVTYMPRPGDGAPRGVTLIPGDGIGPLVTHAVEQVMEAMHAPIYFEKYDVHGDMRRVPEEVLDSIRKNKVCLKGGLRTPVGGGVSSLNVQLRKDLDLYASLVNCFNLPGLPTRHHNVDIVVIRENTEGEYSGLEHEVVPGVVESLKVMSKFCSERIAKYAFEYAYLNNRKQVTAVHKANIMKLADGLFLESCRHVATKYPGIKYNEIIVDNCCMQLVSKPEQFDVMVTPNLYGNLVANTAAGIAGGTGVMPGGNVGADHAVFEQGASAGNVGKEKMVEQKKANPVALLLSSAMMLRHLQFPSFADRLETAVKRVISEGNCRTKDLGGDSTTQQVVDAVIANLD

SEQ ID NO: 152171 - protein, 209 aa, Glycine max
  Clone ID: PAT_MRT3847_108433C.1.pep
RTRGVCIIYDPSRSDQGVLALKALKLSDSFMELYRSNNFTGEKLREKNLSWVDIFEEIPIKVSNSALISAFMTELEPDTPVTQCDYDRLQLSTSSLMERNTEFLIECMDDLSLEQQKFQFYYRSLSRQQAQQQAWLQKRRAENMARKAAGEEPLPEEDPSNPIFKPLPEPSRLESFLITNQISNYCNQINGVSGQSFNRLYLMKALHED

SEQ ID NO: 152172 - protein, 206 aa, Glycine max
  unsure (1)..(206): unsure at all Xaa locations
  Clone ID: PAT_MRT3847_108434C.1.pep
VCIIYDPSRPDQGVLALKDLKLSDSFMELYRNNNFTREKXLREKNLSWVGIFEEIPIKVSNSALISAFMTELEPDTPVTQCDYDRLQLSTSSLMERNTEFLIECMDDLSLEQQKFQFYYRSLSRQQAQQQAWLQKRRTENMARKAAGEEPLPEEDPSNPIFKPLPEPSRLESFLITNQISNYCNQINGVSGQSFNRLYLMKALHED

SEQ ID NO: 152173 - protein, 349 aa, Glycine max
  Clone ID: PAT_MRT3847_108435C.1.pep
MAAMAMLRLSPLSGQNHVLSFPSSPSPPPPKLHNRPLYLTNLPHLPQRLKLSFAGGAGGDGVGRGGGSGGGGGGGESWGDDDGKSKDSSLGILGLFLNGWRSRVAADPQFPFKVLMEELVGVSACVLGDMASRPNFGLNELDFVFSTLVVGAILNFTLMYLLAPTMTSSASNLPALFASCPKSHMFEPGAFSLLDRLGTLVYKGTIFSVVGFGAGLVGTTLSNGLIKMRKKMDPTFETPNKPPPTILNALTWAAHMGISSNLRYQTLNGVEFMLERVLNPLAFKSSVLVLRCVNNVLGGMSFVVLARLTGAQSVGGEQKENEVALIAEKEKVVESEREEGLQNNQSTAP

SEQ ID NO: 152174 - protein, 224 aa, Glycine max
  Clone ID: PAT_MRT3847_108436C.1.pep
MAAMAMLRLSPLSGQNHALSFPSSPSPPPKLQNRPLYLTNLPHLPQRLKLSFAGGDGGDGVGRGGGGGGGGESWGDEGKPKDSSFGILGLFLNGWRSRVAADPQFPFKVLMEELVGVSACVLGDMASRPNFGLNELDFVFSTLVVGAILNFTLMYLLAPTMTSSAASNLPALFASCPKSHMFEPGAFSLLDRLGTLVYKGTIFSVVGFGAGLVGTHFQWADQDE

SEQ ID NO: 152175 - protein, 51 aa, Glycine max
  unsure (1)..(51): unsure at all Xaa locations
  Clone ID: PAT_MRT3847_108437C.1.pep
GSPTINTNNDLPSIACGGGAVPCMQVAPPLGTSNXETITYLPHLDDAALVK

SEQ ID NO: 152176 - protein, 145 aa, Glycine max
  Clone ID: PAT_MRT3847_108438C.1.pep
VADFGLSKLLNRDNLHSNSTVSMIRGTRGYMAPEWVYNLPITSKVDVYSYGIVLLQMITGKSPTTGVQSIDGEESHNGRLVTWVREKRSATSWLEQIMDPAIKTNYDERKMDLLARVALDCVEEKKDSRPTMSQVVEMLQSHETN

SEQ ID NO: 152177 - protein, 55 aa, Glycine max
  Clone ID: PAT_MRT3847_108439C.1.pep
IMCTQLGSLALERRPFMKAQGSFPICAARPPLGKSPRGSIDYRAPPKHLSMNVFI

SEQ ID NO: 152178 - protein, 149 aa, Glycine max
  unsure (1)..(149): unsure at all Xaa locations
  Clone ID: PAT_MRT3847_10843C.1.pep
MIGFDWTFSKFFWYLFFMFFTFLYFTFYGMMAVGLTPDHNVATIVSFGFYMIWNLFSGFVIPRTRMPVWWRWYXXICPVSWTXYGLVTSQFGDIKERIDTGETVEEFVRSYFGYRDDFVGVAAAVLVGFTLLFGFTFAFSIKAFNFQKR

SEQ ID NO: 152179 - protein, 86 aa, Glycine max
  unsure (1)..(86): unsure at all Xaa locations
  Clone ID: PAT_MRT3847_108440C.1.pep
IFIIYFLIYSVYSFLFLEGVFFRFLLARCFPSSSIAPIXIHRXSSLAPSPAASPPRTYRASPLYRHQSKRSTRGRRTRAHRSFCIP

SEQ ID NO: 152180 - protein, 122 aa, Glycine max
  Clone ID: PAT_MRT3847_108441C.1.pep
KAEKAVLEALSDSIYHTLLPAVNLCDLPPDTKIETLMSHTALRSLTYLRQAFHSLFGTNTLYAGVVDLFSTDAFDVAGEFNAFPYAFYASTATELYLVFQLSSFDQQVQCEFRDLPEPVSIP

SEQ ID NO: 152181 - protein, 80 aa, Glycine max
  Clone ID: PAT_MRT3847_108442C.1.pep
TLKLFICVGNPLDVTHPPYNPPLKQETTRKLDLLLMVEYRCSLTHSTACHKNKAVCSEPMPSLRSISTTTMAFAPNLYTS

SEQ ID NO: 152182 - protein, 72 aa, Glycine max
  Clone ID: PAT_MRT3847_108443C.1.pep
IGYIESQRNAKLDPYKKLDPGGNYCNPLNLASDPQNKATLQLTKIKHTHLTIRNFLSFATRTATTCESPLNN

SEQ ID NO: 152183 - protein, 111 aa, Glycine max
  unsure (1)..(111): unsure at all Xaa locations
  Clone ID: PAT_MRT3847_108444C.1.pep
XTXXTEQAXXLVXXGXAQSHGXXGEFGTDGVGRXXSEXGXQXEXVGTVGXXXSAXXVMXQVHXXXALXLLCFTSVEXDQQQQHQLLPXSXNHLSXTHSSSRIPSLRTRXXX

SEQ ID NO: 152184 - protein, 117 aa, Glycine max
  unsure (1)..(117): unsure at all Xaa locations
  Clone ID: PAT_MRT3847_108445C.1.pep
VEIVMSGNATDTRSDWASLVQVFLSNSSGTEHYDACRWTKSEPHCWELIFPIEXVCGPNNGYEMWSSEWADQTSWHLSLLIDTPRQTTVYDILLGVSHDLDIAGNTLMPAPYVPQAT

SEQ ID NO: 152185 - protein, 72 aa, Glycine max
  Clone ID: PAT_MRT3847_108446C.1.pep
MKEHCLFLTYIDMACHIDGFITAVAHTHVLQEGPVAATNTAAEVALRLVRPGKKVINCNNFFLLDLHLYNTS

SEQ ID NO: 152186 - protein, 190 aa, Glycine max
  Clone ID: PAT_MRT3847_108447C.1.pep
MGRAPCCDKNGLKKGPWTTEEDQKLIDYIQKHGYGNWRTLPKNAGLQRCGKSCRLRWTNYLRPDIKRGRFSFEEEETIIQLHSILGNKWSAIASRLPGRTDNEIKNYWNTHIRKRLLSMGIDPVTHSPRLAHVDISSTRSAALHGPSQRIFLWLLAMHQPMAPPQPPVRAAPRASTSRLLPLLPLAAPPP

SEQ ID NO: 152187 - protein, 62 aa, Glycine max
  unsure (1)..(62): unsure at all Xaa locations
  Clone ID: PAT_MRT3847_108448C.1.pep
MCTALYLFCLSQMTKVPWHRPCFLCLRHRAISYQXRVYTFSYPPSPSPGKCSRRSNCLCISP

SEQ ID NO: 152188 - protein, 106 aa, Glycine max
  unsure (1)..(106): unsure at all Xaa locations
  Clone ID: PAT_MRT3847_108449C.1.pep
MGRAPCCDKNGLKKGPWTTEEDQKLIDYIQKNGYGNWRTLPKNAGLQRCGKSCRLRWTNYLRPDIKRGRFSFEEEETIMQLRFILGNKWTGIAXRFPGRIHDEIKN

SEQ ID NO: 152189 - protein, 52 aa, Glycine max
  Clone ID: PAT_MRT3847_10844C.1.pep
RRSDYVGVCAYAISYMLSGGDWSHYNQHLNVPLGHRFRASMAVYLPSTMLGM

SEQ ID NO: 152190 - protein, 64 aa, Glycine max
  Clone ID: PAT_MRT3847_108450C.1.pep
FSLALLIVPVLIFLSLRLPSSATLLLNMEYRLLPIFTLLNVSFSIQTTVACMLINTLFKVMVSF

SEQ ID NO: 152191 - protein, 132 aa, Glycine max
  unsure (1)..(132): unsure at all Xaa locations
  Clone ID: PAT_MRT3847_108451C.1.pep
VSSWISAFGYFDIRDWLTFLRGVAPYPGLRLAFGSFPWDKGCVRGSIRGVGFPFVMGVFXSXLRPCCPXFSGFARPSGRCCXLFCRVVFLXGGFGCXALPXPPLWGSLVSSLAPCPXLFWLXXXDKKRNXXX

SEQ ID NO: 152192 - protein, 67 aa, Glycine max
  Clone ID: PAT_MRT3847_108452C.1.pep
MMSLFIEAQSTLSAKQVLRLYRDLKPAWQNREYHPRDPLSGGKFFYKCRRKEQAQKAKLLADKLRVI

SEQ ID NO: 152193 - protein, 165 aa, Glycine max
  Clone ID: PAT_MRT3847_108453C.1.pep
SPTRPELSKSATLCEKIGSINGAILILVGMTSSKSEDLLTVEKADKTLENLEKCESNVRQMAENGRLQPLLTQLLEGPPETKLSMATYLGELVLNNDVKVLVAGTVGSSLINIMKSGNMQSREAALRALNQISSCYPSAKILIEAGILSPLVNDLFAVGPNLLPT

SEQ ID NO: 152194 - protein, 67 aa, Glycine max
  Clone ID: PAT_MRT3847_108454C.1.pep
FAVAIVGVGGVRTVSAEMLTICGIGRLLSDDCDQVELANMNRLSFRPNQVGLTQTDGAAHTLTDINP

SEQ ID NO: 152195 - protein, 145 aa, Glycine max
  Clone ID: PAT_MRT3847_108455C.1.pep
LMGVKVLQQAIIDLLLDIMVECCQPSEVGPVADSVDACSKPSPNGSGAASPLECERENGAMESARVPVCERLDSVVQESSNASAVQSSDLKGNGIQEKALPGQPICPPETSATASENASLRSKTKWPEQSEELLSLIVNSLRALD

SEQ ID NO: 152196 - protein, 162 aa, Glycine max
  Clone ID: PAT_MRT3847_108456C.1.pep
MLASSLSFLHSCTSPSSSSLLSISPPNPKPSHFLPFVVEAKDRTRREDRTARHTRIRKKVEGTPERPRLSVFRSNKHLSVQVIDDTAMRTLASVSTMQKTVADEFNYSAGPTVEVAKRMGEIIAKSCLEKGITKVAFDRGGYPYHGRVQALAEAAREHGLDF

SEQ ID NO: 152197 - protein, 185 aa, Glycine max
  unsure (1)..(185): unsure at all Xaa locations
  Clone ID: PAT_MRT3847_108457C.1.pep
ELSGIPPAPRGVXPQITVCFDIDANGILNVSAEDKTTGQKNKITITNDKGRLSKEEIEKMVQEAEKYKAEDEEHKKKVDAKNALENYAYNMRNTIKDEKIASKLSGDDKKKIEDAIESAIQWLDGNQLAEADEFEDKMKELESTCNPIIAKMYQGAGAPDMAGGMDEDVPPSGSGGAGPKIEEVD

SEQ ID NO: 152198 - protein, 59 aa, Glycine max
  Clone ID: PAT_MRT3847_108458C.1.pep
GVPIVLAPGCRGSGLFLKHNFLVSKKFFPAPPVNGLFFQKVNFLKKGVFFWDFKTPLFS

SEQ ID NO: 152199 - protein, 79 aa, Glycine max
  unsure (1)..(79): unsure at all Xaa locations
  Clone ID: PAT_MRT3847_108459C.1.pep
XXXYLLXLXLSXLPXXXXSXAXTXXXXXXXXXTPPXXXXXXXXXLLXQLXXXQMXXNLMPSXXXXXXXNXNXAVXXRXX

SEQ ID NO: 152200 - protein, 90 aa, Glycine max
  Clone ID: PAT_MRT3847_10845C.1.pep
FPLSPAPPAPTACSFSTLLTPSINNTYTIWRKQCGKKVRERNLTFGKQRSNPMSWKIAMWMKQQCERIRSDENCGEIIVRGREIGVWGFC

SEQ ID NO: 152201 - protein, 105 aa, Glycine max
  Clone ID: PAT_MRT3847_108460C.1.pep
IHSEKKTSILFHVLISSEKEQHFFRRRRRKTNKHCPTLIRNSAVPPPSATVPPPRFPAPAVPPPRPAPYPPLLRKQAHQCHVQHVAAGIALSSAAGGIGRRAHFF

SEQ ID NO: 152202 - protein, 284 aa, Glycine max
  Clone ID: PAT_MRT3847_108461C.1.pep
MEGWISFTGNLTRKVPLILGIWGGKGQGKSFQTELIFQAMGIEPVIMSAGELESERAGEPGKLIRERYRTASQVVQNQGKMSCLMINDIDAGLGRFGNTQMTVNNQIVVGTLMNLSDNPTRVSVGQDWRESDVTNRIPIIVTGNDFSTLYAPLIRDGRMDKFYWQPNQEDILNIVHRMYEKDSISRDEVERVVNTFPNQALDFYGALRSRTYDRSILKWIDDIGGVENFGNKLLKRRKDQSLPVFIPPEQTVDALLESGYSLIKEQRLIMETKLSKEYMKNIDD

SEQ ID NO: 152203 - protein, 181 aa, Glycine max
  Clone ID: PAT_MRT3847_108462C.1.pep
MENNPSSSRVDRKFIERNRRNQMKALFRKLNSLVPHQRSKEAIPLPDQLEEATNYIKKLQINLEKMKDKKNMLLGNERPNERMNNDGRRVGLKSPRIEIQQMGSALEVVLITGLDSQFMFGETIRVLHEEGVDVVNASYKVIEDAVFHSIHCQDKEETANGAARISERLKNFIHDSSYNAF

SEQ ID NO: 152204 - protein, 52 aa, Glycine max
  unsure (1)..(52): unsure at all Xaa locations
  Clone ID: PAT_MRT3847_108463C.1.pep
MLFYFTLALMDHLXXMEXTXKNSASXRGHXTILQNAXXTYGLRTTIRRXKNN

SEQ ID NO: 152205 - protein, 73 aa, Glycine max
  Clone ID: PAT_MRT3847_108464C.1.pep
ILRTYLRRSISYSSKLTNEGGTFKQKQWEDAKAPLQKNASKISIIQTFASIDWWRGQQTPTTWPVWKKKKDSR

SEQ ID NO: 152206 - protein, 87 aa, Glycine max
  Clone ID: PAT_MRT3847_108465C.1.pep
KTNLILDCSLTKILLHSCRAKFSWKGTNSNPNLVKGTSWEGPINVPQFLSLPGGLYFSFQRGPQAGVIPSALSATVSSRGILNVGES

SEQ ID NO: 152207 - protein, 77 aa, Glycine max
  Clone ID: PAT_MRT3847_108466C.1.pep
AITWKETNNLCLHKDQGFLHVSAVYATLVTADHDLSLITPVFVIHCLIVRILWSRTFCFSSKFHGNLHGVLKNCGRQ

SEQ ID NO: 152208 - protein, 104 aa, Glycine max
  unsure (1)..(104): unsure at all Xaa locations
  Clone ID: PAT_MRT3847_108467C.1.pep
MKFTRRYRQYTQQLQAVVPSFEYVSGLSNAAPXASLAIKTKSQHFRCLKKPFLTIQFAKKASFFFSATGKLNLQGLATVIEALRHRPGFLSTNLLAALRGPPAA

SEQ ID NO: 152209 - protein, 733 aa, Glycine max
  unsure (1)..(733): unsure at all Xaa locations
  Clone ID: PAT_MRT3847_108468C.1.pep
MSTQKKRPYHIEAFKHRAVGDPKYAEKTWKVLEHAIHEIYNHNASGLSFEELYRNAYNMVLQKFGEKLYTGLVTTMTSHLKEISQSIESAQGEIFLEEINRKWVDHNKALQMIRDILMYMDRTFIPSNHKTPVHELGLNLWRDVVIHSSKTKARLLDTLLELVLRERNGEVINRGLMRNIIKMLMDLGLPVYQQDFEKHFLDVSANFYCRESQKFIESCDCGDYLKKAERRLNEEMERVSHYLDPKSESKITNVVEKEMIESHMHTLVHMENSXLVSMLVDDKYEDLQRMYNLFRRVSDGLTIVKDVMTSFVRDTGKQLIMDPERLRDPVDFGLRIVNXQEKDDSVITMCFNKEQTGQAAVNPSFEYCISLHSRSHVXIQLFLHEKPMNKDEGEYDGVFLNCKLTSQFSNVKLATVVAQRESEPENLETRQRVEEDRKPQIEAAIVRIMKSXRTLDHNNIVAEVTNHLQTRYFPMHVFIENLIDSLRDRAMLSVHVLKTGLWPTHPSPPCNLPVEILGVCDKFRTYYLGTHNGRRLSWQTNMGTADLKATFGKGQKHELNVSTYQMCVLMLFNSAERLTCKEIEQATAIPMSDLRRCLQSLACVKGKNVLRKEPMSKDIAEDDAFFFNDKFTSKFFKVKIGTVVAQRESEPENLETRQRVEEDRKPQIEAAIVRIMKSRRTLDHNNIVAEVTKQLQSRFLPNPVVIKKRIESLIEREFLERDKVDRKLYRYLA

SEQ ID NO: 152210 - protein, 73 aa, Glycine max
  Clone ID: PAT_MRT3847_108469C.1.pep
NMLPNGSPFNNASWLSQMNLRDQISVRPPMGGFSPFPNPYQTQKPHLLFLSVANILHYAMIPNTLTSLMMNVS

SEQ ID NO: 152211 - protein, 63 aa, Glycine max
  Clone ID: PAT_MRT3847_10846C.1.pep
NKWKPLCRNPWEMMHPIMGKFKKPLLLFDQPFHLVSIKAFYLSTKGPLLIALESPQEPIVECE

SEQ ID NO: 152212 - protein, 266 aa, Glycine max
  unsure (1)..(266): unsure at all Xaa locations
  Clone ID: PAT_MRT3847_108470C.1.pep
LAICDCGDYLKKAERRLNEEMERVSHYLDPRSESKITNVVEKEMIESHMHTLVHMENSGLVSMLVDDKYEDLQRMYNLFRRVSDGLTIVKDVMTSFVRDTGKQLIMDPERLRDPVDFVQRLLDLKDKYDRVITMSFNNDKTFQNALNSSFXSTISTSSSPTPFNPRSPEFISLLVDDKLRRGLKGVGEXDVEILLDKDMMLFRYLQEKDVXFEKYYTQHLAKRLLSRKTISDDAQRSLIVXLKTECGYQFTSXLEGMFTDLKTFYD

SEQ ID NO: 152213 - protein, 50 aa, Glycine max
  Clone ID: PAT_MRT3847_108471C.1.pep
LAEYIELNSKHESSSRPRYTDKRRMGMDKLMWIMFFRNSHVSIEEPMYLV

SEQ ID NO: 152214 - protein, 39 aa, Glycine max
  Clone ID: PAT_MRT3847_108472C.1.pep
ITICYSLLIIDSFCPFWCKREGITKKMFITPLLSSSRSV

SEQ ID NO: 152215 - protein, 136 aa, Glycine max
  unsure (1)..(136): unsure at all Xaa locations
  Clone ID: PAT_MRT3847_108473C.1.pep
MHHYLVNYDGIDLKRFAFFLIQVFEGERSLTKDCRLLGKFDLSGIPPAPRFVTCVDDAVSSLIIAPYINVSKFIGGIIFGXLNRGTPQIEVTFEVDANGILNVKAEDKGPGKSEKITITNEKGRLSQEEIDRWMVT

SEQ ID NO: 152216 - protein, 48 aa, Glycine max
  Clone ID: PAT_MRT3847_108474C.1.pep
CVRHSVMMVFAVSQFVSVAYALFVDSFFYSYIAKSEVVRCCSASPIRL

SEQ ID NO: 152217 - protein, 69 aa, Glycine max
  Clone ID: PAT_MRT3847_108475C.1.pep
HKLGHLHWVLFSKFYWVKKKAQRGNIPLDSFPEKLKLKILGVCVLGEEKTRGGAENFQGTLGLGIGDEK

SEQ ID NO: 152218 - protein, 493 aa, Glycine max
  Clone ID: PAT_MRT3847_108476C.1.pep
GFPGRPTRPQASASSYASPCVPPRLRRGARPRGGGRGGFSRPRDPSSRLLPADEARNGDAINFEAYESVPVEASGKDVPAPVNTFNEADLDEGLKRNIERCKYVKPTPVQRHAIPIVSAGRDLMACAQTGSGKTAAFCFPIISGILKGRYRSGFSSIPSPGAAIAYPAALILSPTRELSCQIRDEANKFAYQTGVKVVVAYGGAPITQQLRLMEKGVDILVATPGRLVDIIERERVSLTKIKYLALDEADRMLDMGFEHQIRKIVEQMQMPSPGIRQTLLFSATFPNDIQKLASDFLSNYIFLSVGRVGSSTELIVQKIELVQDMDKRDHLINHLRRQKVHGANGKHALTLVFVETKRGADVLEGWLLRSGFSAVAIHGDKVQMERERALRSFKSGLTPILVATDVASRGLDIPHVAHVINFDLPRDIDNYVHRIGRTGRAGKSGLATAFFSDKNSPIVKALIGLLQEANQEVPSWLNQYATEGSSSGGGGRL

SEQ ID NO: 152219 - protein, 71 aa, Glycine max
  Clone ID: PAT_MRT3847_108477C.1.pep
DGGDDPFLDGNLKAESVAKHMRAIMEPLLSTKFGAEVINELFTRFQKKIMQLMEVEKSEWATLMISMIKTA

SEQ ID NO: 152220 - protein, 59 aa, Glycine max
  Clone ID: PAT_MRT3847_108478C.1.pep
ISLLLYFNSRICSFRYHKFFHQYICVSITSSLRSLGLLCRSSKRLSAFLPLRNLCTSSA

SEQ ID NO: 152221 - protein, 186 aa, Glycine max
  Clone ID: PAT_MRT3847_108479C.1.pep
CMLIASKYEEICAPRVEEFCFITDNTYTRAGEREREREGERERDFQLSVPTTKTFLRRFILASESSYKVSYVELEFLANYLAELTLLTLVENSFLQFLPSLIAASAVLLARWTLNQSEHPWNSTMEHYTNYKVSELKTTVLALADLQHDMKGCSLNSIREKYKQQKFRSVANLSPKPVQSLFKAQV

SEQ ID NO: 152222 - protein, 86 aa, Glycine max
  unsure (1)..(86): unsure at all Xaa locations
  Clone ID: PAT_MRT3847_10847C.1.pep
FSSSLGLXSVLCXFALVCVXLVSXGVAXXLLLLLLXFLSFXAXAFPXVXPSVLCSRVSVLGAXVRLSSPASAACAAAXSAXXFAAA

SEQ ID NO: 152223 - protein, 63 aa, Glycine max
  Clone ID: PAT_MRT3847_108480C.1.pep
NTGGVPPFMKKKFSHLIKPTLNVQLRLEKKQGGKKGLRPFLWMTPPLLMRPPITSRGNGGPFF

SEQ ID NO: 152224 - protein, 197 aa, Glycine max
  unsure (1)..(197): unsure at all Xaa locations
  Clone ID: PAT_MRT3847_108481C.1.pep
VLLVLAGVYAFCQKRRAERAISRSNPFGNWDPNKSNCGTPQLKAARQFSFKEIKKYTNNFSQDNDIGSGGYGKVYRGTLPSGQVVAIKRAQRESKQGGLEFKAEIELLSRVHHKNLVSLVGFCFEREEQMLVYEFVPNGTLKDALTGESGIVLSWSRRLXVALGAXQGLAYLHEHADPPIIHKDIKSNNILLDENYT

SEQ ID NO: 152225 - protein, 91 aa, Glycine max
  Clone ID: PAT_MRT3847_108482C.1.pep
LAYYSHAPVTCAVAVTTTKILVFYCSPRITLISFLKPFYYFVISRILWSLYVYELCWLLSRDLLACLPQSPRCRGPPPPPKEGGRHTVMTE

SEQ ID NO: 152226 - protein, 120 aa, Glycine max
  Clone ID: PAT_MRT3847_108483C.1.pep
ERERERERERERERERASCLIPHVAIHFPPDYPFHPPMVAFLTIAFHPYININGCICLAILNDLCPPALTLSKVLLSVCSLLTHPHPDAPLLPELARMYQTDPSMYQPTATSWTQKYAMG

SEQ ID NO: 152227 - protein, 68 aa, Glycine max
  Clone ID: PAT_MRT3847_108484C.1.pep
YYQLYMYKKLSCMPIKIKCIKNNIILTQSSIGWRLVKDDKKMKDDCRNHSFTIVDRVAIVDPRNSAMQ

SEQ ID NO: 152228 - protein, 190 aa, Glycine max
  Clone ID: PAT_MRT3847_108485C.1.pep
MMELFLSCMVLFVLTLATLGAHCIWVVSSSRAGSKLPPGPFPLPIIGNLLALGKKPHQSLAKLAETHGPIITLKFGQLTTIVVSSADMAKEVLLTHDHSLSSNRVIPQAVQVHNHHNHSITFLPVSPLWRDLRKICIANLFSNKTLDASQDLRRSKLHQLLHDIHRSSLAGEAVDVGKAVFNTSMNLLSN

SEQ ID NO: 152229 - protein, 60 aa, Glycine max
  Clone ID: PAT_MRT3847_108486C.1.pep
IPFFFFFFFFFFFFFFFFFFFFFFFLKKPVPDPWIKVGFSKGIKPKKKRGKTKKKKKWPP

SEQ ID NO: 152230 - protein, 69 aa, Glycine max
  Clone ID: PAT_MRT3847_108487C.1.pep
ITLQSSLKKKKKKKKKKKKKKKKKKKKKKKKKKKEKKIKILKGPFFKKNLKKKKKTWGGARAPISPYGG

SEQ ID NO: 152231 - protein, 97 aa, Glycine max
  Clone ID: PAT_MRT3847_108488C.1.pep
VIAVMDEKTNYRYYVYQIMNVLKYQLLDFFINHCDHLFYRYLRRAKSKIPTPKSSMRKLTVDITYASTTNHKCIGASSVNFLINVNTYFTLTLEKEL

SEQ ID NO: 152232 - protein, 106 aa, Glycine max
  unsure (1)..(106): unsure at all Xaa locations
  Clone ID: PAT_MRT3847_108489C.1.pep
LFYDGNNGIWYSYALLKSXQYMPCSGHSQYEASNESVPSKVSDGFGSKKVISAPEXAVAAGXEATFHGQDAVRATAAAALAAEKKEKERSEAIKLAPLSGMLAKLR

SEQ ID NO: 152233 - protein, 74 aa, Glycine max
  Clone ID: PAT_MRT3847_10848C.1.pep
RSFVRLLPHLTLQRIKTCNNRYGYLIPRIYPYIPTYWRTICEGKENNSLCWPLTSRLILSYTLSLLAEHFPYLT

SEQ ID NO: 152234 - protein, 54 aa, Glycine max
  Clone ID: PAT_MRT3847_108490C.1.pep
ILKSFLSKKNTYMNLKINLCTLIINIRVCFFKIKLIIKAKRRYTCKFSPDAWVD

SEQ ID NO: 152235 - protein, 145 aa, Glycine max
  unsure (1)..(145): unsure at all Xaa locations
  Clone ID: PAT_MRT3847_108491C.1.pep
LESNCSSSYFNAAFGKRTERFWSMQLPVLIAEIVFADFLVSIVSITAVLYVRYKLRNCQCSGPXVKKLKGSSINQKDHKCKIRPDLDDFKIMRAQMFPYEELDRATSGFKXEFILWKGSFSCGVKGGLKDGTVVADYRAIVSSNM

SEQ ID NO: 152236 - protein, 196 aa, Glycine max
  unsure (1)..(196): unsure at all Xaa locations
  Clone ID: PAT_MRT3847_108492C.1.pep
SFTAIVESRQKALDNPDIVHSPIQLLPSSTXLFSQQPFXDSPLSVSSHQFLPAAHMSMAPLNSQISSTPVLINPVMQTQENLLGNYHAAQKLVPLPTEPRNTAYQGTISPGIPFDGYGGSQVPPSNHVVLPDGSFYQQVTMAESFQRVNDCHMCQTSFPHMPSDPIMREGNDGSTMYVPYVSSAFHASRPDDIMRI

SEQ ID NO: 152237 - protein, 244 aa, Glycine max
  Clone ID: PAT_MRT3847_108493C.1.pep
AISPYYIIKFFSKTGKEGWVSLGGILLCITGTEAMFADLGHFTALSIRLAFAFVIYPCLVVQYMGQAAFLSKNLGSVDNSCYDSIPDPVFWPVFIIATLAAIVGSQAVITATFSIIKQCHALGCFPRVKVVHTSKHIYGQIYIPEINWILMILTLAITIGFQDTTIIGNAYGNLFPYEPLSLSLHAYGNLFPYAYGNLYPHTHIETQDHLSCYFVSFMASHIVKIGSIGNIVMLCSGANWLFTA

SEQ ID NO: 152238 - protein, 64 aa, Glycine max
  Clone ID: PAT_MRT3847_108494C.1.pep
MHRLQLQLVVFLSISTFHNAYSLTDRLMPNANFDHGPKPSELKGSVVTGHDDIAHSTISGFDEY

SEQ ID NO: 152239 - protein, 96 aa, Glycine max
  unsure (1)..(96): unsure at all Xaa locations
  Clone ID: PAT_MRT3847_108495C.1.pep
VGPXLWGXVAACWALSPGAVVFXGSLGXASLSRVLLRLPVGGCPCGLCPAPLPPSFCCVAXLVPPASCWCVLSRVVFSAPPPRLFLVSGRVVGSVG

SEQ ID NO: 152240 - protein, 120 aa, Glycine max
  Clone ID: PAT_MRT3847_108496C.1.pep
MSPFCLCCVIWTNLLIFGGVMPGDVARVNGQLAVSRAFGDKNLKSHLRSDPDIRHVDIDPDAELLILASDGLWKVMANQEAVDIARRIKDPQKAAKQLVAESLNRESKDDISCIVVHFKG

SEQ ID NO: 152241 - protein, 63 aa, Glycine max
  Clone ID: PAT_MRT3847_108497C.1.pep
TTPQVIDDIFYQLFCVYLSKPNICCNSGMEIQPLIMGILPFYSHRSHDVHTKIIVHEMGSIRF

SEQ ID NO: 152242 - protein, 185 aa, Glycine max
  Clone ID: PAT_MRT3847_108498C.1.pep
ARNSARDAILGSVKKVDTVEGLRDLQIPSGIQPGDSVKLSCLGVPDINKPSVRGDHYFIVNVLIPKDISGTERVLVEQLASLRASSKRDSLSSNDNGIPKGKFNEFIKRDPKGDASRKGIKNVGSLWGSIKNFLRGGQSEERFASISMDTKVFLWRSGHQNPVPDYFFVVFIITWIFASIAKSKH

SEQ ID NO: 152243 - protein, 109 aa, Glycine max
  Clone ID: PAT_MRT3847_108499C.1.pep
EDDRRGHMENKQERRNSSQAITLLKLKVKVTPPTPKTTTPNSPLLTHVRGLRILLCYYKYLLYYGGSWLKALFLSLLTTTNFLAALLAAATHLLLTLLLHLVVYGGSFP

SEQ ID NO: 152244 - protein, 54 aa, Glycine max
  Clone ID: PAT_MRT3847_10849C.1.pep
TNANPESCPAGLKRERFWDVADTCRDMELRPLQCIIFVALSSLLSCLHSFSTLR

SEQ ID NO: 152245 - protein, 116 aa, Glycine max
  unsure (1)..(116): unsure at all Xaa locations
  Clone ID: PAT_MRT3847_1084C.1.pep
EVHLLKXHPPPQDXEXXLXHMRMLXSKMKKSGINVEDXXTVYVPXDAXPXAGXGXPTSNGYSHRKQXQXGXIVGSMDMIALXXLRANYXRXXRXXXLESHISILKVSHSHDHISYL

SEQ ID NO: 152246 - protein, 66 aa, Glycine max
  Clone ID: PAT_MRT3847_108500C.1.pep
LIHFFILIILIFLSEHKILKIKEFQLKYLKFLKFKIFQNFKFLHPNTGIFNIIIRLKLKFHLMNLC

SEQ ID NO: 152247 - protein, 112 aa, Glycine max
  Clone ID: PAT_MRT3847_108501C.1.pep
RVNQATICTCMYHVQETKCTQPGNNSYISLRRVYCFLCIINIRLRCIAYAPFFCLLCSFLVVPMETFRNNIRVRHIVTWNVLNHSMLITQCSLCDCLYRQMLVLLKMSVWRF

SEQ ID NO: 152248 - protein, 100 aa, Glycine max
  Clone ID: PAT_MRT3847_108502C.1.pep
GCEKTTEGDIFLCLSEKEKYFYICCWFQIMMYFMELASPHTEEAIKLVDKVGGFEWLIQKYEIDGATALKLDLALDTPIIIVPRNSMSKELVIFKSVCGV

SEQ ID NO: 152249 - protein, 48 aa, Glycine max
  Clone ID: PAT_MRT3847_108503C.1.pep
YKLSIIHNNLEIMVGQRLTSSFKYQKDKFNRSIETHFLVIIKYNPKMS

SEQ ID NO: 152250 - protein, 42 aa, Glycine max
  Clone ID: PAT_MRT3847_108504C.1.pep
SSAWTSYCVWKGLRGSVSFVLYIIRLSGLLKAYRKANRSRQR

SEQ ID NO: 152251 - protein, 101 aa, Glycine max
  Clone ID: PAT_MRT3847_108505C.1.pep
ASQGHTLEQPLYLISWMSMAMSFGDVIQSNLGFKPNEPLLDVGSTRLWMIGLISTWMVYLTVWLVPHFNKQSKQHTRMLGIRAVRQIVKCNVKFCDEILFW

SEQ ID NO: 152252 - protein, 110 aa, Glycine max
  unsure (1)..(110): unsure at all Xaa locations
  Clone ID: PAT_MRT3847_108506C.1.pep
QPRPRFKTMGLAVQIIQKGKFPGMDLIQHHEANGIDITLTLENIGLTRDDSNGKGXSRAKYNXTLHNKAKKAPQIRGAKGPFTYQATKDPKNIFKIKPNGGVTPWAPKIF

SEQ ID NO: 152253 - protein, 44 aa, Glycine max
  Clone ID: PAT_MRT3847_108507C.1.pep
DTYRLSIHWQHQNERWQPVEPCLNLQRAILSPIISHIQIRYNPT

SEQ ID NO: 152254 - protein, 87 aa, Glycine max
  Clone ID: PAT_MRT3847_108508C.1.pep
EVLCLMVVELRSTITNGAVHILLLGKILRQEDGLYGSAHLISPLLLHHITICYWTTFKIRIYSLLQRDETLAYYLSQSQRTFCCTIV

SEQ ID NO: 152255 - protein, 114 aa, Glycine max
  unsure (1)..(114): unsure at all Xaa locations
  Clone ID: PAT_MRT3847_108509C.1.pep
GIGEYPPGGSLQVTVQALTWLFAKVEVKVWLXRSPACPQGAGNHXLKGALGELSENIDYGAGGVVFSKDVEXLGFGVPQKSNFYYRNIDGDGIVVFKQGNWGSLSSRITLAAFL

SEQ ID NO: 152256 - protein, 89 aa, Glycine max
  Clone ID: PAT_MRT3847_10850C.1.pep
PHPQSAAGLVRFSPGFGGLSPLFTRAFRLGHQQQVVGPSSVNFGPATGLYGAGPLPFAQPPRDASFATAGLAFVTLPQLGRSLVVESHV

SEQ ID NO: 152257 - protein, 64 aa, Glycine max
  Clone ID: PAT_MRT3847_108510C.1.pep
YYTYITHTRFKNLFAVKAKNERRSFIALLPCISVEFFTGNRVVCVLRERRRRVSKKEKKKRNLL

SEQ ID NO: 152258 - protein, 92 aa, Glycine max
  unsure (1)..(92): unsure at all Xaa locations
  Clone ID: PAT_MRT3847_108511C.1.pep
VLMTSKVHTNVAAITPAEAQVPALQSRPLYLILGAEWVSTVMSVAIDVIIGKIEKGYLSVEGDGEGIGWSHGLAERQSCSMVRLIESXSPAY

SEQ ID NO: 152259 - protein, 162 aa, Glycine max
  Clone ID: PAT_MRT3847_108512C.1.pep
VNHASGGSIDKHRGTTFLQPSVSGSSALAKLKTGGSGGPLKQQGEKKETPQERLKRIMNKQLNKQIKKDTAAELAKKREQERQRQEKLAETSRLSRYRHHSRSRSRSFSRSPPRRYRRSRSPSSRGSRRYYSSSRSPSRPRSRSRSRSPYSRSPRIRNRSRH

SEQ ID NO: 152260 - protein, 51 aa, Glycine max
  Clone ID: PAT_MRT3847_108513C.1.pep
AKVSCLTRRCADPRVDWILTSLTYSVAIMITRQLSSHNIVKHISNKPPSNL

SEQ ID NO: 152261 - protein, 39 aa, Glycine max
  Clone ID: PAT_MRT3847_108514C.1.pep
VTLAGALALLLIETLMRVVDHPEASPGPHDSDYAFRDFA

SEQ ID NO: 152262 - protein, 97 aa, Glycine max
  Clone ID: PAT_MRT3847_108515C.1.pep
AFRQAFRFSAILDPMESPLFPSKGPLSRSKASPVPSKTYLKKAGPFRRTGSLVLKGLPSRVLKFRLSKLESTVTPKGTFVGMVFLLARKFEVIWPSF

SEQ ID NO: 152263 - protein, 89 aa, Glycine max
  Clone ID: PAT_MRT3847_108516C.1.pep
VSLMDEVISTLERNGLSFVNSAMRVKTKKKGKPHMAIRIDIPATTPTAVTSMLWEDLVNSPMKPGYGGEFINKRKIQCAEKMIRSAFVE

SEQ ID NO: 152264 - protein, 31 aa, Glycine max
  Clone ID: PAT_MRT3847_108517C.1.pep
GKNIQSGLTRTYDLTLTSLINRSNQTRPYLY

SEQ ID NO: 152265 - protein, 156 aa, Glycine max
  unsure (1)..(156): unsure at all Xaa locations
  Clone ID: PAT_MRT3847_108518C.1.pep
KDGQTRNHALLAFTLSVKHIIYCCNNIDTTTPNDSITIYNKIIRKFSSYFKKVNYNPDNIPFIPISNFEDNNIINKSTNLNXYKKPTLLKALNQINNPKRPXHKPLELPLHNIYKINSMNTIPVKHIETNMXNPEIIXTFNPTKLTTKVKSGDIRH

SEQ ID NO: 152266 - protein, 82 aa, Glycine max
  Clone ID: PAT_MRT3847_108519C.1.pep
WLERLPLEPNRLEHPCLNFFVCRFWGVYSLEPGLTIHERLGFMRVCMILGLIWQTMLLPYLRPLLKSEAFLPLLYMAGLALD

SEQ ID NO: 152267 - protein, 118 aa, Glycine max
  Clone ID: PAT_MRT3847_10851C.1.pep
HIAATMLRRSFGDISTLGLEKHRKWFNVCIMYASPEVHSVFLLASQPTGAVFRSSGFRLSHMLRERAQKKYVFCSHPKIVVVMIKCSMLYVNKASASPHCLTRRVWISVPYKGVTNKP

SEQ ID NO: 152268 - protein, 47 aa, Glycine max
  Clone ID: PAT_MRT3847_108520C.1.pep
RVLLLHASLVRVGHQYHTTLQINELIENLVYFDFPVFLPMYSFALYN

SEQ ID NO: 152269 - protein, 516 aa, Glycine max
  Clone ID: PAT_MRT3847_108521C.1.pep
PCFREGEKDLPEGNENLTEREWDQMKRESWNGMEKEVSNNEKESDDASDKLTEQEIVLPEQKKQKEVDSWKNVDREARERRKERDADLEGDRSDKRTKGLDKESNDGCADVEGVMEKEREVYNYSSQHRKRIQRSRGSPQAPNRESFFRSHPQDKDGSQGKVEVSSVVYKVGESMQELIKLWKEHESSQSEMEKNGESSNNGPTLEIRIPSEHVTATNRQVRGGQLWGTDVYTYDSDLVAVLMHTGYCRPTASPPHAAIQELRATVRVLPPQDCYISTLRNNIRSRAWGAAIGCSYRVERCCIVKKGGETIDLEPCLTHTSTIEPTLAPVTVERTMTTRAAASNALRQQRFVREVTIQYNLCNEPWIKYSISTVADKGLKKPLYTSARLKKGEVLYLETHLSRYELCFTGEKMVKVTPATQLHDPVTEKSQNHHPHSTNGEKNDCENVMIDAFRWSRCKKPLPQKLMRTIGIPLPIEHIELLEENLDWEDVQWSQTGVWIAGKEYTLARVHFLSMN

SEQ ID NO: 152270 - protein, 252 aa, Glycine max
  Clone ID: PAT_MRT3847_108522C.1.pep
GIPASTPRPQLSRGSPQAPNRESFFRSHPQDKDGSQGKVEVSSVVYKVGESMQELIKLWKEHESSQSEMEKNGESSNNGPTLEIRIPSEHVTATNRQDALRHQYPYSANYLVRGGQLWGTDVYTYDSDLVAVLMHTGYCRPTASPPHAAIQELRATVRVLPPQDCYISTLRNNIRSRAWGAAIGCSYRVERCCIVKKGGDTIDLEPCLTHTSTIEPTLAPVTVERTMTTRAAASVWPRSYNKHNFGLRKLIQ

SEQ ID NO: 152271 - protein, 67 aa, Glycine max
  Clone ID: PAT_MRT3847_108523C.1.pep
YCMGKDIACATASMAVKAQLPLSTAIWELRPLATNCGIPSLWKIRIKYQAITHYPILRLLTPDTKRS

SEQ ID NO: 152272 - protein, 60 aa, Glycine max
  Clone ID: PAT_MRT3847_108524C.1.pep
LNYNFLKYKNVRALLFLTKRKKVRDFTSKYTCVHYISLAFWHYSGLVLCGWMPLNFGVFD

SEQ ID NO: 152273 - protein, 37 aa, Glycine max
  Clone ID: PAT_MRT3847_108525C.1.pep
CILPFSTLHGPLNFYGSSVQILRLDFFFLLNSNKWIT

SEQ ID NO: 152274 - protein, 66 aa, Glycine max
  unsure (1)..(66): unsure at all Xaa locations
  Clone ID: PAT_MRT3847_108526C.1.pep
PPTLKTKLSGENALGKYYPDAFAPVFSPSKSESAPGLGAFPFLKMTQGLFXVATWGPLVVFLKSMF

SEQ ID NO: 152275 - protein, 167 aa, Glycine max
  Clone ID: PAT_MRT3847_108527C.1.pep
PFLGQLKELTLFYAWQNQLHGSIPTELSNCEKLQAIDLSHNFLMGSIPSSLFHLENLTQLLLLSNRLSGPIPPDIGSCTSLVRLRLGSNNFTGQIPPEIGFLRSLSFLELSDNSLTGDIPFEIGNCAKLEMLDLHSNELQGAIPSSLEFLVSLNVLDLSANRITGSI

SEQ ID NO: 152276 - protein, 144 aa, Glycine max
  Clone ID: PAT_MRT3847_108528C.1.pep
MSMASSVSFSEESSWGKRVSEKVLSFYASLPKKGKPQGREVTVLAAFLLSSPSNDLKVVAMGTGTKCIGRSLLRTCGDVVHDSHAEVIARRALMRFFYTQIQHLTESSSKHAPGNGGKRFKLDEDHLPFEWDPSCLNKRKYTLK

SEQ ID NO: 152277 - protein, 74 aa, Glycine max
  Clone ID: PAT_MRT3847_108529C.1.pep
ETASRGVEGGEVDDGNGVRYGCGVADASGLRGMNVLWWDPGETRPPQGLHLGRHDGVVADLHWIRTNHRWNETS

SEQ ID NO: 152278 - protein, 67 aa, Glycine max
  unsure (1)..(67): unsure at all Xaa locations
  Clone ID: PAT_MRT3847_10852C.1.pep
PVWHFIVATWETVVYSPXLDLDRWAIPLGVMVSLFILYWRCYGKKKHGSLLPLYRSNKNGPNRPRTD

SEQ ID NO: 152279 - protein, 106 aa, Glycine max
  Clone ID: PAT_MRT3847_108530C.1.pep
LAGKLVECPEKGMEGMESGASRALASVQVALRVATTLVPLNAPLQGASHWPFRLGNCSKAFRFVPLRYFYCCRNPSVLHSKGFGFRQRFPRQDAVMLRSVKTPQLL

SEQ ID NO: 152280 - protein, 72 aa, Glycine max
  Clone ID: PAT_MRT3847_108531C.1.pep
LCSLYNILLQKDRVRQAKKLGVAYMIYFCSRPTFLCLKRIRDLSSVPFPVLNYCFLKKLYCCRRWGPNRCYS

SEQ ID NO: 152281 - protein, 286 aa, Glycine max
  Clone ID: PAT_MRT3847_108532C.1.pep
MTNPLERYQKLGLSESLPKTYRYPIACRELSFILREAFHQFPKNLQSIVFQDTLSAFRLLPEIQTQSAVSAVHFLLQSVEAALPKQKKNVAVTEFKHAMVAHKRRCKAHQVEKGSLPLPQDILVLIFSFLDMKSLVSVGLVCRSWNIAANDNHLWEMQYVALFGGRAKLVEGKNNRLLLEPIDTRIITDWKEAVKGAYTGALSRILTTSRGYCGHCKSVVWLNNSKCPNVHSGISEIQDIKPVTAFQAVEYVLEDSLSVTSSSDSDSDSEGGTVSRLWAYPKHIRK

SEQ ID NO: 152282 - protein, 175 aa, Glycine max
  Clone ID: PAT_MRT3847_108533C.1.pep
MEGNSGRGVRGTKKIAILPWELIIEILLRLPVKSLVRFKCVCKSWLCLLSDPHFATSHFEQPSTRTHRLIFIVAPSSPQIRSIDFNASLYDDSAWAALNLNFLRPNTYHNVQILGSCRGFLLLNGCQSLWAWNPSTGVYKKLSSSPIGSNLMRSVFYTFLYGFGYDSSLMITGGQ

SEQ ID NO: 152283 - protein, 70 aa, Glycine max
  Clone ID: PAT_MRT3847_108534C.1.pep
KSVVWLNNSKSPNVHSEISEIQDIKPVPAFQAVEYVLEDSLSVTSSSDSDSDSEGGTVSRLWAYPKHIRK

SEQ ID NO: 152284 - protein, 163 aa, Glycine max
  unsure (1)..(163): unsure at all Xaa locations
  Clone ID: PAT_MRT3847_108535C.1.pep
TYSMLGHTTKRSWEAERVMEWLKTQEWGLMILDEVHTIPAKMFRXRVLTIVQAHCKLGLTATLVREDDKIVDLHFLIGPKLYEANWMELQNNGYIAKVQCAEVWCPMSXEFYRXYCGIKTKKRILLYTMNPNXFRACQFLIKFHERRNDKIIVFADNVFALKE

SEQ ID NO: 152285 - protein, 79 aa, Glycine max
  Clone ID: PAT_MRT3847_108536C.1.pep
EKYSSNFEHFNTNNVTSSYFYLPLAFYSSKLGRLQISLTFFSHMSVVEGGLTHDLYVKCTLCLKVHKATQHKATKSRNG

SEQ ID NO: 152286 - protein, 110 aa, Glycine max
  unsure (1)..(110): unsure at all Xaa locations
  Clone ID: PAT_MRT3847_108537C.1.pep
SRLRPLAQAQKNGYSKASRRPDTRGSTSFRTDPKWAAGQKPPNSAGTSTPKRDTAICQVAINTYSTAWTGLANIXLTKETDCRRWNDASSDGGTTKQGMSKMGETINTLC

SEQ ID NO: 152287 - protein, 86 aa, Glycine max
  Clone ID: PAT_MRT3847_108538C.1.pep
RSLQILQARFSMFLIIKAQFMGPCRYTSLCIAASSTGLLGPLSRSISGRATATIIESLFCVDPAKKVSNLELMARACGVCVWLTYS

SEQ ID NO: 152288 - protein, 95 aa, Glycine max
  Clone ID: PAT_MRT3847_108539C.1.pep
GFLPLGLAHYVFSPMGLLGSTPPGGFKMRGHWKYFFFFGRPRLISGWPFFKNSKNDPVTDFFFSTPGHRPCMLLQFSHHLRAGLCENKQKTNKQK

SEQ ID NO: 152289 - protein, 76 aa, Glycine max
  unsure (1)..(76): unsure at all Xaa locations
  Clone ID: PAT_MRT3847_10853C.1.pep
WTAESLYYNPVWHFIVATWETVVYSPXLDLDRWAIPLGVMVSLFMLYWRCYGRRKHGSLLPLYRSNKNGPNRPRTD

SEQ ID NO: 152290 - protein, 65 aa, Glycine max
  Clone ID: PAT_MRT3847_108540C.1.pep
LTRNFPGGRKINTSKSTLLFTFMIKIITIQEEFAPTAFHWINTIRESFNNPLPLDYHTPQFLLLY

SEQ ID NO: 152291 - protein, 81 aa, Glycine max
  Clone ID: PAT_MRT3847_108541C.1.pep
LNALSRFFCRYMGGGGTPIFLCWLPPLAPPPLVFSFSAIIVCGLFPLSPFVPGYRFCEGFSNVFLVSLLFILVGIYDRVRD

SEQ ID NO: 152292 - protein, 55 aa, Glycine max
  Clone ID: PAT_MRT3847_108542C.1.pep
CLVEDEAKVSGICAWNFKDKFILHVCYGTKLFTSLSSSLSLAHVYFRFPCEYIEI

SEQ ID NO: 152293 - protein, 76 aa, Glycine max
  unsure (1)..(76): unsure at all Xaa locations
  Clone ID: PAT_MRT3847_108543C.1.pep
CAERLEEKQQPDALNGTAVNIEAKFSQLTLDVTGXSGLNYNFDSLNMDSPAIDVVYTALKEAEARSTEPLPDWKEN

SEQ ID NO: 152294 - protein, 81 aa, Glycine max
  unsure (1)..(81): unsure at all Xaa locations
  Clone ID: PAT_MRT3847_108544C.1.pep
PIPDMVSFASSSSRSSSSASMLSYTPPFEAAFIEDRTIVDGQVVSGGGEFSKIWRMRNTXNCRLAHGNNCLVYRRTLHDYC

SEQ ID NO: 152295 - protein, 48 aa, Glycine max
  Clone ID: PAT_MRT3847_108545C.1.pep
ALLLPGRPGSPSFWPVWVRCSCCSLWPGCGVLVGHTVKSCFFALPLEP

SEQ ID NO: 152296 - protein, 169 aa, Glycine max
  unsure (1)..(169): unsure at all Xaa locations
  Clone ID: PAT_MRT3847_108546C.1.pep
VKKKNPPPPKMEKPLGPKKGVQKKAGGPKGETQKKTQKKNSKGKGPPKKPPPPKRCQKKGGPKSKTEKPGKKGAPLRKRGKKAFAXPPRGQGEKQHQGQKQELGPNPGPEENKAQKGPQGEPPWQLEKMQQELGQKQPRPPWAXNQPEQRGPGPKSTGKIQGEPPPRKR

SEQ ID NO: 152297 - protein, 91 aa, Glycine max
  unsure (1)..(91): unsure at all Xaa locations
  Clone ID: PAT_MRT3847_108547C.1.pep
VAHAIVPQHQTLQIENPSELGPYIGXYRDHYRMLSIFNYSFDVGLYYITPHTVTLAXMIWLQRSDQTSRLAXEANMGIPVGENATISLGTD

SEQ ID NO: 152298 - protein, 75 aa, Glycine max
  Clone ID: PAT_MRT3847_108548C.1.pep
VCTLPRPVCKLIFSYDVLQIYFNEIPDEIIEKLVDEGITLNVAGGLIIEHPLVLPFVREVVGTTDSVMGLPKLLL

SEQ ID NO: 152299 - protein, 155 aa, Glycine max
  Clone ID: PAT_MRT3847_108549C.1.pep
HLHFFIDTNAFLKTLVFAYFDYYRPCPSVAIALSKMPVNNPLLFGRITRASFPACGWSVITYSDLHELADRSLSADAPSSMSEPFRNWLEMGVTIPARFVFVDPVRVLNRSYHRFSFYLLFPFLQIPNSVSSTDSSSLRKRKRKPQEPPPLRTRG

SEQ ID NO: 152300 - protein, 94 aa, Glycine max
  Clone ID: PAT_MRT3847_10854C.1.pep
MNPLPFQSAPPPPPPWFPILPSEPPNSTSFWDNRNVCDRLRELQHTLHLAKSMQKELEMLKMIKDGKGSLEDVKDASNEPCLSGFVKCLEDRGV

SEQ ID NO: 152301 - protein, 66 aa, Glycine max
  unsure (1)..(66): unsure at all Xaa locations
  Clone ID: PAT_MRT3847_108550C.1.pep
VKRAPAVDEARAWSQLIQTCRAQDLSWKGPANQSXQVPLSLDVPVSHPESNEQSFPPQAKQNVATP

SEQ ID NO: 152302 - protein, 42 aa, Glycine max
  Clone ID: PAT_MRT3847_108551C.1.pep
ILKKKDAEHTPSEVVGTIFRYSRYFFICLFRGFNSVKISILT

SEQ ID NO: 152303 - protein, 229 aa, Glycine max
  Clone ID: PAT_MRT3847_108552C.1.pep
ISEKKVSTSIEALCRGYPTEFASYFHYCRSLRFDDRPDYAYLKRIFRDLFIREGFQFDYVFDWTILKYQQSQLAAPPARAIGPNVGTSSALPPAVTNADRQTGEEEGRPPGLVSGDSTRRRMTGPIPNSVNISKQKNPVTTDAALNKEAMLSRPNVLGQSSGSRRAAVSSSRDAFVGSDLDLRTRTTETNPGTAIKTSSARNASHVKNYETAIKGIEGLQLENDEKAHY

SEQ ID NO: 152304 - protein, 35 aa, Glycine max
  Clone ID: PAT_MRT3847_108553C.1.pep
LAAARINIDICLSGAGYDTEQSIIQKLLPFHQTPS

SEQ ID NO: 152305 - protein, 56 aa, Glycine max
  unsure (1)..(56): unsure at all Xaa locations
  Clone ID: PAT_MRT3847_108554C.1.pep
PTRPATLTVYSTALRLMRSVLALPHLKFGYLTTPPVXASIASHNDCKLSELLLDHE

SEQ ID NO: 152306 - protein, 136 aa, Glycine max
  Clone ID: PAT_MRT3847_108555C.1.pep
GNSRKKRQSHNSISMRMASNETSPFESREMLASFVSSTPLLSDSWRLCTQANATPFLTFVTERVGASVYVAFSGVHMAGESDPNWRNLTPLYSIGGLPLFSSRRSKEWEEPVMVHAGILNLFFSLFNSFQNQVRSL

SEQ ID NO: 152307 - protein, 67 aa, Glycine max
  unsure (1)..(67): unsure at all Xaa locations
  Clone ID: PAT_MRT3847_108556C.1.pep
XTXPAPRGGEINVFHCNFGGSHPHIPPLIKHAPSPLQIWRISLCNPPLIGKISPLFYPQVFPRLCPH

SEQ ID NO: 152308 - protein, 116 aa, Glycine max
  unsure (1)..(116): unsure at all Xaa locations
  Clone ID: PAT_MRT3847_108557C.1.pep
VISLVACDSFGSRTDSKCDTAALSTFVTRLLKTPCSWFIMGNELIPXDASIQMMTDXSLLHRNTTFNFPSYAATGLETDSETRMMPAPIKNYGEMDEXSATSDVQTRCANMIPDLS

SEQ ID NO: 152309 - protein, 239 aa, Glycine max
  unsure (1)..(239): unsure at all Xaa locations
  Clone ID: PAT_MRT3847_108558C.1.pep
CAKQSDKFNDQLMSNLEVKRVVSGEGFTCGEVNDGGLICWGPTSENLGNINISNVTDSFAVLVAGRSAVCGVFNVSGELKCWGDPVSYSDPPLDSVRLVSLSAGANHFCGVRMDNHEVECWGDLNSSVVPKGNGFMAIASSDFTTCGIREDDLLLDCWLVNASKPDFDPPLELSSPGLCRASECGVDEFAFNVSVLNELSLTSVCVREDLRICSPCGSNCSXGFFLSSECSTNADRVCT

SEQ ID NO: 152310 - protein, 114 aa, Glycine max
  unsure (1)..(114): unsure at all Xaa locations
  Clone ID: PAT_MRT3847_108559C.1.pep
EEFFPLKEGRKSQMKFTFPVSNTIVFGLKSPNVVWKPGVRVAPRKKMLGPFTPTQDXYPFELEEEPIPFGMFVRGPYAPRPKFVDHDXKCYLDLSYSFEIQKTSPPPSMRFKLE

SEQ ID NO: 152311 - protein, 112 aa, Glycine max
  unsure (1)..(112): unsure at all Xaa locations
  Clone ID: PAT_MRT3847_10855C.1.pep
NSAREHIRIWFATQLLKHGISWSPXRCXEARKEMFNGTIQSVPPTITVLPAQFAPTKVTQPILQTALPCQILGQTSLVLTHVTSGSTSVSCSPITLAVALCTNHVQKRPLVT

SEQ ID NO: 152312 - protein, 89 aa, Glycine max
  Clone ID: PAT_MRT3847_108560C.1.pep
YFTEHNASHTTSSSQGRFFLVSKNYPSLRKQRDDPWTLHWTQVLVLNARRMLCPLALKTVTMTPPKGAYTDDASFYGYWSIKPSHWTLI

SEQ ID NO: 152313 - protein, 51 aa, Glycine max
  Clone ID: PAT_MRT3847_108561C.1.pep
NSQSLALFYKRGANLKGFIWEALPHKIFKRVGSKLKPNFVKRGEVKLGPGP

SEQ ID NO: 152314 - protein, 157 aa, Glycine max
  Clone ID: PAT_MRT3847_108562C.1.pep
NSARGIPIIDLQEVNKSSSLHAEVVDQIGSACRKWGFFQVMNHGVGVDVLDEMICGIRRFHEQDAEVRKTFYSRDSNKRVRYFSNGGLLRDLDQPANWRDTIAFVANPDPPNPEEIPATCRDIVAEYSKKVRALGVTILELLSEALGLDPSYLKKMD

SEQ ID NO: 152315 - protein, 56 aa, Glycine max
  Clone ID: PAT_MRT3847_108563C.1.pep
CSYIFIHIRLTLLSPLLKTLFSSPTTNSLYYSFHQSHPHTLILTSIFFLKTKNNTI

SEQ ID NO: 152316 - protein, 149 aa, Glycine max
  Clone ID: PAT_MRT3847_108564C.1.pep
IRVLINVLLPPVTMSQDRVTNVIVKITVTHWHKERHAHSLFSCPSSNSSLKRTERKNLRVPLFFFAPKKIFWLREIQPFSPLPKLQVLAFPALHSKTLFVGTEFQRETFLNMAKPRPGRKVLDSYAIRGTSKIVRGNRKKSLCLCPDAW

SEQ ID NO: 152317 - protein, 45 aa, Glycine max
  Clone ID: PAT_MRT3847_108565C.1.pep
SSRAAAFVFFFFFFFFGHCGPSQGLIYRRANTPYQELMDSFLINH

SEQ ID NO: 152318 - protein, 86 aa, Glycine max
  Clone ID: PAT_MRT3847_108566C.1.pep
RPFFGKGGGNRGLRGAVRINFGVEKRAPFPIFWGPLFTGFFGGGWGNPRYMSGFFVIREIKFCGPYFKGGWGKNVFGINEEGVWPF

SEQ ID NO: 152319 - protein, 143 aa, Glycine max
  Clone ID: PAT_MRT3847_108567C.1.pep
MGKPRGIRTARKHVNHRREQRWADNDFKKANLGTRWKANPFGGASHAKGIVLEKVGVEAKQPNSAIRKCVRVQLIKNGKKITAFVPNDGCLNYIEENDEVLVAGFGRKGHAVGDIPGVRFKVVKVANVSLLALYKEKKERPRS

SEQ ID NO: 152320 - protein, 53 aa, Glycine max
  Clone ID: PAT_MRT3847_108568C.1.pep
TVASRRQMGGYSRLMDFIISRHSSNITTSVFIMCHGYGRNHRHMLMLRDIASS

SEQ ID NO: 152321 - protein, 151 aa, Glycine max
  Clone ID: PAT_MRT3847_108569C.1.pep
MAENTRSKAMSSEKMEELFAKFAATVEAKMESLAERLAHLETSRFSPSQTQPEMPSFPAAGPSAAPHRLKLDVPRFDGSDATGWIFKITQFFEYHTTPDHERLTIASFYMEGQALAWFQWMHRNGQLSSWPAFLHALHSRFASTSYEDPTG

SEQ ID NO: 152322 - protein, 45 aa, Glycine max
  Clone ID: PAT_MRT3847_10856C.1.pep
NSNTTFFIRNFQMEAVASTLDKNSRRLRFTFIEGDVCIRLQNLIT

SEQ ID NO: 152323 - protein, 58 aa, Glycine max
  unsure (1)..(58): unsure at all Xaa locations
  Clone ID: PAT_MRT3847_108570C.1.pep
MXKYDLXXXFVXXXIYMGXXEKRXXXXXQRKEKXTNVSFLLSNVSFLLEEKSIPFFLX

SEQ ID NO: 152324 - protein, 47 aa, Glycine max
  Clone ID: PAT_MRT3847_108571C.1.pep
MTAVVCLGADTFGSSALIRIENQLTTLYSDIEDTQNQHDCDLGGPLQ

SEQ ID NO: 152325 - protein, 87 aa, Glycine max
  unsure (1)..(87): unsure at all Xaa locations
  Clone ID: PAT_MRT3847_108572C.1.pep
TNTKRNFSNDSTTTAKNNWRIQTPSATNHPPTPXNTPTRPINXTPPRHTMPPSQQINXSKKQPPXPQKEPXQPQSTQKNRXRERRDL

SEQ ID NO: 152326 - protein, 252 aa, Glycine max
  unsure (1)..(252): unsure at all Xaa locations
  Clone ID: PAT_MRT3847_108573C.1.pep
MAQRSNVPMLGKSEENVSDTAHSDKAQKGQPGSKMINPNDTKENSDVVSSAGLPHSKPRVHSEDPSGKGSVRSIHELQMSREDGDPKQFTDSPARHGGSDSAYRGHGVGSADNRKRPSRQSTGSEHSIDRSPLHRQAKTPGRDSPSWEGKNSYDSSHGTPGRSRLRPPNRXGMKLLIKVLLFQSLVSGMRATLHRLMATLTFSTKCGRRNRWGLDTCQLRLMGDNMLLGTNLPTTKLRVAAFAGAKNDLCEA

SEQ ID NO: 152327 - protein, 44 aa, Glycine max
  unsure (1)..(44): unsure at all Xaa locations
  Clone ID: PAT_MRT3847_108574C.1.pep
QKXYIIHHVYICFFMIYYNFFNVNYVIDFLVNLYILYLIMILSN

SEQ ID NO: 152328 - protein, 65 aa, Glycine max
  Clone ID: PAT_MRT3847_108575C.1.pep
KSGKISLPLGAPILVIYSAHLDIPLKKKVVSWEIFVWGFQYLQEPWILFVPFIDGDLKLNLMKEF

SEQ ID NO: 152329 - protein, 40 aa, Glycine max
  Clone ID: PAT_MRT3847_108576C.1.pep
EQYNFSLTQLVNCCKTQQATFFFLFQLMNLVKAKAFILIT

SEQ ID NO: 152330 - protein, 97 aa, Glycine max
  Clone ID: PAT_MRT3847_108577C.1.pep
LASHSMVPYRLLALVQFHSLPGIACAGSVFSSQNGLCLEFWGGSIGTVAFVVCVDLPVVSFVSPEVLFRGRLPVGGLYTEFALNNPPLLWCSRGRKE

SEQ ID NO: 152331 - protein, 79 aa, Glycine max
  Clone ID: PAT_MRT3847_108578C.1.pep
FFLGKILSWVSELFLGKTPVDLVRAITFPPSTLKIPVACLGFPLGFGGPLTNPFGFFFFFQIIWADWPNRYFLIPMALF

SEQ ID NO: 152332 - protein, 158 aa, Glycine max
  Clone ID: PAT_MRT3847_108579C.1.pep
PALFHPHRPANSCGCHPEEHLIGFCPSCLYERLTILKHDGSSSIDTRPITSLTSPEANCQPFTTTLDGNHLPKSSSITFNPKLCSTKSFPALKNEGLSCALEPRRKSCDVIPYSPLFSISNPDDKHEIPIKEPKVETCNLTSSSIIELEADVEAEKTL

SEQ ID NO: 152333 - protein, 96 aa, Glycine max
  Clone ID: PAT_MRT3847_10857C.1.pep
MESATSESPYPGSGNGEIPIDLFGSKKHAGVSRGALAFTDESGNIVFRVNPHPPNPNLSPLSRTRNSCLMPQAIPLFSIYRYHNGSWKCYKGNSDE

SEQ ID NO: 152334 - protein, 58 aa, Glycine max
  Clone ID: PAT_MRT3847_108580C.1.pep
KVFKIAHLGPLKKFPPLGCQAGVEIILKNGGFPVKLGSGVATPSANLQSPIPMIPPRV

SEQ ID NO: 152335 - protein, 92 aa, Glycine max
  Clone ID: PAT_MRT3847_108581C.1.pep
MVKFSKELEAQLIPEWKEAFVNYWQLKKQIKRIKLSRIPKQSHHHAKPDFGLSIFDSLSFFVKNIAQNFSASRHHDLNIIQVRKKTTKDDEE

SEQ ID NO: 152336 - protein, 70 aa, Glycine max
  Clone ID: PAT_MRT3847_108582C.1.pep
PRKCQSKLFSAIRNIVQIFSFSFFCGGGLISWSCYWNQLRHSRVPFCDTILLFLKSLNLEKLRFTKWALL

SEQ ID NO: 152337 - protein, 75 aa, Glycine max
  Clone ID: PAT_MRT3847_108583C.1.pep
QHISPLGRNFCKKIVKFIFTIFTPIQLKKSKNNKSTWFQHIEKKKKKTRNVPIKVEFKGKVGEENQGNHSNQITP

SEQ ID NO: 152338 - protein, 102 aa, Glycine max
  unsure (1)..(102): unsure at all Xaa locations
  Clone ID: PAT_MRT3847_108584C.1.pep
LISXPLXLCXXHXXXXPYPXXLXXXXXPXXXXXLXXXXSXXHXNXXFXSXVYXXXXXXXLXYPFTSXXIXXSXXXRXXXPXSSTYTXXXXPXXXNSXLTXXX

SEQ ID NO: 152339 - protein, 193 aa, Glycine max
  Clone ID: PAT_MRT3847_108586C.1.pep
ARELSSLNALQNLSTMKENVQHLISSGIAGSLLQLLFSVTSVLMTLREPASAILARIAQSESILVNEDVAQQMLSLLNLSSPIIQGHLLEALNNIASHPGASKVRSKMKEKGALQLLLPFLKENTTKVRSKVLQLLYTLSKDLTDELTEHLDETHLFNIVNIVSTSTLDSEKAAAVGILSNLPASNKKVTDIL

SEQ ID NO: 152340 - protein, 46 aa, Glycine max
  Clone ID: PAT_MRT3847_108587C.1.pep
INLSEKIIKHSLVRLLEMLFMRFWTGDESLSNEISVTMIYHCINEA

SEQ ID NO: 152341 - protein, 48 aa, Glycine max
  unsure (1)..(48): unsure at all Xaa locations
  Clone ID: PAT_MRT3847_108588C.1.pep
CQPEFVETGLYATGDLDEARVGRTKLLNDQSYNPTWNETFHIYXAHLI

SEQ ID NO: 152342 - protein, 191 aa, Glycine max
  Clone ID: PAT_MRT3847_108589C.1.pep
RLEELLADRSVQRVPGLCFFYTNIQEGLTPILGHYIKNMKSLHKVTIFTTLRYLLVPKVAPHERIVIKKSNLEGVYCCVIQYGYADALNLEGDHFVNQVITSLTQHIQNSPDKLSSDSREIEETSYLKKARCAGVVHVRGKTKFYIGLNCGWFDKFGLRFYEVMPNNCRSALPALGVPPQQRIEVGMLYEA

SEQ ID NO: 152343 - protein, 137 aa, Glycine max
  unsure (1)..(137): unsure at all Xaa locations
  Clone ID: PAT_MRT3847_10858C.1.pep
MRAFLTTNLLSAYDQDRSAVAVALSTIGRAFDQQYEALEDIGDLYLLCAPTRLSSQMTALNTXHIWDSRQAKNSVLISRIRSRHQCMLTXYMLQFGTTTEISLYHMHDREDHVNMNGPMTKYIFDMRCMNHLRQACR

SEQ ID NO: 152344 - protein, 234 aa, Glycine max
  Clone ID: PAT_MRT3847_108590C.1.pep
EPSKRLTLCIYWVCIICVSVLRFYNISKNSKIERILLRKYYHLMAVSMFLPALIFQPKFLDLAFGAALAIFLTLEIIRVWRIWPLGHPINQFMNAFTDHRDSDLLIVSHFSLLLGCALPIWMSTGYNDRPLAPFAGILSLGIGDTMASMVGHKYGVLRWSKTGKKTVEGTAAGITSVLAACSLLLPLLASTGYILTQHWFSLLLAVTVSGLLEAYTTQLDNAFIPLFFYSLLCL

SEQ ID NO: 152345 - protein, 102 aa, Glycine max
  Clone ID: PAT_MRT3847_108591C.1.pep
EKAVKSFTSSQAVFCRESPWTTLSNTILRDSPSVDLRMLDRPGESGSGNASNNGVRSNKFDLLNEVAHSIRKQHRPLVSRLKFGCINYHTCNQNINKLTPSL

SEQ ID NO: 152346 - protein, 223 aa, Glycine max
  Clone ID: PAT_MRT3847_108592C.1.pep
MSAISFSSTHFHSWKNPKGFGKVRKQRDGKLLVKCSSKSGNPTSLQNGVRVGVLGASGYTGSEVMRLLANHPQFGIALMTADRKAGQPISSVFPHLSTRDLPDLIAIKDANFSDVDAVFCWLPHGTTQEIIKGLPKHLKIRDLSADLRLKDLSEYEEWYGQPHRAPDLQKEAIYGLTEVLREEIQNARLVANPGCYPTSVQLPLVPLIKASLIELKNIIIDAK

SEQ ID NO: 152347 - protein, 70 aa, Glycine max
  Clone ID: PAT_MRT3847_108593C.1.pep
ESAMSSLSLPPDGVRRLNSILTVLFPHLRYTHELGAADQCVFLRVGGVAPRLDLSPPLWCFEEVLLQTSG

SEQ ID NO: 152348 - protein, 59 aa, Glycine max
  Clone ID: PAT_MRT3847_108594C.1.pep
GEINGNLHIPSSLNVHKIEHFSLNRISMLIQTHPSFVKFVPVHSNKSSTHMDPFTKMHH

SEQ ID NO: 152349 - protein, 69 aa, Glycine max
  Clone ID: PAT_MRT3847_108595C.1.pep
RGSSLIKPILKQSNRRRKPASIYRPLTLPNYPINSDDVTARPEGRPRRELLKRLRSSRSETKKDLKRPR

SEQ ID NO: 152350 - protein, 56 aa, Glycine max
  Clone ID: PAT_MRT3847_108596C.1.pep
LSITHLRSKIASGDDVISIDRDTLLRKLHLGRKSNRGCPKRLEIGEAVVGVVTNSV

SEQ ID NO: 152351 - protein, 43 aa, Glycine max
  Clone ID: PAT_MRT3847_108597C.1.pep
FQISIMVAGYINILRITLSLICESSQIKITVTNFQSIYQHHNL

SEQ ID NO: 152352 - protein, 175 aa, Glycine max
  Clone ID: PAT_MRT3847_108598C.1.pep
PTRSCGGGCGSGCGGGCSGGCDVGSGCSGGCGGGGDVSNIEGRSDGTEPKYVAVSPEKSSNSAAGGEKEAEGEQAQVPAEQQPLPVAPAAAEAASAENAPTENAAAVPSSGYSGGEPAQAQAVAVQTVEQQQAASESEPTAIGTSNGNNEINDANSSSTDQKAILLISQSNNKWW

SEQ ID NO: 152353 - protein, 354 aa, Glycine max
  unsure (1)..(354): unsure at all Xaa locations
  Clone ID: PAT_MRT3847_108599C.1.pep
MMSASARNRSPFTQTQWQELEHQALVFKYMVTGTPIPPDLIYSIKRSLDTSISSRLFPHHPIGWGCFEMGFGRKVDPEPGRCRRTDGKKWRCSKEAYPDSKYCERHMHRGRNRSRKPVEVSSAISTATNTSQTIPSSYTRNLPLTPTTPTRKATTLFLSLLCPLIIYAKSPNXFSRSYQNSSLNPFFYSQSTYSKPPHADIPPHDATTHHLFMDSPGSYSHDEKNYSRHVHGIREDVDERAFFPEASGSARSYTDSYQQLSMSSYKSYSNSNFQNINNDATTNPRQQEQQLQQQQHCFVLGTDFKSTRPSKEKEAETTTGHRPLHRFFGESPPKNTTTDSWLDLASNSRIQTDE

SEQ ID NO: 152354 - protein, 184 aa, Glycine max
  Clone ID: PAT_MRT3847_10859C.1.pep
MTNLKPLILFFYLLAIVVMISIPSSHCSRTLLPENEKLIENTCKKTPNYNVCLESLKASPGSSSADVTGLAQIMVKEMKAKANDALKRIQELQRVGASGPKQRRALSSCADKYKAVLIADVPQATEALQKGDPKFAEDGANDAANEATYCETDFSAAGNSPLTKQNNAMHDVAAVTAAIVRLLL

SEQ ID NO: 152355 - protein, 58 aa, Glycine max
  Clone ID: PAT_MRT3847_1085C.1.pep
CRVESQRFHSFNPSLDESKTPMFAHTTIALYSPFIHKTNCLRTIIKISQYSHEYTFPF

SEQ ID NO: 152356 - protein, 53 aa, Glycine max
  Clone ID: PAT_MRT3847_108600C.1.pep
MELVWILQQMAEDFHRIISKGFGLFVTNIAFKIKGKIVMRSSETKPFCVVQPS

SEQ ID NO: 152357 - protein, 110 aa, Glycine max
  unsure (1)..(110): unsure at all Xaa locations
  Clone ID: PAT_MRT3847_108601C.1.pep
REKTWSNRPDLVSDIGSVLEPSEAACXTRHHFRLLRRXLRIPSHDVCPIAQEVMEDPYVARHGFTYXTRPDKVGMNSVQLTDPLTDLKLDHSDLVPNYALQSAILEWRLH

SEQ ID NO: 152358 - protein, 79 aa, Glycine max
  unsure (1)..(79): unsure at all Xaa locations
  Clone ID: PAT_MRT3847_108602C.1.pep
LQKLHAQLVAWVPIYILLVLAFIFFKSLCYTLLSSYTINKDKKTIKLMGQFCXYPMYRPLFILCDEFHVNGVNSCSYLE

SEQ ID NO: 152359 - protein, 208 aa, Glycine max
  unsure (1)..(208): unsure at all Xaa locations
  Clone ID: PAT_MRT3847_108603C.1.pep
LSKHLDFKGITSDLVTLNILINCFCHLGQITLSFSVLATILKRGYHPDVITLTTLIKGLCLRGEVKKALKFHDDVVALEFQLDRISYGTLINGLCKIGETKAAIQLMRNLEERSIKPDVVMYNIIIDSLCKNKLVGEACNLYSEMNAKQIYPNVVTYTTLIYGFCXHGLFEEAVALLNEMKLKNINPDVYTFSILIDALGKEGKMKAA

SEQ ID NO: 152360 - protein, 75 aa, Glycine max
  unsure (1)..(75): unsure at all Xaa locations
  Clone ID: PAT_MRT3847_108604C.1.pep
FRSVGKTQMNEQSSRSHFVFTLRICGVNXSTDQQVQGVLNLIDLAGSERLSKSGSTGDRLKETQAINKSLSSLDD

SEQ ID NO: 152361 - protein, 57 aa, Glycine max
  Clone ID: PAT_MRT3847_108605C.1.pep
AYTKKKKNCFFLMSLLNLILLEKLILHINFSVSFQAGLYTYMQKDVSNWFQSVRSFN

SEQ ID NO: 152362 - protein, 56 aa, Glycine max
  Clone ID: PAT_MRT3847_108606C.1.pep
SARAARVRLRTTEGDFQKKKKKNKKTRGPRLVTPSPRDLFRAGYLRGYNFPQKGAV

SEQ ID NO: 152363 - protein, 186 aa, Glycine max
  Clone ID: PAT_MRT3847_108607C.1.pep
MRSYGLTVPGSDHRFCVPTVSQVFFRPNRPINRIAFPKATLKNDGFVVDLSFYDLLGIPESGSVTEIKNAYKQLARKYHPDVSPPGRVEEYTKRFIQVQEAYETLSDPSRRAMYDKDMAKGINFAFNARRRYNYHDQVVEQKSEWKARWKSQLSELKRKSNGKDAGGNMSWAARMRQQRDELSNES

SEQ ID NO: 152364 - protein, 141 aa, Glycine max
  unsure (1)..(141): unsure at all Xaa locations
  Clone ID: PAT_MRT3847_108608C.1.pep
LSRSNLCKHVVQSSPSNRGRDPVGLLATQGKWQREAAVGPRKARGERLSPGQPGSLHMLDRPTTAGTLKAGKMELVDAXAYTQTKGAAATTEETEGCTEDKSAQKVDGHPRNEGTGREDEAHRSGYIYTAQADERETDAGG

SEQ ID NO: 152365 - protein, 55 aa, Glycine max
  Clone ID: PAT_MRT3847_108609C.1.pep
NSSGRFFFFFFFFFFTQCGGLLKSMVKCPLTKKRGGALTNPKCFILPNQLNLELR

SEQ ID NO: 152366 - protein, 66 aa, Glycine max
  unsure (1)..(66): unsure at all Xaa locations
  Clone ID: PAT_MRT3847_10860C.1.pep
VSRSWGGRCSALCRGVLLASAALGGXGXLPXXCLXLLGVAXSXASXXGGGWGSCSIMPPSLLSLSL

SEQ ID NO: 152367 - protein, 74 aa, Glycine max
  Clone ID: PAT_MRT3847_108610C.1.pep
VFSQKPSSENQKPQFLSSQHFQNFCPSNFVLPKPVYTLAAWRGINGMPETSDGPRSEAFVGGTAIPPVDESDYL

SEQ ID NO: 152368 - protein, 167 aa, Glycine max
  unsure (1)..(167): unsure at all Xaa locations
  Clone ID: PAT_MRT3847_108611C.1.pep
WPLPTAANSAAASLISLESTALRLRRTLGAALLFFLVSLSCVLLFKNAYYSLCASSNPLSRLTTVFHPNDSVAVTNDYSLENILNEAAMQDRTVILTTLNEAWAATNSIIDLFLESFRIGDRTRRLLNHLVIIALDQKAFXRCQAIHTYCYLLGNEATDFHKEAYFM

SEQ ID NO: 152369 - protein, 181 aa, Glycine max
  Clone ID: PAT_MRT3847_108612C.1.pep
MEGKSRKRSIILGPWGGNGGNSWDDGTFTGVREIKLVYGHCIDSIQVVYDRNGKPLTAKKHGGVGGNKTAEIKLQFPDEFLVSVSGHYCPVVRGGTPVILSLTFKSNRKTFGPYGVEEGTPFTFSIDGGCVVGFKGRSDWYLDAIAFTLCNTRSKSLFQKVQRSLLWLTSTAPKSTSSKDG

SEQ ID NO: 152370 - protein, 86 aa, Glycine max
  Clone ID: PAT_MRT3847_108613C.1.pep
NKLYNVQNFIILLFNRKKNYLFTTEQNRRRIIFLGNCPYSGMVLNTPANPPLPPAPGVVLPFPPPTIIAAYTPLGLELFFLKNKIF

SEQ ID NO: 152371 - protein, 82 aa, Glycine max
  unsure (1)..(82): unsure at all Xaa locations
  Clone ID: PAT_MRT3847_108614C.1.pep
GGIFIQCSYVIQYGIINLFTSVIFHKGGSKVANILFLGACAMEKKKIFSNYQPFYGLNYMIYGXVVWISITKHRVLFNCLVW

SEQ ID NO: 152372 - protein, 51 aa, Glycine max
  Clone ID: PAT_MRT3847_108615C.1.pep
VKVYYKRKHEMTQDLRISNMTKLLLIITCNAVDLLLPQNWKHLKYFILSLN

SEQ ID NO: 152373 - protein, 143 aa, Glycine max
  unsure (1)..(143): unsure at all Xaa locations
  Clone ID: PAT_MRT3847_108616C.1.pep
ISGLFITRVHDMKNNYSVMVLTCVSECPLLSTLVLKAIIIXNHDVLSNHRPGFCPVIELLLTCIARIFSFLINFGSXCGGGVLLVVGLCWWRRLLSVRPXSVEXDAWFPCSSLSRVVCWVSAPPPPXVGLGRSXFFLFARACG

SEQ ID NO: 152374 - protein, 77 aa, Glycine max
  Clone ID: PAT_MRT3847_108617C.1.pep
YIHSLSKYCHCFNSVSMFALSSASASSCSASTLTSGGCGKATKIGVVVGVITTGALVVAGLFLLCYCAKRRSTWLRK

SEQ ID NO: 152375 - protein, 57 aa, Glycine max
  Clone ID: PAT_MRT3847_108618C.1.pep
RTRGRTRGRTRGRTRGRLREDDRRGCFFIKRFLFWSICIGKWRQQRSINGRVSNSVT

SEQ ID NO: 152376 - protein, 39 aa, Glycine max
  unsure (1)..(39): unsure at all Xaa locations
  Clone ID: PAT_MRT3847_108619C.1.pep
MDQXLWRVXXFXXDPCFLWSVLTTXXILTEHTVXXXHXV

SEQ ID NO: 152377 - protein, 70 aa, Glycine max
  Clone ID: PAT_MRT3847_10861C.1.pep
THHLLLVKISWKSHKIVGSTSYLMTLFHDFVDLNKFQPIVECVASSPPAEHIHILYLIEEQLQRTAKAVV

SEQ ID NO: 152378 - protein, 76 aa, Glycine max
  Clone ID: PAT_MRT3847_108620C.1.pep
TPCELLSPPHPFHPVEEFLSLTVSVSPLLHYGPSEGSTLLTDGCYTQPFGRRDNCVPGSDWRLYRAQTLLHGSLLP

SEQ ID NO: 152379 - protein, 90 aa, Glycine max
  Clone ID: PAT_MRT3847_108621C.1.pep
FFPTQYSVVGGFIQYYRLSHIPSYPHDNTYCAPHHSSLIINHTIHPSINGTPNQISNHNYLPKNSSKYLLHTTKPKLIYISHDHDLCTVT

SEQ ID NO: 152380 - protein, 328 aa, Glycine max
  Clone ID: PAT_MRT3847_108622C.1.pep
PSLRSWSLHKRSAHVYLTGTAIKELPFSFGNLVHLQTLRLNMCTDLESLPNSILKLKLTELDIMKLSKQIAFPEILEPTQNFAHVTLTGTAIKELPFSFGNLVQLQTPGPYMCTDLESLPNSIFKLKLTKLDLSGCSKLRTFPEILEPTQNFAHVNLTGTAIKELPFSFGNLVQLQTLRLNMCTDLESLPNDIVNLNLLSVLDCSGCAKLTEIPNNIGRLSLLRELSLSESGIVNLPESIAHLSSLELLDLTECKKLECIPRLPAFLKQLLAFDCQSITRVMSNSLIQIPSNSIHMMMMMKHNIMMMMTFGRHHLSYRLSETSNQLSK

SEQ ID NO: 152381 - protein, 85 aa, Glycine max
  Clone ID: PAT_MRT3847_108623C.1.pep
GAKITHHKKFFFVNPRGDSPRENLVRCESGEKKNPPRLWGRQNLRIGGIILLKKHCPKKNFLFYFFATKQKKKQKKKKKIKKKKK

SEQ ID NO: 152382 - protein, 80 aa, Glycine max
  Clone ID: PAT_MRT3847_108624C.1.pep
DFQKMALKNLVEAMLHERRKTFNKLPRQLISCSSGSLRCSQRDFEVVVRYSLLLLYQHKLACSVFPQLQCFIVLYGNTIR

SEQ ID NO: 152383 - protein, 178 aa, Glycine max
  unsure (1)..(178): unsure at all Xaa locations
  Clone ID: PAT_MRT3847_108625C.1.pep
MNLLVLFLPVWVLSISFSSPILHAASSISLSQNAQAESPGIQEVRTVHHQNLNKRILIALVACSALLVGVFLFLLYVWFGRHKNLRCSKSKSQETIEAAKGETIXSVNAKLNYSKMADKKSSVAIFDYQLLEAATNSFNTSNIMGESGSRIVYRAHFDEHFQAAVKKADSDADREYEN

SEQ ID NO: 152384 - protein, 57 aa, Glycine max
  Clone ID: PAT_MRT3847_108626C.1.pep
DMKVQPPSRRECPSSRRQSHSEVRHLRVEPHWSTALMINSCTSTSRSIALLFITQTS

SEQ ID NO: 152385 - protein, 46 aa, Glycine max
  Clone ID: PAT_MRT3847_108627C.1.pep
MLFGTPNGNPSTVPLYGLPVCFFWIVTAFFLGRRQVQLSKPQISST

SEQ ID NO: 152386 - protein, 73 aa, Glycine max
  Clone ID: PAT_MRT3847_108628C.1.pep
LKLPPQLPPLTTNLATMCIIPSNHTQYDILFFLFSNSPQTILRCNHAPYDGFPYGCHNLSSRTRSTREQYSNL

SEQ ID NO: 152387 - protein, 61 aa, Glycine max
  Clone ID: PAT_MRT3847_108629C.1.pep
KGLFPLGQILFPGPRFWNPVYSFASRTNVFNSNFVGAMTKLGRVGVKTAKNGKICPHCFVL

SEQ ID NO: 152388 - protein, 183 aa, Glycine max
  unsure (1)..(183): unsure at all Xaa locations
  Clone ID: PAT_MRT3847_10862C.1.pep
TIQAIDKKQNNIPLKKGSAVFNKELLSWYLINGKLKETLESGIPSSPNSGNRSTEFAQQQQEPTEALQVVINEDGEKFEEEPNSPTSEWVVTIKEKLDEAGQEDVASSWSKLXIYKIPHYLRDGSGDDKSFAPQIVSIGPYHHGKKRLRQMDRHKWRSLNHVLKRTKHDIRLYLNSMKEIGKR

SEQ ID NO: 152389 - protein, 94 aa, Glycine max
  Clone ID: PAT_MRT3847_108630C.1.pep
VSRPFTLRAQKGILDCRTGVNHHTASQHTHDYPMPGTHWSSKYWGYGPDSSNATTTDVASTGATGTSDGIIFGTFNAATTTLLYFFMPRHYLDR

SEQ ID NO: 152390 - protein, 66 aa, Glycine max
  Clone ID: PAT_MRT3847_108631C.1.pep
LDQGFEITEVCLNGYHKLADGIYFYSISPVNYLRGNFQYLRMLIFICSNPCTHCPSIFISTSLCIM

SEQ ID NO: 152391 - protein, 154 aa, Glycine max
  Clone ID: PAT_MRT3847_108632C.1.pep
QTETSTPCISHCSAALLSLHPQQIAARVQGLSPNGNNLQTETFRREIIMEICYHAHIDREIESLLERIHPPRVCIDNDSCRDCTVVKVDSANRKGILLEMVQVLTDLDLIISKSYISSDGGWCNGVFHVTDEAGKKLTDETLMLHIQQELCATR

SEQ ID NO: 152392 - protein, 45 aa, Glycine max
  Clone ID: PAT_MRT3847_108633C.1.pep
SIKMKLLYHLCYIHTSYVFSQIAPRYSFVFLDYFYPLSLLLNSVN

SEQ ID NO: 152393 - protein, 49 aa, Glycine max
  Clone ID: PAT_MRT3847_108634C.1.pep
KFQSSYILYFSFDKFVDVRFNYFTNTHLWSVWFGGRENKERMKSLKFEL

SEQ ID NO: 152394 - protein, 54 aa, Glycine max
  Clone ID: PAT_MRT3847_108635C.1.pep
VGHCMLSLHLPRIVGSLAGALLYTMNETPCAYGSLTPQRVKKGTRNLWSWSIFL

SEQ ID NO: 152395 - protein, 124 aa, Glycine max
  Clone ID: PAT_MRT3847_108636C.1.pep
EHRFISWLPLFSIESRERSGRATPPLHTLSSVPFMWEQVPGKPMPCSALVSFSNPKCLELPPMLFTPSPATVFKVSSNRFRSPSFRMSANCYGSDTKVLGAMFLTKANDYTCVGSWRKKNLQTQ

SEQ ID NO: 152396 - protein, 132 aa, Glycine max
  Clone ID: PAT_MRT3847_108637C.1.pep
MDATNNLSDDFMIGSGGSGKIYKAELATGETVAVKKISSKDEFLLNKSFLREVKTLGRIRHRHLVKLIGYCTNRNKEAGWNLLIYEYMENGSVWDWLHGKPAKASKVKRRIDWETRFKIAVGLAQGVEYLHH

SEQ ID NO: 152397 - protein, 131 aa, Glycine max
  Clone ID: PAT_MRT3847_108638C.1.pep
MQSSKEKLKNMTSAAKEQVDIYKAKIDEKTEKATARTEEERVITHERAKAKEAEAKMELHEAKARHAAEKLSTNQSHYGLHHGHNPPLVGTTETHYQQGHHQPLGAVPMPGAIYPSYPLGANPNPPRNKHI

SEQ ID NO: 152398 - protein, 136 aa, Glycine max
  Clone ID: PAT_MRT3847_108639C.1.pep
GQCLGNNKSLNILLAAWLPSSVHRARYLRKCYASSSTIVHVMNASNFDRFQCIVQVDDANVSPIKSKGSGHRVQTAPPHSTPPCKWSILDIYYQSQYLIYHAVSCHLPNLPPAMKLTAILLLFLVFSKLFVIFECH

SEQ ID NO: 152399 - protein, 92 aa, Glycine max
  Clone ID: PAT_MRT3847_10863C.1.pep
ISENSGTTFPRLHQRGLRLIRHTQKRAEIVQVVLDVIGQCAACSPSVLRVVILIVRGQCGQHYAWPSGPVDLGHQIVGKICEIGENGLLFQM

SEQ ID NO: 152400 - protein, 37 aa, Glycine max
  unsure (1)..(37): unsure at all Xaa locations
  Clone ID: PAT_MRT3847_108640C.1.pep
PLVVSDGNLLVGVADDVNIVAQLSVSSGFXGPSPSRA

SEQ ID NO: 152401 - protein, 65 aa, Glycine max
  Clone ID: PAT_MRT3847_108641C.1.pep
ALRMVMNCTSIRILLLGLLHIAVDSGWSSKEVSSIISRFQRYQILNTAHAIPRYQESARFHDVLR

SEQ ID NO: 152402 - protein, 53 aa, Glycine max
  Clone ID: PAT_MRT3847_108642C.1.pep
VSLSFLPLFAFLAHSEYVEQVVDITGRPIFPGGTVYSMRATSGAAGGGLKLGR

SEQ ID NO: 152403 - protein, 79 aa, Glycine max
  Clone ID: PAT_MRT3847_108643C.1.pep
KICRLKEGHLEYDLLKIDTRSIYYWFFFSLYILVFKFFIFIIFSFFFSFFLFFYYIFFIFYFFFFFFYFLFFFFYPTRP

SEQ ID NO: 152404 - protein, 92 aa, Glycine max
  Clone ID: PAT_MRT3847_108644C.1.pep
AILGLPFVFFCCPIPAPIHTPPPPLRHPPPPTCVTLTFTRDPESPSTSGTADPVTCCLCPATPTLTPTSINCTHTPPHPNLPPPPPRPPPPP

SEQ ID NO: 152405 - protein, 171 aa, Glycine max
  unsure (1)..(171): unsure at all Xaa locations
  Clone ID: PAT_MRT3847_108645C.1.pep
PHPIPPLGVSPRGPPPPSXLPPGGKRHDPLPPXPSGPEGPGGPPFARPPRGGXPPLLSNRQTPFPRGLAGSXYPPGPTGFPPPKGAPGAPPFMWGGSLFGPPRRCPFFPRVVFCAEFCPGFFFPPKTEMALPPPTPSGSPRGDPGAPPGAGPGFPGKTMFSPPRPPPGPGK

SEQ ID NO: 152406 - protein, 68 aa, Glycine max
  Clone ID: PAT_MRT3847_108646C.1.pep
TRGVEANTIVKWQTVPASCLECVADYFLRDQYCSDSITVTQQAYFYAKSLKLTITYVFVLDVHDPTLS

SEQ ID NO: 152407 - protein, 62 aa, Glycine max
  Clone ID: PAT_MRT3847_108647C.1.pep
AHFPRNVIMEFSFKELASHFGSNCKCLASKSNGVQLHGPSGLLGTCHRNRHLFYLQSCHFWP

SEQ ID NO: 152408 - protein, 268 aa, Glycine max
  unsure (1)..(268): unsure at all Xaa locations
  Clone ID: PAT_MRT3847_108648C.1.pep
MVVTKALLLPPHPHPFCSLPIPTKLGIRPFFTFHQVHPLVVQHTRKPKKHVAHVSLHDDPLVSCIIHQQQQNPYHLVLLXESAGYSLASYYTSLGLFVISVPGLWSLIKRSVKSKIVQKTFIGEGEKKAPNQVAGEILSFFTRNNFAVTDRGETITFEGMMVPSRGQAALLTFCTCISLASVALVLTITVPDVGNNWFWITLLSPLAGLYYWTRASRKEQIKVKMIVGNEGNLSEIIVQGDDQQVEQMRKELKFSEKGMVYVKGVFER

SEQ ID NO: 152409 - protein, 62 aa, Glycine max
  unsure (1)..(62): unsure at all Xaa locations
  Clone ID: PAT_MRT3847_108649C.1.pep
LNPHSTVHXGKNYQLKLSCDQDYPXKPPNPRLHSRVNMTCLNHETGLLEPKKSGLTANRQRE

SEQ ID NO: 152410 - protein, 63 aa, Glycine max
  Clone ID: PAT_MRT3847_10864C.1.pep
ISNFGQPFQPACTGFHSLFLYCGNDSFKDKRQIQRQLDNSFSLKDVRTEASSMHLVPIARSIQ

SEQ ID NO: 152411 - protein, 64 aa, Glycine max
  Clone ID: PAT_MRT3847_108650C.1.pep
TIFVFLVCSCYSVKRMPMTQTYITFHFTKFIPISTNSKKSSMVHQLNNQDFHVHIHNANCTHMF

SEQ ID NO: 152412 - protein, 156 aa, Glycine max
  Clone ID: PAT_MRT3847_108651C.1.pep
MGALDHISELFDCSHTSSKLKKKRKQFQTVEVKVKMDCEGCERKVKKSVEGMKGVTEVEVDRKASKVTVSGYVEPSKVVSRIAHRTGKRAELWPYLPYDVVAHPYAPGVYDRKAPSGYVRNADVDPRLTNLARASSTEVKYTTAFSDDNPAACVVM

SEQ ID NO: 152413 - protein, 115 aa, Glycine max
  unsure (1)..(115): unsure at all Xaa locations
  Clone ID: PAT_MRT3847_108652C.1.pep
MKRPMSNKNFFHPTHLSLRILPSNRSSIHTPKFNALPKDVPSNVPKLTAFFYCNXVMTYIVLESHNPGSKLHKKETFEPVTIIDTPPKPPVALXIYVLTPPGLPPLNTVIAQHFN

SEQ ID NO: 152414 - protein, 120 aa, Glycine max
  Clone ID: PAT_MRT3847_108653C.1.pep
TPPPAPLSSPPPASPPPSSPPPASPPPASPPPFSPPPATPPPATPPPALTPTPLSSPPATSPAPAPAKVVAPALSPSLATGPSLSTISPSGDDSGAEKLWSFQKMIGSLVFGCALLSLLF

SEQ ID NO: 152415 - protein, 147 aa, Glycine max
  Clone ID: PAT_MRT3847_108654C.1.pep
NNLEKVTDKAVVQWMLTLHQIGLDVARTDRTLVFYEKQENLSQLWDILAVYAWIDKDVGYGQGMCDICSPMIILLDDEADAFWCFERLMRRLRGNFRCTESSVGVAAQLSNLASVTQVIDPKLHKHLEHLGGGDYLLASRMLMVLFR

SEQ ID NO: 152416 - protein, 211 aa, Glycine max
  Clone ID: PAT_MRT3847_108655C.1.pep
METHLVLLLALIFTVVAGVGAQGPSTSPAPPTPQSSPPPIQSSPPPVPSSPPPAQSPPPASTPPPAPLSSPPPASPPPSSPPPASPPPASPPPASPPPASPPPASPPPASPPPATPPPASPPPFSPPPATPPPATPPPALTPTPLSSPPATSPAPAPAKVVAPALSPSLAPGPSLSTISPSGDDSGAEKLWSFQKMIGSLVFGCALLSLLF

SEQ ID NO: 152417 - protein, 179 aa, Glycine max
  Clone ID: PAT_MRT3847_108656C.1.pep
RLGIQARVETHLVLLLALIFTVVAGVGAQGPFTSPAPPTPQSSPPPIQSSPPPVPSSPPPAQSPPPASTPPPAPLSSPPPASPPPSSPPPASPPPASPPPASPPPATPPPASPPPFSPPPATPPPATPPPALTPTPLSSPPATSSAPAPAKVVAPALSPSLAPGPSLFTISPSGDDSGA

SEQ ID NO: 152418 - protein, 59 aa, Glycine max
  Clone ID: PAT_MRT3847_108657C.1.pep
NLYLGKDKGYKIRLQKRSENIKLQMFFVSTFKVKWQYNHCKYSRFLSVGILFLLWTGVT

SEQ ID NO: 152419 - protein, 209 aa, Glycine max
  Clone ID: PAT_MRT3847_108658C.1.pep
MAPFPLMCFVILLLSSTVSVTATATQTTLTVGKLDQVPHIMCKECELPPPPPKECPPPPIPLAPPPPLPPSPPPPLPPSPPPPLPPSPPPPLPPPIPLSPPPPLPPSPPPPLPPSPSPPNLPSPPPLAPPPPLPPLAPPPPPLPPLPIPPNGPGEYLVPPPRDPNLPDLDDLNGAKIINPLLCFSNTSYFSLHSFTLLVLLCLPYYFFM

SEQ ID NO: 152420 - protein, 162 aa, Glycine max
  unsure (1)..(162): unsure at all Xaa locations
  Clone ID: PAT_MRT3847_108659C.1.pep
GFAARXXGGGSSRCRPAVAPRSXPPLHWLXQDRARRAAREARPGNPPGSRLSPSVSHRIWLGPCESYDVKGPCSEANPNVDSSSWVLCTGVHLETLLLKTVELCAMTLWPSPLLWAPGRRWLSKRFCSMDPVPVPVIWQRRAAISLACSTAGPWTCLSPALR

SEQ ID NO: 152421 - protein, 66 aa, Glycine max
  Clone ID: PAT_MRT3847_10865C.1.pep
LRDRSRVRINRDHGVSNLTTGNKSNRYLIPKIFEFCSYLGENNTLWAGQSLSELATDSLNDFLLQP

SEQ ID NO: 152422 - protein, 44 aa, Glycine max
  unsure (1)..(44): unsure at all Xaa locations
  Clone ID: PAT_MRT3847_108660C.1.pep
PPKPLFMGVAPVKAQFESAXMGVPPENNGSKCGANWTCNPCPCK

SEQ ID NO: 152423 - protein, 46 aa, Glycine max
  Clone ID: PAT_MRT3847_108661C.1.pep
PTRSPTRPPTRSSTRSYRCERTHTKGIMLSLKTSIQLCLTSFYILT

SEQ ID NO: 152424 - protein, 86 aa, Glycine max
  Clone ID: PAT_MRT3847_108662C.1.pep
VYDTLAGVRVPAFPVCRVGAIFRTPGKVFWLVGPRVTSSSVISLSLMSFGGLFSFVLKINKLEHAVVYQLHAFPRSQLSQEKRKSG

SEQ ID NO: 152425 - protein, 88 aa, Glycine max
  Clone ID: PAT_MRT3847_108663C.1.pep
SMGLRKQKSGLLLSYRCYVNRGWRNLLGVGQPFWFWILRVCSSFFVFWVFFFFFCFLCFFFSHTHSDFFLFIMWSTIYTLFFFGSSSS

SEQ ID NO: 152426 - protein, 68 aa, Glycine max
  Clone ID: PAT_MRT3847_108664C.1.pep
PLWPPRLFPLFPPVNSFFCLLSPPSFYTGPFYFPDNFRLSFYLFWLCNKTPAGSGLKFPWTAPPFRFI

SEQ ID NO: 152427 - protein, 67 aa, Glycine max
  Clone ID: PAT_MRT3847_108665C.1.pep
FLNQIWKLFYNLPPLKKKQGDFIKNPVFKRGGLQGVLNSNQTTIFCFSTKGGPHKGEEFSLSLGVLV

SEQ ID NO: 152428 - protein, 92 aa, Glycine max
  Clone ID: PAT_MRT3847_108666C.1.pep
KTNMVMVFGEITIKANVDYDKIGRDTCREIGFISDDVGLDADKCKVWVNIEQQSPDIAQGVRGHFIKRPKEAGAGDQSHMFGYATDETPEYM

SEQ ID NO: 152429 - protein, 110 aa, Glycine max
  Clone ID: PAT_MRT3847_108667C.1.pep
TTNKKYTIPQEPKTGLRAKTIRTLPGPSTHKSTTTTHASQGLKGPKGQPKLNHRADPNKQTNGQNQAWPKQNPPGEQPRQTVGPQRKKAEPGTPTKEISNRKVKGNRPGH

SEQ ID NO: 152430 - protein, 68 aa, Glycine max
  Clone ID: PAT_MRT3847_108668C.1.pep
FTPPFCCNPQGWINNVGQYYCFFKSPQWGFISNKKINPPENILFSPTIIYKCLAENLLMISSTILFFS

SEQ ID NO: 152431 - protein, 86 aa, Glycine max
  Clone ID: PAT_MRT3847_108669C.1.pep
NPNSHRIDYECAELLRNQFSTVGTKKTEDDGPSDKVKDSSKDPRKKEKISVSAMLASMDQKPDKPKKVSSSSSKPKPKSAPKASTY

SEQ ID NO: 152432 - protein, 107 aa, Glycine max
  unsure (1)..(107): unsure at all Xaa locations
  Clone ID: PAT_MRT3847_10866C.1.pep
NQLNPQXQTAGTRGKTPYAPEDRAXTKPKAGPHNSRSDRQKEEPQQHHTLAANKDSANSDTXTNPXQTQAGDDPKRHQPNDTTARRQPREEHRHRQRRRHRTRHTDN

SEQ ID NO: 152433 - protein, 56 aa, Glycine max
  Clone ID: PAT_MRT3847_108670C.1.pep
IFTAYCTLVTLGQQLGSVLLCEHTLPEVVDGWNVVVSTGSVGHTLIMNHSVHPGTT

SEQ ID NO: 152434 - protein, 63 aa, Glycine max
  Clone ID: PAT_MRT3847_108671C.1.pep
AAAFFFEGDLGFFASRSNYLLLWGLHQGVKKSKYNSYNSIWCQYNAPPNSVCSTFFNPNKIPK

SEQ ID NO: 152435 - protein, 328 aa, Glycine max
  unsure (1)..(328): unsure at all Xaa locations
  Clone ID: PAT_MRT3847_108672C.1.pep
TGDLHLTTEMLNQLELQVDGGFNQNLNSKTLSAPNLSAMDYPALTSPDGQTASVEYVVDNVQQSGNPYRSYDSDVLLFKSVSSVSSRGGAIDFASAVRKLASRDSGGIWKYDKNGSGDAAIGSSRNSNVLASGYNGGQGRAHFGDRLQNRGSARAFPVWLETGDAVANMYSELREEARDHACLRNAYFEQAQQAYLIGNKALAKELSVKGQLHNMHMKAAHGKAQESIYLQSXPELQGDGRGNERIIDLHGLHVSEAIHVLKHELSVLKSTAIAAEQRLQVYILVGTGHHTRGSRTPARLPIAVQRFLLEEGIDFTETQPGLLRVVIY

SEQ ID NO: 152436 - protein, 179 aa, Glycine max
  Clone ID: PAT_MRT3847_108673C.1.pep
SARAAPVWLETGDAANMYSELREEARDHACLRNAYFEQAQQAYLIGNKALAKELSAKGQLHNMHMKVAHGKAQESIYLQRNPVAPEVQGNGRGNERIVDLHGLHASEAIHVLKHELSVLKSTAIAAEQRLQVYILVGTGHHTRGSRTPARLPIAVQRFLLEEGIDFTETQPGLLRVVIY

SEQ ID NO: 152437 - protein, 223 aa, Glycine max
  Clone ID: PAT_MRT3847_108674C.1.pep
QTVSYKRGGNVTTDNVEEGEIILEDDESLNVSTVINMQTPEQQRHVLRMLEKSLANEIDLEKNFIDSRQIEEKLKQKMVSLEQELILMEEEATDACERWLEADNASEILTGISKQLLGRLQISQFNLNGLSQRESELRTKLETCIEQLKEKDVVSDKIEQLNDKLILANSQVVALSVEVCSLEKQLKESECQVLNVKASADEYQKQYNILCSEVRDMRSYWLN

SEQ ID NO: 152438 - protein, 45 aa, Glycine max
  unsure (1)..(45): unsure at all Xaa locations
  Clone ID: PAT_MRT3847_108675C.1.pep
SITTTLVMGVAPVNAQFEGAEMTVPHENNSCKCGPNXCCKPCTCK

SEQ ID NO: 152439 - protein, 166 aa, Glycine max
  Clone ID: PAT_MRT3847_108676C.1.pep
KKKQKKKKKEKKKKKKKKKKKKKKKKKKNEKKKKKQKKQKKKKKKKKKKKKKKKKKKKKGKKDRNRQGKPRKEQGAEKGKEKKIEKKEGKNNCKNKLIKKQNTKKKNNKKKKPKKTRGKTKKKKGANKEGETGKAPGGKTKPKKRLKKFTNPPDKRMGQPARRTVY

SEQ ID NO: 152440 - protein, 52 aa, Glycine max
  Clone ID: PAT_MRT3847_108677C.1.pep
AMAASQLALKGIWSFSVAKFGHCLTLVNHRRTFGWQVISSSSRPTTSHQQHQ

SEQ ID NO: 152441 - protein, 75 aa, Glycine max
  Clone ID: PAT_MRT3847_108678C.1.pep
MTKIRIVSFLAPPIKTRIAPSFEGLWCFKLERHFSSQWFFLWGVTYTRGQAAIIQFKEVGPSSKFDSVLRVIVAH

SEQ ID NO: 152442 - protein, 60 aa, Glycine max
  unsure (1)..(60): unsure at all Xaa locations
  Clone ID: PAT_MRT3847_108679C.1.pep
XWARFYILVKHTLTFLXLNTLIQILRVATSKKPIKPTLTSYYLFINNDYINTLFTIVYYN

SEQ ID NO: 152443 - protein, 105 aa, Glycine max
  Clone ID: PAT_MRT3847_10867C.1.pep
GRPSFFFVSGYYCAAAVLALFIAILALNIMGLFIQKNYLEVDGPTDLLTGGSTDMVRSMAKILSHKGAHIVIVSRNHTHLAQTLSGVSAASNDPAKQLFTTISND

SEQ ID NO: 152444 - protein, 75 aa, Glycine max
  unsure (1)..(75): unsure at all Xaa locations
  Clone ID: PAT_MRT3847_108681C.1.pep
XXXHIXSXRXPPXXXSLFQTXPXXXXXXQIEXXLXXXXXPXLXXEKTXXLXWDLKLXGSMXXXXLTRLVXXLMXP

SEQ ID NO: 152445 - protein, 54 aa, Glycine max
  Clone ID: PAT_MRT3847_108682C.1.pep
FGSWEMEVPHTRFLVRQLEFQEVGFRSILCSQRDQPVVCLCKEKVHGALGFIIA

SEQ ID NO: 152446 - protein, 178 aa, Glycine max
  unsure (1)..(178): unsure at all Xaa locations
  Clone ID: PAT_MRT3847_108683C.1.pep
MIFCPADFVMFKYSFFLFVGCGWKFKLIIKVVDIEILLDYYVGHLYVKSDVYGFGVVLVEILTGLRALDSNRPSGQHKLTEWVKPYLHDRRKLKGIMDSRLEGKFPSKAAFRIAQLSMKCLASEAQTSGXMKDVLENLERILSANKKPVEPKFRFIHAASCKGHQVVHHRFPRQDGSN

SEQ ID NO: 152447 - protein, 133 aa, Glycine max
  Clone ID: PAT_MRT3847_108685C.1.pep
MAKAAEKKPAAEKSPAEKKPKAEKKIPKEGGGEKKKKRSKKSVETYKIYIFKVLKQVHPDIGISSKAMGIMNSFINDIFEKLAQEAARLARYNKKPTITSREIQTAVRLVLPGELAKHAVSEGTKAVTKFTSS

SEQ ID NO: 152448 - protein, 99 aa, Glycine max
  Clone ID: PAT_MRT3847_108686C.1.pep
GLGVSFCAGGCLGFSFGKGVVGPPLWMGVGPPISPPGFSCLSFGLAWGVDLLTVSFFFPGSSLAMCAASFFPILCLGILFTCRGRSVFCGWTLGCVWPF

SEQ ID NO: 152449 - protein, 158 aa, Glycine max
  unsure (1)..(158): unsure at all Xaa locations
  Clone ID: PAT_MRT3847_108687C.1.pep
GPEPQGRPTPTLGIESTTTGERERQKRKPKLDRTNKNKTDEEHQHKHKADAGATKTNPQQAGTKRKNGXNDNKGRPRKAAEETTPKXGKHGHAKSHKDGKETNTAKKQDDNAPXNHNRDEPQEKRTDNQPXDRDEEGNKRQTTEKGNTKDEPKHPPRR

SEQ ID NO: 152450 - protein, 60 aa, Glycine max
  Clone ID: PAT_MRT3847_108688C.1.pep
MGFNVALGMFWCSSLVLRCFHSIVCTRLCAFLLTGFKCKSAWVGSALPVRSGPGWRLSLS

SEQ ID NO: 152451 - protein, 78 aa, Glycine max
  Clone ID: PAT_MRT3847_108689C.1.pep
LTTFALKLETLLCETLDLSILVTGLSLRFSAAGERQNNGLVMNFYKESCTQAEALITESVKLPYKRNKHSVSPWFRNM

SEQ ID NO: 152452 - protein, 93 aa, Glycine max
  Clone ID: PAT_MRT3847_10868C.1.pep
LASSTLQVMGHENRSSIKQVAKDLINEDGWRGFYRGFGPRFFSMSAWGTSMILTYEYLSKNSSSLITFSLSVCALVFMFIIRLCFLATDKQIF

SEQ ID NO: 152453 - protein, 60 aa, Glycine max
  Clone ID: PAT_MRT3847_108690C.1.pep
NMDFLKEFDVSCAVGMRSEPTEKAHPASMSLSQNQKEQVYNKREEWQHPMTPPQLYVSTP

SEQ ID NO: 152454 - protein, 90 aa, Glycine max
  Clone ID: PAT_MRT3847_108691C.1.pep
TPIGLHDSSNPQRNTCTDHRASQHDVNQQGNFAAIPLKHSTQASRKKLFKGAKGYRIKPKLLPTSNRENLWNWISSLAPTPFHREEISNT

SEQ ID NO: 152455 - protein, 78 aa, Glycine max
  unsure (1)..(78): unsure at all Xaa locations
  Clone ID: PAT_MRT3847_108692C.1.pep
APINDGTTGTVIVLTTPDAQRSMLAYHGTSSSANYDASRTNAMYQTNILRLRXHLFELTDSLKQSPNHVRSHGARLLG

SEQ ID NO: 152456 - protein, 100 aa, Glycine max
  unsure (1)..(100): unsure at all Xaa locations
  Clone ID: PAT_MRT3847_108693C.1.pep
TVHEIAASYNLCYRAANMNWCDITAAGFGLVTSTYHXACYRRFPLRMKTDYGELPLQVDCARFRLAVEAHSIRSFKTIPWDCVEPTTDCINGKQYRSYSN

SEQ ID NO: 152457 - protein, 62 aa, Glycine max
  unsure (1)..(62): unsure at all Xaa locations
  Clone ID: PAT_MRT3847_108694C.1.pep
DYSFPVADNVREYMNDPSKFDRATDAAPAAASCAPTAAXRTMNRXEEPSEESDDDMGVSLYD

SEQ ID NO: 152458 - protein, 59 aa, Glycine max
  Clone ID: PAT_MRT3847_108695C.1.pep
TPSFQPLAPAPAPSSPYHLLPSLLHPNLLSLLNLVLSQLHILLLPLHLNFSLLFSSLYP

SEQ ID NO: 152459 - protein, 82 aa, Glycine max
  Clone ID: PAT_MRT3847_108696C.1.pep
LLTSRILSIDSALECLSPPAEQYSFFSHLLSCATIWSASFHLFCSRFLLPNPYTNLFSLPSFAVPPPPPQAVGLSTSCLLPK

SEQ ID NO: 152460 - protein, 147 aa, Glycine max
  Clone ID: PAT_MRT3847_108697C.1.pep
FVNTDCSPFYSDSVSFIALISVSVPHCSPLYSLGVSFPFALFFLFSFPPPPPPPPPFFFFSLPCSTVFFFCHPILCLILYTTAPRLGLHIPLAHGSARTPAHFCTPCHIANRYWLWPPSLPRRPGSLCYGPPPPKEGGRHTVMTGNL

SEQ ID NO: 152461 - protein, 58 aa, Glycine max
  Clone ID: PAT_MRT3847_108698C.1.pep
REKGKARAYCCGLWIVLKLTRRDERSCFSKKRLLMFPPHPSPVKEHKERRGGSKKIGP

SEQ ID NO: 152462 - protein, 273 aa, Glycine max
  unsure (1)..(273): unsure at all Xaa locations
  Clone ID: PAT_MRT3847_108699C.1.pep
EREIRIGGYPKVQETFARVSGYCEQNDIHSPNITVEESVMFSAWLRLPSQIDAKTKAEFVNEVIHTIELDGIKDSLVGMPNISGLSTEQRKRLTIAVELVANPSIIFMDEPTTGLDARAAAVVMRAVKNVVGTGRTVACTIHQPSIDIFEAFDELILMKAGGRLTYAGPLGKHSSRVIEYFESIPGVPKIKDNYNPSTWMLEVTSRSAEAELXIDFAQIYRESTLYEQNKELVEQLSSPPPNSRDLYFPSHFPQNGWEQFKACLWKQHLCYWR

SEQ ID NO: 152463 - protein, 64 aa, Glycine max
  unsure (1)..(64): unsure at all Xaa locations
  Clone ID: PAT_MRT3847_10869C.1.pep
KILTPSLFFFSTIFFLSFPYHYAGYQIFPLLIKTIYFKPSSYIKCSHFXLSFESHNILTFKTIP

SEQ ID NO: 152464 - protein, 366 aa, Glycine max
  unsure (1)..(366): unsure at all Xaa locations
  Clone ID: PAT_MRT3847_1086C.1.pep
MVACFRTVSLISVLIVWIIGKKRINPGGDTDKVELEXNSXSSYSGVHPEVDKEASLVVLFPNKTYEIKDLTIFEILKATENFSQANIIGCGGFGLVYKATLPNGTTVAIKKLSGDLGLMEREFKAEVEALSTAQHENLVALQGYCVHEGVRLLIYTYMENGSLDYWLHEKADGPSQLDWPTRLKIAQGASCGLAYMHQICEPHIVHRDIKSSNILLDEKFEAHVADFGLARLILPYQTHVTTELVGTLGYIPPEYGQAWVATLRGDVYSFGVVMLELLSGRRPVDVSKPKMSRELVAWVQQMRSEGKQDQVFDPLLRGKGFEEEMQQVLDAACMCVNQNPFKRPSIREVVEWLKNVGSSKPQMNKD

SEQ ID NO: 152465 - protein, 30 aa, Glycine max
  Clone ID: PAT_MRT3847_108700C.1.pep
KALGCSFQLILQVGAANGTFPFKSNWLLCY

SEQ ID NO: 152466 - protein, 110 aa, Glycine max
  Clone ID: PAT_MRT3847_108701C.1.pep
HLMIQHVATSRTKKYECRRVIYHNTPLRCRYDIHRPKNSCNETSGGYVIMNKKPTMLHPPLNYNEEKRISYDCALARETDDTFSTSTACVWIQHMGPQKGMMKRQHLADS

SEQ ID NO: 152467 - protein, 87 aa, Glycine max
  Clone ID: PAT_MRT3847_108702C.1.pep
DSSMISSPMLPLSTVARAGMYAPFSGLESMAVFPTRMTNNDITSFASYLGILQCMSGCAPDVKKTFDTLSYLPDLDDALLDYEVSIL

SEQ ID NO: 152468 - protein, 77 aa, Glycine max
  Clone ID: PAT_MRT3847_108703C.1.pep
TKNNTICSNRVDASLVGQLNGASPSISRCTEVEKFSSDIRLKPNEAYILEQMKSQDGFMQNTFGTLDDIMGAMVKRV

SEQ ID NO: 152469 - protein, 149 aa, Glycine max
  Clone ID: PAT_MRT3847_108704C.1.pep
DGISVPLEDPKNELRCQEGLIGNIVQPSSYTPRQRWKEHNLDYTQNMSCPFNSVNSHASSSGVTSSMGHVLNQNNTICSNRVDASSLVGQLNGASPSISRCTEVEKFSSDIRLKPNEAYILEQMKSQDGFMQNTFGTLDDIMGVMVKRV

SEQ ID NO: 152470 - protein, 77 aa, Glycine max
  Clone ID: PAT_MRT3847_108705C.1.pep
APTDENTEGFTAEKNSRIQHEYHRPRTYELTNSQTHAHLSGYQGGPKYYSNTYQMQHLGQVTNSGSRRTTNNKAQTW

SEQ ID NO: 152471 - protein, 107 aa, Glycine max
  unsure (1)..(107): unsure at all Xaa locations
  Clone ID: PAT_MRT3847_108706C.1.pep
MRGGAPPKQKKIFFFLKKKKKKRGGGGLFPXRGGGGPPKKKKRRPPARGGGEKYPPPGRGGGFFFPPPPGGKIFPPLPKKKGAPNQRGGQKKKPPWWGCWHPPFFFL

SEQ ID NO: 152472 - protein, 52 aa, Glycine max
  Clone ID: PAT_MRT3847_108707C.1.pep
LKSRFALHPVEFDVELYNQLLKSHLRLGDCILMIYYISSGQLLSNLTVRYTH

SEQ ID NO: 152473 - protein, 25 aa, Glycine max
  Clone ID: PAT_MRT3847_108708C.1.pep
SVEGKPMNYVISLITIVTVYEIVYL

SEQ ID NO: 152474 - protein, 54 aa, Glycine max
  Clone ID: PAT_MRT3847_108709C.1.pep
STRPECMIVTPIPLPSDAILDADQTPTRDIQRDGYGNEDRGRLASDTNAQNEAP

SEQ ID NO: 152475 - protein, 75 aa, Glycine max
  unsure (1)..(75): unsure at all Xaa locations
  Clone ID: PAT_MRT3847_10870C.1.pep
VRSVFSSFSGQFDWYQWTSTQTGTXASWIYSSKRLLGRGPSGHLDSDAIITNGGSIHLPSAPTATPASIAPRDVG

SEQ ID NO: 152476 - protein, 199 aa, Glycine max
  Clone ID: PAT_MRT3847_108710C.1.pep
NHVVLFMTAVASLSSLVHKPSLKVLPDKGLEVGLSGSAAKGKPPTTLSPSMLIVDWRCEVARNTPYEVNITIPVEGYEPIEFVLTKTCDYKQDPGGGRTRGWAIFGVLSCIFFVSSTLFCCGGFIYKTKVERQRGIDALPGMTILSACLETVSGAGQGYSRPEDINSAFGSETSWERPPGPSQGAGAAWRPTERKYGAI

SEQ ID NO: 152477 - protein, 88 aa, Glycine max
  unsure (1)..(88): unsure at all Xaa locations
  Clone ID: PAT_MRT3847_108711C.1.pep
PPLSLPNFNFLFPPLGYGSIGETPCCRGRFPNFRLRERGFRWRHAXXVRRKRRPRPDQIRSWPRRALLQTPSSGSSQXRVFLRHGPCA

SEQ ID NO: 152478 - protein, 52 aa, Glycine max
  Clone ID: PAT_MRT3847_108712C.1.pep
QDSCQWLFSIDPSKVIFHVWTSSKSSIHTAVQGCYLLYRDVSCAVERVSPYC

SEQ ID NO: 152479 - protein, 78 aa, Glycine max
  unsure (1)..(78): unsure at all Xaa locations
  Clone ID: PAT_MRT3847_108713C.1.pep
WSKRKLEIMSCRHGKQPHGISVVSISIKSSFLSVVYFLSMFSDNSKNMMFTTWNRVLMLCGFXHVTKPSSINMLLLGR

SEQ ID NO: 152480 - protein, 157 aa, Glycine max
  Clone ID: PAT_MRT3847_108714C.1.pep
SHASVRLREDDRRGNHGHRFFQRKLASVFILLFVKYVFVFVTFYIYSSDVFDLIIFVLTEEQDVSCGFLCDDENDDESDMISIPYNTDDKSRHLSERIPLFLPSFIFGLFNFLRVVCCFDCLYFLCFFEIRHGDDCLLSSDDSFDEYITSYSFRMPI

SEQ ID NO: 152481 - protein, 81 aa, Glycine max
  Clone ID: PAT_MRT3847_108715C.1.pep
EKKRGFFWGGPNHRTKEPNREEKSIGGRGQKKTTRRGRPNWLVKNPLRYKKTKMDHKHGWAPGGHHRGALQGHQKGGEFLH

SEQ ID NO: 152482 - protein, 74 aa, Glycine max
  Clone ID: PAT_MRT3847_108716C.1.pep
SRCVLPLVLVPVPLPKNKWPSQMSPPLLQSWLRQAPGRSGQLSLVHQSFRKTLWPPLRDKAPVEVPNWCVCLTP

SEQ ID NO: 152483 - protein, 90 aa, Glycine max
  Clone ID: PAT_MRT3847_108717C.1.pep
KLYSTEFLTTALCTTRVFIILKTLIVTNACLDIPYSASLTQKDNCPADHATTPYYTVLVTWIGAELIRHLQLGQRTLASERGNEHPENSA

SEQ ID NO: 152484 - protein, 111 aa, Glycine max
  Clone ID: PAT_MRT3847_108718C.1.pep
THASAHAFGFFNFNLHYTGYAPPYPPPQGYPPPGYPSAPPQPPPGYVPYPPPQYEGYQGYFNHGYPLPPPPNYHCHHAQHHHNDNPGFTSFLQGCLTAFCCCCLLEECCLF

SEQ ID NO: 152485 - protein, 64 aa, Glycine max
  Clone ID: PAT_MRT3847_108719C.1.pep
TYIERSMIALTSTTLVLRQPAHAAHRTMKIAQLITLEAGVMYIRLLWIWLLLLFTDSQHQELRT

SEQ ID NO: 152486 - protein, 69 aa, Glycine max
  unsure (1)..(69): unsure at all Xaa locations
  Clone ID: PAT_MRT3847_10871C.1.pep
SAAADNYSLGVSHGTPLXTPDGNSVKLYCRGSRSPHSPPDHQIHSPYFLFHFTSLFFYQTLVSFILHVF

SEQ ID NO: 152487 - protein, 54 aa, Glycine max
  Clone ID: PAT_MRT3847_108720C.1.pep
VIFLSGEKQEKIKKEQKLHAKKNKMKVSVCFLISPIFFLCRDFLLFVVENYGNM

SEQ ID NO: 152488 - protein, 64 aa, Glycine max
  unsure (1)..(64): unsure at all Xaa locations
  Clone ID: PAT_MRT3847_108721C.1.pep
TRVKYLLGIDVRITSSDDLPLWGYVGELHPDENGDNGKHVRYTHKNINVQXMQGQGSHVNLTND

SEQ ID NO: 152489 - protein, 204 aa, Glycine max
  unsure (1)..(204): unsure at all Xaa locations
  Clone ID: PAT_MRT3847_108722C.1.pep
MLSLPARVSRSTSRSRRSPTDETESSRSTTSRSSSTPSAGESTTASTTCCTSSSRPPPPVSSRRLSLPVSRPVSELLSPRPTSSSCKSGTLPTTRRGPTRPPDRRLSRTCSPRRSRSPRRRRSTPRRRLAPSSWSPTERTRSXPRCSRTASRCRSDCSRPKTTPPPPATRDGAXPLSTLSTRGTTRPLPASCRRVSRLEPVTRT

SEQ ID NO: 152490 - protein, 110 aa, Glycine max
  Clone ID: PAT_MRT3847_108723C.1.pep
SFYDFFFFFFARGRGADLLWRKTTSHNMDDLEWDDIVLMTASGAQNFFIYSKDCERIIDYIGPRDKHLPVEMGGIVKDQMNEALPFSEEVILCLWNLINNSSKKPGDIEK

SEQ ID NO: 152491 - protein, 54 aa, Glycine max
  Clone ID: PAT_MRT3847_108724C.1.pep
KSTSSILGNIWNIFHAMKLHSNNMLAVCWSNNRSIMSLIHVKIETFAIESMQMC

SEQ ID NO: 152492 - protein, 58 aa, Glycine max
  Clone ID: PAT_MRT3847_108725C.1.pep
KIKINKTLNQYIWSSCRQTKGLQNPTITFMTKNLNVKLCQTRCNNRGLNSITGAYLIV

SEQ ID NO: 152493 - protein, 74 aa, Glycine max
  Clone ID: PAT_MRT3847_108726C.1.pep
MEHDSLYILMVLSRNSQCITDPQHPGVPNQMRASDPRPRYAYKIGRLGETIYYPSMSDLLCNSVATTHLMHTVK

SEQ ID NO: 152494 - protein, 85 aa, Glycine max
  Clone ID: PAT_MRT3847_108727C.1.pep
KSWKFSNNFSLFNFQSSIFSLPYNYYSPLQYQSLIIHIFHNFPFNSQKHFIKRKSNQSKDNTHSFLPQFPIPNSSALDFVPFFIA

SEQ ID NO: 152495 - protein, 111 aa, Glycine max
  Clone ID: PAT_MRT3847_108728C.1.pep
SSKVFHLYMVHYFSVFPILVDCVQWQAALYCHYNMSREDPAPQNPIVSHLAVAAGATRFTATITAVHGHVSVGHLNLFGGSGYNWKSETSFYMTAFPHIRAPPTWNPSPCF

SEQ ID NO: 152496 - protein, 73 aa, Glycine max
  Clone ID: PAT_MRT3847_108729C.1.pep
QLSPSVIFLSLTEWSTYSWTPPFLLLSFIHFEAFIIITGPLRLSSLIHLSFGPNKIILSVFAFFVVILLYGAI

SEQ ID NO: 152497 - protein, 81 aa, Glycine max
  Clone ID: PAT_MRT3847_10872C.1.pep
SSNLCANLSCLLQKIHTSEEGFLLQSTLCFRKCFLLRNIVFYVSDLSTFTHFVWFISVHFMFLGYSMKLIVVSAEEAALHL

SEQ ID NO: 152498 - protein, 329 aa, Glycine max
  Clone ID: PAT_MRT3847_108730C.1.pep
MGLVSQDALNQLQALMDQVLLEEEPLQRTFQNVHQGCVTETLTRFLKAREWNATKAHKMIVDCLKWRVQNEIDNILSKPIIPTDLYRGIRDSQLIGLSGYSREGLPVFAIGVGLSTFDKASVHYYVQSHIQINEYRDRVILPSASKKHERPITTCVKILDMTGLKLSALNQIKLLTIISSIDDLNYPEKTNTYYIVNAPYIFSACWKVVKPLLQERTRRKVQVLQGCGRDELLKIMDYASLPHFCRREGFGSSRHSGNGNENCYSLDHPFHQQLYNYIKEKSRIHEAVEPIKQGSFHVDFPEPPAEKAEIVKTLESELHKFKISNVNGD

SEQ ID NO: 152499 - protein, 101 aa, Glycine max
  Clone ID: PAT_MRT3847_108731C.1.pep
RDELLKIMDYTSLPHFCRREGSGSSRHSENGNENCYSVDHPFHKQLYNYIKEQSRIHEAVEPIKQGSFHVDFPEPPAEKAEIVKTLESELHKFKISNENGD

SEQ ID NO: 152500 - protein, 67 aa, Glycine max
  unsure (1)..(67): unsure at all Xaa locations
  Clone ID: PAT_MRT3847_108732C.1.pep
VSGVSNFYINWSGNVGSCEHYRFSSGGRVVNTGCGRCVSRLVFPNISTKIPCSIIYKNINLYXKKHT

SEQ ID NO: 152501 - protein, 118 aa, Glycine max
  unsure (1)..(118): unsure at all Xaa locations
  Clone ID: PAT_MRT3847_108733C.1.pep
SIVCLYFHIFKVFHLSKHLFNREPYLALSILFFCLRIILFVLPTIXSRLKEFWTSYASHLNMQIFGEVMERVLNVIDVKRIWTKLRLYKTRNFHERVRSARVWASSLASVSLGDSSAR

SEQ ID NO: 152502 - protein, 58 aa, Glycine max
  Clone ID: PAT_MRT3847_108734C.1.pep
PIFNGGQGRSIYVTQLTIIKEWILGMVSVVPLEPTTLFFFFDIAELLPGSAVAQECKF

SEQ ID NO: 152503 - protein, 99 aa, Glycine max
  unsure (1)..(99): unsure at all Xaa locations
  Clone ID: PAT_MRT3847_108735C.1.pep
VWAAMVYCTTIANHSIDKIIGATVERGKKRSRRLGTCVXNGRRSKXGDFKPPAKTRGGKRERIYYXTRTTIRPPTFMCCINNTKLFPKTDRRYIKKQLR

SEQ ID NO: 152504 - protein, 112 aa, Glycine max
  Clone ID: PAT_MRT3847_108736C.1.pep
KGHLGAPFGTSSSRLLAGFFFFCSHRFSPFFPSFRAPQLNWVSLLFWPPRASPFFSGWFGVGFLGGFQFSPGFPFYPFLPSFFKLFFWATIVPLRGPARYFPVFPGVPPRVP

SEQ ID NO: 152505 - protein, 38 aa, Glycine max
  Clone ID: PAT_MRT3847_108737C.1.pep
PTRSKFSLTVFSVCCSTTVLLSGFGSSANVTGYTSFYN

SEQ ID NO: 152506 - protein, 146 aa, Glycine max
  Clone ID: PAT_MRT3847_108738C.1.pep
MGKDSKPKESGGKGKGKQAASGSDENASKGKGKGGKGGDGLGTCTYVKARHILCEKQGKINEAYKKLQDGWLGNGDKVPPAEFAKVAQEYSECPSGKKGGDLGWFPRGKMAGPFQEVAFNTPVGATSAPFKSTHGYHIILSEGRKN

SEQ ID NO: 152507 - protein, 70 aa, Glycine max
  unsure (1)..(70): unsure at all Xaa locations
  Clone ID: PAT_MRT3847_108739C.1.pep
DCSHSIFLNGSNLXDMHTLEWTEPQTQGDLLSPRAGHTGITIDESWLIVRGRDNTCGCPETLVLDMSKLD

SEQ ID NO: 152508 - protein, 66 aa, Glycine max
  unsure (1)..(66): unsure at all Xaa locations
  Clone ID: PAT_MRT3847_10873C.1.pep
MAXTFLFTSXSVNEGHPDKLCDQISXAVLDACXEQXPDSKVAXXTWTKTNLVMXFGEITTKANVDY

SEQ ID NO: 152509 - protein, 136 aa, Glycine max
  unsure (1)..(136): unsure at all Xaa locations
  Clone ID: PAT_MRT3847_108740C.1.pep
AYASAHASAHASEKKKKQNRKNTHTPHPKRTPTTTHQTSRPLDPTHTPHSTYGGGRPGGPRLPPPGGRPHGSLXGPQTPIPGPGRPPPGGGETPGAPNPMGLGRHPLSPRGAQPEGAPPDRPLPTGAPPLGIGAPP

SEQ ID NO: 152510 - protein, 116 aa, Glycine max
  Clone ID: PAT_MRT3847_108741C.1.pep
LLSCILKSDFLNEDTRISIQVPSNFENMSTSKQVQITISAEEFGAKEKSPYLSYAGGEVPSSSLSHIIGLREGNVMFNYRYYNNKLQRTEVTKDFTCPFCLVKCACFKGLRCHLSS

SEQ ID NO: 152511 - protein, 154 aa, Glycine max
  unsure (1)..(154): unsure at all Xaa locations
  Clone ID: PAT_MRT3847_108742C.1.pep
MDGLPGSVGTSASFSLRXLGQTMFSSASLLFMSLGGEFYSYTAFCYLVTIMGLVIPWSFTLALVDGYSVLVKCPIRQPGILLIIVVGDWXVLSTLTLAAACSTASVVDLLLNTHGSFCPPKLCSRYRISAIMAFLSWFLSMASSLFNLWLVPSL

SEQ ID NO: 152512 - protein, 259 aa, Glycine max
  Clone ID: PAT_MRT3847_108743C.1.pep
IRGSQIKTFNKGYGVSVKTQANSDAGTLQGIPGTIDLFTDRLFPFTLIVTNFEKLRHGEEPHLTIAFLGLAYTIIYRNLLSYMFPMMLMILAVGMLTIRALKEQGRLGRSFGEVTIRDQPPSNTIQKIIAVKDAMRDVENFMQQVNVFLLKMRSILLSGHPQITTEVALVLISSATILLIIPFKYIFSFLLFDMFTRELEFRREMVKKFRSFLRERWHTVPAVPVSILPFENEDRSEIYLKEIEDQSKTQGNQSSVKSR

SEQ ID NO: 152513 - protein, 101 aa, Glycine max
  Clone ID: PAT_MRT3847_108744C.1.pep
VERPAEEALDGGRGMFCILPLAKALVHKASQSINCAVISVKKASEKPELFSHQMLQSALDDGVKSFMTSLKNVGSKGFILNKNSQSQAFNNPSHSLTGSNE

SEQ ID NO: 152514 - protein, 122 aa, Glycine max
  unsure (1)..(122): unsure at all Xaa locations
  Clone ID: PAT_MRT3847_108745C.1.pep
DCELWNPACSNAMTMSFNPNPCSDAWRKQFMKQPGCHXDIISLTGWTATPMQDVQVTIDALISSQECVPRTYCVINPQNPFALXKCMGKLTFPHGTSRSDKRVPLSIGGGVWSKECYILVNM

SEQ ID NO: 152515 - protein, 33 aa, Glycine max
  Clone ID: PAT_MRT3847_108746C.1.pep
LPSSTCSTVDPTHSGFKFQEHQKTLDCDSNTFE

SEQ ID NO: 152516 - protein, 256 aa, Glycine max
  unsure (1)..(256): unsure at all Xaa locations
  Clone ID: PAT_MRT3847_108747C.1.pep
MGIRFSSSQAAPSESSPASSLGELPESCVAQIMTYMDPPQICKLATLNRAFRGASSADFVWESKLPPNYDVLLRRIFADFPSHLGKRGIYARLCRLNSLDDGTKKVWLDRGMGKLCLCVSAKGLSITGIDDRRNWNHIPTDESRFSSVAYLQQIWWFEVDGEVEFPFPAGKYSVFFRIHLGRAGTVCGLRVCNTEHVHGWHLQPVRFXVEHGNASTKVKFSMTQIDCTHTKGGLCLDSVLVYPSEFRKVKAFLNYS

SEQ ID NO: 152517 - protein, 64 aa, Glycine max
  unsure (1)..(64): unsure at all Xaa locations
  Clone ID: PAT_MRT3847_108748C.1.pep
IISSWKARLRSWGYEPVFCSVESGHGLDLLGFKLRXDQTTVIVXPSGVXKSSLINALRSNPSNA

SEQ ID NO: 152518 - protein, 251 aa, Glycine max
  unsure (1)..(251): unsure at all Xaa locations
  Clone ID: PAT_MRT3847_108749C.1.pep
MKVEVEIISREDIRPSSPTPSHLRVFNLSLLDHLIPSPYAPIILYYTSPNSDKTYLSEVPKRLELLKKSLSETLTQFYHLGGKIKELDFSIECNDEGANFVQAKVKCPLDKFLVQPQLTLLHKFLPTDLVSEGSNSGTYVTNIQVNIFECGGIAIGLCISHRILDGAALSTFIKGWSERAKGFNCDQLTKPNFIGSALFPTNNNPWLRDLSMRMWXSFFKQGKWVTKRFLFRNSDIAKLKAQTLGTANSTR

SEQ ID NO: 152519 - protein, 34 aa, Glycine max
  unsure (1)..(34): unsure at all Xaa locations
  Clone ID: PAT_MRT3847_10874C.1.pep
GGCEKTTQXDEFAYQQNLTHLXLCAILVSKNQLS

SEQ ID NO: 152520 - protein, 101 aa, Glycine max
  Clone ID: PAT_MRT3847_108750C.1.pep
LVQRRESVFVHQKGGQKVPLLFRTMKGEGLGPLLIPKRPEEKKAGFLKWPMKEELSFVLNDRERFLRIFDRFKLGGSFPVKTFIFKILGRVARKRGLKGVQ

SEQ ID NO: 152521 - protein, 80 aa, Glycine max
  Clone ID: PAT_MRT3847_108751C.1.pep
HIHREKPHCQRCYSKQLGSKSQLYFSLKFPVLTQGLPTEQSPRPFFAKGVINKALITKLKLLKFHNTESQTTWPSCLSVF

SEQ ID NO: 152522 - protein, 101 aa, Glycine max
  Clone ID: PAT_MRT3847_108752C.1.pep
ATPFLQFRHHIRQFVTVLPSRHYQPHHLRSTCVCRYGTCHRHPQNHSPLIPRSTNLHPYPTFPRFITTKTKRPRFNMHKIKIKKTLANGRSPVGLHSGEAK

SEQ ID NO: 152523 - protein, 59 aa, Glycine max
  Clone ID: PAT_MRT3847_108753C.1.pep
DNLFLDSYERISVADSGVKCVKLNHPHSIYGVSQVYLLSSPHLKKMDQTPYYVLLSIRF

SEQ ID NO: 152524 - protein, 52 aa, Glycine max
  Clone ID: PAT_MRT3847_108754C.1.pep
GGGTTFFKFLPWERLKKTLGGNGFYLEGGHKTTGGFSGLGLKWVRRESTGFF

SEQ ID NO: 152525 - protein, 72 aa, Glycine max
  Clone ID: PAT_MRT3847_108755C.1.pep
SVQIYLLKSMLFVILKDGCRNIALQCDACINLPSHNFFNGWCSNIALHVSRLLDISYLFLILNMNMMVGFHK

SEQ ID NO: 152526 - protein, 384 aa, Glycine max
  Clone ID: PAT_MRT3847_108756C.1.pep
MEFHRSDSSSSPSSSTPTPNNADPNKTSSSDPMHSWWESVSKARSRIHALAAILPSSSSDSLSSLADSDRPALSLLSSPAAYAAVSSSLSGSHSDPLCHWLYDTFLSSDPHLRLVVLSFVPLLSGLYLSRIHSPEPPSLAGFEAVLLALYAAETKSRNGKPLVVTIPDLSHPSIYHAPLRKPQSQTLTLASTPSVGLISPPLEPQLGVKSTKRASIVGVALHSFFSQISHMPAWSKLEFCQFAAAWAGSAHCPCRNELDRDGEIEDFATAIENVRIRDGDYLEEGKGERIPLPWEILQPSLRILGHCLLGPLNSQDVKDAASFAVRCLYARASHDLVPQAILATRSLIQLDVRTREAAKTNAATNSNANTPTKAKKPEILLVSK

SEQ ID NO: 152527 - protein, 93 aa, Glycine max
  Clone ID: PAT_MRT3847_108757C.1.pep
HFLYIYEETGTAYGINNHMKATPVRKKIVDMHREASIHHITHAADSHLLQVFLGQQSFPASATSFIIWLGHFPEELHSTDNKNAIMKSHTIRY

SEQ ID NO: 152528 - protein, 33 aa, Glycine max
  Clone ID: PAT_MRT3847_108758C.1.pep
QAYDLTYVLTKIAELLTTGRVTRHHQFFDRTLR

SEQ ID NO: 152529 - protein, 685 aa, Glycine max
  unsure (1)..(685): unsure at all Xaa locations
  Clone ID: PAT_MRT3847_108759C.1.pep
AFWRVRIEAAFALANSASEETDFSGLLHLMKFYKSRRFDTDIGLXPKPNDFHDFAEYFVLEAIPHAVVIVRAADKKSPREAIEFVLQLLKYNDNNGNPYSDVFWLAALVQSVGELEFGQQSILLLSSLLKRIDRLLQFDSLMPSYNGILTISCIRTLTQIALKLSGFIPLDRVYGLVKPFRDIKALWQVRIEASRALLDLEFHCKGMDSALLLFIKYIEEEHSLRGQLKLATHVMRLCQMRDGLNSNDEITSQTLVSMLNLLEGRIAFNNAFLRHYLFCILQILARRHPTLHGIPRENRMLHMXLQKLVTIKRTCLLLIQKANPKDQSGSTDDLTQNLSSKKVEPVVDVARQVKSVEPSGYNSKVEIKKIDTKPEPSEGXLVHQKFELKLKTECSASPREYNVLYFVDAXNENHNSFIFSRATSRADTDNQVVERSLGGRNEMDHGASSSVSVDAPQRNFAETVSISNHNIDEVNSWHDRGSRMTASIGSAKFLSDGDELVKELQCTADSSIVYSQPQPEDPSSSSIIQDNNIDADARRYASLQTLSVARFDPDGEPLGKEISARGKEKHKSKEKKRKRESNKGHHDDPEYLERKRLKKEKKRREKELAKLQSDEAKRSSIDMSSKKEEPVVDVVARQVTSVEPTGYDSKLEIKKIDTTKPEPSEGTSGAPKIRIKIKNRMLSKP

SEQ ID NO: 152530 - protein, 56 aa, Glycine max
  Clone ID: PAT_MRT3847_10875C.1.pep
VVPTVVCSDKGPCYRKKVTCPKKCFSSYSSSGKGYGGGGGGGGCTIDCKTKCTAYC

SEQ ID NO: 152531 - protein, 71 aa, Glycine max
  unsure (1)..(71): unsure at all Xaa locations
  Clone ID: PAT_MRT3847_108760C.1.pep
LLSLNWTRGGPHPSRYFRKDVTIEFLNKXRYGSSCEYNARTTNICHLFARKFTPHALDRLLRFAPKIMQFN

SEQ ID NO: 152532 - protein, 76 aa, Glycine max
  Clone ID: PAT_MRT3847_108761C.1.pep
KLAYRMRVAPTYIIYLGTISSRCGIWIFSNTPLHIQHFWAGCMDNMVGDLFNGSWINSNIILKCGFGPNTIPKASL

SEQ ID NO: 152533 - protein, 121 aa, Glycine max
  Clone ID: PAT_MRT3847_108762C.1.pep
CVYAGIMHDVLGIAMEEKRVGFGDQKINSHVDWTLGSFITETMAEPLELEHLDTGMIVGNESVTYFSLFAFLFLFMLAAFFVLQWRKPQLKTVYDLEKGRYIVTRIPKCGRGKAKDETEKP

SEQ ID NO: 152534 - protein, 85 aa, Glycine max
  Clone ID: PAT_MRT3847_108763C.1.pep
RSFNMTLSLISNRRVYSKLSNSGTENDSRSLSPAQRVVYIPLINRTQRSRQKMRNSLNQASNPVVTGFEARQPVLPPEHNFRTHK

SEQ ID NO: 152535 - protein, 190 aa, Glycine max
  Clone ID: PAT_MRT3847_108764C.1.pep
AKLADFGLAVKGGLSEPGPAPAGTIGYIDPCYTTPDKLSTKNDIFSFGVVLLEIISGRKAIDVCKTPASIVERVKTSDELKEFCDTRMPLPPNYMVGSVTRLLSFAARCVSLNEEERPWAGEVVMGMEMELNCFFRVPAWRLCVLKGVVWFRNRKRRKKPFVSIISVSSGKKKSSMTMTIKDVLADLTFH

SEQ ID NO: 152536 - protein, 51 aa, Glycine max
  Clone ID: PAT_MRT3847_108765C.1.pep
KRATLVISEGTCPGGLTKKGARGQMLQPGLAMGANLWGGQACHKTYPHRPP

SEQ ID NO: 152537 - protein, 74 aa, Glycine max
  Clone ID: PAT_MRT3847_108766C.1.pep
MFYGTSLPHRRIYIDIKFNDHRVDHAHRQQIHRGSRHRWNLDPDYESGGSGSQRHTPSATVSGGTSKNRGGCHL

SEQ ID NO: 152538 - protein, 153 aa, Glycine max
  Clone ID: PAT_MRT3847_108767C.1.pep
SHTEQQGHCNVCELTRLCKEGKVKEAIELMDKGVKADAGCFDLLFDLCGQSKSLEDAKKAHDHFLQSTFRSDLTLNNKVIEMYGNCKSMTDARRVFDHMPNRDMGSWHLMLRGYAYNTNGDDALQLFEQMNELGLEITSETLLAVLSACASAE

SEQ ID NO: 152539 - protein, 131 aa, Glycine max
  Clone ID: PAT_MRT3847_108768C.1.pep
MAFLLGKRRSSQNELAKRRRDKSPEGIELEENPEVFKSSLLKDSKEHIISTYFPDVRTLFDAFQRGLKAAEHSACLGFRPAKGSPYQFLTYAEVAVRSQSFGHALISKLGLQPGNETFVAIYAQNCPEWMI

SEQ ID NO: 152540 - protein, 101 aa, Glycine max
  unsure (1)..(101): unsure at all Xaa locations
  Clone ID: PAT_MRT3847_108769C.1.pep
VPPXXFXFFPXXFPXPPLICPAYCVPPRFWWPSLCLCSFIRSTGSARKILGFLESLISNLCGTXLRCGLFCPYDSVLPSDLAVRLXXSHXKSLLXXLXPVP

SEQ ID NO: 152541 - protein, 66 aa, Glycine max
  Clone ID: PAT_MRT3847_10876C.1.pep
RLREDDRRDQVKRRRKMNLLLNRKQTCKHHLFSVHQSITCDFDPNRGLFTNLINTHGNGALVSINE

SEQ ID NO: 152542 - protein, 80 aa, Glycine max
  Clone ID: PAT_MRT3847_108770C.1.pep
RLRVTGGAWTDTYRQAPSGQSAPCFSGPGLWIPPRPSRTTMPGADPARRRYMSKTMQLNTKNRVPRHATLHAIPEDAEMM

SEQ ID NO: 152543 - protein, 92 aa, Glycine max
  Clone ID: PAT_MRT3847_108771C.1.pep
TGCGIDPSKWESVFESFEQADPSTTRLHGGTGLGLCIVRTLVNKMGGEIKVVKKEGSGTLMRLCLRLSAPVDATEQHCQVDFANKGLVVLLA

SEQ ID NO: 152544 - protein, 63 aa, Glycine max
  Clone ID: PAT_MRT3847_108772C.1.pep
RRYLLCIYQTLNHLCSTAHIRSHLLPNCLPPQTLLLLTRPSSTQDSCETPPTAASNDNSCRAL

SEQ ID NO: 152545 - protein, 147 aa, Glycine max
  unsure (1)..(147): unsure at all Xaa locations
  Clone ID: PAT_MRT3847_108773C.1.pep
YPQFYLSKDQNSPPYKKPQWVNNSKIVGFLTAFINHMSPDIAXIRTSFKQSKCLQYNITSIEIATSLAIINQYEALXRELYPDYIPPLASSGGSXSLVIXDINEYDVXGGEDQPNFYLEYCIHYNLDTSNLWMERLTVTLPVQQPFF

SEQ ID NO: 152546 - protein, 50 aa, Glycine max
  Clone ID: PAT_MRT3847_108774C.1.pep
SQPFSHVRQVYTSVQVVDLWRLDRTISRSMHGDASPGALSARAETTLNFN

SEQ ID NO: 152547 - protein, 48 aa, Glycine max
  Clone ID: PAT_MRT3847_108775C.1.pep
HDDTYVAEMEPCKLETIFCIINYYCTANKFIKYNFTSIPPFIHTFLNY

SEQ ID NO: 152548 - protein, 76 aa, Glycine max
  Clone ID: PAT_MRT3847_108776C.1.pep
TTWLENPTCPNLETVQQKGEPPRRVVCPLSGVRRYYARPTRGGQRQQWHAILHLKMENEGRNRTLEHNDYGMHKRS

SEQ ID NO: 152549 - protein, 146 aa, Glycine max
  Clone ID: PAT_MRT3847_108777C.1.pep
MGSDRERESCNSRHFAWLMKSCFPNPNDAVAKLASPPQSHRNSPVPATTISSLPDDIVLDCLSRVPTSSLPALSLVCRRWSRLLSSPDFSDLRRHRLLLRHTAVAIAGTNLGLSSATLLDGAWHPSLFVPCYDAHSLDNFHSLLAH

SEQ ID NO: 152550 - protein, 80 aa, Glycine max
  Clone ID: PAT_MRT3847_108778C.1.pep
LKFPLTTESAIKKIEDTTPLVFIVDPRAAKKKIKNPVKKMYAIQAKKVNPLIRPDGTKKAYVRLTPDYDALDVANKIGII

SEQ ID NO: 152551 - protein, 106 aa, Glycine max
  Clone ID: PAT_MRT3847_108779C.1.pep
PLPGRWGFLATPPVRPVPPKAGVALSSFFKPGWGFFWAHFWLRKGLSPWGGACPVGHPGGGGKKMCFFGSVWFFALKNPPQFFLPFSLQTCFFGVSPFFLGPMFFP

SEQ ID NO: 152552 - protein, 90 aa, Glycine max
  unsure (1)..(90): unsure at all Xaa locations
  Clone ID: PAT_MRT3847_10877C.1.pep
MGXYQPGGSECQNPIKYCYFFFVSRDLAQKPVAPEDSSMMQIAXLYCSDKPNPAXASFFIQSSLTRNEQACLFCHRDFTYVTLYLFVTFT

SEQ ID NO: 152553 - protein, 135 aa, Glycine max
  Clone ID: PAT_MRT3847_108780C.1.pep
PGPFEVSRAPFLKSLNPEFMFGLPFLKPFLLKGNWPPNITIFPPRFFAKKKSPPPPPPGFCPPPPPVLFQVFGHWGDFWVGGNAFKPLVDLVFGFPNFFVLKINRGGVFYLLGLITLAFVPKKKKKKKKKKNPNP

SEQ ID NO: 152554 - protein, 126 aa, Glycine max
  unsure (1)..(126): unsure at all Xaa locations
  Clone ID: PAT_MRT3847_108781C.1.pep
MRTLEVLTYKLLTRRQMIIDVLHPHHANVSXKELTDXIDQEIKANDSNADCVLRMRTAVRGQQSSGXALIYDSSEDALDSEPKYRLVRPGLNAKKDGSHQQRRELKNRKLKVRGSNMAKVAADTNN

SEQ ID NO: 152555 - protein, 141 aa, Glycine max
  Clone ID: PAT_MRT3847_108782C.1.pep
LWSPSFKNNIIYEDGSVQKIPEIPDDLKIIYKTVWEIKQKTLVDMAVDRGCYIDQSQSLNIHMDQPNFGKLTSLHFYAWSKGLKTGMYYLRSRAAADAIKFTVDTSMLHEKPMAEEEDDNTKMAQMVCSLTNREECLACGS

SEQ ID NO: 152556 - protein, 55 aa, Glycine max
  Clone ID: PAT_MRT3847_108783C.1.pep
IAGPSSSLVGGRPSFFSVGYARPAGAFVSINCSWTEFAKRLRARAGVLEPNSELT

SEQ ID NO: 152557 - protein, 58 aa, Glycine max
  Clone ID: PAT_MRT3847_108784C.1.pep
GVLMVTGTVKRVTHSQLLKCAMTGIVQEEVERSKKGARMLRCSHQTMTFRPNWIKSNL

SEQ ID NO: 152558 - protein, 230 aa, Glycine max
  Clone ID: PAT_MRT3847_108785C.1.pep
TTEDEEGCCLTSKYCCSRRLLQFAVRDAVATSRTATGMSVEPSLKRLRSVVSTSAGDSSFVERPQRMQLASRVANPMATMIKAVAEAAEDVIKSKPSGSVFDRLGRGIDTLDDNRQLEDSYQHQEQHHLFRSQRTEYNGGYAANMTMAGHETGYPSDSNSDNEGFDDINVMDHRVSGASQICPSAGYRGNDSLMVQYSVAKNVDDSLRQKRNREPGALAASPNTSHKIVN

SEQ ID NO: 152559 - protein, 119 aa, Glycine max
  Clone ID: PAT_MRT3847_108786C.1.pep
TTRQENQTKAEKENGTHRAPTKREPDRPAEKEAEHEADPDDATKGEQKDPENHKPQPGGAAPATKDGEDTPKEPRAITRHQAEKHRPQGAETPGKTREERGPAAQRPEAEAHNNQAQAH

SEQ ID NO: 152560 - protein, 298 aa, Glycine max
  Clone ID: PAT_MRT3847_108787C.1.pep
MLKSIVGCCKVYISESRNRTALESIERASKLFPLAPIINKFEDVTYNRVGYTLVSELGHSGPCHLSNAVLAMVKAAFDSIDFEVHTGTHPRLGVVDHICFHPLLDASLDHAANAARCLATDMGSTLQVPTYLYGAAHEEGRTLDSIRRIFGYFKPNSIENQWIGGMKSDSLPLNPDSGPSQVTPAKGVVVIGATNWVDNYNVPLLSSDISAVQRIAKRVSGRGGGLPSVQAMALAHGEGVIEVACNLLDPNKVGGERVQQEVENLAREEGISVEMGYYTDFSQDQIISSYLEFFEEKI

SEQ ID NO: 152561 - protein, 246 aa, Glycine max
  Clone ID: PAT_MRT3847_108788C.1.pep
QFRAHKSPISALCFDPSGTILLTASVQGHNINVFKIIPGYERVSASDADPSYVHLYRLQRGLTNAVIQDISFSADSRWIMISSSRGTSHLFAINPQGGPVSILSCDNSLTEKNGGLDIINNQAVRWPHSSALEICKPQSLCAAGPPITLSVVSRIRNGSNGWRSTVTGAAAAATNRMSSLSGAIASSFRNFEGNSTLYVNGNYSKEKRHLLVFSPTGSMIQYALQTINSQDSGVVSGVTPAYESAH

SEQ ID NO: 152562 - protein, 66 aa, Glycine max
  unsure (1)..(66): unsure at all Xaa locations
  Clone ID: PAT_MRT3847_108789C.1.pep
MDLDTSELEPRLGTIVKGRLESGQLYTPAYXGRVGAMAHGAEXGITGPTNLTVVWSXMQQLLQDID

SEQ ID NO: 152563 - protein, 355 aa, Glycine max
  Clone ID: PAT_MRT3847_10878C.1.pep
MRSFTFFERVSRAFRDHGSNFKLVLLCTTVSGGGIVAYGEAAAASEAAAAATEKKKVVVLGTGWAGTSFLRNLDNPKYEVHVVSPRNYFAFTPLLPSVTCGTVEARSIVEPVRNIFRKKKMDMQFSEAECLKIDAANRKVYCRSNISNNLNEKEEFVVDYDYLIIAVGANVNTFNTPGVMENCHFLKEVEDAQKIRRTVIDCFERASLPSVSEPTSPRILHFAIIGGGPTGVEFAASLHDYVTEDLVNIYPGIKDLVKITLLEAGDHILSMFDKRITAFAEEKFGRDGIDVKTGSMVVKVSEKEISTKEMKNGGAITTIPYGMAVWSTGIGTRPFIRDSMSQIGQTNRRAIATDE

SEQ ID NO: 152564 - protein, 222 aa, Glycine max
  Clone ID: PAT_MRT3847_108790C.1.pep
MGCQLKTQLFLLFLVWGSWTFLCYGLPSEYSILALEIDKFPSEEGVIELFQRWKEENKKIYRSPDQEKLRFENFKRNLKYIAEKNSKRISPYGQSLGLNRFADMSNEEFKSKFTSKVKKPFSKRNGLSGKDHSCEDAPYSLDWRKKGVVTAVKDQGYCGCCWAFSSTGAIEGINAIVSGDLISLSEPELVDCDRTNDGCDGGHMDYAFEWVMHNGGIDTETN

SEQ ID NO: 152565 - protein, 92 aa, Glycine max
  Clone ID: PAT_MRT3847_108791C.1.pep
ILNYEMGGLNNTPPSLFSDLCYLRTLQESRMIIILEVTRKVSRLLAHPESRHSLTHAELSKCPVAWNSLEPPLIFICLMVEPSTDTDYPYRL

SEQ ID NO: 152566 - protein, 57 aa, Glycine max
  Clone ID: PAT_MRT3847_108792C.1.pep
SLHQFSYADPSSPSSPRLKPWHQISTCTPIPPSHFPPDILMRRQIDGKMCYDQLVRS

SEQ ID NO: 152567 - protein, 297 aa, Glycine max
  unsure (1)..(297): unsure at all Xaa locations
  Clone ID: PAT_MRT3847_108793C.1.pep
MEKCAMINWCALDSLSGDARAARHAIVKEPVADILGAXLLWVLQCKSEALLSMASDVAVKVISFIPNSLFAIPSCAIALNLVISNLSATSEKAVMETLKETETSMRIVGNRKDFAEGAKKIEYFEETTFLLSAILWRWPPSRFPVGNDVILMKVLANIHTRTDKATPFSKLFLLQFHSIPYKSLCILDFTRTYPLCKNPFFTFPASYIRILGSEKVPCAILFQVQITVEVNKKRSAVRRFLKKDMADLLGSSLDYNSYGRSPKSLTRLVCYKFSLVLSSLQHKLNFFLHSISLSLLL

SEQ ID NO: 152568 - protein, 61 aa, Glycine max
  Clone ID: PAT_MRT3847_108794C.1.pep
ALHAEGCPIVCPHTYLNLLIRESLPHFDTDLYICKGGLLFYTHGQDFPGKPILDLDFIKLL

SEQ ID NO: 152569 - protein, 60 aa, Glycine max
  Clone ID: PAT_MRT3847_108795C.1.pep
RVPCNELQIVPMGSFNVLSIPQDAFLSLFPQTQIICVEFDNQIFLWCSLLRRSLIRTVMM

SEQ ID NO: 152570 - protein, 73 aa, Glycine max
  Clone ID: PAT_MRT3847_108796C.1.pep
FFFLVFHGYSSLETILFKAQSGTQHKYVSFDKDSNLNSSHSMILLILTLMLDPFCRLLAAVLEPIRLEFEPNP

SEQ ID NO: 152571 - protein, 152 aa, Glycine max
  unsure (1)..(152): unsure at all Xaa locations
  Clone ID: PAT_MRT3847_108797C.1.pep
AYACICRAHNLADDALKKFQMLDGDNKIMMKELEDLCNECRSXSCIEHASGIMEEKKTQENLSERVSNISLTGTERLEKFLLEKLDVYESAVGDSNVKCTPRIAGFPPAFQAISRNPIVLDLAYNMIEFPPIENRMKKDRKAKGGLISRIFG

SEQ ID NO: 152572 - protein, 164 aa, Glycine max
  Clone ID: PAT_MRT3847_108798C.1.pep
RTVQPPIIASILAMTIGAFPSNQKLIFTPDGIRSNFTDSCMSRGEAMIPCILLALGGNLIDGPGSSKLGFRTTAAIIFARLLLVPLVGLGIVTLADKLGFLPSDDKMFRFVLLLQHSMPTSVLAGAVANLRGCGRDAAAVLFWVHIFAIFSMAGWIILYLNILF

SEQ ID NO: 152573 - protein, 603 aa, Glycine max
  unsure (1)..(603): unsure at all Xaa locations
  Clone ID: PAT_MRT3847_108799C.1.pep
MGKESQTSAMEIDAPKSMNSDLIVPKFSINVLQLLKSAQMQHGLRHGDYTRYRRYCTARLRRLYKSLKFTHGRGKYAKRALTESTVTEVRFLHVILYTAERAWSHAMEKRQLPNGPNARQRIYLIGRLRKAVKWATLFSIVADIKNSQRHHFASTSTLSRHSKPLLFETRWEWNVALKNIKSARAVXEELGKYVEKFYQVLCRERVEELEQSIRYCLHKIGQSDLQASELLQISDVEGPALDLFKAKLEAAMAEARSQQAASMTEFLWLGHRFPISNAKTRVSILKAQELEKDIHGPLADSIPADKRLVIFDKIFSAYHEARGYIRADLATTGSTESVKDDLNGLDKAVSAVLGERTIDRNLLLVKVAKSKLAKRHDDKNEKLTKPEELVRLYDLLLQNTGDLSDLVSSGRDKKPEEVIFAEVCSYKSLAFRAQRCFYAPKSYSVAGKRAEAYALYCRARNLADDALKKFQMLDGDNKTMMKELEDLCNECRSNSCIEHALGIMEEKKTQENLSERVSNISLTGTERLEKFLLEKLDVYESAVGDSNVKCTPRIAGFPPAFQAISRNPIVLDLAYNMIEFPPIENRMKKDRKAKGGFISRIFG

SEQ ID NO: 152574 - protein, 367 aa, Glycine max
  Clone ID: PAT_MRT3847_10879C.1.pep
LKSCDYRTLAIGDGGNDVRMIQQADIGVGISGREGLQAARAADYSIGKFRFLKRLILVHGRYSYNRTAFLSQYSFYKSLLICFIQILFSFISGVSGTSLFNSVSLMAYNVFYTSVPVLVSVLDKDLSEKTVMQHPQILFYCQAGRLLNPSTFAGWFGRSLFHAIVVFVISIHAYAYDKSEMEEVSMVALSGCIWIQAFVVTMETNSFTILQYMAIWGNLAAFYVINWIFSALPSSGMYTIMFRLCRQPSYWIAIFLMVAAGMGPILAIKYFRYTYRPSKINALQQAERLGGPILSLGTIEPQLRSVEKDVSTLSITQPKTRNPVYEPLLSDSPNATRRSFGAGTPFDFFQSQSRLSLSSYTRNCKDN

SEQ ID NO: 152575 - protein, 58 aa, Glycine max
  unsure (1)..(58): unsure at all Xaa locations
  Clone ID: PAT_MRT3847_1087C.1.pep
IELIRDKNLQMLSNSCLEGELINDDGTKLVCLPSXCLHSEPRECPNPKSRSNTSLEGF

SEQ ID NO: 152576 - protein, 84 aa, Glycine max
  Clone ID: PAT_MRT3847_108800C.1.pep
SEAGREQNFGPKFEGRTPTSLRASSPALAWAHLQVGHWKEGVQGTEKLRVHTYNCTTAIKSYLKTLSLAYKWKRLGYLVKWKDC

SEQ ID NO: 152577 - protein, 144 aa, Glycine max
  Clone ID: PAT_MRT3847_108801C.1.pep
MLLGKRPRPPMKRTTSMSEMTLDLNTAAAADAPDNQQRSGVGPGAAADQTTRMLATPKILRRHSSDFGDTPPFLRACSLCKRCLVPGHDIYMYRGDNAFCSLECHQQQMNQDERKEKFVMASCETSVATPPSGSQGHLGLNHQG

SEQ ID NO: 152578 - protein, 51 aa, Glycine max
  unsure (1)..(51): unsure at all Xaa locations
  Clone ID: PAT_MRT3847_108802C.1.pep
LQFKXLRFVIVNVDLRLFGYAKFKQLSIYHDIHVRFINSLVQQFCTLLLLL

SEQ ID NO: 152579 - protein, 37 aa, Glycine max
  Clone ID: PAT_MRT3847_108803C.1.pep
DEKSRIPNKLSLSLLRIKQTIIPSKMHQLINNSSVYQ

SEQ ID NO: 152580 - protein, 78 aa, Glycine max
  Clone ID: PAT_MRT3847_108804C.1.pep
TGGGNFSLYGRGLGRTKWGTKNPPLFWGVYEPPLGPEEKGPLNERPPGTPLFPPLGKFLKRGKPRGFWFAHCKAPPIF

SEQ ID NO: 152581 - protein, 66 aa, Glycine max
  unsure (1)..(66): unsure at all Xaa locations
  Clone ID: PAT_MRT3847_108805C.1.pep
MMGCLELSEVAFMPVIHVLLISALRALMATHFFDHILSPDIQXASNKIELVIFTPSLSAYSFAKSV

SEQ ID NO: 152582 - protein, 43 aa, Glycine max
  unsure (1)..(43): unsure at all Xaa locations
  Clone ID: PAT_MRT3847_108806C.1.pep
LXIKTAQGFLVRFKRRASELYICIAIFHTLSAFTMWTLRGAFF

SEQ ID NO: 152583 - protein, 52 aa, Glycine max
  Clone ID: PAT_MRT3847_108807C.1.pep
KVLRLQSEFYGYPMMRQVLADGITINGITQNMKLTIGEHQPMLQDWCRVLVH

SEQ ID NO: 152584 - protein, 68 aa, Glycine max
  unsure (1)..(68): unsure at all Xaa locations
  Clone ID: PAT_MRT3847_108808C.1.pep
MXGYXXXYDDXGRXVXXYXNXXXQTXXYXXPVHAASVTYVATRTAAXGYSVGIIXQGQGRGKPGSGAP

SEQ ID NO: 152585 - protein, 70 aa, Glycine max
  unsure (1)..(70): unsure at all Xaa locations
  Clone ID: PAT_MRT3847_108809C.1.pep
LGDRDDHSLLLSVLLFLSERLWKFFEITPEKNPQLXDLDIFLSSVDINEGALLLPHFNSKAIVILVINEG

SEQ ID NO: 152586 - protein, 90 aa, Glycine max
  Clone ID: PAT_MRT3847_10880C.1.pep
SDRTHPTNQPIGDKNHIAAYPNHVAMGYVKPVAGWSSTTENDDAFYTATLGRLAVAYEAQARINVAHLLPLNAADKRTALTNIDFHGKWH

SEQ ID NO: 152587 - protein, 160 aa, Glycine max
  Clone ID: PAT_MRT3847_108810C.1.pep
GTSDEVVDCSHGKQLWELCKEKYEPLWLKGGNHCDLELFPEYIRHLKKFITTVEKSPSQRYSFRRSTDQFEQPRKSTDIFEVSRKSTDRREKPRKSTDKPEKLKNLSNNSDMLEKLRMTFDHKERSRRSVDCHEKSRKSIDHQLEKARKSVDRLDRIRSG

SEQ ID NO: 152588 - protein, 84 aa, Glycine max
  Clone ID: PAT_MRT3847_108811C.1.pep
VHAFAHASAHASDFSHLLPCKATILPSCIVGMALLTAQFSVSQYIWSLSIQGLRLCFHVWPSWGADMTPKMASWVIPSKWILLR

SEQ ID NO: 152589 - protein, 271 aa, Glycine max
  Clone ID: PAT_MRT3847_108812C.1.pep
MIEKWWKANNVEISPNCPRCGSTNTKFCYYNNYSSTQPRYFCKGCRRYWTKGGSLRNVPVGGGCRKSRSAKYNKTFRQANNSVGYSDDLMASPNSVVSDAPSIDLAQVYASFLNQKPDQAVQTVRYPNEPDYYSCLLNTTDFGHSALSEEELGLTDCLHFHEQSTESHFGESFQMYLFGFNSIHNHQEYYSSSYDTTNNTNFELPQLPGEETEISHGDMLWSKSNSEMMLDHALQASQPPLFGPQSHDADFIMGNCWSHFDLPRDASFSTL

SEQ ID NO: 152590 - protein, 75 aa, Glycine max
  unsure (1)..(75): unsure at all Xaa locations
  Clone ID: PAT_MRT3847_108813C.1.pep
MPMINIHVGRPEKATHPDTLNAALAEFIPTFIFVFAGSCSGIAXKKLTENRAANLACLITGSIGHAFAIFVDVDV

SEQ ID NO: 152591 - protein, 77 aa, Glycine max
  unsure (1)..(77): unsure at all Xaa locations
  Clone ID: PAT_MRT3847_108814C.1.pep
MAPXXDKXPPPSSKXXXSXGGKQKXKKWSXGXXKXKVNNMVLFDQGTYXKLLXXAPKYKXXXPXSIXSDXLXXNGXL

SEQ ID NO: 152592 - protein, 77 aa, Glycine max
  unsure (1)..(77): unsure at all Xaa locations
  Clone ID: PAT_MRT3847_108815C.1.pep
IQEQYFASVLHKSMKGLGNNYCTLIRVVVSRTQVNMQSLSXYLKKHKKALSNEGHSATCSRYSTFLLSHLGPNHLHH

SEQ ID NO: 152593 - protein, 441 aa, Glycine max
  Clone ID: PAT_MRT3847_108816C.1.pep
NVTRSTDEKQLLDWHLANLEYANAGCLSNLSAAYCRSDDPYEMSGDHCFLAGGNMGLIKALCEGVPVFYGKTVNTIRYGNEGVEVIAGEHVFQADIALCTVPLGVLKKKAISFEPELPARKLEAIERMGFGLLNKVAMVFPHVFWGEDRDTFGCLNEHSHQRGEFFLFYCYHTVSGGPALIALVAGEAAQAFESTDASILLHRVLTVLKGIFHPKGIIVPDPIQPTRPRWGSDPLSYGSYSHVSVNSSGADYDILAENVGNRLFFAGEATSRQYPATMHGAFLSGLREASHIYRSARIQNNPRKCMPKNIVSNDILGDLFKWPDLEFGKFAFIFYPSPENLQSTGLLQVTIGDAEEIYEELFSSYPNAAKWPLQLYTIISREQAQQLQKVEGGNESLLSFFTAARRLQLGGPNALLTAGNTLIASIAHSRKGRWRNRVITC

SEQ ID NO: 152594 - protein, 72 aa, Glycine max
  Clone ID: PAT_MRT3847_108817C.1.pep
PHRPYHFRPLLSQTPTHLKRETTADHGRNTPGLSGDPDAIDKNRAPDEIHEKSDPLADLPTHHSQSSEHQII

SEQ ID NO: 152595 - protein, 122 aa, Glycine max
  Clone ID: PAT_MRT3847_108818C.1.pep
MQIFVKTLTGKTITLEVESLDTIDNVKAKIQDKEGIPPDQQRLIFAGKQLEDGRTLCDYNIQKECTLHLVLRLRGGAKKRKKKTYTKPKKIKHKHKKVKLGILQFYKVDDSGRKKLTMLQQS

SEQ ID NO: 152596 - protein, 62 aa, Glycine max
  Clone ID: PAT_MRT3847_108819C.1.pep
SGANTQNKLNNLGMGGEKKINLTRKKNNTTGFLGLLLRELRNKVGLYNNGRGVRATHLFREP

SEQ ID NO: 152597 - protein, 144 aa, Glycine max
  Clone ID: PAT_MRT3847_10881C.1.pep
MFTCIACTKTDDKDEEGGSRESGTPSTKEAVKSLTTQIKDMALKFSGAYKQCKPCTGSSSYKKGHRPYPDFDTISEGVPYPYIGGASSSSTPAWDFTTSHYPGGRSDPRFAGAYGGDRTPRGRDSSSVCDVVLEDEDEPKEWMA

SEQ ID NO: 152598 - protein, 168 aa, Glycine max
  Clone ID: PAT_MRT3847_108820C.1.pep
MRLEKCWFCSSTIYPGHGIQFVRNDAKIFRFCRSKCHKNFKMKRNPRKVKWTKAYRRVHGKDMTQDSTFEFERKRNRPERYDRNLAENVLKAIPKIDKIRVTRGLKHHKNRMKGKKQKLQMEAARELEQGISLVKAPSVLQKDPSLTLPKIKVGVSQQQSEDNHPMEE

SEQ ID NO: 152599 - protein, 103 aa, Glycine max
  Clone ID: PAT_MRT3847_108821C.1.pep
ATSILQSISKLEMDGGGYNLTTTSLSSSMEQVMRPKSPLPGLVDFHGKRKQMVKIQVLEREIGLLQELKSLEGLNPASRCCKELDAFVDSVSDPFTPTRKQTV

SEQ ID NO: 152600 - protein, 93 aa, Glycine max
  Clone ID: PAT_MRT3847_108822C.1.pep
MAGARTECNKELSCGPDEPLTRFAFQLAMGLKDERANPWFWMYSAEPNDAMAGLFSLERHVLCTNYEFNMFESRDPENCLSNKFCIWTIFLTA

SEQ ID NO: 152601 - protein, 63 aa, Glycine max
  Clone ID: PAT_MRT3847_108823C.1.pep
ITDLVALPADPTKMSDSTKYTSRLLNRRVLVIGGSSGSGLCVAQASLEHRAIVTISSSYEDRI

SEQ ID NO: 152602 - protein, 64 aa, Glycine max
  Clone ID: PAT_MRT3847_108824C.1.pep
RAGNNCRDELIIRRPPSFFFFLGRTDNVYSNSRIIPQPRTPMADYGVSNQLGKEHYGGHEPKPK

SEQ ID NO: 152603 - protein, 356 aa, Glycine max
  Clone ID: PAT_MRT3847_108825C.1.pep
MANELPVKAFGWAASDTSGTLAPFHFSRRENGVDDVTLKILFCGVCHSDLHTLKNDWGFTTYPVVPGHEIVGVVTEVGNNVKNFKVGDKVGVGVIVESCKECENCQQDLENYCPRPVFTYNSPYYDGTRTQGGYSNIVVVHQRYVLRFPENLPLDAGAPLLCAGITVYSPMKYYGMTEPGKHLGVAGLGGLGHVAIKLAKAFGLKVTVISSSPNKQAEAIDRLGADFFLVSSDPAKMKAALGTMDYIIDTISAVHSLIPLLGLLKLNGKLVTVGLPNKPLELPIFPLVAGRKLIGGSNFGGLKETQEMLDFCGKHNITADIELIKMDQINTAMERLSRADVKYRFVIDVASSFSSF

SEQ ID NO: 152604 - protein, 360 aa, Glycine max
  Clone ID: PAT_MRT3847_108826C.1.pep
MAKSPETELPVEAFGWAASDTSGTLAPFHFSRRENGVDDVTLKILFCGVCHSDLHTLKNDWGFTTYPVVPGHEIVGVVTKVGNNVKNFKVGDKVGVGVIVESCKECESCQQDLESYCPRPVFTYNSPYYDGTRTKGGYSNIMVVHQRYVLRFPENLPLDAGAPLLCAGITVYSPMKYYGMTEPGKHLGVAGLGGLGHVAIKLAKAFGLKVTVISSSPNKQAEAIDRLGADSFLVSSDPAKMKVALGTMDYIIDTISAVHSLIPLLGLLKLNGKLVTVGLPNKPLELPIFPLVAGRKLIGGSNFGGIKETQEMLDFCAKHNITADIELIKMDQINTAMERLSKADVKYRFVIDVANSFASL

SEQ ID NO: 152605 - protein, 64 aa, Glycine max
  unsure (1)..(64): unsure at all Xaa locations
  Clone ID: PAT_MRT3847_108827C.1.pep
EGANVRVFYVWSLFDNSEWSSGYSSRYGMIFVAYQDGLDTYRXLSAQWFKTFLEKEIRLYSSSK

SEQ ID NO: 152606 - protein, 76 aa, Glycine max
  Clone ID: PAT_MRT3847_108828C.1.pep
LGLVYSMRFYVPSRRWTARSSYCSLCSSATRHDLLLPLNSRLCDICCVVLMALTVFNCRRQSLRLFRLTTSVRGAR

SEQ ID NO: 152607 - protein, 118 aa, Glycine max
  unsure (1)..(118): unsure at all Xaa locations
  Clone ID: PAT_MRT3847_108829C.1.pep
QLNEVVRETGGACNGPTNMHRPVNSATHSTXPAPARTKYLSPFSEQIPSFVTGEFAGDYRWDTAGLXADPETLDRNQALEVSHSTLSMLGALGCTLPEMLANNGLKSRKSRVDHGCCH

SEQ ID NO: 152608 - protein, 61 aa, Glycine max
  unsure (1)..(61): unsure at all Xaa locations
  Clone ID: PAT_MRT3847_10882C.1.pep
TYSDNQPGVLIXVFEGGRGRTNDNHWLGRFELSGLRPAPMGVPQITVCLDIGASGIVNVSA

SEQ ID NO: 152609 - protein, 92 aa, Glycine max
  Clone ID: PAT_MRT3847_108830C.1.pep
LETVSLSHMADAKDSSIVDSKSSPTSTLTSSASQQQHRIIRTFLMAQDILRILPTLLSAASIAVMVTNNQTVLIFAIRFQAHFYYSPSFKFF

SEQ ID NO: 152610 - protein, 103 aa, Glycine max
  Clone ID: PAT_MRT3847_108831C.1.pep
RWTSFTRCCGGTERRGEDDRKELQELDKSEKEKRMKAGTEQHRVWVPSFEWEDFTDQVQFRGQQYMQFPTSSTSPSPLAGGTDNKQRKHDDQHSHSLDLNLTL

SEQ ID NO: 152611 - protein, 50 aa, Glycine max
  Clone ID: PAT_MRT3847_108832C.1.pep
LTTRGMPGSSKYIISTSFLSSQFIFLLHNISLTVTCSLFIPSTPIAKEDF

SEQ ID NO: 152612 - protein, 67 aa, Glycine max
  Clone ID: PAT_MRT3847_108833C.1.pep
VLYYFCTLCDTWIPIPKRMTFLHKNEIKKKKKKKKKKKKKKKKKAKDLNGLRDTKDNHKKEKQTGKA

SEQ ID NO: 152613 - protein, 65 aa, Glycine max
  unsure (1)..(65): unsure at all Xaa locations
  Clone ID: PAT_MRT3847_108834C.1.pep
VRKLGIRLELGYVAASKDPVIGXGSLLLTYTTGYVSPLLLAASFAGALQSLLSFRKFSAWINPIS

SEQ ID NO: 152614 - protein, 140 aa, Glycine max
  Clone ID: PAT_MRT3847_108835C.1.pep
KNSKWLQENLTDMDSKVKQMIKLIEEDADSFARRAEMYYKKRPELMKLVEEFYRAYRALAERYDHATGVIRQAHHTMAEAFSNQVPPLAPADDSPGVTSMETEPHTPETIHFSRAFLDSDDLQKDALTHFHAISRNGSYT

SEQ ID NO: 152615 - protein, 59 aa, Glycine max
  Clone ID: PAT_MRT3847_108836C.1.pep
PKFPDRPTRPKGLTFLLKPEDMTTRAEAAAPRAIRGIYSTQQRLCFFALRCYTGYRHHP

SEQ ID NO: 152616 - protein, 134 aa, Glycine max
  unsure (1)..(134): unsure at all Xaa locations
  Clone ID: PAT_MRT3847_108837C.1.pep
PGVVLMMTVPVGTDRFMPTDTNASAITPGTGPGTALVRSFLWKLFFEKRDDYWVSGQAXLSSGVLTSWSLLHAEEFEPMRVNGPGNERLDCAVCRELSSLIGEILHSETRMAQYAYQLQDLLKKDITSEYVCRL

SEQ ID NO: 152617 - protein, 74 aa, Glycine max
  Clone ID: PAT_MRT3847_108838C.1.pep
LGWGPSYKLFTSITQRRVAHLAYVPTNQHWSIYHHDHNTDDAYCIVASCTRDYFCVAYSYLMTFYQDCEITMRR

SEQ ID NO: 152618 - protein, 89 aa, Glycine max
  Clone ID: PAT_MRT3847_108839C.1.pep
YYNWGTGNKIRTKRGLELNRIPQKRQVKKEKIPKKDGEQQKKKKNEKRKQKRTITQGNENHNSNRIADKTEITPMIVEKGRMRPQVTKP

SEQ ID NO: 152619 - protein, 71 aa, Glycine max
  unsure (1)..(71): unsure at all Xaa locations
  Clone ID: PAT_MRT3847_10883C.1.pep
KVPDVYKVFQFKVHYXKLIYTSLSLSKHIPIQPFRHKQYKKFIPATYPYNKAXFSMIKDCFIFTTLHLYSK

SEQ ID NO: 152620 - protein, 95 aa, Glycine max
  unsure (1)..(95): unsure at all Xaa locations
  Clone ID: PAT_MRT3847_108840C.1.pep
IFLLYRNELMSDWCDLFIKSNLLHKKVLVFIYNXKPIAKSFVIVEYIDDTWNNNPILSSDLYQRALVRFCVKFIDVKVFWCFMDIFFLQFFIYSL

SEQ ID NO: 152621 - protein, 61 aa, Glycine max
  Clone ID: PAT_MRT3847_108841C.1.pep
FTLPHVINQFACNSFSSVIVSNPNCFNATSIDGCFSITIKCTFLIFIITQVNILFFLILPF

SEQ ID NO: 152622 - protein, 65 aa, Glycine max
  Clone ID: PAT_MRT3847_108842C.1.pep
RGHRVRVSMEGRMWDFFQGNLSNNLLFHLWVNGQSSFSSFFFPKVGFIFSCPKDNLRAIFAPFTP

SEQ ID NO: 152623 - protein, 62 aa, Glycine max
  Clone ID: PAT_MRT3847_108843C.1.pep
PSQAAMKGYKILTWSTFAANYFTHSVITSHVYATGLFHETARPKKSMKRGVILEIALVQSLS

SEQ ID NO: 152624 - protein, 56 aa, Glycine max
  Clone ID: PAT_MRT3847_108844C.1.pep
NIFTSMDSTPHLYSIINKWRLILTRRCIHPYIHFYIYTYIYVSNRTCQNFNSHTEM

SEQ ID NO: 152625 - protein, 280 aa, Glycine max
  Clone ID: PAT_MRT3847_108845C.1.pep
MAATSSLCSSTLQSQINGFFLHKTSLSHTPSLTFSRRKISTTVKATSRVDKFSKSDIIVSPSILSANFSKLGEQVKAVELAGCDWIHVDVMDGRFVPNITIGPLVVDALRPVTDLPLDVHLMIVEPEQRVPDFIKAGADIVSVHCEQSSTIHLHRTVNQVKSLGAKAGVVLNPATPLSAIEYILDVVDLVLIMSVNPGFGGQSFIESQVKKISDLRRVCAEKGVNPWIEVDGGVGPANAYKVIEAGANALVAGSAVFGAKDYAEAIRGIKTSKRPEAVAV

SEQ ID NO: 152626 - protein, 62 aa, Glycine max
  Clone ID: PAT_MRT3847_108846C.1.pep
GLDRYGAPIKIIASGWQARILQHECDHLDGTLYVDKMLPRTFRTVDNMDLPLAQGCPKLGPR

SEQ ID NO: 152627 - protein, 57 aa, Glycine max
  Clone ID: PAT_MRT3847_108847C.1.pep
TATNFFNNFLFGCGKKNQGLFGGSPGLIGPGRNPFSFFKKTAAKYLKTSPNGFPSTS

SEQ ID NO: 152628 - protein, 252 aa, Glycine max
  Clone ID: PAT_MRT3847_108848C.1.pep
MEALHLHRVLLMPVSQKTSIFLRASGTPLSTLARPPLRWSSQTCSARAGWFLGLGADSKKTNLPDTVKAGDPVLHEPAQDVDPNEIKSERVQKIIDDMIQVMRKAPGVGLAAPQIGIPLRIIVLEDTKEYISYVSKEEAKTQDRRPFDLLVILNPKLEKKGKRTALFFEGCLSVDGFRAVVERHLDVEVTGLDRYGAPIKIIASGWQARILQHECDHLDGTLYVDKMLPRTFRTVDNMDLPLAQGCPKLGPR

SEQ ID NO: 152629 - protein, 169 aa, Glycine max
  Clone ID: PAT_MRT3847_108849C.1.pep
YGCEKTTEGGPQVDKKQFEKILSYIEHGKKEGATLLTRGKRVGNKGYYIEPTIFSNVKEDMLIVQDEIFGPVMALMKFKTIEDAIKIANNTRYGLASGIVTKSLDTANTVSRSIRAGIVWINCYFAFGDDIPYGGYKMSGFGRDFGMEALHKYLQVKSVVTPIYNSPWL

SEQ ID NO: 152630 - protein, 95 aa, Glycine max
  Clone ID: PAT_MRT3847_10884C.1.pep
AGIPGSTHASAQFTLTRVPIFSSQFLKVPIYLLITHPFCFSSSTSHFCVNFSSLKPIHTFIIHLFRVFNLISSFKVAHALDLNVCVNFHTRVYDC

SEQ ID NO: 152631 - protein, 126 aa, Glycine max
  Clone ID: PAT_MRT3847_108850C.1.pep
YMHEHGQGLPFDLHLAKRYYDEALDHDPAAKLPVTLALSSLWVRKNYADSFVVQVIDSLPELYPKLEAWVENVLLEEGNATILTLFVCLLTVLYLRERQRRQAAVAAGEVAQPNHPNELGVPAAPI

SEQ ID NO: 152632 - protein, 66 aa, Glycine max
  Clone ID: PAT_MRT3847_108851C.1.pep
EPLYTYAMRNRHPTIMSPTDKTGDAFDFEDENNPPPLSPNRRDGFAGLRDMIQLFMLSPQRCYIVY

SEQ ID NO: 152633 - protein, 197 aa, Glycine max
  Clone ID: PAT_MRT3847_108852C.1.pep
RGLRPSSSWVDRERHQRAHSLWWQASEQGNGHAALLIGDAYYYGRGTARDYERAAEAYMHAKSQLNAQAMFNLGYMHEHGQGLPYDLHLAKRYYDEALEHDSAAKLPVTLALSSLWVRKNYADSFMVQVIDSLPELYPKLEAWVENVLLEEGNATILTLFVCLLTVLYLRERQRRQAAVAAGEVAQPNRPNELGAPM

SEQ ID NO: 152634 - protein, 143 aa, Glycine max
  Clone ID: PAT_MRT3847_108853C.1.pep
RGYGEYKDGPTYQIHKKGAARVDIIGVGCYSSKDLWTWKHEGIVLAAEETDETHDLHTSNVLERPKVIYNERSGKFVMWMHIDDANYTKAAVGVAISDTPDGPFDYLGSQRPHGYESRDMTVFKDDDGVAYIIYSSEDNSELQ

SEQ ID NO: 152635 - protein, 62 aa, Glycine max
  Clone ID: PAT_MRT3847_108854C.1.pep
GKKKDTFVLKKDRWQGWEDSFQHRVDLSADEISTQQPRFKSFFVFFYKKYTGCYGISKPIFT

SEQ ID NO: 152636 - protein, 49 aa, Glycine max
  Clone ID: PAT_MRT3847_108855C.1.pep
HGVSPAADYLNSVSELISKPRKIMQCTVRVWFGKLKGHLQNLRCVGEVR

SEQ ID NO: 152637 - protein, 77 aa, Glycine max
  Clone ID: PAT_MRT3847_108856C.1.pep
RWFCRQWPKEGQGSIANTTTVPWLSHNRSLSARQKHTNPDCDYLTEYRRANSLGLQGRRATSITLFSSGTKYSAMVS

SEQ ID NO: 152638 - protein, 112 aa, Glycine max
  Clone ID: PAT_MRT3847_108857C.1.pep
DFIKPKKNQGQGGTLKPKTPKNPKTPPQPTRGKRQNDRPQEHSLRKDKKKTLQPTTHTKAKHEQNPRREKTATTYRGHTQQRNTPGAEANKPRLPVAQERRRGRDQKNPDST

SEQ ID NO: 152639 - protein, 90 aa, Glycine max
  Clone ID: PAT_MRT3847_108858C.1.pep
RVSRPGRDNRRISYDTSNSDKGSVVSREYAQSRTEEIDDDFVSVGGSPRGGSGDRRSHRRRSRFYDDSAPCELKGRQSPGDMVTRCVSRC

SEQ ID NO: 152640 - protein, 84 aa, Glycine max
  Clone ID: PAT_MRT3847_108859C.1.pep
IYDFGGQIMHCGCRYVICEPVFWYHGSVLLHHLELVSYIMHVYGCIVQDSSSSCDVIHCSILFCSFVIRTPYAIYVCVSFCWAP

SEQ ID NO: 152641 - protein, 64 aa, Glycine max
  Clone ID: PAT_MRT3847_10885C.1.pep
LAALWPALGELGCLGIKVMWSPFHFQSWLKSHLTLLLANWGCHVFLLKVNSFWDKIWMKFFRCF

SEQ ID NO: 152642 - protein, 89 aa, Glycine max
  unsure (1)..(89): unsure at all Xaa locations
  Clone ID: PAT_MRT3847_108860C.1.pep
SALSPTSEDYAVTIRTRTSMTNTLLSRKPFIVDALHPQRPNVSKDELXDTLRRMHDVKDTNSEFVFKLRTHFGGGKSTGIDWIYHIESR

SEQ ID NO: 152643 - protein, 54 aa, Glycine max
  Clone ID: PAT_MRT3847_108861C.1.pep
AQGKLDKRWGFGKPRTFLKRFFTANQRGLWPKETLYWAGVLVFGWGSFFLRSCN

SEQ ID NO: 152644 - protein, 407 aa, Glycine max
  unsure (1)..(407): unsure at all Xaa locations
  Clone ID: PAT_MRT3847_108862C.1.pep
MALNYPFLTYFILLLVTITRLIFTVGKTEQWKAPILPELDIDNISHKLHDDPETIQMASRDYGHLTHEFPLAVFRPSSIDDIVTLIKSSYNSFAPFDIAARGQGHSTHGQAMARDGIVVDMASLRKQRNGVAISVSKDPLMGHYADVGGEQLWXDVLHATLKYGLAPVSWTDYLYLTVGGTLSNAGISGQSFRYGPQISNVHEMDVITGKGEFVTCSSQKNLELFHAVLGGLGQFGVIARARIALEPAPKRVKWVRLLYSDFFAFTKDQERLISINGRKQKNALDFLEGMLLMNQGPINNWRSSFFPLSDHPRISSLITEHSILYCLEVAKYYDEQTELNVDKEIQVLLQGLAYIPGFYYEKNVSYVEFLNRVRSGELKLQSQGLWDVPHPWLNLFIPKSQILDFNS

SEQ ID NO: 152645 - protein, 49 aa, Glycine max
  Clone ID: PAT_MRT3847_108863C.1.pep
CKLFVAEKQLELFLLVLSIHNLPKVCSYLMTRMLSNSSINEKKSNNFVL

SEQ ID NO: 152646 - protein, 57 aa, Glycine max
  Clone ID: PAT_MRT3847_108864C.1.pep
KTNKKALKIRTNPTPSYLQNNFPPPRNETKISTFIRRFHPRTKRNNKKSRCCWRGST

SEQ ID NO: 152647 - protein, 90 aa, Glycine max
  Clone ID: PAT_MRT3847_108865C.1.pep
SKSDKNPSPPDGIDKTSATYSSTKLGSRHPSHSPQQHTHTKTALLVSTQNLSSWRSKTKTALFEKCSTLIGATWELEAQIMMSTTRRQRG

SEQ ID NO: 152648 - protein, 82 aa, Glycine max
  Clone ID: PAT_MRT3847_108866C.1.pep
KFLQTPPFRIIAVAFEPQQVCPSGSSSQRLVKELAERKNGTSPKKGPSRRFISRTPIGDNSFAERFLNSAQLSLKSFPILSS

SEQ ID NO: 152649 - protein, 91 aa, Glycine max
  Clone ID: PAT_MRT3847_108867C.1.pep
PPAFEKFVKAFKNVNFAPGASVFYRQSPEGILGLSFSKKAPIPKKEAPVIKTKAVSTGVLEPMFGEQAVSPALKPSLAFQLPAVFTPGLIV

SEQ ID NO: 152650 - protein, 81 aa, Glycine max
  unsure (1)..(81): unsure at all Xaa locations
  Clone ID: PAT_MRT3847_108868C.1.pep
MASCNKVGNRSRHGAARXTHAPVQTCYIHRCTXEHAFIGGLTYGVDDHSHQDAFSGFXDVAYAKVITRXNSGRSMGFGFVN

SEQ ID NO: 152651 - protein, 55 aa, Glycine max
  Clone ID: PAT_MRT3847_108869C.1.pep
SICIRQVKHFQLVSLSFCYLHVSSYLIGGIQGVQRKFYLGFCGFRSIFLFSRVSY

SEQ ID NO: 152652 - protein, 89 aa, Glycine max
  Clone ID: PAT_MRT3847_10886C.1.pep
KGNGGLSGFPRLPHKNFIFSINQRRKVWKNGKKEICLLCNLETVLKGQTLFPFFQWNILNSCLGGEPENYKIGFSGGWEEGNFTDSPNP

SEQ ID NO: 152653 - protein, 68 aa, Glycine max
  Clone ID: PAT_MRT3847_108870C.1.pep
KKPLIFDSPGGTSKGPTHINMHETGCRKQKGVLKRMDNLEGVNYKPPRGKINTHGWGGGLTIIYSQKN

SEQ ID NO: 152654 - protein, 75 aa, Glycine max
  Clone ID: PAT_MRT3847_108871C.1.pep
GPFVLERSPFFLFPYNPGRLRMVPRGCSPGGAHFVMGRCSPVSVRVICLTPFVSGLTRVSQWGSFLWLFFMGLPV

SEQ ID NO: 152655 - protein, 49 aa, Glycine max
  Clone ID: PAT_MRT3847_108872C.1.pep
QTKQLDLRAQYFIYREVLNYQYRSAKLTKEKISCLHSFSTFGLFLHLIY

SEQ ID NO: 152656 - protein, 112 aa, Glycine max
  unsure (1)..(112): unsure at all Xaa locations
  Clone ID: PAT_MRT3847_108873C.1.pep
LCGDALIIPAGTTYYVANPDNHKNLKLITLAIPVNKNGRLDSFFLSNPQADQKYLQGFTLNMREAXIRHRTXDINVVLCGGEDGIPQGEERLREIVNVEILWKQIRELILHD

SEQ ID NO: 152657 - protein, 141 aa, Glycine max
  Clone ID: PAT_MRT3847_108874C.1.pep
MKNSLFLLDNANTIHFNRHSQITLPSIPLTTITTTKPFPHNRHFPRIEIDMVKNSQGIYAPKASKVVVLWDLDNKPPRGPPYDVAISLKTLAARFGDLVDFSAYANRHAFVHLPQWVLQQRRDRKNLDILERKGIITPPEP

SEQ ID NO: 152658 - protein, 247 aa, Glycine max
  unsure (1)..(247): unsure at all Xaa locations
  Clone ID: PAT_MRT3847_108875C.1.pep
LHNANTIHFNLHSQITLPSIPLTTITTTKPFPHNRHFPRIQCCSNNNNNNSIEIDMVKNSQGIYAPKASKVVVLWDLDNKPPRGPPYDVAISLKTLAARFGDLVDFSAYANRHAFVHLPQWVLQQRRDRKNLDILERKGIITPPEPYTCGVCGRKCKTHLDXKKHFKQLHQRERQKKLNRLKSLKGKKRHRFKERFLRGNHKYDDAARTLVVPKVGYGLAAELRRAXVFVKTVQDKPXAADWALKEQ

SEQ ID NO: 152659 - protein, 507 aa, Glycine max
  Clone ID: PAT_MRT3847_108876C.1.pep
GPKFRGSPTRPRLLEDDRRGVQKWYHDEGYACAQVVNFGNLNTKEVVCEVVEGDITQLDIQFQDKLGNVVEGNTQVPVIQRELPRQLRSGYTFNIEAGKQALRNVNSLALFSNIEVNPRPDETNELGTIVEIKLKELEQKSAEVSTEWSIVPGRGGHPTLASLQPGGTVSFEHRNLQGLNRSINGSITTSNFLNPQDDLAFKLEYVHPYLDGVYYSRNRTLRVSCFNSRKLSPVFTGGPGVDEVPPIWVDRTGVKANITENFTRQSKFTYGLVMEEITTRDESSHICANGQRVLPSGGISADGPPTTLSGTGIDHMAFLQANITRDNTRFVNGTVVGDRNMFQVDQGLGIGSQFPFFNRHQLTLTRFIQLMAVEEGAGKPPPPVLVLHGHYGGCVGDLPSYDAFTLGGPYSVRGYNMGEIGAARNILELAAELRIPVKGTHVYAFTEHGNDLGSSKGVKGNPTEVYRRMGHGSSYGLGVKLGLVRAEYAVDHNSGTGALFFRFGERF

SEQ ID NO: 152660 - protein, 117 aa, Glycine max
  Clone ID: PAT_MRT3847_108877C.1.pep
YGGCVGDLPSYDAFTLGGPYSVRGYNMGEIGAARNILELAAELRIPVKGTHVYAFAEHGNDLGSSKGVKGNPTEVYRRMGHGSSYGLGVKLGLVRAEYAVDHNSGTGALFFRFGERF

SEQ ID NO: 152661 - protein, 73 aa, Glycine max
  Clone ID: PAT_MRT3847_108878C.1.pep
LQHHCVEEDDGKSAGIIHIINDGGGSLVEKSFYKNNDADDEEKEVAYTTIDDGELLQYYTSIEGDIAATTIDE

SEQ ID NO: 152662 - protein, 78 aa, Glycine max
  Clone ID: PAT_MRT3847_108879C.1.pep
DHQSGYIQWTNFVSIKILKQGNKSYKLISLNKEVALAFVFQLGAIYYRWISRCGKSSLQHFTFHFLYIQEHQGFQVCK

SEQ ID NO: 152663 - protein, 72 aa, Glycine max
  Clone ID: PAT_MRT3847_10887C.1.pep
RESHQPKTFTYWINPTVKTALYLSTLPQYTTHLTPRNHNPSLITPFNFDPSNQSYSQYSINLSWWMNFIAQN

SEQ ID NO: 152664 - protein, 90 aa, Glycine max
  Clone ID: PAT_MRT3847_108880C.1.pep
RDRFGYADGYRFSLITGSISIHKSNSLSAIIVDFCLSEQNGGSDIELDKYWLMREGHSSMCKLTPSRDNSNSGDMEDNSYLLDMDLDKGT

SEQ ID NO: 152665 - protein, 64 aa, Glycine max
  Clone ID: PAT_MRT3847_108881C.1.pep
VLYRSPSLNYLVSEQPFRSSISVIGFPFRAICALYWLFVPFFLTGFMFVLDSICFRVIANYSDC

SEQ ID NO: 152666 - protein, 85 aa, Glycine max
  Clone ID: PAT_MRT3847_108882C.1.pep
SKVLDKVTENGYFTKDKAARKPGKDSFFKQGKKPEKKETAKGRIEDQKSVDKALLAPIKKEAPLADYLGASFSLRSSNRPHQMVF

SEQ ID NO: 152667 - protein, 27 aa, Glycine max
  Clone ID: PAT_MRT3847_108883C.1.pep
CNCHTRINLNQQYKNYTEPYKASYLIR

SEQ ID NO: 152668 - protein, 65 aa, Glycine max
  Clone ID: PAT_MRT3847_108884C.1.pep
LSNVRSSEAFFGTLVDCLFIKCRHRACKGISRSRSLWYEDDSAYNGTKVGFTRLSRYHLKWVVGI

SEQ ID NO: 152669 - protein, 216 aa, Glycine max
  Clone ID: PAT_MRT3847_108885C.1.pep
MAKPKAPRRTLESYSVKHISKTIRAGDCILMRPSDLSKPSYVARIERIEADARGANVKIHVRWYYRPEESIGGRRQFHGSKEVFLSDHFDVQSADTIEAKCTVHSFKSYTKLDAVGNDDFFCRFEYNSSTGAFNPDRVAVYCKCEMPYNPDDLMVQCEGCTDWFHPACIDMTVEEAKRLDHFFCESCSAEGQKKLQNSHSASRHSDTKVDTKRRRR

SEQ ID NO: 152670 - protein, 96 aa, Glycine max
  Clone ID: PAT_MRT3847_108886C.1.pep
AQYEVSFCIVTNHLPTRICDITTRAKGEQPSMAKKKQDTRTIITRSIDTEGTTIAITVCKIYKAPNNLLIVQIIYNPNPMDLTEKHTTKDITHRVK

SEQ ID NO: 152671 - protein, 148 aa, Glycine max
  unsure (1)..(148): unsure at all Xaa locations
  Clone ID: PAT_MRT3847_108887C.1.pep
MGDWGPVFVSVVLFILLSPGLLVQIPGRGRFIEFGNFQTSGLSILIHAILYFALVCIFMLAIGIHMXHGVNHPKICVGSRGDWGPVFVSVVLFILLTAGLLVQIPGRGRFIEFGNFQTSGLSILIHAILYFALVCIFMLAIGIHMYMG

SEQ ID NO: 152672 - protein, 75 aa, Glycine max
  Clone ID: PAT_MRT3847_108888C.1.pep
YNLIILILDSVKFSLLLSIKRIFFIHNTQLSTLYAYPPLYYIELAKHSKRRESINCPFLLFLVNQFFLLFVGTSN

SEQ ID NO: 152673 - protein, 45 aa, Glycine max
  unsure (1)..(45): unsure at all Xaa locations
  Clone ID: PAT_MRT3847_108889C.1.pep
VEFAMMIYLDGDIQVYDNIDHWCDLPDDCXYAARDCICEATSGHS

SEQ ID NO: 152674 - protein, 383 aa, Glycine max
  unsure (1)..(383): unsure at all Xaa locations
  Clone ID: PAT_MRT3847_10888C.1.pep
MHSQKVVEMEDKTESHMSSAAAFVEGGIQESCDDACSICLEEFGASDPSTVTTCKHEFHLQCILEWCQRSSQCPMCWQPISLKDPTSQELFEVVEQERSLRATPSRNAAIFHHPAFGDFELQHLRMSLNDADFEERIIQHLAAAAAMRRANQLGWREGQRARSSAHGHPQFLVFSNQPIAPSSVAGGENDPTAIPNRSPSTPITSVGNEASQQILHLQTQSSSSASGSPVMATNPRGIYSNERGSTACSSPANQDRAEPSELQSFSDSLRSRLNAVSMRYKESISKGTRGWKERLFSRSSSMSKLGSEXRRREINSGIASVSRLMESLETSENNRVVGTSLSNHTEGCSIGGVSNQNNVEARGENSSHDDNTPAACSANSHLN

SEQ ID NO: 152675 - protein, 86 aa, Glycine max
  Clone ID: PAT_MRT3847_108890C.1.pep
APSLATRPALRLSFPRLAPGRCRRPFAGRRPRGSGCSGCCGRVLCIPNHLGAFAWSLISAVAVCFFFVPFRLWLFLPPFLWILFDP

SEQ ID NO: 152676 - protein, 68 aa, Glycine max
  Clone ID: PAT_MRT3847_108891C.1.pep
AAATTLSLTICTTMPCAACLRKLLVAVLRSSCDTRSWTLRLIYVINFYICLIYSLMTFDVACYLYIWI

SEQ ID NO: 152677 - protein, 120 aa, Glycine max
  Clone ID: PAT_MRT3847_108892C.1.pep
YMCMNCWTYKLSIACLSPAWGDSNASQAVGVVRIARAAIVVAGASSGSTDSIPSQRNVCLWSSFMLNDAGGSLSASETRCCRTPPRSMRSASDPWQQDLRASKKLFRWRLEYDDSEHVCT

SEQ ID NO: 152678 - protein, 141 aa, Glycine max
  Clone ID: PAT_MRT3847_108893C.1.pep
KGIASAIFGRVNQKREFKKCFFSVYEKEESVDEELREIIREPANAPGALDAFVSIVTGPPGPNPVLLMPKISLPVLLLWGDNDPFTPIDGPVGKYFSSLPSQKENVKLFLLEGVGHCPHDDRPDLVHEKLLPWLASISNSE

SEQ ID NO: 152679 - protein, 126 aa, Glycine max
  unsure (1)..(126): unsure at all Xaa locations
  Clone ID: PAT_MRT3847_108894C.1.pep
SYVFVNSAVLARSQEEVTRIVATGRPFECMDHIALKGKGGQYRYAXNILTYNXHLLFKCYPFHKKDTQFIHNEKPIKNFVLMGQYNDISCNINPILNCDTYPIGXNFFWAKFIVHKEFGAPFKFVF

SEQ ID NO: 152680 - protein, 77 aa, Glycine max
  unsure (1)..(77): unsure at all Xaa locations
  Clone ID: PAT_MRT3847_108895C.1.pep
EELSLINGTDEGMPILLGILGSALDVTKGEYHYGSRGXYGHDAGRDADRAIVSXTCTGDGLTDSVRGISSDAVSSVV

SEQ ID NO: 152681 - protein, 116 aa, Glycine max
  unsure (1)..(116): unsure at all Xaa locations
  Clone ID: PAT_MRT3847_108896C.1.pep
FKGMIEMGATDGVTENTGIGLAXAMNSXFRGRARSDIDTICSQECESWNPXATKAMTMXYNANPCSDAWRLEFLKQTGLHCDIICVTGWTATAMQDDQGTNDWIISWXECVDRTNC

SEQ ID NO: 152682 - protein, 27 aa, Glycine max
  unsure (1)..(27): unsure at all Xaa locations
  Clone ID: PAT_MRT3847_108897C.1.pep
IRTPLLXTKTKGCVILIKRVRIHKRKD

SEQ ID NO: 152683 - protein, 230 aa, Glycine max
  Clone ID: PAT_MRT3847_108898C.1.pep
MSSSSFSPATLTTEQELSVIVAALTNVVAGSTSASSSFSLPEFRLPQTSDPLAAACLMPPPPPPSMDTCRECNIAGCLGCNFFPEEKKKQKRAKKKYRGVRQRPWGKWAAEIRDPRRAARVWLGTFGTAEDAARAYDKAAIEFRGPRAKLNFPLVDESLTLQQSEPERVQTEEEQIKTENLNQGMEMDSFGNKDTEFWDRINEADFHQLMMMMDFAGDSSDSATGNALSS

SEQ ID NO: 152684 - protein, 137 aa, Glycine max
  Clone ID: PAT_MRT3847_108899C.1.pep
LFMVNEPPDWILPQSEILAVVYAGTIASALNYGIVTWSNKILGPALVALYNPLQPAFFAFLSQIFLGTPIYLGSILGGSLIVAGLYIVTWASYKERQKSFGVTPNGSWVPEPLIHEKSAYQKIAGSSSVSSNPNSSD

SEQ ID NO: 152685 - protein, 70 aa, Glycine max
  Clone ID: PAT_MRT3847_10889C.1.pep
ARGRYFGFRIHHLRPLMREGVICKFGVRFPPHLKKVFFFFINSHECFGLFHTPYHRGSLILFSYEKNQKI

SEQ ID NO: 152686 - protein, 64 aa, Glycine max
  unsure (1)..(64): unsure at all Xaa locations
  Clone ID: PAT_MRT3847_1088C.1.pep
KWPQPNWSILLNECRPHLIMVYSANIIFDCRFIYSDRDTRVPFACVSCISPDAFGSXPGXIXGP

SEQ ID NO: 152687 - protein, 55 aa, Glycine max
  Clone ID: PAT_MRT3847_108900C.1.pep
MMQLPLTVVTETKEIIISTRSVSFPLRTTKVLIFPLQMLHKILITQLLSNLILPS

SEQ ID NO: 152688 - protein, 102 aa, Glycine max
  unsure (1)..(102): unsure at all Xaa locations
  Clone ID: PAT_MRT3847_108901C.1.pep
ASSPAAHLMGCLFRYRAGVLKRNGLKRSCGQPGTHARTWAVLSGVHSLVRGIVKRLRGXDDVINAGCAGXSTGLALSLPGAPLALVLSCLTLEALSLMMEGL

SEQ ID NO: 152689 - protein, 62 aa, Glycine max
  unsure (1)..(62): unsure at all Xaa locations
  Clone ID: PAT_MRT3847_108902C.1.pep
FXHINSIPHYSINITKIKXLSYNILSTTLLITSFHNFTNQILSNLKKLHFSLQKYPISHNNS

SEQ ID NO: 152690 - protein, 91 aa, Glycine max
  Clone ID: PAT_MRT3847_108903C.1.pep
QNGRIQDMSYHHDQYYNGTTGFYTMAMEEGARARPYAVPLSKTPAVTLSWPPNSWSTSNGQRLSVQNMGPAIPPTNRITSVPGTNGIYAGH

SEQ ID NO: 152691 - protein, 373 aa, Glycine max
  unsure (1)..(373): unsure at all Xaa locations
  Clone ID: PAT_MRT3847_108904C.1.pep
MFTGQHSDRAHTFKELPPSTGISLKRHRIAHKPMPCSSLTSTGDNSSSSSSSNKKKDGSSLREFKLNESTFLASLMPKKEIGVDRFFDAHPEYDGRGALIAIFDSGVDPAADGLQITSDGKPKVLDVIDCTGSGDIDTSKVVKADSDGRICGASGASLVINTSWKNPSGEWRVGYKLVYELFTEXVISRLKKERKKKWDEKNQEEIARAVKQLADFDQQRLEVEDVKLKMSREDLQNRLDILRRQSESYDDKGPVIDAVVWHDGEVWRVALDTQSLEDDPNCGKLASFMPLTNYRIERKYGVFSKLDACTFVVNVYSDGNVLSIVTDCSAHATHVAGIATAFHPKEPLLNGVAPGAQIISCKIGDSRLGSMET

SEQ ID NO: 152692 - protein, 55 aa, Glycine max
  Clone ID: PAT_MRT3847_108905C.1.pep
MFTDSGVDPAADGLQVTSDGKPKVLDVIDCTGSGDIDTSKVVKADSDGRICGASG

SEQ ID NO: 152693 - protein, 127 aa, Glycine max
  unsure (1)..(127): unsure at all Xaa locations
  Clone ID: PAT_MRT3847_108906C.1.pep
IIYQKYPSVVFCQNFILQTILIGKRSPAVKVKKYEQIIEQPTCRIRFTSYHRNMKYIHQFIPTLNYTKIKLDCSLHPKDRINQPGKVSNLHYXQVHPSFLSIIVAFKKKHQNEAIKILTKMKDYLKQ

SEQ ID NO: 152694 - protein, 513 aa, Glycine max
  unsure (1)..(513): unsure at all Xaa locations
  Clone ID: PAT_MRT3847_108907C.1.pep
HRSRLFLFFPLPTQGSHTRKTIKQRASTVDLHLFSKLDACTFVVNVYSDGNVLSIVTDCSAHATHVAGIATAFHPKEPLLNGVAPGAQIISCKIGDSRLGSMETGTGLIRALIAAVEHKCDLINMSYGEATLLPDYGRFVDLVNEVVNKHRLIFVSSAGNSGPGLSTVGAPGGTSSSIIGVGAYVSPAMAAGAHCVVEPPSDGLEYTWSSRGPTADGDLGVCVSAPGGAVAPVPTWTLQRRMLMNGTSMASPSACGGTALLISAMKAEGIPVSPYSVRKALENTAIPIGDLPEDKLSTGQGLMQVDKAFEYIQKCQNVPCVWYQIKIQQCGKTSPSSRGIYLREASACQQSTEWTVQLNPNFHEDADNFKDLVPFEECIELHSTEETVVKAPDYLLLTYNGRTFNVVVDPSNLSDGLHYFEVYGVDCKAPWRGPLFRIPITITKPKAITNQPAQISFXKMLFQPGHIERRYIQVPHGASXARVTKANTYFAFNSTIIEELVFMRQQYVNATIP

SEQ ID NO: 152695 - protein, 74 aa, Glycine max
  Clone ID: PAT_MRT3847_108908C.1.pep
VILPGKVLGRFKIGLHGNLTTLCGYTLPLCKNIVEKTQKKNPTFKRSLCLSTPFLPKGGYSTIPLSFGEPFYHV

SEQ ID NO: 152696 - protein, 71 aa, Glycine max
  unsure (1)..(71): unsure at all Xaa locations
  Clone ID: PAT_MRT3847_108909C.1.pep
NNLTFILGLKFTILTHVKNTLLWLQXXTTTTVAQQPYKSDNNTLLGISAFHLNLGLIFLYTYIYFAKVPSF

SEQ ID NO: 152697 - protein, 85 aa, Glycine max
  unsure (1)..(85): unsure at all Xaa locations
  Clone ID: PAT_MRT3847_10890C.1.pep
IMTLHHTEKILHGFCTNLTVXTDADGVRTIRLEGRGKLTGQVIYVPCDPSSTAFPLVAALLVPGSYVTILNLLINPTRTGLYPYS

SEQ ID NO: 152698 - protein, 94 aa, Glycine max
  unsure (1)..(94): unsure at all Xaa locations
  Clone ID: PAT_MRT3847_108910C.1.pep
ACXXXXILXLXXXVXXXXXXSXXVXXXXACXKXXGXXXSXXXXSXXWSFXXGPXGXXRCXRFGXXXXISVEFGRKDLXXSXXXXSXTXXYGMGV

SEQ ID NO: 152699 - protein, 95 aa, Glycine max
  Clone ID: PAT_MRT3847_108911C.1.pep
LKVVKTIWAGIFNALGSGRNVYVCVKPKGHKEFLRNPLLPNPGTYVNPKGFFFPKKTKVLLTKITPLKKKVEVFKENAMEKYPSFQKKLGYEDKT

SEQ ID NO: 152700 - protein, 51 aa, Glycine max
  Clone ID: PAT_MRT3847_108912C.1.pep
IAQTLITHELDFIIIHYFQLVLIHGNTYELVFLSLIQRKMLKLELYIMCLH

SEQ ID NO: 152701 - protein, 86 aa, Glycine max
  Clone ID: PAT_MRT3847_108913C.1.pep
RGGLFKKPTFTSPCFPVNIFFLVSPNFILLPLFLQLLYLEKPLLPPINYLLSKSHFRQMTYFEKRPLHNISSKNLPKPYWLFEPPL

SEQ ID NO: 152702 - protein, 65 aa, Glycine max
  Clone ID: PAT_MRT3847_108914C.1.pep
RVNPSDYHGGQVSWLEHYLFQRPSVTIMWMRWDYTKWMICLSPDIYTAGDMLVTALGMDALWSDV

SEQ ID NO: 152703 - protein, 108 aa, Glycine max
  unsure (1)..(108): unsure at all Xaa locations
  Clone ID: PAT_MRT3847_108915C.1.pep
MVYAGTTQEGLAXDKTVNLVVKLPVAYLVNHKVCFRCHHRXGTLKHKIYNSFEGDIYCMPHYDQLEKRTHFFDKCFEGTPIIAPPEKTWEVNPVPAKVSSVFGGTRYK

SEQ ID NO: 152704 - protein, 136 aa, Glycine max
  Clone ID: PAT_MRT3847_108916C.1.pep
MLHQQMGSHVEAFQGSDMNCQNSLHQQPMARGIQYASGGIQKFPQQVFEGGANQETGAIPFASSQQGMRLVAKEEQFEMEKLDGAEINCNKSDMEMEMNNLDPQQLRLQQRLPQHAFMRPNFPQAAWNSLGQHMGK

SEQ ID NO: 152705 - protein, 62 aa, Glycine max
  Clone ID: PAT_MRT3847_108917C.1.pep
VILQGNKMIISVTGATGFIGRRVVQRLHADNHSVHVLTRSKFKAETIFFRVEAKDFSRIKIA

SEQ ID NO: 152706 - protein, 96 aa, Glycine max
  Clone ID: PAT_MRT3847_108918C.1.pep
LRERLALIAVAVEIGKQSHGTGAIPAAENTLHGGAWPESGSVTRRRRGWRCLLSSSLSFSAVNHSLRMKRRLLTFLFFFSLSLSECLCFLETKLRL

SEQ ID NO: 152707 - protein, 69 aa, Glycine max
  Clone ID: PAT_MRT3847_108919C.1.pep
HEKGGFLDTLKDFIQDIFDKIYGAHRFGKPTPDFTGIHISSINLENAYLVVDDLIKNPIPVPISLIDIN

SEQ ID NO: 152708 - protein, 427 aa, Glycine max
  Clone ID: PAT_MRT3847_10891C.1.pep
MASNTNTNNSNKKEKDLEFFFEEDINELGAQQMDAETAKLESESSSSDDEGNDTTRRHSFTSQQWPQSYKETTDSYTLAATPNFESILRVPSIIYSSFESRSKNNLDIVRKTPFLSGHEGITQSTSWKEGLVQKHLSGELPIGRECSFLQTVFNATNVMAGVGILSTPYTLKEAGWMSMVLMILFAVICCYTATLMRYCFESREGITSYPDIGEAAFGKYGRIIVSIILYTELYSCCVEFITLEGDNLTGLFPGTSLDLGSFRLDSVHLFGILAALIIIPTVWLKDLRIISILSAGGVFATLLIVVCVFCVGTINGVGFHHTGQLVNWSGIPLAIGIHGFCFAGHSVFPNIYQSMADKRQFTKALIICFVLSITIYGGVAIMGFLMFGGETLSQITLNMPRDAFAFKVALWTTVINPFTKYALLMNP

SEQ ID NO: 152709 - protein, 155 aa, Glycine max
  unsure (1)..(155): unsure at all Xaa locations
  Clone ID: PAT_MRT3847_108920C.1.pep
FGPPSRNKIHGSRAETPPKKKKKLLELFPESVKDFQGVVHGHKEVKPPIQDVIMPKSAHCPPYLSKANSACRSERPLSFTQVRSSIREISVKFFQWCIPTLFSSQSFPKRSPNPIPPLKINXNLFFFFQPNQPNFFFLFYFITGGGVNPPPPHFL

SEQ ID NO: 152710 - protein, 68 aa, Glycine max
  Clone ID: PAT_MRT3847_108921C.1.pep
ALVRRTTPNVSLDTRKLNYLAPKVVSVAGKWRIRPPSGEKGMPPLLLEPNIWVNNGCKGTFESFILTP

SEQ ID NO: 152711 - protein, 43 aa, Glycine max
  Clone ID: PAT_MRT3847_108922C.1.pep
SFNQVGLQDILKDEYKAEIGNSYLATTFLSWTSFKAICQQNNS

SEQ ID NO: 152712 - protein, 48 aa, Glycine max
  Clone ID: PAT_MRT3847_108923C.1.pep
SGNLLLLENNGKNTNYKVFLGRSQSVPNKICIYIYIYIWTVLIPIMTN

SEQ ID NO: 152713 - protein, 34 aa, Glycine max
  Clone ID: PAT_MRT3847_108924C.1.pep
LRDQYFIMWNLHCSGHRPQHFKVTDNDLECPYHR

SEQ ID NO: 152714 - protein, 37 aa, Glycine max
  Clone ID: PAT_MRT3847_108925C.1.pep
MNSLLQTLILEAPNTPPVEWNFALLTYGLQLGENCHL

SEQ ID NO: 152715 - protein, 83 aa, Glycine max
  Clone ID: PAT_MRT3847_108926C.1.pep
NQIHFPIKHLNKKVWHLIIFIKKELGFNSTPNTNSRGEDSPSLIKSIIAIFIANMGHLNIPLSHPRLDRSFKRVSLHVCSSRI

SEQ ID NO: 152716 - protein, 54 aa, Glycine max
  Clone ID: PAT_MRT3847_108927C.1.pep
FVHRQASKGAIKNECDPAVDMAIEIWSPSCTILDMLTGKPPRSDAPGVSTHYVF

SEQ ID NO: 152717 - protein, 91 aa, Glycine max
  Clone ID: PAT_MRT3847_108928C.1.pep
PSVYTSEGTGNGLHELYQPCSCNNTLRKSKPKCRTKLWENRGLCLRAGHCFTIENGQTFYNLLTIAQINSLGVVKYMIHSKNKTRIAGDWA

SEQ ID NO: 152718 - protein, 190 aa, Glycine max
  Clone ID: PAT_MRT3847_108929C.1.pep
TVPVQQFQCFTESNWRNITRPCIPPHSSLLLRSRNKIQISLISCSSSQTPEADTQTAESCVNLGLELFSKGRVKDALTLFETALSLNPNPVEAQAAYYNKACCHAYRGEGKKAADCLRTALREYDLKFGTILNDPDLASFRVLPEFKELQEEARLGGEDIGYSFRRDLKLISEVQAPFRGVRRFFYVAFT

SEQ ID NO: 152719 - protein, 83 aa, Glycine max
  Clone ID: PAT_MRT3847_10892C.1.pep
PKSPFWGILSIVRGLFYFRPAIIALNHELPRGETPPFFETPPVAHFGGDPPCFSSEVFPPLKGAPVPEGLKGAPALMASFFFF

SEQ ID NO: 152720 - protein, 50 aa, Glycine max
  Clone ID: PAT_MRT3847_108930C.1.pep
PQNTKVQQGRYPPAYIITPLTHTSERPNGPLCEDSPWRSESCIIPNQGLP

SEQ ID NO: 152721 - protein, 77 aa, Glycine max
  Clone ID: PAT_MRT3847_108931C.1.pep
VLRPPTRPTEAGATEGTTADEEEGMEKDRGNTATQNDTNPEKRMDETENARAAITDQKTPAEKDTTPRAEKTTKARA

SEQ ID NO: 152722 - protein, 69 aa, Glycine max
  Clone ID: PAT_MRT3847_108932C.1.pep
PSVNLDSFKPGRFFFFFFFFFLKKKFSFFGKFGWKFLRDFNFGVYWPGGLKGLTNSLKMAFYCPGNKSS

SEQ ID NO: 152723 - protein, 95 aa, Glycine max
  Clone ID: PAT_MRT3847_108933C.1.pep
GGQGILGDPKAPKFKPPIWGVNPTFGNPFNPVLNPPLLGVSGKIFGPPPPKNILGGIGFKRLPPKKVAPNVLGNPPLNLGGNWAFFFPRDPFPNP

SEQ ID NO: 152724 - protein, 91 aa, Glycine max
  Clone ID: PAT_MRT3847_108934C.1.pep
TASYYHIVNPLTNAADGAELSHSSYGNEHILTFGTQHALYPLTVSTARVNNYGRASALIQPVWTPRTRFSRAGEVDTRAIVKSAEVGHTVA

SEQ ID NO: 152725 - protein, 106 aa, Glycine max
  unsure (1)..(106): unsure at all Xaa locations
  Clone ID: PAT_MRT3847_108935C.1.pep
PXHPFDINXXGPQKXTGAMETADGNPQAGHNRAGDPKHQTERRKHRTEGTGDTGHPQEQKPKGANHEGNGAGNGEQKPKSTATTRTENKTRPLRDRAKTTHEEGTN

SEQ ID NO: 152726 - protein, 78 aa, Glycine max
  Clone ID: PAT_MRT3847_108936C.1.pep
TPTCYLTPQTDSRLPRRSEREAVGRCSSSLRDGDGKDARLRQVPPSDDGAARQPCRSDGVTVLCGFEMREQSCVHEKW

SEQ ID NO: 152727 - protein, 43 aa, Glycine max
  Clone ID: PAT_MRT3847_108937C.1.pep
KDTKNCYSYRKVYTNYIGSFYMKRTPFILLGQSPLGYSNYVHF

SEQ ID NO: 152728 - protein, 116 aa, Glycine max
  unsure (1)..(116): unsure at all Xaa locations
  Clone ID: PAT_MRT3847_108938C.1.pep
GNPWVFERAVISNIRVIEILNRYRYYKLLRQAKAPSMCLQSFKKCPTLCGYGXDNLISVHQCGKPYFRVTKLQSLLASHNITITDGVDKTCSTLQFRRVADWDXLKINFQLMSNVL

SEQ ID NO: 152729 - protein, 115 aa, Glycine max
  unsure (1)..(115): unsure at all Xaa locations
  Clone ID: PAT_MRT3847_108939C.1.pep
GRALFPKKLTKAFLTGDFAFVAHSLKNVLPSYLIXTILPFHLPREDVRDAFIFLSAASLPDLPXESMVVLLXLKQRYKSLQFPFFNGEENFPGHGPTRVKKLNEGLGPTYLMALT

SEQ ID NO: 152730 - protein, 58 aa, Glycine max
  Clone ID: PAT_MRT3847_10893C.1.pep
YKSNLVLLQLFYKSNSVHVHHIINHTLFRQIYLSRLTQRPKDKGYIWIKVWKILHANF

SEQ ID NO: 152731 - protein, 53 aa, Glycine max
  Clone ID: PAT_MRT3847_108940C.1.pep
NLGVHNYCWGSFLEAQSLHNYIRCFLLVNKLVYRTHIPFPLLPTKGKKNPLPL

SEQ ID NO: 152732 - protein, 155 aa, Glycine max
  Clone ID: PAT_MRT3847_108941C.1.pep
MAQPKKQVPLPFTYTFSFGAIAGVTELLLLYPLDVVKTRQQLEAGKGGMGMMATFKNIISTQGTSRLYKGIIPPLLMEAPKRAIKFSANGWWSGLITNNGQRETTQAIAILTGCAAGGTESFVVTPFELVKIRLQDKATAFKGPIDVLQHAIKND

SEQ ID NO: 152733 - protein, 107 aa, Glycine max
  Clone ID: PAT_MRT3847_108942C.1.pep
MELAQHTVMENGVGEEMDGETSARVPLRERRVYPAHPSGLVRKRAYIFDCMGNFYHKDWDLADLFLKEEKESGVGEGRGNEFSWYHVELPKGNQKLSQSAQDLIGVF

SEQ ID NO: 152734 - protein, 76 aa, Glycine max
  unsure (1)..(76): unsure at all Xaa locations
  Clone ID: PAT_MRT3847_108943C.1.pep
LEAYFAGSCRKFMELAQHTVMENGVGEEMDGETSARVPLRERRVYPAHPSXLVRKRAYIFDCMGNFYHKDWDLADL

SEQ ID NO: 152735 - protein, 68 aa, Glycine max
  Clone ID: PAT_MRT3847_108944C.1.pep
HQDGCATRVSTEHEQLLVDVVQAAMSEAVALLDGLADHISTGAVSAACTTLHRSRDIDRSIDLACNLV

SEQ ID NO: 152736 - protein, 70 aa, Glycine max
  Clone ID: PAT_MRT3847_108945C.1.pep
EIITLNYQRNRRMNSDENLHFESDQRCTSDGKENILINRHSLTLSQGLYTFNLELHVKTHMRCKPIAAQL

SEQ ID NO: 152737 - protein, 67 aa, Glycine max
  unsure (1)..(67): unsure at all Xaa locations
  Clone ID: PAT_MRT3847_108946C.1.pep
TPTPLIPNKNRKKIEIQKITPPVNEETQKNESNGGLRNFPHSPEKHGDRLFTKIEGRKKNPPXNGKK

SEQ ID NO: 152738 - protein, 44 aa, Glycine max
  Clone ID: PAT_MRT3847_108947C.1.pep
THSSRLNALSLLIDGKLHTSLPSPNTPHSDINFAQTPLEILHRA

SEQ ID NO: 152739 - protein, 77 aa, Glycine max
  Clone ID: PAT_MRT3847_108948C.1.pep
FTGEEIVSYESPRPIVGIHRIVFVLFRQLRRLTLQPPGWRQNFNTRDFAEIYNLGLPVAAMYFNCKRENDQSSGRRR

SEQ ID NO: 152740 - protein, 112 aa, Glycine max
  Clone ID: PAT_MRT3847_108949C.1.pep
MATAEAASTGLGPRYAPDDPTLPQPWKGLIDGSTGLLYYWNPETNVTQYEKPTPPVPAPVASAPSLAPIPAAHTMQPGGMMQQHGQQMLHVQSSHSILPTAWPIDAATAAAA

SEQ ID NO: 152741 - protein, 211 aa, Glycine max
  Clone ID: PAT_MRT3847_10894C.1.pep
MVRVLRSCIQSILKLVNSVIGMAGLAMILYSAWMIRVWQRKMGELPFGHDSDYPPPWFIYMFLGLGVAFCVITCLGHVAAETANGCCLYLYMVFVVLLIMLEAAVTVDVFVNQDWEKDFPKDPSGSFDQFKNFIRSNYEMCKWVGLSLVSVQGLSLLLAMILKALGPHQYYDSDDEYAPDRVPLLRNAPPHYVVVDPGYVHGNDAWRRQDK

SEQ ID NO: 152742 - protein, 98 aa, Glycine max
  Clone ID: PAT_MRT3847_108950C.1.pep
KLSGGVAVFKVGGASEAEVGERKDRVTDALNATRAAVEEGIVPGGGVALLYATVVLDNLLTQNDVEKRGTTIIPAVVDNSNDKIASTTGVEDMVDLDL

SEQ ID NO: 152743 - protein, 70 aa, Glycine max
  Clone ID: PAT_MRT3847_108951C.1.pep
CRKNSLGAVFQTKNSNTTPTPKVTMVYINIFNINACLCDNRRISHQLAVQFVENCLPPFVVTFRTGMHNR

SEQ ID NO: 152744 - protein, 78 aa, Glycine max
  unsure (1)..(78): unsure at all Xaa locations
  Clone ID: PAT_MRT3847_108952C.1.pep
MMNKLMVEVEEASVLMPKDGEGSVSPFVEVIVDVQKHITETRHKYLKSFXNEKLVFNINNSKDLVHKTIEGVGYINNH

SEQ ID NO: 152745 - protein, 547 aa, Glycine max
  Clone ID: PAT_MRT3847_108953C.1.pep
MADDGSRRELIFRSKLPDIYIPKHMPLHSYCFENLRECGSRPCLINAPTGDVYSYHEVDSTARKVARGLKKEGVEQGQVIMILLPNCPEFVFSFLGASHRGAMATAANPFFTPAEIAKQAHASNAKLLITQASYYDKVKDLRDIKLVFVDSCPPHTEEKQHLHFSHLCEDNGDADVDVDVDIKPDDVVALPYSSGTTGLPKGVMLSHKGLVTSIAQQVDGDNPNLYYHCHDTILCVLPLFHIYSLNSVLLCGLRAKATILLMPKFDINSLLALIHKHKVTIAPVVPPIVLAISKSPDLHKYDLSSIRVLKSGGAPLGKELEDTLRAKFPNAKLGQGYGMTEAGPVLTMSLAFAKEPIDVKPGACGTVVRNAEMKIVDPETGHSLPRNQSGEICIRGDQIMKGYLNDGEATERTIDKDGWLHTGDIGYIDDDDELFIVDRLKELIKYKGFQVAPAELEALLLTHPKISDAAVVPMKDEAAGEVPVAFVVISNGYTDTTEDEIKQFISKQVVFYKRINRVFFIDAIPKSPSGKILRKDLRAKIAASVPK

SEQ ID NO: 152746 - protein, 161 aa, Glycine max
  Clone ID: PAT_MRT3847_108954C.1.pep
MISYADMLKGSHGCQQLQLSSIVRDVNYSCGSCGYELNLNSSNRNTCSLIDSKSIKRGIISFFSVDESRFTQIQQLHWPSWMPFFNSKRQRTKLFCRSCGNHLGYAYTLPSQSQSRDGISDDSRIYDIKLTALLPSFCEEPSQKLEDMGKFETASSSTLVF

SEQ ID NO: 152747 - protein, 266 aa, Glycine max
  Clone ID: PAT_MRT3847_108955C.1.pep
MVIMSALFSFIFPPPSSLVVSGMSVISLVSLANAGFSEIRGKHLNYSKFWNANPSAEKQVKLSSKAGMLLLYTPAFLAGLASFWIFPHQGLRSTLLQSAVTLHFFKRVFEVVFIHKYSGAMLLDSAIPITLSYFLSTATMIYAQHLTQGLPEPPIDLLYPGIVLFVVGIIGNFYHHYLLSNLRGKGEKEYKIPKGGMFELVICPHYLFEIIEFYGFSFISQTLYAFSFTVGTTLYLLGRSYSTRKWYLSKFEDFPEHVKAIIPFVF

SEQ ID NO: 152748 - protein, 104 aa, Glycine max
  Clone ID: PAT_MRT3847_108956C.1.pep
SVPFNVSFEVPIRFFFLMAKLTFWCFLMYNVLHGDYHIYIYIYIYIYIYVIVWVQLCLVISQVMLQLIKVSNIGLGRVCLLISQTNGRQMWPMRSNCDLTVADG

SEQ ID NO: 152749 - protein, 80 aa, Glycine max
  Clone ID: PAT_MRT3847_108957C.1.pep
CWYTPLPWLRCTQSSSCFSPTPPISRIPLQSEYFFHFVFFFSSPILHTTPFWPQIYRPMSYGLKIVVSLCIELISPARVV

SEQ ID NO: 152750 - protein, 96 aa, Glycine max
  Clone ID: PAT_MRT3847_108958C.1.pep
MASAGARGGFGDANQRIDYVFQAVLIRDSAVGKSQILTQFARNEISLDSKFTIRVAFQTRTLVIDHKTAKAPILDTAGQKRYKAATSAYYRGAGGA

SEQ ID NO: 152751 - protein, 105 aa, Glycine max
  Clone ID: PAT_MRT3847_108959C.1.pep
PNTLLLQTPNTVKIKTLKYFYSSASTRSIPVFPSPTSTIYDVEIFKAKKTNNLEPIYTGKIPLTDPNSINETHYPKPSQASSFVKNSQNHHLKRRKTLSSMKFAR

SEQ ID NO: 152752 - protein, 65 aa, Glycine max
  Clone ID: PAT_MRT3847_10895C.1.pep
NGVDIRGFSMWPALRHRISWKKQQPNISLFEAIVALGLIPFAWVLRRFQFINPFPCSEDGLSVCE

SEQ ID NO: 152753 - protein, 78 aa, Glycine max
  unsure (1)..(78): unsure at all Xaa locations
  Clone ID: PAT_MRT3847_108960C.1.pep
IVSFFTLLFQLCTVFWEGFFYXRTXFYPTILHXYSKYQSTVPXFVVRHIKFSXNYILYSHNHFCKXLEVALLLIRYLS

SEQ ID NO: 152754 - protein, 51 aa, Glycine max
  Clone ID: PAT_MRT3847_108961C.1.pep
HLTDSNPHKPHNNSNLNFRKNLQLDTKISPLRGNQLSYRQERVRVWFCSGK

SEQ ID NO: 152755 - protein, 90 aa, Glycine max
  Clone ID: PAT_MRT3847_108962C.1.pep
LTRCRGTLLTHVINLVTRYPHLEEANGNLCKMMMLCHLPSSVTIVLILPPPYRDSRLYYRDSIDKIALSLCLLQVLHALLRISRASAPRI

SEQ ID NO: 152756 - protein, 102 aa, Glycine max
  Clone ID: PAT_MRT3847_108963C.1.pep
SLIKQNFCTWGIEMPIDLKRKDNQASYFMLRDMGTLPSTSSFVSGIVLKLIQMYAGSTGTHRSESLGYCLRFHHDLSSLYYGDKYITSFFPLVIDDGPKAIH

SEQ ID NO: 152757 - protein, 50 aa, Glycine max
  Clone ID: PAT_MRT3847_108964C.1.pep
SGFTAKMNLSDDVDLEDYVSRPDKISVLIFVPNNFLVLYISFYLFVLFFY

SEQ ID NO: 152758 - protein, 261 aa, Glycine max
  Clone ID: PAT_MRT3847_108965C.1.pep
MDGELHIMLFPFPGQGHLIPMSDMARAFNGRGVRTTIVTTPLNVATIRGTIGKETETDIEILTVKFPSAEAGLPEGCENTESIPSPDLVLTFLKAIRMLEAPLEHLLLQHRPHCLIASAFFPWASHSATKLKIPRLVFHGTGVFALCASECVRLYQPHKNVSSDTDPFIIPHLPGDIQMTRLLLPDYAKTDGDGETGLTRVLQEIKESELASYGMIVNSFYELEQVYADYYDKQLLQVQGRRAWYIGPLSLCNQDKGKRGK

SEQ ID NO: 152759 - protein, 108 aa, Glycine max
  Clone ID: PAT_MRT3847_108966C.1.pep
SIWTTVPCGCSSQRNIARIQLRARFIVSRTHFKPESIDIRKPGKVQTPNPPKAAGDGGASLDVELLGPNSEDKHLFTAVEQATKDLDVFMIFDPVTRTFTMYEADSSV

SEQ ID NO: 152760 - protein, 68 aa, Glycine max
  Clone ID: PAT_MRT3847_108967C.1.pep
LPGLTASILSGDMNDSIVFSSIHYSVSIENFSGFFKPPKSVISPPIVVGHSTLKIWGDVAALPLHQGF

SEQ ID NO: 152761 - protein, 156 aa, Glycine max
  Clone ID: PAT_MRT3847_108968C.1.pep
ARARAVLFGSSIIQMSFDNGGWGAILANLYARKDAYVQPSLVIVYFGGNDSIDPHPSGLGPHVPLEEYVENMRKIANHLKSLSDHIRIIFLTSPPINEELIRKKLSATQSGRTNESCGEYADGLMELCEEMNIKAINLWSAIQTREDWLDVSFTDG

SEQ ID NO: 152762 - protein, 262 aa, Glycine max
  unsure (1)..(262): unsure at all Xaa locations
  Clone ID: PAT_MRT3847_108969C.1.pep
YAWADAWADAWADAWVVLFGSSIIQMSFDNGGWGAILANLYARKADIILRGYSGWNSRRALEVLDEIFPKDAYVQPSLVIVYFGGNDSIDPHPSGLGPHVPLEEYVENMRKIANHLKSLSDHIRIILLTSPPINEELIFXMSSAKXKGELIKNYKVFKDKXMRDHKLPELEITQNLCISFILIMDFGNFLXDGVHLSAEGSKVVVKEILKVLREVDWKPSLHWMSMPTEYAEDSPYYPPSPDGTTTINVSHIISRRCLQWDI

SEQ ID NO: 152763 - protein, 60 aa, Glycine max
  Clone ID: PAT_MRT3847_10896C.1.pep
IVYNKVSIVRVVSSMLISKGTQCEKARLKKRVQRNQLPPESHKIINLKLVCALCLTPKLI

SEQ ID NO: 152764 - protein, 47 aa, Glycine max
  Clone ID: PAT_MRT3847_108970C.1.pep
ILLHITFQGGFNNRLKMCVIKCIFYYNNYRNVTVPLSKSVPYITVVE

SEQ ID NO: 152765 - protein, 256 aa, Glycine max
  Clone ID: PAT_MRT3847_108971C.1.pep
MAGPIMRPQIVLFGSSIIQMSFDNGGWGAILANLYARKADIILRGYSGWNSRRALEVLDEIFPKDAYVQPSLVIVYFGGNDSIDPHPSGLGPHVPLEEYVENMRKIANHLKSLSDHIRIIFLTSPPINEELIRKKLSATQSGRTNESCGEYADGLMELCEEMNIKAINLWSAIQTREDWLDVSFTDGVHLSAEGSKVVVKEILKVLREVDWKPSLHWMSMPTEYAEDSPYYPPSPDGTTTINVSHIISRRCLQWDI

SEQ ID NO: 152766 - protein, 218 aa, Glycine max
  Clone ID: PAT_MRT3847_108972C.1.pep
MAFKLYGLPMSTNTTRAMICLHEKEVDFELVPVNVFAAEHKQPPFLSKNPFGLIPLLEDGDLTLFESRAITAYVAEKFKETGADLIRHKDAKEAALVKVWTEVESHYYEPAVSPIIYEYFVAPFQGKEPDKSVIDTNVEKLKTVLDVYEAKLSSTKYLAGDFYSLADLSHVSETHYLMQTPCASMINELPHVKAWWEDISSRPAFNKVVGGMSFGQNH

SEQ ID NO: 152767 - protein, 72 aa, Glycine max
  unsure (1)..(72): unsure at all Xaa locations
  Clone ID: PAT_MRT3847_108973C.1.pep
MSDSKIVFGDNWLTEETHFTCREWNILDGYXTLATXFRKFLPHSITWRLYTLLIYIFPSFLTGAINYKPDFE

SEQ ID NO: 152768 - protein, 69 aa, Glycine max
  Clone ID: PAT_MRT3847_108974C.1.pep
RRGITLTEIPEFNPTAPQPSILSAPAAVVETATPVTGSMSHPGADIVVSLALSPNRHRLSYVRPWDIGH

SEQ ID NO: 152769 - protein, 116 aa, Glycine max
  Clone ID: PAT_MRT3847_108975C.1.pep
CVGCTPRLHLLHYTFVGNLGMATTRLYYLCRCMRLNGCCRTVTLYGSVLVGYGFWSPIRTRRKWFHSAFVYGVHVWHGFRPWLLRPALVRLSVAPVWCGGYATRVTFLATPVNAIT

SEQ ID NO: 152770 - protein, 46 aa, Glycine max
  Clone ID: PAT_MRT3847_108976C.1.pep
RASFTHMGLTNHAGPRLYYGLFLSSSFSQQWNGKNSPIGITKIFLF

SEQ ID NO: 152771 - protein, 49 aa, Glycine max
  Clone ID: PAT_MRT3847_108977C.1.pep
LGSSLYPWSPMSTALAHEYSYGTHTADLVSASISYFNFHYHRVPMYMMS

SEQ ID NO: 152772 - protein, 324 aa, Glycine max
  Clone ID: PAT_MRT3847_108978C.1.pep
AAETQPIDPDHVTIGALLKACTKAGQVERAQEVYKMVQKYNIKGCPEVYTIAINSCSQTGDWEYARTVYNDMTQKGILPDEIFLSALIDVAGHAKKLDAAFDVLQEAHKGGIQIGIMSYSSLMGACSNARNWQKALELYEYLKSLKLTITVSTVNALLTALCDGDQFQKALEVLFEMKGLGLSPNSITFSILIVASEKKDDMEAAQMILSLAKKDGVAPNLIMCRCIIGMCQRRYEKACFVGEPVLSFDSGRPLVDNKWTSLALMVYRETIEAGGKPTSEILPQILGCLQLPYDTSVKNRLVENLGVRAETEAQTSVHNGWIGE

SEQ ID NO: 152773 - protein, 41 aa, Glycine max
  Clone ID: PAT_MRT3847_108979C.1.pep
MGYEKAQINIVVVGHVDPEEATTINELKKPVVEKEAPGHAI

SEQ ID NO: 152774 - protein, 79 aa, Glycine max
  Clone ID: PAT_MRT3847_10897C.1.pep
LLLDWSPYSSTHGFINCMTANSGQSCIRRHLSLVKNSTTSLIINVTFIPHFQKKKKKKKKKKKKRQNKKQKKKGDRENT

SEQ ID NO: 152775 - protein, 115 aa, Glycine max
  unsure (1)..(115): unsure at all Xaa locations
  Clone ID: PAT_MRT3847_108980C.1.pep
TPQWRTGPMGPKTXCNACGVRYKSGRLVPEYRPAASPTFVLTKHSNSHRKVXELRRQKEMVRSQQHHHQHQQQFLQHHXXXHHHYQHHQNMMFDVSNGDDYLXHQPVGPDFRQLI

SEQ ID NO: 152776 - protein, 60 aa, Glycine max
  unsure (1)..(60): unsure at all Xaa locations
  Clone ID: PAT_MRT3847_108981C.1.pep
MAKEKAQINIVVVGHVDPEEATTINELKXPVVEKEASACHMKACTYSLRREPENYVNKII

SEQ ID NO: 152777 - protein, 84 aa, Glycine max
  Clone ID: PAT_MRT3847_108982C.1.pep
PKASLKLPPLMMTLNTLGFPDYFVNIIFWFPLRGRTCMPSYGMPWSFFLHNRLLQLVNGGCLLRVHMTNHHNVDLSLFLSHLAN

SEQ ID NO: 152778 - protein, 136 aa, Glycine max; identical to SEQ ID NO: 143601
  Clone ID: PAT_MRT3847_108983C.1.pep

SEQ ID NO: 152779 - protein, 77 aa, Glycine max
  unsure (1)..(77): unsure at all Xaa locations
  Clone ID: PAT_MRT3847_108984C.1.pep
WTAWFEVDVTIYSFIXYHECILKTYRVLNPQNPFVLNRWMGKLTFPXGSSTRVKRMPQSIWGGAGAXNAIFMHIPKA

SEQ ID NO: 152780 - protein, 148 aa, Glycine max
  unsure (1)..(148): unsure at all Xaa locations
  Clone ID: PAT_MRT3847_108985C.1.pep
ADSPPRRNARSPSPWRAEXRSRSRSTCTPRSRSRIRSFERHRPRSRSAIGGRSRSSNTQRSEANDAGPTLYVTGLXSRVTDRDLXEHFSIDGXVAPCYIGGRPRHDSVGLLSYEMYTAEDANRCITYLNPSGCEGLVITAVLSQQKLS

SEQ ID NO: 152781 - protein, 103 aa, Glycine max
  Clone ID: PAT_MRT3847_108986C.1.pep
SSCQDHTHASISNSRLCLKLELSSPTLARTSVTDAVTPSFQPNVSISVSHSSTGDASIHRCQSHVLGRDGASHAGAAVWGHIATSASGNRTSVGLCTLSLHRT

SEQ ID NO: 152782 - protein, 118 aa, Glycine max
  Clone ID: PAT_MRT3847_108987C.1.pep
MQPTLFRSNKFIGHASVPLVSQPAEKESLLVESDDDDDDDDTEIEDQDVEGGRTVAKNNDSGKSPPVIGGESSKTDGDEGPDVDKKADEFIAKFREQIRLQRIESIKRSTRSARNASR

SEQ ID NO: 152783 - protein, 50 aa, Glycine max
  Clone ID: PAT_MRT3847_108988C.1.pep
KGSEEWFLNLILVQILRFKLMCNQGCPEIYLNGGIKFFFNYFKWFKLLIK

SEQ ID NO: 152784 - protein, 71 aa, Glycine max
  Clone ID: PAT_MRT3847_108989C.1.pep
PLYHPLLYLFLFSLPLNHLHSFLNLTRTYFNTRFTFIHCSFLSSPSHLSFHSSVSVLLLGLDLTYNFWTII

SEQ ID NO: 152785 - protein, 111 aa, Glycine max
  unsure (1)..(111): unsure at all Xaa locations
  Clone ID: PAT_MRT3847_10898C.1.pep
MATGGSFIPIIDLNPLLAKADDPKMTKDPGVLEADKQXHKASTQAEFFYVKRHRNPETLLKEXRDVTRRYYELSYEDKANIKMTPAAGFKRYHRLGENITNSVPDMHESIH

SEQ ID NO: 152786 - protein, 52 aa, Glycine max
  Clone ID: PAT_MRT3847_108990C.1.pep
RICKTITLANSGNGYLSVGFTVFLNFMLLFALYCPTFTSDPLLLERCWYDCC

SEQ ID NO: 152787 - protein, 104 aa, Glycine max
  Clone ID: PAT_MRT3847_108991C.1.pep
FYSPPPGKFRPVFPSPPVPKFFPQFFGPVFLYPQKDPRVGPPPKLFSPALPPNSQPQKSRVFPFCKPHKTPPLIKGAPPNINSPGFPRFVFSFTEKKCASWEVH

SEQ ID NO: 152788 - protein, 76 aa, Glycine max
  Clone ID: PAT_MRT3847_108992C.1.pep
CGGFIAISIASHGVFPFAIFELNTRGRFCMRYHHSLHCAHRLTSLGTSRSTPHVLGVDVIFPSSEVVAKSSNNIIN

SEQ ID NO: 152789 - protein, 107 aa, Glycine max
  Clone ID: PAT_MRT3847_108993C.1.pep
PHGGNYISITYLPLYAIALTPLHPRHSPDARYICALLNARYTTFTTFYTLLLSLLWFPVLPLSQQAGKARISSLADLFLRRFIYHLLSVRRILHLCPPPPPPQAGGT

SEQ ID NO: 152790 - protein, 93 aa, Glycine max
  Clone ID: PAT_MRT3847_108994C.1.pep
LFSQTILIHIRMDRSLHATIVILGSCVLCYQLGIIVALLQTASFQILYLRMSFDQLSTEIDTLLLHGHGGIRDRLCAFTETDGNMLFPARTLC

SEQ ID NO: 152791 - protein, 75 aa, Glycine max
  unsure (1)..(75): unsure at all Xaa locations
  Clone ID: PAT_MRT3847_108995C.1.pep
VLFVLWNISTILGKDMENDHQIVKIATRPATSTPWLIHAPYLRLLHYPAXYSYHCALXPLFHVMMESKHVVVASL

SEQ ID NO: 152792 - protein, 115 aa, Glycine max
  Clone ID: PAT_MRT3847_108996C.1.pep
KKNGFPPGAGMTIIWGNPLIIGDVGKPGGAGPNVRGFPSFPPRARFGKKGDNLINLVKWVKCFTLPPPPLGPGGGPNHPHQLEERVPIVQNGFGEEKTAFSTRGGRIFGSERKRV

SEQ ID NO: 152793 - protein, 323 aa, Glycine max
  Clone ID: PAT_MRT3847_108997C.1.pep
MASPNPKEIVAEIPTYIRVFSDGTVERPRETPFVPPSIDDPQTGVSSKDIVISQNPLVSARIYLPKLTTINQVPILVFFHGGGFFFESAFSQLYHHHFNTFVSQTNCIVVSVEYRLAPEHPLPACYLDCWEALKWVASHSSENSPINAEQWLISHGNFQRVFIGGDSAGGNIVHNIAMRAGTEPLPCGVKLLGAIFAHPYFCSSYPIGSEPVTGHEQSLPYVVWDFVYPSVPGGIDNPMVNPVAPGAPSLAELGCSKIIVCVASEDKLRDRGVWYYEAVKKSGWKGDLELFEENGEDHVYHIFHPESENATKLIKRLGLFLNE

SEQ ID NO: 152794 - protein, 42 aa, Glycine max
  Clone ID: PAT_MRT3847_108998C.1.pep
EFLEHFNGLRFRSQGHQYIALLVAFSFKTLERSSQLSSDTTV

SEQ ID NO: 152795 - protein, 32 aa, Glycine max
  Clone ID: PAT_MRT3847_108999C.1.pep
SFYEIPSLIVPLNRGNFIQRESYMPMYCYYME

SEQ ID NO: 152796 - protein, 98 aa, Glycine max
  Clone ID: PAT_MRT3847_10899C.1.pep
LAPDRERPAYGLIPGGTGTRLLGTIPHSISQQTVCNQMATVRTPLNFDSSKQSYCQFTIDLVCGRILVDKTGDWITLIQNFSNLVTLLKSCCLYKKAV

SEQ ID NO: 152797 - protein, 117 aa, Glycine max
  Clone ID: PAT_MRT3847_1089C.1.pep
EVADEAVAALTKFASPDNYLHIEHSKTIVEFNGIPALMRLLRSNEVAQMHRGLTLLCYLALHAGNSESLEQARVLTVLEGADRTVLPPHIKELVSRAIIHLNLYHAGMNSQRISYLP

SEQ ID NO: 152798 - protein, 119 aa, Glycine max
  unsure (1)..(119): unsure at all Xaa locations
  Clone ID: PAT_MRT3847_108C.1.pep
SALVETVLLATVLAVSKFVFPIAEKLLARGSFLSLRNLLLPRAAVSGKKTKIDKFHGTNGGTVPRDGIDVLGRKGKGKGAHXPADKHGVNADGHSFTHDIKDRLLIGDAHVGGMIGPVT

SEQ ID NO: 152799 - protein, 208 aa, Glycine max
  unsure (1)..(208): unsure at all Xaa locations
  Clone ID: PAT_MRT3847_109000C.1.pep
GVLGVKDITAFNKALLIKWKWMMFHYPDQLWNRILTSKYGGWRGLEEXAHKEQFSCWWSDLRSTINHSSMADVSSQFIWKLGRGDQILFWEDSWVERGIRLKDKFPELYHLSSQKFHTVATMGTFCESGWEWSFSWRRNLFDSEMGRASEFIDQTAAIRPSTALKDSWLWGADSKGIFSTNSAYLYIKDDHLNEDQCLGFQHLWNIKI

SEQ ID NO: 152800 - protein, 92 aa, Glycine max
  unsure (1)..(92): unsure at all Xaa locations
  Clone ID: PAT_MRT3847_109001C.1.pep
KMVESGELRSRIAEIQKLCNANDDELDNDSALLHFKTALQQIDSDFSSMXIQDAYLHHLKEELNNLHLETAQVTNQIHLLSKTHNDDCILLE

SEQ ID NO: 152801 - protein, 107 aa, Glycine max
  Clone ID: PAT_MRT3847_109002C.1.pep
IMELMLNTLMDKVLLFTHVIVLLLGSTYAFFYLQCLHTGIGEMTKAALAHNRDREVAVRIIYSRKPIPVRIHFLGLMLYFFLVLSPWNLNKNGFSCWNWICFLDWSH

SEQ ID NO: 152802 - protein, 134 aa, Glycine max
  unsure (1)..(134): unsure at all Xaa locations
  Clone ID: PAT_MRT3847_109003C.1.pep
RTKQTAXKPTGGKXPRKQQAXKAARKXXPATGGEKKAHRGRPGTAGQRETRKHQKRIFFLNQKQPIKRMDRDKAQESKTDLRFQSKAEPAAQEAAEGYPEGILRRQNIGGIHARRVPIMPKDNQIARRTKGERA

SEQ ID NO: 152803 - protein, 49 aa, Glycine max
  Clone ID: PAT_MRT3847_109004C.1.pep
NPGGAHRNCPSGHTRLNSRGNNDEGRPEGPFRKGGHPLWGKGKGPGGGH

SEQ ID NO: 152804 - protein, 88 aa, Glycine max
  unsure (1)..(88): unsure at all Xaa locations
  Clone ID: PAT_MRT3847_109005C.1.pep
FSLVAQFPRAGFKMQIFVKTLTGKTITLEVESSDTIDNVKAKIQDKEXIPPDQQRLIFTGKHLYDSRTLSDYNIQNESTLHLVLRLRC

SEQ ID NO: 152805 - protein, 118 aa, Glycine max
  Clone ID: PAT_MRT3847_109006C.1.pep
MSSSFSPSWLTSPSCSALDIDSSSPTALLIVQWLRFILLSPCPQRVLLSAVDSIFLLSLLAFAAVKLYSRFTSNTTSNNTITKPLLQDKDSDYKVTFWFKLPLLVTTLLAIAYTVLSI

SEQ ID NO: 152806 - protein, 54 aa, Glycine max
  Clone ID: PAT_MRT3847_109007C.1.pep
DACGVFVEEYYVCLVVMEVSQPVAIHRLMMCKQLLVGDFQIRLKCAPVDVGLSK

SEQ ID NO: 152807 - protein, 38 aa, Glycine max
  unsure (1)..(38): unsure at all Xaa locations
  Clone ID: PAT_MRT3847_109008C.1.pep
PFSLFICPHKSKHSVIDQITLIISYTRTPWFLLHAXSV

SEQ ID NO: 152808 - protein, 115 aa, Glycine max
  Clone ID: PAT_MRT3847_109009C.1.pep
NSARGSISNLSSGVANMENLVKGLLCEDEKSESFVISMKWFLNYAERKVRDLQGDEGRVMARVKEITEYFHGDVSKEESNPLRIFVIVRDFLEMVDNVCNELKRSTKSPRTIRIE

SEQ ID NO: 152809 - protein, 74 aa, Glycine max
  Clone ID: PAT_MRT3847_10900C.1.pep
MKRLGSTQNRNFNSTDLMCHSRSRCHTNRHSGIGVWDEEWNVSVVPLTMERNRVAPDGLSYCECCLYRVGRKSD

SEQ ID NO: 152810 - protein, 56 aa, Glycine max
  Clone ID: PAT_MRT3847_109010C.1.pep
MGDKVRVRKGNSPDHQLSMIARTCGALRSENAGVSSERRVDIPVPPSIGIIHGGTQ

SEQ ID NO: 152811 - protein, 48 aa, Glycine max
  Clone ID: PAT_MRT3847_109011C.1.pep
RDRDFLVGETFFSFHFIYGEETGKSVREKPLSPIGRIIFHSLRVSRED

SEQ ID NO: 152812 - protein, 22 aa, Glycine max
  unsure (1)..(22): unsure at all Xaa locations
  Clone ID: PAT_MRT3847_109012C.1.pep
WTQNAALNSAPPQTXRFNSDLI

SEQ ID NO: 152813 - protein, 95 aa, Glycine max
  unsure (1)..(95): unsure at all Xaa locations
  Clone ID: PAT_MRT3847_109013C.1.pep
ASSKISFPVVTTDNRAGAGMVAPFTGLIFMAGFPTIKTNIDITSIASNGGRVQXFQVWPPAGNKKFETLTFLTDLDNAQLSNEVKYLLKKGWIPC

SEQ ID NO: 152814 - protein, 72 aa, Glycine max
  Clone ID: PAT_MRT3847_109014C.1.pep
HAYFLPRSHGLDCHERFANRNTVSFDLNLKGLAGTQGPRYVDTVTGSSKHALCGYEPPMCETRPMLTSDRCP

SEQ ID NO: 152815 - protein, 46 aa, Glycine max
  Clone ID: PAT_MRT3847_109015C.1.pep
GGSMFKYPCLLRLKSKIKPPKCKTLAEFKQRRYIKNRGGKQLNCLT

SEQ ID NO: 152816 - protein, 89 aa, Glycine max
  unsure (1)..(89): unsure at all Xaa locations
  Clone ID: PAT_MRT3847_109016C.1.pep
MAPKADRKPVXKKPVEENKSTVGYKAPADIKSAAGEKLPKEGGAGGECMKNKRNKNSVETYXSXIGNVQKHVHTDIGISTKAMGIISRF

SEQ ID NO: 152817 - protein, 36 aa, Glycine max
  Clone ID: PAT_MRT3847_109017C.1.pep
CMCCLSSWCRIRFDVFEFPVYSNNLCKFREQLSYSI

SEQ ID NO: 152818 - protein, 92 aa, Glycine max
  Clone ID: PAT_MRT3847_109018C.1.pep
MVANRIIMYISCCQVFVKMHSTLKIRDTLPKMKKFGGLAFLLSCMTKNFFFKKKYPPKRGPFRFRGFLACFAKKTKTGGIKKKRGGQQRLKV

SEQ ID NO: 152819 - protein, 74 aa, Glycine max
  Clone ID: PAT_MRT3847_109019C.1.pep
PRKTPTVYMNRFAASFLENVELESAEACQYNFLWMQYSFNRCRIMPIHIWAFCPLCLEMWIGSPGGSLSRRAGI

SEQ ID NO: 152820 - protein, 125 aa, Glycine max
  Clone ID: PAT_MRT3847_10901C.1.pep
VASRKYGIGFWKPGSGIIHTVIFENYATPGGLIIGTDSHTPNAGGLGMLGIGVGGADAVDAMSGMPWELVAPKVVGVRLTGQLQGWSSTKDIICRHAGLKTVSGGKGRVIEYYGPGTQTLGATAM

SEQ ID NO: 152821 - protein, 198 aa, Glycine max
  Clone ID: PAT_MRT3847_109020C.1.pep
ENRHTPGLKHWSLAVKDGKALENEWRSEIPIPRGGPHRACVVVDDRLYVLGGQEGDFMAKPGSPIFKCSRRQEVVYTDVYMLDDDMKWKTLPPMPKANSHIEFAWALVNNSIVIVGGTTEKHPITKKMVLNGEVVQFNLNTLKWSVIGKLPYRVKTTLVGFWNGWLYFTSGQRDKGPDDPSPKKVIGEMWRTKLKLNE

SEQ ID NO: 152822 - protein, 71 aa, Glycine max
  Clone ID: PAT_MRT3847_109021C.1.pep
LGGLFAKLNSGDISKNASDKLLQLCQALDNGDFGTALQIQVLLTTTEWDECQSWLGSLKRMIKTRQSVRLS

SEQ ID NO: 152823 - protein, 865 aa, Glycine max
  unsure (1)..(865): unsure at all Xaa locations
  Clone ID: PAT_MRT3847_109022C.1.pep
ISPIKEFVGHTRGVIAMSWCPNDSSYLLTCGKDSRTICWDMISGEIAYELPAGTNWNFDVHWYPRIPGVISASSFDGKIGIYNIKGCRQNGIGENDFGAVPLRAPKXWYKRPTGVSFGFGGKLVSFHPRASAAGSPAGASEVYVHNLVTENGLVSRSSEFEAAIQNGERSLLRVLCEKKTEESESEDHASXKKTWGFLKVMFEDDGTARTKLLSHLGFNVPSEAKDTVNDDLSQEVNALGLEDTTVDNTGHVSTNETPIFSTDNGEDFFNNLPSPKADTPVSTSAGNFVVAENANGSKKIQDDVEVEESSDPSFDDSVQHALVVGDYNGAVMQCISANKWADALVIAHVGNASLWESTRDQYLKMVRSPYLKIVSAMVSNDLLSLVNTRTXKFWKETLALLCSFAQRNEWIKLXRLREDDRRGAGNTLAATLCYICAGNIDKTVEIWSRSLSNETEGKSYVDLLQDLMEKTIVLALATGQKRFSASLCKLVEKYAEILASQGLLTTAMEYLKLLGSEELSPELTILKDRIALSTEPEKDFKTTAFESSQSHSGSYYGADNSNYNSNYYQEPVTTQVQHGVSGIQYPDSYQQPFDPRYGRGYGAPTPPQQPLQPNLFVAPQTTQVVQTPQPTFSNTAVAPPPLRTFDPQTPPMLRNVEQYQQPTLGSQLYNTTNPPYQPTPPVPSQVALSHGQNLSQVVAPTPNPMGYMPVSGSGGVQRPGVGSIQPPSPPQVQPVQPPAAPPPTLQTADTSKVPGHQMPIVTTLTRLFNETSDALGGSRANPAKRREIEDNSKRLGGLFAKLNSGDISKNASDKLLQLCQALDNGDFGTALQIQVLLTTTEWDECQSWLGSLKRMIKTRQSARLG

SEQ ID NO: 152824 - protein, 169 aa, Glycine max
  unsure (1)..(169): unsure at all Xaa locations
  Clone ID: PAT_MRT3847_109023C.1.pep
MDRRSHPTGTVSTRNILFNKYEIGKLLGQGNFAKVYHGRNLSTNESVAIKVIKKERLQKERLVKQIKREVSVMRLVRHPHIVELKEVMANKAKIFMVVEYVKGGELFAKVAKGKMKEDVARKYFQQLISAVDFCHSRGVTRRDLKXPENLLLDENEDLKVSDFWPVALP

SEQ ID NO: 152825 - protein, 244 aa, Glycine max
  unsure (1)..(244): unsure at all Xaa locations
  Clone ID: PAT_MRT3847_109024C.1.pep
MVHLGFFLLGCLSMISYANGYVSNGGLTNAHATVYGQSEASXTMGGACWLWKLVLVKDYGSNTAALMTALFNNSLSCDFCYQIKYDKSPTWXLCLTIVVTPTNFCPPGGWGDPPNHHFDLSQPVFQQIAQYRAGIVPVVYRTERGMTRGGLRFTINGHSYFNLVLVTNVGGAGDVHSVAIKGSRTRWQPMSRNWGQNWQSNSYLNGQSLSFLVTTSDGRSVLSYNAAPPSWSFGQTYTGRQFRY

SEQ ID NO: 152826 - protein, 222 aa, Glycine max
  Clone ID: PAT_MRT3847_109025C.1.pep
RIIEDGTANQNLGNKESFPERYDVDVQCLSPKKQCTVYKYDAFVPVLGKPVDSSWNTLTQKDKDALSKGADCFPSKTCDGYSNHFVRLRETTEGGIVTVIRLTRNMPRKITEAIVYGSSSGYYDGTMMKAPTISCNDYMAVMKRMAELEEKVTVLSMRPVIPHEKEEVLNSALCRVTTLEQDLVATKKALDDALARQVELQAQIDKKKNSNKKLFRFRCFAT

SEQ ID NO: 152827 - protein, 80 aa, Glycine max
  Clone ID: PAT_MRT3847_109026C.1.pep
MVWNSMVVLRVARASAEAWQCIAEPLNSEQILDLVCCFPLHQLALCLYSFFCTPQSNFYHFPSHSDSDHDDSSDYQSSSD

SEQ ID NO: 152828 - protein, 142 aa, Glycine max
  Clone ID: PAT_MRT3847_109027C.1.pep
MPKMGLKNLFFFKTSPSPPSSSPTRTFSDSLMDENIETARAIISKWELISPSDQTAPLFSNTRQEAKQYLNAVMSLQSTMQHLVALDSSSDTLIQAHFLMQLAMKRLQTEFYRILTQNRDNLDPESVASTDHRSSSVSDDGT

SEQ ID NO: 152829 - protein, 345 aa, Glycine max
  Clone ID: PAT_MRT3847_109028C.1.pep
MAHPTSSGQSHDLKKEDCKETRSLVVCFGEMLIDFVPTVGGVSLAEAPAFKKAPGGAPANVAVGISRLGGSSAFIGKVGADEFGYMLGNILKQNNVETSGMRFDSNARTALAFVTLRADGEREFLFFRNPSADMLLQESELDKDLLKQARIFHYGSISLIDEPCKSAHLAAMSIAKNSGCILSYDPNLRLALWPSADAARKGIMDIWDQADVIKISEDEITFLTGGDDPYDDNVVLKKLFHPNLKLLIVTEGSQGCRYYTKAFKGRVAGVKVKPVDTTGAGDAFVSGILYCIASDQTIFQDEKRLRKALYFANVCGALTVTERGAIPALPTKEAILQFLLEAAVI

SEQ ID NO: 152830 - protein, 118 aa, Glycine max
  Clone ID: PAT_MRT3847_109029C.1.pep
TIDLSMEIYQVIYAKHSVYHCILKFNLLELELHGNSYQPPYSDTSPFTNETVRNLEQKWRKGKRYCISCLIETKENRTKERELSFNDIHKVLTSQRISPFTKEQILNLQRTTDRNEFP

SEQ ID NO: 152831 - protein, 147 aa, Glycine max
  Clone ID: PAT_MRT3847_10902C.1.pep
MDSRKGKASVSASSLSAAPLSVSNKVDQMVSPPRDVRAVETDVDIDLREIYFLIMHFLSVGPCHRTFLNFKEELLEHQLLPRRYHAWFSRSGEPSGDDADEDDDGISLPLDYSNLVGRYPHITKDHLVKLLKQLMLSTVNPLHGKLE

SEQ ID NO: 152832 - protein, 70 aa, Glycine max
  Clone ID: PAT_MRT3847_109030C.1.pep
QFGPHCKRRCCNTHHVSCANAISQPYLSIVTFRGHVVVTILYNCRRPNFGAQDCCLSYLTSHVNLSMYSG

SEQ ID NO: 152833 - protein, 137 aa, Glycine max
  unsure (1)..(137): unsure at all Xaa locations
  Clone ID: PAT_MRT3847_109031C.1.pep
PPPVAAKNAFFPNQGVSQTRPSFHAKGIFEENKLFEKPKAKTHTPITQLWHANGRCPKDTIPMPRXKEEDVLRASSVKRYGRKKHRTIPKPRSIEPDLINQSGHQHAIAYVEGDKYYGAKTIISLWEPKIQQPNEFN

SEQ ID NO: 152834 - protein, 118 aa, Glycine max
  Clone ID: PAT_MRT3847_109032C.1.pep
NLLCLPETIKFVACRDNHGHLPLLKDFNVFRSRLLKSFLPSRDNQVRRHAKTNYGHLPLFEDFNFFRSRLLKSHFPSRDNQVHWHAETNYGHLPLFEDFNVIRPRLLQSHLQSRDNQV

SEQ ID NO: 152835 - protein, 47 aa, Glycine max
  Clone ID: PAT_MRT3847_109033C.1.pep
YYASYYLFVVMHIINKSIFLIERRKLLSFSLVIGYYVRYYLSVITLL

SEQ ID NO: 152836 - protein, 96 aa, Glycine max
  unsure (1)..(96): unsure at all Xaa locations
  Clone ID: PAT_MRT3847_109034C.1.pep
LXXXXPXLXPXPXXPXXPXXXXXPLXXXXXPXXXXXXPXXXXALXAXXLXPXXSXXXXXLXXLXXXNXAXXVXXPXXFXXFVLXPXSXXTYACXQX

SEQ ID NO: 152837 - protein, 32 aa, Glycine max
  Clone ID: PAT_MRT3847_109035C.1.pep
TIQAHITMTEPWSWQDFGHYTRLIPRWRTCQK

SEQ ID NO: 152838 - protein, 41 aa, Glycine max
  Clone ID: PAT_MRT3847_109036C.1.pep
LSSNWNIIKSLFKISHLILLNFYLRFSLCTFVLFSFVFNIF

SEQ ID NO: 152839 - protein, 104 aa, Glycine max
  Clone ID: PAT_MRT3847_109037C.1.pep
GGGVKFFRFSNGENKSPVGGPPPPKKPPFPKKRGKPGGGLKKGLLKKSRGGLGLFPPYPGDFYFVVFPNVPRTSKTGCPFVYCLTKPFWQGFFFFQKIFEGYLG

SEQ ID NO: 152840 - protein, 54 aa, Glycine max
  Clone ID: PAT_MRT3847_109038C.1.pep
YDIWRYPYCIDHGCSKKKELILLYRGCDQTPCTKTHDQHHMLPAVKNTNYATDM

SEQ ID NO: 152841 - protein, 264 aa, Glycine max
  unsure (1)..(264): unsure at all Xaa locations
  Clone ID: PAT_MRT3847_109039C.1.pep
MEPLKLYFIHYPTAGHMIPLCDIATLFASRGHHATIITTPVNAQIIRKSIPSLRLHTVPFPSQELGLPDGIESLSSLIDDIRHFPKVYHAISMLQPPIEQFVEQHPPDCIVADFLFPWVHDLANKLNIPSVAFNGFSLFAICAIRAVNLESSDSFHIPSIPHPISLNATPPKELTQYLKLMLESQLKSHAIIINNFAELDGQDYIRHYEKTTGHKTWHLGPASLIAAGPLKRXAERGMKSAVSMQDCVSWLDSKRVNSVLYICF

SEQ ID NO: 152842 - protein, 96 aa, Glycine max
  Clone ID: PAT_MRT3847_10903C.1.pep
RCAKWGTLTEFIQEFEVPMAQVLGTKEAQLRGYFLVGLCNEIRAKIHPHKPKDLSRAMELTADFEEAEKEGNPEVDLRSHGFRFQPKGGTWIHSVG

SEQ ID NO: 152843 - protein, 40 aa, Glycine max
  Clone ID: PAT_MRT3847_109040C.1.pep
HRGRIILIKYFFDNLLQSDYDIIYQQKGGAYGQYLQHCIS

SEQ ID NO: 152844 - protein, 103 aa, Glycine max
  Clone ID: PAT_MRT3847_109041C.1.pep
MLASSLSFLHSCSSSSFLLSISLPNPKPSHSLPFVLEAKDRTRREDRSARHTRIRKKVEGTPERPRLSVFRSNKHLSVQVIDDTKMHTLASISTMQKTVAEEK

SEQ ID NO: 152845 - protein, 186 aa, Glycine max
  unsure (1)..(186): unsure at all Xaa locations
  Clone ID: PAT_MRT3847_109042C.1.pep
GWYTDGLSAHPQTLAKNRELEVIHSTWAMLRALGCVFPELLSLNGVKFGESVWFTVGSHIFSEGGLHYSGNPCLIHAYSILAIWATHVILMCAAVGYRIAGGPLGEVTDLMYPLGHFNPLRLADDPKAVSELSVKDLLNGRLALFSMFGFSVHAIVNSMGPLENLDDHLADAVDFNTXAYATNFMP

SEQ ID NO: 152846 - protein, 224 aa, Glycine max
  Clone ID: PAT_MRT3847_109043C.1.pep
MMANHTMKMANLLLLVTLAQLLATAISSDPDLLQDLCVADLASGVKVNGFTCKEASKVNASDFFSNILAKPGATNNTFGSLVTGANVQKVPGLNTLGVSLSRIDYAPGGINPPHTHPRATELVFVLEGQLYVGFITTSNVLISKSINKGDIFVFPKGLLHFQKNNAKVSASVISAFNSQLPGTQSIATTLFAATPSVPDHVLTQTFQVGTKEVQKIKSRLAPKK

SEQ ID NO: 152847 - protein, 188 aa, Glycine max
  Clone ID: PAT_MRT3847_109044C.1.pep
SHHILHHDFAYTYGHPPVLATYTPPSHCHFNTFSKIVLQWNATCKGRQFDRIFGVWLGGVELLRSCTAEPRATGIVWSVEKDITRYRSLLLSPQNQSFAVFLGNVVDKTYTGVYHVDVTMHFYPLGYFDGESSKIGVLAFGGGVHADLVLPISRNLPLNDGLWFAIQNSSDEGLKEFRVPQNTYRAVL

SEQ ID NO: 152848 - protein, 151 aa, Glycine max
  Clone ID: PAT_MRT3847_109045C.1.pep
QRGGRTMPGVTVKDVNQQEFVRALAAFLKKSGKLKVPEWVDTVKLAKHKELAPYDENWFYTRAASTARHLYLRGGAGVGSMTKIYGGRQKNGVRPSHFSRGFKSVAPRVLQALEGLKMVEKDQNGGRKLTPQGQKDLDRISGQVAASHKKL

SEQ ID NO: 152849 - protein, 89 aa, Glycine max
  Clone ID: PAT_MRT3847_109046C.1.pep
PRVRSRVRGRVGGRVGGFWTHSGWNSTLESVCEGVPMMCRPQFADQMINTRYVQEVWRVGFELDGDQLERRKIAVAVTKLLCTVEGMRM

SEQ ID NO: 152850 - protein, 56 aa, Glycine max
  unsure (1)..(56): unsure at all Xaa locations
  Clone ID: PAT_MRT3847_109047C.1.pep
EESCKRKCVKTLLEXHACMKRIHGDEYGQKHRNGQYFDYWSCIDKCVAPKLYTKLK

SEQ ID NO: 152851 - protein, 67 aa, Glycine max
  Clone ID: PAT_MRT3847_109048C.1.pep
PTTAPPPPVPRSHSNLLHIVAPAPYSVTICIQVYSVPPTYVFLQIHQYFQSKVRILDDCPDREVKVM

SEQ ID NO: 152852 - protein, 194 aa, Glycine max
  Clone ID: PAT_MRT3847_109049C.1.pep
FRPKLASTLDSLEPVDPNTMNLLQGILVLRHHTPDTNEKKSFLSRLKRLKTKETPSFNSYALYAYDTVCLVARALDAFLKKGSVVSFSSDPKLQDTNGSMLHLQSLRVFNDGPTFLETILSTNFTGLTGTVQFDIERNRIHPAYDILNIGGSGMRRVGYWSNYSGLSVVTPEILYKKPPNTFTSSQQLYGVIWP

SEQ ID NO: 152853 - protein, 93 aa, Glycine max
  unsure (1)..(93): unsure at all Xaa locations
  Clone ID: PAT_MRT3847_10904C.1.pep
SLPVFLIFIAKTVWPNXGEWDAHFTNIFNAATYNQNFIKKVTIKPWLQTPPRPNSAIPSFLFTLFNENYKTVPFTYRHFNLLHPNGFRVYDFD

SEQ ID NO: 152854 - protein, 59 aa, Glycine max
  Clone ID: PAT_MRT3847_109050C.1.pep
FGIVLLVASFIFLIRFFVFFFLSGSKGVSILEIFLLFENRWFWRIFVFFLEPETSKGFV

SEQ ID NO: 152855 - protein, 59 aa, Glycine max
  unsure (1)..(59): unsure at all Xaa locations
  Clone ID: PAT_MRT3847_109051C.1.pep
FMCSGVALPLGPGRPVAHWLFSPCRGAGPCPLFVSGAWVKFGSKKPSSRMXPAGQKNSG

SEQ ID NO: 152856 - protein, 77 aa, Glycine max
  Clone ID: PAT_MRT3847_109052C.1.pep
IIRHKEMHQIFSSYSKNLEAHPDHEFWNIDTLTYCLTMEANLHKKYIWNRSYNLLMHVRKVVYAINTTTKQLIGPLK

SEQ ID NO: 152857 - protein, 61 aa, Glycine max
  Clone ID: PAT_MRT3847_109053C.1.pep
LHHNVLTYQNRYAQKIQNWSAPILLRALLLTNHTYPITCDSYTGSLLKPSLGTNAPKQIAM

SEQ ID NO: 152858 - protein, 105 aa, Glycine max
  unsure (1)..(105): unsure at all Xaa locations
  Clone ID: PAT_MRT3847_109054C.1.pep
RGRLLCNSEPENIIQITRPSGKIMLVPKDDPKATHILVDTRSGVAPCTGYLRLMFXNKYLDTHYAGLAXFYLGAANTDSCLYDDEHTXYLKDYSGNLSYNRSLRK

SEQ ID NO: 152859 - protein, 125 aa, Glycine max
  unsure (1)..(125): unsure at all Xaa locations
  Clone ID: PAT_MRT3847_109055C.1.pep
NNDSGHLRKFSGNYRSSSSDDEYAHQPMSXKKSGVRDHESKVGGSAQYHDSFDAPNSVRGMHAVNKIDSESIDEFSSSENWLWPSDAEETGDYPTNQNSNNVIKSDIPKTKRRTPKETDEAWDSD

SEQ ID NO: 152860 - protein, 53 aa, Glycine max
  Clone ID: PAT_MRT3847_109056C.1.pep
PTLPGDQLWPQHWPYLAVQQTSVEAYWIPTPLIITPISVHVKMLDKKYKGFIG

SEQ ID NO: 152861 - protein, 68 aa, Glycine max
  unsure (1)..(68): unsure at all Xaa locations
  Clone ID: PAT_MRT3847_109057C.1.pep
WCLXRXGXXRLXALXXVLPCXRXVXSXVPPARXCGFLXAXXGALXVXXLLVGGLXXRYVXLXXXRXLG

SEQ ID NO: 152862 - protein, 82 aa, Glycine max
  unsure (1)..(82): unsure at all Xaa locations
  Clone ID: PAT_MRT3847_109058C.1.pep
HASQSCRIRHNGKVQQFVLNYKLDYREENMKLFGFPVAPLGVVPPACHSARYXRFPLPKQTGYRERSSQGKCAHFKRAVGAH

SEQ ID NO: 152863 - protein, 59 aa, Glycine max
  Clone ID: PAT_MRT3847_109059C.1.pep
PPPMLTLLGMTQNCKIFSPVSFLRRGLLAVVNLIKFLHSWGCLYPKKFIHFDFLKKPSP

SEQ ID NO: 152864 - protein, 68 aa, Glycine max
  Clone ID: PAT_MRT3847_10905C.1.pep
LFIFFQKRKPIQTLSDPTPYYYYPTQPIRQTQLPTNYGVSVLEPPTFPPRACDVLVVLSRDQITIHCP

SEQ ID NO: 152865 - protein, 62 aa, Glycine max
  Clone ID: PAT_MRT3847_109060C.1.pep
PRLKNFLSKVSITYPLHILTTTRLSNPIPIKMLNTRCFHNHKQYLALLQLLFIIKHPIFHKL

SEQ ID NO: 152866 - protein, 268 aa, Glycine max
  unsure (1)..(268): unsure at all Xaa locations
  Clone ID: PAT_MRT3847_109061C.1.pep
MDLGVVGLEGVVGSESGCVFGSSLASDPETKHKWYGSGVLKQERSAIASEDDEWGTYKVAKIDHDMSSAPKAMIFQQRNNSLLRSNNATLFSDGHHQSQMLSFSSPKSETLLVDTAYSNATLPFSYHQLSTYSKNTGYSYGSISMHEALAGVRRPFTLSHPLELDXIVWASESITVDIPGPTALVMRMVSIWDSRATSTFPPARLRAHSVGWGGFHLGFSNSTDPDPGRCRRTDGKKWRCSRDADVHQKYCERHMNRGRHWFMKSPVE

SEQ ID NO: 152867 - protein, 50 aa, Glycine max
  Clone ID: PAT_MRT3847_109062C.1.pep
TAARKRQKGGMFSLVMFFFFFMYYSLVTSCVLGWSNKEGAFWLLLRKLYR

SEQ ID NO: 152868 - protein, 110 aa, Glycine max
  unsure (1)..(110): unsure at all Xaa locations
  Clone ID: PAT_MRT3847_109063C.1.pep
ARGKNYAHHSKGEDRHLLTLRGITPSTYGSSLGRSMVPTPRCLRLIAFTKLYFPXPGKQARSAVRIKQTMETNVAFXLQTDAPKSMYVRPPERRLTPGERFIATVFKYIG

SEQ ID NO: 152869 - protein, 52 aa, Glycine max
  unsure (1)..(52): unsure at all Xaa locations
  Clone ID: PAT_MRT3847_109064C.1.pep
KGKITLRVTKAKPXTGKVIGVFESVQPYDHDLGSKAPKVVKIQGILYAQIYS

SEQ ID NO: 152870 - protein, 83 aa, Glycine max
  Clone ID: PAT_MRT3847_109065C.1.pep
TKLGPCIVTSSQTTFPSTPISHFEPYLRKMKEQYIKPCMYNFRSEPNFLLCKGRNPWFSQHKPEFERERERKMDTERKLKQAV

SEQ ID NO: 152871 - protein, 282 aa, Glycine max
  Clone ID: PAT_MRT3847_109066C.1.pep
EQDREKPHRHLFRFPHMGMWTKLRPGIWNFLEKASKLYELHLYTMGNKLYATEMAKVLDPKGVLFAGRVISRGDDTDSVDGEERVPKSKDLEGVLGMESSVVIIDDSVRVWPHNKLNLIVVERYTYFPCSNCQFGLPGPSLLEIDHDERPEAGTLASSLAVIEKIHQIFFASQSLEEVDVRNILASEQRKILAGCRIVFSRVFPVGEANPHLHPLWQTAEQFGAVCTNQIDEQVTHVVANSPGTDKVNWALNNGRFVVHPGWVEASALLYRRANEQDFAIKP

SEQ ID NO: 152872 - protein, 66 aa, Glycine max
  unsure (1)..(66): unsure at all Xaa locations
  Clone ID: PAT_MRT3847_109067C.1.pep
FFIQXFTSKVAPESFVEENSDLYIALGAKIRHEENMQFHFLIVKYRQLNLTNKIYSTSFFDHIMRA

SEQ ID NO: 152873 - protein, 138 aa, Glycine max
  unsure (1)..(138): unsure at all Xaa locations
  Clone ID: PAT_MRT3847_109068C.1.pep
IIVNVCIACRTKLKQTEVDCWYLKRCCGALTEENRSFRNEGQEIRALKTSKCNYKQLPSTXMCPSCERVATNSTSTSLSISATINATNSGAMASVKTSNNNNNNDSTSKAIGFPFGKPRFHPFVHSSQQPHQHQSTAS

SEQ ID NO: 152874 - protein, 71 aa, Glycine max
  unsure (1)..(71): unsure at all Xaa locations
  Clone ID: PAT_MRT3847_109069C.1.pep
XXSXXXHXXALXXXXXXXXCTXXXXXXXXDXLXXXXIXXXIXLXLXRXXXRRXRXRXPSLRTPXXDXXSXA

SEQ ID NO: 152875 - protein, 234 aa, Glycine max
  Clone ID: PAT_MRT3847_10906C.1.pep
MKRRNLPGHTGTPSRCTKSGSNWLVFRLAADLYRLSVSGAKPVSTNVSLLQSGSNLRQQNATRGIFFIAGLGMASWAPLIPFVKARLDIDDGTLGLLLFCIAAGSMLVMPFTGRAIARLGCRTLILACAAVFCLILPFMMHATSAVEIGGALLVFGAVNGLLDVSMNAQAVIVERDSGQARMSGFHGFYSIGCVAGAGGVSLLLWAGLMPLQAIFLIVLLIALVVMTASGHLLA

SEQ ID NO: 152876 - protein, 75 aa, Glycine max
  Clone ID: PAT_MRT3847_109070C.1.pep
KHGYGDKKGDYKYGYSEKNGDHKHGYGYKNGDDKYGYGDKKGDDKYGFGEKNSDDKYGFGDKKGDNKPGYGAKYP

SEQ ID NO: 152877 - protein, 332 aa, Glycine max
  Clone ID: PAT_MRT3847_109071C.1.pep
MEQQDMADTTTLSYWLNWRFYLCAVCVLLSIVLSFLVIWKDKGSRKFRSGKGENQEDGTLSGDEAWKPFLKEIHPVCLLAFRVIAFSSLLASLVAKIHINGRAIFFYYTQWTFTLVTIYFGFASTLSAYGCYRHNKSSTINNVNVARIDVEQGPYMPFLHQDTSNLSRMEHLADPLAEIQKNQVAPIWSYILQILFQMNAGAVMLTDCIYWLIIFPFLTLRDYDFNFMTVNMHTLNVVFLLGDAALNCLKIHWFGMSFFVLWTSLYVIFQWTIHAFIWIWWPYPFLDVSLPSSPLWYLLVALLHIPCYGLFKLIVDVKYYFLSKWFPSSCQS

SEQ ID NO: 152878 - protein, 57 aa, Glycine max
  Clone ID: PAT_MRT3847_109072C.1.pep
KFFFIFDSCFIKTLFFIKPCLKPYPPTLFYFNKNPNIACGGISPPCLTRKHFYLGGN

SEQ ID NO: 152879 - protein, 66 aa, Glycine max
  Clone ID: PAT_MRT3847_109073C.1.pep
RTVPLIYGAPLFLFVSIAGGQVRWWSGFLFCCWLLLCAQLSLLCIQELTIPFQHSEKKQIKKNTRY

SEQ ID NO: 152880 - protein, 47 aa, Glycine max
  Clone ID: PAT_MRT3847_109074C.1.pep
HKFDIHELLIAYSEILSRGCFNSSYNADTFNVATLLLNRFKQMNNAV

SEQ ID NO: 152881 - protein, 68 aa, Glycine max
  Clone ID: PAT_MRT3847_109075C.1.pep
EKKKKRFKKKKKKKKEVKKKKGKKNKKVKLFMVLKVPSFYSATFLTTLYCNVIAFLWPTVNNFKCGKF

SEQ ID NO: 152882 - protein, 60 aa, Glycine max
  Clone ID: PAT_MRT3847_109076C.1.pep
MMFNKSNNIYNSLLQKLIFTPLKIHLKYNQVKIKNNKLDSNLKTTLSLRCGKRKEKHTTL

SEQ ID NO: 152883 - protein, 143 aa, Glycine max
  unsure (1)..(143): unsure at all Xaa locations
  Clone ID: PAT_MRT3847_109077C.1.pep
MANEGSNAETLPPAEPHLFENRHVDANQHHPTSYAPTTTGSEAAPWTVHSSTGNGVYSNPTYLYDQHPQPPGRSIQDCQNVSSVAGNSSNLGTANVTQDYNAYASYPSSSNPYGYGSMGFSGYXYNYQQQQPNHTYSQPVGAY

SEQ ID NO: 152884 - protein, 193 aa, Glycine max
  Clone ID: PAT_MRT3847_109078C.1.pep
MVAEREVNGNGVGEGRTTLIFTYGTLKRGFSNHPLLQDLIRSGDASFVGTYRTAAKYPLVCGPYKVPFLLNIPGSGHGVHGELYSVSTRGLERMDELEGTSRAHYERLPIKVVPAAEEEDDDGFDGEEEAAAGLTCAEAYYAHGNYAMELWKKNGKRGLRCYSQKETIGYVKRKDRPQHLTFLDHIRFFLSSN

SEQ ID NO: 152885 - protein, 37 aa, Glycine max
  Clone ID: PAT_MRT3847_109079C.1.pep
RIVFPEHISLRQRYALLGNSLSIAVVAPLLQYLFTQP

SEQ ID NO: 152886 - protein, 92 aa, Glycine max
  unsure (1)..(92): unsure at all Xaa locations
  Clone ID: PAT_MRT3847_10907C.1.pep
NCQLQCSVASLLPLFHSQPAXXFLPLPLCXSSPNPFFYKLNSHSKPFFTIRNXSSSFKVKPSSQIKKIRXEXELDPXLXXLRXLFSKPXVNI

SEQ ID NO: 152887 - protein, 51 aa, Glycine max
  Clone ID: PAT_MRT3847_109080C.1.pep
FLIPVDGVESFYFAHAPSSSGLSIIGNIQQKGIEISVDEANGFVGFGPNVC

SEQ ID NO: 152888 - protein, 84 aa, Glycine max
  Clone ID: PAT_MRT3847_109081C.1.pep
SKQTHLSINYVNHTLRHVLRGKTKYKFENRGKYNLAKPIDKKNYDCISKTVIGTQIQEGKSITQFGSYPLSAAFSELSWYDNHP

SEQ ID NO: 152889 - protein, 58 aa, Glycine max
  Clone ID: PAT_MRT3847_109082C.1.pep
DTSPTLVCLHTVFTGPNVNGQILHTRNYLVWVIVRTPGQLLLMVQHTMTQKVFFPCLV

SEQ ID NO: 152890 - protein, 113 aa, Glycine max
  Clone ID: PAT_MRT3847_109083C.1.pep
NPRGGEKKKNKAPRDRGKPGTTKTQIFQQKRKPEISKKQNSNRKGAPSLEGAKKRSQPPRGKGKIKNFWGRGPKKSSKKLILLGGGGGPGPKRDGPKRGFGAHRGKDLGGGGG

SEQ ID NO: 152891 - protein, 146 aa, Glycine max
  unsure (1)..(146): unsure at all Xaa locations
  Clone ID: PAT_MRT3847_109084C.1.pep
MTLEDFFTLTEMKDGLMAPSRVQELVSVMKKEQDCVAKNAGDTTRQWAAVASTIAATENKDCLDFFIKLDGLGFINKWLKDTLNLGADNTNDGFIEESITAMLRAIEKLYLDSEKSISSGISVTVSNLLGHRSSXVQDRARVLFDR

SEQ ID NO: 152892 - protein, 61 aa, Glycine max
  Clone ID: PAT_MRT3847_109085C.1.pep
KHQHHLILHSIITIAPSFHLSNLDSPAYGKQLPMRYQSYWQPLIFVIFTTQGSDTLNYSYT

SEQ ID NO: 152893 - protein, 211 aa, Glycine max
  Clone ID: PAT_MRT3847_109086C.1.pep
MALRHLRFFPHTLPLTLTPTPNPNNSNRFSFFTPSLSSTTLMATAHKVLVPIADGTEPMEAVITIDVLRRSGADVTVASASDNLAVQALHGVKIIADAPVRDVAATSFDLVALPGGLQGVENLRDCKVLEGLVKKHVEDGRLYAAVCAAPAVVLGPWGLLNGKKATCYPALMEKLAAYAAATSESRVQVDGRVVTSRAPGTTMEFAITLIE

SEQ ID NO: 152894 - protein, 437 aa, Glycine max
  Clone ID: PAT_MRT3847_109087C.1.pep
MALRHLRIFPHTLPLTLTPKPKLNNSNRFSFFTSSLSLSSTTLMATAHKVLVPIADGTEPMEAVIIIDVLRRSGADVTVASSSANLAVQALHGVKIIADASVSDVAATAFDLVALPGGLQGDENLRDCKVLEGFVKKHVEDGRLYAAVCAAPAVVLGPWGLLNGKKATCYPALMEKLAAYVAATSESRVQVDGTVVTSRAPGTTMEFAIALIEQLIGKEKAYEVAGPLVMRSNHDDEHTFKEFNSVQWTSDNPPKILVPIANGSEEMEAVIIIDILRRAKAKVVVASVEDKLEIVASRKVKLEADMLLDEATKLSYDLIVLPGGLGGAQTFANSETLVSLLKKQRESNKYYGAICASPALVLEPHGLLKGKKATAFPVMCDKLSDQSEVENRVVVDGNLITSRGPGTSIEFALAIVEKLFGRKLALELANAVVFARP

SEQ ID NO: 152895 - protein, 72 aa, Glycine max
  unsure (1)..(72): unsure at all Xaa locations
  Clone ID: PAT_MRT3847_109088C.1.pep
SAQLICSVINVSIDVSHLDFNQILPLTVGKHGNTLXQLXSFHLKKXLVDLFRCYHGITSVFDLSSPNFFYWP

SEQ ID NO: 152896 - protein, 99 aa, Glycine max
  unsure (1)..(99): unsure at all Xaa locations
  Clone ID: PAT_MRT3847_109089C.1.pep
RFTPDYEHWKRLMSQSYLESMVIYXSNVRNVIDMKSIYRAFAAALIDFNVWVINVLTIYSPHTSSHYIXRCLFNIYHHSCESFTTYPTTYDLLHAYQSL

SEQ ID NO: 152897 - protein, 49 aa, Glycine max
  Clone ID: PAT_MRT3847_10908C.1.pep
ILSFQVCFCKVYHARNTLSGMSVPITIIDNEKTPKDGVADQTYLVNPPP

SEQ ID NO: 152898 - protein, 85 aa, Glycine max
  Clone ID: PAT_MRT3847_109090C.1.pep
KKKGPISPFLLKKLQFCKFFFQGLNPSIKNGWGIQSKNPKGAKQKSPGEQNLFPCLKGLEGNLFRRGSLFFFFTTTGAWDFKYSL

SEQ ID NO: 152899 - protein, 56 aa, Glycine max
  Clone ID: PAT_MRT3847_109091C.1.pep
TNTSIFPNHYLKMNCIFINHKYKHKRVIPFLVQSDMEHSIEVIHCPNVVTMLFSIS

SEQ ID NO: 152900 - protein, 137 aa, Glycine max
  Clone ID: PAT_MRT3847_109092C.1.pep
QASEVINPHLFKQLEGCKGGFKRGAESRMARKVTFDCVSECLDLRCRRYVGGGYKMWIKGFEMVKKKEWLAENVYKEISDWSGMGDSMVDELVDKDMSSQYRRWLEYEVDAFELGSEVVDQIFNSLVDDVVTEMLQL

SEQ ID NO: 152901 - protein, 74 aa, Glycine max
  unsure (1)..(74): unsure at all Xaa locations
  Clone ID: PAT_MRT3847_109093C.1.pep
QXYXXEXSKXVXXSYRRHVTXNMXXLIIXPXSHMGXTLDGSXVXSXXEIXAXQIFXSDSNHXYTXFLHHWXDIR

SEQ ID NO: 152902 - protein, 55 aa, Glycine max
  Clone ID: PAT_MRT3847_109094C.1.pep
QFLWGVDIGHIRFALVPLLRIAKSPKYHFFLPFLSLLAPTLPPTFLPSCLSFFPF

SEQ ID NO: 152903 - protein, 89 aa, Glycine max
  Clone ID: PAT_MRT3847_109095C.1.pep
ATYKKKKSSNVLTMNHQQHSAVTAYTPRADIILPSPPPPEGYTTDDDLPCQQNVPVKTTTRGGGLWSGRCTALRYGGCYIHCVQGRLSC

SEQ ID NO: 152904 - protein, 80 aa, Glycine max
  unsure (1)..(80): unsure at all Xaa locations
  Clone ID: PAT_MRT3847_109096C.1.pep
MLPINRGSLTIRGIQGALIISSIFHVCMGFLGIWRFVVXXFLNPLSVVPYVTFTGQCLYHLVFPMVKSSTLVSQFFNQIG

SEQ ID NO: 152905 - protein, 272 aa, Glycine max
  Clone ID: PAT_MRT3847_109097C.1.pep
LGSHSTFPSIKKRLDKEIETNVSITVAPSETGEALKVSGRGELQLGVLIENMRREGFEISVSPPEVVFKEENGKKFEPIEEVTIDVDGEYSSAILDKMTGRKAEFVDMKQIAGKTRLQFLCPSRILVGLRNELLTQTRGTAIFNHLFHSYAPYQPGLTISRRGSLISMATGVCTSYSLGMLEARGTLFVEPQTKVYPGMVIGEHSRETDLEVNPTKAKALSNMRTTSKEEQVRLSPIRQFSLEEAIAYVRGDQLLEITPQSIRIRMAPKKVK

SEQ ID NO: 152906 - protein, 85 aa, Glycine max
  unsure (1)..(85): unsure at all Xaa locations
  Clone ID: PAT_MRT3847_109098C.1.pep
FLEFPAVVTVTALVKTYFLGGAMDRGSTIDWKFIKHTGIRIYFEDKAVPTLVGKLNGPTSXELSHTVQLYRDIIQCANEKLITGS

SEQ ID NO: 152907 - protein, 83 aa, Glycine max
  Clone ID: PAT_MRT3847_109099C.1.pep
SYKMTSGSCIGISTMKPCCRILCNYKSPSIFGFSPTKLSDSAIMGMLSRSCRHNSTHRHRYNTCNTQNVGYINGIHPDRRDLV

SEQ ID NO: 152908 - protein, 54 aa, Glycine max
  Clone ID: PAT_MRT3847_10909C.1.pep
KSSSFVLVYFFWYTISSHSAECLIFFCLVAVNIKPQVNQVARCLPCNSIYFIHV

SEQ ID NO: 152909 - protein, 41 aa, Glycine max
  unsure (1)..(41): unsure at all Xaa locations
  Clone ID: PAT_MRT3847_1090C.1.pep
WGRVGXSCDILWXIASLVLXFCSLCSREVAQISXAFRHXGP

SEQ ID NO: 152910 - protein, 74 aa, Glycine max
  unsure (1)..(74): unsure at all Xaa locations
  Clone ID: PAT_MRT3847_109100C.1.pep
TXXXHNQLFTTHLPXPKIXXTERETXRSXXHKTKLTNAEGSTHTKNXPXNAQSXXXKQHXIKRXTQREKXXLYS

SEQ ID NO: 152911 - protein, 45 aa, Glycine max
  Clone ID: PAT_MRT3847_109101C.1.pep
TSIYFFSVFIIRLKRLLALTQMHDTPQRLLTTAQYIHAMAFRNFT

SEQ ID NO: 152912 - protein, 394 aa, Glycine max
  Clone ID: PAT_MRT3847_109102C.1.pep
MLEITTKMPKILLSPTAGGESESPRCHASPVLLEELISNILHRVPVRSLLQFKCVCKSWNSLISDPLFAKDHLCASTADPNMTHQRLLSFTVCDPKIVSFPMHLLLQNPPTPAKPLCSSSLNDSYLILGSCNGLLCLYHIPRCYVALWNPSIRFTSKRLPTGLSPGEGFSTFHGFGYDAVNDKYKLLLAMRVLGETVTKIYTFGADSSCKVIQNLPLDPHPTERLGKFVSGTLNWIAPKMGVSDEKWVICSFDFATETSGQVVLPYGDRDNVCKPVINAVRNCLWVCFFDSRKAHWAVWLMKKYGVQDSWTKLMVIPRFVQENSWPWKLIPHDELCTCRGFPALEPLCISGNGIALFKTTASNIVVYNSNDGRLDFLRIWGDLWSYLESLVSPS

SEQ ID NO: 152913 - protein, 54 aa, Glycine max
  Clone ID: PAT_MRT3847_109103C.1.pep
IISVATAIIIALTCIHNIISTMNMPFYRFLSYLHSPTYIISLLKIDKTSELRHY

SEQ ID NO: 152914 - protein, 58 aa, Glycine max
  Clone ID: PAT_MRT3847_109104C.1.pep
HSSNNVYLDVSMDSETHSDLLLVSSSPLCTCESRHLREAHSDTRALEQSFLSINADTM

SEQ ID NO: 152915 - protein, 64 aa, Glycine max
  unsure (1)..(64): unsure at all Xaa locations
  Clone ID: PAT_MRT3847_109105C.1.pep
PRGKPDHTEITLKDDLPDQDMTDLYKTXGPYCPTGELTTVPFGXAHITTNKDDSEYLLQNQLAG

SEQ ID NO: 152916 - protein, 271 aa, Glycine max
  Clone ID: PAT_MRT3847_109106C.1.pep
MLFPSSSSSFPFLLLPPALLKCFCASTSTQSLPTPSEKWEPFLKKKVVMRVGYVGTDFRGLQMQRDEHRLSTVEKELETAIFTAGGMRDSNFGDLNKVKWGRSSRTDKGVHSLATMIAFKMEIPENAWKGDDYGIVLANRINSYLPNTIRVFSILPSTKRFDPRRECNLRKYSYLLPADIIGIQSHFSQDEIDFHILEFNSILNVFEGEHPFHNYTVRSKYRKKYQVRQSSENDGMPDRIGSSSLASACESESEESDDDDDDDFVSGRPTT

SEQ ID NO: 152917 - protein, 67 aa, Glycine max
  Clone ID: PAT_MRT3847_109107C.1.pep
RCVNEKISTKMFLSNNINTCRIEKIFSIFLWCAVRINSHYLKLNAHIIYSVRQNIINMKIIKHNNTT

SEQ ID NO: 152918 - protein, 47 aa, Glycine max
  unsure (1)..(47): unsure at all Xaa locations
  Clone ID: PAT_MRT3847_109108C.1.pep
KDLSTEGGLDSYSNVCLFLNTQSWLSGLYAPSELAPXLLLLIIERYR

SEQ ID NO: 152919 - protein, 84 aa, Glycine max
  Clone ID: PAT_MRT3847_109109C.1.pep
AAWFETVSAEFFVSLRLYHNGCLPPSFMSMPQYLQCISCWQHVDQFRVILLHTISVLHSFSHSVVQRVLSFRTPERMAAHKEFK

SEQ ID NO: 152920 - protein, 268 aa, Glycine max
  unsure (1)..(268): unsure at all Xaa locations
  Clone ID: PAT_MRT3847_10910C.1.pep
MDPQQRPLMSDRVTVNGSVTPLALLADGRLWWSEGIQRCLSIEKDVLGIVASGPYIKIKSLVETRDGCCITSAPARLVRNDVVFMPSSEESHRLWCHKLREFIDSLGRPKRLLVFVNPFGGKKSATKIFAEQVKPLFEDAHIQITVQETKHQLHAKEVARSLDITKYDGIVCVSGDGILVEVSFIAITLVALFVIIILIVIVMFVGINTSMSSXMSQITLLCYMFKLFIXILTGSKRPLDVATITXGETRFFSILMLAWGNYSHHVLD

SEQ ID NO: 152921 - protein, 115 aa, Glycine max
  unsure (1)..(115): unsure at all Xaa locations
  Clone ID: PAT_MRT3847_109110C.1.pep
AFWRFFSPLLAKFFXGGFKPLPSKPGNRGSSKPDPFFXKTGFVLPPGAIWVPPPLGGGFLFLNGGFFGGNENPIRGGGFFPFRASPGGVSSLWAHFRGLKGLGRVGVFFCPLMPN

SEQ ID NO: 152922 - protein, 376 aa, Glycine max
  unsure (1)..(376): unsure at all Xaa locations
  Clone ID: PAT_MRT3847_109111C.1.pep
LGEEQNETFAPKIVQPTTDISSHMDDENLTTPSSARHKRGCNCKRSMCLKKYCECYQANVGCSSGCRCEGCKNVHGKKEDYVAFGHTSSKERVSSIVEEGSDCTFHNKLEMVASKTVYDLHCLSPITPSLQCSDQGKEDAKSRVISGNYLPSPESDVNMLASCTNYTKSSENLHGSEALLDTNEMLGNTPYDSQIECSDAALLQLTPLPNPEQSGXFIILICXQMSVQRLLTPDSPMDVFASYLAVLFVGVVLPLTPSTRVGEAQYLQCSESDSKLFDILENETPDILKEASTPMTSVKVNSPTQKRVSPPQSCHIGIGSSSSGGLRSGRKFILKAVPTFPSLSPCINSKSNGDEDSCNSPSKSPLKANECPQRES

SEQ ID NO: 152923 - protein, 500 aa, Glycine max
  unsure (1)..(500): unsure at all Xaa locations
  Clone ID: PAT_MRT3847_109112C.1.pep
MATARRSFPPITECNGTTPCESVAADLDGTLLISRSSFPYFMLVAVEAGSLLRGLILLLSLPFVIIAYLFISESLGIQILIFISFSGLKIRDIELVSRAVLPRFYAADVRKESFELFDRCKRKVVVTANPTLMVEPFVKDFLGGDKVLGTEIEVNPKTKKATGFVKKPAVLVGKWKRLAVFEXFGDESPYFVRGERLSVFDFMFICKEGYIVPVSKSAKIDRHWRLMSRMIFHDGRFVQXRPDPLNALITFTWLPFGFILSIIRVYFNLPLPERIVRYTYEMLGINLVIRGHRPPPPSPGTPGNLYVCNHRTALDPIVIAIALGRKVSCVTYSVSKLSRFLSPIPAVALSRDRAADAARIKELLQRGDLVVCPEGTTCREPFLLRFSALFAELSDRIVPVAVNCKQNMFFGTTVRGVKFWDPYFFFMNPRPVYEVTFLDPLPEEMSVKAGGKSSIEVANHVQKVLGDVLGFECTGLTRKDKYMLLGGNDGKVESLYGAKK

SEQ ID NO: 152924 - protein, 95 aa, Glycine max
  Clone ID: PAT_MRT3847_109113C.1.pep
TAYLMRTERLSVEDALESLRQSCEFVCPNDGFLEQLKMFEGMGFKVDHSSPIYKRFRLKLLCMASSHRLFCCRGLVVHLIILLSFMVLWHIIERQ

SEQ ID NO: 152925 - protein, 62 aa, Glycine max
  Clone ID: PAT_MRT3847_109114C.1.pep
YENNTLKFGGCKIYIILQRCYFGFQVGVFSIYQGTTHQCTRCQALAPNQGLSFFPHIIKCLT

SEQ ID NO: 152926 - protein, 55 aa, Glycine max
  Clone ID: PAT_MRT3847_109115C.1.pep
IGYSVLKLGSSQRVVFVFCTHVCRCNRILYRSFHVFLNLYKVSIHSRKLLYQCDI

SEQ ID NO: 152927 - protein, 101 aa, Glycine max
  Clone ID: PAT_MRT3847_109116C.1.pep
ANLFCCHVFVATVFFFNVCVFCSSCPRCQITLLSPNRVGLIPLLPPLIPTRTSSRCLSCIISSRSNPHSHLHDVGCRAPPPPPPPKHGGTPTHLQVHKKSQ

SEQ ID NO: 152928 - protein, 66 aa, Glycine max
  Clone ID: PAT_MRT3847_109117C.1.pep
ASNTNSIIMMMMAWRYEKIEGFADNDSLYRVTLGPNPIRYEKFLVSILKFFRWGEIFCYFTLTEQF

SEQ ID NO: 152929 - protein, 48 aa, Glycine max
  unsure (1)..(48): unsure at all Xaa locations
  Clone ID: PAT_MRT3847_109118C.1.pep
KXNKSNNDYDIFVIIYKTIFSQSTIDITLKMLCSMVGVLCFIILIYLF

SEQ ID NO: 152930 - protein, 64 aa, Glycine max
  Clone ID: PAT_MRT3847_109119C.1.pep
KKVYIGKCKLVAIKLLHKHGDVARQLKRRENLKYMMTNSKSFLIKGFFYGKYIKEIKFNIYSFL

SEQ ID NO: 152931 - protein, 56 aa, Glycine max
  unsure (1)..(56): unsure at all Xaa locations
  Clone ID: PAT_MRT3847_10911C.1.pep
SXLXFXSXXDXSXSRSXXTPARLCLPXXKDLXKPSNSCXIXXACFCXSRQVXXQLI

SEQ ID NO: 152932 - protein, 62 aa, Glycine max
  Clone ID: PAT_MRT3847_109120C.1.pep
KFRHRISYKKFSVIIHKRITFGFFLTHPSHPSPGIECEFRSNSTPKISLRGEGCPSLDFIFS

SEQ ID NO: 152933 - protein, 87 aa, Glycine max
  Clone ID: PAT_MRT3847_109121C.1.pep
HLLVKPSYKQYEPRLIYELEDYIHENTILEAKNNLFNFYKVLFLSFFHYIMLKDNDYKYSFVQHYFEKRFDKGKEAIRAIDTLQKFK

SEQ ID NO: 152934 - protein, 38 aa, Glycine max
  unsure (1)..(38): unsure at all Xaa locations
  Clone ID: PAT_MRT3847_109122C.1.pep
AYEKERFXESKKELDGLLSDESLESVPFLVLGKKIDIP

SEQ ID NO: 152935 - protein, 66 aa, Glycine max
  unsure (1)..(66): unsure at all Xaa locations
  Clone ID: PAT_MRT3847_109123C.1.pep
CSAFRATGLCAMSPSQRMPFVRRMGRVLLLTLCRAGFETSATTYIAGAEIMLLCNXQVSNEVVYTT

SEQ ID NO: 152936 - protein, 49 aa, Glycine max
  Clone ID: PAT_MRT3847_109124C.1.pep
VCTKTITWKYKVGQVVEREFKGEGKRERRKVVSLNLPLTFINKTSSKKI

SEQ ID NO: 152937 - protein, 54 aa, Glycine max
  Clone ID: PAT_MRT3847_109125C.1.pep
KKGGKTPSPPKKKLIGCGEFKKPNPKIFKRGQKKLNPMGEPALEKKKKLTRAKF

SEQ ID NO: 152938 - protein, 63 aa, Glycine max
  unsure (1)..(63): unsure at all Xaa locations
  Clone ID: PAT_MRT3847_109126C.1.pep
MGXAPCCDKSNVKRGPWSPDEDATLKNYXEKHGTGGNWIALPKKAGLKRCGKSCRLRWLNYLR

SEQ ID NO: 152939 - protein, 71 aa, Glycine max
  Clone ID: PAT_MRT3847_109127C.1.pep
PIKRAFPMIQVMKLEGTITFFQSLMNKSMRLLNIISSKERAKDYGGKEGPPEISCKASDVPKVKNWEGKLT

SEQ ID NO: 152940 - protein, 62 aa, Glycine max
  Clone ID: PAT_MRT3847_109128C.1.pep
RGGVLFFLKCPVVRLIRDWRKDGNRGILLGNCHSNTNPHMKLFGKMDGRAKGGIWEHKLKSI

SEQ ID NO: 152941 - protein, 70 aa, Glycine max
  Clone ID: PAT_MRT3847_109129C.1.pep
GPLSPVDTTRPTRPTRPLGYFLCMQLKARNERVTINAVHPGIVKTGIIRAHKGLITDSLFFIASKLLKTT

SEQ ID NO: 152942 - protein, 71 aa, Glycine max
  Clone ID: PAT_MRT3847_10912C.1.pep
ISCMSGEERENTGPHAGKKNGHPRGDYKRRPGGLKKKPLRKREAKGPIEGPEKVRNAKAGKKAGATAENNK

SEQ ID NO: 152943 - protein, 71 aa, Glycine max
  Clone ID: PAT_MRT3847_109130C.1.pep
RLRERRQKEKKKKDHGHEHGHDSSCSSGSDYTAASPIHLKGLWDHSSEGCALISLSALCLLFSLSLARVSP

SEQ ID NO: 152944 - protein, 69 aa, Glycine max
  Clone ID: PAT_MRT3847_109131C.1.pep
YMGHAMYMLSAHTTIYGTRSKIIHVVNISVACQILFIKVAVRPVSKLWPFMNTCVGASHQQVSENSIDS

SEQ ID NO: 152945 - protein, 47 aa, Glycine max
  Clone ID: PAT_MRT3847_109132C.1.pep
RLEGTPLSIRLWPNNALYSNPQITLFYEATHANLKRLYNRPNQKMYK

SEQ ID NO: 152946 - protein, 44 aa, Glycine max
  Clone ID: PAT_MRT3847_109133C.1.pep
DPPYLLQTLWYDVRCVSAFTCKNYNRGVASRCNCASTQGAREPL

SEQ ID NO: 152947 - protein, 70 aa, Glycine max
  unsure (1)..(70): unsure at all Xaa locations
  Clone ID: PAT_MRT3847_109134C.1.pep
RSYCVLNPQNRGVSNRWMGXLTFPQGTLRSVQRMPLSIGGGAVANTAIFMNMPSAALSKWGFLAGDFSLV

SEQ ID NO: 152948 - protein, 95 aa, Glycine max
  Clone ID: PAT_MRT3847_109135C.1.pep
KVLAKTHRTGIWSRSACSHCNNNGTKASTSKKSGESDSPLKAQPSHQKGHGTVGEIVSHAFSSSVKEQYNKGLINSSGYTTGSLNNSIVFIDCNF

SEQ ID NO: 152949 - protein, 59 aa, Glycine max
  Clone ID: PAT_MRT3847_109136C.1.pep
YRNLIKAEDLMTHLYIQSIIPTNGMDETLAECCTASSGLRLYTRCSQAFPSHCIKRQCS

SEQ ID NO: 152950 - protein, 59 aa, Glycine max
  Clone ID: PAT_MRT3847_109137C.1.pep
EDEEFPYSNQRYNETLISSKEALPSPLCMWTIEISPLETCAGNQKIKLCHKIVVRKNSD

SEQ ID NO: 152951 - protein, 146 aa, Glycine max
  Clone ID: PAT_MRT3847_109138C.1.pep
MILKRLLLLLKPLSVSSPPSHINPQILQFLENRRKVHHDAINFCQAILQKKSIEWKAVHRNNLSQPINDVDLVVTVGGDGTLLQASHLMDDKIPVLGVNSDPTQIDEVEEFGSEFDAHRSTGHLCAATVENFEQVRLILFCLWRKY

SEQ ID NO: 152952 - protein, 87 aa, Glycine max
  unsure (1)..(87): unsure at all Xaa locations
  Clone ID: PAT_MRT3847_109139C.1.pep
YTSRKKIHKDXDAEPSEFEEPVGQAXSDLENSNNELXRDLXDLYINSTVQIDVXGIRKAVIIHVRYRLWIRFRKIHVKLVRNPVYIV

SEQ ID NO: 152953 - protein, 71 aa, Glycine max
  Clone ID: PAT_MRT3847_10913C.1.pep
MASRRLGSSLIRASLRRSQSKPSNAAWTWRLTSSNRASPHGYLLNRVGEYATAGVAATAPPSARDPEKKET

SEQ ID NO: 152954 - protein, 56 aa, Glycine max
  Clone ID: PAT_MRT3847_109140C.1.pep
MPFFFFFCLDFCFYFHLLFFLLFCSLKPALFHAQRLSLINKRRLCKPKLKPPIKKS

SEQ ID NO: 152955 - protein, 143 aa, Glycine max
  unsure (1)..(143): unsure at all Xaa locations
  Clone ID: PAT_MRT3847_109141C.1.pep
ENLNLRVPAGKSLAVVGQSGSGKSTVISLVMRFYDPDSGLVLVDECDIKNLNLRSLRLRIGLVQQEPALFSTTVYENIKYGKEEASEIEVMKAAKAANAHEFISRMPEGYKTEVGERGVQXSGGQKQRVAIARAILKDPSILL

SEQ ID NO: 152956 - protein, 510 aa, Glycine max
  Clone ID: PAT_MRT3847_109142C.1.pep
MFGSSGMAQESGMFMVNQTIGSVLCCKCGIPMQPNAANMCVKCLRSEVDITEGLLKRLVLVHCPECESYLQPPRSWVKLQLESKELLTFCLKKLQKNLNSNKVRLVHAEFIWTEPHSRRVKVKVKVQKEVLNGAILEQSYPVEYVQQEHMCESCSRVQANPDQWVASVQLRQHVSHRRTFFYLEQLILKHGAAATAIRIKQMEQGIDFFFSNRSHGVKFVEFIGKVSPVRSRHDKQLVSHDPKSNNYNYKYTFSVEISPICREDLICLPPRVAVSLGNIGPLVICTKVTNSIALLDPFTLRHCFIDADQYWRTSFKSLLTSRQLVEYIVLDVETVSSEVTIGGTKYRLADAQVARVSDFGKNDTIFNIKTHLGHLLNPGDYALGYDLYGANSNDMELDKYKGHIPEAILIKKSYEEKHQKKRGKPRSWKLKSLEMEVDDKGRVDEDKMVSEYEQFIQDLEENPEMRFNISLYRNKEYKPSDGDESSVPLEELLADLDLSEHEDEEDNMTE

SEQ ID NO: 152957 - protein, 174 aa, Glycine max
  Clone ID: PAT_MRT3847_109143C.1.pep
MILTKKPKWVNTSHFNKLLVEPLAIAEYYGKGMHRTKGPYMQHGRERRYEIFDRWWKDKTVTSGREETKERGQFASLTQDSCFWARVEEARDWFNCVRSEKAPNKLALLWDKIENFEKYAIDLIENKEVSGDVLFKNSSYSIWVEDLRELKQLKAKVQRFPRQFTGFLDGEVVP

SEQ ID NO: 152958 - protein, 259 aa, Glycine max
  unsure (1)..(259): unsure at all Xaa locations
  Clone ID: PAT_MRT3847_109144C.1.pep
EAMKQPFSQSEVKCLMIQLLEGVKYLHDNWVLHRDLKTSNLLLNNRGELKICDFGLARQYGSPLKPYTHLVVTLWYRAPELLLGAKQYSTAIDMWSLGCIMAELLSKEPLFNGRTEFDQLDKIFRILGTPNETIXXPGFSKLPGVKXVNFVKHQYNLLRKKFPATSFTGSPVLSDSGFDXLNKLLTYDPEKRITAEDALNHEGFREVPLPKSKEFMPTFPAQXAQDRRVRRIYKSPDPLKEQRRKELQQGEPGTGGIFG

SEQ ID NO: 152959 - protein, 89 aa, Glycine max
  unsure (1)..(89): unsure at all Xaa locations
  Clone ID: PAT_MRT3847_109145C.1.pep
SQYEKGYLPSTGVLILPRGLDFIVRTTAATESVIVTLRWADLRSPTSVEILYPEYGTQEATMXHTSLASILGCLLLLLTMHMIGWTRCY

SEQ ID NO: 152960 - protein, 94 aa, Glycine max
  Clone ID: PAT_MRT3847_109146C.1.pep
YAVPMIAIDNDDGFSYTAIRGPTIDLLYPNAQALNQISTNFIAILVLESINLICHTRYNVLKIMIELNDSPDVMLQMPPLPVKVNEELASSLLA

SEQ ID NO: 152961 - protein, 91 aa, Glycine max
  Clone ID: PAT_MRT3847_109147C.1.pep
KLERNQCLCVSHILLRFRFEREEEGKKKKKKKKKKKKGRTIYKIQSTAIGRGGWYLGTRLTNWYIKSIAHSLSYIDKLNRPGVEPMRLAKP

SEQ ID NO: 152962 - protein, 171 aa, Glycine max
  Clone ID: PAT_MRT3847_109148C.1.pep
NPITRVVRYAKRILQISLLRFAVLTLRSRGRNRFKLLRNRGLLPLLRRRMSAHAFTPQRWYSPTMQLYGPLSVVYFSPSVAVPSIRLICTPHFLSGLFALVSNASSYLSSVTSNIATFICPIKLLSLPLPSYTPFPCKLFYLVCRALLSLFAIFVPPPPPKQEVLHTCSTV

SEQ ID NO: 152963 - protein, 160 aa, Glycine max
  Clone ID: PAT_MRT3847_109149C.1.pep
LVQLDGVNNSSTNEDGTRKIVMVLAATNFPWDIDEALRRRLEKRIYIPLPNFESRKELIRINLRTVEVSPDVNIDEVARRTEGYSGDDLTNVCRDASLNGMRRKIAGKTRDEIKNMSKDEISKDPVAMCDFEAALKKVQPSVSQADIERHEKWYAEFGSA

SEQ ID NO: 152964 - protein, 158 aa, Glycine max
  unsure (1)..(158): unsure at all Xaa locations
  Clone ID: PAT_MRT3847_10914C.1.pep
MDTEEGAHGKGTQVVSLIEKATNSTAPEVDPRLLKAIKTVVRYSDSELRLATQTLMDLMKRDHSQVRYLALLIIDELFMRSKLFRTLVVENLDQLLSLSVGFRRNLPLPAPPAFASVLRSKAIEILEKWNVTFGLHYRQLRLGXDYLKNTLRLQFLTY

SEQ ID NO: 152965 - protein, 137 aa, Glycine max
  Clone ID: PAT_MRT3847_109150C.1.pep
MARPLLTSSMHNLLFSSMPIPTLFLAILSVLCLFSIITFLCGSDKLKKLHLEAEKEAAIKTNSKEHKLISKLNSNIGNRALSMVKMLSWRKVQEGEVEGEYSDQDEEALWRKNILMGEKCRPLSFSGKIENDSEEKN

SEQ ID NO: 152966 - protein, 62 aa, Glycine max
  Clone ID: PAT_MRT3847_109151C.1.pep
SLGVTMGSATQISMFVVPLSVFVAWIMGIRMDSDFNLLETRCLSFTIIITMFTLQVCTMPSI

SEQ ID NO: 152967 - protein, 48 aa, Glycine max
  Clone ID: PAT_MRT3847_109152C.1.pep
ECFGSGLIIACAYQPWTPLMIYLKTNCKEESSLIEELLLHECVGGPMG

SEQ ID NO: 152968 - protein, 68 aa, Glycine max
  Clone ID: PAT_MRT3847_109153C.1.pep
PIDTLKQTICTLKMHISILITMLKALHRMGPVDNCQRPRDMYAAIAIVYWSKEVGAVMMLTRCGITRL

SEQ ID NO: 152969 - protein, 78 aa, Glycine max
  Clone ID: PAT_MRT3847_109154C.1.pep
WLWIISSQRHCCYSQDSARLEMSTEASYLFCRLLWKSLSDLSCLKNDVSLCFGLRLFSGQYLLGSHAREPHNRAIYPM

SEQ ID NO: 152970 - protein, 45 aa, Glycine max
  Clone ID: PAT_MRT3847_109155C.1.pep
SHGGQRVSNSKTKARAHHGFTELNTCESELYASTCIAPQEIPKRH

SEQ ID NO: 152971 - protein, 77 aa, Glycine max
  Clone ID: PAT_MRT3847_109157C.1.pep
IQISEQQIGTAATATATTMQTQTQTQTQTPVSVSHRVRSVCFSCVCLKYGDFRTRLPAPNLRPCLDCAFALAFSNSR

SEQ ID NO: 152972 - protein, 86 aa, Glycine max
  Clone ID: PAT_MRT3847_109158C.1.pep
EEGEGARRRGEGSETATTREAALQERDLAAKEVDRLRKVVRRQKKDLRARMLEVSREEAERKRMLDERANYRHKQVMLEAYDRQCD

SEQ ID NO: 152973 - protein, 205 aa, Glycine max
  Clone ID: PAT_MRT3847_109159C.1.pep
MGSENKEAAGGELNNSSPSPSSSHAWKSRIVIPTLLAGVAGAGAGLISKHRRTLGLATVCSNYAVNFTIVTGCYCGAREFVAATRKTGPDDILNSAVAGFGTGALLGRLQGGQLGAIRYSVMFAVVGTTADFAILKLKDALRDHTKTIYQHIENSKKSGTWLKLPEWFPIQVLDEEAMTEKRAHDEKVLQQRARIRSLREKYGTG

SEQ ID NO: 152974 - protein, 94 aa, Glycine max
  Clone ID: PAT_MRT3847_10915C.1.pep
MRFSTLVPLLLAAGVANAQFGGQGGGQGQNNGQNGQNGGNNGQNNGQNNGQNGGNNGGNNGGNNGGNNGGNGGWFGPQCRCRSEGQSIRRIRPG

SEQ ID NO: 152975 - protein, 44 aa, Glycine max
  Clone ID: PAT_MRT3847_109160C.1.pep
FSPLFVFYMDMYVIKVTVQTHSHTITFITYISIWNINVIVCECF

SEQ ID NO: 152976 - protein, 157 aa, Glycine max
  unsure (1)..(157): unsure at all Xaa locations
  Clone ID: PAT_MRT3847_109161C.1.pep
PXXXXAYXXXLSKILEFLDTXXIVLSRSFGRXXFLHXXHHATVLLMCYLXLQTSQSLFPVALLTNASVHVIMYGYYFLSALGIRPSWKRAVTDCQIIQFVFSFAISGLMLHYHFSGSGCSGIWGWCFNAVFNASLLALFVDFHLKSYAKKRTLNKDS

SEQ ID NO: 152977 - protein, 44 aa, Glycine max
  Clone ID: PAT_MRT3847_109162C.1.pep
MAPFHRHVLSFFFFFFFFFFFFFFFFFFFFFFFLVAKYDFPDAW

SEQ ID NO: 152978 - protein, 123 aa, Glycine max
  unsure (1)..(123): unsure at all Xaa locations
  Clone ID: PAT_MRT3847_109163C.1.pep
YVLFTXWSQRSLAPHGSFSCFTIKISAEFIWISTLLRFCTSMVAATTKVLRDSCWCKGDRGNILGFNLPRIFRGSSLSSRICLNSCLPXICNCILYVHVLFTTILWLIDNNVILDTIPSPNAT

SEQ ID NO: 152979 - protein, 57 aa, Glycine max
  Clone ID: PAT_MRT3847_109164C.1.pep
FVGVIKTGKDNYLMGCSSLSPIKDKTKFKNKYNPFCSAASYHVHRNPYTSMSIEIVK

SEQ ID NO: 152980 - protein, 113 aa, Glycine max
  Clone ID: PAT_MRT3847_109165C.1.pep
MKVIAAYLLAVLGGNAAPSADDLRTILGSVGADANDDNISNFLSEVKGKDIAELIAAGREKLASVPSGGGAAVSVAAAPGGGAAAPAAAESKKEEKVEEKEESDDDMGFSLFD

SEQ ID NO: 152981 - protein, 145 aa, Glycine max
  unsure (1)..(145): unsure at all Xaa locations
  Clone ID: PAT_MRT3847_109166C.1.pep
GKGTVRRKKKAVHKTTTTDDKRLQSTLKRIGVNAIPAIEEVNIFKDDVVIQFLNPKVQASIAANTWVVSGSPANKEVAGYTXSIIHQLGPDNLENLKKLAEQFQKQAPEGAAGSTTAQEENDDDVPELVPGQDFETAAEETKAAS

SEQ ID NO: 152982 - protein, 96 aa, Glycine max
  unsure (1)..(96): unsure at all Xaa locations
  Clone ID: PAT_MRT3847_109167C.1.pep
QIHFEKRTQIYRETLKDLVYINSNLKXDSQMSAKSSEVGSLQFHEIGMPSEWVEENVNXSPTQWLDRFGPPLEANYLNTRQQGSSKCGAKDPIFEA

SEQ ID NO: 152983 - protein, 56 aa, Glycine max
  unsure (1)..(56): unsure at all Xaa locations
  Clone ID: PAT_MRT3847_109168C.1.pep
DPIXXXSXTXXLXXVLCTXXXSVVSXECXXXRXEKEXXRXXXXAXFXAXXRXLXXX

SEQ ID NO: 152984 - protein, 97 aa, Glycine max
  Clone ID: PAT_MRT3847_109169C.1.pep
PTDVTLVSLLFEYGMRKGLLYQNLTLFLLKALHYSWIFFTKSHSRGRVFLVLTNTMVITFLGRKIIWLGIFRGRGDIHPHRLQGILKDHFDLKMLYW

SEQ ID NO: 152985 - protein, 109 aa, Glycine max
  Clone ID: PAT_MRT3847_10916C.1.pep
MCLHGRAQMIPPIVKSNQLRPGRRVIRRRANASSPSSPSAGAIDACTESSHPKSDYVLNHDDDEHLKLHSRLSYAYMSNVSSNVIAKTPRLNLRYLHRNSLTRISLYIA

SEQ ID NO: 152986 - protein, 54 aa, Glycine max
  Clone ID: PAT_MRT3847_109170C.1.pep
ILQNFIFYKYTLNTTQLSYIYPSKTYSVLYKPLFLYLYQNIFFKKDTNFFIDHN

SEQ ID NO: 152987 - protein, 198 aa, Glycine max
  Clone ID: PAT_MRT3847_109171C.1.pep
WRPRPPSIFFFFFFFFFFFAHTRARAPYVCMHAFFRTHAHTHLSVFRSSLPLPACMHAYIYISRARPSVARTHALTHSVLPLVRNIHTSLFLPPLPPHPVIDRSLCMDLSICFSLAPTHSLARSLYTNKRRGGGVCVCLSLSPSVRPSVFVFLSYLFVCPRPAVYVCPFIQLVCVWLVGRSVCQRERERERERERESW

SEQ ID NO: 152988 - protein, 106 aa, Glycine max
  unsure (1)..(106): unsure at all Xaa locations
  Clone ID: PAT_MRT3847_109172C.1.pep
MISGQQVSVAHDAPPASTPGERMDIMTALQLALRKSMAYGRLARGLHESAKVIEKYALQLFVLSQDCDQPDYVKLVKALXHSSILAFXTVISAKTLGEYAHLCQID

SEQ ID NO: 152989 - protein, 78 aa, Glycine max
  Clone ID: PAT_MRT3847_109173C.1.pep
RSVMRKHSKGIKSKMSHLHVVKVFSVKNCKFHSPLCNQRYLIFPSIPFAIRSPFPVLLRAMEGIVKLIPNPFATACSN

SEQ ID NO: 152990 - protein, 77 aa, Glycine max
  Clone ID: PAT_MRT3847_109174C.1.pep
LTQKGICFLDHQSANDYPWPNRAWKNLQVLGSIHGVSTSPSAHIFPCDAFAENRGKQHRCIMRLWKCNPPGRERAHL

SEQ ID NO: 152991 - protein, 125 aa, Glycine max
  unsure (1)..(125): unsure at all Xaa locations
  Clone ID: PAT_MRT3847_109175C.1.pep
QLYLLVFVVNHGGHGVGGGSDKQSPYSVLSVWLGSVGTLCEQQLNALTDGSESSIKXSWASTAPSDSSCGAHDLGYKDDPLKWXPHGFLDRSRXPGFFATAWAPHTQMVLHVXCGGCLTHCGRNG

SEQ ID NO: 152992 - protein, 85 aa, Glycine max
  Clone ID: PAT_MRT3847_109176C.1.pep
GTTLHLLVEALGLLLLLHRRRRRGLTLALRRCNRNRRFHKIQVKTGTWLILLILLLALAPLSIPPSRHSNDVKNGRKGTHPPKQQ

SEQ ID NO: 152993 - protein, 52 aa, Glycine max
  Clone ID: PAT_MRT3847_109177C.1.pep
QNLNYYELPKAYTFERLRSNSLIYGSLLHKDTNPITGLEFCFHSKQTAHIIT

SEQ ID NO: 152994 - protein, 68 aa, Glycine max
  unsure (1)..(68): unsure at all Xaa locations
  Clone ID: PAT_MRT3847_109178C.1.pep
XHKHTNEKKLTXIXSLQTIKAMAFLLPNLQASLLAQSKSNKDKXNLHQTLXXQKXTSXFPXSXXTXSS

SEQ ID NO: 152995 - protein, 40 aa, Glycine max
  Clone ID: PAT_MRT3847_109179C.1.pep
FKVLVMMMNKGGVSPFPTRSIPQTDKLHIPILSFPRGTCS

SEQ ID NO: 152996 - protein, 143 aa, Glycine max
  unsure (1)..(143): unsure at all Xaa locations
  Clone ID: PAT_MRT3847_10917C.1.pep
MDTEEGAHGKGTQVVSLIEKATNSTAPEVDPRLLKAIKTVVRYSDSELRLATQTLMDLMKRDHSQITTVRYLALLIIDELFMRSKLFRALVVENLDQLLSLSVGFRRNLPLPAPPAVASVLRSKAIEXLEKWNVTFGLHYRQL

SEQ ID NO: 152997 - protein, 107 aa, Glycine max
  Clone ID: PAT_MRT3847_109180C.1.pep
IRSIKLEICARSVPLGIKQKAGNSFYSALLSHSNAHNATNSDGWCAITRVSPFSPVIIILVSDNEIHHPLMINVLVSTSGSTRPHFPILRANTGAIRISVSLYRTSG

SEQ ID NO: 152998 - protein, 107 aa, Glycine max
  Clone ID: PAT_MRT3847_109181C.1.pep
RQVTLSIQVHITSNPTPSRVIEFLTIQQPLRIQIGLRRKHLVREKGSLQKDHLLKNWVIPSKASLSPEGPILEEALEKVPNILAEVKPSNVGLEQKAQLVRGRKRSL

SEQ ID NO: 152999 - protein, 128 aa, Glycine max
  Clone ID: PAT_MRT3847_109182C.1.pep
MVELVSALSVHAHGKLICNSLCTIAGMLLEAPSLYKEAFVSFSVSLSIEPDYIPGIISTAELLMKLGMQSLPIARSFLMNALRLEPTNHDAWFNLGLVSKMEGSLQQAAEFFQAAYELKLSAPVQEFK

SEQ ID NO: 153000 - protein, 69 aa, Glycine max
  Clone ID: PAT_MRT3847_109183C.1.pep
CPHNGKDWCSKKRNNRNPRCSIPWKSTAINESWLKGSFLSVKKYVTWSVWNIYAGFHLNSVKTVSRGSF

SEQ ID NO: 153001 - protein, 349 aa, Glycine max
  Clone ID: PAT_MRT3847_109184C.1.pep
MGNIGSSGSNSRWRHGGGGGSGRRIHPPPPPVMSPPEVTANRFVYPPAATPYHNYPGYYPPPTTMPAPLPAPYDHHHRPAVDPMWVRYPPAAPPAPAPYVEHQKAVTIKNDVNIKKETLRIEPDDENPGCFLVSFTFDATVSGSITILFFAKEGEGCTLTPMKENVLPPVTVNFQQGLGQKFKQPAGTGIDFSTFEESELLKVGDMDVYPVAIKADASSSDHDESKSNETPSSGSSNSQITQAVFEKEKGEFQVKVVKQILWVNGMRYELQEIYGIGNSVESDVDGNDPGKECVICLSEPRDTTVLPCRHMCMCSGCAKVLRFQTNRCPICRQPVERLLEIKVGPEPEE

SEQ ID NO: 153002 - protein, 111 aa, Glycine max
  unsure (1)..(111): unsure at all Xaa locations
  Clone ID: PAT_MRT3847_109185C.1.pep
KTTKRVRFQNSTQRLRFPNNTRRVPFQKNPTRVRLQKYNKRVRLQKDTKRYGFKKTTQGYGSQNTIIRLLLSXKTTSXGXACEDIPSDWDCAQFILSFHYIRTTHFTPSFT

SEQ ID NO: 153003 - protein, 39 aa, Glycine max
  Clone ID: PAT_MRT3847_109186C.1.pep
PPLFSESPLSSIGQHTLNDQAMESLIPSCFCVRRWATVG

SEQ ID NO: 153004 - protein, 47 aa, Glycine max
  Clone ID: PAT_MRT3847_109187C.1.pep
IEFSKGGFKRVGVSGFLGPSDGDVYDRHLFQLTPMTMMRSSEQKSIN

SEQ ID NO: 153005 - protein, 64 aa, Glycine max
  unsure (1)..(64): unsure at all Xaa locations
  Clone ID: PAT_MRT3847_109188C.1.pep
PPPHQHPPKGPNTNTRHTPAXPQLRDQAHXPRHTARGTLNLSPCLHWCLPGIPDTWNELLVAQI

SEQ ID NO: 153006 - protein, 75 aa, Glycine max
  unsure (1)..(75): unsure at all Xaa locations
  Clone ID: PAT_MRT3847_109189C.1.pep
DSFLGCCRVYARNFQPFEVVWGFSLLKFMGMYPFCFFYLYLFISMFLTGLIGPVWVYVISPFLXVCFCLSKKKSL

SEQ ID NO: 153007 - protein, 141 aa, Glycine max
  Clone ID: PAT_MRT3847_10918C.1.pep
MGTPRDFENGDYEYYKENQGITKSYYLIIFISSLLISIIGGSMLGWWLHKYHPTNRQLWMVPFGLILLLTPVLVWLSLIISDLCISKKEEEDVLKTNQQRIHPLDESLCAPKRRLLGCVRTRCCYVRVEINHPPLFLILTC

SEQ ID NO: 153008 - protein, 56 aa, Glycine max
  Clone ID: PAT_MRT3847_109190C.1.pep
ETSGQAGLPAEFKHINKRRKKKKSGRSKGAAVTIGSNLTYSCLQRVTYFIVTAKCN

SEQ ID NO: 153009 - protein, 356 aa, Glycine max
  unsure (1)..(356): unsure at all Xaa locations
  Clone ID: PAT_MRT3847_109191C.1.pep
MARYGEGDKRWIVEDRPDGTNVHNWHWSETNCLDWSKTFFTSLLTNLPILDGEGNLFLKTTSLRSLDGEAYINVRKGKIIPGYEISLTLNWQGEAKDSLGTSLLKVDGTVEIPYISDENADEDPEVRVTVNDEGPVGMRIKDAMLSKGKPLILEKVRVWVQSMAKGGPVKEELEPKKVAPSSFSPSPAXTTQTTTPTTMKTTAAAPKKEEKKEKVKKGRKSISMTERFNCRAKDLFEILMDENRWKGFTQSNARISKEVGGEFSIFDGSVTGTNLELQEGKLIVQRWRFGSWNDGVQSTVRLEFEEPESGVTVVKLTHTDVPEEDRYGNATVVENTERGWRDLIFQRIRAVFGFGI

SEQ ID NO: 153010 - protein, 59 aa, Glycine max
  Clone ID: PAT_MRT3847_109192C.1.pep
LIIHLLHCSEDRYLRDCGEPPRADYRVVSDQAMESEHMTKLHSGITLRRPIQRIWVGPL

SEQ ID NO: 153011 - protein, 80 aa, Glycine max
  Clone ID: PAT_MRT3847_109193C.1.pep
KDDKGKAPSTTALKDLKHPSKIEADEDKKSSEGNDPTMELYATERSGRGWLVPHTDRPMTKTVGRATLEALIRVLADAYD

SEQ ID NO: 153012 - protein, 63 aa, Glycine max
  Clone ID: PAT_MRT3847_109194C.1.pep
QPRVHAPQSHSSHVRLLSQQQAKLVITYPSPPRDNAVAPKRAPHTNIPSTGMNSHLTDHPIVG

SEQ ID NO: 153013 - protein, 164 aa, Glycine max
  Clone ID: PAT_MRT3847_109195C.1.pep
SPTRPGKRVGFSCKAGPHGRSTADGANMFREFLCGREDSKRKPPESCNAMIRIEQNGQNKWVVTKFIKEHSHSMASVSKVHNIRPRKPFSSVGRTMPETYQGVGLVPSGMMYVSMDKNCIPTKNIQGIKNIPTAVAVAETYQPVKSPTMMNYAVRPATRKRTLG

SEQ ID NO: 153014 - protein, 59 aa, Glycine max
  Clone ID: PAT_MRT3847_109196C.1.pep
NYWKKGSIFLWFCCCLRMGGNSSFRDEYTFGMFSQLLLSPIFFFITTIIKGLLSYLRLD

SEQ ID NO: 153015 - protein, 60 aa, Glycine max
  Clone ID: PAT_MRT3847_109197C.1.pep
CSRITCILTSSYKTVAWVYRSPSLPPRAPLLSFFFASAKLLLWVRFYTPFHLGCSLVAPC

SEQ ID NO: 153016 - protein, 57 aa, Glycine max
  Clone ID: PAT_MRT3847_109198C.1.pep
GAKAQIPKGNSYMLQKEIFTLWAPLTSRDFEKRDTHLGTQKQQFPPISFIHWIKGAN

SEQ ID NO: 153017 - protein, 146 aa, Glycine max
  unsure (1)..(146): unsure at all Xaa locations
  Clone ID: PAT_MRT3847_109199C.1.pep
CLTSNHQATAMHEGSLKTVTDSTARPDCNIDGPMLADDAYHTNPASAARTILVAPHRGRRPTGVDALANAIMHIEPDRTEWHKLVSTTTNGAYDTGKELAMPKVNVARAAXGMTTRYTPSPYAESGLQPDIRSMVEYLRRTTNVAH

SEQ ID NO: 153018 - protein, 55 aa, Glycine max
  Clone ID: PAT_MRT3847_10919C.1.pep
VVTLKNLGKPSLCPMKAKIILSQKLLDLMKPLQAMCLHLKNRKIDDGSQEASLLQ

SEQ ID NO: 153019 - protein, 110 aa, Glycine max
  Clone ID: PAT_MRT3847_1091C.1.pep
RCDVYSFGVILWELSTMQQPWGGMNPMQVVGAVGFQHRRLDIPDDMDPTIADIIRKCWQTDPNLRPTFAEILAALKPLQKSVIGSQVPRPSVSGKHEKGQSLHVVEDSAR

SEQ ID NO: 153020 - protein, 55 aa, Glycine max
  Clone ID: PAT_MRT3847_109200C.1.pep
GPEKTQQLGLLFFCRPTAPKADKLKKADPKAQALKTAKAAKPGAYFKKKTKMIRT

SEQ ID NO: 153021 - protein, 58 aa, Glycine max
  Clone ID: PAT_MRT3847_109201C.1.pep
LVPNSARGKKFHSDYTFQVVPFFFFHLEYNSGSSINHGKRFVIDLVPEHRYNVLFEGM

SEQ ID NO: 153022 - protein, 128 aa, Glycine max
  Clone ID: PAT_MRT3847_109202C.1.pep
AEVFSVLISQSVSRQLLHGVKICPRAPPITHLFFSNDNILFVRADVREANHVFEVIHACERVLGQRINLNKPEISFSQNVSTFRSNELEMLLKLKVVGDHKKYLGILVLVGKSKKQVFQFIKDIVWKK

SEQ ID NO: 153023 - protein, 58 aa, Glycine max
  Clone ID: PAT_MRT3847_109203C.1.pep
SFQHITRSNQHQVYFMMSNLHIQELIASDFNRERSSLDQSIVKSEHFRCVSKLMKQDQ

SEQ ID NO: 153024 - protein, 62 aa, Glycine max
  Clone ID: PAT_MRT3847_109204C.1.pep
NYIKQTAIVSLFCKKNKKLLSLCVHKTFVILVYPHDFTLFFFTLAFIYILKVPIFALSSPLV

SEQ ID NO: 153025 - protein, 43 aa, Glycine max
  Clone ID: PAT_MRT3847_109205C.1.pep
IAITSENLCIMYYYWFSLVIAIQFCSAITSENLCIMYYYCSSR

SEQ ID NO: 153026 - protein, 100 aa, Glycine max
  unsure (1)..(100): unsure at all Xaa locations
  Clone ID: PAT_MRT3847_109206C.1.pep
HFFYDDPESVTVNLGYIGLLAYTVHKQKPLLPXLLAGLDDILCLLQGHLENVADLKQQCGLNNTSTDATIIIRTCRTLXDRGPYPAAHDVRDFQCNLHVF

SEQ ID NO: 153027 - protein, 63 aa, Glycine max
  Clone ID: PAT_MRT3847_109207C.1.pep
RERGLVATIQIQKKIKILEPISLEVKFLNWKYSTKFFQIQIIWRPFNMVGLSLYNESNFFLND

SEQ ID NO: 153028 - protein, 70 aa, Glycine max
  Clone ID: PAT_MRT3847_109208C.1.pep
IDAPPALNIYDLNYFHLKFTGFLFVATTTTYVSPSLVLELLQKIAPFFNNYLRVLNESFFSKNSVLRYEL

SEQ ID NO: 153029 - protein, 55 aa, Glycine max
  Clone ID: PAT_MRT3847_109209C.1.pep
SVNNTIFPRIWFFSWVISYHRVLIACEQFSLVKIDMLSINLMLFLNAQSLPSLLS

SEQ ID NO: 153030 - protein, 144 aa, Glycine max
  unsure (1)..(144): unsure at all Xaa locations
  Clone ID: PAT_MRT3847_10920C.1.pep
GAAANSAGVALFLFTVTPMSCVALXLAVLSVSLKAHLDPYTDRHTCSKGQSVERDLDMYVSNTDPRMLATLRGQHYPDCFGEGCAASALPYTTVTIKSERQALPNNTSLRRVADPNNMNTALEKATAGWVSCAXILTLAYEISS

SEQ ID NO: 153031 - protein, 54 aa, Glycine max
  unsure (1)..(54): unsure at all Xaa locations
  Clone ID: PAT_MRT3847_109210C.1.pep
XXXLXXYDNLEXRXTAVTWPXPRLSLXXXXTNXVTHDXXXQXFGNVEIVXXSCK

SEQ ID NO: 153032 - protein, 62 aa, Glycine max
  Clone ID: PAT_MRT3847_109211C.1.pep
LANYKWTKPQDKSIRSNAASATSSRGNPCSKSELLLLKLMAKSFKYSSFLTPSDEPALVVVV

SEQ ID NO: 153033 - protein, 86 aa, Glycine max
  unsure (1)..(86): unsure at all Xaa locations
  Clone ID: PAT_MRT3847_109212C.1.pep
DSFKNYSNGLNANNDAFRRYSAASTRRGEQFNNYADNGNVXQHELLSYGSARIKPPASSATTTXGETFRNLGFTTRTPGXXSQXSS

SEQ ID NO: 153034 - protein, 382 aa, Glycine max
  unsure (1)..(382): unsure at all Xaa locations
  Clone ID: PAT_MRT3847_109213C.1.pep
IIYFLHRNTLSPAGGAFVPNKIITDNDLIAXECFNFMKKKXDNEVXMMDLKLDMSKVYENIQWLIVQKVLTSMTFSMKFVDVVMRCIXLVCFSVMLNGVPRRELKPHRSLRQGNPLSPYLFILCTEILSTLYMIIVKYGSLHGLNVCPRAPSISHLFFADNNIMFGHATXEEAKKTSLILKRYKDASRQRNNFHKSELSCSXNVLTPRVNQLVYLFNVKTIKSQDKXLRPHTIMGRSKTXVFNFVKEEVWKKLKGWKEKSLSRAGREVLIKVMVQTTPSYIMGCFILLVSIYNHIKSMATRFFXGGFINTMKMHWMSXEKLTRSKVDGGLGFMMAHAFNKALLAKQWWWIIHFEDSFMAKVFKAKYFPKFHPFEVFRSHNPS

SEQ ID NO: 153035 - protein, 49 aa, Glycine max
  unsure (1)..(49): unsure at all Xaa locations
  Clone ID: PAT_MRT3847_109214C.1.pep
PRIRHALANHGGHDPYLRFANFHWTEPSQEDXHTLNPTRSVPHSLHRPS

SEQ ID NO: 153036 - protein, 90 aa, Glycine max
  Clone ID: PAT_MRT3847_109215C.1.pep
QQRVFYLPLFYTHLIHYFTNPTSIQKLIFLFAFPLLNSQLSHPFCPFYPLHSSVKTLDFKSGVLFSKSVQTWFWELPACKSEFYVWNPSF

SEQ ID NO: 153037 - protein, 63 aa, Glycine max
  Clone ID: PAT_MRT3847_109216C.1.pep
LKKVFLKPISRKKNPPLPGLPVFYSTPSPSFLIIEGIFLKKKIFDLRGYFPKFSYQQNLFLPG

SEQ ID NO: 153038 - protein, 116 aa, Glycine max
  unsure (1)..(116): unsure at all Xaa locations
  Clone ID: PAT_MRT3847_109217C.1.pep
CIVILAMGTFNHYVIVKCKDGVAVDDLIHWLEIIVIGIDQVKSFEWGKDIESHDMQNRDIESHDMLRQGFTHDFLMAFNRKEEFNAFQTHLTHLEFTRVXSPAIEKIVVLDFHLTL

SEQ ID NO: 153039 - protein, 42 aa, Glycine max
  Clone ID: PAT_MRT3847_109218C.1.pep
LEERGDTYRGFSCYPRSSEEILFFHLTILLIEEQAIPQHENT

SEQ ID NO: 153040 - protein, 105 aa, Glycine max
  unsure (1)..(105): unsure at all Xaa locations
  Clone ID: PAT_MRT3847_109219C.1.pep
YSLSWEVKRNXDLNGLTRLLHFHKPHLPSHLVLQKRXDHFGVIESKIFLLYTATYNLLPHVRNNYLTGIFIAAKEIVXRSQWIFLLSEHERIKMNHLSHSTSINL

SEQ ID NO: 153041 - protein, 60 aa, Glycine max
  Clone ID: PAT_MRT3847_10921C.1.pep
SMSNAHTVLCLGAVKEPHCWVVLLMSLWRSAITTPISEPHFLGLALRNESAHATTQLVVG

SEQ ID NO: 153042 - protein, 76 aa, Glycine max
  unsure (1)..(76): unsure at all Xaa locations
  Clone ID: PAT_MRT3847_109220C.1.pep
LRMGEGITVVCLCGCIAIDVPPPKGPLWSVGNVLIRAYHTVFVRGKYXVGFVEAVLVGFVEDFLCIFVGGVVNKML

SEQ ID NO: 153043 - protein, 75 aa, Glycine max
  Clone ID: PAT_MRT3847_109221C.1.pep
LPKQDEPDAGNGAQLLTNLNPTQGAGRLRLHVCGQGTRNALQSVYPLSCRINYPQNWTALKLATYTRPSGAGPNP

SEQ ID NO: 153044 - protein, 51 aa, Glycine max
  unsure (1)..(51): unsure at all Xaa locations
  Clone ID: PAT_MRT3847_109222C.1.pep
VSASLTYXPHSLLTIRTLPPKTLTHPVPSLPTHTPQHSKPNDFALSVALSL

SEQ ID NO: 153045 - protein, 268 aa, Glycine max
  Clone ID: PAT_MRT3847_109223C.1.pep
MDRVKGPWSPEEDEALRRLVQAHGPRNWSVISKSVPGRSGKSCRLRWCNQLSPQVAHRPFSPDEDEAIVRAHARFGNKWATIARLLNNGRTDNAVKNHWNSTLKRKKCSAVSDDVTDRPPLKRSASVGPAHLNPGSPSGSDLSDPSLPALSNPSPSAHYRPNLMETASSACDPATSLSLSLPGFGSGSNPVCAPRPVSVSPPSPPPAEPVEQRGKQMFNAEFLRVMQEMIKKEVRSYMSGMEQKNGFRMQTEAIGNAVVKRMGISNIE

SEQ ID NO: 153046 - protein, 140 aa, Glycine max
  Clone ID: PAT_MRT3847_109224C.1.pep
IPPQIPRREARRSGSPRQRRPRPQGRQSRQTRNRRRNRSPKRAEARKKLHRALEAMAEKEALDMKAALESKGEVEFQVCTLGKNVTIKKSMLTIQKEIKKEHQRVFTPSVIEPSFGIGRIIYCLFEHTFYTRPSRLQSWG

SEQ ID NO: 153047 - protein, 124 aa, Glycine max
  Clone ID: PAT_MRT3847_109225C.1.pep
KVGSLLALYSFEFSPRFLRFLVPHLSQVWISQQPDPTTNKRFLRRGASSRSWLSKVSSSPSRSLCLSLRETVTEKKKTELLSLPHHSKWLQLRCLTLTGSARPGYCIRIQMLNKKSQHLLVVLT

SEQ ID NO: 153048 - protein, 100 aa, Glycine max
  Clone ID: PAT_MRT3847_109226C.1.pep
PYTLQRRHRSYASSPMSAISYCAIATVRTPLVTTGEWFNWMRTNLLTPTYRSCHWETEWRHHRAGSYAFKTHTQSSLQKSATECAMHHLRGRSETAAPEA

SEQ ID NO: 153049 - protein, 48 aa, Glycine max
  Clone ID: PAT_MRT3847_109227C.1.pep
WTDMEPGECDETTLHDVNMEEDTGRTRPQSHEAYDEDDALPGGAHTAQ

SEQ ID NO: 153050 - protein, 64 aa, Glycine max
  Clone ID: PAT_MRT3847_109228C.1.pep
MRQRTRHSDLESSLAPVSQKSASNLRLTHSLRLFTKPNNLRLATKSGNTLSCTRVKAQLTEVAL

SEQ ID NO: 153051 - protein, 28 aa, Glycine max
  Clone ID: PAT_MRT3847_109229C.1.pep
LKVTLPINFSSHAMILLYNFRSLALATQ

SEQ ID NO: 153052 - protein, 52 aa, Glycine max
  Clone ID: PAT_MRT3847_10922C.1.pep
GLTKGRPTLKEGSKSRRMKHFKKINKDLSKTRQILFQWCGTAHNNGSATFKQ

SEQ ID NO: 153053 - protein, 47 aa, Glycine max
  Clone ID: PAT_MRT3847_109230C.1.pep
MQSSKEKLKNMTSAAKEQVDIYKAKIDEKTEKATARTEEERVITHER

SEQ ID NO: 153054 - protein, 110 aa, Glycine max
  Clone ID: PAT_MRT3847_109231C.1.pep
ILLFNLQKSGPKPIIVPIVLKMAEFDHKALLEEWISARTFNDKCPDLDNEKLIANLKTIQDYLCSFTSQGLTVVNVSATTFPQTLDWLHGYLLQCIEQGIKENVTPVAPS

SEQ ID NO: 153055 - protein, 46 aa, Glycine max
  Clone ID: PAT_MRT3847_109232C.1.pep
FHFLLFQAIRFIILEFEAPPLWVEIIKPRLDWSSVVKIDCLSEVLL

SEQ ID NO: 153056 - protein, 80 aa, Glycine max
  Clone ID: PAT_MRT3847_109233C.1.pep
GILLQHLHSCWNLSSLAGTQLLYTPTNPWNHIEPRRNTFRLHIASSSCFDIINAKVHGWKKQYSDLRDALSFQKNDALPL

SEQ ID NO: 153057 - protein, 132 aa, Glycine max
  Clone ID: PAT_MRT3847_109234C.1.pep
MANDPFFEAHHRTRQQQHQCMMMIQQPNNDDDVVPEHTCAQQQQQEQQNQSPKLAASSTSQNATPVLPAFVALLLLVTSIAPAALCHPLQGSNHTFRPNHELLKLRRVRAHLKKINMPSVKTIQSTYGDLID

SEQ ID NO: 153058 - protein, 49 aa, Glycine max
  unsure (1)..(49): unsure at all Xaa locations
  Clone ID: PAT_MRT3847_109235C.1.pep
RAKRLRILFPGQARDSAFSEGLAVAWGAEGAGFKVFPPWRPPARRLXFP

SEQ ID NO: 153059 - protein, 96 aa, Glycine max
  Clone ID: PAT_MRT3847_109236C.1.pep
KKKKKKKKKKKKKKGKKKKKKKKKKKKKKKKKKKKKKKKKKKKKKKKKKKGGAPPLGPLPPGFYSGPGPWGCPSFPFRGAFKAWAKNGKKLFPGKN

SEQ ID NO: 153060 - protein, 68 aa, Glycine max
  Clone ID: PAT_MRT3847_109237C.1.pep
RCNNPVHPLQAGMHFTLILLNLSVSVNLNVFVHLIHIIVTVITTISLTMDPYLLLNCVFRSVFDSQRV

SEQ ID NO: 153061 - protein, 65 aa, Glycine max
  Clone ID: PAT_MRT3847_109238C.1.pep
SLFDVTVPRKVSAVGLQYASLLKVAHHSRAFAVSQARAKWMFFVIAQRDMHRFPPYTNESTSSSA

SEQ ID NO: 153062 - protein, 93 aa, Glycine max
  Clone ID: PAT_MRT3847_109239C.1.pep
KKQILPMLGADHARAAETEEGTPVRVWDMDTKSMHQLVLKRWSSSKSYVLIGKWNQDFLRRRDLKKGDEIGFHWDPYNCVFNFCVLKRAMPEN

SEQ ID NO: 153063 - protein, 68 aa, Glycine max
  unsure (1)..(68): unsure at all Xaa locations
  Clone ID: PAT_MRT3847_10923C.1.pep
FVVSYKLVYREENMKSYVFFVAAVGLVAWPXHGAGYQRVPLRVTTGYRERSSEVNSPMLRLALERHNI

SEQ ID NO: 153064 - protein, 109 aa, Glycine max
  unsure (1)..(109): unsure at all Xaa locations
  Clone ID: PAT_MRT3847_109240C.1.pep
VRCRSRPQVIFGFSPYSLMNMIGTLNVYAAFCKHEGVPVRSPGTRGAWEXYECFCEADQIAEGGIWTELDPYARNEATDXAQRTTLFMWMHISSALPVPFGLEEIGADQ

SEQ ID NO: 153065 - protein, 308 aa, Glycine max
  unsure (1)..(308): unsure at all Xaa locations
  Clone ID: PAT_MRT3847_109241C.1.pep
MSTPALSGGTGLFSGFTRLCKGLAVVLVCGHIAVQFIPSAVNYLALIPARTIPFAWNLITAGYVEQSIYGVVVSTLSLLFIGKLLEPIWGSREFFKFIFVVNLLTSVCLFITAIALYYITRLETYLYMPLSGFHGVVSGXLVGIKQIIPXDQELPFIKFKNKVGCHLSLLLLSIAISFWTLEXTAYLPTIISGTYISWIYLRYWQRKPETKHRGDLSEDFAFSTFFPEFLRPVIDPIASIFHRMLCGRYDASNDGQGNSLESEPLPGSDSIEASRRRERGARALEERLAAERLAVARRELQREAEENV

SEQ ID NO: 153066 - protein, 49 aa, Glycine max
  Clone ID: PAT_MRT3847_109242C.1.pep
FLKYHIMTMLHQVAHEDTGHDVIRRMYMDQINQYLKIYISKCISLILSP

SEQ ID NO: 153067 - protein, 50 aa, Glycine max
  unsure (1)..(50): unsure at all Xaa locations
  Clone ID: PAT_MRT3847_109243C.1.pep
GDYNLLVIHLHLPTLXHLFNFYIITLSLNTSLILANQMINLIDFIHSYSF

SEQ ID NO: 153068 - protein, 140 aa, Glycine max
  unsure (1)..(140): unsure at all Xaa locations
  Clone ID: PAT_MRT3847_109244C.1.pep
MRECISIHISQAGIQVGNACWELYCLKHSIQPDGHMPSDKTIGGGDDTFNTFFTETGARKHIPHTIFIDLKPTVINKVKTETYHQLFHPKQLISKKEDTXNNFTHNHYTITKEIIKLYLDHITXLTNNYTTLRNFLILNT

SEQ ID NO: 153069 - protein, 71 aa, Glycine max
  Clone ID: PAT_MRT3847_109245C.1.pep
ENYMHLTFDGYESLNLPVLSMVDHSGWCCGIWPKDGKQRKIFYIYIYVCALVFFKICFFNHIIYKYILLYI

SEQ ID NO: 153070 - protein, 88 aa, Glycine max
  Clone ID: PAT_MRT3847_109246C.1.pep
KCIAVSVGNVEQESRHALIMLVVNIEHISVNYLYIVIPIVGLRVSGYSRCTVVRDRRHKRVSDCRIICEYQVRTQVMSLHVNLCSFSP

SEQ ID NO: 153071 - protein, 98 aa, Glycine max
  Clone ID: PAT_MRT3847_109247C.1.pep
PPLWGKKKTLGFKGVSKKPKMPKNFFWVKKKFFSPGFFSKRGTAQVLGLKKGVPNLKGGGPLKGLFFFPPNILSPPTQGFFSGPGKFFKKTRVWPLFK

SEQ ID NO: 153072 - protein, 240 aa, Glycine max
  Clone ID: PAT_MRT3847_109248C.1.pep
MAFEDFDPIFSKPKVKWDSESCSSSCPFFLHAYAPDSSHLVIHVTNIYDAWETRLSLSMLEDIRDIVGIGGSWSDFADYFLTSLKSQDLKLVLEPDSNSDGVSHVKLVAQKSKGMPLITIPLTKLMDSAAMEVKLNFCSSLFEAFEIKSTECSLEKEREHSARTNMLAAEKERNEAIQLEQRQKFQKISNSENGVSTDGLQNSPDKQAARDTGATKVKNRKVPAYRRTRIRGALLHDSDE

SEQ ID NO: 153073 - protein, 333 aa, Glycine max
  Clone ID: PAT_MRT3847_109249C.1.pep
RADSARDVFQYINCEDGKMSGPPGDVANSLMDGYSKGNNEVRRRSRFLRRRGRVRRLKYTWKSAAYHSIRKRIPQKGDQPCRQYNPCGCQTACGKQCPCLQNGTCCEKYCGRPKSCKNRFRGCHCAKSQCRSRQCPCFAADRECDPDVCRNCWVSCGDGTLGIPSQRGDNYECRNMKLLLKQQQRVLLGRSDVSGWGAFLKNSVGKHEYLGEYTGELISHREADKRGKIYDRENSSFLFNLNDQFVLDAYRKGDKLKFANHSPDPNCYAKVIMVAGDHRVGIFAKERICAGEELFYDYRYEPDRAPAWARKPEASGSKKEDGAPSSGRAKKLA

SEQ ID NO: 153074 - protein, 83 aa, Glycine max
  unsure (1)..(83): unsure at all Xaa locations
  Clone ID: PAT_MRT3847_10924C.1.pep
SVAEGLPKPATIDCNLLNXLIPVAVCHALSHVTSNVLLAAHAVAYTHTIKALEPFFNAXAASQFILGQSIPHHFVSDTRLIVV

SEQ ID NO: 153075 - protein, 69 aa, Glycine max
  unsure (1)..(69): unsure at all Xaa locations
  Clone ID: PAT_MRT3847_109250C.1.pep
IGYLPLTTKDLLLIGTRLIISALVLFIIIQESSSKFPEWVPSSTVAKIPGPGHLSTFCFFQLPRLXCRP

SEQ ID NO: 153076 - protein, 73 aa, Glycine max
  Clone ID: PAT_MRT3847_109251C.1.pep
MPSVAVKLYSVFFKFLLKHRLHNRIQTTSEPSDPFGVTTRPEESVAPANPSFSDGVATKDIHIDPLTYLYIRI

SEQ ID NO: 153077 - protein, 100 aa, Glycine max
  Clone ID: PAT_MRT3847_109252C.1.pep
KKSINLAPMRIRKRQVPFPLLPATYSDPNLINRSPVMVQLNDDTKASSCTHYHGSTTTAPSPLLDRPQPADQPLPPIGKPTNGSDESFGEWHKKQEESFG

SEQ ID NO: 153078 - protein, 48 aa, Glycine max
  Clone ID: PAT_MRT3847_109253C.1.pep
LPGPLFGSPLGVPHKGNVPELPGFEFFPAPRGPLLGGKPDSPPPILPT

SEQ ID NO: 153079 - protein, 102 aa, Glycine max
  Clone ID: PAT_MRT3847_109254C.1.pep
ECCWGVDLYRRFHKYSEPGMDQASLYDYHSRIPGLLTNPAAKLTRAFQTVLESLCKLNQHNMPRTLMTTPTYKISATTLFTIATQSTSLPTNTYPSDTYKHS

SEQ ID NO: 153080 - protein, 42 aa, Glycine max
  Clone ID: PAT_MRT3847_109255C.1.pep
HYIAKVAATTLLASKKCTPILLNARVITNWDWNWNKLIYLLH

SEQ ID NO: 153081 - protein, 75 aa, Glycine max
  Clone ID: PAT_MRT3847_109256C.1.pep
TAARRRQKGPGQVSADYMEWFFKISHLFVTPTHEGDEPKQPTTPDVDAYVEPHVPRRFQLQLISPYIQWYFNLVK

SEQ ID NO: 153082 - protein, 45 aa, Glycine max
  Clone ID: PAT_MRT3847_109257C.1.pep
NFVYGSRGKKKKKKKKKKKKKKKKKKKKKKKKKKKNGKKKKKNKL

SEQ ID NO: 153083 - protein, 130 aa, Glycine max
  Clone ID: PAT_MRT3847_109258C.1.pep
MVSPNVAAPVRFPSRFDLSYTNALSFTPKRAPTMASGEQKAPPQTQRLQIYPNTNSGVSPFWREKYEREAKRYWDVFYKLHKDRVSFFISIYCVFGLCQYKFCCSLVYSINTICDCGASLLKKAKIVYYY

SEQ ID NO: 153084 - protein, 79 aa, Glycine max
  Clone ID: PAT_MRT3847_109259C.1.pep
IIAICEISVRTTSLELRSVYVKQCSREMQQSGDQCGLSSKRIKIQMHAHTSLFETASKRTIVWVQHSSYVKVASRHTCW

SEQ ID NO: 153085 - protein, 180 aa, Glycine max
  unsure (1)..(180): unsure at all Xaa locations
  Clone ID: PAT_MRT3847_10925C.1.pep
DPTVENLLPDFDFDHTVGRKLASSIGTRSVVLMAVDVADCDGCLSRKAAKLVIKTIEDHFAAWKHAKSXNAPKVALVVTNIDLTARSSSPTWLQHWISHRAXDGGLNKVTSWHIESASRDWRSCTIVATSVTQAXLTGHEWAAGAHRAGPSSGRDSIGKSAIRNISPPAQPPVNATSITV

SEQ ID NO: 153086 - protein, 95 aa, Glycine max
  Clone ID: PAT_MRT3847_109260C.1.pep
FGTHFRYASKTCYFPLDMLSRLHCNSFAEYVFFFFLHIVLHTYVNIFSTYIWCLSCIIILLWPLVSMKTNILQFIYLDFFFGPVCYFVVGSSCVL

SEQ ID NO: 153087 - protein, 52 aa, Glycine max
  Clone ID: PAT_MRT3847_109261C.1.pep
RLDTVPAVPPFMPLIALLYPHGKLVAVGAPEKPLALLLPPLIVGKNTNTFFH

SEQ ID NO: 153088 - protein, 77 aa, Glycine max
  Clone ID: PAT_MRT3847_109262C.1.pep
TRQLRGHCKICMPIFIFSQISFCGTHPLASAAVSASHSRAKESDEVPCPPYTKSTVRIAHPPTLFSTIIIHIFHPNA

SEQ ID NO: 153089 - protein, 33 aa, Glycine max
  Clone ID: PAT_MRT3847_109263C.1.pep
RNMIKVYLHTKKPYNKQGKTSTVNNVFKIKVLF

SEQ ID NO: 153090 - protein, 205 aa, Glycine max
  Clone ID: PAT_MRT3847_109264C.1.pep
MDQTTAAANEVVREFPGLLRVYKDGRVERLLGTETTPPGTDPGTAVQSKDVTINAETGAGVRLYLPPTAAAQKLPLLIYIHGGAFCVCTPYNPAYHHHLNALSAAANVVVASVHYRLAPEHPLPAAYDDAWEVLQWVAASDPEPWLNCHADLSTVFLAGDSAGANIAHNTAMRGTTQGFGNLTLAWSCLPILRDDKTSFWSIYTL

SEQ ID NO: 153091 - protein, 296 aa, Glycine max
  Clone ID: PAT_MRT3847_109265C.1.pep
MAKKRSAPSGGRRENRAESSSRRLNSASGRRKLVAFFIVSSIIAIVTYRYRFRQSSPSQGLVTTHANCQHILAENSKVSGNSSQRHYTYPVLGYITPWNSRGYELAKRFNSKFTHLSPIWYDLKRLQLVYVLGSPPEKLQEYDFGPKYLETLSEEVDGWGLMTYDLSNPHYPGPSSSLKWIQKVLQLLLGTSGNRAQSLAPKILLGINFYGNDFSLSRDADAGGGAIIGRDYLALLEKHWPELQWDKNSGEHFFFYTDDKDIRHVVFYPSLKSISLILVSKVLLFYLPFFILQIMT

SEQ ID NO: 153092 - protein, 417 aa, Glycine max
  unsure (1)..(417): unsure at all Xaa locations
  Clone ID: PAT_MRT3847_109266C.1.pep
MAKKRSAPSGGRRENRAESSSRRLNSASGRRKLVAFFIVSSIIAIVTYRYRFRQSSPSQGLVTTHANCQHILAENSKVSGNSSQRHYTYPVLGYITPWNSRGYELAKRFNSKFTHLSPIWYDLKSQQTSLVLEGRHNADRGWISELKKAGEALILPRVVLEASPAVLLGKEKQRNKAINLIVTESREMGYDGIVLESWSRWAAYGILHDPSMRNLALQFVKQLGDALHSISSEKISGQQLQLVYVIGSPSEKLQEHDFGPKDLETLSEAVDGFSLMTYDFSNPHNPGPNAPLKWIQIVLQLLLGTSGNRAQSLAPKILLGINFYGNDFSLSRDAXGGGAIIGRDYLALLEKHWPELQWDKNSGEHFFFYTDDKDIRHVVFYPSLKSISLRLEEARSWGCGISIWEIGQGLDYFFDLL

SEQ ID NO: 153093 - protein, 42 aa, Glycine max
  Clone ID: PAT_MRT3847_109267C.1.pep
RVGALSGFYVEQVSTPPQSFYSPMNQISVREINNKIRISSNA

SEQ ID NO: 153094 - protein, 114 aa, Glycine max
  Clone ID: PAT_MRT3847_109268C.1.pep
YCFRCLICCSITFNLINKKKKDKGIPTFLYFNIENQATDAYRVLRVMVHRILAPVSSQFLYFWHNQLFWPHLVRLDTRMSMYIHNNTVIFCALSLQHLLLFTRTSSVTEDTESE

SEQ ID NO: 153095 - protein, 49 aa, Glycine max
  Clone ID: PAT_MRT3847_109269C.1.pep
SPYTNQTLIIHTHTSFIHISSNHLHLKTPSPYIQHPSLLLLHLFQNTFI

SEQ ID NO: 153096 - protein, 102 aa, Glycine max
  unsure (1)..(102): unsure at all Xaa locations
  Clone ID: PAT_MRT3847_10926C.1.pep
KNDGLPDKLCDHISYAELHACLXLDPDMEGACXTCTTTNMWMVLGEITTQGNVYYDKIATCTXRNIVFASDDXGLDSDNYWGLDSIDQPSADIAQGGHGHLT

SEQ ID NO: 153097 - protein, 92 aa, Glycine max
  unsure (1)..(92): unsure at all Xaa locations
  Clone ID: PAT_MRT3847_109270C.1.pep
NFYLQRVWFISVAHCTSPTQWRKILPYYIREGLPCSIVDPHGRSLISAGMKXKRNWRNIHSCGLFYGGSYKCWPNHEKNMDLPDEEKMEVFR

SEQ ID NO: 153098 - protein, 40 aa, Glycine max
  Clone ID: PAT_MRT3847_109271C.1.pep
FYSSTITIQSFCKQSLLCILHLYSFKTYINLLSTNPIFLF

SEQ ID NO: 153099 - protein, 79 aa, Glycine max
  Clone ID: PAT_MRT3847_109272C.1.pep
CVGAARSVSASRLCAVHEDRDTSVVFRGNEGVLTRGANADDTLDHHGVPNPHIITEPTFIPVKAVCIDGHGQAAIEGAH

SEQ ID NO: 153100 - protein, 91 aa, Glycine max
  Clone ID: PAT_MRT3847_109273C.1.pep
FIMHISINTSANLYTLPPFKIFLRNVFFIDPTIEVYLIILILLARFSCEQLQINLRLSKLRELIITWKIFYEICAIKSLVRINIKLYGRNK

SEQ ID NO: 153101 - protein, 411 aa, Glycine max
  unsure (1)..(411): unsure at all Xaa locations
  Clone ID: PAT_MRT3847_109274C.1.pep
GPSLSARYISSRSANRFRFIIRCRTTFAVIEPAGSASKQWDSDTKTSVPVARRGIISIFFTPLSRSAQRSATQFIRPTFPPYXPTSGATTPTRRPSLSSNEPSIYASSVKASSSPKPASVTSRQPTPVTVRKQAPVNSRQPASPSRGTSPTVRSRPWKPSEMPGFSLDAPPNLRTTLPDRPLSATRGRPGAPTSRSSSVEPSSSGRPRRQSCSPSRGRASNGSVHISGNSMPAVSRGHSKVNDNVSPVVMGTKMVERVINMRKLVPPMIEDKNSPRSNLSGKSASSPDSSGFGRTLSKKSLDMAIRHMDIRRTIPGNLRPLMTNIPASSLYSVRSGSHHGRTISVSGSPHATSNSSEVDDDIGSERCGQSPASVRGSHSGFAYGANLACTNVKLLGSDVTSCNEKLYKPRE

SEQ ID NO: 153102 - protein, 167 aa, Glycine max
  Clone ID: PAT_MRT3847_109275C.1.pep
MNRSFRAQESQMLAALKQREQQFGGLRASVMKEKEEELALFLEMKKREKERNDLLLNSSEEFDAPLGSNGGANPIFNISSSTPAPVRKTGVDDFLNSENDKNDYDWLLTPPGTPLFPSLEMESRKTVMSQLGTPTTRPVALKSRKTCFVGSIIIDMHDECGLDFQQK

SEQ ID NO: 153103 - protein, 493 aa, Glycine max
  unsure (1)..(493): unsure at all Xaa locations
  Clone ID: PAT_MRT3847_109276C.1.pep
MNRSFRAHESQMHAALKQREQQFGGLRTSVMKEKEEELALFLEMKKREKERXDLLANHQSEPAGRTNLVSKQPTSSPGLSSSSGGTRRPSSSGGPGSRPATPTGRPTLTTSSKSSRPSTPTLTAASKSSRSATPTRSMVTSKTTTSTIKPAVSATKHLASATKTPVPATKPAIPSRSSTPLSRSAARSSTPTSRPTLPPSRPTSRATTPTRRPSLSSNEPSIYASSVKASSSPKPASVTSRQPTPVTPASPSRGTSPTVRSRPWKPSEMPGFSLDAPPNLRTTLPDRPLSATRGRPGAPTSRSSSVEPSSSGRPRRQSCSPSRGRASNGSVHISGNSMPAVSRGHSKVNDNVSPVVMGTKMVERVINMRKLXDELLSHLIGTSARRRQKGGFGRTLSKKSLDMAIRHMDIRRTIPGNLRPLMTNIPASSLYSVRSGSHHGRTISVSGSPHATSSNASSELSVNQNGICLDSSEVDDDIGSERCGQSPASVRGR

SEQ ID NO: 153104 - protein, 201 aa, Glycine max
  Clone ID: PAT_MRT3847_109277C.1.pep
PSRPTSRATTPTRRPSLSSNEPSIYASSVKASSSPKPASVTSRQPTPVTVRKQAPVNSRQPASPSRGTSPTVRSRPWKPSEMPGFSLDAPPNLRTTLPDRPLSATRGRPGAPTSRSSSVEPSSSGRPRRQSCSLVPPMIEDKNSPRSNLSGKSASSPDSSGFGRTLSKKSLDMAIRHMVCIFSASENHSWQFTAFDDKYSS

SEQ ID NO: 153105 - protein, 145 aa, Glycine max
  Clone ID: PAT_MRT3847_109278C.1.pep
DLNFAGIPALSSIVRSSWRVHCVGNKLGYWLCCEVNEKQTRLGFAVWGFEEFRVRVVWVLGMNRSFRAQESQMLAALKQREQQFGGLRASVMKEKEEELALFLEMKKREKERNDLLLNSSEEFDAPLGIDFCSFSFLVLSFFFFF

SEQ ID NO: 153106 - protein, 54 aa, Glycine max
  Clone ID: PAT_MRT3847_109279C.1.pep
CSSGSSGSSTAARRRQKGGAAAEETPNPNLNLKLSSLSFQTRIMLRLLKLRENR

SEQ ID NO: 153107 - protein, 127 aa, Glycine max
  unsure (1)..(127): unsure at all Xaa locations
  Clone ID: PAT_MRT3847_10927C.1.pep
MKRYCIATNATSTFHSIVSSYPGELVLVSIQCPNPDFNKPEHRWRMLQRSLIEAVVDLLAPNGKIFLQSDVEAVAIRMKEQFLTYGKGKLDMEHGQSEWLEENPFGLXSDWERHVLERGAPMYRIII

SEQ ID NO: 153108 - protein, 52 aa, Glycine max
  Clone ID: PAT_MRT3847_109280C.1.pep
GSSRNICQFLLVVSDGSLTLLWDKPGPMATWAWAGTLFWCYVIRVFNGIQRC

SEQ ID NO: 153109 - protein, 54 aa, Glycine max
  Clone ID: PAT_MRT3847_109281C.1.pep
YNHYGLTLFYKQLADKTCTSTLVPSSKKTKRQMLSLVSAPQRVINNMKLVPYSQ

SEQ ID NO: 153110 - protein, 109 aa, Glycine max
  unsure (1)..(109): unsure at all Xaa locations
  Clone ID: PAT_MRT3847_109282C.1.pep
VHAFFFVRTTDLGAFTNCPTHGCLPQLPSKPTARTNCATEPILWYYDQFLMQHXTSWGKTKLSIIGKPXLTLPSVGXDNTALGEFCHTLMRPCDILGTHCNVGRNARMP

SEQ ID NO: 153111 - protein, 56 aa, Glycine max
  Clone ID: PAT_MRT3847_109283C.1.pep
FTTDKHYSHITLLSVSHRIFASSLFPSPFYHPLPSKIKRTINVLNHNNRLTCCINQ

SEQ ID NO: 153112 - protein, 334 aa, Glycine max
  Clone ID: PAT_MRT3847_109284C.1.pep
MNRGVLQSSPVQQMMTGNPNWWNININSMAPQAPPFLSTPNNFPIPCAPTSLPFPSWHENQDLPESWSQLLMSGVVDEQGKAGMGQFIQTKKLESWEDQMLGQAPNASLVDVKQENLVNSYAYGHGSEELQSSKPSWSPKSCVTTSFSSNMLDFSNNKTDGRHPPPDLSSECNSTAAGGALKKARVQPSATTQTTFKVRKEKLGERITALHQLVSPFGKTDTASVLLEAIGYIRFLQSQIEALSLPYLSGGSGNTRQQHSVQGEKSCIFPEDPGQLLDENCLKRKAAGEPDTQEEPKKGLRSRGLCLVPVSCTLQVGSDNGADYWAPALGGGFR

SEQ ID NO: 153113 - protein, 98 aa, Glycine max
  unsure (1)..(98): unsure at all Xaa locations
  Clone ID: PAT_MRT3847_109285C.1.pep
CDREYAVFASVAQEKVSXLEAEHCGLNMPANWYPPCRGFTHILDGIXYELKSRVPQLEIVYASIEEHXDAFNSLYADMPSIAITISDVETWKFLTRNY

SEQ ID NO: 153114 - protein, 112 aa, Glycine max
  Clone ID: PAT_MRT3847_109286C.1.pep
PRVRFGVGHMRDTKTKGIWVWGTPIDLDINGVRTSVFYLDTEGFESVGKSNVYDDRIFALATVLSSVLIYNLPETVSYCCHLPISGLFCCLSFCNVKWTKELVLGMILKQGY

SEQ ID NO: 153115 - protein, 78 aa, Glycine max
  unsure (1)..(78): unsure at all Xaa locations
  Clone ID: PAT_MRT3847_109287C.1.pep
ANLKKAGFDAWLQLILXKDPHLIIPNALLYKXAMGENLLRQXYRIVGIIGDQWSDLLGDHRGESRIFKLSNPMYYIEK

SEQ ID NO: 153116 - protein, 61 aa, Glycine max
  unsure (1)..(61): unsure at all Xaa locations
  Clone ID: PAT_MRT3847_109288C.1.pep
RCCSSGVPTIVDSRTIIYDIEDDINGEVDMAVTPKHGXEWAMPPQKMVLAYRVNDLDGSSA

SEQ ID NO: 153117 - protein, 42 aa, Glycine max
  Clone ID: PAT_MRT3847_109289C.1.pep
QISRRTCLPLQNLEKMQSDYLDSDPERSGYALQTSRTCVIIL

SEQ ID NO: 153118 - protein, 192 aa, Glycine max
  unsure (1)..(192): unsure at all Xaa locations
  Clone ID: PAT_MRT3847_10928C.1.pep
GSRDWSELPKDLLHKISQLLLESPLYLLRFRSVCSSWRSSTPPSPFNPSISLTNTFSLSHRTLLLLNPNPNPNPNPRPWLVKLSLDPHASTARLFHPLSRFPMKLPRFALDLFTLPALDLGREFLLTNTRHTRDSLYIEKLVFLPLTHRKDRFALLTIHVXRKLALFRSGDDGLTVIPDMPTPYDDVCVFRA

SEQ ID NO: 153119 - protein, 51 aa, Glycine max
  Clone ID: PAT_MRT3847_109290C.1.pep
PKIPKKLKISLLSNVSSNGGLERLFSVHHSTSLVNPLSKALLFIVSIYILG

SEQ ID NO: 153120 - protein, 379 aa, Glycine max
  Clone ID: PAT_MRT3847_109291C.1.pep
MNCRRLVYVVVWFNLYVACTFIQVSGLDASNFSKCWFPAIYNFGDSNSDTGAVFAAFTGVKPPNGISFFGSLSGRASDGRLIIDFMTEELKLPYLNAYLDSVGSNYRHGANFAVGGSSIRPGGFSPFPLGLQVAQFLLFKFHTNTLFNQFSNNRTEQPFKNSLPRPEDFSKALYTFDIGQNDLAFGLQHTSQEQVIKSIPEILNQFFQAVQQLYNVGARVFWIHNTGPIGCLPYSYIYYEPKKGNIDANGCVKPQNDLAQEFNRQLKDQVFQLRRKFPLAKFTYVDVYTAKYELINNTRNQGFVSPLEFCCGSYYGYHINCGKTAIINGTVYGNPCKNPSQHVSWDGIHYSQAANQWVAKKILYGSLSDPPVPIGQACF

SEQ ID NO: 153121 - protein, 78 aa, Glycine max
  Clone ID: PAT_MRT3847_109292C.1.pep
LLTGWKRDDKKVVSFRYGYRCRCSCGSNRGCRCRRHSESVRQIVNVLFINSFEGGEFYELAEVEKRLRVSKNVIDEII

SEQ ID NO: 153122 - protein, 51 aa, Glycine max
  Clone ID: PAT_MRT3847_109293C.1.pep
YRRPVKRRSHSTRCVRCVNHVTSSHMSADVRLVSRAWSVIAERVDRVSRVS

SEQ ID NO: 153123 - protein, 96 aa, Glycine max
  Clone ID: PAT_MRT3847_109294C.1.pep
SIGNGIPLGAVVTTPEIAKALTRRSYFNTFGGNPVCTAAGLAVLRVIEKEKLQENAFVVGSYLKERLNALKDKYECIPSSLHFLFLVHSRLVHKHA

SEQ ID NO: 153124 - protein, 61 aa, Glycine max
  Clone ID: PAT_MRT3847_109295C.1.pep
ISVFHNKIVEIKALLLLNWEMLPTTTISLIHSFQAYSFLSTEIFGKSQNFAGLRMLKNRSI

SEQ ID NO: 153125 - protein, 248 aa, Glycine max
  Clone ID: PAT_MRT3847_109296C.1.pep
MRGGGGGGGEVEVKRVFIGAGCNRIVNNVSWGASGLLSFGAHNAVAIFCPKSAQILTTLPGHKAVVNCTHWLPSSKFLFKAKLLEQHYLLSGDADGAIILWELSLADGKWRQMLQLPQSHKKGVTCISGIMVSQTEAIFASTSSDGTACVWELVFPTTGSGDCKLSCLDSFSVGSKSMVALSLAELPGDSGQIVLAMGGLDNKIHLYCGGRTRKLVHACELKGHTDWIRSLDFSLPISINGEVTIFFW

SEQ ID NO: 153126 - protein, 39 aa, Glycine max
  Clone ID: PAT_MRT3847_109297C.1.pep
EYIERWCELVVGRLAIILKAKGMFSRYERTNCSRVICSP

SEQ ID NO: 153127 - protein, 51 aa, Glycine max
  unsure (1)..(51): unsure at all Xaa locations
  Clone ID: PAT_MRT3847_109298C.1.pep
GPKLFFLKTCTVLKTNKVLATQXVICFLDLGGNGKKKTIPPGLKEQQSLQT

SEQ ID NO: 153128 - protein, 45 aa, Glycine max
  Clone ID: PAT_MRT3847_109299C.1.pep
KMWPINTLSPKKLLKQTFAQTQKYYSNKTTLTNNTNHSKKKSERK

SEQ ID NO: 153129 - protein, 95 aa, Glycine max
  unsure (1)..(95): unsure at all Xaa locations
  Clone ID: PAT_MRT3847_10929C.1.pep
VETDEEREAWKEISALLISXYAEYTPILATMREGLDSWCNINDKIHHXNRCVXAYSEVINNIDREELRXIFALTNDPQDGEAENVRKKTRVTRNR

SEQ ID NO: 153130 - protein, 66 aa, Glycine max
  Clone ID: PAT_MRT3847_1092C.1.pep
PQSANTQTACMAPTSACNTLHTGPSGEYMKLITDHTLVERIARTHLPSGFPVLPEYSEQRYFPSQI

SEQ ID NO: 153131 - protein, 367 aa, Glycine max
  Clone ID: PAT_MRT3847_109300C.1.pep
EKKMDVEKAFHMTGGVGKTSYAKNSSLQKKESDKVKHIIIQTVEELYLATTPKSIGIADLGCSSGPNTLSIIKDIFQAIQGISHRIMHHSTEFRVYFNDLPTNDFNSIFKAIPEFQNLLRQDRKNGFPSIFMGGYPGSFYGRLFPNSYLHFVHSSFSLHWLSRVPPSLYDEHKRPLNKGCVYICESSPEVVSQAYYQQFQEDFSLFLRSRSEELVVGGRMVLIFLGRRGPEHVDRGNSFFWEILSRSFAILVSQGEVEQEKFDSYDVHFYAPSREEIEEEVRKEGSLKLERLEMFEMDKSNNEHESSESYGTQVAVAVRAIQESMISHHFGEGILESLFENYARLVDEEMAKEDIRPISFVLVLRKI

SEQ ID NO: 153132 - protein, 62 aa, Glycine max
  Clone ID: PAT_MRT3847_109301C.1.pep
IITCFLNLHYKKLDMTLNKIIKNKLIDVKCLVMLMNSNQTTLTINNNLFVNSNQTTLTHQFS

SEQ ID NO: 153133 - protein, 137 aa, Glycine max
  unsure (1)..(137): unsure at all Xaa locations
  Clone ID: PAT_MRT3847_109302C.1.pep
PASVRNDHAYSCGLSESNLYDYAFKSLIXTCGTTKLLLAIPPLLKFTETLSLKAYSVNYTRGRXIYPRADSYSHHHLSDEVAIRERFFVPLVAGCNAHIAGGXDKTQSWRVYCVLADTVSDCDNEYTVEMCMTGPNR

SEQ ID NO: 153134 - protein, 309 aa, Glycine max
  Clone ID: PAT_MRT3847_109303C.1.pep
MNPSTLTPSHTHRPLLLPSPFHTRRRRFKVSLPRCSSSSAASSPPPSSPPPPQRPPKDLKGIDVLVDKLSPPARLATSAVIVAGAAAAGYGLGSRFGGSRYAALGGAVALGAAGGAAAYALNAAAPQVAAVNLHNYVAAFDDPSKLKKEEIEAIASKYGVSKQDEAFKTEICHIYSEFVSSVLPPGGEELKGDEVDRIVSFKNSLGIDDPDAAAMHMEIGRKFFRQRLEVGDRDADVEQRRAFQKLIYVSNLVFGDASSFLLPWKRVFKVTDSQIEVAVRDNAQRLVASKLKSVGRDIDAEKLVALRKE

SEQ ID NO: 153135 - protein, 69 aa, Glycine max
  unsure (1)..(69): unsure at all Xaa locations
  Clone ID: PAT_MRT3847_109304C.1.pep
TGRGIIIGSYGGCGTHGAGALSWKDPTNVDMMGAYIVRQASKNIVARGLATMCNXQCVSAIGVPKPLSV

SEQ ID NO: 153136 - protein, 162 aa, Glycine max
  Clone ID: PAT_MRT3847_109305C.1.pep
MSSSSPQRSRGDGEKRPRFFDSNAKAICWSKADTVPGRHPERWRKDAAGNVVCKRFFNCIGCLCYEYDHIIPFSKGGESTADNCQILQSRVNRLKSDKYNIDSDQLKDYSWEVNFTDKELDIIEMAVYGDVMRPGNQCRCRTIAEKLGKVYPSGLTHPRMLP

SEQ ID NO: 153137 - protein, 86 aa, Glycine max
  Clone ID: PAT_MRT3847_109306C.1.pep
FWKPLSQFELEPGQSYYLLPFSNRNNNHNNNNSNNNIDTLPCDGENVNVVVRQGHVRSQSVPTISNPALYRMSLDYHHHNQGMGLL

SEQ ID NO: 153138 - protein, 63 aa, Glycine max
  Clone ID: PAT_MRT3847_109307C.1.pep
VRVGFFYREHITIKIQNLTLLFYLFQLLYLVKPDNLIEITISQIHTFYHSNKTFPKAHSLTIS

SEQ ID NO: 153139 - protein, 88 aa, Glycine max
  Clone ID: PAT_MRT3847_109308C.1.pep
MRKKTYSDLSLFFLPLLLILVSHSLCASAFSHNGPLTDSQVSFIKQRQLLYYKDYFGDRGEKVTLDPSFVFENDRLRNAYIALQAVEG

SEQ ID NO: 153140 - protein, 46 aa, Glycine max
  Clone ID: PAT_MRT3847_109309C.1.pep
QQALYLPFKNGDPKYFYTETHIQNLLSLAMMATRRLTQVVKNCGPN

SEQ ID NO: 153141 - protein, 45 aa, Glycine max
  Clone ID: PAT_MRT3847_10930C.1.pep
FWQFVQQQIEHLLAREGSLIASFNQSCSARLLIRHLYIFLRTCEK

SEQ ID NO: 153142 - protein, 279 aa, Glycine max
  unsure (1)..(279): unsure at all Xaa locations
  Clone ID: PAT_MRT3847_109310C.1.pep
LNLFVQVAFGWGHALARTADGKLFGWXGYSADGRIGKMGNNYFQWGPLESESPNXLTALPNNEQLSTSVLQGMEKGVFMAIERENNMPIVWEPRLVEELRGVHVLDIACGLDHSLVLCXDGVLLSCGSNVYGQLGRAKIDLGVFPVEMSFSPVFIAAGLGHSLAICQFGESDVSVGTTNIASWGWNLSSQLGRPGDGKLPSLIDALDGENPVSVSAGRAHSLALTSKGELWVWGSGKSGRLGLGSSVNQVEPSCIDSLEAFQILQAVSGFDHNLVLVAG

SEQ ID NO: 153143 - protein, 166 aa, Glycine max
  unsure (1)..(166): unsure at all Xaa locations
  Clone ID: PAT_MRT3847_109311C.1.pep
LNLFVQVAFGWGHALARTADGKLFGWXGYSADGRIGKMGNNXLPDISVGIRVSKYLTALADLEAAEKRVLQGMEQENNMPIVWEPRLVEELHGVHVLDIACGLDHSLILCRDGVLLSCGSNVYGQLGRAKTDLGIFPVEMSFSPVLXQGLGHSLAICELGESDVSV

SEQ ID NO: 153144 - protein, 62 aa, Glycine max
  Clone ID: PAT_MRT3847_109312C.1.pep
RRVGYYYGRGPQGYYRYMWERAGCHLVGVVSVHIIGCEHNFGGLAHLAQELVEDLCLLQYLR

SEQ ID NO: 153145 - protein, 126 aa, Glycine max
  Clone ID: PAT_MRT3847_109313C.1.pep
LMSFFTESSSHTWQPTITSDSTTLSYWLNWRFFFCALWILASMALASFLIFKYEGFNKSRSNSGENQGEEEAGLLYEDEAWNTCLKGIDPSWLLIYRIICFVVLLALIIASVAAPSVVFSQPYGRV

SEQ ID NO: 153146 - protein, 60 aa, Glycine max
  Clone ID: PAT_MRT3847_109314C.1.pep
TCEVLVLYFRHDHSVPSDTKRRRNDLGGKSKRFSHYIILRALAGIPGLSGTIVKFLKLSS

SEQ ID NO: 153147 - protein, 90 aa, Glycine max
  Clone ID: PAT_MRT3847_109316C.1.pep
DSNGGGGDDSSKAIVGAVLGIGSVLLILVIVCVVCSRKKKKNRMYYYAGEQSMGKGNNNNYYNSGQHPNYYGGPHGDHVVRMQQNGMGPG

SEQ ID NO: 153148 - protein, 118 aa, Glycine max
  unsure (1)..(118): unsure at all Xaa locations
  Clone ID: PAT_MRT3847_109317C.1.pep
NVHICSPDEHXGDPSKAKKXATHDDAHTRGGPNPPTDKHETQQTKKGPTQPXGNEDNNNRATTKAANNKESEKKEGAPAPDAPKRPTGKRPTGAGPRTGXARDHPGHHQTRAPEQDNP

SEQ ID NO: 153149 - protein, 113 aa, Glycine max
  Clone ID: PAT_MRT3847_109318C.1.pep
VCSPIPGIFNIPCCSPTISQSFGPSCWVLPSLLIFFFYKCLLRSFSKQSLIHFQHVTISTFILIVLKKGSIHQVKKRKSDNVLPEANLFHLPHVVLYKYTQQPTSHGQSYMEV

SEQ ID NO: 153150 - protein, 84 aa, Glycine max
  Clone ID: PAT_MRT3847_109319C.1.pep
GGNLGSGRNPPRGGQNSCGPRPKFSRGVSAAGWGGPPCEIFVGLGRFPSLVVPPIMFPLGGGAPPPRGFKVVFFFKMPPFSLGL

SEQ ID NO: 153151 - protein, 192 aa, Glycine max
  Clone ID: PAT_MRT3847_10931C.1.pep
MSVSCVKNFFQRFWQDEFQTGNIPHGSFLANDDLLPSLGARINQETRLRRYIISPFHPRYRAWELVLVVLVIYSAWICPFEFAFLPYKENALFIADNIVNGFFAIDIVLTFFVAYLDRHSYLLVDDPKKIAIRYISTWFAFDVCSTIPFQSFSFLFNHSSELGFKVLNMFRLWRLRRVSSLVARLEKDIRFN

SEQ ID NO: 153152 - protein, 48 aa, Glycine max
  Clone ID: PAT_MRT3847_109320C.1.pep
AVVTTHFTRGYNKVTTCLHLCNKSLPAYLLEPSITPIKPFVNHRNGCR

SEQ ID NO: 153153 - protein, 61 aa, Glycine max
  Clone ID: PAT_MRT3847_109321C.1.pep
STFETMCLGPRMEIGGKNLSGLFKFKVIGGREKSTWDPHNFFIFFLPLKQKQDLRVMRFFF

SEQ ID NO: 153154 - protein, 53 aa, Glycine max
  Clone ID: PAT_MRT3847_109322C.1.pep
YGQKLVQCVCLIIIACLCLSSFFMIFPPPLSSITFYSCSIGLFLPMLFFHLAC

SEQ ID NO: 153155 - protein, 88 aa, Glycine max
  Clone ID: PAT_MRT3847_109323C.1.pep
MTSNLKPIVAVQAGNESNHGTSSSLNNSNGNQNITGSKINAGANSGDKTRYVNSRVINNNGTFNGNANGCFIEGGSHTTQNYFDGRKD

SEQ ID NO: 153156 - protein, 53 aa, Glycine max
  unsure (1)..(53): unsure at all Xaa locations
  Clone ID: PAT_MRT3847_109324C.1.pep
ICKVTYLLLXYNFSNSSYLLRDTSLARAVGVYMCILQHLISLSDYCTVSEMEF

SEQ ID NO: 153157 - protein, 84 aa, Glycine max
  Clone ID: PAT_MRT3847_109325C.1.pep
LDLQDASCSANARDPCVDFSYKAFHLGPYIIAVLSALRVVSPTRVGFLEGDAAFTRIKSLPGGLAVLDLSALPESLWPPTLPSP

SEQ ID NO: 153158 - protein, 195 aa, Glycine max
  Clone ID: PAT_MRT3847_109326C.1.pep
TVTQTPTVTKTKSVTLSKTDPTIITVCYLATITVNLANFLLPVPISIQLFVNSISCIFIGSYRGAILHHTLPVEEQSKLERMSSKDAYMFPVYGSGVLFGLYCLYKYFSKDLLNKILSVHFTFFGFFSLLQLIAYHLEKVFPDWEQVVIHKALSIPPVLGTKKFDLVVKKSEIVAGLISTSPTALYFTTKYWLLN

SEQ ID NO: 153159 - protein, 53 aa, Glycine max
  Clone ID: PAT_MRT3847_109327C.1.pep
VNFYIFLTPLKSSNSVVYTSREAYLVYFKTITIELLLILISFMPTMNLMIISN

SEQ ID NO: 153160 - protein, 50 aa, Glycine max
  Clone ID: PAT_MRT3847_109328C.1.pep
SYQLMGVILNSLFAFLEARPFYGPIIGTLLSTNIVLLAMHLEHHENEWLK

SEQ ID NO: 153161 - protein, 54 aa, Glycine max
  Clone ID: PAT_MRT3847_109329C.1.pep
YEARTPQFLAVSGYDTDTDTDTTPMPVFGLNLMYLTGVHVSMSVSCPVSVLVLM

SEQ ID NO: 153162 - protein, 58 aa, Glycine max
  Clone ID: PAT_MRT3847_10932C.1.pep
YTLAGKLKTSNFCFLFPICYGSILLKLTTMFYMFKDYSSPQLSFQFKINSRQLVTHVS

SEQ ID NO: 153163 - protein, 61 aa, Glycine max
  Clone ID: PAT_MRT3847_109330C.1.pep
MLQAVLIRFLLSEQLVLDLFIITSSIFFSNAHYYKNLFFVGSIAYLRRFSSRKLRFLTIIS

SEQ ID NO: 153164 - protein, 115 aa, Glycine max
  Clone ID: PAT_MRT3847_109331C.1.pep
MKPQLKIALALVISLLWIQHSFCDENSDTSSLNKWRCRCSFQGNQSYSLANCSKSCDCHSDSEESASVWTCVCDSNGFPQVAADGRSSNCFSTCNCTWGTVSRPGGSKSMFQQDG

SEQ ID NO: 153165 - protein, 419 aa, Glycine max
  Clone ID: PAT_MRT3847_109332C.1.pep
MAATDVTEPTWAELLGRDNWAGLLDPLHPSLRSLILRCGDLIQATYDAFNNDKNSLYCGASRYGKASFFRKVMLDCPENYDVAAFLYATARVTVPEAFLLHSLSREAWDRESNWIGYIAVTSDSRSQELGRREIYVVWRGTTRDMEWINVFGAGQVDASGLLSAKSLKELKDGNKDGSSSSSDEEDDPRKPKVMSGWLTIYTSDNPKSPFTKSSARTQLQAHVKSLLQHYSSENPSLVIVGHSLGATLSIVSAFDLVENGVTEVPVTAIVFGSPQVGNKAFNERFNMFPNLKVLHVKNVIDLIPHYPGKLLGYEYMGTELVIDTRKSPSLKDSRNPGDWHNLQAMLHVVAGWNGKKEEFEMRVKRSVALVNKSCEFLKEEYGVPGSWWVEKNKGMVKREDGEWVLDAPDEEDVPVLEEI

SEQ ID NO: 153166 - protein, 742 aa, Glycine max
  unsure (1)..(742): unsure at all Xaa locations
  Clone ID: PAT_MRT3847_109333C.1.pep
MKGTVLVAIAAAIGNILQGWDNASIAGAIVYIKKDLALQTTMEGLVVAMSLIGATVITTCSGPIADWLGRRPMMIISSVLYFLGGLVMLWSPNVYVLCLARLLDGFGIGLAVTLVPVYISETAPSEIRGSLNTLPQVSGSGGMFLSYFMVFGMSLSPAPSWRLMLGVLSIPSLLYFALTIFFLPESSSSGSVSKXNLMLRRQTKCSQRLRGREDVSGEMTLLVEGSTXIGGDTSIEEYIIGXADQVADGHEHATEKDKIRLYGSQAGLSWLAKPVTGQSSIGLASRHGSIINQSMPLMDPLVTLFGSIHEKLPETGAGGSMRSTLFPNFGSMFSTAEPHAKNEQWDEESLQREGEDYMSDAAGGDSDDNLHSPLISRQTTSLEKDLPPPPPSHGSILGSMRRHSSLMQGSGEQGGSTGIGGGWQLAWKWTDKGEDGKQQGGFKRIYLHEEGVSASRRGSIVSIPGEGEFVQAAALVSQPALYSKELIDGHPVGPAMVHPSETASKGPSWKALLEPGVKHALVVGVGIQILQQFSGINGVLYYTPQILEEAGVEVLLSDIGIGSESASFLISAFTTFLMLPCIGVAMKLMDVSGRRQLLLTTIPVLIGSLIILVIGSLVNFGNVAHAAISTVCVVVYFCCFVMGYGPIPNILCSEIFPTRVRGLCIAICALVFWIGDIIITYSLPVMLGSLGLGGVFAIYAVVCFISWIFVFLKVPETKGMPLEVISEFFSVGAKQAASAKNE

SEQ ID NO: 153167 - protein, 98 aa, Glycine max
  Clone ID: PAT_MRT3847_109334C.1.pep
AAYIGDTHGRYTKNIAWIKRGFNLLYDHHRLRAEVACTEHRPPHAPQPPPTLLRRVSHIPNTDYFTLSLRLRILLRDETTQHANHSPCSKYSSTIRNL

SEQ ID NO: 153168 - protein, 63 aa, Glycine max
  Clone ID: PAT_MRT3847_109335C.1.pep
KEIMPLKKESLSLEMLPSISPISNSNEVRLMRNICHLESAYFSMRSNFSFLKQMLQLTLIKIY

SEQ ID NO: 153169 - protein, 212 aa, Glycine max
  Clone ID: PAT_MRT3847_109336C.1.pep
QGVRRYPTFFAMLEAESLGKVLPGVESSEEGVKVYQRFCTEEKEQANGVLAIVVSKFTPQPYDSLARLFCELSYEGVQSLLGLMHTTGTIPNALPPPISTLLASFNFPCNPNENGLTDGARALAKHACRSSSGYWGSLNGNDSNKNRLAMDVINRLISHCCWLNVYTVPPHGVVFEIRVANGYGARWTEDGSKFIGFLEPYMQDGHSKRWKH

SEQ ID NO: 153170 - protein, 97 aa, Glycine max
  Clone ID: PAT_MRT3847_109337C.1.pep
HVSISMMAVPESVPFVLTKKIALPLPECGKIQISVLVQDSHRVPIQTFVPFAVPPLFPVYHPVSPYQPLLISDYERISVIIARSMARYEIGEIVAGG

SEQ ID NO: 153171 - protein, 175 aa, Glycine max
  unsure (1)..(175): unsure at all Xaa locations
  Clone ID: PAT_MRT3847_109338C.1.pep
ASSMISSPAVTTVNRAGARMVAPFSALKNMDGFPTTNTNNDITSIGINGGTPQCMQEWPTLGYKKYDTLSYLPDLDDALLTKEXKYLLKNGWIPCLEFQLEHGFAYRDHDRSPRYYDGRYWTMRNLPMFGCTDAYHVIKDLQEVNTVYPNGFIRIIEFNNFLQEQRISFIAYKTP

SEQ ID NO: 153172 - protein, 144 aa, Glycine max
  Clone ID: PAT_MRT3847_109339C.1.pep
RLRDGETPNAVPSHAKLHGLLLEERIENGYSNPARLVKLKKRQLNGPAVETRAGKSYMEKFLETPSPDHKMVCETSIFPLPVKQTSDDASEAGIKILEISSISPVKKSLGNKNTYSSPDEKELELKPFSQMDGGTNGDLVKVKE

SEQ ID NO: 153173 - protein, 87 aa, Glycine max
  Clone ID: PAT_MRT3847_10933C.1.pep
VAEGCPCGWERFTCRAGAASPAALGDVRPPEGTGPPAFLGAVAAIMLRRGFSARAFPLSPTRTGGYLFWSLQQDIRTLSHQNGWTLA

SEQ ID NO: 153174 - protein, 370 aa, Glycine max
  Clone ID: PAT_MRT3847_109340C.1.pep
MFPLQVQRLAPRPRHISRQKPPMFFCALLLLLLPICVVGIFIHGQKITYFFRPLWDNPPAPFTSIPHYYAENVSMEHLCRLHGWSLRSKPRRIFDAVIFSNELDMLEIRWHELSPYVSKFVILESNTTFTGIPKRLFFALNRERFSFAKQKIVHDIYPGRIAVPGSHEDPFVLESKQRGAMNALLCRAGISNGDILLMSDTDEIPSPHTLKLLQWCDGIPPIMHLELRHYMYSFEFPVDYSSWRATAHVYGPQTQYRHSRQTDVIFSDAGWHCSFCFQYISEFVFKMTAYSHADRVKRKYFLSHSRIQDIICKGDDLCDMLPEEYSFQELIKKMGSIPRSASAVHLPAYLIENADKFKFLLPGGCLRPPE

SEQ ID NO: 153175 - protein, 448 aa, Glycine max
  Clone ID: PAT_MRT3847_109341C.1.pep
MNPPSLGGSKEQGTAAGGGGYPNARVRRKEVASAVEPEQPAWSSAGAASKLAHASALEKVSSGRWQSKAVNYQTDAEVVRSPEVENRPHEYYDAMLARHAERGLGIDNPMQGGRNELPNYERSGVSRYSDVRPTSAPHHSGGVQLARNDGKIVGSDLQHPMPSELTERHKLKLLPRAKPVESSEPAVMDYAQGNRHVNDSGHVETVYQAHGHANFVKPVSAGNDNGKDAGQRPKLNLKPRSQPTEKLDGNSERDRNVLFGGARPRELVLKERGIDDVSINVVEHSNRVENNILRVQKHPDHSTQTRYGEKTEDAHLDQKTGRKPERKEQRADGDRAHAQRRNWRGDTRRNGKETDRQPHAPERQPSPETWRKPVEQQLKSAPGAASTRYSRAASAVELAQAFSRSVSDPKVNDRFSGQRGLNTGNSSRTQVPFSRLVGPTSRPQINGY

SEQ ID NO: 153176 - protein, 49 aa, Glycine max
  Clone ID: PAT_MRT3847_109342C.1.pep
VKKNNIKPYKCSHTPYYHDINKNMFKLQGSLAYTPVCSGTNQSNQLLPS

SEQ ID NO: 153177 - protein, 154 aa, Glycine max
  unsure (1)..(154): unsure at all Xaa locations
  Clone ID: PAT_MRT3847_109343C.1.pep
MGYVKVETVFTPSTIAVIIGFAIGAISPIKKLVVGDSAPFRVIISSASLVGFKXSGISIFLIIGIMVVRFIISPILGILIVKAAYYRGFIGSYSLYQFVLMLQYALPPARNAGIVAHMLGNGESECSLIMIWTYFIATFSLALWCTFFMCMLEV

SEQ ID NO: 153178 - protein, 57 aa, Glycine max
  Clone ID: PAT_MRT3847_109344C.1.pep
FSIGFTLLQSLSHYIIWRQQRCSGYCALLCLVYMSVVLVEHARTWRLDTTMHDGLPS

SEQ ID NO: 153179 - protein, 88 aa, Glycine max
  unsure (1)..(88): unsure at all Xaa locations
  Clone ID: PAT_MRT3847_109345C.1.pep
KPLFHFFHPYGVTALLRSLRRRDLPSSSLSAFCTLTSGTKTAYVGNKWASLSRPFSSKTAGNDVMRIDLGTTKSCDDVMEEXNPKVIE

SEQ ID NO: 153180 - protein, 159 aa, Glycine max
  Clone ID: PAT_MRT3847_109346C.1.pep
FIASPLHGAVLLSPLHIDGGDAILGISEAVDTLILFLNPSLFKSFTSQCGAYLISQTPHSRKRASDSFCFRLINPLNSSRNRNFKNMSSRQVVKRAKYKTTVKDPGTPGVLKLTQDRFVFKPNDPTSKTKLDVEFRFIQGHKVTKEGSKQPPLLNLIRA

SEQ ID NO: 153181 - protein, 52 aa, Glycine max
  Clone ID: PAT_MRT3847_109347C.1.pep
FNNVKVVPISFSRLRVKIDSIMVPGMLRRKIPKFNGYTRTLYIVHFLFTLSS

SEQ ID NO: 153182 - protein, 104 aa, Glycine max
  unsure (1)..(104): unsure at all Xaa locations
  Clone ID: PAT_MRT3847_109348C.1.pep
RLIGSVDVVVSVKTGSSVFLPGLLAEAHRGVLYVDEINLLDEGISNLLLNVLSEGVNTVECEGISFMLPCRPLLXXXNPEEGAVREHLLDRIAINLRSSWPESI

SEQ ID NO: 153183 - protein, 77 aa, Glycine max
  Clone ID: PAT_MRT3847_109349C.1.pep
IKKYEIYYNNLNHAISYNVIINIISINKKGETNSHVFKSNIFLVVRIEKCYLATEINDRKILVSGSDRSRDHTIIGA

SEQ ID NO: 153184 - protein, 60 aa, Glycine max
  unsure (1)..(60): unsure at all Xaa locations
  Clone ID: PAT_MRT3847_10934C.1.pep
SLNLPNHKPLPLLPRKFLLFHTSSFFLLVLLPSSISKVFHQIFTRLVSIQHISVKGMXHS

SEQ ID NO: 153185 - protein, 49 aa, Glycine max
  Clone ID: PAT_MRT3847_109350C.1.pep
MNRCDWAIHEGSGSTFVTMAYSRFKWEIRTVPITLSGNPSCVFPCSRKP

SEQ ID NO: 153186 - protein, 72 aa, Glycine max
  unsure (1)..(72): unsure at all Xaa locations
  Clone ID: PAT_MRT3847_109351C.1.pep
HEXKKKEGMKCDHYGTGCKEEQTQPISAQAQRTNQANSFSRPNGPRPKEKTFGPPNNKWHRLITVHHHAAHK

SEQ ID NO: 153187 - protein, 90 aa, Glycine max
  Clone ID: PAT_MRT3847_109352C.1.pep
SWSRKDLMSVTKQRTIITALHSKITSIDFGQQGPRAGCNKDLRGAPVDSQPLVVSPKAWTWKAMEPGLSQQRFRCGVGAISLLSEENSSR

SEQ ID NO: 153188 - protein, 44 aa, Glycine max
  Clone ID: PAT_MRT3847_109353C.1.pep
ASSFDINLKGSIIGKKHNEMGYVVFLEICDIRIESSLLAEFYHP

SEQ ID NO: 153189 - protein, 50 aa, Glycine max
  Clone ID: PAT_MRT3847_109354C.1.pep
SLLSFLFFEVIRLQCHHISHFCGRRISCCLLSTLLESTFCVLLFTLMFYA

SEQ ID NO: 153190 - protein, 87 aa, Glycine max
  Clone ID: PAT_MRT3847_109355C.1.pep
MAATAPATETRVEIKEPPTEELLEPLMCKSCVLKVSIHCQGCTRKVKKILQSIDGVHCKLKPNIFHFYFHSSLFIHTLVTPYNFFKS

SEQ ID NO: 153191 - protein, 61 aa, Glycine max
  unsure (1)..(61): unsure at all Xaa locations
  Clone ID: PAT_MRT3847_109356C.1.pep
RALNQLKTQGKEKRYXVFASNSPKSXLSHFINPSPWAIDIPNSILRSFYFGKPLNYYXXVI

SEQ ID NO: 153192 - protein, 33 aa, Glycine max
  Clone ID: PAT_MRT3847_109357C.1.pep
YAIHTTNILRVRVVNAAVHCSEFMTQQHWHQSS

SEQ ID NO: 153193 - protein, 48 aa, Glycine max
  Clone ID: PAT_MRT3847_109358C.1.pep
LRRVGWVLTARSILLLASYRPPVPLAFFPSLPPTSAGFPQLYLSGCLP

SEQ ID NO: 153194 - protein, 119 aa, Glycine max
  Clone ID: PAT_MRT3847_109359C.1.pep
MGSKVVASVALLLSINILFISMVSSSSHYDPQPQPSHVTALITRPSCPDLSICLNILGGSLGTVDDCCALIGGLGDIEAIVCLCIQLRALGILNLNRNLQLILNSCGRSYPSNATCPRT

SEQ ID NO: 153195 - protein, 605 aa, Glycine max
  Clone ID: PAT_MRT3847_10935C.1.pep
MMRARFPLLLLGLVFLASVSVSFGIAYWEKENPKHNKCLQSCNSERDSYRNQACHARCNLLKVEKEECEEGEIPRPRPRPQHPEREPQQPGEKEEDEDEQPRPIPFPRPQPRQEEEHEQREEQEWPRKEEKRGEKGSEEEDEDEDEEQDERQFPFPRPPHQKEERKQEEDEDEEQQRESEESEDSELRRHKNKNPFLFGSNRFETLFKNQYGRIRVLQRFNQRSPQLQNLRDYRILEFNSKPNTLLLPNHADADYLIVILNGTAILSLVNNDDRDSYRLQSGDALRVPSGTTYYVVNPDNNENLRLITLAIPVNKPGRFESFFLSSTEAQQSYLQGFSRNILEASYDTKFEEINKVLFSREEGQQQGEQRLQESVIVEISKEQIRALSKRAKSSSRKTISSEDKPFNLRSRDPIYSNKLGKFFEITPEKNPQLRDLDIFLSIVDMNEGALLLPHFNSKAIVILVINEGDANIELVGLKEQQQEQQQEEQPLEVRKYRAELSEQDIFVIPAGYPVVVNATSNLNFFAIGINAENNQRNFLAGSQDNVISQIPSQVQELAFPGSAQAVEKLLKNQRESYFVDAQPKKKEEGNKGRKGPLSSILRAFY

SEQ ID NO: 153196 - protein, 134 aa, Glycine max
  Clone ID: PAT_MRT3847_109360C.1.pep
MGSKVVASVALLLSINILFISMVSSSSHYDPPPPPCYVPAPLTPPPSLSPPPSLSPPPPSGPSCPDLSVCLNILDGSPADDCCALIADLVDLEASVCLCIQLRVLGIVNLDLNLQLILNACGPSYPSNATCPRT

SEQ ID NO: 153197 - protein, 78 aa, Glycine max
  unsure (1)..(78): unsure at all Xaa locations
  Clone ID: PAT_MRT3847_109361C.1.pep
MQILVETXTGKTITLAEESSDTIDXNGKAKIQDTEGILTDQKRIIFAGKQLEDXRTLADYNIQKESTLHLVLRLRGGM

SEQ ID NO: 153198 - protein, 33 aa, Glycine max
  Clone ID: PAT_MRT3847_109362C.1.pep
LILTCILHLEFMFSTFYDMSFNRIRISTRVVFF

SEQ ID NO: 153199 - protein, 89 aa, Glycine max
  Clone ID: PAT_MRT3847_109363C.1.pep
KRRTPPEMGPTRGGATVVKTCRVDPVCKTSTGRRFGSGTGNLFWPARVFPPPTVVKSGQVHFYLGAPKKTQTVACPGQETWGPKKDRPL

SEQ ID NO: 153200 - protein, 80 aa, Glycine max
  Clone ID: PAT_MRT3847_109364C.1.pep
NLINYLIYHNHLTTHPYRLQISMKQPNINEQSLHTPENGPFTVICQVNINVALELRRFSEMFWMNMKSTSTCMFCKNEEN

SEQ ID NO: 153201 - protein, 200 aa, Glycine max
  Clone ID: PAT_MRT3847_109365C.1.pep
RDKLVYREENMKLFVFFVAAVVLVAWPCHGAGYQRFPLRMKTGYGERSSEVKCASFRLAVEAHTFQPFKPFLENGVDPPRDSFIGNHLKSNFKPVTHQPFFIVVDPKVLTTDFLFFGLNTTGLFIFHSYENLGFGGEELMEPLFNDGVTRANPPALQKILKITTSLWLLGFKNGFLPGSILDRMAEQKPTQEGWFQAWER

SEQ ID NO: 153202 - protein, 76 aa, Glycine max
  Clone ID: PAT_MRT3847_109366C.1.pep
KQHLSYYKSTKRTDQHKCIYMNKQNGEALHIHALTDKKNSEGSGSVIPSYSLSATKNKTRFQSTNVINHSKLTVPT

SEQ ID NO: 153203 - protein, 90 aa, Glycine max
  Clone ID: PAT_MRT3847_109367C.1.pep
SSYSSAAYVLSSAVPLPFRPLFSLCYSVFSSSLGFSCSSISPFWLFVQSCSIVSSLLCCSNPCVSFSTDSLSCLRKTSSTIKGVIWPVSA

SEQ ID NO: 153204 - protein, 36 aa, Glycine max
  Clone ID: PAT_MRT3847_109368C.1.pep
MLYDDCTKGLTWPPVFLYIFPHRMPTDFISHPPGMC

SEQ ID NO: 153205 - protein, 53 aa, Glycine max
  Clone ID: PAT_MRT3847_109369C.1.pep
PHLPRESVHRVLRRPFSYRYRVVSELGRWISREDRIREIRACVKPSSERERER

SEQ ID NO: 153206 - protein, 623 aa, Glycine max
  Clone ID: PAT_MRT3847_10936C.1.pep
MRARFPLLLLGVVFLASVSVSFGIAYWEKQNPKHNKCLQSCNSERDSYRNQACHARCNLLKVEKEEECEEGEIPRPRPRPQHPEREPQQPGEKEEDEDEQPRPIPFPRPRQPRQEEEHEQREEQEWPRKEEKRGEKGSEEEQDGREHPRPHQPHDEDEEQDERQFPFPRPPHQKESEERKQEEDEDEEQQRESEESESSESQRELRRHKNKNPFLFGSNRFETLFKNQYGRIRVLQRFNQRSPQLQNLRDYRILEFNSKPNTLLLPNHADADYLIVILNGTAILSLVNNDDRDSYRLQSGDALRVPSGTTYYVVNPDNNENLRLITLAIPVNKPGRFESFFLSSTEAQQSYLQGFSRNILEASYDTKFEEINKVLFSREEGQQQGEQRLQESVIVEISKEQIRALSKRAKSSSRKTISSEDKPFNLRSRDPIYSNKLGKFFEITPEKNPQLRDLDIFLSIVDMNEGALLLPHFNSKAIVILVINEGDANIELVGLKEQQQEQQQEEQPLEVRKYRAELSEQDIFVIPAGYPVVVNATSNLNFFAIGINAENNQRNFLAGSQDNVISQIPSQVQELAFPGSAQAVEKLLKNQRESYFVDAQPKKKEEGNKGRKGPLSSILRAFY

SEQ ID NO: 153207 - protein, 178 aa, Glycine max
  Clone ID: PAT_MRT3847_109370C.1.pep
MGSFVRIARNLLWSSFCSQSLSKNVSQQLFTSSVSVFKSYKFRYGRTPVRKHREANATHTTAVELAFNSVVKIFTVSCSPNYLLPWQNKSQRETMGSGFVILGRKILTNAHVVADHSFVLVRKHGCPTKYRAEVKAVGHECDLAILVIENKEFWDGMNPLELGDVPFLPEAVAVVGYP

SEQ ID NO: 153208 - protein, 72 aa, Glycine max
  Clone ID: PAT_MRT3847_109371C.1.pep
PTRAIKSQTREKKEQTLDLTALCTHRNRDKYSNSNFPHSIPISLLHAPAHSTHMDASAFMHHHNAPFFQDLQ

SEQ ID NO: 153209 - protein, 64 aa, Glycine max
  unsure (1)..(64): unsure at all Xaa locations
  Clone ID: PAT_MRT3847_109372C.1.pep
TIXNDCGXLXVAKVGNXKQIXGFHVAGSXGRLGYASLIPXVEXVXXAXSAXVYFXXLPXEPHRH

SEQ ID NO: 153210 - protein, 55 aa, Glycine max
  Clone ID: PAT_MRT3847_109373C.1.pep
LFLGMVLGMREFRHGESTGNLAVVPPWRGHSRYINLKAIRLIARDGLAPLVNDHG

SEQ ID NO: 153211 - protein, 51 aa, Glycine max
  Clone ID: PAT_MRT3847_109374C.1.pep
VFFFFLFVLGQVLTYIAIKLSAILNVHSNESDPIIYFCRKFNEELVNEIIF

SEQ ID NO: 153212 - protein, 81 aa, Glycine max
  Clone ID: PAT_MRT3847_109375C.1.pep
KVDFKIWIYFFKSSLRNILRGCTFSKGGFKWPPYIQETPPIYGKRGNNPENKKRVMGHLYVGLKNIGFQYNPFTYLPVDCN

SEQ ID NO: 153213 - protein, 92 aa, Glycine max
  unsure (1)..(92): unsure at all Xaa locations
  Clone ID: PAT_MRT3847_109376C.1.pep
MFAYICVSMDKCSVLIPMKLPIKRSNNLSIRETSTNHPYVAANIGHQNLKTRVXKNNCNPDWNEKLTLSVQDVKSSKHMTVYDKHTFSDDDK

SEQ ID NO: 153214 - protein, 58 aa, Glycine max
  Clone ID: PAT_MRT3847_109377C.1.pep
RSPMDMLVGYLKTILTEPPHFQIYIPNLITFDPILLSNPAYSLDSTWTTPIHDTVVVY

SEQ ID NO: 153215 - protein, 81 aa, Glycine max
  unsure (1)..(81): unsure at all Xaa locations
  Clone ID: PAT_MRT3847_109378C.1.pep
GLPSSGIRRTVINSRVHLSSSTVWLERCLRPMADEYATKXSAKRKHSTTSVTDKPSRVSAQDVNEALLRCNLITLISLLVR

SEQ ID NO: 153216 - protein, 104 aa, Glycine max
  Clone ID: PAT_MRT3847_109379C.1.pep
WKVIGYVCFPASFWVLYSYPIKCKSRIRGCPMIIWEDVYSFHSMCNCFKDTICLLKGFFNDRQSYCHIRSSSCYISLGRSCMCISYCKACMFVRSAKRSGKYMP

SEQ ID NO: 153217 - protein, 54 aa, Glycine max
  Clone ID: PAT_MRT3847_10937C.1.pep
VGFAVRFGHRHRPTQGFPSVPSVKVAFFLVGWALWASQAPRKHLVRALEPYALS

SEQ ID NO: 153218 - protein, 35 aa, Glycine max
  Clone ID: PAT_MRT3847_109380C.1.pep
CCHLLITRRLKHAHSEILGEHRWLKFLEVARFGRV

SEQ ID NO: 153219 - protein, 49 aa, Glycine max
  unsure (1)..(49): unsure at all Xaa locations
  Clone ID: PAT_MRT3847_109381C.1.pep
LLMSYEYGLLELIWKIFFINSYNWKKKNEISFLLQFVXSLVNLQALIVL

SEQ ID NO: 153220 - protein, 84 aa, Glycine max
  Clone ID: PAT_MRT3847_109382C.1.pep
KQKGAIFYNWTKNLMHNEFCCMRKTCCITSDFEWALEVFELGRIAPFFPQKKIGTPLIILQTQLTIGLFKNKPLPMEKKPFFLF

SEQ ID NO: 153221 - protein, 128 aa, Glycine max
  unsure (1)..(128): unsure at all Xaa locations
  Clone ID: PAT_MRT3847_109383C.1.pep
MAIEKNSFKVSRLDSECSPRSREIMSSDEEVIRRRNSAAESDDDDEFDDADSGAGSDDFDLLELGETRAEFCQIGNQTCSIPLELYDLSXLEDVLSVDVWDDCLRRRKXFELAKYLPDMDQETFCSDL

SEQ ID NO: 153222 - protein, 58 aa, Glycine max
  unsure (1)..(58): unsure at all Xaa locations
  Clone ID: PAT_MRT3847_109384C.1.pep
ILKXKTRPPIFKTPIHIHTQSLKNFYPNPSLFSLHTYITNSNLLYSILKLHFSSTIYY

SEQ ID NO: 153223 - protein, 46 aa, Glycine max
  Clone ID: PAT_MRT3847_109385C.1.pep
VKLGCGIESVAYGKLVYLNLYPLERTQFFSNILYMIRGQPLKQTSL

SEQ ID NO: 153224 - protein, 359 aa, Glycine max
  Clone ID: PAT_MRT3847_109386C.1.pep
MSIVFSAAATLSPRSRLLFPPLSFSHTYPTKFHRNGWHPSLSKSRTQPLITNSLLSDKFPTVGSLSTGPIPSTHLIEVVKTAAQTGAQVVMEAVNKPRNITYKGLTDLVTETDKMSEAAILEVVKKNFEDHLILGEEGGVIGDAASDYLWCIDPLDGTTNFAHGYPSFAVSVGVLYRGNPAAAAVVEFVGGSMCWNTRLFSATAGGGAFCNGQRIQVSATNQVERSLLVTGFGYDHDDAWATNIDLFKEFTDVSRGVRRLGAAAVDMCHVALGIVEAYWEYRLKPWDMAAGVLMVEEAGGTVSRMDGGKFCVFDRSVLVSNGQLHAKLLERIGPATEKLKNKGIDFSLWYKPENYRADV

SEQ ID NO: 153225 - protein, 40 aa, Glycine max
  Clone ID: PAT_MRT3847_109387C.1.pep
IQQVCHVVCPRIQWHKLFLTTRIIDTNMHQEATTWQRLYT

SEQ ID NO: 153226 - protein, 66 aa, Glycine max
  Clone ID: PAT_MRT3847_109388C.1.pep
HASLKRDACRFFPSVINFFFSLSKGTHHVKVLHFAPSFSHFQSNTLTGIVKFDFPRRYLVSLLIIT

SEQ ID NO: 153227 - protein, 70 aa, Glycine max
  Clone ID: PAT_MRT3847_109389C.1.pep
HNQNPILFTWSYTLSLDKQTLCVFTKDAGYYNNHHVPSFISMIFNDNLPFTLCFVYCKTCFFVNIFILRV

SEQ ID NO: 153228 - protein, 109 aa, Glycine max
  Clone ID: PAT_MRT3847_10938C.1.pep
LGAELAADEGRSAAALAACRTLAEELTEYRFPAPRILAFKEGSSQARYFVSRLIPAHKDPPYEQEARFPQLRSLTSEQRTKLKASFVHFDDPSFCEWMRSLKVVPPQPS

SEQ ID NO: 153229 - protein, 71 aa, Glycine max
  Clone ID: PAT_MRT3847_109390C.1.pep
QPAKTGRHQDSHQIKNDEQHLFSLPQFFITLLRGSGSHSYFHIQLLIHGVARTPNRRPQSSAVNNRFLCWL

SEQ ID NO: 153230 - protein, 120 aa, Glycine max
  Clone ID: PAT_MRT3847_109391C.1.pep
FRMISHKFHGKGPGKMKQEKRMKQYHEELKMKQMKSSDTPSLSVERMREAQARLQTPYLVLSGHVKPGQTSDPKSGFATVEKDLPGGLTPMLGDRKVEHFLGIKRKAEPSSSDTPKKPKS

SEQ ID NO: 153231 - protein, 58 aa, Glycine max
  unsure (1)..(58): unsure at all Xaa locations
  Clone ID: PAT_MRT3847_109392C.1.pep
YTSFASALNLDQNLELRIVTTNQCLVNLSLLIGYNLIKLLYLLNSSSCNARXHHGFXT

SEQ ID NO: 153232 - protein, 330 aa, Glycine max
  Clone ID: PAT_MRT3847_109393C.1.pep
VFVDDDEDLRKSLEKARRLALKKKEGEGASGPQAIALLATSNHNNETDDQNPTAGESRENKVVFTEMEEFVWGLHIDEEARKPESEDVFMHDDEEANVPDEEKINEVGGWTEVQETSEDEQRNTEDKEEIIPDETIHEVAVGKGLSGALKLLKERGTLKESIEWGGRNMDKKKSKLVGIVDDEEKEAQKTREIRIERTDEFGRILTPKEAFRMISHKFHGKGPGKMKQEKRMKQYYEELKMKQMKSSDTPSLSVERMREAQARLQTPYLVLSGHVKPGQTSDPKSGFATVEKDLPGGLTPMLGDRKVEHFLGIKRKAEPSSSDTPKKPKS

SEQ ID NO: 153233 - protein, 43 aa, Glycine max
  Clone ID: PAT_MRT3847_109394C.1.pep
RPSSCYYSHFVPSPAISFLSEEVVVLFSHRRMRCRLQSFLQIK

SEQ ID NO: 153234 - protein, 112 aa, Glycine max
  Clone ID: PAT_MRT3847_109395C.1.pep
METKSTSSFTNLVDQSVCPGDVKFDLSKMINQTIEFGGRIRQDFDAISMVKAGRLEHARVDKYWVGISRGDGVLALLIGKGSEFGEDVEGAQDLLSLEREHARLLRLVSKVE

SEQ ID NO: 153235 - protein, 45 aa, Glycine max
  unsure (1)..(45): unsure at all Xaa locations
  Clone ID: PAT_MRT3847_109396C.1.pep
LLXXPVXXCRHSIPXXTFXXALLXRAXLKMKIETPNQXXXNNXGL

SEQ ID NO: 153236 - protein, 187 aa, Glycine max
  Clone ID: PAT_MRT3847_109397C.1.pep
KLKKLRILSFSGSRIENLPAELKNLDKLQLLDISNCSVVKRIPPQLMSRLTSLEELYVRNCFMEVSEEGERNQCQISFISELKHLHQLQVVDLSIPCAEVFPKELFFDNLSDYKIEIGNFEMLSAGDFRMPNKYENFKSLALELKDDTDNIHSQKGIKLLFKRVENLLLGELNGVQDVINELNLDGF

SEQ ID NO: 153237 - protein, 229 aa, Glycine max
  Clone ID: PAT_MRT3847_109398C.1.pep
MAETLIQIGVVGCADIARKVSRAITLAPNAALCAVASRSHDKAAAFAAANGFPLSAKVYGSYESLLEDPDVDAVYMPLPTSLHLHWAVLAAQNKKHLLLEKPVALDVAQFDRILEACESSGVQFMDNTMWVHNPRTAAMAHFLNDAQRFGNLKSVRTCFTFAADPDYLNTNIRVKSDLDALGSLRDAGWYCIRAILLAANYELPKTVVASYEPVLNKDGVILDCGASLY

SEQ ID NO: 153238 - protein, 42 aa, Glycine max
  Clone ID: PAT_MRT3847_109399C.1.pep
ARVFYVGLIHLLDMCQLPSATHMNGTNGCNNPILRSCTRAIP

SEQ ID NO: 153239 - protein, 45 aa, Glycine max
  Clone ID: PAT_MRT3847_10939C.1.pep
LACTNGFPNTQSSHLLSSAIVCIVALLTFKRNSIDGKSTRGDAWA

SEQ ID NO: 153240 - protein, 72 aa, Glycine max
  Clone ID: PAT_MRT3847_1093C.1.pep
RLELEPLEPFQVKLYAKHMEKTREQIEADIQRPKYFSPSEAVEYGIIDKVIYNDRGSEDRGVVSDLKKARLI

SEQ ID NO: 153241 - protein, 96 aa, Glycine max
  Clone ID: PAT_MRT3847_109400C.1.pep
ITQRAFIPQRKVRTCFTFAADPDYLNTNIRVKSDLDALGSLGDAGWYCIRAILLAANYELPKTVVASYEPVLNKDGVILDCGASLYWEDGKVATFH

SEQ ID NO: 153242 - protein, 89 aa, Glycine max
  Clone ID: PAT_MRT3847_109401C.1.pep
HVDSAMGTPSSNPLFIFFLFYSSVSLNPSDLTFESTYARLCNHHVPAPPSRSAEGTFPGVADELRFQFGYFAGGHRFFNRSVSMKNRAS

SEQ ID NO: 153243 - protein, 76 aa, Glycine max
  Clone ID: PAT_MRT3847_109402C.1.pep
LLEKPVALDVAQFDRILEACESSGVQFMDNTMWVHNPRTAAMAHFLNDAQRFGNLKSLQCKSSLSILIAIFAWPNF

SEQ ID NO: 153244 - protein, 143 aa, Glycine max
  Clone ID: PAT_MRT3847_109403C.1.pep
MLLGKRPRPPMKRTTSMSEMTLDLNTAADAAAAADQQRSGVGPSAAADQTTRMLASPKILRRHSSYFGDARHFLRACSLCKRPLVPGRDIYMYRGDSAFCSLECRQQQINQDERKEKFVMASKKKVVAPPPSGSQVVATATKG

SEQ ID NO: 153245 - protein, 57 aa, Glycine max
  unsure (1)..(57): unsure at all Xaa locations
  Clone ID: PAT_MRT3847_109404C.1.pep
IIIGFYDIKSKTVIKTALECAFTIXFINTLRASSSFPFRAEVSLTLSCCPVAYLSKL

SEQ ID NO: 153246 - protein, 63 aa, Glycine max
  unsure (1)..(63): unsure at all Xaa locations
  Clone ID: PAT_MRT3847_109405C.1.pep
MQALLMFCGDNRVTETPVFNCRDXLLSGEHYTIASEVRQILPHYKPWDVNTLLNYIPRSFLTD

SEQ ID NO: 153247 - protein, 133 aa, Glycine max
  Clone ID: PAT_MRT3847_109406C.1.pep
VVSNARRIPLHSLLILLFACVAIMKYLAKELSSQFLLESVNYPAATQAPVSLGEAFQGFLTEIAYETAMMMVFLLAFLVSCPRPLFGVAMVATSFLGLFLYIPDLVGKAPGIVVTCGFFTMPLICFTTIVAFV

SEQ ID NO: 153248 - protein, 131 aa, Glycine max
  Clone ID: PAT_MRT3847_109407C.1.pep
TRQKNFNPGGPPVFILVKTKIFCKIFGEPWIFRPGLFGWKTPEQVSQFLKLRGMFPLGYGLCFPNFKIGRGTLSTGKREVPFNWIIVAPPPPKPLFFLGCKRATHILNGVLGGAPFALFFKKIKIVYFSPF

SEQ ID NO: 153249 - protein, 50 aa, Glycine max
  Clone ID: PAT_MRT3847_109408C.1.pep
LFLTQLVCRMLIMPRENSWSDPATFTKQVSLCSPCRERYFFNHSTLPQVA

SEQ ID NO: 153250 - protein, 213 aa, Glycine max
  Clone ID: PAT_MRT3847_109409C.1.pep
MAENGEGGEEYLFKIVLIGDSAVGKSNLLSRFARNEFDSNSKATIGVEFQTQLVEIDGKEIKAQIWDTAGQERFRAVTSAYYRGAVGALVVYDISRRGTFDSIKRWLQELTTQNDSTVARMLVGNKCDLENIREVSTEEGKSLAEEEGLFFMETSALDATNVQTAFEIVIREIYNNISRKVLNSDSYKAELSVNRVSLVNGAGSKQGPSCCSR

SEQ ID NO: 153251 - protein, 72 aa, Glycine max
  Clone ID: PAT_MRT3847_10940C.1.pep
NSAPGSSQARYFVSRLIPAHKDPPYEQEARFPQLRSLTSEQRTKLKASFVPFDDPSFCEWMRSLKVVPPQPS

SEQ ID NO: 153252 - protein, 74 aa, Glycine max
  Clone ID: PAT_MRT3847_109410C.1.pep
VRGVGYYDTFLKNYQDLAKTRNWKQPLLVALSYSEQILDEGVIPMTSSDLPVDALVSPEGVIPISKTALNSMDL

SEQ ID NO: 153253 - protein, 82 aa, Glycine max
  unsure (1)..(82): unsure at all Xaa locations
  Clone ID: PAT_MRT3847_109411C.1.pep
GTTYYVVNPDNNENLRLITLAIPVNKPGRFESFFLSSTEAQQVLLQGLSRNXLEAIXXTKVEEXNKGLCXIEEGQQQGEQRQ

SEQ ID NO: 153254 - protein, 57 aa, Glycine max
  unsure (1)..(57): unsure at all Xaa locations
  Clone ID: PAT_MRT3847_109412C.1.pep
LGLRLRXHXXXXXXRXCXAXCRXCVFFLGVXQQXLXVGDXHXLXVAPYNXFXAXLXX

SEQ ID NO: 153255 - protein, 90 aa, Glycine max
  Clone ID: PAT_MRT3847_109413C.1.pep
NPSFFSKENKNYHKFTLLGEKTLNTPRGKNPLVKIQEGIFQFNRTKRPPFKARQIITTSSRANPPPNRQKNATLTTSYSHPHINNRNLSN

SEQ ID NO: 153256 - protein, 68 aa, Glycine max
  unsure (1)..(68): unsure at all Xaa locations
  Clone ID: PAT_MRT3847_109414C.1.pep
HXVXLFSXXRVFGRPXLFXLXTHXGXCQXHXGSFLVXLPXCSFLELLLVLLGNFNAGHLERRLREGFE

SEQ ID NO: 153257 - protein, 69 aa, Glycine max
  Clone ID: PAT_MRT3847_109415C.1.pep
YKLSHIQTAVIEIAHRSPMHAVMGTHLISQVRDTFYQIDRCSHPYSTLRTSETLTLYLGLSRAFDADAW

SEQ ID NO: 153258 - protein, 109 aa, Glycine max
  Clone ID: PAT_MRT3847_109416C.1.pep
LTTIHLFTLYRSMTCVTAVVHLLPYCTDQYTCFRPCCHNTRFVPSLLDTRLALSYARTRTSLCRAENLLMDSNGRDLSLDIDHEYLERWDDVARRWVLGSRSVCWNRGS

SEQ ID NO: 153259 - protein, 56 aa, Glycine max
  Clone ID: PAT_MRT3847_109417C.1.pep
RIKRAFLVNPYFSRSFIHKLSVCGCACFYLDIDIYPIICSLHTDFRAKALKFDFKG

SEQ ID NO: 153260 - protein, 58 aa, Glycine max
  Clone ID: PAT_MRT3847_109418C.1.pep
NMQKNWMFLLVCFPNSMYVFVVYPLPKVSFKPKRTRRNLIFIWYYFFPPYDFRCKSNI

SEQ ID NO: 153261 - protein, 66 aa, Glycine max
  Clone ID: PAT_MRT3847_109419C.1.pep
QSLHFYYQRHRSYNALDSAHKSGLRISTLCRISISCQFVTLRVKSPVTSVISSVHVWPRIAISKYF

SEQ ID NO: 153262 - protein, 66 aa, Glycine max
  Clone ID: PAT_MRT3847_10941C.1.pep
LQESLNNSLLLSVRFLKGKKITLCAGHRLRESFYIPLLVYLLNTLLYDIGLRVRFKPFLPLSQFSV

SEQ ID NO: 153263 - protein, 245 aa, Glycine max
  unsure (1)..(245): unsure at all Xaa locations
  Clone ID: PAT_MRT3847_109420C.1.pep
TTKLISPQQVPKRPILLAFKGNKSNKTTFXVSPQEKIPLPLETAKKHQKRVGKTSESLKRVRAVSTVETSPCTLDVDYNEAAAKLENIYKLSPASDNAECIDGKIKRVSRRGKKVVDESEEKELKGDWVVRNQNKNKKPKRLNLDQRISLKNNKSGDEVIPTRKKRNVGNKIEKIEELIREYSVSTDFVSMDWKRMRIPPVLSSSEHAWLFKLMQPMKALLQVKEDLQQELTREPAGELCATNMR

SEQ ID NO: 153264 - protein, 133 aa, Glycine max
  unsure (1)..(133): unsure at all Xaa locations
  Clone ID: PAT_MRT3847_109421C.1.pep
MGRLNQMPSTIVKEKPRIQAKVTEEQAWRNYERIRLTKRPYTAXRDEVPLRGNLKQTYATNETAKKLWRLLKNHPANGTTLRTLGALEPAQVTQRAKHWDTNYASGWQRSATHTTSNEPGPDXLAEHPNDTGP

SEQ ID NO: 153265 - protein, 159 aa, Glycine max
  unsure (1)..(159): unsure at all Xaa locations
  Clone ID: PAT_MRT3847_109422C.1.pep
MGVVTVSTLAARTPLRLNTRLTSHQQVHKRPLIVAFKGNKLNKAALVSPQEQIPLPIETAKKDQKRVGKTSESLKRVRAVSIVETSPCTLDMDYNEAAAKLENIYKLSPVSDTCNMEDIDSXSHELCGGGGRSGNEHDDEHCDIVVRNQNMKAKRLSLD

SEQ ID NO: 153266 - protein, 159 aa, Glycine max
  unsure (1)..(159): unsure at all Xaa locations
  Clone ID: PAT_MRT3847_109423C.1.pep
MGVITVSTSAARTPLRLNTRLISHQQVHKRPIILAFKGNKSNKTTLVSPQEKIPLPLETAKKHQKRVGKTSESLKRVRAVSTVETSPCTLDVDYNEAAAKLENIYKLSPVSDTLNGEDIDSKIERVLRRRKKVSEERDXEIVIMVVRNQNKKAKRLSLD

SEQ ID NO: 153267 - protein, 495 aa, Glycine max
  unsure (1)..(495): unsure at all Xaa locations
  Clone ID: PAT_MRT3847_109424C.1.pep
TKALKEKLKHYGVEKARDLTLIEDDTNEGMNRGFAFLEFSSRSDAKEAYKRLQKRDVAFGVDKPAKVSFADSFIDLGDEIMAQVKTVFIDSLPPSWNEVYVRDLLKKYGEIEKVELAKDMPAARRKNYGFVTFSTHVAAVECADSITSAGLGEGDKKAKVRARLSRPLSKPLQRGRGKHVNHGDFRSGRNSGRLVRSSRSQPAPRSLPAHVVRGVGSRVPPVRPISVRNRRPVTPMLVRARPVAPPARSYDRRLAAPAYPKSGMKRDYRRRVNLPPPRNRVAADYGSRLASQRHTSHRDYPARGSNYPELHRSTSRGSAPKRGYVDDGHGQRFERAPPPPPPPPHLSYXEGRPRDYDTLSGSKRPYTDIDDVPPRYDTSARQSRSRLNYDYGGSASQYGDAYGDRLGRSSLGYSGSRNSISSQDLHGTYGSRQGMSYGGGSFGGSDGGMYSSSYGGDYVSRGSDVGGRSYSSMYSGRGVGDSSNYMGGGGSGSYY

SEQ ID NO: 153268 - protein, 55 aa, Glycine max
  Clone ID: PAT_MRT3847_109425C.1.pep
QHKWDGLIIKSLSDTDHSPDFHDPSCMKAQLRRPAFIVSTHTIEYREDHHCKHYY

SEQ ID NO: 153269 - protein, 214 aa, Glycine max
  Clone ID: PAT_MRT3847_109426C.1.pep
PTRPGRLVRSSRSQPAPRSLPAHVVRGVGSRVPPVRPISVRNRRPVTPMLVRARPVAPPARSYDRRLAAPAYPKSGMKRDYSRRVDLPPPRSRVATDYGSRVASQRHSSYRDYPARGSDYPELHRRSTSRGAPKRGYVDDGYGQRFERAPPSPPPPHLSYHEGRPRDYDSLSGSKRPYTAIDDVPPRYDTGARQSRSRLDYDYGGSASQYGDAY

SEQ ID NO: 153270 - protein, 88 aa, Glycine max
  Clone ID: PAT_MRT3847_109427C.1.pep
MKQRKKKQGFRRPVVIKKPKQPQEQPSVDPITGKKIPKSFVFSRGKLPAPLKQLQMDLRKLMLPYTALSLRVSLIFLSSSLFLLFMFE

SEQ ID NO: 153271 - protein, 94 aa, Glycine max
  Clone ID: PAT_MRT3847_109428C.1.pep
DCLLAPLGIFLCDAIIFAHFITIQSNCIILEDICPCYIIGKCNFARLYSSWNGFNIMCYQQILNFKNLWNLAFLHQVIYPAWFCRTHAPMANMN

SEQ ID NO: 153272 - protein, 56 aa, Glycine max
  Clone ID: PAT_MRT3847_109429C.1.pep
LCFPTFVIWKLFDRLPHPVPGLVLHGKAQIIFPQKLPGGISSYPPLYKWILFTKTP

SEQ ID NO: 153273 - protein, 62 aa, Glycine max
  Clone ID: PAT_MRT3847_10942C.1.pep
QGLASQALKRFRRVSFRWVILNHVKYKSSKHESRFPGPPPKCLDGIYIGSLLSGLPHSCIAH

SEQ ID NO: 153274 - protein, 91 aa, Glycine max
  Clone ID: PAT_MRT3847_109430C.1.pep
SGTGFFVSWDGKKKGVMVDRCVEDGWMDEWWSLVTSSQFTRSLVLCLFPWQDAKPTLSASGYGLKKPEPEERKLNTAIIWVLYQQLDRQWC

SEQ ID NO: 153275 - protein, 352 aa, Glycine max
  Clone ID: PAT_MRT3847_109431C.1.pep
MASRKFDNPHSGDGASPGKIFIGGLAKDTTLETFVKYFEKYGEITDSVIMKDRHTGRPRGFGFITYADPSVVDQVIQENHVVNGKQVEIKRTIPKGSSQANDFKTKKIFVGGIPTSVSEDELKNFFSKYGKVVEHEIIRDHTTKRSRGFGFIVFDSEKVVDNILADGNMIDMGGTQVEIKKAEPKKSSNPASLPPFASDSRARSYNDGFGGFGDSYGSFGGSGYGPGSYRSLGGFGGRLGDYGGYGAGDEFGGSFGGYGGAGAGGYAGFRGESSFGYSSRYGSYMGGLGAGYGGSGLGAYGRGGGAYGTYGGPSAGGGYESGPGAGYGGAGGGMYPSRGSYGGSSRYHPYAR

SEQ ID NO: 153276 - protein, 109 aa, Glycine max
  Clone ID: PAT_MRT3847_109432C.1.pep
QSIYWTGLRKNNPKPRNKKFPCPGPPGLPPQLPYWGLILTTWTLFLNQNLKGALPTPLAPQEMFYQKWAPNLTQRMGAKVPIPHQISLPKEPSEGKNPYNFSLMEVRSS

SEQ ID NO: 153277 - protein, 62 aa, Glycine max
  Clone ID: PAT_MRT3847_109433C.1.pep
KKDLCLQIYTQPFTMMPTSAVEGPGNIMMQALVDKLVPLLLQQTLQDYDEWVRKQSYTLKSF

SEQ ID NO: 153278 - protein, 254 aa, Glycine max
  Clone ID: PAT_MRT3847_109434C.1.pep
MENMPPGYRFYPTEEELISFYLHNKLEGEREDMNRVIPVVDIYDYNPSELPQISGEASMRDTEQWFFFIPRQESEARGGRPKRLTTTGYWKATGSPNHVYSSDNRIIGIKRTMVFYSGRAPNGTKTDWKMNEYTAIKTSSSSPTLRKEFNLCRVYKKSKCLTAFDRRPPPRRDTESYSGAQNVEEQQKGSTSYDDYHHKMVERSATCSPAESSSSGDHDQPPLHGEEATQMDVDNNDDPFLDWEKVDMFLGSEP

SEQ ID NO: 153279 - protein, 99 aa, Glycine max
  Clone ID: PAT_MRT3847_109435C.1.pep
GIYQAAKPFKGDIQGLQNVGPPNVLIQGLRTKHESITGARMAHRNDTGAIESGPCNATNGQREMPGQDPALEQRMDRGDPTKGGLNTPFNHRSFPESCD

SEQ ID NO: 153280 - protein, 74 aa, Glycine max
  unsure (1)..(74): unsure at all Xaa locations
  Clone ID: PAT_MRT3847_109436C.1.pep
SGTIPDRIPKXXMKGXXPXRXQRPXFFFFFKFFFFSLNTASSRTGFITKTQTILTLKTITYTTYFLSHEFNTSF

SEQ ID NO: 153281 - protein, 67 aa, Glycine max
  Clone ID: PAT_MRT3847_109437C.1.pep
MPAYSSCLDLCSCIMCNNSRTEKVAALEQLLNGLVLFFLDELSALKQQPLPDSVGIHSLIVDLLSDP

SEQ ID NO: 153282 - protein, 65 aa, Glycine max
  unsure (1)..(65): unsure at all Xaa locations
  Clone ID: PAT_MRT3847_109438C.1.pep
MGQFLAIHDVSYLNWSSLPQGFIFGSTSSAYQYEXGVAREGEKRPSIWDTFAHKYPECNSVDNKE

SEQ ID NO: 153283 - protein, 63 aa, Glycine max
  Clone ID: PAT_MRT3847_109439C.1.pep
CFSCWFLFVCLGVIVDSQFLCHCFEVVGWSRFGCAPLGISFLSLSFVFGVSSICVGVIVGWIR

SEQ ID NO: 153284 - protein, 118 aa, Glycine max
  Clone ID: PAT_MRT3847_10943C.1.pep
LLKLDNLCPIGPPPHLIDRGPRQELYSAALRFRFFLTTGGPFGPFYRIQAWGSIRVFKEDLFWSQFQCVYDILRQQMLFDLELIAPEAIPLFLVPLEKLGFFGQTSQHTDKHPPNTKQ

SEQ ID NO: 153285 - protein, 72 aa, Glycine max
  unsure (1)..(72): unsure at all Xaa locations
  Clone ID: PAT_MRT3847_109440C.1.pep
MEGKEQDXSLGANKFPERQPIGTAAXSQDDGKDYQEPAPAPLVXPTEFTSWSFYRXGXXEFXGTFLVLYITV

SEQ ID NO: 153286 - protein, 163 aa, Glycine max
  Clone ID: PAT_MRT3847_109441C.1.pep
MASIEQTWSLAGKVAVVTGSGRGIGKAMAIELAKRGAKVAVNYANAVEGAEQVVKEIKALGNGSDAAAFKANVGNVEESEKLMDDVVAHFGKLDICCSNSGVVSFGHFKDVTPEEFDRVFTINTPGQFFVAKAAYKKMEIGGRIILMGSITGQAKGVPKHAVY

SEQ ID NO: 153287 - protein, 54 aa, Glycine max
  unsure (1)..(54): unsure at all Xaa locations
  Clone ID: PAT_MRT3847_109442C.1.pep
CICSWGSSTPGMVGFIAGVRRHCSILIRTPEEEAPXASKLEIPMSSRKKDQKTT

SEQ ID NO: 153288 - protein, 64 aa, Glycine max
  unsure (1)..(64): unsure at all Xaa locations
  Clone ID: PAT_MRT3847_109443C.1.pep
PRVRKWASTSTLRMLLSCIPTRGVXHYWRKFDDSVMRPVFGGRGFVPYVPGSPLEQSVHQWHCT

SEQ ID NO: 153289 - protein, 78 aa, Glycine max
  Clone ID: PAT_MRT3847_109444C.1.pep
WVVPRLWIESGVIYVGGKVLCQDCTKGWNEWVYGGNPMKGVKVSLTCMDKRSRVVYYTSDTTDELGQYDLSRLWCVWA

SEQ ID NO: 153290 - protein, 176 aa, Glycine max
  Clone ID: PAT_MRT3847_109445C.1.pep
MPSLSEAFRGHPVYLHQKHHDFNSLQELPDSYAWTQPDDDDHRLTNYPSNNKTKTVVPIIDLNDPNAPNLIGHACKTWGVFQVVNHGIPTSLFSDIQRASLALFSLPLHQKLKAARSPDGVSGYGRARISSFFPKLMWSECFTILDSPLDLFLKLWPQDYAKYCDIVVEYEAAMKK

SEQ ID NO: 153291 - protein, 473 aa, Glycine max
  Clone ID: PAT_MRT3847_109446C.1.pep
MFPPIPNQVKLIREKIKASQDKQKSYYDRRRKPLDFQEGEHVFLKVSPVTGVGRALKSRKLRPKYLGPYEILKKVGPVAYQIALPPSLSNLHPVFHVSQLRQYNLDPSHVLALDEVQVKDNLTYKAQPQKITDRRMKSLRGKEIALVKVQWRPNEGDSTWELKDRGLILSVLIYIYCLLSNTGPDGCRETRGTGTREAACKPRQDFSIQNVKIFLLVAEYEVTSREKANFRNFSLLPTLLFFFLLLHHCCPLKLQNCSSFLLQIARRSHFRSLEAHLYFVGLQIPGTSSKNFKAIQRLANQNEENVIEVWVDGDPVLRETRIRATWECIAMTAQLIHDRVVMECLEGVWETLKGNERCQFRGMIQLTATSLVHPEEPARTLQQPVEWILPTPTPYRLVEPVQVIEVSSSEEDLEEDPEELPPEPAVDALDFPEDDEDPLPDVDSPEDVMSTSEADSIEESGPGGTANSDDSSS

SEQ ID NO: 153292 - protein, 47 aa, Glycine max
  unsure (1)..(47): unsure at all Xaa locations
  Clone ID: PAT_MRT3847_109447C.1.pep
WXALTLHNSISLHIXALLSSLNXIHGXKRXLRNAPHTPXSLVLSKIR

SEQ ID NO: 153293 - protein, 102 aa, Glycine max
  Clone ID: PAT_MRT3847_109448C.1.pep
WPLGPSGSLSPALFLRFGSGGQGSNQPNGPKAKIYQVGLQWVGIPSRGWEPLVEKRKIPPFCGSPHVGGSPMVWVSPWYFLGSKMSCFRVQLPEPGIDFPLL

SEQ ID NO: 153294 - protein, 55 aa, Glycine max
  Clone ID: PAT_MRT3847_109449C.1.pep
SCRVQITFKRSSAESSFISLLFFSFRPCSLVIQYRYHIQLEKSLAFVCIDKDKNT

SEQ ID NO: 153295 - protein, 94 aa, Glycine max
  Clone ID: PAT_MRT3847_10944C.1.pep
SPGFHDYLLEPCKLQSQLAWGLFSSSSSSSSSSSSPPIWSVKIAFQISTTMMGSAFILFLLAIDYNCNILLVCQSLPNRDQARFMGASTGGNSM

SEQ ID NO: 153296 - protein, 114 aa, Glycine max
  Clone ID: PAT_MRT3847_109450C.1.pep
PRYACCHCYLLLFHYDPAVYQHGSYVCAPRAVSLATVIPGSPPCNQSPTVTALLRCVSCAVPAAIGSVQIPPATSRPHLAAFAPYPGAGESLTTLLVRCGVAYGLSVSPLGDGP

SEQ ID NO: 153297 - protein, 267 aa, Glycine max
  unsure (1)..(267): unsure at all Xaa locations
  Clone ID: PAT_MRT3847_109451C.1.pep
MKNKSSCDFMVPSNHNYSVRLSPICCKLSESGIEENHTSTSTGERPSKIKDRMEEYNIAMKKMMRNPYEYHHDLGMNYTLITDNLIVGSQPQKPEDIDHLKKEEGVAYILNLQQDKDVEYWGVDLQSIIRRCRELEISHTRRPAKDFDPDSLRNGLPKAVSSLDWAFSEXKGRVYVHCTAGLGRAPAAAIAYLFWFCDMNLNKAYDMLTSKRPCGPNKRAIRGATYDLAKNDPWKEPFENLPEYAFEDIADWERNLIQDRVRSLRGT

SEQ ID NO: 153298 - protein, 391 aa, Glycine max
  unsure (1)..(391): unsure at all Xaa locations
  Clone ID: PAT_MRT3847_109452C.1.pep
MEFNKFRMGSKEGQSNCAEMEYLERSCEEGPSERVFFFTYTTAEPICSIRKSFRYMLQVSELDIALFGFIRPSIKLNTFHRQTRKDLALMGFFFGLRVLSELLRXGIGSSLVRXLEKWLNSXDVDYAYMATEKDNHASVSLFMDKFGYTKFRTPAILVNPVNHHCFQISPNIEIARLKIDQAEYLYRRFMGSTEFFPNDIGNILRNKLSLGTWVAYFKGDIAWGDFGSDGQVPNSWAMLSVWNSGEIFKLRLGKAPFSCLVCTKSWWLIHKIFPCLKLPTIPDFFNPFGFYFMYGVHHEGPFSGKLVRALCQFVHNMGAESKDESNCRIIVTEVGGRDELNHHIPHWKLLSCPEDLWCIKALKNEGTNNKFHELTTKTPPTRALFVDPREV

SEQ ID NO: 153299 - protein, 46 aa, Glycine max
  Clone ID: PAT_MRT3847_109453C.1.pep
NSQCMIISHWILDTVLDVRQWFMKPKDGGESFPCKQCSGIISSLND

SEQ ID NO: 153300 - protein, 143 aa, Glycine max
  Clone ID: PAT_MRT3847_109454C.1.pep
RVRLRHFGKSEFAIFSRLDHRNLVGLVGYCENRDERLSVYEYMKNGLLRDCLHDKNNVDKDSSVLNSWKMRIKIAWDASLGIQYLHNYANPSIIHRDIKSSNILLDASWTARVFDFELSFICPEPDDEYDEIIMGTMGYMCPE

SEQ ID NO: 153301 - protein, 441 aa, Glycine max
  unsure (1)..(441): unsure at all Xaa locations
  Clone ID: PAT_MRT3847_109455C.1.pep
MDSEIVESTDMADITVDAKSFSWAVDSAIKSETASISGESRIHSFCSVVDNAIRSRTASDLGTSPSPVHSLASAVANAMSSSSAAPFSQLEVVPNATGLVPARLFTWSELKEATYNFSPHNRIRHFGTFGFVYRGKLVDGREVAIVKGTQFGKSEFAIFSRLDHRNLVGLVGHCENRDERLSVYEYMKNGXCHDCLQDKNNVDKDSSVLNSWKMRIKIAWDAYLGIQYLHNYANPSIIHRDIKSSNILLDASWTARVFDFELSFICPEPDDEYDEIIMGTMGYMCPEYMTRGVLTAKCDVYGLGVVLLELLTGKRAILLESEEDGPPFYLVDFAVPSILAGDLVEILDSRVGPPDLKEAEALKILAHTAIRCVEEEPRQRPTMNDIVVDLDRAFAICGSSLYDENFSYSIALPSHESNHMTPDPLDTDSCDIPIYEENTNS

SEQ ID NO: 153302 - protein, 36 aa, Glycine max
  Clone ID: PAT_MRT3847_109456C.1.pep
DFQDFNVEALEKFVEESSTPVVTVFNNDPSCSSHGI

SEQ ID NO: 153303 - protein, 155 aa, Glycine max
  Clone ID: PAT_MRT3847_109457C.1.pep
MGIVTTECEQVCAVAPARLYKAMAFDFNNVMPKAIPNFVKSAEIIGDGGPGSIKKLVLVNGYVNQKVDVVDEENYVYHYTVDEGSVLSDLLEKVCYEYKLVASLDGGGCIIKSTVKYYTKDDTQLSEEFLKDNKEKSAAFTKAVVDYLLANPNYN

SEQ ID NO: 153304 - protein, 493 aa, Glycine max
  unsure (1)..(493): unsure at all Xaa locations
  Clone ID: PAT_MRT3847_109458C.1.pep
MLVLCKKKKKKLARAEFGSSFRGTMAGRVSTCFFFVFALSLLLPFQISAEESSEKEFVLTXDHSNFHDTVSKHDFIVVEFYAPWCGHCKKLAPEYEKAASILSSHDPPIVLAKVDANEEKNKDLASQYDVKGFPTINILRNGGKNVQEYKGPREADGIVDYLKKQSGPASTEIKSADEATAFIGENKVAIVGVFPKFSGEEFDNFSALAEKLRSDYDFGHTLNAKLLPRGESSVSGPVVRLFKPFDELFVDFQDFNVEALEKFVEESSTPVVTVFNNEPSNHPFVVKFFNSPNAKAMLFINFTAEGAEAIKSKYREAAEQYKQQGVSFLVGDVESSQGAFQYFGLKEEQVPLIIIQHNDGKKFFKPNLEADHIPTWLKAYKDGHVAPFVKSEPIPETNDEPVKVVVGASLEDIVFKSGKNVLLEFYAPWCGHCKQLAPILDEVAISYQSDADVVIAKLDATANDIPSETFDVQGYPTVYFRSASGKLSQYEGG

SEQ ID NO: 153305 - protein, 108 aa, Glycine max
  Clone ID: PAT_MRT3847_109459C.1.pep
LVEKPNQKLYPHFYGHDKMLEARLHTGWNCLKTVSSLYFSYLLAEESGYCSTTGTTTVPCIVRCTQTVVQYFYHMRDARLHLGRYYLMVRKHTCSLFPSMNMYHVIEF

SEQ ID NO: 153306 - protein, 91 aa, Glycine max
  Clone ID: PAT_MRT3847_10945C.1.pep
GVGVVWYVSKLLKIFIEIVSRFYPCTCSFGYSWCLKLCMSWYSNTSIICCREVCLLISLILFNFSCDICELFSSITKSAQVVCPSKICSPT

SEQ ID NO: 153307 - protein, 64 aa, Glycine max
  Clone ID: PAT_MRT3847_109460C.1.pep
HLIRLFGVISMDISPHWVNSAPQSCDQSVLRLCSSPYVKRHYVNPWGSLIMDSQFPHPPCSQEK

SEQ ID NO: 153308 - protein, 55 aa, Glycine max
  Clone ID: PAT_MRT3847_109461C.1.pep
LIIMEYLLVIFSLYYKSKFPSPKKSPVRKYDNTNMHINGFWISTFATIKKHMNIK

SEQ ID NO: 153309 - protein, 161 aa, Glycine max
  Clone ID: PAT_MRT3847_109462C.1.pep
GSRFGPAACMTLELAEFGKPFIISIINGYDIVPTLSASSVHDFVSEGRDRNNDQIIPIAKAIAKHAVTHCTEGVKKYQHRTHALLPWHRRENKLDNMAELASGSSHETNFESLLTEEQLIMESMSDDEEYNSSSEGSDVDDDEDQLWNQVGKLKLGKEAAT

SEQ ID NO: 153310 - protein, 61 aa, Glycine max
  Clone ID: PAT_MRT3847_109463C.1.pep
NSNVLSQIEQPYLLLLDAMPVLLTIATGQEARGITKLLTLPNIIHWIELRPLCFHNQGIQL

SEQ ID NO: 153311 - protein, 124 aa, Glycine max
  Clone ID: PAT_MRT3847_109464C.1.pep
YIILLQSFTSINCQTLFDFSLSDTASAESSIRITSWRLSVLGPGSTHSQCGDDCDGCCAFVEDLSVSTTSKCVRVARLLTESAIFSVNSTISISSEATVAAGMSDKRSVSFHELDWSNVLRLFT

SEQ ID NO: 153312 - protein, 92 aa, Glycine max
  Clone ID: PAT_MRT3847_109465C.1.pep
EHLEPKSCYFFSNSPVAILRRESIQFGGGRFLNILNSTVSIMSLEFYQQENLSTIDLRQHAKMTLSALEKPKRVNIDIKSMEFDYVHHTEKL

SEQ ID NO: 153313 - protein, 85 aa, Glycine max
  Clone ID: PAT_MRT3847_109466C.1.pep
MASLAASTAAASLGMADKRGQPINFSGATRRAPSASSPGSFKTVAPVSKKKATPAPPKKAAAAAPANDELAKWYGPDRRIVLADG

SEQ ID NO: 153314 - protein, 67 aa, Glycine max
  Clone ID: PAT_MRT3847_109467C.1.pep
EKMGFEKDPSLPCCSSSTTNNNSSQQHPDFKSKEREKERTFFLLGKNEKNKTQKLNLLGGEIYQFNN

SEQ ID NO: 153315 - protein, 83 aa, Glycine max
  unsure (1)..(83): unsure at all Xaa locations
  Clone ID: PAT_MRT3847_109468C.1.pep
LDSVQPCVGIWSDNCSSRSRIRWTFILAGSRMIYLAVILIGCSAENGYVLRDTHECYXAFKGFRTRAARVCILGFSMHDLANN

SEQ ID NO: 153316 - protein, 71 aa, Glycine max
  Clone ID: PAT_MRT3847_109469C.1.pep
NAFSSAHAYAQASEEAWMETLMGWKAIKWQIKATFLQRKEKNRAEEGRINQQIKKKRPYQKNRSRNHHEWQ

SEQ ID NO: 153317 - protein, 579 aa, Glycine max
  unsure (1)..(579): unsure at all Xaa locations
  Clone ID: PAT_MRT3847_10946C.1.pep
MASSSGSLDTSASANSFTNFTFSTHPFMTTSFSDLLASPTDNNKPPHGGGGGLSERTGSGVPKFKSTPPPSLPLSPPPISPSSYFSIPPGLSPAELLDSPVLLNSSNILPSPTTGAFVARSFNWKSSSGGNQRIVKEEDKGFSNFSFQTQXGPPASSTATYQSSNVTVQTQQPWSYQETTKQDNFSSGKSMMKTEKSSSMQSFSPEIASVQNNHSNGFQSDYGNYPPQSQTLSRRSDDGYNWRKYGQKQVKGSENPRSYYKCTYPKCPTKKKVEXLDGQHTAIVCKVTHNHPKPQNTRKNSSNSSSLAIPQSNPIIAEIPAHPXATHKCTQMDSASEPANSSISIGDDDFEQSSQKCKSGGDEYDEDEPDAKRWKIEGENEGMSAPGSRTVREPRVVVQTTSDIDILDDGYRWRKYGQKVVKGNPNPRSYYKCTHPGCPVRKHVERASHDLRAVITTYEGKHNHDVPAARGSGSHSVNRPMPNNASNPTNTAATAISPLQVIQHSDNSHQNQRSQAPPEGQSPFTLEMLQSPGSFGFSGFGNPMQSYMNQQQQQLSDNVFSSRAKEEPRDDMFLESLLC

SEQ ID NO: 153318 - protein, 46 aa, Glycine max
  Clone ID: PAT_MRT3847_109470C.1.pep
MKRRPPEYVTDTSSGGRLFIQRVSFTRLLEYKNTHLYNPTCLLNCL

SEQ ID NO: 153319 - protein, 185 aa, Glycine max
  Clone ID: PAT_MRT3847_109471C.1.pep
MTPSFSTPMKSVFLSMVMILISIIIYQGNAQLPQPMPNQTTMVFYLQDIAKGSSATVTPVAGIKGSDWTYTTFGSIFVVDDPVTLSISPTSEMVGRAQGLLIASAHDGANVNVALSIVFNNLQYSGSTLELQGISRQRESYKKVSVVSGTGKFRFARGYALLQTVLYDAPTSRSIIRITITIQTN

SEQ ID NO: 153320 - protein, 81 aa, Glycine max
  Clone ID: PAT_MRT3847_109472C.1.pep
ISMASLVLLFSELVHNHEWDAEALLAAYPSSNFTITSSSCAVAAKKTLKDEGFMQKNTQKTEDIVVENPLESRVCVDLVWP

SEQ ID NO: 153321 - protein, 93 aa, Glycine max
  Clone ID: PAT_MRT3847_109473C.1.pep
CLLLPARGPLRRRGIPVHAWKALALRVFFVLASYKFPNGFVILGTPRARVYRYFIFGTPKTLSLKGVGARGVKLFLRGADSTQKLIFFPNESP

SEQ ID NO: 153322 - protein, 98 aa, Glycine max
  Clone ID: PAT_MRT3847_109474C.1.pep
KGPSYPPMFNPLALIFVAFSEAIILGEPLTVGTLLDMVLIMVGLYSFLWGKNNETMRRVQQLASAKISNITNLSIRTESMTTIVSSSSPMNSVGLART

SEQ ID NO: 153323 - protein, 158 aa, Glycine max
  Clone ID: PAT_MRT3847_109475C.1.pep
PEPVRNNPPHGTRRYQDQMVPSITSSHVRVEEEETSSDLRNSAADSRAEVPINVTTQQNARETVNQGVLLNTNRNTRVQNNPTTWLRNAAEDSTAESSSSTRRERDGGVVPVWSPPASNFSEQFVDDENGIGTGSSYLQRQHPQSHQLMNWTRLPQTG

SEQ ID NO: 153324 - protein, 262 aa, Glycine max
  unsure (1)..(262): unsure at all Xaa locations
  Clone ID: PAT_MRT3847_109476C.1.pep
KINTIVEEAQVCRKNQKVKAPSIVDKECIMQNIVFVIGRNGRLYPXNEMTDLWDEHYQSQHLGLSKXSGTSYFDIDYTCAAXMYKVKNSCLYSFLLQPALYLSIKLQHGNXYKDVKLVSSPGHSFAGIPXHLNGSDGKVYLXYLDKVAWTWKDCSFPSMGNKIVETHSGGINEEKPVRIDENCASGLSKDQDNLADLNLNCEPKVASTRPIPFSEGSVIFELRDGRLAELQLVEETEWAWSRIIGTPNSLCLENYWIALASS

SEQ ID NO: 153325 - protein, 79 aa, Glycine max
  unsure (1)..(79): unsure at all Xaa locations
  Clone ID: PAT_MRT3847_109477C.1.pep
HQFSIILSDASCVTICLAPCVKIMNEESGIVNGTIPSTHSYRXDHRLLYDXHRHFIRVRVAALNIVPTSSEPAKPVSLV

SEQ ID NO: 153326 - protein, 68 aa, Glycine max
  Clone ID: PAT_MRT3847_109478C.1.pep
HVSLLYKLFFINTLFLQPIEIDSAQKRLSGFGLYCLNYPYPQLKVGLLFMLSTVESWKFPDMSYWDIH

SEQ ID NO: 153327 - protein, 92 aa, Glycine max
  Clone ID: PAT_MRT3847_109479C.1.pep
RVRYRALPYYSMCDLGTLLIPKSLLKFCAVPSTLSGYFLYFFYYYFTIVMKCVHWTGVSNISLVFIYCYKHNITMFVLIVSSVWVKPQVIFC

SEQ ID NO: 153328 - protein, 146 aa, Glycine max
  Clone ID: PAT_MRT3847_10947C.1.pep
FRRIIALLDGLVSCCAKLVTCRSYYKCTHPGCPVRKHVERASHDLRAVITTYEGKHNHDVPAARGSGSHSVNRPMPNNASNPTNTAATAISPLQVIQHSDNSHQNQRSQAPPEGQSPFTLEMLQSPGSFGFSGFGNPMQSYMNQQQ

SEQ ID NO: 153329 - protein, 111 aa, Glycine max
  Clone ID: PAT_MRT3847_109480C.1.pep
RNLKQTRQSPAGNLWSLNLFRPLLKTRRYPVEIRMLTLICHGGCLGTYFMMFLEGELQRPKQISELFLDVRGLSSDDSKCITNILEELYLRSYLYTMRMKQVYKFPCVGSM

SEQ ID NO: 153330 - protein, 139 aa, Glycine max
  unsure (1)..(139): unsure at all Xaa locations
  Clone ID: PAT_MRT3847_109481C.1.pep
LQEYDESYKLCDREENMKSYVFFVATRILVAWPCHGSCYQKVPLRMKTGYGERSSXEVKCASFMLAAEAHNIRAFITIPEECVEPTKDYINGEQFKSYSLTANQQDFFYANERDIHHNILFIFGINNTALSNILYYEKH

SEQ ID NO: 153331 - protein, 132 aa, Glycine max
  Clone ID: PAT_MRT3847_109482C.1.pep
VYAKCKFVAQCFVYGDSLNASLVAVVSVDHDNLKAWAASEGIMYNDLAQLCNDPKARAAVLAEMDAAGREAQLRGFEFVKAVTLVLEPFTLENGLLTPTFKVKRPQAKEYFAKAISDMYSELSRTDTSQKTL

SEQ ID NO: 153332 - protein, 469 aa, Glycine max
  unsure (1)..(469): unsure at all Xaa locations
  Clone ID: PAT_MRT3847_109483C.1.pep
TQTEDSARAYSKLLNQGRSNLQPFCPPKPDDIATICYTSGTTGTPKGAILTHGNFIASVAGSTMDEKFGPSDVYISYLPLAHIYERANQVMTVHFGIAVGFYQGDSMKLMDDIAALRPTVFCSVPRLYNRIYAGITNAVKTSGGLKERLFNAAYNAKRQALLHGKNPSPMWDRLVFNKIKEKLGGQVRFMASGASPXIPDIMEFLMICFGCRVTEGYGMTESTCIISFIDEGDKLGGHVGSPNLACEIKLVDVPEMNYTSDDQPNPRGEICVRGPIVFRGYHKDEAQTRDVIDEDGWLHTGDIGTWLPGGRLKIIDRKKNIFKLAQGEYIAPEKIENVYAKCKFVAQCFVYGDSLNSSLVAVVSVDHDNLKAWAASEGIMYNDLAQLCNDSKVRAAVLAEMDAAGRDAQLRGFEFVKAVTLVLEPFTLENGLLTPTFKVKRPQAKEYFAKAISDMYNELSRTDVSQKTL

SEQ ID NO: 153333 - protein, 43 aa, Glycine max
  Clone ID: PAT_MRT3847_109484C.1.pep
IQKERFVASRVKVLLSYTNFNPNMLCIASADLRRDCYSLGIIS

SEQ ID NO: 153334 - protein, 136 aa, Glycine max
  Clone ID: PAT_MRT3847_109485C.1.pep
MNQNPQSSEGRNDDDSALSDFLASLMDYTPTIPDELVEHYLAKSGFQCPDVRLTRLVAVATQKFVAEVAGDALQHCKARQATIPKDKRDKQQKDKRLVLTMEDLSKALREYGVNLKHQEYFADSPSTGMDPATREE

SEQ ID NO: 153335 - protein, 78 aa, Glycine max
  Clone ID: PAT_MRT3847_109486C.1.pep
KFNGEVFASTRGPPMVGRGAFLLIFRKVLVLLILIGPMNFFPQLLFQIIKIKLRAIGFIRGSPPLCHVPIWIKKIVFF

SEQ ID NO: 153336 - protein, 78 aa, Glycine max
  Clone ID: PAT_MRT3847_109487C.1.pep
YLIDDRTNTGIRIGDLPIMILNIGAYISNQCSLRLLQGLEKLLLQSSSVRYFKLLYPRLSMLLIIDRVIPLKVGLSVH

SEQ ID NO: 153337 - protein, 131 aa, Glycine max
  Clone ID: PAT_MRT3847_109488C.1.pep
IANSSTTFHRDERLYEIGNAYAMHGKCNDEIEMPEETSFPINHALGNMLNHFVLFSGGAEAKRAEKPVSATVLFGGDSIVEVERVTERIVAEGAVLLVVVASEAANERVPPPAPPPPPVLAVRRNWKFSVS

SEQ ID NO: 153338 - protein, 61 aa, Glycine max
  Clone ID: PAT_MRT3847_109489C.1.pep
TITPGHSLPNAIIANYNKKYWILLVKFYCQPIDDILTYQLSIDIYYVCLHYLKLSNILSTP

SEQ ID NO: 153339 - protein, 103 aa, Glycine max
  Clone ID: PAT_MRT3847_10948C.1.pep
MMKTEKSSSMQSFSPEIASVQNNHSNGFQSDYGNYPPQSQTLSRRSDDGYNWRKYGQKQVKGSENPRSYYKCTYPNCPTKKKVERTLDGQITEIVYKGTHNPS

SEQ ID NO: 153340 - protein, 42 aa, Glycine max
  unsure (1)..(42): unsure at all Xaa locations
  Clone ID: PAT_MRT3847_109490C.1.pep
IRLELTHKIIVYLSDTTLMDILPRIIHDGLLPVLSLVTSLXX

SEQ ID NO: 153341 - protein, 127 aa, Glycine max
  unsure (1)..(127): unsure at all Xaa locations
  Clone ID: PAT_MRT3847_109491C.1.pep
MGCYKGHYEFLVMPFGLTNASSTFQALMNEVLQPFLRQFAXVFFDDILVYSSSLEDHHLHLKAILQVLQQHKLXVXRKKCNFGRNSLEYYAPNIPGKGVEADPSKLAAMAEWPRPKDAKGLRGFLGL

SEQ ID NO: 153342 - protein, 46 aa, Glycine max
  Clone ID: PAT_MRT3847_109492C.1.pep
MTHLVTGSMIRFCTKQRKALIVNNPRSYNHLFKDAGWLSNEEKPSV

SEQ ID NO: 153343 - protein, 325 aa, Glycine max
  Clone ID: PAT_MRT3847_109493C.1.pep
FGSREEIQLEEDMRTYDMECISMRKRANQFVTLEVPGLAERRPSLVHGDFIFVKLTSERDNNTTPVYQGYIHRVEADEIYLKFDPGFHFYHRDENRYDVHFTYNRINMRRLYQAAEAAEKLVTDFLFPSTSRKRHIKTTSLLPISGTFNEEQISSIKMILGCKGAPPYMIHGPPGTGKTRTMVEAILQLYKYHKNARILVCAPSNSAADYILEKLLAQQDVEFRENEIFRLNASARPYEDVKPEFVRFCFFDEMVFKCPPVNALIHYRIIISTYMSASLLYAEDVSHGHFSHIFLDEAGQASEPETMIPVSHLCTSDTVVVLAGE

SEQ ID NO: 153344 - protein, 224 aa, Glycine max
  unsure (1)..(224): unsure at all Xaa locations
  Clone ID: PAT_MRT3847_109494C.1.pep
DFDRSLSIYLHYVYIIEAFLNIXLAGTDTTAATSVWAMTALVKNPRVMKKVQEEIRNVGGTKDFLDEDDVQKLSYFKAMIKETFRLHPPATLLVPRESTEECIVHGYRIPAKTIVYVNAWVIQRDPEVWKNPEEFCPERFLDSAIDFRGQDFELIPFGAGRRICPGILMAAVILELVLANLLHSFDWELPQGIVKEDIDFEVLPGITQHKKNHLCLCAKTRSHI

SEQ ID NO: 153345 - protein, 64 aa, Glycine max
  unsure (1)..(64): unsure at all Xaa locations
  Clone ID: PAT_MRT3847_109495C.1.pep
KLGGIDKGVIERFEKEAAEMNKRSFKYAWVLDKLKADREKGLTFVLAWXKFGTTKYYWTSIDSP

SEQ ID NO: 153346 - protein, 77 aa, Glycine max
  Clone ID: PAT_MRT3847_109496C.1.pep
GQKQSQKSVKKTQESQSSFRVINSTTKNFFLSMIQQTFLVSRMFFYKRGSLKQLWKYCFKKNKKKKKNNKKKQKKKK

SEQ ID NO: 153347 - protein, 77 aa, Glycine max
  Clone ID: PAT_MRT3847_109497C.1.pep
HSRVVPQRRHLLSFDIKFSSQVGTFQPQFLSVGMSYIEERRAHPFRVVRQMTRCLWAEHSPASALQCHMVSRPQQHK

SEQ ID NO: 153348 - protein, 124 aa, Glycine max
  unsure (1)..(124): unsure at all Xaa locations
  Clone ID: PAT_MRT3847_109498C.1.pep
YRIDYLGESPEIPGYVSXQVRHFLAKCFKREPGERWSVEEIIGPGFVKECAELKLLVLDSDTPTGVLERGFWDSLETAQHEALDCPSPRDRIRRLFSDEPVWASNDDEWVPVRGNEIHVHTFGG

SEQ ID NO: 153349 - protein, 96 aa, Glycine max
  Clone ID: PAT_MRT3847_109499C.1.pep
NHQRTPRLMVKTIESNRRALRELLFTAPGVLQYLSGVILFEETFYQSTVEGKPFVNALKEAGVLPGIKVDKGPAKLAGTKGETTSQGLNGLGQRGP

SEQ ID NO: 153350 - protein, 174 aa, Glycine max
  Clone ID: PAT_MRT3847_10949C.1.pep
MFSFLLLFSAMEDEPFLTTTSQPIADCLLPSSKSFNDVTTTRARDVAAAAAEEIQSEQQQPPKKKKLSRCKTAPAMVTMRDLKPKTPQLPKPQSSSIIRQGMWLLAVYLSIGVVIYSFNRDRFSGIETHPVVDALYFCIVTMCTIGYGDIAPFTPFTKIFGCAFVMEGLGFIDI

SEQ ID NO: 153351 - protein, 83 aa, Glycine max
  unsure (1)..(83): unsure at all Xaa locations
  Clone ID: PAT_MRT3847_1094C.1.pep
SSCTXLCPXRISSIKIGFQSSLXHAVNDGHIYSRALFTTLGSETSGGTVYTLDLVEPLNLGPGILNTWSGLEEIASFKGTNWT

SEQ ID NO: 153352 - protein, 66 aa, Glycine max
  Clone ID: PAT_MRT3847_109500C.1.pep
ARNSARVDLEIVNIVQIQWCSREGYLGSGGGNKHTKYISQDVLPLPDYYMHQSLGRSAYFRLNTLT

SEQ ID NO: 153353 - protein, 82 aa, Glycine max
  Clone ID: PAT_MRT3847_109501C.1.pep
RSPALFHSIFICIWVYSIQPSILRVHPHVTCPRAPILFYPLGALKMSIDESIVNLCFRICKTSIRSLSHINSFPFPRACFSF

SEQ ID NO: 153354 - protein, 72 aa, Glycine max
  unsure (1)..(72): unsure at all Xaa locations
  Clone ID: PAT_MRT3847_109502C.1.pep
KSXXXPAXXXXXXXDDAEXPXXVXXXXXSXXXGMXXXXXXNXEFXAXLQXNXDXILSXXSTXSXXPXXRXXX

SEQ ID NO: 153355 - protein, 95 aa, Glycine max
  unsure (1)..(95): unsure at all Xaa locations
  Clone ID: PAT_MRT3847_109503C.1.pep
LSHNYRISQILVNCTCTGFTLSFXHFLSIYIYIYIKESCNIITSGTGTYTAFLVSDHGLLANSVAFFYFLICIYRISVVEDSSFSSKLYFTFSLP

SEQ ID NO: 153356 - protein, 54 aa, Glycine max
  Clone ID: PAT_MRT3847_109504C.1.pep
SVNKCHFLSLFIYFPGGAPRINHPQPITRECFLWSIPLTPFPLLHTAKHGLMQL

SEQ ID NO: 153357 - protein, 56 aa, Glycine max
  Clone ID: PAT_MRT3847_109505C.1.pep
LYRKKSKFYSHNIVITHNNHIITGGNQRVLTLFIDKQPSEYALQINTLAWRETKTP

SEQ ID NO: 153358 - protein, 94 aa, Glycine max
  unsure (1)..(94): unsure at all Xaa locations
  Clone ID: PAT_MRT3847_109506C.1.pep
HAFVDDCKYKVVHAGGWLSSANARWNVTQTVAGRGGKSLPPRTSARDDEINDTIATMGSVTNLRNGKSLYYXREGDDYFTGMNHYSRSALPWMV

SEQ ID NO: 153359 - protein, 279 aa, Glycine max
  Clone ID: PAT_MRT3847_109507C.1.pep
LNQTSEMSKEKDSADNQVDTFSEPVMLERFHTLMEIDNLHLEPDWDPIAELDSILSDSYNMSSMSTHSATVSEIEVHGPNVAAILEKLETLLETSLEILSSDDEVKQQFHHVLEQLSQFKDQVPVRLHAVIYKLKSFIEDVDIRYVTAQKTIQDYDQLLESRSLLSKQLESAKAQQDQINLKVSEGKTQFEKINSEIDELEHKLCALVVTRDKLKRALDSCDAENNKLKTQVAKWVPECKSIITALKESETSYKVALTDKRKTEDEWADLKKTFVANKI

SEQ ID NO: 153360 - protein, 49 aa, Glycine max
  Clone ID: PAT_MRT3847_109508C.1.pep
FLQAKTTPYVLSQNLNPSKCKLKNNQPPTLGLWNPHSNKTLAPRCYKRQ

SEQ ID NO: 153361 - protein, 143 aa, Glycine max
  unsure (1)..(143): unsure at all Xaa locations
  Clone ID: PAT_MRT3847_109509C.1.pep
MGTPSLLPMQSPRRKRITLRLHLDEXTLVHSTLEPCDVADFSFTDFFSLKEYTVYGYQRPYLHAFLERVSQMFEGKLPTAGPSVSARHLLAILDPDGGFISRRMCPESCLFSXADYTPDLTILGADLATGSYSILHLRLSDCG

SEQ ID NO: 153362 - protein, 83 aa, Glycine max
  Clone ID: PAT_MRT3847_10950C.1.pep
MGVFPPPGKVKNTFPVVKRSNAPSSDFRTLMLKKIVKKKIFLPPDLENFFQCFLSLNSHPPQKNIVHVFPKIWEGLFSAGFWF

SEQ ID NO: 153363 - protein, 57 aa, Glycine max
  Clone ID: PAT_MRT3847_109510C.1.pep
RKFFCSKRCQEAARPRSKSGIQALCSLHVALEKAKNVLQHCSECSKLYLAITGDSVL

SEQ ID NO: 153364 - protein, 175 aa, Glycine max
  unsure (1)..(175): unsure at all Xaa locations
  Clone ID: PAT_MRT3847_109511C.1.pep
MRIMDVAEVEESFFAASDAKLHGEMCKSLSAIYCKILSLFPSLEAARPRSKSGIQALCSLHVAFELDKSEIQHCYECSKLYXQGRKLNDSNDFDELESFHQAATRLGIASSRAALAERRALKKLIVRARSEEDKRKESIIAYLLHLMRKYSLLKFEKAKCALEDSLRRVEDIVPQ

SEQ ID NO: 153365 - protein, 99 aa, Glycine max
  Clone ID: PAT_MRT3847_109512C.1.pep
LATPALVCVSSNHGNGNPSLSLNYNPLLNEIQRSRLPDMPPEIQPVLLQHQAPELLQNNSHTITSTRPQRHQHKITLHPSGSPHQNLNQTPLNRSSGAK

SEQ ID NO: 153366 - protein, 180 aa, Glycine max
  Clone ID: PAT_MRT3847_109513C.1.pep
MSPVPSMMLFSFISFLAILKSEAQDQLNFVYHECNNHFGNFTPAGVYGSNLNTLLSKVYSHEEIDNGYYNFSYGQNPNKAYAIGFCRGDVKPDKCRRCLDKSAVLLRERCPLQKEAIAWFDACMLRYTNHSIFGVMVTQPNNILCNTNNVSTKVLEQFDQAVDDLLSKLSNMTVDGGGSR

SEQ ID NO: 153367 - protein, 97 aa, Glycine max
  Clone ID: PAT_MRT3847_109514C.1.pep
HSICTSKNVKQKKNSPHAFHMKTKTVKGNRRMNKLDLPSVFLICIFFFLAGFSASSLFSHSQKHEYDLRLRPRPRPRARLLEKSTQEKTEYHLLKAG

SEQ ID NO: 153368 - protein, 60 aa, Glycine max
  Clone ID: PAT_MRT3847_109515C.1.pep
MEGAGMEEMYIINDDDYNYMSALWNFVAGCVDCGIHDTCDNACSICLEAFCDSDPSTVTS

SEQ ID NO: 153369 - protein, 72 aa, Glycine max
  Clone ID: PAT_MRT3847_109516C.1.pep
ITTSVASLSKFLPYFTNYLLTPFFAKSVNFLKNTIVQLFLLIILKVLNLLILFILMCGVLCLFSISLVQKGL

SEQ ID NO: 153370 - protein, 71 aa, Glycine max
  unsure (1)..(71): unsure at all Xaa locations
  Clone ID: PAT_MRT3847_109517C.1.pep
QIAHRGYVKGMGFYAFPDIHEGMLTSNPLRIGNKLTLEPKLCCVLTCRSFSSIINIPPLPLFLFSYXPRVW

SEQ ID NO: 153371 - protein, 122 aa, Glycine max
  unsure (1)..(122): unsure at all Xaa locations
  Clone ID: PAT_MRT3847_109518C.1.pep
KFSPKNNIPGAGLNPKVSCYTHFIATTYSISHLTLLNQLAAVRTPLHFLSHKQNFVTYFIKLLAGGILFDXTGDLITLIQNSSIHNFFRVAAWNKSCFMVKIEISGNSTIKTNDWTLFVQVF

SEQ ID NO: 153372 - protein, 96 aa, Glycine max
  Clone ID: PAT_MRT3847_109519C.1.pep
LDRGRCRACELCLTSFFLSSCRIRVGATLKADIRGSLSQCLKYSAYYYHLYPSLLMYLLYARAVIYRATPDPNRAYTFCAFSSQRLLTSPSGYGGY

SEQ ID NO: 153373 - protein, 80 aa, Glycine max
  Clone ID: PAT_MRT3847_10951C.1.pep
TLASPPLLILILIDPFFFFLSFSLSLSFFFFLTFTFDRSKNEYHPLSGFDSGNTWGQNPMMKHRPQKIANNPRKLCSRGH

SEQ ID NO: 153374 - protein, 75 aa, Glycine max
  Clone ID: PAT_MRT3847_109520C.1.pep
VDILCVGEGVPYQFEVKWHQNVLLVASRSKIQWCCLNNEHTGSSICSLSVRMFHASLMMRMLWAFHLDKIGNVQE

SEQ ID NO: 153375 - protein, 53 aa, Glycine max
  Clone ID: PAT_MRT3847_109521C.1.pep
NACLFSRTKVSSCHHHELLSVVSISVLHRMRAMFQRRVSSWLKLEPGASVCSM

SEQ ID NO: 153376 - protein, 46 aa, Glycine max
  Clone ID: PAT_MRT3847_109522C.1.pep
RFLEGRSLMQIQDSLFSVSFRRTTSCISANERSLDGIREVVCRVEI

SEQ ID NO: 153377 - protein, 92 aa, Glycine max
  Clone ID: PAT_MRT3847_109523C.1.pep
GSKVYFPGFATFFFFFGFPKIKLIGRVLKHFYRENPWVTQIYCFGIKSSFARLVYYLKGPPHCPFPKIGQSLWRIGPPLYPFHYSRWFVCFP

SEQ ID NO: 153378 - protein, 97 aa, Glycine max
  unsure (1)..(97): unsure at all Xaa locations
  Clone ID: PAT_MRT3847_109524C.1.pep
HASGKGKEGRKPPVPKVTQSKKGKASLAAQGKPRYAPHQAGXGGQTKPVFPKKGKTPQKIVLRVQGQGCKHVLQRAIKRGKPFEIGGAKKGKGTSLF

SEQ ID NO: 153379 - protein, 104 aa, Glycine max
  unsure (1)..(104): unsure at all Xaa locations
  Clone ID: PAT_MRT3847_109525C.1.pep
XXMXXXWXXXXXXXXFSXXXXXXIXXXXXXNXXXXXXXXXXXXXLXXIXXXILNSXSEXXXXEIXXXKXXXKXETXRXNKXKPNXNKTDSDQDRTEYXSLXTXI

SEQ ID NO: 153380 - protein, 61 aa, Glycine max
  Clone ID: PAT_MRT3847_109526C.1.pep
MRFLRFYRAKLFESERKLDHILNIFPLCIRTNNTNLTLFHIILHLLLFREESAYSGHPLLK

SEQ ID NO: 153381 - protein, 63 aa, Glycine max
  Clone ID: PAT_MRT3847_109527C.1.pep
HLHRSIACFRDELDAVLDDEVASSMVGRSLKVINLEDYGGPTANREHDPWKGASRGGNAGRKG

SEQ ID NO: 153382 - protein, 41 aa, Glycine max
  Clone ID: PAT_MRT3847_109528C.1.pep
KMPNPPILGYAFPFSQSPNILTRKRKKKKGRHPNKLCVITG

SEQ ID NO: 153383 - protein, 225 aa, Glycine max
  Clone ID: PAT_MRT3847_109529C.1.pep
MGQGTPGGMNRQGDRKPDGGDKKEKKFEPSAPPARVGRKQRKQKGPEAAARLPTVTPVTKCKLRLLKLERIKDYLLMEEEFVANQERLKPQEEKAEEDRSKVDDLRGSPMSVGNLEELIDENHAIVSSSVGPEYYVGILSFVDKDQLEPGCAILMHNKVLSVVGLLQDEVDPMVSVMKVEKAPLESYADIGGLDAQIQEIKEAVELPLTHPELYEDIGIKPSKGV

SEQ ID NO: 153384 - protein, 51 aa, Glycine max
  unsure (1)..(51): unsure at all Xaa locations
  Clone ID: PAT_MRT3847_10952C.1.pep
PKPTNTQMMNVRGIKPKASHRKSVVNNLPPQATTHXVAYFPWKTQAEVTEN

SEQ ID NO: 153385 - protein, 75 aa, Glycine max
  Clone ID: PAT_MRT3847_109530C.1.pep
RDSDSFRATLSLLSFVFVRSIVNNEYVILISKCEILSSIYQLYTDLTYYISLLLVLTQMFLSLRCGSGKGTNMQS

SEQ ID NO: 153386 - protein, 95 aa, Glycine max
  Clone ID: PAT_MRT3847_109531C.1.pep
LGAKMRVKGERVQLPPFPPRNSLNDSCGGCNPRPFVLSYSRFWPYPGCFVRLFFALCPSYWFLIGRLPFFMLLLLEHEIDQLFIVFFLTTNDSCF

SEQ ID NO: 153387 - protein, 92 aa, Glycine max
  Clone ID: PAT_MRT3847_109532C.1.pep
RRGRFCRRAVPFDFLKKKGWQSGHEKDFKAQGRDLHPWRSPPRQQRRKKRADPHERKPFVKAKFSGGGGGPSHFEKNMPQVRVDKEFFFASA

SEQ ID NO: 153388 - protein, 69 aa, Glycine max
  unsure (1)..(69): unsure at all Xaa locations
  Clone ID: PAT_MRT3847_109533C.1.pep
FLDCNFFVLFLGNQNWLIIEKGPLRDYIGRLLMTATNDSYPRWSDFKXAISSIGEKLSRPEILASTTNA

SEQ ID NO: 153389 - protein, 49 aa, Glycine max
  unsure (1)..(49): unsure at all Xaa locations
  Clone ID: PAT_MRT3847_109534C.1.pep
QXLAVSGQAFXXLPXNLEXXRVWXXXYSXXIXXXXXTXPFHFXXXHQNH

SEQ ID NO: 153390 - protein, 202 aa, Glycine max
  unsure (1)..(202): unsure at all Xaa locations
  Clone ID: PAT_MRT3847_109535C.1.pep
KRQKGEKVLKQSLVYAGAELQLKPKKDFDAQREKELEEQEKFRPPXGSGHQNNTNTEANYPKGLLIAFKLKSISDQVPLDQNNIDQQANDSNVVKDNADNDKENNGVSEGKDTEGEEKSKETDGKNYAAAYKDNNDVVSREDLKGVFDKSGTVKYIDFKIGEESGYIHLREPEAVQKARAAAVLSVKDGSVVKNYIATLDPI

SEQ ID NO: 153391 - protein, 84 aa, Glycine max
  Clone ID: PAT_MRT3847_109536C.1.pep
KNNPGWVYIPPFDDPLIWEGHASIVKELKETLWEKPGAIALSVGGGGLLCGVVQGLQEVGWGDVPVIAMETFGAHSFHAATTAG

SEQ ID NO: 153392 - protein, 47 aa, Glycine max
  unsure (1)..(47): unsure at all Xaa locations
  Clone ID: PAT_MRT3847_109537C.1.pep
XXMXXXXLECRXXXMCXXHKLXXXXNXRPXQGCWYQXSFYDGXNXAI

SEQ ID NO: 153393 - protein, 67 aa, Glycine max
  Clone ID: PAT_MRT3847_109538C.1.pep
ENNGYSITQESKKLITLIKFGKDIVQIRCSSSIVVVWFWDALNLFCMIPYSLIFCKSFSVMFFLYVF

SEQ ID NO: 153394 - protein, 77 aa, Glycine max
  Clone ID: PAT_MRT3847_109539C.1.pep
LFPLRFVLQSIQCMLRLFTNTMLVRNPRGNINGIPTNPRLRTNLPQRYNDRISYYPPHATYCLLLRVTNRCILAALW

SEQ ID NO: 153395 - protein, 84 aa, Glycine max
  Clone ID: PAT_MRT3847_10953C.1.pep
DYRIKEASQLLKYLWDNYVELSECTHVYLMGTNTGHGAIINLLKNNQETFLKKYNDREEENKLLKVISFVEDVPLMSCKSLVNG

SEQ ID NO: 153396 - protein, 48 aa, Glycine max
  Clone ID: PAT_MRT3847_109540C.1.pep
VLKIFHHLLGEFLPLHGYHQILAWKFCLISGWGPRFCVSISSPLFYEP

SEQ ID NO: 153397 - protein, 134 aa, Glycine max
  unsure (1)..(134): unsure at all Xaa locations
  Clone ID: PAT_MRT3847_109541C.1.pep
PCLYNQXTFNLDPVQFAAEGIKSSCIMTALKSANKELKGMMKTVKIQDIDNLQDEMMDLMDVSNEIQETLGRSYNVPDDIDEDDLMGELDALELDMANETEADGVPSYPKPDKVTKLDYFLRFCFKCSVPFIPD

SEQ ID NO: 153398 - protein, 91 aa, Glycine max
  Clone ID: PAT_MRT3847_109542C.1.pep
ILFTNITHSPLLMEAKGLSLVPYHCDIMESPESAVAPFYISVLGEAVKFKNDVSPESFSPLPKDIKDPGYETTRGNPDYSVGVFDVYNHKA

SEQ ID NO: 153399 - protein, 81 aa, Glycine max
  Clone ID: PAT_MRT3847_109543C.1.pep
FFKGSFVLLVISLLLSLLVNLTLLVLTHVFSVLIYLCVFPYVHMPMCLSSACYWPNKILLTCVHMPPSDFICTPSVVFSQP

SEQ ID NO: 153400 - protein, 51 aa, Glycine max
  Clone ID: PAT_MRT3847_109544C.1.pep
SISSGMNHQMLQQLMGVDPGANPVCHSLGSKAILWVPNLSVDTAYKTNNCR

SEQ ID NO: 153401 - protein, 340 aa, Glycine max
  Clone ID: PAT_MRT3847_109545C.1.pep
MASAVPATGRELSNPPLDGITNLRFSNHSDHLLVSSWDKSVRLYDASANVLRGEFMHAGPVLDCCFHDDSSGFSVAADNTVRRLVFSSNKEDILGRHDAPVRCIEYSYAAGQLITGSWDKTLKCWDPRGASGQERTLVGTYPQAERVYSLSLVGHRLVVATAGRHVNIYDLRNMSQPEQRRESSLKYQTRCVHCYPNGTGYALSSVEGRVAMEFFDLSEASQAKKYAFKCHRKSEAGRDIVYPVNAIAFHPIYGTFATGGCDGYVNVWDGNNKKRLYQYSKYPTSVAALSFSRDGRLLAVASSYTFEDGPKSQEQDAIFVRSVNEIEVKPKPKVYPNPPA

SEQ ID NO: 153402 - protein, 45 aa, Glycine max
  Clone ID: PAT_MRT3847_109546C.1.pep
TSPILQAKTVNQDYFKPYSIRGQHIIFLTLKTHQMLLRCTLVHNQ

SEQ ID NO: 153403 - protein, 150 aa, Glycine max
  Clone ID: PAT_MRT3847_109547C.1.pep
MASAVPATGRELSNPPSDGITNLRFSNHSDHLLVSSWDKSVRLYDASANVLRGEFMHAGPVLDCCFHDDSSGFSVAADNTVRRLVFSSNKEDILGRHDAPVRCVEYSYAAGQLITGSWDKTLKCWDPRGASGQERTLVGTYAQAERVCSL

SEQ ID NO: 153404 - protein, 53 aa, Glycine max
  Clone ID: PAT_MRT3847_109548C.1.pep
PKILYFSSFFNIIHITFEVIFNLHAHASFFFPCYGTTFITTTHLPSLFWIHNM

SEQ ID NO: 153405 - protein, 134 aa, Glycine max
  unsure (1)..(134): unsure at all Xaa locations
  Clone ID: PAT_MRT3847_109549C.1.pep
VIFKLKVIFNALPSQRQTLLFSATLTSALNRLNAVSVRKPFLFEEKDTVKTVDKLEQRFVLCPRSVKDAYLVFVVKEFNLRGETXILVVGKTWRGWQALALMVKPVGFEGGSLHSEILQKGSGWLVGERFVPGR

SEQ ID NO: 153406 - protein, 77 aa, Glycine max
  unsure (1)..(77): unsure at all Xaa locations
  Clone ID: PAT_MRT3847_10954C.1.pep
FLGEEAPATVGGCTECSIITTIITVVPEGYDAFQVVYRRAIXRERPIPLWASXHKVGAIPMRDLKEFPLQSIIGFKL

SEQ ID NO: 153407 - protein, 54 aa, Glycine max
  Clone ID: PAT_MRT3847_109550C.1.pep
GRQLKKSHPCQELHLDGIRRCFCGPIWRTTTLPLLKTKMSLYEQIRQTNFNFFY

SEQ ID NO: 153408 - protein, 162 aa, Glycine max
  unsure (1)..(162): unsure at all Xaa locations
  Clone ID: PAT_MRT3847_109551C.1.pep
VPWGRQLGISILLGLAVLGAPIETRERGGASVFSLFNLKXXRPFWGEGVIHNEFEELKVSSDGKLRAFNYTNAGNIAXYLXLRGGGSIHLPGPXNLGGGGXXGRGXXFKVLPXKIEGWXTKIEHGFGHTRSRHGERLIPFYKTNMGKMRMGPPCGEAHKLQF

SEQ ID NO: 153409 - protein, 74 aa, Glycine max
  Clone ID: PAT_MRT3847_109552C.1.pep
EYLVPLPHLFLASVTLRYPDHNPSTVQCVQSLPYQSNYFVPTLQSPLVCGLQPPPHVTGTTRITVAPPPRTIPL

SEQ ID NO: 153410 - protein, 97 aa, Glycine max
  unsure (1)..(97): unsure at all Xaa locations
  Clone ID: PAT_MRT3847_109553C.1.pep
SMAYGHYQAPAVFSTGLIYSNPAPSIHTAAVRLLAASIARATIADWPYVLLPWRSAXRSLALRRASRCAKTLASGASTVVGHRGASASSTDIISYAK

SEQ ID NO: 153411 - protein, 46 aa, Glycine max
  unsure (1)..(46): unsure at all Xaa locations
  Clone ID: PAT_MRT3847_109554C.1.pep
NHKSXRDLHHPSTSNTCQAKRPAFSLVGKPTKFFSXTRKLCLDNXK

SEQ ID NO: 153412 - protein, 81 aa, Glycine max
  unsure (1)..(81): unsure at all Xaa locations
  Clone ID: PAT_MRT3847_109555C.1.pep
MDGADSLSFGPLVPTETERSLLERVRQELKHVFKQGYKVFVGGIKFFFXXXRRSXXXPGGGGGLXTPPPPXXSXWPCPPXE

SEQ ID NO: 153413 - protein, 111 aa, Glycine max
  Clone ID: PAT_MRT3847_109556C.1.pep
YLPKLLALFFLHLNNCHFQTLPLISKLSMVDSISCDISKSTRDSIKPTDRPALKTIINKQEHALSPALAQLLREPFLQNQEPSLALHSAATAAVAHAETLHFHWPLYFSPV

SEQ ID NO: 153414 - protein, 205 aa, Glycine max
  unsure (1)..(205): unsure at all Xaa locations
  Clone ID: PAT_MRT3847_109557C.1.pep
QYLEVAIFQWRTSRLCAHCAFFMGLQRKQGGQEGQQFDIRGTVEEFRRNSGIXVNMYMFWKPGMEIYVSHVRRRQIPCYVFPDGYKRSRLSRPTSQFENCKSFHNNEVSVTEHVERIRKRKNNDGVDVREDAIVKRQYACPPGDRLARRNSLGTGGLSVEAVSDSQELRSVECNHLSNSGQDDLDRTESPEAASNSSVITICWFF

SEQ ID NO: 153415 - protein, 78 aa, Glycine max
  Clone ID: PAT_MRT3847_109558C.1.pep
DQSFKILHETHPMGTYCKKKMESKDQESLGYELTNFKSIKEVIKNKESSFKSDVNYDILLTSKRDIEEGRKIKERNKE

SEQ ID NO: 153416 - protein, 24 aa, Glycine max
  Clone ID: PAT_MRT3847_109559C.1.pep
CGLSLVFKLCCTVSILERRKESLS

SEQ ID NO: 153417 - protein, 219 aa, Glycine max
  unsure (1)..(219): unsure at all Xaa locations
  Clone ID: PAT_MRT3847_10955C.1.pep
MPSSTAFQWLSLVGIIWLQSINGTNTNFPAYSSQLKQLLSISQFQLNNLAFASDAGKIFGFFSGMAAFYLPLWLVLMIGSTLGLIGYGVQYLLITNQISSLSYWHVFLLTVLAGNSICWINTVCYVITIRNFSYDHRQVAVGLTTSYQGLSAKIYTSIVGTVSGQNKAXTFFFLNSFLPLIVSLIATSVVREIEAVTRPKHMNVGFAAMFGITIATGNI

SEQ ID NO: 153418 - protein, 38 aa, Glycine max
  Clone ID: PAT_MRT3847_109560C.1.pep
KGTKFHCSASAVRSTLFVSPLKLDLECLDLLIGIHSSY

SEQ ID NO: 153419 - protein, 133 aa, Glycine max
  Clone ID: PAT_MRT3847_109561C.1.pep
MKANNELNAQQPLPINDLTITQYSYFLKKKSICLFFTSAILFIMIIQAIITLVTLHSFEELSQNAKNKLTICCILVMVGSCCMIVLQFIFIRVSSRTAGSLQFYSYWTFFIQLAYTIFCLEGAIVPMYRLQHL

SEQ ID NO: 153420 - protein, 161 aa, Glycine max
  unsure (1)..(161): unsure at all Xaa locations
  Clone ID: PAT_MRT3847_109562C.1.pep
GCEKTTEGHQFPDESLSEALERFRGLLRKTPTHGFSEPIQLNMFIDGLRPXTKQLLEASSGGKIKLKTPKEATELIENMSASDHAILGDRVHQPTKRSLLELSSQDIVLAQNKLLSKQLEILIETIGKLPTKLSTGQPSQSSVLQVIGCTISGGAHESGHC

SEQ ID NO: 153421 - protein, 179 aa, Glycine max
  Clone ID: PAT_MRT3847_109563C.1.pep
MSDHLNDPLKTPLDWRTRLQIANGVVAALEYLFLFSDPPVCHVSITSSNIMLDENFTAKLSDFGLLTSGGNSVMVPYSEDLKQKSCKIIFQLGVLILELVTGQSSEMEGSDLIEWIQESRFYNSIDKMIDPDLGNNYDCTELKSLLAVAKLCIKSWDKPSFTIPQLFRHLQKKIDISNY

SEQ ID NO: 153422 - protein, 46 aa, Glycine max
  Clone ID: PAT_MRT3847_109564C.1.pep
WGYIYTNKILWGSLNAITYQISGAHHFHSSLLQRKLLVGKNGFQRR

SEQ ID NO: 153423 - protein, 45 aa, Glycine max
  Clone ID: PAT_MRT3847_109565C.1.pep
NLVSSQYKKKKMLKNLCLIGFTWKPSGICFEEGLGNGRVRYYQGL

SEQ ID NO: 153424 - protein, 118 aa, Glycine max
  Clone ID: PAT_MRT3847_109566C.1.pep
RHDSRQSTGAADGEHQKRMDGATQMLPGKEIREPPAAKYVLEQCLSPPVLVPSHRGHPGTRQRLYLADLLTWPELPPPADTASRKSNGGSGTRCGVKGSRRKKLNRCRGQCSQRKESA

SEQ ID NO: 153425 - protein, 212 aa, Glycine max
  Clone ID: PAT_MRT3847_109567C.1.pep
MMEPQQQQQQAQGSQQQQQNEDGGSGKGGFLSRQSSTRWTPTNDQIRILKELYYNNGIRSPSAEQIQRISARLRQYGKIEGKNVFYWFQNHKARERQKKRFTSDHNHNNVPMQRPPTNPSAAWKPDLADPIHTTKYCNISSTAGISSASSSVEMVTVGQMGNYGYGSVPMEKSFRDCSISAGGSSGHVGLINHKLGWVGVDPYNFSTYANFF

SEQ ID NO: 153426 - protein, 154 aa, Glycine max
  Clone ID: PAT_MRT3847_109568C.1.pep
FGSYLHKVIGSRVPNTNICSGSYDIVAVEQKKDIEETHQTDDDRWKGLAYDISHYQQDITRGKGGVDSLLQASHDAGAHYAVMSYYEYLSTGLRQYSDHNMDGSYIAPACMDKLVGHIDQDFMTLANIIVALISRICGGNGTGKYLQCEHVLVR

SEQ ID NO: 153427 - protein, 626 aa, Glycine max
  unsure (1)..(626): unsure at all Xaa locations
  Clone ID: PAT_MRT3847_109569C.1.pep
MRENNNEVVITAGEEENHVSGGHLRHSRDGIWWSVVKSLPRSTAVLIFPVMLIIGALTYTRTLDTHCLFFGASSTKIHNQHLPHQFTATKTQYPSSGSHDQLKPELSFSTEPKTPYLSSTKINDHHLPQHSSASATNAQYPSARSHDQFLPEYSSQTKTPKTYGDNQTTQTRHQEENKGNDKPSTISLATAAIADKAVSAKNTEASSLGYGYDADTETTQSRDHDENTHGEKPSAISSQASAIYDKAVSAKNIVTSKLGLGDKTETTQTSRQERTQPQTISLATAAIADKAVSAKNTVASKLGYGDSXTETTQTSHQEQNTGNEKPSTISSATSAITDKAVTAKNVVASKLGYGDNTETTQTTLARNQEENTGNEKPSTISSETSAIADKDASAKNSVASKLGFGDTARTHEEKRTNHAAAPTEYGKSVAQSLTEKLAPVSGKVSGAGSGVKSKVSGTEKISNVGVEQDKGVSVKDYLVDKLRPGDEDRALSKVISETLHKKEVHPVEVTEEGVRKMVSDAVHKREDEPERKVEHQKILGKVTESEEVKRRLGGEDVETEKKYQEMYVNSPGTGVVDKLTGMVGTWFTNPAENQSSQDSSMNHEASRAEVEHQGAAGARRLQESPN

SEQ ID NO: 153428 - protein, 54 aa, Glycine max
  Clone ID: PAT_MRT3847_10956C.1.pep
YENIKSSQLKKNLNDTRTNIRLYLINLRCKTYIPFILVYVSRTLFKPSTISSSN

SEQ ID NO: 153429 - protein, 35 aa, Glycine max
  Clone ID: PAT_MRT3847_109570C.1.pep
DWKDYLGSKIRKIIILTNTDTKIYKRKNTFIARSK

SEQ ID NO: 153430 - protein, 37 aa, Glycine max
  Clone ID: PAT_MRT3847_109571C.1.pep
KTQNVFPPPQEGDRNLLCLEVFLEAHFKRGALEIAME

SEQ ID NO: 153431 - protein, 135 aa, Glycine max
  Clone ID: PAT_MRT3847_109572C.1.pep
PDKKIQRPIPSEEKPPRKTREGENGGKGGGRKQKNTGAKTPQGGGEKQKGDRTKRKPPQAKALPTGGGEDHPPERPENSQGGGSAKGTQGHTRPGGEAPGAKAGEPPKGAKKQTWPKAYRALRRADTGGGEHKGG

SEQ ID NO: 153432 - protein, 272 aa, Glycine max
  Clone ID: PAT_MRT3847_109573C.1.pep
MGKGGQCFFEKLRRCVRTVFFVVALVRSLSVTSLPVVVAVVDVLVPCVLIPNFTCVMCYSIKDHFHRYAFKSSFTDIPLISVIRSLIILCVYSVCDGPALSHGPYLGTVTLCSFLSIVLLSVKACVFTVNSHIEAEASVSLRKHRLHLKKPWGMPVLFLSSVVFALGHTVVAYRTSCRARRKLLFHRVDPEAVLLCKNVFSGYPKVPRSPTPSAGRTPKSDCEMRRRPFGTARDEELLVRLLANSDSLFITCQGLTLHHKLSLPGSPPHTLS

SEQ ID NO: 153433 - protein, 118 aa, Glycine max
  unsure (1)..(118): unsure at all Xaa locations
  Clone ID: PAT_MRT3847_109574C.1.pep
GPTHAPGVATPAGSICARXGKDGGTLMRDQADGXRKLLLSRAGSIIHALCYSPHRYWLXAHTEQSIRSWDXESNNIAEDWKVDHKTEAXTHTSCGGNANHNKEIYCTRSNRSAEGSTL

SEQ ID NO: 153434 - protein, 80 aa, Glycine max
  Clone ID: PAT_MRT3847_109575C.1.pep
FSFLRDASNGCVDVGNVASALTTSSVLEAQSRKPNRYEVSQYRYRNVPIKRRAWVEGQMSFDQSVVAIMSKCKASMRMGN

SEQ ID NO: 153435 - protein, 61 aa, Glycine max
  Clone ID: PAT_MRT3847_109576C.1.pep
NRYILRFPHNPLEKVWIDIKCVTCLKKPCKGKFSQDYFVCHHNYNSSKLFVDKIKIYQKFG

SEQ ID NO: 153436 - protein, 69 aa, Glycine max
  Clone ID: PAT_MRT3847_109577C.1.pep
AMAPPHPGGMAAIVAGIMNLALDAGKATPASPPVPAIASTGGYIMAACEDCSAPTRDLPRYVTLVQDPD

SEQ ID NO: 153437 - protein, 75 aa, Glycine max
  unsure (1)..(75): unsure at all Xaa locations
  Clone ID: PAT_MRT3847_109578C.1.pep
DFSHRFELGIEKRSAGWHFVFAYTRLXXDSGGNFCGRFCVLVRRLSQFCSTASVPCLFLXCXSVAQTKRIXVVRF

SEQ ID NO: 153438 - protein, 113 aa, Glycine max
  Clone ID: PAT_MRT3847_109579C.1.pep
RKWRLPSLIFLPRNPPHPNTRSLYQPIPPRKVPHHLVSEPQLLTQVLSYPIIFFLICPGSCFLPCSVIRVFVYTLFRSCLRLVLCYSRSCSHLVSFLLLPRSGSCFLCLPPFA

SEQ ID NO: 153439 - protein, 50 aa, Glycine max
  unsure (1)..(50): unsure at all Xaa locations
  Clone ID: PAT_MRT3847_10957C.1.pep
GFRVRDARNRARAISTAFLKMVSGXPHGPGRSGDLTVAAVGGCFSLPTHA

SEQ ID NO: 153440 - protein, 71 aa, Glycine max
  Clone ID: PAT_MRT3847_109580C.1.pep
NFLGCNNIVWFLLYHYKMIMFYSGHELFFDEPYHGYLTESRDYQWSYSLMNLTVTTIKWSKPLHSYSNSTV

SEQ ID NO: 153441 - protein, 35 aa, Glycine max
  Clone ID: PAT_MRT3847_109581C.1.pep
SASQSSLASRHLYWTFSYKHCFHRIGGSFKIGRGG

SEQ ID NO: 153442 - protein, 87 aa, Glycine max
  Clone ID: PAT_MRT3847_109582C.1.pep
RPRPQGQLQQSRWKRRDQEPPCAERRRPSLPYADHRDEQHSTICPCSPTERDTRRWVIAHFEGMERSRRSEQILDERTRGSTRNPDR

SEQ ID NO: 153443 - protein, 93 aa, Glycine max
  Clone ID: PAT_MRT3847_109583C.1.pep
QFLFTLVQFILLVVSGPTPLFLQFCFPPLVPWCHFFFPFSLLGPPPIFFCPPSSHLVVFKGGARALSLLKLRCQVACVCCDYVRNPHTLNRSG

SEQ ID NO: 153444 - protein, 76 aa, Glycine max
  Clone ID: PAT_MRT3847_109584C.1.pep
GKNLNDASPAQRPCDPTSYHESSKQQAEPVLTFYLIQGCFSFLELLHALSLLLPVGGAGIMGSNSGSALSNCPISM

SEQ ID NO: 153445 - protein, 143 aa, Glycine max
  unsure (1)..(143): unsure at all Xaa locations
  Clone ID: PAT_MRT3847_109585C.1.pep
ALRLLLELKRPLGVMYSLDDARCQAYSPAGQPNPGEVISRQNIAFYIGDSQFSLPSSPRVLIQRYREFXHALREGPVVYSHCAANMKRKRPAAPPRRVPVRAPVYVAGGYDDGDDDGDYSGGSDMPKISFSGRRSSLRNSRPY

SEQ ID NO: 153446 - protein, 103 aa, Glycine max
  unsure (1)..(103): unsure at all Xaa locations
  Clone ID: PAT_MRT3847_109586C.1.pep
RFKNNRKKRGKESDGQGGSGKHRKHAGGRGNGGGKQDHKDLSHKNKPSLLRKVGTRHEHIVCKKYNSDRRNXEKGGSATDEDAKEKARKTKERAPPRGATTEG

SEQ ID NO: 153447 - protein, 56 aa, Glycine max
  Clone ID: PAT_MRT3847_109587C.1.pep
NFKFEFISFFFLLCGPHDLPRTSMLTWWVPRNSISPTCYSVIHFLNHLRILHVLHG

SEQ ID NO: 153448 - protein, 53 aa, Glycine max
  Clone ID: PAT_MRT3847_109588C.1.pep
TRILHFTSLLQKKTSSIEKLFCLKLQNVEVKLTYSQDQNILIYITNLKFDFLS

SEQ ID NO: 153449 - protein, 176 aa, Glycine max
  unsure (1)..(176): unsure at all Xaa locations
  Clone ID: PAT_MRT3847_109589C.1.pep
GPAPLLGQTINLCGGHWIFQEQGLGPLDQSFLXLPNNFCNKICCPPKGKGLXSSPTGPNVNSMVPPKKKLKMQELVPLGAPKFSTGLYFKIKKTFLPVGQSFFYTAFFYSRAVHFPIAQVLFYEVVLIKLDFLERILAPPYPCENFPPPMKKKKPLFGAPGKIKPSPVFLMGNLPW

SEQ ID NO: 153450 - protein, 579 aa, Glycine max
  Clone ID: PAT_MRT3847_10958C.1.pep
MDLGSESVEENEVNHDGNGNGGSYDDEKIGLGLEGNSDVNGSDQKGTVGEVEVGSAEGVNSKGTPTKGFGLKKWKRIRRNVVKDPNSSVDSGKVLKRGLSGNANLSESQPFLRDVKEKNEGSSNMFGNVVFSDGNVIHGSSSDSRYALGSGFVVGTDSENSEDRSSKSSTAASEPNRSKNVNSKHLANSAQRVQPGKGRTEGSKKPGGGGRVKIEKENSFSSLESDSRSSNFKQGVFSVTSNGKHTSRPNVYDGVNSGEAHTNEHFTEGVEAGYGNENVVEDEYLLQDLLQENLGTNLSWDVAEEKRSSAVEDPIIESVSCLQAVQEALQEELQKFREIGIEAISPDDDSAKCSSASAGTTIDLGLNKSSQSGQSGAEEIRQTASSSSDPQVLSLTQNINILESKLENLLEDLQGVLALMDSRIAELETSSSSVKESASTIALSEKKCERVESELEGRFKLRIEAELKYLFISKVMQNMKGGAGIQQTLLEEQEKLSENQAQILDKVVDAESKASVLKNKTEELEKYCGDSVVVEESFVLQRRVCKMSFYLFIQFMFLVLIFWLYMSQLSHNSGMVVPT

SEQ ID NO: 153451 - protein, 90 aa, Glycine max
  unsure (1)..(90): unsure at all Xaa locations
  Clone ID: PAT_MRT3847_109590C.1.pep
GGLCRHTWVSKIFSTIICTPEIGSVLDTAFLQAVFLTRPSSAGLDLLSGVDYYEFSYXETLIWKGNPYSVLLEPFXHNSLHRDALELLHT

SEQ ID NO: 153452 - protein, 94 aa, Glycine max
  Clone ID: PAT_MRT3847_109591C.1.pep
HGTACTFSSCTTGSCAELSHFWGVLYDHVRAGQAAAGTCSSHFLEDICAPPCMSSKGTPPATLSSRRSERCLVCLVRAIRRAQQGTLSYVLIRH

SEQ ID NO: 153453 - protein, 61 aa, Glycine max
  Clone ID: PAT_MRT3847_109592C.1.pep
VTGSRLGLLVKVCDNKVWHQSQAYGSMVVLRRPKYNYRRYHPLCLDPVSGHPAITQINSVL

SEQ ID NO: 153454 - protein, 52 aa, Glycine max
  Clone ID: PAT_MRT3847_109593C.1.pep
ITGSPLIQALVHMMLNYPKQKTLPLFYFFTEYNFLLTIYSISIPPLVYEVHS

SEQ ID NO: 153455 - protein, 54 aa, Glycine max
  Clone ID: PAT_MRT3847_109594C.1.pep
KLPQLSRFNNFPSCYPSICIAPKRRHVTSVTSSYNAQPSLHPGICTEVWDHKLN

SEQ ID NO: 153456 - protein, 222 aa, Glycine max
  Clone ID: PAT_MRT3847_109595C.1.pep
RLEILLIMAYCSLKVLFGVVLYAFAFQHCYADANSTLIVNAASNNATARQIPNTFLGVFVEEINHAGAGGLWAELVINRGFEAGGPNNALNVYNWSIIGDESSISVSISRTSCFERNKAALQMEVYCGAHKPCPYGVGISNPGYWGMNIEQGKRYKVVYHVKSERKFDFQLSFTGVDVIKVASSRRHVYGDGKWKRVETIVEAKTTNHYSSLQIPTTREGSY

SEQ ID NO: 153457 - protein, 342 aa, Glycine max
  Clone ID: PAT_MRT3847_109596C.1.pep
VLPSSFLRRLQRGAAGPVLQCSSIFYPQTHKIWCFKPSLSVTPPPQQQQQQRTSHEEKPKPITSVSNPFVKHCLKLRNSSSYRRSHASAIVVGATPIREICRFRESIQDGSVLMDCLILPDKADIPDGLDKSTASVVRVSSVVMRKLSGLQTTESLDAIALMKIPASFFSVDDHQKNCLKWFPSVHRILVLDGIQDPGNLGTLLRSAVAFRWDGVFLLPGCCDPFNEKALRASRGASFQLPVVSGSWNHLESLKKEFQMRFLAGHPEHEGLVKPVSSLSPSFCDSLSDTPLCLVLGSEGSGLSEKSLQTCELVSIAMTGEYESLNVSVAGGIFLYMLQPKNT

SEQ ID NO: 153458 - protein, 49 aa, Glycine max
  Clone ID: PAT_MRT3847_109597C.1.pep
AGIHCISFLSPVPNQWHHVLAFTRWHTRLRTRSAPRRLGHAQRRRRRPS

SEQ ID NO: 153459 - protein, 94 aa, Glycine max
  unsure (1)..(94): unsure at all Xaa locations
  Clone ID: PAT_MRT3847_109598C.1.pep
AISSSRLWGTMAKTTSQVTVSIQRATVRAPXELSFLPAELXPFLMDLTRRGLLVDITSERITLIQNDTISNWLIVAAWLIGSWLVNSDMSRIAA

SEQ ID NO: 153460 - protein, 176 aa, Glycine max
  Clone ID: PAT_MRT3847_109599C.1.pep
INKRISPTITKASLSVVWYLVSSSSNSSDKMRLKFVELGLVSSLLDILIDSDKSMCEKAVTILDSLCSSEEGRNKACGNDLTIPLLVKKILRVSPLTTDYSVSAIWKLCKFGEKDEGRTLVEALQVGAFQKLLLVLQVGCGDETKEKATELLKLLNPYRAELECIDSDYKNVKRSF

SEQ ID NO: 153461 - protein, 137 aa, Glycine max
  Clone ID: PAT_MRT3847_10959C.1.pep
LFRRGLTQNINILESKLEDLQGVLALRDSRIAELETSSSSVKISREESARTVDSSDEKCKVVESELEDLFRLRIEAEVECLAISKAMQNLKDGAVFHQTLLEEQEKLSKSQVQALNKLVDAVSAESVRQNRWKNMVE

SEQ ID NO: 153462 - protein, 58 aa, Glycine max
  Clone ID: PAT_MRT3847_1095C.1.pep
AICYQSNYRIKTIFSGTNFPISIQSVFMILCNIGNNNSSFICEIIKIVIFLSFKQLES

SEQ ID NO: 153463 - protein, 63 aa, Glycine max
  unsure (1)..(63): unsure at all Xaa locations
  Clone ID: PAT_MRT3847_109600C.1.pep
KRCKDANSHHAQEALRRAKYKFTRPTYEHSLAYXWRFTNFNLSEHTKLKHDNRSVPDGISAKD

SEQ ID NO: 153464 - protein, 87 aa, Glycine max
  unsure (1)..(87): unsure at all Xaa locations
  Clone ID: PAT_MRT3847_109601C.1.pep
VGSIFFFILFFKEHFSSPPDFFLYSPSISLLFXFLLPYYLYEXTAWRLEIPLLNKQLEPPKSNGINVIPXAVINPFNPTNHLLYYPN

SEQ ID NO: 153465 - protein, 89 aa, Glycine max
  unsure (1)..(89): unsure at all Xaa locations
  Clone ID: PAT_MRT3847_109602C.1.pep
NYKLINSLIPSPSPSHGAPMGACLHHSSFSFASIGFPQTPLCDPKLGSHEKVALLGRDHDHGIKSDSKSWETDKXVRIGGXIDXFRDKP

SEQ ID NO: 153466 - protein, 70 aa, Glycine max
  Clone ID: PAT_MRT3847_109603C.1.pep
AAHTHTYKIEKILFHGKSQYRELLVFETSRQGKGAILDGHIQLTEKDEFAYKETRTHLALWSHTKKKKVL

SEQ ID NO: 153467 - protein, 91 aa, Glycine max
  Clone ID: PAT_MRT3847_109604C.1.pep
GRFFFFFFFFFFRAWKTRTLAISFFCTIATSLFELSRERDTMGDSLGILDIATYSLVSIRKLTPLYHVYHTLSLGWQSELTNDDADSSKQA

SEQ ID NO: 153468 - protein, 123 aa, Glycine max
  Clone ID: PAT_MRT3847_109605C.1.pep
LICLGIDVCLSICYFVFSATGKLVEEDEGNFALWLSYILTGVGANLVSWLVLPRNTVSVGASGAVFGLFTISVLVKMSWDWRKILELLILGQFVIEKVMEAAQASTSLSGRGGHTLSCYERLL

SEQ ID NO: 153469 - protein, 83 aa, Glycine max
  unsure (1)..(83): unsure at all Xaa locations
  Clone ID: PAT_MRT3847_109606C.1.pep
KNFFIYLTTLRSMTDXKVMRYCHQMDLTIECRDILKPAKFFHDAVSPEYVLYXIMSSVLPEPTNIQCRGXPMLFKGRELLGIV

SEQ ID NO: 153470 - protein, 53 aa, Glycine max
  Clone ID: PAT_MRT3847_109607C.1.pep
YLKFLLLCAIQGSHMICSLICIDTDIMFISSKFNAEFMILVRVRNNKLILSKA

SEQ ID NO: 153471 - protein, 64 aa, Glycine max
  Clone ID: PAT_MRT3847_109608C.1.pep
LVAYQNLYGNHSYFHLMAYKTAFLYYFKIMQNIHNSPQIFPLLCTNRRTLLASLRSTIAARPCV

SEQ ID NO: 153472 - protein, 83 aa, Glycine max
  Clone ID: PAT_MRT3847_109609C.1.pep
GDNSIFYLPNKNKKCLGGIRLTLGKTLQTNYFRPKAFFFRKTPGPKLAKSPPLFYLKGWPNPGKWIFFYFGLTPQEGAHNNFF

SEQ ID NO: 153473 - protein, 79 aa, Glycine max
  Clone ID: PAT_MRT3847_10960C.1.pep
YNKIFQIHSTTFKTEIPHILTLIFKTPLKKLLIILPLKSTITLQLPSPIFHLSLPHSSFISLLSSTSFPISIYSPSNPP

SEQ ID NO: 153474 - protein, 133 aa, Glycine max
  Clone ID: PAT_MRT3847_109610C.1.pep
QLRSPRSYDQRGRHSRGASESQEMHSEVAKQPGQRTSAYAFSVLVLIHRIRTNYGSCRGVVDERGDECSQARIHRHVMNVKLSECDQKWTTGQGAEDVRRRRVKFSEKREVGQSDEEDIWKSTVDKKIIVLLI

SEQ ID NO: 153475 - protein, 55 aa, Glycine max
  Clone ID: PAT_MRT3847_109611C.1.pep
SENARLHGSIFHLMSDICYLPFNSMVSVFGHDTRSLSLSAVISQQAGAGRPESGR

SEQ ID NO: 153476 - protein, 61 aa, Glycine max
  unsure (1)..(61): unsure at all Xaa locations
  Clone ID: PAT_MRT3847_109612C.1.pep
KTHAXKKGGKKKKKRAPKEETGFKVASKPVSNYPVGRIIRYFKKRRCSHRVGTAAPVYLAA

SEQ ID NO: 153477 - protein, 63 aa, Glycine max
  Clone ID: PAT_MRT3847_109613C.1.pep
MARTSFKMEHDLEKRQSESARIRDKYPDRIPVIVEKAGKTDVPEIDKKKYLVPADLTVGQFVY

SEQ ID NO: 153478 - protein, 332 aa, Glycine max
  Clone ID: PAT_MRT3847_109614C.1.pep
GFGMVFKGTLSDGTVVGVKRILESDFQGDAEFCNEVEIISNLKHRNLVPLRGCCVAEENENYDERGSQRYLVYDYMPNGNLEDHLFLSTDSQKAKGSLTWPQRKSIILDVAKGLAYLHYGVKPAIFHRDIKATNILLDADMRARVADFGLAKQSREGQSHLTTRVAGTHGYLAPEYALYGQLTEKSDVYSFGVVALEIMCGRKALDLSSSGSPRAFLITDWAWSLVKAGEIEEALDAFLVKDENFPSSNPKSIMERFLLVGILCSHVMVALRPTIADALKMLEGDIEVPQIPDRPMPLGHPSFYNNNNNDGSTFSISPALSGPKLQTGDMLT

SEQ ID NO: 153479 - protein, 48 aa, Glycine max
  Clone ID: PAT_MRT3847_109615C.1.pep
IININISLLFHQVFSLLKRVLNIFLSQYFYFFIFIINKGEIQLFLLKV

SEQ ID NO: 153480 - protein, 123 aa, Glycine max
  Clone ID: PAT_MRT3847_109616C.1.pep
HTQESTKSRGKIRTPRAGEHTPQQRKPPQTQQPTRPAPHQSQQNHKHQQTPTERSHQQQRGKRQTRPSKATRGKHKPNQETSPQQQHQRRQREHPHQQKHRRQQPPHQTAEAQTPPPQNPGQN

SEQ ID NO: 153481 - protein, 58 aa, Glycine max
  Clone ID: PAT_MRT3847_109617C.1.pep
GGTQRARNPRDYVWRGTWVTLCIIFLASGATPIFSLTESANQLCTNFLETARKPELFD

SEQ ID NO: 153482 - protein, 38 aa, Glycine max
  Clone ID: PAT_MRT3847_109618C.1.pep
ALFLASDESGFITAHNLLIDGGHTSADSRMSYMYQDPK

SEQ ID NO: 153483 - protein, 51 aa, Glycine max
  Clone ID: PAT_MRT3847_109619C.1.pep
SRRKVKEPKEENVTLGPAVIDGEHVFGVARIFASFSDTFVHVTDLTGRETL

SEQ ID NO: 153484 - protein, 93 aa, Glycine max
  Clone ID: PAT_MRT3847_10961C.1.pep
FGSRWERMGPGLTFIMLAQPYLNAVPMPIGLEGLCFKACTHYPTLFDHFQRELRQVLRDLQQSNSFIQDWRDTKSWKLLKDLANSAQHRASIR

SEQ ID NO: 153485 - protein, 96 aa, Glycine max
  Clone ID: PAT_MRT3847_109620C.1.pep
MSLRRFLGYSDGEVMRSDAKPCSRLMRHTAAIFSVGGALGFWVLCRMHYGPRITNPRSLRWAACGAVTASSGTALLVRLFSPECEPQNIAAYDNKN

SEQ ID NO: 153486 - protein, 278 aa, Glycine max
  unsure (1)..(278): unsure at all Xaa locations
  Clone ID: PAT_MRT3847_109621C.1.pep
MYMAYGWPQVIPLEQGLCPSAQKIVYLKIINRTLLVVSPTHFELWSTSQHRVRLGKYKRDSDSLQREGENLQAAWSPDAKLIAILTSAFFLHIFKVQLSDKRIHTGGKQPSALCLATVSLLLTEQVPFAVKDLSVSNIVSDNKHMLLGLSDGTLYSMSWKGEFYGAFQFDPQPTSSFDNSQMPLTLENGLSPKSHPKVLMSNHIIPRKSEINQLELCLPLRLLFVLYSDGQLVSCSVSKKGLKQVDCIKAEKSLACGDAVCASVALEQXILAXGTKEE

SEQ ID NO: 153487 - protein, 44 aa, Glycine max
  Clone ID: PAT_MRT3847_109622C.1.pep
DLKSQSFEVTCSSHKPISAQTFISFHLPLPCYQNNQIDDEMNLV

SEQ ID NO: 153488 - protein, 109 aa, Glycine max
  Clone ID: PAT_MRT3847_109623C.1.pep
WAFSLVQAQKNMDVGLNLEVVNPTGEKTLMLPHGRFEFSQGNFFTLMGGTYSLIWVPPDSTFFKKGVRFNIDCIPPVPESGQFYSNKCMLVLCSPWSEKSQCSHYSCQG

SEQ ID NO: 153489 - protein, 92 aa, Glycine max
  unsure (1)..(92): unsure at all Xaa locations
  Clone ID: PAT_MRT3847_109624C.1.pep
IISSPYLLXXXIXXTGPFQKYXPTPLLHIYSILSLFFQILSFLLLNPTLXYITFSPLIFPLSSPLLLPILPFSLLXISISISPIFPPSSIXL

SEQ ID NO: 153490 - protein, 163 aa, Glycine max
  Clone ID: PAT_MRT3847_109625C.1.pep
MMHHCCGSSQGHVMGTCTCGMYHSETSAYGSMLFSVPNNSEYDMYSSFTPSPSSVDCTLSLGTPSTRLTQDDDHDNDNKRHPHQRRSGVANFCWDLLHSKHNNNNTQSQSKSSSRGSSSNNNNNNDPLLARRCANCDTTSTPLWRNGPRGPKSLCNACGIRFK

SEQ ID NO: 153491 - protein, 55 aa, Glycine max
  Clone ID: PAT_MRT3847_109626C.1.pep
SKLLKKYYNDPKNTFILYHTRCILDHYIIDVKYLPQFEILPNRFKLNFTLINNIR

SEQ ID NO: 153492 - protein, 70 aa, Glycine max
  Clone ID: PAT_MRT3847_109627C.1.pep
PLIALPLSTFYVLMTVVSNTRLNAGSYTDFLHFLGLCRPFYFRYLFVLLYTQTSYILSLCFGSAALHTAP

SEQ ID NO: 153493 - protein, 58 aa, Glycine max
  Clone ID: PAT_MRT3847_109628C.1.pep
PMLIISYNLHIPQPNLLFLKLILLNIQSLINPLNFSPILLIYQLLINSYFNNTYTKII

SEQ ID NO: 153494 - protein, 199 aa, Glycine max
  Clone ID: PAT_MRT3847_109629C.1.pep
SIYILITHNFSQSGGPYWNVLKGRKDGRVSKASETVNLPAPTLNVNQLIQSFAKRGLGVKDMVTLSGGHTLGFSHCSSFQARIHNFSLLHDIDPSLNTEFALDLKKKCPKPNTNFSAGQFLDSTASVFDNDYYRQLLVGKGLFSSDQSLVGDQRTSWIVKAFAKDQSLFFKEFADSMLKLGNVGVSENGEVRLNCKVVN

SEQ ID NO: 153495 - protein, 83 aa, Glycine max
  Clone ID: PAT_MRT3847_10962C.1.pep
SGKCCELSLIYRRPPSCCKSIQCLIFFFLLGKPTIKLDYSEGPFLRVNQLIRPSQLLWFIIIQYTRWLEISFAHLPSGYIHCV

SEQ ID NO: 153496 - protein, 46 aa, Glycine max
  unsure (1)..(46): unsure at all Xaa locations
  Clone ID: PAT_MRT3847_109630C.1.pep
IXXTTTLXCXXISLAXVXGTAXVXXGFILYRRXCKGXRXGXWRSXY

SEQ ID NO: 153497 - protein, 108 aa, Glycine max
  Clone ID: PAT_MRT3847_109631C.1.pep
ASVSSNNLRLAAWVRDAGGSLNLYVCANNLEAVSIPERSRMNISSLTGQGKFPLISANFYSRPSQILLGSNQTLYKALENPPPHQQQIMGVQKAFTIKWGLGTESLPV

SEQ ID NO: 153498 - protein, 48 aa, Glycine max
  Clone ID: PAT_MRT3847_109632C.1.pep
IECYTGPDFLEPPFNPRGGTNPMHKLQSHIHGYTLKLTIDGMANPYTI

SEQ ID NO: 153499 - protein, 53 aa, Glycine max
  unsure (1)..(53): unsure at all Xaa locations
  Clone ID: PAT_MRT3847_109633C.1.pep
VIHSPALWWKFFERRPYNMFNIHTFPGLSPRVFSPLPPILLLVCSLVIFXVIN

SEQ ID NO: 153500 - protein, 60 aa, Glycine max
  unsure (1)..(60): unsure at all Xaa locations
  Clone ID: PAT_MRT3847_109634C.1.pep
ARADTIDRIMERVEEKEGIPPGPQRLIYAGKQLADDQTGXEYNIGGGSVLYLVLALGGGT

SEQ ID NO: 153501 - protein, 127 aa, Glycine max
  unsure (1)..(127): unsure at all Xaa locations
  Clone ID: PAT_MRT3847_109635C.1.pep
GFDEMESSPSSSSSSMSSSSGSDTSGGGGGGAVTWFGMSFPFRSPLSLVMDYCAREDSAEPVIIIPRTRPRFQAHAESASASSSDSDENACNGAAEEVAIRIIGAGEQESXSSPSSSSRGPGGEPXC

SEQ ID NO: 153502 - protein, 89 aa, Glycine max
  Clone ID: PAT_MRT3847_109636C.1.pep
MAFWFCCGKVSTRRRRGKEQPKWRVFSLKELHSATNNFNYDNKLGEGSFGSVYWGQLWDGSQIAVKRLKVWSNRAETEFTVELEILARI

SEQ ID NO: 153503 - protein, 101 aa, Glycine max
  unsure (1)..(101): unsure at all Xaa locations
  Clone ID: PAT_MRT3847_109637C.1.pep
XVXSXEXGXXXXRXGXSIXLRFYKIXCLXXRXXYYXVLXIXXXXMQNTLQEQXWKXFHXXWVXXXMXXKXXXLGXLMKXWGIXAXXXSTDETGLENFLIXG

SEQ ID NO: 153504 - protein, 34 aa, Glycine max
  Clone ID: PAT_MRT3847_109638C.1.pep
KTKWACFLFIWLLRCFSSKGCILTAGGFSSSSKG

SEQ ID NO: 153505 - protein, 51 aa, Glycine max
  Clone ID: PAT_MRT3847_109639C.1.pep
PPLKNFKGNFYKLATCPNYEKQILPLSILNRAYLLILKSIIICTRTIPGPL

SEQ ID NO: 153506 - protein, 141 aa, Glycine max
  Clone ID: PAT_MRT3847_10963C.1.pep
MKCRDLEEELERKSAEVDILEAELDKKKDLSSEIALKFRDLEKDLERKSAKVNILEAELDKKDMPNEIAMKCKDLKEELESKSTKVDLLEALLRSKRDSYGEKTKKQEDLALAAQKLAESQKTLSSLGNQLRSLVGLILQK

SEQ ID NO: 153507 - protein, 150 aa, Glycine max
  unsure (1)..(150): unsure at all Xaa locations
  Clone ID: PAT_MRT3847_109640C.1.pep
GSSWWSSSRSSRAKKIWSYGPETLVPNMGLDMGKGLHILNEMXQMIVAXESQCASKEGALAXEHMRAICYEICDVALYADAMHRGGGQFIPTAMRAYYAFQITDKPRLIESVYLDQIXGTEQALGGIYSXVNQKRGHMLEEMQRSRSPLY

SEQ ID NO: 153508 - protein, 455 aa, Glycine max
  unsure (1)..(455): unsure at all Xaa locations
  Clone ID: PAT_MRT3847_109641C.1.pep
MDNHTGGGYTDNNDGGLETRKFFLNCLCLLLGRLDSKRFESMVSEFGMNISCILVPQLNCTDEDVXXGVVSIFKAIILRPDYSQEDALTDNRQANSVIPFLLHLLDEQDGTAKAVVMLIAEYCSMSEGDQCLMEVLKRLASGNISQRRNAMDVISEVLHISSKSQNLMPSSAWQDMANKLLERLGDEETKIREQASKLLPMIDPPLYLPALVGLVYSPDESQSSASDAIIGVLKHHNQRIEIIFLLLDCLSNMSKSLYLTQSTGDKGSKLDADQVLKLVPVWSKSVQDWNLLIGPLVDKMFGDPSNATIVKFLSYISENLANVADLVLHHVLLHVKEQKKIDESFLSRWEQRTYTCDEFEEMQQSLFEHLCPLLIIKILPLKTFNDLNSSIMHGHLTPNIIQYARSRHTDIDYDWIAALLLNRPFCEFEFEQLTKLSAELCGRIRPRVSTPICLL

SEQ ID NO: 153509 - protein, 98 aa, Glycine max
  Clone ID: PAT_MRT3847_109642C.1.pep
MSWIETATFYNNTKGPDIMTSDGANASHKCSIHHWAEHGIAGRGVLLDYRGYAKKKGISYDPYDHYPISFEELYQCGKDQGIDIRPAAQGGDIKIGDM

SEQ ID NO: 153510 - protein, 149 aa, Glycine max
  Clone ID: PAT_MRT3847_109643C.1.pep
VLQSQPFNVGVRSLISAESYYIQNRLVCITSPGIVKCFSSSIHQRLPRVTGDCRSKTKVFALRRRRRANERTETYVLLEPGQDERFVSEEELKATLKELLENWPGKVLPPDLSRYENIDDAVSFLVRSVCELEIDGDVGSIQWYEVRLE

SEQ ID NO: 153511 - protein, 55 aa, Glycine max
  Clone ID: PAT_MRT3847_109644C.1.pep
TWILSILITLAIQTGIYFGCPGYSGQKILISRSRRLIQGTDLSEQIFFNKHRLAD

SEQ ID NO: 153512 - protein, 176 aa, Glycine max
  unsure (1)..(176): unsure at all Xaa locations
  Clone ID: PAT_MRT3847_109645C.1.pep
LCILDDSPAPSLWTNFLLPATDDKHHLLHIMMPDPDDDLDEEQTSMSCTTILAAPFGAAAPKIQNKDAAGSPASYNLYNDKKTDVANAYGWTAALHGGHYPPLAKADIGNVLVKLSTRSMLAPHVNPLSNDYTIPLSGYGQLHNTVSKAKKCRVALIFRGDVAVEPXAFPFCSVSS

SEQ ID NO: 153513 - protein, 107 aa, Glycine max
  Clone ID: PAT_MRT3847_109646C.1.pep
MPDLEEKQHNRELHCACEALGVTLVDSPDLSGLDLVLVKVDRLIELTSQTEHMTTSLKVHNTGCDVVLESLLCSSENQASDLTYLNATLDDGKGASKPSYGAGIPVK

SEQ ID NO: 153514 - protein, 42 aa, Glycine max
  Clone ID: PAT_MRT3847_109647C.1.pep
KNPPQKGPQDQMGFGGPPPQEAKPVVFFGPVNILMKGPRVCP

SEQ ID NO: 153515 - protein, 253 aa, Glycine max
  unsure (1)..(253): unsure at all Xaa locations
  Clone ID: PAT_MRT3847_109648C.1.pep
SNPGSTHASADTHPTNISSAMSRLPDEAIALAAASHIERELQITPWNLSCNFVACTSQGKENIERMEITGVGDPSGRGMGFSYARAPPKAPVSSAMVKKKAAANRGGSTVTGTDADLRRLSMDAAREXWHRIAMIRKLSSEQATSGVKVDPTTISKYARGQRMSFLQLQQQTREKCQEIWDRQVQSLSAVNGDENESDSEGNSDLDSFAGDLENLLDAEGXEEGEEGTNDLXRDRXDGXKGLXMRRRPTLAQA

SEQ ID NO: 153516 - protein, 434 aa, Glycine max
  Clone ID: PAT_MRT3847_109649C.1.pep
EYANLQRGTNGQSILVKKRNFRIWSEDELRKMVTPELVCAYESMQADLYRLKHLGITETHPTNISSAMSRLPDEAIALAAASHIERELQITPWNLSSNFVACTSQGKENIERMEITGVGDPSGRGMGFSYARAPPKAPVSSAMVKKKAAANRGGSTVTGTDADLRRLSMDAAREVLLKFNVPDEVIAKQTRWHRIAMIRKLSSEQATSGVKVDPTTISKYARGQRMSFLQLQQQTREKCQEIWDRQVQSLSAVNGDENESDLEGNSDLDSFAGDLENLLDAEECEEGEESTNDLKRDKGDGVKGLKMRRHPTLAQAEEEIEDGAAEAAELCRLLMDDDEADKKKKKKAKVIVGEARLVPKMQSKFSFDNAEQVKQITNTLQLDGTNHWKEDAITDLREEENFPTKKSKSLKVNKVKKNDITPISIPNKKIKLNM

SEQ ID NO: 153517 - protein, 48 aa, Glycine max
  Clone ID: PAT_MRT3847_10964C.1.pep
KMPTELELDEFFAAAEKDIRKRFSDKYNYDIVKDVSLEGRYEWVKLKP

SEQ ID NO: 153518 - protein, 92 aa, Glycine max
  Clone ID: PAT_MRT3847_109650C.1.pep
WTFFYFSLHFDFLHFTTLHIFNVLCGLAQAQKREIFFFLPSLGPGEILNPLHRAVLNDPHPGGGGYFFFLFSGEPLYLGSLRRYIAWGLPSP

SEQ ID NO: 153519 - protein, 76 aa, Glycine max
  Clone ID: PAT_MRT3847_109651C.1.pep
VKIPNFPHIPGNEAPPPAHLVKNGPLAMGVNAIFPPPYNGGVSGPLICSKKRLTHGVLLVGYGAKGFSILRLGKVD

SEQ ID NO: 153520 - protein, 85 aa, Glycine max
  Clone ID: PAT_MRT3847_109652C.1.pep
KRGEGKNPGVPQLNRLEKNPLFPSGGKKKKAPTERLSKKWPTLIGKGAPPCRGPLRGGGGGVPPRGTLTFGRALAPALFVFFLFF

SEQ ID NO: 153521 - protein, 69 aa, Glycine max
  unsure (1)..(69): unsure at all Xaa locations
  Clone ID: PAT_MRT3847_109653C.1.pep
NFGSQKLNFLLSPXXTRLKGNSLNSGFKFPYLMIRTHYPLKKKYCSLKQKAPCFLGTILESLLPSWVPF

SEQ ID NO: 153522 - protein, 40 aa, Glycine max
  Clone ID: PAT_MRT3847_109654C.1.pep
SLLTEVDLLVANWVNLASYECSSEEADQMTLCSHVWIISC

SEQ ID NO: 153523 - protein, 78 aa, Glycine max
  Clone ID: PAT_MRT3847_109655C.1.pep
MSHSNDQNCQPQGWNSSLAYEPKDIAPGPNYQAPPPPPAIITHEEKVPPNGETKFKGDGFWRGCCAGMCCYCCLDICF

SEQ ID NO: 153524 - protein, 76 aa, Glycine max
  unsure (1)..(76): unsure at all Xaa locations
  Clone ID: PAT_MRT3847_109656C.1.pep
XAXVRKLGIRLEVLDRELPPHCSLWSLEPDPVCSHVFTVMSCYPEAFLFPMLVPSFPVGSQSSTCPSLLHPEFPWL

SEQ ID NO: 153525 - protein, 154 aa, Glycine max
  Clone ID: PAT_MRT3847_109657C.1.pep
MLDFGDELTLDGFRIPWLIWIQLLVFLLLLALLFCLSVIALDPSHHTTSPSASATATDSDLHTQQPSNHHSTAVTNRLQSTRGVENTSTKGEIATSASTGIVREEFAEGEASTSSLYFLHPCYYFNLAKEAFLKCLGLDNDVPSTQNNRKTKES

SEQ ID NO: 153526 - protein, 88 aa, Glycine max
  Clone ID: PAT_MRT3847_109658C.1.pep
YVSVLVRKLDLIEDELLNQQVESGHEQESLSYPGSTANARDTSLGRIISILNQWTAEKENAKNNGNAEVLVSETDAKRLLDCCHKFLK

SEQ ID NO: 153527 - protein, 61 aa, Glycine max
  Clone ID: PAT_MRT3847_109659C.1.pep
IMMTGISNIFCMKIVTTACHWENSWGRNLECHFDFGKWNAVILVSAMCLTCSNKSMVLIVY

SEQ ID NO: 153528 - protein, 50 aa, Glycine max
  Clone ID: PAT_MRT3847_10965C.1.pep
FQSKQNLGIYFFLDIIKCLLNGCVHGQCCQCLLDQCNVLCKKFCVAFTYR

SEQ ID NO: 153529 - protein, 109 aa, Glycine max
  Clone ID: PAT_MRT3847_109660C.1.pep
LIKINKSGRKGKRSRGRTRLRKKKSTYARACVRPTSTWALMVWNLSTCPHVHKRAMLIIIASIGTHVRTVHNIPFSDHDTSSSQVSTHRIIIVNLLLMVFLVVVISVSI

SEQ ID NO: 153530 - protein, 61 aa, Glycine max
  Clone ID: PAT_MRT3847_109661C.1.pep
IRLSPNSHMYVCWIIGYQYNISLSSSHFVWLDNFVVDVRFLFMSFFFARTVESFRWKFFFE

SEQ ID NO: 153531 - protein, 50 aa, Glycine max
  Clone ID: PAT_MRT3847_109662C.1.pep
IIGISKEQNTLYINMIGRNYFIVHMQLLLDMKIDNFLPSLETTNEKRDTN

SEQ ID NO: 153532 - protein, 51 aa, Glycine max
  Clone ID: PAT_MRT3847_109663C.1.pep
SGPMVIHMLHDETGMINIGSKPCLKLTFFPKKVGLLFAKLITQFFRGLNFT

SEQ ID NO: 153533 - protein, 214 aa, Glycine max
  unsure (1)..(214): unsure at all Xaa locations
  Clone ID: PAT_MRT3847_109664C.1.pep
MLWSYASHYVPPQHRTNSFQTLTDDSTSRGGARPRDGGRGGSGSRGFSRPRIPSNRLPVEEPQDGSDAINFDAYESVPVEASGKDVPPPVNTFNEADLDEGLKRNIDRCKYVKPTPVQRHAIPIASAGRDLMACAQTGSGKTAAFCFPIISGIXKGRSLSGFSSMXARGAAVAYPTALILSPTXELSCQIRDEANKYAHQTXVKXVVAYRGAPI

SEQ ID NO: 153534 - protein, 281 aa, Glycine max
  Clone ID: PAT_MRT3847_109665C.1.pep
MPPSPSFPSENRTKWRKRRKRESYKRNQKRHGDDDDSDDDNEPDDDDSDDQFRSPSAQIADPRRVDIEVVSPEGVQISRFPPAIRREVTRPHAVVVAIAALEVGDDKSHHNNVPVLENVSHGQLQVLSAVSTDCLGGGSSFVVAPPPVSKGSGVVKRFGSRVLVVPMHSDWFSPASVHRLERQAVPHFFSGKLPDHTPDKYVECRNYIVARYMEEPGKRITVSSCQGLLVGVGNEDLTRIVRFLDHWGIINYCAQGPSCENSDNETYLEEDTSGAICVPST

SEQ ID NO: 153535 - protein, 82 aa, Glycine max
  Clone ID: PAT_MRT3847_109666C.1.pep
GLSLSIFKGILVVFLYLSKAYIIHYFISQNHLNHKYLYMVQHSDILLNVFYLSWYAHSFIRLSIHWLTLGLADNLSLWIQHV

SEQ ID NO: 153536 - protein, 55 aa, Glycine max
  Clone ID: PAT_MRT3847_109667C.1.pep
GFHKGEDALPPLFQNVKAKFNKVVEPWSREKKDPCLEETEKSFQLLGGIPRLVLP

SEQ ID NO: 153537 - protein, 109 aa, Glycine max
  Clone ID: PAT_MRT3847_109668C.1.pep
SLLARLFVSLSVGALSLLGVVVWGGWAAWCFRWVGLRSVLSVWCVALARSVSLGGSLAFLSRRLRACVGLGPLARAPVGFFGVFFLTPPPFVVFSRGCNRVWVTPGSPA

SEQ ID NO: 153538 - protein, 112 aa, Glycine max
  Clone ID: PAT_MRT3847_109669C.1.pep
RRKARIAVKQGVGGEPKSKRVKIKTKTKNRVKGLILRNMGQPGTNKYKQVEKPCRKRREGGLTGNRVYTVSTLRYQWCFARVTISAAMHRSGCVRLGKMAANVVFRHYMPQK

SEQ ID NO: 153539 - protein, 137 aa, Glycine max
  Clone ID: PAT_MRT3847_10966C.1.pep
MLLRNPALTASLLSATTKKLYNHRYSTPAAFMASSGVACSLLVLCGKSLAENETAKAIKTNNTLKLPEDEKLSLVLHSEMDKSVMQGFFQVHSYMDSLSTNQFGRLLVWSPDLTSTHDVVSHNFCELPIGTVCIADV

SEQ ID NO: 153540 - protein, 43 aa, Glycine max
  Clone ID: PAT_MRT3847_109670C.1.pep
PLKSTKYFKKRTILLIEISIPSIFKKPLNKKLSCHLIKILYQI

SEQ ID NO: 153541 - protein, 119 aa, Glycine max
  Clone ID: PAT_MRT3847_109671C.1.pep
KKSMVKALEHKEAQRTVQIANVAAANQDVDQKMMSLPRTWSLAYLLDMNYLGPILYDGSYCPTLGFQISNANVEVAPFVKSHAVEIVYNYEADSGKYQVKQSSAIDPPIYVEQMYDLIG

SEQ ID NO: 153542 - protein, 53 aa, Glycine max
  Clone ID: PAT_MRT3847_109672C.1.pep
WTVAACCFPPFRSSEYTMSPTTGSLGNGPSQVLKAVCSTSLHMVGLIISYVVR

SEQ ID NO: 153543 - protein, 68 aa, Glycine max
  unsure (1)..(68): unsure at all Xaa locations
  Clone ID: PAT_MRT3847_109673C.1.pep
HTLXNSYDMRWCVSSDILSRLSYTPSTPPHFHPGGGPSFNLSYNLPRRVQGRLDVVTPLIIYCLPASS

SEQ ID NO: 153544 - protein, 73 aa, Glycine max
  Clone ID: PAT_MRT3847_109674C.1.pep
SQLHNCSLQITNALFANLYLLTLTTFLCTLPYFLGLWRHYPTTNDNVIVSFSDILLPILSPQHYRLNPFIYQS

SEQ ID NO: 153545 - protein, 80 aa, Glycine max
  unsure (1)..(80): unsure at all Xaa locations
  Clone ID: PAT_MRT3847_109675C.1.pep
LFGVDGDGYQLTXSYHLLTHDVAELKRSDVTESVHQTERSWALPIRQLHLQXLLGEGASLDARGTAGGGLGPIWPLLDVG

SEQ ID NO: 153546 - protein, 57 aa, Glycine max
  Clone ID: PAT_MRT3847_109676C.1.pep
YAVWVPYYSTPLQFVVLCSLVVLLGDVDSCSNHLGPYSSPFINFMLYFCHRCISLLS

SEQ ID NO: 153547 - protein, 135 aa, Glycine max
  unsure (1)..(135): unsure at all Xaa locations
  Clone ID: PAT_MRT3847_109677C.1.pep
XXXXSVXXMSXXXXSXXVLRXLXSXRRSRXXXXVGSXXXLXXXSVXCXASLXXXLXLGXXFLVXXVLLRSXXCSSXXXXCSSXCAXFLFXXXPXXXXXXILXXXRXPXXXXWXLRXCGXXXCVXYHLXVXYXLVA

SEQ ID NO: 153548 - protein, 211 aa, Glycine max
  unsure (1)..(211): unsure at all Xaa locations
  Clone ID: PAT_MRT3847_109678C.1.pep
RGCAAQLRDFSRNNCRLRLSCFXEDILKKDPTCSDTLAKLIKMHQNGDYSLVSLLEMIALHLDATDAEYNTWKVFSSCFLRLSSYEEDCMSSCPIQNEDGHKQHFPLNKTPKIFTDGISGKSWRLRCRWWLTKHFSNSKLESEINTGDLQLLTYKAACASYMYGREFSYVAKAYSHLEKEDDKELLLFLDEHRGNSFGIYQKFQKKFTHII

SEQ ID NO: 153549 - protein, 182 aa, Glycine max
  unsure (1)..(182): unsure at all Xaa locations
  Clone ID: PAT_MRT3847_109679C.1.pep
IPTCSDALAXLIKMHQNGDYSLESLLEMIAXHLDATHAEYNTWKVFSSCFLRLSSYEEDCMSSCPVQNEDGHKQHFSLNKTPKIFTDGISGKSWRLRCRWWLTRHFSNSKLESEIEAGDLQLLTYKAACASYMYGREFSYVAKAYSHLEQENDKELLLFLDEHRGNSFGFYKKIQKKFTHIT

SEQ ID NO: 153550 - protein, 162 aa, Glycine max
  unsure (1)..(162): unsure at all Xaa locations
  Clone ID: PAT_MRT3847_10967C.1.pep
MEMAQVKARARTALAMAASASSRKRRKISINNNFVQIKSLSNATVPATGERISGESPASCCSSNGSVDDENRIIKFSDLEFESQGVGAXACDCGEQQQQIRREMSLTSELRITNSSSQEVDSAEEQITQTKSLPPQKMPTELELDEFFAAAEKDIRKRFSDK

SEQ ID NO: 153551 - protein, 101 aa, Glycine max
  Clone ID: PAT_MRT3847_109680C.1.pep
MLHQPLGGFSIEQTSRKYCTSAREFFDLQISTLDGIHLSSNKSKQCSIVCKSCPFRSFGWCGPIIYCSQHGIGHSYTCQNAPKSGSPLCGLLHSQICKTHA

SEQ ID NO: 153552 - protein, 42 aa, Glycine max
  Clone ID: PAT_MRT3847_109681C.1.pep
VYYPPNHNDFLVLSNSFKRNIGLERLRNTFLATGFSPRADRI

SEQ ID NO: 153553 - protein, 77 aa, Glycine max
  Clone ID: PAT_MRT3847_109682C.1.pep
ATRIHTDSKPCSCRAEVPMATAHNTLSSLLAPQATGRTTLRIPISSKRHRKNHLRPKILKILTKPYPLALPLLPSLP

SEQ ID NO: 153554 - protein, 51 aa, Glycine max
  Clone ID: PAT_MRT3847_109683C.1.pep
GKMPGVPRRWLVGCRKQWRWPEKKTLSESLPTETLPREPALARAPAYAEAG

SEQ ID NO: 153555 - protein, 154 aa, Glycine max
  unsure (1)..(154): unsure at all Xaa locations
  Clone ID: PAT_MRT3847_109684C.1.pep
NNRNXXWXISXXXGFAVQIFRGYFXQREXEXXSRTFLNWYRRADYTAYAFNTRPFSRTRCQKPFVFYFSKAKLNSTLQQTVTEYERDPIPPPECRWNMADPSALDKIEVPKKQDPHLWDRAPRRNCCRVMKSNKTGILKIEVAVCRDGEFSEPA

SEQ ID NO: 153556 - protein, 57 aa, Glycine max
  Clone ID: PAT_MRT3847_109685C.1.pep
ALVCPSSLICHNTFLSRLLRQISPLGRVKLPEPGSFEEFGIGMNPIFPSLNECPPVA

SEQ ID NO: 153557 - protein, 174 aa, Glycine max
  Clone ID: PAT_MRT3847_109686C.1.pep
LVKPQRGISFLELANSQASGSDADSSNKRLVLALYDALNSGDSDAVVKIVAADLEWWFHGPPSHQFLMRMLTGDSAADNSFRFLPQSIAAFGSTVIVEGCDTARNIAWVHACTVTDGIITQIREYFNTALTVTRIHDSGEIVPASSGAGRLPCVWESSVSGRVGKSVPGLVLAI

SEQ ID NO: 153558 - protein, 173 aa, Glycine max
  Clone ID: PAT_MRT3847_109687C.1.pep
FSTATRNLFLELANSQASGSDADSSNTRLVVALYDALNSGDSNAVVKIVAADLEWWFHGPPSHQFLMRMLTGDSAADNSFRFVPQSIAAFGSTVIVEGCDSARNIAWVHAWTVTDGMITQIREYFNTALTVTRIHDSGEIVPARSGAGRLPCVWESSVSGRVGKSVPGLVLAI

SEQ ID NO: 153559 - protein, 43 aa, Glycine max
  unsure (1)..(43): unsure at all Xaa locations
  Clone ID: PAT_MRT3847_109688C.1.pep
DRFTGTRPRSCTXYITDYNYTSIDQLLDIFLVDPPPPASGDFA

SEQ ID NO: 153560 - protein, 134 aa, Glycine max
  Clone ID: PAT_MRT3847_109689C.1.pep
LKKKNFFFFGNRFNRGGRPLGGKDPKEKNGFCFSGEKNYFYYFPTPRGQNLTPRPREKSRGGRPPPKIRRLPGPFRPKRPRLGFGGAPTPPQFGAHPFFMKAPRTVGPCPTQGPQTNPLPGESFSGGPHPESPG

SEQ ID NO: 153561 - protein, 65 aa, Glycine max
  Clone ID: PAT_MRT3847_10968C.1.pep
MFDLSFTLFFSLIRHCRSKWSYLKNTRALVQMFASLIISGDNRLTEKTLFTCRELDIFDVYHTIA

SEQ ID NO: 153562 - protein, 48 aa, Glycine max
  unsure (1)..(48): unsure at all Xaa locations
  Clone ID: PAT_MRT3847_109690C.1.pep
RXDLXXEXFAQPXSQXAPXLXWLXFAXXXIEEXRKXHHQATNAILXIN

SEQ ID NO: 153563 - protein, 329 aa, Glycine max
  Clone ID: PAT_MRT3847_109691C.1.pep
SDSSSAYTTLLRTALFGPDFAPPPTPEKTASPAMTLPSRNIFRYKTETRQSMHSLSPFMCEDSVPGVVHGPVKAPRKVPRSPFKVLDAPALQDDFYLNLVDWSSHNVLAVGLGNCVYLWNACSSKVTKLCDLGIDDLVCSVGWAQRGTHLAVGTSNGKVQIWDASRCKKIRSLEGHRLRVGALAWSSSLLSSGGRDKNIYQRDIRAQEDFVSKLSGHKSEVCGLKWSYDNRELASGGNDNRLFVWNQHSTQPVLKYCEHTAAVKAIAWSPHLHGLLASGGGTADRCIRFWNTTTNSHLSCMDTGSQVCNLVWSKNVNELVSTHGYSQNQ

SEQ ID NO: 153564 - protein, 256 aa, Glycine max
  Clone ID: PAT_MRT3847_109692C.1.pep
MSQEQPRRPQGQDPIKYGDVFDVYGDLAQMPIAPEDAAMMQSAEARVLGKTQPGGASSVMQSAATRNEQAGLVGHQDVTDITGDHGVTVTETTFHGRRIITEAVGGQVVEQYVEPNPVEAGRTSAIKESAITIGEALEATAQTVGHKPVDQSDASAIQAAEVRATGSNVITPGGLAAMAQSAAAYNADCKHDQDKVKLADVLTGATAKLPADKAATLQDAEGVASAEARNNPDATATPGGVAASVAAAARLNENVK

SEQ ID NO: 153565 - protein, 48 aa, Glycine max
  Clone ID: PAT_MRT3847_109693C.1.pep
EELCRPFLILLVGRGLYQMLGACAISWPWFTLALVWLLPVPAFNNRFK

SEQ ID NO: 153566 - protein, 65 aa, Glycine max
  Clone ID: PAT_MRT3847_109694C.1.pep
YNTTYWDTKQVKKTTSLFYLNSAYVKINFNHLNHLLHHIIPSTTPPPSFLHLSYHLPTYHLLKLN

SEQ ID NO: 153567 - protein, 76 aa, Glycine max
  Clone ID: PAT_MRT3847_109695C.1.pep
LREDDRRDVGSNLTTYVRTFHALALINPKCTTHLNFSLPKNMGYILSHIQVNILFFLNLQSYQHKYKNPTQLYEHH

SEQ ID NO: 153568 - protein, 217 aa, Glycine max
  Clone ID: PAT_MRT3847_109696C.1.pep
GTQLPNLESKFFQIGSVHPAVFEVGLRYSAGDISGGNARCIAMLRAFQDAIRDYCTPHEKVLVRDLASKISSYVSFFTECRPLSMSMGNAIRFVKSRIVNLTLNHSEFEAKTTLCSDIDRFINEKIILADKVIVRHAFTKVKDGDVLLTYGLSCVVEMILLYAYEQGKKFRVVVVDSRPRLEGQALLRRLVAKGLSCTYTHINADSYIMHEVTRVLL

SEQ ID NO: 153569 - protein, 61 aa, Glycine max
  Clone ID: PAT_MRT3847_109697C.1.pep
IPIRPTRTPTLTPTHETYPVYSNIIPLIGNGALSTTEGLITIILLITHMCYRLIHNKTCIL

SEQ ID NO: 153570 - protein, 43 aa, Glycine max
  Clone ID: PAT_MRT3847_109698C.1.pep
LNFGQNKSIFIGEITISYLNDCLLFVMDVMITLYLYNLSNFLS

SEQ ID NO: 153571 - protein, 97 aa, Glycine max
  unsure (1)..(97): unsure at all Xaa locations
  Clone ID: PAT_MRT3847_109699C.1.pep
FFLRTLVKTMNLTRSVGGDLKLLTEGKLCEGKHIPVANICAGESYVVQIPLMASEEIVSFSAXRLXTAKLRKNSKADATASHVGAIQINICCFASPD

SEQ ID NO: 153572 - protein, 62 aa, Glycine max
  unsure (1)..(62): unsure at all Xaa locations
  Clone ID: PAT_MRT3847_10969C.1.pep
SXDEALLIIRAKQIEEIXNYXIXHTSILXKXIMXSLXXLFXLXNFPKPXFXQSXFWNSTMEQ

SEQ ID NO: 153573 - protein, 100 aa, Glycine max
  Clone ID: PAT_MRT3847_1096C.1.pep
KKLVSIFNYPLGRESIPNHFFYKQPKYPLIKKILFDKKRASSLQFLGWGKLNKGFPPTNDPWVFLFSRVFYFLNPERRIAKFWGPVLKPKTLPYGKGPFF

SEQ ID NO: 153574 - protein, 68 aa, Glycine max
  Clone ID: PAT_MRT3847_109700C.1.pep
LWMGSYVHHSYMSSNHLHGILSAWCYETKWLCIGLGMLRTVRILLALYLWVPPPNLKKCPPNVGFAAA

SEQ ID NO: 153575 - protein, 62 aa, Glycine max
  unsure (1)..(62): unsure at all Xaa locations
  Clone ID: PAT_MRT3847_109701C.1.pep
CVPLTEILKLPLMGQKHGCRFSSVTSXAVFSSAIFVVTFDFGSSPLCHVLEQQILEQKGFKT

SEQ ID NO: 153576 - protein, 47 aa, Glycine max
  Clone ID: PAT_MRT3847_109702C.1.pep
QKGKVGKFVVISKLVYPEENIKVACIPCSYTNYGNMDMRIGMLSMAH

SEQ ID NO: 153577 - protein, 162 aa, Glycine max
  unsure (1)..(162): unsure at all Xaa locations
  Clone ID: PAT_MRT3847_109703C.1.pep
LNDVYLKSFVGTYFNLLARKSCFTREVLTHMATGLTMVYIITVNATIIAVSGRTLLLEDCSSPTRAYCKVKPDVGYKSCLSKTKSDLVVATTVYRLIGSLAMGLIANLPLSLAPGMGPNTYFAXNLDGFHGTEPLSYQTALAVISVEGIDFLLVSAVALTGK

SEQ ID NO: 153578 - protein, 108 aa, Glycine max
  Clone ID: PAT_MRT3847_109704C.1.pep
MPDHGMGRRDLNLRRNPKPVRFTISVCAARVQQPPLLYRIVRRLKHSSKVILLLKPSADANADDLRAGAQETAHIRSQQSTARKSLTTDHGLRPEHNYNRILLDAINE

SEQ ID NO: 153579 - protein, 142 aa, Glycine max
  unsure (1)..(142): unsure at all Xaa locations
  Clone ID: PAT_MRT3847_109705C.1.pep
SSHEEVTLLGATVSPFVCRVHITLKLKGVQYKYVEXNLKNNTKLLLKSNPLHNNVPFFIHNNNPIADSLIIIKYINXDXKNNPILPSDPYQTALTHFXSKFIHNKVFNTAYKSIFTADEKEHNKNVKEAIHTRHFLNNQINN

SEQ ID NO: 153580 - protein, 69 aa, Glycine max
  Clone ID: PAT_MRT3847_109706C.1.pep
PLRSVLPLPGTVSTQSKGVITVTTKSRDNARKNMCAKSAKKAKNPVKAPFLGFFHMRSAPEKHHTNLHS

SEQ ID NO: 153581 - protein, 131 aa, Glycine max
  Clone ID: PAT_MRT3847_109707C.1.pep
EKRFKKGLLTDHPLPLLTGSAFRDVRIPSGPRLLNFAPIPKDPVFKKKRGPPKVLKIKDCCLSTLKFPEKWKVGSFCFQCSLSFFGWKLWSNVVAATLYAIWLDPSVRFSCAMKRKRLGNKLGSINLFPLK

SEQ ID NO: 153582 - protein, 131 aa, Glycine max
  Clone ID: PAT_MRT3847_109708C.1.pep
PTRPLSTGSGTSPKCEEHSEKWHCPWGFTVVDDVAPTFKTILEENYLSTKSPFEDTTQNRMLWWKRRKNLDHCLDKLLRNLEESWFGSWKCLLLGEWLNCKNFDLVLKNLGNDLRSKCKLDVNEGLLKNYS

SEQ ID NO: 153583 - protein, 39 aa, Glycine max
  Clone ID: PAT_MRT3847_109709C.1.pep
QTDTPLLSKPHNLTETWGYPGNADRLLEAYHHKLIAMLL

SEQ ID NO: 153584 - protein, 123 aa, Glycine max
  unsure (1)..(123): unsure at all Xaa locations
  Clone ID: PAT_MRT3847_10970C.1.pep
SRGDPRVRFLRMASFSPAGGGLIHHVXFXIIILHLLLHPQNPNHTPTSIWFHRAGPLQTPHFPQPQNPGLQGNLXLPXTPIPHQRGTRVPYWGGAFLTFSCAASPGGGPPWAAGLSAPYKGGG

SEQ ID NO: 153585 - protein, 297 aa, Glycine max
  Clone ID: PAT_MRT3847_109710C.1.pep
RERTSSLSPARKNLKHQSLTQGGDKINYGFDTPLVQKSPVSPPSPVRFSWIKRCTELIFRNSPEKPLERNEDSLMGSDTGNVCNGKQYSENDESLGNIGKGQQIGFAFEEPKVIVEVPSLDDARRSEIESEAKDVNGKSALLLPDGHHAGRRKRGRGNVTDKGGDPQMGAPHSRWPRAEQSNEKVQSGVSKVQQVLTSSNQTQGNTEETRVVMVDKVIHVSEVTSEKLDALPILSQEPRDNMQSPTFGADQCILHGETIDRSNSKTRQEDILPCASSVLGSTEEISKGNNEQVSEHC

SEQ ID NO: 153586 - protein, 143 aa, Glycine max
  Clone ID: PAT_MRT3847_109711C.1.pep
GNMTDKVGNPFVDVGQNKKSRAEEQTNEKVQSGVSKVQQVLTSSNQTQGNTEETRVVIMVDKVIHVSKVTSEKLDVLPILSQEPRDNFPSPTLGADQCNLHGETIDQSNYKTRQEDVLPCASSVLGSTEEISKGNNEQVFEHC

SEQ ID NO: 153587 - protein, 105 aa, Glycine max
  Clone ID: PAT_MRT3847_109712C.1.pep
GEFEKKYIATLGVEVHPLGFTTNLGPIQFDVWDTAGQEKFGGLRDGYYINGQCGIIMFDVTSRITYKNVPNWHRDLVRVCENIPIVLTGNKVDVKERKVKAKSIT

SEQ ID NO: 153588 - protein, 45 aa, Glycine max
  Clone ID: PAT_MRT3847_109713C.1.pep
VFCAAPMAASQITSSLRNVAAFERFEPSTLRFPSAGHVSSGTLTQ

SEQ ID NO: 153589 - protein, 39 aa, Glycine max
  Clone ID: PAT_MRT3847_109714C.1.pep
ANSLLTEATSNYYKHHEFNRVVHKKTKKRKSYFSAVLWR

SEQ ID NO: 153590 - protein, 42 aa, Glycine max
  Clone ID: PAT_MRT3847_109715C.1.pep
RQREILRASVDLQGAHRIRGILTLVVTVWVFLGIEVYPWPVL

SEQ ID NO: 153591 - protein, 50 aa, Glycine max
  Clone ID: PAT_MRT3847_109716C.1.pep
SLFSENKKTPKAYPLGTWEPKLRGAPLKQRGSNHGRPPGLIFKIQPPPKK

SEQ ID NO: 153592 - protein, 78 aa, Glycine max
  Clone ID: PAT_MRT3847_109717C.1.pep
NWRNWLWFLPAIAGENYLPNKAITLRATSRTNYYPLMPPNGYPLIQGWCWIPWRLTTMSYWHVRASYLCENTQVCAPG

SEQ ID NO: 153593 - protein, 78 aa, Glycine max
  Clone ID: PAT_MRT3847_109718C.1.pep
TTQHYGLKLHIESAQTDPCEWNLRVSHKPLLGVTNSRVVTTLVSKVLFSSLTSACYSFFKILISPVKILMHLNYTLSF

SEQ ID NO: 153594 - protein, 123 aa, Glycine max
  Clone ID: PAT_MRT3847_109719C.1.pep
GAWPCSPPFACPKWSIKSCRGLLISDSLSKFVIGKTVCFNPPGGRLLFPGVLGVWTKLSLAPWAFLGAPLWPPEVNIPAFVSGWGGFRGRFLVGVPRAGFPPCVFVRRFRGALLFFVEVGFCS

SEQ ID NO: 153595 - protein, 55 aa, Glycine max
  Clone ID: PAT_MRT3847_10971C.1.pep
TCISYLLASCRISYFPFHFTGLHVHTIRTIFYLSKIGMTLTWFLILIDKSYQFSS

SEQ ID NO: 153596 - protein, 75 aa, Glycine max
  Clone ID: PAT_MRT3847_109720C.1.pep
KKRDGLWLYKTKDWGLPSKTKLEPKPNANLPCPGWNSFFFLLGNLNLMAWGLQYHDLEGPSLALPNFIGMQDLFL

SEQ ID NO: 153597 - protein, 52 aa, Glycine max
  Clone ID: PAT_MRT3847_109721C.1.pep
FKGNLIFFYKKKLGSLSSFIFTLIIASFFSCFGLLSSSHVHATDSTITIQTQ

SEQ ID NO: 153598 - protein, 33 aa, Glycine max
  Clone ID: PAT_MRT3847_109722C.1.pep
NKNKTNPLYLSPFPVSAVILVTTSLVIIYYYNL

SEQ ID NO: 153599 - protein, 96 aa, Glycine max
  Clone ID: PAT_MRT3847_109723C.1.pep
KINRPNFLFGGQKIPYPGGQTPPPQMVGDAFKKSLNFWEGQTQRASFPFNSQTFFPPYFDPKTLFFLKKAIQKNNGGPFSPLWPNKKFKPGHPGCF

SEQ ID NO: 153600 - protein, 110 aa, Glycine max
  unsure (1)..(110): unsure at all Xaa locations
  Clone ID: PAT_MRT3847_109724C.1.pep
GILVAWACHGTCYQTLPIRMKTGYRERSSEVKCACLMLAVXAHNILTFKTIPEXSFXPTKDYINGXQLTSDSKTLNQQAIYHATERNVHHNYIFTFGINHTVLSNIPYLL

SEQ ID NO: 153601 - protein, 137 aa, Glycine max
  Clone ID: PAT_MRT3847_109725C.1.pep
VTDPLTDNQPILEASYVNIPIIAFADTDAPLRHIDVSIPCNNKGKQSIALMYWLLAREVQRMRGLLQRAQPWNVMVDLFMYRDLEEVEKEQADQAALLAAQQEAAAAPEAAAPAAAAPEEQGGKVEWGATDAAEYAQ

SEQ ID NO: 153602 - protein, 80 aa, Glycine max
  unsure (1)..(80): unsure at all Xaa locations
  Clone ID: PAT_MRT3847_109726C.1.pep
WNNPVGPKTINFWAPTFKGGLSFANIAVFXKPPEKLSFPKQLAATVPGFFWSGSRTVLTPKIGTLFRVNFALAGPGFSQL

SEQ ID NO: 153603 - protein, 40 aa, Glycine max
  Clone ID: PAT_MRT3847_109727C.1.pep
RSRQDEPFLIRDSCQVEVLLSIHVSHLHIPERPRNSTAIT

SEQ ID NO: 153604 - protein, 60 aa, Glycine max
  Clone ID: PAT_MRT3847_109728C.1.pep
IFFSPKNHNSKITNMPFKPLQTPTTSKASLSIVLKKRLPPWHQHPPKNPHFPSFVFQNQT

SEQ ID NO: 153605 - protein, 56 aa, Glycine max
  Clone ID: PAT_MRT3847_109729C.1.pep
PPPPPAPPPAPAPAPPPPGGFPPRASTPPPRRGDIVHPTDARFPPCRILKRPAVFY

SEQ ID NO: 153606 - protein, 93 aa, Glycine max
  Clone ID: PAT_MRT3847_10972C.1.pep
IFVVGLRSVSKGASAAVSLCGFADIGRGVFGGSVGLAALMAGERSYFPMFPDTRLPRVLNDFKNGVNRRFRLSSANKGIASNSVRRSSKVLEI

SEQ ID NO: 153607 - protein, 66 aa, Glycine max
  Clone ID: PAT_MRT3847_109730C.1.pep
MQFDEQKELVTVERILRVVFIDPARQSPVLEKLKRQLAEADAAVEARKKPPVEAGPRVAAEGLVID

SEQ ID NO: 153608 - protein, 133 aa, Glycine max
  Clone ID: PAT_MRT3847_109731C.1.pep
RIGDRLMAEAETNLAINVLPGLSESFEGLRRGELQLGILIENMRREGFELSVSPPKVMYKTESGQKLEPVEEVTIEVNDEHVGLIMEALSHRRAEVTDMGPVSGTVGRTRLCLTCPSRRLVRLWSGFTVDAWF

SEQ ID NO: 153609 - protein, 84 aa, Glycine max
  Clone ID: PAT_MRT3847_109732C.1.pep
HFIQHPNGLLGKIHFNRWKDWWVALNLTIRRHRHQLIFSNEPFIGSTLMEEAEFLVWSWFRQMEKGFTEHYNCWSINLSTAFCN

SEQ ID NO: 153610 - protein, 155 aa, Glycine max
  Clone ID: PAT_MRT3847_109733C.1.pep
MAHLSHKTLVYLPEMRPEHEAEEGQPRKSLGSFSSWPHRLENVFPVYAMGTSNPAVLDSSLHTSDCLDPIWDAVREEAKLEAEKEPILSSFFYATILSHDCLEQALAFALANRLQNPTLLATQLMDILSYVMKHDKSIQQCIRLYIQACKDQDAA

SEQ ID NO: 153611 - protein, 40 aa, Glycine max
  Clone ID: PAT_MRT3847_109734C.1.pep
YWNLAQTNCSNPYAGEAILGTPTFLRKLISRNKKAIQDFT

SEQ ID NO: 153612 - protein, 91 aa, Glycine max
  Clone ID: PAT_MRT3847_109735C.1.pep
SSKSCGGASCCCGTCCSCSPHHCLFFLATYTPVLEESHPPPPYHNHALHKTHTFFVSLFMLCMLCMLCYTCVERERKKSASVWGCLLSPLH

SEQ ID NO: 153613 - protein, 74 aa, Glycine max
  Clone ID: PAT_MRT3847_109736C.1.pep
YITVQIRRPLFSFLQFQKQNTELGFRLSTLSLTLPEDETMRQLWLPSTWLQSHVERSNIWRQIGWEIFKDDMWL

SEQ ID NO: 153614 - protein, 489 aa, Glycine max
  Clone ID: PAT_MRT3847_109737C.1.pep
MATRAKLSLAIFLFFLLALISNLALGKLKETEVEEDPELVTCKHQCQQQRQYTESDKRTCLQQCDSMKQEREKQVEEETREKEEEHQEQHEEEEDQNPYVFEEDKDFSTRVETEGGSIRVLKKFTEKSKLLQGIENFRLAILEARAHTFVSPRHFDSEVVLFNIKGRAVLGLVRESETEKITLEPGDMIHIPAGTPLYIVNRDENEKLLLAMLHIPVSTPGKFEEFFGPGGRDPESVLSAFSWNVLQAALQTPKGKLERLFNQQNEGSIFKISRERVRALAPTKKSSWWPFGGESKAQFNIFSKRPTFSNGYGRLTEVGPDDEKSWLQRLNLMLTFTNITQRSMSTIHYNSHATKIALVMDGRGHLQISCPHMSSRSDSKHDKSSPSYHRISADLKPGMVFVVPPGHPFVTIASNKENLLIICFEVNVRDNKKFTFAGKDNIVSSLDNVAKELAFNYPSEMVNGVFERKESLFFPFELPSEERGRRAVA

SEQ ID NO: 153615 - protein, 518 aa, Glycine max
  Clone ID: PAT_MRT3847_109738C.1.pep
MATRAFFLFLTDQAMAMRTKLSLAIFFFFLLALFSNLAFGKCKETEVEEEDPELVTCKHQCQQPQQYTEGDKRVCLQRCDRYHRMKQEREKQIQEETREKKEEESREREEEQQEQHEEQDENPYIFEEDKDFETRVETEGGRIRVLKKFTEKSKLLQGIENFRLAILEARAHTFVSPRHFDSEVVFFNIKGRAVLGLVSESETEKITLEPGDMIHIPAGTPLYIVNRDENDKLFLAMLHIPVSVSTPGKFEEFFGPGGRDPESVLSAFSWNVLQAALQTPKGKLEKLFDQQNEGSIFAISREQVRALAPTKKSSWWPFGGESKPQFNIFSKRPTISNGYGRLTEVGPDDDEKSWLQRLNLMLTFTNITQRSMSTIHYNSHATKIALVIDGRGHLQISCPHMSSRSSHSKHDKSSPSYHRISSDLKPGMVFVVPPGHPFVTIASNKENLLMICFEVNARDNKKFTFAGKDNIVSSLDNVAKELAFNYPSEMVNGVFDRKESFFFPFELPREERGRRADA

SEQ ID NO: 153616 - protein, 66 aa, Glycine max
  Clone ID: PAT_MRT3847_109739C.1.pep
ATHVLAINPEPYVENRELAMIHYSCAMLIALKSTFAEHMTRNDAMLADPMMLNAGLHTEINAGLDY

SEQ ID NO: 153617 - protein, 66 aa, Glycine max
  Clone ID: PAT_MRT3847_10973C.1.pep
GYPFPVSVSGHVTNESVAFVATPTAGVTPHGPIVPQRHKSMLFIICHRDQCLMRNRSLRISIIATL

SEQ ID NO: 153618 - protein, 155 aa, Glycine max
  Clone ID: PAT_MRT3847_109740C.1.pep
RTRGWDSHISPKNSKWLQENLTDMDAKVKAMIKLIEEDADSFARRAEMYYKKRPELMKLVEEFYRAYRALAERYDHATGELRQAHKTMAEAFPNLLTDDSPCNSSDTGAEPPHTPEMPHGPHPIRALLDSVNLQKDSFGFSLIQNTLKMNGESLE

SEQ ID NO: 153619 - protein, 88 aa, Glycine max
  Clone ID: PAT_MRT3847_109741C.1.pep
RSGSLFSDQGFIPVEGLISEVVAWGLGGKVSKDAQHSHKNSVALFSQHRRIVALRSFGSSEDSPERMIMPGCLIPMLWDRNPCQVDHL

SEQ ID NO: 153620 - protein, 90 aa, Glycine max
  unsure (1)..(90): unsure at all Xaa locations
  Clone ID: PAT_MRT3847_109742C.1.pep
ASSSSFGCSSSSLSEARSRKNPRMXGSEEEGGSEGXEXEXXXXXRRKDVGRXDFVCPRNSRAAPASSSAPTVSSSFDWALFFEGSHVIGL

SEQ ID NO: 153621 - protein, 191 aa, Glycine max
  Clone ID: PAT_MRT3847_109743C.1.pep
MVSFHKALAEIPITEVPPEFEAPPKKRKWEGETLTEEFFMHDPTDEKRKSIFGIELHLETPLPSHKLQQYLTIQSLDLELSLKKKEDGYDINEKKNYGSSGSAFGERDLFLESTSKSKKDDSCVLTRSPPSWLSSEGDDHKEMITTVCMRCHMLVMLCKSSPACPNCKFMHPPDQNPSKFLKRKKVQPLLC

SEQ ID NO: 153622 - protein, 544 aa, Glycine max
  unsure (1)..(544): unsure at all Xaa locations
  Clone ID: PAT_MRT3847_109744C.1.pep
MKQHELSLLLCLLWALTLLYGEMFAYWVPPLFTCSWPHLLRSSSSSSSXVQTDSGNYQGDYVKVAVIADPQLMDKTSLRLPARSLALELAEFYTDLNMRRSFFASVLPFKPDVILFLGDYFDGGPSLSDEEWQESFSRLKHIFGLNAQGKYRDMPVYYIPGNHDIGYESLHSLKPEVIQRYEEAFGTRNYKFTVGKVDFIAVDAQTLDGHPQNHLTSQTWDFVKNISVGDVVHPRVLLSHIPLYRRDDTYCGPHRSSPIINQRIHHAINGNTNEISYQNYVSEKSSKYLLDTIKPKLILSGHDHDLCTVTHQSKSGSVNEHTLGTISWQQGNLYPSFMLLSVDNSTLQKASIPEEALLTHLCYLPMQTHIYIWYIVLFILTLLATLFWPTSGTSLWHQCCGLVGYCKQLIACTFSRSETKEKDEDANYEYEMMWDAEGTMHLVKKPLNPSTVNSNDRGLGERGNVVMRAAARKNTPQEGDHSVNVDIASGIGVDPVARMPLRTGKSKTKIIIQRLIRTLRMLTVIAAVNVPLYMMLLFKDWIDK

SEQ ID NO: 153623 - protein, 48 aa, Glycine max
  Clone ID: PAT_MRT3847_109745C.1.pep
CGLRTLNFRFLKLIQKIITKGMKIGNFGQIQLEIKNQGVREGVDERVA

SEQ ID NO: 153624 - protein, 248 aa, Glycine max
  Clone ID: PAT_MRT3847_109746C.1.pep
RRQKGNPNQVCGQVAGNMMRTSGFLVNQGWPLFISEFGGDLRGTNVNDNRYLNCFLAVAAELDLDWALWTLVGSYYFRQGVIGMEEFYGILSWDWTQVRNTTFLNRISALQLPFRGPGITRGNPYKLIFHPLTGLCVIRKSLLDPLTLGPCYLSDGWKYTPQKILSIKGTYFCIQAENEGMPAKLGIICSDPNSRWEMISDSKLHLSSKLSDDSNVCLDVDDNNNIVTNACKCLSRDRTCDPSSQWFK

SEQ ID NO: 153625 - protein, 82 aa, Glycine max
  Clone ID: PAT_MRT3847_109747C.1.pep
QELVGLVEMYSFTSWEPDYFRLTFLMLDHYIEMHLGQGLLLKVWHYWLRNCQCQLKLCNISIGILYKQFKLVLSINATCIFS

SEQ ID NO: 153626 - protein, 93 aa, Glycine max
  Clone ID: PAT_MRT3847_109748C.1.pep
SLLKTSSTEADRPYSSRKDTQLVLPVVPVEHHIADGVQRSNKAHGHTLSRDIAELPHSPIHPCEPHSPAQRNRIIEQVHRRFIAEPPDQQQAR

SEQ ID NO: 153627 - protein, 59 aa, Glycine max
  Clone ID: PAT_MRT3847_109749C.1.pep
SPPPFVADTRSSIFDPKPGIPFNKTPVTLVYWYPPEWGYSSRAHCLDCIRRQKLFLRLP

SEQ ID NO: 153628 - protein, 298 aa, Glycine max
  Clone ID: PAT_MRT3847_10974C.1.pep
MPGELQLPPGFRFHPTDDELVNHYLCRKCAAQTIAVPIIKEIDLYKFDPWQLPEMALYGEKEWYFFSPRDRKYPNGSRPNRAAGSGYWKATGADKPIGKPKALGIKKALVFYAGKAPKGVKTNWIMHEYRLANVDRSASKKNTTTNNLRLDDWVLCRIYNKKGKIEKYNGVAVVDQKVAKLSEEEVQFQHETKPQIKMYGHDDFRNDQLYMDTSDSGPRLHTDSSCSEHVVSPDGTCEKEVQSEPKWNDLELGPDPALGFDFNFMDLTSDDAFAPQVQYQINHLSPWQEMFTYLPKTF

SEQ ID NO: 153629 - protein, 68 aa, Glycine max
  unsure (1)..(68): unsure at all Xaa locations
  Clone ID: PAT_MRT3847_109750C.1.pep
IQRASFLFGEHTPDHLGGDEHKGGFLDKIRHKTHGEEGAPPPGANRKEEEXKKKHEHGHDSSSSSDSD

SEQ ID NO: 153630 - protein, 105 aa, Glycine max
  unsure (1)..(105): unsure at all Xaa locations
  Clone ID: PAT_MRT3847_109751C.1.pep
MTQTGDRSLTKHTYVHTRLVQVLNIKMTSVIVTYCKRVLGLIKINGFPIYLVEPEILRFKAFEPILLMRKIRLDGVDMRIRVKXGRHTFHIYTICQSITKALVAF

SEQ ID NO: 153631 - protein, 63 aa, Glycine max
  Clone ID: PAT_MRT3847_109752C.1.pep
LSKLFLIHITMISLRVNYMNLLYLQNMLPLTSKYCLAQIWQLICQVNGCSVIKWHSLILSFFS

SEQ ID NO: 153632 - protein, 58 aa, Glycine max
  Clone ID: PAT_MRT3847_109753C.1.pep
KNELCIQYQVSTTNMYIRTEITFLNFNKQNLNVLKETSISIGLPGYQTSNDPLYSSSS

SEQ ID NO: 153633 - protein, 600 aa, Glycine max
  Clone ID: PAT_MRT3847_109754C.1.pep
MAYAAPPLDPPGIGTNSPSSQKKRVAYFYDSDVGNYAYQSGHLMKPHRIRMAHSLVMNYGLYNKMEIYRAKPASKYEMTQFHTDEYVDFLQRVTPDNEHLLAKECAKHNVGEDCPPFDGVFEFCAISAGGSMEGAARLNRAKCDMAINWAGGLHHAKKNEASGFCYINDIVLAILELLRFHARVLYIDIDVHHGDGVEEAFYTTDRVMCVSLHKYGEFFPGTGDLRDIGIGQGKHYSVNVPLRDGIDDASYKDVFESVTTWAVEFFQPGAIVLQCGADSLSGDRLGAFNLSLAGHANCVNFVKKFNLPTLFLGGGGYTIRNVARAWAYETGQIVGVELSRSMPFTDYYEYYSPDFELDVKPSNMDNRNSAEYLAKIKSFVYTNLRQAQPVPSVQLQDVPRYPVGMSEHIDDMDDRLDDEDADEETSKDQRLTERVEDRMIEDDMDMSGLEDARGVDSGADADHGSPSIVGEGGSGCKVLSSDHDTDQITEPVPSIDPGNDPEPDRTTMMLQEAIRDESNEVSQPTNVEQTVVQRDAPAEHVEIIAQPSIVLESAPMQPEPPIVQCMNRVDSHTLGLSDAAEAVEAMENNHKGGNENIGLS

SEQ ID NO: 153634 - protein, 82 aa, Glycine max
  Clone ID: PAT_MRT3847_109755C.1.pep
IKVTRSVRVPFSLGSYSDYADCDVIPMEACSLLLGRPWKYDTDSLHHGRSNHYSFMFKGQKIIIHPMTTDQIIKDDLARATK

SEQ ID NO: 153635 - protein, 109 aa, Glycine max
  Clone ID: PAT_MRT3847_109756C.1.pep
VKRDGALPYYKSHLSFLSALSKISTSYICHGGNTRLKIRDRYPKRHSLGTKFCKGHKTSKLRAGCIKRLDGIISIFHRFQQPDNIDTWTILLCSQMDIYYGGGEIDMIK

SEQ ID NO: 153636 - protein, 105 aa, Glycine max
  Clone ID: PAT_MRT3847_109757C.1.pep
RMPPPPGFSQFRASLMGARGFQEQGASLQQALPIKSPYFFPPQKGLRGPNKKGSPPPFFKFFILRLKKLAPFPCFMGEEKIFFFKGGKKKKKKKKKPQGGKRGKK

SEQ ID NO: 153637 - protein, 70 aa, Glycine max
  Clone ID: PAT_MRT3847_109758C.1.pep
LRSSVNPHSIGETGPSPGACLKFPVVPPRSGLKALFRAKGSAFLEKKPKSKKFHKRFLGGPKAQKNKKIR

SEQ ID NO: 153638 - protein, 227 aa, Glycine max
  Clone ID: PAT_MRT3847_109759C.1.pep
RQFKIQRPGSGGDLPQGGEYNPSSSFPVARRVNSSHSIMMEDDMETGTLGAYQDKLRTFPNMRTKPYTPLIFRILLGINVRVLFILLLFGLGAIFYVGASTSPIIVFVISVCILSFLVAIYLTKWVLAKDEGPPEMVQIAIRDGAEGFFRTQYGSISKMAMLLALVILCIYLFRSTNPQQESSGLGRTTSAYITVASFLLGALCSGVAGYVGMWVSVRANVRVSSAA

SEQ ID NO: 153639 - protein, 196 aa, Glycine max
  unsure (1)..(196): unsure at all Xaa locations
  Clone ID: PAT_MRT3847_10975C.1.pep
MPGELQLPPGFRFHPTDDELVNHYLCRKCAAQTIAVPIIKEIDLYKFDPWQLPGTFFSFLTLVSVFFCLXNFIRVLILLHFFSLHLKVLLFMFLCTEMALYGEKEWYFFSPRDRKYPNGSRPNRAAGSGYWKATGADKPIGKPKALGIKKALVFYAGKAPKGVKTNWIMHEYRLANVDRSASKKKHHHQQLEGMSR

SEQ ID NO: 153640 - protein, 206 aa, Glycine max
  unsure (1)..(206): unsure at all Xaa locations
  Clone ID: PAT_MRT3847_109760C.1.pep
MMDHDLETAALGAYQDKPRTFPNMRTKPYTPLIFRILLGINVRVLFILLLLGLGAIFYVGASTSPIIVFVISVCILSFLVAIYLTKWVLAKDEGPPEMVQISDAIRDGAEGFFRTQYGSISKMAMLLALVILCIYLFRSTTPQQESSGLGRTTSAYITVASFLLGALCSGVAGYEGXGVVSXRANVRVSSAARRSAREXLQVATRA

SEQ ID NO: 153641 - protein, 444 aa, Glycine max
  Clone ID: PAT_MRT3847_109761C.1.pep
MEAVQVISTTTIKAPPSHNNHDSVQKIDLTPWDLQFLPIETIQKGLLFRNKKHTENQIEHLQHSLSSTLAFFPPLAGRLVILQHHDNTVSSHIVCNNAGALFVHAVADNTTVVDILQPKYVPPIVCSFFPLNGVKNHEGTSQPVLAVQVTELLDGVFIAFTINHVVADGKSFWHFVNSWAEISRGIPKISKIPFFERFFPVGIDRAIRFPFTKVEEKEEGEHSQNLEPKTLSERVFHFTKRKISELKSKANAEANTDKISSLQAVLTLLWRTVSRCKHMGPQEEVHFVLLIGARPRLIPPLADDYFGNAALVGRATMKAEELLQKGGFGKGASEINKVISSHSHEKVRSYYEYWVRTPRLFTIGSLANSNSLATSSSPRFNVYGNDFGWGKPLAVRSGGANKSSGKITLFAGAEEGSIDIEVCLPYEILEAIGNDSELMDAISN

SEQ ID NO: 153642 - protein, 45 aa, Glycine max
  Clone ID: PAT_MRT3847_109762C.1.pep
ASSSYLDRTVQGPVTDKNWCLHVVYIGPVLIEHATSCVDNASYMC

SEQ ID NO: 153643 - protein, 64 aa, Glycine max
  Clone ID: PAT_MRT3847_109763C.1.pep
SDCKMVADYINHVTTGIYSLHIYNICCILAKCRGSLLHFLNSISFIRKQVNHVVHCKDFTILCS

SEQ ID NO: 153644 - protein, 89 aa, Glycine max
  Clone ID: PAT_MRT3847_109764C.1.pep
WFSVLILKVQIISQLALNFLLQIKKCCRKGKLRLAILNVILLFGLRQPDNKEHNYLLVKWKWGSKFHNFELLILSICAILYLLSVRSTI

SEQ ID NO: 153645 - protein, 88 aa, Glycine max
  Clone ID: PAT_MRT3847_109765C.1.pep
RALAACFLPLERGVCALPFLWFGPLIFCPWGFSLCAPGVTFFASGGDIFFPWEGSLFRSGPRFDPVSLKVSGMSSRESPDCLQVTNKY

SEQ ID NO: 153646 - protein, 114 aa, Glycine max
  unsure (1)..(114): unsure at all Xaa locations
  Clone ID: PAT_MRT3847_109766C.1.pep
MISTLVVMTSNDFGEGTSPSAPGIETTRVIPKNKARXMTAGEETELHAGVKNDGDTSLNDIAIKASVHLPYDHRMLVHNVTAQGSNNGSVPSSAQATMPYVSAAVSSGRLNFRP

SEQ ID NO: 153647 - protein, 95 aa, Glycine max
  unsure (1)..(95): unsure at all Xaa locations
  Clone ID: PAT_MRT3847_109767C.1.pep
PTRPRLRSYTLCSTSVPMGGNPEVRQKFLDYVRVIVKKKGQLRCXVGINPYSMEWTGLANKLLGKGNDILCCDYASFDGLITNQVMSKMAEIDNS

SEQ ID NO: 153648 - protein, 72 aa, Glycine max
  Clone ID: PAT_MRT3847_109768C.1.pep
IKKMDGRREENNHAELDLDALDNKRALDLIYRTRTDYNASVTTGTTGHSYALMKTCTLFADAHIICCSSLRS

SEQ ID NO: 153649 - protein, 311 aa, Glycine max
  Clone ID: PAT_MRT3847_109769C.1.pep
MEGSGSGVVTVYGNGAITETKKSPFSVKVGLAQMLRGGVIMDVVNAEQARIAEEAGACAVMALERVPADIRAQGGVARMSDPQLIKDIKRAVTIPVMAKARIGHFVEAQILEAIGIDYVDESEVLTLADDANHINKHNFRIPFVCGCRNLGEALRRIREGAAMIRTKGEAGTGNIIEAVRHVRSVMSDIRVLRNMDDDEVFTFAKSIVAPYDLVMQTKQLGRLPVVHFAAGGVATPADAALMMQLGCDGVFVGSGVFKSGDPAKRARAIVQAVTHYSDPEVLAEVSCGLGEAMVGINLTDDKVERFANRSE

SEQ ID NO: 153650 - protein, 76 aa, Glycine max
  Clone ID: PAT_MRT3847_10976C.1.pep
PKRHHKNGDVYRPHMPDAFIRPSIPMRPGFFPGSMVYEGYYSPPMGYCNSNERDVPFMGMAPGPPVYNKYSNQNPP

SEQ ID NO: 153651 - protein, 311 aa, Glycine max
  Clone ID: PAT_MRT3847_109770C.1.pep
MEGSGSGVVTVYGNGAITETKKSPFSVKVGLAQMLRGGVIMDVVDAEQARIAEEAGACAVMALERVPADIRAQGGVARMSDPQLIKDIKRAVTIPVMAKARIGHFVEAQILEAIGIDYVDESEVLTLADDANHINKHNFRIPFVCGCRNLGEALRRIREGAAMIRTKGEAGTGNIIEAVRHVRSVMSDIRVLRNMDDDEVFTFAKNIAAPYDLVMQTKQLGRLPVVHFAAGGVATPADAALMMQLGCDGVFVGSGVFKSGDPAKRARAIVQAVTHYSDPEILAEVSCGLGEAMVGINLTDDKVERFANRSE

SEQ ID NO: 153652 - protein, 207 aa, Glycine max
  Clone ID: PAT_MRT3847_109771C.1.pep
MSSSKKRFIPINLEDAAVDLLNHVVKLKEKGWIPLFIPLILIAWAIHRWLFSFSNWLPLVLALWASMQYGNYQRKLLEEELNKKWKRILLNTSPMTPLEHCEWLNLLLTQIWSNYFNPKFSRRLKAIVEKRLKLRKPRFIEKVEVQEFSLGSCPPSLGLQGMRWSTSGGQRVLKTSFDWDTSEMSILMLAKLSVGTARIVNNSVHIN

SEQ ID NO: 153653 - protein, 59 aa, Glycine max
  Clone ID: PAT_MRT3847_109772C.1.pep
GRNRISLERNSARAPPTLSMNTLKHGIEATTPQGFLEYESVTLDYATDVLYLTNALTAQ

SEQ ID NO: 153654 - protein, 253 aa, Glycine max
  unsure (1)..(253): unsure at all Xaa locations
  Clone ID: PAT_MRT3847_109773C.1.pep
ETKTKSTGKTLLEAIDAIDPPQRPTEKPLRLPLQDVYKIGGIGTVPVGRVETGIIKAGMVVTFAPAGVTTEVKSVEMHHEQLTEGLPGDNVGFNVKNVSVKEIRRGNVAGDSKNDPPKGCDSFNAQVIVLNHPGQVGAGYAPVLDCHTAHIACKFSELLEKIDRRTXKSVEDSPKFIKSGDWVVLPSVPSKPMWVSASSELSTSPLPPLARSPSLLPRPPRNKRYPSSPPDVLGSLVKMVQWGSVRSLRGPND

SEQ ID NO: 153655 - protein, 66 aa, Glycine max
  Clone ID: PAT_MRT3847_109774C.1.pep
GRWDSMVRMRKAVENRGTKEFIGHSWIGIRNNVYTFASNQLQHYGGKDLYLVLNLLVWEMETEGYV

SEQ ID NO: 153656 - protein, 83 aa, Glycine max
  Clone ID: PAT_MRT3847_109775C.1.pep
SYLDRTVQGPVTSSSKSSTSGPFPVLLSMSVLTIFFALALDVTTYAHFPPPLACLPYCGVLSRRSNFLYCGCHHCLASIITTP

SEQ ID NO: 153657 - protein, 73 aa, Glycine max
  Clone ID: PAT_MRT3847_109776C.1.pep
VYINFSIALQKRFLHYIRATKGQVPNSNNKKIHKSRKYPNRMIFPYSLLQRHYQKDTNPTTLFMYVRCMQHVS

SEQ ID NO: 153658 - protein, 55 aa, Glycine max
  Clone ID: PAT_MRT3847_109777C.1.pep
LRSHHIFKYHIVLLWCLTTTPHKALSNLLFSLIYPLFLHIPSFFFNYTRINTIST

SEQ ID NO: 153659 - protein, 75 aa, Glycine max
  Clone ID: PAT_MRT3847_109778C.1.pep
IQVTIELILDGYYLEKDVGALCDTSQSLLGINKADSCQHQLVALVADGSGHRLPKCGALDFHTIPRVCHLPLSHS

SEQ ID NO: 153660 - protein, 141 aa, Glycine max
  Clone ID: PAT_MRT3847_109779C.1.pep
YELYTGKVLFPGFTNNDMLWLHMELKGIFPKKMLRKGAFIEQHFDQYLNFLATEEDPVTKKAIKRMIVNIKPKDIGTIISGSPGEDPKMLTNFKDLMEKVFILDPDKRLTVSQALNHPFITGKGTMLLILTPTMMFTDICT

SEQ ID NO: 153661 - protein, 32 aa, Glycine max
  Clone ID: PAT_MRT3847_10977C.1.pep
VIYSVNTVVLVKELCHLRPIRVFYVWPSAIHR

SEQ ID NO: 153662 - protein, 110 aa, Glycine max
  unsure (1)..(110): unsure at all Xaa locations
  Clone ID: PAT_MRT3847_109780C.1.pep
SYLLPXQLKAPFLLKIEAATKNNPDIYYFNSQHLTNSNTLPSIINFYKFKHFSKKKLNPSIFHLNKFYNLHNNFLISTIPLPYYLTIIFSDITTLNFYSTYKTIPNTTSS

SEQ ID NO: 153663 - protein, 67 aa, Glycine max
  Clone ID: PAT_MRT3847_109781C.1.pep
KLAKAVKPSPQFLKRMFSGPNRFFVPPYTDSFGALGISPVKSINFLFFFGSLAGGSPFGCLNKFIRH

SEQ ID NO: 153664 - protein, 53 aa, Glycine max
  Clone ID: PAT_MRT3847_109782C.1.pep
FYHIRAKHTLSRPRIAKTVDYFFFYQNNELQIHATKLLMLHYVNENYICSLSR

SEQ ID NO: 153665 - protein, 72 aa, Glycine max
  Clone ID: PAT_MRT3847_109783C.1.pep
GQGGWKKSHNKRPKPLFFLLCAPFMLSGGLLFRKLPFKIGVIKLTKTLKLCWGRRIFFCPPVFFLVEGFFIV

SEQ ID NO: 153666 - protein, 40 aa, Glycine max
  Clone ID: PAT_MRT3847_109784C.1.pep
RSCNFIIESSLNYYIFSSSFIFSFLLLFTNFNLNLNTHLF

SEQ ID NO: 153667 - protein, 86 aa, Glycine max
  Clone ID: PAT_MRT3847_109785C.1.pep
EFHPGGSPKGFKAGYGLFPGSPTLLDGSHSFRWVGRALLSYWSLAVFPFFFRGCLWLFLGMVWAFVKIRCGLFGFWVSNAPVPWPL

SEQ ID NO: 153668 - protein, 78 aa, Glycine max
  unsure (1)..(78): unsure at all Xaa locations
  Clone ID: PAT_MRT3847_109786C.1.pep
LFPLPSLPGVVCPPCPXGXXXAAXXXKKKXVLLPPFLFPXRFXXXXSLXAXGXPXVXXLVLXGCCWXCLXXLFPPFFA

SEQ ID NO: 153669 - protein, 189 aa, Glycine max
  unsure (1)..(189): unsure at all Xaa locations
  Clone ID: PAT_MRT3847_109787C.1.pep
GLVYYGMPLGLQNFSFNXYLSVIFNALSELPSALIVLFFIDKFNRRITLLLFTILSGLFSVMSTVQVSKSSSSWNNNVQIVFELVSFFSACTSFNVYLIYTTELFPTCVRNSALSMARLAVVLGGMFSPLLVSAGRGNKFLCYGVFGLVIGFSGVFGIFLPETKGRAFCDSMDEEENKEKNMACGMLLA

SEQ ID NO: 153670 - protein, 54 aa, Glycine max
  Clone ID: PAT_MRT3847_109788C.1.pep
QNRRTGPKWLIFQSPTDGVVPYSTTSDRWSTLRRGPGFLCACGILLRTHSERCF

SEQ ID NO: 153671 - protein, 83 aa, Glycine max
  Clone ID: PAT_MRT3847_109789C.1.pep
NSLGVMWRERALLVILLLLLVQQICATKKQDHGCPLSSCGKITNITYPFRLKGHPKSCGDNRSRSTNKLLLPSSLFLVSLQFH

SEQ ID NO: 153672 - protein, 55 aa, Glycine max
  Clone ID: PAT_MRT3847_10978C.1.pep
YPNSFLRDCECSGFTDTAPIWSIVVFLCPCPSVYIIATVGMLERFDHSDLLSPCI

SEQ ID NO: 153673 - protein, 128 aa, Glycine max
  Clone ID: PAT_MRT3847_109790C.1.pep
MNSIFFLLIYVTLLFYDDKWILIFFINIHKSQHGVYFTSIEVARGIAYLHYGCEMQILHFDIKPHNILLDPDFSPKVSGGGSPKADPFGYGIVPRTAARGTIGYMAPELFYNNIEGISHKADVYSYGI

SEQ ID NO: 153674 - protein, 89 aa, Glycine max
  Clone ID: PAT_MRT3847_109791C.1.pep
GDEKKKLLNSLENLKANLFGFGNQRFWPIPKDNFGRGYHLWVNSGPQPRAPCQGVPVVKVIIPFGGPFPVMKLFHPGALGKIKKGFWFS

SEQ ID NO: 153675 - protein, 75 aa, Glycine max
  Clone ID: PAT_MRT3847_109792C.1.pep
KLSRLEEAWKISRAAAAMVAMITECRSIGMRFRTSKSIQKPDARRAGKTSCWHKYGDVWQAWAEWRDDLDCDKRL

SEQ ID NO: 153676 - protein, 65 aa, Glycine max
  Clone ID: PAT_MRT3847_109793C.1.pep
MKWVPLSRRWKIELGAHVWFQSQQMDYWKDKDRASYVQDRMADEERVFGIASGAECTCMKGTKRA

SEQ ID NO: 153677 - protein, 65 aa, Glycine max
  Clone ID: PAT_MRT3847_109794C.1.pep
TKDQCQSHLSNIEGINYYKETQFKSEALSARTTCHRANIFPLEVSFLNRTNHFKPRIHAVLNFVA

SEQ ID NO: 153678 - protein, 61 aa, Glycine max
  unsure (1)..(61): unsure at all Xaa locations
  Clone ID: PAT_MRT3847_109795C.1.pep
MPNQIHGIGDLLLTVRMQDARSSNITTSRNFGTYTVRCFKYLYTLXVIDPEKADTLKQSIP

SEQ ID NO: 153679 - protein, 38 aa, Glycine max
  Clone ID: PAT_MRT3847_109796C.1.pep
NQITLNINYLTVMVALISIVEIFGDPYKIFVITRNTLP

SEQ ID NO: 153680 - protein, 38 aa, Glycine max
  Clone ID: PAT_MRT3847_109797C.1.pep
HASVHKLGSSRAKADRYVPFFYYGKITMLNICFNKKCF

SEQ ID NO: 153681 - protein, 326 aa, Glycine max
  Clone ID: PAT_MRT3847_109798C.1.pep
MGVDDEQEMEEEEEEEREEEKKKHKQAPPSLFPISVRKGFSGERVKRDEWSEGAVSTLLEAYEAKWVLRNRAKLKGHDWEDVARHVSSRANCTKSPKTSTQCKNKVESMKKRYRSESATADHASSSWPLYSRLDLLLRGTGPVFSSPPGPLMVAAPMPPLSPVEPSQPLAPSGPLANAQNSHGSNGVDEKLAKEDGLGTKSSDQVSSKNPLDTDSSTPALYSQKEELRSNKRKKKTIDHNTGRRRKEYVEIAESLRWLAEAMIRSEQARMDTMKEIERMRVEAEAKRGEMDLKRTEIIANTQLEIARIFASVNSKGVDSSLRIGRS

SEQ ID NO: 153682 - protein, 47 aa, Glycine max
  Clone ID: PAT_MRT3847_109799C.1.pep
LRCSLELHIHDYLISRSPMLSGAVTAIRSHIKKKKKKKKKKKKKKKK

SEQ ID NO: 153683 - protein, 226 aa, Glycine max
  unsure (1)..(226): unsure at all Xaa locations
  Clone ID: PAT_MRT3847_10979C.1.pep
LLPRKLISSSNILLEVDMQTKKKTSRRNASQECGSPKVLRAPRKVSENGRATEKKVTDLITSSARKNKSFSTLENKTREPIPPTDLNNGYEFMDSGTSDACLENDAVDGVSLDFMGCNNQAVHLESGTIFSPGFHLSKNSGGVDRVDFIKIFQNEDHKRVSPCQEIESPQEDAVDGHVSRDSDTAXEXDINNSSFSTXNVNGCNSDYDGKWLSMEVSALYLALKNS

SEQ ID NO: 153684 - protein, 92 aa, Glycine max
  unsure (1)..(92): unsure at all Xaa locations
  Clone ID: PAT_MRT3847_1097C.1.pep
SRVRTATKKDAAGSLLELLRAALILMXEGLATYYIPVKKPPVYKATVYKPSVYRTTXYEPEPPAYKPEPRCYXPPYLKTPYWIPPYGTYPAF

SEQ ID NO: 153685 - protein, 105 aa, Glycine max
  unsure (1)..(105): unsure at all Xaa locations
  Clone ID: PAT_MRT3847_109800C.1.pep
MVYILLESRCPGLPSVHSYRLRGERRAACIPVDLRNNCLSQMTLALKSAHDADSLALAIAXSDKVLMPQDQDSSASLTDQAETPDITSEDTRMLEDXTMEDEDMY

SEQ ID NO: 153686 - protein, 230 aa, Glycine max
  Clone ID: PAT_MRT3847_109801C.1.pep
ITRLEHPSSLHPIKEECVSVRKPFSGDRVKRDEWSEGAVSTLLEAYEAKWVLRNRAKLKGHDWEDVARHVSARANCTKSPKTSTQCKNKVESMKKRYRSESAATADHASSSWPLYSRLDLLLRGTGPVLSSPPPPPPAMMPAAMPVLSPVEPSQPPQLSPPPAAPSGPLANAQNSHGSNGVDEKLAKEDGLGTKSSDQVSSKNPLDSDSSTPALYSKKDGLRCNKRKKKH

SEQ ID NO: 153687 - protein, 66 aa, Glycine max
  Clone ID: PAT_MRT3847_109802C.1.pep
VVATVWEYQNRADRWTRVFMRHNIIRGGNNQGETHGNDDGPVSFLLRVSDGEAEGIIVQGCQHIRL

SEQ ID NO: 153688 - protein, 45 aa, Glycine max
  Clone ID: PAT_MRT3847_109803C.1.pep
VYAIIVPYSLVARLLAVLIASTVNKMLLLSSTYDLHGYLMSEMSI

SEQ ID NO: 153689 - protein, 56 aa, Glycine max
  Clone ID: PAT_MRT3847_109804C.1.pep
AFNTTGALETAYAQSFGESIFLSEHQLEDWACPLNNFGCHGGLTIQGFEYIKYNGG

SEQ ID NO: 153690 - protein, 41 aa, Glycine max
  Clone ID: PAT_MRT3847_109805C.1.pep
SGIPASTHASGSRSRAAPFFFFFFSSGAHKNYQLLINSQHF

SEQ ID NO: 153691 - protein, 61 aa, Glycine max
  Clone ID: PAT_MRT3847_109806C.1.pep
LLLRVMLFKLIQLNGLKIIYVHVNNFIFCVFREICVCLHLCVYNVYVILFLGALLSSSRSR

SEQ ID NO: 153692 - protein, 61 aa, Glycine max
  Clone ID: PAT_MRT3847_109807C.1.pep
NIYIYNTEDGPNTLGAGKGVLYSKPNEKNSSTKYGDFIINTLSGDHLVDPYMKLMKTYGVF

SEQ ID NO: 153693 - protein, 51 aa, Glycine max
  Clone ID: PAT_MRT3847_109808C.1.pep
GELLDTLRILQLDSVAVHYKPDRGLDLPWSDGALLAVLRKAGRSLSNLLQD

SEQ ID NO: 153694 - protein, 69 aa, Glycine max
  Clone ID: PAT_MRT3847_109809C.1.pep
KHTSHNTLSNYTLKRALLLNYNYHSFPESLITLYLYSNSNSNHNHNLFPSFQIYSFIYPIGFQIFFSFS

SEQ ID NO: 153695 - protein, 56 aa, Glycine max
  Clone ID: PAT_MRT3847_10980C.1.pep
HESNDYLNNYFMSDFYSTISDYTVKAFASVLLQDYSRKLSVCYRHLNLNDSTYSLH

SEQ ID NO: 153696 - protein, 68 aa, Glycine max
  Clone ID: PAT_MRT3847_109810C.1.pep
IKFKDIPTGRRNFLLSWAAWSQRKKKQLSYKKFKISQKSEGNSSSTVSYALHSSKLLGTATRDEKKPE

SEQ ID NO: 153697 - protein, 38 aa, Glycine max
  unsure (1)..(38): unsure at all Xaa locations
  Clone ID: PAT_MRT3847_109811C.1.pep
IMYVVPSYYYRHNPLFRCVLVNHKSLLCAXXXVRVGSA

SEQ ID NO: 153698 - protein, 53 aa, Glycine max
  unsure (1)..(53): unsure at all Xaa locations
  Clone ID: PAT_MRT3847_109812C.1.pep
TGLQLKQLINISLNNNMLFLKVYLFLLFLLLVTTSRIXLIFFKSYQSSIYDYY

SEQ ID NO: 153699 - protein, 66 aa, Glycine max
  Clone ID: PAT_MRT3847_109813C.1.pep
KTSPFFCFSPDLTNFFWRRRAEFAVKTYTGALLIPKGKTEKTAPKILKKVGGGGPPKNILGAGGTF

SEQ ID NO: 153700 - protein, 83 aa, Glycine max
  unsure (1)..(83): unsure at all Xaa locations
  Clone ID: PAT_MRT3847_109814C.1.pep
LTIRNRCLTPFYGRSKGSNLTXYTWIRHHISSIVTLRYRSRDVALHLHDRQNPGIRKLNRLASHPTFASLRYIKYDLIDYTSQ

SEQ ID NO: 153701 - protein, 278 aa, Glycine max
  unsure (1)..(278): unsure at all Xaa locations
  Clone ID: PAT_MRT3847_109815C.1.pep
GFRKIDPDRWEFANEGFLRGHRHLLANIRRRKQPSSQPSSSSSSSSYYYYSSSSQQAQQGHCVEVGRFGLDEEIDRLRRDKHVLMMELVKLRQQQQNXRSYLQAMEERLRGTEIKQQQMMAFLARALKNPTFIQQLLQQKEKRKELEEAMSKKRRRPIERGPNHGVVGEESSSVKVESLVFGDEYGFGVSELEVLAMEMQGYGKGRREQEEEPDEALDQSQERLEKELDEGFWEELFSEGFEGELDTNPTNSQDQDEEEEDHVNVLANRFGYLGSSPK

SEQ ID NO: 153702 - protein, 60 aa, Glycine max
  Clone ID: PAT_MRT3847_109816C.1.pep
RKTQGGGKRKHGKARKTALRQACKRTHSSCIGLPNSKARPECKKRGDWKNPGGGQNNGLA

SEQ ID NO: 153703 - protein, 85 aa, Glycine max
  Clone ID: PAT_MRT3847_109817C.1.pep
EMEPQQEMEWNEAQKIPISGGLEVVAKKQLQFLATVDKNRHLYDGPALDRAIYRYNACWIPLLAKHSESAIFEGPCGTALDWEWI

SEQ ID NO: 153704 - protein, 88 aa, Glycine max
  unsure (1)..(88): unsure at all Xaa locations
  Clone ID: PAT_MRT3847_109818C.1.pep
RDGQQGKKVIVGFEVYAKSIEAGNRXAQGIPVSITDVSNGMELTMRKNGTAAAAASYYSSDFDLPPGDHPTTLMRXLLLHSLHVSVXS

SEQ ID NO: 153705 - protein, 53 aa, Glycine max
  Clone ID: PAT_MRT3847_109819C.1.pep
FAKHVSQPVPISLTLKSLLLVACIVKILWSNCLSMHVSVYVYCYIFVHMLNIM

SEQ ID NO: 153706 - protein, 49 aa, Glycine max
  Clone ID: PAT_MRT3847_10981C.1.pep
LKKEKGVNDDQSSVGLSDLKTEYALLYLSIRILNFFLSIIISTLLVFLD

SEQ ID NO: 153707 - protein, 120 aa, Glycine max
  Clone ID: PAT_MRT3847_109820C.1.pep
KPLHDLDRIAATHNLARYITSSLICFPITSSKMYLHSVVILVRHGPKRRRRSKPHCPHQRQIRIHRRSIHSRRNRTHNGGIIYFLHHHAILMLLVLLIRQNPMLHLRMHMIIITIQKTMP

SEQ ID NO: 153708 - protein, 56 aa, Glycine max
  Clone ID: PAT_MRT3847_109821C.1.pep
PFCQDFTCFSLFIRTPPFPFVSVAKRPNHLPHRCSHIVNAYFGGEIKVNLDLLCGR

SEQ ID NO: 153709 - protein, 197 aa, Glycine max
  Clone ID: PAT_MRT3847_109822C.1.pep
MAVGSKTRNMLEGLVKEGSFKWLLGKKSYFYEEFEEMENSPSAGKNFIRELSPVANLVVRRCSKILRTSSSDLQESFNQEASDSMKNSSRYARNLLEYCCFKALFLTTQMTGHLFDKTFRRTTYDMIYGMVLAWADREPDTNVDDNIAEDIAVGLEAAPSIPIIANVIIRENLFEGLSSSTDGRLQFPIYDKDLTGL

SEQ ID NO: 153710 - protein, 68 aa, Glycine max
  Clone ID: PAT_MRT3847_109823C.1.pep
MAVASKTRNMLEGLVKEGSLKWLLGKKSYFGEEFEEMENSPSAGKNFIRELSPVANLVVRRCSKSMKT

SEQ ID NO: 153711 - protein, 43 aa, Glycine max
  Clone ID: PAT_MRT3847_109824C.1.pep
GPVCFFQNLSASSRHFLCTSLMLSSGSRWVERTFQLQNGPPLC

SEQ ID NO: 153712 - protein, 278 aa, Glycine max
  Clone ID: PAT_MRT3847_109825C.1.pep
MAGAGRGYGDANQKVDYVFKVVLIGDSAVGKSQILARFARNEFSLDSKATIGVEFQTRTLVIQHKSIKAQIWDTAGQERCYVLFQIPNDIQKSYLCHFNCIFCIYVMENHMVGFIRNYSCLEVSYLLNNVTVGYRAVTSAYYRGAVGAMLVYDITKRQSFDHIPRWLEELRNHADKNIVIILIGNKSDLENQRQVPTEDAKEFAEKEGLFFLETSALEATNVETAFMTVLTEIFNIVNKKNLAAGDNQGNGNAASLSGKQIIVPGTAQEIPKRSMCCQ

SEQ ID NO: 153713 - protein, 146 aa, Glycine max
  Clone ID: PAT_MRT3847_109826C.1.pep
NRYRAVTSAYYRGAVGAMLVYDITKRQTFDHIPRWLEELRNHADKNIVIILTGNKCDLENQRDVPTEDAKEFAEKEGLFFLETSALEATNVETAFITAARRRQKGNKNNLAAGDNQGNDNSASLSGKKVIVPGPAQEIPKRSMCCQ

SEQ ID NO: 153714 - protein, 54 aa, Glycine max
  Clone ID: PAT_MRT3847_109827C.1.pep
NSANQTKPTKINSTSTKVKVFSSPTLGKTNIDPPKKVPNFIQIDQNFPPPTHQS

SEQ ID NO: 153715 - protein, 232 aa, Glycine max
  unsure (1)..(232): unsure at all Xaa locations
  Clone ID: PAT_MRT3847_109828C.1.pep
MASGRSYGDANQKVDYVFKVVLIGDSAVGKSQILARFARNEFSLDSKATIGVEFQTRTLVIQHKSIKAQIWDTAGQERXRYRAVTSAYXQGCCGAMLVYDITKXRQTFDHIXPRWLEELRNHADKXNIVIILTGNKCDLELRRDRHVPTEDAKEFAEKEGLFFLETSALEATNVETAFITVLTEIYNIVNKKNLAAGENQGNGNSASLSGKKIIVPGPAQEIPKRNMCCQSS

SEQ ID NO: 153716 - protein, 181 aa, Glycine max
  Clone ID: PAT_MRT3847_109829C.1.pep
MAGAGGGYGDANQRIDYVFKVVLIGDSAVGKSQILARFARNEFSLDSKSTIGVEFQTRTLVIDHKTVKAQIWDTAGQERYRAVTSAYYRGAVGAMLVYDITKRQTFDHIPRWLEELRNHADKNIVIILTGNKCDLENQRDVPTEDAKEFAEKEGLFFLEASALEATNVETAFITVLTEIYN

SEQ ID NO: 153717 - protein, 56 aa, Glycine max
  Clone ID: PAT_MRT3847_10982C.1.pep
RIQIATAQHHTFMPSKVKALKPNSEFKLASFFPPAEVHVCRHYHVRIQYSIKPIMG

SEQ ID NO: 153718 - protein, 70 aa, Glycine max
  Clone ID: PAT_MRT3847_109830C.1.pep
SFHLSASLCDFPFLVLAPISLPTASLIEMPLGRYPCWSSEPLRFVPGFILWLLPRVGTIKVSKSVLVQEK

SEQ ID NO: 153719 - protein, 109 aa, Glycine max
  unsure (1)..(109): unsure at all Xaa locations
  Clone ID: PAT_MRT3847_109831C.1.pep
VHAPVSEGRPKRPVRWRSGPAWPIQCTENRVLGKASPYISYSKFNWERRLPCPQCYCTGRVHTPTGCVXYMRGNGSMXGPGKGETLQGRPXAEHMNEPQHSLREADLPA

SEQ ID NO: 153720 - protein, 51 aa, Glycine max
  Clone ID: PAT_MRT3847_109832C.1.pep
CWIISHLLYDYGRDFLKKPPQQNFGHIKGGKNLILSWGFFLLKQKTLPFFF

SEQ ID NO: 153721 - protein, 126 aa, Glycine max
  unsure (1)..(126): unsure at all Xaa locations
  Clone ID: PAT_MRT3847_109833C.1.pep
PGSKGKGVFQFVNKNGGNVDGYSPIFDPKGWFPTGYVFPGGKTGLAIWGGTXLGFLKGGALFVYNPKGLGQKTLQNDVLGITKAPGLFKKKKLFPKYFGGNVPCVVKKGGGELVMVLHSDDTPAIL

SEQ ID NO: 153722 - protein, 261 aa, Glycine max
  unsure (1)..(261): unsure at all Xaa locations
  Clone ID: PAT_MRT3847_109834C.1.pep
MEMKNEDQITQQAQRPKYDCLLFDLDDTLYPLNSGLANAIDKNIKDYMVEKLGAEPSKTGELVNLLYSNYGTTIAGLRAIGYDIDYEEYYSFVHGKLPYENLKPDPVLRNLLLSLPYRKLIFTNSDKVHTIKALERLGLEDCFEGMICFETLNPIQKSTVFYYEADIKFEGSKSINPTPKNGVECSEIFDIIEHFAQPEPSAVLPETPIICKPSEHAIKLAXKMEPLNPQRTLKIEKTRPPTKKKERERRSPREFPQLQMM

SEQ ID NO: 153723 - protein, 139 aa, Glycine max
  Clone ID: PAT_MRT3847_109835C.1.pep
MGKNDGKKQQHLLLGGVAAGGSGGRTNINGFIPSFHTLSGYLKIVSSGASTVARSAAASFASSILDKDDDADRDRVIWAGFDTLEGGHGEVMRQVLLLGYWSGFQVWDVDDSNNVRDLVSRQDGPVSFMQMVPTPIVSK

SEQ ID NO: 153724 - protein, 124 aa, Glycine max
  unsure (1)..(124): unsure at all Xaa locations
  Clone ID: PAT_MRT3847_109836C.1.pep
MASPNAETMAGKGEGPAIGINLGTTYSCVGVWHHVRVEMIRNDHGNRTTPYYVGCTDTERLXGDADENQVGMNPINTVFDAKMLIXGQEYSDSSVHSDIKLRPDKVIDGAGDKPLIVVNYKGEE

SEQ ID NO: 153725 - protein, 86 aa, Glycine max
  Clone ID: PAT_MRT3847_109837C.1.pep
IFWEALPQENPKFSLGPKKKNFFFWLGHWSLSLLKTKTPPPGGKSLKGLIKRLAQRTPPVFLPKFWGKLNFYFWGVGAGPFNLYPP

SEQ ID NO: 153726 - protein, 53 aa, Glycine max
  unsure (1)..(53): unsure at all Xaa locations
  Clone ID: PAT_MRT3847_109838C.1.pep
XNXXXFLVVPIQRRXRIGXEIGVNYIXPPFXLQRQRSEGXXKSLKTTXXKSRX

SEQ ID NO: 153727 - protein, 43 aa, Glycine max
  Clone ID: PAT_MRT3847_109839C.1.pep
RFSYTLPLLKECVIALCSSAPAPKMYRAPRSSQTVVCKRIYQA

SEQ ID NO: 153728 - protein, 101 aa, Glycine max
  Clone ID: PAT_MRT3847_10983C.1.pep
RTRGLGFIWAKNLGPNTSTYGDMIFLDLPSIHIYYVTLDSDLDLQGAMSATASFCVTASADQVLLLFRSLVRAARQVPRCHIREDHKRTTIGYFRHNATLF

SEQ ID NO: 153729 - protein, 60 aa, Glycine max
  Clone ID: PAT_MRT3847_109840C.1.pep
SAPPFFYFYLFHSKYSLVQCNFNSMPKTRRSSYTRGYFTIKFPLVLNQVSEKNKFVLFIY

SEQ ID NO: 153730 - protein, 131 aa, Glycine max
  Clone ID: PAT_MRT3847_109841C.1.pep
SIVSRNLNALAVHLLPRDCEYTKAAQRRRLVAHPSVDSWCGTIKDSTDRTSHHQSTLNDVRNALCRYTLRTVGVVFSHKETRYLSLSRTSGNIGFFPLLIVTMASSMHRTLLRWIPSRARVSATRDLEHSS

SEQ ID NO: 153731 - protein, 68 aa, Glycine max
  Clone ID: PAT_MRT3847_109842C.1.pep
TDSGAPVACQDKPCDQYKLASAVLFLRPNSALLCISCDSDIHCSNKLMYRHDPVSMCETCEPAPIDVT

SEQ ID NO: 153732 - protein, 70 aa, Glycine max
  Clone ID: PAT_MRT3847_109843C.1.pep
TTTTYRDQHEYGSNDIIRNYWVQPFMDKEEYMLQIALNHLTITEIDWQITPRRNYKLEDTIHYNGEQFVA

SEQ ID NO: 153733 - protein, 35 aa, Glycine max
  Clone ID: PAT_MRT3847_109844C.1.pep
RKDISKWPLIHQRITKHIGIIYVAIIQQLNHDVIL

SEQ ID NO: 153734 - protein, 70 aa, Glycine max
  Clone ID: PAT_MRT3847_109845C.1.pep
ALLYVYHIFLFIKGLIDTFCALQTLYSYSEGLKSGFFGQRTKGFCFFTSTSLSLNYHGILLLILGQVAYL

SEQ ID NO: 153735 - protein, 81 aa, Glycine max
  Clone ID: PAT_MRT3847_109846C.1.pep
ITTSIYTTTYLYRTIYPIPYLSTPIIHNNPTSMLHIYSYLHLFTSTTIIFSIHIIHLSPLHTPLKQHYPLYLPLLSYLLPI

SEQ ID NO: 153736 - protein, 76 aa, Glycine max
  unsure (1)..(76): unsure at all Xaa locations
  Clone ID: PAT_MRT3847_109847C.1.pep
AWKSSTAIEYGATLKKKAERIRTSDTFHRPRTYIKDRYATYPCINSPTMNKREHYHIPXYHATTESVMKNIEDKST

SEQ ID NO: 153737 - protein, 48 aa, Glycine max
  Clone ID: PAT_MRT3847_109848C.1.pep
HAYEKKKILIKKKKKKKKEGKNKKKKKKKKIKKKKKKSNARLKHHKLK

SEQ ID NO: 153738 - protein, 86 aa, Glycine max
  Clone ID: PAT_MRT3847_109849C.1.pep
NPNTWVIYHFFFQKWYENNNEETKHAKLQKSCYKKKNLKTEKREICVWGEPQQKQRKIGREESLGEIFFFRKNRLWDTIFLNSFTI

SEQ ID NO: 153739 - protein, 107 aa, Glycine max
  Clone ID: PAT_MRT3847_10984C.1.pep
LGERTRDPFIKKRLGKGEKEPKKINQRLPSKTGLKGKALIKMKNLTSRGGPKQTALFKKTGRQKGAGQSRKKPPPQENLLAKQNPPTKVLKQTGKNWRGLAKKNGAP

SEQ ID NO: 153740 - protein, 647 aa, Glycine max
  unsure (1)..(647): unsure at all Xaa locations
  Clone ID: PAT_MRT3847_109850C.1.pep
MLERFSKIEMVTMRHQLNFKKNKVDDYPIKKQNPYAQNNLAALLANATNNEGLPEESISLSKSLIGGSMNACKMRILTFCVPERVVQGSVVTIIPRMRTRMIIFEKSDGTVAMHCGEIEEVDYVAAEDHLLTLPNTHSADLLVQQFCSLMVREGFVKEDDRIQLKPNRVNLPLGNQSTTPNNAVVEMQQYGEAIPGQSSNEVAKPTSGSNAPVNLSQNLVTNPRMLPPGNPQALQMSQGLLSGVSMASRPQQMDSQQAIQQQQQQQQQQQQQQQLQQNQHTLIQQQNPQFQRSPMMLGTNQLSHLNPVGQNSNMPLGNHMLNRPSALQLQMFQQQQQQQQQQQQQPQMQRKMMMGLGQAVGMGNLRYFLVGHLTVLXHTLXVGVRGIYVAGISQPMTSIAGMGNMGQNPMNLSQTGNITXLKEDDRGPGSINAAAICLTFYQTLPNNAXNRQGMLWSSQSNIASISRARQIHPGGTPSLSMLGRANTMQRPIGPMGPPKIMAGMNLYMSQQQQQQHQQPQPQQQQQQHQQQLQLQQHMQQQLQQQQQQETTSQLQAVVSPPQVGSPSMGIPPMNQQAQQQASPQQMSQRTPMSPQMSSGAIHAMNAGNPEACPASPQLSSQTLGSVSSITNSPMDMQGVNKSNSNAQ

SEQ ID NO: 153741 - protein, 365 aa, Glycine max
  unsure (1)..(365): unsure at all Xaa locations
  Clone ID: PAT_MRT3847_109851C.1.pep
RTRMIMFEKSDGTVAMHCGVIEEVDYVAAEDHLLTLPNTHSADLLAQQFCSLMVREGYVKEDDRIQLKPNRVNLPLGNQSTTPNNAVVEMQQYGEVIPGQSSNEVAKPASGSNAPINLSQNLLTNPRMLPPGSPQPLQMSQGLLSGVSMASRPQQMDSQQAVQQQQQQQQQQQQQQQQQQQQLQQNQHTLIQQQNPQFQRSPMMLGTNHLSHLNPVGQNSNMPLGNHMLNKPSALQMQMFQQQQQQPQMQRKMMMGLGQAVGMGNLRNNLDGLAPMGNPMGMGGARGIXASGISSPMTSIAGMEDMGHSPMNLSQTSXITNCISQQFRYGSLYAAASADLISRLRLVHSNRQSMLGSPQSNLASI

SEQ ID NO: 153742 - protein, 49 aa, Glycine max
  Clone ID: PAT_MRT3847_109852C.1.pep
GPEPASCRPFPYNAAYCNMSVLIGTAIACTKSLSSHISVNVQPRIRRLL

SEQ ID NO: 153743 - protein, 43 aa, Glycine max
  Clone ID: PAT_MRT3847_109853C.1.pep
KAWIKKKVGLWNIKRHPRVSCYDRYFGFFKTDCDSFSHFLCRL

SEQ ID NO: 153744 - protein, 81 aa, Glycine max
  unsure (1)..(81): unsure at all Xaa locations
  Clone ID: PAT_MRT3847_109854C.1.pep
XSXXHASWPLSITVYXXYTXKLSTKDXFXXXGFGREKNERKVLIXXSVVAFXGLPPXETSFGAEAXRIKVXQXHFVTPNXX

SEQ ID NO: 153745 - protein, 92 aa, Glycine max
  unsure (1)..(92): unsure at all Xaa locations
  Clone ID: PAT_MRT3847_109855C.1.pep
SLHDFLNSLYXLXXXTXHXXXKTXPQVLXXTSHTQXKXXAFLFKXLNSSXTXRSXHXXXVWMXPXSGXHQXMSSESLENMXACSKAQQERKP

SEQ ID NO: 153746 - protein, 59 aa, Glycine max
  Clone ID: PAT_MRT3847_109856C.1.pep
TFSGVWLTETHRIHRHIVKLFIHTKGLPFLYVFLQSLSFVTGRSTLWDNRKSVALRYYK

SEQ ID NO: 153747 - protein, 88 aa, Glycine max
  Clone ID: PAT_MRT3847_109857C.1.pep
GVVTTLSLSFLSKQNFNGMDVIHLISTAHTNSHPHRTFHIPPRVKQNSFLRLSSFPTGKPAAFRDTLSLLSSLISIKIKILLSPLPIH

SEQ ID NO: 153748 - protein, 341 aa, Glycine max
  Clone ID: PAT_MRT3847_109858C.1.pep
GSFLCFLTFSPPMAKKRTTPQKKKTQTIIPMPKHSQQPRSSPPKRRTDFSFFTRSPSSFSNPTSGSSPGSSSGEVRLSNVASSSLQGRKMVMKQFSEDIMVQCSIYQEGRPVCSSESFDTPVVEVDSAVQDEILNLGGHRAACNEKIDISKMSESTRLESYVCDSSSLAATPGNVVWARTDGQVWWPAEILEETSALSNPGSGGHVLVQFYGNLPSAWIDPMTDISTFEDSFEDKSNNPSEDFQQALKKALQRKAQLSSCQKLTLDRSAHSDMQERSSDKCTSTSTSKTIDDVQEKRRGKRERKPKVHFDEVTYPMKSERKVRRLKIMRYLGLAPPVGSPF

SEQ ID NO: 153749 - protein, 123 aa, Glycine max
  Clone ID: PAT_MRT3847_109859C.1.pep
MARSYFKQEHDLEKRRAEAARIREKYPDRIPVIVEKAERSDIPSIDKKKYLVPADLTVGQFVYVIRKRIKLSAEKAIFIFVDNVLPPTGAIMSAIYDEKKDEDGFLYVTYSGENTFGDLISIQ

SEQ ID NO: 153750 - protein, 44 aa, Glycine max
  Clone ID: PAT_MRT3847_10985C.1.pep
MRTLVESQNHSKPSKQHQISDATCYDLYSIIRNVRIFYILYTRS

SEQ ID NO: 153751 - protein, 82 aa, Glycine max
  unsure (1)..(82): unsure at all Xaa locations
  Clone ID: PAT_MRT3847_109860C.1.pep
HSDNADRAASFRYHPTNTDAGGNRDHIYTRHHTCIDYIIDTNIQISSIIYDSDTTRHHEATLGYQGDTEIQHXSTGVYGIGS

SEQ ID NO: 153752 - protein, 122 aa, Glycine max
  Clone ID: PAT_MRT3847_109861C.1.pep
MTKSYFKQEHDLEKRRAEAARIREKYPDRIPVIVEKAERSDIPSIDKKKYLVPADLTVGQFVYVIRKRIKLSAEKAIFIFVDNVLPPTGAIMSAIYDEKKDEDGFLYVTYSGENTFGDLTSH

SEQ ID NO: 153753 - protein, 52 aa, Glycine max
  Clone ID: PAT_MRT3847_109862C.1.pep
IRSCDKASKLILFIMYIIKAKVKMIRCIPSRVKMVYKMVTSISPKTEGKYQF

SEQ ID NO: 153754 - protein, 83 aa, Glycine max
  Clone ID: PAT_MRT3847_109863C.1.pep
KVPHEDSWHSAGTRQRLITGPNSSQSASTPFATIFIHIVIGALPLGSPFHFTLASVRSIGNICYSQCCHQYVNLYTMRVAPLD

SEQ ID NO: 153755 - protein, 87 aa, Glycine max
  unsure (1)..(87): unsure at all Xaa locations
  Clone ID: PAT_MRT3847_109864C.1.pep
FQVDPSPGCLQLXKKLHRGFKMQNGSSQLKYLDDEEKWVMLVNDSDLQECTEILDAIGTRCVKFLVRDVPCVLSSHGSNSCFLSDSS

SEQ ID NO: 153756 - protein, 44 aa, Glycine max
  Clone ID: PAT_MRT3847_109865C.1.pep
PPYGWDKTTEGACITELTAILTPGPPILVIFHEIRPLSVRSITL

SEQ ID NO: 153757 - protein, 63 aa, Glycine max
  Clone ID: PAT_MRT3847_109866C.1.pep
IEFLHGSLKRSRKFQPEDRLFSLSSVTSPAAEDLAAGRDGEFIYYGPGRSIFGGILVNIHGIL

SEQ ID NO: 153758 - protein, 101 aa, Glycine max
  Clone ID: PAT_MRT3847_109867C.1.pep
MGRRPARCYRYCKGMPYIKSRYCRGVPDAKIRIFDLGRKRATADEFPFCAHLVSLENEQLSSEALEAGRISCNKYITTFGGKDSLHMRARVHPYFFFFPPP

SEQ ID NO: 153759 - protein, 92 aa, Glycine max
  unsure (1)..(92): unsure at all Xaa locations
  Clone ID: PAT_MRT3847_109868C.1.pep
XCGSSMLAXSRHALXGRLLSARSDXXTHXHRSXVRXPIXXANXXCRQPRRXAXAGPVKGAREXPCPKXHPPCXSXXXRAAXXXPXXPSRGLL

SEQ ID NO: 153760 - protein, 94 aa, Glycine max
  Clone ID: PAT_MRT3847_109869C.1.pep
FLSHFEYKVRSTLENFSIGKSSIFLIRKALKTTSGLYPNIPYISLISSLDILLLLKNTSTLSISASFAGCGKCSNLMLVLSPNQVIKIQAVACR

SEQ ID NO: 153761 - protein, 39 aa, Glycine max
  Clone ID: PAT_MRT3847_10986C.1.pep
GGRVRMAVVVKGKSINPRALSCGVAKRCLVGMPVICRLV

SEQ ID NO: 153762 - protein, 66 aa, Glycine max
  unsure (1)..(66): unsure at all Xaa locations
  Clone ID: PAT_MRT3847_109870C.1.pep
DXRPPLXKYXEXQXKNVRGDGTXDXKEWXXIYDYDXYNDLXDPHXGEKYATXXXWRLXLTXXRRXD

SEQ ID NO: 153763 - protein, 426 aa, Glycine max
  Clone ID: PAT_MRT3847_109871C.1.pep
DFSLNNGFNFSKHAFQCRDKLSKDNCILEYSLPLRTRLLKVLLACMEVSVLSEAFETNWINDVRKHWGIKLSKSSSVEELLQILTLFERSLRRDFLSLNFSTTDELLGSSSMSERSVQASTDPESVAVLPWVPLTTAALSLRLFEIDSSISYVKLERLEPCEEKEAREYIKLPSRYTHMKSNREVEPAEFVHDEFTKDKSVPKKIVRNGNKRGRGTNEQGRGKKLAKRVCNSKRDGGRKNAKVTDNLSHRLKQQARGTQGQGAGRGRRTIRKRRMGKRAVEDLLLGHTTASHSYKIDREPVRNLDEEWDGEKASPMTPVHIGVAADNSNSAEEVESDDDNAQAVEYDQGNWEVGFNGVPPNRWSRGLVGMSDEDVDAFEELNDNGIEENEEEDSEADVMSEGSDGIPNTVVNVGGSDSALSEDSSD

SEQ ID NO: 153764 - protein, 122 aa, Glycine max
  Clone ID: PAT_MRT3847_109872C.1.pep
MQSSPGRSQRGHPREDGLMTDQTEDDRDDDDFDDGYEMYHVQGTLREWVTRDEVRRFIARKFKDFLLTYVNPKNEHRDKEYVWLINEMVSASKCSLEIDYKQFIYVHPNIAIWLADAPQSVL

SEQ ID NO: 153765 - protein, 50 aa, Glycine max
  Clone ID: PAT_MRT3847_109873C.1.pep
TNTLQTNSRLGGAKFKLPKAEYLQAYQNRWRSLNGTFYRLKKFVLFSNRL

SEQ ID NO: 153766 - protein, 63 aa, Glycine max
  Clone ID: PAT_MRT3847_109874C.1.pep
QVPFLGGSHKIGFEDRCTKPLDLKFTKVSNSLLSINLRKKEDKVKKKHFELAQLAQHNGRTRG

SEQ ID NO: 153767 - protein, 127 aa, Glycine max
  Clone ID: PAT_MRT3847_109875C.1.pep
GPPPPNNKNFEGAEKKKTNPIKGPHKGTPTAPPDFFYSEKKGFTGAPKTPGKKKKNWPWVGQNPMPPQLGEPLNLEGTLPLQKPRRARTNRALRVNPKESPLKKLHTICFVTGGTTKPKKFLTPLQK

SEQ ID NO: 153768 - protein, 70 aa, Glycine max
  Clone ID: PAT_MRT3847_109876C.1.pep
LQPELSIIGSNQYLATSIQDNWLIAKCINPYNPAGDGALDIPTSPSLLGALHEGSIGSTSRAIASADQLT

SEQ ID NO: 153769 - protein, 548 aa, Glycine max
  unsure (1)..(548): unsure at all Xaa locations
  Clone ID: PAT_MRT3847_109877C.1.pep
MGNQSSSNKIETLPIDTTFKLPANIPVWPQGGGFATGTINIGGLKLFQISTFNKVWKTLEGGPGDAGAAFFEPAGIPEGFFTLGHYSQPNNKPLFGSILVAKDETSSGDNNGALKKPIDYTLVWSSKSQKIKQDKDGYIWLPTAPDGYKTLGHVVTTTPEKPSLDKIRCVRSDLTDQCERSSWIWGPDKSSDEKGFNVYEVRPSNRGTQAPGVLVGTFFAHNGEIPSPLPIACLKNTNMNFSFSMPNLPQVKALVQAYSPFMYLHPDEEFQPASTKWYFTNGALLVKKGEESKPVPIDPTGSNLPQGGNNDGEYWLDLPSDKANKERVKKGDFKSCQAYVHAKPMFGGTXKDLVMGVFYPFNGPGTAKVGLIDIPLGKIGEHIGDWEHVTLRVSNFDGELKKVYLSQHSNGQWVEASQLEFQSGNKSVCYSSLNGHAIYPKAGLVMQGLDGIGIKNETKKSEKVIDMGVGFEVVSGEYLGSAIVEPPWLNFLRQWGPKITYDIAKELDNLAKVFPALEALEDGLPNELLGQEGPTGPKLKRNWQGDEV

SEQ ID NO: 153770 - protein, 95 aa, Glycine max
  Clone ID: PAT_MRT3847_109878C.1.pep
MGNQSSSNKIETLPIDTTFKLPANIPVWPQGGGFATGAINIGGLKLFQISTFNKVWKTLEGGPGDAGAAFFEPARIPEGFFTLGHYSQPNHKAFF

SEQ ID NO: 153771 - protein, 102 aa, Glycine max
  Clone ID: PAT_MRT3847_109879C.1.pep
LRVRGRVGGRVGKKSEKVIDMGVGFEVVSGEYLGSAIVEPPWLNFLRQWGPKITYDIAKELDNLAKVFPALEALEDGLPNELLGQEGPTGPKLKRNWQGDEV

SEQ ID NO: 153772 - protein, 83 aa, Glycine max
  unsure (1)..(83): unsure at all Xaa locations
  Clone ID: PAT_MRT3847_10987C.1.pep
GVRAASSSPEWDDANIAPFLLESPIGQILSQTLEDHPHLEPAAVYQQLHQHQTDRDAHLQNQQQXASPTWLVFYRSIAEVMAN

SEQ ID NO: 153773 - protein, 58 aa, Glycine max
  Clone ID: PAT_MRT3847_109880C.1.pep
LQFQGRENLLNLNQKERTEKANEPEDLLSPCDSDSCREHKKLTSDNTRMSDHCLKSSK

SEQ ID NO: 153774 - protein, 40 aa, Glycine max
  Clone ID: PAT_MRT3847_109881C.1.pep
FGKMSQRFLFELDRDSSGTPCYHLSVKAKTTATSSMFLMC

SEQ ID NO: 153775 - protein, 157 aa, Glycine max
  unsure (1)..(157): unsure at all Xaa locations
  Clone ID: PAT_MRT3847_109882C.1.pep
PDTAFFFPSTGISVMQRAAGSSIEPSITHLTAKLALGGRTRVTQHMLKNXVXNNASYKACHMARKNVDADHRITHDLHNITANLSGLGTAREQPSVDIXCFTRNMNLLTGRRGAAILYAYMLLRWGXLTTETPDLSDSNSKEQPREGTFRNMHERLC

SEQ ID NO: 153776 - protein, 122 aa, Glycine max
  unsure (1)..(122): unsure at all Xaa locations
  Clone ID: PAT_MRT3847_109883C.1.pep
VNAITGASVPDRGLWGLSRGPLPLLSXCGPNYSGVWYYRVPSYKSYYFCGTIKIAPVSQPKSIQTTPLVSSPHRPSIYYVNSTGISVGREQVPCPSECLVLNLNTGAETIIVWGAVITRFEE

SEQ ID NO: 153777 - protein, 90 aa, Glycine max
  Clone ID: PAT_MRT3847_109884C.1.pep
LFVPKAKKPKFWGVPLVPWIPSISIFINIFLLGSIDKDSFIRFGFWTVFLLVNYVFFGLHASYDTAKEFEAQRSMENSINKMEDGEMSST

SEQ ID NO: 153778 - protein, 77 aa, Glycine max
  Clone ID: PAT_MRT3847_109885C.1.pep
MQTAFRGRKGVSVTTRGPVTPWGSSVSSAPAPRGSTPSFPGKIREVSPSSCTTHSSVSTHGSCRANTSIITNNNVIN

SEQ ID NO: 153779 - protein, 74 aa, Glycine max
  Clone ID: PAT_MRT3847_109886C.1.pep
MEQMCNEAERDSILEFNLGLVMPFDFLTRKAHCGLERVPNAEDTMIEGIDKSVAYHEFGSESEETLRFVSFGNE

SEQ ID NO: 153780 - protein, 250 aa, Glycine max
  Clone ID: PAT_MRT3847_109887C.1.pep
MDRAQLLLLGVPLFLFCSDLFSLFTHHPPPPPHHHHHHHHPHPPHHHHHPPHHHHHPPHHHHHHPPHHHHQPVTIDFPPEKPTNNIATPGLGNTVHINFCSSCSYKGTAVTMKNMLEIAFPGTEVILANYPPTLPKRLLSKLVPVVQIGVIGVVVAGEHIFPMLGFVAPPPWYYNLRANRFGTIASTWLLGNALQSFLQSSGAFEVYFNGELVFSKLKEGRFPGEIELKDLITKKMTNSIRVNGVSELTS

SEQ ID NO: 153781 - protein, 71 aa, Glycine max
  Clone ID: PAT_MRT3847_109888C.1.pep
MSAYCGKYKDELIKNAAYIGTPGKGILAADESTGTIGKRLSSINVDNVEENRRALRELLFCCPGALQYISG

SEQ ID NO: 153782 - protein, 54 aa, Glycine max
  Clone ID: PAT_MRT3847_109889C.1.pep
VGFDYGPSILQRINGEKVVGNNFRVIPSNQAVLIRRIKMWPGLVLIRKMVSKPP

SEQ ID NO: 153783 - protein, 84 aa, Glycine max
  Clone ID: PAT_MRT3847_10988C.1.pep
NQTNFSPPPLKKKNPPGAQKKNPPPPGNRSQISRLTPPPLFKFQTPPPPLKFFLKKKKTFGFLKKKKKKKKKKKKKKKKKKKNK

SEQ ID NO: 153784 - protein, 109 aa, Glycine max
  Clone ID: PAT_MRT3847_109890C.1.pep
PTPSSGVQRKFWRESIPRLLRRNDDLANGKDERTVLEERENYVVVVAASFLTDLITAAAVKKAYRKATLCIHPDKVQQKGANLQQKYVAEKVFDLLKEAWNKFNSEELF

SEQ ID NO: 153785 - protein, 43 aa, Glycine max
  Clone ID: PAT_MRT3847_109891C.1.pep
LYSLSDIYVLRITLMIFGCKDACFKQFFFFFTKLMKYCFFIFL

SEQ ID NO: 153786 - protein, 65 aa, Glycine max
  Clone ID: PAT_MRT3847_109892C.1.pep
MKNKKVEASGVSLSEAYALSEESAKHARAQRTINSPSESFVSSGSQRAQLAKPKFTNSHLVRKWC

SEQ ID NO: 153787 - protein, 195 aa, Glycine max
  Clone ID: PAT_MRT3847_109893C.1.pep
AVERTVFYRERAAGMYSALPYALAQVIIELPHILVQALMYGIIVYAMMGFDWTTSKFLWYLFFMYFTFLYYTFYGMMTMAITPNAHVAAILSSAFYAIWSLFSGFVIPLSRIPIWWKWYYWICPVAWTLNGLVASQYGDNRDKLENGQRVEEFVKSYFGFEHDFLGVVASVVAGFSLLFAFIFAFGIKVLNFQKR

SEQ ID NO: 153788 - protein, 38 aa, Glycine max
  Clone ID: PAT_MRT3847_109894C.1.pep
PGQRWRVRTRSVVCRIRLIRVRRSPPELCVMRVMVVKR

SEQ ID NO: 153789 - protein, 35 aa, Glycine max
  Clone ID: PAT_MRT3847_109895C.1.pep
GIYFSLKCSLFLTIFSQNLSIFFFKNIIISYSLIP

SEQ ID NO: 153790 - protein, 57 aa, Glycine max
  Clone ID: PAT_MRT3847_109896C.1.pep
RPFLAKTIFKCSYLRWFSFENHRKMLNTPFNKSYRYLILKTFFCQNCLKRKSFLKWF

SEQ ID NO: 153791 - protein, 93 aa, Glycine max
  Clone ID: PAT_MRT3847_109897C.1.pep
AKADISFGGKYQTTKHSLPAKTAIIQHTTQIKIEKRLKFTAITKFLAPTAFAHHGHCGKILAIYKNTIFPNFHGTLPNSHYPKENWPCWHPFF

SEQ ID NO: 153792 - protein, 80 aa, Glycine max
  Clone ID: PAT_MRT3847_109898C.1.pep
CKSHKSMHNRRGCLSQKRSVYYVSRHEPVCNHQHRNLTTKVPLIENFHEVSVVFYQYPRRQVYQWSNPEYGLTSNGMKSS

SEQ ID NO: 153793 - protein, 47 aa, Glycine max
  Clone ID: PAT_MRT3847_109899C.1.pep
GGPIYQKGLAKMRALGEEIGIPIEVYGPRATMTGVCKQAIQCITAAA

SEQ ID NO: 153794 - protein, 53 aa, Glycine max
  Clone ID: PAT_MRT3847_10989C.1.pep
SRDLICVTTLLQVKNILSNSNSTNPAIEPKLFHSRSNIRFTFLWALPFPCYPH

SEQ ID NO: 153795 - protein, 94 aa, Glycine max
  Clone ID: PAT_MRT3847_1098C.1.pep
SHGRGVNVHIAYGACITIQFVANVIIPGLRLRDCYLAPLAPVPSAPSQCGGTTLADGDGISIFGSSHILIDHNLLSTCADGLVDAVRGSTAIRG

SEQ ID NO: 153796 - protein, 79 aa, Glycine max
  unsure (1)..(79): unsure at all Xaa locations
  Clone ID: PAT_MRT3847_109900C.1.pep
RFLVTSFLFVEFVTKYQFQVDRFFFIAEXVLFFPEFFSIMVRHHSIVXVYTVIPFNPTNLVKGFVPFVKKKKKILYFCG

SEQ ID NO: 153797 - protein, 64 aa, Glycine max
  Clone ID: PAT_MRT3847_109901C.1.pep
RILNILCPLLINRFMLIYSHGKAWFTLYLRTVNAFYVPRLPNISYSFSFLPPPPPKKRRRTSYS

SEQ ID NO: 153798 - protein, 67 aa, Glycine max
  Clone ID: PAT_MRT3847_109902C.1.pep
IIHLFVFIFTKKFFFSTLKEGYVGGTEGLATDYTIRLRYHVQRLSSHHIHLLLTVSRWPKFKKEDTV

SEQ ID NO: 153799 - protein, 145 aa, Glycine max
  Clone ID: PAT_MRT3847_109903C.1.pep
MSLFLKALPLMAFRTRPSLVFLRRVSNTIPLSLSRTRTVYSASASTQPPPSACASETLTSSAKPPLPLSEPLEWVNRTAFCGELSSNDVGKSVQLCGWVALHRVHGGLTFLNLRDHTGIVQVTTLPNEFPDAHSAINDLRLEYVV

SEQ ID NO: 153800 - protein, 62 aa, Glycine max
  Clone ID: PAT_MRT3847_109904C.1.pep
TMSESILNRLVLVLRKNLIIRGDIIFGTKILGQATRKVVVIALRFLAIGSAKAKKFRIGFVL

SEQ ID NO: 153801 - protein, 75 aa, Glycine max
  Clone ID: PAT_MRT3847_109905C.1.pep
LPFWLINPPTPSNSIILFPLCSQHVLQPMGLTLELHRKMMLLLDLYFLLGPSWIFWSNLHLQAPLIVVRNIFFNP

SEQ ID NO: 153802 - protein, 48 aa, Glycine max
  Clone ID: PAT_MRT3847_109906C.1.pep
YALYCGTALNLNHARQLSTPSSLLSVNNKVICTVALQIFNQFFKQLVK

SEQ ID NO: 153803 - protein, 46 aa, Glycine max
  Clone ID: PAT_MRT3847_109907C.1.pep
SETGKWSKVTSQNFFPLPVYDHKMRKISKISPTTSHIWNIKADYAL

SEQ ID NO: 153804 - protein, 150 aa, Glycine max
  unsure (1)..(150): unsure at all Xaa locations
  Clone ID: PAT_MRT3847_109908C.1.pep
ALERECPGVVSCADILVLSATDGIVSLGGPHIPLKTGRRDGRRSKSDVVXHFLLYHNESISXSLLTHFGAMGIDTPGIVALLGAHIVGRTHCVKLVHRLYPKIDPSLNPDHFPHILKKCSDAISYPKAPQYMTNYPCVSLIVDINYYITI

SEQ ID NO: 153805 - protein, 58 aa, Glycine max
  Clone ID: PAT_MRT3847_109909C.1.pep
DMRLWCPCNTPPTWLYGSLPRDIGFDPLCLASDPESLIWNDQAELEHCTWAMRGAAAL

SEQ ID NO: 153806 - protein, 58 aa, Glycine max
  Clone ID: PAT_MRT3847_10990C.1.pep
IPAGRTHLDDPNTFSNWIHRMLKLVLVSFEYAGEAHAHIPPLEDADAYAEGIKIEEVD

SEQ ID NO: 153807 - protein, 71 aa, Glycine max
  Clone ID: PAT_MRT3847_109910C.1.pep
DISTLGQKNNGFYWMVSRDFFSLIRTWPSRGVLITLCPLFRSFCPRVILSKIFMCENCPLRLQINLITFEA

SEQ ID NO: 153808 - protein, 418 aa, Glycine max
  Clone ID: PAT_MRT3847_109911C.1.pep
MANGNTSHRFKLLLFLLTLHSSFAEIFFEERFEDGWKSRWVLSDWKRSEGKAGTFKHTAGKWSGDPDDKGLQTYNDAKHFAISAKIPELSNKDRTLVLQYSIRFEQDIECGGGYIKLLSGYVNQKKFGGDTPYSLMFGPDICGSQTKKLHLILSYQGQNYPIRKDLQCETDKLTHFYTFILRPDASYSILVDNRERDSGSMYTDWDILPPRKIKDVKAKKPADWDDREYIEDPNDVKPEGYDSIPAEIPDPKAKKPVEWDEEDDGLWKPPKIPNPAYKGPWKRKKIKNPNYKGKWKIPWIDNPEFEDDPDLYVLKPIKYVGIEVWQVKAGSVYDNILICDDPQYAKQIVDEFMANNREAEKEAFEEAEKERRAREEEEAQRAGEEGEKRRKEREHKYGNRRHRRRPDPRDMDDCHDEL

SEQ ID NO: 153809 - protein, 247 aa, Glycine max
  unsure (1)..(247): unsure at all Xaa locations
  Clone ID: PAT_MRT3847_109912C.1.pep
MANGNNISHFFKLLLFLLTFHSCLAEIFFQERFEDGWKSRWVLSDWKRSEGKAGTFKHTAGKWSGDPDDKGLQTYNDAKHFAISAKIPELSNKDRTLVVQYSIRFEQDIECGGGYIKLLSGYVNQKKFGGDTPYSLMFGPDLCGSQTKKLHLILSYQGQNYPIRKDLQCETDKLTHFYTFILRPDASYSILVDNRERDSGSMYMDWDILPPXKIKDVKAKKPSDWDDREYIEDPNDVKPEGYDSIPA

SEQ ID NO: 153810 - protein, 101 aa, Glycine max
  Clone ID: PAT_MRT3847_109913C.1.pep
KYVGIEVWQVKAGSVYDNILICDDPQYAKHGSSEFMANNREAEKEAFEEAEKERRAREEEEAQRAREEGERRRKERDHKYGNRRHRRRPDPRDMDDYHDEL

SEQ ID NO: 153811 - protein, 59 aa, Glycine max
  Clone ID: PAT_MRT3847_109914C.1.pep
RLLPWCCAIQQKVHHEHPAACKPHDCCNYLESIGLSLYIPGSRTSVTPRISSPASAHAW

SEQ ID NO: 153812 - protein, 88 aa, Glycine max
  Clone ID: PAT_MRT3847_109915C.1.pep
GWGHSSEQLFKLITPPGRNQGHSHIVQVIPSADSCFIKVARSNINKNQANVCGCRLPFIKMICLAQILAYNINVIVVLYAIRCMFTDY

SEQ ID NO: 153813 - protein, 86 aa, Glycine max
  unsure (1)..(86): unsure at all Xaa locations
  Clone ID: PAT_MRT3847_109916C.1.pep
MPDAHGLTWRTRDYFSQTFMKKGTIEHHTYLKTYHGRNSGNFKGSGPIQHGMPHKVYHXRTCRVWNVTKRAAWVGFITQVCHRIIR

SEQ ID NO: 153814 - protein, 79 aa, Glycine max
  unsure (1)..(79): unsure at all Xaa locations
  Clone ID: PAT_MRT3847_109917C.1.pep
EEEHEQKEDHEWHRKEEKHGGKGSEEEQDEREHPRPHDTQXKKVEKHEWQHKQEWHQGQVSEEDVEDLDEDEEQDSVSQ

SEQ ID NO: 153815 - protein, 82 aa, Glycine max
  Clone ID: PAT_MRT3847_109918C.1.pep
KTNGSCLVSIQGEEKKHCLGQAHSVRELRIIWRLTPDISGRGTHSHQLHFTYKLFWVYPLSYSLFLEKTFGKWVASFWEING

SEQ ID NO: 153816 - protein, 74 aa, Glycine max
  unsure (1)..(74): unsure at all Xaa locations
  Clone ID: PAT_MRT3847_109919C.1.pep
MGSTVLAAVVVLLSINILFISMVTSSSHYYPQPQSSYVTALSIRPICLDLSICLNIXRWSLGTVDDGCALSGGH

SEQ ID NO: 153817 - protein, 54 aa, Glycine max
  Clone ID: PAT_MRT3847_10991C.1.pep
LSSWLHKKSGRIFAEVMRLSHHHLVEELSSAYCVPPVSSFVRPIVNQKSCFLEW

SEQ ID NO: 153818 - protein, 100 aa, Glycine max
  Clone ID: PAT_MRT3847_109920C.1.pep
VDLESVAVHEIGHLLGLGHSSVEDAIMYPTITARTRKVELNEDDILGIQVLYGSNPNFTGTPATSSRQSDTSDGGVRHVGVTGAVLFTFLLFFFVFGLHV

SEQ ID NO: 153819 - protein, 230 aa, Glycine max
  Clone ID: PAT_MRT3847_109921C.1.pep
MMCRRTELYRELKQRITHLRHFCDTQQKHLQDLELLKCFKSEIQFELASNHFQNARSDSSLGDFVVDPNSPSSKDVVLRRKFDSGEEIAISAILGPPNYVKDLVFPRDAFVKVCVKKPALSSMLQFDCDVYEETDKGSDFDIYNAYYLRSPTCLSPSIYRGPLFRTLDDELQDALKEYLIAKGIGVSLTNFLLHYLHKREHEQYMNWLKKGEAAFVAKEGSLRESSELHS

SEQ ID NO: 153820 - protein, 108 aa, Glycine max
  unsure (1)..(108): unsure at all Xaa locations
  Clone ID: PAT_MRT3847_109922C.1.pep
LGKIILLPKFGELPQXSVVGDTFPVGCAFDKANIHDKXSKDNPDSEYPANNTKKGIYAEGCGLENVTMSWEHDEYMYMVAKENSTTLPSTGLFIIRFHSIYFPGKVRW

SEQ ID NO: 153821 - protein, 47 aa, Glycine max
  Clone ID: PAT_MRT3847_109923C.1.pep
DFASLDAPVGSSSPAAQVPCSSLRGCLPLLISFLFFSIPFCRFLAAV

SEQ ID NO: 153822 - protein, 248 aa, Glycine max
  Clone ID: PAT_MRT3847_109924C.1.pep
MLRSFSPRKFLTSLSCKRLYTSEGEAARAILPKLLVVQPRVRPEKLLQAKLNEALCLANSLEDQRDGYFHTDFFDKPLPPHVLVQNRLPRADTYFGRGTVDNIKVHIDAAAESKGDVDAVFVNAILSGIQQRNLEMAWGKPVLDRVGLIIEIFNAHAFTKEAKLQAELAALSYKKTRLVRIRGPDGRNTFGASGEAEVVSARGRGSGGQGFMSGAGETELQLQRRRILERRNYLLSQIEEVRRTRALQ

SEQ ID NO: 153823 - protein, 82 aa, Glycine max
  unsure (1)..(82): unsure at all Xaa locations
  Clone ID: PAT_MRT3847_109925C.1.pep
GXXKGSLDFVHISSLLQLVIYTSFPTNGIWPFGLREYFLNHWLILLGSCWPLEYQQPTILQLGISFAQPGQLPFSPTFICNP

SEQ ID NO: 153824 - protein, 94 aa, Glycine max
  unsure (1)..(94): unsure at all Xaa locations
  Clone ID: PAT_MRT3847_109926C.1.pep
AAASPMARQLKSTFTRTLVAPKGLSASSPLHLFFSRRQFSFTVKGIQSXKPTYQVIQPINGDPFIGSLETPFTSSPLIAWYLSNLPAYKTRSEP

SEQ ID NO: 153825 - protein, 75 aa, Glycine max
  Clone ID: PAT_MRT3847_109927C.1.pep
IPNYTCAMSNLEPPTQIKRETIVYHQLKEWGQTNRIAQTLALTLGNLNHGNLDLDRNTKLGLVNISTLPFHSHVI

SEQ ID NO: 153826 - protein, 163 aa, Glycine max
  Clone ID: PAT_MRT3847_109928C.1.pep
IRLEGCERRQKGFPCRITKDGMAEKTHHFTLLDGEMIIDTLPDSKKQERRYLIYDLMAINGVSVMERPFYERWKMLEKVIEPRNQERFQSRNPYYRYDMEPFRVRRKDFWLLSTVTKLLSEFIPKLSHDADGLIFQGWDDPYIPRTHEGLLKWKYAELNSVDF

SEQ ID NO: 153827 - protein, 38 aa, Glycine max
  Clone ID: PAT_MRT3847_109929C.1.pep
WISSEFGLSSGNNAEYFFFFFFFFWLIMIPFINIYIYN

SEQ ID NO: 153828 - protein, 47 aa, Glycine max
  Clone ID: PAT_MRT3847_10992C.1.pep
RRINTVPGVMVAISMTESGTCMLTMVVKKSSAEYNIGGKTAVVSEMN

SEQ ID NO: 153829 - protein, 211 aa, Glycine max
  Clone ID: PAT_MRT3847_109930C.1.pep
MSPSVFLLWLVIISVLAHSALASIPLAYFLDCGGTKEVTVDNLTYIPDESYIKVGKTTTINKPDLLPILSTLRYFPDTSAKKYCYSLPVIKGSKYLVKTMYYYGGFDGRNKQPPVFDQIIEGTRWSVVNTTEDYAKGLSSYFDIVVVPSGKTLSVCLARNAHTGGASPFISALEVKRLDASFYNPTDFNKYALLTVARHAFGAEKSLVFQM

SEQ ID NO: 153830 - protein, 86 aa, Glycine max
  Clone ID: PAT_MRT3847_109931C.1.pep
NIKKNKITPKGISTRYLVVILLIRLGFLQRLSFSTLLGRHGCDAELGFGLNTKTRNRGSAQDTTQHYGTLPSPHKYSSADSPICRL

SEQ ID NO: 153831 - protein, 59 aa, Glycine max
  Clone ID: PAT_MRT3847_109932C.1.pep
TSESQPFGPFMYQKRLVNLVCHENLLTVVRSSITAFTFHNPDLCVRVSKSEKRERSASN

SEQ ID NO: 153832 - protein, 81 aa, Glycine max
  Clone ID: PAT_MRT3847_109933C.1.pep
NVEEGFGHFGKNFRNEGSDSQSQRERERERLFKINQQKIERNESKTQNGEKGEKTGENDEGVIAKAAVSRSQDTSDKRSCL

SEQ ID NO: 153833 - protein, 121 aa, Glycine max
  Clone ID: PAT_MRT3847_109934C.1.pep
CFFFFFFFFFFFFFFFGRGGSRISIRLAGFKFIRKTPKGDNPLLSFLKPEQTFKGGGARLQKGRDPLILFFHKSRIKFLGPIWIIEHFTFLFGAGGLINLTRVPILGINMAFILWLKAFFP

SEQ ID NO: 153834 - protein, 165 aa, Glycine max
  unsure (1)..(165): unsure at all Xaa locations
  Clone ID: PAT_MRT3847_109935C.1.pep
PKLFQRSICYDHARHLPFXVSLGYVVQVLPNIVFPQELERSERTYSAWNGISQTNEFDFDAREPYKSVCKGPTRFFLKDTRREGNASWGSYVRGRDKDDFKKRILCFPHLPPLRNVGEIQVAVQHLSKNWHLVPRRLCCRQSQAGKEILQISVGECGKGTFSSVY

SEQ ID NO: 153835 - protein, 106 aa, Glycine max
  Clone ID: PAT_MRT3847_109936C.1.pep
AGGQLGPFKNEIESHFWFVTACSPNFLWGGFSNPPKNFWGGIFPLKGGPFSQLSREPKQTRGGLREGFRFKTKKKTGYQGVAKSNFPMFPLMPKKKKIFPPAPPYC

SEQ ID NO: 153836 - protein, 86 aa, Glycine max
  Clone ID: PAT_MRT3847_109937C.1.pep
NSFPFTRIGAIGVPIYVPSSVCKNFAVQNKIRVTTQEKEEIEATGERVGLAGIAAGRQKWNSEHEASLALYVYFYSLKIRVFRSQE

SEQ ID NO: 153837 - protein, 66 aa, Glycine max
  Clone ID: PAT_MRT3847_109938C.1.pep
EIKQDKSGRKKRVRLVRSVDKTCTPPPNQNSEKSYSFKSVQILFLSPHLLHHFHIGPNPNQNPNIH

SEQ ID NO: 153838 - protein, 61 aa, Glycine max
  Clone ID: PAT_MRT3847_109939C.1.pep
KCYQLNLKKKKKKKKKKKKKKKKKKKKKEKEKKKRGAKIKRNKAYKAGQKKAKTLNVGPQN

SEQ ID NO: 153839 - protein, 450 aa, Glycine max
  Clone ID: PAT_MRT3847_10993C.1.pep
MLQRCTTNMSWLSGLRELRPLLHLLLPLSIHWVAEEMTVSVLVDVTTSALCPGESTCSKAIYINGVQQTIVGIFKMVVLPLLGQLSDEYGRKPLLLITISTAIFPFVLLVWHQSEEYVYAYYVLRTISNIISQGSIFCISVAYAADVVNESKRAAVFGWITGLLSASHVLGDVLAWSLPEKYIFAVSIVLLTSCPVYMKFFLVETVIPAPKNDRESGCWAKIVDVPRQRYISMRRAAEIVIFSPTLRGMALVSFFYELGMSGISSVLLYYLKAVFGFNKNQFSELLMMVGIGSIFSQMLLLPILNPLVGEKVILCSALLASIAYAWLYGLAWAPWVPYLSASFGIIYVLVKPATYAIISNASSSTNQGKAQTFIAGTQSISDLLSPIAMSPLTSWFLSSNAPFECKGFSIICASICMIISLCFACLLKPADTSSSNDIEGSQETPLLTDN

SEQ ID NO: 153840 - protein, 226 aa, Glycine max
  Clone ID: PAT_MRT3847_109940C.1.pep
MNIFKSPLDHDLNCGGIFHDSAEASYSSETRSTPSDEEVILASARPKKRAGRRVFKETRHPVYRGVRRRNKNKWVCEMRVPNNNSRIWLGTYPTPEMAARAHDVAALALRGKSACLNFADSRWRLTVPATTNAEEIRRAAGEAAEAFAVADGDDVNIEQQQSVMATNDDEVQEPLQQEEVQDLHDLLLSIANEPLMSPPPCARDGRDWNDVDIFDDDEISLWNFSI

SEQ ID NO: 153841 - protein, 51 aa, Glycine max
  Clone ID: PAT_MRT3847_109941C.1.pep
DSSFLNFGDSTLLLRMRRVFLIFFLPEKVKTSTILDFTSQSSHTCSGSRLQ

SEQ ID NO: 153842 - protein, 259 aa, Glycine max
  Clone ID: PAT_MRT3847_109942C.1.pep
MARMGPGFRFHPTDEELVVFYLKRKMTGNLSRYDHIAVVDVYKLEPWDLPPLSKLKTKDLEWYFFSALDRKYGNGSRTNRATDRGYWKTTGKDRPVTHGDRTVGMKKTLVYHSGRAPQGRRTNWVMHEYKMLDDELARSGTVLDVFVVCRIFEKSGSGPKNGAKYGAPLDEKEWDVEDGTRMKRMSRRRWLPCSFLIMRWLLLLPCRRLLIMWWLILLCWRRLLIIIIWWLLLLLPCRLLLMGPMFQPTTLTWNLIGVV

SEQ ID NO: 153843 - protein, 319 aa, Glycine max
  Clone ID: PAT_MRT3847_109943C.1.pep
MAAISIPSHMKAWTYSEYGKSKEVLKFNQSVALPEVKEDQVLIKVAAASLNPIDHKRMEGYFKNSDSPLPTAPGYDVAGVVVKVGSEVKKFKVGDEVYGDINVKALEYPKVIGSLAEYTAAEERLLAHKPQNLSFAEAASLPLTLETAYEGLERTGFSAGKSILVLGGAGGVGTHVIQLAKHVYGASKVAATASTRKLELLRNLGADWPIDYTKENFEDLSEKFDVVYDTVGQTEQAFKVLKEGGKVVTIVPPGFHPAILFILSTDGAILEKLNPYFESGKLKPILDPKSPFPFSQTVEAFAHLETNRATGKIVVYPIP

SEQ ID NO: 153844 - protein, 82 aa, Glycine max
  unsure (1)..(82): unsure at all Xaa locations
  Clone ID: PAT_MRT3847_109944C.1.pep
KXPLHKACELFYRLFKSILSLRNPVPKDVQFQWALTEASKDSNVGEFFTKLVHSEKARIKSIWGFNDDMDISSIMEEPPLLP

SEQ ID NO: 153845 - protein, 66 aa, Glycine max
  Clone ID: PAT_MRT3847_109945C.1.pep
PHLHHSFISVRYTTASWLGYIFNDVFYGQIQFHHRGDNQRLSVKKFCTSFHWSVFYISGSESILVP

SEQ ID NO: 153846 - protein, 146 aa, Glycine max
  Clone ID: PAT_MRT3847_109946C.1.pep
MDSIPCLQGLNSQSQVPSSWSSLSCPSEPPDIGNWFSSYEYRSPGPDSNFSVEDSAFSEEETQRDGEEEEEENVRVQGEGVAGENVVQCIRTCVKEDNHSEDQCLNTNLEPFSSFSLLSEPPDIRNWFSSYVYESPESDTSSLFRD

SEQ ID NO: 153847 - protein, 85 aa, Glycine max
  Clone ID: PAT_MRT3847_109947C.1.pep
VLLVVVSPALWTSLPYAVVLRAGVSPLKTDFTDVVFNAHLSCTRARGIFGNESCSIFLLRLSRYHPLSNPSLCPLSQSVVQPRDI

SEQ ID NO: 153848 - protein, 320 aa, Glycine max
  Clone ID: PAT_MRT3847_109948C.1.pep
MLRKDKIEVQTGVSRRRGKKQATILAPVPDLLHQDLHQTANLPISSGSISGEKATELKSLQESNVQESKCVVLDQASQSVGDQDLKSLGGSDDSSKQTVIMSSCQDSMIKSPGQDLDTVKNPDAHDSSVKVVKSSEITSSKIDEVCNNSGNETLLGTTVPVTGVIQDQHSGGKTHNQTVEISKTIPSVVDTPINSLTDNETTQSINKSLDPVTPTIVPSTLTTVYPTPGSESTHPGLAESIPTKRQGRKTQNRAEPPRRKGKKSAAVLPVVPDAVTGQDPKLSHHAQNSPVDSLPGKATANITQTQALEILLPSGVVSHD

SEQ ID NO: 153849 - protein, 40 aa, Glycine max
  unsure (1)..(40): unsure at all Xaa locations
  Clone ID: PAT_MRT3847_109949C.1.pep
VTLXSSSGVIYLNXHFYINTEEMKKRMYTSVLAISGAPMN

SEQ ID NO: 153850 - protein, 69 aa, Glycine max
  unsure (1)..(69): unsure at all Xaa locations
  Clone ID: PAT_MRT3847_10994C.1.pep
TTSTSYNRTCTTATXTGINGFGXIGXXTARXALXRDDVELVAVNDPFITTDYXTYMXNXQXHGXWKHHD

SEQ ID NO: 153851 - protein, 71 aa, Glycine max
  unsure (1)..(71): unsure at all Xaa locations
  Clone ID: PAT_MRT3847_109950C.1.pep
PSWRDIRRVSVATLRNYGMGKQGNEXRIQREAHVLLEALRKTQGQPFEPTFVIGCAACNVIGDILFRKHID

SEQ ID NO: 153852 - protein, 57 aa, Glycine max
  Clone ID: PAT_MRT3847_109951C.1.pep
ARTKETKTSSLAWKECTNHYAKGKIINLSCQDIKKLTSSKEISSQNFTSAHASNRGF

SEQ ID NO: 153853 - protein, 62 aa, Glycine max
  Clone ID: PAT_MRT3847_109952C.1.pep
SLFKNLATFSKKIIFNHIFLSTTLEYKILLKACIKQISIIEQKNCIPQIKPPCFLSLLSTQF

SEQ ID NO: 153854 - protein, 86 aa, Glycine max
  unsure (1)..(86): unsure at all Xaa locations
  Clone ID: PAT_MRT3847_109953C.1.pep
AERKPSWARGSKNENWRHGPNRRYVVPRVDPSNKLSTRVTETGDTDAKCDQTLTISVTPKPLXDQTLYIDAAHAXGSQEDTKPLIG

SEQ ID NO: 153855 - protein, 94 aa, Glycine max
  Clone ID: PAT_MRT3847_109954C.1.pep
FFSCYIEIMGVHKSRFLTTIFLLFILVILLHLSSCRHISWGLKEEIMEQRTRSRFPFSSFPHSYNSAEIKDNKVSGFHTVSHTATPGGPNPLHN

SEQ ID NO: 153856 - protein, 62 aa, Glycine max
  Clone ID: PAT_MRT3847_109955C.1.pep
QGPIVLLLNMTAYGIPIQSHLHCIGYINENTDRNTLLYHYSYCYTMCCRIRYGCKTLRVQNW

SEQ ID NO: 153857 - protein, 40 aa, Glycine max
  Clone ID: PAT_MRT3847_109956C.1.pep
IIHWHPGRCYYVVCSRQEFERVWKLGAINIICNELGSANA

SEQ ID NO: 153858 - protein, 71 aa, Glycine max
  Clone ID: PAT_MRT3847_109957C.1.pep
NNKGRVRLNLFILVQLCLVCLSQRPCCLGWLIGLFGFYFATFSPHRMIWLENSFKDFSLKLSGNSHSSPVC

SEQ ID NO: 153859 - protein, 45 aa, Glycine max
  Clone ID: PAT_MRT3847_109958C.1.pep
VVKVFCYKIKTWLCTEQVSMILFIIIIIRLPGIHERPWKKERAIQ

SEQ ID NO: 153860 - protein, 108 aa, Glycine max
  Clone ID: PAT_MRT3847_109959C.1.pep
AVYMCSSAAFLGGGGGSEQWVARVEAERRHDKNPGHKPRRQKRTTEIGGCCKLFYYTCTQQGGWVGVRWAMTLTRWYRVSLTNWGNFTVSAQERVNLCAKGKPACFAW

SEQ ID NO: 153861 - protein, 51 aa, Glycine max
  Clone ID: PAT_MRT3847_10995C.1.pep
TKRTNMVTWTSMLYEDSFFLYAFFLWSMHEESYLYPEDLEQPKHPRIEKYL

SEQ ID NO: 153862 - protein, 42 aa, Glycine max
  Clone ID: PAT_MRT3847_109960C.1.pep
LQLCGVFTSSQEGHSDQCCSLIPVYIRRMHLLFGRVADEGLP

SEQ ID NO: 153863 - protein, 102 aa, Glycine max
  unsure (1)..(102): unsure at all Xaa locations
  Clone ID: PAT_MRT3847_109961C.1.pep
IXXXXVXXXYXACRCXXWXXXCXLXXXWDAXXXXXXXXXLAXXVRXXXSXVHXXXXXXXAXXXXSXVLWTXXXXXXFXXXDXXXXYXXSIXSXXVXXFXXRX

SEQ ID NO: 153864 - protein, 59 aa, Glycine max
  Clone ID: PAT_MRT3847_109962C.1.pep
SPALQEEATSGANTHVLFSLLSCSGQMNRNKWYQYTRRKAGTQTFPSRAEFRAYVRVHA

SEQ ID NO: 153865 - protein, 61 aa, Glycine max
  unsure (1)..(61): unsure at all Xaa locations
  Clone ID: PAT_MRT3847_109963C.1.pep
EIGEPIHEPVFYTGIIPILGKIGKEGADLPVRERIFLLLDATQTFLGGAFGKLPQXYNAYY

SEQ ID NO: 153866 - protein, 56 aa, Glycine max
  unsure (1)..(56): unsure at all Xaa locations
  Clone ID: PAT_MRT3847_109964C.1.pep
SFLGGNXVCPCYKKNYVGIEKKVDFSRVWCPRLSLSFCGRDGFSXSFLKHRSHTAL

SEQ ID NO: 153867 - protein, 53 aa, Glycine max
  Clone ID: PAT_MRT3847_109965C.1.pep
LILQPWVIFFKKRGLLPQRKGIPTWVLRNQILSQILPGGQQKNQAMGPLSPIF

SEQ ID NO: 153868 - protein, 152 aa, Glycine max
  Clone ID: PAT_MRT3847_109966C.1.pep
EEESNDGQLYKLCAICHSLGGASMLMYVVTRRIEAKPHRLSRLVLLSPAGFHHDSNLVFSVAEHVLFLLAPIWSRIFPAFYIPTRFFRMLVNKLARDLQNLPAVGGLVQTLVGYVVGGDSSNWVGVLGLPHYNMNDMPGVSFGVALHLAQIK

SEQ ID NO: 153869 - protein, 58 aa, Glycine max
  Clone ID: PAT_MRT3847_109967C.1.pep
LKSFKDQIMLARPVSLVKAPFHLKWTECSLTVDLGSDDGLIFSGIGEALPWLIWQTKS

SEQ ID NO: 153870 - protein, 143 aa, Glycine max
  Clone ID: PAT_MRT3847_109968C.1.pep
MLKATLAILLICLFASQEVFAAKVKLVSVERVKEHSKVAPKPKIELCGFCVSFMDQAIDQLLNIIANVGVVGGCAGLCSYLPNQILSAGCNMLCDVVGIEEFVKLVDDADPDPIWIREELSLCNINDYAKANMTAFSLSSPHS

SEQ ID NO: 153871 - protein, 46 aa, Glycine max
  Clone ID: PAT_MRT3847_109969C.1.pep
KNKWPSLYNNHFYTVNYYSPLLKIFLNYLLDIVIKTCKKNVHKYYL

SEQ ID NO: 153872 - protein, 324 aa, Glycine max
  Clone ID: PAT_MRT3847_10996C.1.pep
MTVDLVGAAKMGMEENIAIQEAASAGLKSMEHLIRVLSSQIPSSASSSSNAHHHRLNLNHLDCTEITDFTVSKFKQVINLLNRTGHARFRSAPSHPSPSTSLPSQPQPQPQPQPYALTLDFAKPVMLKSNPNPNPSSTDLSVSQYSKTKDTTTFSISPPVSTTTSSFMSSITADGSVSDGKIGPAIIAAGKPPLSSSHRKRCHDATLSAGKASSSAHCHCSKRRKSRVKRMIRVPAISSKIADIPVDEYSWRKYGQKPIKGSPYPRGYYKCSSVRGCPARKHVERAQDDPNMLIVTYEGEHRHPQPRLPETAAGAGGTFAAHPV

SEQ ID NO: 153873 - protein, 92 aa, Glycine max
  Clone ID: PAT_MRT3847_109970C.1.pep
MPVGTAEPERTRDAGSGGNTNHARPASNIVNIVKPVGYSASVASGMQDVLVTFVASKSDGTEVMVDNKYLKAFNPLLLINFYEQHLRYSPTL

SEQ ID NO: 153874 - protein, 464 aa, Glycine max
  Clone ID: PAT_MRT3847_109971C.1.pep
MKGGGGKRKASTSEAPNDVVVVVAAASAPSDDADLGVGDVGGVKVQNFEGNEGTQLRNTEEQEEEPHHVEGDEGGEDEEDYAEGEEEYEEENGGAVAGGQQGFPALGENFFEVEAIRRKRLRKGEVQYLIKWNGWPETANTWEPLENLESVPDVVEAFEESLKSGKHRKRKRKHVVHHTQPKKRLERSTTPYSLRRFSTSTAENHTQSAPPLNDPSLPDIPAFPHTVLFSDDVGNGAEGSSLRKATPSNANRSANGSEQNIKRNEENDYDPVLSELKAMTSNGNDADRLAIRIPEAKGSGPSGSNGQMDAKSKGACMETSESDRCRGSKRRKCGSVKRFKKELYANEPANAENPVSMPVGTAEPERTRDAGSGGNTNHARPASNIVNIVKPVGYSASVASGMQDVLVTFVASKSDGTEVMVDNKYLKAFNPLLVVPYTFTLLHLIIGCIIFLVPHLLRISVFSP

SEQ ID NO: 153875 - protein, 49 aa, Glycine max
  Clone ID: PAT_MRT3847_109972C.1.pep
VHDRQAHSSLRRYFSECDSLKPHDALSLTLQKIVVLPSVVFSQPYGRVG

SEQ ID NO: 153876 - protein, 65 aa, Glycine max
  Clone ID: PAT_MRT3847_109973C.1.pep
QYEFGTRTLSNKQSNKSGGGGITHSHLITRRTNKGNGLLLKGTIHQNWLLVNISEDKHPTRSTHG

SEQ ID NO: 153877 - protein, 81 aa, Glycine max
  Clone ID: PAT_MRT3847_109974C.1.pep
AGRCSPWGGLGLKTPIGEENNGGGKIFFCGARVKHYILFFFTRDFFFSQTLPFYKKAPGSTNPLLFFKTRGRVLENVRVIF

SEQ ID NO: 153878 - protein, 377 aa, Glycine max
  unsure (1)..(377): unsure at all Xaa locations
  Clone ID: PAT_MRT3847_109975C.1.pep
LESKGFYQLLDMLLGVGGCLMVLIAVQNKLSFTRVEFIVDGMVVLLLLLLPLGIVFKEXFKIWKNQNQNFTDAAASVVELAQPEEAPSHSERKNNNSCLKNVFKPPKRGEDYTIFQALFSIDMLILFIATVFGVGGTLTALDNLGQIGNSLGYPKKSLTTFVSLVSIWNYLGRASSGFVSEYLLTKYKFPRPLLLTLVMLLSCVGHILIAFGIPNSLYFSSVIIGFCFGAIWPLMFAIISEIFGLKYYSTLYNFGAVASPVGSYILNVRVTGYLYDKEALKQLGVKGLIRQKGKDLTCVGVQCYRMAFLIITASTLVGCVVSFILVLRTRNFYKGDIYEKFRVVELDTGESLPTFGSTGTTTTTTNRTEEPDKINRK

SEQ ID NO: 153879 - protein, 147 aa, Glycine max
  unsure (1)..(147): unsure at all Xaa locations
  Clone ID: PAT_MRT3847_109976C.1.pep
MGKKPPHLSDVEAARNPPSPPPTFHVPLPSMWFPWLVPLIFLATIAMFRXTMYENDCPAYLDEEVCLFSQYLGRFSFQPFRENPLLGPAIRTLRLLGALEKELVVDQNEVWRFFSCMFLHAGVVHLLANMFSLLFIGVRLEKEFGFL

SEQ ID NO: 153880 - protein, 63 aa, Glycine max
  unsure (1)..(63): unsure at all Xaa locations
  Clone ID: PAT_MRT3847_109977C.1.pep
FGXXXXXXVFGXXSYMMITXLXMRGXTYRXILXINXRXDEQQTENPQQDSRGLISWLLXHQXI

SEQ ID NO: 153881 - protein, 94 aa, Glycine max
  unsure (1)..(94): unsure at all Xaa locations
  Clone ID: PAT_MRT3847_109978C.1.pep
MTNIYNFMITNGLKTVGXKXNVSSKRQHYFGHNALISVSIIDTQGVIXGMDFIHTRAGLKFRLGGSTVGRFFNVLREPMDHLRPEDTVTAYPIR

SEQ ID NO: 153882 - protein, 57 aa, Glycine max
  Clone ID: PAT_MRT3847_109979C.1.pep
RAASNSFNFLSCSPINNARVHLFLLTHSLSPFFLTPTLSSGFLSFSESNNNLTGIFS

SEQ ID NO: 153883 - protein, 36 aa, Glycine max
  Clone ID: PAT_MRT3847_10997C.1.pep
THPQKCRIDIYPRHIFNKDIFLVIIFYTYALFCSFQ

SEQ ID NO: 153884 - protein, 90 aa, Glycine max
  Clone ID: PAT_MRT3847_109980C.1.pep
RARSNPPQNCPSTHDPNWFIFKLQSWTSHVYIHRKKGLMGSAKLPRVIEISANQLALKVSRQAFVASLFFPAFGKGKDPESHMVFMDLET

SEQ ID NO: 153885 - protein, 119 aa, Glycine max
  unsure (1)..(119): unsure at all Xaa locations
  Clone ID: PAT_MRT3847_109981C.1.pep
GARVGLHRDQGKREGDDEPSIGTEDMTDMFKYYSVDGHWKHHEVTDKDEKTLLFGDQADTVFGHRNPEEIPWGSTGADLIGESTGVLTRXDMAAAHXLKGGAKKASMYAPRKGAPMSVM

SEQ ID NO: 153886 - protein, 75 aa, Glycine max
  Clone ID: PAT_MRT3847_109982C.1.pep
IRSKLKNNWENKDLARPTTPKGKPLNHKPLKGKIWDPNNLKNPPTPTVEVARLGAGNMATGQLYSHQKPPKQLLW

SEQ ID NO: 153887 - protein, 150 aa, Glycine max
  Clone ID: PAT_MRT3847_109983C.1.pep
LEFQAKKSSSFLDFIRSKGNRYRLMLIISLGLFSQWSGNALFSYYANKVYTAAGVSGSKAGLGLDGGNKVLSLIVSISCALLCDRIGRRPLFLAATGGMLLCLMAATVSAAQYTKTENRGTGIAVIVFFWFHGVCYAFAWSGLLVAYTVE

SEQ ID NO: 153888 - protein, 65 aa, Glycine max
  Clone ID: PAT_MRT3847_109984C.1.pep
NKRPGGTSLRKIFLFKKIVKQNCLKLSCKLSPFSSNLIWETPVFCIQIKWAFCKSPPLKTIRCQV

SEQ ID NO: 153889 - protein, 67 aa, Glycine max
  Clone ID: PAT_MRT3847_109985C.1.pep
MNSTRVSNRRLFFFVKIGAMSSYHDEVTLLGATGRLFVYKVHNTHRLMGVLFNYFYYKLMYKSLLSH

SEQ ID NO: 153890 - protein, 59 aa, Glycine max
  Clone ID: PAT_MRT3847_109986C.1.pep
LGFAPFFPPKKSLDSTRGTFSPLFLHGVFFQSKTLKKGSKSTRKCLFNCIGKGTLSNFA

SEQ ID NO: 153891 - protein, 51 aa, Glycine max
  unsure (1)..(51): unsure at all Xaa locations
  Clone ID: PAT_MRT3847_109987C.1.pep
VRSXVLCXXIRPDQILYLAFRSPFADAKLLMTFGCLGQRSIVHIRVQAAKW

SEQ ID NO: 153892 - protein, 39 aa, Glycine max
  unsure (1)..(39): unsure at all Xaa locations
  Clone ID: PAT_MRT3847_109988C.1.pep
PGLRTPTRPXPWLTVTFCSAXVWGSFTKPQGKRRQSECR

SEQ ID NO: 153893 - protein, 52 aa, Glycine max
  Clone ID: PAT_MRT3847_109989C.1.pep
KAKTFACAQCVNLHLQLSSHFTRNRILTQFHLIKNNFQDKPKSEKKKYILKN

SEQ ID NO: 153894 - protein, 44 aa, Glycine max
  Clone ID: PAT_MRT3847_10998C.1.pep
SSLKMLRTAYLLSRLSILQLSQIPDSLSEVCLSSGQTIIDHPQA

SEQ ID NO: 153895 - protein, 106 aa, Glycine max
  unsure (1)..(106): unsure at all Xaa locations
  Clone ID: PAT_MRT3847_109990C.1.pep
HRSFHVQRVQHDGGDMALTFTKLVSRLFAKKEMRLLMDGLDAAGXTTILYKLKLVEIVTTSPTIGFNVYTVEIRNIIFTGXDVCGQDKILPWXMHYFHISQGFIFV

SEQ ID NO: 153896 - protein, 157 aa, Glycine max
  unsure (1)..(157): unsure at all Xaa locations
  Clone ID: PAT_MRT3847_109991C.1.pep
FLILISKQRLPHDHFPTVTTVNRAGAGLDAPLTGLKSMAGFPTRKYQXDITSLASNGGRLQCMRGWPPGGKNNLETLSYLPDLDDAQLPKXVEYLLRKGWIPCLEFXLEHGFESREHTRKPGYYHGRYWTMWKLPMFGCTDAPEVLKELQEANTAYP

SEQ ID NO: 153897 - protein, 46 aa, Glycine max
  Clone ID: PAT_MRT3847_109992C.1.pep
LKYDVFDLELSSMFSNLELMRVMMETTNRSIIVIDDIDCNIEVHAR

SEQ ID NO: 153898 - protein, 132 aa, Glycine max
  Clone ID: PAT_MRT3847_109993C.1.pep
EWGSRDSILYTFIRSLQTIQVLARRVICGPEPVTVGYLIGRSLWSACQYVPELQGQADPPVEAVDVLREYLRQDLIGHLDEDRVRYNHSLPVGSPQCNHEYISTRLNLLMYHRGPTGPGSFRCLRDGSDRWV

SEQ ID NO: 153899 - protein, 80 aa, Glycine max
  Clone ID: PAT_MRT3847_109994C.1.pep
NKNYVLFYYNVHNYVVIIKFVWEPYPIHPLYHCMHPDCLVGSLPWYAMVPLICFLVIEWYQPDRVLTQFGMLQPVLESTA

SEQ ID NO: 153900 - protein, 97 aa, Glycine max
  Clone ID: PAT_MRT3847_109995C.1.pep
NNQNENFCFQNYDLEKTRSQIGEKINTNFLDPKYQKDKGIGMIIPGNWRNSASHLHQIRLSFQTRQAASWHNLPAHRNQQQMQMFAPTPLKKDFGPS

SEQ ID NO: 153901 - protein, 76 aa, Glycine max
  Clone ID: PAT_MRT3847_109996C.1.pep
VDSRWGTTEDGEDYWLLANQWNSEWGDDGYFKIRRGTYECGIKEDVTAGLPSTKNLVREVTDMDADAAVSFRIICV

SEQ ID NO: 153902 - protein, 127 aa, Glycine max
  Clone ID: PAT_MRT3847_109997C.1.pep
HYSALTSSKLGFHDIMAEVYKNGPVEVAFTVYEDFAYYKSGVYKHITGYELGGHAVKLIGWGTTDDGEDYWLLANQWNREWGDDGYFKIRRGTNECGIEEDVTAGLPSTKNLVREVTDMDADAAVSF

SEQ ID NO: 153903 - protein, 364 aa, Glycine max
  unsure (1)..(364): unsure at all Xaa locations
  Clone ID: PAT_MRT3847_109998C.1.pep
MASTHLMASTHLLPLATFFLLLSASYLQIAGAEAQPLTSLKLNSHILQESTAKEINENPEAGWEAAINPRFSNYTVEQFKRLLGVKPMPKKELRSTPAISHPKTLKLPKNFDARTAWSQCSTIGRILDQGHCGSCWAFGAVESLSDRFCIHFDVNISLSVNDLLACCGFLCGSGCDGGYPLYAWRYLAHHGVVTEECDPYFDQIGCSHPGCEPAYRTPKCVKKCVSGNQVWKKSKHYSVNAYRVSSDPHDIMTEVYKNGPVEVAFTVYEXDFAYYKSGVYKHITGYELGGHAVKLIGWGTTEDGEDYWLLANQWNREWGDDGYFKIRRGTNECGIEEDVTAGLPSTKNLVREVTDMDADAAVSF

SEQ ID NO: 153904 - protein, 85 aa, Glycine max
  Clone ID: PAT_MRT3847_109999C.1.pep
YQQSAKKWQLWGVNKTQKAIYHNTKTRIKDNICVTQNPLTAPPTSEYIPIPRKTGLKNLAINGRQKINAWVDSNRACFTTNYKST

SEQ ID NO: 153905 - protein, 99 aa, Glycine max
  unsure (1)..(99): unsure at all Xaa locations
  Clone ID: PAT_MRT3847_10999C.1.pep
KXXXIXPXKXFNSGXRXXXHXNXXXXXXLDXXXXEXXXTXXXXXXLXXTXXXXXXXXXAXXXXXLXXXXXXXNLYXHKXXXPXXSEXXXXXKXKTXVXX

SEQ ID NO: 153906 - protein, 155 aa, Glycine max
  Clone ID: PAT_MRT3847_1099C.1.pep
MCDQQNLVESSFVFHAQHMNSSSSAAESTMEDPSNHRHSKKHQRRHRHHPATTTTTVSTTTGESDGEEAEDVGDPEAWATLNKGFRQVQSVLDRNRLLIQQVNENQQSRMHDNMVKNVSLIQELNGNISKVVSLYSDLNTNFTNVCQQRSKNSSK

SEQ ID NO: 153907 - protein, 60 aa, Glycine max
  unsure (1)..(60): unsure at all Xaa locations
  Clone ID: PAT_MRT3847_109C.1.pep
MAXESASRLTSMADSYIGSLISLTSKSEIKYKGILYHINTEESNIGLKNSILLLPTSFFL

SEQ ID NO: 153908 - protein, 57 aa, Glycine max
  Clone ID: PAT_MRT3847_10C.1.pep
FCSNCTMVHPRNKCQKLIIGLLAGWSRNDQYGGALGEKWNLAMPQIKAFMVLRNCCV

SEQ ID NO: 153909 - protein, 79 aa, Glycine max
  Clone ID: PAT_MRT3847_110000C.1.pep
STLEFLWPVLKSGILDFDYLPKILKFSLFSLQKLSSPANEEMMKAAHKKLFHELSEICHSRDESNNSCVVTLVKGLQFV

SEQ ID NO: 153910 - protein, 50 aa, Glycine max
  Clone ID: PAT_MRT3847_110001C.1.pep
THRSLVSLSLQCFAALFCLVTLFSNQAMLKKNQARKFGCEKFSLFLFKTD

SEQ ID NO: 153911 - protein, 138 aa, Glycine max
  unsure (1)..(138): unsure at all Xaa locations
  Clone ID: PAT_MRT3847_110002C.1.pep
AQSLSTRRESTWKRLLHNATVLRELVLNRTDLSSTSMRPLNMSSSLNTLSLRGTGLKGTLADGILCLPNLQHLYLSDNWDLHGQLPNWSCSTTSLSVLQISSNEFQGPIPPSFSNTEHLTFLDLXMNKLNGSIPPLLL

SEQ ID NO: 153912 - protein, 107 aa, Glycine max
  Clone ID: PAT_MRT3847_110003C.1.pep
ENQEIQTIDNKIKQWSKGKEGNIRSLLSTLQYVLWPECGWKPVPLVDIIEGNAVKRSYQRALLCLHPDKLQQKGASSYQKYIAEKVFDILQEAWTQFNMLVAIFLKQ

SEQ ID NO: 153913 - protein, 56 aa, Glycine max
  unsure (1)..(56): unsure at all Xaa locations
  Clone ID: PAT_MRT3847_110004C.1.pep
ASPYDSIHADAPSAWPPKFVSAGTNKEKEEDLLAIXGSKLSNRPKNRPKFIQRTFN

SEQ ID NO: 153914 - protein, 180 aa, Glycine max
  unsure (1)..(180): unsure at all Xaa locations
  Clone ID: PAT_MRT3847_110005C.1.pep
GEISFISQPQVGSTFSFTADFGTIKKNAITDMKKHNLEDLPSNFRGLKAIVVDGKPVRAAVTRYHLKRLGIQAKVANSFNKAVSLCGKNGCLTSGLFQPDIIFVEKDSWVCVEDGIFNVWQLDWKQNRHIXKIPQMILLATNIGNDEFDKAKAAGFSDTVIMKPLXASMVAACLQQVLGT

SEQ ID NO: 153915 - protein, 123 aa, Glycine max
  Clone ID: PAT_MRT3847_110006C.1.pep
KLAHAHQNWHSEVTEAKLLLKEALQAEVGLPVDRNIPLIGFIGRLEEQKGSDILVEAIPMFIDQNVQIMILGTGKKVMEKQIEQLEEIYPDKVRRVAKFNGPLAHKIIAGADFIVIPSRFEPC

SEQ ID NO: 153916 - protein, 328 aa, Glycine max
  unsure (1)..(328): unsure at all Xaa locations
  Clone ID: PAT_MRT3847_110007C.1.pep
AITDMKKHNLEDLPSNFRGLKAIVVDGKPVRAAVTRYHLKRLGIQAKVANSINKAVSLCGKNGSLASGYXRLRLQIXQKDSWVCGEEEIFNLWQLDWKQNGHMFKIPQMILLATIQCVATGLETESAYXKIPQIILLATNIGNDEFDKAKAAGFNDTVIMKALRASVVAACLRLLRGTGILGLHGNVVNPRVAAGALRNFGADVTCAESGNAALEMLQLPHNFDACFMDIQMPEMDGFQATQRIRMMETKANEQQMNGEGNGWKDKYHIPILAMTADVIHATYDECVKYGMDGYVSKPFEEENLYQAVAKFFNPKPTTDNSLIENGRT

SEQ ID NO: 153917 - protein, 132 aa, Glycine max
  unsure (1)..(132): unsure at all Xaa locations
  Clone ID: PAT_MRT3847_110008C.1.pep
GVGYWGCAGQNPCDDFYAWGMAHCNCVVKFGMPPVECHXRLKVCLPRELQSGKVGFSKECPSTRPALTMIRGMGLALLLSQLGAFSVPPYQPDPPPFMLSFLSPSPFSNFFSFVWGTWFYICSCWAWLTCCY

SEQ ID NO: 153918 - protein, 230 aa, Glycine max
  Clone ID: PAT_MRT3847_110009C.1.pep
HASGAFRLLERPLSFQSVAVSSLFFGFLLLLLCLGFGQKACIFSLHLVFLFLGGGGGGGLSKDDLVFEVLISQPQYRVPFPSVCSNLDSVSYGVQYPIGLHNEGRALEKECNTGDGVSNFPDCPVNYAVCASSGPPELDSGAGSPPQNQIETRASDRHHDPTPSLAKLQRSKSTQKALELRNSAKAPRRLSGEDDNACVCAGTGTGSAPSTQEAEHAMESGCGQKIFIPT

SEQ ID NO: 153919 - protein, 127 aa, Glycine max
  Clone ID: PAT_MRT3847_11000C.1.pep
FINSRTYSSYEVYDAQFTEKSKHFSEELLKGYKEVATNAGVKNVDTRLEFGSPKAIIPKKLARDVGADLIMSGTSGLNAVERFIVGSVSEAIVRHAPCDVLVVRTEEMPEDFQPQVATPQLREKYQD

SEQ ID NO: 153920 - protein, 69 aa, Glycine max
  Clone ID: PAT_MRT3847_110010C.1.pep
FQIIITNKSKDMQKPHETITKSHPYWEHQSVVYIRYWLQSDRGIDILPAVLFSTGDRKLLIEDSCRSFL

SEQ ID NO: 153921 - protein, 162 aa, Glycine max
  Clone ID: PAT_MRT3847_110011C.1.pep
WSYGIVLYEMLYGTTPFKGANRKETFYRILTKEPELTGEKTALRDLIGKLLEKDPDRRIRVDEIKGHDFFKGVKWDMVLRIVRPPYIPENEVKNKVGFGKSDVEVFVDKVFFPTGDDGGREKTKMVLEKKDSNNNGENINNMVKVDELSHVPTEKIDDFLIF

SEQ ID NO: 153922 - protein, 63 aa, Glycine max
  unsure (1)..(63): unsure at all Xaa locations
  Clone ID: PAT_MRT3847_110012C.1.pep
XHKREDCFFIGGVPPKKCLRKRPTFFKPPPMQNPWGKKKTGGRAKKQNVMIGGAEPLTNYGKT

SEQ ID NO: 153923 - protein, 68 aa, Glycine max
  Clone ID: PAT_MRT3847_110013C.1.pep
YKRKIKGIKKGLNMAVNNIASKGIDFDLTMTKKSQKPKANTHILYQLFYTLHGNHLLEPLTPSLCQTL

SEQ ID NO: 153924 - protein, 108 aa, Glycine max
  unsure (1)..(108): unsure at all Xaa locations
  Clone ID: PAT_MRT3847_110014C.1.pep
SYTGKPSTVFIYYIRWLLLPRACFAISSSKLTXSQRNILSAVEPDHRVESPGGQIQTWKYHHTMLKSAACTVCKHSLNRTDLHLTSYSPYPSVIIISRGQGALVHAIS

SEQ ID NO: 153925 - protein, 80 aa, Glycine max
  unsure (1)..(80): unsure at all Xaa locations
  Clone ID: PAT_MRT3847_110015C.1.pep
DKCHIVSHGVIRLILCTVGSPWXGVPPDRVVYSVAHQCSRLQMPEGPLGRFISECWAECHQRPSCKENSPRVVDAENSMC

SEQ ID NO: 153926 - protein, 49 aa, Glycine max
  Clone ID: PAT_MRT3847_110016C.1.pep
LRMCLVCIFIFCFHFQKIRILKTCFVLLLVFCFQEIKTLKMCFQKEIYF

SEQ ID NO: 153927 - protein, 66 aa, Glycine max
  Clone ID: PAT_MRT3847_110017C.1.pep
CQQNIPTAPYNLNWVSYCHVPSFLSPDFYIVAPITAPSLPSFGACLPLPLSEAPCCAPRSPPAALS

SEQ ID NO: 153928 - protein, 44 aa, Glycine max
  Clone ID: PAT_MRT3847_110018C.1.pep
QTIIYCIPLLAGLIQRVIAMCDSLDGPIYKIDDLCLETTSVAVN

SEQ ID NO: 153929 - protein, 62 aa, Glycine max
  Clone ID: PAT_MRT3847_110019C.1.pep
HASVNSEQRDSSANHGPRYNGALTLHRLNPNHLHTASRFESVQALILGRSHSSTADKDPNKT

SEQ ID NO: 153930 - protein, 54 aa, Glycine max
  Clone ID: PAT_MRT3847_11001C.1.pep
VYMALEPKRKRSGREEIFISYHAKDDLQSTYASSLFHNGRNYHISSHKNNVSSF

SEQ ID NO: 153931 - protein, 186 aa, Glycine max
  Clone ID: PAT_MRT3847_110020C.1.pep
MRAQTLMTQWCTRAATCGQLRMSTNTNTPKHDGIDAIFKQKRFLRTQVRKTLKSIDPSLKSHQDNTVQDIVLGAPWFRSSRRLCAYISCAALREVDTSKILSQILQHNSTTDGKKLYVPRVEDKNSHMRMLHISRIDDLIANSMDILEPTPVDADGNAREDVMQANDPVDLFLLPGLAFDRSGRRL

SEQ ID NO: 153932 - protein, 74 aa, Glycine max
  unsure (1)..(74): unsure at all Xaa locations
  Clone ID: PAT_MRT3847_110021C.1.pep
SSCALTTSLSRIVGIXVLLXVXSSSLCFVSSHLSHGSRAPTVSSTTSSEHAEHIGSMSLTKLTGSLEKLLIEDE

SEQ ID NO: 153933 - protein, 467 aa, Glycine max
  unsure (1)..(467): unsure at all Xaa locations
  Clone ID: PAT_MRT3847_110022C.1.pep
MEGVLSANEQQSMVSSFLEVAQGQTAETARQFLQATSWKLEEALQLFLIGSEGGAVPLPVPPPPLLHTPPLENVDSWTDQQPLSEPRKDAAAASESIGLNDAEEVRPPLPVIRETLYDDAMLYGASRAGHRSHEPSSLVAFRNFEEEMRQPGVWESEQGAASTAEASRDNLASLYRPPFHLMFNGAFDXAKDAASVQNKWLLVNIQSTKEFSSHMLNRDTWANEAVSQTISTNCIFWQVYDDTTEGRKVCTYYRLDSIPVVLVIDPITGQKMRSWIGMVQPESLLEGLLAFLDAGPKDHHITMSHKRPRGSSSPPKSKALVESDENKEEYEEVQRALAASMESMKESTAMAGRDNKDADVAVNGQETPMAKRPTYPTLPEEPKVERNLLCRVGVRLPDGRRVQRNFLRTDPIQLLWSFISAQLGEDETNSFRLTHAIPGASKILDYEINSTFQESGLANSMISVTWD

SEQ ID NO: 153934 - protein, 87 aa, Glycine max
  Clone ID: PAT_MRT3847_110023C.1.pep
MNDWSSSGAFVTPQVRSLRKGNSDHVAIAVDVDPGSTSRIEDEEDDKGNYVLLNLCTGFCCFQQHRLKFNSGIPTFLLQSMVSNSSQ

SEQ ID NO: 153935 - protein, 68 aa, Glycine max
  Clone ID: PAT_MRT3847_110024C.1.pep
KKDVTYDMILTDLDTDTCCNRTGGHDPELLHVVQVEGDHRMTGDSLLEQTGVMNTDHINIHRYGAIVV

SEQ ID NO: 153936 - protein, 105 aa, Glycine max
  Clone ID: PAT_MRT3847_110025C.1.pep
MGPVSEGQNPTPNLSRGPAAPPKNRRGQISPSPGGAFLLEILCNKALFPVGVPITVALTPPMVRFLARRKISKSGVLIGFGGENRGMKSIFVSPEAFSGCCETWK

SEQ ID NO: 153937 - protein, 41 aa, Glycine max
  Clone ID: PAT_MRT3847_110026C.1.pep
QRLFLESGYIYYYLCCAFMDHVLSYFDLILIFNSINLELLN

SEQ ID NO: 153938 - protein, 106 aa, Glycine max
  Clone ID: PAT_MRT3847_110027C.1.pep
TCQNPMLYPEPGGGPHPWGGVPWKKKRNKRWHPPLTAGGLGPLWGGNPSSKTRKWGPMGTPGGINKKKSPVIGLRGPPPFKHAPPGLGMGGLKKTRTGAWKGQEGG

SEQ ID NO: 153939 - protein, 75 aa, Glycine max
  Clone ID: PAT_MRT3847_110028C.1.pep
SGPICYQRNRAGAGMVAPFTVLKSMAGFPTRNTNNDITSIASIVGRVQCMHVCPPIVKKKFETLSYLSDLDYAQL

SEQ ID NO: 153940 - protein, 89 aa, Glycine max
  Clone ID: PAT_MRT3847_110029C.1.pep
LIHHFPILTLLTLNHSTPHISFISTLNISTNPLFYYPYISLPPFFTLTNSSLHCLTTFPYIFQTLTSSISTFTNYLIIPTILNFKQFLL

SEQ ID NO: 153941 - protein, 63 aa, Glycine max
  Clone ID: PAT_MRT3847_11002C.1.pep
YGCEKTTEGEVLLTNCSLFPYLYVINWVNYSPLKDALITLLPPPCYTLVYIRLNEPPWNVLSL

SEQ ID NO: 153942 - protein, 615 aa, Glycine max
  Clone ID: PAT_MRT3847_110030C.1.pep
MASLSGICSSSPTLKKFPNQSPSLTDPLRKDHVSFPARLADRTLSLAPLRAVAREVSDGALAAAVKKGLEKDPRALWRRYVGWLYQHKELGIYLDVSRVGFSDEFVKEMEPRFQAAFRAMEELEKGAIANPDESRMVGHYWLRDPKRAPNSFLKTQIENTLDAVCKFANDVVSGKIKPPSSPEGRFTQILSVGIGGSALGPQFVAEALAPDNPPLKIRFVDNTDPAGIDHQIAQLGPELASTLVIVISKSGGTPETRNGLLEVQKAFREAGLDFPKQGVAITQENSLLDNTARIEGWLARFPMFDWVGGRTSEMSAVGLLPAALQGIDIREMLAGASLMDEANRSTVLRNNPAALLALCWYWATDGVGSKDMVILPYKDSLLLFSRYLQQLVMESLGKEFDLNGNRVNQGISVYGNKGSTDQHAYIQQLREGVHNFFVTFIEVLRDRPPGHDWELEPGVTCGDYLFGMLQGTRSALYANNRESITVTVQEVTPRTVGALIALYERAVGIYASLVNINAYHQPGVEAGKKAAGEVLALQKRVLAVLNEASCKEPVEPLTLEEVADRCHAPEDIEMIYKIIAHMAANDRALIVEGSCGSPRSIKVFLGECNIDGLYA

SEQ ID NO: 153943 - protein, 68 aa, Glycine max
  unsure (1)..(68): unsure at all Xaa locations
  Clone ID: PAT_MRT3847_110031C.1.pep
LGLTASVFQWFPMSHCPLGDNYSNGLPSSNCDSHFKSFNNIGAIGAPLRDEEIXXCWLNLWGTVKLVR

SEQ ID NO: 153944 - protein, 179 aa, Glycine max
  Clone ID: PAT_MRT3847_110032C.1.pep
LEPLLNFMVVTSDSPMLHPAKQYLKLRSLGAPAVLLSLAMQGVFRGFKDTKTPLYATVAGDVTNIALDPLFMFVFRLGVSGAAIAHVISQYLISVILLWRLLEQVDLIPPSINHLQLDRFLKNGFLLLMRVIAVTFCVTLAASLAARQGPTSMAAFQVCLQVWLAVSLLADGLAVAGRQ

SEQ ID NO: 153945 - protein, 62 aa, Glycine max
  Clone ID: PAT_MRT3847_110033C.1.pep
NYMSWELEDSAKKERQGKEQGFPLKTEATAQRVTLLVSRGSKENTTKTQRQREREKETVRFI

SEQ ID NO: 153946 - protein, 103 aa, Glycine max
  Clone ID: PAT_MRT3847_110034C.1.pep
AVLLSLAMQGVFRGFKDTKTPLYATVAGDVTNIALDPLFMFVFRLGVSGAAIAHVISQYLISVILLWRLLEQVDLIPPSINHLQLDRFLKNGKGLFCLDQMIS

SEQ ID NO: 153947 - protein, 160 aa, Glycine max
  unsure (1)..(160): unsure at all Xaa locations
  Clone ID: PAT_MRT3847_110035C.1.pep
MSGIARGRLAEERKSWRKNHPHGFVAKPETLPDATVNLMVWHCTIPGKAGTDXWEGGFFFPLCNVPFRGGVFLLGGSPGANSSKGFFSPHWVFLFGNRWGGVFFFWEKLVGVETPLFFPGEKNIFFGGGFGEPFFFFKKKFFLFLPLPPRAVGWGVFFFF

SEQ ID NO: 153948 - protein, 128 aa, Glycine max
  unsure (1)..(128): unsure at all Xaa locations
  Clone ID: PAT_MRT3847_110036C.1.pep
GESACTALVAVVAAWFQTNQDLMPIRSQFDNLILEGSLEXSRLCEIETYRERFPDKRFHPPTVLHAKIRPLTVARSKSFSGFFHLQGTEDVTVFDFLDGAMSFDNIWDEIHSTSGVLLRKACPLQCQG

SEQ ID NO: 153949 - protein, 74 aa, Glycine max
  unsure (1)..(74): unsure at all Xaa locations
  Clone ID: PAT_MRT3847_110037C.1.pep
EKTILKGVTGMVCPGDIMAMLGLYGSGKTTLLTALGGRLKCXLSGKVTYNNQPFLGAMKRRTGFVVKDDVLYPH

SEQ ID NO: 153950 - protein, 206 aa, Glycine max
  Clone ID: PAT_MRT3847_110038C.1.pep
PLGFDAWASGRWVAEIKDSSQHVRLWLGTYDTPEEAARAYDEAARALRGENARTNFAPVSQLVNGQLGQQSGFNNNNNLLSTGSDIGKHGLSFASLKAKLSKNLQNIMARASDHNNNNNNKSSKSRVSDHFTFASIFHRRSYQIPEGDMMKNIEKVVQPSIIVPPMEQSGGDYNSCVANWESASSVSDCSSEWVGFGNNNSKPRLE

SEQ ID NO: 153951 - protein, 80 aa, Glycine max
  Clone ID: PAT_MRT3847_110039C.1.pep
EAKALGLGLAATDSRGVVRGWVGNVNAEVAMAMSDGSVLILEERLLGCDCGEEERGMDDSECERENPEVGLWSGSKPNSE

SEQ ID NO: 153952 - protein, 72 aa, Glycine max
  Clone ID: PAT_MRT3847_11003C.1.pep
KQGFPNFYTFKHSSKTTNNNNSLKNTKKINTPYHKTSTSKIIHKFHPPIFFFFFFFFFFFFFFFFLKNFFFR

SEQ ID NO: 153953 - protein, 309 aa, Glycine max
  Clone ID: PAT_MRT3847_110040C.1.pep
MASTHIGNAGDADAKALKGRPKKPSDDFISLFHGSDPVRVELTRLDHWLREKDRELGDALAEIKSLRNSERLKEKGVEELTDELIKVDEKLKAAEALLESKNLEIKKINEEKRAALAAQFAAEATLRRVHAAQKDDEMPPIEAIIAPLEAELKLARMEVAKLQDDNRALGRLTKSKEAALLEAERTVQIALAKASLVDDLQNKNQELMKQIEICQEENKILDKMLRQKGAEVEKLTQTVRELEEAVLAGGAAANAVRDYQRKVQEMNDERKILEREVARAKVTANRVATVAANEWKDANDKVMPEKQRL

SEQ ID NO: 153954 - protein, 174 aa, Glycine max
  Clone ID: PAT_MRT3847_110041C.1.pep
KGRIILLTTHSMDEADELGDRIAIMANGSLKCCGSSLFLKHHYGVGYTLTLVKSAPTASIAGDIVYRHVPSATCVSEVGTEISFRLPMASSSAFERMFREIEGCMKKTVSNMELSGNGDKDSLGIESYGISVTTLEEVFLRVAGCDYDEVECFVENNHTHKSDSVASLPTNDHP

SEQ ID NO: 153955 - protein, 50 aa, Glycine max
  Clone ID: PAT_MRT3847_110042C.1.pep
GGQTTVGPFPGPGKGPKNDPLQPKRRLPQRETHPGRKSRSDHTVRIHPPN

SEQ ID NO: 153956 - protein, 119 aa, Glycine max
  Clone ID: PAT_MRT3847_110043C.1.pep
TGRIDDATSQQSIEMAKFAVRYDGVTNCEHCAIPPKDLRAATVLELVLLMTYEETRLPGGVGDTVLAKGPLLALNGPMLYRLTRSVPEALITVEMATMFLEHSGYEVRVSSAMGPYWGT

SEQ ID NO: 153957 - protein, 89 aa, Glycine max
  unsure (1)..(89): unsure at all Xaa locations
  Clone ID: PAT_MRT3847_110044C.1.pep
MARGLKKHLKRLNAPKHWMLDKLGGAFAPKPSSGPHKSKECLPLILIIRNRLXYALTYREVISILMQRHVLVDGKXVGTDKTYPAGFMD

SEQ ID NO: 153958 - protein, 66 aa, Glycine max
  Clone ID: PAT_MRT3847_110045C.1.pep
LRMNAIQVFVNSKVLNFLEFTSFCYESFCPKIRLSPYLVLFLHVVSKKKKKKKKKKKKKKKKKKKK

SEQ ID NO: 153959 - protein, 60 aa, Glycine max
  unsure (1)..(60): unsure at all Xaa locations
  Clone ID: PAT_MRT3847_110046C.1.pep
PGWVGSNYFQLSPPLGPLPFEFGGLLFPLGQRGFSLIFKKMHAPLTFCFFLXTYCKSVXK

SEQ ID NO: 153960 - protein, 70 aa, Glycine max
  Clone ID: PAT_MRT3847_110047C.1.pep
MPIRFAGGACPRYEQSRSKQLHGEAVTEESRELLELVQTLQCWIQHLPQQSQVGSRPRRHEEKRPRPLLT

SEQ ID NO: 153961 - protein, 67 aa, Glycine max
  Clone ID: PAT_MRT3847_110048C.1.pep
YLLSFGLSYNAFLYLLRVLTYYIRPSTLSLLPHARPLAYSPPPPLPPPISTGATLIHVMIGKRFLGT

SEQ ID NO: 153962 - protein, 276 aa, Glycine max
  Clone ID: PAT_MRT3847_110049C.1.pep
GFLVSDFLTDELLLKYQEVAVKKFLDQDFSGAALSEFKREVRIMRRLRHPNIVLFMGAVTRPPNLSIISEYLPRGSLYRILHRPNCQIDEKRRIKMALDVARGMNCLHTSTPTIVHRDLKSPNLLVDKNWNVKVCDFGLSRLKHNTFLSSKSTAGTPEWMAPEVLRNEPSNEKCDVYSFGVILWELATLRLPWSGMNPMQVVGAVGFQNRRLDIPKEVDPIVARIIWECWQQDPNLRPSFAQLTVALKPLQRLVIPSYQDQLAPPMPQEISVNSTP

SEQ ID NO: 153963 - protein, 514 aa, Glycine max
  Clone ID: PAT_MRT3847_11004C.1.pep
MDLASVLLLLTSLCSSSALHELDSQEDALYALKVSLNVSANQLTNWNKNLVNPCTWSNVECDQNSNVVRISLEFMGFTGSLTPRIGSLKSLTILSLQGNNITGDIPKEFGNLTNLVRLDLESNKLTGEIPYSLGNLKRLQFLTLSQNNLYGTIPESLASLPSLINVMLDSNDLSGQIPEQLFSIPMYKYIATDNFSEKNILGQGGFGKVYKGILADGTKVAVKRLTDYESPAGDAAFQREVELISIAVHRNLLRLIGFCTTSTERLLVYPFMQNLSVAYRLRELKRGEPVLDWPTRKRVALGTARGLEYLHEQCNPRIIHRDVKAANILLDGDFEAVVGDFGLAKLVDIRHTNVTTQVRGTMGHIAPEYLSTGKSSERTDVFGYGIMLMELVTGQRAIDFSRLEEEDDVLLLDHREKRLETIVDCNLNKNYNIEDVEVIVQIALLCTQASPEDRPAMSEVVRMLEGEGLAERWEEWQHVEVNTRQDYERLQRRMNWGEDSVYNNQDAVELSGGR

SEQ ID NO: 153964 - protein, 49 aa, Glycine max
  unsure (1)..(49): unsure at all Xaa locations
  Clone ID: PAT_MRT3847_110050C.1.pep
XRKEXAWTGQEGXXWFXPXEGGXGXPXATYVPDDRXLVXNQXDPFGXXX

SEQ ID NO: 153965 - protein, 171 aa, Glycine max
  Clone ID: PAT_MRT3847_110051C.1.pep
RRNLSYSTGSDLYSKSTKESTSLQSAQSPCCEVQSHSYSSQKVNNEVEESPFCTADNSPQYLSASSKDDGFKRSPFTPTRSDGSRSYIRGYPDYPSYMACTESSKAKARSLSAPKQRPQSERSGSSDRYSLNGFDMSRLATQRAMQASFTNKAYPGSGRLDKLGMPVGYRF

SEQ ID NO: 153966 - protein, 292 aa, Glycine max
  Clone ID: PAT_MRT3847_110052C.1.pep
SSTASSSSFTQQVIKDISKNWLTIVFVTILLILLALIIAFFFKKIAQVNLETAILSVIPGALSQMLVMAEENKKANILVVSLTQTSRVIFVVILVPLISYFFQDNHHEMNHTTMEVPTLSQTLNIWQIIILFSMVGIIYIGMSKINFPTKQLLAPIIVLIIWNMTTHLTFSLDHWLLATAQLIYMIRIGLQIANLMSDLKGRIAIAIAFQNIMLIVTTFIMIIGIHLITNESINELFLGAAPGGMSQIVLVAMATGADVAMISSYHIFRIFFILFVIAPLIGYFINVKLNNK

SEQ ID NO: 153967 - protein, 113 aa, Glycine max
  Clone ID: PAT_MRT3847_110053C.1.pep
NTAGRGGGPLTGVFSAPNEKTVKIFVEKKISYLGIFKGVDKAGRELPKDVVASPSPEKIIPYGQGGGQNIVSFQKTPNVLIPNFWHILKIGAAVDFWPLPAFLAKVFVGSPTL

SEQ ID NO: 153968 - protein, 357 aa, Glycine max
  Clone ID: PAT_MRT3847_110054C.1.pep
MENVSVLLCNKEKDQMDLPPGFRFHPTDEELISHYLYRKVTDTNFSARAIGEVDLNRSEPWDLPWKAKMGEKEWYFFCVRDRKYPTGLRTNRATESGYWKATGKDKEIFRGKSLVGMKKTLVFYKGRAPKGEKTDWVMHEYRLDGKFSFHTLPKTAKNEWVICRVFQKSSGVKRTHISGMMMLDSYGNEMVYSSSALPPLTDSSPSIGNNTKALSVTDSAYVPCFSNPIDVPRGIFDSLNNINISINSNTLYGVSSNHSFYNTQGVQLQAPPTLPLPSSSNHYLRAFLENQGNGSNMSNNGFEPEREMVSVSQKTSLSTDVKAEISSLGKRHFENQNNPIASAAAVAPMDLATLWNY

SEQ ID NO: 153969 - protein, 357 aa, Glycine max
  Clone ID: PAT_MRT3847_110055C.1.pep
MENVSVLLCNKEKDQMDLPPGFRFHPTDEELISHYLYRKVTDTNFSARAIGEVDLNRSEPWDLPWKAKMGEKEWYFFCVRDRKYPTGLRTNRATESGYWKATGKDKEIFRGKSLVGMKKTLVFYKGRAPKGEKTDWVMHEYRLDGKFSFHNLPKTAKNEWVICRVFQKSSGVKRTHISGMMMLDSYGNEMVYSSSALPPLTDSSPSIGNNTKALSVTDSAYVPCFSNPIDVPRGIFDSLNNINISINSNTLYGVSSNHSFYNTQGVQLQAPPTLPLPSSSNHYLRAFLENQGNGSNMSNNGFEPEREMVSVSQKTSLSTDVKAEISSLGKRHFENQNNPIASAAAVAPMDLATLWNY

SEQ ID NO: 153970 - protein, 79 aa, Glycine max
  Clone ID: PAT_MRT3847_110056C.1.pep
LQSYGERQQGVGVQRGALSAGRCYKPDTIIPPDNSRYAVVNSVLGASSLRYGCPPSSNGHVGVDYASAFTLRLVVAGWP

SEQ ID NO: 153971 - protein, 59 aa, Glycine max
  Clone ID: PAT_MRT3847_110057C.1.pep
SGVLPQRSRLFSEHNMRILFARLFSSEELLVISYYGTSWVADYLFGLGAYVVHISANIT

SEQ ID NO: 153972 - protein, 69 aa, Glycine max
  Clone ID: PAT_MRT3847_110058C.1.pep
MHWDAGDPKVGGGTQPSKLQANIGHRKTICGNWPERRTGESGDVWLNNHPLTHWAQNWRGPTKQKLAHG

SEQ ID NO: 153973 - protein, 82 aa, Glycine max
  Clone ID: PAT_MRT3847_110059C.1.pep
LFSWAVWFFFFPVGSGAPPINFFLFTFLARRAFLFIFSSPLFFCFVMGSPFHSGPRFALAFAKPWSASPYGKVVCLPVPDRN

SEQ ID NO: 153974 - protein, 38 aa, Glycine max
  Clone ID: PAT_MRT3847_11005C.1.pep
LVSTSFYCIVSAHSKSSQNAHYGRAVRILSIINDSYGK

SEQ ID NO: 153975 - protein, 99 aa, Glycine max
  Clone ID: PAT_MRT3847_110060C.1.pep
MSNRCHGGSAGNKFPMSLGLPVPATVNCADATGAKNRNIIALKGINGTLNRLPSTCVRDTLMATVMMGQPDLRMKVLLAVIVRHLMPWRQKDGVYIYFN

SEQ ID NO: 153976 - protein, 68 aa, Glycine max
  Clone ID: PAT_MRT3847_110061C.1.pep
LVARRRQKGATNDTDTNQALPALTHSTTPYSYHSDLPNTHTPDNEPKMQLQPTLSTLCLYVTLTITLT

SEQ ID NO: 153977 - protein, 62 aa, Glycine max
  Clone ID: PAT_MRT3847_110062C.1.pep
WLEFKLNWFNFMCTSNFILLYCLGFNYHNLLNINNYRYTITVRNSCYSSICHDHNHLAAFEI

SEQ ID NO: 153978 - protein, 328 aa, Glycine max
  Clone ID: PAT_MRT3847_110063C.1.pep
GSLSFVLAKFDGLLGLGFQEISVENAVPVWYNMVKQNLVSEQVFSFWLNGDPKVKNGGELVFGGVDPKHFKGEHIYVPVTKKGYWQIEMGDFFIGGLSTGVCEGGCAAIVDSGTSLLAGPTTVVTEINHAIGAEGVLSVECKEVVSEYGELLWDLLVSGVRPDDVCSQVGLCFKRAKSESNGIEMVTEKGQRELSAKDTALCTSCQMLVVWIQNQLKQKKTKEIVFNYVNQLCESLPSPNGESVVDCNSIYGLPNITFTVGDKPFTLTPEQYILKTGEGIAEVCLSGFIAFDIPPPRGPLWILGDVFMRVYHTVFDYGNLRVGFAKAA

SEQ ID NO: 153979 - protein, 154 aa, Glycine max
  Clone ID: PAT_MRT3847_110064C.1.pep
ILIPCSNGIEMVTEKGQRELSAKDTALCTSCQMLVVWIQNQLKQKKTKEIVFNYVNQLCESLPSPNGESVVDCNSIYGLPNITFTVGDKPFTLTPEQYILKTGEGIAEVCLSGFIAFDIPPPRGPLWILGDVFMRVYHTVFDYGNLRVGFAKAA

SEQ ID NO: 153980 - protein, 67 aa, Glycine max
  Clone ID: PAT_MRT3847_110065C.1.pep
LMDTPCAVVSRTPVSMFDAVHPALVVVLSQLCVLLSTPRLDVPVTVTDHSVVVLFRLPPPVRVILVA

SEQ ID NO: 153981 - protein, 97 aa, Glycine max
  Clone ID: PAT_MRT3847_110066C.1.pep
LCRKMRLKRVVRVPAIILKMADIPPDDYSWRKYGQKPIKGSPHPRGYYKCSSVRGCPARKHVERALDDPAMLVVTYEGEHNHTVSAADATNLILESS

SEQ ID NO: 153982 - protein, 294 aa, Glycine max
  unsure (1)..(294): unsure at all Xaa locations
  Clone ID: PAT_MRT3847_110067C.1.pep
ATSGSGDVVRRGGGGGGGDELAPHPALSFSLGYLGLSDLLVVERVCKSSHSTVCGDPLLWRSIHVDQPLNERITDDVLLQLTNRAQGHLQCLSLVECTRITDDGLKRILEGNPKLTKLSVPGCTRLSIEGIVTILKAYNSMDTQGVKHLHIGGLYGVTQKHFEELRXLLGADSPLLPHSHKPHYYRRGNLYLSCDDDQAIDIEVCPRCQNLRLVYDCPAESCQGVEHTTQVCRACTLCIPRCSQCGRCINDSEYEETFCLELLCSSCSKQLVKCSERGDRKIGSDKSVVIHEQN

SEQ ID NO: 153983 - protein, 369 aa, Glycine max
  Clone ID: PAT_MRT3847_110068C.1.pep
MHTFFLCLILLSLSLSLLHPSIFSFSSSHGVIAPTMAVDLMTTGCSRNDNINSFTTKAEENAVQEAASGLESIEKLIRLLSQTQTQTRHQINNNSSNEIAIAMDCKVVADVAVSKFKKVISLLGRTRTGHARFRRAPLPNQNQHTQPPSEPPVFHATPLHQIPPPSLHQIPKTERNLNDSSSSKTIHFSYPSAATSFISSLTGDGAADNKQPSSSPPAAAATTTPFQITSLSHVSSAGKPPLSTSSFKRKCSSENLGSGKCGSSSSRCHCSKKSRKMRLKRVVRVPAISLKMADIPPDDYSWRKYGQKPIKGSPHPRGYYKCSSVRGCPARKHVERALDDPAMLVVTYEGEHNHTLSAADATNLILESS

SEQ ID NO: 153984 - protein, 332 aa, Glycine max
  Clone ID: PAT_MRT3847_110069C.1.pep
MAVDLMTTGYTRNDNISSFTTKAEENAVQEAASGLESVEKLIRLLSQTQAQAQAHHQFNNNNSSSNEIAIAMDCKAVADVAVSKFQKVISLLGRTRTGHARFRRAPLPNQHQHTQPPSEPPVLHATPLHQIPPPSLHQIPKTEKHLNDSSSKTLHFSYPSAVTSFVSSLTGDAADNKQPSPAATTTTSHFQITSLSHVSSAGKPPLSSSSFKRKCSSENLGSGKCGSSSSRCHCSKKRKMRLKRVVRVPAISLKMADIPPDDYSWRKYGQKPIKGSPHPRGYYKCSSVRGCPARKHVERALDDPAMLVVTYEGEHNHTVSAADATNLILESS

SEQ ID NO: 153985 - protein, 624 aa, Glycine max
  Clone ID: PAT_MRT3847_11006C.1.pep
SIIYVVVSLVDVSGKMDLASVLLLLTSLCSSSALHELDSQEDALYALKVSLNVSANQLTNWNKNLVNPCTWSNVECDQNSNVVRISLEFMGFTGSLTPRIGSLKSLTILSLQGNNITGDIPKEFGNLTNLVRLDLESNKLTGEIPYSLGNLKRLQFLTLSQNNLYGTIPESLASLPSLINVMLDSNDLSGQIPEQLFSIPMYKYVCFTGNNLNCGVNYHHLCTSDNAYQDSSHKTKIGLIAGTVTGLVVILFLGGLLFFWYKGCKREVYVDVPGEVDRRITFGQIKRFSWKELQIATDNFSEKNILGQGGFGKVYKGILADGTKVAVKRLTDYESPAGDAAFQREVELISIAVHRNLLRLIGFCTTSTERLLVYPFMQNLSVAYRLRELKRGEPVLDWPTRKRVALGTARGLEYLHEQCNPRIIHRDVKAANILLDGDFEAVVGDFGLAKLVDIRHTNVTTQVRGTMGHIAPEYLSTGKSSERTDVFGYGIMLMELVTGQRAIDFSRLEEEDDVLLLDHVKKLQREKRLETIVDCNLNKNYNIEDVEVIVQIALLCTQASPEDRPAMSEVVRMLEGEGLAERWEEWQHVEVNTRQDYERLQRRMNWGEDSVYNNQDAVELSGGR

SEQ ID NO: 153986 - protein, 217 aa, Glycine max
  unsure (1)..(217): unsure at all Xaa locations
  Clone ID: PAT_MRT3847_110070C.1.pep
MQTRYIERSSSSAREKRALDSGSADEDQPQRKRPALASVIVEALKVDSLQKLCSSLEPILRRVVSEEVECALEICPAKLMGGLWWVCGGSAWTRHSLGFPWYHNPPGSRPWPSSLCPSRGLSASSRLRGRGXCWVEGGSPKGIEGPDDSSLQLQFRTRLSLPLFTGGKVEGEHGSAIHIGLIDTTTGHVVTCGPASCVKLDVIVLEGDFNNEDDDNW

SEQ ID NO: 153987 - protein, 125 aa, Glycine max
  Clone ID: PAT_MRT3847_110071C.1.pep
ACSMISSPSVTTVNRACAGMFAPFTGLNSIAGFPIMNTNTDITSIASNGGRVQCMQVWPPVCKKKCETLSYLPDLDDAQSAYEVQHHLMNGWITCLECQLEHCFVYRVHYMSPVYYDGLYWTIWN

SEQ ID NO: 153988 - protein, 84 aa, Glycine max
  Clone ID: PAT_MRT3847_110072C.1.pep
HKFFGSETMHEKCVEATKEYTHGMQYTSDSKTAYQQHYFHARDLEVHTKDTLVLSIHGTELSNMTYYKTHGYRVEKAYSARTDE

SEQ ID NO: 153989 - protein, 41 aa, Glycine max
  Clone ID: PAT_MRT3847_110073C.1.pep
MMLGYNRSPSCNWDASGPSEGHMRDCIPEIAQLGYVWQLLT

SEQ ID NO: 153990 - protein, 115 aa, Glycine max
  unsure (1)..(115): unsure at all Xaa locations
  Clone ID: PAT_MRT3847_110074C.1.pep
XXXXGXXXXXXXXRRXXLXSXXVXXTMXXTXSTVXTXLXAXXXXGXKXXXFXXRPQXKCXLYXXXXXXRXXQVXXXXXYIHSPSXSXXNXVXXPXXXXTXIPXXESRAXRYXYXX

SEQ ID NO: 153991 - protein, 230 aa, Glycine max
  Clone ID: PAT_MRT3847_110075C.1.pep
MIHGKRQRSSSGSASKKTKKIVNGKKSPSNHVKHGQKGASKTNSHHEDAKESSELSNPEDISKAEINSGGSEAEQAEGSDVIVTKQKKSNKKPKSVSRGKKLKKEKSLRYKKESDEEKRESDQEKQDHGERLAEENIPQGDQNDDAESSSKETDGNESRGALRENGNEEESGSGGNENDSDGEKSSPREVEKSPKESASPDGAKIAEVSDDELLSKWRRPSGKKSSGQKR

SEQ ID NO: 153992 - protein, 147 aa, Glycine max
  unsure (1)..(147): unsure at all Xaa locations
  Clone ID: PAT_MRT3847_110076C.1.pep
VFSRIDITYRVTFATSCSLRANGSNAKFLVVGNSLIPKAHRSAPPVSCTHDPWRQMIAYLLHESRNXLTSNPKFVLQMLCSFGSHSAESQFRVHVCXLVHAAMTDLKHLDLEGDGLIDNENIPDQTYDPSTVHXVRTYCGXIWLAAL

SEQ ID NO: 153993 - protein, 72 aa, Glycine max
  unsure (1)..(72): unsure at all Xaa locations
  Clone ID: PAT_MRT3847_110077C.1.pep
SAYLIDKFSPFEEXCKKCHMRKKREGEMTMYFDLVKLKIENLYLLQQKCITRSPNFKESIANYKKSLKPLVR

SEQ ID NO: 153994 - protein, 66 aa, Glycine max
  Clone ID: PAT_MRT3847_110078C.1.pep
TLIPHSLSYFSPYSIRMFRDERSLGGHDDVQNNLGRVAERKHVYAVIDGVSSICTRTVSSTFPRRL

SEQ ID NO: 153995 - protein, 337 aa, Glycine max
  Clone ID: PAT_MRT3847_110079C.1.pep
MAAKKAWRIIPRPLLETILNNHVQHHRVPQLLLLHGPRGVGKTTLINQRLLPEWNKGPHITGYVDFAESIKAHHGPWASWSTCPLPVLSECRKTLEQCLESMAEKGVRAGTITSQQIFATLNKWHGLTTALRRVLQGKSRVPDRASPLVLWDRAVFAMSGQCTASEVRRIWGLGEKEKNDFSSEEASYLKESVAALKLAKKVIAVQQGWRANAIAHMNRIGTFSRTLTHSCTDWPCLLLELLSQAAEIDHFQPKLVINNIEVLKHAAENDESSVSGPLYHDSLIWRIMALGADKLCLPVILVTSDSYYSYEALEFGYMEIFISRETFGWTPQEAKMH

SEQ ID NO: 153996 - protein, 82 aa, Glycine max
  Clone ID: PAT_MRT3847_11007C.1.pep
SALLPFFGNFMSLPGAISPFPLTFILANHMSLVANANKLTSIQKLWHWINICFFAFMSVAATIAALRLIDLDSKTYHVFADI

SEQ ID NO: 153997 - protein, 89 aa, Glycine max
  unsure (1)..(89): unsure at all Xaa locations
  Clone ID: PAT_MRT3847_110080C.1.pep
MFGTVEHDEIRRAYRKMDLWYPDRWIKDPKLALEAKKXFQRVQEAYSVLSNKGKRRIYDAGLFGLIGEDDDXGFVDFMQTWSFDDAESE

SEQ ID NO: 153998 - protein, 48 aa, Glycine max
  unsure (1)..(48): unsure at all Xaa locations
  Clone ID: PAT_MRT3847_110081C.1.pep
QVVXXKLXTTXLTRSGXASYXGHHNGFPXICCXXFRSSVXGEXEEAQV

SEQ ID NO: 153999 - protein, 169 aa, Glycine max
  Clone ID: PAT_MRT3847_110082C.1.pep
RLLAGLYQPTAGAVEIDGLDLRQLDPADFRRHIGVVEQEPRLFRGTVRENLLLGREAGADRLAEVLRLTGLDRVVAAHPMGLDMPVGEGGAMLSGGQRQLVALARALLLRPQILLMDEPTSAMDAQTEAQFVAQLRQALPRCTLVVVTHRPAMLELGERIAVLEGGRMI

SEQ ID NO: 154000 - protein, 53 aa, Glycine max
  Clone ID: PAT_MRT3847_110083C.1.pep
SCKCHCKIQLRFLVQVIGSLSVIISFYNAYISTFILSFYMVHSTNFVLTYFLS

SEQ ID NO: 154001 - protein, 67 aa, Glycine max
  Clone ID: PAT_MRT3847_110084C.1.pep
RYGLQDVTVKAFGCNGHHGVRTTRTLFLVRDLTVRDLSGYLSLSLSMMLMHLEEQVSTLTRQDPVDG

SEQ ID NO: 154002 - protein, 59 aa, Glycine max
  unsure (1)..(59): unsure at all Xaa locations
  Clone ID: PAT_MRT3847_110085C.1.pep
DKGLLLAPAFIKLGRYYIFFLSHLTTMFEVRWPHLTXSLVNPNHHLCYHFTTWKQMTNK

SEQ ID NO: 154003 - protein, 49 aa, Glycine max
  Clone ID: PAT_MRT3847_110086C.1.pep
IKIFSTNGGVSCQRSPQKLLQNSFYTCSLHINQLRKIKFRIRIPSFLPL

SEQ ID NO: 154004 - protein, 50 aa, Glycine max
  Clone ID: PAT_MRT3847_110087C.1.pep
HDDKDCSSVLEHWPADPRLLPLVVLARLHRHGLRLLLLVPECCCVCVCVC

SEQ ID NO: 154005 - protein, 177 aa, Glycine max
  unsure (1)..(177): unsure at all Xaa locations
  Clone ID: PAT_MRT3847_110088C.1.pep
IRLSQEGTLVERRLHQRKWKWVVHGSPEHQTLTSITLALQDESSETFISLFFPTSTGSVFEYQMPKQLGTVPNNQFPGAWGSHEHPLHAKAARGIAGLPLQVGRILFALDDGRLAELHLAGLGGETSGPSVPQNFRRKAXTKYVWTILDVPESEGWNAEYCTEERGXGNCMAGTKDE

SEQ ID NO: 154006 - protein, 50 aa, Glycine max
  Clone ID: PAT_MRT3847_110089C.1.pep
MATSMISPPTDTTVNKTRTGIISLTTCLLGIAGLLTRKTARDITSMVSNP

SEQ ID NO: 154007 - protein, 93 aa, Glycine max
  Clone ID: PAT_MRT3847_11008C.1.pep
KQEILVLTVQEPYHLIVGFAQLMGITCSISDNTLRSRHATVDGQYCLQLHMHVPRSAYHCKKQLERGRKVYLVQSIMDSFKKLNHLIYRNMRG

SEQ ID NO: 154008 - protein, 77 aa, Glycine max
  Clone ID: PAT_MRT3847_110090C.1.pep
DKARQNLFNGHKTNKCYHHFIQPLVWGRENGSLVHFQLEKKGRRKLVQLHKEILKPIRRYPSPLPDSLKSGALTRSN

SEQ ID NO: 154009 - protein, 47 aa, Glycine max
  Clone ID: PAT_MRT3847_110091C.1.pep
TIISYIKTIFNVSLTKDKSFKRIFFPLIEKCPKIGIGEPIVPYSLVA

SEQ ID NO: 154010 - protein, 78 aa, Glycine max
  unsure (1)..(78): unsure at all Xaa locations
  Clone ID: PAT_MRT3847_110092C.1.pep
LTDQHIYKFNVAFRLFHKDLHGHINTKGLYTVMXPLGQNPTDAXLDDMIQEDDADCNXLLIFHDALNLMERKIKDTDS

SEQ ID NO: 154011 - protein, 126 aa, Glycine max
  unsure (1)..(126): unsure at all Xaa locations
  Clone ID: PAT_MRT3847_110093C.1.pep
MPFVKVLKNKAYFKRYQVKYRRRREGKTDYRARKRLITQDKNKYNSPKYRLVVRITNTKVICQIAYAEIDGDKILAQATSAELPRYGLTVGLKNYAAAYATGLLVGRRVLQKLGLDEDYEXNTEVD

SEQ ID NO: 154012 - protein, 446 aa, Glycine max
  Clone ID: PAT_MRT3847_110094C.1.pep
MKMKKKRKESEASGRSNLPDEISKSHYSLERRSRLIKRCREDGVVATVPPSRGASLFLTPSRGLKRKIGCIDKATQMGRSVRIEDDYVTGGSAIGQGKFGSVTVCRARANGAEHACKTLRKGEETVHREVEIMQHLSGHPGVVTLEAVYEDEECWHLVMELCSGGRLVDRMKEGPCSEHVAAGILKEVMLVVKYCHDMGVVHRDIKPENILLTAAGKIKLADFGLAIRISEGQNLTGVAGSPAYVAPEVLLGRYSEKVDIWSSGVLLHALLVGGLPFKGDSPEAVFEEIKNVKLDFQTGVWESISKPARDLVGRMLTRDVSARITADEVLRHPWIFFHTRDLVGRMLTKAKLKLQNAAACQNESGLVGGNKIVDDGSLDEDYSSPFSSSESCNSEYHEDCAWIDALSTAVSRVRISETKRTKLWGSTSPLDQQGSSNMKTNLCKAF

SEQ ID NO: 154013 - protein, 388 aa, Glycine max
  Clone ID: PAT_MRT3847_110095C.1.pep
MSWWWAGAIGAAKKKFEEEEPPRSFQSVGLVIGVTGIVGNSLAEILPLADTPAGPWKVYGVARRPRPPWNADHPVEYIQCDVSDPADAEAKLSALTDVTHVFFVSWTNRSTEAENCEVNGAMLQNVLRAVIPNAPNLRHVSLQTGGKHYIGPFEFIGKIESHEPPFAEDMPRLDAPNFYYTQEDILFEETAKKEGLTWSVHRPQVIFGFSPYSLMNMIGTLSVYAAICKHEGVPLRFPGTRGAWESYSCASDADLIAEQHIWAAVDPYARNEAFNCSNGDVFRWKHLWKVLAEQFGIEEYGFEEEGLSLSELMKDKGPVWDEIVSENQLLPTKLDEVADWWFVDLIFSGEGMLDSMNKAKEHGFLGFRNSKNSFISWIDKTKAYKIVP

SEQ ID NO: 154014 - protein, 75 aa, Glycine max
  Clone ID: PAT_MRT3847_110096C.1.pep
NTGLLPFRGFIERAPPKGPSPLQISPVPPVFEPKVGTWKPLPCFQKNWVKQLGKFHPGGGLPLPLVLNPRYSIPF

SEQ ID NO: 154015 - protein, 84 aa, Glycine max
  Clone ID: PAT_MRT3847_110097C.1.pep
AKPDLWRVPFFFSLTTYIDCVSDGGVQKGSSMKPIHLLFVARRPVSVSRFFWTGNYKHVVSYYVQCSDVSYVRFDDKWQRAFLS

SEQ ID NO: 154016 - protein, 101 aa, Glycine max
  Clone ID: PAT_MRT3847_110098C.1.pep
MGGCREGWEGAGPPFWGGARPSEGPVFAVFRNRWGGFFASKKNVATEVFLPPGACSGLKRKFPGRWNLSFRHVPGKKKKKSQGFGFFWAPPVKKKIFFFGF

SEQ ID NO: 154017 - protein, 54 aa, Glycine max
  Clone ID: PAT_MRT3847_110099C.1.pep
RRFITKDYDSIRFSKIAFYQPGRALLTPCPDNDYTPALVLIITCPLLLNGGIKT

SEQ ID NO: 154018 - protein, 72 aa, Glycine max
  Clone ID: PAT_MRT3847_11009C.1.pep
KGFTFLKFEMCQIIYTLLFEKGIRFSPRKIKMSRFLLGGCCIFSPPPFGWLLNHFSPPKKKKKKKKKKKKKK

SEQ ID NO: 154019 - protein, 49 aa, Glycine max
  Clone ID: PAT_MRT3847_1100C.1.pep
VYMFCPPKNIHFRVNVHECPFVCAPPTLIIVPNNEPKAIQFFHLPSHVL

SEQ ID NO: 154020 - protein, 79 aa, Glycine max
  Clone ID: PAT_MRT3847_110100C.1.pep
MECGLVLTTFQDALSPMEQVLRSPIAMLAFLLILFFSNQTTALTWSFGGAVVVQSFLKLDIPGWLHYATIRVIAVLPAL

SEQ ID NO: 154021 - protein, 120 aa, Glycine max
  Clone ID: PAT_MRT3847_110101C.1.pep
FGSREGHLLVRHFQFLRWSAYRYTPDSKKAFLHLLAEVDKWHAESGDGRTIVHCLNCGGRIGTFCACATVLEMIRCHILVDVFFAAKTLRNYIPNMVETMDQYHFCYDVALEYLEVLESR

SEQ ID NO: 154022 - protein, 45 aa, Glycine max
  Clone ID: PAT_MRT3847_110102C.1.pep
GFRCSQKGRPETFQTKWKLQPKECHLPKIESKENFEKLPEKPLVF

SEQ ID NO: 154023 - protein, 110 aa, Glycine max
  Clone ID: PAT_MRT3847_110103C.1.pep
KIPNFSHSQPFCRNSKGLKEDIGAEIKLYEPPTLSIMVKKALMIEQINRAIWKVGPDVASNSISKVNTSYRNPSHTKTITYGMSQKGGGKSNGPFNSFTSSTSVNTPENN

SEQ ID NO: 154024 - protein, 101 aa, Glycine max
  Clone ID: PAT_MRT3847_110104C.1.pep
APARNSGVAPRVPTPKGFKPAQIPFFNQGLPGFQKPPRENPFFPRERDFFSPLYKRVFFPPLFLFSLLNPLKYFWWGGTQKIGVGLFWLYQMAPPLFSCSG

SEQ ID NO: 154025 - protein, 208 aa, Glycine max
  Clone ID: PAT_MRT3847_110105C.1.pep
FSFQNILAAGTDTTAATSVWAMTALVKNPRVMKKVQEEVRNVGGTKDFLDEDDIQKLPYFKAMIKETLRLHLPGPLLVPRESTEECIVDGYRIPAKTILYVNAWVIQRDPEAWKNPQEFIPERFLDSDVDFRGQDFQLIPFGSGRRSCPGLPMAVVILELVLANLLHSFDWELPQGMIKEDIDVQVLPGLTQHKKNDLCLCAKTRSHI

SEQ ID NO: 154026 - protein, 117 aa, Glycine max
  unsure (1)..(117): unsure at all Xaa locations
  Clone ID: PAT_MRT3847_110106C.1.pep
SATGDGEERTLIPGTRGEEAHNKXXSEQEKSXPTPAGTERPKXEKHPXRKKGDKPKTRXRTIRPMECNLAVRQKILNLVRPIMKKRDKLSRQAGINPHPMERTGLANRSLKKGNDIL

SEQ ID NO: 154027 - protein, 167 aa, Glycine max
  unsure (1)..(167): unsure at all Xaa locations
  Clone ID: PAT_MRT3847_110107C.1.pep
SFRHQAXSSFTAAKRAPSRRPHMPAALQAGAVRHGQVGLHWPVQQVDRQATEGSQGRGAGSVRLSVVCRPSGRGSVQGRLRVHVGRLVQVHELHADQDAQESHLCAAQERRRDVRAAHRDQEVLTQHSSTSPIGCSSVGKPVKRQRVVRPSFANARFPLSCKKKKKK

SEQ ID NO: 154028 - protein, 147 aa, Glycine max
  Clone ID: PAT_MRT3847_110108C.1.pep
MAEARLYAPPSQLDIKQIILEAQHRWLRPAEICAILGNYKKFRIAPEPAHMPPSGSLFLFDRKVLRHFRKDGHNWRKKKDGKTVREAHERLKAGSVDVLHCYYAHGEENENFQRRTYWLLEELLFSPFLFNIVAGNSLTLFSSIIDK

SEQ ID NO: 154029 - protein, 120 aa, Glycine max
  Clone ID: PAT_MRT3847_110109C.1.pep
RASILSYSLSLIFSLTKETLLTTLSVVFSIAMGGNRQRKSSSFKSVFNIFKSSNRQRGGHYDANYDDAPKQWTKVWPSDEDRGRWGVADPVIDLRATAFIAQYKKRVSESEIHCQAQVQQ

SEQ ID NO: 154030 - protein, 132 aa, Glycine max
  unsure (1)..(132): unsure at all Xaa locations
  Clone ID: PAT_MRT3847_11010C.1.pep
MVLNSGSGDARLLTQLSCKSHRLNNYEPDCRPELVPSFSGPHILQLRSRLPTPXIKPHKVLGRARAVSDNPSNTRMRAGYGRYIFKPLQPLIQGRDXGGRFQPSETXVKTFSVGQHVIGALHATALRGTDSD

SEQ ID NO: 154031 - protein, 50 aa, Glycine max
  Clone ID: PAT_MRT3847_110110C.1.pep
RIVMGPKSQEIVDIQFKRAGLLDRGLRSMRLNGEKASWSGIMKVHLGLDS

SEQ ID NO: 154032 - protein, 86 aa, Glycine max
  unsure (1)..(86): unsure at all Xaa locations
  Clone ID: PAT_MRT3847_110111C.1.pep
XLGEXESPKGXLXLPQLKXGVFGGTQNPFGXXWGNPKIFXRKXLXLNXXLLXHLFXLXFXFEGVKGRGKQXXXXXXXAQVVKFXLA

SEQ ID NO: 154033 - protein, 63 aa, Glycine max
  unsure (1)..(63): unsure at all Xaa locations
  Clone ID: PAT_MRT3847_110112C.1.pep
RLEQAHNNNIYLNDGLCNVHCGTNQHHSQDHTMRNNKPQLWLSLSLIITCFSFHTTYEGXXXS

SEQ ID NO: 154034 - protein, 132 aa, Glycine max
  Clone ID: PAT_MRT3847_110113C.1.pep
VTPSPPRRENEDLEDYSGPDEISDRNDGAGKIDTEVKAKTKAKPESESDSESEKSASSESDDSRSRKKRRKGSAGSSRKSYSESESESDSESEEEERRRRKSRKNRRKRSYRSRKKRRYSDSDESEESESDD

SEQ ID NO: 154035 - protein, 72 aa, Glycine max
  unsure (1)..(72): unsure at all Xaa locations
  Clone ID: PAT_MRT3847_110114C.1.pep
MFLSPCSFFFDSKTIFSYRPILRICAINASQPFDYVYRMAQQFYYSQXLKIVIVGFGNFLAVLSQTLVRQGH

SEQ ID NO: 154036 - protein, 149 aa, Glycine max
  unsure (1)..(149): unsure at all Xaa locations
  Clone ID: PAT_MRT3847_110115C.1.pep
MASTARVAAALILLLLGLSATAPLAARDLMSAAPSAKKQPAGRKPSVQPGYPGTNPGGGGGGGIPTIPGFGSIPGMGGGMGGINVPGMGGGWGGGYGTPSGGYSRGGVEEPTVVCSHEGPCYRKNVTRPTKRXTPYRSCCKGKSTCGGR

SEQ ID NO: 154037 - protein, 69 aa, Glycine max
  Clone ID: PAT_MRT3847_110116C.1.pep
FPLEKEKGNKAGGSAVEVKDQPNSSKQQKPKLSKAERRALQESQRAAKAAAKGEGSKASGTVATMNAKP

SEQ ID NO: 154038 - protein, 170 aa, Glycine max
  Clone ID: PAT_MRT3847_110117C.1.pep
QIMQKISKGPLDVRANGKREEFRQDYRNLRKALCMGYANQLAERKMHHNGYRTLGFQAQVVQVHPSSVLSLDDLGKFPDYVVYHELIATPRPYMRNVCAVEMRWVIPIINKLKSLDVYKLSGGVHHVEEEPEKKLPDFPKKDVEVASTADDRESRIQAARERFLARKGKK

SEQ ID NO: 154039 - protein, 49 aa, Glycine max
  unsure (1)..(49): unsure at all Xaa locations
  Clone ID: PAT_MRT3847_110118C.1.pep
VXYHHAXLCHGQLXXXPIPSQXHQHXHHXQQAXXXAARHXSDGAPXXSX

SEQ ID NO: 154040 - protein, 118 aa, Glycine max
  Clone ID: PAT_MRT3847_110119C.1.pep
LDLVFFLLSVSSTCKSALTGWFCLCQNPITGIHWIFILNDWKSTFEGIMFSVHLFNAYTNVMNVPFHNQTSVPPWKSIKKLKEENSKMETKEMNKMTPQSHFDNRKSLEICHKNFKTP

SEQ ID NO: 154041 - protein, 46 aa, Glycine max
  unsure (1)..(46): unsure at all Xaa locations
  Clone ID: PAT_MRT3847_11011C.1.pep
NXXNHCXXXXXIXMDHDHEXPILXAFSLTSXKEXLHTTXSXXCYGT

SEQ ID NO: 154042 - protein, 89 aa, Glycine max
  unsure (1)..(89): unsure at all Xaa locations
  Clone ID: PAT_MRT3847_110120C.1.pep
LCNGINMPHCWXLENVATAAFAVMGVMRIGLWRPVITLVAKPCAQRMYKCVKRAYCNATGDTKLIGLSACHLITVVPAIMRVPRYTKPP

SEQ ID NO: 154043 - protein, 600 aa, Glycine max
  Clone ID: PAT_MRT3847_110121C.1.pep
MTDYEERYEGNGEEEELHNSHHQPHPDSSPLPTHDDLTDSKSRHGSRDYDRDSSRSRDKEREKGRDRERKREKGRDREREKSRDRDSERSRDKDRDRDKSKDRERDRDRDGEKERDRDRDRHHRDRHRDRGERRERTRDRDDDDYHRSRDFDRRRDFDREDRHRRRSRSRSQSRSGGRSEHRSRSRSRSRSKSKRTSGFDMAPPASAMLTGASAVAGQITGANPTIPGMFPNMFPLATNQMQQFSALPVMPVQAMTQQATRHARRVYVGGLPPTANEQSVATFFSQVMAKIGGNTAGPGDAVVNVYINHDKKFAFVEMRSVEGASNSRALDGIIFEGAPVKVRRPTDYNPSLAATLGPSQPNPNLNLGAVGLTPGSAGGLDGPDRIFVGGLPYYFTETQIRELLETFGPLRGFDLVKDRETGNSKGYAFCVYQDLAVTDIACAALNGIKMGDKTLTVRRANQGANPQQPKPEQESILMHAQQQIALQKLMLQPALVATKVVCLTHAVSSDELKDDEDYEEILDDMRQECSKFGTLVNVVIPRPPSDGEPAAGVGKVFLEYVDIDGATKARAGLNGRKFDGNQVVAVFYPENKFAQGDYEG

SEQ ID NO: 154044 - protein, 95 aa, Glycine max
  Clone ID: PAT_MRT3847_110122C.1.pep
PLSSHACSLHVYENLFAYFTVLFSLYAGTLVNVVIPRPPSDGEPAAGVGKVFLEYVDIDGATKARAGLNGRKFDGNQVVAVFYPENKFAQGDYEG

SEQ ID NO: 154045 - protein, 292 aa, Glycine max
  Clone ID: PAT_MRT3847_110123C.1.pep
RSSSKISLTSIRNRLNSYTKSKSLKSPVSCVLETTEVKLSGTRNRAYQRSLLNDFSNTAKHSEGISEFINRDIQFSGLSCSPVHLHGNLKLKNKQGLPFFEFKVKCPEDVFVVKTWKSGNAFNWAYTFHSMDNRKKSTATDLGSHCCDKDSSMVAQMLVSSNSCSKLEGGMFDNSMVSEFVLYDLTHSSKSVSPEKKRYSDQHCSKTLKASRVGMKGETFRPDEETLFTKNKLLSGNADFDKSNSYPLSSTELHSNPEMAAIVLQIPFRKRESLKYKRRDRINAEEHSKISD

SEQ ID NO: 154046 - protein, 185 aa, Glycine max
  Clone ID: PAT_MRT3847_110124C.1.pep
AGNSARAQSRSGGRSEHRSRSRSRSRSKSKRTSGFDMAPPASAMLAGASAVAGNITGANPTIPGMFPNMFPLATNQMQQFSALPVMPVQAMTQQATRHARRVYVGGLPPTANEQSVATFFSQVMAKIGGNTAGPGDAVVNVYINHDKKFAFVEMRSVEEASNAMALDGIIFEGAPVKDRRPTGYN

SEQ ID NO: 154047 - protein, 145 aa, Glycine max
  unsure (1)..(145): unsure at all Xaa locations
  Clone ID: PAT_MRT3847_110125C.1.pep
RRANQGANPQQPKPEQESILMHAQQQIALQKLMLQPALVATKVVCLTHAVSSDELKDDEDYDEILDDMRQECSKFAXCTLVNVVIPRPPPDGEPAAGVGKVFLEYVDIDGATKARAGLNGRKFDGNQVVAVFYPENKFAQGDYEG

SEQ ID NO: 154048 - protein, 40 aa, Glycine max
  Clone ID: PAT_MRT3847_110126C.1.pep
MVYYIGRLRDPSIQFVSLLTYFVVRWQLTFGFSMVFVSKT

SEQ ID NO: 154049 - protein, 126 aa, Glycine max
  Clone ID: PAT_MRT3847_110127C.1.pep
KAQENSLEKANKNQIGQKQPKGGGGIKSGGKKKTFSHPREPIRGPFGFFHLPKGNFWKTRGFFLGTPGKKPKMGGGEKFLPPKAPFFTLWAGGNHPKFFPLMGWEILTPPILTPRKHPFLRFFGFK

SEQ ID NO: 154050 - protein, 60 aa, Glycine max
  unsure (1)..(60): unsure at all Xaa locations
  Clone ID: PAT_MRT3847_110128C.1.pep
PLPRKIEKEVGIKIFNPHLKLVPVWKPFIYKGYFLKKNFKEWQGXKKKKKKKKKKKKPPP

SEQ ID NO: 154051 - protein, 198 aa, Glycine max
  unsure (1)..(198): unsure at all Xaa locations
  Clone ID: PAT_MRT3847_110129C.1.pep
MSFAYQTDGYQLVASQAPPIFMRKGKSIVLGVFVLLRWYSVPLAAGLSEGISLGMHEALVLRDGRSDYLGKGVXKAVDYANTDLGPALIGKDPPEQTDIDNLMVXQLDGTANERGRSKLKLGTNAILXKCVEICINEASMLKNPIYKHIVNIXGDKKPDLPVPASKVNKGGSHAXDKLAMNEGIALPVGATYVKETMM

SEQ ID NO: 154052 - protein, 47 aa, Glycine max
  Clone ID: PAT_MRT3847_11012C.1.pep
YTQLLTNQSCRFLLRHTATNQAHNEYIDSNFPSAYLRYCECQWSYYR

SEQ ID NO: 154053 - protein, 69 aa, Glycine max
  Clone ID: PAT_MRT3847_110130C.1.pep
HTVSSGAPERVGCVLFGAVQHVVSVGPAPRPLKLGCPYLCLWVGHMLTGGFPKRVLVCIAAYKFSKTSH

SEQ ID NO: 154054 - protein, 41 aa, Glycine max
  unsure (1)..(41): unsure at all Xaa locations
  Clone ID: PAT_MRT3847_110131C.1.pep
RSISRTNRGVGFPRLTKRYNTIKWCTKASEXNPVYNIGLVR

SEQ ID NO: 154055 - protein, 82 aa, Glycine max
  Clone ID: PAT_MRT3847_110132C.1.pep
FSTIINAQAWGFHAIITHIQSLVTLTVIALPFSLSREFNSQFNSQPPFLTSNQTRSLATPIFFFHFSWIFKRLRRIYDHLSA

SEQ ID NO: 154056 - protein, 93 aa, Glycine max
  unsure (1)..(93): unsure at all Xaa locations
  Clone ID: PAT_MRT3847_110133C.1.pep
LEYKSGDWITLIRRGPIGNWSPFSAFLKGSIKVTIVMSTNAVIKKSDXSXLGHVFITNSTSSXHFVACELTQSEPHFLQSILPIHVCGTHNEF

SEQ ID NO: 154057 - protein, 393 aa, Glycine max
  Clone ID: PAT_MRT3847_110134C.1.pep
MALSRLSHRSIGSTLTKPFSAAAASSRSISTSDTPLTIETSVPFTAHNCDPPSRAVATSSSELLTFFRDMALMRRMEIAADSLYKAKLIRGFCHLYDGQEAVAVGMEAAITKKDSIITAYRDHCIFVGRGGTLLEVFAELMGRKEGCSKGKGGSMHFYKKESGFYGGHGIVGAQVPLGCGLAFAQKYSKDESVTFAMYGDGAANQGQLFEALNIAALWDLPAILVCENNHYGMGTAEWRAAKSPAYYKRGDYVPGLKVDGMDVLAVKQACKFAKEHALKNGPLILEMDTYRYHGHSMSDPGSTYRTRDEISGVRQERDPIERVRKLVLSHDIAAEKELKDIEKEVRKEVDEAIAKAKESPMPDPSDLFTNVYVKGYGVETFGADRKEVRATLP

SEQ ID NO: 154058 - protein, 71 aa, Glycine max
  Clone ID: PAT_MRT3847_110135C.1.pep
NQQGYLAKPSDSNNLENCSTIGRRSTLAFIVHEITIKNILSQGLPLCFCKALYKDLYKSVLFSHIFWAVLN

SEQ ID NO: 154059 - protein, 91 aa, Glycine max
  Clone ID: PAT_MRT3847_110136C.1.pep
RGIVQQSPPVEILRLDLPTAIVAQRHAPPPPHHRKTSTLSSATPTPSSMCFSSKTSTLHSHANSNGRSGFSAKALTIIFLAPMVPKDMTPP

SEQ ID NO: 154060 - protein, 123 aa, Glycine max
  Clone ID: PAT_MRT3847_110137C.1.pep
AKGLFFFLFFFFFFCWGRGGQKTPINLTWVPAPTFSALKFNPPKKNSRFFLGEPFFKKPQKIKSSKGDCRPLCSLNFVYQIQRGGPPPCNFGFFYPVRPKGLFKACLFPGLAQHYLGHGEQGF

SEQ ID NO: 154061 - protein, 88 aa, Glycine max
  Clone ID: PAT_MRT3847_110138C.1.pep
PHRATPDPCGLAAYTGHLLWTLMVCSGFLLLLAHLIDPLYVWYVAGQPLSHCGQQLPLVKQRQLVGKASIGGVVCCSLPSIISSLLLC

SEQ ID NO: 154062 - protein, 67 aa, Glycine max
  Clone ID: PAT_MRT3847_110139C.1.pep
VASCRLSLANTMMLLQRLIMTISKAPTRVTCHYSLVCLNEVSHSGLHLCIRPTGVLHATVGHHIGSS

SEQ ID NO: 154063 - protein, 59 aa, Glycine max
  Clone ID: PAT_MRT3847_11013C.1.pep
RVWSSKHTISDSTYTFSSKGISLFSAQNNRARSLTVCLHILCNDKTICARGIKWHTLID

SEQ ID NO: 154064 - protein, 88 aa, Glycine max
  Clone ID: PAT_MRT3847_110140C.1.pep
MGKPIQRTTGPRGITPTMQHSLITPLYLTHNEDDNEYSSHCFQEALTLLKGTVSCNETYANSNTKAQPPAAMDAYSCDHLRMNEFNAR

SEQ ID NO: 154065 - protein, 60 aa, Glycine max
  Clone ID: PAT_MRT3847_110141C.1.pep
RLVCLATHNSASYTQSSSPLNPSSPTLPLCWFSPLVAKECTKFNRYRRPIMLSTRTALLT

SEQ ID NO: 154066 - protein, 97 aa, Glycine max
  Clone ID: PAT_MRT3847_110142C.1.pep
GYFSRILWRHDSYCQPIICSSVLCIPSDPEAGKIYNFLTYSLQHTVSLNRSSPSGKSCALLLGFYILKALQLSQSFVSPLQFRLERSFIFCQLYFFS

SEQ ID NO: 154067 - protein, 91 aa, Glycine max
  unsure (1)..(91): unsure at all Xaa locations
  Clone ID: PAT_MRT3847_110143C.1.pep
EGRDFNFXSVLLSDKXNNMWVFIQYRSSNPNSNPNPNPYNPHTPFQFPLPPHSTSFNHLPHPFFFFLFPPFHLPYHPLTHFXINFPLPHQF

SEQ ID NO: 154068 - protein, 266 aa, Glycine max
  Clone ID: PAT_MRT3847_110144C.1.pep
QDYHSSTATNHSKDKMASFSVEEFIGNGILKELLQKLLEEGWDDVPTLKIMSSEDMDLLQMTQEQKDALGIRSYLHDRGLMQYADKMEDCGKALSELINLSTTDLSTQFEMKRGHIARFINRTTSDDSVKLRALAARRRSSTMHRDDSIPKSVGSNSSNSLTRSHIRSNAASDALEQSMADMKIKEGYVFKGIVAAEPAEPRACGCVNPPPPISDQVAPYGTVENISVQKLTPEYKIGMEPLVKTKAPSLKVSELWRDKQLFSCVS

SEQ ID NO: 154069 - protein, 122 aa, Glycine max
  Clone ID: PAT_MRT3847_110145C.1.pep
TRQNANVMKGKNSEIHPWHLHGHDFWILGYGDGKFKQGDDSKFNLKNPPLRNTAVIFPHGWTALRFKADNPGVWAFHCHIEPHLHMGMGVIFAEAVQNVTSTIPRDAFACGILKKFLNKEHN

SEQ ID NO: 154070 - protein, 34 aa, Glycine max
  Clone ID: PAT_MRT3847_110146C.1.pep
MAELCLVPDVVIPPKLKVSDFDKYKGTTCPKNHL

SEQ ID NO: 154071 - protein, 129 aa, Glycine max
  Clone ID: PAT_MRT3847_110147C.1.pep
THQNKAPEAKAANTNHREKESNNGHTSAKDPTNRGAAAEATAGSHHDEDKRTLEEHRRPDDKPGGETPTIPQDAANAAHDQGAKAEQAETPRAGGKASRDRAKESTNKGTDRHGDTTGDGATPHRRTKQ

SEQ ID NO: 154072 - protein, 580 aa, Glycine max
  Clone ID: PAT_MRT3847_110148C.1.pep
MESATVSSSESEMALPLPLASESQQPYVSELLSFTLDRLHKEPELLRVDADRIRRQMQEVAVGNYRSFIAAADALIAIRQEVSSIDNHLESLINEIPKLTSGCTEFIESAEQILEKRKMNQTMLTNHSTLLDLLEIPQLMDTCVRNGNYDEALDLEAFVGKLSTMHPKLPVIQALAAEVRLTTQSLLSQLLQKLRSNIQLPECLRIIGYLRRIGVFSEYGMRLLFLRCREAWLTGILEDLDQANPYEYLKGMINCHRMHLFDVVNQYRAIFADDTSGSEENYDGGLLFSWAMHQITSHLQTLKVMLPKITEGGSLSNILDQCMYCAMGLGWVGLDFRGLLPSLFEEAVLNLFSKNMSTAVENFQLVLDSHRWVPLPGVGFSAHTVGDENHEDVTPPSNLMEHPPLAVFINGVSAAMNELRPCAPISLKHVLAQELIKGLQAVSDSLLLYNTTRVLRSNESGLFLSLCWAFIEAAYPHCATCFGRCYLGGATLIMDAKNVYNGISRLLETSSARELPKPVNNVESKSVAENGESPKMENGETPDAKESEAVNSEEVNEEGTEEGPTLQTDREDTNLEKPLE

SEQ ID NO: 154073 - protein, 84 aa, Glycine max
  Clone ID: PAT_MRT3847_110149C.1.pep
NSINFFYLIQKLSKLLQFKINFRFRINSLSWNQSCEHLSKIMLNLYFDMLLFSIIQRETKQAHRAFFWLKVGSLNLYNMQVIFS

SEQ ID NO: 154074 - protein, 50 aa, Glycine max
  Clone ID: PAT_MRT3847_11014C.1.pep
TRHVFSMPKVTAMGSTTMGPRLACSGATWAATCLKKPLLSRTLTFKAYVL

SEQ ID NO: 154075 - protein, 97 aa, Glycine max
  Clone ID: PAT_MRT3847_110150C.1.pep
DNNRTSLISPPEGGSFQARKVSRVVKAEGTPPLVAQGKDPIGVVLQKKVPKNFWTTPGVHPLLSLTQEPGLMANGMASGGKRLGPPSRNGAAEVRLN

SEQ ID NO: 154076 - protein, 65 aa, Glycine max
  Clone ID: PAT_MRT3847_110151C.1.pep
KRIFFNSFSQKNTLNQPTTKKPFKSKKKKEEEKGTDRESRPNPQWKTELNAQIGTLERRKDKRCE

SEQ ID NO: 154077 - protein, 98 aa, Glycine max
  Clone ID: PAT_MRT3847_110152C.1.pep
GFLTSCFSSASSVAIIVGPLVPSALEGRPLPVYKGAPWCGPFWTWGGAVRPYILLRSPLRIRCVMSPCVFLRTSLYATCTSPLLRAFIRFACTIYCPC

SEQ ID NO: 154078 - protein, 69 aa, Glycine max
  Clone ID: PAT_MRT3847_110153C.1.pep
CMDSSLWPPRFALCSFGVHSFCCSVREIFFFSVPIFPVAFYHLFITLLKENWHWSLVSPIIPVLQHASY

SEQ ID NO: 154079 - protein, 147 aa, Glycine max
  unsure (1)..(147): unsure at all Xaa locations
  Clone ID: PAT_MRT3847_110154C.1.pep
HFIGLLLSHLYSTHWRSFIQRLKWKNLAVAXLNLFGEHPGLTRWSPIEEAPPYSPFQHMDKLNGERHSPCFATLNAEGVAICTSPLTALDRAVTPGVSATFPIFLAPFPGFSFHAFIPAFPAWSRNILLRGLHRGYLYGADGSLNGP

SEQ ID NO: 154080 - protein, 59 aa, Glycine max
  Clone ID: PAT_MRT3847_110155C.1.pep
IGFEKEANVVCRFEKINCVHCFLSFEVLCNRRCTGGLWIKQYGISVQLYWAPIVNHCFM

SEQ ID NO: 154081 - protein, 37 aa, Glycine max
  Clone ID: PAT_MRT3847_110156C.1.pep
KSIHIRIFYNLYRPNNLFDHLSYIKLNLIIYFLENPF

SEQ ID NO: 154082 - protein, 56 aa, Glycine max
  Clone ID: PAT_MRT3847_110157C.1.pep
PGWVEEFPFMVKTKQKAEKQALSPFGFQVLAEVYFPFKFHQKNWLCPVNNVVKSKN

SEQ ID NO: 154083 - protein, 48 aa, Glycine max
  Clone ID: PAT_MRT3847_110158C.1.pep
QKICWNPWREKVRKSSWFLSQVSVVLAKICRSLVFHPDAMYIFSLMSF

SEQ ID NO: 154084 - protein, 45 aa, Glycine max
  Clone ID: PAT_MRT3847_110159C.1.pep
LMCDCSRGTASMRGSTMLKNAMGSTAVNTMMDQPNRPGCHKHTRS

SEQ ID NO: 154085 - protein, 94 aa, Glycine max
  unsure (1)..(94): unsure at all Xaa locations
  Clone ID: PAT_MRT3847_11015C.1.pep
FFDDDFELKFEIVTEWGTAIFSLSDPGTPLIMRLQPQMLSSSPCRFEISTGLAYCLQHRYYFCLLGSGPWFSFGTPPSMIFSRPXKHSQQPKGS

SEQ ID NO: 154086 - protein, 29 aa, Glycine max
  Clone ID: PAT_MRT3847_110160C.1.pep
RSVTMYFRWEFVIKWVIAFSFPFAAGWIY

SEQ ID NO: 154087 - protein, 143 aa, Glycine max
  Clone ID: PAT_MRT3847_110161C.1.pep
RVSFVYIKEVDLIRMKRRVKRKVPEANSNTMIIIRIQGYPNLKSIKELIYKKGHARMEQRKVPLTDNNIIEQELGKFGIVCIEDMVHQIYNAGPHFKEVARFMWPFELNKPAEGLKGSKTIFKEGGDTGNREDLINELINKMN

SEQ ID NO: 154088 - protein, 236 aa, Glycine max
  Clone ID: PAT_MRT3847_110162C.1.pep
MAEEDSKPLNYISEVILKKRKNTEAWALRKKEQFQQKKYQSIKKPEDFIHEYRNKEVDLIRMKRRVKRKVPEANSNTLIIIRIQGKKDMHPRTRKVLYSLGLRRRFSAVFVKPSEGIMAKLQRVEPYVTYGYPNLKSIKELIYKKGHARMEQRKVPLTDNNIIEQELGKFGIVCIEDMVHQIYNAGPHFKEVVRFMWPFELNKPAEGLKGSKTSFKEDGDTGNREDLINELINKMN

SEQ ID NO: 154089 - protein, 64 aa, Glycine max
  Clone ID: PAT_MRT3847_110163C.1.pep
CNVMAWQAPNCSISHHRLRARLPSFIERVIIFYECLDHDHKSVAAKNTRTYILIPPLVAILINK

SEQ ID NO: 154090 - protein, 209 aa, Glycine max
  unsure (1)..(209): unsure at all Xaa locations
  Clone ID: PAT_MRT3847_110164C.1.pep
MAEDDSKPLNYISEVILKKRKSTEAWALRKKEQFQQKKFQSIRKPEDFIHEYRNKEVDLIRMKRRVKRKVPEANSNTMIIIRIQGXVKKKDTHPRTRKVLYSLGLRRRVSAVFVKPSEGIMAKLQRVEPYVTYGYPNLKSIKXELIYKKRHARMEQRKVPLTDNNIIEQELGKFGIVCIEDMDHQIYNAGPHFKEVARFMWAFELTKPA

SEQ ID NO: 154091 - protein, 108 aa, Glycine max
  Clone ID: PAT_MRT3847_110165C.1.pep
PGAPPLKKVLIRGDFGAQFNSLNEKKGPNFSFFWWAGNLFYFFPFPKTQPPLFGKIFFPQKLLQCQFIWTFWWPPRFKDTWGVTLFFGGKVHGHFQAWNGPLIKPPGG

SEQ ID NO: 154092 - protein, 72 aa, Glycine max
  Clone ID: PAT_MRT3847_110166C.1.pep
NPITNSWIYFVTHFTNITTYTKKVINKSSDKLQTQKRQKQDITIHPAFKRHATMDLQVFTSYIHHKKVSLVC

SEQ ID NO: 154093 - protein, 158 aa, Glycine max
  Clone ID: PAT_MRT3847_110167C.1.pep
LGLVECWFPPDTGTIAEENQHSTRTSTPDSLQRSLATQPVGAQLQQAQPVVKQDQHASVQTHNKPNSSGLPGRLQDSASSQSQAPWPRMTQTDVQKYMKVFMEVDTDRDGKITGEQARNLFLSWRLPREVLKQVWDLSDQDNDSMLSLRGVCIALYLM

SEQ ID NO: 154094 - protein, 73 aa, Glycine max
  Clone ID: PAT_MRT3847_110168C.1.pep
KYICSGRVRAYMLLLLIITKKMVLLLLLVPLNGTHGLRSSYLLLSLRSSHPNNCFRVLHTSTFSPPLHGSHYS

SEQ ID NO: 154095 - protein, 127 aa, Glycine max
  Clone ID: PAT_MRT3847_110169C.1.pep
VRSEFGRLERLETGCEKTTEGDTESPAIYQKSCLDHYFDKPIQVTGDVRLTFYEKMIGGRLFYCCFNTAFIRNSLLQLPIQELDKVGKKGTSICGPDFCLELLFGPANAGYSSSSISNDEYSNDDSL

SEQ ID NO: 154096 - protein, 313 aa, Glycine max
  Clone ID: PAT_MRT3847_11016C.1.pep
MASSLASSSTVLWILFLTIATLHLSSARKLSGSDPQLQFQYHRGPLLKGKISVNLIWYGKFKPSQKAIVADFITSLSSPKPVTAQPSVATWWKATDKYYKNSSPKLALSLGTTQILDENYSLGKSLTNNQILKLASKGPQRNAINIVLTSADVAVEGFCSSRCGTHGSSVGARVNGKRYKLAYIWVGNSETQCPGQCAWPFHQPIYGPQNPPLVAPNTDVGLDGMLINVASLLAGTVTNPFGNGYFQGPKEAPLEAGSACTGVYGKGAYPGYAGNLLLDPTTGASYNANGVNGRKYLLPALVDPETSACSTLV

SEQ ID NO: 154097 - protein, 45 aa, Glycine max
  Clone ID: PAT_MRT3847_110170C.1.pep
NAYINIKGVKLVPSAAETAMVSLKKTVTKQDSSGRPLCGPDRARL

SEQ ID NO: 154098 - protein, 390 aa, Glycine max
  Clone ID: PAT_MRT3847_110171C.1.pep
ARALFNDSKEFVSNSLAILSPRAAALSTIQTLARGSRSLLSENSNSPVASLDKADGLPSWMNHEDRRVLKAMDNKPAPNVTVAKDGSGDFKTISECLNAVPQNFEGRYVIFVKEGVYDETVTITKKMQNITMYGDGSQKSIITGNKNFRDGVRTFLTASFVVEGDGFIGLAMGFRNTAGPDGHQAVAARVQADRAVFANCRFEGYQDTLYTQAHRQFYRSCIVTGTIDFIFGDAAVVFQNCIMVVRKPLENQQNMVTAQGRVDKQQVTGIVLQKCTIKADDSLVPEKDKIRSYLGRPWKEFSRTIVMESEIGDFIHPDGWTAWEGDFALKTLYYAEYGNTGPGASTNARIKWPGYQVINKDEASQFTVGSFLRGTWLQNTGVPATQGLYN

SEQ ID NO: 154099 - protein, 358 aa, Glycine max
  unsure (1)..(358): unsure at all Xaa locations
  Clone ID: PAT_MRT3847_110172C.1.pep
KLTGGASSPASSSSLAIPTANPKRSTKDRHTKVDGRGRRIRMPATCAARVFQLTRELGHKSDGETIEWLLQQAEPAIIAATGTGTIPANFSSLNVSLRSSGSTLSAPPSKSAPHTFHGALALAHHPYDEAXNTPLLLGFHPHHQPQQLLSADHIPESLPSGAGDSGDNYLRKRYREDLFKDDNINNNNTQSQNESGDGDGSSPKLPKQQSEAGSGLLRPSNLLPATAMWAVAPSPASGPPGSTIWMLPVTAGASSSASSETQMWPFPQSVSGFMPRFNLPVPGALEFQGARAGSLQLGSMSMPQQQHLGLAMSDSNLGMLAALNAYTRASLNVNSDHHQHQHQSQPSESGEDDPNSSQ

SEQ ID NO: 154100 - protein, 169 aa, Glycine max
  unsure (1)..(169): unsure at all Xaa locations
  Clone ID: PAT_MRT3847_110173C.1.pep
MDNIVWQTPANPPHPNDYVFRNGIRYVRPYYFEFIAHVKNRWAGKTIVDLFAEEFKGRPYEYYVSAVKCGRIQVDGEMVPVSYIVKSSQKISHFLHRHEPPVMCCEFHVLQKDIDVLTVCKPAYVPXVHPCSQYRKNTVVGILQAXEHGLTPLFXVIRLDRLVSGLLNL

SEQ ID NO: 154101 - protein, 54 aa, Glycine max
  Clone ID: PAT_MRT3847_110174C.1.pep
LRISTLLSKGPVSLGPAHQGGALTLLTFMLLFNPPGRNPSLSLPKFLPPVGKAP

SEQ ID NO: 154102 - protein, 78 aa, Glycine max
  Clone ID: PAT_MRT3847_110175C.1.pep
MEFVLPTQGLFDCVSLVPLACYPPFRFCPSHALFLILILSIYPSLCPFSPSSYNPIVKKTPEILYKKKKHKKTPTAPP

SEQ ID NO: 154103 - protein, 194 aa, Glycine max
  Clone ID: PAT_MRT3847_110176C.1.pep
RAESARAAREPSLGVTESAAKLGQWTSTERTSQSFSNNRHGGFSSRSSSQTTGQKNQSFIEMMKSARDSNAQDEVLESEETFFLKKEPSSNTQRELRVKVDAKSTDQKPNTPRSKHSATEQRRRSKINDRFQMLRELIPHSDQKRDKASFLLEVVEYIHFLQEKVHKYEGSFQGWSNEPEKLMPWRNNDKPAET

SEQ ID NO: 154104 - protein, 46 aa, Glycine max
  Clone ID: PAT_MRT3847_110177C.1.pep
MFLSEIVIDIILKMFLYIYIYIYIYIYIYIYIYIYIYIYTYSQIML

SEQ ID NO: 154105 - protein, 35 aa, Glycine max
  Clone ID: PAT_MRT3847_110178C.1.pep
IITSLLFQITKEHNTERCYNLLHRSLKYLYKAKNT

SEQ ID NO: 154106 - protein, 71 aa, Glycine max
  Clone ID: PAT_MRT3847_110179C.1.pep
CLISEMKLVSSEHEVYLIVVIHGSRYCRGCRYCLSHRCCKTSVYGRGCHVSQVTVCGCLDLMRSLKSWNEM

SEQ ID NO: 154107 - protein, 67 aa, Glycine max
  Clone ID: PAT_MRT3847_11017C.1.pep
PSVHSKRGHLQLLPNYRGPGKFHLRPAEISRSTLFPLRLSCAHDTLTRTKILSGMGYLFTIMTADID

SEQ ID NO: 154108 - protein, 38 aa, Glycine max
  Clone ID: PAT_MRT3847_110180C.1.pep
ITNGYFFMGGHSQTDSKCYRSLLSGDRNPLPLPQNVGH

SEQ ID NO: 154109 - protein, 143 aa, Glycine max
  Clone ID: PAT_MRT3847_110181C.1.pep
NSFHYLDFKILRKDQNNPLCSFLHLHHPVPLPPQSSPLSFVWFPSTTQMEGMVAASLPPTVGILVVSLHELCILLHLFLGGVITVNESLFHSCCATLASLSERILSTSEVWRWSKRVLRSLRTFRAEIESNSNSPNKIGVVPH

SEQ ID NO: 154110 - protein, 134 aa, Glycine max
  unsure (1)..(134): unsure at all Xaa locations
  Clone ID: PAT_MRT3847_110182C.1.pep
PKPSLYQYHWSVKRARTLXWNMTANAAKPNSHGAYHSGKKAPTXTKEEDNEAPTINGKPYYAVNKVSYANSDTPLNLADYYNISGIYSGDSVQTLTLKDSCIHSAHFVAPTTLHDDNDVESQDIEHAMQPWRLD

SEQ ID NO: 154111 - protein, 203 aa, Glycine max
  Clone ID: PAT_MRT3847_110183C.1.pep
PGLFWLVALVPGDSPFYHVSRVVSPGSEIPRWFNNEHEGNCVSLDASHVMHDDNWIGVAFCAIFVVPHETISAMAFSKTDGYYSGFSDIPVDFYEDLDQELVLDKSDHMWLFFFDRKMFIFKFHLQPENLGRLLLKCDGRRKWKESYAEVKKYGYRWVYKGDNEQRKRKFGEIEENEGMMSEEGRKDDASSSQENTINLDLSL

SEQ ID NO: 154112 - protein, 153 aa, Glycine max
  unsure (1)..(153): unsure at all Xaa locations
  Clone ID: PAT_MRT3847_110184C.1.pep
VKEPRLPWLNREXYAYWKGNPVVAETRQDLMKCNVSENQDWNARLYVQDWGRESQEGYKNSYLASQGSCRYKVYIEGSAWSVSEKYILACDSPTLLVKPHYYDFFTRGLIPVHHYWPIKEDDKCRSIKFAVDWGNSHKQRVILKFCLFINSRI

SEQ ID NO: 154113 - protein, 605 aa, Glycine max
  unsure (1)..(605): unsure at all Xaa locations
  Clone ID: PAT_MRT3847_110185C.1.pep
PXTVMPSSVLSSDSMHIGLLAAAAHAAATNXFTVCYNPHLNCFSFKYVKAFSXTIFSLIRLKMLFETEESSVRRYMGTITGISDLDSVRWPNSHWRSVKVGWDESTAGERQPRVSLWEIEPLTTFPMYPSLFPLRLKRPWHPGTSSLHDGRDEATNGLMWMRGGPVDQGLNSLNFQGAGMLPWMQQRLDPTLLGNDQNQQYQAMLAAGLQNLGSGYLMKQQMMNFQQPYHYLQQSGNSNSPLQLQQQQPIQQSVSSNMLQPQAHVLTENLSQHLLQKPHNNQEVQAQQQQHTYQDSLLIPSDQLHQRQHSGIPSPSYSKPDFLDSSMKFPASVSPGQNMLSSLCPEGSGSLLNLSRSGQSLLTEQLPQQQWTQKYAPVQVNAYGSTVSHAQYSGKDSVMVLPHCNSDAQNSTLFGVNIDSSGLLLPTTVPGYTTSSADTNSSTMPLAESGFQGSLYGCMQDSSELLQSAGHVDPENQTQTFVKVYKSGSVGRSLDISRFSSYHELREELAQMFGIEGKLEDPLRSGWQLVFVDRENDVLLLGDDPWESFVNNVWYIKILSPEDIQKMGDQAVESLALGSGQRLNGTGAESQDIVSGPPSIGSLEY

SEQ ID NO: 154114 - protein, 72 aa, Glycine max
  Clone ID: PAT_MRT3847_110186C.1.pep
LYLVQENQGQSMDAVSSALLEPVTNSVLDLIKKQVDYIRYRQNFDELRECVKQLKLVKEKVDHQCEEAFKNG

SEQ ID NO: 154115 - protein, 98 aa, Glycine max
  Clone ID: PAT_MRT3847_110187C.1.pep
QQPVLPVGLSQLPRTRCSWLDNATNQPTNVLTDADATGPEERADEPHPGPSPYWTQLLTSYSQARGQPSYSYLRCLGRKDPAGTGPQRRRLLPTASGP

SEQ ID NO: 154116 - protein, 128 aa, Glycine max
  Clone ID: PAT_MRT3847_110188C.1.pep
MESPVNGVDSLSEVQNSVSGVHHDLLSSGTPRPSRPPLRASRNHQTKTIHHQNSHVINQKHSYQEGNNVEHERLPTKLCSKHQPLDDSKNCESSDVLESDNCILWPSKRVVANHARSYCQSEVTFCPS

SEQ ID NO: 154117 - protein, 226 aa, Glycine max
  unsure (1)..(226): unsure at all Xaa locations
  Clone ID: PAT_MRT3847_110189C.1.pep
MESPVNGVDSLSEVQNSVSGVHHDLLSSGTPRPSRPPLRASRNHQTKTIHHQNSHVINQKHSYQEGNNVEHERLPTKLCSKHQPLDDSKNCESSDVLESDNCILXPXKRVVANHARSYCQSEVTFCPSPQSSFYSATVYSEAKQSFTNTEVSECASVDKSCVSGEMANSCDFNESRKTSICRASTGSDASDESSTSSLSSVVYKPHKANDIRWEAIQXVRARDGML

SEQ ID NO: 154118 - protein, 114 aa, Glycine max
  unsure (1)..(114): unsure at all Xaa locations
  Clone ID: PAT_MRT3847_11018C.1.pep
LRDLDIMQGLQWPGLFHILASRPGGAPYVRLTGLGTSMEALEATGKRLSDFANKLCLPFEFFPVAEKVGNLDPERLNGSKTEAGAVHXLQHSLYDVTGSDTNTLWLXLQRLAPK

SEQ ID NO: 154119 - protein, 70 aa, Glycine max
  unsure (1)..(70): unsure at all Xaa locations
  Clone ID: PAT_MRT3847_110190C.1.pep
CIHXYQFDKFKRFPRGLVNDAHQNMSCTDCILYSLYAIRSFTFEIQYAEINLIRYKVFGRTLPNCTCNKI

SEQ ID NO: 154120 - protein, 246 aa, Glycine max
  Clone ID: PAT_MRT3847_110191C.1.pep
TPFSPFLIYLFFLITGFEGSGTFAPTPRTTPKRKTQIKKRKQAKTIANLINSKPFSNGLLSSLLITISKTTVLRTLRLIKDPSKALCFFKWTQQKGFSHTPESYFIMLEILGRERNLNVARNFLFSIEKHSKGTVKLEDRFFNSLIRSYAEAGLFKESMKLFQTMKSIAVSPSVVTFNNLLSILLKRGCTNMAKEVYDEMLRTYGVSPDTCTYNVLIIGFCKNSMVDEGFRFFREMESFNCDADVV

SEQ ID NO: 154121 - protein, 28 aa, Glycine max
  Clone ID: PAT_MRT3847_110192C.1.pep
TSINIYSLNFNQTYLNHYIPSFISLHYS

SEQ ID NO: 154122 - protein, 80 aa, Glycine max
  Clone ID: PAT_MRT3847_110193C.1.pep
QATIPTPPITKHGIHIPTIFKRKAKPLTENFTHLFSSITFTQKQKTSQNNILPFILKNPSLLTLTCYQISNFSTHLNSLH

SEQ ID NO: 154123 - protein, 86 aa, Glycine max
  Clone ID: PAT_MRT3847_110194C.1.pep
GWHENPNHQSSSSFSGFCFSYPFWQGKWSSVGVIGVFRHCKVEKPSRLLQCFIMHGLSKDGGNVVRFEGSGGHKILFQDQKKGGSE

SEQ ID NO: 154124 - protein, 77 aa, Glycine max
  Clone ID: PAT_MRT3847_110195C.1.pep
PFNVDLSAVLETGQNKTEAPSQYERLAKYNQFLRIKGELGWQSCESWSQIQSPREAPRIVEPKITKSQLNKIILMSA

SEQ ID NO: 154125 - protein, 110 aa, Glycine max
  Clone ID: PAT_MRT3847_110196C.1.pep
WQSSRPRRRRILRKPRSPRLPRTRSESCGIGLPPPPPPCGYNQGPPRAIGDSSLESPTPGFSLGGRPSGCASPSQGWGFALLWRFTFGQPPPYNVSVTSQKNGFVKHSVS

SEQ ID NO: 154126 - protein, 49 aa, Glycine max
  unsure (1)..(49): unsure at all Xaa locations
  Clone ID: PAT_MRT3847_110197C.1.pep
HITKTTXLPCKLTRRYIKTQPLVSNPQKRHIDTFVFCIPLYLEQILDKQ

SEQ ID NO: 154127 - protein, 63 aa, Glycine max
  Clone ID: PAT_MRT3847_110198C.1.pep
MKSLSKLKKTLHKTVSKDKKDFPPTVKFDELALAAKDMQAMRDCYDSLLSAAAATQNSAYGKH

SEQ ID NO: 154128 - protein, 65 aa, Glycine max
  Clone ID: PAT_MRT3847_110199C.1.pep
LIFSFPKLKQCLVKLKTRQILGCVIRHRAKVITMRSQPLDFVDFKSMVQIFLSFFFIFLFFSYFS

SEQ ID NO: 154129 - protein, 55 aa, Glycine max
  Clone ID: PAT_MRT3847_11019C.1.pep
LAVQKHGQMYMCKMDKVLVTLLLLTFFLMILYVMKLLKRVWCLFTNLHSRFAKVL

SEQ ID NO: 154130 - protein, 134 aa, Glycine max
  Clone ID: PAT_MRT3847_1101C.1.pep
MNSSSSAAESTMEDRRSKKHHRRHRHHPATTTTTLSTTTGESDGEVEEAEDGDPEAWVTLNKGFRQVQSVLDRNRLLIQQVNENQQSRMHDNMVKNVSLIQELNGNISKVVSLYSDLNTNFSNVCQQRSKNSSK

SEQ ID NO: 154131 - protein, 63 aa, Glycine max
  Clone ID: PAT_MRT3847_110200C.1.pep
HLNLVRIPEFSYVSIARILPSCAVSDLESHTTHSNQVQPVLNESLCLEQLCSWEPFGGLLPPV

SEQ ID NO: 154132 - protein, 42 aa, Glycine max
  Clone ID: PAT_MRT3847_110201C.1.pep
LSNKFQIICKVIASSSVCRIRQSYIYREVVASYNELYFKKQT

SEQ ID NO: 154133 - protein, 165 aa, Glycine max
  Clone ID: PAT_MRT3847_110202C.1.pep
MLSSSACCTLLAALISAAFFAAANPPTVKQCLCSEIQPCTQKYMNTWKACMEQCKGHLSGVGGNVDKLGHCMDSNSALLQSTIKCTQSHRQTACAKSAASAKQVPKRYPETLEIATISEINRMVNSMGIEGAMKGLMDAGKKMYGCTSKCMNSKAGNCEKSSSAA

SEQ ID NO: 154134 - protein, 83 aa, Glycine max
  Clone ID: PAT_MRT3847_110203C.1.pep
PPRKGTLAFTGAFKGVFVPGAVLSGGCFSGVFVIPVCRVQFSPQKGFPFWFRVPLLCFSPRDAPRFPLNIKVQHGFIVEFPES

SEQ ID NO: 154135 - protein, 59 aa, Glycine max
  Clone ID: PAT_MRT3847_110204C.1.pep
FPCLVHSLQSTRFCNADLSKSNDYHILHKVGDIHSKGIISLVLNSILTFFQQFNMFHLL

SEQ ID NO: 154136 - protein, 41 aa, Glycine max
  Clone ID: PAT_MRT3847_110205C.1.pep
GMKCCNFASMKFLLANLFHLHVYSFTLPSQDQDKCKLRIIQ

SEQ ID NO: 154137 - protein, 36 aa, Glycine max
  Clone ID: PAT_MRT3847_110206C.1.pep
EKYIYLNTQYKYNLIKYFINKYIYLTDLIILPKQRK

SEQ ID NO: 154138 - protein, 118 aa, Glycine max
  Clone ID: PAT_MRT3847_110207C.1.pep
STWVTVLVDRDRETVFRRGWEPGRNGSGMTHQTQSGMERFGVRDLHHANGAGDHVSVGIRGGAALKQPWFRRSARSDRSSHPTMACITLCHFLRLDRTKLGLFYISRDDLCNLGGDSD

SEQ ID NO: 154139 - protein, 75 aa, Glycine max
  Clone ID: PAT_MRT3847_110208C.1.pep
PFEMARSKQTARKSTGGKAPRKQLATKAGRKSAPTTGGVKNPHRYRSGTVALPVIRNYQKSTVPLIRKLPFQRLV

SEQ ID NO: 154140 - protein, 105 aa, Glycine max
  Clone ID: PAT_MRT3847_110209C.1.pep
NLAGNNSNNNKGWSIQRELGDLVEMHVKSIGWHAMITFSCGKKNHTAKDVHSAIDGVGLGRAVRHSNDGRCFDDPSSGFENKNKFYTQEQLRTALPQSANTSYRS

SEQ ID NO: 154141 - protein, 72 aa, Glycine max
  unsure (1)..(72): unsure at all Xaa locations
  Clone ID: PAT_MRT3847_11020C.1.pep
MIGLFSGGGGSFPGFGWGGWFVHPIGFVCQPNGGTLIHGRLLARGIFVLVSLSSFFDSSCGMFQANVCWLXK

SEQ ID NO: 154142 - protein, 158 aa, Glycine max
  Clone ID: PAT_MRT3847_110210C.1.pep
MCIALFLWQAHPLYPFLLLNNRDEYHNRPTKPVSWWEDIDIVGGRDEIAGGTWLACSREGTAAFLTNVLELPSLPEAKSTGDLPVSFLKSGKHPKEFAESLHMEPHYYNGFNLIVADIPSKCMVYISNSPKGQPITIKEVSPGLHVLSNAKLDSKWHK

SEQ ID NO: 154143 - protein, 120 aa, Glycine max
  Clone ID: PAT_MRT3847_110211C.1.pep
KKKKSPKVFIGGNYWGKHKQRGWKERLWGKKRTKEKETPQFFTKNGKRKKKPSQKMDMVTTPGPRAPYFKKQAPPQGPNTRPWGKTKGGGTRGQSRGKTKILTPPPLGKGPPVPWGGQKN

SEQ ID NO: 154144 - protein, 192 aa, Glycine max
  Clone ID: PAT_MRT3847_110212C.1.pep
MAYTLTTDLYQTEILGINYGNRQLKFDGQSKVGKVFFDSGSSYTYFPKEAYLDLVASLNEVSGLGLVQDDSDTTLPICWQANFQIRSIKDVKDYFKTLTLRFGSKWWILSTLFQIPPEGYLIISNKGHVCLGILDGSKVNDGSSIILGDISLRGYSVVYDNVKQKIWLKRSDCGMPSSRLRKKNNFIPDSML

SEQ ID NO: 154145 - protein, 47 aa, Glycine max
  Clone ID: PAT_MRT3847_110213C.1.pep
STRPSILAFQFFSRCYYTGTGLLPNRHGLNDPYLDDSINANQLAPQH

SEQ ID NO: 154146 - protein, 176 aa, Glycine max
  unsure (1)..(176): unsure at all Xaa locations
  Clone ID: PAT_MRT3847_110214C.1.pep
LEVVLHPGAPWIMCKQQHTPYSVIDTCSGYYCENYTHNMKYKSKMWTYNWTGWYTXPGGADHRRPAHDMTFSDERFVHNGGPSANYYMYHVGTSLDRTSRGLIIVXSYDYDXPIDEYXRLNEPQWGHHRDSHTEIKFCEPALVSVDSTVTWSDNNLEVHVXKTNGACVASLVNYDI

SEQ ID NO: 154147 - protein, 47 aa, Glycine max
  Clone ID: PAT_MRT3847_110215C.1.pep
MSCVFFLLKAMILGVAAPLGPSLGVTCRRKKVPSNQTHSFYYLIPDQ

SEQ ID NO: 154148 - protein, 71 aa, Glycine max
  Clone ID: PAT_MRT3847_110216C.1.pep
FHRRKCTVHMPIMMVVVRIITVLWVYSSGHCIRFSCYYSIANTSRSVVVSLNHLQRRTNVFVSHANIIMFM

SEQ ID NO: 154149 - protein, 423 aa, Glycine max
  unsure (1)..(423): unsure at all Xaa locations
  Clone ID: PAT_MRT3847_110217C.1.pep
MCKSKKSTSVIQPRTRTNTKRTNSPRPHRTRTPTSSSSNYETSTRDVPITESRSYVFENNNNSNTNYDFEWSKTSSISSRASLSSLRDTLPENPNIYHFSEIGAATGNFSSPRLSSSSWGCXIRQRDVVVSRRNFRQQIDLPELSRRLGLICRSHHSSLVKLXSARGSPAPSFFLXYEFVPGASLADCLRNRRNPSFTDLKTWISRMQIASDVAHGLDYIHNFSGSGSDSEAGFVHNHIKISSIVITEENLRAKICHFGASDLCGEAVAGEGEPSGGRMVRIEGRRGYMAPEFQISGLATKKTDVYAFGVVVLELLSGEEALKFEFNDDGGYRRISVVETAKIAAEVNGGVRKWADKRLRDSFPVKVAERMLRVGLECVCDDPNERPDMGRVSSRIPRLYLKSKEXDEKMGTDIDLSVSLAPR

SEQ ID NO: 154150 - protein, 84 aa, Glycine max
  unsure (1)..(84): unsure at all Xaa locations
  Clone ID: PAT_MRT3847_110218C.1.pep
GWRHLLLACCARVAISXSEAWRVECGXPSGFPHTVICDRIVDEMLISCSYEKXLRHAYAPSMTVGSYKACASLRVYGVANFISV

SEQ ID NO: 154151 - protein, 64 aa, Glycine max
  Clone ID: PAT_MRT3847_110219C.1.pep
DFSISWWQNSFHTNTSDIPLVLHSLWISIVYFIDSITNEILIQVDSHINGIGIVRVKRNKDNLK

SEQ ID NO: 154152 - protein, 62 aa, Glycine max
  Clone ID: PAT_MRT3847_11021C.1.pep
NLSFEHVATQPKSGFHTLSKKNFHLALMGNSCLTFFLGINLNLPRELPLKALDLDPNKGPFA

SEQ ID NO: 154153 - protein, 61 aa, Glycine max
  Clone ID: PAT_MRT3847_110220C.1.pep
ATLGMTYSPNCGFYNYPAHMHESPKGKDLPFFYSTKGTTPTSSLDKLFLIWTRISTHICNI

SEQ ID NO: 154154 - protein, 101 aa, Glycine max
  Clone ID: PAT_MRT3847_110221C.1.pep
SFWQERVLKFVKITKKLASKSGGFAKGGRVFVFVPRGPENPIGVLVTACFSSKSYAPNVVSNANFSHNISPDVKRRKLTKPFGKKSLWPVILKVIPRMPFF

SEQ ID NO: 154155 - protein, 105 aa, Glycine max
  unsure (1)..(105): unsure at all Xaa locations
  Clone ID: PAT_MRT3847_110222C.1.pep
XXXVRKLGIRLEXXXRRXGXXXQXXXXXTXHTGAXHYRHPRLHAXIRSHXXRVSEXLHXXQXRXXXHXIXXXVXXXXRXMXXXXXRXXXXQXXXXLXKLITXXMX

SEQ ID NO: 154156 - protein, 89 aa, Glycine max
  Clone ID: PAT_MRT3847_110223C.1.pep
EWKTSRKELPQMPQSKKDLRKLKQKQDAENGIVHQKKAPNTSAKCTQCNLSFRTTKRNIEIYQHATAKHPNVTFEQCFPGEKYNPDAKQ

SEQ ID NO: 154157 - protein, 96 aa, Glycine max
  unsure (1)..(96): unsure at all Xaa locations
  Clone ID: PAT_MRT3847_110224C.1.pep
ENAFLITEAVRGDGGILYNFGMERFMPLHDERAELAPRDVVARSIHDQLXKRYEKYVLLDISHKPKEXKLLSHFPNLASTCIQYGLDITPRTIPAV

SEQ ID NO: 154158 - protein, 69 aa, Glycine max
  Clone ID: PAT_MRT3847_110225C.1.pep
LGLGMRACTVKNWVLPVTECFQIHSGLGSPGPVYRPFRSLRMALMCQIAIGLSFGIWCTTAHIYCHHMI

SEQ ID NO: 154159 - protein, 76 aa, Glycine max
  Clone ID: PAT_MRT3847_110226C.1.pep
EEIFDDPSTFALLQVGLLYAQRDPPFLRPISKGIQRCLVRWLAQQWMQLNFHNWIHFVWHRMIRGRYYRHLMVQRA

SEQ ID NO: 154160 - protein, 176 aa, Glycine max
  Clone ID: PAT_MRT3847_110227C.1.pep
MGMVTSYMGGAEVASKGMSMLTGTLYDRIIKQRNIRELNEFQIAILDIFNAINMALPGKHYDAPAHDDIQKCYETWTKSEGAEKKKEAFTRFISENVNLSKADESMMITGIVAPPVAMVAKRTGQTVPQLSVIKAIPDVAFVPGATILALIAIKLTKRMAFKNIPSLPQKEEDTPS

SEQ ID NO: 154161 - protein, 54 aa, Glycine max
  Clone ID: PAT_MRT3847_110228C.1.pep
RIKCDGCKGYVRAWNTSHSETCSKYSHNSRCTDFSGGGLNILSRELLLFETLRS

SEQ ID NO: 154162 - protein, 62 aa, Glycine max
  unsure (1)..(62): unsure at all Xaa locations
  Clone ID: PAT_MRT3847_110229C.1.pep
FLFFCFFXKRTCPCENIFIVALLVIIILRIKTSKATIKFVTLELDDESHRHFIWEQNAENNN

SEQ ID NO: 154163 - protein, 69 aa, Glycine max
  Clone ID: PAT_MRT3847_11022C.1.pep
FFLNFLINILKILVYIFLPFLKGMTYKFLLYSSMAPPLHFLFKIHTLTTWATNKIRSNPTVGPSPWPNP

SEQ ID NO: 154164 - protein, 39 aa, Glycine max
  Clone ID: PAT_MRT3847_110230C.1.pep
IDLRSDLYHIRIGAVKYEANMYLHVIWDSSDERMHVLHD

SEQ ID NO: 154165 - protein, 43 aa, Glycine max
  Clone ID: PAT_MRT3847_110231C.1.pep
LTLTRNNKTIPHVHLSQEFILCPFNKKIILAKKKKLTTKTERR

SEQ ID NO: 154166 - protein, 309 aa, Glycine max
  unsure (1)..(309): unsure at all Xaa locations
  Clone ID: PAT_MRT3847_110232C.1.pep
TRPRRLDSTQILANAVLEDPEAHALKEEGERLRRENEGLTKELEQLHADRCLDLEELVYLRWINACLRHELRSYQPPPGKTVARDLSKSLSPXSEKKAKQLILEYASNEGGEGAXSDMDSDQWGPLPRLSFLTDPGEREDYFPLDNSSELKATNNTSKSRIFGKLMRLIRGKESQNQRDRATSKEKSMSREDSNTNSPHFSLSISTGTEGLRSENATPSATSRTSLDFNQTMSMKEESSRNSDSHTPGSSKNLSPRRTRSVDFKNHLRSFSESSGSEKSNLVKYAEAIKDSSGTLKQRTHRRSASISSF

SEQ ID NO: 154167 - protein, 84 aa, Glycine max
  Clone ID: PAT_MRT3847_110233C.1.pep
VEQLELAEQNVKFIAELIDLLLTTLLPDWKPCVAIDHLVSSNGKLTHSSKQKDSELAKYRQSSEDSSQIVAEIVGLSTSPGRPA

SEQ ID NO: 154168 - protein, 64 aa, Glycine max
  Clone ID: PAT_MRT3847_110234C.1.pep
KPHFLMQRMAPFRTLASSVIMTLHYLETTCAVGLTAAQSLRLFPHIDERTVCLKEENNRSLLRS

SEQ ID NO: 154169 - protein, 85 aa, Glycine max
  unsure (1)..(85): unsure at all Xaa locations
  Clone ID: PAT_MRT3847_110235C.1.pep
GRFVIGGPHGDAGLTGRXMIIDTDGGRGXAHGSRVFAAKDRTSVDRSGAYMMRRVCWSIVAYGTVRXAIVQASYAIGGPEPLSVF

SEQ ID NO: 154170 - protein, 51 aa, Glycine max
  Clone ID: PAT_MRT3847_110236C.1.pep
GLLPPPTAEISLCDHILCSRSVSGRHISPYSATALRSYSRLISLIRFGSYS

SEQ ID NO: 154171 - protein, 196 aa, Glycine max
  unsure (1)..(196): unsure at all Xaa locations
  Clone ID: PAT_MRT3847_110237C.1.pep
MMSGYVRRAFSYRNMLWLRNSGVVRGCDVWSPIQMCDSNRVLTLPATPNFVAESRRAFAKGRKSKDEGGASTIEVPPNAGPTIKANAVSQMEAAMAALSTELSKLRTGRASPGMLDHIIVETSGLKMPLNRLAVVSVLDPKTLSVNPYDPETLKQLENAIVSSPLXGLNPKSDGGRLIACFPPLTKEHMEALTQLV

SEQ ID NO: 154172 - protein, 369 aa, Glycine max
  Clone ID: PAT_MRT3847_110238C.1.pep
MLTAHNILQLNLPSGLLPSIDLSYIEDRYAGRQAWSFMNNGNKRSSSQVQLSSDTSKIWVPSNPRGAERLPPGIVEAESDFYLRRLWGKPSEDLTSRPNYLVTFTVGYDQKNNIDAAVKKFSGNFTILLFHYDGRTTEWDEFEWSKKAIHVSVHKQTKWLGAKRWYAKRFLHPDIVAPYDYIFIWDEDLGVEHFNAEEYIKLVRKHGLEISQPGLEPNKGLTWQMTKRRGDQEVHKVTEEKPGWCSDPHLPPCAAFVEIMAPVFSRDAWRCVWHMIQNDLVHGWGLDFALRRCVEPAHEKIGVVDSQWIVHQGLPSLGNQGESQTGKSRWQGVRERCRKEWTMFQSRLANAENAYYKSMGTDTSNSTAH

SEQ ID NO: 154173 - protein, 404 aa, Glycine max
  Clone ID: PAT_MRT3847_110239C.1.pep
MVIITRSSAGRKPSEIMKFFLTTFIGIVFGFFIGVSIPTLSITKLNLPSGLLPSIDLSYIEDRYAGRQAWSFMNNGNKRSSSQVQLSSDTSKIWVPSNPRGAERLPPGIVEAESDFYLRRLWGKPSEDLTSRPNYLVTFTVGYDQKNNIDAAVKKFSGNFTILLFHYDGRTTEWDEFEWSKKAIHVSVHKQTKWLGAKRWYAKRFLHPDIVAPYDYIFIWDEDLGVEHFNAVEYIKLVRKHGLEISQPGLEPNKGLTWQMTKRRGDQEVHKVTEEKPGWCSDPHLPPCAAFVEIMAPVFSRDAWRCVWHMIQNDLVHGWGLDFALRRCVEPAHEKIGVVDSQWIVHQGLPSLGNQGESQTGKSRWQGVRERCRKEWTMFQSRLANAENAYYKSMGTDTSNSTAH

SEQ ID NO: 154174 - protein, 62 aa, Glycine max
  Clone ID: PAT_MRT3847_11023C.1.pep
MQEGSVEGIAWRASSLTFENEIYPLNESWVVSGLGHDYKTDTQPIKTASVLHYDGKMKPWLD

SEQ ID NO: 154175 - protein, 126 aa, Glycine max
  unsure (1)..(126): unsure at all Xaa locations
  Clone ID: PAT_MRT3847_110240C.1.pep
SPYIPDFKLAFEHFXCIHAGGRTVLDXLEKNLELFDWHMEPSRMTLNRFGNTSSSSLWYELAYTEAKGRIRKGDRTWQIAFGSGFKCNSAVWRALRTINPAKEKNPWMDEIHEFPVHVPKVATIGS

SEQ ID NO: 154176 - protein, 517 aa, Glycine max
  Clone ID: PAT_MRT3847_110241C.1.pep
MADHTPGSGTVSVEASSQERRKLPNFLLSVRLKYVKLGYHYLISNAMYLLLIPLLGIASCHLSTISYQDVVQLWENLKFNLLSVTLCSSLIVFLVTFYFMSRPRGVYLVDFACYKPEPECTCTREIFMNRSVETGVFSEENLAFQKKILERSGLGQKTYLPPAILSVPSNPCMAEARKEAEQVMFGAIDQLLEKTGVKAKDIGILVVNCSLFNPTPSLSAMIVNHYKLRGNIQSYNLGGMGCSAGLISIDLAKQLLQVHPNSYALVVSMENITLNWYFGNNRSMLVSNCLFRMGGAAVLLSNKSSDRRRAKYQLIHTVRTHKGADDRSYGCVFQEEDEKKTIGVALSKDLMAVAGEALKTNITTLGPLVLPMSEQLFFFATLVARKVFKMKIKPYIPDFKLAFEHFCIHAGGRAVLDELEKNLELSDWHMEPSRMTLNRFGNTSSSSLWYELAYTEAKGRIRKGDRTWQIAFGSGFKCNSAVWRALRTINPAKEKNPWMDEIHEFPVHVPKVATISS

SEQ ID NO: 154177 - protein, 34 aa, Glycine max
  Clone ID: PAT_MRT3847_110242C.1.pep
RSVNSRDRTHCVTSWLRNDQTGYRLAYEDRPRRG

SEQ ID NO: 154178 - protein, 87 aa, Glycine max
  Clone ID: PAT_MRT3847_110243C.1.pep
NEPASINLSTLLNYFRRSLKSVSSFKMFGKRSFASSKDRSGKITKQQTTKRSFRDASKQKQAVAEKLDTRKDSPMMEGSPSLTSAIV

SEQ ID NO: 154179 - protein, 205 aa, Glycine max
  Clone ID: PAT_MRT3847_110244C.1.pep
MLQHSEKALRRTLFLSVLVSAGVFPTLSSYGKTKSKNPYDEKRLLQQNRRIQKENNAPEDFPNFVREGFQVKVVSSDNYIKSDSGLIYRDFVVGQGDCPKDGLQVTFHYIGYNESGRRIDSTYLQGTPAKIRMGTKGLVPGFEEGIRDMRPGGKRRIIIPPELGPPVGPSTFFSSKQFEVFDVELLSVQNCERRTIAFYSDVVCN

SEQ ID NO: 154180 - protein, 145 aa, Glycine max
  Clone ID: PAT_MRT3847_110245C.1.pep
MGTGKPRGIRAARKLRNLRREERWADKQYKKSNLGTALKANPFGGASMAKGIVLEKIGIEAKQPNSAIRKCVRVQLIKNGKKVSAFVPRDGCLNFIEENDEVLVAGFGRKGHAVGDIPGIRFKVVKVASVGLDALYREKKEKPRS

SEQ ID NO: 154181 - protein, 52 aa, Glycine max
  Clone ID: PAT_MRT3847_110246C.1.pep
SGWFGSSCQFFSKKPNQSKLINIDRFGPKYLLNPNQPVATQFLYIMPFNISL

SEQ ID NO: 154182 - protein, 341 aa, Glycine max
  unsure (1)..(341): unsure at all Xaa locations
  Clone ID: PAT_MRT3847_110247C.1.pep
MAHFTSSGKSDDLTKEDCKGQSALVVCFGEILIDFVPTVGGVSLAEAPAFKKAPGGAPANVAVGISRLGGSSAFVGKVGADEFGYMLADILKKNDVETSGMKFDPNARTALAFVTLRADGEREFLFFRXPSADMLLQESELDENLIKKAKIFHYGSITLIDEPCKSAHLAAMRFAKESGCILSYDPNLRLALWPSAEAARDGIMSIWDQADIIKISEEEITFLTGGDDPYDDNVVLNKLFHPNLKLLIVTEGSEGCRYYTKEFKGRVAGVEVKPVDTTGAGDAFVSGIIYSLASDQSLFQNEEHLRKALYFANVCGAITVTERGAILALPTKEAVFQFAAT

SEQ ID NO: 154183 - protein, 87 aa, Glycine max
  Clone ID: PAT_MRT3847_110248C.1.pep
AIHGDLLSNLYLSLSVRRVSLHLTPSLSHLFSKPIDFNPCSPLCLGPCTPRASRDAGWRGPWSSANRLPSGGSLRFLATRWIVLLGV

SEQ ID NO: 154184 - protein, 150 aa, Glycine max
  unsure (1)..(150): unsure at all Xaa locations
  Clone ID: PAT_MRT3847_110249C.1.pep
SPDSTNSNNGSRKKLKLTKEQSATLEDIFKLHSSLNPAQKQALAEQLNYXHRRVEVWFQNRRARTKLKQTEVDCEFLKKCCEKLTDENLRLKKELQELRAQKLGSTPLYIQLSKATTLTICSSCEKLLKPNEGNKGAINKLQNSIELGGI

SEQ ID NO: 154185 - protein, 135 aa, Glycine max
  unsure (1)..(135): unsure at all Xaa locations
  Clone ID: PAT_MRT3847_11024C.1.pep
XXXXXLXXSXXXTXXLXYXXXXIXXXXLXXXXXXXPXXFSXXXXXXXSXXXXXXXSXXHXSYXIXNXXXXLXXXXXXXSXXTPXHXXXXXFXSXXCXXXXXSXPFXXPLTXXXXXTXXXXXLXXXXXXXXXXXXX

SEQ ID NO: 154186 - protein, 45 aa, Glycine max
  Clone ID: PAT_MRT3847_110250C.1.pep
VSQVTLLVWGYKYEHASFQRKTVVLKSFNQFCDPSFWLASQIDVL

SEQ ID NO: 154187 - protein, 68 aa, Glycine max
  Clone ID: PAT_MRT3847_110251C.1.pep
LNQRPQNKYIKNPTLYQYPYKNHDLTAKNKINLLAFKIIIILKIGHRIKTEQKNCTQQMMMGTYMKKT

SEQ ID NO: 154188 - protein, 87 aa, Glycine max
  unsure (1)..(87): unsure at all Xaa locations
  Clone ID: PAT_MRT3847_110252C.1.pep
MHTPPSSQPGLGFHNETYEGSEDTPADTGGPTAPCRVCEAEIPLEGKVNQHVARSQQSNEVTPIXPHPPGKKSVQWPCNCLLVCKAT

SEQ ID NO: 154189 - protein, 36 aa, Glycine max
  Clone ID: PAT_MRT3847_110253C.1.pep
ETAMLAAAPLTVVAAMEENVEGPELFTVGVVNNLVF

SEQ ID NO: 154190 - protein, 59 aa, Glycine max
  Clone ID: PAT_MRT3847_110254C.1.pep
HLFVPLFLSMNPKTMPCKAQSRQSQQIIITSSESNSYTYASEYIRGSVEHSSVPSINDS

SEQ ID NO: 154191 - protein, 117 aa, Glycine max
  Clone ID: PAT_MRT3847_110255C.1.pep
MTSSSSALVLLLAAIFVFSGVAQSPASSPESPATPPKAATPSPSSSKSPPAVSPTPSPSGGISPPSPPSLVPASSPSSISSPPSDAPAPSENAAVSNGFAAAGSVVVGLVAAASLIM

SEQ ID NO: 154192 - protein, 61 aa, Glycine max
  unsure (1)..(61): unsure at all Xaa locations
  Clone ID: PAT_MRT3847_110256C.1.pep
FLKWKKREEKKRVWFGFSFHRPSTSLCHTTPPPTPXFFICIVLFLXLLFLSFFVPSESTHE

SEQ ID NO: 154193 - protein, 140 aa, Glycine max
  Clone ID: PAT_MRT3847_110257C.1.pep
SPPAPRGFLWWPPLGEIGPQTLVVMAMAPPIRVPPGISTPPPFLGPLFPYTLGPPPPGFPLSPPPGGGFIRPPPRFCFFPGTGALGPSPTPKLLHPLPPRFVPLNYSPMKILRPAFSCEGCPQISPPGTNFFFFNPVGLF

SEQ ID NO: 154194 - protein, 36 aa, Glycine max
  Clone ID: PAT_MRT3847_110259C.1.pep
AGVVDAIAIYRIERRSGQAEPLIDHSLIRMSPDCDH

SEQ ID NO: 154195 - protein, 54 aa, Glycine max
  Clone ID: PAT_MRT3847_11025C.1.pep
SPLLPPILHHQTFLLLSIWGRSLPTALGHLYKRTKTFTEEANKKSQSLTPSYFR

SEQ ID NO: 154196 - protein, 86 aa, Glycine max
  unsure (1)..(86): unsure at all Xaa locations
  Clone ID: PAT_MRT3847_110260C.1.pep
EREXFIKQHFRERNTNLKNSPKTMRPPELHSGFLXFNSIQFRNXKRVWCVCSLAXLSCXWLTEAXLKTXXGGXXXGXXYXXXLGFX

SEQ ID NO: 154197 - protein, 96 aa, Glycine max
  unsure (1)..(96): unsure at all Xaa locations
  Clone ID: PAT_MRT3847_110261C.1.pep
LXKXXXXPRXXFGFFLGIXXXLNXXSLXXXVXFXXXIXXLRXIXXKXVCCXXXXREXXKNXXLXWFFXFFFXXXXWGSXEXXXEPNSEXYVRVHAX

SEQ ID NO: 154198 - protein, 64 aa, Glycine max
  Clone ID: PAT_MRT3847_110262C.1.pep
CFTIKPCAFQFVKHLSDHSVLIQNWHRYRLYVTDMSRPQYGVVQIEHQIYRGATSIICLGFLLS

SEQ ID NO: 154199 - protein, 148 aa, Glycine max
  Clone ID: PAT_MRT3847_110263C.1.pep
IRLEINTCSEVSPEVWALGGSVVEFVFSNFALFFSNNFCDLLGNIACVPAELGFPSVGCKRVLASYNEAILSKDWPLAWSCAPILSKQHTVPPEYSWGPLHLQSPPPFCTVLKHLQVIGRNGGEDTLAHWPIASGMNIEECTCEILKY

SEQ ID NO: 154200 - protein, 44 aa, Glycine max
  Clone ID: PAT_MRT3847_110264C.1.pep
LPSDASSVEPYQVATTTSSTFFTLERSTRARRHKTTTMGLRDSL

SEQ ID NO: 154201 - protein, 98 aa, Glycine max
  unsure (1)..(98): unsure at all Xaa locations
  Clone ID: PAT_MRT3847_110265C.1.pep
TRAESPLFAPFTVLKTMAGLPTIKTTNYITSIANNGGRVQCMQVCPPVGKKKFDTLSYLPNLDDAQLAKEVQYLLRKGWIPCXEIRXDHGLEYREHNR

SEQ ID NO: 154202 - protein, 75 aa, Glycine max
  Clone ID: PAT_MRT3847_110266C.1.pep
DKKGGSRGKTASKTDPHLNNLVISAATPPPKKEIKFDTRLYEAHISFLLPTLQHINTSSNPPLISLSHHNFIKTF

SEQ ID NO: 154203 - protein, 280 aa, Glycine max
  unsure (1)..(280): unsure at all Xaa locations
  Clone ID: PAT_MRT3847_110267C.1.pep
MEKASLCHRNTPLPLLNRPSNFLQFKHQNSFLKFPNPNLHRLRRLNCSVSDGTVSSSLGATDSSLAVKKKAAEVSSELKGTSIFLVGLKSSLKTSLGKLLADALRYYYFDSDSLVEEAVGGALAAKSFRESDEKGFYESETEVLKQLSSMGRLVVCAGNGTVTSSTNLALLRHGISLWIDVPLDFVARDVIEDKSQFAPSEISISGSYPEVQDELRALYDKYRVXVRSDSIISVQKVASRLGCDNLDEITREDMGALGALREIEKLTKVKKMQEEAARPF

SEQ ID NO: 154204 - protein, 70 aa, Glycine max
  Clone ID: PAT_MRT3847_110268C.1.pep
VQDELGALYDRYRVGYATADAIISVQKVASRLGCDNLDEITREDMALEALGEIEKLTRVKKMLEEAARPF

SEQ ID NO: 154205 - protein, 68 aa, Glycine max
  Clone ID: PAT_MRT3847_110269C.1.pep
RILSSTKWHLPVAGCKMEEEHALNDAKQKSLVIKLECVYTPYPRIIRHKKSLILEEVDRQMEMDTLMA

SEQ ID NO: 154206 - protein, 76 aa, Glycine max
  unsure (1)..(76): unsure at all Xaa locations
  Clone ID: PAT_MRT3847_11026C.1.pep
CSASFLISVINGRWRKTEILPYKHAIVPYGGPPSTNCLWQLAKKIHHAIPPWQPLGRYLIILLLIKFYHKETSKXC

SEQ ID NO: 154207 - protein, 278 aa, Glycine max
  unsure (1)..(278): unsure at all Xaa locations
  Clone ID: PAT_MRT3847_110270C.1.pep
SPFQFSSIQAPNFLLQVPEPESEPEPESEPEPPSIAQAQLLSIRRHRSVFGWCHGLFFSCGEVFVQKKAAEVSSELKGTSIFLVGLKSSFKTSLGKLLADALRYYYFDSDNLVEEAVGGALAAKSFRESDEKGFYESETEVLKQLSSMGRLVVCAGNGAXTSSTNLALLRHGISLWIDVPLDFVARDVIEDQSQFAPSEISISGSYPEVQDELGALYDRYRVGYATADAIISVQKVASRLGCDNLDEITREDMALEALGEIEKLTRVKKMLEEAARPF

SEQ ID NO: 154208 - protein, 197 aa, Glycine max
  unsure (1)..(197): unsure at all Xaa locations
  Clone ID: PAT_MRT3847_110271C.1.pep
IRHQEKEKKNWWKHFISSKKGGGGKVRSKLNSSTNKTRRINVRQNKKRWMELSALYIGQEIRAHKGLIWTMKFSPNGQYLASGGEDGVIRIXRVKTLNTSSICFNAEDSAANKVKHDFSSSQKKHSSQSFVVLPVRFXIEESPLHEFSGHASDVLDLAWSNSDTLLSSSSDKTVRLWKIGCSQCLSVFHHKDYVTCI

SEQ ID NO: 154209 - protein, 145 aa, Glycine max
  unsure (1)..(145): unsure at all Xaa locations
  Clone ID: PAT_MRT3847_110272C.1.pep
IRLETAGEDDRRAKWPVPKDLIELQPSYKQDNWDPDWQSTSSSKVSYLVLRLKALRGTKSGTNFNTENIIDEMHIENSLHRSDDKSSIQTCFMSSTKTNLNPEKVLIFSQFLEHIHVIEQQVTIAXGIKYTGMYSPMHSSNKKKS

SEQ ID NO: 154210 - protein, 53 aa, Glycine max
  Clone ID: PAT_MRT3847_110273C.1.pep
ILVFVHVQYLRIRITLSDQSSHLHVSCHFIIQCFMCLSFHNDERGYHICISTR

SEQ ID NO: 154211 - protein, 97 aa, Glycine max
  Clone ID: PAT_MRT3847_110274C.1.pep
ASLGCNWASSKHLLIGGNYSKHIIFFWLGVPSKICKVFILPFSSHSLSSSLHLPLHHSGTCADPLDWNGGGFDQTTMMIFKEHYGCLNTNWYLLHIE

SEQ ID NO: 154212 - protein, 62 aa, Glycine max
  Clone ID: PAT_MRT3847_110275C.1.pep
LRTGIESTETEYAGGVQIRFAFFSSEEIEATHSYSELLYSHPFTTRVLSCPQKSQSMFFWLF

SEQ ID NO: 154213 - protein, 129 aa, Glycine max
  Clone ID: PAT_MRT3847_110276C.1.pep
ASIATIAAVVVELPNALLSEYPDVPGISDRRTVAATPRQHPSSSRTFAGHFSSGPKKSELKIGESSAFFTYVKATTLKRNVEESAHVDNTTTTAATATTTEVRMEDMNQACTEQGDNGLKTHNNGEMFG

SEQ ID NO: 154214 - protein, 347 aa, Glycine max
  Clone ID: PAT_MRT3847_110277C.1.pep
MRTSHMEISSIRGLPEMGIIEDPNFLHHWQLNSIDTTSLTGAPFGEILQKHSFSDNSNFNPKTSMETSPTGIERPAKQLRNNSWNHNKSQQQTPETQFASCSNLLSFVNSNYTSELGLVKPKVEMACPKIDNNALADMLISQGTLGNQNYIFKASQETKKIKTRPKLSQPQDHIIAERKRREKLSQRFIALSALVPGLKKMDKASVLGEAIKYLKQMQEKVSALEEEQNRKRTVESVVIVKKSQLSSDAEDSSSETGGTFVEALPEIEARFWERNVLIRIHCEKNKGVIEKTISEIEKLHLKVINSSALTFGSFILDITIIAQMDMEFCMTVKDLVRSLRSAFSYFV

SEQ ID NO: 154215 - protein, 53 aa, Glycine max
  unsure (1)..(53): unsure at all Xaa locations
  Clone ID: PAT_MRT3847_110278C.1.pep
NVKKPCDWMELISLQGKTNFSIXXVGEYQKAFVMSSLNGNGGWNNVFKMDEIL

SEQ ID NO: 154216 - protein, 323 aa, Glycine max
  unsure (1)..(323): unsure at all Xaa locations
  Clone ID: PAT_MRT3847_110279C.1.pep
MWLEIIFGLVIYKLFRRFFYDDDVLDIEGSDSSALFFVADRLKKLYGANVYVGLRIPDADTASRQSIDMVLLTKQELWVISVKNFSGILTIGGDGCWVCEKPDKHKAERHPDPVEEARKQASIVESYLEQRGVALPEGYISCKVILPNPKLCTIXHADSFPSEVITHDQWMQLKPEPKRMLSSWVKSAFRSGKKDMQESVNQNLDFVLGSAPIWDRVELKGNKYVLGEFLEFKGKQEDVEALRPIRRSKVGRMIIQKTSMFGLAPSRLQVLYSLRDYRTEGASEPEWKEVTVRSSTEIVFQPENASKVRKFKLSSVSSMLLSA

SEQ ID NO: 154217 - protein, 269 aa, Glycine max
  Clone ID: PAT_MRT3847_11027C.1.pep
MEDSEGVLSFDFEGGLDAAPSSAAAAPSGPLIPHDSSAASSAVSNGGPAAPAPSAVDPVGGGNVPGRRSFRQTVCRHWLRSLCMKGDACGFLHQYDKARMPVCRFFRLYGECREQDCVYKHTNEDIKECNMYKLGFCPNGPDCRYRHAKSPGPPPPVEEVLQKIQHLYSYNYNSSNKFFQQRSASYNQRAEKTIEGQGNNSTNQGVTGNPLPAGLGNAQPQQQVQQSQQQVNQSQMQNVANGQPNQANRTATPLPQGISRCVQGPVFFN

SEQ ID NO: 154218 - protein, 156 aa, Glycine max
  Clone ID: PAT_MRT3847_110280C.1.pep
MWLEIIFGLVIYRLFRRFFYDDDVLDIEGSDSSALFSVADRLKKLYGANVYVGLRIPDADTASRQSIDMVLLTKQELWVISVKNFSGILTIGGDGCWVCEKPDKHKAERHPDPVEEARKQASILQSYLEQRGVALPEGYISCKGILPNPKLCTRPA

SEQ ID NO: 154219 - protein, 62 aa, Glycine max
  unsure (1)..(62): unsure at all Xaa locations
  Clone ID: PAT_MRT3847_110281C.1.pep
FAAPSRLQVLYSLRDYRTEGASRXEWKEVTVRSSTEIAFQPENASKVRKFKLSSVSSMLLSA

SEQ ID NO: 154220 - protein, 31 aa, Glycine max
  Clone ID: PAT_MRT3847_110282C.1.pep
LCIAYGQLVILVDAAVILEPGSNSPCDSAVS

SEQ ID NO: 154221 - protein, 88 aa, Glycine max
  unsure (1)..(88): unsure at all Xaa locations
  Clone ID: PAT_MRT3847_110283C.1.pep
MLHIYGERLHMDIMDGQKEPDXRIGASKIASAXMHTKGYLVGYLMVTKPVDYVQPLDXANACGSTFNVVASHDNWDGLIHRNKAHGVT

SEQ ID NO: 154222 - protein, 47 aa, Glycine max
  Clone ID: PAT_MRT3847_110284C.1.pep
RGGSYAMETSAKTDSNVNDILYEISDTLPRAQPAHNPAGTVLEDRPI

SEQ ID NO: 154223 - protein, 208 aa, Glycine max
  Clone ID: PAT_MRT3847_110285C.1.pep
MLSFSSPKSESLLVDKASSNATLPFSYHQLSSNTRNAGYSSGSISMHGRLEGVRGPFTPSQWMELEHQALIYKYITSNVPVPTHLIPIRKALDSLGFCNFSTGLLRPNALGWGGFHLGFSNNTDPEPGRCRRTDGKKWRCSRDAVVDQKYCERHMNRGRHRSRKPVEGQLGHALTTTTTTNTPNASSNSTVVPRNTTTTTTFAHNNVH

SEQ ID NO: 154224 - protein, 219 aa, Glycine max
  Clone ID: PAT_MRT3847_110286C.1.pep
MANWSAENAKKAYLQALKMAKRGKEPDVAEFISAIAAGNNAQLMMVSSAGVAGSATLALAAAAHQTNGRVVCICCDQIESDASRKALGVHGDRVEFVVGDVKTLLLGEYKGADFVLVDCDITNAKEVFLAAFKGANKNGAIVVGYNVKHRVSRWRQLKASFLPIGEGLLVAKIDPNIVKVNDDKVVQRKSRWIVQVDKCTGEEHIFRVTSPDRKMQIEV

SEQ ID NO: 154225 - protein, 126 aa, Glycine max
  Clone ID: PAT_MRT3847_110287C.1.pep
MKGQQQLKKSKVVKIDSRKSWEHHITNATNKGYPVMVHFSAYWCMPSIAMNHFFQQLASTYQNVLFLNVDVDEVKEVASKLEIKAIPTFCLMNGGAPVDKIVGANPDELRKRINCFIHQKHSPKSV

SEQ ID NO: 154226 - protein, 107 aa, Glycine max
  unsure (1)..(107): unsure at all Xaa locations
  Clone ID: PAT_MRT3847_110288C.1.pep
MLTKSRIAVKSGSFVPKNCQRSLNTIDAGTLMGPKEPIXRTATXILTFNLNGKPVLDDHDLLDXIYLLMAKKENGMDRTFLESTFXWHTHSSDTIDRYKEMIDIYHP

SEQ ID NO: 154227 - protein, 32 aa, Glycine max
  Clone ID: PAT_MRT3847_110289C.1.pep
HEGRRGILKLLLGNSGVPMTALLGSGCAYAAE

SEQ ID NO: 154228 - protein, 60 aa, Glycine max
  Clone ID: PAT_MRT3847_11028C.1.pep
VRDISSPPDVFVVSRCANCDNGLDLYGGVLSLRITRPQRKARYRRKKASAVSSTIVRTRG

SEQ ID NO: 154229 - protein, 149 aa, Glycine max
  Clone ID: PAT_MRT3847_110290C.1.pep
RIAEVIRVAERLGVDKPVISQPLYNIVNRQAETEQITAAAAYGLGVVPYSPLARGVLSGKYAPDVAPDANSRAGRQDKRILETEWRVESLRIAQQLQAYTQQRGVGLVEFAIAWVLNNTAVSSAIVGPRTEEQWDSYTKALTVKISAED

SEQ ID NO: 154230 - protein, 47 aa, Glycine max
  Clone ID: PAT_MRT3847_110291C.1.pep
GVRTGERRLKGDRNHCIFTLHTGALRTLNCCYSHTPWVNEWFLSNSS

SEQ ID NO: 154231 - protein, 100 aa, Glycine max
  Clone ID: PAT_MRT3847_110292C.1.pep
RGSRTQNLLWPRLPLNPRQILGIRRLSPTKAYLPFQCGPHQSLSLASGIDPGNLEGPIYNAAWGLPPKNFPSIPGILASDLFGLQSQPIPGFILAAFFRD

SEQ ID NO: 154232 - protein, 66 aa, Glycine max
  unsure (1)..(66): unsure at all Xaa locations
  Clone ID: PAT_MRT3847_110293C.1.pep
IFVILANNLLGIPVGQLVLVQRPEKISEAHKASRFAVGALAFYYVSXAVEFLKKLLELLTNSSAGQ

SEQ ID NO: 154233 - protein, 76 aa, Glycine max
  Clone ID: PAT_MRT3847_110294C.1.pep
MMGHKYLWLVFCLWALTCSLLPSFSFGLMRIGLKKRDLDLDSIRAARMVREKPRLGRPVLGAYDHDLGKPIDEGIV

SEQ ID NO: 154234 - protein, 79 aa, Glycine max
  Clone ID: PAT_MRT3847_110295C.1.pep
VRVFFPSRGEERKRIQGFFCFVGPQISRSRDGKALLCGLDGLLLNSYAALVCWFYLVACLPVGGWKKFFLFLEKKKKKL

SEQ ID NO: 154235 - protein, 124 aa, Glycine max
  unsure (1)..(124): unsure at all Xaa locations
  Clone ID: PAT_MRT3847_110296C.1.pep
RSHTETGLLYCYLHHHAITMAVRSPSHRIMASTKPNQMVCKVHTPEEFVVAPISTGIAITYLMAAAACGSXAHPADTADGEAIYEVDKPKNCTHRVSYKAKSFKLSCCSEWKTHTEAEHSDQDR

SEQ ID NO: 154236 - protein, 223 aa, Glycine max
  Clone ID: PAT_MRT3847_110297C.1.pep
MAASAFSNTLVSPISLPSKPKPKAISLQPKFPLVKFPNPRSHPLSRKTTSLTTFCSSDAANAPQHDTPIELRYPAFPTVMDINQIRDILPHRFPFLLVDRVIEYNPGVSAVAIKNVTINDNFFPGHFPERPIMPGVLMVEAMAQVGGLVMLQPEVGGSRENFFFAGIDKVRFRKPVIAGDTLVMRMTLTKLQKRFGIAKMEGKAYVGGEVVCEGEFLMAMGSE

SEQ ID NO: 154237 - protein, 99 aa, Glycine max
  unsure (1)..(99): unsure at all Xaa locations
  Clone ID: PAT_MRT3847_110298C.1.pep
XXXTSHARVRKLGIRLEXXAXSFHRCXHXPMXXSNTEIXXXXKRGSXHXXXIEVXTXGXXKMYXXXRXXXXAXEXXDFXLASLGNVIXXXXGXPGLXXX

SEQ ID NO: 154238 - protein, 443 aa, Glycine max
  unsure (1)..(443): unsure at all Xaa locations
  Clone ID: PAT_MRT3847_110299C.1.pep
MEGLGGLGHLFVTMFVSGFGGVIVLPAITDVTMAALCPGQDQCSLAIYLSGFQQAMAGVGSVVMTPLIGNLSDRYGRKALLTLPLTVSVIPQVILAYSRDTQFFYAYYVVKTLAAMAGEGSFHCLALAYVADKVPDGKRTSAFGILAGVGSASFVGGTLAARFLSTALTFQVASVLSMVALVYMRIFLKDSVPGGAIRQPLLKVVEESCAEDDSTPKVSRNXKKLPSLGDLICLLRCSPTFSQAAMVSFFNSLADGGLMAVLLYYLKARFQFNKNQFADLLMITGIGATLAQLFFMPILVPVIGEEKLLSTGLLISCINVFVYSIAWTAWVPYALAGCSVFAVFVRPSLCSIASKQVGPTEQGMVQGCLSAISSFANIIAPLIFSPLTALFLSEEAPFYFPGFSLMCLGLALMVAFFQSLIIRAVPPIAGGKISSNRCTDTLV

SEQ ID NO: 154239 - protein, 236 aa, Glycine max
  Clone ID: PAT_MRT3847_11029C.1.pep
MSSNFLVEFNMNSLVQNFGGPISVFSNQDQVEKGFDFEFDDSSSPSSGTSSGGESTEVTKYSNPILRYISDILMDEEDDLERKPCMLQECLRLQAAEKSFHDALLHQNPSSCFSDENYGRTVSFESCTTDNSCESELVNGVGEFDSSFLQLQTPLVHDPFGESQAAGYFHDGTWNLFQSQSQTKPLMVEEGSSASAPREKRSHGMDDYASHEQEGRRGSKVSAVFSDESESPEILD

SEQ ID NO: 154240 - protein, 220 aa, Glycine max
  unsure (1)..(220): unsure at all Xaa locations
  Clone ID: PAT_MRT3847_1102C.1.pep
MAGAAPPPKPEELQPHPVKDQLPNVSYCITSPPPWPEAILLGFQHYLVMLGTTVLIPTTLVTQMGGGNEEKAKMVQTLLFVAGINTFFQTLFGTRLPAVIGGSYTFVPTTISIIFAGRYSDIVNPRERFERIMRGTQGALIVASTLQIVVGFSGLWRNVVRFLSPLSAVPLVALSGFGLYEWGXPVLAXCVEIWLPEIVFLLVFSQYISHVMKGEKRIFD

SEQ ID NO: 154241 - protein, 129 aa, Glycine max
  Clone ID: PAT_MRT3847_110300C.1.pep
MMRITQFCIDGKVMKLKLKLPQNPMQINPTMFMNIKKFGINFAQPFIEFIKTSNIFSRFPMFENKLGNFLFEFDKYENIMPKSNKETLNAFNSIFSNGHASYRKFLVSKVGLATLEVDTKNERSRLEEK

SEQ ID NO: 154242 - protein, 45 aa, Glycine max
  Clone ID: PAT_MRT3847_110301C.1.pep
FTVQESHGVSIIKVSPLSYKSHLDLAPFHVKLAYFGPNLTMSIYR

SEQ ID NO: 154243 - protein, 111 aa, Glycine max
  Clone ID: PAT_MRT3847_110302C.1.pep
IACFFKHRQRGFDQQWLSLTFSKAIFLGNGLVAILSGLFGNVLVDTLALGPVAPFDAASCFLAIGMAIILSSWSENFGDPSENKDLLTQFRGAAVAIASGRFLTLKFIFSF

SEQ ID NO: 154244 - protein, 142 aa, Glycine max
  unsure (1)..(142): unsure at all Xaa locations
  Clone ID: PAT_MRT3847_110303C.1.pep
MASLAAVSVKPVAIKGLAGSSISGRKLAVPRPTARSIRRPRAAAVVAKYGDKSVYFDLDDIGNTTGQWDLYGSDAPSPYNPLQSKFFETFAAPFTKRGLLLKFLLLGGGSLLAYVSAVASPDLLPIKKGPYEPSXPGPRGKI

SEQ ID NO: 154245 - protein, 106 aa, Glycine max
  Clone ID: PAT_MRT3847_110304C.1.pep
ISFLFFLFKAKNSMAGIASGISTLAIGSGDARRRPAQAQSTPNTNTNTNTNSNTSSSTPSSEGFTYLNSAKQDIKGLTNQTGYVKGNANGVINFGTLTASASVQRQ

SEQ ID NO: 154246 - protein, 173 aa, Glycine max
  unsure (1)..(173): unsure at all Xaa locations
  Clone ID: PAT_MRT3847_110305C.1.pep
ILNGNLCGLXNLSLGFNSVGFYQMTKLAIIPCTILLEILFLGKKFSKRVQFSLSILLLGVGIATVTDLQLNALGSFLSLLAVITTCVAQIMTNTIQKKFKVSSTQLLYQTCPYQSATLLIFGPYLDKLLTNLNVSAFKYTTQVTMVIILSCMISIAVNFSTFLVIGKTYRAEL

SEQ ID NO: 154247 - protein, 738 aa, Glycine max
  unsure (1)..(738): unsure at all Xaa locations
  Clone ID: PAT_MRT3847_110306C.1.pep
MEQSLLRGESSDQSNRSRGIFRRSDAITYGSNYEKAAAFIDLAEDGVGLPEEILDSPNFQNYIRFYFILNKCNLIEKARHXFLLNGIIKSYWQDAIIYRDFYISTESISNWYFCFICPLKSVLFIMYCNRNLLFIHTLCSMFYFGSHIYRXNTINQLKVFSLLVLVADVLLYALFLSPLAFDFLPFIMAPYIRVVLFVLNIRELRETITILVGMLDTYLNVLALWLLFLLFASWVAYVFFEDTIQGKTVFTSYGTTLYQLFLLFTTSNNPDVWVPAYKSSRWYCLFFVLFVLVGVYFVTNLILAVVYDSFKSELVKQVFEKDRLRRTMLDKAFDLLDTHKVSSLNKNQCIRLFEELNKYRTLPKISREDFELIFDELDDSHDIKINKDEFADICNAIALKFQKEDVMSYFEYLAFYHSPSSKRLKEFVRSPMFGYLVSFVLVINLVAVIIETTLDIENNSAQKAWQMVEFVFGWIYVIEMVLKIYAFGFENYWRDGQNRFDFIVTVTIAIGETVTFAVPDDDLPFISNGEWIRYLLLARMLRLIRILMYVKRYRAFVATLLTLIPSLMPYLGIIFCTLCIYCSIGVQIFGGIVNAGNPELELTALAENDYLVFNFNDYPNGIVTLFNFLVTATWDEVMTSYKELTGTSWTYLYFISFYLITVLLLLNLIIAFVLEAFFAEMELESSETCEGNGKEVEGDKYRKRSIGTKTRSQRVDALLHHMLSAELCQNEPSSTQTS

SEQ ID NO: 154248 - protein, 143 aa, Glycine max
  Clone ID: PAT_MRT3847_110307C.1.pep
LTALAENDYLVYNSIRVIIEIENPNGIVTLFNFLVTATWDEVMTSYKELTGTSWTYLYFISFYLITVLLLLNLIIAFVLEAFFAEMELESSETCEGNDKEVEGDKYRKRSIGTKTRSQRVDALLHHMLSAELCQNESSSTQTS

SEQ ID NO: 154249 - protein, 39 aa, Glycine max
  Clone ID: PAT_MRT3847_110308C.1.pep
EPGKKGNLRIKFDVMFPSRLTSQQKYELKRILSNSTADD

SEQ ID NO: 154250 - protein, 45 aa, Glycine max
  Clone ID: PAT_MRT3847_110309C.1.pep
YYKCYRLTSPNPRMYIGSGKVSEIKSAIHALGVETVIFDDELSAG

SEQ ID NO: 154251 - protein, 249 aa, Glycine max
  unsure (1)..(249): unsure at all Xaa locations
  Clone ID: PAT_MRT3847_11030C.1.pep
PVVTDYIVSIPVNQKKPNYSLKLHPHPKSRIKDAQLNGXELFKINXSTGNLAGPXPXPHPKTFEFPLQSKNKKSKGRTGTITAAVAGAVSGVVMLSLIVAFFLIKRKKNVAIDEGSNKKDGTSQGGGSLPANLCRHFSIAEIKAATNNFDELLVVGVGGFGNVYKGYIDEGSTHVAIKRLKPGSQQGEQEFVNEIEMLSQLRHLNLVSLIGYCYESNEMILVYDFMDQGTLCEHLYGTDNPSLSWKQRL

SEQ ID NO: 154252 - protein, 74 aa, Glycine max
  Clone ID: PAT_MRT3847_110310C.1.pep
PTHLFVGRLAQMGLVFPLLGEFIPGKGALAPLPIGPGGPIKEIEPQGLSNVLFFFKEALNPGTGNFVPNRGGDV

SEQ ID NO: 154253 - protein, 39 aa, Glycine max
  unsure (1)..(39): unsure at all Xaa locations
  Clone ID: PAT_MRT3847_110311C.1.pep
RPSGNLRKSIQIFTYHIKKINGKWPSAGNLFSHNRLXCG

SEQ ID NO: 154254 - protein, 134 aa, Glycine max
  Clone ID: PAT_MRT3847_110312C.1.pep
AFCEFLLWDMIYRGVQNFYMCEIRKDFTVDATFKGNTSRFLNHSCDPNCVLEKWQVDGETRVGVFAACSIEAGEPLTYDYRFVQFGPEVKCHCGAANCQGFLGTKKKIGKLDLYWGSKRMRTSKASCITLVTAV

SEQ ID NO: 154255 - protein, 48 aa, Glycine max
  Clone ID: PAT_MRT3847_110313C.1.pep
FFINIIGITNRYSSSINRIEFYHISEILFINNYLITTLILFRFIYKSY

SEQ ID NO: 154256 - protein, 73 aa, Glycine max
  Clone ID: PAT_MRT3847_110314C.1.pep
FFFFFFFFFFFFFFFFFFFFFFFGGNLFLKMGGLTKRPHWKKTAMFELLAPRKNFSHLIRSKATPFTYKIYVF

SEQ ID NO: 154257 - protein, 77 aa, Glycine max
  Clone ID: PAT_MRT3847_110315C.1.pep
LFELLGNISTYQYSTLPFLYRTFKLQLPNYPQTDLLTTAYLDYPVQIPRNKTATREQAPCAPSKHTLLGTVYILLKP

SEQ ID NO: 154258 - protein, 38 aa, Glycine max
  Clone ID: PAT_MRT3847_110316C.1.pep
IKEVVGMLSGELEPPQLPVEYSPSTPSRFPFKSRRKGR

SEQ ID NO: 154259 - protein, 94 aa, Glycine max
  Clone ID: PAT_MRT3847_110317C.1.pep
SSNFPNPLSRHGTPIYKTHKRINQIKSNTQNLREREREQTIAVFVEQAEGFLELGDLFIGKFIGPCLLLLLWWGKIALPFFFVFGRLLLGRIFL

SEQ ID NO: 154260 - protein, 109 aa, Glycine max
  unsure (1)..(109): unsure at all Xaa locations
  Clone ID: PAT_MRT3847_110318C.1.pep
KVDTFYNEGFNYMGAAYKNCDKVDTQCILQTLGAXLIGRVKLTRNYHQAPDTLIFTNYPDNGSIACMSHNTNALYCFKQTAVVRAFDDCYPHDPLSHTIHMAYDAYNSN

SEQ ID NO: 154261 - protein, 82 aa, Glycine max
  unsure (1)..(82): unsure at all Xaa locations
  Clone ID: PAT_MRT3847_110319C.1.pep
ADQXSKGEEXEKKAEKKLSXGGXXGSKXEXAADLXXKAAXGXKXAKXGDKXGATXXKXAXXXXKXESKHEAAQAHVDAAHCF

SEQ ID NO: 154262 - protein, 382 aa, Glycine max
  Clone ID: PAT_MRT3847_11031C.1.pep
MRGGNMDQVSYKNCVPKKVPALARWQLKRPRASSASGETKTVETKEEIVYDHDYPCRSNDSNDGGTKTELDHHTLASEEKLGIEDEAGDMNADLNFTEPELRDRSYNDSSNLKVCSGRTIESMKETSETSGAIVNDDLESILRQRALENLRKFREIQSSAKAPDQKNKIVSLVKQPITNKQEGLIHKPVVNDAAAGTKIDKRTLGEETNLPDGRRNLIACPRNNERISNMDKDVSAKCHPAGAPEKVIDSDNPSGTITESSNYNTTNLELTKQAQNSCCDSLQTHASNEAANANLPVTEVDVERNAAKTSHAAIQSVNSNDRNVNVSSEENKSGKLQDESNQGSQFEKKTMNVMRGGEMVQVSYKVYIPNKVPALARRQLKR

SEQ ID NO: 154263 - protein, 57 aa, Glycine max
  Clone ID: PAT_MRT3847_110320C.1.pep
LQFLGVCYCFAYDPPFSQKQRLFSSASYLFFAFGFWLIEGIHNLIRCCIIIHLFNQD

SEQ ID NO: 154264 - protein, 59 aa, Glycine max
  Clone ID: PAT_MRT3847_110321C.1.pep
LGIWIEERSIPFRIFSFSTITRWSGAWVSLYLPYSLPCLYQLYHTLEATPTTAFFVHNP

SEQ ID NO: 154265 - protein, 70 aa, Glycine max
  Clone ID: PAT_MRT3847_110322C.1.pep
PLVPQHFLYNIIPLSLHRQADHACPTRLNLRLTQSSPLRSPLINASTTTITVIQSSSTSQIHHQIHTAYT

SEQ ID NO: 154266 - protein, 135 aa, Glycine max
  unsure (1)..(135): unsure at all Xaa locations
  Clone ID: PAT_MRT3847_110323C.1.pep
SRRSGGGYDRHITMFSPKRHLFQXEYTFKAVKAARITSSDIQKKDSICVGTQNKGPNKLLNNTSITHLFRITKYLKWIATDMTAXTKTLVQQPKNEAXXFRCTYGYKXPGDILXKGMTYESQFYTRHTYMIPLRV

SEQ ID NO: 154267 - protein, 51 aa, Glycine max
  unsure (1)..(51): unsure at all Xaa locations
  Clone ID: PAT_MRT3847_110324C.1.pep
ASRLWPGPPGSSAXRLPASCGVSRPVALRLPFCCPPLRAFRWGFCGGLLLS

SEQ ID NO: 154268 - protein, 63 aa, Glycine max
  Clone ID: PAT_MRT3847_110325C.1.pep
HSMGVVFASQRQAGFNAPLPLPSSSYGNHTTTLSIYGGGFRGTFTATVVEYLNKALKAEEPTT

SEQ ID NO: 154269 - protein, 110 aa, Glycine max
  Clone ID: PAT_MRT3847_110326C.1.pep
DLIESTTVAQSSLSKFAKDNPGIKTGQWILAINVTRNDNKSLNPPVMSPFAKYRLFMNPRSKNAGTMLALSDFVSMRNNQTSLSSVASNGDNGAYLADKQGLSVTDAVIG

SEQ ID NO: 154270 - protein, 66 aa, Glycine max
  unsure (1)..(66): unsure at all Xaa locations
  Clone ID: PAT_MRT3847_110327C.1.pep
MAYDILGSPSGILDTYAFRITVRIALAEKGIXEMRSKEDELXRNKSPLLLQMNPDHKKIAVLMHDG

SEQ ID NO: 154271 - protein, 572 aa, Glycine max
  unsure (1)..(572): unsure at all Xaa locations
  Clone ID: PAT_MRT3847_110328C.1.pep
KALNTGTAFSMTERDRLDLRGLLPPNVMSPDLQIERFMVDLKRLEVQARDGPSDPNALAKWRILNRLHDRNETMYYKVLIAKIEEYAPIVYTPTVGLVCQNYSGLFRRPRGMYFSAEDRGEMMSMVYNWPAEQVDMIVVTDGSRILGLGDLGVQGIGIAIGKLDLYVAAAGINPQRVLPVMIDVGTNNEKLLEDPLYLGLQQHRLDGDDYLAVVDEFMEAVFTRWPNVIVQFEDFQSKWAFKLLQRYRNTYRMFNDDVQGTXAGVAIAGLLGAVRAQGRPMIDFPKQKIVVAGAGSAGIGVLNAARKTMARMLGNNEVAFESAKSQFWVVDAQGLITEGRENIDPDALPFARNLKEMDRQGLREGASLVEVVKQVKPDVLLGLSAVGGLFSKEVLEALKGSTSTRPAIFAMSNPTKNAECTAEEAFSILGDNIIFASGSPFSNVDLGNGHIGHCNQGNNMYLFPGIGLGTLLSGARIVSDGMLQAAAERLATYMSEEEVLKGIIFPSTSRIRDITKQVATAVIKEAVEEDLAEGYHGMDARELQKLSEDEIAEYVQNNMWSPEYPTLVYKKE

SEQ ID NO: 154272 - protein, 349 aa, Glycine max
  Clone ID: PAT_MRT3847_110329C.1.pep
MSGEARSCDYCGHSTALLYCRADSAKLCFSCDREVHSTNQLFSKHTRTLLCDACDHSPATILCSTDTSVLCQNCDWEKHNPALSDSLHERRPLEGFTGCPSVSELLSIVGFSDISKKSLLFSPQGSVADGFFGGEIEGLSDLFVWDAPSFVTLDDLISSSPSSHSFQAMEVPPLPKNRKAACGQHKEEILSQLRELAKSEPLDLEPYVSSGNLSSGFEREPEADIFPSHEWHRESSEPMYQVVPPDPLMRTYTEEIPFKHSTSAVGETQTYGDNGGKPSISLKSETLSTTPKAAACELTSQERDSALLRYKQKKKTRRFDKHIRYESRKVRAESRVRVKGRFAKMEHEH

SEQ ID NO: 154273 - protein, 456 aa, Glycine max
  unsure (1)..(456): unsure at all Xaa locations
  Clone ID: PAT_MRT3847_11032C.1.pep
FLDLASHFITRLRRYARFCRTLASHAVTAGSGSNRNMVASPTQSSATPATSQGGQNGTSSSMGSAQLQTWVQGAIAKISNTTDGGSNPTPNPISGPSTFMPISINTGTFPGTPAVRLIGDCHFLHRLCQLLLCCFFFRRTQLPRYINRTCDTNIQKPQSNTPAPGKVEEIAXPVSAVVKSDDPRVRSGXRVSQLVPASKGGEEPSPGRSRIGTGNAGLGYTYEEVKVLFLVLMDLCRRTAGLQHPLPVSQVGSNNIQVRLHYIDGNYTVLPEVVEAALGPHMQNMPRPRGADAAGLLLRELDLHPPAEEWHRRNMFGAPWSDPDDLDSANDAPKLVSLNPLDSSSLENCDVYYGANGLWPRKRRMSERDAAFGLNTSVGLGAYLGIMGSRRDVVTALWKTGLEGIWYKCIRCLRQTCAFASPASTNLPSQNDREIWWISRWAYGCPMCGGTWVRVV

SEQ ID NO: 154274 - protein, 89 aa, Glycine max [sequence omitted]

SEQ ID NO: 154275 - protein, 49 aa, Glycine max
  Clone ID: PAT_MRT3847_110331C.1.pep
SYHCCLVTCSGGWVYMLLKKSSQFSSSSMQIPFLPLIKKTTSSHDQNYN

SEQ ID NO: 154276 - protein, 44 aa, Glycine max
  Clone ID: PAT_MRT3847_110332C.1.pep
ETTLKESPARSQNQQFLEGALLQIKIKKTISIKAYFQSYTYLPP

SEQ ID NO: 154277 - protein, 126 aa, Glycine max
  unsure (1)..(126): unsure at all Xaa locations
  Clone ID: PAT_MRT3847_110333C.1.pep
STLELHCPIQKATIVYCDNVSATYLSGNRVQHQRTKHIEMDIHFVREKVAHGEVRVLHVPSRYQIADIFTKGLPRVLFNDFRDSLSIREPPASTEGECXIYLAYILLLVLYIFICLLNIRYHIFSH

SEQ ID NO: 154278 - protein, 90 aa, Glycine max
  Clone ID: PAT_MRT3847_110334C.1.pep
KKPNGGQNPKIWCFFGQTKGLFKEKLGVLVFFNNQKGWEVLPINRALKEPKRIFFVGLLKGIFSRENILCKAKNKTPKIYPRVKIGVGWG

SEQ ID NO: 154279 - protein, 41 aa, Glycine max
  Clone ID: PAT_MRT3847_110335C.1.pep
HQCVCPTGVHLISALYCRSVLGTNQKADPKNGIKSPDVSSV

SEQ ID NO: 154280 - protein, 204 aa, Glycine max
  Clone ID: PAT_MRT3847_110336C.1.pep
NTLDNKLEVVEGMKLTRGYISPYFITDQKTQKCELENPFILIHDKKISDINSLLKILELAVTKKRPLLVVAEDVESDALAMLILNKHHAGLKVCAVKAPGFGDNRRASLDDLAILTGGEVITDERGLALDKVQPEMLGTAKKVTITIDDTIILHGGGDKKVIEERCEQLRTAMGESSATFDKEKAQERLSKLSCGVAGFQVGGA

SEQ ID NO: 154281 - protein, 76 aa, Glycine max
  unsure (1)..(76): unsure at all Xaa locations
  Clone ID: PAT_MRT3847_110337C.1.pep
MAXXXXSXAQXKXLFXSXNNSTKLPGXXXLKRXDSXTTVEXRXXXSAAAQSPPPAWPXTAIPXPSXVXTWDGQXPM

SEQ ID NO: 154282 - protein, 47 aa, Glycine max
  Clone ID: PAT_MRT3847_110338C.1.pep
SSERYIYDLALSLRLKSSSSFYFYLSLSLHNVDGDSFCFSDCHRCRS

SEQ ID NO: 154283 - protein, 34 aa, Glycine max
  Clone ID: PAT_MRT3847_110339C.1.pep
GLLSSIVTKCLDNYLDSTMTFKLQCTIPWNEATK

SEQ ID NO: 154284 - protein, 377 aa, Glycine max
  Clone ID: PAT_MRT3847_11033C.1.pep
PTQSSATPATSQGGQNGTSSSMGSAQLQTWVQGAIAKISNTTDGGSNPTPNPISGPSTFMPISINTGTFPGTPAVRLIGDCHFLHRLCQLLLFCFFFRRTQLPRYINRTSDTNIQKPQSNTPAPGKVEEIAKPVSAVVKSDDGQTGRTGAKGAEEVPSGRSRLGSGNAGQGYTFEEVKVLFMMLMDLCRRTAGLQHPLPVSQVGSNNIQVRLHYIDGNYSVQPEVVEASLGPHMQNMPRPRGADAAGLLLRELELHPPAEEWHRRNMFGAPWSDPEDVDCANDTPKLVNSDPLDFSSLEHCDVYYGTHRLWPRKRRMSERDAAFGLNTSVGLGGYLGIMGSRRDVVTATWKTGLEGVWYKCVRCQRQTSAFTSPDAT

SEQ ID NO: 154285 - protein, 309 aa, Glycine max
  Clone ID: PAT_MRT3847_110340C.1.pep
MCAPVLPPLPPCVLPGPRTEAGNVAAPCPTLMSSPLVHLVSSPSVAFLLLLPSPPILGTAFVQVMDVPLPRDKLALDLINNEPSPANTSNSKIYVILVATGSFNPPTFMHLRMFELARDALNSDGYCVIGGYLSPVNDAYKKKGLISAEHRIQLCHLACKSSDFIMVDPWEASQSTYQRTLTVLSRVHNSVCETGLVSQESLKVMLLCGSDLLHSFSIPGFWIPDQVKTICKDYGVVCIPREGQDVEKTIFKDDILNENKDNIKVVNELVPNQISSTRVRDCIARGLSIKYLTADEVIDYIREQQLYLN

SEQ ID NO: 154286 - protein, 102 aa, Glycine max
  Clone ID: PAT_MRT3847_110341C.1.pep
GPRGGPFLFLRRLERGGFLARHLGREPPGFTQVCCVKTGVMQLNLRCQQKGELKGGRAGKKRGAPQKGPPFSLPFFYFAPPLFFFFFFFYFKFFFFFFFFGT

SEQ ID NO: 154287 - protein, 52 aa, Glycine max
  Clone ID: PAT_MRT3847_110342C.1.pep
LIICIFSLSVFFSLTKYRITFWLFYYIYPLIIHHISIITICIFVGIRVTFLN

SEQ ID NO: 154288 - protein, 53 aa, Glycine max
  unsure (1)..(53): unsure at all Xaa locations
  Clone ID: PAT_MRT3847_110343C.1.pep
FLAYCNQIPPXGILTALYAFYKHDMSRRILSLTFLLAVLKLLNIFHMCSLPAF

SEQ ID NO: 154289 - protein, 108 aa, Glycine max
  unsure (1)..(108): unsure at all Xaa locations
  Clone ID: PAT_MRT3847_110344C.1.pep
PTEKRLVMDGIAPGSPERPQFVKGNQPLFPVEQPRRQALXAHTATIAPFKGPGKGNPSDFNSLASKTLKAGXQVKPTCKVIDXGAPPGKPSFSKEPTEPFSEGWAEEW

SEQ ID NO: 154290 - protein, 30 aa, Glycine max
  unsure (1)..(30): unsure at all Xaa locations
  Clone ID: PAT_MRT3847_110345C.1.pep
RIVGIIGEXWSDMLGEXRGESRSFKLRNRM

SEQ ID NO: 154291 - protein, 82 aa, Glycine max
  Clone ID: PAT_MRT3847_110346C.1.pep
CFRSPVYVPKSRRVVGRQIAPSLGWSLFSRSSCSSPIWFPVTVLSFMSTPRSGFFVECPEFSKPAAPVHLRLAISRLKLQEN

SEQ ID NO: 154292 - protein, 111 aa, Glycine max
  Clone ID: PAT_MRT3847_110347C.1.pep
AGSDRKKKKAKIVSGGGGSLNNLKEILEDFMRQQMQIEAQWMVAFEARENERRLKEMEWRQAMEVLENERIMMEERWREREEQRRIREEARAEKRDALITALLNKLERQGM

SEQ ID NO: 154293 - protein, 63 aa, Glycine max
  Clone ID: PAT_MRT3847_110348C.1.pep
EEGCRTPKRSACRIPAAMVCPPPPKKKSAAYTARQRVPPKNGYFVPPDLELIFRVAPTREAFT

SEQ ID NO: 154294 - protein, 219 aa, Glycine max
  Clone ID: PAT_MRT3847_110349C.1.pep
MKLVWSPETASKAYIETVQSCRIFRESGVAELVSAMAAGWNAQLIVETWSEGGVIATSVGLAVARTHTCGRHVCVVPDERSRAEYAERMGEAGMSPEIVVGEAEEVMEGLGGGIDFMVVDSTRGNFSRVLRLAKLSNKGAVLICKNVNSATNIASSSGFRWRSVLEEGSGSRRVVRSVFLPVGKGLDIAHVSAIGGGSAAKRWFKHVDQQSGEVHVIRR

SEQ ID NO: 154295 - protein, 54 aa, Glycine max
  unsure (1)..(54): unsure at all Xaa locations
  Clone ID: PAT_MRT3847_11034C.1.pep
XIXKSPLRXPXRRRXXSIXXHSRXRXXXXHXXHVEXXXXXXVXXFLNXRXXXSX

SEQ ID NO: 154296 - protein, 71 aa, Glycine max
  Clone ID: PAT_MRT3847_110350C.1.pep
NRAWVKKVPAWLLGSQTFLGRVWIFYPKQGWWFGYLLGSTPFVCSFLVAPPEEKKFIEMCKKKKGPKCVFG

SEQ ID NO: 154297 - protein, 78 aa, Glycine max
  Clone ID: PAT_MRT3847_110351C.1.pep
MAMLRTALPGCDDGSYSRVFKALMPLEKDKKKRIIDHINKISTIRRCSFLSAASDIFSAKISGTFKRSELTHGRKILM

SEQ ID NO: 154298 - protein, 190 aa, Glycine max
  Clone ID: PAT_MRT3847_110352C.1.pep
MEIVCSSIIAAGSIEQEVQAIRKDLVTADYGEYMNPFGSEDCLNNEHEQCSLWSDTRARDHIIEIDNAEFTNPFAIDAHSNHDPVSQFIDTVPNSENPSADDPPELYLPGFVIHVVLEKKRPQTDLKTSWRMLERGKCYRAYIANRESFKDIIVSPSMFLDHLPWRCHDALQKILKAQTAKDQVTEPHII

SEQ ID NO: 154299 - protein, 86 aa, Glycine max
  Clone ID: PAT_MRT3847_110353C.1.pep
DNSHQACTIVEPDPGHTQLGISRQSLKAIEKITNPIASEAEIVPYRPEKPLKLNQLFSLSSYQGQVVGHMRDTTTNRRWVGRTPIN

SEQ ID NO: 154300 - protein, 806 aa, Glycine max
  Clone ID: PAT_MRT3847_110354C.1.pep
MANHPLTHSHSFRERFDETLTGHRNEILALLSRLEAKGKGILQHHQVVAEFEEIPEESRKKLQDGVFGEVLRSTQEAIVLPPFVALAVRPRPGVWEYLRVNVHMLVVDELRPAEYLRFKEELVEGSSNGNFVLELDFEPFNASFPRPTLNKSIGNGVEFLNRHLSAKLFHDKESMQPLLEFLRLHSYKGKTMMLNDKVQSLDSLQHVLRKAEEYLISVAPETPYSEFENRFREIGLERGWGDTAERVLEMIQLLLDLLEAPDPCTLETFLGRVPMVFNVVILSPHGYFAQDNVLGYPDTGGQVVYILDQVRALENEMLNRIKKQGLDITPRILIITRLLPDAVGTTCGQRLERVYDTEYCDILRVPFRTEKGIVRKWISRFEVWPYLETYTEDVALELAKELQAKPDLIVGNYSDGNIVASLLAHKLGVTQCTIAHALEKTKYPESDIYWKKFEEKYHFSCQFTADLFAMNHTDFIITSTFQEIAGSKDTVGQYESHTAFTLPGLYRVVHGIDPFDPKFNIVSPGADMGIYFPYTETERRLTEFHSDIEELLYSSVENEEHICVLKDRNKPIIFTMARLDRVKNITGLVEWYGKNARLRELVNLVVVAGDRRKESKDLEEKAEMKKMYGLIETYKLNGQFRWISSQMNRVRNGELYRVICDTRGAFVQPAVYEAFGLTVVEAMTCGLPTFATCNGGPAEIIVHGKSGYHIDPYHGDHAAEILVEFFEKSKADPSHWDKISQGGLKRIHEKYTWQIYSDRLLTLTGVYGFWKHVTNLERRESKRYLEMFYALKYRKLAESVPLAIEE

SEQ ID NO: 154301 - protein, 806 aa, Glycine max
  Clone ID: PAT_MRT3847_110355C.1.pep
MANHPLTHSHSFRERFDETLTGHRNEILALLSRLEAKGKGILQHHQVVAEFEEIPEESRKKLQGGVFGEVLRSTQEAIVLPPFVALAVRPRPGVWEYLRVNVHMLVVDELVPAEYLRFKEELVEGSSNGNFVLELDFEPFNASFPRPTLNKSIGNGVEFLNRHLSAKLFHDKESMQPLLEFLRLHSYKGKTMMLNDKVQSLDSLQHVLRKAEEYLTSVAPETPYSEFENKFREIGLERGWGDIAERVLEMIQLLLDLLEAPDPCTLETFLGRVPMVFNVVILSPHGYFAQDNVLGYPDTGGQVVYILDQVRALENEMLNRIKKQGLDITPRILIITRLLPDAVGTTCGQRLERVYDTEYCDILRVPFRTEKGIVRKWISRFEVWPYLETYTEDVALELAKELQAKPDLIVGNYSDGNIVASLLAHKLGVTQCTIAHALEKTKYPESDIYWKKFEEKYHFSCQFTADLFAMNHTDFIITSTFQEIAGSKDTVGQYESHTAFTLPGLYRVVHGIDPFDPKFNIVSPGADMSIYFPYTETERRLTEFHPDIEELLYSSVENEEHICVLKDRNKPIIFTMARLDRVKNITGLVEWYGKNARLRELVNLVVVAGDRRKESKDLEEKAEMKKMYGLIETYKLNGQFRWISSQMNRVRNGELYRVICDTRGAFVQPAVYEAFGLTVVEAMTCGLPTFATCNGGPAEIIVHGKSGYHIDPYHGDRAAEILVEFFEKSKADPSHWDKISQGGLKRIHEKYTWQIYSDRLLTLTGVYGFWKHVTNLERRESKRYLEMFYALKYRKLAESVPLAIEE

SEQ ID NO: 154302 - protein, 328 aa, Glycine max
  unsure (1)..(328): unsure at all Xaa locations
  Clone ID: PAT_MRT3847_110356C.1.pep
LGTTAXNQYILHLDLEAPPRERLELANAVKADPLXDTGRGVESVRVSAHPNLVPXTCPPSCVGTLQASATPSWRSPHEDQRMHLVSPEPPLMAIGDLLHVCSNLSRNINFIEHTRIAGWTRNQRARPIIIDPALYLSKKSDLALTTQRRTLPTSFKLFTGSAWVVLTRSFVEYCIWGWDNFPRTMLMYYTNFISSPEGYFHTVVCNTEEFRHTAVNHDLHYIAWDTPPKQHPISLTMKDFDKMVKSKALFARKFAKEDPVLDKIDKELLGRTHRFSPGAWCVGNTDGGADPCSVRGNDTMFRPGPGAERLRELLQVLLSKESLSKQCL

SEQ ID NO: 154303 - protein, 218 aa, Glycine max
  unsure (1)..(218): unsure at all Xaa locations
  Clone ID: PAT_MRT3847_110357C.1.pep
RYHPRNQYILHLDLEAPPRERLELANAVKADPIFRGVENVRVMSQSNLVTYKGPTMIACTLQAIAILLKESSEWDWFINLSASDYPLMTQDDLLHVFSNLSRNLNFIEHTRIAGWKLNQRARPIIIDPALYLSKKSDLALTTQRRTLPTXFKLFTGSXWVVLTRSSVEYCIWXWDNFPRTMLMYYTNFISSPEGYFHXTVARNTXEFRHTAVNHDLHY

SEQ ID NO: 154304 - protein, 87 aa, Glycine max
  unsure (1)..(87): unsure at all Xaa locations
  Clone ID: PAT_MRT3847_110358C.1.pep
AFKHLNDSFSLTSIKGVYTEFAXTLLFGFTNISXAITYRKLTSDAALDPGGLLTFTIYHKLARWCTISIETNICNRRVNPAMTCELA

SEQ ID NO: 154305 - protein, 252 aa, Glycine max
  Clone ID: PAT_MRT3847_110359C.1.pep
ETEETNLLQQLSDACLVVDALEPSVREELVNNFCNRELTSYEQIFEGAELAKLDKTERRYAWIKRRMRSNEEIWKIFPSSWHVSYRLCILFCKKTRKQLEDILGNLKEKPDVGTLLLALQRTLEFEDELAEKFGGGTQNREIGNEIEEIGKGTNSSSSAMDIRKKYEKKLAAHQGGDSEVYGSKDLAVPGAGFNFRGIVSSCFEPHLTVYVELEEKTLMESLEKLVQEETWDIEEGSQSWFLSSNMQLFLII

SEQ ID NO: 154306 - protein, 82 aa, Glycine max
  Clone ID: PAT_MRT3847_11035C.1.pep
SSLRQLSCSCYESMRPFLFCCIWLFIILLNLCNSFSAFGMSHTFSAHKAIETSPFCCVALWLLTMAPSTSFREREIGSKCSV

SEQ ID NO: 154307 - protein, 148 aa, Glycine max
  Clone ID: PAT_MRT3847_110360C.1.pep
KFIRKMGLGMFKALFCCSKPHEIDIADSWDSSPDHTPKQHSKPKPKPNAAPTHSNNKQTTTSTQIGAILGKPYVNIHQMYEMKKELGSGQSGVTYLCVEKTTKREYACKSISRSKLLSTHEIEDVRREVMILQHLSGQPNIVEVRGAY

SEQ ID NO: 154308 - protein, 139 aa, Glycine max
  Clone ID: PAT_MRT3847_110361C.1.pep
VASSLTFSVSWFCKRSICNPTGSGWTRETSSPPYMSSLATIFLFLVLPNAHTKSLCSTTDEAWSLEIGFVQQQILGLSHWKNTSQSLFQLSLFSTMACTTVVLTLVAALLVTSVVAQSPASSPALSPKRTPAALPLTTL

SEQ ID NO: 154309 - protein, 84 aa, Glycine max
  Clone ID: PAT_MRT3847_110362C.1.pep
TQDGKMEVSRSRCSPAEGHANRAHDVVNHASHESLKDQIPAAEKRYATKDNKSAIIMKLRQRVVGDHKLLTDSKVYQGTAYSSI

SEQ ID NO: 154310 - protein, 102 aa, Glycine max
  unsure (1)..(102): unsure at all Xaa locations
  Clone ID: PAT_MRT3847_110363C.1.pep
MKMKVLVFFVATILVPWKCHAYKMFPLRRNTGYGARTPGVKCTIWRLAVEAHKIFGFDTIPEELLEPTREYLXGQQYILDSKTVNQQSYFYARHLNVHPKET

SEQ ID NO: 154311 - protein, 59 aa, Glycine max
  Clone ID: PAT_MRT3847_110364C.1.pep
EAPPSPLFEPIELTSWSFYRASLAEFVATLLFLYVTVLTVMGVALSPILCSIVGVQGIS

SEQ ID NO: 154312 - protein, 149 aa, Glycine max
  Clone ID: PAT_MRT3847_110365C.1.pep
MAILMLWRRHFRKGRPLEAFIVTPPPNRNAVEQLLTLQEAITQFESLIQAANIILLKLRALLLAILPQATEKVALLLVFLAAVFAFVPPKYIFLVVFVEFYTREMPYRKESSDRWIRRIREWWDRIPAAPVQLVKPVHESKKNESKKKK

SEQ ID NO: 154313 - protein, 61 aa, Glycine max
  Clone ID: PAT_MRT3847_110366C.1.pep
TKYFIQLYFSSNCKPVAEGQLEGLRDLNKHVKVTTTEAKLLPDGSLTPQRLLPYRHSRFTV

SEQ ID NO: 154314 - protein, 146 aa, Glycine max
  Clone ID: PAT_MRT3847_110367C.1.pep
MEDGAGRGLECQKTMDGKVSNSNGPEKEIPSCCLKAKASIPESEAKFHSTVVSGWFSASQTCSGKSGKAVYFNNPMWPGEAHSIKVEKILYKEKSEYQEVLVFESSTYGKVLVLDGIVQLTEKDECAYQEMIAHLPLCSIQSPKTV

SEQ ID NO: 154315 - protein, 134 aa, Glycine max
  Clone ID: PAT_MRT3847_110368C.1.pep
VWIQLSILTLRSPIQYVKQALHTFVAWPTNLVKLVLDEDEEIIPHKVYAHGDKPANVDADDPMCGLIKYNFDIYDNPVEFKFDGSKFGIVDAPTSIFLTYSDVSEIIAGDKSLNISVQQLWLMYMHEWSETLGR

SEQ ID NO: 154316 - protein, 74 aa, Glycine max
  unsure (1)..(74): unsure at all Xaa locations
  Clone ID: PAT_MRT3847_110369C.1.pep
XFXRFXXKIIXLFXEXXKMXQIMLXEAFFRNKTTQQRFPFPQSHYLSSQLQQDRDINLINFSALMEIKINRVXK

SEQ ID NO: 154317 - protein, 261 aa, Glycine max
  Clone ID: PAT_MRT3847_11036C.1.pep
MGSLKGDSGHANGENLTEALLPTRDAQQQHQTDDEEQRFGDKLWLETRKLWLIVGPSIFSRLASFTMNVVTQAFAGHLGDVELAAISIANNVLVGFNFGLLLGMASALETLCGQAFGAKRYHLLGIYMQRSWIVLFMCCFLLLPFYVFATPLLKFLGQPDDVAEWSGVVAVWLIPLHFSFAFQFPMQRFLQCQLKTAVIAWVSLLGLVVNVVTSWLFIYVWDFGLYGAAISLDISWWVLVFGMYAYIAYGGCPLTWNGFSL

SEQ ID NO: 154318 - protein, 116 aa, Glycine max
  unsure (1)..(116): unsure at all Xaa locations
  Clone ID: PAT_MRT3847_110370C.1.pep
FSFSLAGSQGRLSPSKGLRRCLSNPADVFSAELPYDTNIPRMYSDRIGRRPILATRSDYAVLSITFPSDYPXNSPAYTAVSSXYXYPEAYPEERVCIYYLHPPVEGPYAYGLESRL

SEQ ID NO: 154319 - protein, 34 aa, Glycine max
  unsure (1)..(34): unsure at all Xaa locations
  Clone ID: PAT_MRT3847_110371C.1.pep
YINXTNILILIHRRPNQNNQTAFFCVSSTQHTXP

SEQ ID NO: 154320 - protein, 60 aa, Glycine max
  Clone ID: PAT_MRT3847_110372C.1.pep
PAFGQPCKTSRSYGAHPSCGGSPVHPKIPNLPLEIVLPINVPCNSGFCHRCICSVENYYA

SEQ ID NO: 154321 - protein, 60 aa, Glycine max
  unsure (1)..(60): unsure at all Xaa locations
  Clone ID: PAT_MRT3847_110373C.1.pep
XPLXNXGXXXXLPXXXXXXXXLXIVPAKPXVXYRFXGXLLXPXVSCHLXFAXDFXEKTET

SEQ ID NO: 154322 - protein, 71 aa, Glycine max
  Clone ID: PAT_MRT3847_110374C.1.pep
VQKEHEDYTGSKFWPIYNSLIFSPTKIRSLVNRTMNWTLIHGLRHIQNTKNYRLTNHKNWTIGETLLSEST

SEQ ID NO: 154323 - protein, 81 aa, Glycine max
  Clone ID: PAT_MRT3847_110375C.1.pep
QTFTFHAPINHLLILIINTFYSNTEIFLLELIINTSYTLYNILFYNFTHNITLYTHPQLFIHIISHNTNTTLTIPYTTIFI

SEQ ID NO: 154324 - protein, 106 aa, Glycine max
  unsure (1)..(106): unsure at all Xaa locations
  Clone ID: PAT_MRT3847_110376C.1.pep
MDPMVHIIETKKDCHTTNGSIKCFFCNPSDLSLVIYQFKIMQNPNYTFHCLLMDFFFFLGEKPLXFWTKNLFTNSGVLFSPKNVKAPNLPSKGTLLTGNFQSFKLE

SEQ ID NO: 154325 - protein, 172 aa, Glycine max
  unsure (1)..(172): unsure at all Xaa locations
  Clone ID: PAT_MRT3847_110377C.1.pep
MEPQTLEIEVTKDDVSINRANKDESSSRMEGFIKDEFDCVLNEKEPPEGQVDAGGGSFGNEENPFHIGDGPLTVLKQKEKKLVDEVSVRTSELAHLEQELELMNETAEMAFNNQHSIDFYIDQLNEQVQAKRNYLLTLESEWDTVEXPLEERKRSLEESLYSNNPDALEMLQ

SEQ ID NO: 154326 - protein, 78 aa, Glycine max
  unsure (1)..(78): unsure at all Xaa locations
  Clone ID: PAT_MRT3847_110378C.1.pep
RLIGNXRISHFWNXNSHRRKVRITSHSPIXKKILXNSXXALXSPLWSLTNNKRTHXNPSXNLFCLFHINYDFAASLHX

SEQ ID NO: 154327 - protein, 60 aa, Glycine max
  Clone ID: PAT_MRT3847_110379C.1.pep
FAHPMFSTKTEEYVELNIAKKEIKDCEIGIKNSIGTIGPLDSLLNLGGIKLNQKLIPTIK

SEQ ID NO: 154328 - protein, 122 aa, Glycine max
  Clone ID: PAT_MRT3847_11037C.1.pep
KKKKKKTEKKYLVLLVPPKNHKNPNRRKGGVVLVFWPHKAGGAGTGKPQKKKKRGCPPSPPPKKQLSLITHKPHWREGGTPHTPTREVTKKKQKSWGGGEAELAWVPGQPEKNEEPSAPLSL

SEQ ID NO: 154329 - protein, 111 aa, Glycine max
  Clone ID: PAT_MRT3847_110380C.1.pep
RRHPPQPKRHLPVTGRSGCPLLFLFFHFSAFQTKQTEQRAHKNRFSVIRVRFCSFSTPNPIPRVFQVFHFPFPSLILAIPFVFCFSEKNLARKRKLFDLVLFFSFRLNSSF

SEQ ID NO: 154330 - protein, 92 aa, Glycine max
  Clone ID: PAT_MRT3847_110381C.1.pep
DYAQQEVRRYDKDNNLWVTIGRLPDRIVSMNGWGLAFRACGNRLIVIGGPRALDGRVIEINACVPGEGVPEWNLLASRQSGSFVYNCAVMGC

SEQ ID NO: 154331 - protein, 79 aa, Glycine max
  Clone ID: PAT_MRT3847_110382C.1.pep
IAFISLTYVVVGSQSRWLAIYATVIGSLIMLSTIGSMCYCVILHRMEETKLRAESRSFSMSHASDQEILNSEYKRMYAL

SEQ ID NO: 154332 - protein, 250 aa, Glycine max
  Clone ID: PAT_MRT3847_110383C.1.pep
YPVYLHYQCVILPIGLCFGNLHQSFHPIFVKGIARGILYLHEDSRLKIIHRDIKPSNVLLDNGINPKISDFGMARMVATDQIQGCTNRVVGTYGYMSPEYAMHGQFSEKSDVFSFGVMVLEIISGKKNSCSFESCRVDDLLSYAWNNWRDESPYQLLDSTLLESYVPNEVEKCMQIGLLCVQENPDDRPTMGTIVSYLSNPSFEMPFPLEPAFFMHGRMRRHSAEHESSSGYYTNHPSSSSVNKMSTTAF

SEQ ID NO: 154333 - protein, 45 aa, Glycine max
  Clone ID: PAT_MRT3847_110384C.1.pep
VIGDHFKTLPPLNQVLACFILSFKAFFFLNLTSLGAHSNALYLSE

SEQ ID NO: 154334 - protein, 342 aa, Glycine max
  Clone ID: PAT_MRT3847_110385C.1.pep
RLPKYTGFRTDKKGQTALHMAVKGQNEEILLELVKPDPAVLSLEDNKGNTALHIATKKGRTQNVRCLLSMECININATNKAGETPLDVAEKFGSPELVSILRDAGAANSTDQRKPPNPSKQLKQTVSDIKHDVQSQLQQTRQTGMRVQKIAKKLKKLHISGLNNAINSATVVAVLIATVAFAAIFTVPGQYVEDKTHGFSLGQANIANNAAFLIFFVFDSLALFISLAVVVVQTSVVVIEQKAKKQLVFVINKLMWMACLFISIAFISLTYVVVGSHSRWLAIYATVIGSLIMLSTIGSMCYCVILHRMEETKLRAESRSFSMSHASDQEILNSEYKRMYAL

SEQ ID NO: 154335 - protein, 123 aa, Glycine max
  unsure (1)..(123): unsure at all Xaa locations
  Clone ID: PAT_MRT3847_110386C.1.pep
GSGEQVYPEEPLYNPLGFGKNEKXLEGFXLKKIKKERLVKLAILGNVDKALVTGVGPXQTILDHLANPGHNNILTSLKFQRMNYMLFNRFFRVNKTQKPFNLLKSCGHFVPWWGAVRNHLSTR

SEQ ID NO: 154336 - protein, 441 aa, Glycine max
  Clone ID: PAT_MRT3847_110387C.1.pep
MLEGPTFLVSRDLPSSCEQETRWIYNSFCVMELASNKRQLELEEEAVLTKSCKLSDAPEEGETKMNFQNLSLSVNQANDQNHSSDQSDSSSLIFQLGRDISINCLLRCSRSDYGSIASLNQSFRSLVRTGELYRLRRQMGIIEHWVYFSCNLPEWEAFDPNTRRWMRLPRMPSNECFICSDKESLAVGTELLVFGKEIMSPVIYRYSILMNAWSSGMEMNIPRCLFGSASLGEIAILAGGCDPRGNILSSAELYNSETGTWELLPNMNKARKMCSGVFIDGKFYVIGGIGVGNSKQLTCGEEFDLQTRKWQKIPNMFPGRNGGTEATEVSSAAEAPPLVAVVNNVLYSADYAQQEVRRYDKDNNLWVTIGRLPDRIVSMNGWGLAFRACGNRLIVIGGPRALDGRVIEINACVPGEGVPEWNLLASRQSGSFVYNCAVMGC

SEQ ID NO: 154337 - protein, 88 aa, Glycine max
  Clone ID: PAT_MRT3847_110388C.1.pep
SMMDTLTTSCSATLPWSYCCFDIYASGRASLYASMTMQYRLPYGKRDDACDSNSRELNKLSTLSDRCLSVTPLYKDAEMGLQLSAATV

SEQ ID NO: 154338 - protein, 98 aa, Glycine max
  Clone ID: PAT_MRT3847_110389C.1.pep
IWSLPHVRVNGIDFEDVKVDLSQHHQLSPQFRVINPLMKVPAVVDGRFKLFERYFNFIFHAILLLIYLHSSFLLICVLFSSLHLQSCYSHISCLCISR

SEQ ID NO: 154339 - protein, 94 aa, Glycine max
  unsure (1)..(94): unsure at all Xaa locations
  Clone ID: PAT_MRT3847_11038C.1.pep
FLQGCKPFVTLRVSGVETVISGHVHAQPHLLGYKMQSCVPGHDASITEGVDKTSATSQVTLDGLXDHLKRNIEQMXDVLPVTTEDPGSIGSRIH

SEQ ID NO: 154340 - protein, 26 aa, Glycine max
  Clone ID: PAT_MRT3847_110390C.1.pep
TTSASKLYAPCVVHIINNSINSLLIL

SEQ ID NO: 154341 - protein, 49 aa, Glycine max
  Clone ID: PAT_MRT3847_110391C.1.pep
KQLASLGEGNQVADKLAKDNFTMSIPQQIYHVVFKVLWFLPPYKKKSRY

SEQ ID NO: 154342 - protein, 117 aa, Glycine max
  Clone ID: PAT_MRT3847_110392C.1.pep
MAMVISSVHATLFARASFFCQSSGLRSFRSCLPFSSSAASVSSHNLSRKKWRQPVLSVLDLGGVKISREDVVRDDPANNVPDNIFSKLGVQLHRRDQHPLGILKNAIYEYFDTNYSN

SEQ ID NO: 154343 - protein, 67 aa, Glycine max
  Clone ID: PAT_MRT3847_110393C.1.pep
VPSAPSTDIRTVRVVLKACIDPVFAVMPSEPASRVHGSRIHIRIAKSPDARVRKPRTHEETEIEIVA

SEQ ID NO: 154344 - protein, 128 aa, Glycine max
  Clone ID: PAT_MRT3847_110394C.1.pep
MAMVISSVHATLFARASFFCQSSGLRSFRSCLPFSSSAASVSSHNLSRKKWRQPVLSVLDLGGVKISREDVVRDDPANNVPDNIFSKLGVQLHRRDQHPLGILKNAIYEYFDTNYSNKFNKFDDLCPI

SEQ ID NO: 154345 - protein, 88 aa, Glycine max
  Clone ID: PAT_MRT3847_110395C.1.pep
PLLFVTLSPVFTRARPAAITTTSFNTHLLHTHANGLPNVATLAYSRFGGVPLLLLVTYFTRGCVSNQPPLRHTRFTYMLRGPPCHPAN

SEQ ID NO: 154346 - protein, 36 aa, Glycine max
  Clone ID: PAT_MRT3847_110396C.1.pep
SNIDNSDFNVGICILELDSYITDHVDLSACAFMFSH

SEQ ID NO: 154347 - protein, 62 aa, Glycine max
  Clone ID: PAT_MRT3847_110397C.1.pep
LNTKYYICDIMHLPKCKTKYIYIYKKAAAEVLKGLLRESVYFIVLLILAMCRKIYTMCKRNV

SEQ ID NO: 154348 - protein, 42 aa, Glycine max
  Clone ID: PAT_MRT3847_110398C.1.pep
INIRIRTALGKGKKIGLLTTVEPFPVAILADLLAVKNALLCS

SEQ ID NO: 154349 - protein, 60 aa, Glycine max
  Clone ID: PAT_MRT3847_110399C.1.pep
TRPRTRGVLTVQFKFGLNGAMTSTLLAYWIPNIGQLVFIMTKCPDTWKGFYFLAFKNLLA

SEQ ID NO: 154350 - protein, 60 aa, Glycine max
  Clone ID: PAT_MRT3847_11039C.1.pep
GGPLFIAHSCTYINFFECLDPMFLCHCTCWINEIRQSSLNMKYICVVWLSKNTCPSCTPS

SEQ ID NO: 154351 - protein, 55 aa, Glycine max
  Clone ID: PAT_MRT3847_1103C.1.pep
HYFCHKSYIYLVNNKESFLIFNIFTNNKQVYIYIYINKTTNILNNRLTTRYSAQR

SEQ ID NO: 154352 - protein, 47 aa, Glycine max
  Clone ID: PAT_MRT3847_110400C.1.pep
IEITTWDQLPSLPSGQIILCPTQCSPQIFPCFISFVRSIAFKHKQTC

SEQ ID NO: 154353 - protein, 78 aa, Glycine max
  unsure (1)..(78): unsure at all Xaa locations
  Clone ID: PAT_MRT3847_110401C.1.pep
GVTSDLWLVPKTLYAEVLGKMVAPSNRVAPVITPNELPEXADGLLLVFPKETRLRGWQYKTLIDASVCLWRTQALAGK

SEQ ID NO: 154354 - protein, 103 aa, Glycine max
  Clone ID: PAT_MRT3847_110402C.1.pep
RPKKPDESDPDNARGAAKSQGGRALTSQIRDMALKASGAYKHCAPCTGPATQGRVRSNATELDADSDRFRWSYRRTGSSSSTTTRTWGKEMEARLKGISSGEG

SEQ ID NO: 154355 - protein, 60 aa, Glycine max
  unsure (1)..(60): unsure at all Xaa locations
  Clone ID: PAT_MRT3847_110403C.1.pep
FLFLHRSILRLLKMQIFVKTLTXGRPSPLRWNPSETSDTVKAKVSDKGGVPPDQRRTYLC

SEQ ID NO: 154356 - protein, 66 aa, Glycine max
  Clone ID: PAT_MRT3847_110404C.1.pep
VCDSAILKIIASFSSYVAVHWHFFSPFEKFRGFIRGIYICSIYVVITRFSFWCKKKPNPQRKKKKK

SEQ ID NO: 154357 - protein, 327 aa, Glycine max
  Clone ID: PAT_MRT3847_110405C.1.pep
TKEDSAGEWQLAKMALDATEFNYQQIYHFVHTHGVSIPIQVEMMRSMAKDHPIYALLDYHFFGNFDFEFLSGIVLFAANTPYDESMAFGASGSIRCLYDEYSKTSLAEDFPAEIANNGLQYLPNHRYVKYGAMYYSIIKTFVTAYVKAYYVSEDTIKNDSELQTWAARATIVWGVNDFPSSFKGYDDLIKLVTNLVFQNAVKHHFMNGRVSWHSQAAPFRTGALYNAPLPTKKGVNVNPFDYVIPSDLFPLLSSTVVQFYRPIPLSQSLLNGYTTAPFSNEAILTDAITQFHQAMLAMETSMSASDTKKHYLDTFVKPSVMPWFSYV

SEQ ID NO: 154358 - protein, 81 aa, Glycine max
  Clone ID: PAT_MRT3847_110406C.1.pep
SKTFLKYHTNSYTGGLILNYLPTPLFTLHQSSSFPLKYYTHFMLSHILSNKPSYQIIYPSHLSIPSYKTTNTLFTHISLFT

SEQ ID NO: 154359 - protein, 127 aa, Glycine max
  Clone ID: PAT_MRT3847_110407C.1.pep
KEHQKKEDSEAGSSGLAGFQKKVFDLLYKIADIPFLSAYKLKIYDVIEKGQEQPNLTVGIVVAVVVVILSIFLRLIFGGKKKPTRVEKTNPEPAETASSQGSGENEENKEKEESSAPARRKPTRRDN

SEQ ID NO: 154360 - protein, 315 aa, Glycine max
  Clone ID: PAT_MRT3847_110408C.1.pep
YPGVDPRRPKKPEDWDEREKIPDSSAVKPDDWDENAPLEIVDEEAEKPEGWDNEPEEIDDPEATKPEDWDDEEDGEWEAPKIENPKCEAAPGCGEWKRPMKRNPAYKGKWHAPLIENPAYKGIWKPQDIPNPDYFEIKKPDFEPIAAIGIEIWTMQDGILFDNILIAKDDKIAESYRETTWKPKFTVEKEKQKEEDSEAGSSGLAGFQKKVFDLLYKIADIPFLSAYKLKIYDVIEKGQEQPNLTVGIVVAVVVVIVSVFLRLIFGGKKKPTRVEKTNVEPAETATSQGSGENEENKEKEESSAPARRRPTRRDN

SEQ ID NO: 154361 - protein, 164 aa, Glycine max
  Clone ID: PAT_MRT3847_110409C.1.pep
EGVRLAQHDLVRVSTISLPLTKARSCWQLHFFLCDPLFHLNIVISEFTTYHREHRQATRGTPKDKRRKGGPPARRLGVHQVRKTPVEAMEGRNAKCRGIPRPGRKAPGGEGTRMGGFHSKVERQERTTGRVGGRLDTQREGERGAEPDQVRAGTPTHPVAKART

SEQ ID NO: 154362 - protein, 252 aa, Glycine max
  Clone ID: PAT_MRT3847_11040C.1.pep
VRMREDDRWGLKDEITNYTLLLLVTVTKHTTMLKVKPYICTTHYPFSISDHPLSFPISILNPISLRLSQSHPTPTIPCAKRRGWSQPSNRKILQLASTVAFNLKILPEPFNSLAGEIARGDSQTLSFLVGGGRRGKIAPNRRVTKKKSAWFAFVLVCVAGGLWSWRIQEFDLFLRALSFCLAGISLLRLWLGKKAVREWVLGFFFGVALILSSRLGKEDVKFWVHKLASSPVTQIVTTIKRSRNRNSRRIFK

SEQ ID NO: 154363 - protein, 76 aa, Glycine max
  Clone ID: PAT_MRT3847_110410C.1.pep
VVRHYIYEDQENYGGHREKRTTAWRELSFWVTSPNSSLATSSIRCRHPFGQKCHPISPVQRGYFGDRSMVEPVVME

SEQ ID NO: 154364 - protein, 37 aa, Glycine max
  Clone ID: PAT_MRT3847_110411C.1.pep
KPKNETRGVHIRTEVYLSSLSMDNTGELQVTNQRQRI

SEQ ID NO: 154365 - protein, 75 aa, Glycine max
  Clone ID: PAT_MRT3847_110412C.1.pep
QAVDLLAQGVDGFFLPAMTSRDTLISVCEVLYIPLMHRSPDRSTDMHVVHLLCSSLSLVDFMCVFPRRSSSLFGL

SEQ ID NO: 154366 - protein, 85 aa, Glycine max
  unsure (1)..(85): unsure at all Xaa locations
  Clone ID: PAT_MRT3847_110413C.1.pep
MPNPXVFFXMTIXGXSAGXIVMELYXEVXPXTXEXFRAXXTGXKGXXAXXKPLXYKXXSFXRVIPNXRXQVXIXRGXGNRGEFXY

SEQ ID NO: 154367 - protein, 105 aa, Glycine max
  Clone ID: PAT_MRT3847_110414C.1.pep
GILSSVARAKELSSESVMLCVITTHSGCYDPQHREFLSPSSLRIFLKWRPIRASCISKNLHQQRCNSSRVRLVAKLSYHSGLCVSPPTQFTICYNIQEIVPPVRV

SEQ ID NO: 154368 - protein, 41 aa, Glycine max
  Clone ID: PAT_MRT3847_110415C.1.pep
EGGVPESALGTVRMGLDKDLDVLSCLDNRIKLGVFPFKRAL

SEQ ID NO: 154369 - protein, 89 aa, Glycine max
  Clone ID: PAT_MRT3847_110416C.1.pep
MGIFTFEDETTSPVAPATLYKALVTDADNVIPKAVEAFRSVENLEGNGGPGTIKKITFVEDGESKFVLHKIESVDEAVEAYLLANPHYN

SEQ ID NO: 154370 - protein, 23 aa, Glycine max
  Clone ID: PAT_MRT3847_110417C.1.pep
LRYKGYRLIEPYSSWFPRKFTSR

SEQ ID NO: 154371 - protein, 158 aa, Glycine max
  Clone ID: PAT_MRT3847_110418C.1.pep
MGVFTFEDETTSPVAPATLYKALVTDADNVIPKAVDAFRSVENLEGNGGPGTIKKITFVEDGESKFVLHKIESVDEANLGYSYSVVGGVGLPDTVEKITFECKLAAGANGGSAGKLTVKYQTKGDAQPNPDDLKIGKVKSDALFKAVEAYLLANPHYN

SEQ ID NO: 154372 - protein, 158 aa, Glycine max
  Clone ID: PAT_MRT3847_110419C.1.pep
MGVFTFEDETTSPVAPATLYKALVTDADNVIPKAVDAFRSVENVEGNGGPGTIKKITFLEDGETKFVLHKIEAIDEANLGYSYSVVGGDGLPDTVEKITFECKLAAGANGGSAGKLTVKYQTKGDAQPNQDDLKIGKAKSDALFKAVEAYLLAHPDYN

SEQ ID NO: 154373 - protein, 276 aa, Glycine max
  unsure (1)..(276): unsure at all Xaa locations
  Clone ID: PAT_MRT3847_11041C.1.pep
REAQNDAVCVAVAGFFSLSSSSSSSSHTLFLSFHQSKVEQLKTLVGRELTMGSHHGHSKEFLDLIKSIGEARSKAEEDRIVLREIETLKRLLNDADTPKRKIKEYIIRLLYVEMLGHDASFGYIHAVKMTHHDALLLKRTGYLAVTLFLSDDHDLIILIVNTIQKDLASDNYLVVCAALNAVCRLINEETIPAVLPRVVDLLNHSKDAVRKKAVMSLHRFYLKSPSSVSHLLSNFRKRLCDNDPGVMGASLCPLFNLVSDDVHSXXDLVVSFVIFL

SEQ ID NO: 154374 - protein, 60 aa, Glycine max
  Clone ID: PAT_MRT3847_110420C.1.pep
KVSYDGKYRIKFGTEGKAVLYTRTMPSWPMLTASIRLVTFDIIQELMVVIRWPRKVSDDR

SEQ ID NO: 154375 - protein, 204 aa, Glycine max
  Clone ID: PAT_MRT3847_110421C.1.pep
MAGHDVCQGVGLASGSKIKGMPHIYFHDTHTHKLVILFFESILLFIMGIFTFEDETTSPVAPATLYKALVTDADNVIPKAVEAFRSVENLEGNGGPGTIKKITFVEDGESKFVLHKIESVDEANLGYSYSVVGGVGLPDTVEKITFECKLAAGANGGSAGKLTVKYQTKGDAQPNPDDLKIGKVKSDALFKAVEAYLLANPHYN

SEQ ID NO: 154376 - protein, 158 aa, Glycine max
  Clone ID: PAT_MRT3847_110422C.1.pep
MGIFTFEDETTSPVAPATLYKALVTDADNVIPKAVEAFRSVENLEGNGGPGTIKKIAFVEDGESKFVLHKIESVDEANLGYSYSVVGGVGLPDTVEKITFECKLAAGANGGSAGKLTVKYQTKGDAQPNPDDLKIGKVKSDALFKAVEAYLLANPHYN

SEQ ID NO: 154377 - protein, 29 aa, Glycine max
  Clone ID: PAT_MRT3847_110423C.1.pep
TWRQTSGQKKREGYKLFERYLTSDNHTPM

SEQ ID NO: 154378 - protein, 116 aa, Glycine max
  Clone ID: PAT_MRT3847_110424C.1.pep
KSRSVVPSRHHSKRSASGSLKNMLSVAMNQGVVEARARIFGHQLNPTGMKTPHKLLRMKLFGEKVAQWYPHDIKKDDPLVMARQEQERLSKLEMLKRRGKGPPKKGQGRRAAKRNK

SEQ ID NO: 154379 - protein, 114 aa, Glycine max
  Clone ID: PAT_MRT3847_110425C.1.pep
MATSTLSHAEEVLPNPAKNTDQKQIQVTEDHTNNIDYVQRAQWLRAAVLGANDGLVSVSSLMMGVGAVKKDERAMLLAGFAGLVAGTCGMAIGEFVAVCTQYEIEVCQMKREMN

SEQ ID NO: 154380 - protein, 504 aa, Glycine max
  Clone ID: PAT_MRT3847_110426C.1.pep
MKCGDSRRKYATGSMPTSNFQITYGFTECTPDLSLQECTQCLGEAIADIPVYFNGKTGGNVLKPSCRIRFDPYSFYGSTLKLDPDAPPPATPLPSPPTNNNSSSQGKSNTSRIIIAIVVPVASVVLVLILFCIYLRVKKPRKENEIKREEDNYEDEITFAESLQFNFDTIRVATNEFADSYKLGQGGFGAVYRGQLSNGQEIAVKRLSRNSGQGDMEFKNEVLLVAKLQHRNLVRLLGFCLEGTERLLVYEFVPNKSLDYFIFDPIKKAQLNWQRRYKIIGGIARGILYLHEDSRLRIIHRDLKASNILLDEEMHPKISDFGMARLVHMDQTQGNTSRIVGTYGYMAPEYALYGQFSAKSDVFSFGVLVLEIISGQKNSGVRHGENVEDLLCFAWRNWRAGTASNIVDPTLNDGSQNEIMRCIHIGLLCVQENVVARPTMASIGLMLNSYSLTLPVPSEPAFLVDSRTRSLSEHDSMETRTSESANQSTPKSINEVSITELYPR

SEQ ID NO: 154381 - protein, 91 aa, Glycine max
  unsure (1)..(91): unsure at all Xaa locations
  Clone ID: PAT_MRT3847_110427C.1.pep
GVPVTGTGLIDCFSEMLIDFIPTVSGVSLIEAPGFLKAPIGAPANGSIXRSRLGGKAVFVGKLGHYXFSHMLAGILKEDGMRADGXNFDQG

SEQ ID NO: 154382 - protein, 137 aa, Glycine max
  Clone ID: PAT_MRT3847_110428C.1.pep
LKQGEIRIVQASMRGSILSNILLVLGCCFLAAGLTQHESRFNETVASTMSSLMAVASASLIVPATLYAVMHGDNKKDNLETDKNILVLSHGTAIILLILYILYLYFQLYSHHSLFADVENQEGGDNEEEAQILSPVA

SEQ ID NO: 154383 - protein, 323 aa, Glycine max
  Clone ID: PAT_MRT3847_110429C.1.pep
MDWQSMMGNLDPFQRTILILVPLTLLLLLLLSRTRPRPPYPPGPKGFPIIGNMFMMDQLTHRGLANLAKHYGGIFHLRMGFLHMVAISDPDAARQVLQVQDNIFSNRPATIAISYLTYDRADMAFAHYGPFWRQMRKLCVMKLFSRKRAESWQSVRDEVDSAVRAVANSVGKPVNIGELVFNLTKNIIYRAAFGSSSQEGQDEFISILQEFSKLFGAFNVADFVPFLGWVDPQGLNKRLVKARASLDSFIDKIIDEHVQKRRSGHDGDEESDMVDELLNFYSHEAKLNDESDELLNSISLTRDNIKAIIMVRTSLPHYLFSNV

SEQ ID NO: 154384 - protein, 34 aa, Glycine max
  unsure (1)..(34): unsure at all Xaa locations
  Clone ID: PAT_MRT3847_11042C.1.pep
LQMFIEEVMELVELNLLREALVGLPGVSXLSTEQ

SEQ ID NO: 154385 - protein, 54 aa, Glycine max
  Clone ID: PAT_MRT3847_110430C.1.pep
FDHHFLFKQTRVVPSFIYVKDTRRNERFITLTLRKDKRVSYHIQIVHVRGLCVL

SEQ ID NO: 154386 - protein, 43 aa, Glycine max
  unsure (1)..(43): unsure at all Xaa locations
  Clone ID: PAT_MRT3847_110431C.1.pep
FREFRLKXWXISLKLFPEYIKSETNANKIRQSFKDIHHFVSSD

SEQ ID NO: 154387 - protein, 55 aa, Glycine max
  Clone ID: PAT_MRT3847_110432C.1.pep
MSNFGDGCHESISDMEIFKRRPVVSMLIRVCRITICGRTAILKTGCILACRSHGS

SEQ ID NO: 154388 - protein, 136 aa, Glycine max
  Clone ID: PAT_MRT3847_110433C.1.pep
GIRHEAELNEILKHLIEPTWVATGLEIDFETLVAGCEIASSKIGEIVSLDDENDQKINSFSFIPHEFFEDMESKWKGRIKRIHIDDVFTAVEKAAEALHIAVTEDFVPVVARIKAIVAPLGGPNGEISYAREQEAV

SEQ ID NO: 154389 - protein, 53 aa, Glycine max
  Clone ID: PAT_MRT3847_110434C.1.pep
PHAFSRDLLPRYFKHNNFSSFVRQLNTYVAAVAWTRIYGSDSNRYLLKIIQKP

SEQ ID NO: 154390 - protein, 76 aa, Glycine max
  Clone ID: PAT_MRT3847_110435C.1.pep
FRAFPFGGSVILPFGVFFHFRGSRASFFFCPCFLLFAFFFLLVSPALWAFALVSCIARAPFLKVPSGLLSSLRKII

SEQ ID NO: 154391 - protein, 53 aa, Glycine max
  Clone ID: PAT_MRT3847_110436C.1.pep
GPRQALFHLHCMIGVLRCCMGTQKITLPIRDGNDKPSTIALHPESEAYSSKTH

SEQ ID NO: 154392 - protein, 91 aa, Glycine max
  unsure (1)..(91): unsure at all Xaa locations
  Clone ID: PAT_MRT3847_110437C.1.pep
MCCCWRDLKQHSIFIVGTLVSKKTVGLLWYIIGWMYYVVHFVNXPLEKDLSEGNSTSDIXIRSILVNVLFTKAHSASGKTFKLDIIRCWIT

SEQ ID NO: 154393 - protein, 37 aa, Glycine max
  Clone ID: PAT_MRT3847_110438C.1.pep
RHVNCSPHYKSRQLSSHHPIATLLSHRIRARRAWLKL

SEQ ID NO: 154394 - protein, 112 aa, Glycine max
  unsure (1)..(112): unsure at all Xaa locations
  Clone ID: PAT_MRT3847_110439C.1.pep
SFGGSSIANPYYKGPWNANIINNPNLNLLGLDHNDDAPHILYPALHTDCSTCMQLSPLSSXPLYLLTKVVAVNRYSDQNTCLSYRLLKASEPTLFSLDLHTGEVLTSRALLD

SEQ ID NO: 154395 - protein, 49 aa, Glycine max
  Clone ID: PAT_MRT3847_11043C.1.pep
ARGWGPNFYRRPLIFDQGNGSNAELRATAQRTIGVALTLHIANWRIGGC

SEQ ID NO: 154396 - protein, 39 aa, Glycine max
  Clone ID: PAT_MRT3847_110440C.1.pep
GCFFFFFFFFFFFKQPYSMIKVNFENNVPFFLNPLRNPL

SEQ ID NO: 154397 - protein, 52 aa, Glycine max
  unsure (1)..(52): unsure at all Xaa locations
  Clone ID: PAT_MRT3847_110441C.1.pep
DKFFFNVQMFLSNQXEAYRLLKRMSESPPLTEAYIWHXEKLFLLQIXNGVGS

SEQ ID NO: 154398 - protein, 898 aa, Glycine max
  Clone ID: PAT_MRT3847_110442C.1.pep
MSGDDQLEHSLIQSFKTVRRQIFSWHHHQWQAINPALYLQPFLDVIRSDETGAPITSVALSSVYKILTLDVIDHNTVNVEDAMHLVVDAVTSCRFEVTDPSSEEVVLMKILQVLLACMKSKASIMLSNQHVCTIVNTCFRIVHQAGSKGELLQQIARYTMHELFGLSTSPLILSMVCSIVLNLYHHLRTELKLQLEAFFSCVILRLAQSRYGASYQQQETFRLPGESQKIHRVLEAFSERYYEQSPHILANKDAALVLSYSMIMLNTDQHNVQVKKKMTEEDFIRNNRHINGGNDLPREMLTEIYHSICKNEIRTIPEQGVGFPEMTPSRWIDLMHKSKKTAPFIVSDSKAYLDHDMFAIMSGPTIAAISVVFDHAEQEEVYQTFEEPVLAFGDDMKARLATVTVFTIANRYGDYIRTGWRNILDCILRLHKLGLLPARVASDAADESELSAETVHGKPIMNSLSSAHMQSIGTPRRSSGLMGRFSQLLSLDTEEPRSQPTEQQLAAHQRTLQTIQKCHIDSIFTESKFLQAESLLQLARALIWAAGRPQKGNSTPEDEDTAVFCLELLIAITLNNRDRIGILWQGVYEHISNIVQSTVMPCALVEKAVFGLLRICQRLLPYKENIADELLRSLQLVLKLDARVADAYCEQITQEVSRLDIGEMWLRLVQGLRKVCLDQREEVRNHALLSLQKCLTGADGIYLPYSLWLQCFDLVIFTVLDDLLEIAQGHSQKDYRNMEGTLILAMKLLSKVFLQLLPELSQLTTFCKLWLGVLTRMEKYIKVKVRGKRSEKLQETMPELLKNSLLVMKMRGILAQRSALGGDSLWELTWLHVNNISPSLQLEVFPEQDSEHLQHKQGESIGGSMSLLLESVFLFITIHTIPDLKILIVQNLWIIFAS

SEQ ID NO: 154399 - protein, 1475 aa, Glycine max
  unsure (1)..(1475): unsure at all Xaa locations
  Clone ID: PAT_MRT3847_110443C.1.pep
MGRLKLQAGINAIEEEEPEECDAAXPNKTAFACLINSEIGAVLSVLGKNVRWGGSDITSDDHVEIFLIQSFKTVRRQIFSWHNYQWQAINPALYLQPFLDVINSDETGAPITSVALSSVYKMLTFDVIDHNTVNVEDAMHLVVDAVTSCRFEVTDPXSEEVVLMKILQVLLACVKSKASMMLSNQHVCTIVNTCFRIVHQAGSKGELLQQIARYTMHELVRCIFSHLQDVGNTDHALVNGSTNLKQETGGLDNEYAFGSRQSENGSMTSEYDNQSLSTNSAPNAASVVKTTVMDENTAITITGKEGGPHDMHLMTEPYGVPCMVEIFHFLCSLLNVVEHTGMGPRSNTLAFDEDVPLFALNLINSAIELGGPSICRHPRLLSLIQDELFHNLMQFGLSTSPLILSMVCSIVLNLYHHLRTELKLQLEAFFSCVILRLAQSRYGASYQQQEVAMEALVDFCRQKTFMVDMYANFDCDITCSNVFEDLANLLSKSAFPVNCPLSAMHILALDGLIAVIQGMAERIANGSVSSEYSPVNLEEYTPFWMVKCENYNDPNHWVPFVRRRKYIKRRLMIGADHFNRDPKKGLEFLQGTHLLPDKLDPQSVACFFRYTAGLDKNLVGDFLGNHDEFCVQVLHEFAGTFDFQDMNLDTALRLFLETFRLPGESQKIHRVLEAFSERYYEQSPHILANKDAALVLSYSMIMLNTDQHNVQVKKKMTEEDFIRNNRHINGGNDLPREMLTEIYHSICKNEIRTIPEQGVGFPEMTPSRWIDLMHKSKKTAPFIVSDSKAYLDHDMFAIMSGPTIAAISVVFDHAEQEEVYQTCMDGFLAIAKISACHHLEDVLDDLVVSLCKFTTLLNPSSVEEPVLAFGDDTKARMATVTVFTIANRYGDYIRTGWRNILDCILKLHKLGLLPARVASDAADESELSAETVHGKPIMNSLSSAHMQSIGTPRRSSGLMGRFSQLLSLDTEEPRSQPTEQQRLEQQREADRRXIQKCHIDSIFTESKFLQAESLLQLARALIWAAGRPQKGNSTPEDEDTAVFCLELLIAITLNNRDRIGILWQGVYEHISNIVQSTVMPCALVEKAVFGLLRICQRLLPYKENIADELLRSLQLVLKLDARVADAYCEQITQEVSRLVKANASHIRSQLGWRTITSLLSITARHIEASEAGFDALLFIMSDGTHLLPANYILCVDTARQFAESRVGQAERSVRALDLMAGSVNCLAQWTSEAKGAMEEEQMSKLSQDIGEMWLRLVQGLRKVCLDQREEVRNHALLSLQKCLTGADGIYLPYSLWLQCFDLVIFTVLDDLLEIAQGHSQKDYRNMEGTLILAMKLLSKVFLQLLPELSQLTTFCKLWLGVLTRMEKYIKVKVRGKRSEKLQETMPELLKNSLLVMKMRGILAQRSALGGDSLWELTWLHVNNISPSLQLEVFPEQDSEHLQHKQGESIGGTVPDEKVSMPSSETASREDAGIVG

SEQ ID NO: 154400 - protein, 81 aa, Glycine max
  Clone ID: PAT_MRT3847_110444C.1.pep
IENTPPNQKKRKTGGGPKKHYFNQNSHKFFLKKAFLKPPQNLGGQKPFFLNPFFLKHFDFKLPSLKVLGSFFKKGFSKPWG

SEQ ID NO: 154401 - protein, 82 aa, Glycine max
  Clone ID: PAT_MRT3847_110445C.1.pep
MASAVSKVSGDLKSSSFDRVREAPPPPPDSSLLLATRPPRQAVSYWTCSKLCAFCFVAGAVFGYSLRGRVKRWASKMLKKLS

SEQ ID NO: 154402 - protein, 101 aa, Glycine max
  unsure (1)..(101): unsure at all Xaa locations
  Clone ID: PAT_MRT3847_110446C.1.pep
QKSKKLCLAFNPAFPLFRNSPPWGAVKNFFEKISXETSSKVGINPDFFFFXRVMETAPPLPDFFLAFKPNENQLPPVGSFWRTKNIKMGPTVPNPFKGGKL

SEQ ID NO: 154403 - protein, 42 aa, Glycine max
  Clone ID: PAT_MRT3847_110447C.1.pep
TWLEPIFGVKLRPNFSSQCKKRGIVPKKKKSLCHVFQGIKIY

SEQ ID NO: 154404 - protein, 91 aa, Glycine max
  Clone ID: PAT_MRT3847_110448C.1.pep
YTPDGTFKHNGTFLHGRGGKHGKDPHGMRGKGMHKGWQGRHHMNLLYLQARRLDAAGHRLHSQLHRVQRAPLRLGHSRQCRHRKRWLIGGI

SEQ ID NO: 154405 - protein, 181 aa, Glycine max
  Clone ID: PAT_MRT3847_110449C.1.pep
MWSATSSPSIFLPHSLLRPLPRRPLCASLSWASPDPPDGLGGWALPDIPAQPNNNNKVAAFPSYAIVGFGTSLAFVLAVFAASRKGFIFRFPRPMWSAVETRHDQNDAREFDVSGGSKSTLSEADTEDNNVAVTQTDKSVVVEKPKRVVIPVCVDSTQEEALSVLKSLKIIEDDVEANELC

SEQ ID NO: 154406 - protein, 73 aa, Glycine max
  unsure (1)..(73): unsure at all Xaa locations
  Clone ID: PAT_MRT3847_11044C.1.pep
SLTNFRYLLQPSFFPQSGKVKIGINGFGRIGRLVARVALQRDDVELVAVNDPXITTDYXDHTGKTKFRGGLVF

SEQ ID NO: 154407 - protein, 94 aa, Glycine max
  unsure (1)..(94): unsure at all Xaa locations
  Clone ID: PAT_MRT3847_110450C.1.pep
RLADKKAPLDKHFLFTGAAAAQSFANQRKGGGQLIHSGGNGQYRENLAINTGDQSGTDAAKWRDDEKTNXDYNTKSGAGGACLHXTQEGWKDSV

SEQ ID NO: 154408 - protein, 79 aa, Glycine max
  Clone ID: PAT_MRT3847_110451C.1.pep
NTSFWCSPHESHNKEGKHSKSSFFYTMMLTLLRWGARLFCSDNVMVSLRDRRCIHSYGMPWRIFLRSRYVHLANGGRCV

SEQ ID NO: 154409 - protein, 96 aa, Glycine max
  Clone ID: PAT_MRT3847_110452C.1.pep
MYNQPRTQLKPTTLSSHFTPKCPLHQNILLLPSWKPAKPTISASLPPGPTSGPAQTLISLLRSIPDWADAVQERGMHNKRALYTHQKTTEGGIQKV

SEQ ID NO: 154410 - protein, 189 aa, Glycine max
  Clone ID: PAT_MRT3847_110453C.1.pep
MSGKGPGFFSEIGKRGRDILTKDYNSDQRFTISSSTNSGLDLKSTLVKSRGLSSGDVAAEFKYKNKAVNVKVDTESNVLTTFTVSDVVPSAKTIASIRLPDYSSGKVEVQYLHEHVAFTLGVGLDRSPVIDFSGTMGTPSIAFGAETSYSTSVGKFMKYNAGLCLKMPSSNASVILGDKGDSMKVSYLH

SEQ ID NO: 154411 - protein, 113 aa, Glycine max
  Clone ID: PAT_MRT3847_110454C.1.pep
KNHNHTSVEATQPSLLCLCGFFFRVWLYPPKFMVWLLASAPRRSIGNHSECSVRTYSSSFVSFLWLLGLFVHLCSPTTSLSPFLKVIILNNWVLYIVGVRHEKICLEAIYYTN

SEQ ID NO: 154412 - protein, 109 aa, Glycine max
  Clone ID: PAT_MRT3847_110455C.1.pep
MMQQKKYSVDERTASLLCESCLKRIYDQDSTEVQDSIKSRVETAEAENPDGLTDKVPKDLQSIMDKAITREKELEKVCKKQAARIEELNQLVEKFKGEMEAKSSIIVYD

SEQ ID NO: 154413 - protein, 69 aa, Glycine max
  unsure (1)..(69): unsure at all Xaa locations
  Clone ID: PAT_MRT3847_110456C.1.pep
ASLRTIYVDLVEFKIXXLVACMSICPFMCAMISYEIGPLSFQRILCIPSVHNILRDGRIFTSMNSGIHQ

SEQ ID NO: 154414 - protein, 51 aa, Glycine max
  Clone ID: PAT_MRT3847_110457C.1.pep
VFSFVEECWLDLMRSSCTYLIFELIFFFYSNFKSISNIQYIQFCLPLSVAT

SEQ ID NO: 154415 - protein, 119 aa, Glycine max
  Clone ID: PAT_MRT3847_110458C.1.pep
AVPDRRQAWRTFVKSAKTIYEMIQATFTLEDMIKTEYLRNDWWYWSSFSAAAKSSTLPSLALRIYSLDLAIIYEKMPNSSFTDSSEPSVIAEPKPLMNVDTEKSKASRKSTRKRKESDS

SEQ ID NO: 154416 - protein, 95 aa, Glycine max
  unsure (1)..(95): unsure at all Xaa locations
  Clone ID: PAT_MRT3847_110459C.1.pep
XXPXXXPXPXDPTSXXXXLXXPLXXXLXSPXPXXXXXXPXXPXXPSLSLXXPXXPPXXSXXPXVXXXLXXXCLXALXSRNFQPRPXLRAXVLVXL

SEQ ID NO: 154417 - protein, 72 aa, Glycine max
  unsure (1)..(72): unsure at all Xaa locations
  Clone ID: PAT_MRT3847_11045C.1.pep
CXYKRFFSPVIRRVSLVSCIKFXLSGLYXLILALDKKTHTVQILILSKTARNXIKLTIPNLNHLSLLANKDV

SEQ ID NO: 154418 - protein, 72 aa, Glycine max
  unsure (1)..(72): unsure at all Xaa locations
  Clone ID: PAT_MRT3847_110460C.1.pep
MSCCCGNCGCGSACYCCNGCXGCKMYPDLSYSRVTTTVTFVMGVAPPHAQFESAEMGVPPENNGCNVELTGP

SEQ ID NO: 154419 - protein, 33 aa, Glycine max
  Clone ID: PAT_MRT3847_110461C.1.pep
YEEIPSSPKGVIKAGFCYNGGNFSKEVGMPLLY

SEQ ID NO: 154420 - protein, 126 aa, Glycine max
  unsure (1)..(126): unsure at all Xaa locations
  Clone ID: PAT_MRT3847_110462C.1.pep
TGPETPGRPTRPLEPVTQTNTEAXEGTXNAXNDSAPXXQHQDADXRPGAGQAKEXPEHPEREPXNEPPAXTRGQHTAEDKPQGTSKGAAAEQATKTXGKGGXPPDXXXRTGDDRTDEDTPESNPRT

SEQ ID NO: 154421 - protein, 187 aa, Glycine max
  unsure (1)..(187): unsure at all Xaa locations
  Clone ID: PAT_MRT3847_110463C.1.pep
PRPFKASLYCVSRVPNSCAWFSVAGLEISCSTSQLLRLTTRWWGRGIACLLSAQTVSALLLCDAFFGPRALPGWARSLFPGLSVAHMHNFLTSVHPEGDIRSALLSVIQALHVAKNGTDIVSRTQIHTHFPXPNXFNIFSRLARKHGGAKIGVFYCGPSKLARELKKLCTKFSTKTTTRFVFHKENY

SEQ ID NO: 154422 - protein, 191 aa, Glycine max
  Clone ID: PAT_MRT3847_110464C.1.pep
MEVALLLAFVGKLRRHFLLLVVGMVLVLFLSPFVSPLGDEGQALMKIKSSFSNVADVLHDWDALHNDDFCSWRGVLCDNVSLSVLFLNLSSLNLGGEISPAIGDLVNLQSIDLQGNKLTGQIPDEIGNCAELIYLDLSDNQLYGDIPFSISNLKQLVFLNLKSNQLTGPIPSTLTQISNLKTLDLARNRLT

SEQ ID NO: 154423 - protein, 47 aa, Glycine max
  Clone ID: PAT_MRT3847_110465C.1.pep
HFRLIKTPLNSYYIIAQNLFISPHSYYLQMYYPPDIHTNTVYLAQLM

SEQ ID NO: 154424 - protein, 73 aa, Glycine max
  Clone ID: PAT_MRT3847_110466C.1.pep
GCEKTTEGAWPGVQPSPLRGGEASTAQEPQPELEVAHEATPEATPQVSHAISPVVEVSEGEEGADDIDYAVDL

SEQ ID NO: 154425 - protein, 67 aa, Glycine max
  Clone ID: PAT_MRT3847_110467C.1.pep
MGSESVAPMVETSKNRSSSGKMNQGKVPRKIHKAEREKMKREHLNERFVDLASALDLNENNGKASIL

SEQ ID NO: 154426 - protein, 89 aa, Glycine max
  Clone ID: PAT_MRT3847_110468C.1.pep
VKSKPEPGVVKHIGVAKIAVSVFFGGSVPDHSLQFLCYRLRDWDGKKNGVVNFSVRVAVPPAAAENDCSSSSGGVVTAIPVYLNNSIDN

SEQ ID NO: 154427 - protein, 62 aa, Glycine max
  Clone ID: PAT_MRT3847_110469C.1.pep
VAYPLLPRQDTLDANLGPPLVCVARARLFLWAISLSDYDRNSTVQDLMRKTTPGGHQRLSPE

SEQ ID NO: 154428 - protein, 68 aa, Glycine max
  Clone ID: PAT_MRT3847_11046C.1.pep
HRLYTKHNRELSTKAESRFFMELHQSTSPQGLSTEPTEMQNSHLLLFCLRILETKFINITNDLTTEIQ

SEQ ID NO: 154429 - protein, 49 aa, Glycine max
  unsure (1)..(49): unsure at all Xaa locations
  Clone ID: PAT_MRT3847_110471C.1.pep
HLMHLSQGTTALNQVCIYDLNMFYFPFIMPFCAFMLFYVYVFGVVAXGL

SEQ ID NO: 154430 - protein, 89 aa, Glycine max
  Clone ID: PAT_MRT3847_110472C.1.pep
RLELIIPKRFSKSKPPTLHKTQLQSLRLYPRLPSGSIPEAPESNTFGRIPIMPCLHLSPNSPSLSTPETPPSNASLKYFKFWGTNFRIR

SEQ ID NO: 154431 - protein, 57 aa, Glycine max
  Clone ID: PAT_MRT3847_110473C.1.pep
GCKKTTEGEPISIDFSNTTSLEILELTPKNIKALNSKKPWNASHHMSIPSLLKNQLT

SEQ ID NO: 154432 - protein, 484 aa, Glycine max
  Clone ID: PAT_MRT3847_110474C.1.pep
MERYGRASEGSQSDPSPEWTVAADADAGLEESSWQLGLPGAESYPMRPDEADCIYYLRTGFCGYGTRCRFNHPRDRAAVIGAAPRTGGEFPERVGQPVCQYYMRTGSCKFGASCKYHHPRQVPGTATPVPLNYYGYPLRVGQKECSYYVKTGQCKFGATCKFHHPQPAGVQVLAPSPVPPVSPLPVPVPSPMYPTVHPPSGPSQQQYGVLVARPPMLPGSVVQGPYGPMVVSPTMVPFSGWSPYQAPATNPLLPSSTTSNVGSTQLYGITQLPSSAATYTGPYQPSGSSIGPSGASQKEHPFPERPDQPECHHYMKTGDCKFGPLCRYHHPPDKSAPKANVTLSPVGLPLRPGAPPCTHYTQRGVCKFGSACKFDHPMGSLSYSPSASSLADMPVAPYPVGSSIGTLALSSLSSELRPELGAGSNKESVASRMSSMSTSTGSVGLTLSSVGPISHSSTQPSAQSSSSPETTSATTSSTVSHTSS

SEQ ID NO: 154433 - protein, 58 aa, Glycine max
  Clone ID: PAT_MRT3847_110475C.1.pep
FLLKLGWKKLVRSILGGCTIKFFYINHYFRRPNTFLKSGNNHLKKFGPRAKIRRDNAT

SEQ ID NO: 154434 - protein, 81 aa, Glycine max
  Clone ID: PAT_MRT3847_110476C.1.pep
PTRPPTRPAKERKKEKGKVSLSLSLGLIRLKRIYLFLSHLFLLPPTTLKAKLVKTKKRMMVVPVASFSTDTNTICSISIFF

SEQ ID NO: 154435 - protein, 52 aa, Glycine max
  Clone ID: PAT_MRT3847_110477C.1.pep
FYRDSFGFLRENKRLQCEGFFSKLRYGFKIPNCENVWTWVVNALLRFHGDPR

SEQ ID NO: 154436 - protein, 46 aa, Glycine max
  Clone ID: PAT_MRT3847_110478C.1.pep
GSSEPALFDTALFPKGVPAKDGDGWLKATGVLWARGFAGIGLQTLA

SEQ ID NO: 154437 - protein, 127 aa, Glycine max
  unsure (1)..(127): unsure at all Xaa locations
  Clone ID: PAT_MRT3847_110479C.1.pep
IMRIGVLIGELEAAQPAKLHGWMVPLMGQMSRRLSSXQSQAHEQASVWWNNVHIEAYIETFYKLILTVVLPAVXPDVQYHCNQHWHQSALNVPMIVRETDPDTDDEFMIKSMNNEPQDEALETDLEA

SEQ ID NO: 154438 - protein, 70 aa, Glycine max
  unsure (1)..(70): unsure at all Xaa locations
  Clone ID: PAT_MRT3847_11047C.1.pep
IDHGTKLNSNLKNIGGKIKYDXINPFELPKYSFWLEMRRKLRNLSQTQNLAIKLTTMEILQKRILPADLS

SEQ ID NO: 154439 - protein, 63 aa, Glycine max
  Clone ID: PAT_MRT3847_110480C.1.pep
STGLSGSLFRGGHGVQTKGGPNLASHRQTTLYQKETQTEPKALTNTCPGEEANQAQKHDRRPK

SEQ ID NO: 154440 - protein, 225 aa, Glycine max
  Clone ID: PAT_MRT3847_110481C.1.pep
TNVSTEADKLSSFNNNGGGDSEGGTNNGGGGYGLRENPKKTWRFNDSSEDNNNNNTTLLVLDKLCKECGKGFQSWKALFGHMKCHSEKVYQNNNSSSSLLLEDQDSWNGNNTTNASQSQKMMVSMDDSHSENEATAPNRRRRSKRRRTRYMAPSTSSVSLVSEAHHEQVQQEEVAMSLLMLSRDVSPWCGLNSVNSMQFESPSLVPTYLDSKVEGKRVVISNGYE

SEQ ID NO: 154441 - protein, 167 aa, Glycine max
  unsure (1)..(167): unsure at all Xaa locations
  Clone ID: PAT_MRT3847_110482C.1.pep
XXXRXXMTXLNTSVGXXXVMGXXLSGTDLRXXVMSGGGLTVKKFTARERGRRCFLIFPIRGSEKKGLVSVEVKKKKGQYHMKLLAVDVPMASGPDQRLYLIGNEEEYRVGGGIISELRDPVVRAMAATKEFDDLDEIEEEEDAERERQEAERKEHEEIEKLEKSSGT

SEQ ID NO: 154442 - protein, 120 aa, Glycine max
  Clone ID: PAT_MRT3847_110483C.1.pep
TCCVCEEQNNILCTHTQTSLFFFFLFEPLKKMFDPRRNQPTISFPLSNEIGQITHGYDTWGATNTDFMASKKPPKNYKNCHSYNDMEVQLGTGSKVDDNESGICSPPLWTTNPPKSPHHR

SEQ ID NO: 154443 - protein, 62 aa, Glycine max
  Clone ID: PAT_MRT3847_110484C.1.pep
VCFQRTILGELVFIRMIISSRVVVEDRRKIIIIIIIMAMAKKTGKKKEGLPYKIKQYFDSFC

SEQ ID NO: 154444 - protein, 77 aa, Glycine max
  unsure (1)..(77): unsure at all Xaa locations
  Clone ID: PAT_MRT3847_110485C.1.pep
KTPPPPPRKKTPAPPPFKKKKNQSVSNQGGLDSPPPQGHGCLLTKPPSPPPILVXKTPPSHGPGGGKNPPGPPPPGG

SEQ ID NO: 154445 - protein, 47 aa, Glycine max
  unsure (1)..(47): unsure at all Xaa locations
  Clone ID: PAT_MRT3847_110486C.1.pep
TPNMVLGAFAEMCGPILPINYGDXNASIINNWENTIECLTKNDIDDT

SEQ ID NO: 154446 - protein, 95 aa, Glycine max
  Clone ID: PAT_MRT3847_110487C.1.pep
RFSAPELMRFIGPARPWNLARSSVALAYNSEFLHPLQTRSYVTISVTPFAHELDIRLLFICIFTQAMKLILCALQILSVRLVYKKSGECLIICNS

SEQ ID NO: 154447 - protein, 108 aa, Glycine max
  Clone ID: PAT_MRT3847_110488C.1.pep
RYESLASLPFNGSFRSLGIKAHSSLHHGFVPTTKSSARFEQGYVGLPIFLEEDEEELLWQGSYHQVPSEGGHTHQNFTLSGSSNLSFVGSSLPPVDLENSTPELTLKL

SEQ ID NO: 154448 - protein, 496 aa, Glycine max
  Clone ID: PAT_MRT3847_110489C.1.pep
MLPKSVPSAVPQPKTLASKITLTSSLTSLLQPQNPRTWILFTVLFIQILLLCNLHSFPSSIPPPLSPIPAATDTDTDTDTITTTVHHSTRTLDQCGSGKVFVYDLPQTFNNEILLHCDNLNPWSSRCDALSNDAFGRSAAALAGIVPEDLLPAWHWTDQFVTEIIFHNRLINHKCRVMEPESATAFYMPFYAGLAVGKYLWFNSTAEERDRHCDMMLQWIQDQPFFKRSNGWDHFISMGRITWDFRRSKDKDWGSSCLYKPGIRNVTRLLIERNPWDYFDVGVPYPTGFHPRSKSDVTRWQSFLRERQRHALFCFAGAPRRAFPDDFRGLLLSQCRDSGESCRAVNCTGTRCSNGTSAIMETFLDSDFCLQPRGDSFTRRSIFDCMVAGSIPVFFWRRTAYLQYEWFLPVEPESYSVFIDRNAVKNGTLTVKNVLEKFTKEEVRKMREKVIEYIPRLVYANTKQGLDGVEDAFDVAIEGVFKRIKEQEQPQFHKWK

SEQ ID NO: 154449 - protein, 127 aa, Glycine max
  Clone ID: PAT_MRT3847_11048C.1.pep
NDVFEGKRSMMEEQAKEELKLLEAQYPNHHEHLKNELRSFIFQLQTNHHDSEQLPENNNFSTHLAFFDTEESTSLEELRKRSDYDLELGLADRVVIEKIDGSSKLETPKSVVVKHFSSRKNKRKDRV

SEQ ID NO: 154450 - protein, 187 aa, Glycine max
  Clone ID: PAT_MRT3847_110490C.1.pep
GIDESVLLLQYYFDTLFPRIPVPVLRQVVSNLEKLKLPTTHSGSTGETTRHGSDDTARRPPSVKAALSVSKTKRAPHRASTRDSSPIRRTLPSHEKNGSDDIRRSPSNRRSQSREYPDRDRERDRSRSRDRDRERDRDRYCDRDRNREWERDRDRERYRDSDSDRDQDRDRIRRDKERALLSSSRSR

SEQ ID NO: 154451 - protein, 440 aa, Glycine max
  unsure (1)..(440): unsure at all Xaa locations
  Clone ID: PAT_MRT3847_110491C.1.pep
YILPSSWRYRLVAGRLISLLEKVLCMNILSSDYFKXELYRLKTYHEVIDEIYNQVDHVEPWMXGHCRGPSTAFCLLYKFFTMKLTXVKQMHGLXLKHLDSPYIRAVGFLYLRYCADPKTLWNWFEPYVKDDEEFSPGSNGRMTTMGVYVRDLLLGQYYFDTLFPRIPVPVLRQVVSNLEKLKLPSTHSGSTGETTRHGSDDTARRPPSVKAALSVSFGQRAPHRASTRDSSPIRRTLPSHEKNGSDDIRRSPSNRRSQSREYPDRERDRERDRSQSRDRDRERDRDRYCDRDRNREWERDRDRERYRDRDLDRDQDRDRIRRDKERERERERSFDYDKRSKYTERESSRDYDNGSKHYRRSRSRRSRSRSLQAGTGRYESRSSPQREESKRTSASSNLAKLKDMYGDLGDSKGDANMERIPRKDSGGEEVIRLGGSTWKD

SEQ ID NO: 154452 - protein, 103 aa, Glycine max
  Clone ID: PAT_MRT3847_110492C.1.pep
TTSCTRLPIVAHLNQPSHSLVWQRLAQNACLALKDYQHFFLTPEYRKTAQVFGYSTPFAAHLTHRVCYKKRWSDRLPYDGLDEVDPLTLNIITETYSALKLSL

SEQ ID NO: 154453 - protein, 114 aa, Glycine max
  Clone ID: PAT_MRT3847_110493C.1.pep
WREGLMSQSYELDEFDCCRCLSDEEEEIANESGTNRFSGPQVNIETNDGKKLNSDVGITETEDTEQEIHGLDKEKIPALMSCSGAESISTDGGGLVASGDSDWTLCHVNKSFEV

SEQ ID NO: 154454 - protein, 83 aa, Glycine max
  Clone ID: PAT_MRT3847_110494C.1.pep
SAPDATSDAPARKQDVKKDVAQVVADNVGDHKELAARRAALQETRVEYDRGNDFVSYLKHHAELKDVLESDTNVDADDIVNIL

SEQ ID NO: 154455 - protein, 45 aa, Glycine max
  unsure (1)..(45): unsure at all Xaa locations
  Clone ID: PAT_MRT3847_110495C.1.pep
RRDQTTPAYAIEDSTGRDRMLKYTSEHMHCLAMXWGPLAYPNTGV

SEQ ID NO: 154456 - protein, 81 aa, Glycine max
  unsure (1)..(81): unsure at all Xaa locations
  Clone ID: PAT_MRT3847_110496C.1.pep
WDLSDATAGVNHINVEPEREAILVQFTISCPNIEKDTSLYVIGSTTKLGQWTAENGLNLSYXSESVWKAECVMQRSAVPIK

SEQ ID NO: 154457 - protein, 121 aa, Glycine max
  unsure (1)..(121): unsure at all Xaa locations
  Clone ID: PAT_MRT3847_110497C.1.pep
AFPDFLDDLSYRIICETTKPAYLVSXDDVTXXXXQXKFLLFLLLFXTCPXAVYIXRQLFFYXRRILTXEFFSIIDAFYSXTIFLFANRFIFDKDVFIASTFSIHXXPFYNFFLLFTHWNRY

SEQ ID NO: 154458 - protein, 62 aa, Glycine max
  Clone ID: PAT_MRT3847_110498C.1.pep
PRRSSNSAQTNTPTSICITIHNGTWGLRRTIPTKPVMRQSHRSFPPRRAALSASQPVQALPC

SEQ ID NO: 154459 - protein, 623 aa, Glycine max
  Clone ID: PAT_MRT3847_110499C.1.pep
MGEQNDITLTWENLEATVTNGKNRKLILHGLTGYAQPGRLLAIIGPSGSGKSTLLDALAGRLTSNIKQTGKILINGHKQELAYGTSGYVTQDDAMLSCLTAGETLYYSAMLQFPNTMSVEEKKERADMTLREMGLQDAINTRVGGWNCKGLSGGQRRRLSICIEILTHPKLLFLDEPTSGLDSAASYYVMSGIANLIQRDGIQRTIVASVHQPSSEVFQLFHDLFLLSSGETVYFGPASDANQFFASNGFPCPPLYNPSDHYLRIINKDFNQDADEGITTEEATKILVNSYKSSEFSNHVQSEIAKSETDFGACGKKKKIHAAFITQCLILIRRASLQIYRDTNNYWARLVVFIFISLSVGSIFYHSGGPDLRSIMDRGSLLCFFVSVVTFMTLVGGISPLIEEMKVFKRERLNGHYGITAFLISNIFSAVPYNFLMSIIPGAVVTYLSGLHKGVDNFVFLISVLFATVTWVESLMMVVGSVFPNYVMGVIVCGGIEGVMILTSGFYRLPNDLPKPVWKFPFYYISFLTYAFQGLLKNEFEDLPFSSEVLADTWHVQMGHSKWVDLAIMFAMIVLYRVLFLAISKCKEKSKQVSVGIKPETKIFSRINISELQMRGIDDHNAV

SEQ ID NO: 154460 - protein, 47 aa, Glycine max
  Clone ID: PAT_MRT3847_11049C.1.pep
ILIPPTFPFNHYFHPQGQHNMIRILWCYSILIFTKHWLSFSTLIFLK

SEQ ID NO: 154461 - protein, 125 aa, Glycine max
  Clone ID: PAT_MRT3847_1104C.1.pep
MASGSPSSSSSSNYDVFLSFRGEDTRLGFTGHLYNTLQSKGIHTFIDDEELPRGEEITPALMKAIQDSRVAITVLSEHYASVSISEATSMASGNKDMKQKKVQEVQIAKKPKRKVRRPAYLKDYA

SEQ ID NO: 154462 - protein, 139 aa, Glycine max
  unsure (1)..(139): unsure at all Xaa locations
  Clone ID: PAT_MRT3847_110500C.1.pep
PSGLRQFLFRLEDVGKPKAEVAAKRVMERISGVEIVPHFCRIEDKEIEFYNNFNIIALGLDSIEARSYINTVACSFLEYDSDDNPQEETIKPMVDGGTEGFKGHARVIMPGITXPCFECTIWLFPPQVSFLLCTLAETP

SEQ ID NO: 154463 - protein, 94 aa, Glycine max
  Clone ID: PAT_MRT3847_110501C.1.pep
RGSSGRNPKLRLSKASITHQGKNLYMQAPPVLEEMTRSNLSLSLFNLMGRLPKDVVHVNGTTIKNDQKFSCSRKLRVVFKGVDGVTDMDTAGGA

SEQ ID NO: 154464 - protein, 448 aa, Glycine max
  Clone ID: PAT_MRT3847_110502C.1.pep
MADTSSRSRDLDKLLLRPGNLVGPRFEPGAELRDDLQAFAKVLVVGAGGLGCELLKDLALSGFRNLEVIDMDRIEVTNLNRQFLFRLEDVGKPKAEVAAKRVMERITGVEIVPHFCRIEDKEIEFYNDFNIIALGLDSIEARSYINTVACSFLEYDSDDNPQEETIKPMVDGGTEGFKGHARVIMPGITPCFECTIWLFPPQVKFPLCTLAETPRTAAHCIEYAHLIKWNEVHGGVAFDPDNPEHMKWVYDEAVKRAELFGIPGVTYSLTQGVVKNISAIPAIASTNAIISAACALETLKIATECSKILSNYLTYNGSEGLHTEVARFERDKDCLVCGPGIRIELDTSITLQKFMDLLEEHPKLRLSKASITHRGKNLYMQAPPVLEEMTRSNLNLSLFNLMGKLPKDVVHVNGTTIKNDQKFSCLRKLRVVFKGVDGVTDMDTAGGA

SEQ ID NO: 154465 - protein, 117 aa, Glycine max
  Clone ID: PAT_MRT3847_110503C.1.pep
MGDKRRAFQVILHMVGNLLEHNHGGGNLVFLVFPQTTIPGTSDIWRSPFRPFSNSGDAKYPKVKTLHGNHSEAGSSISSGFGGRKYNRDRFGGRLSLSICNRVVHESSIMAIICMHE

SEQ ID NO: 154466 - protein, 98 aa, Glycine max
  unsure (1)..(98): unsure at all Xaa locations
  Clone ID: PAT_MRT3847_110504C.1.pep
GKSCIEFLQTXXSLXGKGRQIWLMXPXILKAFPNKLVQFGEIXXXXVVWKFSCENFXXXDSERKXFXXXSXXKKIRXXXXGVXXFXXXGGLGLGESXV

SEQ ID NO: 154467 - protein, 92 aa, Glycine max
  Clone ID: PAT_MRT3847_110505C.1.pep
ALAILECIQIEPKTHYKIRLKPYKLHLHDSLKAQQRPTNKNHDELSTPKSLVDALPMCLLQNREKDGQQCALPHSGRSETSYLNPMGEEGYL

SEQ ID NO: 154468 - protein, 68 aa, Glycine max
  Clone ID: PAT_MRT3847_110506C.1.pep
IRDVILCSSITLIWHHRHSSSVCTPLFKRRPTDHSVRIKTDTPRRTTSILSSLYAAMTEPDLTLLCTT

SEQ ID NO: 154469 - protein, 139 aa, Glycine max
  Clone ID: PAT_MRT3847_110507C.1.pep
VFSYGMLLLEIIEGRKNYDQWEGAEKAHFPSYVFRMMDEGKLKEVLDPKIDIDEKDERVESALKIALWCIQDDVSLRPSMTKVAQMLDGLCPVPDPPSLSQSGTYSAFMKLSSGEATSSGQASFFSNVPMSCVQLSGPR

SEQ ID NO: 154470 - protein, 44 aa, Glycine max
  Clone ID: PAT_MRT3847_110508C.1.pep
FYFMFYSLSSCNNNSRRFLVQLIPSSYKYWLRSIYFTAVEYLWA

SEQ ID NO: 154471 - protein, 51 aa, Glycine max
  Clone ID: PAT_MRT3847_110509C.1.pep
ITFVLQKTELTDTAIFCNDVHIMYYRHGCAPVHTIGVILSSQRGRSTRRYD

SEQ ID NO: 154472 - protein, 89 aa, Glycine max
  Clone ID: PAT_MRT3847_11050C.1.pep
PVLTYYRGAQGIILVGLDDSKFKQSLLVKDLTMQTTLFSHPLFCFSCRNISTNGKTKCSVKFRTSYPSQLDRKCEFNGIPHVYNSPSPI

SEQ ID NO: 154473 - protein, 47 aa, Glycine max
  Clone ID: PAT_MRT3847_110510C.1.pep
RATLTVAIWKRKKRNPIKLKIKGWKSALIHQAERNLEWVLRVWSPSV

SEQ ID NO: 154474 - protein, 82 aa, Glycine max
  Clone ID: PAT_MRT3847_110511C.1.pep
SSLLTALDTHLFSVYAVMWNTALYLAPIQLWYCIGATAAPVCADTWTFYTTPSPTHTYTALPDGNRLFLLLLPYGPPSTGLT

SEQ ID NO: 154475 - protein, 64 aa, Glycine max
  Clone ID: PAT_MRT3847_110512C.1.pep
MANAASGMAVHDDCKLTFLDLEAKRTHRFIVFKIQDQQEQVIVEKLGEPAHGYEGFTRQLPADG

SEQ ID NO: 154476 - protein, 68 aa, Glycine max
  Clone ID: PAT_MRT3847_110513C.1.pep
FGSRPAEFLGRPLVTGEKTLPVRPGMFLETVSKVLSGLYAGTDSGITAQHLEWVHRKTLQVLQEIAYG

SEQ ID NO: 154477 - protein, 78 aa, Glycine max
  Clone ID: PAT_MRT3847_110514C.1.pep
FNQKKKDQKKGVPPNKNHHYFFFSFQTQIWLPKKEPAKTPIIVGTSGVVNSFFSLSLVQNSLILFFFFWFGLILEASQ

SEQ ID NO: 154478 - protein, 179 aa, Glycine max
  unsure (1)..(179): unsure at all Xaa locations
  Clone ID: PAT_MRT3847_110515C.1.pep
MSLAQSLQSQLCSAARQSPLLAKKLHAQIIKAGLNQHEPIPNTLLNAYGKCGLIQDALQLFDALPRRDPVAWASLLTACNLSNRPHRALSISRSLLSTGFHPDHFVFASLVKACANLGVLHVKQGKQVHARFFLSPFSDDDVVKSSLIDMYAKFGLPDTXRARFDSISSLNSFSWTTMI

SEQ ID NO: 154479 - protein, 51 aa, Glycine max
  Clone ID: PAT_MRT3847_110516C.1.pep
AINFLLKIKIMHTEILSYYKLINHRRKGEQNDCCYLLTRSEANHHRQGQTK

SEQ ID NO: 154480 - protein, 66 aa, Glycine max
  Clone ID: PAT_MRT3847_110517C.1.pep
IRDWYRFHFPFDPPWRFQPFNCDCYSAICFTHSFCDKLVIDRFMIPPIVCLFASISLLLVLRASFL

SEQ ID NO: 154481 - protein, 300 aa, Glycine max
  unsure (1)..(300): unsure at all Xaa locations
  Clone ID: PAT_MRT3847_110518C.1.pep
MHNFPSHSNGTPSNQKSNGSNNIDDRASTNTYLGPQSDTFDNITDIGCVNTYRGTKLDTFDKKPESGRGIGSFNSRELQTLQKNNICSSQKKTTAREEYTEIIKESVGGSEHGFQVEHTYYQLHHYNHIAHKAAVDLQSDHDLLLKSSTQQCVSSNAFGGPAESNAANYGVDGNAAESDHGSNNGQDGSNTLTIRMINXGNGNVAAGSIGIGGIDRKSFGNGADEGRLALREAALTKFRLKRKERCFEKKVRYHSRKKLAEQRPRIRGQFVRRIVSEGKEEKDKQSDNLVPGDNSIDIPQ

SEQ ID NO: 154482 - protein, 138 aa, Glycine max
  Clone ID: PAT_MRT3847_110519C.1.pep
TGNVGSCSPLDNSSAAPNTETMHNFPSHSNGTPSNQKSNGSNNINDRASTNTYLGTKPDTFDKKPESGRGIGSYNSCELLTVQNNSISSSQKKTSAWEEYTEIIKESVGGSEQGFQVEHTYYQLHHYNHIAHKAAVDP

SEQ ID NO: 154483 - protein, 154 aa, Glycine max
  unsure (1)..(154): unsure at all Xaa locations
  Clone ID: PAT_MRT3847_11051C.1.pep
LEPNWIEIDLLGGXILMDKTGDWITLIQNSTISDLWXVAAWKNGCLMVKIVRSGNATFKXSDWAXLVQAFLTYTNSTXHFDACXWSKSEPHSWXLILPIHVCGPNYGFEMWSSEWANQTSWRLSLLIVYTQQTTVSDMLLRISQNSEIAGNTLM

SEQ ID NO: 154484 - protein, 114 aa, Glycine max
  Clone ID: PAT_MRT3847_110520C.1.pep
NSANKYKFFLAYSPSLTSRPQPECGLIGIRHMAREREKRVKRKAEAAKHLFFICSLLSNGGALSCSCYKRQIPGSGAPSSFPLSRVAGTTSLISEREGAPYQPLAAVLLLITDE

SEQ ID NO: 154485 - protein, 71 aa, Glycine max
  unsure (1)..(71): unsure at all Xaa locations
  Clone ID: PAT_MRT3847_110521C.1.pep
ATLIADNNHSPHEDAEAFRXAFEGWGTDDNTVIAIMGYIIVYQRQHIRTFYEVIYPDDLVKRLXSEIYGDF

SEQ ID NO: 154486 - protein, 94 aa, Glycine max
  Clone ID: PAT_MRT3847_110522C.1.pep
SAGGNPWAKGVLKANYFSPPPPFFKGGGKVNFHFFFLGIEDIFFNFSKVKVFLLKPLLKAGLFFWVEGRPFLRDSQHNKWGGPSPVLFFPPVFR

SEQ ID NO: 154487 - protein, 83 aa, Glycine max
  unsure (1)..(83): unsure at all Xaa locations
  Clone ID: PAT_MRT3847_110523C.1.pep
YWGAAKEQMMEVIILGVVSLTSSSGNASACLLCFSKVLVHSCLFCFFVHKKFRVDADMYDXIDILRSHTSGSMRRDQCDLPRV

SEQ ID NO: 154488 - protein, 70 aa, Glycine max
  Clone ID: PAT_MRT3847_110524C.1.pep
AKGKCDARKINMEGQMNSQKAGCKVSGREEYLGVTMEDVIEWHVRFINFFLFFFCFSFFLFFFFFFFFFF

SEQ ID NO: 154489 - protein, 128 aa, Glycine max
  unsure (1)..(128): unsure at all Xaa locations
  Clone ID: PAT_MRT3847_110525C.1.pep
ESAKISKWLNLLVYILLLLKAEGSLIPLTLINNTESKRAIYLNKNPPAYHFNRXLNKGLRTRLFTWTEKNXCNNIETYLYQRNSRLNSSKRMKNLYFSTMLSNKQYYNPDFYNWNRVNIKYGNGSSFT

SEQ ID NO: 154490 - protein, 60 aa, Glycine max
  Clone ID: PAT_MRT3847_110526C.1.pep
REELQDDANPNFVEEIVTLHYRDSSRLISSIEQALKERNPLDFNKLDTLMHQFKGSSFKS

SEQ ID NO: 154491 - protein, 97 aa, Glycine max
  Clone ID: PAT_MRT3847_110527C.1.pep
SEHSPMFHQLSFLFHQLGINLHILVSISFEFAYLLRKCSPHELQVPVYMTVQLCVHFRERSSFRYQFVLLQVPNPRLIRLFQKPMRLPPVSCFFNLL

SEQ ID NO: 154492 - protein, 159 aa, Glycine max
  unsure (1)..(159): unsure at all Xaa locations
  Clone ID: PAT_MRT3847_110528C.1.pep
NSKYRKIRQHINSSCSSSCSYLRISGPSRASSQSLRESFTSSSCDRTESEQCRDESAAMVLKFVAVASILVAGFGGVSIPLVGKSRRFLRPDGDVFAAAKAFAAGVILATGFVHMLRDSWDALREPCLGTHSRAWAKFPFTGFFAMVSALFTLLVDFXA

SEQ ID NO: 154493 - protein, 205 aa, Glycine max
  Clone ID: PAT_MRT3847_110529C.1.pep
SCGAPTPSLQKLQVQVFYSSFNFQDLWSLPRLFSESLNLQSLRESFTSSSCDRTESEQCRDESAAMVLKFVAVASILVAGFGGVSIPLVGKSRRFLRPDGDVFAAAKAFAAGVILATGFVHMLRDSWDALREPCLGTHSRAWAKFPFTGFFAMVSALFTLLVDFLATEYYERREARGRVERGQVLIMIRVDHSYDVIGTALVGPL

SEQ ID NO: 154494 - protein, 459 aa, Glycine max
  Clone ID: PAT_MRT3847_11052C.1.pep
MTLQADSAPVPPPPPDSAATNGISPTAEEAPQPPSPPPPHPTPPPELRVPIWWPEDGNLSMDWVDNLMRCFDWSSRNVPPSELPSVLPVGVFDSLILVASKMLHKEPNCVTVDPFRPSSDDDNTPSAASSVVVVGDVHGQLHDLLFLLQDAGFPSRDRIFVFNGDYVDRGAWGLETFLLLLAWKVFMPHNIYLLRGNHESKYCTSVYGFEKEVMVKYGDKGKHVYRKCLGCFEGLPLASIIAGCVYTAHGGLFRSVTVMPSKRLKGKKNRKINVNHESKILSLGSLEELCKARRSVLDPPWEGPNLIPGDVLWSDPSKNPGLAPNKERGIGLMWGPDCTEEFLKKYQLKLIIRSHEGPDAREKRDGFEGMDEGYTIDHVVDSGKLVTVFSAPDYPQFQATQERYNNKGAYVVLQPPNFENPIFHGFSAVTPRPKVNPYYDYKEVIDSDEELDLASMVTS

SEQ ID NO: 154495 - protein, 94 aa, Glycine max
  unsure (1)..(94): unsure at all Xaa locations
  Clone ID: PAT_MRT3847_110530C.1.pep
SLTKSLNLQSLRESFTSSSCDRTESEQCRDESAAMVLKFVAVASILVXRIRGVSIPLVGKSRRFLRPDGDVFAAAKAFAAGVILATGFVHMLRD

SEQ ID NO: 154496 - protein, 97 aa, Glycine max
  unsure (1)..(97): unsure at all Xaa locations
  Clone ID: PAT_MRT3847_110531C.1.pep
HLHNTNRIGKFWAFDLDAPGAGVTDKRKVREMGVSTADATFHNLDSSEISLSDVRHYYDIYSTXAGQTLRKDGRKPSXAYFADTTHTTAVVRALFET

SEQ ID NO: 154497 - protein, 61 aa, Glycine max
  unsure (1)..(61): unsure at all Xaa locations
  Clone ID: PAT_MRT3847_110532C.1.pep
ESGIISTLQQNIVLHLTRTNLMMMQHXAYRTCLTHYSKHVQGFTELLAFGLYYTWGKRTPC

SEQ ID NO: 154498 - protein, 112 aa, Glycine max
  Clone ID: PAT_MRT3847_110533C.1.pep
SSYLDRTVQGPVTVASSRNQKNKGLVKAPRGTLLSVFHTVPFPLDVRLTHPLLCSTRSHNNFVRRSPPRIHSSVNVWRFIIITVFGYFRVGLRNQHTGAGGQPLWHKGPNGT

SEQ ID NO: 154499 - protein, 54 aa, Glycine max
  Clone ID: PAT_MRT3847_110534C.1.pep
SLMLRSACTVSEEYTQVLSCEHLSSTGALMMTQGHVGLVAYRFTEVHCVSRAGS

SEQ ID NO: 154500 - protein, 58 aa, Glycine max
  unsure (1)..(58): unsure at all Xaa locations
  Clone ID: PAT_MRT3847_110535C.1.pep
MMSSAVLCHLFILCAFTTSYLPXTIPDFALYNEXNHFXNGGTYYILADITTYIGLKPV

SEQ ID NO: 154501 - protein, 41 aa, Glycine max
  Clone ID: PAT_MRT3847_110536C.1.pep
LPIHSPLSRGFFFWESITLYCILFGHEFNFGPHLKGCFIEI

SEQ ID NO: 154502 - protein, 118 aa, Glycine max
  unsure (1)..(118): unsure at all Xaa locations
  Clone ID: PAT_MRT3847_110537C.1.pep
AXNSXRAHTQKTQTLLLFFRTIRRARGLLRRPHGTTGRFGCCAVNILSAERRWELQGPRQHEQSYYNELEHDAQEYSNFNEGTWKPPTMMTENVPQRLQLALRHCPEEHRRGLYVMKV

SEQ ID NO: 154503 - protein, 75 aa, Glycine max
  Clone ID: PAT_MRT3847_110538C.1.pep
FYAWATVHTGGLTLTAETPLSHLDIKKHSIPIYFYGLDSLRERQSLCALVTDFVNNFIFHVIYIVETLQLHNIGP

SEQ ID NO: 154504 - protein, 54 aa, Glycine max
  Clone ID: PAT_MRT3847_110539C.1.pep
SNILIKQCIKRLIYLKNHQFFHNCHQELSQTHHIKTKDLSKSFTPHYNKKHISY

SEQ ID NO: 154505 - protein, 79 aa, Glycine max
  Clone ID: PAT_MRT3847_11053C.1.pep
PVLTYYRGAQGIILVGLDDSKFKQSLLVKDLTMQTTLFSHPLFCFSCRNISTNGKTKCSVKFRTSYPSQLDRECEFNGI

SEQ ID NO: 154506 - protein, 44 aa, Glycine max
  unsure (1)..(44): unsure at all Xaa locations
  Clone ID: PAT_MRT3847_110540C.1.pep
CVQKRPWGRYSVENRDPGKKTRGWFGTXDTDEEAARAYXTDERV

SEQ ID NO: 154507 - protein, 67 aa, Glycine max
  Clone ID: PAT_MRT3847_110541C.1.pep
LWCHLFLPSSSLLLGTLFCFFVLLCVYLFLSWSPLSLPLLGRVLEGIRVKRRRRWFNQQFAFLHHPI

SEQ ID NO: 154508 - protein, 215 aa, Glycine max
  Clone ID: PAT_MRT3847_110542C.1.pep
IIREIARMLANDYKKRVMIVDTSNEIGGDGDIPHAGIGNARRMQVPNSDMQHKVLIEAVENHMPQVIVIDEIGTKLEAMAASTIAQRGIQLVATAHGITIENLIMNPSLEMLVGGIQSVTLGDEEASRRGVQKTVLERKGPSTFSCGVEIISKTELRIHRSLEATVDAILSGRFPNVEIRKMKSQEQEEILQDGLVSDSSLQKNGEIMFKATKGF

SEQ ID NO: 154509 - protein, 140 aa, Glycine max
  unsure (1)..(140): unsure at all Xaa locations
  Clone ID: PAT_MRT3847_110543C.1.pep
XGGGGGXXXXXXGETDTGETQXEKGGXGXRPXAHFTXXQXXEKGGGEXTRGQKXGGGGDPRERAXKXEXKTXXETTTTXAXKGPPEKGQEXKPGQGPTAAQGHXLGXKEAPSXXNPXXENHXXGKEPREAXXXPPXQTLN

SEQ ID NO: 154510 - protein, 53 aa, Glycine max
  Clone ID: PAT_MRT3847_110544C.1.pep
NAVLRYGISHPVVNDGDMYLWRKLGINSWPTFAIVGPNGKVLAQLAGEGPKKG

SEQ ID NO: 154511 - protein, 107 aa, Glycine max
  Clone ID: PAT_MRT3847_110545C.1.pep
MSNYQRAPQDPYYPPPGYAPPYPPQQGYPPPGYPSAPPQPPPGYSPYPPPPQYEGYQGYFNQGYPPPPPPNYHCHHVQHDNPGFTSFFQGCLTAICCCCLLEECCFF

SEQ ID NO: 154512 - protein, 86 aa, Glycine max
  Clone ID: PAT_MRT3847_110546C.1.pep
AGVKYTEVARNGRRRFNCGNFQSCVLGFSSGHLCLCSPRGFSLPFCPFCWSNGPKSVRVVMSPSVDPLGLLFLFFYQSLCSKSISY

SEQ ID NO: 154513 - protein, 78 aa, Glycine max
  unsure (1)..(78): unsure at all Xaa locations
  Clone ID: PAT_MRT3847_110547C.1.pep
LFKIWGLVQWWMRIRVLVLFSNKGIGGVRGKNGGWFFVSRQELVWWREQKGGWSXXXLWDGVVVLGWESPFVLAWSLV

SEQ ID NO: 154514 - protein, 72 aa, Glycine max
  Clone ID: PAT_MRT3847_110548C.1.pep
NLRNQNCTIMIPKRLKNQLGKNFVSVMCSHWECRGAQNKKLRPCSLVLCNSKLTLVVIYTVAVHGTLLKFVT

SEQ ID NO: 154515 - protein, 92 aa, Glycine max
  Clone ID: PAT_MRT3847_110549C.1.pep
FLHMHLYALRAAYVAFSTIPVHLIMCLSLTGTQAVQLLFVCPDNGPYFRVSHHISMDFLPVNYSHFLPFKILLYILKTYLFSFNHIYIYIYI

SEQ ID NO: 154516 - protein, 61 aa, Glycine max
  Clone ID: PAT_MRT3847_11054C.1.pep
GIVMEGSIEKYDCIICIQIIKDMNDESAISLQVHECVTEDFLRNRHAVCTKSKLLHPFYLD

SEQ ID NO: 154517 - protein, 64 aa, Glycine max
  unsure (1)..(64): unsure at all Xaa locations
  Clone ID: PAT_MRT3847_110550C.1.pep
SFIQHMSQRPTIPHSSSMAYGLLSHLLVSSEMNPSSNWSHSLPLSCSHDSHSFSFTQHHGRXRF

SEQ ID NO: 154518 - protein, 50 aa, Glycine max
  Clone ID: PAT_MRT3847_110551C.1.pep
GIRGSTLRYRGFCCRDLIKGRFICITASPRALPNSLVHLARLVSGLCNGQ

SEQ ID NO: 154519 - protein, 60 aa, Glycine max
  Clone ID: PAT_MRT3847_110552C.1.pep
KYSRVPTTMDIELTVTKKELPLGSHPHIIHTSNYMAKGCHHPGGDSTTLNYDPVSYAHTY

SEQ ID NO: 154520 - protein, 48 aa, Glycine max
  Clone ID: PAT_MRT3847_110553C.1.pep
IIVRCCKAPAIVATSMRTTIITTSRAVCSLISTRHMAYIELIKLNSLT

SEQ ID NO: 154521 - protein, 48 aa, Glycine max
  Clone ID: PAT_MRT3847_110554C.1.pep
IRLELKVALDHGKSSCVIKTHDRVVDCQTVGDAYAVKIIALERLSALI

SEQ ID NO: 154522 - protein, 244 aa, Glycine max
  Clone ID: PAT_MRT3847_110555C.1.pep
METGGRKLKSRETMAFESVTQSAPPPRSRGRITLLENPKTPFALALLFADAVLVSLIIAFVPYTKIDWDAYMSQVTGFLGGERDYRNLKGDTGPLVYPAGFLYIYSAFQYLTEGQVYPAQILFGVLYIVNLAIVLAVYVKTDVVPWWALCLLSLSKRVHSIFVLRLFNDCVAMTLFHAALLLLVHRRWNLGLILFSGAVSVKMNVLLYAPPLLLLMLKAMDISGVLLALSGAALVQVSFSWAST

SEQ ID NO: 154523 - protein, 53 aa, Glycine max
  Clone ID: PAT_MRT3847_110556C.1.pep
TQQNHEEAFLCSPFCRSFLFRFGGSILILLRHGEHQLLFIGLTRAGFTGQVSE

SEQ ID NO: 154524 - protein, 537 aa, Glycine max
  Clone ID: PAT_MRT3847_110557C.1.pep
YNTLIAGLMRCSRIEDSRQLFYDMQEKDSISWTAMIAGFTQNGLDREAIDLFREMRLENLEMDQYTFGSVLTACGGVMALQEGKQVHAYIIRTDYQDNIFVGSALVDMYCKCKSIKSAETVFRKMNCKNVVSWTAMLVGYGQNGYSEEAVKIFCDMQNNGIEPDDFTLGSVISSCANLASLEEGAQFHCRALVSGLISFITVSNALVTLYGKCGSIEDSHRLFSEMSYVDEVSWTALVSGYAQFGKANETLRLFESMLAHGFKPDKVTFIGVLSACSRAGLVQKGNQIFESMIKEHRIIPIEDHYTCMIDLFSRAGRLEEARKFINKMPFSPDAIGWASLLSSCRFHRNMEIGKWAAESLLKLEPHNTASYILLSSIYAAKGKWEEVANLRKGMRDKGLRKEPGCSWIKYKNQVHIFSADDQSNPFSDQIYSELEKLNYKMVQEGYVPDMNSVLHDVDDSEKIKMLNHHSEKLAIAFGLIFIPPGLPIRVVKNLRVCGDCHNATKYISKITQREILVRDAARFHLFKDGRCSCGDFW

SEQ ID NO: 154525 - protein, 41 aa, Glycine max
  Clone ID: PAT_MRT3847_110558C.1.pep
VILNNTAFLYNQYILPLQYTKGSTQDHSFNYESNQTKKVYY

SEQ ID NO: 154526 - protein, 82 aa, Glycine max
  Clone ID: PAT_MRT3847_110559C.1.pep
AIREKERGSRKSNRLYFAISGGGCTNPQWCTFTPLCSFITPMIDGADAAAEPQTGRFDTERPSRNTFTKGDLYTTVTFAYQA

SEQ ID NO: 154527 - protein, 63 aa, Glycine max
  Clone ID: PAT_MRT3847_11055C.1.pep
LCTCVLVSDGYSFDAQYILRKKLTHIRVSPFMILIILTGSLNLFHSGPFLVLYVLPSFALGHF

SEQ ID NO: 154528 - protein, 90 aa, Glycine max
  Clone ID: PAT_MRT3847_110560C.1.pep
PRVRCGDGDVVEVAGSFNGWHHRIEMDLQQSTSAIDLDGSRSSRCWSTMLWLYPGVYEIKFVVDGKWITDPQRESVTRGHICNNILRVDR

SEQ ID NO: 154529 - protein, 76 aa, Glycine max
  Clone ID: PAT_MRT3847_110561C.1.pep
GSFNGWHHRIEMDLQQSTSAIDLDGSRSSRCWSTMLWLYPGVYEIKFVVDGKWITDPQRESVTRGHICNNILRVDR

SEQ ID NO: 154530 - protein, 224 aa, Glycine max
  Clone ID: PAT_MRT3847_110562C.1.pep
HSFIYLFIYSPTDSEIALQQALFAPKLSFPSSSRNVALISRVPSTPISWRCTPLIAKPSFAVRADSNVEGAGEATEDVPSYNVDEVSEGEGEQVSDSEAPKSPRKPRVKLGDIMGILNQRAIEASEKQRPTPDIRTGDIVEIKLEVPENKRRLSIYKGIVISKQNAGIHTTIRIRRIIAGTGVEIVFPVYSPNIKEIKVVSHRKVRRARLYYLRDKLPRFSTFK

SEQ ID NO: 154531 - protein, 71 aa, Glycine max
  unsure (1)..(71): unsure at all Xaa locations
  Clone ID: PAT_MRT3847_110563C.1.pep
HELGFTIRRGVGTGDCVSXVNYDDLGQXDVDVGDMLLGDXGGMMSLVVKAKTEDSAKCEGVDGGQLKSRTH

SEQ ID NO: 154532 - protein, 37 aa, Glycine max
  Clone ID: PAT_MRT3847_110564C.1.pep
LAKNMNDWEPDAPRYLHKSTRKVGILWFSPSESSRSC

SEQ ID NO: 154533 - protein, 142 aa, Glycine max
  unsure (1)..(142): unsure at all Xaa locations
  Clone ID: PAT_MRT3847_110565C.1.pep
LFCKKSEFXKKKKKKKKKKKKKKKKKKKKKKKKKKKKKKKKKKKKKKKKKKKKKKGGPFKRSKFYSPGLERYNFFFGDPKLNLLAGVLKRGGGENPGGTQINWLGKKSLFSNWVKKKKAPPNSLSKNLANLNGKWDPPFKRL

SEQ ID NO: 154534 - protein, 139 aa, Glycine max
  Clone ID: PAT_MRT3847_110566C.1.pep
QNNSGSKEELQALMEQRKRKRMISTRESARRSRMRKQKHLDDLASQVTQLRNENHQILTSVNLTTQKYLAVEAENSVLRAQVNELSHWLESLNEIIHFLNATDGGPPPPPSSFFEPDATFFNKAYLSQPIMASADMLQY

SEQ ID NO: 154535 - protein, 237 aa, Glycine max
  Clone ID: PAT_MRT3847_110567C.1.pep
MFCKKKLELDGNLQIDHVVASSSTATTLLTTDNGDSEELRSHDSCHEFSNGNEYFSRTGNFPSPSELANLDESFLAKRCGLGYRAGYIIELARAIVEGKIQLGQLEELSKDASLSNYKQLDDQLKQIRGYGPFTRANVLMCLGYYHVIPTDSETVRHLKQVHSRYTTSKTIERELEEIYGKYEPYQFLAFWSEVWDFYETRFGKLNEMHSSDYKLITACNMRSTTNKRKRPSRKCQC

SEQ ID NO: 154536 - protein, 58 aa, Glycine max
  Clone ID: PAT_MRT3847_110568C.1.pep
CRSATCLGGGGGGGEVIELITRMEGERPRNFHDRKPTNEIRARVCRREISEYEYTAKL

SEQ ID NO: 154537 - protein, 73 aa, Glycine max
  Clone ID: PAT_MRT3847_110569C.1.pep
DLPPVSCYKLSLSLSLSLSLSLSYTHTVLEIFIYNEIRNADTYTDHDHRQTDTVMDVDYALNMQRKSLYLYGG

SEQ ID NO: 154538 - protein, 67 aa, Glycine max
  Clone ID: PAT_MRT3847_11056C.1.pep
ALASFSNEQIWQPITSSFHFFLFPCLFFTCSFLQMFLISFSLFFFFLVWLFLFFISSIFLCSVFSKF

SEQ ID NO: 154539 - protein, 49 aa, Glycine max
  Clone ID: PAT_MRT3847_110570C.1.pep
QYLFSMTLTSCPTSHTQHSSSQAQHNASTSRSMELLLGRPIGIIIMEGV

SEQ ID NO: 154540 - protein, 127 aa, Glycine max
  unsure (1)..(127): unsure at all Xaa locations
  Clone ID: PAT_MRT3847_110571C.1.pep
FLRVLKAAVGIVHRVPPNVAYGCPCLKNVRGLFVKTGYGXLTYQRAALSYHSFFEQAVGQYEIVSPRDVIHEIISVGPHFKXLSSYLWPFKLKAPLGGLKKRTILYVXAGDPGDRQYSINERISRMN

SEQ ID NO: 154541 - protein, 110 aa, Glycine max
  Clone ID: PAT_MRT3847_110572C.1.pep
QGCVIFSHLGSVIFLFFVFGCNLLYSTCLLFSSIILHVYGLGSVDNGLHQNIPNFVYQDSGIAWFSTLILCWIGYLYPAILYLKFRSNPRFSTSLQYLNFTIQYAPNNNH

SEQ ID NO: 154542 - protein, 54 aa, Glycine max
  Clone ID: PAT_MRT3847_110573C.1.pep
KYMHMQLLRLVAVPLWAVIAAPCDPGANIALPAPIHVSFSTEEDGKGEERHQAD

SEQ ID NO: 154543 - protein, 43 aa, Glycine max
  Clone ID: PAT_MRT3847_110574C.1.pep
MNGGKSKTESKRADPKLAVNKMGAAIKARKRAGKGNAAKDPNK

SEQ ID NO: 154544 - protein, 48 aa, Glycine max
  Clone ID: PAT_MRT3847_110575C.1.pep
WHAVEITALVSLKIMINNKTLNDEMHRLHHVSSLRANKIFHIIIATGN

SEQ ID NO: 154545 - protein, 115 aa, Glycine max
  Clone ID: PAT_MRT3847_110576C.1.pep
MRTEVMGRWGTWEELLLGGAVLRYGARNWKVVAAELRARTVCPYIITPEVCKAKYEDLQKRYSGNKAWFEELRKTRVAELKRALEVSEDSIGLVPFIYFSLQDQIFVRRQQSIHS

SEQ ID NO: 154546 - protein, 77 aa, Glycine max
  unsure (1)..(77): unsure at all Xaa locations
  Clone ID: PAT_MRT3847_110577C.1.pep
SDRHIAQYSGDIFVQQIDLYGSCAARSRPSSRPRLCQRASRTXCRRCNCVPPDTAANQELXPCYTSLTTHRGKRKFP

SEQ ID NO: 154547 - protein, 190 aa, Glycine max
  Clone ID: PAT_MRT3847_110578C.1.pep
MGSEKQSKAEEEEGEIPVLTVLKNNTILKNIFIVNKPPEEQARADHVNVLLVGRHPDCDLMLTHPSISRFHLQIRSNPSSRTFSLLDLSSVHGTWVSGRRIEPMVSVEMKEGETLRVGVSSRVYRLHWIPVSRAYDLENPFVAQLDSVAEEEEEEKEEEEEMQNLSCCPAEMEEIDSMDSIVEGYECFIP

SEQ ID NO: 154548 - protein, 57 aa, Glycine max
  Clone ID: PAT_MRT3847_110579C.1.pep
FSLGLDETPPHSPMHPSTSTADLHVSDSDPESRPYPTCPLLRRFRRDLPTPCLDADD

SEQ ID NO: 154549 - protein, 85 aa, Glycine max
  Clone ID: PAT_MRT3847_11057C.1.pep
HACYNSRIVHRPIYSQRLVLTTPGMFPSPKLQWECVMRVHLQTMRCMTLSTYNYGLKFSNPIDGPNFAMPRSGNCIPTKCRCSRH

SEQ ID NO: 154550 - protein, 69 aa, Glycine max
  Clone ID: PAT_MRT3847_110580C.1.pep
CSCKKKKKKKKKKKKKKKKKKKKKKKKKKKKKKKKKKKKKKKKKGAHFGGPILRSQFLQPKIFFKGSLK

SEQ ID NO: 154551 - protein, 157 aa, Glycine max
  Clone ID: PAT_MRT3847_110581C.1.pep
KKRRGKRKRKDCGRNMKEASVGESDLLDSADIVSWCKESSTSNCGEVAKSCGVDDQNRNLKKDRVEDMMEILDFIFETKGAPAFRRRLDSQKRGRYKKMIRQHMDFDTIRSRISSQTIKSSVELFRDLLLLTNNALVFYSKSTREYKTVLLLRGIVT

SEQ ID NO: 154552 - protein, 142 aa, Glycine max
  Clone ID: PAT_MRT3847_110582C.1.pep
TRAKTTHKPNPKKKKEGRPNQKKNQNQKNRGDSPGGKKKDKPARPGKESTPPTPGEKRVANSTKGRLHPRGKRRATVASPGGPGYKKGKGASLVWPNPQGQKRVGGSGPPGKNPTWEKPDGGPQTGEPTQSPDRNWESTAPS

SEQ ID NO: 154553 - protein, 79 aa, Glycine max
  unsure (1)..(79): unsure at all Xaa locations
  Clone ID: PAT_MRT3847_110583C.1.pep
QSPSLFLNGKHVFCMHMGKFPEAQTLLGAALNKDARDPQTLAHLAVSCFRIGGASNKSXFSELILSHPKHVSVERGSSP

SEQ ID NO: 154554 - protein, 54 aa, Glycine max
  Clone ID: PAT_MRT3847_110584C.1.pep
SKGSQFCAPIHIIITWSIKNTFHNLVIISSRTHVHKGRAQCGCPALWTGLQVSA

SEQ ID NO: 154555 - protein, 70 aa, Glycine max
  Clone ID: PAT_MRT3847_110585C.1.pep
DAFASILLIMNRHDQFQKRMLFLIHLKRITFLFVFIALLEFCNILFNLYSNSDSLLSGNHAFTAFFFFFF

SEQ ID NO: 154556 - protein, 44 aa, Glycine max
  Clone ID: PAT_MRT3847_110586C.1.pep
KNHQTTPMNISKTGAFFNFIIISPLSSTNNSLNLNYYSKTFPHL

SEQ ID NO: 154557 - protein, 91 aa, Glycine max
  Clone ID: PAT_MRT3847_110587C.1.pep
TFYIQLTFFYGKKKKRGRAKKNKKKNKQNKNCLPPTNYHLNPLINSPPFPSPFPTFPKSNPIKPSHKTIHTSYLLKILTPSQFHTSSHPQP

SEQ ID NO: 154558 - protein, 383 aa, Glycine max
  Clone ID: PAT_MRT3847_110588C.1.pep
MGWLDSVWGRGRKFIKRKDSDAGDAGKALEELRASLYNEIRTSEGAKRQQQRYCGPVVALSFNFMVSVGIIMANKLVMGKVGFNFPIFLTFVHYITAWLLLAIFKTLSVLPVSPPSKTTPFSSLFALGVVMAFASGLANTSLKYNSVGFYQMAKIAVTPTIVLAEFILFGNTIDFKKVLALAVVSAGVAVATVTDLEFNLFGALIAIAWIIPSAINKILWSTLQQQGNWTALALMWKTTPITVFFLGALMPWIDPPGVLSFKWDVNNSTAVFVSALLGFLLQWSGALALGATSATTHVVLGQFKTCVILLGGYLLFESDPGVVSIGGAVVALSGMSVYTSLNLQEPQEPSSKPKSTSEDTKSTDSNVNTTTTTTTSTTIVCVI

SEQ ID NO: 154559 - protein, 65 aa, Glycine max
  unsure (1)..(65): unsure at all Xaa locations
  Clone ID: PAT_MRT3847_110589C.1.pep
XXQPXXTXXVRXSCXRSXPCIGLASALVXXRXLHSXLRXXXQXAXXXXXXXXXXXXXGXRXXLGX

SEQ ID NO: 154560 - protein, 217 aa, Glycine max
  Clone ID: PAT_MRT3847_11058C.1.pep
MGAYRADDDYDYLFKVVLIGDSGVGKSNLLSRFTKNEFSLESKSTIGVEFATRSIHVDDKIVKAQIWDTAGQERYRAITSAYYRGAVGALLVYDVTRHVTFENVERWLKELRDHTDANIVIMLVGNKADLRHLRAVSTDDAKAFAERENTFFMETSALESLNVDNAFTEVLTQIYRVVSRKTLEIGDDPAALPKGQTINVGSRDDVSAVKKSGCCSA

SEQ ID NO: 154561 - protein, 137 aa, Glycine max
  unsure (1)..(137): unsure at all Xaa locations
  Clone ID: PAT_MRT3847_110590C.1.pep
FLFVREDTVHWATNITXCDMYGKGWIIEMYGYSFGAAEVGLRHRIKVNLMIYPGYVPCEGIEPILFHYGVPFSVGNWTFNKLAHHDDRIVYECNQVSTEPSYPKEVRLLELDPRSKARTICKLIXINIIDEGHLLHH

SEQ ID NO: 154562 - protein, 61 aa, Glycine max
  Clone ID: PAT_MRT3847_110591C.1.pep
HRRYQSYTFTLTNINYYLTTHIILTLDIRFHTYDIILLLLDHCLASLIFSQIITFLNFPFQ

SEQ ID NO: 154563 - protein, 34 aa, Glycine max
  Clone ID: PAT_MRT3847_110592C.1.pep
LRCSIPDTNPGQPGAIPRELEDVQQLWTIGLCLL

SEQ ID NO: 154564 - protein, 167 aa, Glycine max
  unsure (1)..(167): unsure at all Xaa locations
  Clone ID: PAT_MRT3847_110593C.1.pep
LVRSPGVEVILVVHVYKLREALYGLKQAHWAWNXRINVFLYQXGFSKCSVGFEVYVKAKNNVDLTLVCLYVDNLLVTGSDHLEIEEFKGRMKFEFEMTDLEVLNYFLGLECVYTKIDIFLHQKRYTQEVFRRFQVENCNEAVTLVEATLKLIKRPDEKAVDGTLTSR

SEQ ID NO: 154565 - protein, 35 aa, Glycine max
  Clone ID: PAT_MRT3847_110594C.1.pep
KNLNFASGTPIIKGPLKKLKPISLTYLFHTWDGPL

SEQ ID NO: 154566 - protein, 84 aa, Glycine max
  Clone ID: PAT_MRT3847_110595C.1.pep
MNFLHHYLTMAPFTPSKLLLLTLVFTLSQKQSLCSTLKSEEGLALLALRERVVSDPQGALSSWSGEDGDIDPCSWFGVECFHGY

SEQ ID NO: 154567 - protein, 129 aa, Glycine max
  unsure (1)..(129): unsure at all Xaa locations
  Clone ID: PAT_MRT3847_110596C.1.pep
MRFGFPHRMVVAVKLFNLDLELGSRSFSVECEVMRNLRHRNLIKIICSCSNSDYKLLVMEFMSNGNLERWLYSHNYYLDFLQRLNIMIDVASALEYMHHGXSPTVVHCDVKPSNVLLDEDMVAHVSDLG

SEQ ID NO: 154568 - protein, 74 aa, Glycine max
  Clone ID: PAT_MRT3847_110597C.1.pep
ATRRTLQVWHVLRCGMNNFDYYLIANLIFCPKAIITMRVSRIKWYLSSYRYSAKAGIISRGNKHGDRLCLWNNL

SEQ ID NO: 154569 - protein, 84 aa, Glycine max
  Clone ID: PAT_MRT3847_110598C.1.pep
PPQNYSPVFRFSLPKPSSQNPFAPPGPTFLPPPGQKQNPFGTFPPPNEHGHPRFPIFFPFPAQSLVSPSGIFFLGLGFISNLGG

SEQ ID NO: 154570 - protein, 62 aa, Glycine max
  Clone ID: PAT_MRT3847_110599C.1.pep
SLTIQSCSSRLCLNSLVVPTHITSGKIPCAHVQGFNVGGVNGGYVEPVFLYPGFYSLRNQFL

SEQ ID NO: 154571 - protein, 107 aa, Glycine max
  unsure (1)..(107): unsure at all Xaa locations
  Clone ID: PAT_MRT3847_11059C.1.pep
KIAXSXLXXPXXXFFQXXXXXLXVXXXMXLRXXFXLRLLRLKPLXLXXASXXRXLRGPEDPRXVXSVLRFXXXXXXRWXXRXSXAXXXXALXXLGSSRIPXLRTXXE

SEQ ID NO: 154572 - protein, 64 aa, Glycine max
  unsure (1)..(64): unsure at all Xaa locations
  Clone ID: PAT_MRT3847_1105C.1.pep
CSKPKLKVEDGFFGTSGGFGFTMLNQLFAGPVALLGFTAXLLGGGITGKGILSXQLNLETGIPI

SEQ ID NO: 154573 - protein, 465 aa, Glycine max
  unsure (1)..(465): unsure at all Xaa locations
  Clone ID: PAT_MRT3847_110600C.1.pep
MVNRYRLRIRSKPFTKMVTIKASYTVLPNEPTPEGLLWLSDIDQVARLRHTPTIYIFHAKHNHDTLIERMRNSLSKILVHYYPIAGRLRRIEGSGRLELDCNAKGVVLLEAESTKTLDDYGDFLRESIKDLVPTVDYTSPIEELPSLLVQVTTFHGGKSFAIGVALCHILCDGXFGAIQFINSWAKLARGDTLEPHEMPFLDRTVLKIQHPQSLRSLNKNAVQEXRHKFIEDDKIVEXKLKGCQLXLVLRIQMMMKQKKVANVVSKVEGSRLYSRFEAIAALIWRCASKARKIDKNQPTLVRFNADIRNRLIPPLPKNYFGNAXSLTTASYQVGDVISNSLSYAAQKIREAIEVVTYEYIWSQIDVIRGQEQLDNARALFFGQNEGKDALFYGNPNLLITSWMSMPMHEADFGWGKPVYLGLGSVSTQDRALIIQSPDGDGSIILSIHFQMEHMQLFKKYFYEDM

SEQ ID NO: 154574 - protein, 37 aa, Glycine max
  Clone ID: PAT_MRT3847_110601C.1.pep
KKNIIKVKYNVYKGDRNQLKVSINKLALKENKKEILI

SEQ ID NO: 154575 - protein, 65 aa, Glycine max
  Clone ID: PAT_MRT3847_110602C.1.pep
AGTTEVSAEAEWNSWSASVRSRYYLRRVGNDSMKLVCWYTVSLEEVKAKHVSPTGATCTQQTHQI

SEQ ID NO: 154576 - protein, 59 aa, Glycine max
  Clone ID: PAT_MRT3847_110603C.1.pep
INSLEQHIRTFLASSQDNVINQIPTQIQELTFPKSTQPIKKLLKNQRQSYFINTHANNK

SEQ ID NO: 154577 - protein, 44 aa, Glycine max
  Clone ID: PAT_MRT3847_110604C.1.pep
VQLKLQKQQPHKDTQFSSGLSLAFTHSLILNTTKMGLFYQDALN

SEQ ID NO: 154578 - protein, 83 aa, Glycine max
  Clone ID: PAT_MRT3847_110605C.1.pep
DRCHIGNGVNNVCLNGLKTLIFNSSMTKMFDREVQGLKLSFTKYSDNIFFLFAPLIASLKPLNIPFLVWLITWNVFLKPDHSN

SEQ ID NO: 154579 - protein, 67 aa, Glycine max
  Clone ID: PAT_MRT3847_110606C.1.pep
LFLVLLHRFLVLKLRRFLGWKKFLSFHCFFSELTVNKLQGVLKFHICQFCTSGTCWHHSHGFSIHVD

SEQ ID NO: 154580 - protein, 78 aa, Glycine max
  Clone ID: PAT_MRT3847_110607C.1.pep
YQGSSQVLNSNGVVLVEFFAPWCGHCQALTPIWEKAATVLKGVVTVAAIDADAHPSLAQVVYCSFLHLMMAFLCIMKC

SEQ ID NO: 154581 - protein, 58 aa, Glycine max
  Clone ID: PAT_MRT3847_110608C.1.pep
HSVNRVPYYFDDIIIWIPSKAVCACPHMASHWSFFQRVSLPQLVNGGCLLRVHNAQPS

SEQ ID NO: 154582 - protein, 48 aa, Glycine max
  Clone ID: PAT_MRT3847_110609C.1.pep
DKTTLLGHTHSTKLQERLLLDRSWCNMQCGGGQAGSMRPFTQLHCQNC

SEQ ID NO: 154583 - protein, 152 aa, Glycine max
  Clone ID: PAT_MRT3847_11060C.1.pep
VATTSSSYIITMANTILNLTTIIILLISLALHNSHFVVSSTDIDQDHDFNEEEEEEYVLDTPIPHLGPRSRFLATIIKKGRQCDRETNNICNGVRANKGRDLLFCCKKHCRNVLSDKNNCRVCGNKCKQGERCCNGVCTHVLSNGRHWGKCN

SEQ ID NO: 154584 - protein, 63 aa, Glycine max
  Clone ID: PAT_MRT3847_110610C.1.pep
LLLVGLRNNNPIIKLQVSVSRSITVDGERIGLFTILPVFLAMPAQLRGTLPFSFFLIVSPVMN

SEQ ID NO: 154585 - protein, 78 aa, Glycine max
  unsure (1)..(78): unsure at all Xaa locations
  Clone ID: PAT_MRT3847_110611C.1.pep
ARVVPLNNMAEMXSATDRTNISLAAIAELAHLTGGGLINRSGLEGRSLECGSLADTVEAYEILLADGTRVRPTKDHEF

SEQ ID NO: 154586 - protein, 541 aa, Glycine max
  Clone ID: PAT_MRT3847_110612C.1.pep
MGSTSLLHLLLGVVLALLSVSLVEGEDAYKYYTWTVTYGILSPLGSPQQVVLIDGQFPGPQLDLVTNENVVLNLVNKLDEPFLLTWNGIKQRKNSWQDGVLGTNCPIPPNSNYTYKFQVKDQIGTYTYFPSTSLHKAAGGFGGLNVYHRSVIPVPYPYPDGDFTLLIGDWYKTNHKVLRESLDSGKSLAFPDGLLINGQAHTTINGDQGKTYMFRISNVGMSTSINFRIQGHPLKLVEIEGSHIVQNTYDTLDVHVGQSAAVLVTLNQPPKDYYIVASTRFSRKVLTATAVLHYSNSNSPASGPLPSPPIYQYHWSVKQARTYRWNLTANAARPNPQGSYHYGKITPTKTIVLSNSAPLINGKLRYAVNKVSYVNSDTPLKLADYFNIPGIYSVDSIQTLPSESTPASIATSVVPTSLHDFIEVVFQNNENAMQSWHLDGYDFWVVGYGFGQWTPAKRRTYNLVDALTRHTTQVYPNAWTTILVSLDNQGMWNLRSAIWERQYLGQQLYLRVWTSERSLANEYDIPNNALLCGKAVGHNNP

SEQ ID NO: 154587 - protein, 68 aa, Glycine max
  Clone ID: PAT_MRT3847_110613C.1.pep
LWASKLRFPIRGGSQSALELSNSAFTGFPLNLCRLSLGERLQLSKDLKFSLEQLGTNNLNSSLQGLWE

SEQ ID NO: 154588 - protein, 86 aa, Glycine max
  Clone ID: PAT_MRT3847_110614C.1.pep
VPSLMISVDRLLRYPSVHIIVGVLYSVRPALCSSAASECLWYPSKRAITRRWSMSCRINEASSNRAFRMRSMCLSGILTTQKNDID

SEQ ID NO: 154589 - protein, 56 aa, Glycine max
  unsure (1)..(56): unsure at all Xaa locations
  Clone ID: PAT_MRT3847_110615C.1.pep
IYYICTIKVFCLSVRRLHEASHVKREGGTLATKTXIVECLIHQDENYLSNLKGMAD

SEQ ID NO: 154590 - protein, 612 aa, Glycine max
  unsure (1)..(612): unsure at all Xaa locations
  Clone ID: PAT_MRT3847_110616C.1.pep
GLPDNIFATWNGVLEDMSDVKELVPELFYLPEVLTIENSFDFAATQMXGKGEYIKXSVSAKNPIDFIHRDRHIVXTSNSSLHLIEKDRRRRIEGPIQVLRGHHSEILSCCVNSDLGIVVSCSHSSDVLLHSIRRGRLIRRLDGVDAHTVCLSSVGVVMTWNESQHTFSTFTLNGTPVPCPQRSFLPAAACLASSVDGAKCVDWHPAPLEMVEPIIAVRIHSRISQVLLILIQNQKKLLITPIMRMFKAPAASGGEWQFPQAVAFAVSGIRSQAIVSITSNKEVITGGHADNSIRLISSDGAKTLETAXGHCAPVTCLGLSPDSNYLDGRSRGTTVLLWRMHWALSSHSSAVSEHSTGTGTLSSTSNSSSHLIEKDQRRRIEGPIQVLRGHHSEIHRWCVDSLLGCVGACSHSSPALLLSLRRERLIRRLDGVEAPTVCLSSEGVVMTWNESQHTLSTFTLNGTPIARAQLSFSCSISCMETSVDGTSALIGMNSLENGRAYNSSPDSQSNKSGVVDFDSESEETFDYTQIDVRSPSICFLHMHTLEVFHVLKLGEGQDITALALNKDNTNLLVSTLDKQLIIFTDPALSLKVVDQMLKLGWEGDGLQPLIKS

SEQ ID NO: 154591 - protein, 44 aa, Glycine max
  Clone ID: PAT_MRT3847_110617C.1.pep
PWIHSNQGSIICALESVKSPVAHNQVKSHQAAKWAKLVMSPSVS

SEQ ID NO: 154592 - protein, 478 aa, Glycine max
  unsure (1)..(478): unsure at all Xaa locations
  Clone ID: PAT_MRT3847_110618C.1.pep
MGRFSSACNRWGKAFSMNKGGKNGKCGGRETADAMAXEAKKNDMMLCSSGIVHVDGSNNFASVFSKRGQKGVNQDCCIVWEEFGCQEDMIFCGIFDGHGPWGHFVAKRVRESMPPSLLCNWQETLAQTSIDQAIDVEEEKSKQYRFNIWKHSYLKTCAAIDQELEQYRKIDSFYSGTTALSIVRQGELIVIANVGDSRAVLATTSDDGSLVPVQLTIDFKPNLPQEAERIIQCQGPRAPLDSDVDFDVETEKKQHRFNMWKHSYLKTCAAIDRELEQNRKIDSFYSGTTALSIVRQGELIIIANVGDSRAVLATTSDDGSLVPVQLTVDFKPNLPQEAERILESNGRVFCLDDEPGVHRVWLPDEEFPGLAMSRAFGDYCVKKYGLISVPEVTQRNITSKDQFVVLATDGVWDVISNQEAVDIVSSTPDRTDSSKRLVECAMRAWKRKRRGIAMDDISAICLFFHSSPSLDQVATLEE

SEQ ID NO: 154593 - protein, 66 aa, Glycine max
  Clone ID: PAT_MRT3847_110619C.1.pep
VPDGCHTCSIETIHQDHHFILRKHPVEQLHERERHLLSLLLSSVASVVDLKIRANHVVCPVVGESV

SEQ ID NO: 154594 - protein, 94 aa, Glycine max
  unsure (1)..(94): unsure at all Xaa locations
  Clone ID: PAT_MRT3847_11061C.1.pep
WGRNRGALVPFLLPIKTWNLRKSPSTFWCGERESNYKELLICLSTLVHFKRVGYTVHSINQTSNLGMRQFQTVHSELRGEFKYEFGSCKVRRCX

SEQ ID NO: 154595 - protein, 187 aa, Glycine max
  Clone ID: PAT_MRT3847_110620C.1.pep
MGIDLKAGGKSKKTKRTAPKSNDIYLKLLVKLYRFLVRRTGSNFNAVILKRLFMSKVNKPPLSLSRLIRYTKGKEDKIAVVVGAVTDDIRVYEVPALKVTALRFTETARARIEKAGGECLTFDQLALRAPLGQNTVLLRGPKNAREAVKHFGPAPGVPHSHTKPYVRAKGRKFERARGKRNSRGFRV

SEQ ID NO: 154596 - protein, 56 aa, Glycine max
  Clone ID: PAT_MRT3847_110621C.1.pep
ALLCRDLNKKTTLTYYSLTRCLGTQPLSKPNPETIPSPPKSGLLFLLAAVTRNRSR

SEQ ID NO: 154597 - protein, 324 aa, Glycine max
  Clone ID: PAT_MRT3847_110622C.1.pep
MELARPASSRRKLKDLLLQSDNRLCADCNAPDPKWASANIGVFICLKCCGVHRSLGTHISKVLSVTLDDWSEDEIDAMMEVGGNASANSIYEAYIPEGYTKPGPDAGHEQRSKFIRSKYELQEFLKPSLRIVSGKSSLQSSSAKSSFMDSFKSTGSSQRMEGMVEFIGMLKVKVIKGTNLAIRDIKSSDPYVVLSLGQQTVQTTIIRSNLNPVWNEEYMLSVPEHYGQMKLKVFDHDTFSADDIMGEADIDLQSLITSAMAFGDAGMFGNMQIGKWLKSDDNALIEDSTVNIVDGKVKQMMSLKLQDVESGELDLELEWIPLEQ

SEQ ID NO: 154598 - protein, 163 aa, Glycine max
  Clone ID: PAT_MRT3847_110623C.1.pep
MATSGSETKQVMVIGIDDSDFSTYALQWTLDHLLSPANVPKFKIFLVYAKPSVASAVGFVGPGAAEVLPVVEADLRKTAAKITERATELCKKKSVNDVAVEVLEGDPRNVLCEAVEKHQASMLVVGSHGYGTLKRAVLGSVSDYCAHHAHCTVMIVKKPKHKH

SEQ ID NO: 154599 - protein, 56 aa, Glycine max
  Clone ID: PAT_MRT3847_110624C.1.pep
KKKLPALYKFLKNSHLQLFFFLPISTILSKRRNNTPWGPLWESGEHINSNWGGPRV

SEQ ID NO: 154600 - protein, 46 aa, Glycine max
  Clone ID: PAT_MRT3847_110625C.1.pep
VGVKFDVKSRLAHAPFALPCSFSYKSLCSGSIADLNFVGLLRMVSK

SEQ ID NO: 154601 - protein, 60 aa, Glycine max
  unsure (1)..(60): unsure at all Xaa locations
  Clone ID: PAT_MRT3847_110626C.1.pep
MAQETFLFTSESMNEGHPDKLFDQISHAVLNACLEHDPDSKVACXTCTKTNIVIVFLEIT

SEQ ID NO: 154602 - protein, 88 aa, Glycine max
  unsure (1)..(88): unsure at all Xaa locations
  Clone ID: PAT_MRT3847_110627C.1.pep
XTVYWFLTXXPTXXXKXLXXXXSKMXQLVXXXVXKMPSDIKTFIEKTETKDXXTSPLKYRHEWELMLGKISKGNVCVVGDAFPLTASG

SEQ ID NO: 154603 - protein, 95 aa, Glycine max
  unsure (1)..(95): unsure at all Xaa locations
  Clone ID: PAT_MRT3847_110628C.1.pep
REQAEEEGGKAGPAGLNLLRSSSAADLHPKAGGAVAGKHMPSAXVMTXLIHVMVWRKLISYPNSHFSLIGVIRSLYAFMWYVHMSNVILESICIP

SEQ ID NO: 154604 - protein, 58 aa, Glycine max
  unsure (1)..(58): unsure at all Xaa locations
  Clone ID: PAT_MRT3847_110629C.1.pep
KALEHIGSYDATXSEXLWKQRIKDKFPPSLTVPLSLKKGVPGEENADQKAGLYIDKSM

SEQ ID NO: 154605 - protein, 121 aa, Glycine max
  Clone ID: PAT_MRT3847_11062C.1.pep
MKPFCTFFILLSLLVILVESSCKNEDQEMVSKAFQSVSGFNSSWFETGSNCSNAEIKGINLSSKNLSGNISWRYLRNISKLKVLDLSGNFLQGQVPNWFWRSSTLLVVNLSSNRFGGSINP

SEQ ID NO: 154606 - protein, 65 aa, Glycine max
  Clone ID: PAT_MRT3847_110630C.1.pep
NSTHASRLPSRMLLRVLMLHLKCENMHLFNIPMTEEPTLQGARPIISHCPDLEFACMSNHCTGLM

SEQ ID NO: 154607 - protein, 87 aa, Glycine max
  Clone ID: PAT_MRT3847_110631C.1.pep
KKVVISAPSKDAPMFVVGVNEKAYKSDINIVSNASCTTNCLAPLRKVINDKFGIVEGLMTTVHVITATQKTVDGPSSKDWRGGMAAS

SEQ ID NO: 154608 - protein, 171 aa, Glycine max
  Clone ID: PAT_MRT3847_110632C.1.pep
MAPGRKKRQGNTSIIPVDANPTQQKAQSLDIDAECESETKRMKFAEEDGDGAGGSSSVVKKKRGRKSKKEKQDTEKMLESNLSEKKDTQGEYHGENCGVGGSSSVQESAKKKRGRKSKKEKEDMEKKKMAEEKDAQNENHGENGGVGGSSCVVDGVPKKRGRKSKKEKEDM

SEQ ID NO: 154609 - protein, 51 aa, Glycine max
  unsure (1)..(51): unsure at all Xaa locations
  Clone ID: PAT_MRT3847_110633C.1.pep
SXRAAALFFFFFFFFFTIXAFYPRPIHEXARYFKAIWSMKQXLIILPNKTI

SEQ ID NO: 154610 - protein, 110 aa, Glycine max
  unsure (1)..(110): unsure at all Xaa locations
  Clone ID: PAT_MRT3847_110634C.1.pep
RGDTPPKQHPSLLKIGGXFDTMVPRGAPFAQKFPEGDPVFTKIDKELFKRSNGPFTPEGWCIANPLLGKDPCAVYGNPMGVKPPFQSKKLEKLIGELLNSEIFRPEQCKW

SEQ ID NO: 154611 - protein, 41 aa, Glycine max
  Clone ID: PAT_MRT3847_110635C.1.pep
YCSEIYGIAYEVSYNFYAFSSMLYYLGLPFNPSTSNFFLGF

SEQ ID NO: 154612 - protein, 120 aa, Glycine max
  Clone ID: PAT_MRT3847_110636C.1.pep
GYSFNHMAPGELVQRMLASLCPPEYSVPLPMPMQGQALNKFPLDITANCCGNSSTEQLAVGGAVVHQTFVQDCHGSASPRSKKNAAAVSPINAISSQVDYKYSWLLCSVVIYHHGPVRFT

SEQ ID NO: 154613 - protein, 46 aa, Glycine max
  Clone ID: PAT_MRT3847_110637C.1.pep
NSKLMGLNIMLDREDEGSLGVGTWKQGCVSVWALVFQQLLHLVHQL

SEQ ID NO: 154614 - protein, 87 aa, Glycine max
  Clone ID: PAT_MRT3847_110638C.1.pep
VTAIFLKSQSQTSFVTYLTGSNSVILPSCISKITKLELLILNFCKKLQRLPELPSSMQRLDASNCTSLETSKFNPSKPCSLFASPTK

SEQ ID NO: 154615 - protein, 966 aa, Glycine max
  unsure (1)..(966): unsure at all Xaa locations
  Clone ID: PAT_MRT3847_110639C.1.pep
RLREDDRRGELDSSNKISFLNKNPFWGLFHLFHDRNSGRYTLHHDFESEEIFQEMADLFTLSITEPDLVYHKGFAFSIDSSGLGQKHFLNELFNSRDESKNHSLLVLPPLFYEENESFYRRIIKKWVQTSCGNNLEDPKPKIVVFTSNNIMEAVNQYRLIRNLIQIQYSTHGYIRNVLNRFNCNFEYGIQRYQIGNDTLNHRTIMKYTINQHLSNLKKSQKKWFDPLIFISRTERSMNRDPNAYRYKWSNGSKNFQEHLDYFISEQNSRFQVVFDRFHINQYSIDWSEVIDKKDLSKSLCFFLSKLLLFLPKFLLFLSNSLPXFFFVSFGGIPIHRSEIHIYELKGPNNPLCNQLLESIGLQIFHLKKWKPLLLDDQDTSQKSKFLINGGTISPFLFNKIPKWMIDSFHTRKNRRKSFDNTDSYFSMISHDPDNWLNPVKPFHRSSRTRGFYKANRLRVLNNQYHFCFYCNKRFPFYVEKACINNYDFTYGQFLNILFIRNKIFPFCDGQKKHAFLKRDTISPIESQVSNILIPNDFPQSGDEGYNLYKSFHFPIRYDLFVRGAIYSIADISGTPLTEGQIVHFEKTYCQPLSDMNIPDSEGKNLHQYLNFNSNMGLIHTPCSEKYLPSEKRKKRSPCLKKCLEKGQMYRTFQQDSVFSTLSKWNLFQTYIPWFLTSTGYKYLNFIFLDTFSDLLPILSSSQKFVSIFHDIMHGSDILWRIRQIPLCLPQWNLISEIWNLISEIPGNCLHNLLLSEEIIHRNNELLLISTHLRSLNVQEFFYSILFLLLVAGYLVRTHLLFVSRVYSELQTEFEKVKSLMIPSYMIELRKLLDRYPTSELNSFWLKNLFLVALEQLGDSLEEIRSFAFGGNMLWGGGPTYGVKSIRSKKKYLNLIDLISIIPNPINRIAFSRNTRHLSHPSKTIYSLIRKIKNVNGDWIDDKIESWVLNSNSIDDKERDSLVQFST

SEQ ID NO: 154616 - protein, 47 aa, Glycine max
  unsure (1)..(47): unsure at all Xaa locations
  Clone ID: PAT_MRT3847_11063C.1.pep
ELHGTLPXALREATPXESSXYXELSSPFWHXTSLTXXXXYFQPSXLA

SEQ ID NO: 154617 - protein, 25 aa, Glycine max
  Clone ID: PAT_MRT3847_110640C.1.pep
SVVNSATPCSYTEARDLMLLLDERP

SEQ ID NO: 154618 - protein, 53 aa, Glycine max
  Clone ID: PAT_MRT3847_110641C.1.pep
LSCRGLLATRAATLLQGHVKLLVALETLHAHTSLINLMTCHTHDRNLAHSYCQ

SEQ ID NO: 154619 - protein, 56 aa, Glycine max
  Clone ID: PAT_MRT3847_110642C.1.pep
KPSYLTALLSYSSISPRLLPKLTKLPYKLFANTLENTSTFYTNIYLLHYLLHDHLF

SEQ ID NO: 154620 - protein, 92 aa, Glycine max
  Clone ID: PAT_MRT3847_110643C.1.pep
QHVPHALVHKLPLECALRLVLHNPPQSISCISLVFASLAISGSSSAGCSSYSASSICFCISGSDEALPRHNISNIPNSRSPRNDQSPVPQNL

SEQ ID NO: 154621 - protein, 132 aa, Glycine max
  Clone ID: PAT_MRT3847_110644C.1.pep
NPPSRPPFKKKKEAHIDLTIQHPSGLTITGAVIGLIIATPIHVLLSTIHVQDAYDLYPNRPNKCSSAFVVCSTEPICLVQKNMSVITTLPVKAPFSMKKKTLTKRQGMLRKGQTTKAMKPKIRLLEATQESH

SEQ ID NO: 154622 - protein, 75 aa, Glycine max
  unsure (1)..(75): unsure at all Xaa locations
  Clone ID: PAT_MRT3847_110645C.1.pep
PTRSTTLTATRLXNLSIQLXLVLLLWLRGLALRLASIGPGVGQSTACLKHWLMVHPPHQAPRKIRQATLRKWLLT

SEQ ID NO: 154623 - protein, 149 aa, Glycine max
  Clone ID: PAT_MRT3847_110646C.1.pep
MANQLTDEQISEFKEAFSLFDKDGDGCITTKELGTVMRSLGQNPTEAELQDMINEVDADGNGTIDFPEFLNLMARKMKDTDSEEELKEAFRVFDKDQNGFISAAELRHVMTNLGEKHTDEEVDEMIREADVDGDGQINYEEFVKVMMAK

SEQ ID NO: 154624 - protein, 156 aa, Glycine max
  Clone ID: PAT_MRT3847_110647C.1.pep
SLFMGSKRINLNYYPVCPNHDLTVAIGRHSDVSTLTVLLQDETGGLYVRAPNHHGWIHVPPVSGAIVINIGDALQVMSNGRYKSIEHRVSANGSKSRVSMPIFVNPRPSDVIGPLPQVLASGEKAMYKNVLYSDYVKHFFRKAHDGKLTIDYAKIC

SEQ ID NO: 154625 - protein, 149 aa, Glycine max
  Clone ID: PAT_MRT3847_110648C.1.pep
MADQLTDEQISEFKEAFSLFDKDGDGCITTKELGTVMRSLGQNPTEAELQDMINEVDADGNGTIDFPEFLNLMARKMKDTDSEEELKEAFRVFDKDQNGFISAAELRHVMTNLGEKLTDEEVDEMIREADVDGDGQINYEEFVKVMMAK

SEQ ID NO: 154626 - protein, 186 aa, Glycine max
  Clone ID: PAT_MRT3847_110649C.1.pep
MKAMTATTTFDVSAACFRAPPPSCSMNPCHTSFSVINSLNPHKGRRISVAVPPKFPNFRREASLQGNLEAIRVPTSVPVRVAYELLLAGHRYLDVRTPEEFDAGHAPGAINIPYMFRVGSGMTKNSNFIREVSSQFRKDDEIIVGCELGKRSMMAASDLLAAGFTGLTDMAGGYAAWTQNGLPTEL

SEQ ID NO: 154627 - protein, 279 aa, Glycine max
  unsure (1)..(279): unsure at all Xaa locations
  Clone ID: PAT_MRT3847_11064C.1.pep
MAWVFELRSRSLCTSSSSKWRVKQVTTSNFQESLQEIKTHISNSDFVAISMGKTGSPSAPSWLRPLPFDTAQTAYSKARRAAQRFQLLHFAVCPFSVSRSDKLLAHPYNFMLFPRDEMKMGMPTYSFSCQTSLLASMARQGFDFNACVYNGISYLSRAQESAARIRLGTALPSLRVMKSSSPSTVADTVFVERIRSKVKYWRESCKSSDTNKSRDEELVNSLRNIVLGNEQFRSRPCXLTVDVCSERQVQLILEMVLDYSDDLLPLPIPTKSGTIHAVR

SEQ ID NO: 154628 - protein, 93 aa, Glycine max
  Clone ID: PAT_MRT3847_110650C.1.pep
SFIGPSFTVYADTEATKFFLFGPRTGVTCTGSAVFSPRETDGGSIMFYLFCLWTTSYEMKTYGPARGTIDVRACCDGTRNVSQWVMPRMHAVE

SEQ ID NO: 154629 - protein, 393 aa, Glycine max
  unsure (1)..(393): unsure at all Xaa locations
  Clone ID: PAT_MRT3847_110651C.1.pep
MPESDAASASDSDENACNGAAEEVAIRIIGVGEQESGSSPSSSRGRGGELGGEEAVVGRSGMLSSRRRMAEERVPLVSLDDGIVGARDSSSSSSSSTYQRYDIQQVAKWIEQILPFSLLLLIVFIRQHLQGFFVTICISAVMFKSNEIVKKQTALKGDRKVSVLLGISFAFMLHVISIYWWYRNDDLLYPLAMLPPKTPPPFWHTIFIIXVNDTLXVRQASMAFKXWLLIYYKNGRGHNFRRQGQMLTLVEYTLLLYRALLPTPVWYRFFLNKDYGSLFSSLTTGLYLTFKLTSVVEKVQCFVSALKALSKKEVHYGVHATTEQVNAAGDMCAICQEKMQAPILLSCKHMFCEECVSEWFERERTCPLCRALVKPADLRTFGDGSTSLFFQLF

SEQ ID NO: 154630 - protein, 681 aa, Glycine max
  Clone ID: PAT_MRT3847_110652C.1.pep
MLAAAGINGGSGTTQQQQQQLFGQLLGSNPFSQGTTPSLMFNNSSAFGGINPTEFDGAAMLAKLSAEFAAVAQAQHGQSGAISATTVQSTGGPSTQQNGAMGRGHTPAPSNKPPPQKRQYSSTSKNFCDLCNKEVCNKYFLRTHMLKMHNIIIDENKQLIANIDTVDKERKGEVKFRCDICHTSMNTREELKLHKRESHGMHAGGGGSQSAPLGGARGVPKATSSSASQPTAVSMDTAETNQQQQQKRVALPSFAPAASNFNAIEHQTQQQQQQSTQRRTTSEGTEANDENNQPLGVHSPQQQQTREAAGAQQPSLAGANPMKQLLSIIGGDEALPPSLVGGARLLRTTGERNDFKKDTEEEHLGHRIADANNNATNCRFCGLCLEEEGQLQLHQLMEHPNEYMAELQPTMDLPHSASTEDKLINQVALQMAEANSHNHHHHHHQHTSAPTAISATTEDFGRVLRRFVLFGRLFRRSRHGPSASATENEERHSVARRKCRRRRRKRRRRGKAPMPTVQKNLQKCAKIGGAPAHGAPQFCRQNVTGEAIDHFAEKDCQTDEFVFMSQMQATVRKSRRMRRTRPFAHPLGEIEARGSGRRTTAGRGGGRRGESTASEEAEDGGGGRRGRSGGTTPSGRRSQRSGGKDEHRRRSGGRSKTAACTETNKGRHGGRRKAQPYERFD

SEQ ID NO: 154631 - protein, 41 aa, Glycine max
  Clone ID: PAT_MRT3847_110653C.1.pep
QKKMGVGSSKLNRRIRTSFRMPDDLRSPNWLYQQQALFLRE

SEQ ID NO: 154632 - protein, 78 aa, Glycine max
  Clone ID: PAT_MRT3847_110654C.1.pep
FASPSNLLAMEIALPFLTESVSFIIWQFLLETIMVSVVHINATLIIILEDFRNLTCNYLFQYYDLRFFFIYKIFGFCL

SEQ ID NO: 154633 - protein, 59 aa, Glycine max
  Clone ID: PAT_MRT3847_110655C.1.pep
SHERRTNSFARTCVHDYPLELEGRIPLLFPVFFSHHHTQHLTLPLPPKLNPPDAWANAW

SEQ ID NO: 154634 - protein, 51 aa, Glycine max
  Clone ID: PAT_MRT3847_110656C.1.pep
HIELAIAHVCFLLRRMNGSHRKKKEHPKSPLDPTRMCQRGLILLYPTCGQS

SEQ ID NO: 154635 - protein, 45 aa, Glycine max
  Clone ID: PAT_MRT3847_110657C.1.pep
ICQPPNRTLMIPTQLKQCILLPLCLMWRINDSEALFDTSGLRSLV

SEQ ID NO: 154636 - protein, 120 aa, Glycine max
  unsure (1)..(120): unsure at all Xaa locations
  Clone ID: PAT_MRT3847_110658C.1.pep
PLVPPVGPAERPAEYLPENSGDPRAAMSGTLDGDGRWLGRICDKDTFEETLEAWATTVGYQEGANALEEIPGWNXAAETQTVPHIIPADAGQVESDERAVPEAVHVWVPDTATKTAHAIL

SEQ ID NO: 154637 - protein, 142 aa, Glycine max
  Clone ID: PAT_MRT3847_110659C.1.pep
VPPHVVAVIWFSFLWTNRSLMFDGARREVRMPDSSNCEVGLFDIGITWCSGDEAGSQLAICAVKRREGAFVCRLVDMTLALSKVLYARRGGRAFPSLVITNIHSVFRAFTCLPSLDLDASKFLRDKKLRSHVCNENFNGLLQ

SEQ ID NO: 154638 - protein, 114 aa, Glycine max
  Clone ID: PAT_MRT3847_11065C.1.pep
RICVLLFRVAPFPCPFELLLHFPGVFLHIIVRRLLWWHAFAEFDLLHIRSLCHSCLWLLSHSCYRWCLGWLVESYGSCQSSMSLCSGPVTCEAGCGVSFSFSGAWAVFLCCIVA

SEQ ID NO: 154639 - protein, 185 aa, Glycine max
  unsure (1)..(185): unsure at all Xaa locations
  Clone ID: PAT_MRT3847_110660C.1.pep
ARAATGCLKQQKDTKNMYATGMVKMICCETEISSGKNVKCLGTRSSENGCFVLWQMQPGMWSLELVVGDHKVVAGSNGKTVWRHTPWLGTHAAKGPQRPLRRLIQGLDPKTTASLFTNAQCLGENRIGTVDXFDLKVSIDRATEVVGLVCLSAMIEHILYGYFCXNCAQFIYLEDSHLTWVPTDN

SEQ ID NO: 154640 - protein, 108 aa, Glycine max
  unsure (1)..(108): unsure at all Xaa locations
  Clone ID: PAT_MRT3847_110661C.1.pep
QGSFKKRLKEVKASGYLXWLDCEKLGIVMYECVGRIWNLRDXELIEVGLVLEEXRKSVNLCYREGGYXEELEKWIKEYGFEERXNARRVLIRGWADKLLILAYCDIGG

SEQ ID NO: 154641 - protein, 96 aa, Glycine max
  unsure (1)..(96): unsure at all Xaa locations
  Clone ID: PAT_MRT3847_110662C.1.pep
KKIRTDDIYMYNTNHMTMRDGSSSLGNFNESGKANMGTERIHVFSGTRKHYSTKELSLFELRNMLIYKAQTEIFKKLQEWRSMAEAKITQXKKKIK

SEQ ID NO: 154642 - protein, 179 aa, Glycine max
  Clone ID: PAT_MRT3847_110663C.1.pep
MILRNLEAFVPIIKAGWRFSKIYCFIHVTQTYLIAPAVTYGPSMLPTIDLKTGVFLMEKISPRFGKVTCGDIVVLRNPQHPRHFMTKRVVGLEGDSVTYISNPETNEYEGDSFTHISSPDNGDKSKTIVVPKGAVWVEGDNKYNSNDSRKFGPVPYDLIDGKMFWRITPLKKFGPFWNK

SEQ ID NO: 154643 - protein, 277 aa, Glycine max
  Clone ID: PAT_MRT3847_110664C.1.pep
MTAFHVIFFGFIIIAGYCNGSAKNLVSPKGLAPFGARGVLDGAAIVYFSYIGYDSASTMAEEVKDPFKSLPIGIVGSVLITTLLYCLMALSLCMMVPYNKISEKASFSIAFLKIGWNWASNLVGAGASLGIVASLLVAMLGQARYLCVIGRARLVPSWLAKVHPSTGTPLNATVFLGLCTATITLFTELDIIIELISIGTLLVFYMVANALIYRRYVITSHAPPTHTLVFLFLLSLSALCFSLAWKFKQQWWVLLLFGGFMIAITAFFQHVVLTTTT

SEQ ID NO: 154644 - protein, 117 aa, Glycine max
  Clone ID: PAT_MRT3847_110665C.1.pep
RFGKVTCGDIVVLRNPQHPRHFMTKRVVGLEGDSVTYISNPETYEYEGDSFTHISSPDNGDKFKTIVVPKGAVWVEGDNKYNSNDSRKFGPVPYDLIDGKMFWRITPLKKFGPFWNK

SEQ ID NO: 154645 - protein, 67 aa, Glycine max
  Clone ID: PAT_MRT3847_110666C.1.pep
KIYISKHNAAGKFLIHSFLRRPPIWVIGRRNCGRTTVSFGLPLRRIISRMTLNIIVIGTNSNKSRRK

SEQ ID NO: 154646 - protein, 206 aa, Glycine max
  Clone ID: PAT_MRT3847_110667C.1.pep
MLKLLLPSSSSKLISRHIFSQLSRPTTTMSINLRTHAFAGNPLRSPNRVDPFSPASALETLTTRILDAAHVSSPSVDFKVLPFRNGRVLASSESGDTWRLGWIALEEVKGLLGADLSADSFVYLGSDSDSDSVVYWAIDVSRESGLVTEFSGVRLCFVELRTLMVATDWVDLKTMGNLAIAGHAILLFYLLGLARPGHFLNGIKYH

SEQ ID NO: 154647 - protein, 96 aa, Glycine max
  Clone ID: PAT_MRT3847_110668C.1.pep
FWQTIHTPSSSSMSYMPNVHQQSHNNAQSVDRSSHHSSTTVASVANSLLPTKRRLRLDPSNKLYYPYEPAKHVMSAISIKNTCNSHVGVKFQTSAP

SEQ ID NO: 154648 - protein, 362 aa, Glycine max
  Clone ID: PAT_MRT3847_110669C.1.pep
MAENKAIEEAQSKFRSEFLQVLRSRRPAQVPLTVEFAKPVVNPLHQNSPPSIEEIKIMESCPRTDIENLEDLLEEENLYLNIEEGEQGRLPLLILKLKESDKQRKRPAVVFLHSTNKYKEVLRPLLKAYASRGYIAISVDSRYHGERATSATTYRDALISAWKTGETMPFIFDTVWDLIRLADYLTHREDIDPSRIGITGESLGGMHAWFAAVADTRYAVVAPLIGVQGFRWAIDNDKWQARVNSIKPLFEAARDDLGKGAIDKEVVEKVWDRIAPGLASQFDSPYSVPTIAPRPLLIVNGAEDPRCPVAGLEIPRAQASQAYGQFDCLDNFKIITEPGVGHQLTRLQVKESSYWFDRFLNP

SEQ ID NO: 154649 - protein, 54 aa, Glycine max
  Clone ID: PAT_MRT3847_11066C.1.pep
PSHPTDPHQMNLSSTSYKRDFRVKNTERVLAANIQESTITDTSRQIQPYPRKLH

SEQ ID NO: 154650 - protein, 114 aa, Glycine max
  Clone ID: PAT_MRT3847_110670C.1.pep
RVQAARDDLGKGAIDKEVVEKVWDRIAPGLASQFDSPYSVPTIAPRPLLIVNGAEDPRCPVAGLEIPRAQASQAYGQFDCLDNFKIITEPGVGHQLTRLQVKESSYWFDRFLNP

SEQ ID NO: 154651 - protein, 50 aa, Glycine max
  Clone ID: PAT_MRT3847_110671C.1.pep
LLHLYLVTANESTRITIDESYSLQPNLIKFQTLVLKNRTGNDMLCRGALC

SEQ ID NO: 154652 - protein, 51 aa, Glycine max
  Clone ID: PAT_MRT3847_110672C.1.pep
STVVLFSSSRAGEWSFRSKTTSIALWQRYPSVVVSQPNPSVVILHQYLDVV

SEQ ID NO: 154653 - protein, 53 aa, Glycine max
  Clone ID: PAT_MRT3847_110673C.1.pep
KKPKLEGGRGRKKKKIDPRSGIGLKKKKKNWVIYVIRQGPREGCSRKLKVENF

SEQ ID NO: 154654 - protein, 55 aa, Glycine max
  unsure (1)..(55): unsure at all Xaa locations
  Clone ID: PAT_MRT3847_110674C.1.pep
NIKQWAYHPLRIRGLREVKHETXXRLSCRFPKATEPPAVEAEGIMTTHVFDHIHT

SEQ ID NO: 154655 - protein, 215 aa, Glycine max
  unsure (1)..(215): unsure at all Xaa locations
  Clone ID: PAT_MRT3847_110675C.1.pep
AFGLAXXXXPGRGAPLAKVVFRDPYRFKKRAELFIAAXGIHTGQFVYCGXKAXLNIGNVLPVGTMPEGTIVCCLEEKPGDRGELARASGNYATVISHNPETKKTRVKLPSGSKKVISSANRAVVGVVAGGGRIDKPILKAGRAYHKYKAKRNCWPRVRGVAMNPVEHPFGGGNHQHIGKPSTIRRDAPAGRKVGLIAARRTGRLRGTKTVQEKEN

SEQ ID NO: 154656 - protein, 66 aa, Glycine max
  Clone ID: PAT_MRT3847_110676C.1.pep
PQPLPSPFLVHTDYQNHNQCNLVSALNYSSPVLSNDSHGGKMWRFFEKMPTNNCGVVGCEWWRHGG

SEQ ID NO: 154657 - protein, 82 aa, Glycine max
  Clone ID: PAT_MRT3847_110677C.1.pep
VTTGAGIASYPLDTIRRRMMMTSGEAVKYKSSIDAGRQIIAKEGVRSLFKGAGANILRGVAGAGVLSIYDQAQLLMFGKAFK

SEQ ID NO: 154658 - protein, 146 aa, Glycine max
  unsure (1)..(146): unsure at all Xaa locations
  Clone ID: PAT_MRT3847_110678C.1.pep
MEVCEPVKSENRLKHRPLTPFRLLRGLICLVVFLSTALMCLVYSVPVADXGLRLFSVRWNTKTVSFIFGLWLSLWPSLFEKDNITQVVLSGDSVPMXKRVLLIANHRTXVDWMYLWDLALRKGXXGCIXYILKSSLMKLPIFGWGI

SEQ ID NO: 154659 - protein, 480 aa, Glycine max
  Clone ID: PAT_MRT3847_110679C.1.pep
AGIRNCGQDGINEIKFLIKEAHKRGIEVIMDVVFNHTAEGNENGPIISFRGVDNSMYYMLAPKGEFYNYSGCGNTFNCNHPVVRQFIVDCLRYWVTEMHVDGFRFDLASIMTRSSSLWDGANVFGAPIEGDLLTTGTPLSSPPLIDLISNDPILCGVKLIAEAWDAGGLYQVGTFPHWGIWSEWNGKYRDTVRLFIKGTDGFAGAFAECLCGSPNLYQGGGRKPWHSINFVCAHDGFTLADLVTYNNKNNLSNGEDNNDGENHNNSWNCGQEGEFVSTSVKKLRKRQMRNFFLSLMVSQGVPMIYMGDEYGHTKGGNNNTYCHDNYHNYFQWDKKEESSSDFFRFCRLMTKFRQECESLGLADFPTSERLQWHGHFPGKPDWSETSRFVACTMVDSVKGEIYIAFNMSHLPFTVTLPERPGYKWEPLVDTSKPTPYDFLTPDLPGRDIAIQQYAQFLDANMYPMLSYSSIILLRIPDENL

SEQ ID NO: 154660 - protein, 63 aa, Glycine max
  Clone ID: PAT_MRT3847_11067C.1.pep
ADFVCVKGYGSPFSCDDGENGRVVVTGSWENRFCACGFDAFSCNFLTLFYLCPVIACRVGFWE

SEQ ID NO: 154661 - protein, 640 aa, Glycine max
  unsure (1)..(640): unsure at all Xaa locations
  Clone ID: PAT_MRT3847_110680C.1.pep
MTDGHLFNNITLGGRGGTNPGQIKIYPGGIVWKRQGGGKLIEVDKSDIMGVTWMKVPRSNQLGVQIKDGLYYKFTGFRDQDVVTLTNFFQNTCGISVEEKQLSVSGRNWGEVDLNGNMLAFTVGSKQAFEVSLADVSQTQLQGKNDVILEFHVDDTTGANEKDSLMEISFHIPNSNTQFVGDENRPPAQVFRDKIMSMADVGAGGEDAIVTFEGIAILTPRGRYSVELHMSFLRLQGQANDFKIQYSSVVRLFLLPKSNQPHTFVIISLDPPIRKGQTLYPHIVMQFETDYVVESELAINEDLYNTKYKDKLDLSYKGLIHEVFTTILRGLSGAKVTKPGKFRSCQDGYAVKSSLKAEDGILYPLEKSFFFLPKPPTLILHEEIDYVEFERHAAGGSNMHYFDLLIRLKSEQEHLFRNIQRNEYHNLYEFISSKGLKILNLGDAQPTVGIKKVLENDDDDAVDPHLERIXNEAGEDESDEEDSDFVADKDDEGSPTDDSGADDSDATDSGDEKEKPAKKESKKDLPSKASTSKKKSKDDEDGKKKKQKKKKDPNAPKRAMSGFMFFSKLERENLKKTNPGISFTDVGRVLGEKWKKLSAEEKEPYEAKAREDKKRYMDEISGYKNPQPMNIDSGNESDSA

SEQ ID NO: 154662 - protein, 94 aa, Glycine max
  Clone ID: PAT_MRT3847_110681C.1.pep
MASFSHCTRRFISLSSMKSAVRTISHSPLLNATVPHRPFSPLIRTCVYRLGSVQSLLPLHSTVATARMVSSLSIDSRNCEALSHATLCCNHPGP

SEQ ID NO: 154663 - protein, 79 aa, Glycine max
  Clone ID: PAT_MRT3847_110682C.1.pep
MSGKYIISAILGSFGVAWVCDYYVSDKKLFGGSTPGTITNNEWAEETDKKLQAWPRTAGPPVVMNPISRQNFIVKSRAE

SEQ ID NO: 154664 - protein, 79 aa, Glycine max
  Clone ID: PAT_MRT3847_110683C.1.pep
MSGKYIVSAILGSFGVAWVCDYYVSEKKLFGGTTPGTITNNEWAEETDKKLQAWPRTAGPPVVMNPISRQNFIVKSRPE

SEQ ID NO: 154665 - protein, 37 aa, Glycine max
  Clone ID: PAT_MRT3847_110684C.1.pep
GVFFFFFFLAEVLGLPLKGYKYLIKHNIKAKIIQDLL

SEQ ID NO: 154666 - protein, 57 aa, Glycine max
  Clone ID: PAT_MRT3847_110685C.1.pep
FWSFKANKVSLVVPWPRKFQRQAQLPRSGGLLTWHLLARNPTPPPTLLFPLRKTPNM

SEQ ID NO: 154667 - protein, 164 aa, Glycine max
  Clone ID: PAT_MRT3847_110686C.1.pep
TSPYSPLKHNLIALRSPHSAIAPPSTAPQAHSFSVPIALSAFLFSLPCFCFLFLFILLCDSLSFFFFPFLLGIKSENHSHCPSVIMSGKYIISAILGSFGVAWVCDYYVSEKKLFGGSTPGTITNNEWAEETDKKLQAWPRTAGPPVVMNPISRRNFIVKSRPE

SEQ ID NO: 154668 - protein, 79 aa, Glycine max
  Clone ID: PAT_MRT3847_110687C.1.pep
MSSKYIISAILGSFGVAWVCDYYVSEKKLFGGSTPGTITNNEWAEETDKKLQAWPRTAGPPVVMNPISRQNFIVKSRPE

SEQ ID NO: 154669 - protein, 70 aa, Glycine max
  unsure (1)..(70): unsure at all Xaa locations
  Clone ID: PAT_MRT3847_110688C.1.pep
SIIPNLFSDRQSNVFNPFSLNVXDPFEGLPFSTNHIPSSYKKISTIANTRVNCKETPATHIFNIRSSRIK

SEQ ID NO: 154670 - protein, 58 aa, Glycine max
  Clone ID: PAT_MRT3847_110689C.1.pep
VGPLLLLVGAGLAPKPKGGGSCIGLISCLESRYQTMKKGGSLSLSLSLQFNMKNPPNQ

SEQ ID NO: 154671 - protein, 37 aa, Glycine max
  Clone ID: PAT_MRT3847_11068C.1.pep
VLDDAELLDTEVVLEQQIPGFVADVRVESRTLSHGLS

SEQ ID NO: 154672 - protein, 97 aa, Glycine max
  Clone ID: PAT_MRT3847_110690C.1.pep
RTRGFGAAIKLQPGYTAGVITSLYLSNNQDYPGHHDEIDIEFLGTTPDKPYVLQTNVYIRGSGDGNIIGREMRFHLWFDPTQDFHNYAILWEPSEIM

SEQ ID NO: 154673 - protein, 50 aa, Glycine max
  Clone ID: PAT_MRT3847_110691C.1.pep
PRERVPPLNSTLYRKNNKFFPHPKLSYPSRGVSSTPSFTWDQEKYLSFFY

SEQ ID NO: 154674 - protein, 61 aa, Glycine max
  Clone ID: PAT_MRT3847_110692C.1.pep
PTTPGFYWGVQGGFPFPFRVGNFWERHLGGAFLIINQLGKRGFVSRGFILGTPRFFRFRGF

SEQ ID NO: 154675 - protein, 92 aa, Glycine max
  unsure (1)..(92): unsure at all Xaa locations
  Clone ID: PAT_MRT3847_110693C.1.pep
KILKDWDVKWFFLKSTQKWVVVMKDLDGFLGEKRGRIRGWGILNLMEGFXTWCWAEKRVMVFPPTRKEXPHPNXXRPGRXVDVHIHFPLCDF

SEQ ID NO: 154676 - protein, 33 aa, Glycine max
  Clone ID: PAT_MRT3847_110694C.1.pep
GFMESEYIGRTMDRTLLGSYDELYIELSGMIGI

SEQ ID NO: 154677 - protein, 147 aa, Glycine max
  unsure (1)..(147): unsure at all Xaa locations
  Clone ID: PAT_MRT3847_110695C.1.pep
PPPPNTPPHHPHTPPPHPPPPPPRHATPPRPPHPPPTPPPPPTPPPPPPPPRPPAHPPPTTPPPPPPPTPPPPPPHTPPPPGXPQPXPPPTPPQPQGPPTRAPTHTPGAPTLRPPTPRPNXHARRQPQPADQRGRKPPRYSTRQRQQ

SEQ ID NO: 154678 - protein, 61 aa, Glycine max
  Clone ID: PAT_MRT3847_110696C.1.pep
QMGVEKRFVVILSFGRHVLLTLYQAVPGDVWWPMEIGGICVALIKTEGSVGLDVLSNSWKA

SEQ ID NO: 154679 - protein, 131 aa, Glycine max
  Clone ID: PAT_MRT3847_110697C.1.pep
MALNTSCSKAIVDMLGTHVPKCAIDVSNTPRFSLSQNDKKGCNLGFPKLVQNKGLFPLHAVPSKTMVDLDNLVLQSQEKPKESKTINVKFQLQCNCNYGEQFLVVGNDPMFGSWNPEKAIPMTWSEGHVWT

SEQ ID NO: 154680 - protein, 53 aa, Glycine max
  Clone ID: PAT_MRT3847_110698C.1.pep
PLQHFLQKSERTTSHAHPQLYIKNMKPTNEKPKSKNLSQQAVTHSFFLQKIRV

SEQ ID NO: 154681 - protein, 69 aa, Glycine max
  Clone ID: PAT_MRT3847_110699C.1.pep
LMTDLPRASTGLAASCQPHLSNLAPESDTPRVTSFGFLNECNLDCTDKCPASDYGQKVIIVIGVCCFKL

SEQ ID NO: 154682 - protein, 172 aa, Glycine max
  unsure (1)..(172): unsure at all Xaa locations
  Clone ID: PAT_MRT3847_11069C.1.pep
MEALRLAYLLLPWWLVFSTAESACKEGCGVALGSYYLWRGSNLTYISSIMASSLLTTPDDIVNYNKDTVPSKDIIIADQRVNVPFPCDCIDGQFLGHTFRYDVQSQDTYETVARSWFANLTDVAWLRRFNTYPPDNIPDTGTLNVTVNCSCGNTDVANYGLFVTYPLXDWDT

SEQ ID NO: 154683 - protein, 55 aa, Glycine max
  unsure (1)..(55): unsure at all Xaa locations
  Clone ID: PAT_MRT3847_1106C.1.pep
HYLCNKLYIYLVNSKESLLIFNMLTNNKYVYIYIYISKXINILNNRVITRYSAQR

SEQ ID NO: 154684 - protein, 65 aa, Glycine max
  Clone ID: PAT_MRT3847_110700C.1.pep
SQSSPKETVFLKRVERAGSQPYCLSFFNTRNWHLKTLIEKSFFFGTRGGTPNGRPTPFNPEMGPV

SEQ ID NO: 154685 - protein, 53 aa, Glycine max
  Clone ID: PAT_MRT3847_110701C.1.pep
HDHSNCIHRSKVISPNPKEFFLFAFFVLPTIISFGYEMLPFCYKQRTRAEIKE

SEQ ID NO: 154686 - protein, 165 aa, Glycine max
  Clone ID: PAT_MRT3847_110702C.1.pep
SQITSQVTGQIGWRREGIKYRRNELFLDVLESVNLLMSPQGQVLSAHVSGRVVMKSYLSGMPECKFGMNDKIVIEKQGKGTADETSKSGKQSIAIDDCTFHQCVRLSKFDSERSISFIPPDGEFELMRYRTTKDIILPFRVIPLVREVGRTKLEVKVVIKSNFKP

SEQ ID NO: 154687 - protein, 47 aa, Glycine max
  Clone ID: PAT_MRT3847_110703C.1.pep
KIADAEDIQPPGVDKGTGMVNAGFARDDAPKAVFPSINGKPRHTGVM

SEQ ID NO: 154688 - protein, 57 aa, Glycine max
  Clone ID: PAT_MRT3847_110704C.1.pep
VLRRCDAYCDGKICGTALDHEVRFLGSRVPPEDIQRAMDDLNTDHDGLMKLSKFVVL

SEQ ID NO: 154689 - protein, 118 aa, Glycine max
  unsure (1)..(118): unsure at all Xaa locations
  Clone ID: PAT_MRT3847_110705C.1.pep
FPGGPPGAKGCLSTGGHFNSYNNEXGAPEARNXQAGGLGKVKVGDDGTVKFSITARQIPLPGPNSLIRRGGVGPAEFYDPGKGGXRLTKTPXKTGGKKTCGIIGLPGLTYPLRVGPGF

SEQ ID NO: 154690 - protein, 38 aa, Glycine max
  Clone ID: PAT_MRT3847_110706C.1.pep
LKTLSPHSLQIIHNYKSPINSVPYPLVIKTQLIIPIHL

SEQ ID NO: 154691 - protein, 58 aa, Glycine max
  Clone ID: PAT_MRT3847_110707C.1.pep
ALCFVKPLVLQSQCFISELYDQTATAFYPFADANAYILLAWSKEYVHILIQKPNVLKS

SEQ ID NO: 154692 - protein, 107 aa, Glycine max
  Clone ID: PAT_MRT3847_110708C.1.pep
SLSARLQSTSSRNQRESVGHGNSHLAGPNVMVGQSFTLRIKFVFGSSPASIQTLWCIHVPGFPSTLLFFVQGLSHQIRNSSIFFQYSESRGKRLRLDHLGSGSLRSE

SEQ ID NO: 154693 - protein, 66 aa, Glycine max
  Clone ID: PAT_MRT3847_110709C.1.pep
SYMQVVHKFVSNFCSYLNYFLYLIFMFDLKCIAFHPILPFLFHFCLVSPQILASFNDIGDDLLSSV

SEQ ID NO: 154694 - protein, 44 aa, Glycine max
  unsure (1)..(44): unsure at all Xaa locations
  Clone ID: PAT_MRT3847_11070C.1.pep
IRLMTXRSSSGFVLSTKSRFKPSXAWLNLFPSLGAMSTSSLIYK

SEQ ID NO: 154695 - protein, 168 aa, Glycine max
  Clone ID: PAT_MRT3847_110710C.1.pep
MGKKNKVKENGGKEHCSSTLFVSNLPYSFSNSQLEETFSEVGPVRRCFIVTQKGSAQHRGFGYVQFAVEEDANRAIELKNGTSVEGRKIVVKHAMPRPPCEERQSKPNKEGKTDDLTKPKDDDEDSTLSGAEKNVSVLKEEEVQVSKQKNMRKPTETKKSALCDDVPD

SEQ ID NO: 154696 - protein, 114 aa, Glycine max
  Clone ID: PAT_MRT3847_110711C.1.pep
WNSVKKSVPAGVPKVGWPIMGEQFLNARMVEEKVKVGLRVETCDGSVKGFVKREGFKKPVKEVMEGVKGKKLKKKVRELAKMAKLATQKGGSSCSPLNSLLPQTCVAFPKNQIF

SEQ ID NO: 154697 - protein, 186 aa, Glycine max
  Clone ID: PAT_MRT3847_110712C.1.pep
MGKKNKVKENGGKEHCPSTLFVSNLPYSFSNSQLEETFSQVGPVRRCFMVTQKGSAQHRGFGYVQFAVEEDANRAIELKNGTSVEGRKIVVKHAMPRPPREERQSKPNQAGKTDDLTKPKDDDEDGRSSGSEKNVSVSKEEELQVSKQKSTRKPMEIKKSALCDDVTDEGGCSKKQRVARTCIFGG

SEQ ID NO: 154698 - protein, 559 aa, Glycine max
  unsure (1)..(559): unsure at all Xaa locations
  Clone ID: PAT_MRT3847_110713C.1.pep
MGSIAVPSSERARTDWTASMEQFFIELLLDQLGRGNQVDNGFNKNAWTDMLAIFNAKFGCQHGRRVLKNRFKKRLKHYCDITNLIKQGFLWDEQQLMLLADDDVWNAYVKAHLHAGTYRSKTLPNYRDLELIFRNMAENEISNLQQEKNHEDVISETKAGEAKGSRNPSGTDRTRTYWTPPMDRCLIDLLLEQVKHGNRLGQTFISQAWNDMITTFNEXFKSQYDKDVLKNRYKHFRKQFNDVDHLLQQGGFSWDDTIEMIDAEDHVWDAYTKAHPEAPPLRVKTLPDYWKWSVIFAAESSDTRYVHLAHNEDHSSELPMYITGEQKNGICSNVYDAGSTIEWTESMECYFVDIMIEQVNRGNRIENLYNEEAWMHMVQAFNARWGLQSDKQVLMDQYFCLMKKHDDISNILSHSEFAWNETLQTINAEDDVWDAYIKDHPDAISYKNNCLYRFCDLCKIFGNKLMEVPDVRVSDLEQLHLMEANDFTIEMDMDEANENLLNISSVDISDQNPGRTREMDTDGSFANLGVTSSSATSGNLDVTSSNATSNQNTERPREN

SEQ ID NO: 154699 - protein, 350 aa, Glycine max
  unsure (1)..(350): unsure at all Xaa locations
  Clone ID: PAT_MRT3847_110714C.1.pep
VRNSRVDPRVRIAQDWNDMITTFNERFKSQYDKDVLKNRYKHFRKQFNDVDHLLXQGGFSWDDTREMIDAEDHVWDAYTKAHPEARSLRVKTLPDYWKLCVIFGAESSDARYVHLAHNADLSSELPMYITGEQKNGFFPNVYDAGSTIEWTESMEHYIVDLMIEQVNRGNRIGHLFNEQAWMHMVQAFNARSARESDKQVLMDQYFCLMKKHDDISNILSHSEFTWNETLQTLNAEDDVWDAYIKDHPDAISYKNKCLYLFHDLCKIFGNKLMEVSDVRVSDLEQLQLMEANDFTIEMDMDETNESLLNVSSVGISDQDPGRAKEIDADGSFGNLVVSSSNEIEIVAVGT

SEQ ID NO: 154700 - protein, 52 aa, Glycine max
  Clone ID: PAT_MRT3847_110715C.1.pep
TSTHINYLLEPIPHFSAVRENEKPSPSLLRGGGNQTREVNQTNRGRHPPEKN

SEQ ID NO: 154701 - protein, 58 aa, Glycine max
  Clone ID: PAT_MRT3847_110716C.1.pep
FCFLNCTILYFIILYTLVQNIVYRIMKYNNPSHLTLEYGKIVPKPFSFFHTQSYSWRG

SEQ ID NO: 154702 - protein, 157 aa, Glycine max
  Clone ID: PAT_MRT3847_110717C.1.pep
MAGIATETIDSFITAASPKSYDGSDLTPSQYSDAFANQPTDLTEDAFTPFESVDDLQDDRSIIKDIDLASLGHATHDVNESANSLSKKLFACEICGRSFQRIDHLARHKVNHDSVKPFNCIVCHRAFARKDVYRKHLQRHEADRRTRKPHTAPLHAH

SEQ ID NO: 154703 - protein, 63 aa, Glycine max
  Clone ID: PAT_MRT3847_110718C.1.pep
PTPSDCTFESFHNHLSLSQHGLLLQNLQSHDRAALAPSARLLLPLRHLLLTLDVHLTLTPYNH

SEQ ID NO: 154704 - protein, 56 aa, Glycine max
  Clone ID: PAT_MRT3847_110719C.1.pep
FGYRQNEVYVGVVLLLFSKKIILSITTAKNVMLESSYDSHEVYLTCINNIQKKKKK

SEQ ID NO: 154705 - protein, 60 aa, Glycine max
  Clone ID: PAT_MRT3847_11071C.1.pep
GFSSCFVNFITSLSYFYNGTILPSIRFTKFKCVVGYPVGCSSIKCKLAARLALTRDFIQS

SEQ ID NO: 154706 - protein, 247 aa, Glycine max
  unsure (1)..(247): unsure at all Xaa locations
  Clone ID: PAT_MRT3847_110720C.1.pep
MINLGYHGKGPKTLLTSIALSSMIRKRXASRKWNLLVVXVSLCTWTHVMGLXVPCIATWATFQLKGVEPPGFSFQIVNTIMDEFSPRARRRSALLTSPLIASWPPCLPVVYCGGFNTQKESTTGRFLLGRSREHGVVGDMRDAWPSARVRKNVSLIPTYLGLLGDKQGTLEFLKLIFRALCLCWDRQTQDLHIDWILFRGRSLIPVSCEVVNDNIDGYYPSSHFPIFAEFMLPRTVRMLESPVQEDS

SEQ ID NO: 154707 - protein, 76 aa, Glycine max
  Clone ID: PAT_MRT3847_110721C.1.pep
EECASSVVVTFRAFMQTCVSANVVDAKHQQTSVTKFYYLNSYVWLSHGGTTLIMPVSLEHMSTFNEIIRLQVVIES

SEQ ID NO: 154708 - protein, 87 aa, Glycine max
  Clone ID: PAT_MRT3847_110722C.1.pep
FDSPKKNSLHFPIKNLFFESKRVDVQKVWRSFHCTRSEPTGCRILGEKRNQIFLLQWERFLSKDNVCALQPRLNIFSLIYFFLVFIA

SEQ ID NO: 154709 - protein, 97 aa, Glycine max
  Clone ID: PAT_MRT3847_110723C.1.pep
TNWTHECQIPATSCEDVATKPEASGSTEQEKVLNVDKLANIVYQEHGGCLKKPRGKRKRKDCSRSINEVSVRESDSSADVCKESSLSYLCENVKSSV

SEQ ID NO: 154710 - protein, 117 aa, Glycine max
  Clone ID: PAT_MRT3847_110724C.1.pep
YTKKKNEKKYGGGLFKGSKFTSRSFQINNFFLGSPNLIYLAIFSNLITWETLGFPKFFPLKEIPLFPIWLIKKKARSFPLLKILSPFFENWTPPFTGILNSGGWVFTPKLPFTFACP

SEQ ID NO: 154711 - protein, 60 aa, Glycine max
  Clone ID: PAT_MRT3847_110725C.1.pep
GSPEGVDSWKRKNSLGKNWGEKGFLWVPKNPGNLLGGGGANYFASTPPQRGPQTPGGARL

SEQ ID NO: 154712 - protein, 44 aa, Glycine max
  Clone ID: PAT_MRT3847_110726C.1.pep
KIRTLFIKKKKKKKKKKKKKKKKKKKKKKKKKKKKKKKKKKKKK

SEQ ID NO: 154713 - protein, 66 aa, Glycine max
  Clone ID: PAT_MRT3847_110727C.1.pep
RSLEVLIKIVAFWLYYNSSRTAGNKNFYSPRTWPRFIIRIVISIRCTPQKIRSYDIILRCIEKLLI

SEQ ID NO: 154714 - protein, 35 aa, Glycine max
  Clone ID: PAT_MRT3847_110728C.1.pep
LPQASKSSRSKSIPIEDLAFAGDITHKKHLFPFGI

SEQ ID NO: 154715 - protein, 91 aa, Glycine max
  unsure (1)..(91): unsure at all Xaa locations
  Clone ID: PAT_MRT3847_110729C.1.pep
TQTKETEGYSEFKATDGASAATANAINMMXYVHRMSPGSLWAHRGHSPGQTLDSIEVHDVHXTCANTHYIAPLDVIDNIHMETPLPYFLHS

SEQ ID NO: 154716 - protein, 70 aa, Glycine max
  Clone ID: PAT_MRT3847_11072C.1.pep
FSSCMKELCRFSLLTAPKRCYLPNVNPKSYYESYLSAWKVKINLTLSDFILQFVILVCLRNKGVQSSDIN

SEQ ID NO: 154717 - protein, 596 aa, Glycine max
  Clone ID: PAT_MRT3847_110730C.1.pep
MMGSTGRVAKLGSFRHSFAEKKERLLSMKGGGYSQIGIGIALPESDEEDQSPTRRSCCSYRAVSDGIVGAWKTAKHVVARAWEMGRSDPRKIIFSAKMGLALILLSLLIFLKQPFEDISKHSVWAILTVVVVFEFSIGATLSKGLNRGLGTLLAGGLALGMGLLSKLAGKWEETIIVISIFTAGFCVTYAKQYPTMKAYEYGFRVFLITYCFIIVSGYRSGEFVETAVDRFLLIALGAAVALGVNVCIYPIWAGEDLHKLVAKNFVGVAASLEGVVNNYLNCIEYERVPSKILTYQASEDVVYKGYRSAVESTSTEDSLMGFAVWEPPHGRYKMLRYPWQNYVKVSGALRHCAFMVMAMHGCILSEIQAPPEKRQVFSREVQKLGSEAAKILRELGNKVKKMEKLGEEDILYEVHEAAEELQQKIDKKSFLLVNSESWEIGNRPRGEGDPQDLLNMNEERHFLEYKSLSEAVLDLRTAKVPRSWGELATPDNKPAAPIGVGDENLFKKQISWPAHISFKADAGTREEESKTYESASSLSLATFTSLLIEFVARLQNLVDSFEELGEKAKFKDPLEQAPPTSGGFWNRLCNCLTFKD

SEQ ID NO: 154718 - protein, 80 aa, Glycine max
  unsure (1)..(80): unsure at all Xaa locations
  Clone ID: PAT_MRT3847_110731C.1.pep
GSSTPKRRISFSNSPPHLTPFGVTSPTTALFAPRESAQLEKNPRWPSDSTTSNGPETAPTPLLLTEMAPXVGGYVTCATN

SEQ ID NO: 154719 - protein, 53 aa, Glycine max
  unsure (1)..(53): unsure at all Xaa locations
  Clone ID: PAT_MRT3847_110732C.1.pep
ALLVVVSPGPRPPSSVLXWFLXACFLLFLCFGCFLRSWPXFGLCLXRPPRRSQ

SEQ ID NO: 154720 - protein, 51 aa, Glycine max
  Clone ID: PAT_MRT3847_110733C.1.pep
AVGLYTFWYRSIRIARYRVSFLRGQTQNSDPSSTALDALERVVVRVFVRVV

SEQ ID NO: 154721 - protein, 117 aa, Glycine max
  Clone ID: PAT_MRT3847_110734C.1.pep
ASQFRRLHSKQLRHTFRFYSQQWRTWAACFIQAAWRRYSKRKLEESLVEEENRLQDALAKAGGSSPSLGATIYASRFAANALRLLRRNGTKKGRVPERLPPMLPQKPAEPDFTADEE

SEQ ID NO: 154722 - protein, 66 aa, Glycine max
  Clone ID: PAT_MRT3847_110735C.1.pep
SPGLVLSMDKCASTAKDPIRYSLGALKCHNIDLKGIKKTKKKKKGGRRLVRLSSSTRIPDAVSVGH

SEQ ID NO: 154723 - protein, 32 aa, Glycine max
  Clone ID: PAT_MRT3847_110736C.1.pep
PTRPRNAIDRGSYSADLAGRLRTELRWRLQLS

SEQ ID NO: 154724 - protein, 98 aa, Glycine max
  Clone ID: PAT_MRT3847_110737C.1.pep
PRDVCHSPRNSYPSRVSEALAIEISLMSYLMSIARRKLRLFVVAGGVDCVGICDAYTEESRLGLNGSIMFGTGASASAALVGVLRRWCTHACVANLSV

SEQ ID NO: 154725 - protein, 140 aa, Glycine max
  Clone ID: PAT_MRT3847_110738C.1.pep
GIGSPRSCLILMSLSSICSGNFSTILSRLRQLSLFRYRLSLPDGDRSHATNPLVPPEEDSDLNRTRFSLFSHGAGPGSPVRRVMSLPNKTTSSETALGKTVAGNSNSERFITETTINHRSKKKRERVIGSVENYGSETPK

SEQ ID NO: 154726 - protein, 30 aa, Glycine max
  unsure (1)..(30): unsure at all Xaa locations
  Clone ID: PAT_MRT3847_110739C.1.pep
LVIVNISIMPCHXSITDQFTSSATFKRPMA

SEQ ID NO: 154727 - protein, 128 aa, Glycine max
  Clone ID: PAT_MRT3847_11073C.1.pep
HALAGSATHVYSPIHAPCIMIPTVTSRACLTHYLPLLFHRSKQVPTTRLPPSTLSASTSHSQAPASSTSSCTVAPYRLHGVTPTCKEYINKARLIEVLDMGPPEGSASPQLRAMRPPVASFHADAARR

SEQ ID NO: 154728 - protein, 80 aa, Glycine max
  Clone ID: PAT_MRT3847_110740C.1.pep
FGSSEDLRNELTGGHIFTKFSSSVSKRVLKVSLDFTRLLWYDPKWKNQSDAKIVKTLPIKLVKDIVPGASTNNLTKKRFL

SEQ ID NO: 154729 - protein, 129 aa, Glycine max
  unsure (1)..(129): unsure at all Xaa locations
  Clone ID: PAT_MRT3847_110741C.1.pep
SEKEDLQSDGIAAAVGVLSPFPFYYCLWIWPQSWVDLCGRARDPSXRVYQLLGEAGTYYGVRFGKTIPWVTEFPFGVIKDPQYVGSIMSLLACFLWVPFQYILLWVLGYVFMMHVESKEDPSTRAKPLH

SEQ ID NO: 154730 - protein, 167 aa, Glycine max
  Clone ID: PAT_MRT3847_110742C.1.pep
MGIAAAIGLLSPFPFYYCLWIWPQWWVDLCGRGREARDPSKVMAYVSYFLKLVQFISLFYVSSFHWPPPFYFWPLIAFGQFLNFRVYQLLGETGTYYGVRFGKTIPWVTEFPFGVIKDPQYVGSIMSILACFSWVPFQYILLWVLGYVFMMHVESKEDPSTRAKPLH

SEQ ID NO: 154731 - protein, 92 aa, Glycine max
  Clone ID: PAT_MRT3847_110743C.1.pep
GVVDGGSHSPVRSPVGIYVRLPDGAGSAKVSAVRGCKCESWDWNLCFVVVQLMNYVSSSVCVWSVSWISRVHISSFHLCVRCYSSRHVLCCG

SEQ ID NO: 154732 - protein, 53 aa, Glycine max
  Clone ID: PAT_MRT3847_110744C.1.pep
FHPLIYSINTIKVKTPLINKRVGKNGKRNYQQPESEVHTPNFKDRRVSLTTTS

SEQ ID NO: 154733 - protein, 41 aa, Glycine max
  Clone ID: PAT_MRT3847_110745C.1.pep
NQQVFRVRYAVKLLEVYAVLDIYWVVLKTFQGWLSFSPFCK

SEQ ID NO: 154734 - protein, 83 aa, Glycine max
  Clone ID: PAT_MRT3847_110746C.1.pep
RVSTCASEIMFEFPNKVGCHADSIVIGHPIPAVALKDELIQGEAYLDLPIDRLITSKTLSVPSLLSLGSHTNYKSTIKIGERP

SEQ ID NO: 154735 - protein, 75 aa, Glycine max
  Clone ID: PAT_MRT3847_110747C.1.pep
WTACYKTSYQTHLTYSHGKPSISSKNYILWHKASLIYQSFKINGLFSLSPFITIGVFNYSSADQQDLNREPELVD

SEQ ID NO: 154736 - protein, 45 aa, Glycine max
  Clone ID: PAT_MRT3847_110748C.1.pep
IKLVILIVYHTNLLNLVTCEKLRHITLDEDFVLSATIETVNVKNC

SEQ ID NO: 154737 - protein, 53 aa, Glycine max
  unsure (1)..(53): unsure at all Xaa locations
  Clone ID: PAT_MRT3847_110749C.1.pep
HPIHIAERTPVKQQKDTVEXGACAPPNEGGSLADARVGNHQQIGGLQRTASMG

SEQ ID NO: 154738 - protein, 76 aa, Glycine max
  unsure (1)..(76): unsure at all Xaa locations
  Clone ID: PAT_MRT3847_11074C.1.pep
TCTRTNMVMVLGKITTKAIVDYXNIVRDTCKNIGFDYDDVGLDANYCKVLINIQQQIPDIAQRDHEHLTKRSVDIG

SEQ ID NO: 154739 - protein, 39 aa, Glycine max
  Clone ID: PAT_MRT3847_110750C.1.pep
HSCLSFLYSATLHQILAHVPRHVYLYSVYNAPLVFMLSP

SEQ ID NO: 154740 - protein, 35 aa, Glycine max
  Clone ID: PAT_MRT3847_110751C.1.pep
SANTTHMKIIVGLEEPDIINEVKAKHNIKISFLNQ

SEQ ID NO: 154741 - protein, 57 aa, Glycine max
  Clone ID: PAT_MRT3847_110752C.1.pep
VSAQVCTVHEHPEHFGWQVQLFGHVSPWILFRSTFQLIVGILLAHSKPEHACRTRGR

SEQ ID NO: 154742 - protein, 51 aa, Glycine max
  Clone ID: PAT_MRT3847_110753C.1.pep
GGYTPPPRLVPLLKNARRINEIACRMGVTIHHCVEYNDFSAHSGWRELLSF

SEQ ID NO: 154743 - protein, 78 aa, Glycine max
  Clone ID: PAT_MRT3847_110754C.1.pep
SAQHYKPIFPFLTINNYNPTIYFLHSNTTITLSNTKTHPLTFLNPHYPPFLSTYHTIYFLFFSILISLYFSLTQPFIL

SEQ ID NO: 154744 - protein, 64 aa, Glycine max
  Clone ID: PAT_MRT3847_110755C.1.pep
RNSRVRPTRPFDFLAKYQHHRPGKKFVSSSKALLEGHPSPFFNRDDSVEHSDDDTEGLPPKFRR

SEQ ID NO: 154745 - protein, 72 aa, Glycine max
  Clone ID: PAT_MRT3847_110756C.1.pep
CRKPYFSSSLTSMLLAYTTVVSELAVNASPYCSTNLLTPYTPIFVLPLIPQWQRIFRRQPCSLRVALKDTPS

SEQ ID NO: 154746 - protein, 37 aa, Glycine max
  Clone ID: PAT_MRT3847_110757C.1.pep
IAHFLRYQAIPSWGAISVPSSLYLHFVSTLLYHDLKF

SEQ ID NO: 154747 - protein, 61 aa, Glycine max
  Clone ID: PAT_MRT3847_110758C.1.pep
YSTASLKFMHMYILLIDAASYLSPYLSSYDQYTIIAVWCLFLSSSGIIPKLNSIHNPWLTQ

SEQ ID NO: 154748 - protein, 55 aa, Glycine max
  Clone ID: PAT_MRT3847_110759C.1.pep
RQILLQCGGAGVRGRQVWVGVERKSDCLITYSSGIHSCSNEQMRSPNPFPSLASL

SEQ ID NO: 154749 - protein, 48 aa, Glycine max
  Clone ID: PAT_MRT3847_11075C.1.pep
VVHVPLPDEKEIERRVLENKKKDLLSRYASEGLVKEQTEAKDMLNIQR

SEQ ID NO: 154750 - protein, 67 aa, Glycine max
  Clone ID: PAT_MRT3847_110760C.1.pep
MSNHPAQEWGVALRPPEGSNVQGGRLASVSDAKSKPRYDYSRFRKCARNLNSMRNVIYSFVNKLILN

SEQ ID NO: 154751 - protein, 51 aa, Glycine max
  Clone ID: PAT_MRT3847_110761C.1.pep
NLHQLNRIMSARIFLFYCQLTSIFGWFRISSPLDTLALFYLDTLHNFLGER

SEQ ID NO: 154752 - protein, 46 aa, Glycine max
  Clone ID: PAT_MRT3847_110762C.1.pep
KKKQIFVDLSLPSPKGDQGIMSPCRNKKRLSPLFLFLDIYPSTQTI

SEQ ID NO: 154753 - protein, 60 aa, Glycine max
  Clone ID: PAT_MRT3847_110763C.1.pep
KSAKRVIVTGGMKCFFNCSVIRRMDLYSMLGDWRVLVMSLCKGCHVHKLHLKYGSFLAFH

SEQ ID NO: 154754 - protein, 78 aa, Glycine max
  Clone ID: PAT_MRT3847_110764C.1.pep
TLGLSVFGVEVAMVQSTFKFPDVLLRHLQPKIVKKPSVSISLVQPGFWFELSTLLILNKLLIVSTISYFIVKSFVPIK

SEQ ID NO: 154755 - protein, 59 aa, Glycine max
  Clone ID: PAT_MRT3847_110765C.1.pep
SLCRYKMTSSMPKNDNSLSTLTYVHVHTVQRLLRLIHVRRSVTWNRLDSCVAYAQEDQI

SEQ ID NO: 154756 - protein, 39 aa, Glycine max
  Clone ID: PAT_MRT3847_110766C.1.pep
NKFAGWGTTLFTLELIFTRLYICKHYAFYYYVCTSPLKL

SEQ ID NO: 154757 - protein, 81 aa, Glycine max
  Clone ID: PAT_MRT3847_110767C.1.pep
VKLSQVNVMVVVHAVSHCLLLVFPTESAPCISARVTVALWIFAPQGYLWHVNILTNNSLILHISWLMKGEKELQPQTRIRH

SEQ ID NO: 154758 - protein, 293 aa, Glycine max
  Clone ID: PAT_MRT3847_110768C.1.pep
MDEQKSAAVNDGEPEPQQNHHQQNHTDNNNNKSNDTENNNNDNEKSTSDPELFCCLLQPATTDGDPEYIGIRRLLLHRKAEAGVLRRRDWRCNGKTYVAYRNYISRPRNWERDSLRTPSLQSTPGNSGRWFPSPTPHGTRWSEVDSLSCGRDLQNANPVYNHRTSFGSSISDSDRPRHHGVEAAYSFVGMHCIFDQCKASVTVLKFGHMSSDLLAYGASDGTLTVCSVSENPSVIKQLNGHSKDVTDFDFTSNNQYIASSSLDKTVRVWEIGKGICIRVIYGVSSQLCIRFHP

SEQ ID NO: 154759 - protein, 71 aa, Glycine max
  Clone ID: PAT_MRT3847_110769C.1.pep
IYLSITQSSPCQIGQPNSTGLWHRSGCMNNLFTLQIRLDPTFKALGMNNGWPRFWCSPLGTHICWKVLLAP

SEQ ID NO: 154760 - protein, 63 aa, Glycine max
  Clone ID: PAT_MRT3847_11076C.1.pep
MMESLWKLLYLLEPAPVTLIITAVAVTFGAAFRALNYGKEMEHNRDLCEASITLDRSQALMIP

SEQ ID NO: 154761 - protein, 71 aa, Glycine max
  Clone ID: PAT_MRT3847_110770C.1.pep
LQGKFLSLAGFLTRPFFSQKYQNFCENPYAFLKLFFNINSRAITLTKEHRMASYNLIFNGGGGEDRRKKFR

SEQ ID NO: 154762 - protein, 42 aa, Glycine max
  Clone ID: PAT_MRT3847_110771C.1.pep
MAIFLEIQYVLFTAKEREKSVFFFLLNLNERQICLLISLNRI

SEQ ID NO: 154763 - protein, 63 aa, Glycine max
  Clone ID: PAT_MRT3847_110772C.1.pep
DNSLTVDGPKMLKLNTPINSKTDHPRFTNNYRKSITRARKQPQTPGAATTEQAVFNALERGRG

SEQ ID NO: 154764 - protein, 102 aa, Glycine max
  unsure (1)..(102): unsure at all Xaa locations
  Clone ID: PAT_MRT3847_110773C.1.pep
XXXXLXXXXXRXGXXXXXXXXLXXXXXXXXXECXVXXRXXXWXXXXXXXXXXXGXXXXCXLXCXXXXXXXXXXXXXXVCXXXXXXXXXXXXXIXXLRXCDXX

SEQ ID NO: 154765 - protein, 33 aa, Glycine max
  Clone ID: PAT_MRT3847_110774C.1.pep
FNLGSHCTLIPYSNSANNSIDGELNGHYTFEAI

SEQ ID NO: 154766 - protein, 49 aa, Glycine max
  Clone ID: PAT_MRT3847_110775C.1.pep
TLLSQSTQQSSFGSGKMAAAFYMASVIRITGWQGSKASPISLSRRKRLA

SEQ ID NO: 154767 - protein, 49 aa, Glycine max
  Clone ID: PAT_MRT3847_110776C.1.pep
DQSEPSWISSTIGHSSDWHVTLDFHVPIVDLRYDINYKIMTPLPCDAQI

SEQ ID NO: 154768 - protein, 72 aa, Glycine max
  Clone ID: PAT_MRT3847_110777C.1.pep
MSHKKFDHPTHGSLGFLPRKLAARHKGNVNAFPKDDPSNASKLTAFLGYNARMTHIVRDVDKPGSKLHNNET

SEQ ID NO: 154769 - protein, 77 aa, Glycine max
  unsure (1)..(77): unsure at all Xaa locations
  Clone ID: PAT_MRT3847_110778C.1.pep
LTSPNYCFSFLYSSHHIXRGPQWSGLILTHSLNSRNLLSIRCRASNRKNTFFAYYTTKKRVLQSIKIIALLIHLTGP

SEQ ID NO: 154770 - protein, 43 aa, Glycine max
  Clone ID: PAT_MRT3847_110779C.1.pep
TLSITVLKPQKMVNAGFPPEIRKFKSRHSHVLFIFKVFSPKFF

SEQ ID NO: 154771 - protein, 29 aa, Glycine max
  Clone ID: PAT_MRT3847_11077C.1.pep
KNRLEYVLISNIKTYINTSNNNSKISSQS

SEQ ID NO: 154772 - protein, 397 aa, Glycine max
  Clone ID: PAT_MRT3847_110780C.1.pep
MQNMSLIASLSSTTSHLTSLASLSSSSSPLSRKFPLTFREKNRTPIAPPHKLPFFSARPATTRVVLVKSQATAPASSEAVAVTPVSSEMKAWVYGEYGGVDVLKLDSNVTVPDVKEDQVLIKVVAAALNPVDAKRRQGKFKATDSPLPTVPGYDVAGVVVKVGSQVKDFKVGDEVYGDVNEKALEGPKQFGSLAEYTAVEEKLLAPKPKNLDFAQAASLPLAIETAYEGLERTGFSPGKSILVLNGSGGVGSLVIQLAKQVYGASRVAATSSTRNLDLLKSLGADLAIDYTKENFEDLPEKFDVVYDAIGQCDRAVKAVKEDGSVVALTGAVTPPGFRFVVTSNGEVLRKLNPYLESGKVKPIVDPKGPFPFDKLAEAFSYLETNRATGKVVIHPIP

SEQ ID NO: 154773 - protein, 80 aa, Glycine max
  Clone ID: PAT_MRT3847_110781C.1.pep
ASRERKRCNNLKACLKVSVWSIQASAVYLKNARVVPEDCEEIVMDELILGFHVSITGIMMYFNRLWFLQILQSKFVVFTK

SEQ ID NO: 154774 - protein, 89 aa, Glycine max
  Clone ID: PAT_MRT3847_110782C.1.pep
CVEHSSVCNVLENARVLPEDCEERVMDELNSDLDLHVSITGIMMYFNRLCGSFQFCSLHEVRSSKSKHDLLNRQIELSMLFCLALFHNI

SEQ ID NO: 154775 - protein, 143 aa, Glycine max
  unsure (1)..(143): unsure at all Xaa locations
  Clone ID: PAT_MRT3847_110783C.1.pep
FYGPMCXPLVIKEACTLRCFWSSHRVHPPPCCGTLHEAPLIGLDCVSTIPDRVFQAFIDXDPYKAQKNLMVFQSVXIYNSGKELSVDXNTVGSQFXLEGVSSFNKSFASLFDYVLEKAGCLKLVSLLSLNVMVSNTILSPPLM

SEQ ID NO: 154776 - protein, 172 aa, Glycine max
  Clone ID: PAT_MRT3847_110784C.1.pep
MKDEDGLPTTTAVTKKENLDSSLFGKGRYKFWALAAILLLAFWSMFTGTVSLRWSGTLNSLSNDIDTPIHDDLDVLEMEEREKVVRHMWDVYTNSRSVRLPRFWQEAFEAAYEDLTSDVAEVRDAAVAEIAKMSVRSIHFDPPPLQSTSAREFSKSLKQAEKGKDATTSRRA

SEQ ID NO: 154777 - protein, 72 aa, Glycine max
  unsure (1)..(72): unsure at all Xaa locations
  Clone ID: PAT_MRT3847_110785C.1.pep
XXXAXLXDQRXLXSTTPTXPXXXLXTXXXKXGXMXDTMSXXLXSXXMMXXDPXXXACKXXXRISXLXVXRXX

SEQ ID NO: 154778 - protein, 63 aa, Glycine max
  unsure (1)..(63): unsure at all Xaa locations
  Clone ID: PAT_MRT3847_110786C.1.pep
MRPAVILKTTISLLEASSSSTPCDGRLNTLARHVLPQMASHDMIXESSTYASESVINHLVRTP

SEQ ID NO: 154779 - protein, 68 aa, Glycine max
  Clone ID: PAT_MRT3847_110787C.1.pep
LKGRCHTHVVDYVKYDDPISASMQAIHVNLSTAMISSFEQSPSVVLCQLGPFSRIPVCGPLAALRTPW

SEQ ID NO: 154780 - protein, 146 aa, Glycine max
  Clone ID: PAT_MRT3847_110788C.1.pep
GGKKNFFWGPPGGPLVPPRGEQKPLFPPPHKKLGGNRGQPRGVPPPSLIPPPPPPGGPLVWARGGPPPPGKTPSGPWGGLDPPEGFQAQNQTFPLPPPKRDKGPLGEKRAGPAFSGANFAPQTLFWGRGALPPGPKKKKGGPNAGG

SEQ ID NO: 154781 - protein, 97 aa, Glycine max
  Clone ID: PAT_MRT3847_110789C.1.pep
YKRLFMKSKRSFSGRCPRFQSGGRFGYSNMGFISRFISVREALLPVRVNRLPLIQLRLRTTAIKQVGISSSSHFLNSEQRFGKSESRGKPESPYCIS

SEQ ID NO: 154782 - protein, 92 aa, Glycine max
  unsure (1)..(92): unsure at all Xaa locations
  Clone ID: PAT_MRT3847_11078C.1.pep
VXXSFDAFPNXSXXHIXQSKXLSHXXYLAPXDIILXXNHYIQXGLXFKKPXTLVDXQNFIXNLLEXXXXSLXXXPLPISIXXLVGLSXTQRR

SEQ ID NO: 154783 - protein, 105 aa, Glycine max
  unsure (1)..(105): unsure at all Xaa locations
  Clone ID: PAT_MRT3847_110790C.1.pep
ASFTFHFKWAVTTSVDYSLAQLIQVIILLSTGGKNGGGYEASKYVVIAFHGGILFLHGVINSLPISLLSFLGQLAAILDVLGVFVLMIVIPSVATXRASAKVVFT

SEQ ID NO: 154784 - protein, 188 aa, Glycine max
  unsure (1)..(188): unsure at all Xaa locations
  Clone ID: PAT_MRT3847_110791C.1.pep
HSSESKRANKAGLRKVNVPEGYSLGKLNNDVQDSKRDQMSSSSDSSRXSREYFDAPKAFSRSHYSIDDEESAKIISSSVPLSVLLIPSLKEALADDPDGSIVQIVINALVNMESTKPQSCDVFVKKFLQQLASSKESSFKDLQELAGQIFSKTKSSEETRNAESDNKKQNKEVHSNFNXNPLARFLLS

SEQ ID NO: 154785 - protein, 83 aa, Glycine max
  unsure (1)..(83): unsure at all Xaa locations
  Clone ID: PAT_MRT3847_110792C.1.pep
PPDLDRTSLLCLLNPHRSLLHLLAHSLAHYCYVPFAYVRCFRASHLDVSLACCRLSYYDSNLHGTHLWXRGQGPSSSPPICCS

SEQ ID NO: 154786 - protein, 65 aa, Glycine max
  Clone ID: PAT_MRT3847_110793C.1.pep
KTNDFVQTHKSILRITFFLQFLLLWTLNTHGGACGSNIRCFIFVTLCLGKKSMNPKICLLNTKEP

SEQ ID NO: 154787 - protein, 62 aa, Glycine max
  Clone ID: PAT_MRT3847_110794C.1.pep
KSYCLYGTNQLLSLTKLRYNTIVTLVTVSNQNWNFTSVIYIIKSPLKDFADYKGKTSILIRE

SEQ ID NO: 154788 - protein, 51 aa, Glycine max
  Clone ID: PAT_MRT3847_110795C.1.pep
REMYDLFLEKIIKIFPIKGRINTKRPYIPWLQVDDLIFHNMEVFNVLQNMN

SEQ ID NO: 154789 - protein, 46 aa, Glycine max
  Clone ID: PAT_MRT3847_110796C.1.pep
QLRLPLSTHHELPGSEATQRITGARALSSTNFVNGVGYGGCFPSLS

SEQ ID NO: 154790 - protein, 111 aa, Glycine max
  Clone ID: PAT_MRT3847_110797C.1.pep
GIGTTAFPLYDHPVCLPPIVLVGTRLLPDITFVACPWFVRETLRRTPFVLNFNQDTPAISTLTFNLTPPSDTHCRCRALWSQTPPPLRNRSHSTHATSVRLTLTTHDPHYW

SEQ ID NO: 154791 - protein, 59 aa, Glycine max
  Clone ID: PAT_MRT3847_110798C.1.pep
AENPFWSGWGSIHRIHEPQSGPFPLGHLYGHIPVEATQGITGPRGIAPGYQNDSAKMHV

SEQ ID NO: 154792 - protein, 42 aa, Glycine max
  Clone ID: PAT_MRT3847_110799C.1.pep
GISSLMLNSLKLCCHLGAVTHKVIVLGRSVLRTPFVSEGVFT

SEQ ID NO: 154793 - protein, 372 aa, Glycine max
  unsure (1)..(372): unsure at all Xaa locations
  Clone ID: PAT_MRT3847_11079C.1.pep
MMESLWKLLYLLEPAPVTLITTAVAVTFGAAFRALNYGKEMERNRDFSEASITLDRSQALMIPVMSSFSLLLMFYLFSSVSQLLTAFTAVASASSLFFCLSPYAAYLKAQFGLADPFVSRCCSKSFTRIQAILLLVCSFTVXAWLVSGHWILNNLLGISICVAFVSHVRLPNIKICAMLLLCLFVYDIFWVFFSERFFGANVMVSVATQQASNPVHTVANSIGLPGLQLITKKLELPVKIVFPRNLLGGVVPGENATDFMMLGLGDMAIPGMLLALVLCFDYRKSRDTVNLLELHSSKGHKYIWYALPGYAIGLVTALAAGVLTHSPQPALLYLVPSTLGPVVVISWMKRELLELWEGNTPNLNDKDREIEV

SEQ ID NO: 154794 - protein, 65 aa, Glycine max
  Clone ID: PAT_MRT3847_1107C.1.pep
SAMCIARFNPLVVRYYISIDYDELQVPWCILCQWICWISYHVKCKSVILSSRCPPKLVSIRILAS

SEQ ID NO: 154795 - protein, 77 aa, Glycine max
  Clone ID: PAT_MRT3847_110800C.1.pep
PRVRIRHYDPLVPLQKDGGWGLLSQDDTFTQLLYYDLKVHPLHDARPGLHYLDIALIYIRHISLYTLDTYLPAYPLC

SEQ ID NO: 154796 - protein, 79 aa, Glycine max
  Clone ID: PAT_MRT3847_110801C.1.pep
SSLEIVCAPHDGSQLWSSECPNQSSWRLSCPIHGVWQSTVFHILLGPSLHNEPPGNSLILAFSVPQPPARSTEKARSTA

SEQ ID NO: 154797 - protein, 79 aa, Glycine max
  Clone ID: PAT_MRT3847_110802C.1.pep
CPCFRGPPRWGTLSRLPLPRVYPELCPFCLPQKLSFFGFFDFSPFQTAGQSGTLPFLGQGWFLSKGGLLPKLLEVKPPF

SEQ ID NO: 154798 - protein, 56 aa, Glycine max
  unsure (1)..(56): unsure at all Xaa locations
  Clone ID: PAT_MRT3847_110803C.1.pep
TNIPLTYSKNNAASCCPHYSLPQPVSPPTPPLLAEIGXTTQWNHTRLCFDYKEKQN

SEQ ID NO: 154799 - protein, 32 aa, Glycine max
  Clone ID: PAT_MRT3847_110804C.1.pep
KQTLDRCQNLRLQFCQCFLSSFNRQSNENPSL

SEQ ID NO: 154800 - protein, 62 aa, Glycine max
  unsure (1)..(62): unsure at all Xaa locations
  Clone ID: PAT_MRT3847_110805C.1.pep
STNATLMALNSAGVETEMVDAWTGXDDIEKTHTYNHELYVELVQTLLLYYLKLDMMLSLTTC

SEQ ID NO: 154801 - protein, 47 aa, Glycine max
  Clone ID: PAT_MRT3847_110806C.1.pep
SFAGKEPPLNIMLCPCNFEITLLIWTLHTNQVRTLKERFTEKERRLF

SEQ ID NO: 154802 - protein, 195 aa, Glycine max
  unsure (1)..(195): unsure at all Xaa locations
  Clone ID: PAT_MRT3847_110807C.1.pep
MACHSWLCNISLLLLLLSLASQSCHALNSFGFDIHHRFSDPVKEILGVHDLPDKGTRLYYVVMAHRDRIFRGRRLAGAVHHSPLTFVPANETYQIGAFGFLHFANVSVGTPPLSFLVALDTGSDLFWLPCNCTKCVRGVXSNGEKIAFNIYDLKGSSTSQTALCNSNLRELHTLCPSFDNICPHEETIYPMPLHY

SEQ ID NO: 154803 - protein, 101 aa, Glycine max
  unsure (1)..(101): unsure at all Xaa locations
  Clone ID: PAT_MRT3847_110808C.1.pep
GGQRKWFTVPHILQPFGYSYPLSTSSHIIMIHHLLLHHKSWMLRAWLHKLXSHHHLVSSQRTLHEIVLVQDHSTLHVDSPHKRPYMLKHLLTCLSSIDQTN

SEQ ID NO: 154804 - protein, 75 aa, Glycine max
  Clone ID: PAT_MRT3847_110809C.1.pep
GRKVYVNKSGEELTGRNAYREYRKVQVGRKVYVNKSGEELTGRNAYRQYRKESGAGFKKSRKKTGAKTTNAKKRN

SEQ ID NO: 154805 - protein, 59 aa, Glycine max
  Clone ID: PAT_MRT3847_11080C.1.pep
MGSPVNQREAKEGKRLMKSLVKQSLNRNMEIITQRANAAGESSKLKSLIISTSSKSLPY

SEQ ID NO: 154806 - protein, 82 aa, Glycine max
  Clone ID: PAT_MRT3847_110810C.1.pep
VGPLLERATGWGLFAITPTPNRGLSPWVFYFVNITCSSRPPFLKRRPLNFSLVPHIKKLSVGMPGSFSTKLGSGQKKKNPTP

SEQ ID NO: 154807 - protein, 57 aa, Glycine max
  Clone ID: PAT_MRT3847_110811C.1.pep
QYGWKKVVYVDRLLQLFRYIPREQLTIPDFVFQHDLEVNGGKGLIVDPRTKYVYHRP

SEQ ID NO: 154808 - protein, 77 aa, Glycine max
  Clone ID: PAT_MRT3847_110812C.1.pep
ALFWAPPRAWRLVSVSTVWFAMPIHGLVFLSCLVGPLFVCWAAFCLSYIADCGGVSPQFLGCCSFLEVLVFVPRVVL

SEQ ID NO: 154809 - protein, 122 aa, Glycine max
  unsure (1)..(122): unsure at all Xaa locations
  Clone ID: PAT_MRT3847_110813C.1.pep
IVSFASPDCNIVGAMLSVDTYHTNAENAVRHIFVAPFIGGRAILVGTLSNTIEQIEPHMNXRFQLLSTTTNGDTVQGKDLAMAKVNVACADAGSTLSYTPTSLMESGLQKDRWLTEEYFGRM

SEQ ID NO: 154810 - protein, 58 aa, Glycine max
  Clone ID: PAT_MRT3847_110814C.1.pep
CHWGVYNKMLLSVQNIFISQWGFVFPPRFFLFFSPSKNCSILTLVYFQKNLSGTVFVP

SEQ ID NO: 154811 - protein, 85 aa, Glycine max
  Clone ID: PAT_MRT3847_110815C.1.pep
PRAEFGTRPTGRALPQPHGPPMYPPAGGHAPPPVPARPSASGVPPTVGEAPPPVAPRPTDYTPPPSAGAGGGAARPPMPPRTLQR

SEQ ID NO: 154812 - protein, 40 aa, Glycine max
  Clone ID: PAT_MRT3847_110816C.1.pep
LDDINLLVLSETPADFTMIHMLDQGLPSQLQDFSSTSCTT

SEQ ID NO: 154813 - protein, 49 aa, Glycine max
  Clone ID: PAT_MRT3847_110817C.1.pep
GLPFTKLYSRLCAKKDMRILMVGLDAAAKTTILYKLTLGKIVATIPTIG

SEQ ID NO: 154814 - protein, 138 aa, Glycine max
  Clone ID: PAT_MRT3847_110818C.1.pep
TSRLNLDGFPGTGWAFTYFAEIEDLDPDESRKFRLVLPGQPDISKAVVNIEENAQGKYRLYEPGFTNISLPFVLSFRFGKTYDSSRGPLLNAMEINMYLEKNDGSLDGATISNILSHYSAADWLQEGGDPCLPVPWSW

SEQ ID NO: 154815 - protein, 64 aa, Glycine max
  Clone ID: PAT_MRT3847_110819C.1.pep
ANSLDPLDNDSSSAELLFVHVVHNLGSLTVLYRARHVNLQIETRLCKYDRRPSATTTCSAHDQL

SEQ ID NO: 154816 - protein, 72 aa, Glycine max
  Clone ID: PAT_MRT3847_11081C.1.pep
PQDHTRCSFSFQDIANEPMCLFIYIIKMSPNNDGSGTCSSRFLKVTSAASSTAAFSDGLYAILSSSTSASSD

SEQ ID NO: 154817 - protein, 57 aa, Glycine max
  Clone ID: PAT_MRT3847_110820C.1.pep
KAFHTIWGPKTGPLFILKEGNSGEKKPPPAELISNGNGDLTLKSGLITDYKLRAARI

SEQ ID NO: 154818 - protein, 91 aa, Glycine max
  unsure (1)..(91): unsure at all Xaa locations
  Clone ID: PAT_MRT3847_110821C.1.pep
MVSSLNFWGCNKLTEKTITTRXDLNISIVYHTIATHFTKFLPHYIKKHLYTLEIYILPSILTAEIKSKQNLSNIHITGLFYNLRYKYWTKH

SEQ ID NO: 154819 - protein, 70 aa, Glycine max
  unsure (1)..(70): unsure at all Xaa locations
  Clone ID: PAT_MRT3847_110822C.1.pep
GITDYRAMILLIYHDKNKYNTLXYRLCECYSNNDFAVQFISAIIAGDIDVAAVYAHDLAHFGLEVRLTYY

SEQ ID NO: 154820 - protein, 118 aa, Glycine max
  Clone ID: PAT_MRT3847_110823C.1.pep
EQVTCFGINMNSGNGPTPTMVSQLSPHRSCASIKPNQEGTLNNNSNTNNNNNNAIDNDNSDRTNNSINNENNNNNNPKAPSLVLVGCPHYLMYLMISDDNLKCPKCKSANLIHFTGRV

SEQ ID NO: 154821 - protein, 126 aa, Glycine max
  unsure (1)..(126): unsure at all Xaa locations
  Clone ID: PAT_MRT3847_110824C.1.pep
GPSRVDPASAGCSKCASETTSFSLTVQDLNRKKPPCNGEGQTERVKACLDDSQDISQISDPDRKSRCTXLGXIGFRDPASVGCGQQLTLLSIEILAECRGDLLPDPEFDAINIGALGFENDADPIR

SEQ ID NO: 154822 - protein, 84 aa, Glycine max
  Clone ID: PAT_MRT3847_110825C.1.pep
MCHGRRYFITCIGAWNIVCSYRLYIICIARLEHPVYSSRQCVEMPRIMRDGPISASSKLKRTDDRHTCVLTGNGPIAYPPMGAL

SEQ ID NO: 154823 - protein, 42 aa, Glycine max
  Clone ID: PAT_MRT3847_110826C.1.pep
RNTIKHYFLSNALLNIICLIPLSFFFFFFFFFFFFFWENNRI

SEQ ID NO: 154824 - protein, 52 aa, Glycine max
  Clone ID: PAT_MRT3847_110827C.1.pep
IQMNCEIEKILKKEVFVMLDLKTYHFVAPVLSTLWFGALSVLLIDIKSFFSY

SEQ ID NO: 154825 - protein, 114 aa, Glycine max
  Clone ID: PAT_MRT3847_110828C.1.pep
SPQHLEAARVLIVTILCYLRVVHPQPFRPPLQPGLTHHGAAVNYPVSPSSCQGAIWGRYTCVSSIGFIIKGLPPFDRQLPHISFPPPPPPPPPPPPPKEGGRHTVMTGNLPWNG

SEQ ID NO: 154826 - protein, 70 aa, Glycine max
  unsure (1)..(70): unsure at all Xaa locations
  Clone ID: PAT_MRT3847_110829C.1.pep
TILTFNMXPVGRFGYLLTPPLALLQSILAMLQGTLXVKENGFQAALCSLACFTGSXLXFSKSSAIEPFLP

SEQ ID NO: 154827 - protein, 296 aa, Glycine max
  Clone ID: PAT_MRT3847_11082C.1.pep
MVEPLNQSTPRTKKMKHKRNPIHDSKMTRKLRIICNDPDATDSSSDEDEYFGNVRKMIEPLEPLERLEVPVNPVVADETSTESTNNDELNQTKRVMAKTPSVKRQSCGKYKGVRMRKWGKWAAEIRDPFKGTRIWLGTFSTAEEASQAYETRRLEFEVMAKALSDEKSNNGSSNNNVVASAETETVAAPENNSSNYYLEMLEMPDLSMLNVPSPSAVAATAAAPSEFELDLLAFVDSEYGFHDEHDFDDDLAALEDFHICGFDDNEPSELPDYDFDDFGADEFAGWIEEPLNIPCV

SEQ ID NO: 154828 - protein, 204 aa, Glycine max
  unsure (1)..(204): unsure at all Xaa locations
  Clone ID: PAT_MRT3847_110830C.1.pep
MSVTELKERHSAATDTVNNLRHRLKQKRLSLLDTDVSGYARSQGRTPVTFGPTDLVCCRTLQGHTGKVYSLDWTSEKSQIVSASQDGRLIVWNALTRQKIHAIKLPCAWVMTCAFSPTGQSVACGGLDSVCSIFNLNSPTDKDGNLPVSPMLSGHKGYVSSCQYVPDEDTHLITGSGDQTCVXWDITTGLKTSIFGGEFQSGHT

SEQ ID NO: 154829 - protein, 80 aa, Glycine max
  Clone ID: PAT_MRT3847_110831C.1.pep
LPFHFYTRILYRKSRLQIYMPRLHRSTHKSYMNHSNLSPGQSACHTYFHCCTYILSTSTTYQIVRSMSSTIDLPILKIFA

SEQ ID NO: 154830 - protein, 408 aa, Glycine max
  Clone ID: PAT_MRT3847_110832C.1.pep
MSVTELKERHSAATDTVNNLRHRLKQKRLSLLDTDVSGYARSQGRTPVTFGPTDLVCCRTLQGHTGKVYSLDWTSEKSQIVSASQDGRLIVWNALTRQKIHAIKLPCAWVMTCAFSPTGQSVACGGLDSVCSIFNLNSPTDRDGNLPVSRMLSGHKGYVSSCQYVPDEDTHLITGSGDQTCVLWDITTGLRTSVFGGEFQSGHTADVLSISINGSNSRMFVSGSCDSTARLWDTRVASRAVQTFHGHQGDVNTVKFFPDGNRFGTHASGRAVRTFHGHEGDVNAVKFFPDGNRFGTGSDDGTCRLFDIRTGHQLQVYYQQHSDNEIPPVTSIAFSASGRLLFAGYTNGDCYVWDTLLAKVVLNIGSLQDSHEDRISCLGLSADGSALCTGSWDTNLKIWAFGGHRRTT

SEQ ID NO: 154831 - protein, 61 aa, Glycine max
  unsure (1)..(61): unsure at all Xaa locations
  Clone ID: PAT_MRT3847_110833C.1.pep
RCGLQSLHVNSLYVVFTPRLGISSHCICHSVRQPLIKCANMNSELLLSTYLIVXSFAYAPI

SEQ ID NO: 154832 - protein, 219 aa, Glycine max
  Clone ID: PAT_MRT3847_110834C.1.pep
MDSPSSFFNSPSSGFCSESSSPEAFSWEGYLPFNENDPEEMLLYGMIAGATTEEHSGERASSEESAAARKEKSYRGVRRRPWGKFAAEIRDSTRHGMRVWLGTFDSAEAAALAYDQAAFSMRGSAAILNFPAEIVRESLKEMNYAHDDSNNEEGCSPVVALKRKHSLRRKINVRKKKNNNNNSKLQSSTVDNAVVFEDLGPDYLEQLLMSSDHHIPTTF

SEQ ID NO: 154833 - protein, 85 aa, Glycine max
  Clone ID: PAT_MRT3847_110835C.1.pep
YQDPTTIIIITIIISLRPKVTIFFILMWAQTVLSSTMNPNTKRGNLNFPECRIGYSKRYKVSKYDQSCVSLYIVNGFFKQIWMKQ

SEQ ID NO: 154834 - protein, 95 aa, Glycine max
  Clone ID: PAT_MRT3847_110836C.1.pep
SEGPRAQSFWAQTILRAMFSSWGKNSSAEEYIRPFFFLKTRKFFPLRNNSLSPRSDPLAYLKHRFWLEHVLRLYLSVRAQGCSAHDSLARRCPMW

SEQ ID NO: 154835 - protein, 146 aa, Glycine max
  unsure (1)..(146): unsure at all Xaa locations
  Clone ID: PAT_MRT3847_110837C.1.pep
QNTTVGNLLXVAAWNRGCLMINIVITGNALIKMNNCTSLGQVFLTNSYRTNHFYACKXTQSEPHSWELIFPIXECVPNNASEMRSSXEGHIXTLWRLSLLIDKPKQPTGLDILLGISNDFENDGYTLMPAFCVPQATVRPFENAEY

SEQ ID NO: 154836 - protein, 78 aa, Glycine max
  Clone ID: PAT_MRT3847_110838C.1.pep
FFKNIQNTRIDNSYGHTDHMFLKKYTPLFLQQSRATELHCIFVNNVRIPSTITSVHKRMLMKTNYTKGVRFYGKKRYC

SEQ ID NO: 154837 - protein, 170 aa, Glycine max
  unsure (1)..(170): unsure at all Xaa locations
  Clone ID: PAT_MRT3847_110839C.1.pep
VRFGSHTILMLPWVPFFVCSQQQPSRRAKHQSNLFEQMLEVRAVGTNIGKEQDGPSYEMLFRLTTTNRSKSAPFLAKIPTKTLKREVANEAKTNNSTNDDERKEEEQFASLKNRCHTIASTSAPFASTKVQQNGVDSNHSPSAKQSSSSSPVASTKTFRRRTAFETXEAM

SEQ ID NO: 154838 - protein, 213 aa, Glycine max
  Clone ID: PAT_MRT3847_11083C.1.pep
KGVRMRKWGKWAAEIRDPFKGTRIWLGTFSTAEEASQAYETRRLEFEVMAKALSDEKSNNGSSNNNSVLSHTSPSSVLELDTSASNLIGSGKVSSNEIVETKGLEAEVAETKSLAAEFAELEIQDLSMLNVPSPSAVAAATSEYELDLLAFDSFKYGFDYEHGFDDDFAALEDIHICSFDDNEPSELPDYDFDDFGADEFAGWIEEPLNIPCV

SEQ ID NO: 154839 - protein, 657 aa, Glycine max
  unsure (1)..(657): unsure at all Xaa locations
  Clone ID: PAT_MRT3847_110840C.1.pep
MLPPAGTIVFNTVGRVQYGFDVFSVDLNHQQPPPHATADHRLTDGVSINFNAQFINPQNDVVFVSERTGSPRFYITKPDTKPQPLPFLPNALFHDRPIVKNGKLYFVSTHEENDAVFTSWSAVYSTAIDDSTATVKRLTPRGEVDYSPAVSLTGKFLGVASYRSRRWQTNDFRELQTEIVVFPESDPKNRVTVSERGGWPSWSQDSTIFFHRIAEDGWXWSIFRVDLTDSELSESRNSPIRVTPPGLHCFTPAAFHDGKRVAVATRRRESNLRHVEIFDLESQTFQRITEDINPNFNHYNPFVSLDSRHLGYHRFRGESIQGEPIYPHLDKVLSPVRDLQLLRLNGSFPTFSPDGDFIAFNHGLDGNVNGGVKIVKSNGSKRWTLLKGRTCFHNAWSPTEKNVIYTSVGPIFESVYKTVQIARIEFDPVHLTNDREEVPFKLTILTREDTGNNAFPSCSPDGKSIVFRSGREGYKNLYIVDAVKGEFDGGIRRLTEGEWIDTMPCWSPKGDLIAFSSNRHDPKNSEVFGIYLVGPNGSGLRRVEVAKGVEGMKERLNHVCFSRDGEWLLFTANLGGVSAEPVGLPNQFQPYGDLYVVRLDGSGLRRLTCNAYENGTPTWHHGDLALCAPREDDGEGGQDWDKLKGEFQEPLWITCDI

SEQ ID NO: 154840 - protein, 241 aa, Glycine max
  Clone ID: PAT_MRT3847_110841C.1.pep
MEKLANSFSVLELDADDSHVPTTAGSSDKRVNADIDIVPGKSEKQNLENPVTSSCEYKLPLVWIDLEMTGLNIEVDRILEIACIITDGNLTKTVEGPDLVIHQTKECLDRMGEWCQSHHAASGLTKKVLKSTISEGEAEKQVIEFVKRYVNVGLYTPLLAGSSIYVDFQFLKKYMPKLASLFSHVVVDVSSVKALCIRWYPKDKERAPSKLKTHRALDDIRESIEELRYYKANIFKPRSRK

SEQ ID NO: 154841 - protein, 48 aa, Glycine max
  unsure (1)..(48): unsure at all Xaa locations
  Clone ID: PAT_MRT3847_110842C.1.pep
VCXISVYFXSLKSXRSXKLXTKXAFIDNSLXKXNQXXLXGXGPXXEGD

SEQ ID NO: 154842 - protein, 115 aa, Glycine max
  unsure (1)..(115): unsure at all Xaa locations
  Clone ID: PAT_MRT3847_110843C.1.pep
RPLFPGLLRKQSLRSRGTDIWGVYATVEPLYRKRVPXTIRRHLCTLLSYILPSFLTGEIKYKPNLRNIHISGLFYNGRYKFWTKHXKRLVLPEEEKMEVIRNRGIPADVLAKRAY

SEQ ID NO: 154843 - protein, 83 aa, Glycine max
  unsure (1)..(83): unsure at all Xaa locations
  Clone ID: PAT_MRT3847_110844C.1.pep
MVPMAGTTATGSRKIETYEEFVKVHALLLAASGLPERLHRRLFEKLSCEHFDGGDHFQIEPCEDGRQMXLVLTSASMPRDSDV

SEQ ID NO: 154844 - protein, 42 aa, Glycine max
  unsure (1)..(42): unsure at all Xaa locations
  Clone ID: PAT_MRT3847_110845C.1.pep
ILFMPSFYSSLYVCDSHSLXSEYIHTNIYVKLVTETDACFST

SEQ ID NO: 154845 - protein, 89 aa, Glycine max
  unsure (1)..(89): unsure at all Xaa locations
  Clone ID: PAT_MRT3847_110846C.1.pep
NGVEGLDYMERIPLATSEGFPHVLPRNIREXGKRRFASGDGEEMTLIPGTSVEEAYNKLIVXDLSKVYLHGTGISXPKDEKLPRRKIFD

SEQ ID NO: 154846 - protein, 214 aa, Glycine max
  Clone ID: PAT_MRT3847_110847C.1.pep
LAVALTLIGGVQHVDASGTRVRGESHLLLVGDPGTGKSQFLKFAAKLSNRSVITTGLGSTSAGLTVTAVKDGGEWMLEAGALVLADGGLCCIDEFDSMREHDRATIHEAMEQQTISVAKAGLVTTLSTRTTVFGATNPKGQYDPDQPLSINTTLSGPLLSRFDIVLVLLDTKNPDWDAVVSSHILSEAELDRTTNDEDLVNSWPLLHSRGTYTM

SEQ ID NO: 154847 - protein, 129 aa, Glycine max
  Clone ID: PAT_MRT3847_110848C.1.pep
TVTLSDTHHSITLSPNTTNCVFFFFFFFFFMAELGFSHPHHLFRPNAPFIIPPKRHICHQYHVPLHSVFRLMYCMKNHKSVRSLAALSTEKGKSATSVDELCKIIWTVEADLEDGHLLFITGDPAVLGC

SEQ ID NO: 154848 - protein, 73 aa, Glycine max
  Clone ID: PAT_MRT3847_110849C.1.pep
AANNKYVTDGGLPYLKPEGFLQSSLSTPKHSGQDFCFRNKTPPYLRRRRLSSCGDLRTTMLEPYPLFLLGWHN

SEQ ID NO: 154849 - protein, 75 aa, Glycine max
  Clone ID: PAT_MRT3847_11084C.1.pep
VGSYLAHGLKIYHKTYENLRASCIFGPIFLESSIQCPWGVGLHHSLPLEKDLTSNLEVLEALGFFSQHLGQSSLE

SEQ ID NO: 154850 - protein, 100 aa, Glycine max
  Clone ID: PAT_MRT3847_110850C.1.pep
MAAVLNSRKTPQAVVAVLVAAALLASSASAAITCGQVGSSLAPCIPYATGRASALPASCCSGVKSLNSAARTSADRQAACRCLKSLANSVKSVNMGTVAT

SEQ ID NO: 154851 - protein, 49 aa, Glycine max
  Clone ID: PAT_MRT3847_110851C.1.pep
NRWACNYRSVKWQSLSIQPIPVGFKGYYYNLNPSKSRTTKPKGFFELAV

SEQ ID NO: 154852 - protein, 51 aa, Glycine max
  Clone ID: PAT_MRT3847_110852C.1.pep
NLEPMSMHFVLVLFSFRFFLWFQTKLISLLGKGADCFEFNWELNDYNFADK

SEQ ID NO: 154853 - protein, 40 aa, Glycine max
  Clone ID: PAT_MRT3847_110853C.1.pep
ISLRPMINRTLPFVTILSNSLNHEPLLLRHSLKKLNERSV

SEQ ID NO: 154854 - protein, 73 aa, Glycine max
  Clone ID: PAT_MRT3847_110854C.1.pep
MMLQGHSIVTYSGKLQLSKVDKNGPTEPSILVHALYYTPMHIWDKEAGIDASLADAFNFTFYDDDTKMLADGI

SEQ ID NO: 154855 - protein, 94 aa, Glycine max
  unsure (1)..(94): unsure at all Xaa locations
  Clone ID: PAT_MRT3847_110855C.1.pep
KPKKYGFELPHVPCXGHEGRYTFSQSVGCGGPKQVNGPKIVVGSCKNPSVKVVWNGTPSPEAPNKVVFXKSLXGAFKNPPIPFKRACKKNFPKL

SEQ ID NO: 154856 - protein, 47 aa, Glycine max
  Clone ID: PAT_MRT3847_110856C.1.pep
HAPCKRHATQIHALLTDNIHYSSLLTIAQSIAVVIFQQPPSVVFSQP

SEQ ID NO: 154857 - protein, 46 aa, Glycine max
  Clone ID: PAT_MRT3847_110857C.1.pep
GVVDNATLSTYAWDTFAHPPTLFLPQSFSYLRPRGSTHIVSSEPYI

SEQ ID NO: 154858 - protein, 172 aa, Glycine max
  Clone ID: PAT_MRT3847_110858C.1.pep
MSAATFAAHIAGAGFVGLKSNSSNLCPSTGSIGWKRKIVSNGSKTYCMKTWNPINNKKFETLSYLPPLSDESIAKEIDYMLKKGWIPCLEFDELGCVRRENSHMPGYYDGRYWTLWKLPMFACSDSSQVLKEIHECRRVYPNAYIRCLAFDNQRHMQSMAFIVHKPDITTTT

SEQ ID NO: 154859 - protein, 84 aa, Glycine max
  Clone ID: PAT_MRT3847_110859C.1.pep
GTYQWVVKPKTVKYEFKTNTHVPKLGVMLVGWGGNNGSTLTGGVIANREGISWATKDKIQQAKVFDIDLQKQLRPYMESMVPLP

SEQ ID NO: 154860 - protein, 107 aa, Glycine max
  Clone ID: PAT_MRT3847_11085C.1.pep
GVLTQFFTMVEPLNQSTPKMKKIKHKPNSIHNSKITRKLCIICNDPNATDSSSDEDEHFRNVRKMKRTVVEIALPPVSVNPVVADETSTESTTNDELDKMKRVLGKT

SEQ ID NO: 154861 - protein, 250 aa, Glycine max
  unsure (1)..(250): unsure at all Xaa locations
  Clone ID: PAT_MRT3847_110860C.1.pep
MFIESFKVESPNVKYTETEIQSVYNYETTELVHENNNGTYQWVVKPKTVKYEFKTNTHVPKLGLXVMLVGWGGNNGSTLTGGVIANREGISWATKDKIQQANYFGSLTQASAIRVGSFQGEEIYAPFKSLLPMVNPDDVVFGGWDISNLNLADAMARAKVFDIDLQKQLRSYMESMVPLPGIYDPDFIAANQGDRATNVIRGMKXEQVLQIIKDINEFKDSTKVDKVVVLWTANTERYSNVFVGLNDTRE

SEQ ID NO: 154862 - protein, 82 aa, Glycine max
  unsure (1)..(82): unsure at all Xaa locations
  Clone ID: PAT_MRT3847_110861C.1.pep
XXXFXLGTLXVXXWSWEILALLLRSIPDPPIHMYSXITFSVXIVRVKVHEISEQRXLQNQXXTLLXSXEQKKISCXXIXXIX

SEQ ID NO: 154863 - protein, 431 aa, Glycine max
  Clone ID: PAT_MRT3847_110862C.1.pep
MFIENFKVESPNVKYTETEIQSVYNYETTELVHENRNGTYQWIVKPKSVNYQFKTNTHVPKLGVMLVGWGGNNGSTLTGGVIANREGISWATKDKIQQANYFGSLTQASAIRVGSFQGEEIYAPFKSLLPMVNPDDIVFGGWDISNMNLADAMARAKVFDIDLQKQLRPYMESMVPLPGIYDPDFIAANQEERANNVIKGTKQEQVQQIIKDIKAFKEATKVDKVVVLWTANTEGYSNLVVGLNDTMENLLAAVDRNEAEISPSTLYAIACVMENVPFINGSPQNTFVPGLIDLAIARNTLIGGDDFKSGQTKMKSVLVDFLVGAGIKPTSIVSYNHLGNNDGMNLSAPQTFRSKEISKSNVVDDMVNSNAILYEPGEHPDHVVVIKYVPYVGDNHMVWMFTGLIEDGIAVDHIINNIALGDFLRAEGLRG

SEQ ID NO: 154864 - protein, 510 aa, Glycine max
  Clone ID: PAT_MRT3847_110863C.1.pep
MFIESFKVESPNVKYTETEIQSVYNYETTELVHENNNGTYQWVVKPKTVKYEFKTNTHVPKLGVMLVGWGGNNGSTLTGGVIANREGISWATKDKIQQANYFGSLTQASAIRVGSFQGEEIYAPFKSLLPMVNPDDVVFGGWDISNLNLADAMARAKVFDIDLQKQLRPYMESMVPLPGIYDPDFIAANQGDRATNVIRGTKKEQVQQIIKDIREFKESTKVDKVVVLWTANTERYSNVVVGLNDTMENLFASLDRNEAEISPSTLYAIACVMENVPFINGSPQNTFVPGLIDLAIKRNSLIGGDDFKSGQTKMKSVLVDFLVGAGIKPTSIVSYNHLGNNDGMNLSAPQTFRSKEISKSNVVDDMVNSNAILYEPGEHPDHVVVIKYVPYVGDSKRAMDEYSSEIFMGGKNTIVLHNTCEDSLLAAPIILDLVLLAELSTRIEFKAENEGKFHSFHPVATILSYLTKAPLVPPSTPVVNALSKQRAMLENILRACVGLAPENNMILEYK

SEQ ID NO: 154865 - protein, 121 aa, Glycine max
  Clone ID: PAT_MRT3847_110864C.1.pep
MNCKINSLSSPIPCKLYTKKPRLRRTNTILFSFSSSEKQQKTISTSTSIEAYTVSFKTEKGCKLGISRYPDFEYDAEGGIGTGVGAKDTKNDPANNDLPVSFDLETLYIPPLTSSTTKFLG

SEQ ID NO: 154866 - protein, 229 aa, Glycine max
  unsure (1)..(229): unsure at all Xaa locations
  Clone ID: PAT_MRT3847_110865C.1.pep
MDKLLLWMSVLXTAFFAEAFAQTDLNQKVFVFPVESETDYVKLIPWLEKPLQNFTLCFRAYSDLSRSQSLFSYSVNSRDNELLIYKDKVGQYSLYIGNSKVTVRGLEEFPSPIHFCTSWESSSGIAEFWVNGKPWVKKGLQKGYTVKSSPSIVLGQEQDTYGGGFDKTQSFVGEIADLYMWDSVLTPENIHSVDRGFPPNPNILDWRALNYEINGYVVIKPRMWGNKSS

SEQ ID NO: 154867 - protein, 77 aa, Glycine max
  Clone ID: PAT_MRT3847_110866C.1.pep
YILIIYMNKIVHEYDTLYLEFGSSVVILSTVPLDLYSRFISLLSNFNFLSSLFFFLYFLAAKATRFKQRIHTFTSLV

SEQ ID NO: 154868 - protein, 113 aa, Glycine max
  Clone ID: PAT_MRT3847_110867C.1.pep
PTRPQACPSQTSSIIFPFILGVFTLEDEINSPVAPATLYKALVTDADNVIPKALDSFKSVQNVEGNGGPGTIKKITFLEDGETNFALHKIQSIVDANLGYSYSVAQPRLFPNT

SEQ ID NO: 154869 - protein, 64 aa, Glycine max
  Clone ID: PAT_MRT3847_110868C.1.pep
NENEDCEGNGFFACYLLTSLSPRYKGPLISGSSLISTLLISPLKEPILEAPLYLNPKTPPPLLD

SEQ ID NO: 154870 - protein, 116 aa, Glycine max
  Clone ID: PAT_MRT3847_110869C.1.pep
SFRRDSHRVGPHQEVGALVTQCSIEKKGSLETGSLLLKHNSKALTGELQVVRGQVQQSCLWLVVLSTTTATMGVLDNVRIIISVLSWLSISISCAERFFAGAVKVPHKGCNMEKRV

SEQ ID NO: 154871 - protein, 84 aa, Glycine max
  unsure (1)..(84): unsure at all Xaa locations
  Clone ID: PAT_MRT3847_11086C.1.pep
YDGVGPCXECXWXLLWFTTLCXVFCSLFXXXLWGIAAGFFSLSLXILGGWRCPLREPHTPVVGWGVVLWPGCLGAPGVGGGWGG

SEQ ID NO: 154872 - protein, 75 aa, Glycine max
  Clone ID: PAT_MRT3847_110870C.1.pep
DLLLLSLSTITNTSKTPFNNFFLFSIGFQSLPVTLIFLSFSIFMEGHHLDHGLQQLQQHQHTHHNITTTNVEWHL

SEQ ID NO: 154873 - protein, 53 aa, Glycine max
  Clone ID: PAT_MRT3847_110871C.1.pep
MGEEVVLLDYWSSPFGKRVRIALAEKDIKYEYKEEDLRNNSPILIQINPGHKK

SEQ ID NO: 154874 - protein, 122 aa, Glycine max
  unsure (1)..(122): unsure at all Xaa locations
  Clone ID: PAT_MRT3847_110872C.1.pep
TTTDLVYRLESQIYGDCERAMYRXMSLSRDRDSDAVNAAIKNGIMDSHVNAXDACVLSADELLXGRPNFHRLYKSSLLEDVAINTNGNLLQLLDRLATXYRYEADAINVKFSQTEANVLHES

SEQ ID NO: 154875 - protein, 51 aa, Glycine max
  Clone ID: PAT_MRT3847_110873C.1.pep
RHVSPSLEAIGRKIRNGLSHTVILTNKKNPKLRLTAPPHLPFCQYQCETPL

SEQ ID NO: 154876 - protein, 87 aa, Glycine max
  Clone ID: PAT_MRT3847_110874C.1.pep
WVEIDGVRLLEDHVHRLMVKKATPDWLPFLPGSSFWVPPPPSPLLHTFSIPSHPFFLQQDDESGNAIATPRGTEVTVQLKELSLDST

SEQ ID NO: 154877 - protein, 71 aa, Glycine max
  Clone ID: PAT_MRT3847_110875C.1.pep
DEKWGICCITNDSKSALQGHTPWSIERHSELNIGSTHELEYFQGHNRTSLAQSQYSTHILNTSKSITFNAR

SEQ ID NO: 154878 - protein, 61 aa, Glycine max
  Clone ID: PAT_MRT3847_110876C.1.pep
LLFTHPLIHQTLNWIVYLNVKEHYPVNSPNLCTRRPILFLPQNFFRETSPRCLDSDSSLAS

SEQ ID NO: 154879 - protein, 118 aa, Glycine max
  Clone ID: PAT_MRT3847_110877C.1.pep
MSPSPTNLLQQFQSRGLNFIVVQSLPTFQFKKNEREQDKTISVECAICLGEFEEGEWLKRLPHCSHSFHVSCIGTWFQSHSNCPLCRSFVHHHILQCSIASHTLLQPLRREDFERVQR

SEQ ID NO: 154880 - protein, 133 aa, Glycine max
  Clone ID: PAT_MRT3847_110878C.1.pep
HTLFCGGDYNRVHRLMSQPIVMCPVETTCSNAFFINGGQQTIVGILKMIVLSLLIHLLYEYSRRPLILITIYTTILTFVLLVWRQSEEYVYAYYVLHTVSNIITQRSIISICVAYATDVVNESKEAPVIWLDY

SEQ ID NO: 154881 - protein, 240 aa, Glycine max
  Clone ID: PAT_MRT3847_110879C.1.pep
MVRAGEQEQEGYKAKLFNFRGIFEGTGRLTKSLSVDTATVLEPTEDGAASSRSQGSKPLNDLDKMIPKARVISKEEISVKEAKEKLLQDMEQMKERFSKLLLGEDMSGGGKGVSSALALSNAFTNLAASIFGEQKRLEPMPAERKAKWRKEIDWLLSVTDYVVEMVPSQQKSKDGSNMEIMTTRQRTDLHMNVPALRKLDAMLLECLDNFKDQNEFYYVSKGSDDSDQDSAKTKNDDKWW

SEQ ID NO: 154882 - protein, 69 aa, Glycine max
  Clone ID: PAT_MRT3847_11087C.1.pep
ILLNNHFSSCRCSFPPFGLTEYDNSFTSTSIALHQQRIKQRIDVIQHKLTPKPRSPTRLSTVVIKVQVK

SEQ ID NO: 154883 - protein, 66 aa, Glycine max
  Clone ID: PAT_MRT3847_110880C.1.pep
EELDDNSLFKKQGVRQNDTDTAAHLLYLSVEGQIRDSHTLRFALENLTEKIDEPVVDADTRSSFNM

SEQ ID NO: 154884 - protein, 67 aa, Glycine max
  Clone ID: PAT_MRT3847_110881C.1.pep
MDAAKKIDCGGKCNSRCSKARRQKMCIRACNSCCKKCRCVPPGTSGNRELCPCYARLTTHGGKLKCP

SEQ ID NO: 154885 - protein, 89 aa, Glycine max
  Clone ID: PAT_MRT3847_110882C.1.pep
TIQHSSIAFIPTTNRPPSLMSFIHVANVRVTAPARGSLSCSLAMRDLIISEKDALMQVLGILNINCAFDRKPLPMSLPNEPPIEHVHGL

SEQ ID NO: 154886 - protein, 90 aa, Glycine max
  Clone ID: PAT_MRT3847_110883C.1.pep
LSPTPRLGSSKLFSRQRAWSLGAFIFLAGVITTPPYWRRLFPWSRTKGREVSFPPPPDKKLGISLLDRLKKKTNKCIEKNFSMHNKYEFR

SEQ ID NO: 154887 - protein, 170 aa, Glycine max
  Clone ID: PAT_MRT3847_110884C.1.pep
MEDDKRKRKNKKKKNKQNKNVENGVGETANRDQNLVSNGKDEHTNLSETANEQSSNFADGQSTNMDSNGHLPNGKECAISEETIRKLKEENDIHIQKETLSKETIRKLKAENDMHIQKEAIMEETIRKLTEQNDLHMQKEIASEETIRKLKKHMIWSVQERGPISREIAS

SEQ ID NO: 154888 - protein, 74 aa, Glycine max
  Clone ID: PAT_MRT3847_110885C.1.pep
ITAIQPFTLTQPPSFDHRATHAHSPSISRVVSLKSIPWSPQTLFVSDTIMIESVKVHALTEKDIMSVRFEGIPG

SEQ ID NO: 154889 - protein, 161 aa, Glycine max
  Clone ID: PAT_MRT3847_110886C.1.pep
MPVTNTTTPTVAEHIKWRRPRNQFNHHHHHHHHPISETDPNPQIPSIIQSTRCKSTISSLLLSTFSNNTSNNATAHSKKKSNFSASTFRGLGCTAGSSQQVSVPAVIRSSADWQGKKTRKKKHKRSNRSSKNKTFHGGVLEGSNPGCVDSQDVWCGPGIVF

SEQ ID NO: 154890 - protein, 263 aa, Glycine max
  Clone ID: PAT_MRT3847_110887C.1.pep
FTHRDDDTLAEDQALLKGSKSTSKLWNQFTIFSKDMKELLHDQVYVINVLGYIAYNFVIGAYSYWGPKAGYSIYHMNNADLLFGGITIVCGIVGTLAGGLFLDRISSTISNAFKLLSGATFLGAIFCLIAFLFKSLSGFIVFFSMGELLIFVTQAPVNYVSLRCVKPSLRPLSMAISTVSIHVFGDVPSSPLVGVLQDHINDWRKTALCLTSIFFLAAVIWFIGIFLKSDVYDKDDEEQSATTRGGKLTPLLDGSSDTTSSQV

SEQ ID NO: 154891 - protein, 220 aa, Glycine max
  unsure (1)..(220): unsure at all Xaa locations
  Clone ID: PAT_MRT3847_110888C.1.pep
MNIFVPKFLLLSAVSSFSNSSSIKRERDQVLGGEEFEVVVEESSXRVVGDVDEDGNPRKKLRLTKEQAAVLEENFREHSTLNPKQKQELAMKLNLRARQVEVWFQNRRARTKLKQTESDCELLKKCCDTLTVENKKLQKELQELKSMQATPVPLYMQIPAATLSICPSCERICGGNENNGDNNNNGSSHTTTLLIGSKTHHHSFYKSNNYPFPHSSSAAC

SEQ ID NO: 154892 - protein, 74 aa, Glycine max
  Clone ID: PAT_MRT3847_110889C.1.pep
PVLSQSIVGSSQASCSRFMYSVDPAVVASSHLCSWRPMAAAQATRQDPVMVSPRIVIDQPNYVAGACRVGVSIV

SEQ ID NO: 154893 - protein, 55 aa, Glycine max
  Clone ID: PAT_MRT3847_11088C.1.pep
PFLLFYALYLYYSIISAFFPLNTPKSNPFSFISAKTLPQKRNIPHFLSFHFTPLN

SEQ ID NO: 154894 - protein, 66 aa, Glycine max
  unsure (1)..(66): unsure at all Xaa locations
  Clone ID: PAT_MRT3847_110890C.1.pep
PKGFXRASKRSWHAPFVFLCFLGKGELISSKVFSVSVFNVEQIFTVAAPSCXESPLQPXGDPHYVS

SEQ ID NO: 154895 - protein, 123 aa, Glycine max
  Clone ID: PAT_MRT3847_110891C.1.pep
KDVKLSDIVFPSVVLIASTVSSLSLSISHTHSLTFSLYTLSPIVSFSPFLSFVALRGKCFSAITFSKKKVRVSQQYKIKDGGFGELISYLSQINRERESVCVAEKKREEREAVALTLRERVRA

SEQ ID NO: 154896 - protein, 50 aa, Glycine max
  Clone ID: PAT_MRT3847_110892C.1.pep
GHRIHRHRKNMKTARLRFVINYAPRKFSHPWDIPMPTKVGTLLSSPTINL

SEQ ID NO: 154897 - protein, 141 aa, Glycine max
  Clone ID: PAT_MRT3847_110894C.1.pep
MALRLRLKVSSIGSPFLQLGSSASAACSVSKLGFHPPRLQLNKNSHPIRLFVRAARIESKGVTLGFRTPQFQLPEPLTGTTWTLDDFEAYPALLVMFICNHCPFVKHLKKDIVKLTKFYMEKGLAVIAISSNSVATHPQDG

SEQ ID NO: 154898 - protein, 98 aa, Glycine max
  unsure (1)..(98): unsure at all Xaa locations
  Clone ID: PAT_MRT3847_110895C.1.pep
ITVHPEKNEGNVFFFKKRHWGRYSAKIINPGNKNRAWIGTVYTLXDAKCDYDDTDLEFLGPKDKTNLPLPYENVNNSNPRQRTNNQTSSRHCDINTDN

SEQ ID NO: 154899 - protein, 124 aa, Glycine max
  Clone ID: PAT_MRT3847_110896C.1.pep
LDVEFYDGEFFLSQKLSNYFAQLEERSYERIEKLNTYVNDLYKTLDFDFLFFNESLDIKQDDELDYLENLKNEKDFGDIGRIYENEFPEIKIQYGEEKIMPGDCNENFLDDNLDEEYDKIFSEW

SEQ ID NO: 154900 - protein, 80 aa, Glycine max
  Clone ID: PAT_MRT3847_110897C.1.pep
FWKRVLNYYYDNNSKILIIYLLSLLSHFHPIFFLSLTSFSVDVTYCIYHFLSLFFFFSSYHTPLSTVNPLHFEIDKYNCS

SEQ ID NO: 154901 - protein, 188 aa, Glycine max
  unsure (1)..(188): unsure at all Xaa locations
  Clone ID: PAT_MRT3847_110898C.1.pep
FWGSPFVLRVIWVLELKGGRDQYVEEVGNKSAMLLQYNPVHKKLPALVHDGKPLAESLVILEYIDETWKQDPSLLPHDPYEKAXRFWSEFVDEKXVMATFSKGGEEQKKAAQEARENLXIAIGWLGYWVRIVEEIVGVNLINEELMAKLDAWFDNFLELPVINECMSPRDKLLNHNKAFHKLLTSSST

SEQ ID NO: 154902 - protein, 229 aa, Glycine max
  unsure (1)..(229): unsure at all Xaa locations
  Clone ID: PAT_MRT3847_110899C.1.pep
MARESSLTLIGFWGSPFVLRIKWALELKGIQYQYVEEDLSNKSAMLLQYNPVYKKVPVLVHDGKPLAESLVILEYIDETWKQDPSLPHDPYEKAKARFWSKFSNTQPFXSPCVPAVMATFSKGGEEQQKAAQEARENLKTLEGGLEGKRYFGGEKIGFADIAIAWLGYWIRIVEEIVGINLIDKELMAKLDAWFDDFLELPVIKECMPPCDKLLKHNKAFHKLLTSSST

SEQ ID NO: 154903 - protein, 91 aa, Glycine max
  unsure (1)..(91): unsure at all Xaa locations
  Clone ID: PAT_MRT3847_11089C.1.pep
RNFEEFKVPVXEIXWXSRSXLXASALWRPTXRXXETXXXTXXTIASEREXRHFGXVRPCXRTXSXKLCXXSSSAFXXCIPXXEDGXHWFLG

SEQ ID NO: 154904 - protein, 97 aa, Glycine max
  unsure (1)..(97): unsure at all Xaa locations
  Clone ID: PAT_MRT3847_1108C.1.pep
GQIRHDEWVVICNAPVLSETGENYNTVVCLAFKIIFLSXRTLDTHAVTQANLQNAGYHTWEKLILKDPHDPSTPNAHSYTASMRRKLITHGYSIHEI

SEQ ID NO: 154905 - protein, 133 aa, Glycine max
  Clone ID: PAT_MRT3847_110900C.1.pep
DSYLHHALTSPHSATNQQPVTTTAPSRLLHLREQSRRLLSLARALLLSLCCTTRRHDSSTRLAQQQSPSHSLLILCQTNGTQIVAKDPAMLLRKTKMKKLSLSNKSFPLVLQTSSVKAIYLACVHNEIEGPRQ

SEQ ID NO: 154906 - protein, 66 aa, Glycine max
  Clone ID: PAT_MRT3847_110901C.1.pep
HWHCTDKVSHKQNRSFDNALTIVSGAVSTITFSWRSRSVDVAKSTTAFNRSWSLKNGCSSLSTFSH

SEQ ID NO: 154907 - protein, 63 aa, Glycine max
  Clone ID: PAT_MRT3847_110902C.1.pep
TLGYKLNMKEYCIYKKQNILKEKNTIDLRELVFAFASSSKTQSKSNERKQKVIKLIREGYGFD

SEQ ID NO: 154908 - protein, 229 aa, Glycine max
  Clone ID: PAT_MRT3847_110903C.1.pep
PLTVAKDYGEVELFGVGGSPFARRVQIALELKGVQYTYFEEDLRNKSDLLIKYNPIHKKVPVLVHNGRPLAESLVILEYIDETWENHHPILPQQPYDRALARFWSRFIDDKCMPAISKAAFTADKEERDKGTEESLESLQILENVLKHKFFGGETTIGIVDIAAGFIAFWLPAIEEAVGLKLLTNEKFPKLYKWGEDYTNHPVVKKNLPQRDRVVGFFKARYASITASK

SEQ ID NO: 154909 - protein, 66 aa, Glycine max
  Clone ID: PAT_MRT3847_110904C.1.pep
TGPKNIRRNDPRSIKKKNELLNRILPFRWEIFFFPNIPNPLNNPCYTIYKVNREVSLGCLPEDNIE

SEQ ID NO: 154910 - protein, 62 aa, Glycine max
  Clone ID: PAT_MRT3847_110905C.1.pep
MTGTWRRRCSFSTARDCKRLALLEEVKANALGFRFLGSSNPPASSGFCFCFFLVFFFLLVLA

SEQ ID NO: 154911 - protein, 105 aa, Glycine max
  Clone ID: PAT_MRT3847_110906C.1.pep
QIRGMHTLIRDRDISKHDFVFYSDRLIRLVVEHGLGHLPFTEKQVVTPTGNHPPLSSVLAIFMFFITPLVWGTRFMLCELQHVWERSDRSTVGHKWRFMLTVLIN

SEQ ID NO: 154912 - protein, 92 aa, Glycine max
  unsure (1)..(92): unsure at all Xaa locations
  Clone ID: PAT_MRT3847_110907C.1.pep
MPKMDGDEATKSNQXSEGGTSRLIPIGALSAHAMAGDEAKGLXVGMNGWLTGPIGFXMMVAAILSVTKRRWYLVSHKAHQANKRLAQASRNV

SEQ ID NO: 154913 - protein, 42 aa, Glycine max
  Clone ID: PAT_MRT3847_110908C.1.pep
GIYTPFVSTGNQLANVLTKGLSGSTFQSIVSKLGMDNIHSTS

SEQ ID NO: 154914 - protein, 44 aa, Glycine max
  Clone ID: PAT_MRT3847_110909C.1.pep
SRRRILPYKKRVIIEESDRESRGSNFEEQGYGKVLFLGLGFYLL

SEQ ID NO: 154915 - protein, 40 aa, Glycine max
  unsure (1)..(40): unsure at all Xaa locations
  Clone ID: PAT_MRT3847_11090C.1.pep
XLHSNAYVKLRNSDSXXLXXRAQSVKLXACCXSMXAXIHT

SEQ ID NO: 154916 - protein, 53 aa, Glycine max
  Clone ID: PAT_MRT3847_110910C.1.pep
RSYARRTESSRANFRRQYYTCACHRPPLGEEERGPSSSLISFYTGLISVFNCG

SEQ ID NO: 154917 - protein, 75 aa, Glycine max
  Clone ID: PAT_MRT3847_110911C.1.pep
ANDEVDITSDVTGVSAETGAHDSVRMLHRESALSSRNVNGSGFTFAAASSTEAQSCSPKRLHNKRNHGHDSYNYT

SEQ ID NO: 154918 - protein, 94 aa, Glycine max
  Clone ID: PAT_MRT3847_110912C.1.pep
PLITLKITHTTISASAKSSDVAHPHWSHFTTRNHNKKKPKPLHFLPDQPHHSPHRNSTLPSPPYHPPPQKRFPPPLLLFFFFFSLFRFPLSLVV

SEQ ID NO: 154919 - protein, 125 aa, Glycine max
  Clone ID: PAT_MRT3847_110913C.1.pep
KGRELGLILKRIPFFIFICQNQTLYLSAHLYITRGVALIINLEALHHHRPLLILLRLCCWFGFSAFTVYSLLGLSQISLHLTIVNLTVSSSPFEATLIFDYIHAYFFTLLSSFAPSILQLFFYFF

SEQ ID NO: 154920 - protein, 65 aa, Glycine max
  Clone ID: PAT_MRT3847_110914C.1.pep
MEEKAKAEQKKIGMTETWLKKHRLLYNGATRHPLIISIRDGTINTASFKTWLVSNSSPFFFKLLV

SEQ ID NO: 154921 - protein, 50 aa, Glycine max
  Clone ID: PAT_MRT3847_110915C.1.pep
ARAISLIAGESTDYLEPFSSYESRLDTSTRTHCSCSSELKQAHIHIRSKS

SEQ ID NO: 154922 - protein, 217 aa, Glycine max
  unsure (1)..(217): unsure at all Xaa locations
  Clone ID: PAT_MRT3847_110916C.1.pep
MDSTSQAYQHRPLTIKLWPPSQSTRLMLVERMTKNLTTPSIFSRKYGLLSKEEAEEDAKHIEDVAFATATQHFEKEPDGDGSSAVQIYAKESSKLMLEALKRGPKVKEDGELITEKSGSTAETVFDISGGRRDFISGEEAAEVLKPLTGPKYYTKICFSNRSFGLDAARVAEPILLSXKDQLKEVDLSDFIAGRPEAEALEVMTIFSSALERSVLRY

SEQ ID NO: 154923 - protein, 60 aa, Glycine max
  Clone ID: PAT_MRT3847_110917C.1.pep
PRVRSLAIVFVYMLVPETKGKSLEQIEIMFKNEHEREGSEMELGDVEVEQLVQDKTVLTN

SEQ ID NO: 154924 - protein, 82 aa, Glycine max
  Clone ID: PAT_MRT3847_110918C.1.pep
DPQLKLVLFQVTGSLLKCLPKKYSIVWKTWQGHGLNHFQNSKLMHREKIIHEKSLSPILPVMHHIRPLTMEMWKELIIRMNV

SEQ ID NO: 154925 - protein, 137 aa, Glycine max
  unsure (1)..(137): unsure at all Xaa locations
  Clone ID: PAT_MRT3847_110919C.1.pep
GGGGARDALLSSLFLIHKATIYGPAYSTTTCPHYLSAPSHKCHFLIHSLMEGVSSFLLQTATKPIKHIXLYIQNHYYIIKTDILFYPYKIIXPPYNRTLSHAIIFSXYPDLHTSNIIHYFPTQTFHFAFNXYFNRLF

SEQ ID NO: 154926 - protein, 50 aa, Glycine max
  Clone ID: PAT_MRT3847_11091C.1.pep
KNIESFLCQVILSPNYVCLRNFYNNSILMELLLVFVLIRIIPSLFLLISS

SEQ ID NO: 154927 - protein, 80 aa, Glycine max
  unsure (1)..(80): unsure at all Xaa locations
  Clone ID: PAT_MRT3847_110920C.1.pep
LTKLEVLDLSQNPYLVSEIPEDIGXLGNLKQLLLQSSSFQGVIPESLVGLXSLTHLDLSXNXXQXGXXXXXXXSSLKNLV

SEQ ID NO: 154928 - protein, 74 aa, Glycine max
  unsure (1)..(74): unsure at all Xaa locations
  Clone ID: PAT_MRT3847_110921C.1.pep
MTLGGNKNRGFTDQTLPDELVKRGSTAEEPCAPQGLMLEIDDYPNAXDGLEILDANKTCEHEHVYVYYPTNAAI

SEQ ID NO: 154929 - protein, 89 aa, Glycine max
  Clone ID: PAT_MRT3847_110922C.1.pep
NVACHLFCFFFKIKNILWLLYGSARPFFLLLFRLLAGKAIDRGLASCGWVYTRQRKLVSQRIVWVQKFCYENSKVQTPKYLLFKHNKSS

SEQ ID NO: 154930 - protein, 90 aa, Glycine max
  Clone ID: PAT_MRT3847_110923C.1.pep
GHLNIHEEVCWRKEKHANEDGDSRGERDIHISANPGSNAHQNIKTSHFCLSYTGKEFASIKASGDAKRKDELDPNAYRPPDRKMMRLRPQ

SEQ ID NO: 154931 - protein, 379 aa, Glycine max
  Clone ID: PAT_MRT3847_110924C.1.pep
MGRRKNNSNNNQCSSSKEDADMNSNHLRFEEADEAVDESSNLDQSMCDIEESDDKTSADYYFDSYSHFGIHEEMLKDSVRTKTYQNVIYQNKFLFKNKVVLDVGAGTGILSLFCAKAGAEHVYAVECSHMADMAKEIVEANGYSNVVTVLKGKIEEIELPVAKVDIIISEWMGYFLLFENMLNSVLYARDKWLVDGGVVLPDKASLHLTAIEDADYKEDKIEFWNNVYGFDMSCIKKQAIMEPLVDTVDQNQIATNCQLLKTMDISKMAPGDASFAAPFKLVAERDDYIHALVAYFDVSFTKCHKLMGFSTGPRSRATHWKQTVLYLEDVLTVCEGEAIVGSMTVAPNKKNPRDVDIMLKYSLNGRRCNVSRVQYYKMR

SEQ ID NO: 154932 - protein, 74 aa, Glycine max
  Clone ID: PAT_MRT3847_110925C.1.pep
VVGSVCGLSVMLLVDSGSYIIAVLCSVEVCLPVLICIRRISGPVYRLLSLTFGLSWTRPSLWPPPITLTSWSSG

SEQ ID NO: 154933 - protein, 37 aa, Glycine max
  Clone ID: PAT_MRT3847_110926C.1.pep
LFPTMKRCIPSFISTMEFKIATIHSDSHLAPVRTPGS

SEQ ID NO: 154934 - protein, 73 aa, Glycine max
  Clone ID: PAT_MRT3847_110927C.1.pep
AATIVKVYSPSVAMLLTPVVSVSLFGFHLSLAFFLGPVVVSVPINLPSAGKIQKYQGLRSSVFPKRDFLIHCC

SEQ ID NO: 154935 - protein, 57 aa, Glycine max
  unsure (1)..(57): unsure at all Xaa locations
  Clone ID: PAT_MRT3847_110928C.1.pep
MTTGTTNHLKRLNAPKHXIRNQPTGTHPPKPSSAPHKSTECPTLTLILPNRLKNALT

SEQ ID NO: 154936 - protein, 75 aa, Glycine max
  Clone ID: PAT_MRT3847_110929C.1.pep
SSKHSGQQVPTVPANTPTFPIAILIIANPIHTHNYTLSENDVHSQFHTTYYPEPYSVTPGYPNQLSNLHLSTYTH

SEQ ID NO: 154937 - protein, 128 aa, Glycine max
  Clone ID: PAT_MRT3847_11092C.1.pep
SVKDLKTHRLIAFTWLSLVPKMVLHLVPLANLHLQATRPAVVGFAFPLLLKFLMGFRIFRDNALHQSRLFLFQLGQIAFNTEARVSNVARMERALRLIWRTLTPSPSSTTDNSQVTQQSLHDLSMLSL

SEQ ID NO: 154938 - protein, 143 aa, Glycine max
  unsure (1)..(143): unsure at all Xaa locations
  Clone ID: PAT_MRT3847_110930C.1.pep
MAAQREEDIKMMLAAQVHIGTRNADSKMADYIWRRRNDGIHIINVGKTWEKLMLAARVIVAVENPEDVIAISARPYGQRAVLKFAQYTGCQAIASRFTPGTFTNQITKQFREPRLLIITDPCTDSXAVRESSFVNVPVIAFCD

SEQ ID NO: 154939 - protein, 79 aa, Glycine max
  Clone ID: PAT_MRT3847_110931C.1.pep
HDLRPPTIKMRTPTIPRLSMHQQMPLISFPRLLHHPLLMVKRRMKLVDTTLTATHAQALSQTILLRVTFDAITELTCTH

SEQ ID NO: 154940 - protein, 66 aa, Glycine max
  Clone ID: PAT_MRT3847_110932C.1.pep
FLLKNLMDHDRIFFKILFTKFEYEILPKKLSLVRSPFYVFIVRFMKINLITLFFHCLSFTLLYKTT

SEQ ID NO: 154941 - protein, 102 aa, Glycine max
  Clone ID: PAT_MRT3847_110933C.1.pep
MPGHRRGGLTWCSYGQPRICTPVLLQFGPSRPLQHSVVSPDASPCLHSSIGLFWTARQLIRSVSLNCAPSLLAGDLETPGSRSTAPPPPPRRSKPILPARIT

SEQ ID NO: 154942 - protein, 105 aa, Glycine max
  Clone ID: PAT_MRT3847_110934C.1.pep
MSLVELSKSRWFNGYQKIFEHNSAQLKCRMRFGVYLPDNQPESKLPVLFYLSGLKCTEENFVVKSAMQRFASNRKIIVVNPDTSPRGVVTGDGDDPSFGAAAGLE

SEQ ID NO: 154943 - protein, 136 aa, Glycine max
  Clone ID: PAT_MRT3847_110935C.1.pep
MKFMKLGSRSDTFYTAESVRTISSEVSSDLIIQVKGTRYLLHKFPLLSKCLRLQRLCSESSDSPQHQIVQLPDFPGGVEAFELCAKFCYGITITLSAYNIVAARSAAEYLQMTEDVEKGNLIYKLDVFFNSCILNG

SEQ ID NO: 154944 - protein, 56 aa, Glycine max
  Clone ID: PAT_MRT3847_110936C.1.pep
AKRGIRVEKNTSRKPHFIQCEITHLGPFKTHSGLITIHKSLFRQTEMSNGIMVNGE

SEQ ID NO: 154945 - protein, 90 aa, Glycine max
  unsure (1)..(90): unsure at all Xaa locations
  Clone ID: PAT_MRT3847_110937C.1.pep
FNYLNESIMELVGVLPSVKXLILAANFIRGPFLKELSLLPNLEVLDLHMXMLGNGSHFATXDYKNKSTLKKLKTLDLSINNLNESIMEFV

SEQ ID NO: 154946 - protein, 50 aa, Glycine max
  Clone ID: PAT_MRT3847_110938C.1.pep
NNSILSKQHKTIPETPFFFKTLVELTPTPNIFMQRVRLPFCQLYVDRFVV

SEQ ID NO: 154947 - protein, 105 aa, Glycine max
  unsure (1)..(105): unsure at all Xaa locations
  Clone ID: PAT_MRT3847_110939C.1.pep
ESEGGLIETWNPNNKPFQCAGVALSRCTLNRNALRRPSYTNVPQEIYIQQCNGIYGMIFPGCPITYLXPHDSQQRGLIHMPQYRHLTVHRYRYVDLIAVPTCDAW

SEQ ID NO: 154948 - protein, 89 aa, Glycine max
  unsure (1)..(89): unsure at all Xaa locations
  Clone ID: PAT_MRT3847_11093C.1.pep
RLMGIRVGSKPLQVPKEIFAPDHXRXRVRQWXDXGYLDSXFLLGSVYTALRNEFVAQTRGVLTLLEDPNFVFEGAMDLCFMVRRGGAPP

SEQ ID NO: 154949 - protein, 142 aa, Glycine max
  Clone ID: PAT_MRT3847_110940C.1.pep
LEDAADMSTSKLEVSDETGQVSDGSAITAKKYSRDFLLKFAEQCTDLPGGFEITADIAEALMGANVSSHVIEHSSTGRIIDRSGGMSRRGSGVIEEDKWNKVSNAFHSGMRLDGAGGNARFRPGQRGNFGVLRNPRTQTPLQ

SEQ ID NO: 154950 - protein, 97 aa, Glycine max
  unsure (1)..(97): unsure at all Xaa locations
  Clone ID: PAT_MRT3847_110941C.1.pep
MLYSYTKEHTDPLKPSVDTVKEAGKTVXARIYDXLHLMPDXVLKYAXXKVSXLDEHXPSNXKKVSSETCSGVCEVRRDEXSTYAKTSDSKYEAYTNE

SEQ ID NO: 154951 - protein, 85 aa, Glycine max
  unsure (1)..(85): unsure at all Xaa locations
  Clone ID: PAT_MRT3847_110942C.1.pep
VRLRWSRRKIXDAVRINSGHQXLSLETVRRRALLSLFSLXXXXXXXXXXAFSLYNKLSLSRNRQSKXEKKKDEEDGESERKRFLI

SEQ ID NO: 154952 - protein, 52 aa, Glycine max
  Clone ID: PAT_MRT3847_110943C.1.pep
HDYVYHGAFEREWNTVKHIRISSFLTCCQQRKKGMGKHYKLFSRKHMNAMRQ

SEQ ID NO: 154953 - protein, 47 aa, Glycine max
  Clone ID: PAT_MRT3847_110944C.1.pep
PRAGTRLCQERRHCQLLLFNGPSLQSLENYVRILRSLVYEVIIAKVN

SEQ ID NO: 154954 - protein, 115 aa, Glycine max
  Clone ID: PAT_MRT3847_110945C.1.pep
SVNPSLQRPAVSKQPTAGVRPHSKWNNDNMSSLDTRPSDRPPQKLSPSLPTPKKETLTTHSFIGPNGLDRQWLGPSAEIQDQCPRRSDPTHAKDTSLNQAALYDPGAPKDGEQGP

SEQ ID NO: 154955 - protein, 99 aa, Glycine max
  Clone ID: PAT_MRT3847_110946C.1.pep
GKHPGELLTMLSSNKYLSSMEEPQMLLKDVLDQRLRLPTDQLAEAVVFTMTIALACTRAAPESRPMMRAVAQELSATTQACLAEPFGMITMSKLAGFQK

SEQ ID NO: 154956 - protein, 100 aa, Glycine max
  unsure (1)..(100): unsure at all Xaa locations
  Clone ID: PAT_MRT3847_110947C.1.pep
MGFVGGEEAIQEPTGHDERILVSVRLRPLNEKELARNDVSDWECINDTAIIYRSNLSASDRSLYPTAYSFDSVFRTNSSTKXVYEKAAKEVALSXVGGIN

SEQ ID NO: 154957 - protein, 144 aa, Glycine max
  Clone ID: PAT_MRT3847_110948C.1.pep
MDSVGGEEAIQEPTDHDERILVSVRLRPLNEKELARNDVSDWECINDTTIIYRSNLSATDRSLYPTAYSFDSVFRTDSSTRQVYEKAAKEVALSVVGGINSSIFAYGQTSSGKTYTMSGITEYTVADIFNYIEKHTEREFMLKF

SEQ ID NO: 154958 - protein, 50 aa, Glycine max
  Clone ID: PAT_MRT3847_110949C.1.pep
TAARRRQKGTHQTHKFDCPSFEQHSWKISILLYHNLFLDGFPWKWLYSNA

SEQ ID NO: 154959 - protein, 92 aa, Glycine max
  unsure (1)..(92): unsure at all Xaa locations
  Clone ID: PAT_MRT3847_11094C.1.pep
YHFLRHYLKPERPQEVXKILKLSXVTLYNILFSLASHIFWALWGLIQAKMSAIEFDYLGYFFLRYHEYKRHKEKYFLLAQSYLSGCKNEMSR

SEQ ID NO: 154960 - protein, 83 aa, Glycine max
  unsure (1)..(83): unsure at all Xaa locations
  Clone ID: PAT_MRT3847_110950C.1.pep
SRLNDCCVFGLPSLWSDHTXTPPYFKHPFNTSYFCLSLFLSHQKSYHISYFNTPSTPLIFVSFFSVSLVSNNILDAHVTFFLL

SEQ ID NO: 154961 - protein, 44 aa, Glycine max
  Clone ID: PAT_MRT3847_110951C.1.pep
PTWFLSRHSLKSLQFNLWHIIYRRPQRIDSTEISAKPVSFDNTV

SEQ ID NO: 154962 - protein, 60 aa, Glycine max
  Clone ID: PAT_MRT3847_110952C.1.pep
FAPPGVLCYPTPLTIKWSCLPFQQVKVFCTCDGCVKLTGPPFFFFLMFGNWSLLYKVRVI

SEQ ID NO: 154963 - protein, 47 aa, Glycine max
  Clone ID: PAT_MRT3847_110953C.1.pep
IIFGNLNLNFQIIFNLHYHTCIQNPSSKVQNQKTLQIFLFQNPTQHH

SEQ ID NO: 154964 - protein, 83 aa, Glycine max
  Clone ID: PAT_MRT3847_110954C.1.pep
RSGCDNTTEWGPYQVAVTLDLYSDYIAKLASFSMTVSIIACTSVTRLSAISAQWRLFVVSATRFQRDTVISYIYETSGMKNLM

SEQ ID NO: 154965 - protein, 85 aa, Glycine max
  Clone ID: PAT_MRT3847_110955C.1.pep
FKRNRVMSRMHQVSCSTAGCSLSCSRPKDLRRETIHPQMDSDHQVLHPVLVSLMLWQPWTVRSSEGRSSELEIPTSSVFASSSLF

SEQ ID NO: 154966 - protein, 115 aa, Glycine max
  unsure (1)..(115): unsure at all Xaa locations
  Clone ID: PAT_MRT3847_110956C.1.pep
KREKPFKGPLKEKPPPGAPAPPREKSKLKTPSPPLSRGKPNTPPWERGIFNKKKAGGGNPKPEGFKSPPYPTPRGGKILGWAPPQGGGXPRSLNKPGXPRGPKPNGEQNPFGPKK

SEQ ID NO: 154967 - protein, 59 aa, Glycine max
  Clone ID: PAT_MRT3847_110957C.1.pep
RIIIPGEGTIMIMLRLLLGLFGILVYNFHLVSWVLALQHVLKTDVRYTHEYATCTFVVR

SEQ ID NO: 154968 - protein, 74 aa, Glycine max
  Clone ID: PAT_MRT3847_110958C.1.pep
VNYMNYVALKYCPFFIFFSALQIFISSHRLFLLLVLLSLSYGLPFLSLTKLFVDIFICYLTPNKIKKNREKREC

SEQ ID NO: 154969 - protein, 168 aa, Glycine max
  unsure (1)..(168): unsure at all Xaa locations
  Clone ID: PAT_MRT3847_110959C.1.pep
RFPLLVLLETVFLASVCVSLKVREAEINLFFLRSSKSFQNLFENXNGRIRLPQSFNKRPLKLENFRANWIVPFQSKPKTIFLPHHADADFPPFVSSGRAILTLVETDNRDLLHLHLGEAKRILAXTNYNLVNLSRHPNLKIIKXLALPVTKPGRXNDFFLSTTQAQPS

SEQ ID NO: 154970 - protein, 145 aa, Glycine max
  Clone ID: PAT_MRT3847_11095C.1.pep
MYRTSMSMPLMVVLGMTLVICLANGQATPPCAKHLSPCLDVMNSTKPPDTCCNPIKETQSTCFCQLVSTPGMLEGIGTTIAQALKLANLCGVNFTLTTCKASTSAPPPSLVQPPATLGGDEGGASRAAFTGLSFALFLCACVLFN

SEQ ID NO: 154971 - protein, 46 aa, Glycine max
  Clone ID: PAT_MRT3847_110960C.1.pep
SIATYQRSPVWSHPMTPSDIHFILLGNQHVRFISLGNESTRCVGDP

SEQ ID NO: 154972 - protein, 47 aa, Glycine max
  Clone ID: PAT_MRT3847_110961C.1.pep
VFFEGVAFFLEKRATVLKETGIETDEAGLVAQCEVDGVCKLFFLCHC

SEQ ID NO: 154973 - protein, 102 aa, Glycine max
  Clone ID: PAT_MRT3847_110962C.1.pep
ARGTREWVGGNRRKKEETGGQVGNLDLKRGTASFGLWLGAARSQCHERGTLSFIMHHPNPYSSFLPFFHAKTNTPLSNLLQNNSEPLKSLMPNPNAIAERQH

SEQ ID NO: 154974 - protein, 98 aa, Glycine max
  unsure (1)..(98): unsure at all Xaa locations
  Clone ID: PAT_MRT3847_110963C.1.pep
FAXIMNLXQSVVGDLKLXTDGXLYEGKHXPXXNXSAGXXHVVXIPXMAQDEILSSSASXFRVAXVGXTXASLXAXXMXMWGXMXXXIXSXGSXXCDIV

SEQ ID NO: 154975 - protein, 57 aa, Glycine max
  unsure (1)..(57): unsure at all Xaa locations
  Clone ID: PAT_MRT3847_110964C.1.pep
VHLSKRNPGAPPPPKVLLFTGGIYEGPPPPPGGVXPKKKKCCVAFALGGIAKEGIHS

SEQ ID NO: 154976 - protein, 61 aa, Glycine max
  Clone ID: PAT_MRT3847_110965C.1.pep
MISYQGEQIVFNGWIYVGAYLRGLAKMRVELREHIYDMKQQKYENKVNFINYTWTIIVLLG

SEQ ID NO: 154977 - protein, 86 aa, Glycine max
  Clone ID: PAT_MRT3847_110966C.1.pep
TTLERDQDFWLGPLGGGISFHWDQAPLGERGQVRPSRKRPGGAKLSFFAFYGGAFRFRVEKNFSFPLGAHPSPKTQGSPPPPGGRK

SEQ ID NO: 154978 - protein, 68 aa, Glycine max
  Clone ID: PAT_MRT3847_110967C.1.pep
GKGPTNLAPKGRPEIELCAKNKNWSSRSKFPTQFQKGQKKKVCVCVCGVIFPVQFLKKTPKKLYQRRC

SEQ ID NO: 154979 - protein, 40 aa, Glycine max
  Clone ID: PAT_MRT3847_110968C.1.pep
VNYSRGLDNPTKCKSNFVFTSICLLFLAYELDPACSVLYS

SEQ ID NO: 154980 - protein, 88 aa, Glycine max
  Clone ID: PAT_MRT3847_110969C.1.pep
GEDIEEKKMVMGISSPSYKLKFLRPRQLEPLSLTPPSSSFRALELKEKVQPLIPWPVSPFTNLNPTNSLSYALQDGKIRLEIDFPYII

SEQ ID NO: 154981 - protein, 381 aa, Glycine max
  Clone ID: PAT_MRT3847_11096C.1.pep
MGAEVKIWNPVEVAEQARHDYASQIHPSHLTIDPSLELPQMTPLVLKLCKDMFKAWSNLDDSCFVVEKISGGITNLLLKVSVKQENCIEETITVRLYGPNTEYIIDRQRELQATKYITAAGFGAKWLGIFGNGMVQSFINAHTLSPSDMREPKLAAKIAKQLQRFHHVEIPGSKEPQLWNDVWKFFEKASVLEFDDSKMQKTYETISFKEVHDEIVELKGLCDLLKSPVIFAHNDLLSGNIMMNCEEDKLYFIDYEYASYNYRGYDIGDHFAEYAGFECDYDLYPNMNEQYHFLRHYLKPERPQEVSEKDLETLYVEANTFSLASHIFWALWGLIQAKMSAIEFDYLGYFFLRYHEYKRHKEKYFLLAQSYLSGCKNEMSR

SEQ ID NO: 154982 - protein, 69 aa, Glycine max
  Clone ID: PAT_MRT3847_110970C.1.pep
TDRSRATRGVISFRIGYSERVRSGTSFLCPLSNFMAILQHQIRPVLSEGGQSKARENHQKSMVMKRKEQ

SEQ ID NO: 154983 - protein, 89 aa, Glycine max
  unsure (1)..(89): unsure at all Xaa locations
  Clone ID: PAT_MRT3847_110971C.1.pep
XFXXXSYPSLEXSRXRIFLXLXXAXXDRIWMDLNQIYTPMVVFGLVFHRSDVMEAQIYCTXXLXIIDEKNADPAASACXXATDACIGLF

SEQ ID NO: 154984 - protein, 63 aa, Glycine max
  Clone ID: PAT_MRT3847_110972C.1.pep
EINHAIGAEGVLSVECKEVVSEYGELLWDLLVSGVRPDDVCSQVGLCFKRTKSERLGFVLLKS

SEQ ID NO: 154985 - protein, 78 aa, Glycine max
  unsure (1)..(78): unsure at all Xaa locations
  Clone ID: PAT_MRT3847_110973C.1.pep
NAISSSTLRDIQRDLENTANDLSKLHKEIASTHHMSTKYTVQPGENELVLKXLDSLIDDANVYKSIGPVLVQQDLAEA

SEQ ID NO: 154986 - protein, 805 aa, Glycine max
  Clone ID: PAT_MRT3847_110974C.1.pep
MATDRLTRVHSLRERLDETLTANRNEILALLSRIEAKGKGILQHHQVIAEFEEIPEENRQKLTDGAFGEVLRSTQEAIVLPPWVALAVRPRPGVWEYLKVNVHALVVEELQPAEYLHFKEELVDGSSNGNFVLELDFEPFNAAFPRPTLNKSIGNGVQFLNRHLSAKLFHDKESLHPLLEFLRLHSVKGKTLMLNDRIQNPDALQHVLRKAEEYLGTVPPETPYSEFEHKFQEIGLERGWGDNAERVLESIQLLLDLLEAPDPCTLETFLGRIPMVFNVVILSPHGYFAQDNVLGYPDTGGQVVYILDQVRALENEMLHRIKQQGLDIVPRILIITRLLPDAIGTTCGQRLEKVFGTEHSHILRVPFRTEKGIVRQWISRFEVWPYLETYTEDVAHELAKELQGKPDLIVGNYSDGNIVASLLAHKLGVTQCTIAHALEKTKYPESDIYWKKLEERYHFSCQFTADLFAMNHTDFIITSTFQEIAGSKDTVGQYESHTAFTLPGLYRVVHGIDVFDPKFNIVSPGADQTIYFPPTETSRRLTSFHPEIEELLYSSVENEEHICVLKDRSKPIIFTMARLDRVKNITGLVEWYGKNAKLRELVNLVVVAGDRRKESKDLEEKAEMKKMYGLIETYKLNGQFRWISSQMNRVRNGELYRVICDTKGAFVQPAIYEAFGLTVVEAMTCGLPTFATCNGGPAEIIVHGKSGFHIDPYHGDRAADLLVDFFEKCKLDPTHWETISKAGLQRIEEKYTWQIYSQRLLTLTGVYGFWKHVSNLDRRESRRYLEMFYALKYRKLAESVPLAVE

SEQ ID NO: 154987 - protein, 132 aa, Glycine max
  Clone ID: PAT_MRT3847_110975C.1.pep
NLLRAEHHLLQNLEPINLHFRSSCLQRTRSKLRTAFMLNLFTPRRLSWCFITGGQEKVELTAAELESLRSELADIAEKVAHSKAQLEHIDEVLRIARLSGYLYIRTRWATIAGEPPPLEDTEVEPWLLNLSI

SEQ ID NO: 154988 - protein, 199 aa, Glycine max
  Clone ID: PAT_MRT3847_110976C.1.pep
KVNVMDDGPAKLKFIPDHFQVPTSSIESPESRTSSITEPGTDQSPRSSCHQRTRRKLRRAFMLNLFTPRRLSWGSNTGGQEKVELTAAELESLRLELADIYSDLHRRLASFTLRWGETMEKDCWQTNAVMSPSDIISRTGLLYVIGRQHFPYDLLMLSQRNRLFLFNFSSLTANVADLLVLAGNLAYQLLNIEYCYLGL

SEQ ID NO: 154989 - protein, 196 aa, Glycine max
  Clone ID: PAT_MRT3847_110977C.1.pep
LLLSIPGTELYRERLVRALAQDLQVPLLVLDNSILAPYDIDDDLSSDYESDEDNAESGEEGSLESENEDDNDATNEEEWASSTETKSDASDNEDAIAAAEAHLKKVKAAVLRKLVPYNVEELEKEVSGESENSESSKSNDVKSSDESGCQLRKGDRVKYIGPSVKVRDEDRPLTKGQRGEVYEVNGDRVAVIFGYY

SEQ ID NO: 154990 - protein, 126 aa, Glycine max
  Clone ID: PAT_MRT3847_110978C.1.pep
SVHRYRAGKTRYAHFRQTDDLLADSGWHCSFCFRYINDFIFKMKAYSHVDRIRFKYFLNPKRIQHVICEGADLFHMLPEQYTFQEIIAKLGPIPSTFSDVHLPAYLLEQFDRYRYLLPGNCVRDSG

SEQ ID NO: 154991 - protein, 179 aa, Glycine max
  unsure (1)..(179): unsure at all Xaa locations
  Clone ID: PAT_MRT3847_110979C.1.pep
VELPAAELESLRSELADIAEREAHSKAQLEHIDEVLRSARLSGYLXIRTRWATLPGEPPPLDDTEVDDWLPRFVVLHGACIFLYLLCTDLSPQDSTLLSDIVEVRRLPCFKREDGEIQYAFCILTRHGLRYECSSNSKIQVASWLSALQSDCKLESDTFCKADYKLESDTSVSNGSIEM

SEQ ID NO: 154992 - protein, 172 aa, Glycine max
  Clone ID: PAT_MRT3847_11097C.1.pep
HASAIHKKIPVLIHNGKPICESAIIVQYIDEVWNDKAPILPSDPYERAQARFWVDYIDKKVNDTWRKMWLSTGEEHETWKKEFISVFKQLEEALGDKPFYGGDTFGFVDLGLIPFYTWFYTFETYGNFKMEAECPKLVAWAKRCLQREAVSKTLPDEKKVYDHVGLKKAFES

SEQ ID NO: 154993 - protein, 115 aa, Glycine max
  Clone ID: PAT_MRT3847_110980C.1.pep
TSAFGSSKKAAAAAVAAKLAASTSSALMLTSVLSSLVAEEAASMNGSLNSTGFTSGLPVFRPEKRQKLEKQMHASEFNSTDMGSSSFLGTLQQPSVANVPLTHSISLQPIPQPYQ

SEQ ID NO: 154994 - protein, 74 aa, Glycine max
  Clone ID: PAT_MRT3847_110981C.1.pep
RAARRRQKGGMQLFRSFLYGVGFTYNNMPASLELGTWSWRAFYFIQEVRGSFSPLNDDFILRSSLSLDGRVANS

SEQ ID NO: 154995 - protein, 91 aa, Glycine max
  Clone ID: PAT_MRT3847_110982C.1.pep
LMHAAGGWEFGMSFKVITSAPSPITLSLTGQGEGHYPTIHNHTTASTSTHNSCHRMRTIQTSKTYHCSDMQIEWIPTTNDCTHEGYCASLS

SEQ ID NO: 154996 - protein, 36 aa, Glycine max
  Clone ID: PAT_MRT3847_110983C.1.pep
DRPDFLDSKRRLFPNRAGEPGTLQKPTIYRPEIKKH

SEQ ID NO: 154997 - protein, 76 aa, Glycine max
  Clone ID: PAT_MRT3847_110984C.1.pep
VELELLPKVNVGLLGRIKGNNFSISLKNTLQRPFSPSQNAINWYKILIKFPFLLLLTIYFLVMQCYRFDAMEIVSK

SEQ ID NO: 154998 - protein, 203 aa, Glycine max
  unsure (1)..(203): unsure at all Xaa locations
  Clone ID: PAT_MRT3847_110985C.1.pep
PRVRALFNDSIDIHYPVVEMSNRSRLSCVCWNNYIQNYLASTDYDGAVKLWDANTGQGFSRFTEHEKRAWSVDFSLLCPTKFASGSDDCSVKLWNINEKNSLATIRNVANVCCVQFSTHSSHLLAFGSADYSAYCYDLRNLRNPWCVLAGHRKAVSYVKFLDSETLVSASTDNMLKIWDLNKTSPVXPSTSACSLTLSGHTNE

SEQ ID NO: 154999 - protein, 119 aa, Glycine max
  Clone ID: PAT_MRT3847_110986C.1.pep
KKPDKQESQVDKRKNNCDAETPLKCNKSTKEGMRFIWLYPSNCFAFEIKIQFTFPYAVDVHATLISFFTEVKFWSPEGRTTMSGGKHKNGKISLSGQVMFESYVFKLLRVQKVLKEACT

SEQ ID NO: 155000 - protein, 53 aa, Glycine max
  Clone ID: PAT_MRT3847_110987C.1.pep
ICLALMRIHKYSSYIFNNLNTDPPTNLNSYASTIYSILLHHSYTNLIIKTYTA

SEQ ID NO: 155001 - protein, 82 aa, Glycine max
  Clone ID: PAT_MRT3847_110988C.1.pep
NFLCVFLKRHHPPPPFFPFGATQFFPLFFFFPQRVYKKPKGPFIFPPLGFFRAFLFPIPPYFVFQIQIAPFFQYNFLPPIIS

SEQ ID NO: 155002 - protein, 93 aa, Glycine max
  Clone ID: PAT_MRT3847_110989C.1.pep
SHCNFIFPTRKREREIVTIPREKSNHRTNHHQQLTSYCCYIAIHFISPRILMKLRYNTVTKPVNSSYSTLFSTLSTCPYLLPAMIPFPSMHLS

SEQ ID NO: 155003 - protein, 71 aa, Glycine max
  Clone ID: PAT_MRT3847_11098C.1.pep
KLITKKKPNKGNQFSTQTSYFYQISLETVLGSNALTTQFAFQIFKRCFKIQRLNDSLFAIKINISKNIKSI

SEQ ID NO: 155004 - protein, 79 aa, Glycine max
  Clone ID: PAT_MRT3847_110990C.1.pep
EFPYRPTTYLRTFIYSATQHSNNAPARCSCYYYRHIYTHSSSSSLKYYNDLSDRDILHSRTQSHNEQRVPHLPICSCNA

SEQ ID NO: 155005 - protein, 79 aa, Glycine max
  Clone ID: PAT_MRT3847_110991C.1.pep
YPSFTIFLNSLLPSPSRYFYIFGLSTYLTPFSQLQPLLILPNHPTISLFITNYFTPNITFPTIPLLHNTTTTNIINLHQ

SEQ ID NO: 155006 - protein, 51 aa, Glycine max
  unsure (1)..(51): unsure at all Xaa locations
  Clone ID: PAT_MRT3847_110992C.1.pep
TIDMHWGEYYLIFIEGSNGQLENDXVLDTYTLDELVKETYNNGNPLPEFNN

SEQ ID NO: 155007 - protein, 104 aa, Glycine max
  unsure (1)..(104): unsure at all Xaa locations
  Clone ID: PAT_MRT3847_110993C.1.pep
LTXXTXEHXXXXXPXXIPXXXXXXXXXXXTTHXNHXXXXXYIXXSPXPXHXXXHTXXXXQXXXPFHXXXXXLVTXXSXXTXXXXXXXXXXTTXXPXYXXXXXLL

SEQ ID NO: 155008 - protein, 109 aa, Glycine max
  Clone ID: PAT_MRT3847_110994C.1.pep
MDGLQRSEVSFRRQGSSGLVWDDKLLSGELNKVNNNEDQKGGGSGGDLNLKVRTTPPNTTIQRSRSNGGYRTGKVSPAIEPPSPKLSACGFCSAFGKTREKGRAKHRSR

SEQ ID NO: 155009 - protein, 69 aa, Glycine max
  unsure (1)..(69): unsure at all Xaa locations
  Clone ID: PAT_MRT3847_110995C.1.pep
TITFHAHINHLLILIINTFYSNNEIFLPELIINTSYTFYKILFXNFTHNNKLHTHPQFFXIHIFPNKTI

SEQ ID NO: 155010 - protein, 133 aa, Glycine max
  unsure (1)..(133): unsure at all Xaa locations
  Clone ID: PAT_MRT3847_110996C.1.pep
ALGDCAGFLEHTGRPVXPALAQVAERQGKFFVELFHEIGNQNGGKAYFAKGMPFGEPFVYRHLGSMASVGGYKALVDFRQSKDSKGLSPAGFVSWMIRRFAYFTRVLSWRNRFYVAVNWAPPLVFGRDNSRIG

SEQ ID NO: 155011 - protein, 116 aa, Glycine max
  unsure (1)..(116): unsure at all Xaa locations
  Clone ID: PAT_MRT3847_110997C.1.pep
QLLXSSNAEGDLQTVTXSXGGGEXXGXPSLEAESEQHSEPSNANRGWIPSXRCEAEKSCLRSPQEXQSKRGRRCAKVHXRGDGXXXGXDLTXVEGVXDLLXRLGNMCNIKTELCGG

SEQ ID NO: 155012 - protein, 67 aa, Glycine max
  Clone ID: PAT_MRT3847_110998C.1.pep
DNAKLACQTSYVHFPLIKLITCSTATPGSTGRAAKSCKNPCTKALPSSSLVVTGFIKNCRNCHDVGN

SEQ ID NO: 155013 - protein, 84 aa, Glycine max
  Clone ID: PAT_MRT3847_110999C.1.pep
ELVADCVKRWFRDALKEAKAGDINMQVLVGQMYYGGYGVPRDAQNGRVWLTKASRTRSSVWKVGDKHPGYNASDSDSDELKEDS

SEQ ID NO: 155014 - protein, 68 aa, Glycine max
  Clone ID: PAT_MRT3847_11099C.1.pep
DNTFKVIFSDLTIQMKDSLLFSLTITFPTPFSPLFDYNTKQLHERVELGGDKKDDGVINSVFEQRFLD

SEQ ID NO: 155015 - protein, 62 aa, Glycine max
  Clone ID: PAT_MRT3847_1109C.1.pep
TVVTISLCGTPYKKPVTLSNIGVRPRDSYMVLTPLQKLFPNPGLRGGGKAQRFPGWPRLSTF

SEQ ID NO: 155016 - protein, 113 aa, Glycine max
  unsure (1)..(113): unsure at all Xaa locations
  Clone ID: PAT_MRT3847_110C.1.pep
SGDYAKGKACARPEDEEREPEFPHLCFXEERLNRPLIRPLSLEPSREANTYSAPAVIPPHMAIPPPPSKHIERERYFQENKKDGATLAGHLSGLSLHSDNGSSSGSGSFDFSD

SEQ ID NO: 155017 - protein, 160 aa, Glycine max
  Clone ID: PAT_MRT3847_111000C.1.pep
MVDAAERRYLEDDDSSLMKTIKGATTGLVAGTIWGTVVATWYDVPRVERNVALPGLIRTIRMMGNYGLTFAAIGGVYIGVEQLVQNYRMKRDLVNGAVGGFVAGATILGYRGRSIKTALSAGSALAFTSAFLDFGDQTLKHDAGKEYAAYTTKKRPSTEA

SEQ ID NO: 155018 - protein, 160 aa, Glycine max
  Clone ID: PAT_MRT3847_111001C.1.pep
MVDAAERRYLEDDDSSLMKTIKGATTGLVAGTIWGTVVATWYDVPRVERNVALPGLIRTFKMMGNYGLTFAAIGGVYIGVEQLVQNYRMKRDLVNGAVGGFVAGATILGYRGRSIKTALSAGSALAFTSAFLDFGDQTLKHDAGKEYAAYTTKKRPSTDA

SEQ ID NO: 155019 - protein, 139 aa, Glycine max
  Clone ID: PAT_MRT3847_111002C.1.pep
MGFGTLSLSVVVRFEATNFNGLPPSRSSNSLPHLSFTKPSWVVRTESNVRKKRRKKPDPHCVVCEGSGRVDCHQCHGKGRTNQVHLEMLPKGEWPKWCRTCGGSGLSYCSRCLGTGEYRYIMGFQFMNRDNNQSQENKS

SEQ ID NO: 155020 - protein, 95 aa, Glycine max
  Clone ID: PAT_MRT3847_111003C.1.pep
KIKNKKKKIQKIKLGAAALVVLTFAFPVLASPIPSFYCYLIWGSLFRGSSFPPRVSPRFFPFWSSRIPLPSSPLFPLLLWVTPGRPPPFSPCFPP

SEQ ID NO: 155021 - protein, 627 aa, Glycine max
  unsure (1)..(627): unsure at all Xaa locations
  Clone ID: PAT_MRT3847_111004C.1.pep
LPLIYLAANSGARLGVAEEVKSCFRVGWSEESNPENGFQYVYLTPEDNARXGSSVIAHELKLESGETRWVIDTIVGKEDALVYENMSGSGAIARSYSRACKEAFRLRCVTVATVVSWSYLARPWKSCIQICDHPIGXAGFSKVNKAVASLIAKGXPLLQSVNEMRSWMVINLXVRGSQPASPCSIYLFAGRLILFVELNTIIKMCNPXLMQMEYFPENSCDPRAAISGTLDGNGRWLGGIFDKDSFVETLEGWARTVVTGRAKLGGIPVGVVAVETQTVMQIIPADPGQLDSHERVVPQAGQVWFPDSATKTAQAILDFNREELPLFILANWRGFSGGQRDLFEGILQAGSTIVENLRTYKQPIFVYIPMMGELRGGAWVVVDSRINSDHIEMYADRTAKGNVLEPEGMIEIKFRTRELLECMGRLDQQLITLKVKLQEAKSNRDIAAFESLQQQIKSRERQLLPVYTQIATKFAELHDTSLRMAAKGVVREVLDWCNSRAVFYQRLHRRIGEQSLINSVRDAAGDQLSHASALNLLKEWYLNSDIAKGRADAWLDDKAFFRWKDNPANYENKLKELRAQKVLLQLTNIGDSALDLQALPQGLAALLSKLEPSGRVKLTDELRKVLG
